United States Patent Application Publication US 2007/0048756 A1 - sequence listing, part 23

SEQ ID NO: 799671 - DNA, 33 bp, Homo sapien
ctgttagggaatgtccagagtttagattggtgt

SEQ ID NO: 799672 - DNA, 33 bp, Homo sapien
ctgttagggaatgtccggagtttagattggtgt

SEQ ID NO: 799673 - DNA, 33 bp, Homo sapien
catttcaacaatcctgacacgtgcataaaatac

SEQ ID NO: 799674 - DNA, 33 bp, Homo sapien
catttcaacaatcctggcacgtgcataaaatac

SEQ ID NO: 799675 - DNA, 33 bp, Homo sapien
tagtggactaatggatcaataaaatgtgatgta

SEQ ID NO: 799676 - DNA, 33 bp, Homo sapien
tagtggactaatggatgaataaaatgtgatgta

SEQ ID NO: 799677 - DNA, 33 bp, Homo sapien
tgcaattctctagagacgtacgatgttgagcat

SEQ ID NO: 799678 - DNA, 33 bp, Homo sapien
tgcaattctctagagatgtacgatgttgagcat

SEQ ID NO: 799679 - DNA, 33 bp, Homo sapien
ttgtgtctgtactgaacatgtgttaactctttt

SEQ ID NO: 799680 - DNA, 33 bp, Homo sapien
ttgtgtctgtactgaatatgtgttaactctttt

SEQ ID NO: 799681 - DNA, 33 bp, Homo sapien
aaaggcatcctagagacggtaacacctagatta

SEQ ID NO: 799682 - DNA, 33 bp, Homo sapien
aaaggcatcctagagatggtaacacctagatta

SEQ ID NO: 799683 - DNA, 33 bp, Homo sapien
ccttatctcctattacgcagtctgcctcatgtc

SEQ ID NO: 799684 - DNA, 33 bp, Homo sapien
ccttatctcctattactcagtctgcctcatgtc

SEQ ID NO: 799685 - DNA, 33 bp, Homo sapien
cctgatgacaaagtgcaaacattacaagaaaac

SEQ ID NO: 799686 - DNA, 33 bp, Homo sapien
cctgatgacaaagtgcgaacattacaagaaaac

SEQ ID NO: 799687 - DNA, 33 bp, Homo sapien
atataaagcctataaactatttttttgacccac

SEQ ID NO: 799688 - DNA, 33 bp, Homo sapien
atataaagcctataaagtatttttttgacccac

SEQ ID NO: 799689 - DNA, 33 bp, Homo sapien
aatagcttgaaatctacgggtatgcagccaagc

SEQ ID NO: 799690 - DNA, 33 bp, Homo sapien
aatagcttgaaatctatgggtatgcagccaagc

SEQ ID NO: 799691 - DNA, 33 bp, Homo sapien
cagtgaagaggcataaatggccaattactctta

SEQ ID NO: 799692 - DNA, 33 bp, Homo sapien
cagtgaagaggcataagtggccaattactctta

SEQ ID NO: 799693 - DNA, 33 bp, Homo sapien
tagtgtactttatgtacggctaaagacaattct

SEQ ID NO: 799694 - DNA, 33 bp, Homo sapien
tagtgtactttatgtagggctaaagacaattct

SEQ ID NO: 799695 - DNA, 33 bp, Homo sapien
agtaagtcctgatgcaaaaaatgagtgagtttc

SEQ ID NO: 799696 - DNA, 33 bp, Homo sapien
agtaagtcctgatgcagaaaatgagtgagtttc

SEQ ID NO: 799697 - DNA, 33 bp, Homo sapien
taaagagccaagattcaatattcttgtgtcatc

SEQ ID NO: 799698 - DNA, 33 bp, Homo sapien
taaagagccaagattccatattcttgtgtcatc

SEQ ID NO: 799699 - DNA, 33 bp, Homo sapien
tcaatgtaattattgacagtttggtaggtccct

SEQ ID NO: 799700 - DNA, 33 bp, Homo sapien
tcaatgtaattattgatagtttggtaggtccct

SEQ ID NO: 799701 - DNA, 33 bp, Homo sapien
taatagatctaatcaaatcattcaaatacattt

SEQ ID NO: 799702 - DNA, 33 bp, Homo sapien
taatagatctaatcaagtcattcaaatacattt

SEQ ID NO: 799703 - DNA, 33 bp, Homo sapien
gtccccacattgagtgcaaatcacacggcatta

SEQ ID NO: 799704 - DNA, 33 bp, Homo sapien
gtccccacattgagtgtaaatcacacggcatta

SEQ ID NO: 799705 - DNA, 33 bp, Homo sapien
gagaaagagcaagtgcagagaggaccaaaggaa

SEQ ID NO: 799706 - DNA, 33 bp, Homo sapien
gagaaagagcaagtgcggagaggaccaaaggaa

SEQ ID NO: 799707 - DNA, 33 bp, Homo sapien
tcttcataatcaattccactgcaatgaatatcc

SEQ ID NO: 799708 - DNA, 33 bp, Homo sapien
tcttcataatcaattcgactgcaatgaatatcc

SEQ ID NO: 799709 - DNA, 33 bp, Homo sapien
ccaatttcttctgaaaacttgagtgctcttagg

SEQ ID NO: 799710 - DNA, 33 bp, Homo sapien
ccaatttcttctgaaaccttgagtgctcttagg

SEQ ID NO: 799711 - DNA, 33 bp, Homo sapien
catatggacataaacaaggaaataattgacact

SEQ ID NO: 799712 - DNA, 33 bp, Homo sapien
catatggacataaacacggaaataattgacact

SEQ ID NO: 799713 - DNA, 33 bp, Homo sapien
tgccccaggtgggataatagatgtgtgagatgc

SEQ ID NO: 799714 - DNA, 33 bp, Homo sapien
tgccccaggtgggatagtagatgtgtgagatgc

SEQ ID NO: 799715 - DNA, 33 bp, Homo sapien
atgcctttgcatataacgttctttccaattggc

SEQ ID NO: 799716 - DNA, 33 bp, Homo sapien
atgcctttgcatataatgttctttccaattggc

SEQ ID NO: 799717 - DNA, 33 bp, Homo sapien
attgatccaatgcaaacccatccgctgcaggag

SEQ ID NO: 799718 - DNA, 33 bp, Homo sapien
attgatccaatgcaaagccatccgctgcaggag

SEQ ID NO: 799719 - DNA, 33 bp, Homo sapien
acaccacagctgataacatattgttttatttgt

SEQ ID NO: 799720 - DNA, 33 bp, Homo sapien
acaccacagctgataagatattgttttatttgt

SEQ ID NO: 799721 - DNA, 33 bp, Homo sapien
tcatgtttggtcaacccaggactaggaccagct

SEQ ID NO: 799722 - DNA, 33 bp, Homo sapien
tcatgtttggtcaaccgaggactaggaccagct

SEQ ID NO: 799723 - DNA, 33 bp, Homo sapien
agtgcaaggcctcaaaaaaattaacaaggctta

SEQ ID NO: 799724 - DNA, 33 bp, Homo sapien
agtgcaaggcctcaaagaaattaacaaggctta

SEQ ID NO: 799725 - DNA, 33 bp, Homo sapien
atcatttcctcattcaccctttgattcctttcc

SEQ ID NO: 799726 - DNA, 33 bp, Homo sapien
atcatttcctcattcatcctttgattcctttcc

SEQ ID NO: 799727 - DNA, 33 bp, Homo sapien
tgcactccagttcagcactgatgcaactgtgtt

SEQ ID NO: 799728 - DNA, 33 bp, Homo sapien
tgcactccagttcagccctgatgcaactgtgtt

SEQ ID NO: 799729 - DNA, 33 bp, Homo sapien
tgtgctaccagaattacaaaagtaaggcagact

SEQ ID NO: 799730 - DNA, 33 bp, Homo sapien
tgtgctaccagaattagaaaagtaaggcagact

SEQ ID NO: 799731 - DNA, 33 bp, Homo sapien
acagcctggcaatagcacgaggctccatctcaa

SEQ ID NO: 799732 - DNA, 33 bp, Homo sapien
acagcctggcaatagcgcgaggctccatctcaa

SEQ ID NO: 799733 - DNA, 33 bp, Homo sapien
ggcccctgagcaaatgcagaaggttcagaagtt

SEQ ID NO: 799734 - DNA, 33 bp, Homo sapien
ggcccctgagcaaatgtagaaggttcagaagtt

SEQ ID NO: 799735 - DNA, 33 bp, Homo sapien
ggccaacctccaacacagtgtgattttgcttcc

SEQ ID NO: 799736 - DNA, 33 bp, Homo sapien
ggccaacctccaacacggtgtgattttgcttcc

SEQ ID NO: 799737 - DNA, 33 bp, Homo sapien
tacaatgaggactaagaaaagtgttagttcatt

SEQ ID NO: 799738 - DNA, 33 bp, Homo sapien
tacaatgaggactaaggaaagtgttagttcatt

SEQ ID NO: 799739 - DNA, 33 bp, Homo sapien
ttgtggtgattctaacaaacctacatctatttg

SEQ ID NO: 799740 - DNA, 33 bp, Homo sapien
ttgtggtgattctaaccaacctacatctatttg

SEQ ID NO: 799741 - DNA, 33 bp, Homo sapien
aggaggaaaattacaacagttcacattttactg

SEQ ID NO: 799742 - DNA, 33 bp, Homo sapien
aggaggaaaattacaatagttcacattttactg

SEQ ID NO: 799743 - DNA, 33 bp, Homo sapien
cttaaagagtatatgacagtataggtgcttctt

SEQ ID NO: 799744 - DNA, 33 bp, Homo sapien
cttaaagagtatatgagagtataggtgcttctt

SEQ ID NO: 799745 - DNA, 33 bp, Homo sapien
tctgaataccgaataacgaaggtttggtttctt

SEQ ID NO: 799746 - DNA, 33 bp, Homo sapien
tctgaataccgaataatgaaggtttggtttctt

SEQ ID NO: 799747 - DNA, 33 bp, Homo sapien
taaaagacagaagagacggtccatagtatgaga

SEQ ID NO: 799748 - DNA, 33 bp, Homo sapien
taaaagacagaagagatggtccatagtatgaga

SEQ ID NO: 799749 - DNA, 33 bp, Homo sapien
tctaaactgataaacacggtcatctgaaaaatg

SEQ ID NO: 799750 - DNA, 33 bp, Homo sapien
tctaaactgataaacatggtcatctgaaaaatg

SEQ ID NO: 799751 - DNA, 33 bp, Homo sapien
gaagcagaagctatggaaagaagagagcaaaca

SEQ ID NO: 799752 - DNA, 33 bp, Homo sapien
gaagcagaagctatgggaagaagagagcaaaca

SEQ ID NO: 799753 - DNA, 33 bp, Homo sapien
ctgtgggagccctggaaagaaaactctgaatgg

SEQ ID NO: 799754 - DNA, 33 bp, Homo sapien
ctgtgggagccctggagagaaaactctgaatgg

SEQ ID NO: 799755 - DNA, 33 bp, Homo sapien
tccaggaggatagagaaggggtatttggagagg

SEQ ID NO: 799756 - DNA, 33 bp, Homo sapien
tccaggaggatagagacggggtatttggagagg

SEQ ID NO: 799757 - DNA, 33 bp, Homo sapien
gacttgaaccaaatgtaaaaacagtagaattca

SEQ ID NO: 799758 - DNA, 33 bp, Homo sapien
gacttgaaccaaatgtgaaaacagtagaattca

SEQ ID NO: 799759 - DNA, 33 bp, Homo sapien
aaatcatgcaattgaactcttatcaaaagttag

SEQ ID NO: 799760 - DNA, 33 bp, Homo sapien
aaatcatgcaattgaattcttatcaaaagttag

SEQ ID NO: 799761 - DNA, 33 bp, Homo sapien
agtattctcaaaaggacgctcaacttctactct

SEQ ID NO: 799762 - DNA, 33 bp, Homo sapien
agtattctcaaaaggatgctcaacttctactct

SEQ ID NO: 799763 - DNA, 33 bp, Homo sapien
agaaactgctcaactaacaggcaaaataatcag

SEQ ID NO: 799764 - DNA, 33 bp, Homo sapien
agaaactgctcaactatcaggcaaaataatcag

SEQ ID NO: 799765 - DNA, 33 bp, Homo sapien
gtctctagatagctgacgcaaaaacatggaagc

SEQ ID NO: 799766 - DNA, 33 bp, Homo sapien
gtctctagatagctgatgcaaaaacatggaagc

SEQ ID NO: 799767 - DNA, 33 bp, Homo sapien
tgctttctgcataacacgatgttctagtctcat

SEQ ID NO: 799768 - DNA, 33 bp, Homo sapien
tgctttctgcataacaggatgttctagtctcat

SEQ ID NO: 799769 - DNA, 33 bp, Homo sapien
caggggtccttggatcacactttaacaattact

SEQ ID NO: 799770 - DNA, 33 bp, Homo sapien
caggggtccttggatctcactttaacaattact

SEQ ID NO: 799771 - DNA, 33 bp, Homo sapien
aatgattacaagagacaaggaaggacattgtat

SEQ ID NO: 799772 - DNA, 33 bp, Homo sapien
aatgattacaagagaccaggaaggacattgtat

SEQ ID NO: 799773 - DNA, 33 bp, Homo sapien
ttttagtcaaaaggtacagattggtagaatgga

SEQ ID NO: 799774 - DNA, 33 bp, Homo sapien
ttttagtcaaaaggtatagattggtagaatgga

SEQ ID NO: 799775 - DNA, 33 bp, Homo sapien
aatggaattattcataagatagtttctacctca

SEQ ID NO: 799776 - DNA, 33 bp, Homo sapien
aatggaattattcatatgatagtttctacctca

SEQ ID NO: 799777 - DNA, 33 bp, Homo sapien
ttaggacaccctgataaatgaaaatcagtggcg

SEQ ID NO: 799778 - DNA, 33 bp, Homo sapien
ttaggacaccctgatagatgaaaatcagtggcg

SEQ ID NO: 799779 - DNA, 33 bp, Homo sapien
tataggaagccagatagaatgatgtgaaaaaaa

SEQ ID NO: 799780 - DNA, 33 bp, Homo sapien
tataggaagccagatataatgatgtgaaaaaaa

SEQ ID NO: 799781 - DNA, 33 bp, Homo sapien
attcttccatagaagacgcacactatcaagaaa

SEQ ID NO: 799782 - DNA, 33 bp, Homo sapien
attcttccatagaagatgcacactatcaagaaa

SEQ ID NO: 799783 - DNA, 33 bp, Homo sapien
caggtgctgctctaaaactacaatgcaataatt

SEQ ID NO: 799784 - DNA, 33 bp, Homo sapien
caggtgctgctctaaatctacaatgcaataatt

SEQ ID NO: 799785 - DNA, 33 bp, Homo sapien
taggcctaaagagttcaaaatcctgacaacttt

SEQ ID NO: 799786 - DNA, 33 bp, Homo sapien
taggcctaaagagttcgaaatcctgacaacttt

SEQ ID NO: 799787 - DNA, 33 bp, Homo sapien
catgcacaacttgcaggcctctcaaagtgtccc

SEQ ID NO: 799788 - DNA, 33 bp, Homo sapien
catgcacaacttgcagtcctctcaaagtgtccc

SEQ ID NO: 799789 - DNA, 33 bp, Homo sapien
gagatctggagaagcactgatgagactttgtat

SEQ ID NO: 799790 - DNA, 33 bp, Homo sapien
gagatctggagaagcagtgatgagactttgtat

SEQ ID NO: 799791 - DNA, 33 bp, Homo sapien
gctactggcaaagccacgttcaaagcaaacctt

SEQ ID NO: 799792 - DNA, 33 bp, Homo sapien
gctactggcaaagccatgttcaaagcaaacctt

SEQ ID NO: 799793 - DNA, 33 bp, Homo sapien
gaaaataggttgtgcactccgtagtcaatttca

SEQ ID NO: 799794 - DNA, 33 bp, Homo sapien
gaaaataggttgtgcattccgtagtcaatttca

SEQ ID NO: 799795 - DNA, 33 bp, Homo sapien
agcagccctggatcaacgtgctcagagtgtttg

SEQ ID NO: 799796 - DNA, 33 bp, Homo sapien
agcagccctggatcaatgtgctcagagtgtttg

SEQ ID NO: 799797 - DNA, 33 bp, Homo sapien
gccctcaactaataaaaactaagctgcagaaat

SEQ ID NO: 799798 - DNA, 33 bp, Homo sapien
gccctcaactaataaagactaagctgcagaaat

SEQ ID NO: 799799 - DNA, 33 bp, Homo sapien
ctgcatatctgtttaagctattccactatatta

SEQ ID NO: 799800 - DNA, 33 bp, Homo sapien
ctgcatatctgtttaatctattccactatatta

SEQ ID NO: 799801 - DNA, 33 bp, Homo sapien
agaatcctccttcctgaagaatcaaggtttgct

SEQ ID NO: 799802 - DNA, 33 bp, Homo sapien
agaatcctccttcctggagaatcaaggtttgct

SEQ ID NO: 799803 - DNA, 33 bp, Homo sapien
aaattatatagacttcacacttcagagcattga

SEQ ID NO: 799804 - DNA, 33 bp, Homo sapien
aaattatatagacttcgcacttcagagcattga

SEQ ID NO: 799805 - DNA, 33 bp, Homo sapien
tggagttttctagttcacagaaagatgttctct

SEQ ID NO: 799806 - DNA, 33 bp, Homo sapien
tggagttttctagttcgcagaaagatgttctct

SEQ ID NO: 799807 - DNA, 33 bp, Homo sapien
aatcaaattgtgctaccgatggacagaaggtgc

SEQ ID NO: 799808 - DNA, 33 bp, Homo sapien
aatcaaattgtgctactgatggacagaaggtgc

SEQ ID NO: 799809 - DNA, 33 bp, Homo sapien
gtcttttgaaagagacaaatcagcttggttctc

SEQ ID NO: 799810 - DNA, 33 bp, Homo sapien
gtcttttgaaagagacgaatcagcttggttctc

SEQ ID NO: 799811 - DNA, 33 bp, Homo sapien
tggcagatcagcagccaaacataattttaatta

SEQ ID NO: 799812 - DNA, 33 bp, Homo sapien
tggcagatcagcagccgaacataattttaatta

SEQ ID NO: 799813 - DNA, 33 bp, Homo sapien
tggactccaatagccacgtgctgcattctctcc

SEQ ID NO: 799814 - DNA, 33 bp, Homo sapien
tggactccaatagccatgtgctgcattctctcc

SEQ ID NO: 799815 - DNA, 33 bp, Homo sapien
acagttgagaaagggcactaggatgtggcactg

SEQ ID NO: 799816 - DNA, 33 bp, Homo sapien
acagttgagaaagggcgctaggatgtggcactg

SEQ ID NO: 799817 - DNA, 33 bp, Homo sapien
tcttagctaagctgaacaaaggcagtggggaaa

SEQ ID NO: 799818 - DNA, 33 bp, Homo sapien
tcttagctaagctgaataaaggcagtggggaaa

SEQ ID NO: 799819 - DNA, 33 bp, Homo sapien
ctgtcatgcacagccaaattttcacttaggcct

SEQ ID NO: 799820 - DNA, 33 bp, Homo sapien
ctgtcatgcacagccagattttcacttaggcct

SEQ ID NO: 799821 - DNA, 33 bp, Homo sapien
tccactcatttccaaaactacacaggtcagcac

SEQ ID NO: 799822 - DNA, 33 bp, Homo sapien
tccactcatttccaaagctacacaggtcagcac

SEQ ID NO: 799823 - DNA, 33 bp, Homo sapien
gttttctttgaggaagaataagctcacctgcat

SEQ ID NO: 799824 - DNA, 33 bp, Homo sapien
gttttctttgaggaagtataagctcacctgcat

SEQ ID NO: 799825 - DNA, 33 bp, Homo sapien
ttgtccactaaggtcacggtgaatcctctttct

SEQ ID NO: 799826 - DNA, 33 bp, Homo sapien
ttgtccactaaggtcatggtgaatcctctttct

SEQ ID NO: 799827 - DNA, 33 bp, Homo sapien
tggacaaggtgagtacaggtctctcggtagatg

SEQ ID NO: 799828 - DNA, 33 bp, Homo sapien
tggacaaggtgagtacgggtctctcggtagatg

SEQ ID NO: 799829 - DNA, 33 bp, Homo sapien
gtctatcacagatacaatcgggcagtaacagca

SEQ ID NO: 799830 - DNA, 33 bp, Homo sapien
gtctatcacagatacagtcgggcagtaacagca

SEQ ID NO: 799831 - DNA, 33 bp, Homo sapien
aatatgttgtgtatgaatatgggttctagtata

SEQ ID NO: 799832 - DNA, 33 bp, Homo sapien
aatatgttgtgtatgagtatgggttctagtata

SEQ ID NO: 799833 - DNA, 33 bp, Homo sapien
gtaaagcacagctaacaacctctttctggttca

SEQ ID NO: 799834 - DNA, 33 bp, Homo sapien
gtaaagcacagctaacgacctctttctggttca

SEQ ID NO: 799835 - DNA, 33 bp, Homo sapien
cgtttgttttattgaaagtgtgcattttcttct

SEQ ID NO: 799836 - DNA, 33 bp, Homo sapien
cgtttgttttattgaaggtgtgcattttcttct

SEQ ID NO: 799837 - DNA, 33 bp, Homo sapien
tgcatttggttaaaagactgctttggcattttt

SEQ ID NO: 799838 - DNA, 33 bp, Homo sapien
tgcatttggttaaaagtctgctttggcattttt

SEQ ID NO: 799839 - DNA, 33 bp, Homo sapien
gaggcctgtggggagacggctttagagaaagag

SEQ ID NO: 799840 - DNA, 33 bp, Homo sapien
gaggcctgtggggagatggctttagagaaagag

SEQ ID NO: 799841 - DNA, 33 bp, Homo sapien
aacctgaacttcgtaaccacattggttttatca

SEQ ID NO: 799842 - DNA, 33 bp, Homo sapien
aacctgaacttcgtaagcacattggttttatca

SEQ ID NO: 799843 - DNA, 33 bp, Homo sapien
ttatctttctttacaaatgcctggaagcaggcc

SEQ ID NO: 799844 - DNA, 33 bp, Homo sapien
ttatctttctttacaagtgcctggaagcaggcc

SEQ ID NO: 799845 - DNA, 33 bp, Homo sapien
gccactgtgtctcaacagcattttctaattttc

SEQ ID NO: 799846 - DNA, 33 bp, Homo sapien
gccactgtgtctcaaccgcattttctaattttc

SEQ ID NO: 799847 - DNA, 33 bp, Homo sapien
gaataggagaaaagatcaatcgatgaatggatg

SEQ ID NO: 799848 - DNA, 33 bp, Homo sapien
gaataggagaaaagattaatcgatgaatggatg

SEQ ID NO: 799849 - DNA, 33 bp, Homo sapien
acctagacttagctgaacccaaacagttttggt

SEQ ID NO: 799850 - DNA, 33 bp, Homo sapien
acctagacttagctgagcccaaacagttttggt

SEQ ID NO: 799851 - DNA, 33 bp, Homo sapien
gagtcttctgatttcactaacaaaaactaaccc

SEQ ID NO: 799852 - DNA, 33 bp, Homo sapien
gagtcttctgatttcattaacaaaaactaaccc

SEQ ID NO: 799853 - DNA, 33 bp, Homo sapien
attgtatccagtcaacggaaaggagccagtcaa

SEQ ID NO: 799854 - DNA, 33 bp, Homo sapien
attgtatccagtcaactgaaaggagccagtcaa

SEQ ID NO: 799855 - DNA, 33 bp, Homo sapien
acttaatcataaggccactgcaagcttcaaggg

SEQ ID NO: 799856 - DNA, 33 bp, Homo sapien
acttaatcataaggcccctgcaagcttcaaggg

SEQ ID NO: 799857 - DNA, 33 bp, Homo sapien
tacttttcttttaagcagagttgagactgttgg

SEQ ID NO: 799858 - DNA, 33 bp, Homo sapien
tacttttcttttaagcggagttgagactgttgg

SEQ ID NO: 799859 - DNA, 33 bp, Homo sapien
ctgtaaatcctattatcagagcttaggtgaaat

SEQ ID NO: 799860 - DNA, 33 bp, Homo sapien
ctgtaaatcctattattagagcttaggtgaaat

SEQ ID NO: 799861 - DNA, 33 bp, Homo sapien
gttgttggtttgagttaaaatgacctgtcacac

SEQ ID NO: 799862 - DNA, 33 bp, Homo sapien
gttgttggtttgagttcaaatgacctgtcacac

SEQ ID NO: 799863 - DNA, 33 bp, Homo sapien
ttctacagctgtgataaagtctttcagttgtgt

SEQ ID NO: 799864 - DNA, 33 bp, Homo sapien
ttctacagctgtgatacagtctttcagttgtgt

SEQ ID NO: 799865 - DNA, 33 bp, Homo sapien
tacttcagatacatccactcatttaatcttcat

SEQ ID NO: 799866 - DNA, 33 bp, Homo sapien
tacttcagatacatccgctcatttaatcttcat

SEQ ID NO: 799867 - DNA, 33 bp, Homo sapien
tgtgccaggaaacaaacactcttattattggag

SEQ ID NO: 799868 - DNA, 33 bp, Homo sapien
tgtgccaggaaacaaagactcttattattggag

SEQ ID NO: 799869 - DNA, 33 bp, Homo sapien
tgagaggattgaacagcctcaaatgagaatttc

SEQ ID NO: 799870 - DNA, 33 bp, Homo sapien
tgagaggattgaacaggctcaaatgagaatttc

SEQ ID NO: 799871 - DNA, 33 bp, Homo sapien
cacccagtaacactaacggtatctgtgaggcag

SEQ ID NO: 799872 - DNA, 33 bp, Homo sapien
cacccagtaacactaagggtatctgtgaggcag

SEQ ID NO: 799873 - DNA, 33 bp, Homo sapien
taatagttagtgatgcactctgttttaaaaatc

SEQ ID NO: 799874 - DNA, 33 bp, Homo sapien
taatagttagtgatgcgctctgttttaaaaatc

SEQ ID NO: 799875 - DNA, 33 bp, Homo sapien
acatgtgcttgtgccaacctttgtatgcacacc

SEQ ID NO: 799876 - DNA, 33 bp, Homo sapien
acatgtgcttgtgccagcctttgtatgcacacc

SEQ ID NO: 799877 - DNA, 33 bp, Homo sapien
gggaaactggaggtaacgtgtcaatctgctgtg

SEQ ID NO: 799878 - DNA, 33 bp, Homo sapien
gggaaactggaggtaatgtgtcaatctgctgtg

SEQ ID NO: 799879 - DNA, 33 bp, Homo sapien
ccagcttggccctgtacccccagctcctttctt

SEQ ID NO: 799880 - DNA, 33 bp, Homo sapien
ccagcttggccctgtatccccagctcctttctt

SEQ ID NO: 799881 - DNA, 33 bp, Homo sapien
taaagatagccttgaacgtccatctaaatcatc

SEQ ID NO: 799882 - DNA, 33 bp, Homo sapien
taaagatagccttgaatgtccatctaaatcatc

SEQ ID NO: 799883 - DNA, 33 bp, Homo sapien
tttttaaaaataacaaaagaagactgccagtaa

SEQ ID NO: 799884 - DNA, 33 bp, Homo sapien
tttttaaaaataacaacagaagactgccagtaa

SEQ ID NO: 799885 - DNA, 33 bp, Homo sapien
ttttataactctcaagacacttaactcctctgt

SEQ ID NO: 799886 - DNA, 33 bp, Homo sapien
ttttataactctcaagccacttaactcctctgt

SEQ ID NO: 799887 - DNA, 33 bp, Homo sapien
tttttcccagagtaaacaatcagttttcataat

SEQ ID NO: 799888 - DNA, 33 bp, Homo sapien
tttttcccagagtaaataatcagttttcataat

SEQ ID NO: 799889 - DNA, 33 bp, Homo sapien
gctattaatgtgcaagccttaaaaataaattgc

SEQ ID NO: 799890 - DNA, 33 bp, Homo sapien
gctattaatgtgcaagtcttaaaaataaattgc

SEQ ID NO: 799891 - DNA, 33 bp, Homo sapien
ctcgtccgccaaatgacagaggacatcagggct

SEQ ID NO: 799892 - DNA, 33 bp, Homo sapien
ctcgtccgccaaatgatagaggacatcagggct

SEQ ID NO: 799893 - DNA, 33 bp, Homo sapien
gagatgaaggagttaaagactacccactactga

SEQ ID NO: 799894 - DNA, 33 bp, Homo sapien
gagatgaaggagttaaggactacccactactga

SEQ ID NO: 799895 - DNA, 33 bp, Homo sapien
tctttccactcccatcacactttcaaagggaaa

SEQ ID NO: 799896 - DNA, 33 bp, Homo sapien
tctttccactcccatcgcactttcaaagggaaa

SEQ ID NO: 799897 - DNA, 33 bp, Homo sapien
gtcagttcacctggtcactattgtttcttaagt

SEQ ID NO: 799898 - DNA, 33 bp, Homo sapien
gtcagttcacctggtccctattgtttcttaagt

SEQ ID NO: 799899 - DNA, 33 bp, Homo sapien
gtttgacaaccaataactcatgtgtgtgtgaag

SEQ ID NO: 799900 - DNA, 33 bp, Homo sapien
gtttgacaaccaataattcatgtgtgtgtgaag

SEQ ID NO: 799901 - DNA, 33 bp, Homo sapien
gggtcccaaatgcccaatccccagtaaaaagac

SEQ ID NO: 799902 - DNA, 33 bp, Homo sapien
gggtcccaaatgcccactccccagtaaaaagac

SEQ ID NO: 799903 - DNA, 33 bp, Homo sapien
aggatcagctggcacaactgtctttttactggg

SEQ ID NO: 799904 - DNA, 33 bp, Homo sapien
aggatcagctggcacatctgtctttttactggg

SEQ ID NO: 799905 - DNA, 33 bp, Homo sapien
agggcagaggggacacgggcaatgattagactg

SEQ ID NO: 799906 - DNA, 33 bp, Homo sapien
agggcagaggggacactggcaatgattagactg

SEQ ID NO: 799907 - DNA, 33 bp, Homo sapien
gacaagaaggaaataaatgaacctggcagttgt

SEQ ID NO: 799908 - DNA, 33 bp, Homo sapien
gacaagaaggaaataagtgaacctggcagttgt

SEQ ID NO: 799909 - DNA, 33 bp, Homo sapien
gaccaggctagatcgcacaaagattttctaagc

SEQ ID NO: 799910 - DNA, 33 bp, Homo sapien
gaccaggctagatcgcgcaaagattttctaagc

SEQ ID NO: 799911 - DNA, 33 bp, Homo sapien
gtagtcttaactcctaggttgctctgactctcc

SEQ ID NO: 799912 - DNA, 33 bp, Homo sapien
gtagtcttaactcctatgttgctctgactctcc

SEQ ID NO: 799913 - DNA, 33 bp, Homo sapien
atgccatcgctctttcccatgggttctggaccc

SEQ ID NO: 799914 - DNA, 33 bp, Homo sapien
atgccatcgctctttcgcatgggttctggaccc

SEQ ID NO: 799915 - DNA, 33 bp, Homo sapien
tctgtgtagcattacacgcccaaacccatgtac

SEQ ID NO: 799916 - DNA, 33 bp, Homo sapien
tctgtgtagcattacaggcccaaacccatgtac

SEQ ID NO: 799917 - DNA, 33 bp, Homo sapien
caagacatgtagaaaccgtgggtagtaaaacca

SEQ ID NO: 799918 - DNA, 33 bp, Homo sapien
caagacatgtagaaactgtgggtagtaaaacca

SEQ ID NO: 799919 - DNA, 33 bp, Homo sapien
tcttttttaggctcccacataactatacacaga

SEQ ID NO: 799920 - DNA, 33 bp, Homo sapien
tcttttttaggctcccgcataactatacacaga

SEQ ID NO: 799921 - DNA, 33 bp, Homo sapien
gcaaagaggttgaccaaagtcccctatgtgcca

SEQ ID NO: 799922 - DNA, 33 bp, Homo sapien
gcaaagaggttgaccacagtcccctatgtgcca

SEQ ID NO: 799923 - DNA, 33 bp, Homo sapien
ctctaacgcatcctgaaatgaacacccatcctt

SEQ ID NO: 799924 - DNA, 33 bp, Homo sapien
ctctaacgcatcctgatatgaacacccatcctt

SEQ ID NO: 799925 - DNA, 33 bp, Homo sapien
agtggtgatgccagagacgagaagatgctgctg

SEQ ID NO: 799926 - DNA, 33 bp, Homo sapien
agtggtgatgccagaggcgagaagatgctgctg

SEQ ID NO: 799927 - DNA, 33 bp, Homo sapien
tacatggtttcagaataaaaagaaaagccatga

SEQ ID NO: 799928 - DNA, 33 bp, Homo sapien
tacatggtttcagaatgaaaagaaaagccatga

SEQ ID NO: 799929 - DNA, 33 bp, Homo sapien
attttagaagcgtacacgactgaatgggagaag

SEQ ID NO: 799930 - DNA, 33 bp, Homo sapien
attttagaagcgtacatgactgaatgggagaag

SEQ ID NO: 799931 - DNA, 33 bp, Homo sapien
tatgttacaaccagcacatttaattcaaacagg

SEQ ID NO: 799932 - DNA, 33 bp, Homo sapien
tatgttacaaccagcatatttaattcaaacagg

SEQ ID NO: 799933 - DNA, 33 bp, Homo sapien
caaatgtccaatgaaaagatggctcatcatgta

SEQ ID NO: 799934 - DNA, 33 bp, Homo sapien
caaatgtccaatgaaaggatggctcatcatgta

SEQ ID NO: 799935 - DNA, 33 bp, Homo sapien
atgttgaactgaatgacccataacagctaatgt

SEQ ID NO: 799936 - DNA, 33 bp, Homo sapien
atgttgaactgaatgagccataacagctaatgt

SEQ ID NO: 799937 - DNA, 33 bp, Homo sapien
cagggatgggatgtaacacgcctctgtgctgct

SEQ ID NO: 799938 - DNA, 33 bp, Homo sapien
cagggatgggatgtaatacgcctctgtgctgct

SEQ ID NO: 799939 - DNA, 33 bp, Homo sapien
attaatttgtgttgaaggaatttgacttaccta

SEQ ID NO: 799940 - DNA, 33 bp, Homo sapien
attaatttgtgttgaatgaatttgacttaccta

SEQ ID NO: 799941 - DNA, 33 bp, Homo sapien
tgaaacaacaggtgtagctatgggggattgtct

SEQ ID NO: 799942 - DNA, 33 bp, Homo sapien
tgaaacaacaggtgtatctatgggggattgtct

SEQ ID NO: 799943 - DNA, 33 bp, Homo sapien
tttgcttgtacaacctgacatgtttgagcaatt

SEQ ID NO: 799944 - DNA, 33 bp, Homo sapien
tttgcttgtacaaccttacatgtttgagcaatt

SEQ ID NO: 799945 - DNA, 33 bp, Homo sapien
gggtcatttgtgggcaccagttcataatgtaca

SEQ ID NO: 799946 - DNA, 33 bp, Homo sapien
gggtcatttgtgggcatcagttcataatgtaca

SEQ ID NO: 799947 - DNA, 33 bp, Homo sapien
acttaacaaacagtgccgagctatgctgttcct

SEQ ID NO: 799948 - DNA, 33 bp, Homo sapien
acttaacaaacagtgctgagctatgctgttcct

SEQ ID NO: 799949 - DNA, 33 bp, Homo sapien
tactaacgagtattaaagaactttcaagtttca

SEQ ID NO: 799950 - DNA, 33 bp, Homo sapien
tactaacgagtattaacgaactttcaagtttca

SEQ ID NO: 799951 - DNA, 33 bp, Homo sapien
gagatggggtttttgaaacaagactatcagtgg

SEQ ID NO: 799952 - DNA, 33 bp, Homo sapien
gagatggggtttttgacacaagactatcagtgg

SEQ ID NO: 799953 - DNA, 33 bp, Homo sapien
catggatagctagctccgacaactccctctttc

SEQ ID NO: 799954 - DNA, 33 bp, Homo sapien
catggatagctagctctgacaactccctctttc

SEQ ID NO: 799955 - DNA, 33 bp, Homo sapien
tatacatacctccaaacgtaggcatctttctgc

SEQ ID NO: 799956 - DNA, 33 bp, Homo sapien
tatacatacctccaaatgtaggcatctttctgc

SEQ ID NO: 799957 - DNA, 33 bp, Homo sapien
ttatgtataaacacacactctttgtagttctca

SEQ ID NO: 799958 - DNA, 33 bp, Homo sapien
ttatgtataaacacacgctctttgtagttctca

SEQ ID NO: 799959 - DNA, 33 bp, Homo sapien
tcagcgatgccaatggaatgaattctgcaccga

SEQ ID NO: 799960 - DNA, 33 bp, Homo sapien
tcagcgatgccaatgggatgaattctgcaccga

SEQ ID NO: 799961 - DNA, 33 bp, Homo sapien
ttgtttacaaaatggagtatttgctcagcttag

SEQ ID NO: 799962 - DNA, 33 bp, Homo sapien
ttgtttacaaaatggattatttgctcagcttag

SEQ ID NO: 799963 - DNA, 33 bp, Homo sapien
gatgagatctggagcccaaaaccttagtgtcac

SEQ ID NO: 799964 - DNA, 33 bp, Homo sapien
gatgagatctggagcctaaaaccttagtgtcac

SEQ ID NO: 799965 - DNA, 33 bp, Homo sapien
gtatttcagaagtacacgacacagaatactatg

SEQ ID NO: 799966 - DNA, 33 bp, Homo sapien
gtatttcagaagtacatgacacagaatactatg

SEQ ID NO: 799967 - DNA, 33 bp, Homo sapien
tctgctatactatgccacacataataagaagag

SEQ ID NO: 799968 - DNA, 33 bp, Homo sapien
tctgctatactatgccgcacataataagaagag

SEQ ID NO: 799969 - DNA, 33 bp, Homo sapien
tattaaaaaactagtacgtgctgagcatttcat

SEQ ID NO: 799970 - DNA, 33 bp, Homo sapien
tattaaaaaactagtatgtgctgagcatttcat

SEQ ID NO: 799971 - DNA, 33 bp, Homo sapien
gaaattgaacactggacgaggacagagatacta

SEQ ID NO: 799972 - DNA, 33 bp, Homo sapien
gaaattgaacactggatgaggacagagatacta

SEQ ID NO: 799973 - DNA, 33 bp, Homo sapien
aactattcataaagcactcgaaaccatttctgg

SEQ ID NO: 799974 - DNA, 33 bp, Homo sapien
aactattcataaagcattcgaaaccatttctgg

SEQ ID NO: 799975 - DNA, 33 bp, Homo sapien
aacagaatgattagtacgatagctatctttgga

SEQ ID NO: 799976 - DNA, 33 bp, Homo sapien
aacagaatgattagtatgatagctatctttgga

SEQ ID NO: 799977 - DNA, 33 bp, Homo sapien
aaggaaagcatttcccacccgtgtaaagcccac

SEQ ID NO: 799978 - DNA, 33 bp, Homo sapien
aaggaaagcatttccctcccgtgtaaagcccac

SEQ ID NO: 799979 - DNA, 33 bp, Homo sapien
ttctgagccctctccaacctcgatagttaaaag

SEQ ID NO: 799980 - DNA, 33 bp, Homo sapien
ttctgagccctctccaccctcgatagttaaaag

SEQ ID NO: 799981 - DNA, 33 bp, Homo sapien
aatactcacattacagaactgaagctgattctc

SEQ ID NO: 799982 - DNA, 33 bp, Homo sapien
aatactcacattacagcactgaagctgattctc

SEQ ID NO: 799983 - DNA, 33 bp, Homo sapien
gtgctgttgaaaatgacggtagattgcacttca

SEQ ID NO: 799984 - DNA, 33 bp, Homo sapien
gtgctgttgaaaatgatggtagattgcacttca

SEQ ID NO: 799985 - DNA, 33 bp, Homo sapien
gtattgaaaaactggaactgtgcaccacaagat

SEQ ID NO: 799986 - DNA, 33 bp, Homo sapien
gtattgaaaaactggagctgtgcaccacaagat

SEQ ID NO: 799987 - DNA, 33 bp, Homo sapien
agccactgttaaatgacattaagttaaaagttg

SEQ ID NO: 799988 - DNA, 33 bp, Homo sapien
agccactgttaaatgatattaagttaaaagttg

SEQ ID NO: 799989 - DNA, 33 bp, Homo sapien
ctcattgcaaatgtaacaatactgcctaattgc

SEQ ID NO: 799990 - DNA, 33 bp, Homo sapien
ctcattgcaaatgtaataatactgcctaattgc

SEQ ID NO: 799991 - DNA, 33 bp, Homo sapien
aaggacataaggatagctgtcagtggtcctgaa

SEQ ID NO: 799992 - DNA, 33 bp, Homo sapien
aaggacataaggatagttgtcagtggtcctgaa

SEQ ID NO: 799993 - DNA, 33 bp, Homo sapien
agctcccattaatgcactccacaggttgaggaa

SEQ ID NO: 799994 - DNA, 33 bp, Homo sapien
agctcccattaatgcattccacaggttgaggaa

SEQ ID NO: 799995 - DNA, 33 bp, Homo sapien
cctctgtttacatttacagggtctttcaggttt

SEQ ID NO: 799996 - DNA, 33 bp, Homo sapien
cctctgtttacatttatagggtctttcaggttt

SEQ ID NO: 799997 - DNA, 33 bp, Homo sapien
ggcccaaacttaagcacactgacttaggtctag

SEQ ID NO: 799998 - DNA, 33 bp, Homo sapien
ggcccaaacttaagcatactgacttaggtctag

SEQ ID NO: 799999 - DNA, 33 bp, Homo sapien
actctaaatcaccttcaccctgaatagagcaat

SEQ ID NO: 800000 - DNA, 33 bp, Homo sapien
actctaaatcaccttcgccctgaatagagcaat

SEQ ID NO: 800001 - DNA, 33 bp, Homo sapien
gaccaatttatcaaagaattgctctattcaggg

SEQ ID NO: 800002 - DNA, 33 bp, Homo sapien
gaccaatttatcaaaggattgctctattcaggg

SEQ ID NO: 800003 - DNA, 33 bp, Homo sapien
cctggaggactttaaaccaaatgtcagaccaat

SEQ ID NO: 800004 - DNA, 33 bp, Homo sapien
cctggaggactttaaatcaaatgtcagaccaat

SEQ ID NO: 800005 - DNA, 33 bp, Homo sapien
gaataggtcagcaccaaggagttaaagtcagag

SEQ ID NO: 800006 - DNA, 33 bp, Homo sapien
gaataggtcagcaccagggagttaaagtcagag

SEQ ID NO: 800007 - DNA, 33 bp, Homo sapien
cttgttttatggataaagaaattgactcggaga

SEQ ID NO: 800008 - DNA, 33 bp, Homo sapien
cttgttttatggataaggaaattgactcggaga

SEQ ID NO: 800009 - DNA, 33 bp, Homo sapien
tttcagtggtttaaaacgccacactcaatgcac

SEQ ID NO: 800010 - DNA, 33 bp, Homo sapien
tttcagtggtttaaaatgccacactcaatgcac

SEQ ID NO: 800011 - DNA, 33 bp, Homo sapien
tgacctggtaactatcacttagaaaaattagct

SEQ ID NO: 800012 - DNA, 33 bp, Homo sapien
tgacctggtaactatcgcttagaaaaattagct

SEQ ID NO: 800013 - DNA, 33 bp, Homo sapien
attgtcatatgcattacctccggcagccagctg

SEQ ID NO: 800014 - DNA, 33 bp, Homo sapien
attgtcatatgcattatctccggcagccagctg

SEQ ID NO: 800015 - DNA, 33 bp, Homo sapien
gaatcatacaatgttacgactggaagggacttg

SEQ ID NO: 800016 - DNA, 33 bp, Homo sapien
gaatcatacaatgttaggactggaagggacttg

SEQ ID NO: 800017 - DNA, 33 bp, Homo sapien
gtgacttgtgtgtctcactggtaaattagatga

SEQ ID NO: 800018 - DNA, 33 bp, Homo sapien
gtgacttgtgtgtctcgctggtaaattagatga

SEQ ID NO: 800019 - DNA, 33 bp, Homo sapien
gttttagaccaggaaacagaaccgttaatttta

SEQ ID NO: 800020 - DNA, 33 bp, Homo sapien
gttttagaccaggaaagagaaccgttaatttta

SEQ ID NO: 800021 - DNA, 33 bp, Homo sapien
acacttaagaactagcagagaccaggcgcagtg

SEQ ID NO: 800022 - DNA, 33 bp, Homo sapien
acacttaagaactagcggagaccaggcgcagtg

SEQ ID NO: 800023 - DNA, 33 bp, Homo sapien
gaaaatgagcatagtcaatgtgaaaacattttc

SEQ ID NO: 800024 - DNA, 33 bp, Homo sapien
gaaaatgagcatagtcgatgtgaaaacattttc

SEQ ID NO: 800025 - DNA, 33 bp, Homo sapien
gagccatgcagaggtccagtgtcatagcaaggt

SEQ ID NO: 800026 - DNA, 33 bp, Homo sapien
gagccatgcagaggtctagtgtcatagcaaggt

SEQ ID NO: 800027 - DNA, 33 bp, Homo sapien
tctgctctttagaggaccacattattcttgaat

SEQ ID NO: 800028 - DNA, 33 bp, Homo sapien
tctgctctttagaggatcacattattcttgaat

SEQ ID NO: 800029 - DNA, 33 bp, Homo sapien
tttattttcttggagaaatctaacccaaaatgg

SEQ ID NO: 800030 - DNA, 33 bp, Homo sapien
tttattttcttggagatatctaacccaaaatgg

SEQ ID NO: 800031 - DNA, 33 bp, Homo sapien
tccaaagtcatcagccaagcattatggggacat

SEQ ID NO: 800032 - DNA, 33 bp, Homo sapien
tccaaagtcatcagccgagcattatggggacat

SEQ ID NO: 800033 - DNA, 33 bp, Homo sapien
ttacaaaataggatacccataggccaaaatata

SEQ ID NO: 800034 - DNA, 33 bp, Homo sapien
ttacaaaataggatactcataggccaaaatata

SEQ ID NO: 800035 - DNA, 33 bp, Homo sapien
atgcattaccagagataatattacctacataac

SEQ ID NO: 800036 - DNA, 33 bp, Homo sapien
atgcattaccagagatgatattacctacataac

SEQ ID NO: 800037 - DNA, 33 bp, Homo sapien
aggtcaggtatgggcaaaggagttcacacctat

SEQ ID NO: 800038 - DNA, 33 bp, Homo sapien
aggtcaggtatgggcagaggagttcacacctat

SEQ ID NO: 800039 - DNA, 33 bp, Homo sapien
ccatgcctggaccttacgtaaatggtttgcttg

SEQ ID NO: 800040 - DNA, 33 bp, Homo sapien
ccatgcctggaccttaggtaaatggtttgcttg

SEQ ID NO: 800041 - DNA, 33 bp, Homo sapien
tactcaaagcagcttaccaactgagaggcatca

SEQ ID NO: 800042 - DNA, 33 bp, Homo sapien
tactcaaagcagcttatcaactgagaggcatca

SEQ ID NO: 800043 - DNA, 33 bp, Homo sapien
taatggcatctaaaaccgatttatttatttatt

SEQ ID NO: 800044 - DNA, 33 bp, Homo sapien
taatggcatctaaaactgatttatttatttatt

SEQ ID NO: 800045 - DNA, 33 bp, Homo sapien
taaaagcctaacccaactatatttcttctccca

SEQ ID NO: 800046 - DNA, 33 bp, Homo sapien
taaaagcctaacccaattatatttcttctccca

SEQ ID NO: 800047 - DNA, 33 bp, Homo sapien
gaattggaagaatcacaggactctgattttaaa

SEQ ID NO: 800048 - DNA, 33 bp, Homo sapien
gaattggaagaatcacgggactctgattttaaa

SEQ ID NO: 800049 - DNA, 33 bp, Homo sapien
agacattaagtaacaacgatttacagaatgcct

SEQ ID NO: 800050 - DNA, 33 bp, Homo sapien
agacattaagtaacaatgatttacagaatgcct

SEQ ID NO: 800051 - DNA, 33 bp, Homo sapien
tagctaagacagtgaaactattccttgacatag

SEQ ID NO: 800052 - DNA, 33 bp, Homo sapien
tagctaagacagtgaagctattccttgacatag

SEQ ID NO: 800053 - DNA, 33 bp, Homo sapien
cctcagtgactctctgcatttcatattccatgg

SEQ ID NO: 800054 - DNA, 33 bp, Homo sapien
cctcagtgactctctgtatttcatattccatgg

SEQ ID NO: 800055 - DNA, 33 bp, Homo sapien
aagagtcataatcccactcatgaaggacatgcc

SEQ ID NO: 800056 - DNA, 33 bp, Homo sapien
aagagtcataatcccattcatgaaggacatgcc

SEQ ID NO: 800057 - DNA, 33 bp, Homo sapien
gttggggccacacttacgctgctctggcttttg

SEQ ID NO: 800058 - DNA, 33 bp, Homo sapien
gttggggccacacttatgctgctctggcttttg

SEQ ID NO: 800059 - DNA, 33 bp, Homo sapien
aagtcactcctttatccaaaagccttcagtgtc

SEQ ID NO: 800060 - DNA, 33 bp, Homo sapien
aagtcactcctttatctaaaagccttcagtgtc

SEQ ID NO: 800061 - DNA, 33 bp, Homo sapien
atttacatttctcaggaacactgaaatatgcac

SEQ ID NO: 800062 - DNA, 33 bp, Homo sapien
atttacatttctcagggacactgaaatatgcac

SEQ ID NO: 800063 - DNA, 33 bp, Homo sapien
ggatgtaagtcacaaaaactcattcaggctaga

SEQ ID NO: 800064 - DNA, 33 bp, Homo sapien
ggatgtaagtcacaaagactcattcaggctaga

SEQ ID NO: 800065 - DNA, 33 bp, Homo sapien
ttctttagcctgatacacaaagctttctccctc

SEQ ID NO: 800066 - DNA, 33 bp, Homo sapien
ttctttagcctgatacgcaaagctttctccctc

SEQ ID NO: 800067 - DNA, 33 bp, Homo sapien
ttacactggaagagtccagacgggtacacatag

SEQ ID NO: 800068 - DNA, 33 bp, Homo sapien
ttacactggaagagtctagacgggtacacatag

SEQ ID NO: 800069 - DNA, 33 bp, Homo sapien
tatggaatccaggtaaggcccatctctgcagga

SEQ ID NO: 800070 - DNA, 33 bp, Homo sapien
tatggaatccaggtaatgcccatctctgcagga

SEQ ID NO: 800071 - DNA, 33 bp, Homo sapien
tatgttgataaaatagaaactcatgtcccttga

SEQ ID NO: 800072 - DNA, 33 bp, Homo sapien
tatgttgataaaataggaactcatgtcccttga

SEQ ID NO: 800073 - DNA, 33 bp, Homo sapien
gccagaagaatctggacgaagaaaagagcatca

SEQ ID NO: 800074 - DNA, 33 bp, Homo sapien
gccagaagaatctggatgaagaaaagagcatca

SEQ ID NO: 800075 - DNA, 33 bp, Homo sapien
acccttcctaggatgcacccttaagtcaatgga

SEQ ID NO: 800076 - DNA, 33 bp, Homo sapien
acccttcctaggatgcgcccttaagtcaatgga

SEQ ID NO: 800077 - DNA, 33 bp, Homo sapien
ttactgggatcccacaagtacacctccttataa

SEQ ID NO: 800078 - DNA, 33 bp, Homo sapien
ttactgggatcccacaggtacacctccttataa

SEQ ID NO: 800079 - DNA, 33 bp, Homo sapien
gttatttcctctttgaacccctttcagtcaaaa

SEQ ID NO: 800080 - DNA, 33 bp, Homo sapien
gttatttcctctttgaccccctttcagtcaaaa

SEQ ID NO: 800081 - DNA, 33 bp, Homo sapien
cctaaatgaaaaagaagatccttttctgacaca

SEQ ID NO: 800082 - DNA, 33 bp, Homo sapien
cctaaatgaaaaagaatatccttttctgacaca

SEQ ID NO: 800083 - DNA, 33 bp, Homo sapien
ggcttcatctttgtgacaggatgtccttgtggc

SEQ ID NO: 800084 - DNA, 33 bp, Homo sapien
ggcttcatctttgtgagaggatgtccttgtggc

SEQ ID NO: 800085 - DNA, 33 bp, Homo sapien
cggtaacttgtctcacacatggatggctgcagt

SEQ ID NO: 800086 - DNA, 33 bp, Homo sapien
cggtaacttgtctcacgcatggatggctgcagt

SEQ ID NO: 800087 - DNA, 33 bp, Homo sapien
ggtgctatgtatgcaaagtctgaagtgtgttta

SEQ ID NO: 800088 - DNA, 33 bp, Homo sapien
ggtgctatgtatgcaatgtctgaagtgtgttta

SEQ ID NO: 800089 - DNA, 33 bp, Homo sapien
ttaccctttccctgagaaacattgtacatatcc

SEQ ID NO: 800090 - DNA, 33 bp, Homo sapien
ttaccctttccctgagtaacattgtacatatcc

SEQ ID NO: 800091 - DNA, 33 bp, Homo sapien
taggcaggcgtctccaatctcatacctaatcca

SEQ ID NO: 800092 - DNA, 33 bp, Homo sapien
taggcaggcgtctccagtctcatacctaatcca

SEQ ID NO: 800093 - DNA, 33 bp, Homo sapien
tttcagttaatgataaatgttgtgaaggaaata

SEQ ID NO: 800094 - DNA, 33 bp, Homo sapien
tttcagttaatgataagtgttgtgaaggaaata

SEQ ID NO: 800095 - DNA, 33 bp, Homo sapien
tctagataagggaaaacagatcagctgaaagat

SEQ ID NO: 800096 - DNA, 33 bp, Homo sapien
tctagataagggaaaatagatcagctgaaagat

SEQ ID NO: 800097 - DNA, 33 bp, Homo sapien
agcagagttgactgagaagaaaagaattttgag

SEQ ID NO: 800098 - DNA, 33 bp, Homo sapien
agcagagttgactgaggagaaaagaattttgag

SEQ ID NO: 800099 - DNA, 33 bp, Homo sapien
agattcttgtcatgaacatacctggtagaaccc

SEQ ID NO: 800100 - DNA, 33 bp, Homo sapien
agattcttgtcatgaatatacctggtagaaccc

SEQ ID NO: 800101 - DNA, 33 bp, Homo sapien
tttttccatacagatacctggttgttccagcaa

SEQ ID NO: 800102 - DNA, 33 bp, Homo sapien
tttttccatacagatagctggttgttccagcaa

SEQ ID NO: 800103 - DNA, 33 bp, Homo sapien
acataaaatttatctacggtgacagaaagtaga

SEQ ID NO: 800104 - DNA, 33 bp, Homo sapien
acataaaatttatctatggtgacagaaagtaga

SEQ ID NO: 800105 - DNA, 33 bp, Homo sapien
aatatttcaggctgtcccttgtttctattgact

SEQ ID NO: 800106 - DNA, 33 bp, Homo sapien
aatatttcaggctgtctcttgtttctattgact

SEQ ID NO: 800107 - DNA, 33 bp, Homo sapien
attttaccagagagtaaagcaagccactaaata

SEQ ID NO: 800108 - DNA, 33 bp, Homo sapien
attttaccagagagtacagcaagccactaaata

SEQ ID NO: 800109 - DNA, 33 bp, Homo sapien
tatccaaagagtataccgtacctgagtaagagt

SEQ ID NO: 800110 - DNA, 33 bp, Homo sapien
tatccaaagagtatactgtacctgagtaagagt

SEQ ID NO: 800111 - DNA, 33 bp, Homo sapien
gttagaaatatgtcgaacatcaagattgcttca

SEQ ID NO: 800112 - DNA, 33 bp, Homo sapien
gttagaaatatgtcgagcatcaagattgcttca

SEQ ID NO: 800113 - DNA, 33 bp, Homo sapien
actcaacagtcagttacggtatacatttctgga

SEQ ID NO: 800114 - DNA, 33 bp, Homo sapien
actcaacagtcagttatggtatacatttctgga

SEQ ID NO: 800115 - DNA, 33 bp, Homo sapien
ttgttgagctaatgagacaaggacagcagctat

SEQ ID NO: 800116 - DNA, 33 bp, Homo sapien
ttgttgagctaatgaggcaaggacagcagctat

SEQ ID NO: 800117 - DNA, 33 bp, Homo sapien
gtttagctgtccagccaaagtggcagatctgtg

SEQ ID NO: 800118 - DNA, 33 bp, Homo sapien
gtttagctgtccagccgaagtggcagatctgtg

SEQ ID NO: 800119 - DNA, 33 bp, Homo sapien
gcaaggccctaaggacgggaaaatcaccctctg

SEQ ID NO: 800120 - DNA, 33 bp, Homo sapien
gcaaggccctaaggactggaaaatcaccctctg

SEQ ID NO: 800121 - DNA, 33 bp, Homo sapien
cagctctctggagatccaaactctgtcattttc

SEQ ID NO: 800122 - DNA, 33 bp, Homo sapien
cagctctctggagatctaaactctgtcattttc

SEQ ID NO: 800123 - DNA, 33 bp, Homo sapien
atccaaaactttttggccatcaacctgatgctc

SEQ ID NO: 800124 - DNA, 33 bp, Homo sapien
atccaaaactttttggtcatcaacctgatgctc

SEQ ID NO: 800125 - DNA, 33 bp, Homo sapien
ataccacgaatgtaaacagttaaattttggctt

SEQ ID NO: 800126 - DNA, 33 bp, Homo sapien
ataccacgaatgtaaatagttaaattttggctt

SEQ ID NO: 800127 - DNA, 33 bp, Homo sapien
tattgtattctgctcaaactcatcctgcatgga

SEQ ID NO: 800128 - DNA, 33 bp, Homo sapien
tattgtattctgctcagactcatcctgcatgga

SEQ ID NO: 800129 - DNA, 33 bp, Homo sapien
gacaacaaaccaaccacgtacatatattagaat

SEQ ID NO: 800130 - DNA, 33 bp, Homo sapien
gacaacaaaccaaccatgtacatatattagaat

SEQ ID NO: 800131 - DNA, 33 bp, Homo sapien
agacaaggccatggctaacactccgaggtgaga

SEQ ID NO: 800132 - DNA, 33 bp, Homo sapien
agacaaggccatggctcacactccgaggtgaga

SEQ ID NO: 800133 - DNA, 33 bp, Homo sapien
ttgcagactctcttaaacttttaagggcattat

SEQ ID NO: 800134 - DNA, 33 bp, Homo sapien
ttgcagactctcttaaccttttaagggcattat

SEQ ID NO: 800135 - DNA, 33 bp, Homo sapien
gctcatattcccgacccagagaatctgagatca

SEQ ID NO: 800136 - DNA, 33 bp, Homo sapien
gctcatattcccgacctagagaatctgagatca

SEQ ID NO: 800137 - DNA, 33 bp, Homo sapien
tctgactctggaagaacagtttgtgacttgagg

SEQ ID NO: 800138 - DNA, 33 bp, Homo sapien
tctgactctggaagaatagtttgtgacttgagg

SEQ ID NO: 800139 - DNA, 33 bp, Homo sapien
agtgtaaatcaaacaccataccattagactcca

SEQ ID NO: 800140 - DNA, 33 bp, Homo sapien
agtgtaaatcaaacacgataccattagactcca

SEQ ID NO: 800141 - DNA, 33 bp, Homo sapien
accaggaagattaaaccggctatgtgtaaggct

SEQ ID NO: 800142 - DNA, 33 bp, Homo sapien
accaggaagattaaacgggctatgtgtaaggct

SEQ ID NO: 800143 - DNA, 33 bp, Homo sapien
cataaacattttagtaaggtgctattctttgta

SEQ ID NO: 800144 - DNA, 33 bp, Homo sapien
cataaacattttagtatggtgctattctttgta

SEQ ID NO: 800145 - DNA, 33 bp, Homo sapien
ttttatgaaaatataccccccagagaccctctc

SEQ ID NO: 800146 - DNA, 33 bp, Homo sapien
ttttatgaaaatatactccccagagaccctctc

SEQ ID NO: 800147 - DNA, 33 bp, Homo sapien
ttatcatctctgggccactgactcatttgttaa

SEQ ID NO: 800148 - DNA, 33 bp, Homo sapien
ttatcatctctgggccgctgactcatttgttaa

SEQ ID NO: 800149 - DNA, 33 bp, Homo sapien
ttctgcgtgtccgggaataactttctccactcc

SEQ ID NO: 800150 - DNA, 33 bp, Homo sapien
ttctgcgtgtccgggagtaactttctccactcc

SEQ ID NO: 800151 - DNA, 33 bp, Homo sapien
gctccaatttcacaaccggaatcttccccataa

SEQ ID NO: 800152 - DNA, 33 bp, Homo sapien
gctccaatttcacaactggaatcttccccataa

SEQ ID NO: 800153 - DNA, 33 bp, Homo sapien
tgatgtccaagacttacgcacttcatagtctga

SEQ ID NO: 800154 - DNA, 33 bp, Homo sapien
tgatgtccaagacttatgcacttcatagtctga

SEQ ID NO: 800155 - DNA, 33 bp, Homo sapien
gccctctgagacttgaagacaattttcttttcc

SEQ ID NO: 800156 - DNA, 33 bp, Homo sapien
gccctctgagacttgaggacaattttcttttcc

SEQ ID NO: 800157 - DNA, 33 bp, Homo sapien
ctctttgatccctgaacctgtcattcaacatac

SEQ ID NO: 800158 - DNA, 33 bp, Homo sapien
ctctttgatccctgaatctgtcattcaacatac

SEQ ID NO: 800159 - DNA, 33 bp, Homo sapien
tatctacattctcccccacactcaacaagagag

SEQ ID NO: 800160 - DNA, 33 bp, Homo sapien
tatctacattctccccgacactcaacaagagag

SEQ ID NO: 800161 - DNA, 33 bp, Homo sapien
cctctcctgacacctccagtgcttacagattca

SEQ ID NO: 800162 - DNA, 33 bp, Homo sapien
cctctcctgacacctctagtgcttacagattca

SEQ ID NO: 800163 - DNA, 33 bp, Homo sapien
aaacatttataggacacctattgtatgcccatg

SEQ ID NO: 800164 - DNA, 33 bp, Homo sapien
aaacatttataggacatctattgtatgcccatg

SEQ ID NO: 800165 - DNA, 33 bp, Homo sapien
gggtgaaagagtgtgaacctgattccagactgc

SEQ ID NO: 800166 - DNA, 33 bp, Homo sapien
gggtgaaagagtgtgaccctgattccagactgc

SEQ ID NO: 800167 - DNA, 33 bp, Homo sapien
ccaaaaatttgactggccaaccactcacccctt

SEQ ID NO: 800168 - DNA, 33 bp, Homo sapien
ccaaaaatttgactggtcaaccactcacccctt

SEQ ID NO: 800169 - DNA, 33 bp, Homo sapien
ggtcctgctgaaggccagatggattcctgaaga

SEQ ID NO: 800170 - DNA, 33 bp, Homo sapien
ggtcctgctgaaggcccgatggattcctgaaga

SEQ ID NO: 800171 - DNA, 33 bp, Homo sapien
gtcactaatggatcaccatcttctttcttgacg

SEQ ID NO: 800172 - DNA, 33 bp, Homo sapien
gtcactaatggatcacgatcttctttcttgacg

SEQ ID NO: 800173 - DNA, 33 bp, Homo sapien
ccatactcagtgctggaagcttaacacagttct

SEQ ID NO: 800174 - DNA, 33 bp, Homo sapien
ccatactcagtgctgggagcttaacacagttct

SEQ ID NO: 800175 - DNA, 33 bp, Homo sapien
tttccctttcctgacactaataacagcagcagc

SEQ ID NO: 800176 - DNA, 33 bp, Homo sapien
tttccctttcctgacattaataacagcagcagc

SEQ ID NO: 800177 - DNA, 33 bp, Homo sapien
atttgcttttccttcacggaatccatcacagtc

SEQ ID NO: 800178 - DNA, 33 bp, Homo sapien
atttgcttttccttcatggaatccatcacagtc

SEQ ID NO: 800179 - DNA, 33 bp, Homo sapien
ctaaaccaaaaatcagaaacacagactccctgg

SEQ ID NO: 800180 - DNA, 33 bp, Homo sapien
ctaaaccaaaaatcaggaacacagactccctgg

SEQ ID NO: 800181 - DNA, 33 bp, Homo sapien
tctgggtatcccttgacgactaagacctgcctc

SEQ ID NO: 800182 - DNA, 33 bp, Homo sapien
tctgggtatcccttgatgactaagacctgcctc

SEQ ID NO: 800183 - DNA, 33 bp, Homo sapien
ctcctttatttccagaacttagggacatactag

SEQ ID NO: 800184 - DNA, 33 bp, Homo sapien
ctcctttatttccagatcttagggacatactag

SEQ ID NO: 800185 - DNA, 33 bp, Homo sapien
cagccaagtggccacacgtgaaaccaggccctg

SEQ ID NO: 800186 - DNA, 33 bp, Homo sapien
cagccaagtggccacaggtgaaaccaggccctg

SEQ ID NO: 800187 - DNA, 33 bp, Homo sapien
gtctcctgactctaaaacttcccatctgaaccg

SEQ ID NO: 800188 - DNA, 33 bp, Homo sapien
gtctcctgactctaaagcttcccatctgaaccg

SEQ ID NO: 800189 - DNA, 33 bp, Homo sapien
tgctctctctgtcttacgctctcgccctctcat

SEQ ID NO: 800190 - DNA, 33 bp, Homo sapien
tgctctctctgtcttatgctctcgccctctcat

SEQ ID NO: 800191 - DNA, 33 bp, Homo sapien
tcctctcttggcctcactgaaggtctttgtggg

SEQ ID NO: 800192 - DNA, 33 bp, Homo sapien
tcctctcttggcctcattgaaggtctttgtggg

SEQ ID NO: 800193 - DNA, 33 bp, Homo sapien
gatatctgttgtgtaacgtttgtatatttctga

SEQ ID NO: 800194 - DNA, 33 bp, Homo sapien
gatatctgttgtgtaatgtttgtatatttctga

SEQ ID NO: 800195 - DNA, 33 bp, Homo sapien
gtgttctggtccccgtgaaaaaggatacatgag

SEQ ID NO: 800196 - DNA, 33 bp, Homo sapien
gtgttctggtccccgttaaaaaggatacatgag

SEQ ID NO: 800197 - DNA, 33 bp, Homo sapien
gggattggtgatactccaaaaagtagtaattat

SEQ ID NO: 800198 - DNA, 33 bp, Homo sapien
gggattggtgatactctaaaaagtagtaattat

SEQ ID NO: 800199 - DNA, 33 bp, Homo sapien
taggtaagagacaggactagggccaggtgatgt

SEQ ID NO: 800200 - DNA, 33 bp, Homo sapien
taggtaagagacaggagtagggccaggtgatgt

SEQ ID NO: 800201 - DNA, 33 bp, Homo sapien
tgagctctcacccttacgtcacaacagaggatt

SEQ ID NO: 800202 - DNA, 33 bp, Homo sapien
tgagctctcacccttaggtcacaacagaggatt

SEQ ID NO: 800203 - DNA, 33 bp, Homo sapien
agcactactgactaccacaaagtcatataatca

SEQ ID NO: 800204 - DNA, 33 bp, Homo sapien
agcactactgactaccgcaaagtcatataatca

SEQ ID NO: 800205 - DNA, 33 bp, Homo sapien
gggtccaggctacttgcatggtatgtgctggtt

SEQ ID NO: 800206 - DNA, 33 bp, Homo sapien
gggtccaggctacttgtatggtatgtgctggtt

SEQ ID NO: 800207 - DNA, 33 bp, Homo sapien
gtgctggttcagatgcaaaatatccatagcaca

SEQ ID NO: 800208 - DNA, 33 bp, Homo sapien
gtgctggttcagatgcgaaatatccatagcaca

SEQ ID NO: 800209 - DNA, 33 bp, Homo sapien
cattcaaactgtatagccatggtaatgagatga

SEQ ID NO: 800210 - DNA, 33 bp, Homo sapien
cattcaaactgtatagtcatggtaatgagatga

SEQ ID NO: 800211 - DNA, 33 bp, Homo sapien
aattcacacatatttacagaactcctacctact

SEQ ID NO: 800212 - DNA, 33 bp, Homo sapien
aattcacacatatttatagaactcctacctact

SEQ ID NO: 800213 - DNA, 33 bp, Homo sapien
ctgggttatatgctgaatatggattccctactc

SEQ ID NO: 800214 - DNA, 33 bp, Homo sapien
ctgggttatatgctgactatggattccctactc

SEQ ID NO: 800215 - DNA, 33 bp, Homo sapien
cctgggccaaatgagaagtcatcccatccaccc

SEQ ID NO: 800216 - DNA, 33 bp, Homo sapien
cctgggccaaatgagaggtcatcccatccaccc

SEQ ID NO: 800217 - DNA, 33 bp, Homo sapien
catgttagctcttaccacatatacccataaaaa

SEQ ID NO: 800218 - DNA, 33 bp, Homo sapien
catgttagctcttacctcatatacccataaaaa

SEQ ID NO: 800219 - DNA, 33 bp, Homo sapien
aatagcagattttttaccctaggagacatttca

SEQ ID NO: 800220 - DNA, 33 bp, Homo sapien
aatagcagattttttatcctaggagacatttca

SEQ ID NO: 800221 - DNA, 33 bp, Homo sapien
ttagaggctttcaggacggctacttgtcttttg

SEQ ID NO: 800222 - DNA, 33 bp, Homo sapien
ttagaggctttcaggatggctacttgtcttttg

SEQ ID NO: 800223 - DNA, 33 bp, Homo sapien
ggctctggcttctttacctcttattccagagct

SEQ ID NO: 800224 - DNA, 33 bp, Homo sapien
ggctctggcttctttatctcttattccagagct

SEQ ID NO: 800225 - DNA, 33 bp, Homo sapien
aaatgttccctgaatcaccgtacttcagccttc

SEQ ID NO: 800226 - DNA, 33 bp, Homo sapien
aaatgttccctgaatcgccgtacttcagccttc

SEQ ID NO: 800227 - DNA, 33 bp, Homo sapien
agtgcatagttcttccactaagctagctgccac

SEQ ID NO: 800228 - DNA, 33 bp, Homo sapien
agtgcatagttcttccgctaagctagctgccac

SEQ ID NO: 800229 - DNA, 33 bp, Homo sapien
tgtgttcagtgttccaagctaaggaatcaagaa

SEQ ID NO: 800230 - DNA, 33 bp, Homo sapien
tgtgttcagtgttccacgctaaggaatcaagaa

SEQ ID NO: 800231 - DNA, 33 bp, Homo sapien
agtagactacatctaccggcataaagaaatttt

SEQ ID NO: 800232 - DNA, 33 bp, Homo sapien
agtagactacatctactggcataaagaaatttt

SEQ ID NO: 800233 - DNA, 33 bp, Homo sapien
cctttatcttccctttcaaaatctaagcctatc

SEQ ID NO: 800234 - DNA, 33 bp, Homo sapien
cctttatcttccctttgaaaatctaagcctatc

SEQ ID NO: 800235 - DNA, 33 bp, Homo sapien
tctgccaaagctaagcaaaaacctccagccatg

SEQ ID NO: 800236 - DNA, 33 bp, Homo sapien
tctgccaaagctaagcgaaaacctccagccatg

SEQ ID NO: 800237 - DNA, 33 bp, Homo sapien
tccatgagatgcagcaaactaaaagaataagat

SEQ ID NO: 800238 - DNA, 33 bp, Homo sapien
tccatgagatgcagcagactaaaagaataagat

SEQ ID NO: 800239 - DNA, 33 bp, Homo sapien
tatcatatgcattaaacgggatgttgccaataa

SEQ ID NO: 800240 - DNA, 33 bp, Homo sapien
tatcatatgcattaaatgggatgttgccaataa

SEQ ID NO: 800241 - DNA, 33 bp, Homo sapien
cagatgagtctcatcaacagatagtgaaagggg

SEQ ID NO: 800242 - DNA, 33 bp, Homo sapien
cagatgagtctcatcatcagatagtgaaagggg

SEQ ID NO: 800243 - DNA, 33 bp, Homo sapien
atatgcaggtttgttacgtttgtatattgtgtg

SEQ ID NO: 800244 - DNA, 33 bp, Homo sapien
atatgcaggtttgttatgtttgtatattgtgtg

SEQ ID NO: 800245 - DNA, 33 bp, Homo sapien
tttgccactgcactagcaaacgtttgtgaaaag

SEQ ID NO: 800246 - DNA, 33 bp, Homo sapien
tttgccactgcactagtaaacgtttgtgaaaag

SEQ ID NO: 800247 - DNA, 33 bp, Homo sapien
gctctagtgcagagaacgtctccaagaaaaata

SEQ ID NO: 800248 - DNA, 33 bp, Homo sapien
gctctagtgcagagaatgtctccaagaaaaata

SEQ ID NO: 800249 - DNA, 33 bp, Homo sapien
accgcctcagcagataaataacagcatgaagaa

SEQ ID NO: 800250 - DNA, 33 bp, Homo sapien
accgcctcagcagatacataacagcatgaagaa

SEQ ID NO: 800251 - DNA, 33 bp, Homo sapien
catgaagaagaatccacgtttttatccaaactc

SEQ ID NO: 800252 - DNA, 33 bp, Homo sapien
catgaagaagaatccatgtttttatccaaactc

SEQ ID NO: 800253 - DNA, 33 bp, Homo sapien
gccaagcactttgttacgtgttgaggataagcc

SEQ ID NO: 800254 - DNA, 33 bp, Homo sapien
gccaagcactttgttatgtgttgaggataagcc

SEQ ID NO: 800255 - DNA, 33 bp, Homo sapien
gtcaggagtaagagtcactagagctctgccatc

SEQ ID NO: 800256 - DNA, 33 bp, Homo sapien
gtcaggagtaagagtcgctagagctctgccatc

SEQ ID NO: 800257 - DNA, 33 bp, Homo sapien
ctcatgagaacctaaaatacaatagtcaacatg

SEQ ID NO: 800258 - DNA, 33 bp, Homo sapien
ctcatgagaacctaaagtacaatagtcaacatg

SEQ ID NO: 800259 - DNA, 33 bp, Homo sapien
attgttcccatcttcacgtccatatgtacccaa

SEQ ID NO: 800260 - DNA, 33 bp, Homo sapien
attgttcccatcttcatgtccatatgtacccaa

SEQ ID NO: 800261 - DNA, 33 bp, Homo sapien
aaggtaaaatataaataaatgatgcaaagccct

SEQ ID NO: 800262 - DNA, 33 bp, Homo sapien
aaggtaaaatataaatgaatgatgcaaagccct

SEQ ID NO: 800263 - DNA, 33 bp, Homo sapien
tcaagatgataaacaactcgcttagtacaagag

SEQ ID NO: 800264 - DNA, 33 bp, Homo sapien
tcaagatgataaacaattcgcttagtacaagag

SEQ ID NO: 800265 - DNA, 33 bp, Homo sapien
cagccctgagattaagactgaagctataaagcc

SEQ ID NO: 800266 - DNA, 33 bp, Homo sapien
cagccctgagattaagtctgaagctataaagcc

SEQ ID NO: 800267 - DNA, 33 bp, Homo sapien
tatgttataaagtcacacccaatttttaaaagg

SEQ ID NO: 800268 - DNA, 33 bp, Homo sapien
tatgttataaagtcacgcccaatttttaaaagg

SEQ ID NO: 800269 - DNA, 33 bp, Homo sapien
tgtaggcaaaattgggaatttagcaggttgtcc

SEQ ID NO: 800270 - DNA, 33 bp, Homo sapien
tgtaggcaaaattggggatttagcaggttgtcc

SEQ ID NO: 800271 - DNA, 33 bp, Homo sapien
tcaaattccagtaatacagacaaaacctttcca

SEQ ID NO: 800272 - DNA, 33 bp, Homo sapien
tcaaattccagtaatagagacaaaacctttcca

SEQ ID NO: 800273 - DNA, 33 bp, Homo sapien
cgccagtgtacagagcaaagattttctgcctcc

SEQ ID NO: 800274 - DNA, 33 bp, Homo sapien
cgccagtgtacagagcgaagattttctgcctcc

SEQ ID NO: 800275 - DNA, 33 bp, Homo sapien
actggagcccataataacgagggagttgtgcac

SEQ ID NO: 800276 - DNA, 33 bp, Homo sapien
actggagcccataatagcgagggagttgtgcac

SEQ ID NO: 800277 - DNA, 33 bp, Homo sapien
acttatcaaggagacacggtcatttcctggaag

SEQ ID NO: 800278 - DNA, 33 bp, Homo sapien
acttatcaaggagacagggtcatttcctggaag

SEQ ID NO: 800279 - DNA, 33 bp, Homo sapien
gcaactgttcatttcaagcatttatatttcagt

SEQ ID NO: 800280 - DNA, 33 bp, Homo sapien
gcaactgttcatttcaggcatttatatttcagt

SEQ ID NO: 800281 - DNA, 33 bp, Homo sapien
tacaatagctgagatagggaatcaacctacatg

SEQ ID NO: 800282 - DNA, 33 bp, Homo sapien
tacaatagctgagatatggaatcaacctacatg

SEQ ID NO: 800283 - DNA, 33 bp, Homo sapien
gagcatcagccaaccaagagatgactggagagg

SEQ ID NO: 800284 - DNA, 33 bp, Homo sapien
gagcatcagccaaccaggagatgactggagagg

SEQ ID NO: 800285 - DNA, 33 bp, Homo sapien
ttccactggcaaagcaacttttagaatttttaa

SEQ ID NO: 800286 - DNA, 33 bp, Homo sapien
ttccactggcaaagcagcttttagaatttttaa

SEQ ID NO: 800287 - DNA, 33 bp, Homo sapien
catggctgggaagttcactcaggtgtctgtaac

SEQ ID NO: 800288 - DNA, 33 bp, Homo sapien
catggctgggaagttcgctcaggtgtctgtaac

SEQ ID NO: 800289 - DNA, 33 bp, Homo sapien
actactgatgatactaaggacaaggtaattata

SEQ ID NO: 800290 - DNA, 33 bp, Homo sapien
actactgatgatactacggacaaggtaattata

SEQ ID NO: 800291 - DNA, 33 bp, Homo sapien
ttgtcttagtctttaaaaacttgcctaggttta

SEQ ID NO: 800292 - DNA, 33 bp, Homo sapien
ttgtcttagtctttaagaacttgcctaggttta

SEQ ID NO: 800293 - DNA, 33 bp, Homo sapien
aaaacatagctaatgacaactgcagaaataaca

SEQ ID NO: 800294 - DNA, 33 bp, Homo sapien
aaaacatagctaatgataactgcagaaataaca

SEQ ID NO: 800295 - DNA, 33 bp, Homo sapien
taaatgtaaacttaaacgaactgaaattaaata

SEQ ID NO: 800296 - DNA, 33 bp, Homo sapien
taaatgtaaacttaaatgaactgaaattaaata

SEQ ID NO: 800297 - DNA, 33 bp, Homo sapien
tttgtgttcagtggaagggtggttaaaaagaag

SEQ ID NO: 800298 - DNA, 33 bp, Homo sapien
tttgtgttcagtggaatggtggttaaaaagaag

SEQ ID NO: 800299 - DNA, 33 bp, Homo sapien
acaaacggacaggaataagaatgaaatcagaat

SEQ ID NO: 800300 - DNA, 33 bp, Homo sapien
acaaacggacaggaatgagaatgaaatcagaat

SEQ ID NO: 800301 - DNA, 33 bp, Homo sapien
catcgctcttgtgggaccttgtctgggtaggtc

SEQ ID NO: 800302 - DNA, 33 bp, Homo sapien
catcgctcttgtgggatcttgtctgggtaggtc

SEQ ID NO: 800303 - DNA, 33 bp, Homo sapien
actttgaatatggcccaagttcaaagggcttcc

SEQ ID NO: 800304 - DNA, 33 bp, Homo sapien
actttgaatatggccccagttcaaagggcttcc

SEQ ID NO: 800305 - DNA, 33 bp, Homo sapien
ttcttgcagtctataacagatcacttaattcag

SEQ ID NO: 800306 - DNA, 33 bp, Homo sapien
ttcttgcagtctataagagatcacttaattcag

SEQ ID NO: 800307 - DNA, 33 bp, Homo sapien
aaaaaaatgaggaagaatcaatgcaattgctga

SEQ ID NO: 800308 - DNA, 33 bp, Homo sapien
aaaaaaatgaggaagagtcaatgcaattgctga

SEQ ID NO: 800309 - DNA, 33 bp, Homo sapien
cagagtatgacccttacgcagctcagggcaaag

SEQ ID NO: 800310 - DNA, 33 bp, Homo sapien
cagagtatgacccttatgcagctcagggcaaag

SEQ ID NO: 800311 - DNA, 33 bp, Homo sapien
taacgccacaaataagactacaggtggaggttt

SEQ ID NO: 800312 - DNA, 33 bp, Homo sapien
taacgccacaaataaggctacaggtggaggttt

SEQ ID NO: 800313 - DNA, 33 bp, Homo sapien
agagccaggtagctaccgaagaattgaaggagg

SEQ ID NO: 800314 - DNA, 33 bp, Homo sapien
agagccaggtagctactgaagaattgaaggagg

SEQ ID NO: 800315 - DNA, 33 bp, Homo sapien
agtgaagaggtaagaaagtaacttaaatcagct

SEQ ID NO: 800316 - DNA, 33 bp, Homo sapien
agtgaagaggtaagaaggtaacttaaatcagct

SEQ ID NO: 800317 - DNA, 33 bp, Homo sapien
ctggactttgaggaaacggaaaacaagggaata

SEQ ID NO: 800318 - DNA, 33 bp, Homo sapien
ctggactttgaggaaatggaaaacaagggaata

SEQ ID NO: 800319 - DNA, 33 bp, Homo sapien
gcacttggaactggtaactctaagaaagctcct

SEQ ID NO: 800320 - DNA, 33 bp, Homo sapien
gcacttggaactggtacctctaagaaagctcct

SEQ ID NO: 800321 - DNA, 33 bp, Homo sapien
attatttttaattacacggttgtagtcgattgg

SEQ ID NO: 800322 - DNA, 33 bp, Homo sapien
attatttttaattacatggttgtagtcgattgg

SEQ ID NO: 800323 - DNA, 33 bp, Homo sapien
gacctctctgaagatacagaaatggtcctgttc

SEQ ID NO: 800324 - DNA, 33 bp, Homo sapien
gacctctctgaagatatagaaatggtcctgttc

SEQ ID NO: 800325 - DNA, 33 bp, Homo sapien
taagtttttagattaaaaggagccacatccaga

SEQ ID NO: 800326 - DNA, 33 bp, Homo sapien
taagtttttagattaagaggagccacatccaga

SEQ ID NO: 800327 - DNA, 33 bp, Homo sapien
gcaagcaactggaagacggatgtgctttgtctg

SEQ ID NO: 800328 - DNA, 33 bp, Homo sapien
gcaagcaactggaagatggatgtgctttgtctg

SEQ ID NO: 800329 - DNA, 33 bp, Homo sapien
aaagaaaactgcttgaagcacctcttcgaagtg

SEQ ID NO: 800330 - DNA, 33 bp, Homo sapien
aaagaaaactgcttgaggcacctcttcgaagtg

SEQ ID NO: 800331 - DNA, 33 bp, Homo sapien
ttccctacccaccatcaaaaaggaagaaagtaa

SEQ ID NO: 800332 - DNA, 33 bp, Homo sapien
ttccctacccaccatcgaaaaggaagaaagtaa

SEQ ID NO: 800333 - DNA, 33 bp, Homo sapien
tgtttcagtaaaatctaaagttagagaggcagt

SEQ ID NO: 800334 - DNA, 33 bp, Homo sapien
tgtttcagtaaaatctcaagttagagaggcagt

SEQ ID NO: 800335 - DNA, 33 bp, Homo sapien
actatacacttgaaaacggttatgatgataaag

SEQ ID NO: 800336 - DNA, 33 bp, Homo sapien
actatacacttgaaaatggttatgatgataaag

SEQ ID NO: 800337 - DNA, 33 bp, Homo sapien
ttatatgaggtacctaaagcaaactcatagagg

SEQ ID NO: 800338 - DNA, 33 bp, Homo sapien
ttatatgaggtacctagagcaaactcatagagg

SEQ ID NO: 800339 - DNA, 33 bp, Homo sapien
tttcggctgttcttatcagttttttcttgattt

SEQ ID NO: 800340 - DNA, 33 bp, Homo sapien
tttcggctgttcttatgagttttttcttgattt

SEQ ID NO: 800341 - DNA, 33 bp, Homo sapien
gggattagatacagaactatcttagtgatgagg

SEQ ID NO: 800342 - DNA, 33 bp, Homo sapien
gggattagatacagaattatcttagtgatgagg

SEQ ID NO: 800343 - DNA, 33 bp, Homo sapien
acagttctatgtctcactatgataccaagtttc

SEQ ID NO: 800344 - DNA, 33 bp, Homo sapien
acagttctatgtctcattatgataccaagtttc

SEQ ID NO: 800345 - DNA, 33 bp, Homo sapien
actgggtgaaaagggaaggtctgaatcgagtgc

SEQ ID NO: 800346 - DNA, 33 bp, Homo sapien
actgggtgaaaagggagggtctgaatcgagtgc

SEQ ID NO: 800347 - DNA, 33 bp, Homo sapien
agtttctgtaggccctaagctgaagaagtgagg

SEQ ID NO: 800348 - DNA, 33 bp, Homo sapien
agtttctgtaggccctgagctgaagaagtgagg

SEQ ID NO: 800349 - DNA, 33 bp, Homo sapien
cagggcaccatccttaagggagaaggtctacag

SEQ ID NO: 800350 - DNA, 33 bp, Homo sapien
cagggcaccatccttaggggagaaggtctacag

SEQ ID NO: 800351 - DNA, 33 bp, Homo sapien
ttaagtgaatagtgtacgtggtttactctcccc

SEQ ID NO: 800352 - DNA, 33 bp, Homo sapien
ttaagtgaatagtgtatgtggtttactctcccc

SEQ ID NO: 800353 - DNA, 33 bp, Homo sapien
ttgtataataggcatgcattactttagaatcag

SEQ ID NO: 800354 - DNA, 33 bp, Homo sapien
ttgtataataggcatgtattactttagaatcag

SEQ ID NO: 800355 - DNA, 33 bp, Homo sapien
tatcaagaatcttaaaaatgtacatactcagtg

SEQ ID NO: 800356 - DNA, 33 bp, Homo sapien
tatcaagaatcttaaatatgtacatactcagtg

SEQ ID NO: 800357 - DNA, 33 bp, Homo sapien
gttgtgactacagcaaatgtctgctaacagatg

SEQ ID NO: 800358 - DNA, 33 bp, Homo sapien
gttgtgactacagcaagtgtctgctaacagatg

SEQ ID NO: 800359 - DNA, 33 bp, Homo sapien
cttccagcagaagcacaataacttcctcagcat

SEQ ID NO: 800360 - DNA, 33 bp, Homo sapien
cttccagcagaagcacgataacttcctcagcat

SEQ ID NO: 800361 - DNA, 33 bp, Homo sapien
tactgtagagtggtgaaatcaagtcggtagatc

SEQ ID NO: 800362 - DNA, 33 bp, Homo sapien
tactgtagagtggtgagatcaagtcggtagatc

SEQ ID NO: 800363 - DNA, 33 bp, Homo sapien
cagactacttgttaaaatagcattagtctcaaa

SEQ ID NO: 800364 - DNA, 33 bp, Homo sapien
cagactacttgttaaactagcattagtctcaaa

SEQ ID NO: 800365 - DNA, 33 bp, Homo sapien
aattggctagggcatacgacaattctactttta

SEQ ID NO: 800366 - DNA, 33 bp, Homo sapien
aattggctagggcatatgacaattctactttta

SEQ ID NO: 800367 - DNA, 33 bp, Homo sapien
aaaatatatctcaagaaccctcagcattaatcc

SEQ ID NO: 800368 - DNA, 33 bp, Homo sapien
aaaatatatctcaagatccctcagcattaatcc

SEQ ID NO: 800369 - DNA, 33 bp, Homo sapien
agttcggcatcaaataacaatagtgaactgaaa

SEQ ID NO: 800370 - DNA, 33 bp, Homo sapien
agttcggcatcaaatagcaatagtgaactgaaa

SEQ ID NO: 800371 - DNA, 33 bp, Homo sapien
tacttgttcatcataccgccagttctttttcta

SEQ ID NO: 800372 - DNA, 33 bp, Homo sapien
tacttgttcatcatactgccagttctttttcta

SEQ ID NO: 800373 - DNA, 33 bp, Homo sapien
acgtggattcttccaaatattggcccttcacct

SEQ ID NO: 800374 - DNA, 33 bp, Homo sapien
acgtggattcttccaactattggcccttcacct

SEQ ID NO: 800375 - DNA, 33 bp, Homo sapien
taccagaaggtccactcaagacttggggtaaga

SEQ ID NO: 800376 - DNA, 33 bp, Homo sapien
taccagaaggtccactgaagacttggggtaaga

SEQ ID NO: 800377 - DNA, 33 bp, Homo sapien
aggtcacagaccctaacaggaaagtcagtccat

SEQ ID NO: 800378 - DNA, 33 bp, Homo sapien
aggtcacagaccctaagaggaaagtcagtccat

SEQ ID NO: 800379 - DNA, 33 bp, Homo sapien; identical to SEQ ID NO: 800377

SEQ ID NO: 800380 - DNA, 33 bp, Homo sapien; identical to SEQ ID NO: 800378

SEQ ID NO: 800381 - DNA, 33 bp, Homo sapien
cagagtgtgaggccggaaggatgactcaggagg

SEQ ID NO: 800382 - DNA, 33 bp, Homo sapien
cagagtgtgaggccgggaggatgactcaggagg

SEQ ID NO: 800383 - DNA, 33 bp, Homo sapien
gcagcacgggagtctccgaatattaaagctacc

SEQ ID NO: 800384 - DNA, 33 bp, Homo sapien
gcagcacgggagtctctgaatattaaagctacc

SEQ ID NO: 800385 - DNA, 33 bp, Homo sapien
ccaaccacatggattaaggtggctccccaaagg

SEQ ID NO: 800386 - DNA, 33 bp, Homo sapien
ccaaccacatggattagggtggctccccaaagg

SEQ ID NO: 800387 - DNA, 33 bp, Homo sapien
gcctggttactggaaaacaatcactggaggacg

SEQ ID NO: 800388 - DNA, 33 bp, Homo sapien
gcctggttactggaaagcaatcactggaggacg

SEQ ID NO: 800389 - DNA, 33 bp, Homo sapien
ctaaaggccttgtgcccacttcttacctcctct

SEQ ID NO: 800390 - DNA, 33 bp, Homo sapien
ctaaaggccttgtgcctacttcttacctcctct

SEQ ID NO: 800391 - DNA, 33 bp, Homo sapien
gttggagaagggtcccagagagtgttgaacaag

SEQ ID NO: 800392 - DNA, 33 bp, Homo sapien
gttggagaagggtcccggagagtgttgaacaag

SEQ ID NO: 800393 - DNA, 33 bp, Homo sapien
tgtttcaggacacactgaatgcagttggagagg

SEQ ID NO: 800394 - DNA, 33 bp, Homo sapien
tgtttcaggacacacttaatgcagttggagagg

SEQ ID NO: 800395 - DNA, 33 bp, Homo sapien
attccatatataagacactctatcctctttttc

SEQ ID NO: 800396 - DNA, 33 bp, Homo sapien
attccatatataagaccctctatcctctttttc

SEQ ID NO: 800397 - DNA, 33 bp, Homo sapien
ggacacttcatataaacgcagtcacacacctaa

SEQ ID NO: 800398 - DNA, 33 bp, Homo sapien
ggacacttcatataaatgcagtcacacacctaa

SEQ ID NO: 800399 - DNA, 33 bp, Homo sapien
ctgggatacctgaaacgcaactattcaatcttt

SEQ ID NO: 800400 - DNA, 33 bp, Homo sapien
ctgggatacctgaaactcaactattcaatcttt

SEQ ID NO: 800401 - DNA, 33 bp, Homo sapien
gtggagtgcgtctgtgcagaaggctggaggaga

SEQ ID NO: 800402 - DNA, 33 bp, Homo sapien
gtggagtgcgtctgtggagaaggctggaggaga

SEQ ID NO: 800403 - DNA, 33 bp, Homo sapien
cttagctaagagcccaaaaccaaacaagggagt

SEQ ID NO: 800404 - DNA, 33 bp, Homo sapien
cttagctaagagcccagaaccaaacaagggagt

SEQ ID NO: 800405 - DNA, 33 bp, Homo sapien
agataataagcacctcaccggaagcagggctag

SEQ ID NO: 800406 - DNA, 33 bp, Homo sapien
agataataagcacctcgccggaagcagggctag

SEQ ID NO: 800407 - DNA, 33 bp, Homo sapien
cttcagttatcatcacaaacacttgctaggctt

SEQ ID NO: 800408 - DNA, 33 bp, Homo sapien
cttcagttatcatcaccaacacttgctaggctt

SEQ ID NO: 800409 - DNA, 33 bp, Homo sapien
tttactcttctcacaaccctttcaggttcagag

SEQ ID NO: 800410 - DNA, 33 bp, Homo sapien
tttactcttctcacaatcctttcaggttcagag

SEQ ID NO: 800411 - DNA, 33 bp, Homo sapien
gaagctccctctgatacggttttatcttatgcc

SEQ ID NO: 800412 - DNA, 33 bp, Homo sapien
gaagctccctctgatatggttttatcttatgcc

SEQ ID NO: 800413 - DNA, 33 bp, Homo sapien
ttatgaaggattgttacatggtgtgttggaaaa

SEQ ID NO: 800414 - DNA, 33 bp, Homo sapien
ttatgaaggattgttatatggtgtgttggaaaa

SEQ ID NO: 800415 - DNA, 33 bp, Homo sapien
gtaatgtttattccccacaaacaggcactgagc

SEQ ID NO: 800416 - DNA, 33 bp, Homo sapien
gtaatgtttattccccccaaacaggcactgagc

SEQ ID NO: 800417 - DNA, 33 bp, Homo sapien
agtctggtccagactaccctttttactgtcttt

SEQ ID NO: 800418 - DNA, 33 bp, Homo sapien
agtctggtccagactatcctttttactgtcttt

SEQ ID NO: 800419 - DNA, 33 bp, Homo sapien
agtctcctccacaggagtaacataatttgctaa

SEQ ID NO: 800420 - DNA, 33 bp, Homo sapien
agtctcctccacaggattaacataatttgctaa

SEQ ID NO: 800421 - DNA, 33 bp, Homo sapien
ctcccttttaggtcaccccagcagaatgggcca

SEQ ID NO: 800422 - DNA, 33 bp, Homo sapien
ctcccttttaggtcactccagcagaatgggcca

SEQ ID NO: 800423 - DNA, 33 bp, Homo sapien
gaaagcaaaacacgaacgaatggctgatgacag

SEQ ID NO: 800424 - DNA, 33 bp, Homo sapien
gaaagcaaaacacgaatgaatggctgatgacag

SEQ ID NO: 800425 - DNA, 33 bp, Homo sapien
ggaattgtcattagaaaagtaatcaccaatagt

SEQ ID NO: 800426 - DNA, 33 bp, Homo sapien
ggaattgtcattagaatagtaatcaccaatagt

SEQ ID NO: 800427 - DNA, 33 bp, Homo sapien
ttattcagtttccccaaagatgaatagcatgct

SEQ ID NO: 800428 - DNA, 33 bp, Homo sapien
ttattcagtttccccagagatgaatagcatgct

SEQ ID NO: 800429 - DNA, 33 bp, Homo sapien
cctctcttccataaaaaaatgaactgtttcttt

SEQ ID NO: 800430 - DNA, 33 bp, Homo sapien
cctctcttccataaaagaatgaactgtttcttt

SEQ ID NO: 800431 - DNA, 33 bp, Homo sapien
attcaccacctctacaatctcattaacactgca

SEQ ID NO: 800432 - DNA, 33 bp, Homo sapien
attcaccacctctacagtctcattaacactgca

SEQ ID NO: 800433 - DNA, 33 bp, Homo sapien
ccctcaggcaaggcaactattagtctgcaaagc

SEQ ID NO: 800434 - DNA, 33 bp, Homo sapien
ccctcaggcaaggcaattattagtctgcaaagc

SEQ ID NO: 800435 - DNA, 33 bp, Homo sapien
ctgtcaacctaaataacgatcagagaggctctc

SEQ ID NO: 800436 - DNA, 33 bp, Homo sapien
ctgtcaacctaaataatgatcagagaggctctc

SEQ ID NO: 800437 - DNA, 33 bp, Homo sapien
caaacagctggaataaaaaatctctcctaactt

SEQ ID NO: 800438 - DNA, 33 bp, Homo sapien
caaacagctggaataagaaatctctcctaactt

SEQ ID NO: 800439 - DNA, 33 bp, Homo sapien
aatatttcataaattgaactcaagggagctcct

SEQ ID NO: 800440 - DNA, 33 bp, Homo sapien
aatatttcataaattgtactcaagggagctcct

SEQ ID NO: 800441 - DNA, 33 bp, Homo sapien
agaatcctgtaggttacggaatgttagaactaa

SEQ ID NO: 800442 - DNA, 33 bp, Homo sapien
agaatcctgtaggttatggaatgttagaactaa

SEQ ID NO: 800443 - DNA, 33 bp, Homo sapien
aaaggaatggcttccccgactacagctccagaa

SEQ ID NO: 800444 - DNA, 33 bp, Homo sapien
aaaggaatggcttccctgactacagctccagaa

SEQ ID NO: 800445 - DNA, 33 bp, Homo sapien
gcaccagagtggcaagactaggccctcatgaga

SEQ ID NO: 800446 - DNA, 33 bp, Homo sapien
gcaccagagtggcaaggctaggccctcatgaga

SEQ ID NO: 800447 - DNA, 33 bp, Homo sapien
tctctacaaacaaaagactgctcttcaattccc

SEQ ID NO: 800448 - DNA, 33 bp, Homo sapien
tctctacaaacaaaagtctgctcttcaattccc

SEQ ID NO: 800449 - DNA, 33 bp, Homo sapien
gggaccacaggaggaactccatatctaacctga

SEQ ID NO: 800450 - DNA, 33 bp, Homo sapien
gggaccacaggaggaattccatatctaacctga

SEQ ID NO: 800451 - DNA, 33 bp, Homo sapien
ttgtggggcatttactaagagtcccatagcatc

SEQ ID NO: 800452 - DNA, 33 bp, Homo sapien
ttgtggggcatttactgagagtcccatagcatc

SEQ ID NO: 800453 - DNA, 33 bp, Homo sapien
cgggatcagaattgaaagtgggagaaaacagga

SEQ ID NO: 800454 - DNA, 33 bp, Homo sapien
cgggatcagaattgaatgtgggagaaaacagga

SEQ ID NO: 800455 - DNA, 33 bp, Homo sapien
ttctttgccttatctgccaaatggaaacaatga

SEQ ID NO: 800456 - DNA, 33 bp, Homo sapien
ttctttgccttatctgtcaaatggaaacaatga

SEQ ID NO: 800457 - DNA, 33 bp, Homo sapien
tgtgcttatctaccggcagtaatgaggaaaagg

SEQ ID NO: 800458 - DNA, 33 bp, Homo sapien
tgtgcttatctaccgggagtaatgaggaaaagg

SEQ ID NO: 800459 - DNA, 33 bp, Homo sapien
gtaagtgttgtttccaatattgttttgatgtta

SEQ ID NO: 800460 - DNA, 33 bp, Homo sapien
gtaagtgttgtttccagtattgttttgatgtta

SEQ ID NO: 800461 - DNA, 33 bp, Homo sapien
gatcccaggattgtccaaagtgtcttcctctta

SEQ ID NO: 800462 - DNA, 33 bp, Homo sapien
gatcccaggattgtccgaagtgtcttcctctta

SEQ ID NO: 800463 - DNA, 33 bp, Homo sapien
tgttttatagataaagaaagtaaggcacaggga

SEQ ID NO: 800464 - DNA, 33 bp, Homo sapien
tgttttatagataaagtaagtaaggcacaggga

SEQ ID NO: 800465 - DNA, 33 bp, Homo sapien
aggggaaatatccataagttatgggaacccaga

SEQ ID NO: 800466 - DNA, 33 bp, Homo sapien
aggggaaatatccatatgttatgggaacccaga

SEQ ID NO: 800467 - DNA, 33 bp, Homo sapien
tgatataagctaaggaaaacactgaacaaggaa

SEQ ID NO: 800468 - DNA, 33 bp, Homo sapien
tgatataagctaaggagaacactgaacaaggaa

SEQ ID NO: 800469 - DNA, 33 bp, Homo sapien
actctactgtacacccaggagaaaatgagcata

SEQ ID NO: 800470 - DNA, 33 bp, Homo sapien
actctactgtacacccgggagaaaatgagcata

SEQ ID NO: 800471 - DNA, 33 bp, Homo sapien
ttagccaggaaggctgaatggaaatcaggaaag

SEQ ID NO: 800472 - DNA, 33 bp, Homo sapien
ttagccaggaaggctggatggaaatcaggaaag

SEQ ID NO: 800473 - DNA, 33 bp, Homo sapien
tctgggagaggattccagattctaaaacagcag

SEQ ID NO: 800474 - DNA, 33 bp, Homo sapien
tctgggagaggattccggattctaaaacagcag

SEQ ID NO: 800475 - DNA, 33 bp, Homo sapien
caatattgttcaaaataagcaaatgttacaagt

SEQ ID NO: 800476 - DNA, 33 bp, Homo sapien
caatattgttcaaaatgagcaaatgttacaagt

SEQ ID NO: 800477 - DNA, 33 bp, Homo sapien
aattcacagcttgatacgatggaatcaaatagt

SEQ ID NO: 800478 - DNA, 33 bp, Homo sapien
aattcacagcttgatatgatggaatcaaatagt

SEQ ID NO: 800479 - DNA, 33 bp, Homo sapien
cattgtaagaaaaagccgaactgcctgatacat

SEQ ID NO: 800480 - DNA, 33 bp, Homo sapien
cattgtaagaaaaagctgaactgcctgatacat

SEQ ID NO: 800481 - DNA, 33 bp, Homo sapien
taaaaagattatggaaagccaaggaagccaatg

SEQ ID NO: 800482 - DNA, 33 bp, Homo sapien
taaaaagattatggaaggccaaggaagccaatg

SEQ ID NO: 800483 - DNA, 33 bp, Homo sapien
catcacttttagcaacccagggcacccagcagg

SEQ ID NO: 800484 - DNA, 33 bp, Homo sapien
catcacttttagcaacgcagggcacccagcagg

SEQ ID NO: 800485 - DNA, 33 bp, Homo sapien
aagctggagagaggaaagagccacttagccatt

SEQ ID NO: 800486 - DNA, 33 bp, Homo sapien
aagctggagagaggaaggagccacttagccatt

SEQ ID NO: 800487 - DNA, 33 bp, Homo sapien
tgtatctacatgttaaatgatgaatacagataa

SEQ ID NO: 800488 - DNA, 33 bp, Homo sapien
tgtatctacatgttaattgatgaatacagataa

SEQ ID NO: 800489 - DNA, 33 bp, Homo sapien
gcaaccaagtcagctacgtatttgaaaaacaga

SEQ ID NO: 800490 - DNA, 33 bp, Homo sapien
gcaaccaagtcagctatgtatttgaaaaacaga

SEQ ID NO: 800491 - DNA, 33 bp, Homo sapien
ctaaatactgcaatgcacaatgccaggatagct

SEQ ID NO: 800492 - DNA, 33 bp, Homo sapien
ctaaatactgcaatgcgcaatgccaggatagct

SEQ ID NO: 800493 - DNA, 33 bp, Homo sapien
attaaagaggtcaacaatgtacacaatatagga

SEQ ID NO: 800494 - DNA, 33 bp, Homo sapien
attaaagaggtcaacagtgtacacaatatagga

SEQ ID NO: 800495 - DNA, 33 bp, Homo sapien
tgttcattttattgctcactacactatgtattt

SEQ ID NO: 800496 - DNA, 33 bp, Homo sapien
tgttcattttattgctgactacactatgtattt

SEQ ID NO: 800497 - DNA, 33 bp, Homo sapien
atgactaagattggcaaaagggtggattttact

SEQ ID NO: 800498 - DNA, 33 bp, Homo sapien
atgactaagattggcagaagggtggattttact

SEQ ID NO: 800499 - DNA, 33 bp, Homo sapien
cgtgactgccattttacaggtattgtttaaaga

SEQ ID NO: 800500 - DNA, 33 bp, Homo sapien
cgtgactgccattttataggtattgtttaaaga

SEQ ID NO: 800501 - DNA, 33 bp, Homo sapien
ctaacggctgcggaaaggagactgaagctttga

SEQ ID NO: 800502 - DNA, 33 bp, Homo sapien
ctaacggctgcggaaatgagactgaagctttga

SEQ ID NO: 800503 - DNA, 33 bp, Homo sapien
aaagctgctctacagcaaaaccaagagaaagtt

SEQ ID NO: 800504 - DNA, 33 bp, Homo sapien
aaagctgctctacagcgaaaccaagagaaagtt

SEQ ID NO: 800505 - DNA, 33 bp, Homo sapien
caaccccaaacttggccatgtatttcagaataa

SEQ ID NO: 800506 - DNA, 33 bp, Homo sapien
caaccccaaacttggctatgtatttcagaataa

SEQ ID NO: 800507 - DNA, 33 bp, Homo sapien
agatcttgagaaaggaagtgataaccaagctgt

SEQ ID NO: 800508 - DNA, 33 bp, Homo sapien
agatcttgagaaaggaggtgataaccaagctgt

SEQ ID NO: 800509 - DNA, 33 bp, Homo sapien
gaaacatgatcatggacacaatggtttacatta

SEQ ID NO: 800510 - DNA, 33 bp, Homo sapien
gaaacatgatcatggagacaatggtttacatta

SEQ ID NO: 800511 - DNA, 33 bp, Homo sapien
taaatcactgggtaacaaccataaaaaggatcg

SEQ ID NO: 800512 - DNA, 33 bp, Homo sapien
taaatcactgggtaacgaccataaaaaggatcg

SEQ ID NO: 800513 - DNA, 33 bp, Homo sapien
ctcactgttctacgaaatcttggctctgctggg

SEQ ID NO: 800514 - DNA, 33 bp, Homo sapien
ctcactgttctacgaagtcttggctctgctggg

SEQ ID NO: 800515 - DNA, 33 bp, Homo sapien
tagtgaaaatgtttccgaagagagccaagtaaa

SEQ ID NO: 800516 - DNA, 33 bp, Homo sapien
tagtgaaaatgtttcctaagagagccaagtaaa

SEQ ID NO: 800517 - DNA, 33 bp, Homo sapien
tgtcagagagcaggacagtatgccgggagctca

SEQ ID NO: 800518 - DNA, 33 bp, Homo sapien
tgtcagagagcaggacggtatgccgggagctca

SEQ ID NO: 800519 - DNA, 33 bp, Homo sapien
tactgccttagcaaacactatgttgtcaggttt

SEQ ID NO: 800520 - DNA, 33 bp, Homo sapien
tactgccttagcaaactctatgttgtcaggttt

SEQ ID NO: 800521 - DNA, 33 bp, Homo sapien
ccacgacatccaagagcccaaagtcgtcttctc

SEQ ID NO: 800522 - DNA, 33 bp, Homo sapien
ccacgacatccaagaggccaaagtcgtcttctc

SEQ ID NO: 800523 - DNA, 33 bp, Homo sapien
ggaaggggagaaaatgacaacaagcttctcttt

SEQ ID NO: 800524 - DNA, 33 bp, Homo sapien
ggaaggggagaaaatgtcaacaagcttctcttt

SEQ ID NO: 800525 - DNA, 33 bp, Homo sapien
cccaggccgcttgcacagtgaggtctcaagaca

SEQ ID NO: 800526 - DNA, 33 bp, Homo sapien
cccaggccgcttgcacggtgaggtctcaagaca

SEQ ID NO: 800527 - DNA, 33 bp, Homo sapien
gagacaggaaggaaacactaaagccagcacagg

SEQ ID NO: 800528 - DNA, 33 bp, Homo sapien
gagacaggaaggaaacgctaaagccagcacagg

SEQ ID NO: 800529 - DNA, 33 bp, Homo sapien
cgcctcctgattcatcacggcttgttgtctgca

SEQ ID NO: 800530 - DNA, 33 bp, Homo sapien
cgcctcctgattcatcgcggcttgttgtctgca

SEQ ID NO: 800531 - DNA, 33 bp, Homo sapien
aggggacgatgttgaactgacaggcagcggagg

SEQ ID NO: 800532 - DNA, 33 bp, Homo sapien
aggggacgatgttgaattgacaggcagcggagg

SEQ ID NO: 800533 - DNA, 33 bp, Homo sapien
catgtaattttcaacaagttcaatattgctagc

SEQ ID NO: 800534 - DNA, 33 bp, Homo sapien
catgtaattttcaacaggttcaatattgctagc

SEQ ID NO: 800535 - DNA, 33 bp, Homo sapien
ctagcataatcaagaccagccttccactcaaac

SEQ ID NO: 800536 - DNA, 33 bp, Homo sapien
ctagcataatcaagactagccttccactcaaac

SEQ ID NO: 800537 - DNA, 33 bp, Homo sapien
aacaatgaatctgccacagagagacatctaaca

SEQ ID NO: 800538 - DNA, 33 bp, Homo sapien
aacaatgaatctgccatagagagacatctaaca

SEQ ID NO: 800539 - DNA, 33 bp, Homo sapien
cttatataaccagcaggctcaagtgtctggtct

SEQ ID NO: 800540 - DNA, 33 bp, Homo sapien
cttatataaccagcagtctcaagtgtctggtct

SEQ ID NO: 800541 - DNA, 33 bp, Homo sapien
ttggtcccacatcagaactggtgaaccagggcc

SEQ ID NO: 800542 - DNA, 33 bp, Homo sapien
ttggtcccacatcagagctggtgaaccagggcc

SEQ ID NO: 800543 - DNA, 33 bp, Homo sapien
tatgtcattttctgtcacttccagaaatatgat

SEQ ID NO: 800544 - DNA, 33 bp, Homo sapien
tatgtcattttctgtcgcttccagaaatatgat

SEQ ID NO: 800545 - DNA, 33 bp, Homo sapien
aagttccctaaggaaactggcagccaacagttt

SEQ ID NO: 800546 - DNA, 33 bp, Homo sapien
aagttccctaaggaaagtggcagccaacagttt

SEQ ID NO: 800547 - DNA, 33 bp, Homo sapien
gcagagtggtgataacagaaacaaaggccggca

SEQ ID NO: 800548 - DNA, 33 bp, Homo sapien
gcagagtggtgataacggaaacaaaggccggca

SEQ ID NO: 800549 - DNA, 33 bp, Homo sapien
actgaaatgtcagtagaaacaggcacattcaag

SEQ ID NO: 800550 - DNA, 33 bp, Homo sapien
actgaaatgtcagtagcaacaggcacattcaag

SEQ ID NO: 800551 - DNA, 33 bp, Homo sapien
ctgcgtgggaatcagcagaaatgacacctagct

SEQ ID NO: 800552 - DNA, 33 bp, Homo sapien
ctgcgtgggaatcagcggaaatgacacctagct

SEQ ID NO: 800553 - DNA, 33 bp, Homo sapien
gcattggtctaggctaccatttaagctccaaat

SEQ ID NO: 800554 - DNA, 33 bp, Homo sapien
gcattggtctaggctatcatttaagctccaaat

SEQ ID NO: 800555 - DNA, 33 bp, Homo sapien
caagttcactcttttcaatggcctacaggccct

SEQ ID NO: 800556 - DNA, 33 bp, Homo sapien
caagttcactcttttccatggcctacaggccct

SEQ ID NO: 800557 - DNA, 33 bp, Homo sapien
ggatgggtggattgaggaggtaactgaacacag

SEQ ID NO: 800558 - DNA, 33 bp, Homo sapien
ggatgggtggattgagtaggtaactgaacacag

SEQ ID NO: 800559 - DNA, 33 bp, Homo sapien
gacaagcagggaggaaaaaaattggtgacgatg

SEQ ID NO: 800560 - DNA, 33 bp, Homo sapien
gacaagcagggaggaagaaaattggtgacgatg

SEQ ID NO: 800561 - DNA, 33 bp, Homo sapien
taccaacaccctagtagtaatgaacacacctag

SEQ ID NO: 800562 - DNA, 33 bp, Homo sapien
taccaacaccctagtattaatgaacacacctag

SEQ ID NO: 800563 - DNA, 33 bp, Homo sapien
ttattagcagcatggaaactaatatatacagct

SEQ ID NO: 800564 - DNA, 33 bp, Homo sapien
ttattagcagcatggatactaatatatacagct

SEQ ID NO: 800565 - DNA, 33 bp, Homo sapien
tctttttttcccacaccgagagtcctgattctg

SEQ ID NO: 800566 - DNA, 33 bp, Homo sapien
tctttttttcccacactgagagtcctgattctg

SEQ ID NO: 800567 - DNA, 33 bp, Homo sapien
tggctattgtgaataacgtagtaaacatgggag

SEQ ID NO: 800568 - DNA, 33 bp, Homo sapien
tggctattgtgaataatgtagtaaacatgggag

SEQ ID NO: 800569 - DNA, 33 bp, Homo sapien
gaaacctctgaaagaaaagtgtcctaaccaacc

SEQ ID NO: 800570 - DNA, 33 bp, Homo sapien
gaaacctctgaaagaagagtgtcctaaccaacc

SEQ ID NO: 800571 - DNA, 33 bp, Homo sapien
gtcatgattgtttaggacagcctgtaactagtg

SEQ ID NO: 800572 - DNA, 33 bp, Homo sapien
gtcatgattgtttagggcagcctgtaactagtg

SEQ ID NO: 800573 - DNA, 33 bp, Homo sapien
attctgtctgacagccaatcccaacagctctgt

SEQ ID NO: 800574 - DNA, 33 bp, Homo sapien
attctgtctgacagccgatcccaacagctctgt

SEQ ID NO: 800575 - DNA, 33 bp, Homo sapien
gcaaaggagatgctcaaagtcgagaatgcttag

SEQ ID NO: 800576 - DNA, 33 bp, Homo sapien
gcaaaggagatgctcagagtcgagaatgcttag

SEQ ID NO: 800577 - DNA, 33 bp, Homo sapien
ccccatgcaaaaccaaagaacagaaatattctg

SEQ ID NO: 800578 - DNA, 33 bp, Homo sapien
ccccatgcaaaaccaaggaacagaaatattctg

SEQ ID NO: 800579 - DNA, 33 bp, Homo sapien
atatgtctggacactcacaattcctttcccaag

SEQ ID NO: 800580 - DNA, 33 bp, Homo sapien
atatgtctggacactcgcaattcctttcccaag

SEQ ID NO: 800581 - DNA, 33 bp, Homo sapien
ttgctcttgctctctgaatgcccctgtgaagcc

SEQ ID NO: 800582 - DNA, 33 bp, Homo sapien
ttgctcttgctctctggatgcccctgtgaagcc

SEQ ID NO: 800583 - DNA, 33 bp, Homo sapien
caaacaagcttttcccacctgagacaatactaa

SEQ ID NO: 800584 - DNA, 33 bp, Homo sapien
caaacaagcttttcccgcctgagacaatactaa

SEQ ID NO: 800585 - DNA, 33 bp, Homo sapien
tcccagaggtggaacacgacctactccattccc

SEQ ID NO: 800586 - DNA, 33 bp, Homo sapien
tcccagaggtggaacatgacctactccattccc

SEQ ID NO: 800587 - DNA, 33 bp, Homo sapien
tcagtgctatcaacacagaggtgatcatcaaag

SEQ ID NO: 800588 - DNA, 33 bp, Homo sapien
tcagtgctatcaacacggaggtgatcatcaaag

SEQ ID NO: 800589 - DNA, 33 bp, Homo sapien
ccacttaccctcatcaacaacactctacagatc

SEQ ID NO: 800590 - DNA, 33 bp, Homo sapien
ccacttaccctcatcagcaacactctacagatc

SEQ ID NO: 800591 - DNA, 33 bp, Homo sapien
tcaaggagatgaatgacgagtttttccttagaa

SEQ ID NO: 800592 - DNA, 33 bp, Homo sapien
tcaaggagatgaatgatgagtttttccttagaa

SEQ ID NO: 800593 - DNA, 33 bp, Homo sapien
ccattaaccaaatatccgacagaaatgcttgtg

SEQ ID NO: 800594 - DNA, 33 bp, Homo sapien
ccattaaccaaatatctgacagaaatgcttgtg

SEQ ID NO: 800595 - DNA, 33 bp, Homo sapien
cttactttctgcttctcaaacagagggcctttg

SEQ ID NO: 800596 - DNA, 33 bp, Homo sapien
cttactttctgcttcttaaacagagggcctttg

SEQ ID NO: 800597 - DNA, 33 bp, Homo sapien
caaacaaatgatttccagagagtcattctgcct

SEQ ID NO: 800598 - DNA, 33 bp, Homo sapien
caaacaaatgatttccggagagtcattctgcct

SEQ ID NO: 800599 - DNA, 33 bp, Homo sapien
cctaaactaaagcttcaatggggcaataccttt

SEQ ID NO: 800600 - DNA, 33 bp, Homo sapien
cctaaactaaagcttcgatggggcaataccttt

SEQ ID NO: 800601 - DNA, 33 bp, Homo sapien
aagatggagtataacacagatgtcagctgtccc

SEQ ID NO: 800602 - DNA, 33 bp, Homo sapien
aagatggagtataacatagatgtcagctgtccc

SEQ ID NO: 800603 - DNA, 33 bp, Homo sapien
aagaagtaatacctacaaaagtatgagtgtgaa

SEQ ID NO: 800604 - DNA, 33 bp, Homo sapien
aagaagtaatacctaccaaagtatgagtgtgaa

SEQ ID NO: 800605 - DNA, 33 bp, Homo sapien
agaaagcaacacttaacagttgagatttgaagg

SEQ ID NO: 800606 - DNA, 33 bp, Homo sapien
agaaagcaacacttaagagttgagatttgaagg

SEQ ID NO: 800607 - DNA, 33 bp, Homo sapien
agagtctgtgtaaccaaaaatttcctttcacac

SEQ ID NO: 800608 - DNA, 33 bp, Homo sapien
agagtctgtgtaaccacaaatttcctttcacac

SEQ ID NO: 800609 - DNA, 33 bp, Homo sapien
ccagcttaattgtgaacagcctcacgtgccata

SEQ ID NO: 800610 - DNA, 33 bp, Homo sapien
ccagcttaattgtgaagagcctcacgtgccata

SEQ ID NO: 800611 - DNA, 33 bp, Homo sapien
agcttatgtttagagagattgatgacttaacag

SEQ ID NO: 800612 - DNA, 33 bp, Homo sapien
agcttatgtttagagatattgatgacttaacag

SEQ ID NO: 800613 - DNA, 33 bp, Homo sapien
gttacttgcctatacaaaagtagcttgatggag

SEQ ID NO: 800614 - DNA, 33 bp, Homo sapien
gttacttgcctatacagaagtagcttgatggag

SEQ ID NO: 800615 - DNA, 33 bp, Homo sapien
ccacttgactgtctcacgcccataggatggtct

SEQ ID NO: 800616 - DNA, 33 bp, Homo sapien
ccacttgactgtctcaggcccataggatggtct

SEQ ID NO: 800617 - DNA, 33 bp, Homo sapien
agctgctgcccagctgaagagcggtgctgcccc

SEQ ID NO: 800618 - DNA, 33 bp, Homo sapien
agctgctgcccagctggagagcggtgctgcccc

SEQ ID NO: 800619 - DNA, 33 bp, Homo sapien
agccattgggtgtagacccagtgagacgtgtgt

SEQ ID NO: 800620 - DNA, 33 bp, Homo sapien
agccattgggtgtagatccagtgagacgtgtgt

SEQ ID NO: 800621 - DNA, 33 bp, Homo sapien
catgacaataatgttaaacctgcaaattgcatt

SEQ ID NO: 800622 - DNA, 33 bp, Homo sapien
catgacaataatgttatacctgcaaattgcatt

SEQ ID NO: 800623 - DNA, 33 bp, Homo sapien
tagatgtggattgatacaagtcatataaatgaa

SEQ ID NO: 800624 - DNA, 33 bp, Homo sapien
tagatgtggattgatagaagtcatataaatgaa

SEQ ID NO: 800625 - DNA, 33 bp, Homo sapien
acctttttgactatagacattccagtgggtata

SEQ ID NO: 800626 - DNA, 33 bp, Homo sapien
acctttttgactatagccattccagtgggtata

SEQ ID NO: 800627 - DNA, 33 bp, Homo sapien
aggggaactccacgtacagtgaggaacagctgc

SEQ ID NO: 800628 - DNA, 33 bp, Homo sapien
aggggaactccacgtatagtgaggaacagctgc

SEQ ID NO: 800629 - DNA, 33 bp, Homo sapien
gattccactgcagacacattactaggacagaag

SEQ ID NO: 800630 - DNA, 33 bp, Homo sapien
gattccactgcagacatattactaggacagaag

SEQ ID NO: 800631 - DNA, 33 bp, Homo sapien
aatacactggacagtcaagaaatccaggttctc

SEQ ID NO: 800632 - DNA, 33 bp, Homo sapien
aatacactggacagtccagaaatccaggttctc

SEQ ID NO: 800633 - DNA, 33 bp, Homo sapien
ataaagacctgatttcacaagtatgagtcagta

SEQ ID NO: 800634 - DNA, 33 bp, Homo sapien
ataaagacctgatttcgcaagtatgagtcagta

SEQ ID NO: 800635 - DNA, 33 bp, Homo sapien
atgagactgaatccccagagacctacacttgaa

SEQ ID NO: 800636 - DNA, 33 bp, Homo sapien
atgagactgaatccccggagacctacacttgaa

SEQ ID NO: 800637 - DNA, 33 bp, Homo sapien
ttatattactctctgccgaccatttaatggact

SEQ ID NO: 800638 - DNA, 33 bp, Homo sapien
ttatattactctctgctgaccatttaatggact

SEQ ID NO: 800639 - DNA, 33 bp, Homo sapien
attaaagaagcaaaaaaagacagttaactggtt

SEQ ID NO: 800640 - DNA, 33 bp, Homo sapien
attaaagaagcaaaaacagacagttaactggtt

SEQ ID NO: 800641 - DNA, 33 bp, Homo sapien
gattctggatataccacgcacaaagcttaagtc

SEQ ID NO: 800642 - DNA, 33 bp, Homo sapien
gattctggatataccatgcacaaagcttaagtc

SEQ ID NO: 800643 - DNA, 33 bp, Homo sapien
tatgggttggctaaacagtacagagtcccctaa

SEQ ID NO: 800644 - DNA, 33 bp, Homo sapien
tatgggttggctaaacggtacagagtcccctaa

SEQ ID NO: 800645 - DNA, 33 bp, Homo sapien
gacgccttagccttgaaacctgagtagagcagg

SEQ ID NO: 800646 - DNA, 33 bp, Homo sapien
gacgccttagccttgagacctgagtagagcagg

SEQ ID NO: 800647 - DNA, 33 bp, Homo sapien
ggggctggggaaagaactgttaggtctgagctt

SEQ ID NO: 800648 - DNA, 33 bp, Homo sapien
ggggctggggaaagaattgttaggtctgagctt

SEQ ID NO: 800649 - DNA, 33 bp, Homo sapien
tgtgatcaagcctagcccctcactttatttttg

SEQ ID NO: 800650 - DNA, 33 bp, Homo sapien
tgtgatcaagcctagcgcctcactttatttttg

SEQ ID NO: 800651 - DNA, 33 bp, Homo sapien
gaagggtgtgggtcccaaagctctctgaccggc

SEQ ID NO: 800652 - DNA, 33 bp, Homo sapien
gaagggtgtgggtcccgaagctctctgaccggc

SEQ ID NO: 800653 - DNA, 33 bp, Homo sapien
ttcattcatgggtagcactcctcaaaaggtagg

SEQ ID NO: 800654 - DNA, 33 bp, Homo sapien
ttcattcatgggtagctctcctcaaaaggtagg

SEQ ID NO: 800655 - DNA, 33 bp, Homo sapien
ctttaaccaggtcagacccgcctaagagagcct

SEQ ID NO: 800656 - DNA, 33 bp, Homo sapien
ctttaaccaggtcagagccgcctaagagagcct

SEQ ID NO: 800657 - DNA, 33 bp, Homo sapien
agggtatccatgtgcaagttagtatgtgtgcat

SEQ ID NO: 800658 - DNA, 33 bp, Homo sapien
agggtatccatgtgcaggttagtatgtgtgcat

SEQ ID NO: 800659 - DNA, 33 bp, Homo sapien
ttgctcttccatcagcaaattcgtgtgtatgta

SEQ ID NO: 800660 - DNA, 33 bp, Homo sapien
ttgctcttccatcagcgaattcgtgtgtatgta

SEQ ID NO: 800661 - DNA, 33 bp, Homo sapien
tagctgttcccctacactatcgccgttgtctca

SEQ ID NO: 800662 - DNA, 33 bp, Homo sapien
tagctgttcccctacattatcgccgttgtctca

SEQ ID NO: 800663 - DNA, 33 bp, Homo sapien
tctctctccctcccaacatttgcacagcttgtt

SEQ ID NO: 800664 - DNA, 33 bp, Homo sapien
tctctctccctcccaatatttgcacagcttgtt

SEQ ID NO: 800665 - DNA, 33 bp, Homo sapien
gggacatggtttggaacctcatgctttgcttct

SEQ ID NO: 800666 - DNA, 33 bp, Homo sapien
gggacatggtttggaatctcatgctttgcttct

SEQ ID NO: 800667 - DNA, 33 bp, Homo sapien
aaatcccgtttctcgcactgcagctcaggaagc

SEQ ID NO: 800668 - DNA, 33 bp, Homo sapien
aaatcccgtttctcgcgctgcagctcaggaagc

SEQ ID NO: 800669 - DNA, 33 bp, Homo sapien
gactccgagatgttgacgggcaatgctgtggtt

SEQ ID NO: 800670 - DNA, 33 bp, Homo sapien
gactccgagatgttgatgggcaatgctgtggtt

SEQ ID NO: 800671 - DNA, 33 bp, Homo sapien
ccctcatctgtgcttcagaaattctccagcaaa

SEQ ID NO: 800672 - DNA, 33 bp, Homo sapien
ccctcatctgtgcttcggaaattctccagcaaa

SEQ ID NO: 800673 - DNA, 33 bp, Homo sapien
atctgttagtccttcacctgtggactcagcgat

SEQ ID NO: 800674 - DNA, 33 bp, Homo sapien
atctgttagtccttcatctgtggactcagcgat

SEQ ID NO: 800675 - DNA, 33 bp, Homo sapien
gaggagaggagcttgacgagaagagaaagacct

SEQ ID NO: 800676 - DNA, 33 bp, Homo sapien
gaggagaggagcttgatgagaagagaaagacct

SEQ ID NO: 800677 - DNA, 33 bp, Homo sapien
gggcttgttgacaagcagccatttgcgagacag

SEQ ID NO: 800678 - DNA, 33 bp, Homo sapien
gggcttgttgacaagcggccatttgcgagacag

SEQ ID NO: 800679 - DNA, 33 bp, Homo sapien
tacagtacctgccatacgtgcggagagtccaag

SEQ ID NO: 800680 - DNA, 33 bp, Homo sapien
tacagtacctgccatatgtgcggagagtccaag

SEQ ID NO: 800681 - DNA, 33 bp, Homo sapien
tggggggactgcacccagaagctttctaaggag

SEQ ID NO: 800682 - DNA, 33 bp, Homo sapien
tggggggactgcacccggaagctttctaaggag

SEQ ID NO: 800683 - DNA, 33 bp, Homo sapien
tggggcagctttagcaacttgccagggctctag

SEQ ID NO: 800684 - DNA, 33 bp, Homo sapien
tggggcagctttagcaccttgccagggctctag

SEQ ID NO: 800685 - DNA, 33 bp, Homo sapien
agaggcaggggacagaaataatgaccctgaggc

SEQ ID NO: 800686 - DNA, 33 bp, Homo sapien
agaggcaggggacagagataatgaccctgaggc

SEQ ID NO: 800687 - DNA, 33 bp, Homo sapien
agcatccctgtaagccacaatgggtttcttctc

SEQ ID NO: 800688 - DNA, 33 bp, Homo sapien
agcatccctgtaagccgcaatgggtttcttctc

SEQ ID NO: 800689 - DNA, 33 bp, Homo sapien
cctccacagactgtgacgttctgagcaagactt

SEQ ID NO: 800690 - DNA, 33 bp, Homo sapien
cctccacagactgtgatgttctgagcaagactt

SEQ ID NO: 800691 - DNA, 33 bp, Homo sapien
tcttggaggctcatccagcagcgtcatgcaggg

SEQ ID NO: 800692 - DNA, 33 bp, Homo sapien
tcttggaggctcatccggcagcgtcatgcaggg

SEQ ID NO: 800693 - DNA, 33 bp, Homo sapien
acaatagttacaaataccaagtcctggctgcac

SEQ ID NO: 800694 - DNA, 33 bp, Homo sapien
acaatagttacaaatatcaagtcctggctgcac

SEQ ID NO: 800695 - DNA, 33 bp, Homo sapien
atttaccaactacatcaccaggaagaaagcatg

SEQ ID NO: 800696 - DNA, 33 bp, Homo sapien
atttaccaactacatcgccaggaagaaagcatg

SEQ ID NO: 800697 - DNA, 33 bp, Homo sapien
cttggggttagacaggaagcagtgaggacattc

SEQ ID NO: 800698 - DNA, 33 bp, Homo sapien
cttggggttagacagggagcagtgaggacattc

SEQ ID NO: 800699 - DNA, 33 bp, Homo sapien
cagggggcgcatggcccacatacagaccaggaa

SEQ ID NO: 800700 - DNA, 33 bp, Homo sapien
cagggggcgcatggcctacatacagaccaggaa

SEQ ID NO: 800701 - DNA, 33 bp, Homo sapien
caactgattgtagagactagtgctggtgttcag

SEQ ID NO: 800702 - DNA, 33 bp, Homo sapien
caactgattgtagagattagtgctggtgttcag

SEQ ID NO: 800703 - DNA, 33 bp, Homo sapien
attatgaacagggatacgtggatgtaagcctgc

SEQ ID NO: 800704 - DNA, 33 bp, Homo sapien
attatgaacagggatatgtggatgtaagcctgc

SEQ ID NO: 800705 - DNA, 33 bp, Homo sapien
tgttgtcattgttgaaagtgcaataaagtctta

SEQ ID NO: 800706 - DNA, 33 bp, Homo sapien
tgttgtcattgttgaatgtgcaataaagtctta

SEQ ID NO: 800707 - DNA, 33 bp, Homo sapien
aaaaatgacctataaacgcccacagattcagtt

SEQ ID NO: 800708 - DNA, 33 bp, Homo sapien
aaaaatgacctataaatgcccacagattcagtt

SEQ ID NO: 800709 - DNA, 33 bp, Homo sapien
taccattgattaaacaccattctgtaacttaac

SEQ ID NO: 800710 - DNA, 33 bp, Homo sapien
taccattgattaaacatcattctgtaacttaac

SEQ ID NO: 800711 - DNA, 33 bp, Homo sapien
aagcctacattgacacaccattatcacccaaag

SEQ ID NO: 800712 - DNA, 33 bp, Homo sapien
aagcctacattgacacgccattatcacccaaag

SEQ ID NO: 800713 - DNA, 33 bp, Homo sapien
cagagaatggaagaaaacctcagagagaaagga

SEQ ID NO: 800714 - DNA, 33 bp, Homo sapien
cagagaatggaagaaaccctcagagagaaagga

SEQ ID NO: 800715 - DNA, 33 bp, Homo sapien
ctgtcagcattttgacactgttggctaatcctg

SEQ ID NO: 800716 - DNA, 33 bp, Homo sapien
ctgtcagcattttgacgctgttggctaatcctg

SEQ ID NO: 800717 - DNA, 33 bp, Homo sapien
tctgctctaccatctccgactccatcgaaactg

SEQ ID NO: 800718 - DNA, 33 bp, Homo sapien
tctgctctaccatctctgactccatcgaaactg

SEQ ID NO: 800719 - DNA, 33 bp, Homo sapien
gggctgttctttcaagaagattggttgcgaaag

SEQ ID NO: 800720 - DNA, 33 bp, Homo sapien
gggctgttctttcaaggagattggttgcgaaag

SEQ ID NO: 800721 - DNA, 33 bp, Homo sapien
ctgcctgacacaacggcatctgatttaatgctg

SEQ ID NO: 800722 - DNA, 33 bp, Homo sapien
ctgcctgacacaacggtatctgatttaatgctg

SEQ ID NO: 800723 - DNA, 33 bp, Homo sapien
aaggaaacagaatgagaaaaagcactaaaggat

SEQ ID NO: 800724 - DNA, 33 bp, Homo sapien
aaggaaacagaatgagcaaaagcactaaaggat

SEQ ID NO: 800725 - DNA, 33 bp, Homo sapien
cgagttgctatacccacggaactgcattgagga

SEQ ID NO: 800726 - DNA, 33 bp, Homo sapien
cgagttgctatacccatggaactgcattgagga

SEQ ID NO: 800727 - DNA, 33 bp, Homo sapien
aatcctttctccaaaaaggctagtaacattcac

SEQ ID NO: 800728 - DNA, 33 bp, Homo sapien
aatcctttctccaaaagggctagtaacattcac

SEQ ID NO: 800729 - DNA, 33 bp, Homo sapien
atctcagcttactacaaaaaaggaacctggtca

SEQ ID NO: 800730 - DNA, 33 bp, Homo sapien
atctcagcttactacagaaaaggaacctggtca

SEQ ID NO: 800731 - DNA, 33 bp, Homo sapien
tatgagatgatcataaactagaaacagaccata

SEQ ID NO: 800732 - DNA, 33 bp, Homo sapien
tatgagatgatcataacctagaaacagaccata

SEQ ID NO: 800733 - DNA, 33 bp, Homo sapien
tattttgctactcaaacaaagcctgtctacact

SEQ ID NO: 800734 - DNA, 33 bp, Homo sapien
tattttgctactcaaagaaagcctgtctacact

SEQ ID NO: 800735 - DNA, 33 bp, Homo sapien
ttggaaagagttgggccacaaggtgtcttgtct

SEQ ID NO: 800736 - DNA, 33 bp, Homo sapien
ttggaaagagttgggctacaaggtgtcttgtct

SEQ ID NO: 800737 - DNA, 33 bp, Homo sapien
tcaagtgctcagcaaccaaagtttagaggttga

SEQ ID NO: 800738 - DNA, 33 bp, Homo sapien
tcaagtgctcagcaacgaaagtttagaggttga

SEQ ID NO: 800739 - DNA, 33 bp, Homo sapien
cctagtacagtatctgcaacatagtaggtgctc

SEQ ID NO: 800740 - DNA, 33 bp, Homo sapien
cctagtacagtatctggaacatagtaggtgctc

SEQ ID NO: 800741 - DNA, 33 bp, Homo sapien
tttagcagcttggcaaaaaaaaaaagatcatac

SEQ ID NO: 800742 - DNA, 33 bp, Homo sapien
tttagcagcttggcaagaaaaaaaagatcatac

SEQ ID NO: 800743 - DNA, 33 bp, Homo sapien
cctccctgggtgagaaagctaaggaaagaggtg

SEQ ID NO: 800744 - DNA, 33 bp, Homo sapien
cctccctgggtgagaaggctaaggaaagaggtg

SEQ ID NO: 800745 - DNA, 33 bp, Homo sapien
tttaaaaaacactgcaacctttgtcttgagctc

SEQ ID NO: 800746 - DNA, 33 bp, Homo sapien
tttaaaaaacactgcagcctttgtcttgagctc

SEQ ID NO: 800747 - DNA, 33 bp, Homo sapien
tagcacaatgctgaaccaaattagccaacaagt

SEQ ID NO: 800748 - DNA, 33 bp, Homo sapien
tagcacaatgctgaacgaaattagccaacaagt

SEQ ID NO: 800749 - DNA, 33 bp, Homo sapien
ttgagaccaacttgagcaagctagcgagaccct

SEQ ID NO: 800750 - DNA, 33 bp, Homo sapien
ttgagaccaacttgaggaagctagcgagaccct

SEQ ID NO: 800751 - DNA, 33 bp, Homo sapien
cccattctactcagcactagctacttcagccct

SEQ ID NO: 800752 - DNA, 33 bp, Homo sapien
cccattctactcagcattagctacttcagccct

SEQ ID NO: 800753 - DNA, 33 bp, Homo sapien
tgctcggtactttaccaagtttctatatatcag

SEQ ID NO: 800754 - DNA, 33 bp, Homo sapien
tgctcggtactttacctagtttctatatatcag

SEQ ID NO: 800755 - DNA, 33 bp, Homo sapien
cagcaaaccaagagaaaggtacagaaggatgtt

SEQ ID NO: 800756 - DNA, 33 bp, Homo sapien
cagcaaaccaagagaagggtacagaaggatgtt

SEQ ID NO: 800757 - DNA, 33 bp, Homo sapien
tccccagtgtcttgaaatactactcttcttgta

SEQ ID NO: 800758 - DNA, 33 bp, Homo sapien
tccccagtgtcttgaagtactactcttcttgta

SEQ ID NO: 800759 - DNA, 33 bp, Homo sapien
atcttttttaatccaaacaaacctcaggagagt

SEQ ID NO: 800760 - DNA, 33 bp, Homo sapien
atcttttttaatccaaccaaacctcaggagagt

SEQ ID NO: 800761 - DNA, 33 bp, Homo sapien
acatgcagaaaacaccagatgctctttatagct

SEQ ID NO: 800762 - DNA, 33 bp, Homo sapien
acatgcagaaaacaccggatgctctttatagct

SEQ ID NO: 800763 - DNA, 33 bp, Homo sapien
ggttgagccatgttgacatcattgcatagaacc

SEQ ID NO: 800764 - DNA, 33 bp, Homo sapien
ggttgagccatgttgatatcattgcatagaacc

SEQ ID NO: 800765 - DNA, 33 bp, Homo sapien
cactttacaggtccccaatgaaccaagagaacc

SEQ ID NO: 800766 - DNA, 33 bp, Homo sapien
cactttacaggtccccgatgaaccaagagaacc

SEQ ID NO: 800767 - DNA, 33 bp, Homo sapien; identical to SEQ ID NO: 800765

SEQ ID NO: 800768 - DNA, 33 bp, Homo sapien; identical to SEQ ID NO: 800766

SEQ ID NO: 800769 - DNA, 33 bp, Homo sapien; identical to SEQ ID NO: 800765

SEQ ID NO: 800770 - DNA, 33 bp, Homo sapien; identical to SEQ ID NO: 800766

SEQ ID NO: 800771 - DNA, 33 bp, Homo sapien
attgcttgtgggattcccagtcagaattatgtg

SEQ ID NO: 800772 - DNA, 33 bp, Homo sapien
attgcttgtgggattctcagtcagaattatgtg

SEQ ID NO: 800773 - DNA, 33 bp, Homo sapien
gaaaggggcctaagaacaatgaagcaaggccat

SEQ ID NO: 800774 - DNA, 33 bp, Homo sapien
gaaaggggcctaagaagaatgaagcaaggccat

SEQ ID NO: 800775 - DNA, 33 bp, Homo sapien
ttgaggttctagtcatcaggccctttctccagg

SEQ ID NO: 800776 - DNA, 33 bp, Homo sapien
ttgaggttctagtcattaggccctttctccagg

SEQ ID NO: 800777 - DNA, 33 bp, Homo sapien
agatgtatagatgtcaataggcaaaagtgtagg

SEQ ID NO: 800778 - DNA, 33 bp, Homo sapien
agatgtatagatgtcagtaggcaaaagtgtagg

SEQ ID NO: 800779 - DNA, 33 bp, Homo sapien
caaggccagtgagtaaataccaggtccgtgtgc

SEQ ID NO: 800780 - DNA, 33 bp, Homo sapien
caaggccagtgagtaagtaccaggtccgtgtgc

SEQ ID NO: 800781 - DNA, 33 bp, Homo sapien
gacattttgttctcatcagtgtagcccctttgc

SEQ ID NO: 800782 - DNA, 33 bp, Homo sapien
gacattttgttctcatgagtgtagcccctttgc

SEQ ID NO: 800783 - DNA, 33 bp, Homo sapien
agtgtagcccctttgcactgggtagtaaacgat

SEQ ID NO: 800784 - DNA, 33 bp, Homo sapien
agtgtagcccctttgcgctgggtagtaaacgat

SEQ ID NO: 800785 - DNA, 33 bp, Homo sapien
acattcccagagatgacattcacatgggctact

SEQ ID NO: 800786 - DNA, 33 bp, Homo sapien
acattcccagagatgatattcacatgggctact

SEQ ID NO: 800787 - DNA, 33 bp, Homo sapien
ccattcacttttactcggaaagaaatggggatt

SEQ ID NO: 800788 - DNA, 33 bp, Homo sapien
ccattcacttttactctgaaagaaatggggatt

SEQ ID NO: 800789 - DNA, 33 bp, Homo sapien
aactgtggtcttctgccgatctttaaatgtggc

SEQ ID NO: 800790 - DNA, 33 bp, Homo sapien
aactgtggtcttctgctgatctttaaatgtggc

SEQ ID NO: 800791 - DNA, 33 bp, Homo sapien
aactgtcatttttgtgaaagagttgggacttta

SEQ ID NO: 800792 - DNA, 33 bp, Homo sapien
aactgtcatttttgtggaagagttgggacttta

SEQ ID NO: 800793 - DNA, 33 bp, Homo sapien
aaacacagatatcaaactgaacctcttagaaca

SEQ ID NO: 800794 - DNA, 33 bp, Homo sapien
aaacacagatatcaaattgaacctcttagaaca

SEQ ID NO: 800795 - DNA, 33 bp, Homo sapien
aacagtatttgctaatcagctgaatataagatt

SEQ ID NO: 800796 - DNA, 33 bp, Homo sapien
aacagtatttgctaatgagctgaatataagatt

SEQ ID NO: 800797 - DNA, 33 bp, Homo sapien
tcatgcattgttctaacaggaggacaactcaca

SEQ ID NO: 800798 - DNA, 33 bp, Homo sapien
tcatgcattgttctaataggaggacaactcaca

SEQ ID NO: 800799 - DNA, 33 bp, Homo sapien
aaaaatacctggcagacacaacatttagcatac

SEQ ID NO: 800800 - DNA, 33 bp, Homo sapien
aaaaatacctggcagatacaacatttagcatac

SEQ ID NO: 800801 - DNA, 33 bp, Homo sapien
taccaacttagtgatacccgtgctattcaatga

SEQ ID NO: 800802 - DNA, 33 bp, Homo sapien
taccaacttagtgatatccgtgctattcaatga

SEQ ID NO: 800803 - DNA, 33 bp, Homo sapien
gaaatagcagcagaacaagtctggaactcatgc

SEQ ID NO: 800804 - DNA, 33 bp, Homo sapien
gaaatagcagcagaaccagtctggaactcatgc

SEQ ID NO: 800805 - DNA, 33 bp, Homo sapien
gcttttcatgccctcaagctgtactgggtgttg

SEQ ID NO: 800806 - DNA, 33 bp, Homo sapien
gcttttcatgccctcaggctgtactgggtgttg

SEQ ID NO: 800807 - DNA, 33 bp, Homo sapien
ttataaggcctctcaaccacacagtgcaagccc

SEQ ID NO: 800808 - DNA, 33 bp, Homo sapien
ttataaggcctctcaatcacacagtgcaagccc

SEQ ID NO: 800809 - DNA, 33 bp, Homo sapien
gaaagagaggcctcaacctgccgccatgatgat

SEQ ID NO: 800810 - DNA, 33 bp, Homo sapien
gaaagagaggcctcaatctgccgccatgatgat

SEQ ID NO: 800811 - DNA, 33 bp, Homo sapien
cacacatacctatacaacatgcatccaaatgca

SEQ ID NO: 800812 - DNA, 33 bp, Homo sapien
cacacatacctatacatcatgcatccaaatgca

SEQ ID NO: 800813 - DNA, 33 bp, Homo sapien
caacctgacatccagaaagcaggtgggggagac

SEQ ID NO: 800814 - DNA, 33 bp, Homo sapien
caacctgacatccagagagcaggtgggggagac

SEQ ID NO: 800815 - DNA, 33 bp, Homo sapien
tccttcagttgtcacaagaacctcctaagtaga

SEQ ID NO: 800816 - DNA, 33 bp, Homo sapien
tccttcagttgtcacaggaacctcctaagtaga

SEQ ID NO: 800817 - DNA, 33 bp, Homo sapien
agcctgtggtcttaataactgcataatcctgtt

SEQ ID NO: 800818 - DNA, 33 bp, Homo sapien
agcctgtggtcttaatcactgcataatcctgtt

SEQ ID NO: 800819 - DNA, 33 bp, Homo sapien
cttatttttattttgacggaaaattagcaatgt

SEQ ID NO: 800820 - DNA, 33 bp, Homo sapien
cttatttttattttgatggaaaattagcaatgt

SEQ ID NO: 800821 - DNA, 33 bp, Homo sapien
aaggttataaggccagcatatagaaaagctggg

SEQ ID NO: 800822 - DNA, 33 bp, Homo sapien
aaggttataaggccagtatatagaaaagctggg

SEQ ID NO: 800823 - DNA, 33 bp, Homo sapien
ctcaaatccaagagccaggattgttagtacaca

SEQ ID NO: 800824 - DNA, 33 bp, Homo sapien
ctcaaatccaagagccgggattgttagtacaca

SEQ ID NO: 800825 - DNA, 33 bp, Homo sapien
aacctaacattggttccacagcattttatttta

SEQ ID NO: 800826 - DNA, 33 bp, Homo sapien
aacctaacattggttctacagcattttatttta

SEQ ID NO: 800827 - DNA, 33 bp, Homo sapien
aataaaaagatttactaaaaacagacaggagta

SEQ ID NO: 800828 - DNA, 33 bp, Homo sapien
aataaaaagatttactgaaaacagacaggagta

SEQ ID NO: 800829 - DNA, 33 bp, Homo sapien
gaatttcagggaagaagtacgagatttccagtc

SEQ ID NO: 800830 - DNA, 33 bp, Homo sapien
gaatttcagggaagaattacgagatttccagtc

SEQ ID NO: 800831 - DNA, 33 bp, Homo sapien
caatcaatagaacaaacgaatattttaacttat

SEQ ID NO: 800832 - DNA, 33 bp, Homo sapien
caatcaatagaacaaaggaatattttaacttat

SEQ ID NO: 800833 - DNA, 33 bp, Homo sapien
agcagcacctttctacacttatgccaacaggaa

SEQ ID NO: 800834 - DNA, 33 bp, Homo sapien
agcagcacctttctacgcttatgccaacaggaa

SEQ ID NO: 800835 - DNA, 33 bp, Homo sapien
attactgtattaaaaactcacagttgcagtcag

SEQ ID NO: 800836 - DNA, 33 bp, Homo sapien
attactgtattaaaaattcacagttgcagtcag

SEQ ID NO: 800837 - DNA, 33 bp, Homo sapien
gcagggacatcacagcaaaacacatggcacttg

SEQ ID NO: 800838 - DNA, 33 bp, Homo sapien
gcagggacatcacagcgaaacacatggcacttg

SEQ ID NO: 800839 - DNA, 33 bp, Homo sapien
aagggacaggaattaacaaggatggagtagggt

SEQ ID NO: 800840 - DNA, 33 bp, Homo sapien
aagggacaggaattaataaggatggagtagggt

SEQ ID NO: 800841 - DNA, 33 bp, Homo sapien
atataaaattcttgtcaaggttgatgtaagtta

SEQ ID NO: 800842 - DNA, 33 bp, Homo sapien
atataaaattcttgtcgaggttgatgtaagtta

SEQ ID NO: 800843 - DNA, 33 bp, Homo sapien
cagtggcaaagaaagaaaagcattgaaaagcac

SEQ ID NO: 800844 - DNA, 33 bp, Homo sapien
cagtggcaaagaaagacaagcattgaaaagcac

SEQ ID NO: 800845 - DNA, 33 bp, Homo sapien
attgcttatgcagttaaagagacactgattgag

SEQ ID NO: 800846 - DNA, 33 bp, Homo sapien
attgcttatgcagttatagagacactgattgag

SEQ ID NO: 800847 - DNA, 33 bp, Homo sapien
aaaattgttttctccaagctgttgccagtggca

SEQ ID NO: 800848 - DNA, 33 bp, Homo sapien
aaaattgttttctccaggctgttgccagtggca

SEQ ID NO: 800849 - DNA, 33 bp, Homo sapien
cgcagaactcaagtaaatgctacagttactgtg

SEQ ID NO: 800850 - DNA, 33 bp, Homo sapien
cgcagaactcaagtaagtgctacagttactgtg

SEQ ID NO: 800851 - DNA, 33 bp, Homo sapien
caggactaatggactaccttagccactggatga

SEQ ID NO: 800852 - DNA, 33 bp, Homo sapien
caggactaatggactatcttagccactggatga

SEQ ID NO: 800853 - DNA, 33 bp, Homo sapien
gaccatgtagggctaaatcggccacaattccaa

SEQ ID NO: 800854 - DNA, 33 bp, Homo sapien
gaccatgtagggctaagtcggccacaattccaa

SEQ ID NO: 800855 - DNA, 33 bp, Homo sapien
gtttggacactctcccacctgctatcagggttt

SEQ ID NO: 800856 - DNA, 33 bp, Homo sapien
gtttggacactctcccgcctgctatcagggttt

SEQ ID NO: 800857 - DNA, 33 bp, Homo sapien
ggggctgtccagaaaaccgaggatgcaggactg

SEQ ID NO: 800858 - DNA, 33 bp, Homo sapien
ggggctgtccagaaaagcgaggatgcaggactg

SEQ ID NO: 800859 - DNA, 33 bp, Homo sapien
ctgtcccatacaatccaactaccagatcttgga

SEQ ID NO: 800860 - DNA, 33 bp, Homo sapien
ctgtcccatacaatccgactaccagatcttgga

SEQ ID NO: 800861 - DNA, 33 bp, Homo sapien
gattaaaagttcaaaacttggagtcagagagac

SEQ ID NO: 800862 - DNA, 33 bp, Homo sapien
gattaaaagttcaaaatttggagtcagagagac

SEQ ID NO: 800863 - DNA, 33 bp, Homo sapien
aggacaaggaagtagcagatctcccagatgcgg

SEQ ID NO: 800864 - DNA, 33 bp, Homo sapien
aggacaaggaagtagccgatctcccagatgcgg

SEQ ID NO: 800865 - DNA, 33 bp, Homo sapien
gcatgggcgactagaggccaggcaagaaggtca

SEQ ID NO: 800866 - DNA, 33 bp, Homo sapien
gcatgggcgactagagtccaggcaagaaggtca

SEQ ID NO: 800867 - DNA, 33 bp, Homo sapien
gtattgtggggacaagactctttcaagggatct

SEQ ID NO: 800868 - DNA, 33 bp, Homo sapien
gtattgtggggacaaggctctttcaagggatct

SEQ ID NO: 800869 - DNA, 33 bp, Homo sapien
attataactaacaaaactaacagcaactcctta

SEQ ID NO: 800870 - DNA, 33 bp, Homo sapien
attataactaacaaaagtaacagcaactcctta

SEQ ID NO: 800871 - DNA, 33 bp, Homo sapien
tctagcactatacaaaacactgaatatatacca

SEQ ID NO: 800872 - DNA, 33 bp, Homo sapien
tctagcactatacaaagcactgaatatatacca

SEQ ID NO: 800873 - DNA, 33 bp, Homo sapien
aggacgttttgaaagcaaagcctctttggactg

SEQ ID NO: 800874 - DNA, 33 bp, Homo sapien
aggacgttttgaaagcgaagcctctttggactg

SEQ ID NO: 800875 - DNA, 33 bp, Homo sapien
aatctcaacacaggaaaaaatcataagcaatcc

SEQ ID NO: 800876 - DNA, 33 bp, Homo sapien
aatctcaacacaggaagaaatcataagcaatcc

SEQ ID NO: 800877 - DNA, 33 bp, Homo sapien
ccctacccacattgaaaaccactaagaagaagc

SEQ ID NO: 800878 - DNA, 33 bp, Homo sapien
ccctacccacattgaagaccactaagaagaagc

SEQ ID NO: 800879 - DNA, 33 bp, Homo sapien
ttactttctagctctacgagatgctccacgtcc

SEQ ID NO: 800880 - DNA, 33 bp, Homo sapien
ttactttctagctctatgagatgctccacgtcc

SEQ ID NO: 800881 - DNA, 33 bp, Homo sapien
agaaatactgacaatacgtccgagatctggtag

SEQ ID NO: 800882 - DNA, 33 bp, Homo sapien
agaaatactgacaatatgtccgagatctggtag

SEQ ID NO: 800883 - DNA, 33 bp, Homo sapien
ctgaatggttcaagaacgatgctgagttttaag

SEQ ID NO: 800884 - DNA, 33 bp, Homo sapien
ctgaatggttcaagaatgatgctgagttttaag

SEQ ID NO: 800885 - DNA, 33 bp, Homo sapien
caatagttttatagaacgatcctgagttttagc

SEQ ID NO: 800886 - DNA, 33 bp, Homo sapien
caatagttttatagaatgatcctgagttttagc

SEQ ID NO: 800887 - DNA, 33 bp, Homo sapien
ggtgacaaaagtgcaaaaagaaacgaatatctg

SEQ ID NO: 800888 - DNA, 33 bp, Homo sapien
ggtgacaaaagtgcaagaagaaacgaatatctg

SEQ ID NO: 800889 - DNA, 33 bp, Homo sapien
agcagttagaggctccaattgagaagaaacaaa

SEQ ID NO: 800890 - DNA, 33 bp, Homo sapien
agcagttagaggctcccattgagaagaaacaaa

SEQ ID NO: 800891 - DNA, 33 bp, Homo sapien
attaacagcagatacaataggaaataccataga

SEQ ID NO: 800892 - DNA, 33 bp, Homo sapien
attaacagcagatacactaggaaataccataga

SEQ ID NO: 800893 - DNA, 33 bp, Homo sapien
tagtacgcatttttcacgaactttttgaagacc

SEQ ID NO: 800894 - DNA, 33 bp, Homo sapien
tagtacgcatttttcatgaactttttgaagacc

SEQ ID NO: 800895 - DNA, 33 bp, Homo sapien
actattcaacaatcacaggctgagcacagtggc

SEQ ID NO: 800896 - DNA, 33 bp, Homo sapien
actattcaacaatcacgggctgagcacagtggc

SEQ ID NO: 800897 - DNA, 33 bp, Homo sapien
gaaagaaaaggcaaagaagacaaggctaaaaat

SEQ ID NO: 800898 - DNA, 33 bp, Homo sapien
gaaagaaaaggcaaaggagacaaggctaaaaat

SEQ ID NO: 800899 - DNA, 33 bp, Homo sapien
cttactagtttgtggaagaaatcttgtgaagaa

SEQ ID NO: 800900 - DNA, 33 bp, Homo sapien
cttactagtttgtggatgaaatcttgtgaagaa

SEQ ID NO: 800901 - DNA, 33 bp, Homo sapien
gtagttttgtgaaagactaggttgaaggttttg

SEQ ID NO: 800902 - DNA, 33 bp, Homo sapien
gtagttttgtgaaagattaggttgaaggttttg

SEQ ID NO: 800903 - DNA, 33 bp, Homo sapien
aagatgaaagctatgaataaacttaaaccagaa

SEQ ID NO: 800904 - DNA, 33 bp, Homo sapien
aagatgaaagctatgagtaaacttaaaccagaa

SEQ ID NO: 800905 - DNA, 33 bp, Homo sapien
gcatgtaagcataaaaacaaagcaataaaaaca

SEQ ID NO: 800906 - DNA, 33 bp, Homo sapien
gcatgtaagcataaaagcaaagcaataaaaaca

SEQ ID NO: 800907 - DNA, 33 bp, Homo sapien
gccagcagcgcagacaaagttgtcgttccagca

SEQ ID NO: 800908 - DNA, 33 bp, Homo sapien
gccagcagcgcagacatagttgtcgttccagca

SEQ ID NO: 800909 - DNA, 33 bp, Homo sapien
gaaagttaaatcttaccggaaggatcatgatga

SEQ ID NO: 800910 - DNA, 33 bp, Homo sapien
gaaagttaaatcttactggaaggatcatgatga

SEQ ID NO: 800911 - DNA, 33 bp, Homo sapien
ctgcatataataataaaggcaactgaaatatga

SEQ ID NO: 800912 - DNA, 33 bp, Homo sapien
ctgcatataataataagggcaactgaaatatga

SEQ ID NO: 800913 - DNA, 33 bp, Homo sapien
atcatattgttggatacaggacttgacaacctt

SEQ ID NO: 800914 - DNA, 33 bp, Homo sapien
atcatattgttggatataggacttgacaacctt

SEQ ID NO: 800915 - DNA, 33 bp, Homo sapien
tgtttaatgtctccacaaattctagatagactg

SEQ ID NO: 800916 - DNA, 33 bp, Homo sapien
tgtttaatgtctccacgaattctagatagactg

SEQ ID NO: 800917 - DNA, 33 bp, Homo sapien
aacctacctaatccatcaaacagtgtctactct

SEQ ID NO: 800918 - DNA, 33 bp, Homo sapien
aacctacctaatccatgaaacagtgtctactct

SEQ ID NO: 800919 - DNA, 33 bp, Homo sapien
catctcatcaaaaccacagaaactgtcaacaga

SEQ ID NO: 800920 - DNA, 33 bp, Homo sapien
catctcatcaaaaccatagaaactgtcaacaga

SEQ ID NO: 800921 - DNA, 33 bp, Homo sapien
tttgcagttgaaaaggccattgcctaatctgga

SEQ ID NO: 800922 - DNA, 33 bp, Homo sapien
tttgcagttgaaaaggtcattgcctaatctgga

SEQ ID NO: 800923 - DNA, 33 bp, Homo sapien
gcagtgaccaatcttacggccctttcctggggg

SEQ ID NO: 800924 - DNA, 33 bp, Homo sapien
gcagtgaccaatcttatggccctttcctggggg

SEQ ID NO: 800925 - DNA, 33 bp, Homo sapien
ttcaatagtagcacaaacatcctttgtccccct

SEQ ID NO: 800926 - DNA, 33 bp, Homo sapien
ttcaatagtagcacaagcatcctttgtccccct

SEQ ID NO: 800927 - DNA, 33 bp, Homo sapien
ggacacaagattgggtcaatgctggttgaaagc

SEQ ID NO: 800928 - DNA, 33 bp, Homo sapien
ggacacaagattgggttaatgctggttgaaagc

SEQ ID NO: 800929 - DNA, 33 bp, Homo sapien
ccccagattgttttcacagggcccaaacactct

SEQ ID NO: 800930 - DNA, 33 bp, Homo sapien
ccccagattgttttcatagggcccaaacactct

SEQ ID NO: 800931 - DNA, 33 bp, Homo sapien
cactggacgaagtatcaaaagtcttgggttcaa

SEQ ID NO: 800932 - DNA, 33 bp, Homo sapien
cactggacgaagtatcgaaagtcttgggttcaa

SEQ ID NO: 800933 - DNA, 33 bp, Homo sapien
aactcacaacccaagaatctattttaaaatgca

SEQ ID NO: 800934 - DNA, 33 bp, Homo sapien
aactcacaacccaagagtctattttaaaatgca

SEQ ID NO: 800935 - DNA, 33 bp, Homo sapien
acaggcaagtgggatcccttctcatttttctgt

SEQ ID NO: 800936 - DNA, 33 bp, Homo sapien
acaggcaagtgggatctcttctcatttttctgt

SEQ ID NO: 800937 - DNA, 33 bp, Homo sapien
acctttactctaaatcagaatcataactcaatg

SEQ ID NO: 800938 - DNA, 33 bp, Homo sapien
acctttactctaaatcggaatcataactcaatg

SEQ ID NO: 800939 - DNA, 33 bp, Homo sapien
catcactgtatttccaatgaaattaggttccag

SEQ ID NO: 800940 - DNA, 33 bp, Homo sapien
catcactgtatttccagtgaaattaggttccag

SEQ ID NO: 800941 - DNA, 33 bp, Homo sapien
ttttatctttcttcaacgataaggttcttgcct

SEQ ID NO: 800942 - DNA, 33 bp, Homo sapien
ttttatctttcttcaatgataaggttcttgcct

SEQ ID NO: 800943 - DNA, 33 bp, Homo sapien
gctgctcctctcgatccagtggtttgtcctgca

SEQ ID NO: 800944 - DNA, 33 bp, Homo sapien
gctgctcctctcgatctagtggtttgtcctgca

SEQ ID NO: 800945 - DNA, 33 bp, Homo sapien
gtttgggataaatggcagaaaacaacgcgtcat

SEQ ID NO: 800946 - DNA, 33 bp, Homo sapien
gtttgggataaatggcggaaaacaacgcgtcat

SEQ ID NO: 800947 - DNA, 33 bp, Homo sapien
gattgctgagtaactaacacacttaaaacaact

SEQ ID NO: 800948 - DNA, 33 bp, Homo sapien
gattgctgagtaactagcacacttaaaacaact

SEQ ID NO: 800949 - DNA, 33 bp, Homo sapien
tttattgttccagtaacaacagtttcattagat

SEQ ID NO: 800950 - DNA, 33 bp, Homo sapien
tttattgttccagtaataacagtttcattagat

SEQ ID NO: 800951 - DNA, 33 bp, Homo sapien
gataaatttgctctgacgtaaaaaaataattca

SEQ ID NO: 800952 - DNA, 33 bp, Homo sapien
gataaatttgctctgatgtaaaaaaataattca

SEQ ID NO: 800953 - DNA, 33 bp, Homo sapien
taaggtactgttaaaaaaggtgagttacatttg

SEQ ID NO: 800954 - DNA, 33 bp, Homo sapien
taaggtactgttaaaacaggtgagttacatttg

SEQ ID NO: 800955 - DNA, 33 bp, Homo sapien
acaaacatgatgcaacacagaaaacaaacattc

SEQ ID NO: 800956 - DNA, 33 bp, Homo sapien
acaaacatgatgcaacgcagaaaacaaacattc

SEQ ID NO: 800957 - DNA, 33 bp, Homo sapien
tcagattttccgtgctaaactatgggtcagaga

SEQ ID NO: 800958 - DNA, 33 bp, Homo sapien
tcagattttccgtgctgaactatgggtcagaga

SEQ ID NO: 800959 - DNA, 33 bp, Homo sapien
cccatttacacacgctcaatatcttgcagtggt

SEQ ID NO: 800960 - DNA, 33 bp, Homo sapien
cccatttacacacgcttaatatcttgcagtggt

SEQ ID NO: 800961 - DNA, 33 bp, Homo sapien
tagccttttcctccaccacattccttgacttaa

SEQ ID NO: 800962 - DNA, 33 bp, Homo sapien
tagccttttcctccacgacattccttgacttaa

SEQ ID NO: 800963 - DNA, 33 bp, Homo sapien
actcagatgggtagaaactgaaacgttttccag

SEQ ID NO: 800964 - DNA, 33 bp, Homo sapien
actcagatgggtagaacctgaaacgttttccag

SEQ ID NO: 800965 - DNA, 33 bp, Homo sapien
agcaatctcaaccacaaatttcaaaatgtttta

SEQ ID NO: 800966 - DNA, 33 bp, Homo sapien
agcaatctcaaccacacatttcaaaatgtttta

SEQ ID NO: 800967 - DNA, 33 bp, Homo sapien
cttgattttgattccacctctctttgtgtcctt

SEQ ID NO: 800968 - DNA, 33 bp, Homo sapien
cttgattttgattccatctctctttgtgtcctt

SEQ ID NO: 800969 - DNA, 33 bp, Homo sapien
caatttatcgatcatacggattgattcatgatt

SEQ ID NO: 800970 - DNA, 33 bp, Homo sapien
caatttatcgatcatatggattgattcatgatt

SEQ ID NO: 800971 - DNA, 33 bp, Homo sapien
cacaagagatacataactgcttactaaaaatga

SEQ ID NO: 800972 - DNA, 33 bp, Homo sapien
cacaagagatacataattgcttactaaaaatga

SEQ ID NO: 800973 - DNA, 33 bp, Homo sapien
gggtgcagaaatgaggaaaatattattggaaac

SEQ ID NO: 800974 - DNA, 33 bp, Homo sapien
gggtgcagaaatgagggaaatattattggaaac

SEQ ID NO: 800975 - DNA, 33 bp, Homo sapien
ctagtctcttcaaagagccttctgtatgattga

SEQ ID NO: 800976 - DNA, 33 bp, Homo sapien
ctagtctcttcaaagatccttctgtatgattga

SEQ ID NO: 800977 - DNA, 33 bp, Homo sapien
actgtgctagctaaaacgaatgttctgcagaaa

SEQ ID NO: 800978 - DNA, 33 bp, Homo sapien
actgtgctagctaaaatgaatgttctgcagaaa

SEQ ID NO: 800979 - DNA, 33 bp, Homo sapien
gattaattcctgacaaacttcttacatatagaa

SEQ ID NO: 800980 - DNA, 33 bp, Homo sapien
gattaattcctgacaaccttcttacatatagaa

SEQ ID NO: 800981 - DNA, 33 bp, Homo sapien
gagcattgatccagaaagagtagtatccttaga

SEQ ID NO: 800982 - DNA, 33 bp, Homo sapien
gagcattgatccagaaggagtagtatccttaga

SEQ ID NO: 800983 - DNA, 33 bp, Homo sapien
ttttattcttgccctaggtatcacaaatgttag

SEQ ID NO: 800984 - DNA, 33 bp, Homo sapien
ttttattcttgccctatgtatcacaaatgttag

SEQ ID NO: 800985 - DNA, 33 bp, Homo sapien
cgtgagtttagtggccaaaaggggaggtagagg

SEQ ID NO: 800986 - DNA, 33 bp, Homo sapien
cgtgagtttagtggccgaaaggggaggtagagg

SEQ ID NO: 800987 - DNA, 33 bp, Homo sapien
ttaaggaccactccaaagtgactgtggaaatta

SEQ ID NO: 800988 - DNA, 33 bp, Homo sapien
ttaaggaccactccaatgtgactgtggaaatta

SEQ ID NO: 800989 - DNA, 33 bp, Homo sapien
ccaagcaggacatacagtagtcaggcaataagg

SEQ ID NO: 800990 - DNA, 33 bp, Homo sapien
ccaagcaggacatacattagtcaggcaataagg

SEQ ID NO: 800991 - DNA, 33 bp, Homo sapien
gtaagtccagtccacaaaagattttcctctaag

SEQ ID NO: 800992 - DNA, 33 bp, Homo sapien
gtaagtccagtccacataagattttcctctaag

SEQ ID NO: 800993 - DNA, 33 bp, Homo sapien
ctccagcatggaaaacacagaacctaggagcct

SEQ ID NO: 800994 - DNA, 33 bp, Homo sapien
ctccagcatggaaaacgcagaacctaggagcct

SEQ ID NO: 800995 - DNA, 33 bp, Homo sapien
ccctacaaaaaataaactagagaagacaaactg

SEQ ID NO: 800996 - DNA, 33 bp, Homo sapien
ccctacaaaaaataaagtagagaagacaaactg

SEQ ID NO: 800997 - DNA, 33 bp, Homo sapien
gaaaagattgtagagaaaatgtgggagataatt

SEQ ID NO: 800998 - DNA, 33 bp, Homo sapien
gaaaagattgtagagagaatgtgggagataatt

SEQ ID NO: 800999 - DNA, 33 bp, Homo sapien
ctctcaggcaactcaaatgtaaatgttcaaaat

SEQ ID NO: 801000 - DNA, 33 bp, Homo sapien
ctctcaggcaactcaagtgtaaatgttcaaaat

SEQ ID NO: 801001 - DNA, 33 bp, Homo sapien
tcatatgagagttatccaaaattagaccaaaat

SEQ ID NO: 801002 - DNA, 33 bp, Homo sapien
tcatatgagagttatcgaaaattagaccaaaat

SEQ ID NO: 801003 - DNA, 33 bp, Homo sapien
caatatattaggaaaaagcacatttaaatgtat

SEQ ID NO: 801004 - DNA, 33 bp, Homo sapien
caatatattaggaaaaggcacatttaaatgtat

SEQ ID NO: 801005 - DNA, 33 bp, Homo sapien
tcagtccagaacccaagtaactcaacctttgaa

SEQ ID NO: 801006 - DNA, 33 bp, Homo sapien
tcagtccagaacccaattaactcaacctttgaa

SEQ ID NO: 801007 - DNA, 33 bp, Homo sapien
taaaaatgaatggtaaacttcagagaacattta

SEQ ID NO: 801008 - DNA, 33 bp, Homo sapien
taaaaatgaatggtaagcttcagagaacattta

SEQ ID NO: 801009 - DNA, 33 bp, Homo sapien
gctcattagaagatcaaaagcagattctcctta

SEQ ID NO: 801010 - DNA, 33 bp, Homo sapien
gctcattagaagatcagaagcagattctcctta

SEQ ID NO: 801011 - DNA, 33 bp, Homo sapien
catttacatcttccacagaaatgagcaatttgg

SEQ ID NO: 801012 - DNA, 33 bp, Homo sapien
catttacatcttccaccgaaatgagcaatttgg

SEQ ID NO: 801013 - DNA, 33 bp, Homo sapien
tccgggtatttactaccatcctgtttctcctta

SEQ ID NO: 801014 - DNA, 33 bp, Homo sapien
tccgggtatttactactatcctgtttctcctta

SEQ ID NO: 801015 - DNA, 33 bp, Homo sapien
ccctgctagatagagacgcgctcaaacagagcc

SEQ ID NO: 801016 - DNA, 33 bp, Homo sapien
ccctgctagatagagatgcgctcaaacagagcc

SEQ ID NO: 801017 - DNA, 33 bp, Homo sapien
cagtttgatcaacatcccttcgaaactatgtgt

SEQ ID NO: 801018 - DNA, 33 bp, Homo sapien
cagtttgatcaacatctcttcgaaactatgtgt

SEQ ID NO: 801019 - DNA, 33 bp, Homo sapien
tggaggtgtctacttgaacactatggaggcttt

SEQ ID NO: 801020 - DNA, 33 bp, Homo sapien
tggaggtgtctacttgcacactatggaggcttt

SEQ ID NO: 801021 - DNA, 33 bp, Homo sapien
agccaaagcgccttgccagtatcggtgcatagg

SEQ ID NO: 801022 - DNA, 33 bp, Homo sapien
agccaaagcgccttgctagtatcggtgcatagg

SEQ ID NO: 801023 - DNA, 33 bp, Homo sapien
actgtctgttttacacacacactttttttttga

SEQ ID NO: 801024 - DNA, 33 bp, Homo sapien
actgtctgttttacacgcacactttttttttga

SEQ ID NO: 801025 - DNA, 33 bp, Homo sapien
ttttttgttttagaaagattattctgtcagtca

SEQ ID NO: 801026 - DNA, 33 bp, Homo sapien
ttttttgttttagaaatattattctgtcagtca

SEQ ID NO: 801027 - DNA, 33 bp, Homo sapien
gcaatctgagtgggaaacacaccagagctcaga

SEQ ID NO: 801028 - DNA, 33 bp, Homo sapien
gcaatctgagtgggaatcacaccagagctcaga

SEQ ID NO: 801029 - DNA, 33 bp, Homo sapien
cgttggtaattaacaaaagatcaagaatacctt

SEQ ID NO: 801030 - DNA, 33 bp, Homo sapien
cgttggtaattaacaacagatcaagaatacctt

SEQ ID NO: 801031 - DNA, 33 bp, Homo sapien
tagttctgaaaagttgcaagggcatcatgacct

SEQ ID NO: 801032 - DNA, 33 bp, Homo sapien
tagttctgaaaagttggaagggcatcatgacct

SEQ ID NO: 801033 - DNA, 33 bp, Homo sapien
tggagaaagcagtaccagaatgttttagaagca

SEQ ID NO: 801034 - DNA, 33 bp, Homo sapien
tggagaaagcagtaccggaatgttttagaagca

SEQ ID NO: 801035 - DNA, 33 bp, Homo sapien
ccttagcacagttgtacgcacaattagatttta

SEQ ID NO: 801036 - DNA, 33 bp, Homo sapien
ccttagcacagttgtatgcacaattagatttta

SEQ ID NO: 801037 - DNA, 33 bp, Homo sapien
attattactcctactactacctttcttttgctt

SEQ ID NO: 801038 - DNA, 33 bp, Homo sapien
attattactcctactattacctttcttttgctt

SEQ ID NO: 801039 - DNA, 33 bp, Homo sapien
aacaaaagttacgtgacccaactgtatgctaaa

SEQ ID NO: 801040 - DNA, 33 bp, Homo sapien
aacaaaagttacgtgatccaactgtatgctaaa

SEQ ID NO: 801041 - DNA, 33 bp, Homo sapien
attttcatattatgccagcagagttgagtagtt

SEQ ID NO: 801042 - DNA, 33 bp, Homo sapien
attttcatattatgccggcagagttgagtagtt

SEQ ID NO: 801043 - DNA, 33 bp, Homo sapien
tcagtacaagcaaaacagttttagaatccaata

SEQ ID NO: 801044 - DNA, 33 bp, Homo sapien
tcagtacaagcaaaacggttttagaatccaata

SEQ ID NO: 801045 - DNA, 33 bp, Homo sapien
attccatttatcgtggaagcatttttttcttgt

SEQ ID NO: 801046 - DNA, 33 bp, Homo sapien
attccatttatcgtgggagcatttttttcttgt

SEQ ID NO: 801047 - DNA, 33 bp, Homo sapien
gatgctttattcaggcggcctcttccactgctg

SEQ ID NO: 801048 - DNA, 33 bp, Homo sapien
gatgctttattcaggctgcctcttccactgctg

SEQ ID NO: 801049 - DNA, 33 bp, Homo sapien
ggctccctgaacccccagagtaaactgcaggct

SEQ ID NO: 801050 - DNA, 33 bp, Homo sapien
ggctccctgaaccccccgagtaaactgcaggct

SEQ ID NO: 801051 - DNA, 33 bp, Homo sapien
acgcttatgtttactacgtctcaagtgttctgc

SEQ ID NO: 801052 - DNA, 33 bp, Homo sapien
acgcttatgtttactatgtctcaagtgttctgc

SEQ ID NO: 801053 - DNA, 33 bp, Homo sapien
agcacttcacgtgtaccaattcattcaatcctc

SEQ ID NO: 801054 - DNA, 33 bp, Homo sapien
agcacttcacgtgtactaattcattcaatcctc

SEQ ID NO: 801055 - DNA, 33 bp, Homo sapien
agggagtgacttaacccctctggacttcaattt

SEQ ID NO: 801056 - DNA, 33 bp, Homo sapien
agggagtgacttaacctctctggacttcaattt

SEQ ID NO: 801057 - DNA, 33 bp, Homo sapien
agaggggatcttggagccattgagggtgtcatg

SEQ ID NO: 801058 - DNA, 33 bp, Homo sapien
agaggggatcttggagtcattgagggtgtcatg

SEQ ID NO: 801059 - DNA, 33 bp, Homo sapien
ggaagaaaaaggacaacgtgtgaagcaaagagg

SEQ ID NO: 801060 - DNA, 33 bp, Homo sapien
ggaagaaaaaggacaatgtgtgaagcaaagagg

SEQ ID NO: 801061 - DNA, 33 bp, Homo sapien
cacagggttgttccagaatcatacatgccaagt

SEQ ID NO: 801062 - DNA, 33 bp, Homo sapien
cacagggttgttccagtatcatacatgccaagt

SEQ ID NO: 801063 - DNA, 33 bp, Homo sapien
ttgcaagaaacaataaactgagcaagcaacagg

SEQ ID NO: 801064 - DNA, 33 bp, Homo sapien
ttgcaagaaacaataagctgagcaagcaacagg

SEQ ID NO: 801065 - DNA, 33 bp, Homo sapien
tgtgtcatcttcatacacaactcaccaactagt

SEQ ID NO: 801066 - DNA, 33 bp, Homo sapien
tgtgtcatcttcatacccaactcaccaactagt

SEQ ID NO: 801067 - DNA, 33 bp, Homo sapien
ttgttcattccacaaacagttgttaagtgaagg

SEQ ID NO: 801068 - DNA, 33 bp, Homo sapien
ttgttcattccacaaatagttgttaagtgaagg

SEQ ID NO: 801069 - DNA, 33 bp, Homo sapien
agggagggatttttagacacaaatgcaggatgg

SEQ ID NO: 801070 - DNA, 33 bp, Homo sapien
agggagggatttttaggcacaaatgcaggatgg

SEQ ID NO: 801071 - DNA, 33 bp, Homo sapien
agtcatactaacggcaaagaagatggactgaaa

SEQ ID NO: 801072 - DNA, 33 bp, Homo sapien
agtcatactaacggcagagaagatggactgaaa

SEQ ID NO: 801073 - DNA, 33 bp, Homo sapien
tcaaagtcggtgcccaataagatgtgcttctcg

SEQ ID NO: 801074 - DNA, 33 bp, Homo sapien
tcaaagtcggtgcccactaagatgtgcttctcg

SEQ ID NO: 801075 - DNA, 33 bp, Homo sapien
gaaccccgggttgaagccctggctctgcctctg

SEQ ID NO: 801076 - DNA, 33 bp, Homo sapien
gaaccccgggttgaagtcctggctctgcctctg

SEQ ID NO: 801077 - DNA, 33 bp, Homo sapien
cctgttgctgtcccagacaaactgcctcattta

SEQ ID NO: 801078 - DNA, 33 bp, Homo sapien
cctgttgctgtcccagccaaactgcctcattta

SEQ ID NO: 801079 - DNA, 33 bp, Homo sapien
gtctcagattattcaaacagactaagattgtat

SEQ ID NO: 801080 - DNA, 33 bp, Homo sapien
gtctcagattattcaagcagactaagattgtat

SEQ ID NO: 801081 - DNA, 33 bp, Homo sapien
gtccacttgccctggaacttgaagctgaaaccc

SEQ ID NO: 801082 - DNA, 33 bp, Homo sapien
gtccacttgccctggatcttgaagctgaaaccc

SEQ ID NO: 801083 - DNA, 33 bp, Homo sapien
gtttgagatgaggccactggacgtcagctgggg

SEQ ID NO: 801084 - DNA, 33 bp, Homo sapien
gtttgagatgaggccattggacgtcagctgggg

SEQ ID NO: 801085 - DNA, 33 bp, Homo sapien
tcaagcatgcaaatccgaccatcacacatggcc

SEQ ID NO: 801086 - DNA, 33 bp, Homo sapien
tcaagcatgcaaatcctaccatcacacatggcc

SEQ ID NO: 801087 - DNA, 33 bp, Homo sapien
tggggctgtttcagcaataccaggctattgttt

SEQ ID NO: 801088 - DNA, 33 bp, Homo sapien
tggggctgtttcagcagtaccaggctattgttt

SEQ ID NO: 801089 - DNA, 33 bp, Homo sapien
cttcactctcttaatccctgtgccctcccaaca

SEQ ID NO: 801090 - DNA, 33 bp, Homo sapien
cttcactctcttaatctctgtgccctcccaaca

SEQ ID NO: 801091 - DNA, 33 bp, Homo sapien
atttgataagtatgagaaataggatttgaactc

SEQ ID NO: 801092 - DNA, 33 bp, Homo sapien
atttgataagtatgaggaataggatttgaactc

SEQ ID NO: 801093 - DNA, 33 bp, Homo sapien
cccacctggctagtaacggcaaatgcctactta

SEQ ID NO: 801094 - DNA, 33 bp, Homo sapien
cccacctggctagtaatggcaaatgcctactta

SEQ ID NO: 801095 - DNA, 33 bp, Homo sapien
agtctctccatctgaacgtcaaggggtcacttg

SEQ ID NO: 801096 - DNA, 33 bp, Homo sapien
agtctctccatctgaatgtcaaggggtcacttg

SEQ ID NO: 801097 - DNA, 33 bp, Homo sapien
ctgggttcctttggcactgataagaactgtagc

SEQ ID NO: 801098 - DNA, 33 bp, Homo sapien
ctgggttcctttggcattgataagaactgtagc

SEQ ID NO: 801099 - DNA, 33 bp, Homo sapien
gaatagttatgcccggaagctggaaaagtttca

SEQ ID NO: 801100 - DNA, 33 bp, Homo sapien
gaatagttatgcccgggagctggaaaagtttca

SEQ ID NO: 801101 - DNA, 33 bp, Homo sapien
aactgcccaactcctaacatttgttcctgggac

SEQ ID NO: 801102 - DNA, 33 bp, Homo sapien
aactgcccaactcctagcatttgttcctgggac

SEQ ID NO: 801103 - DNA, 33 bp, Homo sapien
tccttcgcagcccacactggcagtgacaatcag

SEQ ID NO: 801104 - DNA, 33 bp, Homo sapien
tccttcgcagcccacattggcagtgacaatcag

SEQ ID NO: 801105 - DNA, 33 bp, Homo sapien
attctatgaaccacaaagtaaacgcttaccagc

SEQ ID NO: 801106 - DNA, 33 bp, Homo sapien
attctatgaaccacaaggtaaacgcttaccagc

SEQ ID NO: 801107 - DNA, 33 bp, Homo sapien
gttatgacttagcaaaaagcttggctggactgt

SEQ ID NO: 801108 - DNA, 33 bp, Homo sapien
gttatgacttagcaaagagcttggctggactgt

SEQ ID NO: 801109 - DNA, 33 bp, Homo sapien
aggacccaggcccaagccaaattttctcttttc

SEQ ID NO: 801110 - DNA, 33 bp, Homo sapien
aggacccaggcccaagtcaaattttctcttttc

SEQ ID NO: 801111 - DNA, 33 bp, Homo sapien
ggcaaaaggcagtcaactgtggtctcccgccct

SEQ ID NO: 801112 - DNA, 33 bp, Homo sapien
ggcaaaaggcagtcaattgtggtctcccgccct

SEQ ID NO: 801113 - DNA, 33 bp, Homo sapien
gaatgattccatcataaggaacagattacacaa

SEQ ID NO: 801114 - DNA, 33 bp, Homo sapien
gaatgattccatcatagggaacagattacacaa

SEQ ID NO: 801115 - DNA, 33 bp, Homo sapien
cctcaccagtgcccgaccatttgaggaaccact

SEQ ID NO: 801116 - DNA, 33 bp, Homo sapien
cctcaccagtgcccgagcatttgaggaaccact

SEQ ID NO: 801117 - DNA, 33 bp, Homo sapien
agagatggagaaatcaaaactttgaacaaagtc

SEQ ID NO: 801118 - DNA, 33 bp, Homo sapien
agagatggagaaatcagaactttgaacaaagtc

SEQ ID NO: 801119 - DNA, 33 bp, Homo sapien
caataattatggtcaaatcctgttgagagatga

SEQ ID NO: 801120 - DNA, 33 bp, Homo sapien
caataattatggtcaagtcctgttgagagatga

SEQ ID NO: 801121 - DNA, 33 bp, Homo sapien
agtgggccaacatcagaaggggttctcaggcct

SEQ ID NO: 801122 - DNA, 33 bp, Homo sapien
agtgggccaacatcaggaggggttctcaggcct

SEQ ID NO: 801123 - DNA, 33 bp, Homo sapien
ccaacctcggagccgaccaaacacagctgaaac

SEQ ID NO: 801124 - DNA, 33 bp, Homo sapien
ccaacctcggagccgatcaaacacagctgaaac

SEQ ID NO: 801125 - DNA, 33 bp, Homo sapien
ccagaatagaaggcaccgctcgataaggtctgc

SEQ ID NO: 801126 - DNA, 33 bp, Homo sapien
ccagaatagaaggcactgctcgataaggtctgc

SEQ ID NO: 801127 - DNA, 33 bp, Homo sapien
tgcgccagacacctaacgtgctcccaactcagt

SEQ ID NO: 801128 - DNA, 33 bp, Homo sapien
tgcgccagacacctaatgtgctcccaactcagt

SEQ ID NO: 801129 - DNA, 33 bp, Homo sapien
atttaatacacataacaatcagatgctatccct

SEQ ID NO: 801130 - DNA, 33 bp, Homo sapien
atttaatacacataacgatcagatgctatccct

SEQ ID NO: 801131 - DNA, 33 bp, Homo sapien
tctaaattaatccttgaaatcctatgaggtagg

SEQ ID NO: 801132 - DNA, 33 bp, Homo sapien
tctaaattaatccttgcaatcctatgaggtagg

SEQ ID NO: 801133 - DNA, 33 bp, Homo sapien
aaaatggactgaccaactgatgagcaaagcggc

SEQ ID NO: 801134 - DNA, 33 bp, Homo sapien
aaaatggactgaccaattgatgagcaaagcggc

SEQ ID NO: 801135 - DNA, 33 bp, Homo sapien
atcccacacttcatacaaaaatcaagccaaaat

SEQ ID NO: 801136 - DNA, 33 bp, Homo sapien
atcccacacttcataccaaaatcaagccaaaat

SEQ ID NO: 801137 - DNA, 33 bp, Homo sapien
aacgttatctagcttgcaggtatagtctgagaa

SEQ ID NO: 801138 - DNA, 33 bp, Homo sapien
aacgttatctagcttggaggtatagtctgagaa

SEQ ID NO: 801139 - DNA, 33 bp, Homo sapien
actagtgtctctttccaaagcaggattctgaca

SEQ ID NO: 801140 - DNA, 33 bp, Homo sapien
actagtgtctctttccgaagcaggattctgaca

SEQ ID NO: 801141 - DNA, 33 bp, Homo sapien
ttaacaggaaattctacgaatgccaattagagc

SEQ ID NO: 801142 - DNA, 33 bp, Homo sapien
ttaacaggaaattctatgaatgccaattagagc

SEQ ID NO: 801143 - DNA, 33 bp, Homo sapien
aacccttttctcaaacacttccgtagtctcctg

SEQ ID NO: 801144 - DNA, 33 bp, Homo sapien
aacccttttctcaaacgcttccgtagtctcctg

SEQ ID NO: 801145 - DNA, 33 bp, Homo sapien
tattcaattccacaccacagatatttattgggc

SEQ ID NO: 801146 - DNA, 33 bp, Homo sapien
tattcaattccacaccgcagatatttattgggc

SEQ ID NO: 801147 - DNA, 33 bp, Homo sapien
ataccacctttcctccaaggagcttaaggcgct

SEQ ID NO: 801148 - DNA, 33 bp, Homo sapien
ataccacctttcctccgaggagcttaaggcgct

SEQ ID NO: 801149 - DNA, 33 bp, Homo sapien
tccttactaattcaccaaactcaatcacgttac

SEQ ID NO: 801150 - DNA, 33 bp, Homo sapien
tccttactaattcaccgaactcaatcacgttac

SEQ ID NO: 801151 - DNA, 33 bp, Homo sapien
tgcagattgtgtacacagggaaactgaggctta

SEQ ID NO: 801152 - DNA, 33 bp, Homo sapien
tgcagattgtgtacacggggaaactgaggctta

SEQ ID NO: 801153 - DNA, 33 bp, Homo sapien
aaagtttagagagggaaaatgagaacaggttgc

SEQ ID NO: 801154 - DNA, 33 bp, Homo sapien
aaagtttagagagggagaatgagaacaggttgc

SEQ ID NO: 801155 - DNA, 33 bp, Homo sapien
gcctccagaggatgaagctcaaagaaagcctcg

SEQ ID NO: 801156 - DNA, 33 bp, Homo sapien
gcctccagaggatgaatctcaaagaaagcctcg

SEQ ID NO: 801157 - DNA, 33 bp, Homo sapien
tacttaggtgggaagagaggagaagtccattct

SEQ ID NO: 801158 - DNA, 33 bp, Homo sapien
tacttaggtgggaagataggagaagtccattct

SEQ ID NO: 801159 - DNA, 33 bp, Homo sapien
aaaagctgataggcaacggtgccagaagttttt

SEQ ID NO: 801160 - DNA, 33 bp, Homo sapien
aaaagctgataggcaatggtgccagaagttttt

SEQ ID NO: 801161 - DNA, 33 bp, Homo sapien
cagtatttttggtgaactggtcttctccctacc

SEQ ID NO: 801162 - DNA, 33 bp, Homo sapien
cagtatttttggtgaattggtcttctccctacc

SEQ ID NO: 801163 - DNA, 33 bp, Homo sapien
cccattctgagttagcaaatcacttcaaaatgc

SEQ ID NO: 801164 - DNA, 33 bp, Homo sapien
cccattctgagttagcgaatcacttcaaaatgc

SEQ ID NO: 801165 - DNA, 33 bp, Homo sapien
ctggctgtaactgtaaccccacctataccttag

SEQ ID NO: 801166 - DNA, 33 bp, Homo sapien
ctggctgtaactgtaatcccacctataccttag

SEQ ID NO: 801167 - DNA, 33 bp, Homo sapien
gcaagcagcactgggaagattcaggagatctcg

SEQ ID NO: 801168 - DNA, 33 bp, Homo sapien
gcaagcagcactgggatgattcaggagatctcg

SEQ ID NO: 801169 - DNA, 33 bp, Homo sapien
atcaggccccatcacaatcctgtgtgactttcc

SEQ ID NO: 801170 - DNA, 33 bp, Homo sapien
atcaggccccatcacagtcctgtgtgactttcc

SEQ ID NO: 801171 - DNA, 33 bp, Homo sapien
caggtcctgttgggtaaaacatttggctttcag

SEQ ID NO: 801172 - DNA, 33 bp, Homo sapien
caggtcctgttgggtagaacatttggctttcag

SEQ ID NO: 801173 - DNA, 33 bp, Homo sapien
tctcctggggaagcaagaaatcattctgaggat

SEQ ID NO: 801174 - DNA, 33 bp, Homo sapien
tctcctggggaagcaataaatcattctgaggat

SEQ ID NO: 801175 - DNA, 33 bp, Homo sapien
tctgaacagtcagcaaacagttgcaaccaatgt

SEQ ID NO: 801176 - DNA, 33 bp, Homo sapien
tctgaacagtcagcaatcagttgcaaccaatgt

SEQ ID NO: 801177 - DNA, 33 bp, Homo sapien
aataacataacttatcagaaagaacacacagcc

SEQ ID NO: 801178 - DNA, 33 bp, Homo sapien
aataacataacttatcggaaagaacacacagcc

SEQ ID NO: 801179 - DNA, 33 bp, Homo sapien
attgcagaccagacacaggtgagtgcttggttc

SEQ ID NO: 801180 - DNA, 33 bp, Homo sapien
attgcagaccagacacgggtgagtgcttggttc

SEQ ID NO: 801181 - DNA, 33 bp, Homo sapien
gagtcccttgtcaatacctagttttgcaaattc

SEQ ID NO: 801182 - DNA, 33 bp, Homo sapien
gagtcccttgtcaatatctagttttgcaaattc

SEQ ID NO: 801183 - DNA, 33 bp, Homo sapien
taatgttgaatgatgactagcagcttcctggaa

SEQ ID NO: 801184 - DNA, 33 bp, Homo sapien
taatgttgaatgatgagtagcagcttcctggaa

SEQ ID NO: 801185 - DNA, 33 bp, Homo sapien
acttctccctagttccaacttttccctccagct

SEQ ID NO: 801186 - DNA, 33 bp, Homo sapien
acttctccctagttcccacttttccctccagct

SEQ ID NO: 801187 - DNA, 33 bp, Homo sapien
tttacatggactcagcagcagagacttggaaac

SEQ ID NO: 801188 - DNA, 33 bp, Homo sapien
tttacatggactcagcggcagagacttggaaac

SEQ ID NO: 801189 - DNA, 33 bp, Homo sapien
acttaaccatgcttcacgagtgtaaaagcatcc

SEQ ID NO: 801190 - DNA, 33 bp, Homo sapien
acttaaccatgcttcatgagtgtaaaagcatcc

SEQ ID NO: 801191 - DNA, 33 bp, Homo sapien
ttatgtatttctcataagcttcttcactcataa

SEQ ID NO: 801192 - DNA, 33 bp, Homo sapien
ttatgtatttctcatatgcttcttcactcataa

SEQ ID NO: 801193 - DNA, 33 bp, Homo sapien
aacaagatttgtttacaagtcctggattttctg

SEQ ID NO: 801194 - DNA, 33 bp, Homo sapien
aacaagatttgtttacgagtcctggattttctg

SEQ ID NO: 801195 - DNA, 33 bp, Homo sapien; identical to SEQ ID NO: 801193

SEQ ID NO: 801196 - DNA, 33 bp, Homo sapien; identical to SEQ ID NO: 801194

SEQ ID NO: 801197 - DNA, 33 bp, Homo sapien
acttgtcacctgcctcaagaccatcatcattca

SEQ ID NO: 801198 - DNA, 33 bp, Homo sapien
acttgtcacctgcctcgagaccatcatcattca

SEQ ID NO: 801199 - DNA, 33 bp, Homo sapien
ttcatttaaaaaggcaaattcctatgcgaaaat

SEQ ID NO: 801200 - DNA, 33 bp, Homo sapien
ttcatttaaaaaggcagattcctatgcgaaaat

SEQ ID NO: 801201 - DNA, 33 bp, Homo sapien
cgcggcagctcccagacgttgatgttttgtttt

SEQ ID NO: 801202 - DNA, 33 bp, Homo sapien
cgcggcagctcccagatgttgatgttttgtttt

SEQ ID NO: 801203 - DNA, 33 bp, Homo sapien
aaatgagaaaccatgcaaaatacttaacacagt

SEQ ID NO: 801204 - DNA, 33 bp, Homo sapien
aaatgagaaaccatgcgaaatacttaacacagt

SEQ ID NO: 801205 - DNA, 33 bp, Homo sapien
aacattgtccaggaaactcttcccgattcattt

SEQ ID NO: 801206 - DNA, 33 bp, Homo sapien
aacattgtccaggaaattcttcccgattcattt

SEQ ID NO: 801207 - DNA, 33 bp, Homo sapien
ccacactagttttgacacttacttcaaatatta

SEQ ID NO: 801208 - DNA, 33 bp, Homo sapien
ccacactagttttgactcttacttcaaatatta

SEQ ID NO: 801209 - DNA, 33 bp, Homo sapien
acaaggctgaaaagtgaaggagtcatgcagaaa

SEQ ID NO: 801210 - DNA, 33 bp, Homo sapien
acaaggctgaaaagtgcaggagtcatgcagaaa

SEQ ID NO: 801211 - DNA, 33 bp, Homo sapien
actgattctgggctgaccctgtgagttgcttta

SEQ ID NO: 801212 - DNA, 33 bp, Homo sapien
actgattctgggctgatcctgtgagttgcttta

SEQ ID NO: 801213 - DNA, 33 bp, Homo sapien
agttaatcacctttcacgatgactacacatgcc

SEQ ID NO: 801214 - DNA, 33 bp, Homo sapien
agttaatcacctttcatgatgactacacatgcc

SEQ ID NO: 801215 - DNA, 33 bp, Homo sapien
ggaacttctcacacaactctttgagaggagctc

SEQ ID NO: 801216 - DNA, 33 bp, Homo sapien
ggaacttctcacacaattctttgagaggagctc

SEQ ID NO: 801217 - DNA, 33 bp, Homo sapien
ggaaatctagatgctactaccaagagaaggagg

SEQ ID NO: 801218 - DNA, 33 bp, Homo sapien
ggaaatctagatgctattaccaagagaaggagg

SEQ ID NO: 801219 - DNA, 33 bp, Homo sapien
gggacctcaaaatctacactctccagctttaag

SEQ ID NO: 801220 - DNA, 33 bp, Homo sapien
gggacctcaaaatctatactctccagctttaag

SEQ ID NO: 801221 - DNA, 33 bp, Homo sapien
gcagcttgagagatgacgttgaggaggatttga

SEQ ID NO: 801222 - DNA, 33 bp, Homo sapien
gcagcttgagagatgatgttgaggaggatttga

SEQ ID NO: 801223 - DNA, 33 bp, Homo sapien
tgacttggattcaggaaacaatggtttggtcca

SEQ ID NO: 801224 - DNA, 33 bp, Homo sapien
tgacttggattcaggacacaatggtttggtcca

SEQ ID NO: 801225 - DNA, 33 bp, Homo sapien
aaggagatgtgcttcacgggactcttataaaca

SEQ ID NO: 801226 - DNA, 33 bp, Homo sapien
aaggagatgtgcttcatgggactcttataaaca

SEQ ID NO: 801227 - DNA, 33 bp, Homo sapien
tttaagggataccctaccttccactcacctcct

SEQ ID NO: 801228 - DNA, 33 bp, Homo sapien
tttaagggataccctatcttccactcacctcct

SEQ ID NO: 801229 - DNA, 33 bp, Homo sapien
tgaagggcacaataagaagcaataaggccacct

SEQ ID NO: 801230 - DNA, 33 bp, Homo sapien
tgaagggcacaataagcagcaataaggccacct

SEQ ID NO: 801231 - DNA, 33 bp, Homo sapien
gtgttaggaattgtacccagaagtgtatacaag

SEQ ID NO: 801232 - DNA, 33 bp, Homo sapien
gtgttaggaattgtactcagaagtgtatacaag

SEQ ID NO: 801233 - DNA, 33 bp, Homo sapien
ttaaggtggtggctaccaagttaaaattaagaa

SEQ ID NO: 801234 - DNA, 33 bp, Homo sapien
ttaaggtggtggctacgaagttaaaattaagaa

SEQ ID NO: 801235 - DNA, 33 bp, Homo sapien
gatgctggttggctggaatctgaaaccacaacc

SEQ ID NO: 801236 - DNA, 33 bp, Homo sapien
gatgctggttggctgggatctgaaaccacaacc

SEQ ID NO: 801237 - DNA, 33 bp, Homo sapien
actgagatgacaattacaggggtctacacattt

SEQ ID NO: 801238 - DNA, 33 bp, Homo sapien
actgagatgacaattataggggtctacacattt

SEQ ID NO: 801239 - DNA, 33 bp, Homo sapien
agataaaaatcacacaagtataactggaaaatg

SEQ ID NO: 801240 - DNA, 33 bp, Homo sapien
agataaaaatcacacacgtataactggaaaatg

SEQ ID NO: 801241 - DNA, 33 bp, Homo sapien
agggagatttgatgctaaagttgctaagtacaa

SEQ ID NO: 801242 - DNA, 33 bp, Homo sapien
agggagatttgatgctgaagttgctaagtacaa

SEQ ID NO: 801243 - DNA, 33 bp, Homo sapien
cacacaaggctctatacagtctacaggaccaca

SEQ ID NO: 801244 - DNA, 33 bp, Homo sapien
cacacaaggctctatatagtctacaggaccaca

SEQ ID NO: 801245 - DNA, 33 bp, Homo sapien
tctaaccagttctcaaaattctaacttctggca

SEQ ID NO: 801246 - DNA, 33 bp, Homo sapien
tctaaccagttctcaagattctaacttctggca

SEQ ID NO: 801247 - DNA, 33 bp, Homo sapien
tgctcccttgaactccagactagaatatccaac

SEQ ID NO: 801248 - DNA, 33 bp, Homo sapien
tgctcccttgaactccggactagaatatccaac

SEQ ID NO: 801249 - DNA, 33 bp, Homo sapien
tccacacttagcccacagcaatatgtttaaatc

SEQ ID NO: 801250 - DNA, 33 bp, Homo sapien
tccacacttagcccacggcaatatgtttaaatc

SEQ ID NO: 801251 - DNA, 33 bp, Homo sapien
gaaagtaatccttttgaaatacatccaggaaga

SEQ ID NO: 801252 - DNA, 33 bp, Homo sapien
gaaagtaatccttttgcaatacatccaggaaga

SEQ ID NO: 801253 - DNA, 33 bp, Homo sapien
aaacagatctccagaaatggatctttgcagtca

SEQ ID NO: 801254 - DNA, 33 bp, Homo sapien
aaacagatctccagaagtggatctttgcagtca

SEQ ID NO: 801255 - DNA, 33 bp, Homo sapien
agtaaggagtagatccagctttcatcctctggt

SEQ ID NO: 801256 - DNA, 33 bp, Homo sapien
agtaaggagtagatccggctttcatcctctggt

SEQ ID NO: 801257 - DNA, 33 bp, Homo sapien
tagtcatcatcaaagacacctggaggcactgtc

SEQ ID NO: 801258 - DNA, 33 bp, Homo sapien
tagtcatcatcaaagatacctggaggcactgtc

SEQ ID NO: 801259 - DNA, 33 bp, Homo sapien
ggtggcgatagatggacacacagaagggcagcc

SEQ ID NO: 801260 - DNA, 33 bp, Homo sapien
ggtggcgatagatggatacacagaagggcagcc

SEQ ID NO: 801261 - DNA, 33 bp, Homo sapien
acctggggtagggctgaactcatcttagaaagc

SEQ ID NO: 801262 - DNA, 33 bp, Homo sapien
acctggggtagggctggactcatcttagaaagc

SEQ ID NO: 801263 - DNA, 33 bp, Homo sapien
cagtcctcagtcaatcaaatagcaatttagttg

SEQ ID NO: 801264 - DNA, 33 bp, Homo sapien
cagtcctcagtcaatcgaatagcaatttagttg

SEQ ID NO: 801265 - DNA, 33 bp, Homo sapien
aacctcacgaataacaactaggattaattgagc

SEQ ID NO: 801266 - DNA, 33 bp, Homo sapien
aacctcacgaataacagctaggattaattgagc

SEQ ID NO: 801267 - DNA, 33 bp, Homo sapien
atctatcccgtgacaacaggattcttcctttcc

SEQ ID NO: 801268 - DNA, 33 bp, Homo sapien
atctatcccgtgacaagaggattcttcctttcc

SEQ ID NO: 801269 - DNA, 33 bp, Homo sapien
ttgaagtactttgatacacaaatggctagctaa

SEQ ID NO: 801270 - DNA, 33 bp, Homo sapien
ttgaagtactttgatatacaaatggctagctaa

SEQ ID NO: 801271 - DNA, 33 bp, Homo sapien
aacatggaactaacccaagcgtccatcaacaga

SEQ ID NO: 801272 - DNA, 33 bp, Homo sapien
aacatggaactaaccccagcgtccatcaacaga

SEQ ID NO: 801273 - DNA, 33 bp, Homo sapien
atgcaaatagcacaagcagaatgtaatgaaagg

SEQ ID NO: 801274 - DNA, 33 bp, Homo sapien
atgcaaatagcacaaggagaatgtaatgaaagg

SEQ ID NO: 801275 - DNA, 33 bp, Homo sapien
gtcttcctactgctcacagaatgttacacattg

SEQ ID NO: 801276 - DNA, 33 bp, Homo sapien
gtcttcctactgctcatagaatgttacacattg

SEQ ID NO: 801277 - DNA, 33 bp, Homo sapien
agaagtcaatgagcaaacaatgcaacatcctta

SEQ ID NO: 801278 - DNA, 33 bp, Homo sapien
agaagtcaatgagcaagcaatgcaacatcctta

SEQ ID NO: 801279 - DNA, 33 bp, Homo sapien
aggctggacaaggtgacgtgaccctgtttctac

SEQ ID NO: 801280 - DNA, 33 bp, Homo sapien
aggctggacaaggtgatgtgaccctgtttctac

SEQ ID NO: 801281 - DNA, 33 bp, Homo sapien
taagcaacatttctaaagtgttaagtcgaaagg

SEQ ID NO: 801282 - DNA, 33 bp, Homo sapien
taagcaacatttctaaggtgttaagtcgaaagg

SEQ ID NO: 801283 - DNA, 33 bp, Homo sapien
agttggagccgtaacacgtaaagtgaagtgatc

SEQ ID NO: 801284 - DNA, 33 bp, Homo sapien
agttggagccgtaacatgtaaagtgaagtgatc

SEQ ID NO: 801285 - DNA, 33 bp, Homo sapien
gaaaggaaatgtctctaaaagcatcatttaaac

SEQ ID NO: 801286 - DNA, 33 bp, Homo sapien
gaaaggaaatgtctcttaaagcatcatttaaac

SEQ ID NO: 801287 - DNA, 33 bp, Homo sapien
taatggtgcatgaaatgagcaatgaacactggg

SEQ ID NO: 801288 - DNA, 33 bp, Homo sapien
taatggtgcatgaaattagcaatgaacactggg

SEQ ID NO: 801289 - DNA, 33 bp, Homo sapien
tgctgctccttttgatgagtgggtactgtgttt

SEQ ID NO: 801290 - DNA, 33 bp, Homo sapien
tgctgctccttttgattagtgggtactgtgttt

SEQ ID NO: 801291 - DNA, 33 bp, Homo sapien
tcctcccttccaaaacacagacttcactgttcc

SEQ ID NO: 801292 - DNA, 33 bp, Homo sapien
tcctcccttccaaaacgcagacttcactgttcc

SEQ ID NO: 801293 - DNA, 33 bp, Homo sapien
acaggctcacagtccaaatataggtgtatgcat

SEQ ID NO: 801294 - DNA, 33 bp, Homo sapien
acaggctcacagtccagatataggtgtatgcat

SEQ ID NO: 801295 - DNA, 33 bp, Homo sapien
agccaagagcctttgacgttaacggtaggtcct

SEQ ID NO: 801296 - DNA, 33 bp, Homo sapien
agccaagagcctttgaggttaacggtaggtcct

SEQ ID NO: 801297 - DNA, 33 bp, Homo sapien
ctgtgtctgacatccaaatatttctagtactga

SEQ ID NO: 801298 - DNA, 33 bp, Homo sapien
ctgtgtctgacatccagatatttctagtactga

SEQ ID NO: 801299 - DNA, 33 bp, Homo sapien
gctgcctgtctcctggaaacttggaaatgttaa

SEQ ID NO: 801300 - DNA, 33 bp, Homo sapien
gctgcctgtctcctggcaacttggaaatgttaa

SEQ ID NO: 801301 - DNA, 33 bp, Homo sapien
gaccgaggtgtactaacgtgaagtagagctcca

SEQ ID NO: 801302 - DNA, 33 bp, Homo sapien
gaccgaggtgtactaatgtgaagtagagctcca

SEQ ID NO: 801303 - DNA, 33 bp, Homo sapien
cacctctaaaccataccgctacaaagaactcta

SEQ ID NO: 801304 - DNA, 33 bp, Homo sapien
cacctctaaaccatactgctacaaagaactcta

SEQ ID NO: 801305 - DNA, 33 bp, Homo sapien
ttagctctgattaatcacataactcttcagaat

SEQ ID NO: 801306 - DNA, 33 bp, Homo sapien
ttagctctgattaatctcataactcttcagaat

SEQ ID NO: 801307 - DNA, 33 bp, Homo sapien
tatgaagtttaaatacccccatctaacattcca

SEQ ID NO: 801308 - DNA, 33 bp, Homo sapien
tatgaagtttaaatacgcccatctaacattcca

SEQ ID NO: 801309 - DNA, 33 bp, Homo sapien
ccttattctgctgatacgaagtaagaatactag

SEQ ID NO: 801310 - DNA, 33 bp, Homo sapien
ccttattctgctgatatgaagtaagaatactag

SEQ ID NO: 801311 - DNA, 33 bp, Homo sapien
ctcttgaatataacaaacattttttcaagcata

SEQ ID NO: 801312 - DNA, 33 bp, Homo sapien
ctcttgaatataacaagcattttttcaagcata

SEQ ID NO: 801313 - DNA, 33 bp, Homo sapien
aacgtgtacaggtatacgcaaaagggaaaagga

SEQ ID NO: 801314 - DNA, 33 bp, Homo sapien
aacgtgtacaggtatatgcaaaagggaaaagga

SEQ ID NO: 801315 - DNA, 33 bp, Homo sapien
tggttgggtagattaacaattattttgtcttta

SEQ ID NO: 801316 - DNA, 33 bp, Homo sapien
tggttgggtagattaagaattattttgtcttta

SEQ ID NO: 801317 - DNA, 33 bp, Homo sapien
aaagctcatggccacaatattttcctcttcaga

SEQ ID NO: 801318 - DNA, 33 bp, Homo sapien
aaagctcatggccacagtattttcctcttcaga

SEQ ID NO: 801319 - DNA, 33 bp, Homo sapien
tacaaagatagtatacagcaagtcttgtaatgt

SEQ ID NO: 801320 - DNA, 33 bp, Homo sapien
tacaaagatagtatacggcaagtcttgtaatgt

SEQ ID NO: 801321 - DNA, 33 bp, Homo sapien
ctcaagccaaagaagacgtgaggggagaggcaa

SEQ ID NO: 801322 - DNA, 33 bp, Homo sapien
ctcaagccaaagaagatgtgaggggagaggcaa

SEQ ID NO: 801323 - DNA, 33 bp, Homo sapien
caccttcaacattggagaccacaattcaacatg

SEQ ID NO: 801324 - DNA, 33 bp, Homo sapien
caccttcaacattggataccacaattcaacatg

SEQ ID NO: 801325 - DNA, 33 bp, Homo sapien
acagataaataaactgcagctgagagaagtgaa

SEQ ID NO: 801326 - DNA, 33 bp, Homo sapien
acagataaataaactgtagctgagagaagtgaa

SEQ ID NO: 801327 - DNA, 33 bp, Homo sapien
atttttctgacggttacatcaggccagcagtgt

SEQ ID NO: 801328 - DNA, 33 bp, Homo sapien
atttttctgacggttatatcaggccagcagtgt

SEQ ID NO: 801329 - DNA, 33 bp, Homo sapien
gatatgaaacaagtaaacagataaacacatgat

SEQ ID NO: 801330 - DNA, 33 bp, Homo sapien
gatatgaaacaagtaaccagataaacacatgat

SEQ ID NO: 801331 - DNA, 33 bp, Homo sapien
atagggaatgttccaaatgtcacccaactgagt

SEQ ID NO: 801332 - DNA, 33 bp, Homo sapien
atagggaatgttccaagtgtcacccaactgagt

SEQ ID NO: 801333 - DNA, 33 bp, Homo sapien
accctcgcttcagtcacgggttgtggtcttaga

SEQ ID NO: 801334 - DNA, 33 bp, Homo sapien
accctcgcttcagtcatgggttgtggtcttaga

SEQ ID NO: 801335 - DNA, 33 bp, Homo sapien
ttgctctcccagcctgacaaaaaagaagtacgt

SEQ ID NO: 801336 - DNA, 33 bp, Homo sapien
ttgctctcccagcctggcaaaaaagaagtacgt

SEQ ID NO: 801337 - DNA, 33 bp, Homo sapien
atagtattgctcctccaagagctggctttatac

SEQ ID NO: 801338 - DNA, 33 bp, Homo sapien
atagtattgctcctccgagagctggctttatac

SEQ ID NO: 801339 - DNA, 33 bp, Homo sapien
gccagcaaatttataccctctgtggctttgttt

SEQ ID NO: 801340 - DNA, 33 bp, Homo sapien
gccagcaaatttatactctctgtggctttgttt

SEQ ID NO: 801341 - DNA, 33 bp, Homo sapien
ccaatgggtgcgaacacacgattagatagaagg

SEQ ID NO: 801342 - DNA, 33 bp, Homo sapien
ccaatgggtgcgaacatacgattagatagaagg

SEQ ID NO: 801343 - DNA, 33 bp, Homo sapien
ttagtttgcttagtcacggctcaagtgggttgc

SEQ ID NO: 801344 - DNA, 33 bp, Homo sapien
ttagtttgcttagtcatggctcaagtgggttgc

SEQ ID NO: 801345 - DNA, 33 bp, Homo sapien
aggaagtaggtccaaactgtaggaaggctgcct

SEQ ID NO: 801346 - DNA, 33 bp, Homo sapien
aggaagtaggtccaaattgtaggaaggctgcct

SEQ ID NO: 801347 - DNA, 33 bp, Homo sapien
gcactgggctggccacacatttgacaggtctgc

SEQ ID NO: 801348 - DNA, 33 bp, Homo sapien
gcactgggctggccacgcatttgacaggtctgc

SEQ ID NO: 801349 - DNA, 33 bp, Homo sapien
ttaaaaggctcaaggcaatgagtgtgccaaaat

SEQ ID NO: 801350 - DNA, 33 bp, Homo sapien
ttaaaaggctcaaggcgatgagtgtgccaaaat

SEQ ID NO: 801351 - DNA, 33 bp, Homo sapien
cagaccctgtgtccaacggtcctcaaatgtcta

SEQ ID NO: 801352 - DNA, 33 bp, Homo sapien
cagaccctgtgtccaatggtcctcaaatgtcta

SEQ ID NO: 801353 - DNA, 33 bp, Homo sapien
caaatggagtcctgaccaagatgcagcttacag

SEQ ID NO: 801354 - DNA, 33 bp, Homo sapien
caaatggagtcctgacgaagatgcagcttacag

SEQ ID NO: 801355 - DNA, 33 bp, Homo sapien
acactagggggcattcaaagacactggtcttat

SEQ ID NO: 801356 - DNA, 33 bp, Homo sapien
acactagggggcattcgaagacactggtcttat

SEQ ID NO: 801357 - DNA, 33 bp, Homo sapien
atatcaccactcccaaatggacgggagccagaa

SEQ ID NO: 801358 - DNA, 33 bp, Homo sapien
atatcaccactcccaactggacgggagccagaa

SEQ ID NO: 801359 - DNA, 33 bp, Homo sapien
agaccgtggataagacagagagactactgtacc

SEQ ID NO: 801360 - DNA, 33 bp, Homo sapien
agaccgtggataagacggagagactactgtacc

SEQ ID NO: 801361 - DNA, 33 bp, Homo sapien
ataatctggtgactaacgtggcctctggagagg

SEQ ID NO: 801362 - DNA, 33 bp, Homo sapien
ataatctggtgactaatgtggcctctggagagg

SEQ ID NO: 801363 - DNA, 33 bp, Homo sapien
gttcctaattatggtaactctcagagcctggca

SEQ ID NO: 801364 - DNA, 33 bp, Homo sapien
gttcctaattatggtatctctcagagcctggca

SEQ ID NO: 801365 - DNA, 33 bp, Homo sapien
tgaagcactttgacaacaaacaaatatggtaac

SEQ ID NO: 801366 - DNA, 33 bp, Homo sapien
tgaagcactttgacaataaacaaatatggtaac

SEQ ID NO: 801367 - DNA, 33 bp, Homo sapien
atccttcctccgcaaagaatgacagttttattc

SEQ ID NO: 801368 - DNA, 33 bp, Homo sapien
atccttcctccgcaaataatgacagttttattc

SEQ ID NO: 801369 - DNA, 33 bp, Homo sapien
tgcaggtccagtaagaaaacattaagaaacact

SEQ ID NO: 801370 - DNA, 33 bp, Homo sapien
tgcaggtccagtaagagaacattaagaaacact

SEQ ID NO: 801371 - DNA, 33 bp, Homo sapien
tggaaggagccttagcaatgatttagaccaggg

SEQ ID NO: 801372 - DNA, 33 bp, Homo sapien
tggaaggagccttagcgatgatttagaccaggg

SEQ ID NO: 801373 - DNA, 33 bp, Homo sapien
tgataggcaaggtacccactctttctggactca

SEQ ID NO: 801374 - DNA, 33 bp, Homo sapien
tgataggcaaggtaccgactctttctggactca

SEQ ID NO: 801375 - DNA, 33 bp, Homo sapien
aataagaaaaatggaggacctatccaggagatt

SEQ ID NO: 801376 - DNA, 33 bp, Homo sapien
aataagaaaaatggagtacctatccaggagatt

SEQ ID NO: 801377 - DNA, 33 bp, Homo sapien
tgttacttatcgaacaaatttcaagtgtcatgt

SEQ ID NO: 801378 - DNA, 33 bp, Homo sapien
tgttacttatcgaacacatttcaagtgtcatgt

SEQ ID NO: 801379 - DNA, 33 bp, Homo sapien
tgcaaggcactgccacaatgcttctctgttgaa

SEQ ID NO: 801380 - DNA, 33 bp, Homo sapien
tgcaaggcactgccacgatgcttctctgttgaa

SEQ ID NO: 801381 - DNA, 33 bp, Homo sapien
gcaatcacataagagaacgaaaacattcctgga

SEQ ID NO: 801382 - DNA, 33 bp, Homo sapien
gcaatcacataagagaccgaaaacattcctgga

SEQ ID NO: 801383 - DNA, 33 bp, Homo sapien
tagcagtactgaccacccaccttgcctagtcag

SEQ ID NO: 801384 - DNA, 33 bp, Homo sapien
tagcagtactgaccactcaccttgcctagtcag

SEQ ID NO: 801385 - DNA, 33 bp, Homo sapien
cagtgatagggatgtacgaggagtaggtcctat

SEQ ID NO: 801386 - DNA, 33 bp, Homo sapien
cagtgatagggatgtatgaggagtaggtcctat

SEQ ID NO: 801387 - DNA, 33 bp, Homo sapien
cagattctggcacaaacctggtctttagggaat

SEQ ID NO: 801388 - DNA, 33 bp, Homo sapien
cagattctggcacaaagctggtctttagggaat

SEQ ID NO: 801389 - DNA, 33 bp, Homo sapien
ctataaatggtgagagcaccttgtttgccgggg

SEQ ID NO: 801390 - DNA, 33 bp, Homo sapien
ctataaatggtgagagtaccttgtttgccgggg

SEQ ID NO: 801391 - DNA, 33 bp, Homo sapien
aggctgtagtaaagtacgattgtatcactgtac

SEQ ID NO: 801392 - DNA, 33 bp, Homo sapien
aggctgtagtaaagtatgattgtatcactgtac

SEQ ID NO: 801393 - DNA, 33 bp, Homo sapien
cagtgattaaagagtacgtttgtattagagata

SEQ ID NO: 801394 - DNA, 33 bp, Homo sapien
cagtgattaaagagtatgtttgtattagagata

SEQ ID NO: 801395 - DNA, 33 bp, Homo sapien
tgctgtgcaaagtcacaatctaatcttccaact

SEQ ID NO: 801396 - DNA, 33 bp, Homo sapien
tgctgtgcaaagtcactatctaatcttccaact

SEQ ID NO: 801397 - DNA, 33 bp, Homo sapien
atggagctctaggtaacgtgtttttttgtttgt

SEQ ID NO: 801398 - DNA, 33 bp, Homo sapien
atggagctctaggtaatgtgtttttttgtttgt

SEQ ID NO: 801399 - DNA, 33 bp, Homo sapien
caggtaaatttctctccattggcttccctccca

SEQ ID NO: 801400 - DNA, 33 bp, Homo sapien
caggtaaatttctctcgattggcttccctccca

SEQ ID NO: 801401 - DNA, 33 bp, Homo sapien
atggatgttcagtacccggagaaaagaagccat

SEQ ID NO: 801402 - DNA, 33 bp, Homo sapien
atggatgttcagtacctggagaaaagaagccat

SEQ ID NO: 801403 - DNA, 33 bp, Homo sapien
atggggccagagggataaagataagaggggcac

SEQ ID NO: 801404 - DNA, 33 bp, Homo sapien
atggggccagagggatgaagataagaggggcac

SEQ ID NO: 801405 - DNA, 33 bp, Homo sapien
caaagtacagagagcaaaggaggggggcacagc

SEQ ID NO: 801406 - DNA, 33 bp, Homo sapien
caaagtacagagagcagaggaggggggcacagc

SEQ ID NO: 801407 - DNA, 33 bp, Homo sapien
agacagagtttggaaaagtttctctagtaagcg

SEQ ID NO: 801408 - DNA, 33 bp, Homo sapien
agacagagtttggaaatgtttctctagtaagcg

SEQ ID NO: 801409 - DNA, 33 bp, Homo sapien
ggcttatatttacacacgctccataatgagcac

SEQ ID NO: 801410 - DNA, 33 bp, Homo sapien
ggcttatatttacacatgctccataatgagcac

SEQ ID NO: 801411 - DNA, 33 bp, Homo sapien
caagttctagtcttatcaaaacttggcaaatca

SEQ ID NO: 801412 - DNA, 33 bp, Homo sapien
caagttctagtcttatgaaaacttggcaaatca

SEQ ID NO: 801413 - DNA, 33 bp, Homo sapien
gtggaggaaggtgataagtttaatactggaaaa

SEQ ID NO: 801414 - DNA, 33 bp, Homo sapien
gtggaggaaggtgatatgtttaatactggaaaa

SEQ ID NO: 801415 - DNA, 33 bp, Homo sapien
cttaatattagtagcaaaggtaggattcaaatg

SEQ ID NO: 801416 - DNA, 33 bp, Homo sapien
cttaatattagtagcagaggtaggattcaaatg

SEQ ID NO: 801417 - DNA, 33 bp, Homo sapien
cttgatttttacgcaacggctgaggctctcatt

SEQ ID NO: 801418 - DNA, 33 bp, Homo sapien
cttgatttttacgcaagggctgaggctctcatt

SEQ ID NO: 801419 - DNA, 33 bp, Homo sapien
tgaggagcaggagttacctgtactggagtttga

SEQ ID NO: 801420 - DNA, 33 bp, Homo sapien
tgaggagcaggagttagctgtactggagtttga

SEQ ID NO: 801421 - DNA, 33 bp, Homo sapien
aattactctttatctgaaattccaattcggtat

SEQ ID NO: 801422 - DNA, 33 bp, Homo sapien
aattactctttatctggaattccaattcggtat

SEQ ID NO: 801423 - DNA, 33 bp, Homo sapien
ttgtgtgagggggcataatgattctctgaatcc

SEQ ID NO: 801424 - DNA, 33 bp, Homo sapien
ttgtgtgagggggcatcatgattctctgaatcc

SEQ ID NO: 801425 - DNA, 33 bp, Homo sapien
taatcctgactccttactaaacgggatgggagg

SEQ ID NO: 801426 - DNA, 33 bp, Homo sapien
taatcctgactccttattaaacgggatgggagg

SEQ ID NO: 801427 - DNA, 33 bp, Homo sapien
taaggcagaggatttacaggagaatatggccca

SEQ ID NO: 801428 - DNA, 33 bp, Homo sapien
taaggcagaggatttataggagaatatggccca

SEQ ID NO: 801429 - DNA, 33 bp, Homo sapien
gccagagtctttaaaacggccttatgaagctcg

SEQ ID NO: 801430 - DNA, 33 bp, Homo sapien
gccagagtctttaaaatggccttatgaagctcg

SEQ ID NO: 801431 - DNA, 33 bp, Homo sapien
gagaaagtattctaggcaaagggaacaacaaat

SEQ ID NO: 801432 - DNA, 33 bp, Homo sapien
gagaaagtattctaggtaaagggaacaacaaat

SEQ ID NO: 801433 - DNA, 33 bp, Homo sapien
aagcaaaatactagtaagtcagatggcaacaag

SEQ ID NO: 801434 - DNA, 33 bp, Homo sapien
aagcaaaatactagtatgtcagatggcaacaag

SEQ ID NO: 801435 - DNA, 33 bp, Homo sapien
ctactacagcatcctcaccattccctccatagc

SEQ ID NO: 801436 - DNA, 33 bp, Homo sapien
ctactacagcatcctcgccattccctccatagc

SEQ ID NO: 801437 - DNA, 33 bp, Homo sapien
agcaccccattagttgaaaaactgtactctcca

SEQ ID NO: 801438 - DNA, 33 bp, Homo sapien
agcaccccattagttggaaaactgtactctcca

SEQ ID NO: 801439 - DNA, 33 bp, Homo sapien
tggctctggcacaaatcagagagacctgtgttt

SEQ ID NO: 801440 - DNA, 33 bp, Homo sapien
tggctctggcacaaattagagagacctgtgttt

SEQ ID NO: 801441 - DNA, 33 bp, Homo sapien
attcttttaatttcacacagatgtttcttctga

SEQ ID NO: 801442 - DNA, 33 bp, Homo sapien
attcttttaatttcacgcagatgtttcttctga

SEQ ID NO: 801443 - DNA, 33 bp, Homo sapien
ccctttattctgtggacaaggtgaaaagagtgg

SEQ ID NO: 801444 - DNA, 33 bp, Homo sapien
ccctttattctgtggataaggtgaaaagagtgg

SEQ ID NO: 801445 - DNA, 33 bp, Homo sapien
tgcttaaacttggcacgaaaggaaatgtctcct

SEQ ID NO: 801446 - DNA, 33 bp, Homo sapien
tgcttaaacttggcactaaaggaaatgtctcct

SEQ ID NO: 801447 - DNA, 33 bp, Homo sapien
agaggaagggtacggacagttacaaggagagtg

SEQ ID NO: 801448 - DNA, 33 bp, Homo sapien
agaggaagggtacggatagttacaaggagagtg

SEQ ID NO: 801449 - DNA, 33 bp, Homo sapien
tcaagcatattaaggaacaaagggctgaatatg

SEQ ID NO: 801450 - DNA, 33 bp, Homo sapien
tcaagcatattaaggatcaaagggctgaatatg

SEQ ID NO: 801451 - DNA, 33 bp, Homo sapien
atatgcttgatttggaaaaggggaagtggttca

SEQ ID NO: 801452 - DNA, 33 bp, Homo sapien
atatgcttgatttggagaaggggaagtggttca

SEQ ID NO: 801453 - DNA, 33 bp, Homo sapien
tagacagctctcagcaccttgaaagtggttata

SEQ ID NO: 801454 - DNA, 33 bp, Homo sapien
tagacagctctcagcatcttgaaagtggttata

SEQ ID NO: 801455 - DNA, 33 bp, Homo sapien
agtgtatacctttccagatctttcttccatgca

SEQ ID NO: 801456 - DNA, 33 bp, Homo sapien
agtgtatacctttccatatctttcttccatgca

SEQ ID NO: 801457 - DNA, 33 bp, Homo sapien
tgctttctggaggaccaaagctaagatgtttat

SEQ ID NO: 801458 - DNA, 33 bp, Homo sapien
tgctttctggaggaccgaagctaagatgtttat

SEQ ID NO: 801459 - DNA, 33 bp, Homo sapien
tgctggctatcatttcaaaataagccatgaagg

SEQ ID NO: 801460 - DNA, 33 bp, Homo sapien
tgctggctatcatttccaaataagccatgaagg

SEQ ID NO: 801461 - DNA, 33 bp, Homo sapien
tagattcttaagtgcccataggtaatgtggaat

SEQ ID NO: 801462 - DNA, 33 bp, Homo sapien
tagattcttaagtgcctataggtaatgtggaat

SEQ ID NO: 801463 - DNA, 33 bp, Homo sapien
gattcttgtgagagcgaaaccctgttgtgaact

SEQ ID NO: 801464 - DNA, 33 bp, Homo sapien
gattcttgtgagagcggaaccctgttgtgaact

SEQ ID NO: 801465 - DNA, 33 bp, Homo sapien
tctgattattagcaacagtaacacacaaagagg

SEQ ID NO: 801466 - DNA, 33 bp, Homo sapien
tctgattattagcaacggtaacacacaaagagg

SEQ ID NO: 801467 - DNA, 33 bp, Homo sapien
aaaagagaattttgtacaagtctccagcctgct

SEQ ID NO: 801468 - DNA, 33 bp, Homo sapien
aaaagagaattttgtataagtctccagcctgct

SEQ ID NO: 801469 - DNA, 33 bp, Homo sapien
ccatgatttgtaaaccacttgaggacagggaac

SEQ ID NO: 801470 - DNA, 33 bp, Homo sapien
ccatgatttgtaaaccgcttgaggacagggaac

SEQ ID NO: 801471 - DNA, 33 bp, Homo sapien
ctcatggagctcacagccagttggtagagggaa

SEQ ID NO: 801472 - DNA, 33 bp, Homo sapien
ctcatggagctcacaggcagttggtagagggaa

SEQ ID NO: 801473 - DNA, 33 bp, Homo sapien
cagattcctggcaaaacaaggcctgcagttaga

SEQ ID NO: 801474 - DNA, 33 bp, Homo sapien
cagattcctggcaaaataaggcctgcagttaga

SEQ ID NO: 801475 - DNA, 33 bp, Homo sapien
gtttcagtcccacaacaatcttgcagagtagag

SEQ ID NO: 801476 - DNA, 33 bp, Homo sapien
gtttcagtcccacaacgatcttgcagagtagag

SEQ ID NO: 801477 - DNA, 33 bp, Homo sapien
ccaggatatgaattgaacatcagagtatttatg

SEQ ID NO: 801478 - DNA, 33 bp, Homo sapien
ccaggatatgaattgatcatcagagtatttatg

SEQ ID NO: 801479 - DNA, 33 bp, Homo sapien
ctagttatcccaggaaggcctaatgtcaaatag

SEQ ID NO: 801480 - DNA, 33 bp, Homo sapien
ctagttatcccaggaatgcctaatgtcaaatag

SEQ ID NO: 801481 - DNA, 33 bp, Homo sapien
cttcaggtttcttttacgggggacatctgccat

SEQ ID NO: 801482 - DNA, 33 bp, Homo sapien
cttcaggtttcttttatgggggacatctgccat

SEQ ID NO: 801483 - DNA, 33 bp, Homo sapien
ttaactgctttttgcacacagtgattgttaata

SEQ ID NO: 801484 - DNA, 33 bp, Homo sapien
ttaactgctttttgcagacagtgattgttaata

SEQ ID NO: 801485 - DNA, 33 bp, Homo sapien
ttctttccattgttcacaattatctttctagat

SEQ ID NO: 801486 - DNA, 33 bp, Homo sapien
ttctttccattgttcataattatctttctagat

SEQ ID NO: 801487 - DNA, 33 bp, Homo sapien
ttataaacagaatccaagactccttccaagtga

SEQ ID NO: 801488 - DNA, 33 bp, Homo sapien
ttataaacagaatccaggactccttccaagtga

SEQ ID NO: 801489 - DNA, 33 bp, Homo sapien
gtgtctgccacccactaacggtcagtattgatt

SEQ ID NO: 801490 - DNA, 33 bp, Homo sapien
gtgtctgccacccactgacggtcagtattgatt

SEQ ID NO: 801491 - DNA, 33 bp, Homo sapien
tgtgtataagccaccacgatttttcctacagaa

SEQ ID NO: 801492 - DNA, 33 bp, Homo sapien
tgtgtataagccaccatgatttttcctacagaa

SEQ ID NO: 801493 - DNA, 33 bp, Homo sapien
caccgtcctaggcacaagggataacagtctaat

SEQ ID NO: 801494 - DNA, 33 bp, Homo sapien
caccgtcctaggcacaggggataacagtctaat

SEQ ID NO: 801495 - DNA, 33 bp, Homo sapien
gagtgctgaaggataaataggcgtttgccaggt

SEQ ID NO: 801496 - DNA, 33 bp, Homo sapien
gagtgctgaaggataagtaggcgtttgccaggt

SEQ ID NO: 801497 - DNA, 33 bp, Homo sapien
aagcctcagaataacaatcctattgctgtgtct

SEQ ID NO: 801498 - DNA, 33 bp, Homo sapien
aagcctcagaataacagtcctattgctgtgtct

SEQ ID NO: 801499 - DNA, 33 bp, Homo sapien
ccttgacaaatattaacataaccattagcctct

SEQ ID NO: 801500 - DNA, 33 bp, Homo sapien
ccttgacaaatattaagataaccattagcctct

SEQ ID NO: 801501 - DNA, 33 bp, Homo sapien
caagtgcttttccaccaccagttctgctttccc

SEQ ID NO: 801502 - DNA, 33 bp, Homo sapien
caagtgcttttccaccgccagttctgctttccc

SEQ ID NO: 801503 - DNA, 33 bp, Homo sapien
aacagtttactgcaacaaaactttgagttccag

SEQ ID NO: 801504 - DNA, 33 bp, Homo sapien
aacagtttactgcaacgaaactttgagttccag

SEQ ID NO: 801505 - DNA, 33 bp, Homo sapien
ccattggaattcagtgaatcatctatctatgca

SEQ ID NO: 801506 - DNA, 33 bp, Homo sapien
ccattggaattcagtggatcatctatctatgca

SEQ ID NO: 801507 - DNA, 33 bp, Homo sapien
tgagtgaggatggctacgctctatatgtcacaa

SEQ ID NO: 801508 - DNA, 33 bp, Homo sapien
tgagtgaggatggctatgctctatatgtcacaa

SEQ ID NO: 801509 - DNA, 33 bp, Homo sapien
cactcaaattgctcaacagagacctccaagtgg

SEQ ID NO: 801510 - DNA, 33 bp, Homo sapien
cactcaaattgctcaatagagacctccaagtgg

SEQ ID NO: 801511 - DNA, 33 bp, Homo sapien
tgcctggcgacaggaccaaagtgagagcctggg

SEQ ID NO: 801512 - DNA, 33 bp, Homo sapien
tgcctggcgacaggacgaaagtgagagcctggg

SEQ ID NO: 801513 - DNA, 33 bp, Homo sapien
tgagaaagagagaaaacggccttttgagggatt

SEQ ID NO: 801514 - DNA, 33 bp, Homo sapien
tgagaaagagagaaaatggccttttgagggatt

SEQ ID NO: 801515 - DNA, 33 bp, Homo sapien
taattcttgttcaacactcttatcccaatctct

SEQ ID NO: 801516 - DNA, 33 bp, Homo sapien
taattcttgttcaacattcttatcccaatctct

SEQ ID NO: 801517 - DNA, 33 bp, Homo sapien
gcaagtatgagaaactcaatcttcctgcttttg

SEQ ID NO: 801518 - DNA, 33 bp, Homo sapien
gcaagtatgagaaactgaatcttcctgcttttg

SEQ ID NO: 801519 - DNA, 33 bp, Homo sapien
cagactttagtatcacacatacctaagttttaa

SEQ ID NO: 801520 - DNA, 33 bp, Homo sapien
cagactttagtatcacgcatacctaagttttaa

SEQ ID NO: 801521 - DNA, 33 bp, Homo sapien
ggtttccagaactctacagtgaccctgaagttg

SEQ ID NO: 801522 - DNA, 33 bp, Homo sapien
ggtttccagaactctatagtgaccctgaagttg

SEQ ID NO: 801523 - DNA, 33 bp, Homo sapien
ggagtcattgcattccactgaaaagtcctccag

SEQ ID NO: 801524 - DNA, 33 bp, Homo sapien
ggagtcattgcattcctctgaaaagtcctccag

SEQ ID NO: 801525 - DNA, 33 bp, Homo sapien
ctttaacctactcacactggccagaactcagtc

SEQ ID NO: 801526 - DNA, 33 bp, Homo sapien
ctttaacctactcacattggccagaactcagtc

SEQ ID NO: 801527 - DNA, 33 bp, Homo sapien
gtgaggtgatgtgtgcgacctggcagtctcttc

SEQ ID NO: 801528 - DNA, 33 bp, Homo sapien
gtgaggtgatgtgtgctacctggcagtctcttc

SEQ ID NO: 801529 - DNA, 33 bp, Homo sapien
aggtacttaatagatacgaaggaacaagtgaat

SEQ ID NO: 801530 - DNA, 33 bp, Homo sapien
aggtacttaatagatatgaaggaacaagtgaat

SEQ ID NO: 801531 - DNA, 33 bp, Homo sapien
taacaaggatgccagcaagattggattcgggcc

SEQ ID NO: 801532 - DNA, 33 bp, Homo sapien
taacaaggatgccagcgagattggattcgggcc

SEQ ID NO: 801533 - DNA, 33 bp, Homo sapien
taggttcaacaaattacaggcagttgggtagaa

SEQ ID NO: 801534 - DNA, 33 bp, Homo sapien
taggttcaacaaattataggcagttgggtagaa

SEQ ID NO: 801535 - DNA, 33 bp, Homo sapien
taaccatgactctaacggcaacaaaaaacaaac

SEQ ID NO: 801536 - DNA, 33 bp, Homo sapien
taaccatgactctaactgcaacaaaaaacaaac

SEQ ID NO: 801537 - DNA, 33 bp, Homo sapien
aggtggcagaaaattgaatcttgcagccttgaa

SEQ ID NO: 801538 - DNA, 33 bp, Homo sapien
aggtggcagaaaattggatcttgcagccttgaa

SEQ ID NO: 801539 - DNA, 33 bp, Homo sapien
gcaaaatttatcctaaacatgaaacatatccta

SEQ ID NO: 801540 - DNA, 33 bp, Homo sapien
gcaaaatttatcctaagcatgaaacatatccta

SEQ ID NO: 801541 - DNA, 33 bp, Homo sapien
agacagcttaaaccaacgactgcgggttttgaa

SEQ ID NO: 801542 - DNA, 33 bp, Homo sapien
agacagcttaaaccaatgactgcgggttttgaa

SEQ ID NO: 801543 - DNA, 33 bp, Homo sapien
agtattctctcaaaacactcaaatgtattatca

SEQ ID NO: 801544 - DNA, 33 bp, Homo sapien
agtattctctcaaaactctcaaatgtattatca

SEQ ID NO: 801545 - DNA, 33 bp, Homo sapien
accaagccagctacacaagccgctcagcctggg

SEQ ID NO: 801546 - DNA, 33 bp, Homo sapien
accaagccagctacacgagccgctcagcctggg

SEQ ID NO: 801547 - DNA, 33 bp, Homo sapien
atggctgtgctagcccccaactcactgttcaca

SEQ ID NO: 801548 - DNA, 33 bp, Homo sapien
atggctgtgctagcccgcaactcactgttcaca

SEQ ID NO: 801549 - DNA, 33 bp, Homo sapien
ctccccaaacccttcacatccacaactgaaaac

SEQ ID NO: 801550 - DNA, 33 bp, Homo sapien
ctccccaaacccttcagatccacaactgaaaac

SEQ ID NO: 801551 - DNA, 33 bp, Homo sapien
catggaacatggagcaaaagaaatagaaagcaa

SEQ ID NO: 801552 - DNA, 33 bp, Homo sapien
catggaacatggagcagaagaaatagaaagcaa

SEQ ID NO: 801553 - DNA, 33 bp, Homo sapien
tttccgttggcatggacctctctttgccaacaa

SEQ ID NO: 801554 - DNA, 33 bp, Homo sapien
tttccgttggcatggatctctctttgccaacaa

SEQ ID NO: 801555 - DNA, 33 bp, Homo sapien
aaggtttcagttagacaaaatgaataggttcta

SEQ ID NO: 801556 - DNA, 33 bp, Homo sapien
aaggtttcagttagacgaaatgaataggttcta

SEQ ID NO: 801557 - DNA, 33 bp, Homo sapien
ggttatagcccaaataataagacctggcttcag

SEQ ID NO: 801558 - DNA, 33 bp, Homo sapien
ggttatagcccaaatactaagacctggcttcag

SEQ ID NO: 801559 - DNA, 33 bp, Homo sapien
cacggcctcaggccaccgcaatcaggtgtggga

SEQ ID NO: 801560 - DNA, 33 bp, Homo sapien
cacggcctcaggccactgcaatcaggtgtggga

SEQ ID NO: 801561 - DNA, 33 bp, Homo sapien
cagagaagccagggcaagatactaagcaagaga

SEQ ID NO: 801562 - DNA, 33 bp, Homo sapien
cagagaagccagggcaggatactaagcaagaga

SEQ ID NO: 801563 - DNA, 33 bp, Homo sapien
gcctgtttcactataacaaggatggcgaccatg

SEQ ID NO: 801564 - DNA, 33 bp, Homo sapien
gcctgtttcactataataaggatggcgaccatg

SEQ ID NO: 801565 - DNA, 33 bp, Homo sapien
aaaacacaatggagcacctaactgcaggaaaaa

SEQ ID NO: 801566 - DNA, 33 bp, Homo sapien
aaaacacaatggagcatctaactgcaggaaaaa

SEQ ID NO: 801567 - DNA, 33 bp, Homo sapien
atgacagtatgttgaacgcaaattgattgagtc

SEQ ID NO: 801568 - DNA, 33 bp, Homo sapien
atgacagtatgttgaatgcaaattgattgagtc

SEQ ID NO: 801569 - DNA, 33 bp, Homo sapien
cagttccatcatcagtgaaaaggattaagaggg

SEQ ID NO: 801570 - DNA, 33 bp, Homo sapien
cagttccatcatcagttaaaaggattaagaggg

SEQ ID NO: 801571 - DNA, 33 bp, Homo sapien
ccaatgcacgactcccaattagtcaccagaagc

SEQ ID NO: 801572 - DNA, 33 bp, Homo sapien
ccaatgcacgactcccgattagtcaccagaagc

SEQ ID NO: 801573 - DNA, 33 bp, Homo sapien
ctgtagatgttcccaaaaaatgattaaagaaga

SEQ ID NO: 801574 - DNA, 33 bp, Homo sapien
ctgtagatgttcccaacaaatgattaaagaaga

SEQ ID NO: 801575 - DNA, 33 bp, Homo sapien
atatctaaagtctatactacatgccagcactgc

SEQ ID NO: 801576 - DNA, 33 bp, Homo sapien
atatctaaagtctatagtacatgccagcactgc

SEQ ID NO: 801577 - DNA, 33 bp, Homo sapien
gaatggtttctttcaactgagagttatttccaa

SEQ ID NO: 801578 - DNA, 33 bp, Homo sapien
gaatggtttctttcaattgagagttatttccaa

SEQ ID NO: 801579 - DNA, 33 bp, Homo sapien
tataacttaaataccaacttatcaccaaaggca

SEQ ID NO: 801580 - DNA, 33 bp, Homo sapien
tataacttaaataccaccttatcaccaaaggca

SEQ ID NO: 801581 - DNA, 33 bp, Homo sapien
accagttgaaatctgccgatccgtcagacctca

SEQ ID NO: 801582 - DNA, 33 bp, Homo sapien
accagttgaaatctgctgatccgtcagacctca

SEQ ID NO: 801583 - DNA, 33 bp, Homo sapien
agactaaccccgtagaaagccagattcctaggt

SEQ ID NO: 801584 - DNA, 33 bp, Homo sapien
agactaaccccgtagagagccagattcctaggt

SEQ ID NO: 801585 - DNA, 33 bp, Homo sapien
cccttatgaagccaccaaatcaaaattgtgggg

SEQ ID NO: 801586 - DNA, 33 bp, Homo sapien
cccttatgaagccaccgaatcaaaattgtgggg

SEQ ID NO: 801587 - DNA, 33 bp, Homo sapien
atggtttaaacccagccaaaggtgagcttcttg

SEQ ID NO: 801588 - DNA, 33 bp, Homo sapien
atggtttaaacccagctaaaggtgagcttcttg

SEQ ID NO: 801589 - DNA, 33 bp, Homo sapien
gttaggatgcgaaaggaaaaatctcacctctgg

SEQ ID NO: 801590 - DNA, 33 bp, Homo sapien
gttaggatgcgaaagggaaaatctcacctctgg

SEQ ID NO: 801591 - DNA, 33 bp, Homo sapien
tctgtgaaacctcaaaaggtagcaatcagctaa

SEQ ID NO: 801592 - DNA, 33 bp, Homo sapien
tctgtgaaacctcaaagggtagcaatcagctaa

SEQ ID NO: 801593 - DNA, 33 bp, Homo sapien
gaaggcagaatcaacacattgagagcctagctc

SEQ ID NO: 801594 - DNA, 33 bp, Homo sapien
gaaggcagaatcaacatattgagagcctagctc

SEQ ID NO: 801595 - DNA, 33 bp, Homo sapien
attaataggtacacttaaagaatgatgccacag

SEQ ID NO: 801596 - DNA, 33 bp, Homo sapien
attaataggtacacttgaagaatgatgccacag

SEQ ID NO: 801597 - DNA, 33 bp, Homo sapien
caatgcagggttaccacgaacctccaatttgta

SEQ ID NO: 801598 - DNA, 33 bp, Homo sapien
caatgcagggttaccatgaacctccaatttgta

SEQ ID NO: 801599 - DNA, 33 bp, Homo sapien
catgctttctagttaacctcagtgcccacccct

SEQ ID NO: 801600 - DNA, 33 bp, Homo sapien
catgctttctagttaatctcagtgcccacccct

SEQ ID NO: 801601 - DNA, 33 bp, Homo sapien
gggcctcatattgccaaatttttccattttttt

SEQ ID NO: 801602 - DNA, 33 bp, Homo sapien
gggcctcatattgccagatttttccattttttt

SEQ ID NO: 801603 - DNA, 33 bp, Homo sapien
catctccctcatagaaaagagtaaccgccccca

SEQ ID NO: 801604 - DNA, 33 bp, Homo sapien
catctccctcatagaacagagtaaccgccccca

SEQ ID NO: 801605 - DNA, 33 bp, Homo sapien
ggttgatgggtctaccgaagagaaggcagggag

SEQ ID NO: 801606 - DNA, 33 bp, Homo sapien
ggttgatgggtctacctaagagaaggcagggag

SEQ ID NO: 801607 - DNA, 33 bp, Homo sapien
ttaccacatttgttcactcaaattttacaggta

SEQ ID NO: 801608 - DNA, 33 bp, Homo sapien
ttaccacatttgttcattcaaattttacaggta

SEQ ID NO: 801609 - DNA, 33 bp, Homo sapien
tctgaatggagatgaacactcctagatattgtg

SEQ ID NO: 801610 - DNA, 33 bp, Homo sapien
tctgaatggagatgaatactcctagatattgtg

SEQ ID NO: 801611 - DNA, 33 bp, Homo sapien
tgtgtggtagaaggagcattacaaatgttatcc

SEQ ID NO: 801612 - DNA, 33 bp, Homo sapien
tgtgtggtagaaggaggattacaaatgttatcc

SEQ ID NO: 801613 - DNA, 33 bp, Homo sapien
agctttatggagactacagatgctcatggctga

SEQ ID NO: 801614 - DNA, 33 bp, Homo sapien
agctttatggagactatagatgctcatggctga

SEQ ID NO: 801615 - DNA, 33 bp, Homo sapien
tgatagtaatcgcaaacattgtctgaatgattg

SEQ ID NO: 801616 - DNA, 33 bp, Homo sapien
tgatagtaatcgcaaatattgtctgaatgattg

SEQ ID NO: 801617 - DNA, 33 bp, Homo sapien
gctcctggatgacaggaagatatggctgcggct

SEQ ID NO: 801618 - DNA, 33 bp, Homo sapien
gctcctggatgacaggcagatatggctgcggct

SEQ ID NO: 801619 - DNA, 33 bp, Homo sapien
agtcaatatcagaataactttaacacactggca

SEQ ID NO: 801620 - DNA, 33 bp, Homo sapien
agtcaatatcagaatagctttaacacactggca

SEQ ID NO: 801621 - DNA, 33 bp, Homo sapien
tgactgctctgacccacagaatatgacagacgt

SEQ ID NO: 801622 - DNA, 33 bp, Homo sapien
tgactgctctgacccatagaatatgacagacgt

SEQ ID NO: 801623 - DNA, 33 bp, Homo sapien
acttactggttgcaagcagtggaaaagctaaaa

SEQ ID NO: 801624 - DNA, 33 bp, Homo sapien
acttactggttgcaagtagtggaaaagctaaaa

SEQ ID NO: 801625 - DNA, 33 bp, Homo sapien
agcaaacacagaggaaagatgagctgagagatg

SEQ ID NO: 801626 - DNA, 33 bp, Homo sapien
agcaaacacagaggaaggatgagctgagagatg

SEQ ID NO: 801627 - DNA, 33 bp, Homo sapien
actcagtgaaaagacaatcactgataatcattc

SEQ ID NO: 801628 - DNA, 33 bp, Homo sapien
actcagtgaaaagacagtcactgataatcattc

SEQ ID NO: 801629 - DNA, 33 bp, Homo sapien
ttgtgttttgcttttccagttgatcatttgtct

SEQ ID NO: 801630 - DNA, 33 bp, Homo sapien
ttgtgttttgcttttcgagttgatcatttgtct

SEQ ID NO: 801631 - DNA, 33 bp, Homo sapien
caggatgttcacaacaacattacttgcaatggt

SEQ ID NO: 801632 - DNA, 33 bp, Homo sapien
caggatgttcacaacaccattacttgcaatggt

SEQ ID NO: 801633 - DNA, 33 bp, Homo sapien
tgtgacactctggtaaggtatcttctctttgtc

SEQ ID NO: 801634 - DNA, 33 bp, Homo sapien
tgtgacactctggtaatgtatcttctctttgtc

SEQ ID NO: 801635 - DNA, 33 bp, Homo sapien
tggctcactcactgaaaggaaacttactgaatt

SEQ ID NO: 801636 - DNA, 33 bp, Homo sapien
tggctcactcactgaatggaaacttactgaatt

SEQ ID NO: 801637 - DNA, 33 bp, Homo sapien
tctggattacacaaaccgatgttacctgaacag

SEQ ID NO: 801638 - DNA, 33 bp, Homo sapien
tctggattacacaaactgatgttacctgaacag

SEQ ID NO: 801639 - DNA, 33 bp, Homo sapien
ttggtgacaatttccaatgccaactctgtgtag

SEQ ID NO: 801640 - DNA, 33 bp, Homo sapien
ttggtgacaatttccagtgccaactctgtgtag

SEQ ID NO: 801641 - DNA, 33 bp, Homo sapien
atttttgtcctacatagattaattgacatgagc

SEQ ID NO: 801642 - DNA, 33 bp, Homo sapien
atttttgtcctacatatattaattgacatgagc

SEQ ID NO: 801643 - DNA, 33 bp, Homo sapien
caggctagaggttaggaatataaagggaataat

SEQ ID NO: 801644 - DNA, 33 bp, Homo sapien
caggctagaggttagggatataaagggaataat

SEQ ID NO: 801645 - DNA, 33 bp, Homo sapien
aaccaatgaaaatggaccagcaactcttttcat

SEQ ID NO: 801646 - DNA, 33 bp, Homo sapien
aaccaatgaaaatggatcagcaactcttttcat

SEQ ID NO: 801647 - DNA, 33 bp, Homo sapien
gtgtcacctggtcaagcaggtaatggtgaacaa

SEQ ID NO: 801648 - DNA, 33 bp, Homo sapien
gtgtcacctggtcaagtaggtaatggtgaacaa

SEQ ID NO: 801649 - DNA, 33 bp, Homo sapien
acagtacgttatggcaatcagtctgtttttcca

SEQ ID NO: 801650 - DNA, 33 bp, Homo sapien
acagtacgttatggcagtcagtctgtttttcca

SEQ ID NO: 801651 - DNA, 33 bp, Homo sapien
atcaattttcactgggacaaaatgaccagacta

SEQ ID NO: 801652 - DNA, 33 bp, Homo sapien
atcaattttcactggggcaaaatgaccagacta

SEQ ID NO: 801653 - DNA, 33 bp, Homo sapien
atctaattgagatcacagtaagagctaaattaa

SEQ ID NO: 801654 - DNA, 33 bp, Homo sapien
atctaattgagatcactgtaagagctaaattaa

SEQ ID NO: 801655 - DNA, 33 bp, Homo sapien
ctaggctcaaataagacgatgacaactaccact

SEQ ID NO: 801656 - DNA, 33 bp, Homo sapien
ctaggctcaaataagatgatgacaactaccact

SEQ ID NO: 801657 - DNA, 33 bp, Homo sapien
tcagcttctcagtactaaaatcagctaaagcag

SEQ ID NO: 801658 - DNA, 33 bp, Homo sapien
tcagcttctcagtactcaaatcagctaaagcag

SEQ ID NO: 801659 - DNA, 33 bp, Homo sapien
gtgaaatttacaaacactgtttcatttgactct

SEQ ID NO: 801660 - DNA, 33 bp, Homo sapien
gtgaaatttacaaacattgtttcatttgactct

SEQ ID NO: 801661 - DNA, 33 bp, Homo sapien
ggtcgagtgtcttggaaggagacaatgggaagg

SEQ ID NO: 801662 - DNA, 33 bp, Homo sapien
ggtcgagtgtcttggatggagacaatgggaagg

SEQ ID NO: 801663 - DNA, 33 bp, Homo sapien
ttataacagtgtcatacatttattctggcaata

SEQ ID NO: 801664 - DNA, 33 bp, Homo sapien
ttataacagtgtcatatatttattctggcaata

SEQ ID NO: 801665 - DNA, 33 bp, Homo sapien
gaaacagtttgcaatgaaacaaaaatacaaagt

SEQ ID NO: 801666 - DNA, 33 bp, Homo sapien
gaaacagtttgcaatggaacaaaaatacaaagt

SEQ ID NO: 801667 - DNA, 33 bp, Homo sapien
ctggaaaatacatctgaaagtatgcctttttaa

SEQ ID NO: 801668 - DNA, 33 bp, Homo sapien
ctggaaaatacatctggaagtatgcctttttaa

SEQ ID NO: 801669 - DNA, 33 bp, Homo sapien
ttatcattcttctgaccgaactcttaaaaaagg

SEQ ID NO: 801670 - DNA, 33 bp, Homo sapien
ttatcattcttctgactgaactcttaaaaaagg

SEQ ID NO: 801671 - DNA, 33 bp, Homo sapien
ctcctcacacatcgtaagctgaaggtggagcac

SEQ ID NO: 801672 - DNA, 33 bp, Homo sapien
ctcctcacacatcgtacgctgaaggtggagcac

SEQ ID NO: 801673 - DNA, 33 bp, Homo sapien
agaacaccttgaccaaccagctaatttaaacaa

SEQ ID NO: 801674 - DNA, 33 bp, Homo sapien
agaacaccttgaccaagcagctaatttaaacaa

SEQ ID NO: 801675 - DNA, 33 bp, Homo sapien
gaggacccatgacagacagctgagacatggatg

SEQ ID NO: 801676 - DNA, 33 bp, Homo sapien
gaggacccatgacagagagctgagacatggatg

SEQ ID NO: 801677 - DNA, 33 bp, Homo sapien
gccaatcctgttgcaaattctaacctcaatgat

SEQ ID NO: 801678 - DNA, 33 bp, Homo sapien
gccaatcctgttgcaagttctaacctcaatgat

SEQ ID NO: 801679 - DNA, 33 bp, Homo sapien
aaaacacatgccacacacagtatccataagaaa

SEQ ID NO: 801680 - DNA, 33 bp, Homo sapien
aaaacacatgccacacgcagtatccataagaaa

SEQ ID NO: 801681 - DNA, 33 bp, Homo sapien
caagtctgactcaacaataatttcccctaggtc

SEQ ID NO: 801682 - DNA, 33 bp, Homo sapien
caagtctgactcaacagtaatttcccctaggtc

SEQ ID NO: 801683 - DNA, 33 bp, Homo sapien
agccttaatactgtccaaaaaacacttcttggt

SEQ ID NO: 801684 - DNA, 33 bp, Homo sapien
agccttaatactgtcccaaaaacacttcttggt

SEQ ID NO: 801685 - DNA, 33 bp, Homo sapien
accgttctgagcactggaggagaaaaatgaaaa

SEQ ID NO: 801686 - DNA, 33 bp, Homo sapien
accgttctgagcactgtaggagaaaaatgaaaa

SEQ ID NO: 801687 - DNA, 33 bp, Homo sapien
ttcctctggctacccaatgatgtgccatatgat

SEQ ID NO: 801688 - DNA, 33 bp, Homo sapien
ttcctctggctacccagtgatgtgccatatgat

SEQ ID NO: 801689 - DNA, 33 bp, Homo sapien
agaaatattcaggatggaaaactcggaggatgc

SEQ ID NO: 801690 - DNA, 33 bp, Homo sapien
agaaatattcaggatgtaaaactcggaggatgc

SEQ ID NO: 801691 - DNA, 33 bp, Homo sapien
tgctacagacgctacaaatttgaaacataacca

SEQ ID NO: 801692 - DNA, 33 bp, Homo sapien
tgctacagacgctacagatttgaaacataacca

SEQ ID NO: 801693 - DNA, 33 bp, Homo sapien
aaggaagaaaataaagcataggagcaaagagaa

SEQ ID NO: 801694 - DNA, 33 bp, Homo sapien
aaggaagaaaataaagtataggagcaaagagaa

SEQ ID NO: 801695 - DNA, 33 bp, Homo sapien
gaggaccgaagtggaacgcttgtagaggactag

SEQ ID NO: 801696 - DNA, 33 bp, Homo sapien
gaggaccgaagtggaatgcttgtagaggactag

SEQ ID NO: 801697 - DNA, 33 bp, Homo sapien
agtgaaaaaagccagacaaaaagagcacatact

SEQ ID NO: 801698 - DNA, 33 bp, Homo sapien
agtgaaaaaagccagagaaaaagagcacatact

SEQ ID NO: 801699 - DNA, 33 bp, Homo sapien
tacatgatttcagaggccacatctcctctaatt

SEQ ID NO: 801700 - DNA, 33 bp, Homo sapien
tacatgatttcagaggtcacatctcctctaatt

SEQ ID NO: 801701 - DNA, 33 bp, Homo sapien
ctgaaaccaggaaaaacggattcatgtgttgca

SEQ ID NO: 801702 - DNA, 33 bp, Homo sapien
ctgaaaccaggaaaaatggattcatgtgttgca

SEQ ID NO: 801703 - DNA, 33 bp, Homo sapien
gtgagagacagaggaaataagaaaccagaagat

SEQ ID NO: 801704 - DNA, 33 bp, Homo sapien
gtgagagacagaggaagtaagaaaccagaagat

SEQ ID NO: 801705 - DNA, 33 bp, Homo sapien
gtggatggaagctggggaatgaactcttgccaa

SEQ ID NO: 801706 - DNA, 33 bp, Homo sapien
gtggatggaagctgggtaatgaactcttgccaa

SEQ ID NO: 801707 - DNA, 33 bp, Homo sapien
tttttaaggggatgtcaaggaatggttaatgaa

SEQ ID NO: 801708 - DNA, 33 bp, Homo sapien
tttttaaggggatgtcgaggaatggttaatgaa

SEQ ID NO: 801709 - DNA, 33 bp, Homo sapien
tcacaaatggtactccacaagaaaaagagactg

SEQ ID NO: 801710 - DNA, 33 bp, Homo sapien
tcacaaatggtactccgcaagaaaaagagactg

SEQ ID NO: 801711 - DNA, 33 bp, Homo sapien
ctactctcagaaaggacggcccaaattcctctc

SEQ ID NO: 801712 - DNA, 33 bp, Homo sapien
ctactctcagaaaggatggcccaaattcctctc

SEQ ID NO: 801713 - DNA, 33 bp, Homo sapien
gagtcagtggctgctaaggttaacaacacaaag

SEQ ID NO: 801714 - DNA, 33 bp, Homo sapien
gagtcagtggctgctagggttaacaacacaaag

SEQ ID NO: 801715 - DNA, 33 bp, Homo sapien
aggagtccatgcctagaagggtcattctgctat

SEQ ID NO: 801716 - DNA, 33 bp, Homo sapien
aggagtccatgcctagtagggtcattctgctat

SEQ ID NO: 801717 - DNA, 33 bp, Homo sapien
aagaacacaagcgaaaattaggtttgtaccttg

SEQ ID NO: 801718 - DNA, 33 bp, Homo sapien
aagaacacaagcgaaacttaggtttgtaccttg

SEQ ID NO: 801719 - DNA, 33 bp, Homo sapien
gtttagaacattgtaccgaaaagtcttgagcca

SEQ ID NO: 801720 - DNA, 33 bp, Homo sapien
gtttagaacattgtactgaaaagtcttgagcca

SEQ ID NO: 801721 - DNA, 33 bp, Homo sapien
tgaccacttctctttcactgctcttctgtctct

SEQ ID NO: 801722 - DNA, 33 bp, Homo sapien
tgaccacttctctttcgctgctcttctgtctct

SEQ ID NO: 801723 - DNA, 33 bp, Homo sapien
ggaaatagacaaatgaccggttccagatgttag

SEQ ID NO: 801724 - DNA, 33 bp, Homo sapien
ggaaatagacaaatgatcggttccagatgttag

SEQ ID NO: 801725 - DNA, 33 bp, Homo sapien
tgttgaatttgctaatcacactcatttttccca

SEQ ID NO: 801726 - DNA, 33 bp, Homo sapien
tgttgaatttgctaatgacactcatttttccca

SEQ ID NO: 801727 - DNA, 33 bp, Homo sapien
aagctgtctcatccaaataagacagctaggaca

SEQ ID NO: 801728 - DNA, 33 bp, Homo sapien
aagctgtctcatccaagtaagacagctaggaca

SEQ ID NO: 801729 - DNA, 33 bp, Homo sapien
tatgaggggagactaccgtaatgtgaaagaaac

SEQ ID NO: 801730 - DNA, 33 bp, Homo sapien
tatgaggggagactactgtaatgtgaaagaaac

SEQ ID NO: 801731 - DNA, 33 bp, Homo sapien
gcatttctggatcacccgaaattatctcttgca

SEQ ID NO: 801732 - DNA, 33 bp, Homo sapien
gcatttctggatcacctgaaattatctcttgca

SEQ ID NO: 801733 - DNA, 33 bp, Homo sapien
ggggagtttttgaaagccatccagtgtaaatag

SEQ ID NO: 801734 - DNA, 33 bp, Homo sapien
ggggagtttttgaaagtcatccagtgtaaatag

SEQ ID NO: 801735 - DNA, 33 bp, Homo sapien
aggcttatttagaaccagctattaaagattaaa

SEQ ID NO: 801736 - DNA, 33 bp, Homo sapien
aggcttatttagaaccggctattaaagattaaa

SEQ ID NO: 801737 - DNA, 33 bp, Homo sapien
aattttttttcagagacgtccattataatgata

SEQ ID NO: 801738 - DNA, 33 bp, Homo sapien
aattttttttcagagatgtccattataatgata

SEQ ID NO: 801739 - DNA, 33 bp, Homo sapien
tggtgttcagaggccaaattatattcttgttat

SEQ ID NO: 801740 - DNA, 33 bp, Homo sapien
tggtgttcagaggccacattatattcttgttat

SEQ ID NO: 801741 - DNA, 33 bp, Homo sapien
acaaaggataaactaactgcaaaaggagaaaaa

SEQ ID NO: 801742 - DNA, 33 bp, Homo sapien
acaaaggataaactaattgcaaaaggagaaaaa

SEQ ID NO: 801743 - DNA, 33 bp, Homo sapien
tttttgaagttaatgtaaactgaatctaagatg

SEQ ID NO: 801744 - DNA, 33 bp, Homo sapien
tttttgaagttaatgttaactgaatctaagatg

SEQ ID NO: 801745 - DNA, 33 bp, Homo sapien
cattgaaggatgttcacgggcagagatgcatag

SEQ ID NO: 801746 - DNA, 33 bp, Homo sapien
cattgaaggatgttcatgggcagagatgcatag

SEQ ID NO: 801747 - DNA, 33 bp, Homo sapien
tcctctgcatgacaaaatgggtccaccatcact

SEQ ID NO: 801748 - DNA, 33 bp, Homo sapien
tcctctgcatgacaaagtgggtccaccatcact

SEQ ID NO: 801749 - DNA, 33 bp, Homo sapien
catctttattttgtccagattttgatccaaagt

SEQ ID NO: 801750 - DNA, 33 bp, Homo sapien
catctttattttgtccggattttgatccaaagt

SEQ ID NO: 801751 - DNA, 33 bp, Homo sapien
cacagtgtaatagctaagaccagcaatccatgc

SEQ ID NO: 801752 - DNA, 33 bp, Homo sapien
cacagtgtaatagctaggaccagcaatccatgc

SEQ ID NO: 801753 - DNA, 33 bp, Homo sapien
ctcatgtggctattgaagaagggcatagcggct

SEQ ID NO: 801754 - DNA, 33 bp, Homo sapien
ctcatgtggctattgaggaagggcatagcggct

SEQ ID NO: 801755 - DNA, 33 bp, Homo sapien
ggcaaggactacaaacagtttagagctttgtcg

SEQ ID NO: 801756 - DNA, 33 bp, Homo sapien
ggcaaggactacaaacggtttagagctttgtcg

SEQ ID NO: 801757 - DNA, 33 bp, Homo sapien
aaacctcatgccatcccatttagactaatttta

SEQ ID NO: 801758 - DNA, 33 bp, Homo sapien
aaacctcatgccatcctatttagactaatttta

SEQ ID NO: 801759 - DNA, 33 bp, Homo sapien
tcgtgtgacactttcacgctccctctcaaaacc

SEQ ID NO: 801760 - DNA, 33 bp, Homo sapien
tcgtgtgacactttcatgctccctctcaaaacc

SEQ ID NO: 801761 - DNA, 33 bp, Homo sapien
gaacaactctaaggtacaatcaaatgattttct

SEQ ID NO: 801762 - DNA, 33 bp, Homo sapien
gaacaactctaaggtataatcaaatgattttct

SEQ ID NO: 801763 - DNA, 33 bp, Homo sapien
gtcctgttcaccattacatcctcagtccctgga

SEQ ID NO: 801764 - DNA, 33 bp, Homo sapien
gtcctgttcaccattatatcctcagtccctgga

SEQ ID NO: 801765 - DNA, 33 bp, Homo sapien
aatatatataaccagagaaatcttctgatcctc

SEQ ID NO: 801766 - DNA, 33 bp, Homo sapien
aatatatataaccagataaatcttctgatcctc

SEQ ID NO: 801767 - DNA, 33 bp, Homo sapien
gcttctagatttcaaccgaatacctgtcacttg

SEQ ID NO: 801768 - DNA, 33 bp, Homo sapien
gcttctagatttcaactgaatacctgtcacttg

SEQ ID NO: 801769 - DNA, 33 bp, Homo sapien
atgatttctaagacctaaaggcttacataggat

SEQ ID NO: 801770 - DNA, 33 bp, Homo sapien
atgatttctaagacctgaaggcttacataggat

SEQ ID NO: 801771 - DNA, 33 bp, Homo sapien
ctttgattatctcagacgacaagtgagtatttg

SEQ ID NO: 801772 - DNA, 33 bp, Homo sapien
ctttgattatctcagaggacaagtgagtatttg

SEQ ID NO: 801773 - DNA, 33 bp, Homo sapien
agtattagactatagcagactcaaattcttagc

SEQ ID NO: 801774 - DNA, 33 bp, Homo sapien
agtattagactatagcggactcaaattcttagc

SEQ ID NO: 801775 - DNA, 33 bp, Homo sapien
ttaaaatgtccctgtgcagaaggatatgaatga

SEQ ID NO: 801776 - DNA, 33 bp, Homo sapien
ttaaaatgtccctgtggagaaggatatgaatga

SEQ ID NO: 801777 - DNA, 33 bp, Homo sapien
gcacttctcatgtttaacagctcattggtaagt

SEQ ID NO: 801778 - DNA, 33 bp, Homo sapien
gcacttctcatgtttaccagctcattggtaagt

SEQ ID NO: 801779 - DNA, 33 bp, Homo sapien
tttggactagtcttgacggcaaatgaataacta

SEQ ID NO: 801780 - DNA, 33 bp, Homo sapien
tttggactagtcttgatggcaaatgaataacta

SEQ ID NO: 801781 - DNA, 33 bp, Homo sapien
catggactcagaaaagcaagagatgaatcagaa

SEQ ID NO: 801782 - DNA, 33 bp, Homo sapien
catggactcagaaaaggaagagatgaatcagaa

SEQ ID NO: 801783 - DNA, 33 bp, Homo sapien
actcttttacagttcacggtaaatgggaaatac

SEQ ID NO: 801784 - DNA, 33 bp, Homo sapien
actcttttacagttcatggtaaatgggaaatac

SEQ ID NO: 801785 - DNA, 33 bp, Homo sapien
agatgtctgagaaaaaaaatgtttcataggctt

SEQ ID NO: 801786 - DNA, 33 bp, Homo sapien
agatgtctgagaaaaataatgtttcataggctt

SEQ ID NO: 801787 - DNA, 33 bp, Homo sapien
atgactggttcttccaacactcagatatccatg

SEQ ID NO: 801788 - DNA, 33 bp, Homo sapien
atgactggttcttccagcactcagatatccatg

SEQ ID NO: 801789 - DNA, 33 bp, Homo sapien
aaacagaagtttcaaacaggcaggattggagta

SEQ ID NO: 801790 - DNA, 33 bp, Homo sapien
aaacagaagtttcaaagaggcaggattggagta

SEQ ID NO: 801791 - DNA, 33 bp, Homo sapien
ctttttttccccctaacgatagcactgaaagaa

SEQ ID NO: 801792 - DNA, 33 bp, Homo sapien
ctttttttccccctaatgatagcactgaaagaa

SEQ ID NO: 801793 - DNA, 33 bp, Homo sapien
cacagaagaaaacttacgcaataaaatgcttct

SEQ ID NO: 801794 - DNA, 33 bp, Homo sapien
cacagaagaaaacttatgcaataaaatgcttct

SEQ ID NO: 801795 - DNA, 33 bp, Homo sapien
cctacacgttactttcccataacgccccggtgc

SEQ ID NO: 801796 - DNA, 33 bp, Homo sapien
cctacacgttactttctcataacgccccggtgc

SEQ ID NO: 801797 - DNA, 33 bp, Homo sapien
ctcctttggaatacaaggcattgggcttttttt

SEQ ID NO: 801798 - DNA, 33 bp, Homo sapien
ctcctttggaatacaatgcattgggcttttttt

SEQ ID NO: 801799 - DNA, 33 bp, Homo sapien
atgcctgcctgagaccactttaaaatgaagccc

SEQ ID NO: 801800 - DNA, 33 bp, Homo sapien
atgcctgcctgagaccgctttaaaatgaagccc

SEQ ID NO: 801801 - DNA, 33 bp, Homo sapien
cataagtctgaaaaaaaactgggaggctgaagt

SEQ ID NO: 801802 - DNA, 33 bp, Homo sapien
cataagtctgaaaaaacactgggaggctgaagt

SEQ ID NO: 801803 - DNA, 33 bp, Homo sapien
ttggagtaggacaggcaataagcaaagaaaata

SEQ ID NO: 801804 - DNA, 33 bp, Homo sapien
ttggagtaggacaggcgataagcaaagaaaata

SEQ ID NO: 801805 - DNA, 33 bp, Homo sapien
tcttacactgtcatgacgatgaagttgctggtg

SEQ ID NO: 801806 - DNA, 33 bp, Homo sapien
tcttacactgtcatgatgatgaagttgctggtg

SEQ ID NO: 801807 - DNA, 33 bp, Homo sapien
aagacaaactataggtaaaaatatttgcaacac

SEQ ID NO: 801808 - DNA, 33 bp, Homo sapien
aagacaaactataggtcaaaatatttgcaacac

SEQ ID NO: 801809 - DNA, 33 bp, Homo sapien
aacaccatttataaaactgaaagacaaactata

SEQ ID NO: 801810 - DNA, 33 bp, Homo sapien
aacaccatttataaaattgaaagacaaactata

SEQ ID NO: 801811 - DNA, 33 bp, Homo sapien
ctttagggaaccctgcacaagttctgagaagct

SEQ ID NO: 801812 - DNA, 33 bp, Homo sapien
ctttagggaaccctgcgcaagttctgagaagct

SEQ ID NO: 801813 - DNA, 33 bp, Homo sapien
aagtctgtggtgttcaactcacagcaattctaa

SEQ ID NO: 801814 - DNA, 33 bp, Homo sapien
aagtctgtggtgttcacctcacagcaattctaa

SEQ ID NO: 801815 - DNA, 33 bp, Homo sapien
atagaacttaactttaaccatcaaatccagagc

SEQ ID NO: 801816 - DNA, 33 bp, Homo sapien
atagaacttaactttagccatcaaatccagagc

SEQ ID NO: 801817 - DNA, 33 bp, Homo sapien
cttccccatcccaaaacccttactgcacttcaa

SEQ ID NO: 801818 - DNA, 33 bp, Homo sapien
cttccccatcccaaaatccttactgcacttcaa

SEQ ID NO: 801819 - DNA, 33 bp, Homo sapien
ttctagttgagtggagaaaaggaacttgagttt

SEQ ID NO: 801820 - DNA, 33 bp, Homo sapien
ttctagttgagtggaggaaaggaacttgagttt

SEQ ID NO: 801821 - DNA, 33 bp, Homo sapien
gagcctccactttcaaacaccatgccagggtgc

SEQ ID NO: 801822 - DNA, 33 bp, Homo sapien
gagcctccactttcaaccaccatgccagggtgc

SEQ ID NO: 801823 - DNA, 33 bp, Homo sapien
ttaacttgactattaaatatgcatgaggtaggg

SEQ ID NO: 801824 - DNA, 33 bp, Homo sapien
ttaacttgactattaattatgcatgaggtaggg

SEQ ID NO: 801825 - DNA, 33 bp, Homo sapien
agtggttgaactctgaacacattatgacttgta

SEQ ID NO: 801826 - DNA, 33 bp, Homo sapien
agtggttgaactctgaccacattatgacttgta

SEQ ID NO: 801827 - DNA, 33 bp, Homo sapien
actgagggctgcagaaataaatcattctctcct

SEQ ID NO: 801828 - DNA, 33 bp, Homo sapien
actgagggctgcagaagtaaatcattctctcct

SEQ ID NO: 801829 - DNA, 33 bp, Homo sapien
gcgtgtgtgttaagacagaaggacgagaaaaat

SEQ ID NO: 801830 - DNA, 33 bp, Homo sapien
gcgtgtgtgttaagacggaaggacgagaaaaat

SEQ ID NO: 801831 - DNA, 33 bp, Homo sapien
tgaagaggaggaaggaacttctgctgtagaggc

SEQ ID NO: 801832 - DNA, 33 bp, Homo sapien
tgaagaggaggaaggaccttctgctgtagaggc

SEQ ID NO: 801833 - DNA, 33 bp, Homo sapien
gttgaaaaagccatgcaaaatcttaagcctatt

SEQ ID NO: 801834 - DNA, 33 bp, Homo sapien
gttgaaaaagccatgcgaaatcttaagcctatt

SEQ ID NO: 801835 - DNA, 33 bp, Homo sapien
taacatcttggttttccctgaagacaaggcttc

SEQ ID NO: 801836 - DNA, 33 bp, Homo sapien
taacatcttggttttctctgaagacaaggcttc

SEQ ID NO: 801837 - DNA, 33 bp, Homo sapien
aacaaacaaaggcaaaagtgttcattcaaggtt

SEQ ID NO: 801838 - DNA, 33 bp, Homo sapien
aacaaacaaaggcaaaggtgttcattcaaggtt

SEQ ID NO: 801839 - DNA, 33 bp, Homo sapien
aagagtaaggcctttaccaagaagttgttgctt

SEQ ID NO: 801840 - DNA, 33 bp, Homo sapien
aagagtaaggcctttatcaagaagttgttgctt

SEQ ID NO: 801841 - DNA, 33 bp, Homo sapien
aggcagatctagaaaacgaactagggaaattat

SEQ ID NO: 801842 - DNA, 33 bp, Homo sapien
aggcagatctagaaaatgaactagggaaattat

SEQ ID NO: 801843 - DNA, 33 bp, Homo sapien
tagcagctcttcttccacctccaggagtttatt

SEQ ID NO: 801844 - DNA, 33 bp, Homo sapien
tagcagctcttcttccgcctccaggagtttatt

SEQ ID NO: 801845 - DNA, 33 bp, Homo sapien
gatggcagagaatttaacaaagcagcaggtgaa

SEQ ID NO: 801846 - DNA, 33 bp, Homo sapien
gatggcagagaatttagcaaagcagcaggtgaa

SEQ ID NO: 801847 - DNA, 33 bp, Homo sapien
cttggcagtcttcgaaagtgctctaccttcagt

SEQ ID NO: 801848 - DNA, 33 bp, Homo sapien
cttggcagtcttcgaacgtgctctaccttcagt

SEQ ID NO: 801849 - DNA, 33 bp, Homo sapien
gtatcacaattccttaagacctagagatggtaa

SEQ ID NO: 801850 - DNA, 33 bp, Homo sapien
gtatcacaattccttaggacctagagatggtaa

SEQ ID NO: 801851 - DNA, 33 bp, Homo sapien
tctggtaggcaagacaaattcttaacccagcac

SEQ ID NO: 801852 - DNA, 33 bp, Homo sapien
tctggtaggcaagacagattcttaacccagcac

SEQ ID NO: 801853 - DNA, 33 bp, Homo sapien
acaaagccttccttgaccatcccagttcaaagt

SEQ ID NO: 801854 - DNA, 33 bp, Homo sapien
acaaagccttccttgatcatcccagttcaaagt

SEQ ID NO: 801855 - DNA, 33 bp, Homo sapien
tgctgaactcgcatgaaccctatggagacaaga

SEQ ID NO: 801856 - DNA, 33 bp, Homo sapien
tgctgaactcgcatgagccctatggagacaaga

SEQ ID NO: 801857 - DNA, 33 bp, Homo sapien
caacaacatacccaaccggatccttaacactga

SEQ ID NO: 801858 - DNA, 33 bp, Homo sapien
caacaacatacccaactggatccttaacactga

SEQ ID NO: 801859 - DNA, 33 bp, Homo sapien
atagccattccaagcaatagattaatgtaaaaa

SEQ ID NO: 801860 - DNA, 33 bp, Homo sapien
atagccattccaagcagtagattaatgtaaaaa

SEQ ID NO: 801861 - DNA, 33 bp, Homo sapien
ctgtcattactttgaacaagccatttgaccttt

SEQ ID NO: 801862 - DNA, 33 bp, Homo sapien
ctgtcattactttgaataagccatttgaccttt

SEQ ID NO: 801863 - DNA, 33 bp, Homo sapien
ctgtgagctatgcctggaggcttttggccctgg

SEQ ID NO: 801864 - DNA, 33 bp, Homo sapien
ctgtgagctatgcctgtaggcttttggccctgg

SEQ ID NO: 801865 - DNA, 33 bp, Homo sapien
gagaactcactatcacagagcattcacccccat

SEQ ID NO: 801866 - DNA, 33 bp, Homo sapien
gagaactcactatcacggagcattcacccccat

SEQ ID NO: 801867 - DNA, 33 bp, Homo sapien
gttaggcttctgagaacggctttcttgagggtg

SEQ ID NO: 801868 - DNA, 33 bp, Homo sapien
gttaggcttctgagaatggctttcttgagggtg

SEQ ID NO: 801869 - DNA, 33 bp, Homo sapien
tgtcactcaccttgtgaaatattataatatcac

SEQ ID NO: 801870 - DNA, 33 bp, Homo sapien
tgtcactcaccttgtggaatattataatatcac

SEQ ID NO: 801871 - DNA, 33 bp, Homo sapien
ttcttaaaagcagcatcacataacgtttcatac

SEQ ID NO: 801872 - DNA, 33 bp, Homo sapien
ttcttaaaagcagcatgacataacgtttcatac

SEQ ID NO: 801873 - DNA, 33 bp, Homo sapien
atacttagatttaacaccaaaagcacaatttaa

SEQ ID NO: 801874 - DNA, 33 bp, Homo sapien
atacttagatttaacatcaaaagcacaatttaa

SEQ ID NO: 801875 - DNA, 33 bp, Homo sapien
atatttggttttgaaggacaagaactagaagag

SEQ ID NO: 801876 - DNA, 33 bp, Homo sapien
atatttggttttgaagtacaagaactagaagag

SEQ ID NO: 801877 - DNA, 33 bp, Homo sapien
ttgaacagattaaaatcagatcagagacaattt

SEQ ID NO: 801878 - DNA, 33 bp, Homo sapien
ttgaacagattaaaatgagatcagagacaattt

SEQ ID NO: 801879 - DNA, 33 bp, Homo sapien
acttctgcaaggacaacgtccaggatgattaag

SEQ ID NO: 801880 - DNA, 33 bp, Homo sapien
acttctgcaaggacaatgtccaggatgattaag

SEQ ID NO: 801881 - DNA, 33 bp, Homo sapien
aatgtccactgctgaaaacaaaggagtaactaa

SEQ ID NO: 801882 - DNA, 33 bp, Homo sapien
aatgtccactgctgaagacaaaggagtaactaa

SEQ ID NO: 801883 - DNA, 33 bp, Homo sapien
ttctgtagtgaaaggagaatttaagattctaca

SEQ ID NO: 801884 - DNA, 33 bp, Homo sapien
ttctgtagtgaaaggataatttaagattctaca

SEQ ID NO: 801885 - DNA, 33 bp, Homo sapien
gagactgcacagtagaaaggagttgacactttt

SEQ ID NO: 801886 - DNA, 33 bp, Homo sapien
gagactgcacagtagagaggagttgacactttt

SEQ ID NO: 801887 - DNA, 33 bp, Homo sapien
cacagaacaagcagacaagattttgctcggcag

SEQ ID NO: 801888 - DNA, 33 bp, Homo sapien
cacagaacaagcagaccagattttgctcggcag

SEQ ID NO: 801889 - DNA, 33 bp, Homo sapien
tgcttcaagttgttagaaaaccattcaaaaaaa

SEQ ID NO: 801890 - DNA, 33 bp, Homo sapien
tgcttcaagttgttaggaaaccattcaaaaaaa

SEQ ID NO: 801891 - DNA, 33 bp, Homo sapien
ggacaaagataaaatacacaccacgtatttcat

SEQ ID NO: 801892 - DNA, 33 bp, Homo sapien
ggacaaagataaaatagacaccacgtatttcat

SEQ ID NO: 801893 - DNA, 33 bp, Homo sapien
ccactcagagcagagcacaaactgtcacgtcct

SEQ ID NO: 801894 - DNA, 33 bp, Homo sapien
ccactcagagcagagcgcaaactgtcacgtcct

SEQ ID NO: 801895 - DNA, 33 bp, Homo sapien
cattcctgaatcaaccaatcactctagttcagt

SEQ ID NO: 801896 - DNA, 33 bp, Homo sapien
cattcctgaatcaacccatcactctagttcagt

SEQ ID NO: 801897 - DNA, 33 bp, Homo sapien
cttaaatagttatgtacatttcctaaaagcctg

SEQ ID NO: 801898 - DNA, 33 bp, Homo sapien
cttaaatagttatgtatatttcctaaaagcctg

SEQ ID NO: 801899 - DNA, 33 bp, Homo sapien
aacagtgcaaatggcacaggctttatgttcatg

SEQ ID NO: 801900 - DNA, 33 bp, Homo sapien
aacagtgcaaatggcagaggctttatgttcatg

SEQ ID NO: 801901 - DNA, 33 bp, Homo sapien
caagagaaaatcgacaataaaagcaattggtga

SEQ ID NO: 801902 - DNA, 33 bp, Homo sapien
caagagaaaatcgacactaaaagcaattggtga

SEQ ID NO: 801903 - DNA, 33 bp, Homo sapien
gaagatggaaattcaacgttaggccccagagct

SEQ ID NO: 801904 - DNA, 33 bp, Homo sapien
gaagatggaaattcaatgttaggccccagagct

SEQ ID NO: 801905 - DNA, 33 bp, Homo sapien
acacagtgagtcatcgcatcacatttcagagcc

SEQ ID NO: 801906 - DNA, 33 bp, Homo sapien
acacagtgagtcatcgtatcacatttcagagcc

SEQ ID NO: 801907 - DNA, 33 bp, Homo sapien
gtgtcttcaaactaggaatacatcaattactta

SEQ ID NO: 801908 - DNA, 33 bp, Homo sapien
gtgtcttcaaactagggatacatcaattactta

SEQ ID NO: 801909 - DNA, 33 bp, Homo sapien
gaactttcctaagatcacaaacctggtaagtgg

SEQ ID NO: 801910 - DNA, 33 bp, Homo sapien
gaactttcctaagatcgcaaacctggtaagtgg

SEQ ID NO: 801911 - DNA, 33 bp, Homo sapien
actcagtacttttaagacaatgcaactttaaca

SEQ ID NO: 801912 - DNA, 33 bp, Homo sapien
actcagtacttttaaggcaatgcaactttaaca

SEQ ID NO: 801913 - DNA, 33 bp, Homo sapien
tggaaaataccgaatgaattgtatagaatagct

SEQ ID NO: 801914 - DNA, 33 bp, Homo sapien
tggaaaataccgaatggattgtatagaatagct

SEQ ID NO: 801915 - DNA, 33 bp, Homo sapien
aaaatgtttgattccagaaagcattacaagaca

SEQ ID NO: 801916 - DNA, 33 bp, Homo sapien
aaaatgtttgattccataaagcattacaagaca

SEQ ID NO: 801917 - DNA, 33 bp, Homo sapien
ctacagtgattttgtccactacactgttatttg

SEQ ID NO: 801918 - DNA, 33 bp, Homo sapien
ctacagtgattttgtctactacactgttatttg

SEQ ID NO: 801919 - DNA, 33 bp, Homo sapien
tcaaccagtcatttcagctactccctgcagtgt

SEQ ID NO: 801920 - DNA, 33 bp, Homo sapien
tcaaccagtcatttcatctactccctgcagtgt

SEQ ID NO: 801921 - DNA, 33 bp, Homo sapien
gaattttcattttataataatttgtaggccagg

SEQ ID NO: 801922 - DNA, 33 bp, Homo sapien
gaattttcattttatattaatttgtaggccagg

SEQ ID NO: 801923 - DNA, 33 bp, Homo sapien
tcccaaatttggttgacgtcgtgattacaagga

SEQ ID NO: 801924 - DNA, 33 bp, Homo sapien
tcccaaatttggttgatgtcgtgattacaagga

SEQ ID NO: 801925 - DNA, 33 bp, Homo sapien
catatcagtcgactcaaattttttgctattctg

SEQ ID NO: 801926 - DNA, 33 bp, Homo sapien
catatcagtcgactcagattttttgctattctg

SEQ ID NO: 801927 - DNA, 33 bp, Homo sapien
agtagggctgtgtatacgctcaggaaagatgga

SEQ ID NO: 801928 - DNA, 33 bp, Homo sapien
agtagggctgtgtatatgctcaggaaagatgga

SEQ ID NO: 801929 - DNA, 33 bp, Homo sapien
tctttagaatccgatacggagaaaaggagatat

SEQ ID NO: 801930 - DNA, 33 bp, Homo sapien
tctttagaatccgatagggagaaaaggagatat

SEQ ID NO: 801931 - DNA, 33 bp, Homo sapien
gtatagatatctgggccctgcctcccaacgatc

SEQ ID NO: 801932 - DNA, 33 bp, Homo sapien
gtatagatatctgggctctgcctcccaacgatc

SEQ ID NO: 801933 - DNA, 33 bp, Homo sapien
attttttacaagaataccaagaccattcaatga

SEQ ID NO: 801934 - DNA, 33 bp, Homo sapien
attttttacaagaatatcaagaccattcaatga

SEQ ID NO: 801935 - DNA, 33 bp, Homo sapien
agtggcaacagcctaaatgatcagctcatgagt

SEQ ID NO: 801936 - DNA, 33 bp, Homo sapien
agtggcaacagcctaagtgatcagctcatgagt

SEQ ID NO: 801937 - DNA, 33 bp, Homo sapien
agtcactatgcacatccgacatttaaggggtag

SEQ ID NO: 801938 - DNA, 33 bp, Homo sapien
agtcactatgcacatctgacatttaaggggtag

SEQ ID NO: 801939 - DNA, 33 bp, Homo sapien
agttgagtgtttcagaagcataggtacttgatg

SEQ ID NO: 801940 - DNA, 33 bp, Homo sapien
agttgagtgtttcagaggcataggtacttgatg

SEQ ID NO: 801941 - DNA, 33 bp, Homo sapien
ggcatactatgaagaacagctgatgttttttga

SEQ ID NO: 801942 - DNA, 33 bp, Homo sapien
ggcatactatgaagaatagctgatgttttttga

SEQ ID NO: 801943 - DNA, 33 bp, Homo sapien
tgcttccgattcttgacacttggtagcaatgat

SEQ ID NO: 801944 - DNA, 33 bp, Homo sapien
tgcttccgattcttgatacttggtagcaatgat

SEQ ID NO: 801945 - DNA, 33 bp, Homo sapien
tgtccttgtaacagcacgaattgccctctccaa

SEQ ID NO: 801946 - DNA, 33 bp, Homo sapien
tgtccttgtaacagcaggaattgccctctccaa

SEQ ID NO: 801947 - DNA, 33 bp, Homo sapien
tctggctggatccataacatcaacttggtatag

SEQ ID NO: 801948 - DNA, 33 bp, Homo sapien
tctggctggatccatagcatcaacttggtatag

SEQ ID NO: 801949 - DNA, 33 bp, Homo sapien
catctctctctttatacctgaatcacaatacct

SEQ ID NO: 801950 - DNA, 33 bp, Homo sapien
catctctctctttatatctgaatcacaatacct

SEQ ID NO: 801951 - DNA, 33 bp, Homo sapien
ttgccctcagaaaaaggacacggccaggatcat

SEQ ID NO: 801952 - DNA, 33 bp, Homo sapien
ttgccctcagaaaaagtacacggccaggatcat

SEQ ID NO: 801953 - DNA, 33 bp, Homo sapien
tcttgctttcctcctccatttatctgctaaaga

SEQ ID NO: 801954 - DNA, 33 bp, Homo sapien
tcttgctttcctcctctatttatctgctaaaga

SEQ ID NO: 801955 - DNA, 33 bp, Homo sapien
attttacaacatattgccaaatggctctccaaa

SEQ ID NO: 801956 - DNA, 33 bp, Homo sapien
attttacaacatattgtcaaatggctctccaaa

SEQ ID NO: 801957 - DNA, 33 bp, Homo sapien
acatttgatttagttcactcaatatcattgctg

SEQ ID NO: 801958 - DNA, 33 bp, Homo sapien
acatttgatttagttctctcaatatcattgctg

SEQ ID NO: 801959 - DNA, 33 bp, Homo sapien
ttattttttagccatgcatggttgtataggtac

SEQ ID NO: 801960 - DNA, 33 bp, Homo sapien
ttattttttagccatgtatggttgtataggtac

SEQ ID NO: 801961 - DNA, 33 bp, Homo sapien
tctagacaccttgctacgtaaacacgaataaat

SEQ ID NO: 801962 - DNA, 33 bp, Homo sapien
tctagacaccttgctatgtaaacacgaataaat

SEQ ID NO: 801963 - DNA, 33 bp, Homo sapien
agtacagcttcagtcaagtatccacacttgaac

SEQ ID NO: 801964 - DNA, 33 bp, Homo sapien
agtacagcttcagtcaggtatccacacttgaac

SEQ ID NO: 801965 - DNA, 33 bp, Homo sapien
ttttccaatcttgaaagcactgcagagagacaa

SEQ ID NO: 801966 - DNA, 33 bp, Homo sapien
ttttccaatcttgaaatcactgcagagagacaa

SEQ ID NO: 801967 - DNA, 33 bp, Homo sapien
ctttttattaaaaaaaatgttgtgctgcttaaa

SEQ ID NO: 801968 - DNA, 33 bp, Homo sapien
ctttttattaaaaaaattgttgtgctgcttaaa

SEQ ID NO: 801969 - DNA, 33 bp, Homo sapien
atgatagtgaaagctaaagaataaaagagtgat

SEQ ID NO: 801970 - DNA, 33 bp, Homo sapien
atgatagtgaaagctagagaataaaagagtgat

SEQ ID NO: 801971 - DNA, 33 bp, Homo sapien
tctgccttccttgcgccaatgtttagtttcaga

SEQ ID NO: 801972 - DNA, 33 bp, Homo sapien
tctgccttccttgcgctaatgtttagtttcaga

SEQ ID NO: 801973 - DNA, 33 bp, Homo sapien
ctttctttgctgataactacaacttttcgttct

SEQ ID NO: 801974 - DNA, 33 bp, Homo sapien
ctttctttgctgataagtacaacttttcgttct

SEQ ID NO: 801975 - DNA, 33 bp, Homo sapien
ccaaagtcaaacaatgcattggtaaggaagaaa

SEQ ID NO: 801976 - DNA, 33 bp, Homo sapien
ccaaagtcaaacaatgtattggtaaggaagaaa

SEQ ID NO: 801977 - DNA, 33 bp, Homo sapien
tctctcttcctctccaatactccagtcttaata

SEQ ID NO: 801978 - DNA, 33 bp, Homo sapien
tctctcttcctctccagtactccagtcttaata

SEQ ID NO: 801979 - DNA, 33 bp, Homo sapien
cagaataccaagtaacaagtttggctgatttaa

SEQ ID NO: 801980 - DNA, 33 bp, Homo sapien
cagaataccaagtaaccagtttggctgatttaa

SEQ ID NO: 801981 - DNA, 33 bp, Homo sapien
ggctggccaactgacaatctatgcattgattta

SEQ ID NO: 801982 - DNA, 33 bp, Homo sapien
ggctggccaactgacagtctatgcattgattta

SEQ ID NO: 801983 - DNA, 33 bp, Homo sapien
gcaagaaatccttccaataggctggccaactga

SEQ ID NO: 801984 - DNA, 33 bp, Homo sapien
gcaagaaatccttccagtaggctggccaactga

SEQ ID NO: 801985 - DNA, 33 bp, Homo sapien
ccaggtgcttctaaaaatgccatttcctggtct

SEQ ID NO: 801986 - DNA, 33 bp, Homo sapien
ccaggtgcttctaaaagtgccatttcctggtct

SEQ ID NO: 801987 - DNA, 33 bp, Homo sapien
aaaggaagaactgtctcacaggtattgttaaca

SEQ ID NO: 801988 - DNA, 33 bp, Homo sapien
aaaggaagaactgtctgacaggtattgttaaca

SEQ ID NO: 801989 - DNA, 33 bp, Homo sapien
aggaagacctgtttgaagctaactatttctctg

SEQ ID NO: 801990 - DNA, 33 bp, Homo sapien
aggaagacctgtttgacgctaactatttctctg

SEQ ID NO: 801991 - DNA, 33 bp, Homo sapien
gaagctggatactttgcacattgagttataaca

SEQ ID NO: 801992 - DNA, 33 bp, Homo sapien
gaagctggatactttgtacattgagttataaca

SEQ ID NO: 801993 - DNA, 33 bp, Homo sapien
tcactttcagagtccagactggaagaacactta

SEQ ID NO: 801994 - DNA, 33 bp, Homo sapien
tcactttcagagtccatactggaagaacactta

SEQ ID NO: 801995 - DNA, 33 bp, Homo sapien
aggagctttaaggatacagtagaggtgaatgca

SEQ ID NO: 801996 - DNA, 33 bp, Homo sapien
aggagctttaaggatatagtagaggtgaatgca

SEQ ID NO: 801997 - DNA, 33 bp, Homo sapien
tctgagatggtgaatacgtagggcttgtgctta

SEQ ID NO: 801998 - DNA, 33 bp, Homo sapien
tctgagatggtgaatatgtagggcttgtgctta

SEQ ID NO: 801999 - DNA, 33 bp, Homo sapien
ttaggagagatgcagcagacattactgagcttg

SEQ ID NO: 802000 - DNA, 33 bp, Homo sapien
ttaggagagatgcagctgacattactgagcttg

SEQ ID NO: 802001 - DNA, 33 bp, Homo sapien
tttgcattgaagaaaaaattttgctgttgaaac

SEQ ID NO: 802002 - DNA, 33 bp, Homo sapien
tttgcattgaagaaaagattttgctgttgaaac

SEQ ID NO: 802003 - DNA, 33 bp, Homo sapien
ccatatacaaaagaggcatgactatgtcactaa

SEQ ID NO: 802004 - DNA, 33 bp, Homo sapien
ccatatacaaaagaggtatgactatgtcactaa

SEQ ID NO: 802005 - DNA, 33 bp, Homo sapien
agccagcctgtctggaacacctctgttggtttt

SEQ ID NO: 802006 - DNA, 33 bp, Homo sapien
agccagcctgtctggagcacctctgttggtttt

SEQ ID NO: 802007 - DNA, 33 bp, Homo sapien
tctgtgggattctagcccccttttctgggcagg

SEQ ID NO: 802008 - DNA, 33 bp, Homo sapien
tctgtgggattctagctcccttttctgggcagg

SEQ ID NO: 802009 - DNA, 33 bp, Homo sapien
gtaatttttaaagagtcacctgatgagtgcata

SEQ ID NO: 802010 - DNA, 33 bp, Homo sapien
gtaatttttaaagagttacctgatgagtgcata

SEQ ID NO: 802011 - DNA, 33 bp, Homo sapien
attccagaatcaaagggcctgtggatatggtaa

SEQ ID NO: 802012 - DNA, 33 bp, Homo sapien
attccagaatcaaaggtcctgtggatatggtaa

SEQ ID NO: 802013 - DNA, 33 bp, Homo sapien
gggacgtgggttagaaaatcacctgggacttta

SEQ ID NO: 802014 - DNA, 33 bp, Homo sapien
gggacgtgggttagaagatcacctgggacttta

SEQ ID NO: 802015 - DNA, 33 bp, Homo sapien
agagagaagagaagaactcacccaggactacca

SEQ ID NO: 802016 - DNA, 33 bp, Homo sapien
agagagaagagaagaattcacccaggactacca

SEQ ID NO: 802017 - DNA, 33 bp, Homo sapien
agatcttcatatggcaagtttcctttgtcattt

SEQ ID NO: 802018 - DNA, 33 bp, Homo sapien
agatcttcatatggcaggtttcctttgtcattt

SEQ ID NO: 802019 - DNA, 33 bp, Homo sapien
tatgaaggttgcataacattccattgtttggaa

SEQ ID NO: 802020 - DNA, 33 bp, Homo sapien
tatgaaggttgcataatattccattgtttggaa

SEQ ID NO: 802021 - DNA, 33 bp, Homo sapien
ctcaaatctccagaaactgtttaaatagaaaga

SEQ ID NO: 802022 - DNA, 33 bp, Homo sapien
ctcaaatctccagaaattgtttaaatagaaaga

SEQ ID NO: 802023 - DNA, 33 bp, Homo sapien
aattgaaatcccatcacgtcgttgcaatgtggt

SEQ ID NO: 802024 - DNA, 33 bp, Homo sapien
aattgaaatcccatcatgtcgttgcaatgtggt

SEQ ID NO: 802025 - DNA, 33 bp, Homo sapien
agagacccagtgcaaacagataagtgcattgaa

SEQ ID NO: 802026 - DNA, 33 bp, Homo sapien
agagacccagtgcaaatagataagtgcattgaa

SEQ ID NO: 802027 - DNA, 33 bp, Homo sapien
ttgacatcagaagagaatcaatagaaggactat

SEQ ID NO: 802028 - DNA, 33 bp, Homo sapien
ttgacatcagaagagactcaatagaaggactat

SEQ ID NO: 802029 - DNA, 33 bp, Homo sapien
tgtctttcctcttaaacgtgtttgcttgaaggt

SEQ ID NO: 802030 - DNA, 33 bp, Homo sapien
tgtctttcctcttaaatgtgtttgcttgaaggt

SEQ ID NO: 802031 - DNA, 33 bp, Homo sapien
agtgaaagactgtaaaaactgaagagctcttgt

SEQ ID NO: 802032 - DNA, 33 bp, Homo sapien
agtgaaagactgtaaatactgaagagctcttgt

SEQ ID NO: 802033 - DNA, 33 bp, Homo sapien
agctatatagcacttaccaggtgatgagtgcaa

SEQ ID NO: 802034 - DNA, 33 bp, Homo sapien
agctatatagcacttagcaggtgatgagtgcaa

SEQ ID NO: 802035 - DNA, 33 bp, Homo sapien
catacagattgacaacactttgtgagtatatcc

SEQ ID NO: 802036 - DNA, 33 bp, Homo sapien
catacagattgacaactctttgtgagtatatcc

SEQ ID NO: 802037 - DNA, 33 bp, Homo sapien
tgggtagatggcataaaagtctgctataattcc

SEQ ID NO: 802038 - DNA, 33 bp, Homo sapien
tgggtagatggcataagagtctgctataattcc

SEQ ID NO: 802039 - DNA, 33 bp, Homo sapien
tctcctgcatcatggacagaaccagtaaataga

SEQ ID NO: 802040 - DNA, 33 bp, Homo sapien
tctcctgcatcatggatagaaccagtaaataga

SEQ ID NO: 802041 - DNA, 33 bp, Homo sapien
agttggaggaaaacaaatccaagtctcccactg

SEQ ID NO: 802042 - DNA, 33 bp, Homo sapien
agttggaggaaaacaagtccaagtctcccactg

SEQ ID NO: 802043 - DNA, 33 bp, Homo sapien
agtgtagagaataggacgcagggaacaagagga

SEQ ID NO: 802044 - DNA, 33 bp, Homo sapien
agtgtagagaataggatgcagggaacaagagga

SEQ ID NO: 802045 - DNA, 33 bp, Homo sapien
atgcttccaactgtgaaaatgaatacagaagat

SEQ ID NO: 802046 - DNA, 33 bp, Homo sapien
atgcttccaactgtgagaatgaatacagaagat

SEQ ID NO: 802047 - DNA, 33 bp, Homo sapien
ggtcttgctttttagcccagggtagagtgcagt

SEQ ID NO: 802048 - DNA, 33 bp, Homo sapien
ggtcttgctttttagcgcagggtagagtgcagt

SEQ ID NO: 802049 - DNA, 33 bp, Homo sapien
tataggaatctggtcaaaaatcaagtcattgtg

SEQ ID NO: 802050 - DNA, 33 bp, Homo sapien
tataggaatctggtcagaaatcaagtcattgtg

SEQ ID NO: 802051 - DNA, 33 bp, Homo sapien
ggactaagtgaaagaaagtatgttattcttcaa

SEQ ID NO: 802052 - DNA, 33 bp, Homo sapien
ggactaagtgaaagaacgtatgttattcttcaa

SEQ ID NO: 802053 - DNA, 33 bp, Homo sapien
gtatgtgtaccagagacatttgctattcactaa

SEQ ID NO: 802054 - DNA, 33 bp, Homo sapien
gtatgtgtaccagagatatttgctattcactaa

SEQ ID NO: 802055 - DNA, 33 bp, Homo sapien
caaaaatgtttcatgaccagtgaaagactgaat

SEQ ID NO: 802056 - DNA, 33 bp, Homo sapien
caaaaatgtttcatgagcagtgaaagactgaat

SEQ ID NO: 802057 - DNA, 33 bp, Homo sapien
ttttttcttttcccaaataatgtgacattcagt

SEQ ID NO: 802058 - DNA, 33 bp, Homo sapien
ttttttcttttcccaagtaatgtgacattcagt

SEQ ID NO: 802059 - DNA, 33 bp, Homo sapien
ttctatttggttcccaactttaatatcggagag

SEQ ID NO: 802060 - DNA, 33 bp, Homo sapien
ttctatttggttcccatctttaatatcggagag

SEQ ID NO: 802061 - DNA, 33 bp, Homo sapien
gtccatataatcagaaagtcatgtgcattggca

SEQ ID NO: 802062 - DNA, 33 bp, Homo sapien
gtccatataatcagaaggtcatgtgcattggca

SEQ ID NO: 802063 - DNA, 33 bp, Homo sapien
gtgccaagtactttcaggcattatctctaatcc

SEQ ID NO: 802064 - DNA, 33 bp, Homo sapien
gtgccaagtactttcatgcattatctctaatcc

SEQ ID NO: 802065 - DNA, 33 bp, Homo sapien
ccaagctggagccttccctaaaactagccatgc

SEQ ID NO: 802066 - DNA, 33 bp, Homo sapien
ccaagctggagccttctctaaaactagccatgc

SEQ ID NO: 802067 - DNA, 33 bp, Homo sapien
agtgaggtgcattcttaaaaaagacaaaatgga

SEQ ID NO: 802068 - DNA, 33 bp, Homo sapien
agtgaggtgcattcttgaaaaagacaaaatgga

SEQ ID NO: 802069 - DNA, 33 bp, Homo sapien
cagctttcctgggatacgtccttgatagcttta

SEQ ID NO: 802070 - DNA, 33 bp, Homo sapien
cagctttcctgggataggtccttgatagcttta

SEQ ID NO: 802071 - DNA, 33 bp, Homo sapien
gatgtgaaagaaaagaacaagtcaaattgaaga

SEQ ID NO: 802072 - DNA, 33 bp, Homo sapien
gatgtgaaagaaaagagcaagtcaaattgaaga

SEQ ID NO: 802073 - DNA, 33 bp, Homo sapien
gtttaaaaagaacggaaatgtgtcttctgatta

SEQ ID NO: 802074 - DNA, 33 bp, Homo sapien
gtttaaaaagaacggagatgtgtcttctgatta

SEQ ID NO: 802075 - DNA, 33 bp, Homo sapien
cacaaactggtgagaaacactttattgagccac

SEQ ID NO: 802076 - DNA, 33 bp, Homo sapien
cacaaactggtgagaagcactttattgagccac

SEQ ID NO: 802077 - DNA, 33 bp, Homo sapien
gggatttgggtccatacgtaggtgaacttggac

SEQ ID NO: 802078 - DNA, 33 bp, Homo sapien
gggatttgggtccataggtaggtgaacttggac

SEQ ID NO: 802079 - DNA, 33 bp, Homo sapien
ccttgacactgccagacgctttgttgttaaacc

SEQ ID NO: 802080 - DNA, 33 bp, Homo sapien
ccttgacactgccagatgctttgttgttaaacc

SEQ ID NO: 802081 - DNA, 33 bp, Homo sapien
aaacagaaagtccagacgatcctgagtcccatg

SEQ ID NO: 802082 - DNA, 33 bp, Homo sapien
aaacagaaagtccagatgatcctgagtcccatg

SEQ ID NO: 802083 - DNA, 33 bp, Homo sapien
gcctctttttaggtagaaaatcctgtccaggga

SEQ ID NO: 802084 - DNA, 33 bp, Homo sapien
gcctctttttaggtaggaaatcctgtccaggga

SEQ ID NO: 802085 - DNA, 33 bp, Homo sapien
atctgtgatgtagagcccttaactgcttccttt

SEQ ID NO: 802086 - DNA, 33 bp, Homo sapien
atctgtgatgtagagcgcttaactgcttccttt

SEQ ID NO: 802087 - DNA, 33 bp, Homo sapien
tcttactgacagtgacagccatatgacttgacc

SEQ ID NO: 802088 - DNA, 33 bp, Homo sapien
tcttactgacagtgacggccatatgacttgacc

SEQ ID NO: 802089 - DNA, 33 bp, Homo sapien
ttatcaggaatcagaaagttgtcaaggttgtta

SEQ ID NO: 802090 - DNA, 33 bp, Homo sapien
ttatcaggaatcagaatgttgtcaaggttgtta

SEQ ID NO: 802091 - DNA, 33 bp, Homo sapien
aaaatacagtgcccagacaacgaatgagatttt

SEQ ID NO: 802092 - DNA, 33 bp, Homo sapien
aaaatacagtgcccaggcaacgaatgagatttt

SEQ ID NO: 802093 - DNA, 33 bp, Homo sapien
cagaattcttcagtgacgtacaggacaattttt

SEQ ID NO: 802094 - DNA, 33 bp, Homo sapien
cagaattcttcagtgatgtacaggacaattttt

SEQ ID NO: 802095 - DNA, 33 bp, Homo sapien
aaaacatttgaatgtaacctttctcagggtgtt

SEQ ID NO: 802096 - DNA, 33 bp, Homo sapien
aaaacatttgaatgtatcctttctcagggtgtt

SEQ ID NO: 802097 - DNA, 33 bp, Homo sapien
ctaacatcatctagtacgaacttggcccaatgg

SEQ ID NO: 802098 - DNA, 33 bp, Homo sapien
ctaacatcatctagtatgaacttggcccaatgg

SEQ ID NO: 802099 - DNA, 33 bp, Homo sapien
tgttctctggtttctcaatgtcaaacactggct

SEQ ID NO: 802100 - DNA, 33 bp, Homo sapien
tgttctctggtttctcgatgtcaaacactggct

SEQ ID NO: 802101 - DNA, 33 bp, Homo sapien
tttggaatttgctctcccctttatccaatgctt

SEQ ID NO: 802102 - DNA, 33 bp, Homo sapien
tttggaatttgctctcgcctttatccaatgctt

SEQ ID NO: 802103 - DNA, 33 bp, Homo sapien
ttaaatggttcagaagcatcctgtgtaagcagt

SEQ ID NO: 802104 - DNA, 33 bp, Homo sapien
ttaaatggttcagaagtatcctgtgtaagcagt

SEQ ID NO: 802105 - DNA, 33 bp, Homo sapien
aatacgtaacaagaataatccttcacttacctg

SEQ ID NO: 802106 - DNA, 33 bp, Homo sapien
aatacgtaacaagaatgatccttcacttacctg

SEQ ID NO: 802107 - DNA, 33 bp, Homo sapien
cttaatcttgcgaaccactgcttttagttctcc

SEQ ID NO: 802108 - DNA, 33 bp, Homo sapien
cttaatcttgcgaaccgctgcttttagttctcc

SEQ ID NO: 802109 - DNA, 33 bp, Homo sapien
tttcagactgacaaccagaaaagtggagagctg

SEQ ID NO: 802110 - DNA, 33 bp, Homo sapien
tttcagactgacaaccggaaaagtggagagctg

SEQ ID NO: 802111 - DNA, 33 bp, Homo sapien
tcccaccaggacatccaaaagcaaaatactatg

SEQ ID NO: 802112 - DNA, 33 bp, Homo sapien
tcccaccaggacatccgaaagcaaaatactatg

SEQ ID NO: 802113 - DNA, 33 bp, Homo sapien
ctttgggggccacataaataactgctcattttc

SEQ ID NO: 802114 - DNA, 33 bp, Homo sapien
ctttgggggccacatagataactgctcattttc

SEQ ID NO: 802115 - DNA, 33 bp, Homo sapien
aaggagattttgcccactgagaaagagccctag

SEQ ID NO: 802116 - DNA, 33 bp, Homo sapien
aaggagattttgcccattgagaaagagccctag

SEQ ID NO: 802117 - DNA, 33 bp, Homo sapien
ccttctgaaactctgaataaaaaaccatccaca

SEQ ID NO: 802118 - DNA, 33 bp, Homo sapien
ccttctgaaactctgagtaaaaaaccatccaca

SEQ ID NO: 802119 - DNA, 33 bp, Homo sapien
gagattattgtagtagccagctagctagtatat

SEQ ID NO: 802120 - DNA, 33 bp, Homo sapien
gagattattgtagtagtcagctagctagtatat

SEQ ID NO: 802121 - DNA, 33 bp, Homo sapien
tggtccgaattcagtaacactgccacacccagc

SEQ ID NO: 802122 - DNA, 33 bp, Homo sapien
tggtccgaattcagtagcactgccacacccagc

SEQ ID NO: 802123 - DNA, 33 bp, Homo sapien
tggaggctctgccagcaacacatgtagactgag

SEQ ID NO: 802124 - DNA, 33 bp, Homo sapien
tggaggctctgccagcgacacatgtagactgag

SEQ ID NO: 802125 - DNA, 33 bp, Homo sapien
tgcagccccgctgacaacaaggttttagcccag

SEQ ID NO: 802126 - DNA, 33 bp, Homo sapien
tgcagccccgctgacaccaaggttttagcccag

SEQ ID NO: 802127 - DNA, 33 bp, Homo sapien
tgtagatcttacctgaaacccagcattgtatct

SEQ ID NO: 802128 - DNA, 33 bp, Homo sapien
tgtagatcttacctgatacccagcattgtatct

SEQ ID NO: 802129 - DNA, 33 bp, Homo sapien
ctgaactagaggaaaaattgtaagagtgcagat

SEQ ID NO: 802130 - DNA, 33 bp, Homo sapien
ctgaactagaggaaaacttgtaagagtgcagat

SEQ ID NO: 802131 - DNA, 33 bp, Homo sapien
ctatatcaggtagccactgcaaaatcttttctt

SEQ ID NO: 802132 - DNA, 33 bp, Homo sapien
ctatatcaggtagccagtgcaaaatcttttctt

SEQ ID NO: 802133 - DNA, 33 bp, Homo sapien
ccaattccgtagatcacgaacagtacatggaaa

SEQ ID NO: 802134 - DNA, 33 bp, Homo sapien
ccaattccgtagatcaggaacagtacatggaaa

SEQ ID NO: 802135 - DNA, 33 bp, Homo sapien
tccatgtaatgacacaaaaactgagacttgaga

SEQ ID NO: 802136 - DNA, 33 bp, Homo sapien
tccatgtaatgacacagaaactgagacttgaga

SEQ ID NO: 802137 - DNA, 33 bp, Homo sapien
aataaggtcaaacctcacagagttcctataaag

SEQ ID NO: 802138 - DNA, 33 bp, Homo sapien
aataaggtcaaacctcgcagagttcctataaag

SEQ ID NO: 802139 - DNA, 33 bp, Homo sapien
ggtataatacttctgcaaacatatgctcattag

SEQ ID NO: 802140 - DNA, 33 bp, Homo sapien
ggtataatacttctgcgaacatatgctcattag

SEQ ID NO: 802141 - DNA, 33 bp, Homo sapien
catccatctatgttccagaagactgttctatgt

SEQ ID NO: 802142 - DNA, 33 bp, Homo sapien
catccatctatgttccggaagactgttctatgt

SEQ ID NO: 802143 - DNA, 33 bp, Homo sapien
gagacactcggacccaatgacaaatacaggttg

SEQ ID NO: 802144 - DNA, 33 bp, Homo sapien
gagacactcggacccagtgacaaatacaggttg

SEQ ID NO: 802145 - DNA, 33 bp, Homo sapien
aatatcaaacatctgccgataatttggttaggt

SEQ ID NO: 802146 - DNA, 33 bp, Homo sapien
aatatcaaacatctgctgataatttggttaggt

SEQ ID NO: 802147 - DNA, 33 bp, Homo sapien
tccattatgtatgaggaactattgtaagtattg

SEQ ID NO: 802148 - DNA, 33 bp, Homo sapien
tccattatgtatgaggcactattgtaagtattg

SEQ ID NO: 802149 - DNA, 33 bp, Homo sapien
atacctgatgcgatcagatttcttgtgtctatt

SEQ ID NO: 802150 - DNA, 33 bp, Homo sapien
atacctgatgcgatcatatttcttgtgtctatt

SEQ ID NO: 802151 - DNA, 33 bp, Homo sapien
cattgtaagacaattaactagattcaagtctca

SEQ ID NO: 802152 - DNA, 33 bp, Homo sapien
cattgtaagacaattatctagattcaagtctca

SEQ ID NO: 802153 - DNA, 33 bp, Homo sapien
ggaaacagttgacttacgctggccccaacaaat

SEQ ID NO: 802154 - DNA, 33 bp, Homo sapien
ggaaacagttgacttatgctggccccaacaaat

SEQ ID NO: 802155 - DNA, 33 bp, Homo sapien
aataaaaaaaaatatgaactgctcatgagactg

SEQ ID NO: 802156 - DNA, 33 bp, Homo sapien
aataaaaaaaaatatggactgctcatgagactg

SEQ ID NO: 802157 - DNA, 33 bp, Homo sapien
gaagtacagatataacgcagtgcagaggcaaat

SEQ ID NO: 802158 - DNA, 33 bp, Homo sapien
gaagtacagatataactcagtgcagaggcaaat

SEQ ID NO: 802159 - DNA, 33 bp, Homo sapien
tcttctcttttcctcacctattacagccaataa

SEQ ID NO: 802160 - DNA, 33 bp, Homo sapien
tcttctcttttcctcatctattacagccaataa

SEQ ID NO: 802161 - DNA, 33 bp, Homo sapien
aataaagtttctgtgacccagcattcttgaaga

SEQ ID NO: 802162 - DNA, 33 bp, Homo sapien
aataaagtttctgtgatccagcattcttgaaga

SEQ ID NO: 802163 - DNA, 33 bp, Homo sapien
gtagcttagaaggaaaactcactgataaatgga

SEQ ID NO: 802164 - DNA, 33 bp, Homo sapien
gtagcttagaaggaaacctcactgataaatgga

SEQ ID NO: 802165 - DNA, 33 bp, Homo sapien
gagttggattatactactaggtgctaatataga

SEQ ID NO: 802166 - DNA, 33 bp, Homo sapien
gagttggattatactagtaggtgctaatataga

SEQ ID NO: 802167 - DNA, 33 bp, Homo sapien
tcccagccctgaaaaacggagcaggctctagac

SEQ ID NO: 802168 - DNA, 33 bp, Homo sapien
tcccagccctgaaaaatggagcaggctctagac

SEQ ID NO: 802169 - DNA, 33 bp, Homo sapien
ttattatgtattaaaacattggttgagtggctt

SEQ ID NO: 802170 - DNA, 33 bp, Homo sapien
ttattatgtattaaaatattggttgagtggctt

SEQ ID NO: 802171 - DNA, 33 bp, Homo sapien
agtcttgcatgacttcacggagctaatcctcta

SEQ ID NO: 802172 - DNA, 33 bp, Homo sapien
agtcttgcatgacttcccggagctaatcctcta

SEQ ID NO: 802173 - DNA, 33 bp, Homo sapien
gaggaatccttagtggaactaggtaacccagag

SEQ ID NO: 802174 - DNA, 33 bp, Homo sapien
gaggaatccttagtgggactaggtaacccagag

SEQ ID NO: 802175 - DNA, 33 bp, Homo sapien
acatgataccaaaacactgggagacaaaagaga

SEQ ID NO: 802176 - DNA, 33 bp, Homo sapien
acatgataccaaaacattgggagacaaaagaga

SEQ ID NO: 802177 - DNA, 33 bp, Homo sapien
atcagagttaacttaccagcaccagaagatgtg

SEQ ID NO: 802178 - DNA, 33 bp, Homo sapien
atcagagttaacttactagcaccagaagatgtg

SEQ ID NO: 802179 - DNA, 33 bp, Homo sapien
cactccattgcctcatcagtctttgtttacaaa

SEQ ID NO: 802180 - DNA, 33 bp, Homo sapien
cactccattgcctcatgagtctttgtttacaaa

SEQ ID NO: 802181 - DNA, 33 bp, Homo sapien
ctccacctaagcctccaacatacctaagccagg

SEQ ID NO: 802182 - DNA, 33 bp, Homo sapien
ctccacctaagcctccgacatacctaagccagg

SEQ ID NO: 802183 - DNA, 33 bp, Homo sapien
catgtgcattggaaaccaggttagaaaagccag

SEQ ID NO: 802184 - DNA, 33 bp, Homo sapien
catgtgcattggaaactaggttagaaaagccag

SEQ ID NO: 802185 - DNA, 33 bp, Homo sapien
ttattctacatagaaaacaaatacgatgtgatt

SEQ ID NO: 802186 - DNA, 33 bp, Homo sapien
ttattctacatagaaagcaaatacgatgtgatt

SEQ ID NO: 802187 - DNA, 33 bp, Homo sapien
tcctgtcacttatcaccaaggtaaccttggaca

SEQ ID NO: 802188 - DNA, 33 bp, Homo sapien
tcctgtcacttatcactaaggtaaccttggaca

SEQ ID NO: 802189 - DNA, 33 bp, Homo sapien
tcttatgataatcctacgaagtggctgttgtta

SEQ ID NO: 802190 - DNA, 33 bp, Homo sapien
tcttatgataatcctatgaagtggctgttgtta

SEQ ID NO: 802191 - DNA, 33 bp, Homo sapien
ttgctggatgaattaaacctctgtcaataatct

SEQ ID NO: 802192 - DNA, 33 bp, Homo sapien
ttgctggatgaattaaccctctgtcaataatct

SEQ ID NO: 802193 - DNA, 33 bp, Homo sapien
acaggagatggccttcaagtgggatgacagagg

SEQ ID NO: 802194 - DNA, 33 bp, Homo sapien
acaggagatggccttccagtgggatgacagagg

SEQ ID NO: 802195 - DNA, 33 bp, Homo sapien
gcaggagatatgttgcccattgggttggcggca

SEQ ID NO: 802196 - DNA, 33 bp, Homo sapien
gcaggagatatgttgctcattgggttggcggca

SEQ ID NO: 802197 - DNA, 33 bp, Homo sapien
catacacctcattacacataaaaatggcaatca

SEQ ID NO: 802198 - DNA, 33 bp, Homo sapien
catacacctcattacatataaaaatggcaatca

SEQ ID NO: 802199 - DNA, 33 bp, Homo sapien
ataaactgaatgaggaggtgtggtagtaggttc

SEQ ID NO: 802200 - DNA, 33 bp, Homo sapien
ataaactgaatgaggatgtgtggtagtaggttc

SEQ ID NO: 802201 - DNA, 33 bp, Homo sapien
ctatagttccatgactcaaatatacatactgat

SEQ ID NO: 802202 - DNA, 33 bp, Homo sapien
ctatagttccatgactgaaatatacatactgat

SEQ ID NO: 802203 - DNA, 33 bp, Homo sapien
agaagttttctttctacgtaacatcgcctaaat

SEQ ID NO: 802204 - DNA, 33 bp, Homo sapien
agaagttttctttctatgtaacatcgcctaaat

SEQ ID NO: 802205 - DNA, 33 bp, Homo sapien
tattgtgacaggatggcaaaatagccacttttg

SEQ ID NO: 802206 - DNA, 33 bp, Homo sapien
tattgtgacaggatggtaaaatagccacttttg

SEQ ID NO: 802207 - DNA, 33 bp, Homo sapien
gtacaaagtgtggaaacgagagaattttagtgc

SEQ ID NO: 802208 - DNA, 33 bp, Homo sapien
gtacaaagtgtggaaatgagagaattttagtgc

SEQ ID NO: 802209 - DNA, 33 bp, Homo sapien
aagggagaactaaaccagctcaaaggattagga

SEQ ID NO: 802210 - DNA, 33 bp, Homo sapien
aagggagaactaaaccggctcaaaggattagga

SEQ ID NO: 802211 - DNA, 33 bp, Homo sapien
aagaacaaaagtttcccatgagatgcgaaaaac

SEQ ID NO: 802212 - DNA, 33 bp, Homo sapien
aagaacaaaagtttcctatgagatgcgaaaaac

SEQ ID NO: 802213 - DNA, 33 bp, Homo sapien
ctagatgccagacatgcagaaaggctcaaacag

SEQ ID NO: 802214 - DNA, 33 bp, Homo sapien
ctagatgccagacatggagaaaggctcaaacag

SEQ ID NO: 802215 - DNA, 33 bp, Homo sapien
tatcttaactgctctaaggaattcagtctcttg

SEQ ID NO: 802216 - DNA, 33 bp, Homo sapien
tatcttaactgctctatggaattcagtctcttg

SEQ ID NO: 802217 - DNA, 33 bp, Homo sapien
atacagctcattcttccgaaactaaacctcttg

SEQ ID NO: 802218 - DNA, 33 bp, Homo sapien
atacagctcattcttctgaaactaaacctcttg

SEQ ID NO: 802219 - DNA, 33 bp, Homo sapien
gccaaggagttagagacggctttaagacttctg

SEQ ID NO: 802220 - DNA, 33 bp, Homo sapien
gccaaggagttagagatggctttaagacttctg

SEQ ID NO: 802221 - DNA, 33 bp, Homo sapien
ccgtattaacagcagccacattgggaccaggag

SEQ ID NO: 802222 - DNA, 33 bp, Homo sapien
ccgtattaacagcagcgacattgggaccaggag

SEQ ID NO: 802223 - DNA, 33 bp, Homo sapien
gacattgcacacatccaaaagaggaaaggtgag

SEQ ID NO: 802224 - DNA, 33 bp, Homo sapien
gacattgcacacatccgaaagaggaaaggtgag

SEQ ID NO: 802225 - DNA, 33 bp, Homo sapien
acattgtgcttactgaacattttatcagcacaa

SEQ ID NO: 802226 - DNA, 33 bp, Homo sapien
acattgtgcttactgagcattttatcagcacaa

SEQ ID NO: 802227 - DNA, 33 bp, Homo sapien
tagttttgtgttgaaaaagagaacagtgcctca

SEQ ID NO: 802228 - DNA, 33 bp, Homo sapien
tagttttgtgttgaaagagagaacagtgcctca

SEQ ID NO: 802229 - DNA, 33 bp, Homo sapien
tcagtggatctgagcaatagtagtttaacttga

SEQ ID NO: 802230 - DNA, 33 bp, Homo sapien
tcagtggatctgagcagtagtagtttaacttga

SEQ ID NO: 802231 - DNA, 33 bp, Homo sapien
cactattgatcaattgaaaataaacatggtaga

SEQ ID NO: 802232 - DNA, 33 bp, Homo sapien
cactattgatcaattggaaataaacatggtaga

SEQ ID NO: 802233 - DNA, 33 bp, Homo sapien
ttcaatattggggaaacaagacttgcaaataat

SEQ ID NO: 802234 - DNA, 33 bp, Homo sapien
ttcaatattggggaaagaagacttgcaaataat

SEQ ID NO: 802235 - DNA, 33 bp, Homo sapien
tcaccctagtgattcaactcttatactgaacag

SEQ ID NO: 802236 - DNA, 33 bp, Homo sapien
tcaccctagtgattcacctcttatactgaacag

SEQ ID NO: 802237 - DNA, 33 bp, Homo sapien
ttttgaccactgtagcagacacttcactgttct

SEQ ID NO: 802238 - DNA, 33 bp, Homo sapien
ttttgaccactgtagcggacacttcactgttct

SEQ ID NO: 802239 - DNA, 33 bp, Homo sapien
aactgagacaatccaaacgctttacttattctc

SEQ ID NO: 802240 - DNA, 33 bp, Homo sapien
aactgagacaatccaagcgctttacttattctc

SEQ ID NO: 802241 - DNA, 33 bp, Homo sapien
atatatcgtcaacataaaagttcccaatattga

SEQ ID NO: 802242 - DNA, 33 bp, Homo sapien
atatatcgtcaacatacaagttcccaatattga

SEQ ID NO: 802243 - DNA, 33 bp, Homo sapien
ggatgggatttttgaaaaagctcttgctatcta

SEQ ID NO: 802244 - DNA, 33 bp, Homo sapien
ggatgggatttttgaataagctcttgctatcta

SEQ ID NO: 802245 - DNA, 33 bp, Homo sapien
aaactaattggaagaacggtaaagacgctataa

SEQ ID NO: 802246 - DNA, 33 bp, Homo sapien
aaactaattggaagaatggtaaagacgctataa

SEQ ID NO: 802247 - DNA, 33 bp, Homo sapien
gtggtaaccattggaaagaaaacactgacataa

SEQ ID NO: 802248 - DNA, 33 bp, Homo sapien
gtggtaaccattggaacgaaaacactgacataa

SEQ ID NO: 802249 - DNA, 33 bp, Homo sapien
gatggaatatacaagaagttctccaaacgaagc

SEQ ID NO: 802250 - DNA, 33 bp, Homo sapien
gatggaatatacaagaggttctccaaacgaagc

SEQ ID NO: 802251 - DNA, 33 bp, Homo sapien
catgacatccatcttccctgagcaaaggaggct

SEQ ID NO: 802252 - DNA, 33 bp, Homo sapien
catgacatccatcttctctgagcaaaggaggct

SEQ ID NO: 802253 - DNA, 33 bp, Homo sapien
tctttccttctaaagcagcattctttctctggc

SEQ ID NO: 802254 - DNA, 33 bp, Homo sapien
tctttccttctaaagcggcattctttctctggc

SEQ ID NO: 802255 - DNA, 33 bp, Homo sapien
attgaataccagaccaccacacattgctgaaga

SEQ ID NO: 802256 - DNA, 33 bp, Homo sapien
attgaataccagaccatcacacattgctgaaga

SEQ ID NO: 802257 - DNA, 33 bp, Homo sapien
ctttttctcagcatgggatatccctgagaaaga

SEQ ID NO: 802258 - DNA, 33 bp, Homo sapien
ctttttctcagcatggtatatccctgagaaaga

SEQ ID NO: 802259 - DNA, 33 bp, Homo sapien
gattatggtttaagacaaagccttctacagagg

SEQ ID NO: 802260 - DNA, 33 bp, Homo sapien
gattatggtttaagactaagccttctacagagg

SEQ ID NO: 802261 - DNA, 33 bp, Homo sapien
tttcaatagttgacaaacacagcagaaccacca

SEQ ID NO: 802262 - DNA, 33 bp, Homo sapien
tttcaatagttgacaatcacagcagaaccacca

SEQ ID NO: 802263 - DNA, 33 bp, Homo sapien
aaccaaaagattcttccatgacagattctatct

SEQ ID NO: 802264 - DNA, 33 bp, Homo sapien
aaccaaaagattcttctatgacagattctatct

SEQ ID NO: 802265 - DNA, 33 bp, Homo sapien
gtcaccattattaaaaactctcttggctaggca

SEQ ID NO: 802266 - DNA, 33 bp, Homo sapien
gtcaccattattaaaatctctcttggctaggca

SEQ ID NO: 802267 - DNA, 33 bp, Homo sapien
aaacaaaggagagagacagcctatatccctgaa

SEQ ID NO: 802268 - DNA, 33 bp, Homo sapien
aaacaaaggagagagagagcctatatccctgaa

SEQ ID NO: 802269 - DNA, 33 bp, Homo sapien
aacccaaacattgagaacaccatattttcatca

SEQ ID NO: 802270 - DNA, 33 bp, Homo sapien
aacccaaacattgagagcaccatattttcatca

SEQ ID NO: 802271 - DNA, 33 bp, Homo sapien
acagtggtctcaacacagactttttaaaacaac

SEQ ID NO: 802272 - DNA, 33 bp, Homo sapien
acagtggtctcaacacggactttttaaaacaac

SEQ ID NO: 802273 - DNA, 33 bp, Homo sapien
ggaatctgaaatcacacctcattagcagagaca

SEQ ID NO: 802274 - DNA, 33 bp, Homo sapien
ggaatctgaaatcacatctcattagcagagaca

SEQ ID NO: 802275 - DNA, 33 bp, Homo sapien
aatgccaatgttctcaaccacaaagcttttccc

SEQ ID NO: 802276 - DNA, 33 bp, Homo sapien
aatgccaatgttctcatccacaaagcttttccc

SEQ ID NO: 802277 - DNA, 33 bp, Homo sapien
gggatttcaatcaacacatttggtctctatgac

SEQ ID NO: 802278 - DNA, 33 bp, Homo sapien
gggatttcaatcaacagatttggtctctatgac

SEQ ID NO: 802279 - DNA, 33 bp, Homo sapien
ttgaatacaatgattacgcaagtttgtagatta

SEQ ID NO: 802280 - DNA, 33 bp, Homo sapien
ttgaatacaatgattatgcaagtttgtagatta

SEQ ID NO: 802281 - DNA, 33 bp, Homo sapien
actattcactcttcataaacatttggttccaca

SEQ ID NO: 802282 - DNA, 33 bp, Homo sapien
actattcactcttcattaacatttggttccaca

SEQ ID NO: 802283 - DNA, 33 bp, Homo sapien
gtgaggaactaggccaaccctaaagtgtttttg

SEQ ID NO: 802284 - DNA, 33 bp, Homo sapien
gtgaggaactaggccatccctaaagtgtttttg

SEQ ID NO: 802285 - DNA, 33 bp, Homo sapien
cacatattagctgagaaatatgttatttgaaca

SEQ ID NO: 802286 - DNA, 33 bp, Homo sapien
cacatattagctgagagatatgttatttgaaca

SEQ ID NO: 802287 - DNA, 33 bp, Homo sapien
attgaatccagagatcagaatcattgttttcct

SEQ ID NO: 802288 - DNA, 33 bp, Homo sapien
attgaatccagagatcggaatcattgttttcct

SEQ ID NO: 802289 - DNA, 33 bp, Homo sapien
ttccaaaagaaccaaactcatactaagcacact

SEQ ID NO: 802290 - DNA, 33 bp, Homo sapien
ttccaaaagaaccaaagtcatactaagcacact

SEQ ID NO: 802291 - DNA, 33 bp, Homo sapien
tagggcagcctatttaacctctgcttcttcata

SEQ ID NO: 802292 - DNA, 33 bp, Homo sapien
tagggcagcctatttaccctctgcttcttcata

SEQ ID NO: 802293 - DNA, 33 bp, Homo sapien
tgctccaagaggctaacggcttcacccaaaagt

SEQ ID NO: 802294 - DNA, 33 bp, Homo sapien
tgctccaagaggctaatggcttcacccaaaagt

SEQ ID NO: 802295 - DNA, 33 bp, Homo sapien
ctttggttccattcacaatgcactgggaacgtt

SEQ ID NO: 802296 - DNA, 33 bp, Homo sapien
ctttggttccattcaccatgcactgggaacgtt

SEQ ID NO: 802297 - DNA, 33 bp, Homo sapien
gcaggcctgattcatacagtttgcttatttctg

SEQ ID NO: 802298 - DNA, 33 bp, Homo sapien
gcaggcctgattcatatagtttgcttatttctg

SEQ ID NO: 802299 - DNA, 33 bp, Homo sapien
gaaagaaacgaatcacagtcatatatacttgac

SEQ ID NO: 802300 - DNA, 33 bp, Homo sapien
gaaagaaacgaatcactgtcatatatacttgac

SEQ ID NO: 802301 - DNA, 33 bp, Homo sapien
ccttttgcaaagtaaagaattcaagtgataatc

SEQ ID NO: 802302 - DNA, 33 bp, Homo sapien
ccttttgcaaagtaaataattcaagtgataatc

SEQ ID NO: 802303 - DNA, 33 bp, Homo sapien
tccagttacacaatcaaaaactgcacgtaggcc

SEQ ID NO: 802304 - DNA, 33 bp, Homo sapien
tccagttacacaatcagaaactgcacgtaggcc

SEQ ID NO: 802305 - DNA, 33 bp, Homo sapien
taaaggctgtgaatgcaaagtctttattttgct

SEQ ID NO: 802306 - DNA, 33 bp, Homo sapien
taaaggctgtgaatgcgaagtctttattttgct

SEQ ID NO: 802307 - DNA, 33 bp, Homo sapien
atggcttgggttaggtaacataaaggctgtgaa

SEQ ID NO: 802308 - DNA, 33 bp, Homo sapien
atggcttgggttaggtgacataaaggctgtgaa

SEQ ID NO: 802309 - DNA, 33 bp, Homo sapien
tattctgcgtaaagcccacaatttgggtttgga

SEQ ID NO: 802310 - DNA, 33 bp, Homo sapien
tattctgcgtaaagcctacaatttgggtttgga

SEQ ID NO: 802311 - DNA, 33 bp, Homo sapien
gaagtcatgtgactacaagtacttaggagagtg

SEQ ID NO: 802312 - DNA, 33 bp, Homo sapien
gaagtcatgtgactaccagtacttaggagagtg

SEQ ID NO: 802313 - DNA, 33 bp, Homo sapien
atgccctggaaggtgaagccccagagtagaaat

SEQ ID NO: 802314 - DNA, 33 bp, Homo sapien
atgccctggaaggtgaggccccagagtagaaat

SEQ ID NO: 802315 - DNA, 33 bp, Homo sapien
ttgtcacccccactccaagaaattcatccatct

SEQ ID NO: 802316 - DNA, 33 bp, Homo sapien
ttgtcacccccactccgagaaattcatccatct

SEQ ID NO: 802317 - DNA, 33 bp, Homo sapien
atttccaggtttccgcgctgcagcgtttttatt

SEQ ID NO: 802318 - DNA, 33 bp, Homo sapien
atttccaggtttccgctctgcagcgtttttatt

SEQ ID NO: 802319 - DNA, 33 bp, Homo sapien
ctgacagtggtaaatacatatcttagtgctcac

SEQ ID NO: 802320 - DNA, 33 bp, Homo sapien
ctgacagtggtaaatatatatcttagtgctcac

SEQ ID NO: 802321 - DNA, 33 bp, Homo sapien
aaaagtcatccaactacattaaaagtataattt

SEQ ID NO: 802322 - DNA, 33 bp, Homo sapien
aaaagtcatccaactagattaaaagtataattt

SEQ ID NO: 802323 - DNA, 33 bp, Homo sapien
cagattgtacaatgaagcatacttaccaaagac

SEQ ID NO: 802324 - DNA, 33 bp, Homo sapien
cagattgtacaatgaatcatacttaccaaagac

SEQ ID NO: 802325 - DNA, 33 bp, Homo sapien
aatttcttgtattggacaaataatcgacatatt

SEQ ID NO: 802326 - DNA, 33 bp, Homo sapien
aatttcttgtattggataaataatcgacatatt

SEQ ID NO: 802327 - DNA, 33 bp, Homo sapien
aatggtttgaagaaatcaggtgggatctagaaa

SEQ ID NO: 802328 - DNA, 33 bp, Homo sapien
aatggtttgaagaaattaggtgggatctagaaa

SEQ ID NO: 802329 - DNA, 33 bp, Homo sapien
ccaaatggtttcggataaagaacaatggtaatg

SEQ ID NO: 802330 - DNA, 33 bp, Homo sapien
ccaaatggtttcggatgaagaacaatggtaatg

SEQ ID NO: 802331 - DNA, 33 bp, Homo sapien
cagcacgggagaactcaaagtgggctctaatga

SEQ ID NO: 802332 - DNA, 33 bp, Homo sapien
cagcacgggagaactcgaagtgggctctaatga

SEQ ID NO: 802333 - DNA, 33 bp, Homo sapien
tgtcaaatgggcattacatggcacctacctcat

SEQ ID NO: 802334 - DNA, 33 bp, Homo sapien
tgtcaaatgggcattatatggcacctacctcat

SEQ ID NO: 802335 - DNA, 33 bp, Homo sapien
gaaaactgaaaaatcaaaatgcctacttttata

SEQ ID NO: 802336 - DNA, 33 bp, Homo sapien
gaaaactgaaaaatcagaatgcctacttttata

SEQ ID NO: 802337 - DNA, 33 bp, Homo sapien
gtgtagccagttaaacaaggggtgttttggtca

SEQ ID NO: 802338 - DNA, 33 bp, Homo sapien
gtgtagccagttaaacgaggggtgttttggtca

SEQ ID NO: 802339 - DNA, 33 bp, Homo sapien
agtgaaggtatgtattataagacctacagttgc

SEQ ID NO: 802340 - DNA, 33 bp, Homo sapien
agtgaaggtatgtattgtaagacctacagttgc

SEQ ID NO: 802341 - DNA, 33 bp, Homo sapien
tcaattactagtggagcattctgcttcttgcac

SEQ ID NO: 802342 - DNA, 33 bp, Homo sapien
tcaattactagtggagtattctgcttcttgcac

SEQ ID NO: 802343 - DNA, 33 bp, Homo sapien
tatcttaccagtaaaacaggatgataatagcac

SEQ ID NO: 802344 - DNA, 33 bp, Homo sapien
tatcttaccagtaaaataggatgataatagcac

SEQ ID NO: 802345 - DNA, 33 bp, Homo sapien
tgtgagtaaccagacccagcgagagcaatgaat

SEQ ID NO: 802346 - DNA, 33 bp, Homo sapien
tgtgagtaaccagacctagcgagagcaatgaat

SEQ ID NO: 802347 - DNA, 33 bp, Homo sapien
tattcataaacatttcacttttcacatttggaa

SEQ ID NO: 802348 - DNA, 33 bp, Homo sapien
tattcataaacatttcgcttttcacatttggaa

SEQ ID NO: 802349 - DNA, 33 bp, Homo sapien
tggatttcttgcaaataattcaaaagggaaggg

SEQ ID NO: 802350 - DNA, 33 bp, Homo sapien
tggatttcttgcaaatgattcaaaagggaaggg

SEQ ID NO: 802351 - DNA, 33 bp, Homo sapien
tatctgttgcatattacggaatgacaacaaaga

SEQ ID NO: 802352 - DNA, 33 bp, Homo sapien
tatctgttgcatattatggaatgacaacaaaga

SEQ ID NO: 802353 - DNA, 33 bp, Homo sapien
aggcacaatggtgatacagacagcttttgcttt

SEQ ID NO: 802354 - DNA, 33 bp, Homo sapien
aggcacaatggtgatatagacagcttttgcttt

SEQ ID NO: 802355 - DNA, 33 bp, Homo sapien
tgaaaattcaggttaacaccattgcttgttata

SEQ ID NO: 802356 - DNA, 33 bp, Homo sapien
tgaaaattcaggttaagaccattgcttgttata

SEQ ID NO: 802357 - DNA, 33 bp, Homo sapien
ctcaggtatgaaaacactgcagggacagtatgg

SEQ ID NO: 802358 - DNA, 33 bp, Homo sapien
ctcaggtatgaaaacattgcagggacagtatgg

SEQ ID NO: 802359 - DNA, 33 bp, Homo sapien
ctcttttagttgcatacaagtgaatcataatcc

SEQ ID NO: 802360 - DNA, 33 bp, Homo sapien
ctcttttagttgcatataagtgaatcataatcc

SEQ ID NO: 802361 - DNA, 33 bp, Homo sapien
atgtggttcatgttaaagagtttgtatttgaat

SEQ ID NO: 802362 - DNA, 33 bp, Homo sapien
atgtggttcatgttaaggagtttgtatttgaat

SEQ ID NO: 802363 - DNA, 33 bp, Homo sapien
attttccagccttaaaatctacatatagtttat

SEQ ID NO: 802364 - DNA, 33 bp, Homo sapien
attttccagccttaaattctacatatagtttat

SEQ ID NO: 802365 - DNA, 33 bp, Homo sapien
aaaagacacacttcaggagaggaaaaatgcttc

SEQ ID NO: 802366 - DNA, 33 bp, Homo sapien
aaaagacacacttcagtagaggaaaaatgcttc

SEQ ID NO: 802367 - DNA, 33 bp, Homo sapien
aggatatttctccctgaacaatatgtatatcca

SEQ ID NO: 802368 - DNA, 33 bp, Homo sapien
aggatatttctccctggacaatatgtatatcca

SEQ ID NO: 802369 - DNA, 33 bp, Homo sapien
gaataaaactatagcaaattgagttgtgttcta

SEQ ID NO: 802370 - DNA, 33 bp, Homo sapien
gaataaaactatagcagattgagttgtgttcta

SEQ ID NO: 802371 - DNA, 33 bp, Homo sapien
tgattctatgcacactaaagtttaaaaatcaat

SEQ ID NO: 802372 - DNA, 33 bp, Homo sapien
tgattctatgcacactgaagtttaaaaatcaat

SEQ ID NO: 802373 - DNA, 33 bp, Homo sapien
tcttgtaattgggaagaattaaagcacaacaac

SEQ ID NO: 802374 - DNA, 33 bp, Homo sapien
tcttgtaattgggaagtattaaagcacaacaac

SEQ ID NO: 802375 - DNA, 33 bp, Homo sapien
gttctgtctctttaaacttggatccctttgggt

SEQ ID NO: 802376 - DNA, 33 bp, Homo sapien
gttctgtctctttaaatttggatccctttgggt

SEQ ID NO: 802377 - DNA, 33 bp, Homo sapien
tttcccattcccttaacctctaggtgcttccca

SEQ ID NO: 802378 - DNA, 33 bp, Homo sapien
tttcccattcccttaagctctaggtgcttccca

SEQ ID NO: 802379 - DNA, 33 bp, Homo sapien
tctcctgggaccaaaacgttccaatatctctca

SEQ ID NO: 802380 - DNA, 33 bp, Homo sapien
tctcctgggaccaaaatgttccaatatctctca

SEQ ID NO: 802381 - DNA, 33 bp, Homo sapien
caccctaggtgatttcaaagcaggtgattcatg

SEQ ID NO: 802382 - DNA, 33 bp, Homo sapien
caccctaggtgatttcgaagcaggtgattcatg

SEQ ID NO: 802383 - DNA, 33 bp, Homo sapien
tgaagtaattaccaaaatctagggttcataaga

SEQ ID NO: 802384 - DNA, 33 bp, Homo sapien
tgaagtaattaccaaactctagggttcataaga

SEQ ID NO: 802385 - DNA, 33 bp, Homo sapien
gtcttctaatttggaagatgcattctatggtta

SEQ ID NO: 802386 - DNA, 33 bp, Homo sapien
gtcttctaatttggaatatgcattctatggtta

SEQ ID NO: 802387 - DNA, 33 bp, Homo sapien
tatgatagaactgcaaatgcaaactaagactgt

SEQ ID NO: 802388 - DNA, 33 bp, Homo sapien
tatgatagaactgcaagtgcaaactaagactgt

SEQ ID NO: 802389 - DNA, 33 bp, Homo sapien
ctcaaggctttttagcaccccagttggtccact

SEQ ID NO: 802390 - DNA, 33 bp, Homo sapien
ctcaaggctttttagcgccccagttggtccact

SEQ ID NO: 802391 - DNA, 33 bp, Homo sapien
tgtgactacaaggactcactactattgaaatga

SEQ ID NO: 802392 - DNA, 33 bp, Homo sapien
tgtgactacaaggactgactactattgaaatga

SEQ ID NO: 802393 - DNA, 33 bp, Homo sapien
gggatagacaggcaaagaaacagatgacttagt

SEQ ID NO: 802394 - DNA, 33 bp, Homo sapien
gggatagacaggcaaataaacagatgacttagt

SEQ ID NO: 802395 - DNA, 33 bp, Homo sapien
ggaagctccttctgctcaattgttcagtgatta

SEQ ID NO: 802396 - DNA, 33 bp, Homo sapien
ggaagctccttctgcttaattgttcagtgatta

SEQ ID NO: 802397 - DNA, 33 bp, Homo sapien
ttttaagaacctgaaaatccctcattaagtaaa

SEQ ID NO: 802398 - DNA, 33 bp, Homo sapien
ttttaagaacctgaaattccctcattaagtaaa

SEQ ID NO: 802399 - DNA, 33 bp, Homo sapien
tctcagcaaccttccaggtagtttcatgaatat

SEQ ID NO: 802400 - DNA, 33 bp, Homo sapien
tctcagcaaccttccatgtagtttcatgaatat

SEQ ID NO: 802401 - DNA, 33 bp, Homo sapien
aagccttcagattcacaatagagagggctccat

SEQ ID NO: 802402 - DNA, 33 bp, Homo sapien
aagccttcagattcacgatagagagggctccat

SEQ ID NO: 802403 - DNA, 33 bp, Homo sapien
gtagaaccatttgcacaagttcaccgattccca

SEQ ID NO: 802404 - DNA, 33 bp, Homo sapien
gtagaaccatttgcacgagttcaccgattccca

SEQ ID NO: 802405 - DNA, 33 bp, Homo sapien
ttgaaaggcagttcaactactgacccgctcaat

SEQ ID NO: 802406 - DNA, 33 bp, Homo sapien
ttgaaaggcagttcaattactgacccgctcaat

SEQ ID NO: 802407 - DNA, 33 bp, Homo sapien
cagtgctctgtaggaaatgtgttcaatttgcta

SEQ ID NO: 802408 - DNA, 33 bp, Homo sapien
cagtgctctgtaggaactgtgttcaatttgcta

SEQ ID NO: 802409 - DNA, 33 bp, Homo sapien
cttgatcagagaaatactataaatgtacctgga

SEQ ID NO: 802410 - DNA, 33 bp, Homo sapien
cttgatcagagaaatagtataaatgtacctgga

SEQ ID NO: 802411 - DNA, 33 bp, Homo sapien
gaacaaaggacttaagaatgcaaccatctaaca

SEQ ID NO: 802412 - DNA, 33 bp, Homo sapien
gaacaaaggacttaaggatgcaaccatctaaca

SEQ ID NO: 802413 - DNA, 33 bp, Homo sapien
tctggtatagacggcaatatgctggttttatac

SEQ ID NO: 802414 - DNA, 33 bp, Homo sapien
tctggtatagacggcagtatgctggttttatac

SEQ ID NO: 802415 - DNA, 33 bp, Homo sapien
agattaggaaaaccaacgtgaagctccctacca

SEQ ID NO: 802416 - DNA, 33 bp, Homo sapien
agattaggaaaaccaatgtgaagctccctacca

SEQ ID NO: 802417 - DNA, 33 bp, Homo sapien
ttaatctcttcttttccacagagctcaataact

SEQ ID NO: 802418 - DNA, 33 bp, Homo sapien
ttaatctcttcttttctacagagctcaataact

SEQ ID NO: 802419 - DNA, 33 bp, Homo sapien
tccacagtactacccacagagtggtcaataact

SEQ ID NO: 802420 - DNA, 33 bp, Homo sapien
tccacagtactacccatagagtggtcaataact

SEQ ID NO: 802421 - DNA, 33 bp, Homo sapien
atgatcattgcagacacacatatttgttcactt

SEQ ID NO: 802422 - DNA, 33 bp, Homo sapien
atgatcattgcagacatacatatttgttcactt

SEQ ID NO: 802423 - DNA, 33 bp, Homo sapien
cactgcttataagagacgcttagttaatgcatg

SEQ ID NO: 802424 - DNA, 33 bp, Homo sapien
cactgcttataagagatgcttagttaatgcatg

SEQ ID NO: 802425 - DNA, 33 bp, Homo sapien
tctaattctgttcacacccacataaaagagctg

SEQ ID NO: 802426 - DNA, 33 bp, Homo sapien
tctaattctgttcacatccacataaaagagctg

SEQ ID NO: 802427 - DNA, 33 bp, Homo sapien
aattctgttggtagaactatagctcatcactgt

SEQ ID NO: 802428 - DNA, 33 bp, Homo sapien
aattctgttggtagaattatagctcatcactgt

SEQ ID NO: 802429 - DNA, 33 bp, Homo sapien
gaaagaggtgctgttactaaatgaattgagtag

SEQ ID NO: 802430 - DNA, 33 bp, Homo sapien
gaaagaggtgctgttattaaatgaattgagtag

SEQ ID NO: 802431 - DNA, 33 bp, Homo sapien
actataattccagtcaacttgtagcctcataca

SEQ ID NO: 802432 - DNA, 33 bp, Homo sapien
actataattccagtcatcttgtagcctcataca

SEQ ID NO: 802433 - DNA, 33 bp, Homo sapien
cagggagaaggagtaaatgtcccattgggcctc

SEQ ID NO: 802434 - DNA, 33 bp, Homo sapien
cagggagaaggagtaagtgtcccattgggcctc

SEQ ID NO: 802435 - DNA, 33 bp, Homo sapien
atttgagaaacaatacaggtaccctcagcgtat

SEQ ID NO: 802436 - DNA, 33 bp, Homo sapien
atttgagaaacaatacgggtaccctcagcgtat

SEQ ID NO: 802437 - DNA, 33 bp, Homo sapien
actgtaatcaacaatggactcttcttcagagct

SEQ ID NO: 802438 - DNA, 33 bp, Homo sapien
actgtaatcaacaatgtactcttcttcagagct

SEQ ID NO: 802439 - DNA, 33 bp, Homo sapien
gatcacacacaaaacactgaggtatagaaaagg

SEQ ID NO: 802440 - DNA, 33 bp, Homo sapien
gatcacacacaaaacattgaggtatagaaaagg

SEQ ID NO: 802441 - DNA, 33 bp, Homo sapien
aggaagtgcttctaagaagtaaaggaactcttg

SEQ ID NO: 802442 - DNA, 33 bp, Homo sapien
aggaagtgcttctaaggagtaaaggaactcttg

SEQ ID NO: 802443 - DNA, 33 bp, Homo sapien
aatgaaacagaacagagtcctcacaaataatgc

SEQ ID NO: 802444 - DNA, 33 bp, Homo sapien
aatgaaacagaacagattcctcacaaataatgc

SEQ ID NO: 802445 - DNA, 33 bp, Homo sapien
tcatttcccattatgcactgactcagggtaggg

SEQ ID NO: 802446 - DNA, 33 bp, Homo sapien
tcatttcccattatgcgctgactcagggtaggg

SEQ ID NO: 802447 - DNA, 33 bp, Homo sapien
ctgtgcttttctttaccatggctattgtatcct

SEQ ID NO: 802448 - DNA, 33 bp, Homo sapien
ctgtgcttttctttacgatggctattgtatcct

SEQ ID NO: 802449 - DNA, 33 bp, Homo sapien
gatagtggttacattcccatcagctgttaatca

SEQ ID NO: 802450 - DNA, 33 bp, Homo sapien
gatagtggttacattctcatcagctgttaatca

SEQ ID NO: 802451 - DNA, 33 bp, Homo sapien
gcaatctgctgtagaaatcttttcatttagatt

SEQ ID NO: 802452 - DNA, 33 bp, Homo sapien
gcaatctgctgtagaactcttttcatttagatt

SEQ ID NO: 802453 - DNA, 33 bp, Homo sapien
cagttgccgatgtgccactttgcctgagcattg

SEQ ID NO: 802454 - DNA, 33 bp, Homo sapien
cagttgccgatgtgccgctttgcctgagcattg

SEQ ID NO: 802455 - DNA, 33 bp, Homo sapien
gataagggcctaatgacgacctcacattgttcc

SEQ ID NO: 802456 - DNA, 33 bp, Homo sapien
gataagggcctaatgatgacctcacattgttcc

SEQ ID NO: 802457 - DNA, 33 bp, Homo sapien
aggaggattggtggatcatatggcaattccatt

SEQ ID NO: 802458 - DNA, 33 bp, Homo sapien
aggaggattggtggattatatggcaattccatt

SEQ ID NO: 802459 - DNA, 33 bp, Homo sapien
tcaatttgcttacccacaaaggcacttcaaaat

SEQ ID NO: 802460 - DNA, 33 bp, Homo sapien
tcaatttgcttacccataaaggcacttcaaaat

SEQ ID NO: 802461 - DNA, 33 bp, Homo sapien
tgtttgcctcgaggaaataactgatattgagca

SEQ ID NO: 802462 - DNA, 33 bp, Homo sapien
tgtttgcctcgaggaagtaactgatattgagca

SEQ ID NO: 802463 - DNA, 33 bp, Homo sapien
atcatgaaacaatagaatcaatatcatgagaat

SEQ ID NO: 802464 - DNA, 33 bp, Homo sapien
atcatgaaacaatagagtcaatatcatgagaat

SEQ ID NO: 802465 - DNA, 33 bp, Homo sapien
tctacagaaacaggaggaatgaaatgatatgaa

SEQ ID NO: 802466 - DNA, 33 bp, Homo sapien
tctacagaaacaggagtaatgaaatgatatgaa

SEQ ID NO: 802467 - DNA, 33 bp, Homo sapien
acaacttagcttcatcaactcttcatttcccaa

SEQ ID NO: 802468 - DNA, 33 bp, Homo sapien
acaacttagcttcatcgactcttcatttcccaa

SEQ ID NO: 802469 - DNA, 33 bp, Homo sapien
aacatgaaacctaaaccgcatattctaccttat

SEQ ID NO: 802470 - DNA, 33 bp, Homo sapien
aacatgaaacctaaactgcatattctaccttat

SEQ ID NO: 802471 - DNA, 33 bp, Homo sapien
tggcaattccacaagaatatagaacgagaaata

SEQ ID NO: 802472 - DNA, 33 bp, Homo sapien
tggcaattccacaagagtatagaacgagaaata

SEQ ID NO: 802473 - DNA, 33 bp, Homo sapien
cttccagatgtgcagcacagttcctagacagga

SEQ ID NO: 802474 - DNA, 33 bp, Homo sapien
cttccagatgtgcagcccagttcctagacagga

SEQ ID NO: 802475 - DNA, 33 bp, Homo sapien
ggaggcatatagactaccggtggtaaagaaaca

SEQ ID NO: 802476 - DNA, 33 bp, Homo sapien
ggaggcatatagactagcggtggtaaagaaaca

SEQ ID NO: 802477 - DNA, 33 bp, Homo sapien
tgaataagcacaccacgagaaaggcagataagc

SEQ ID NO: 802478 - DNA, 33 bp, Homo sapien
tgaataagcacaccactagaaaggcagataagc

SEQ ID NO: 802479 - DNA, 33 bp, Homo sapien
tggattaagtttttaacgtggatttgtctgtct

SEQ ID NO: 802480 - DNA, 33 bp, Homo sapien
tggattaagtttttaaggtggatttgtctgtct

SEQ ID NO: 802481 - DNA, 33 bp, Homo sapien
agaagtgcttttatcacagtttcgaaagagaca

SEQ ID NO: 802482 - DNA, 33 bp, Homo sapien
agaagtgcttttatcagagtttcgaaagagaca

SEQ ID NO: 802483 - DNA, 33 bp, Homo sapien
tctgctttttgggaaactcaggctaagataatt

SEQ ID NO: 802484 - DNA, 33 bp, Homo sapien
tctgctttttgggaaattcaggctaagataatt

SEQ ID NO: 802485 - DNA, 33 bp, Homo sapien
actttaagggaattaacgtcctagaggagtgaa

SEQ ID NO: 802486 - DNA, 33 bp, Homo sapien
actttaagggaattaatgtcctagaggagtgaa

SEQ ID NO: 802487 - DNA, 33 bp, Homo sapien
gaggccaatgttaaaactaaacgactgtttcct

SEQ ID NO: 802488 - DNA, 33 bp, Homo sapien
gaggccaatgttaaaattaaacgactgtttcct

SEQ ID NO: 802489 - DNA, 33 bp, Homo sapien
agggctgctgcagaaccaaattccagcttgaac

SEQ ID NO: 802490 - DNA, 33 bp, Homo sapien
agggctgctgcagaactaaattccagcttgaac

SEQ ID NO: 802491 - DNA, 33 bp, Homo sapien
gcagacaatcatatgcactgaactgatttctta

SEQ ID NO: 802492 - DNA, 33 bp, Homo sapien
gcagacaatcatatgcgctgaactgatttctta

SEQ ID NO: 802493 - DNA, 33 bp, Homo sapien
gggaacagtaaatgcaaggaccctgaggtgaga

SEQ ID NO: 802494 - DNA, 33 bp, Homo sapien
gggaacagtaaatgcagggaccctgaggtgaga

SEQ ID NO: 802495 - DNA, 33 bp, Homo sapien
acacctttaagacttcgaccttcattgtctctt

SEQ ID NO: 802496 - DNA, 33 bp, Homo sapien
acacctttaagacttctaccttcattgtctctt

SEQ ID NO: 802497 - DNA, 33 bp, Homo sapien
ctatgttatgacaagactctcaaggaaattatg

SEQ ID NO: 802498 - DNA, 33 bp, Homo sapien
ctatgttatgacaagagtctcaaggaaattatg

SEQ ID NO: 802499 - DNA, 33 bp, Homo sapien
agttaaaatcataggcacagaaagcagaaagat

SEQ ID NO: 802500 - DNA, 33 bp, Homo sapien
agttaaaatcataggctcagaaagcagaaagat

SEQ ID NO: 802501 - DNA, 33 bp, Homo sapien
caagaggtgaaagcaacccaaatattcactgac

SEQ ID NO: 802502 - DNA, 33 bp, Homo sapien
caagaggtgaaagcaatccaaatattcactgac

SEQ ID NO: 802503 - DNA, 33 bp, Homo sapien
ttgtaacctgcaaccacgtctatatctaaaata

SEQ ID NO: 802504 - DNA, 33 bp, Homo sapien
ttgtaacctgcaaccatgtctatatctaaaata

SEQ ID NO: 802505 - DNA, 33 bp, Homo sapien
cttactatgcttataactcaaatggaaacaaaa

SEQ ID NO: 802506 - DNA, 33 bp, Homo sapien
cttactatgcttataattcaaatggaaacaaaa

SEQ ID NO: 802507 - DNA, 33 bp, Homo sapien
gttgctgaaaggcccagaactttaaaatcatga

SEQ ID NO: 802508 - DNA, 33 bp, Homo sapien
gttgctgaaaggcccataactttaaaatcatga

SEQ ID NO: 802509 - DNA, 33 bp, Homo sapien
gacttgtcatgggttacctaaaaggccatgtat

SEQ ID NO: 802510 - DNA, 33 bp, Homo sapien
gacttgtcatgggttagctaaaaggccatgtat

SEQ ID NO: 802511 - DNA, 33 bp, Homo sapien
gctccattctgaaagaccttaccgggaacacta

SEQ ID NO: 802512 - DNA, 33 bp, Homo sapien
gctccattctgaaagatcttaccgggaacacta

SEQ ID NO: 802513 - DNA, 33 bp, Homo sapien
caagactcagtgtagaataaaaaaatatataaa

SEQ ID NO: 802514 - DNA, 33 bp, Homo sapien
caagactcagtgtagattaaaaaaatatataaa

SEQ ID NO: 802515 - DNA, 33 bp, Homo sapien
ttcaaaacggactgtaagcattactaacattta

SEQ ID NO: 802516 - DNA, 33 bp, Homo sapien
ttcaaaacggactgtaggcattactaacattta

SEQ ID NO: 802517 - DNA, 33 bp, Homo sapien
gagatgactttgataccgatatgtgatttgatt

SEQ ID NO: 802518 - DNA, 33 bp, Homo sapien
gagatgactttgatactgatatgtgatttgatt

SEQ ID NO: 802519 - DNA, 33 bp, Homo sapien
gtgaggaaaatttacactctgttgagaatccct

SEQ ID NO: 802520 - DNA, 33 bp, Homo sapien
gtgaggaaaatttacattctgttgagaatccct

SEQ ID NO: 802521 - DNA, 33 bp, Homo sapien
gttacagttgctctgaatacatttttttagtct

SEQ ID NO: 802522 - DNA, 33 bp, Homo sapien
gttacagttgctctgagtacatttttttagtct

SEQ ID NO: 802523 - DNA, 33 bp, Homo sapien
ataaaatgctgaaataaaattcattaggctgaa

SEQ ID NO: 802524 - DNA, 33 bp, Homo sapien
ataaaatgctgaaatataattcattaggctgaa

SEQ ID NO: 802525 - DNA, 33 bp, Homo sapien
aaatgtacattcaagacgggttatatgatgggc

SEQ ID NO: 802526 - DNA, 33 bp, Homo sapien
aaatgtacattcaagatgggttatatgatgggc

SEQ ID NO: 802527 - DNA, 33 bp, Homo sapien
catcagtgagtgaataacatttgttgagagcta

SEQ ID NO: 802528 - DNA, 33 bp, Homo sapien
catcagtgagtgaatagcatttgttgagagcta

SEQ ID NO: 802529 - DNA, 33 bp, Homo sapien
aagtgtaggctacaaccatatgctttaagtgaa

SEQ ID NO: 802530 - DNA, 33 bp, Homo sapien
aagtgtaggctacaactatatgctttaagtgaa

SEQ ID NO: 802531 - DNA, 33 bp, Homo sapien
aaagaggttgctaaaaattaataccaaaaaatt

SEQ ID NO: 802532 - DNA, 33 bp, Homo sapien
aaagaggttgctaaaacttaataccaaaaaatt

SEQ ID NO: 802533 - DNA, 33 bp, Homo sapien
attaactcatcattgaccttactccatctcatg

SEQ ID NO: 802534 - DNA, 33 bp, Homo sapien
attaactcatcattgatcttactccatctcatg

SEQ ID NO: 802535 - DNA, 33 bp, Homo sapien
atgtctacaaggagaactgatataattgtcttg

SEQ ID NO: 802536 - DNA, 33 bp, Homo sapien
atgtctacaaggagaagtgatataattgtcttg

SEQ ID NO: 802537 - DNA, 33 bp, Homo sapien
ttactgaggaccgttcaattctaggcattgtcc

SEQ ID NO: 802538 - DNA, 33 bp, Homo sapien
ttactgaggaccgttcgattctaggcattgtcc

SEQ ID NO: 802539 - DNA, 33 bp, Homo sapien
acataggtacataagacagagctaataactaaa

SEQ ID NO: 802540 - DNA, 33 bp, Homo sapien
acataggtacataagagagagctaataactaaa

SEQ ID NO: 802541 - DNA, 33 bp, Homo sapien
ctctgtttttagaataactgtagcatttaatgt

SEQ ID NO: 802542 - DNA, 33 bp, Homo sapien
ctctgtttttagaatatctgtagcatttaatgt

SEQ ID NO: 802543 - DNA, 33 bp, Homo sapien
taaatgcaaatagatacatatgactagtggcta

SEQ ID NO: 802544 - DNA, 33 bp, Homo sapien
taaatgcaaatagatagatatgactagtggcta

SEQ ID NO: 802545 - DNA, 33 bp, Homo sapien
ctggtggctctttcccacaacatagaaagatat

SEQ ID NO: 802546 - DNA, 33 bp, Homo sapien
ctggtggctctttcccgcaacatagaaagatat

SEQ ID NO: 802547 - DNA, 33 bp, Homo sapien
ttacaatggggaaaaacacatattgagggaaat

SEQ ID NO: 802548 - DNA, 33 bp, Homo sapien
ttacaatggggaaaaagacatattgagggaaat

SEQ ID NO: 802549 - DNA, 33 bp, Homo sapien
aataagcacacacagaactgacttcttatttag

SEQ ID NO: 802550 - DNA, 33 bp, Homo sapien
aataagcacacacagatctgacttcttatttag

SEQ ID NO: 802551 - DNA, 33 bp, Homo sapien
agctcctcttgatgagacactggcttcagggtt

SEQ ID NO: 802552 - DNA, 33 bp, Homo sapien
agctcctcttgatgaggcactggcttcagggtt

SEQ ID NO: 802553 - DNA, 33 bp, Homo sapien
tgcccagattggcaaaacaacttttccaaactc

SEQ ID NO: 802554 - DNA, 33 bp, Homo sapien
tgcccagattggcaaagcaacttttccaaactc

SEQ ID NO: 802555 - DNA, 33 bp, Homo sapien
ctaatccagtacttgaacaaattatttgaccac

SEQ ID NO: 802556 - DNA, 33 bp, Homo sapien
ctaatccagtacttgagcaaattatttgaccac

SEQ ID NO: 802557 - DNA, 33 bp, Homo sapien
tttgtagtggaatacacgggctttgtggtcaaa

SEQ ID NO: 802558 - DNA, 33 bp, Homo sapien
tttgtagtggaatacatgggctttgtggtcaaa

SEQ ID NO: 802559 - DNA, 33 bp, Homo sapien
aaacatatgagctgaacatattatcagttgaga

SEQ ID NO: 802560 - DNA, 33 bp, Homo sapien
aaacatatgagctgaagatattatcagttgaga

SEQ ID NO: 802561 - DNA, 33 bp, Homo sapien
acattcatgtccactaatacatagcattttaac

SEQ ID NO: 802562 - DNA, 33 bp, Homo sapien
acattcatgtccactattacatagcattttaac

SEQ ID NO: 802563 - DNA, 33 bp, Homo sapien
atgttggcatgaattcactgtgcttgtttctgt

SEQ ID NO: 802564 - DNA, 33 bp, Homo sapien
atgttggcatgaattcgctgtgcttgtttctgt

SEQ ID NO: 802565 - DNA, 33 bp, Homo sapien
aatttaatcacaacacaataagacttacatcca

SEQ ID NO: 802566 - DNA, 33 bp, Homo sapien
aatttaatcacaacacgataagacttacatcca

SEQ ID NO: 802567 - DNA, 33 bp, Homo sapien
cgacaaagatataaccaaaaaaccaccttgtgc

SEQ ID NO: 802568 - DNA, 33 bp, Homo sapien
cgacaaagatataaccgaaaaaccaccttgtgc

SEQ ID NO: 802569 - DNA, 33 bp, Homo sapien
tatcctctgaagtactaaataccactgtcaatt

SEQ ID NO: 802570 - DNA, 33 bp, Homo sapien
tatcctctgaagtactgaataccactgtcaatt

SEQ ID NO: 802571 - DNA, 33 bp, Homo sapien
aaagcccaagaaccagcagcaccaaagtctgag

SEQ ID NO: 802572 - DNA, 33 bp, Homo sapien
aaagcccaagaaccaggagcaccaaagtctgag

SEQ ID NO: 802573 - DNA, 33 bp, Homo sapien
ccacatagtaatctgaggcaggtaattcagcag

SEQ ID NO: 802574 - DNA, 33 bp, Homo sapien
ccacatagtaatctgatgcaggtaattcagcag

SEQ ID NO: 802575 - DNA, 33 bp, Homo sapien
agagtgacagtggtccagcttttaaatccacgg

SEQ ID NO: 802576 - DNA, 33 bp, Homo sapien
agagtgacagtggtccggcttttaaatccacgg

SEQ ID NO: 802577 - DNA, 33 bp, Homo sapien
gctgttgttaggggaccattctataatgtcaat

SEQ ID NO: 802578 - DNA, 33 bp, Homo sapien
gctgttgttaggggactattctataatgtcaat

SEQ ID NO: 802579 - DNA, 33 bp, Homo sapien
gattcaagggtgactaaccaagagaagcagaca

SEQ ID NO: 802580 - DNA, 33 bp, Homo sapien
gattcaagggtgactagccaagagaagcagaca

SEQ ID NO: 802581 - DNA, 33 bp, Homo sapien
aacttgaataccaaatgaacctaaaaattgtgt

SEQ ID NO: 802582 - DNA, 33 bp, Homo sapien
aacttgaataccaaattaacctaaaaattgtgt

SEQ ID NO: 802583 - DNA, 33 bp, Homo sapien
ctaatttgcagatatcaaaatggaggtatagta

SEQ ID NO: 802584 - DNA, 33 bp, Homo sapien
ctaatttgcagatatcgaaatggaggtatagta

SEQ ID NO: 802585 - DNA, 33 bp, Homo sapien
agcataaaactagcagacaaaatttaatgatta

SEQ ID NO: 802586 - DNA, 33 bp, Homo sapien
agcataaaactagcaggcaaaatttaatgatta

SEQ ID NO: 802587 - DNA, 33 bp, Homo sapien
tttttttcacaagacaatgacatcatcggtcag

SEQ ID NO: 802588 - DNA, 33 bp, Homo sapien
tttttttcacaagacagtgacatcatcggtcag

SEQ ID NO: 802589 - DNA, 33 bp, Homo sapien
ggattagacggaaaagaaaagaatgtaactgtc

SEQ ID NO: 802590 - DNA, 33 bp, Homo sapien
ggattagacggaaaagcaaagaatgtaactgtc

SEQ ID NO: 802591 - DNA, 33 bp, Homo sapien
caatattaactttaaacgtaaacaggctcaatg

SEQ ID NO: 802592 - DNA, 33 bp, Homo sapien
caatattaactttaaatgtaaacaggctcaatg

SEQ ID NO: 802593 - DNA, 33 bp, Homo sapien
tgcaacattccacagcgaaataaaggaatatgc

SEQ ID NO: 802594 - DNA, 33 bp, Homo sapien
tgcaacattccacagctaaataaaggaatatgc

SEQ ID NO: 802595 - DNA, 33 bp, Homo sapien
atcttcaataccaaataataactttcagtgact

SEQ ID NO: 802596 - DNA, 33 bp, Homo sapien
atcttcaataccaaatgataactttcagtgact

SEQ ID NO: 802597 - DNA, 33 bp, Homo sapien
tctgaagaagaaaaaaaggtcaatgattccata

SEQ ID NO: 802598 - DNA, 33 bp, Homo sapien
tctgaagaagaaaaaagggtcaatgattccata

SEQ ID NO: 802599 - DNA, 33 bp, Homo sapien
catgaagattaagtccaaatttccagttaagac

SEQ ID NO: 802600 - DNA, 33 bp, Homo sapien
catgaagattaagtcctaatttccagttaagac

SEQ ID NO: 802601 - DNA, 33 bp, Homo sapien
ccagaactgaggaatacaatcactgagctgaaa

SEQ ID NO: 802602 - DNA, 33 bp, Homo sapien
ccagaactgaggaatataatcactgagctgaaa

SEQ ID NO: 802603 - DNA, 33 bp, Homo sapien
aagttacaaattaaaaagagacattgcaagtga

SEQ ID NO: 802604 - DNA, 33 bp, Homo sapien
aagttacaaattaaaaggagacattgcaagtga

SEQ ID NO: 802605 - DNA, 33 bp, Homo sapien
ccacaaaagacccataatagccaaataaatctt

SEQ ID NO: 802606 - DNA, 33 bp, Homo sapien
ccacaaaagacccatactagccaaataaatctt

SEQ ID NO: 802607 - DNA, 33 bp, Homo sapien
ctgagaatatggccacaccaatcattgttctgc

SEQ ID NO: 802608 - DNA, 33 bp, Homo sapien
ctgagaatatggccacgccaatcattgttctgc

SEQ ID NO: 802609 - DNA, 33 bp, Homo sapien
tgaagatccatatggtaacatacatgaaatgta

SEQ ID NO: 802610 - DNA, 33 bp, Homo sapien
tgaagatccatatggtgacatacatgaaatgta

SEQ ID NO: 802611 - DNA, 33 bp, Homo sapien
agcttgctcaggaaaacaaaatgccttggagaa

SEQ ID NO: 802612 - DNA, 33 bp, Homo sapien
agcttgctcaggaaaataaaatgccttggagaa

SEQ ID NO: 802613 - DNA, 33 bp, Homo sapien
tatgatttttgctttacgtcagcttctaagaag

SEQ ID NO: 802614 - DNA, 33 bp, Homo sapien
tatgatttttgctttatgtcagcttctaagaag

SEQ ID NO: 802615 - DNA, 33 bp, Homo sapien
ttatttgaaataaatcccaagatgtgagacttc

SEQ ID NO: 802616 - DNA, 33 bp, Homo sapien
ttatttgaaataaatcgcaagatgtgagacttc

SEQ ID NO: 802617 - DNA, 33 bp, Homo sapien
tcaaggagacatactcaagatggaatcaccgtt

SEQ ID NO: 802618 - DNA, 33 bp, Homo sapien
tcaaggagacatactcgagatggaatcaccgtt

SEQ ID NO: 802619 - DNA, 33 bp, Homo sapien
gtatatgctaaattaactgataatgactttcct

SEQ ID NO: 802620 - DNA, 33 bp, Homo sapien
gtatatgctaaattaattgataatgactttcct

SEQ ID NO: 802621 - DNA, 33 bp, Homo sapien
ttgtggtagctttaacaccttgcacatgatatg

SEQ ID NO: 802622 - DNA, 33 bp, Homo sapien
ttgtggtagctttaacgccttgcacatgatatg

SEQ ID NO: 802623 - DNA, 33 bp, Homo sapien
ggctaacataattaaaaaattcaggcatagctg

SEQ ID NO: 802624 - DNA, 33 bp, Homo sapien
ggctaacataattaaacaattcaggcatagctg

SEQ ID NO: 802625 - DNA, 33 bp, Homo sapien
ctttagggaaatatggaacattactaagaggac

SEQ ID NO: 802626 - DNA, 33 bp, Homo sapien
ctttagggaaatatggtacattactaagaggac

SEQ ID NO: 802627 - DNA, 33 bp, Homo sapien
ggtgattgactgaacaagataggccttaattta

SEQ ID NO: 802628 - DNA, 33 bp, Homo sapien
ggtgattgactgaacaggataggccttaattta

SEQ ID NO: 802629 - DNA, 33 bp, Homo sapien
atgcaagaacaaaacacagttatgcaagaacag

SEQ ID NO: 802630 - DNA, 33 bp, Homo sapien
atgcaagaacaaaacagagttatgcaagaacag

SEQ ID NO: 802631 - DNA, 33 bp, Homo sapien
ctgattgttagtgccacctctgtacttttgata

SEQ ID NO: 802632 - DNA, 33 bp, Homo sapien
ctgattgttagtgccatctctgtacttttgata

SEQ ID NO: 802633 - DNA, 33 bp, Homo sapien
aaggaatatggctgaagtgtttgtgttctagtg

SEQ ID NO: 802634 - DNA, 33 bp, Homo sapien
aaggaatatggctgaattgtttgtgttctagtg

SEQ ID NO: 802635 - DNA, 33 bp, Homo sapien
tctcatttttcaaactaagtgaaggtaaaaaga

SEQ ID NO: 802636 - DNA, 33 bp, Homo sapien
tctcatttttcaaactgagtgaaggtaaaaaga

SEQ ID NO: 802637 - DNA, 33 bp, Homo sapien
ttctctggaaacataaatcagcaccactctggc

SEQ ID NO: 802638 - DNA, 33 bp, Homo sapien
ttctctggaaacataagtcagcaccactctggc

SEQ ID NO: 802639 - DNA, 33 bp, Homo sapien
agataaattgtttcaccaaatccttacattaat

SEQ ID NO: 802640 - DNA, 33 bp, Homo sapien
agataaattgtttcacgaaatccttacattaat

SEQ ID NO: 802641 - DNA, 33 bp, Homo sapien
ccgtcaatatcagcaccatacgaaggccccaag

SEQ ID NO: 802642 - DNA, 33 bp, Homo sapien
ccgtcaatatcagcacgatacgaaggccccaag

SEQ ID NO: 802643 - DNA, 33 bp, Homo sapien
agttggaagcctagcagtactggcagaagaaaa

SEQ ID NO: 802644 - DNA, 33 bp, Homo sapien
agttggaagcctagcattactggcagaagaaaa

SEQ ID NO: 802645 - DNA, 33 bp, Homo sapien
ggtaggggtctgtagacagccatgagtatccct

SEQ ID NO: 802646 - DNA, 33 bp, Homo sapien
ggtaggggtctgtagatagccatgagtatccct

SEQ ID NO: 802647 - DNA, 33 bp, Homo sapien
tagacaaaatgcaaaccgcacgaactgtgatag

SEQ ID NO: 802648 - DNA, 33 bp, Homo sapien
tagacaaaatgcaaactgcacgaactgtgatag

SEQ ID NO: 802649 - DNA, 33 bp, Homo sapien
catatgctttgaaccactgaccaatgtctggtg

SEQ ID NO: 802650 - DNA, 33 bp, Homo sapien
catatgctttgaaccagtgaccaatgtctggtg

SEQ ID NO: 802651 - DNA, 33 bp, Homo sapien
gaacagtagcttaggacacttatagtttaatac

SEQ ID NO: 802652 - DNA, 33 bp, Homo sapien
gaacagtagcttaggatacttatagtttaatac

SEQ ID NO: 802653 - DNA, 33 bp, Homo sapien
tgttactttaaatatgaaatgaaaacatcactc

SEQ ID NO: 802654 - DNA, 33 bp, Homo sapien
tgttactttaaatatggaatgaaaacatcactc

SEQ ID NO: 802655 - DNA, 33 bp, Homo sapien
acatctttcaatatcaagctctcttggtacatt

SEQ ID NO: 802656 - DNA, 33 bp, Homo sapien
acatctttcaatatcaggctctcttggtacatt

SEQ ID NO: 802657 - DNA, 33 bp, Homo sapien
ggggttcctatgccacacaacctattattttcc

SEQ ID NO: 802658 - DNA, 33 bp, Homo sapien
ggggttcctatgccacgcaacctattattttcc

SEQ ID NO: 802659 - DNA, 33 bp, Homo sapien
cccactttgagcagaactggacaggccctggta

SEQ ID NO: 802660 - DNA, 33 bp, Homo sapien
cccactttgagcagaattggacaggccctggta

SEQ ID NO: 802661 - DNA, 33 bp, Homo sapien
catgaaagccttacacacaaatctgtttctctc

SEQ ID NO: 802662 - DNA, 33 bp, Homo sapien
catgaaagccttacacgcaaatctgtttctctc

SEQ ID NO: 802663 - DNA, 33 bp, Homo sapien
gtacagtgaaaagttaaatggtgttgatttcta

SEQ ID NO: 802664 - DNA, 33 bp, Homo sapien
gtacagtgaaaagttacatggtgttgatttcta

SEQ ID NO: 802665 - DNA, 33 bp, Homo sapien
aaatctatattcctcacctgtgaaatccttgag

SEQ ID NO: 802666 - DNA, 33 bp, Homo sapien
aaatctatattcctcatctgtgaaatccttgag

SEQ ID NO: 802667 - DNA, 33 bp, Homo sapien
atagtgaatcatagtccaatcggatgtgtaaac

SEQ ID NO: 802668 - DNA, 33 bp, Homo sapien
atagtgaatcatagtctaatcggatgtgtaaac

SEQ ID NO: 802669 - DNA, 33 bp, Homo sapien
ggtttgtggtacgaacaaatctgtaacccaggt

SEQ ID NO: 802670 - DNA, 33 bp, Homo sapien
ggtttgtggtacgaacgaatctgtaacccaggt

SEQ ID NO: 802671 - DNA, 33 bp, Homo sapien
aagttgattttttgtacattgtaagaggtagga

SEQ ID NO: 802672 - DNA, 33 bp, Homo sapien
aagttgattttttgtatattgtaagaggtagga

SEQ ID NO: 802673 - DNA, 33 bp, Homo sapien
caaaaatgagattgcaaaaacttctttatgtac

SEQ ID NO: 802674 - DNA, 33 bp, Homo sapien
caaaaatgagattgcacaaacttctttatgtac

SEQ ID NO: 802675 - DNA, 33 bp, Homo sapien
aataagggtcttaggagtcagtggcaggaatgg

SEQ ID NO: 802676 - DNA, 33 bp, Homo sapien
aataagggtcttaggattcagtggcaggaatgg

SEQ ID NO: 802677 - DNA, 33 bp, Homo sapien
aaattggagataagtacgtctgcttacctaaac

SEQ ID NO: 802678 - DNA, 33 bp, Homo sapien
aaattggagataagtatgtctgcttacctaaac

SEQ ID NO: 802679 - DNA, 33 bp, Homo sapien
tgacaatcagcccagaccttttcacacctctct

SEQ ID NO: 802680 - DNA, 33 bp, Homo sapien
tgacaatcagcccagagcttttcacacctctct

SEQ ID NO: 802681 - DNA, 33 bp, Homo sapien
gcatttcccaagctctaaaagcactcatttaca

SEQ ID NO: 802682 - DNA, 33 bp, Homo sapien
gcatttcccaagctctgaaagcactcatttaca

SEQ ID NO: 802683 - DNA, 33 bp, Homo sapien
ctcttggtggaaacaaagcaatggcatataaaa

SEQ ID NO: 802684 - DNA, 33 bp, Homo sapien
ctcttggtggaaacaatgcaatggcatataaaa

SEQ ID NO: 802685 - DNA, 33 bp, Homo sapien
ggggtagagagtgccaatagaactgataactga

SEQ ID NO: 802686 - DNA, 33 bp, Homo sapien
ggggtagagagtgccactagaactgataactga

SEQ ID NO: 802687 - DNA, 33 bp, Homo sapien
ataactgagggacataacctggacaggaaggga

SEQ ID NO: 802688 - DNA, 33 bp, Homo sapien
ataactgagggacatagcctggacaggaaggga

SEQ ID NO: 802689 - DNA, 33 bp, Homo sapien
ggaagtgctagaagaaaaaagggcagttccaac

SEQ ID NO: 802690 - DNA, 33 bp, Homo sapien
ggaagtgctagaagaagaaagggcagttccaac

SEQ ID NO: 802691 - DNA, 33 bp, Homo sapien
aagccatctaagactccgaactctttgtttaaa

SEQ ID NO: 802692 - DNA, 33 bp, Homo sapien
aagccatctaagactctgaactctttgtttaaa

SEQ ID NO: 802693 - DNA, 33 bp, Homo sapien
tgaagtgttatacgacagggaaagacatgaatt

SEQ ID NO: 802694 - DNA, 33 bp, Homo sapien
tgaagtgttatacgacggggaaagacatgaatt

SEQ ID NO: 802695 - DNA, 33 bp, Homo sapien
tggtgcaaatggcatacactagagcagtggaga

SEQ ID NO: 802696 - DNA, 33 bp, Homo sapien
tggtgcaaatggcatatactagagcagtggaga

SEQ ID NO: 802697 - DNA, 33 bp, Homo sapien
acttgcataagtccaagttaggaaagcagataa

SEQ ID NO: 802698 - DNA, 33 bp, Homo sapien
acttgcataagtccaatttaggaaagcagataa

SEQ ID NO: 802699 - DNA, 33 bp, Homo sapien
cacatttattttgaaccagcatattctgttgac

SEQ ID NO: 802700 - DNA, 33 bp, Homo sapien
cacatttattttgaactagcatattctgttgac

SEQ ID NO: 802701 - DNA, 33 bp, Homo sapien
taagtgcaagaaaatgaacagcaacgtctcaga

SEQ ID NO: 802702 - DNA, 33 bp, Homo sapien
taagtgcaagaaaatggacagcaacgtctcaga

SEQ ID NO: 802703 - DNA, 33 bp, Homo sapien
tgtttacattagagggaatcactcccattcagc

SEQ ID NO: 802704 - DNA, 33 bp, Homo sapien
tgtttacattagagggtatcactcccattcagc

SEQ ID NO: 802705 - DNA, 33 bp, Homo sapien
gctgtagtgcttataaggagtgtgaggagcaag

SEQ ID NO: 802706 - DNA, 33 bp, Homo sapien
gctgtagtgcttataatgagtgtgaggagcaag

SEQ ID NO: 802707 - DNA, 33 bp, Homo sapien
tattttattattttaaatcaacttggctgaagt

SEQ ID NO: 802708 - DNA, 33 bp, Homo sapien
tattttattattttaagtcaacttggctgaagt

SEQ ID NO: 802709 - DNA, 33 bp, Homo sapien
tcaatgggtaagacagaattaggccaaaggtag

SEQ ID NO: 802710 - DNA, 33 bp, Homo sapien
tcaatgggtaagacagtattaggccaaaggtag

SEQ ID NO: 802711 - DNA, 33 bp, Homo sapien
agaatgcataaaccagcaggatctgacatctcc

SEQ ID NO: 802712 - DNA, 33 bp, Homo sapien
agaatgcataaaccagtaggatctgacatctcc

SEQ ID NO: 802713 - DNA, 33 bp, Homo sapien
aatttcctgataaatacacctcatagcagaggt

SEQ ID NO: 802714 - DNA, 33 bp, Homo sapien
aatttcctgataaatatacctcatagcagaggt

SEQ ID NO: 802715 - DNA, 33 bp, Homo sapien
cagaaggagtgattcaaaaggaaaaccttgtag

SEQ ID NO: 802716 - DNA, 33 bp, Homo sapien
cagaaggagtgattcagaaggaaaaccttgtag

SEQ ID NO: 802717 - DNA, 33 bp, Homo sapien
gtctggatgcttaactcacttccaggattcttc

SEQ ID NO: 802718 - DNA, 33 bp, Homo sapien
gtctggatgcttaactgacttccaggattcttc

SEQ ID NO: 802719 - DNA, 33 bp, Homo sapien
ctaaaattcttatagccatgtatgcttttattt

SEQ ID NO: 802720 - DNA, 33 bp, Homo sapien
ctaaaattcttatagcgatgtatgcttttattt

SEQ ID NO: 802721 - DNA, 33 bp, Homo sapien
attcagctactcaaaacaaatacaccggtcaga

SEQ ID NO: 802722 - DNA, 33 bp, Homo sapien
attcagctactcaaaagaaatacaccggtcaga

SEQ ID NO: 802723 - DNA, 33 bp, Homo sapien
aacaactagtgaaaagcaaatagttctggttac

SEQ ID NO: 802724 - DNA, 33 bp, Homo sapien
aacaactagtgaaaagtaaatagttctggttac

SEQ ID NO: 802725 - DNA, 33 bp, Homo sapien
attttctcagttacaccgtgggacgtggacatt

SEQ ID NO: 802726 - DNA, 33 bp, Homo sapien
attttctcagttacactgtgggacgtggacatt

SEQ ID NO: 802727 - DNA, 33 bp, Homo sapien
cttggtatagaaagagaaattacaagcaaagcc

SEQ ID NO: 802728 - DNA, 33 bp, Homo sapien
cttggtatagaaagaggaattacaagcaaagcc

SEQ ID NO: 802729 - DNA, 33 bp, Homo sapien
aacccagtgtaagttaccaggctaattcttgca

SEQ ID NO: 802730 - DNA, 33 bp, Homo sapien
aacccagtgtaagttatcaggctaattcttgca

SEQ ID NO: 802731 - DNA, 33 bp, Homo sapien
ataatcaagtagggaacatcaggttgtgtgaag

SEQ ID NO: 802732 - DNA, 33 bp, Homo sapien
ataatcaagtagggaatatcaggttgtgtgaag

SEQ ID NO: 802733 - DNA, 33 bp, Homo sapien
ccctcctgagagaataggtcttgttccaagttc

SEQ ID NO: 802734 - DNA, 33 bp, Homo sapien
ccctcctgagagaatatgtcttgttccaagttc

SEQ ID NO: 802735 - DNA, 33 bp, Homo sapien
gataccacattccactaactcaactggccagat

SEQ ID NO: 802736 - DNA, 33 bp, Homo sapien
gataccacattccactcactcaactggccagat

SEQ ID NO: 802737 - DNA, 33 bp, Homo sapien
caataaagaaaaaagacatgcaaagtttggaac

SEQ ID NO: 802738 - DNA, 33 bp, Homo sapien
caataaagaaaaaagatatgcaaagtttggaac

SEQ ID NO: 802739 - DNA, 33 bp, Homo sapien
gttgctccaaaggacacgatcgcattctttttt

SEQ ID NO: 802740 - DNA, 33 bp, Homo sapien
gttgctccaaaggacatgatcgcattctttttt

SEQ ID NO: 802741 - DNA, 33 bp, Homo sapien
ataatcacttcaacaactgagttcaaatattta

SEQ ID NO: 802742 - DNA, 33 bp, Homo sapien
ataatcacttcaacaattgagttcaaatattta

SEQ ID NO: 802743 - DNA, 33 bp, Homo sapien
acctttttggctccaaccttcagtgccttcttc

SEQ ID NO: 802744 - DNA, 33 bp, Homo sapien
acctttttggctccaagcttcagtgccttcttc

SEQ ID NO: 802745 - DNA, 33 bp, Homo sapien
tccacgaagaggaccagtctcaatattctggag

SEQ ID NO: 802746 - DNA, 33 bp, Homo sapien
tccacgaagaggaccattctcaatattctggag

SEQ ID NO: 802747 - DNA, 33 bp, Homo sapien
aaataaatgtatatcgcattgcattttacatgt

SEQ ID NO: 802748 - DNA, 33 bp, Homo sapien
aaataaatgtatatcgtattgcattttacatgt

SEQ ID NO: 802749 - DNA, 33 bp, Homo sapien
atttcttcatagcaggaaaggtcttaaatgaat

SEQ ID NO: 802750 - DNA, 33 bp, Homo sapien
atttcttcatagcagggaaggtcttaaatgaat

SEQ ID NO: 802751 - DNA, 33 bp, Homo sapien
aacctggtaaatgggaagatcaatgaaattctg

SEQ ID NO: 802752 - DNA, 33 bp, Homo sapien
aacctggtaaatgggaggatcaatgaaattctg

SEQ ID NO: 802753 - DNA, 33 bp, Homo sapien
ttcccaaacaaggtaccgccatttgcacacaga

SEQ ID NO: 802754 - DNA, 33 bp, Homo sapien
ttcccaaacaaggtactgccatttgcacacaga

SEQ ID NO: 802755 - DNA, 33 bp, Homo sapien
actgctcaggatgtaacagtaagtacaaatgca

SEQ ID NO: 802756 - DNA, 33 bp, Homo sapien
actgctcaggatgtaatagtaagtacaaatgca

SEQ ID NO: 802757 - DNA, 33 bp, Homo sapien
tggccctgtcttaaacaaaaatctgcataaata

SEQ ID NO: 802758 - DNA, 33 bp, Homo sapien
tggccctgtcttaaacgaaaatctgcataaata

SEQ ID NO: 802759 - DNA, 33 bp, Homo sapien
gtggaacttttacctcaagagtcataatttagg

SEQ ID NO: 802760 - DNA, 33 bp, Homo sapien
gtggaacttttacctcgagagtcataatttagg

SEQ ID NO: 802761 - DNA, 33 bp, Homo sapien
gtgactgggatgcaagaagcaatgtcctgagac

SEQ ID NO: 802762 - DNA, 33 bp, Homo sapien
gtgactgggatgcaaggagcaatgtcctgagac

SEQ ID NO: 802763 - DNA, 33 bp, Homo sapien
cttctcttagtcctaccggcttcatgcaaccct

SEQ ID NO: 802764 - DNA, 33 bp, Homo sapien
cttctcttagtcctactggcttcatgcaaccct

SEQ ID NO: 802765 - DNA, 33 bp, Homo sapien
acttcaaggtagccataaaaatgagtattatta

SEQ ID NO: 802766 - DNA, 33 bp, Homo sapien
acttcaaggtagccatgaaaatgagtattatta

SEQ ID NO: 802767 - DNA, 33 bp, Homo sapien
caatatgacaattccacagggtagatgctatta

SEQ ID NO: 802768 - DNA, 33 bp, Homo sapien
caatatgacaattccatagggtagatgctatta

SEQ ID NO: 802769 - DNA, 33 bp, Homo sapien
tcccattacttccttcaataaagtttcatacat

SEQ ID NO: 802770 - DNA, 33 bp, Homo sapien
tcccattacttccttccataaagtttcatacat

SEQ ID NO: 802771 - DNA, 33 bp, Homo sapien
cagaagactttttcagacagagaaactattctg

SEQ ID NO: 802772 - DNA, 33 bp, Homo sapien
cagaagactttttcagccagagaaactattctg

SEQ ID NO: 802773 - DNA, 33 bp, Homo sapien
agtcctacaagcataacagtgaagttagatcaa

SEQ ID NO: 802774 - DNA, 33 bp, Homo sapien
agtcctacaagcataatagtgaagttagatcaa

SEQ ID NO: 802775 - DNA, 33 bp, Homo sapien
acagcagactcttgcacgacaaactattccttt

SEQ ID NO: 802776 - DNA, 33 bp, Homo sapien
acagcagactcttgcatgacaaactattccttt

SEQ ID NO: 802777 - DNA, 33 bp, Homo sapien
aaatatgatttactcaactgtacaagaatccag

SEQ ID NO: 802778 - DNA, 33 bp, Homo sapien
aaatatgatttactcagctgtacaagaatccag

SEQ ID NO: 802779 - DNA, 33 bp, Homo sapien
agtgagataggaagacggaacatagcacttggc

SEQ ID NO: 802780 - DNA, 33 bp, Homo sapien
agtgagataggaagactgaacatagcacttggc

SEQ ID NO: 802781 - DNA, 33 bp, Homo sapien
ggcccgattttacttacacatcagaattgttgc

SEQ ID NO: 802782 - DNA, 33 bp, Homo sapien
ggcccgattttacttatacatcagaattgttgc

SEQ ID NO: 802783 - DNA, 33 bp, Homo sapien
tgagatggtagcatggaaaggtgctagagtctt

SEQ ID NO: 802784 - DNA, 33 bp, Homo sapien
tgagatggtagcatggtaaggtgctagagtctt

SEQ ID NO: 802785 - DNA, 33 bp, Homo sapien
ggtttcttcttcacttacccgcaagcaccctat

SEQ ID NO: 802786 - DNA, 33 bp, Homo sapien
ggtttcttcttcacttgcccgcaagcaccctat

SEQ ID NO: 802787 - DNA, 33 bp, Homo sapien
ttccaccctacaatgacatccacagtgtccaca

SEQ ID NO: 802788 - DNA, 33 bp, Homo sapien
ttccaccctacaatgatatccacagtgtccaca

SEQ ID NO: 802789 - DNA, 33 bp, Homo sapien
tttatactcctgtgacccatttctgacaaattg

SEQ ID NO: 802790 - DNA, 33 bp, Homo sapien
tttatactcctgtgactcatttctgacaaattg

SEQ ID NO: 802791 - DNA, 33 bp, Homo sapien
caattacttgacgttacggaaaaggcaaaactg

SEQ ID NO: 802792 - DNA, 33 bp, Homo sapien
caattacttgacgttatggaaaaggcaaaactg

SEQ ID NO: 802793 - DNA, 33 bp, Homo sapien
taaatgggatgctcaaaatagtgttacggctct

SEQ ID NO: 802794 - DNA, 33 bp, Homo sapien
taaatgggatgctcaacatagtgttacggctct

SEQ ID NO: 802795 - DNA, 33 bp, Homo sapien
tattgtcagtctcgtgaagcttatctattcttg

SEQ ID NO: 802796 - DNA, 33 bp, Homo sapien
tattgtcagtctcgtgtagcttatctattcttg

SEQ ID NO: 802797 - DNA, 33 bp, Homo sapien
ctaaaattcactcttacactgtaccttccagtc

SEQ ID NO: 802798 - DNA, 33 bp, Homo sapien
ctaaaattcactcttagactgtaccttccagtc

SEQ ID NO: 802799 - DNA, 33 bp, Homo sapien
ctctttcattatgtgacgtctatttttggtatg

SEQ ID NO: 802800 - DNA, 33 bp, Homo sapien
ctctttcattatgtgatgtctatttttggtatg

SEQ ID NO: 802801 - DNA, 33 bp, Homo sapien
cagtctgtactgcccaccttctactccctggga

SEQ ID NO: 802802 - DNA, 33 bp, Homo sapien
cagtctgtactgcccatcttctactccctggga

SEQ ID NO: 802803 - DNA, 33 bp, Homo sapien
taaaacatatgacatcgattcagtctgttgtgc

SEQ ID NO: 802804 - DNA, 33 bp, Homo sapien
taaaacatatgacatctattcagtctgttgtgc

SEQ ID NO: 802805 - DNA, 33 bp, Homo sapien
aaagacttacctgaaagaaaccaggataaaaca

SEQ ID NO: 802806 - DNA, 33 bp, Homo sapien
aaagacttacctgaaataaaccaggataaaaca

SEQ ID NO: 802807 - DNA, 33 bp, Homo sapien
caagtttatatccagacagctgatgcacagggc

SEQ ID NO: 802808 - DNA, 33 bp, Homo sapien
caagtttatatccagagagctgatgcacagggc

SEQ ID NO: 802809 - DNA, 33 bp, Homo sapien
cctctgtctagtgtcacctgtatttccacactg

SEQ ID NO: 802810 - DNA, 33 bp, Homo sapien
cctctgtctagtgtcatctgtatttccacactg

SEQ ID NO: 802811 - DNA, 33 bp, Homo sapien
gaatactcatggattgaaagatggaatgaatga

SEQ ID NO: 802812 - DNA, 33 bp, Homo sapien
gaatactcatggattggaagatggaatgaatga

SEQ ID NO: 802813 - DNA, 33 bp, Homo sapien
tcaggcttcaaaaaaccggataactgtatcatt

SEQ ID NO: 802814 - DNA, 33 bp, Homo sapien
tcaggcttcaaaaaactggataactgtatcatt

SEQ ID NO: 802815 - DNA, 33 bp, Homo sapien
atcttcctgcagaaataacaaaacctgttgaac

SEQ ID NO: 802816 - DNA, 33 bp, Homo sapien
atcttcctgcagaaatcacaaaacctgttgaac

SEQ ID NO: 802817 - DNA, 33 bp, Homo sapien
acatgatagaacgctcaattggccaagcctggg

SEQ ID NO: 802818 - DNA, 33 bp, Homo sapien
acatgatagaacgctccattggccaagcctggg

SEQ ID NO: 802819 - DNA, 33 bp, Homo sapien
gtgggaagggcttcccagcaaaactcaggtcat

SEQ ID NO: 802820 - DNA, 33 bp, Homo sapien
gtgggaagggcttcccggcaaaactcaggtcat

SEQ ID NO: 802821 - DNA, 33 bp, Homo sapien
gacatttataaattcaaaaaggctcagtggaca

SEQ ID NO: 802822 - DNA, 33 bp, Homo sapien
gacatttataaattcataaaggctcagtggaca

SEQ ID NO: 802823 - DNA, 33 bp, Homo sapien
acaggctagatttgacgcagggctgtagttttt

SEQ ID NO: 802824 - DNA, 33 bp, Homo sapien
acaggctagatttgactcagggctgtagttttt

SEQ ID NO: 802825 - DNA, 33 bp, Homo sapien
aggagttgcatgtaacaaatgttttaataaaat

SEQ ID NO: 802826 - DNA, 33 bp, Homo sapien
aggagttgcatgtaacgaatgttttaataaaat

SEQ ID NO: 802827 - DNA, 33 bp, Homo sapien
tttttgtcaatgatccggccacagatagagtac

SEQ ID NO: 802828 - DNA, 33 bp, Homo sapien
tttttgtcaatgatcctgccacagatagagtac

SEQ ID NO: 802829 - DNA, 33 bp, Homo sapien
ggctttgagacttagaccattagcatttaaata

SEQ ID NO: 802830 - DNA, 33 bp, Homo sapien
ggctttgagacttagatcattagcatttaaata

SEQ ID NO: 802831 - DNA, 33 bp, Homo sapien
tatatgatttatcaggcactgtgttctgcctta

SEQ ID NO: 802832 - DNA, 33 bp, Homo sapien
tatatgatttatcaggtactgtgttctgcctta

SEQ ID NO: 802833 - DNA, 33 bp, Homo sapien
ctaacaatacccagaactcacaattcttcccct

SEQ ID NO: 802834 - DNA, 33 bp, Homo sapien
ctaacaatacccagaagtcacaattcttcccct

SEQ ID NO: 802835 - DNA, 33 bp, Homo sapien
ggggaactatgagagagtaacttaaccataatt

SEQ ID NO: 802836 - DNA, 33 bp, Homo sapien
ggggaactatgagagattaacttaaccataatt

SEQ ID NO: 802837 - DNA, 33 bp, Homo sapien
agctctatgacaacgacgaatttctctatctca

SEQ ID NO: 802838 - DNA, 33 bp, Homo sapien
agctctatgacaacgaggaatttctctatctca

SEQ ID NO: 802839 - DNA, 33 bp, Homo sapien
gagagaactcacagaaaaacataggtcctccta

SEQ ID NO: 802840 - DNA, 33 bp, Homo sapien
gagagaactcacagaagaacataggtcctccta

SEQ ID NO: 802841 - DNA, 33 bp, Homo sapien
tgtcctagctacaaggcagttgccatccttctt

SEQ ID NO: 802842 - DNA, 33 bp, Homo sapien
tgtcctagctacaaggtagttgccatccttctt

SEQ ID NO: 802843 - DNA, 33 bp, Homo sapien
cctgtgcattgaatcaccatattaattgtttcc

SEQ ID NO: 802844 - DNA, 33 bp, Homo sapien
cctgtgcattgaatcatcatattaattgtttcc

SEQ ID NO: 802845 - DNA, 33 bp, Homo sapien
agacccacgcactgtgcagggcagagaaactag

SEQ ID NO: 802846 - DNA, 33 bp, Homo sapien
agacccacgcactgtgtagggcagagaaactag

SEQ ID NO: 802847 - DNA, 33 bp, Homo sapien
gaaacctggttggtgacaaacacagtcttaatt

SEQ ID NO: 802848 - DNA, 33 bp, Homo sapien
gaaacctggttggtgataaacacagtcttaatt

SEQ ID NO: 802849 - DNA, 33 bp, Homo sapien
tgaactcgttgtacaaagtccgtgaaatgattt

SEQ ID NO: 802850 - DNA, 33 bp, Homo sapien
tgaactcgttgtacaaggtccgtgaaatgattt

SEQ ID NO: 802851 - DNA, 33 bp, Homo sapien
ctttagttgcattcaactccagcacgggtgttc

SEQ ID NO: 802852 - DNA, 33 bp, Homo sapien
ctttagttgcattcaattccagcacgggtgttc

SEQ ID NO: 802853 - DNA, 33 bp, Homo sapien
ctacctccaaatcagacgttctctgatgtctag

SEQ ID NO: 802854 - DNA, 33 bp, Homo sapien
ctacctccaaatcagatgttctctgatgtctag

SEQ ID NO: 802855 - DNA, 33 bp, Homo sapien
agaggagtcatgggataagaaagaagtggatga

SEQ ID NO: 802856 - DNA, 33 bp, Homo sapien
agaggagtcatgggatgagaaagaagtggatga

SEQ ID NO: 802857 - DNA, 33 bp, Homo sapien
ttataggtccctcccaaatggattgtaaacaag

SEQ ID NO: 802858 - DNA, 33 bp, Homo sapien
ttataggtccctcccagatggattgtaaacaag

SEQ ID NO: 802859 - DNA, 33 bp, Homo sapien
agtgccaaatacttcaagtaaaagcaagaactt

SEQ ID NO: 802860 - DNA, 33 bp, Homo sapien
agtgccaaatacttcacgtaaaagcaagaactt

SEQ ID NO: 802861 - DNA, 33 bp, Homo sapien
aaagagcattcatggacatttcccgtttgccta

SEQ ID NO: 802862 - DNA, 33 bp, Homo sapien
aaagagcattcatggatatttcccgtttgccta

SEQ ID NO: 802863 - DNA, 33 bp, Homo sapien
cttttcactatgcatacgtacgtcaaaacatca

SEQ ID NO: 802864 - DNA, 33 bp, Homo sapien
cttttcactatgcatatgtacgtcaaaacatca

SEQ ID NO: 802865 - DNA, 33 bp, Homo sapien
tacttctcctaaactcaccaatcaaactactca

SEQ ID NO: 802866 - DNA, 33 bp, Homo sapien
tacttctcctaaactcgccaatcaaactactca

SEQ ID NO: 802867 - DNA, 33 bp, Homo sapien
acaagttactgtaacacattcttggattgttac

SEQ ID NO: 802868 - DNA, 33 bp, Homo sapien
acaagttactgtaacagattcttggattgttac

SEQ ID NO: 802869 - DNA, 33 bp, Homo sapien
aatggtatagaaaaatcatgatccagaattggg

SEQ ID NO: 802870 - DNA, 33 bp, Homo sapien
aatggtatagaaaaattatgatccagaattggg

SEQ ID NO: 802871 - DNA, 33 bp, Homo sapien
aaaaggagaaagggaaagacaagatacaaagta

SEQ ID NO: 802872 - DNA, 33 bp, Homo sapien
aaaaggagaaagggaatgacaagatacaaagta

SEQ ID NO: 802873 - DNA, 33 bp, Homo sapien
aaggtaatctatgtaacgataaagagccagaca

SEQ ID NO: 802874 - DNA, 33 bp, Homo sapien
aaggtaatctatgtaatgataaagagccagaca

SEQ ID NO: 802875 - DNA, 33 bp, Homo sapien
cccctgcattttttcaatatgactttttcttat

SEQ ID NO: 802876 - DNA, 33 bp, Homo sapien
cccctgcattttttcagtatgactttttcttat

SEQ ID NO: 802877 - DNA, 33 bp, Homo sapien
tcagcagtcattcacaacattagtctgatagca

SEQ ID NO: 802878 - DNA, 33 bp, Homo sapien
tcagcagtcattcacagcattagtctgatagca

SEQ ID NO: 802879 - DNA, 33 bp, Homo sapien
ccaaactcaaggaaacacatggattcttcaatc

SEQ ID NO: 802880 - DNA, 33 bp, Homo sapien
ccaaactcaaggaaacgcatggattcttcaatc

SEQ ID NO: 802881 - DNA, 33 bp, Homo sapien
tacactacaatactgacatcttagtccagtgcc

SEQ ID NO: 802882 - DNA, 33 bp, Homo sapien
tacactacaatactgatatcttagtccagtgcc

SEQ ID NO: 802883 - DNA, 33 bp, Homo sapien
actatcagaaatgacaaaggttacattatcact

SEQ ID NO: 802884 - DNA, 33 bp, Homo sapien
actatcagaaatgacacaggttacattatcact

SEQ ID NO: 802885 - DNA, 33 bp, Homo sapien
acagagtcctgtgatacgaaccatctatgggtt

SEQ ID NO: 802886 - DNA, 33 bp, Homo sapien
acagagtcctgtgatatgaaccatctatgggtt

SEQ ID NO: 802887 - DNA, 33 bp, Homo sapien
aagacaatataattacacaagttagaaataggt

SEQ ID NO: 802888 - DNA, 33 bp, Homo sapien
aagacaatataattacgcaagttagaaataggt

SEQ ID NO: 802889 - DNA, 33 bp, Homo sapien
cagccctttctagctcaatgctccaaattgtcg

SEQ ID NO: 802890 - DNA, 33 bp, Homo sapien
cagccctttctagctcgatgctccaaattgtcg

SEQ ID NO: 802891 - DNA, 33 bp, Homo sapien
ttgcgccaagtcttacacaactctgtgcggcat

SEQ ID NO: 802892 - DNA, 33 bp, Homo sapien
ttgcgccaagtcttactcaactctgtgcggcat

SEQ ID NO: 802893 - DNA, 33 bp, Homo sapien
ttctgtcacaggggaacactaaatctttgatat

SEQ ID NO: 802894 - DNA, 33 bp, Homo sapien
ttctgtcacaggggaagactaaatctttgatat

SEQ ID NO: 802895 - DNA, 33 bp, Homo sapien
tccctcatagaatcagaacataggtgcttggtt

SEQ ID NO: 802896 - DNA, 33 bp, Homo sapien
tccctcatagaatcaggacataggtgcttggtt

SEQ ID NO: 802897 - DNA, 33 bp, Homo sapien
cctactgtggacattacgattttggaagtggcc

SEQ ID NO: 802898 - DNA, 33 bp, Homo sapien
cctactgtggacattatgattttggaagtggcc

SEQ ID NO: 802899 - DNA, 33 bp, Homo sapien
acatcaaactcctccaccaacctctttgctcat

SEQ ID NO: 802900 - DNA, 33 bp, Homo sapien
acatcaaactcctccagcaacctctttgctcat

SEQ ID NO: 802901 - DNA, 33 bp, Homo sapien
actatgccatcaacaaatcacagcaacaatttc

SEQ ID NO: 802902 - DNA, 33 bp, Homo sapien
actatgccatcaacaagtcacagcaacaatttc

SEQ ID NO: 802903 - DNA, 33 bp, Homo sapien
gagtggtctgtgtgatgactagatttgaagggc

SEQ ID NO: 802904 - DNA, 33 bp, Homo sapien
gagtggtctgtgtgattactagatttgaagggc

SEQ ID NO: 802905 - DNA, 33 bp, Homo sapien
aagataaaagtaaaggaactatagtagatgggt

SEQ ID NO: 802906 - DNA, 33 bp, Homo sapien
aagataaaagtaaagggactatagtagatgggt

SEQ ID NO: 802907 - DNA, 33 bp, Homo sapien
tggaacaatccctatggaagggagagctaagag

SEQ ID NO: 802908 - DNA, 33 bp, Homo sapien
tggaacaatccctatgtaagggagagctaagag

SEQ ID NO: 802909 - DNA, 33 bp, Homo sapien
gggacatttgactaaacccaaactaataactgc

SEQ ID NO: 802910 - DNA, 33 bp, Homo sapien
gggacatttgactaaagccaaactaataactgc

SEQ ID NO: 802911 - DNA, 33 bp, Homo sapien
aattggcttaggtccactacagtctaatccttg

SEQ ID NO: 802912 - DNA, 33 bp, Homo sapien
aattggcttaggtccattacagtctaatccttg

SEQ ID NO: 802913 - DNA, 33 bp, Homo sapien
atccttttggtaagtacagattctgaaatagat

SEQ ID NO: 802914 - DNA, 33 bp, Homo sapien
atccttttggtaagtatagattctgaaatagat

SEQ ID NO: 802915 - DNA, 33 bp, Homo sapien
tccctgctttgaaaataagaatcaaatcgtttt

SEQ ID NO: 802916 - DNA, 33 bp, Homo sapien
tccctgctttgaaaatgagaatcaaatcgtttt

SEQ ID NO: 802917 - DNA, 33 bp, Homo sapien
catatacaatgacgaaaaagacaggataggttt

SEQ ID NO: 802918 - DNA, 33 bp, Homo sapien
catatacaatgacgaacaagacaggataggttt

SEQ ID NO: 802919 - DNA, 33 bp, Homo sapien
tggcaatccggggagactataagcatttaattc

SEQ ID NO: 802920 - DNA, 33 bp, Homo sapien
tggcaatccggggagattataagcatttaattc

SEQ ID NO: 802921 - DNA, 33 bp, Homo sapien
agggggaggaattttaccattttgaatgtttca

SEQ ID NO: 802922 - DNA, 33 bp, Homo sapien
agggggaggaattttatcattttgaatgtttca

SEQ ID NO: 802923 - DNA, 33 bp, Homo sapien
aaattgctaacataccaaaatcaagcatattcc

SEQ ID NO: 802924 - DNA, 33 bp, Homo sapien
aaattgctaacataccgaaatcaagcatattcc

SEQ ID NO: 802925 - DNA, 33 bp, Homo sapien; identical to SEQ ID NO: 802923

SEQ ID NO: 802926 - DNA, 33 bp, Homo sapien; identical to SEQ ID NO: 802924

SEQ ID NO: 802927 - DNA, 33 bp, Homo sapien
tcgtcaacggacacccaaggatgactgaaagaa

SEQ ID NO: 802928 - DNA, 33 bp, Homo sapien
tcgtcaacggacacccgaggatgactgaaagaa

SEQ ID NO: 802929 - DNA, 33 bp, Homo sapien
cctgccctttccactacaaagaccattctccct

SEQ ID NO: 802930 - DNA, 33 bp, Homo sapien
cctgccctttccactataaagaccattctccct

SEQ ID NO: 802931 - DNA, 33 bp, Homo sapien
tttctactgtccatacccacctatctactcagc

SEQ ID NO: 802932 - DNA, 33 bp, Homo sapien
tttctactgtccatacgcacctatctactcagc

SEQ ID NO: 802933 - DNA, 33 bp, Homo sapien
tacagagtagagcataaatccagacggtatgac

SEQ ID NO: 802934 - DNA, 33 bp, Homo sapien
tacagagtagagcatacatccagacggtatgac

SEQ ID NO: 802935 - DNA, 33 bp, Homo sapien
cctaacaacaggcagaaactgcagcctcctccc

SEQ ID NO: 802936 - DNA, 33 bp, Homo sapien
cctaacaacaggcagacactgcagcctcctccc

SEQ ID NO: 802937 - DNA, 33 bp, Homo sapien
tatttgtcactgaaacaatgcgggcaagtcaaa

SEQ ID NO: 802938 - DNA, 33 bp, Homo sapien
tatttgtcactgaaacgatgcgggcaagtcaaa

SEQ ID NO: 802939 - DNA, 33 bp, Homo sapien
ttatctcaaggcctatgaaaagctaactacata

SEQ ID NO: 802940 - DNA, 33 bp, Homo sapien
ttatctcaaggcctattaaaagctaactacata

SEQ ID NO: 802941 - DNA, 33 bp, Homo sapien
gaggagtcatggctcaatcctcgggaaagaaac

SEQ ID NO: 802942 - DNA, 33 bp, Homo sapien
gaggagtcatggctcagtcctcgggaaagaaac

SEQ ID NO: 802943 - DNA, 33 bp, Homo sapien
acactgaagaatgtgacagtcttttaattcatg

SEQ ID NO: 802944 - DNA, 33 bp, Homo sapien
acactgaagaatgtgatagtcttttaattcatg

SEQ ID NO: 802945 - DNA, 33 bp, Homo sapien
tgctctacctgccacacctttctaagtcacctc

SEQ ID NO: 802946 - DNA, 33 bp, Homo sapien
tgctctacctgccacatctttctaagtcacctc

SEQ ID NO: 802947 - DNA, 33 bp, Homo sapien
gtatttaaattgcctaagacaaaagcagtggct

SEQ ID NO: 802948 - DNA, 33 bp, Homo sapien
gtatttaaattgcctacgacaaaagcagtggct

SEQ ID NO: 802949 - DNA, 33 bp, Homo sapien
aaggtagctgctgaccaaagcctactgagcccc

SEQ ID NO: 802950 - DNA, 33 bp, Homo sapien
aaggtagctgctgacccaagcctactgagcccc

SEQ ID NO: 802951 - DNA, 33 bp, Homo sapien
agcaaagttgattttacaccaagacgaaacgag

SEQ ID NO: 802952 - DNA, 33 bp, Homo sapien
agcaaagttgattttataccaagacgaaacgag

SEQ ID NO: 802953 - DNA, 33 bp, Homo sapien
tcctcatatgattgtcccttctgccaagtgctt

SEQ ID NO: 802954 - DNA, 33 bp, Homo sapien
tcctcatatgattgtcgcttctgccaagtgctt

SEQ ID NO: 802955 - DNA, 33 bp, Homo sapien
aggggtccactccataagctcacagttcatagg

SEQ ID NO: 802956 - DNA, 33 bp, Homo sapien
aggggtccactccatacgctcacagttcatagg

SEQ ID NO: 802957 - DNA, 33 bp, Homo sapien
caaagccatgaactggaagtcagtagacctgga

SEQ ID NO: 802958 - DNA, 33 bp, Homo sapien
caaagccatgaactggtagtcagtagacctgga

SEQ ID NO: 802959 - DNA, 33 bp, Homo sapien
gctttgaataacataaagggaaaattcacccag

SEQ ID NO: 802960 - DNA, 33 bp, Homo sapien
gctttgaataacataaggggaaaattcacccag

SEQ ID NO: 802961 - DNA, 33 bp, Homo sapien
tgatgatgtgtacttacgaaaggaaaatacatg

SEQ ID NO: 802962 - DNA, 33 bp, Homo sapien
tgatgatgtgtacttatgaaaggaaaatacatg

SEQ ID NO: 802963 - DNA, 33 bp, Homo sapien
ccacaggaatcagcaaactttggaaatcagggc

SEQ ID NO: 802964 - DNA, 33 bp, Homo sapien
ccacaggaatcagcaacctttggaaatcagggc

SEQ ID NO: 802965 - DNA, 33 bp, Homo sapien
tttcagtttttgttgacggaaaaactgagctgc

SEQ ID NO: 802966 - DNA, 33 bp, Homo sapien
tttcagtttttgttgatggaaaaactgagctgc

SEQ ID NO: 802967 - DNA, 33 bp, Homo sapien
tgctcactgaagcaagaagaaaactgagctaag

SEQ ID NO: 802968 - DNA, 33 bp, Homo sapien
tgctcactgaagcaaggagaaaactgagctaag

SEQ ID NO: 802969 - DNA, 33 bp, Homo sapien
gccacttagacccacacagagatgttaccggcc

SEQ ID NO: 802970 - DNA, 33 bp, Homo sapien
gccacttagacccacagagagatgttaccggcc

SEQ ID NO: 802971 - DNA, 33 bp, Homo sapien
atctactgtggccttgcataaggtttgcatgaa

SEQ ID NO: 802972 - DNA, 33 bp, Homo sapien
atctactgtggccttgtataaggtttgcatgaa

SEQ ID NO: 802973 - DNA, 33 bp, Homo sapien
gcatatatacatctcccatgaatttttggatac

SEQ ID NO: 802974 - DNA, 33 bp, Homo sapien
gcatatatacatctcctatgaatttttggatac

SEQ ID NO: 802975 - DNA, 33 bp, Homo sapien
ctttcaggaaacaaaacgactgcataattgtct

SEQ ID NO: 802976 - DNA, 33 bp, Homo sapien
ctttcaggaaacaaaatgactgcataattgtct

SEQ ID NO: 802977 - DNA, 33 bp, Homo sapien
aggcccaagtttcaccagctgcacggaaggctg

SEQ ID NO: 802978 - DNA, 33 bp, Homo sapien
aggcccaagtttcaccggctgcacggaaggctg

SEQ ID NO: 802979 - DNA, 33 bp, Homo sapien
ctagaagagggaatgacgtcctagatacagtgg

SEQ ID NO: 802980 - DNA, 33 bp, Homo sapien
ctagaagagggaatgaggtcctagatacagtgg

SEQ ID NO: 802981 - DNA, 33 bp, Homo sapien
gttcattcattccagaggagagagacaggtgaa

SEQ ID NO: 802982 - DNA, 33 bp, Homo sapien
gttcattcattccagatgagagagacaggtgaa

SEQ ID NO: 802983 - DNA, 33 bp, Homo sapien
ccaagagagtgattacaaaaaagcatggttctt

SEQ ID NO: 802984 - DNA, 33 bp, Homo sapien
ccaagagagtgattaccaaaaagcatggttctt

SEQ ID NO: 802985 - DNA, 33 bp, Homo sapien
tcctctcttgaagcagaatttttgaaggtgcct

SEQ ID NO: 802986 - DNA, 33 bp, Homo sapien
tcctctcttgaagcagcatttttgaaggtgcct

SEQ ID NO: 802987 - DNA, 33 bp, Homo sapien
gccacattcttgaagacgtcctcattcctctcc

SEQ ID NO: 802988 - DNA, 33 bp, Homo sapien
gccacattcttgaagatgtcctcattcctctcc

SEQ ID NO: 802989 - DNA, 33 bp, Homo sapien
tatgcatagaggaggcaaaatgcattcaggaga

SEQ ID NO: 802990 - DNA, 33 bp, Homo sapien
tatgcatagaggaggcgaaatgcattcaggaga

SEQ ID NO: 802991 - DNA, 33 bp, Homo sapien
caaatccttcttccgcactgtcaggccctgcgt

SEQ ID NO: 802992 - DNA, 33 bp, Homo sapien
caaatccttcttccgcgctgtcaggccctgcgt

SEQ ID NO: 802993 - DNA, 33 bp, Homo sapien
aactatacagatagaaacaggagtgttggtggg

SEQ ID NO: 802994 - DNA, 33 bp, Homo sapien
aactatacagatagaatcaggagtgttggtggg

SEQ ID NO: 802995 - DNA, 33 bp, Homo sapien
ctaatggaggacagagaaaaggtacactgaagc

SEQ ID NO: 802996 - DNA, 33 bp, Homo sapien
ctaatggaggacagagtaaaggtacactgaagc

SEQ ID NO: 802997 - DNA, 33 bp, Homo sapien
ttgaaaatccagccaaatagaatcgtgatggta

SEQ ID NO: 802998 - DNA, 33 bp, Homo sapien
ttgaaaatccagccaagtagaatcgtgatggta

SEQ ID NO: 802999 - DNA, 33 bp, Homo sapien
gctggaactcctgttgcagagattggcgatatt

SEQ ID NO: 803000 - DNA, 33 bp, Homo sapien
gctggaactcctgttgtagagattggcgatatt

SEQ ID NO: 803001 - DNA, 33 bp, Homo sapien
cagcgctgaaagcacaacccgaggactttatct

SEQ ID NO: 803002 - DNA, 33 bp, Homo sapien
cagcgctgaaagcacaccccgaggactttatct

SEQ ID NO: 803003 - DNA, 33 bp, Homo sapien
ttttttcactgtacacccttgatttcttcactg

SEQ ID NO: 803004 - DNA, 33 bp, Homo sapien
ttttttcactgtacactcttgatttcttcactg

SEQ ID NO: 803005 - DNA, 33 bp, Homo sapien
gtactccactcagagagcataaataacctgttg

SEQ ID NO: 803006 - DNA, 33 bp, Homo sapien
gtactccactcagagatcataaataacctgttg

SEQ ID NO: 803007 - DNA, 33 bp, Homo sapien
actcaatactttctaccctaaattacacacacc

SEQ ID NO: 803008 - DNA, 33 bp, Homo sapien
actcaatactttctactctaaattacacacacc

SEQ ID NO: 803009 - DNA, 33 bp, Homo sapien
aaatagaaggagaaagaaagggagagtcaggtg

SEQ ID NO: 803010 - DNA, 33 bp, Homo sapien
aaatagaaggagaaaggaagggagagtcaggtg

SEQ ID NO: 803011 - DNA, 33 bp, Homo sapien
aattggttgccaaggcaatacggcagaatcaca

SEQ ID NO: 803012 - DNA, 33 bp, Homo sapien
aattggttgccaaggcgatacggcagaatcaca

SEQ ID NO: 803013 - DNA, 33 bp, Homo sapien
aaaacacatctggtccaatatcttcttatacaa

SEQ ID NO: 803014 - DNA, 33 bp, Homo sapien
aaaacacatctggtccgatatcttcttatacaa

SEQ ID NO: 803015 - DNA, 33 bp, Homo sapien
caaattgctgttgagcaccagaggtctgaaagt

SEQ ID NO: 803016 - DNA, 33 bp, Homo sapien
caaattgctgttgagcgccagaggtctgaaagt

SEQ ID NO: 803017 - DNA, 33 bp, Homo sapien
catccctttcatgttaacttttggagacatttt

SEQ ID NO: 803018 - DNA, 33 bp, Homo sapien
catccctttcatgttaccttttggagacatttt

SEQ ID NO: 803019 - DNA, 33 bp, Homo sapien
agaaggtcttcctacaatagagcagataaactg

SEQ ID NO: 803020 - DNA, 33 bp, Homo sapien
agaaggtcttcctacagtagagcagataaactg

SEQ ID NO: 803021 - DNA, 33 bp, Homo sapien
tagtgttgggctcaaacgctgcctctttggaaa

SEQ ID NO: 803022 - DNA, 33 bp, Homo sapien
tagtgttgggctcaaatgctgcctctttggaaa

SEQ ID NO: 803023 - DNA, 33 bp, Homo sapien
tgtcaggctgattagacacccaaattcctccca

SEQ ID NO: 803024 - DNA, 33 bp, Homo sapien
tgtcaggctgattagatacccaaattcctccca

SEQ ID NO: 803025 - DNA, 33 bp, Homo sapien
agtgagtagtacagtaaggatttgaacaaacta

SEQ ID NO: 803026 - DNA, 33 bp, Homo sapien
agtgagtagtacagtacggatttgaacaaacta

SEQ ID NO: 803027 - DNA, 33 bp, Homo sapien
attttttctcatatgcactcaagaacaaagctg

SEQ ID NO: 803028 - DNA, 33 bp, Homo sapien
attttttctcatatgcgctcaagaacaaagctg

SEQ ID NO: 803029 - DNA, 33 bp, Homo sapien
tgcctgttttaagtggcagtggctgtgtttaca

SEQ ID NO: 803030 - DNA, 33 bp, Homo sapien
tgcctgttttaagtggtagtggctgtgtttaca

SEQ ID NO: 803031 - DNA, 33 bp, Homo sapien
ttcttttggtatcacaaaattaaactgcaaata

SEQ ID NO: 803032 - DNA, 33 bp, Homo sapien
ttcttttggtatcacagaattaaactgcaaata

SEQ ID NO: 803033 - DNA, 33 bp, Homo sapien
attaacaaaacagacacaggccctgcacacatg

SEQ ID NO: 803034 - DNA, 33 bp, Homo sapien
attaacaaaacagacataggccctgcacacatg

SEQ ID NO: 803035 - DNA, 33 bp, Homo sapien
gtgaagtgtcaggaaactgtatccaaatgaata

SEQ ID NO: 803036 - DNA, 33 bp, Homo sapien
gtgaagtgtcaggaaagtgtatccaaatgaata

SEQ ID NO: 803037 - DNA, 33 bp, Homo sapien
tgtcttttcagccaaacctcaccgcaagacacc

SEQ ID NO: 803038 - DNA, 33 bp, Homo sapien
tgtcttttcagccaaatctcaccgcaagacacc

SEQ ID NO: 803039 - DNA, 33 bp, Homo sapien
tcaccacatccatgccaacatcgactgtttttt

SEQ ID NO: 803040 - DNA, 33 bp, Homo sapien
tcaccacatccatgcccacatcgactgtttttt

SEQ ID NO: 803041 - DNA, 33 bp, Homo sapien
gtgaaatgaccataccactcaaagtaatctaca

SEQ ID NO: 803042 - DNA, 33 bp, Homo sapien
gtgaaatgaccataccgctcaaagtaatctaca

SEQ ID NO: 803043 - DNA, 33 bp, Homo sapien
aggagcccaggaaagacgcttggacttgtcatt

SEQ ID NO: 803044 - DNA, 33 bp, Homo sapien
aggagcccaggaaagatgcttggacttgtcatt

SEQ ID NO: 803045 - DNA, 33 bp, Homo sapien
gcacacatttacacaacagacctgttttctttc

SEQ ID NO: 803046 - DNA, 33 bp, Homo sapien
gcacacatttacacaagagacctgttttctttc

SEQ ID NO: 803047 - DNA, 33 bp, Homo sapien
caaaactttgcaccagacagaaagaaaacaggt

SEQ ID NO: 803048 - DNA, 33 bp, Homo sapien
caaaactttgcaccagccagaaagaaaacaggt

SEQ ID NO: 803049 - DNA, 33 bp, Homo sapien
cataggcccatcatctaagactcggtgattcca

SEQ ID NO: 803050 - DNA, 33 bp, Homo sapien
cataggcccatcatctgagactcggtgattcca

SEQ ID NO: 803051 - DNA, 33 bp, Homo sapien
agctggattctctcagaaggacaaaatcaactg

SEQ ID NO: 803052 - DNA, 33 bp, Homo sapien
agctggattctctcagcaggacaaaatcaactg

SEQ ID NO: 803053 - DNA, 33 bp, Homo sapien
accaacctcttgaaccagctaccaagacatggt

SEQ ID NO: 803054 - DNA, 33 bp, Homo sapien
accaacctcttgaaccggctaccaagacatggt

SEQ ID NO: 803055 - DNA, 33 bp, Homo sapien
tgttcttggatgggacaacttaatatttaaaga

SEQ ID NO: 803056 - DNA, 33 bp, Homo sapien
tgttcttggatgggacgacttaatatttaaaga

SEQ ID NO: 803057 - DNA, 33 bp, Homo sapien
tctgacgaagaagatgaaatttggttggggtaa

SEQ ID NO: 803058 - DNA, 33 bp, Homo sapien
tctgacgaagaagatggaatttggttggggtaa

SEQ ID NO: 803059 - DNA, 33 bp, Homo sapien
ttaaatggtggtatagacacagaacgaaatgta

SEQ ID NO: 803060 - DNA, 33 bp, Homo sapien
ttaaatggtggtatagtcacagaacgaaatgta

SEQ ID NO: 803061 - DNA, 33 bp, Homo sapien
atataacagatacctgaatacataccacccgta

SEQ ID NO: 803062 - DNA, 33 bp, Homo sapien
atataacagatacctgcatacataccacccgta

SEQ ID NO: 803063 - DNA, 33 bp, Homo sapien
aggacactgaagactaaacactatataatgcca

SEQ ID NO: 803064 - DNA, 33 bp, Homo sapien
aggacactgaagactatacactatataatgcca

SEQ ID NO: 803065 - DNA, 33 bp, Homo sapien
accattccacaatcaccctcctgaggaactctt

SEQ ID NO: 803066 - DNA, 33 bp, Homo sapien
accattccacaatcactctcctgaggaactctt

SEQ ID NO: 803067 - DNA, 33 bp, Homo sapien
taccatatgacccagtaaatctgtttctagtgt

SEQ ID NO: 803068 - DNA, 33 bp, Homo sapien
taccatatgacccagtcaatctgtttctagtgt

SEQ ID NO: 803069 - DNA, 33 bp, Homo sapien
tggttttttgatcctacaacttgatctttggac

SEQ ID NO: 803070 - DNA, 33 bp, Homo sapien
tggttttttgatcctataacttgatctttggac

SEQ ID NO: 803071 - DNA, 33 bp, Homo sapien
tttgtacatgtgtctacgtcaatgattgcgtaa

SEQ ID NO: 803072 - DNA, 33 bp, Homo sapien
tttgtacatgtgtctatgtcaatgattgcgtaa

SEQ ID NO: 803073 - DNA, 33 bp, Homo sapien
tcttgctttagattcaaaatgttgggtcataaa

SEQ ID NO: 803074 - DNA, 33 bp, Homo sapien
tcttgctttagattcagaatgttgggtcataaa

SEQ ID NO: 803075 - DNA, 33 bp, Homo sapien
caagaacacaatagaccgaccttggccaaggag

SEQ ID NO: 803076 - DNA, 33 bp, Homo sapien
caagaacacaatagactgaccttggccaaggag

SEQ ID NO: 803077 - DNA, 33 bp, Homo sapien
cagtgaagagccatcactataaacagaagacaa

SEQ ID NO: 803078 - DNA, 33 bp, Homo sapien
cagtgaagagccatcattataaacagaagacaa

SEQ ID NO: 803079 - DNA, 33 bp, Homo sapien
aaaagacatagaggcactcagtgttggatggga

SEQ ID NO: 803080 - DNA, 33 bp, Homo sapien
aaaagacatagaggcattcagtgttggatggga

SEQ ID NO: 803081 - DNA, 33 bp, Homo sapien
gggaataaccaactcaactaagaccctggcaca

SEQ ID NO: 803082 - DNA, 33 bp, Homo sapien
gggaataaccaactcagctaagaccctggcaca

SEQ ID NO: 803083 - DNA, 33 bp, Homo sapien
tgacagcctgtttgaccaccagtcccatgactc

SEQ ID NO: 803084 - DNA, 33 bp, Homo sapien
tgacagcctgtttgactaccagtcccatgactc

SEQ ID NO: 803085 - DNA, 33 bp, Homo sapien
gggcacttcattccacccaactatgcctccctc

SEQ ID NO: 803086 - DNA, 33 bp, Homo sapien
gggcacttcattccactcaactatgcctccctc

SEQ ID NO: 803087 - DNA, 33 bp, Homo sapien
ctcggctgcgcacaaacacagttcaggtcttca

SEQ ID NO: 803088 - DNA, 33 bp, Homo sapien
ctcggctgcgcacaaatacagttcaggtcttca

SEQ ID NO: 803089 - DNA, 33 bp, Homo sapien
agcatttgggtttaaacgtagcaatggacccaa

SEQ ID NO: 803090 - DNA, 33 bp, Homo sapien
agcatttgggtttaaatgtagcaatggacccaa

SEQ ID NO: 803091 - DNA, 33 bp, Homo sapien
tcagttatcttacttcccacccctacttgttgg

SEQ ID NO: 803092 - DNA, 33 bp, Homo sapien
tcagttatcttacttctcacccctacttgttgg

SEQ ID NO: 803093 - DNA, 33 bp, Homo sapien
atttctctgtgcataaaactctcagttatctta

SEQ ID NO: 803094 - DNA, 33 bp, Homo sapien
atttctctgtgcataagactctcagttatctta

SEQ ID NO: 803095 - DNA, 33 bp, Homo sapien
atagcgctagcctccacgacaaggaacaacagt

SEQ ID NO: 803096 - DNA, 33 bp, Homo sapien
atagcgctagcctccatgacaaggaacaacagt

SEQ ID NO: 803097 - DNA, 33 bp, Homo sapien
gacctatgggctccagacaagtgctgctcccac

SEQ ID NO: 803098 - DNA, 33 bp, Homo sapien
gacctatgggctccaggcaagtgctgctcccac

SEQ ID NO: 803099 - DNA, 33 bp, Homo sapien
gacccgaagactaagaaggaaccagacacgcag

SEQ ID NO: 803100 - DNA, 33 bp, Homo sapien
gacccgaagactaagagggaaccagacacgcag

SEQ ID NO: 803101 - DNA, 33 bp, Homo sapien
ggggttaaacaggcagccatcttttaatgcgat

SEQ ID NO: 803102 - DNA, 33 bp, Homo sapien
ggggttaaacaggcagtcatcttttaatgcgat

SEQ ID NO: 803103 - DNA, 33 bp, Homo sapien
tacactgaaattttaggccatgttcacttatta

SEQ ID NO: 803104 - DNA, 33 bp, Homo sapien
tacactgaaattttagtccatgttcacttatta

SEQ ID NO: 803105 - DNA, 33 bp, Homo sapien
ggagttcatgtatccactgaaaattattaacag

SEQ ID NO: 803106 - DNA, 33 bp, Homo sapien
ggagttcatgtatccattgaaaattattaacag

SEQ ID NO: 803107 - DNA, 33 bp, Homo sapien
gcacaactgattttcagcctcagaaagagaagt

SEQ ID NO: 803108 - DNA, 33 bp, Homo sapien
gcacaactgattttcatcctcagaaagagaagt

SEQ ID NO: 803109 - DNA, 33 bp, Homo sapien
actccaagtgtgattacggaagagtgacatgta

SEQ ID NO: 803110 - DNA, 33 bp, Homo sapien
actccaagtgtgattatggaagagtgacatgta

SEQ ID NO: 803111 - DNA, 33 bp, Homo sapien
gaaagatcctcaggacacctgaagaagttactt

SEQ ID NO: 803112 - DNA, 33 bp, Homo sapien
gaaagatcctcaggactcctgaagaagttactt

SEQ ID NO: 803113 - DNA, 33 bp, Homo sapien
tccaaatcaagattccccagacatagcttcata

SEQ ID NO: 803114 - DNA, 33 bp, Homo sapien
tccaaatcaagattcctcagacatagcttcata

SEQ ID NO: 803115 - DNA, 33 bp, Homo sapien
agaaatagaacttgcagagtaagcgaaaacagt

SEQ ID NO: 803116 - DNA, 33 bp, Homo sapien
agaaatagaacttgcatagtaagcgaaaacagt

SEQ ID NO: 803117 - DNA, 33 bp, Homo sapien
attaatcccttccaaaatttgcaaaaccactaa

SEQ ID NO: 803118 - DNA, 33 bp, Homo sapien
attaatcccttccaaagtttgcaaaaccactaa

SEQ ID NO: 803119 - DNA, 33 bp, Homo sapien
tttgtcaagaaatccaataatacatcagcgacg

SEQ ID NO: 803120 - DNA, 33 bp, Homo sapien
tttgtcaagaaatccagtaatacatcagcgacg

SEQ ID NO: 803121 - DNA, 33 bp, Homo sapien
ggtagaatatgaagggaatagttcagtgcagcc

SEQ ID NO: 803122 - DNA, 33 bp, Homo sapien
ggtagaatatgaaggggatagttcagtgcagcc

SEQ ID NO: 803123 - DNA, 33 bp, Homo sapien
ttaccgtctagaagaccgacaaacaacccctgc

SEQ ID NO: 803124 - DNA, 33 bp, Homo sapien
ttaccgtctagaagactgacaaacaacccctgc

SEQ ID NO: 803125 - DNA, 33 bp, Homo sapien
tgcatatgaatttttcgcagttttgaaactagg

SEQ ID NO: 803126 - DNA, 33 bp, Homo sapien
tgcatatgaatttttctcagttttgaaactagg

SEQ ID NO: 803127 - DNA, 33 bp, Homo sapien
taaacaggtagataatgagaacctctgcctcac

SEQ ID NO: 803128 - DNA, 33 bp, Homo sapien
taaacaggtagataattagaacctctgcctcac

SEQ ID NO: 803129 - DNA, 33 bp, Homo sapien
caatttataacatccacgtccctcacgccagaa

SEQ ID NO: 803130 - DNA, 33 bp, Homo sapien
caatttataacatccatgtccctcacgccagaa

SEQ ID NO: 803131 - DNA, 33 bp, Homo sapien
attaacagggagaaaacttgcattaagaatagg

SEQ ID NO: 803132 - DNA, 33 bp, Homo sapien
attaacagggagaaaagttgcattaagaatagg

SEQ ID NO: 803133 - DNA, 33 bp, Homo sapien
gagtaatcgcccaaaacagtgtttgccaaaatg

SEQ ID NO: 803134 - DNA, 33 bp, Homo sapien
gagtaatcgcccaaaatagtgtttgccaaaatg

SEQ ID NO: 803135 - DNA, 33 bp, Homo sapien
aacacagggctaaaaaagcaacttctggcttta

SEQ ID NO: 803136 - DNA, 33 bp, Homo sapien
aacacagggctaaaaaggcaacttctggcttta

SEQ ID NO: 803137 - DNA, 33 bp, Homo sapien
acttaaatacattgggaagttttgtgctgtaat

SEQ ID NO: 803138 - DNA, 33 bp, Homo sapien
acttaaatacattggggagttttgtgctgtaat

SEQ ID NO: 803139 - DNA, 33 bp, Homo sapien
aagaacatgaaaagaacggcatttaaatattat

SEQ ID NO: 803140 - DNA, 33 bp, Homo sapien
aagaacatgaaaagaatggcatttaaatattat

SEQ ID NO: 803141 - DNA, 33 bp, Homo sapien
ttatcattgagagaacaaataaatgtagagctc

SEQ ID NO: 803142 - DNA, 33 bp, Homo sapien
ttatcattgagagaactaataaatgtagagctc

SEQ ID NO: 803143 - DNA, 33 bp, Homo sapien
tgttgtgcttttaatacgctctttagctgttcc

SEQ ID NO: 803144 - DNA, 33 bp, Homo sapien
tgttgtgcttttaatatgctctttagctgttcc

SEQ ID NO: 803145 - DNA, 33 bp, Homo sapien
atagtatcatagtgtaaaaagtagagagtacat

SEQ ID NO: 803146 - DNA, 33 bp, Homo sapien
atagtatcatagtgtagaaagtagagagtacat

SEQ ID NO: 803147 - DNA, 33 bp, Homo sapien
tctgctgaagatgacactattaaagtgatggtg

SEQ ID NO: 803148 - DNA, 33 bp, Homo sapien
tctgctgaagatgacattattaaagtgatggtg

SEQ ID NO: 803149 - DNA, 33 bp, Homo sapien
ccacagaattacggaaaaaactcagtcagttac

SEQ ID NO: 803150 - DNA, 33 bp, Homo sapien
ccacagaattacggaagaaactcagtcagttac

SEQ ID NO: 803151 - DNA, 33 bp, Homo sapien
tgctcctagtactcaagaccctttctgatagta

SEQ ID NO: 803152 - DNA, 33 bp, Homo sapien
tgctcctagtactcaataccctttctgatagta

SEQ ID NO: 803153 - DNA, 33 bp, Homo sapien
tattttatgctaacctgaagttttccagtatta

SEQ ID NO: 803154 - DNA, 33 bp, Homo sapien
tattttatgctaaccttaagttttccagtatta

SEQ ID NO: 803155 - DNA, 33 bp, Homo sapien
tgatatactagtggatcactgtccaagataaaa

SEQ ID NO: 803156 - DNA, 33 bp, Homo sapien
tgatatactagtggattactgtccaagataaaa

SEQ ID NO: 803157 - DNA, 33 bp, Homo sapien
tgtttgaaaaaggtgaaattcaatggcacaatg

SEQ ID NO: 803158 - DNA, 33 bp, Homo sapien
tgtttgaaaaaggtgagattcaatggcacaatg

SEQ ID NO: 803159 - DNA, 33 bp, Homo sapien
agaaaattggatgaaactattttgtgtatagag

SEQ ID NO: 803160 - DNA, 33 bp, Homo sapien
agaaaattggatgaaagtattttgtgtatagag

SEQ ID NO: 803161 - DNA, 33 bp, Homo sapien
gagggaaaagcaaggacgtttctcactaagccc

SEQ ID NO: 803162 - DNA, 33 bp, Homo sapien
gagggaaaagcaaggaggtttctcactaagccc

SEQ ID NO: 803163 - DNA, 33 bp, Homo sapien
cacagcatctttgccacgaatagattccatctt

SEQ ID NO: 803164 - DNA, 33 bp, Homo sapien
cacagcatctttgccatgaatagattccatctt

SEQ ID NO: 803165 - DNA, 33 bp, Homo sapien
attcccatgcacttaaacattgattggggagct

SEQ ID NO: 803166 - DNA, 33 bp, Homo sapien
attcccatgcacttaaccattgattggggagct

SEQ ID NO: 803167 - DNA, 33 bp, Homo sapien
tcaatgaagcaagagcaacaagatgactgatct

SEQ ID NO: 803168 - DNA, 33 bp, Homo sapien
tcaatgaagcaagagcgacaagatgactgatct

SEQ ID NO: 803169 - DNA, 33 bp, Homo sapien
tggggaatcctggaccgcgactacgctgcactc

SEQ ID NO: 803170 - DNA, 33 bp, Homo sapien
tggggaatcctggacctcgactacgctgcactc

SEQ ID NO: 803171 - DNA, 33 bp, Homo sapien
aagtgatcaataataacacaaagtctaggatat

SEQ ID NO: 803172 - DNA, 33 bp, Homo sapien
aagtgatcaataataatacaaagtctaggatat

SEQ ID NO: 803173 - DNA, 33 bp, Homo sapien
gtttgtagtattcataaccgttgaggactctct

SEQ ID NO: 803174 - DNA, 33 bp, Homo sapien
gtttgtagtattcatacccgttgaggactctct

SEQ ID NO: 803175 - DNA, 33 bp, Homo sapien
gggagtaggcagtttcacacattactggtgagt

SEQ ID NO: 803176 - DNA, 33 bp, Homo sapien
gggagtaggcagtttcgcacattactggtgagt

SEQ ID NO: 803177 - DNA, 33 bp, Homo sapien
catggcgaatgtatggcatttagaacatcttgg

SEQ ID NO: 803178 - DNA, 33 bp, Homo sapien
catggcgaatgtatggtatttagaacatcttgg

SEQ ID NO: 803179 - DNA, 33 bp, Homo sapien
ctgcagtgaattaagaagtaactaggagatgaa

SEQ ID NO: 803180 - DNA, 33 bp, Homo sapien
ctgcagtgaattaagacgtaactaggagatgaa

SEQ ID NO: 803181 - DNA, 33 bp, Homo sapien
gcagttcctactgttagcacccgttctacatat

SEQ ID NO: 803182 - DNA, 33 bp, Homo sapien
gcagttcctactgttatcacccgttctacatat

SEQ ID NO: 803183 - DNA, 33 bp, Homo sapien
gaaaataggggctccacgtactttccagaggtt

SEQ ID NO: 803184 - DNA, 33 bp, Homo sapien
gaaaataggggctccatgtactttccagaggtt

SEQ ID NO: 803185 - DNA, 33 bp, Homo sapien
cgatcttgtggattcccgaccatacactgctca

SEQ ID NO: 803186 - DNA, 33 bp, Homo sapien
cgatcttgtggattcctgaccatacactgctca

SEQ ID NO: 803187 - DNA, 33 bp, Homo sapien
agggctgatgcatctcaaggtaatactacatta

SEQ ID NO: 803188 - DNA, 33 bp, Homo sapien
agggctgatgcatctcgaggtaatactacatta

SEQ ID NO: 803189 - DNA, 33 bp, Homo sapien
ctggatggatactagccactgattgacattatc

SEQ ID NO: 803190 - DNA, 33 bp, Homo sapien
ctggatggatactagctactgattgacattatc

SEQ ID NO: 803191 - DNA, 33 bp, Homo sapien
tggcatggcaagagtaagtagagttaaatcaca

SEQ ID NO: 803192 - DNA, 33 bp, Homo sapien
tggcatggcaagagtaggtagagttaaatcaca

SEQ ID NO: 803193 - DNA, 33 bp, Homo sapien
ggaccacaaccatgtcaccttactttgccccat

SEQ ID NO: 803194 - DNA, 33 bp, Homo sapien
ggaccacaaccatgtcgccttactttgccccat

SEQ ID NO: 803195 - DNA, 33 bp, Homo sapien
tgctgtaaaatgacggcaaggcctgagatggta

SEQ ID NO: 803196 - DNA, 33 bp, Homo sapien
tgctgtaaaatgacggtaaggcctgagatggta

SEQ ID NO: 803197 - DNA, 33 bp, Homo sapien
cttttacttgtaagtacaataaacacaatataa

SEQ ID NO: 803198 - DNA, 33 bp, Homo sapien
cttttacttgtaagtagaataaacacaatataa

SEQ ID NO: 803199 - DNA, 33 bp, Homo sapien
cgtgtatatgtcagtgcaagaaggccaactatt

SEQ ID NO: 803200 - DNA, 33 bp, Homo sapien
cgtgtatatgtcagtgtaagaaggccaactatt

SEQ ID NO: 803201 - DNA, 33 bp, Homo sapien
accaattactaaagaaagggcattataacacac

SEQ ID NO: 803202 - DNA, 33 bp, Homo sapien
accaattactaaagaatgggcattataacacac

SEQ ID NO: 803203 - DNA, 33 bp, Homo sapien
ccaagtaaagctattgaaacaatcacaatcagc

SEQ ID NO: 803204 - DNA, 33 bp, Homo sapien
ccaagtaaagctattggaacaatcacaatcagc

SEQ ID NO: 803205 - DNA, 33 bp, Homo sapien
gggaaagctaaagggacagaaatcagatcagtg

SEQ ID NO: 803206 - DNA, 33 bp, Homo sapien
gggaaagctaaagggatagaaatcagatcagtg

SEQ ID NO: 803207 - DNA, 33 bp, Homo sapien
ttggattttgctattacagttgatctgttcttt

SEQ ID NO: 803208 - DNA, 33 bp, Homo sapien
ttggattttgctattagagttgatctgttcttt

SEQ ID NO: 803209 - DNA, 33 bp, Homo sapien
ccagtaccaccctttgaagctttacttgttttg

SEQ ID NO: 803210 - DNA, 33 bp, Homo sapien
ccagtaccaccctttggagctttacttgttttg

SEQ ID NO: 803211 - DNA, 33 bp, Homo sapien
tgtaagagcgctgagaggtaagggaacttttgc

SEQ ID NO: 803212 - DNA, 33 bp, Homo sapien
tgtaagagcgctgagatgtaagggaacttttgc

SEQ ID NO: 803213 - DNA, 33 bp, Homo sapien
gtgtagccaggccttacaaagtgctagcaccag

SEQ ID NO: 803214 - DNA, 33 bp, Homo sapien
gtgtagccaggccttagaaagtgctagcaccag

SEQ ID NO: 803215 - DNA, 33 bp, Homo sapien
ctgattattttgatgcaatccatattccttttt

SEQ ID NO: 803216 - DNA, 33 bp, Homo sapien
ctgattattttgatgcgatccatattccttttt

SEQ ID NO: 803217 - DNA, 33 bp, Homo sapien
attgtatgggtctaataaggatgattgaggaac

SEQ ID NO: 803218 - DNA, 33 bp, Homo sapien
attgtatgggtctaatgaggatgattgaggaac

SEQ ID NO: 803219 - DNA, 33 bp, Homo sapien
attaactatctcatctaaagaacagaggaggtg

SEQ ID NO: 803220 - DNA, 33 bp, Homo sapien
attaactatctcatctgaagaacagaggaggtg

SEQ ID NO: 803221 - DNA, 33 bp, Homo sapien
aagccaagcgtattggaaagcatgacacaaatt

SEQ ID NO: 803222 - DNA, 33 bp, Homo sapien
aagccaagcgtattgggaagcatgacacaaatt

SEQ ID NO: 803223 - DNA, 33 bp, Homo sapien
atggcttcaaaaacaacgaacactagaagcaga

SEQ ID NO: 803224 - DNA, 33 bp, Homo sapien
atggcttcaaaaacaatgaacactagaagcaga

SEQ ID NO: 803225 - DNA, 33 bp, Homo sapien
tatctcatataaaacacgtatcacgtaagtacc

SEQ ID NO: 803226 - DNA, 33 bp, Homo sapien
tatctcatataaaacaggtatcacgtaagtacc

SEQ ID NO: 803227 - DNA, 33 bp, Homo sapien
taagtcataaataagaataattccccctaccta

SEQ ID NO: 803228 - DNA, 33 bp, Homo sapien
taagtcataaataagagtaattccccctaccta

SEQ ID NO: 803229 - DNA, 33 bp, Homo sapien
gtcttaatgaactggacgaagcaaagattagag

SEQ ID NO: 803230 - DNA, 33 bp, Homo sapien
gtcttaatgaactggaggaagcaaagattagag

SEQ ID NO: 803231 - DNA, 33 bp, Homo sapien
agccaccaagagagccaggatgatggttctcca

SEQ ID NO: 803232 - DNA, 33 bp, Homo sapien
agccaccaagagagccgggatgatggttctcca

SEQ ID NO: 803233 - DNA, 33 bp, Homo sapien
ccttagtcatgcacccacttactcatctctgcc

SEQ ID NO: 803234 - DNA, 33 bp, Homo sapien
ccttagtcatgcacccgcttactcatctctgcc

SEQ ID NO: 803235 - DNA, 33 bp, Homo sapien
agtgcctggtttgtcaatattctctaccttttc

SEQ ID NO: 803236 - DNA, 33 bp, Homo sapien
agtgcctggtttgtcactattctctaccttttc

SEQ ID NO: 803237 - DNA, 33 bp, Homo sapien
ataagagtttgccaccagacccataagttcatt

SEQ ID NO: 803238 - DNA, 33 bp, Homo sapien
ataagagtttgccaccggacccataagttcatt

SEQ ID NO: 803239 - DNA, 33 bp, Homo sapien
cacaaatcctgttccaatgataatcaagctgtg

SEQ ID NO: 803240 - DNA, 33 bp, Homo sapien
cacaaatcctgttccagtgataatcaagctgtg

SEQ ID NO: 803241 - DNA, 33 bp, Homo sapien
tagaagatgttacagcaagtacagagcgagtca

SEQ ID NO: 803242 - DNA, 33 bp, Homo sapien
tagaagatgttacagccagtacagagcgagtca

SEQ ID NO: 803243 - DNA, 33 bp, Homo sapien
tcttgcatggaatgaaataggttgggtcaattt

SEQ ID NO: 803244 - DNA, 33 bp, Homo sapien
tcttgcatggaatgaagtaggttgggtcaattt

SEQ ID NO: 803245 - DNA, 33 bp, Homo sapien
tttgtgtaagatcataaaggtcaagtagctagc

SEQ ID NO: 803246 - DNA, 33 bp, Homo sapien
tttgtgtaagatcatataggtcaagtagctagc

SEQ ID NO: 803247 - DNA, 33 bp, Homo sapien
cagtcttaccccaccactggtaaaatgaaatga

SEQ ID NO: 803248 - DNA, 33 bp, Homo sapien
cagtcttaccccaccattggtaaaatgaaatga

SEQ ID NO: 803249 - DNA, 33 bp, Homo sapien
tggtcacctgcagaacagcacccacgagggcca

SEQ ID NO: 803250 - DNA, 33 bp, Homo sapien
tggtcacctgcagaacggcacccacgagggcca

SEQ ID NO: 803251 - DNA, 33 bp, Homo sapien
gtaatgaacagaaactaacgctcaaagaggttg

SEQ ID NO: 803252 - DNA, 33 bp, Homo sapien
gtaatgaacagaaactgacgctcaaagaggttg

SEQ ID NO: 803253 - DNA, 33 bp, Homo sapien
atactataaatgcccacgaaagaggatgacagc

SEQ ID NO: 803254 - DNA, 33 bp, Homo sapien
atactataaatgcccatgaaagaggatgacagc

SEQ ID NO: 803255 - DNA, 33 bp, Homo sapien
gaaaatagaataagacagggagcaagatctaac

SEQ ID NO: 803256 - DNA, 33 bp, Homo sapien
gaaaatagaataagacggggagcaagatctaac

SEQ ID NO: 803257 - DNA, 33 bp, Homo sapien
ttctgccacttatctaatacaggacagtttaat

SEQ ID NO: 803258 - DNA, 33 bp, Homo sapien
ttctgccacttatctagtacaggacagtttaat

SEQ ID NO: 803259 - DNA, 33 bp, Homo sapien
aaattagcagacctttaaaaaattaagcaggct

SEQ ID NO: 803260 - DNA, 33 bp, Homo sapien
aaattagcagaccttttaaaaattaagcaggct

SEQ ID NO: 803261 - DNA, 33 bp, Homo sapien
cttctgcagtggttaaagtgagagatgacggtg

SEQ ID NO: 803262 - DNA, 33 bp, Homo sapien
cttctgcagtggttaaggtgagagatgacggtg

SEQ ID NO: 803263 - DNA, 33 bp, Homo sapien
caaaagttattttcaaggtatcaatctgatatc

SEQ ID NO: 803264 - DNA, 33 bp, Homo sapien
caaaagttattttcaatgtatcaatctgatatc

SEQ ID NO: 803265 - DNA, 33 bp, Homo sapien
ttattacaccacagaacaaaaagtctggagata

SEQ ID NO: 803266 - DNA, 33 bp, Homo sapien
ttattacaccacagaataaaaagtctggagata

SEQ ID NO: 803267 - DNA, 33 bp, Homo sapien
tgtaaaatggccagaaagacatctatcctagct

SEQ ID NO: 803268 - DNA, 33 bp, Homo sapien
tgtaaaatggccagaaggacatctatcctagct

SEQ ID NO: 803269 - DNA, 33 bp, Homo sapien
ccccagcagccacacacgggtcctagttcccac

SEQ ID NO: 803270 - DNA, 33 bp, Homo sapien
ccccagcagccacacatgggtcctagttcccac

SEQ ID NO: 803271 - DNA, 33 bp, Homo sapien
gtccttctttcagccaccaaaagttctgagtcc

SEQ ID NO: 803272 - DNA, 33 bp, Homo sapien
gtccttctttcagccatcaaaagttctgagtcc

SEQ ID NO: 803273 - DNA, 33 bp, Homo sapien
tgaatagatgagaccacgtaagagagagactag

SEQ ID NO: 803274 - DNA, 33 bp, Homo sapien
tgaatagatgagaccatgtaagagagagactag

SEQ ID NO: 803275 - DNA, 33 bp, Homo sapien
ctgttctccttcagagcaaacttgttgaaacag

SEQ ID NO: 803276 - DNA, 33 bp, Homo sapien
ctgttctccttcagagtaaacttgttgaaacag

SEQ ID NO: 803277 - DNA, 33 bp, Homo sapien
cttcatgtggaatggacactatagaggtaaaca

SEQ ID NO: 803278 - DNA, 33 bp, Homo sapien
cttcatgtggaatggatactatagaggtaaaca

SEQ ID NO: 803279 - DNA, 33 bp, Homo sapien
agagattaggtaaccacaggtgcaggctgttgc

SEQ ID NO: 803280 - DNA, 33 bp, Homo sapien
agagattaggtaaccataggtgcaggctgttgc

SEQ ID NO: 803281 - DNA, 33 bp, Homo sapien
gtctattctcacaaccaccctagaacataggta

SEQ ID NO: 803282 - DNA, 33 bp, Homo sapien
gtctattctcacaaccgccctagaacataggta

SEQ ID NO: 803283 - DNA, 33 bp, Homo sapien
agagttgaagggggaactcatgaactttgagcc

SEQ ID NO: 803284 - DNA, 33 bp, Homo sapien
agagttgaagggggaattcatgaactttgagcc

SEQ ID NO: 803285 - DNA, 33 bp, Homo sapien
gtgatctcaccaaccacagagaattaaccagag

SEQ ID NO: 803286 - DNA, 33 bp, Homo sapien
gtgatctcaccaaccagagagaattaaccagag

SEQ ID NO: 803287 - DNA, 33 bp, Homo sapien
cctggaatatgggaacaattttgccttttagag

SEQ ID NO: 803288 - DNA, 33 bp, Homo sapien
cctggaatatgggaacgattttgccttttagag

SEQ ID NO: 803289 - DNA, 33 bp, Homo sapien
gaatgaagcctcaggaagaagagtagatgctgg

SEQ ID NO: 803290 - DNA, 33 bp, Homo sapien
gaatgaagcctcaggaggaagagtagatgctgg

SEQ ID NO: 803291 - DNA, 33 bp, Homo sapien
tatgtaaaagccaacactaaagagtagttgacc

SEQ ID NO: 803292 - DNA, 33 bp, Homo sapien
tatgtaaaagccaacagtaaagagtagttgacc

SEQ ID NO: 803293 - DNA, 33 bp, Homo sapien
tggaataaagattgtgcatagaattatgatgct

SEQ ID NO: 803294 - DNA, 33 bp, Homo sapien
tggaataaagattgtggatagaattatgatgct

SEQ ID NO: 803295 - DNA, 33 bp, Homo sapien
ggcccttctgcattggcaagtctgcagcccaag

SEQ ID NO: 803296 - DNA, 33 bp, Homo sapien
ggcccttctgcattggtaagtctgcagcccaag

SEQ ID NO: 803297 - DNA, 33 bp, Homo sapien
gaatgcttggtctttccatgccaaaactgttcc

SEQ ID NO: 803298 - DNA, 33 bp, Homo sapien
gaatgcttggtctttcgatgccaaaactgttcc

SEQ ID NO: 803299 - DNA, 33 bp, Homo sapien
gtagggaagcaagacaccatcttcactccaacc

SEQ ID NO: 803300 - DNA, 33 bp, Homo sapien
gtagggaagcaagacagcatcttcactccaacc

SEQ ID NO: 803301 - DNA, 33 bp, Homo sapien
gtgcatttgcttgtaccgcatctaaactctaag

SEQ ID NO: 803302 - DNA, 33 bp, Homo sapien
gtgcatttgcttgtactgcatctaaactctaag

SEQ ID NO: 803303 - DNA, 33 bp, Homo sapien
ccaatggaggataagacagccaagtaggacgct

SEQ ID NO: 803304 - DNA, 33 bp, Homo sapien
ccaatggaggataagagagccaagtaggacgct

SEQ ID NO: 803305 - DNA, 33 bp, Homo sapien
ttagaccatggaaaggaaaaaagatctcaaagc

SEQ ID NO: 803306 - DNA, 33 bp, Homo sapien
ttagaccatggaaagggaaaaagatctcaaagc

SEQ ID NO: 803307 - DNA, 33 bp, Homo sapien
cactctctgggcttcaaaaatagtggccttctt

SEQ ID NO: 803308 - DNA, 33 bp, Homo sapien
cactctctgggcttcataaatagtggccttctt

SEQ ID NO: 803309 - DNA, 33 bp, Homo sapien
aatgttctttccactgcaccacatcacattgaa

SEQ ID NO: 803310 - DNA, 33 bp, Homo sapien
aatgttctttccactgtaccacatcacattgaa

SEQ ID NO: 803311 - DNA, 33 bp, Homo sapien
aaccaggtagcaaccaaaagcttcaggtgggga

SEQ ID NO: 803312 - DNA, 33 bp, Homo sapien
aaccaggtagcaaccacaagcttcaggtgggga

SEQ ID NO: 803313 - DNA, 33 bp, Homo sapien
atctctgcagacaatgcacggtaactgaggagg

SEQ ID NO: 803314 - DNA, 33 bp, Homo sapien
atctctgcagacaatgtacggtaactgaggagg

SEQ ID NO: 803315 - DNA, 33 bp, Homo sapien
ttgaactgagttaagacgtcctggcctgatctg

SEQ ID NO: 803316 - DNA, 33 bp, Homo sapien
ttgaactgagttaagatgtcctggcctgatctg

SEQ ID NO: 803317 - DNA, 33 bp, Homo sapien
tcctagccccatcaatgactctgccaacatggc

SEQ ID NO: 803318 - DNA, 33 bp, Homo sapien
tcctagccccatcaattactctgccaacatggc

SEQ ID NO: 803319 - DNA, 33 bp, Homo sapien
atgcgttctgggaagtgaaagatgatctggtat

SEQ ID NO: 803320 - DNA, 33 bp, Homo sapien
atgcgttctgggaagttaaagatgatctggtat

SEQ ID NO: 803321 - DNA, 33 bp, Homo sapien
cattgaggtgaacagacaaacctttgaatacca

SEQ ID NO: 803322 - DNA, 33 bp, Homo sapien
cattgaggtgaacagataaacctttgaatacca

SEQ ID NO: 803323 - DNA, 33 bp, Homo sapien
tggaagcataaactacaacaagattttcagaag

SEQ ID NO: 803324 - DNA, 33 bp, Homo sapien
tggaagcataaactaccacaagattttcagaag

SEQ ID NO: 803325 - DNA, 33 bp, Homo sapien
actcttcttgggaaaacttaagcatctttaatg

SEQ ID NO: 803326 - DNA, 33 bp, Homo sapien
actcttcttgggaaaatttaagcatctttaatg

SEQ ID NO: 803327 - DNA, 33 bp, Homo sapien
ccctctaatacaagagaaattcatgtttaaaga

SEQ ID NO: 803328 - DNA, 33 bp, Homo sapien
ccctctaatacaagaggaattcatgtttaaaga

SEQ ID NO: 803329 - DNA, 33 bp, Homo sapien
tggttagtactaaaagccagatactgtgctaat

SEQ ID NO: 803330 - DNA, 33 bp, Homo sapien
tggttagtactaaaagtcagatactgtgctaat

SEQ ID NO: 803331 - DNA, 33 bp, Homo sapien
agttgtcactctaaagacctagactctctccca

SEQ ID NO: 803332 - DNA, 33 bp, Homo sapien
agttgtcactctaaagccctagactctctccca

SEQ ID NO: 803333 - DNA, 33 bp, Homo sapien
cttactgccaggagaaatgttgggcagacttat

SEQ ID NO: 803334 - DNA, 33 bp, Homo sapien
cttactgccaggagaagtgttgggcagacttat

SEQ ID NO: 803335 - DNA, 33 bp, Homo sapien
gctcacaattttgaacaaacaattattctgttt

SEQ ID NO: 803336 - DNA, 33 bp, Homo sapien
gctcacaattttgaacgaacaattattctgttt

SEQ ID NO: 803337 - DNA, 33 bp, Homo sapien
gttactcagtgttggcacttctccaactaggat

SEQ ID NO: 803338 - DNA, 33 bp, Homo sapien
gttactcagtgttggcgcttctccaactaggat

SEQ ID NO: 803339 - DNA, 33 bp, Homo sapien
gctaaatgttctgcaccgaagacaggatgttca

SEQ ID NO: 803340 - DNA, 33 bp, Homo sapien
gctaaatgttctgcactgaagacaggatgttca

SEQ ID NO: 803341 - DNA, 33 bp, Homo sapien
gttacctggcctcccaacagcaatggcttttaa

SEQ ID NO: 803342 - DNA, 33 bp, Homo sapien
gttacctggcctcccatcagcaatggcttttaa

SEQ ID NO: 803343 - DNA, 33 bp, Homo sapien
aactcatctgatcacaacaacaaattacaagag

SEQ ID NO: 803344 - DNA, 33 bp, Homo sapien
aactcatctgatcacagcaacaaattacaagag

SEQ ID NO: 803345 - DNA, 33 bp, Homo sapien
acagagaatgagctgaagtgatattaatcagac

SEQ ID NO: 803346 - DNA, 33 bp, Homo sapien
acagagaatgagctgacgtgatattaatcagac

SEQ ID NO: 803347 - DNA, 33 bp, Homo sapien
catctgtagaccccaccgtggaatcctactgtc

SEQ ID NO: 803348 - DNA, 33 bp, Homo sapien
catctgtagaccccactgtggaatcctactgtc

SEQ ID NO: 803349 - DNA, 33 bp, Homo sapien
atcatggctattattaacccctactgatagtgg

SEQ ID NO: 803350 - DNA, 33 bp, Homo sapien
atcatggctattattaccccctactgatagtgg

SEQ ID NO: 803351 - DNA, 33 bp, Homo sapien
cattcagagcatcaagcctggatttatgccaag

SEQ ID NO: 803352 - DNA, 33 bp, Homo sapien
cattcagagcatcaaggctggatttatgccaag

SEQ ID NO: 803353 - DNA, 33 bp, Homo sapien
aaacaagtgagctaatcaagcatacaatgacca

SEQ ID NO: 803354 - DNA, 33 bp, Homo sapien
aaacaagtgagctaattaagcatacaatgacca

SEQ ID NO: 803355 - DNA, 33 bp, Homo sapien
tttaatgccactttcccatgagaacttttctgg

SEQ ID NO: 803356 - DNA, 33 bp, Homo sapien
tttaatgccactttcctatgagaacttttctgg

SEQ ID NO: 803357 - DNA, 33 bp, Homo sapien
agttctaacttccagtaactctcataaacccat

SEQ ID NO: 803358 - DNA, 33 bp, Homo sapien
agttctaacttccagtgactctcataaacccat

SEQ ID NO: 803359 - DNA, 33 bp, Homo sapien
tttgtattacctgggaccatgcctaatactcca

SEQ ID NO: 803360 - DNA, 33 bp, Homo sapien
tttgtattacctgggatcatgcctaatactcca

SEQ ID NO: 803361 - DNA, 33 bp, Homo sapien
ccaagtgaagttcagacaagtgaccaaccatgt

SEQ ID NO: 803362 - DNA, 33 bp, Homo sapien
ccaagtgaagttcagagaagtgaccaaccatgt

SEQ ID NO: 803363 - DNA, 33 bp, Homo sapien
ttttggtaggtcatcactaagaacactttgtga

SEQ ID NO: 803364 - DNA, 33 bp, Homo sapien
ttttggtaggtcatcattaagaacactttgtga

SEQ ID NO: 803365 - DNA, 33 bp, Homo sapien
tgcaagcattgttcaaggaaagtatggttttct

SEQ ID NO: 803366 - DNA, 33 bp, Homo sapien
tgcaagcattgttcaatgaaagtatggttttct

SEQ ID NO: 803367 - DNA, 33 bp, Homo sapien
tatatctcacaacgagcccactctccttgcttt

SEQ ID NO: 803368 - DNA, 33 bp, Homo sapien
tatatctcacaacgagtccactctccttgcttt

SEQ ID NO: 803369 - DNA, 33 bp, Homo sapien
aaacttttgaccttaagaggatgattgacagtt

SEQ ID NO: 803370 - DNA, 33 bp, Homo sapien
aaacttttgaccttaataggatgattgacagtt

SEQ ID NO: 803371 - DNA, 33 bp, Homo sapien
taaataacaggtaaaaccaggctgccaaatgaa

SEQ ID NO: 803372 - DNA, 33 bp, Homo sapien
taaataacaggtaaaatcaggctgccaaatgaa

SEQ ID NO: 803373 - DNA, 33 bp, Homo sapien
cccagtgttaaaagacaaatgagagtcagcctg

SEQ ID NO: 803374 - DNA, 33 bp, Homo sapien
cccagtgttaaaagaccaatgagagtcagcctg

SEQ ID NO: 803375 - DNA, 33 bp, Homo sapien
tttttttggcccaagaacagcatgaaaaaaatt

SEQ ID NO: 803376 - DNA, 33 bp, Homo sapien
tttttttggcccaagagcagcatgaaaaaaatt

SEQ ID NO: 803377 - DNA, 33 bp, Homo sapien
ctgtcactgtaccacacagagaatccagaggca

SEQ ID NO: 803378 - DNA, 33 bp, Homo sapien
ctgtcactgtaccacatagagaatccagaggca

SEQ ID NO: 803379 - DNA, 33 bp, Homo sapien
cccagatgttcttagacgtgtgaacagcacatc

SEQ ID NO: 803380 - DNA, 33 bp, Homo sapien
cccagatgttcttagatgtgtgaacagcacatc

SEQ ID NO: 803381 - DNA, 33 bp, Homo sapien
atatttcaccaaagacaatagacagatgaccaa

SEQ ID NO: 803382 - DNA, 33 bp, Homo sapien
atatttcaccaaagacgatagacagatgaccaa

SEQ ID NO: 803383 - DNA, 33 bp, Homo sapien
tggtggccacaaagacacttaataaatgctgct

SEQ ID NO: 803384 - DNA, 33 bp, Homo sapien
tggtggccacaaagacccttaataaatgctgct

SEQ ID NO: 803385 - DNA, 33 bp, Homo sapien
ttgttttagccaatatcagtaacttttttcttt

SEQ ID NO: 803386 - DNA, 33 bp, Homo sapien
ttgttttagccaatatgagtaacttttttcttt

SEQ ID NO: 803387 - DNA, 33 bp, Homo sapien
atccttgtttctcctacctgtaaacattcccac

SEQ ID NO: 803388 - DNA, 33 bp, Homo sapien
atccttgtttctcctatctgtaaacattcccac

SEQ ID NO: 803389 - DNA, 33 bp, Homo sapien
attggtatctaacttacgtatgtctaatcctac

SEQ ID NO: 803390 - DNA, 33 bp, Homo sapien
attggtatctaacttatgtatgtctaatcctac

SEQ ID NO: 803391 - DNA, 33 bp, Homo sapien
cagtaatccatccggcaaatatttattgagtga

SEQ ID NO: 803392 - DNA, 33 bp, Homo sapien
cagtaatccatccggcgaatatttattgagtga

SEQ ID NO: 803393 - DNA, 33 bp, Homo sapien
tctacttttgaaaacaacattcaaggatcccag

SEQ ID NO: 803394 - DNA, 33 bp, Homo sapien
tctacttttgaaaacagcattcaaggatcccag

SEQ ID NO: 803395 - DNA, 33 bp, Homo sapien
ctacaaaacctaaggaagagcacattctcaaga

SEQ ID NO: 803396 - DNA, 33 bp, Homo sapien
ctacaaaacctaaggatgagcacattctcaaga

SEQ ID NO: 803397 - DNA, 33 bp, Homo sapien
ggtttcacagagccgacgttatcacatagacac

SEQ ID NO: 803398 - DNA, 33 bp, Homo sapien
ggtttcacagagccgatgttatcacatagacac

SEQ ID NO: 803399 - DNA, 33 bp, Homo sapien
caaaaagaggaatgaggatagactagacagaag

SEQ ID NO: 803400 - DNA, 33 bp, Homo sapien
caaaaagaggaatgagtatagactagacagaag

SEQ ID NO: 803401 - DNA, 33 bp, Homo sapien
cacttgtgtagctcacccttctgtctagtctat

SEQ ID NO: 803402 - DNA, 33 bp, Homo sapien
cacttgtgtagctcactcttctgtctagtctat

SEQ ID NO: 803403 - DNA, 33 bp, Homo sapien
caatttgggtcttgatgacatctttttttcagt

SEQ ID NO: 803404 - DNA, 33 bp, Homo sapien
caatttgggtcttgattacatctttttttcagt

SEQ ID NO: 803405 - DNA, 33 bp, Homo sapien
aggtacctttgattgacgtgataggatggaaat

SEQ ID NO: 803406 - DNA, 33 bp, Homo sapien
aggtacctttgattgatgtgataggatggaaat

SEQ ID NO: 803407 - DNA, 33 bp, Homo sapien
atcttaatacatcctcaaagttcctgacaaaca

SEQ ID NO: 803408 - DNA, 33 bp, Homo sapien
atcttaatacatcctcgaagttcctgacaaaca

SEQ ID NO: 803409 - DNA, 33 bp, Homo sapien
acacgtgatttactcacatgaaactgacacaaa

SEQ ID NO: 803410 - DNA, 33 bp, Homo sapien
acacgtgatttactcagatgaaactgacacaaa

SEQ ID NO: 803411 - DNA, 33 bp, Homo sapien
tttgcactgcagccagaatagtatttttgaaaa

SEQ ID NO: 803412 - DNA, 33 bp, Homo sapien
tttgcactgcagccagcatagtatttttgaaaa

SEQ ID NO: 803413 - DNA, 33 bp, Homo sapien
tctttccttgttagcactaatagcaatcagcaa

SEQ ID NO: 803414 - DNA, 33 bp, Homo sapien
tctttccttgttagcattaatagcaatcagcaa

SEQ ID NO: 803415 - DNA, 33 bp, Homo sapien
tgagactgggaaaacacggccataggctttaaa

SEQ ID NO: 803416 - DNA, 33 bp, Homo sapien
tgagactgggaaaacatggccataggctttaaa

SEQ ID NO: 803417 - DNA, 33 bp, Homo sapien
caaagtgcaaataaaacgggcagtgtgtactca

SEQ ID NO: 803418 - DNA, 33 bp, Homo sapien
caaagtgcaaataaaatgggcagtgtgtactca

SEQ ID NO: 803419 - DNA, 33 bp, Homo sapien
ataagaacagaaaaaaatgtttatggaattgag

SEQ ID NO: 803420 - DNA, 33 bp, Homo sapien
ataagaacagaaaaaagtgtttatggaattgag

SEQ ID NO: 803421 - DNA, 33 bp, Homo sapien
gaccaggcgccaatgggatatatgtggagggtg

SEQ ID NO: 803422 - DNA, 33 bp, Homo sapien
gaccaggcgccaatggtatatatgtggagggtg

SEQ ID NO: 803423 - DNA, 33 bp, Homo sapien
gaagggacaataggtacaaaagcccagagagat

SEQ ID NO: 803424 - DNA, 33 bp, Homo sapien
gaagggacaataggtataaaagcccagagagat

SEQ ID NO: 803425 - DNA, 33 bp, Homo sapien
ccaagtagctcctttcaattattgattcattct

SEQ ID NO: 803426 - DNA, 33 bp, Homo sapien
ccaagtagctcctttcgattattgattcattct

SEQ ID NO: 803427 - DNA, 33 bp, Homo sapien
agaatatctaggttcacatagtcaaaaatagat

SEQ ID NO: 803428 - DNA, 33 bp, Homo sapien
agaatatctaggttcatatagtcaaaaatagat

SEQ ID NO: 803429 - DNA, 33 bp, Homo sapien
gtacattgaagcacagaaacataagcataagag

SEQ ID NO: 803430 - DNA, 33 bp, Homo sapien
gtacattgaagcacaggaacataagcataagag

SEQ ID NO: 803431 - DNA, 33 bp, Homo sapien
ttcatttcaatgggtaccactgtagggagagac

SEQ ID NO: 803432 - DNA, 33 bp, Homo sapien
ttcatttcaatgggtatcactgtagggagagac

SEQ ID NO: 803433 - DNA, 33 bp, Homo sapien
tgaacctctatatttgaaaaatggaagaaaaca

SEQ ID NO: 803434 - DNA, 33 bp, Homo sapien
tgaacctctatatttgcaaaatggaagaaaaca

SEQ ID NO: 803435 - DNA, 33 bp, Homo sapien
gactggatgtagggtacaggaagattttcaaaa

SEQ ID NO: 803436 - DNA, 33 bp, Homo sapien
gactggatgtagggtagaggaagattttcaaaa

SEQ ID NO: 803437 - DNA, 33 bp, Homo sapien
ttgacatttatttcaacagaagccataaacata

SEQ ID NO: 803438 - DNA, 33 bp, Homo sapien
ttgacatttatttcaagagaagccataaacata

SEQ ID NO: 803439 - DNA, 33 bp, Homo sapien
tatgagtggcaaataaacacctgaaaatatgct

SEQ ID NO: 803440 - DNA, 33 bp, Homo sapien
tatgagtggcaaataagcacctgaaaatatgct

SEQ ID NO: 803441 - DNA, 33 bp, Homo sapien
tctctactagaattgccaagactaactatgtca

SEQ ID NO: 803442 - DNA, 33 bp, Homo sapien
tctctactagaattgctaagactaactatgtca

SEQ ID NO: 803443 - DNA, 33 bp, Homo sapien
aacaatttctttattaagtagctaggcccaaac

SEQ ID NO: 803444 - DNA, 33 bp, Homo sapien
aacaatttctttattacgtagctaggcccaaac

SEQ ID NO: 803445 - DNA, 33 bp, Homo sapien
tagtggcatagagagaaagtaatccaataatca

SEQ ID NO: 803446 - DNA, 33 bp, Homo sapien
tagtggcatagagagacagtaatccaataatca

SEQ ID NO: 803447 - DNA, 33 bp, Homo sapien
aatagaggccaacatacagttccagtaatgact

SEQ ID NO: 803448 - DNA, 33 bp, Homo sapien
aatagaggccaacatatagttccagtaatgact

SEQ ID NO: 803449 - DNA, 33 bp, Homo sapien
agaagaatgaaggaaaatcacctgctttagttc

SEQ ID NO: 803450 - DNA, 33 bp, Homo sapien
agaagaatgaaggaaagtcacctgctttagttc

SEQ ID NO: 803451 - DNA, 33 bp, Homo sapien
aaatatttataatagccgccttgaaatttttgt

SEQ ID NO: 803452 - DNA, 33 bp, Homo sapien
aaatatttataatagctgccttgaaatttttgt

SEQ ID NO: 803453 - DNA, 33 bp, Homo sapien
ctcatcttctgatccacataatggctgcctgga

SEQ ID NO: 803454 - DNA, 33 bp, Homo sapien
ctcatcttctgatccatataatggctgcctgga

SEQ ID NO: 803455 - DNA, 33 bp, Homo sapien
ccggctactcagggaacaggagagagtaggcag

SEQ ID NO: 803456 - DNA, 33 bp, Homo sapien
ccggctactcagggaataggagagagtaggcag

SEQ ID NO: 803457 - DNA, 33 bp, Homo sapien
tgtatttaaggtttatcaaggtatcagcctgtc

SEQ ID NO: 803458 - DNA, 33 bp, Homo sapien
tgtatttaaggtttattaaggtatcagcctgtc

SEQ ID NO: 803459 - DNA, 33 bp, Homo sapien
aggaaaactaaccacccagtatatgcagagaga

SEQ ID NO: 803460 - DNA, 33 bp, Homo sapien
aggaaaactaaccacctagtatatgcagagaga

SEQ ID NO: 803461 - DNA, 33 bp, Homo sapien
taggaaaaattgtaacaatgcatttggtatttg

SEQ ID NO: 803462 - DNA, 33 bp, Homo sapien
taggaaaaattgtaactatgcatttggtatttg

SEQ ID NO: 803463 - DNA, 33 bp, Homo sapien
ctgctatccagagaaacaagaaaatgatgcaag

SEQ ID NO: 803464 - DNA, 33 bp, Homo sapien
ctgctatccagagaaagaagaaaatgatgcaag

SEQ ID NO: 803465 - DNA, 33 bp, Homo sapien
ctcccattcagcccataaggttgtaagaaagta

SEQ ID NO: 803466 - DNA, 33 bp, Homo sapien
ctcccattcagcccatgaggttgtaagaaagta

SEQ ID NO: 803467 - DNA, 33 bp, Homo sapien
gtgttcctcagatacaacaacgagcagacatta

SEQ ID NO: 803468 - DNA, 33 bp, Homo sapien
gtgttcctcagatacagcaacgagcagacatta

SEQ ID NO: 803469 - DNA, 33 bp, Homo sapien
gtcttgattttcacacaaaagccttcaatccca

SEQ ID NO: 803470 - DNA, 33 bp, Homo sapien
gtcttgattttcacaccaaagccttcaatccca

SEQ ID NO: 803471 - DNA, 33 bp, Homo sapien
tctcaatccccttagagtccccagtccctgaag

SEQ ID NO: 803472 - DNA, 33 bp, Homo sapien
tctcaatccccttagattccccagtccctgaag

SEQ ID NO: 803473 - DNA, 33 bp, Homo sapien
ctactcattaagtcctaaaacaatgtagtatta

SEQ ID NO: 803474 - DNA, 33 bp, Homo sapien
ctactcattaagtcctgaaacaatgtagtatta

SEQ ID NO: 803475 - DNA, 33 bp, Homo sapien
gtgcttcacagcctaaatgtttctagggctcag

SEQ ID NO: 803476 - DNA, 33 bp, Homo sapien
gtgcttcacagcctaagtgtttctagggctcag

SEQ ID NO: 803477 - DNA, 33 bp, Homo sapien
aagagcaaaggaagacggagagactgtcagaaa

SEQ ID NO: 803478 - DNA, 33 bp, Homo sapien
aagagcaaaggaagactgagagactgtcagaaa

SEQ ID NO: 803479 - DNA, 33 bp, Homo sapien
cacctatttctcattgcaattgaccacagataa

SEQ ID NO: 803480 - DNA, 33 bp, Homo sapien
cacctatttctcattgtaattgaccacagataa

SEQ ID NO: 803481 - DNA, 33 bp, Homo sapien
cccagcatcatcctcacgtggtttacacagaca

SEQ ID NO: 803482 - DNA, 33 bp, Homo sapien
cccagcatcatcctcatgtggtttacacagaca

SEQ ID NO: 803483 - DNA, 33 bp, Homo sapien
cctcctagctcacaacaggggctcaataaatga

SEQ ID NO: 803484 - DNA, 33 bp, Homo sapien
cctcctagctcacaacgggggctcaataaatga

SEQ ID NO: 803485 - DNA, 33 bp, Homo sapien
gcagacagtcaaaaaacctcttctagccatttg

SEQ ID NO: 803486 - DNA, 33 bp, Homo sapien
gcagacagtcaaaaaatctcttctagccatttg

SEQ ID NO: 803487 - DNA, 33 bp, Homo sapien
aagaatgttattagacacccagatgaagatgga

SEQ ID NO: 803488 - DNA, 33 bp, Homo sapien
aagaatgttattagacgcccagatgaagatgga

SEQ ID NO: 803489 - DNA, 33 bp, Homo sapien
ataaacgatgtgaaaacttgggataagagcatt

SEQ ID NO: 803490 - DNA, 33 bp, Homo sapien
ataaacgatgtgaaaatttgggataagagcatt

SEQ ID NO: 803491 - DNA, 33 bp, Homo sapien
tcttgtattcctcagaactagcctccaccctgc

SEQ ID NO: 803492 - DNA, 33 bp, Homo sapien
tcttgtattcctcagatctagcctccaccctgc

SEQ ID NO: 803493 - DNA, 33 bp, Homo sapien
tggtgccagacccaacactaggtaaagctactg

SEQ ID NO: 803494 - DNA, 33 bp, Homo sapien
tggtgccagacccaacgctaggtaaagctactg

SEQ ID NO: 803495 - DNA, 33 bp, Homo sapien
gataacagaataaataggtcaagctaagcccca

SEQ ID NO: 803496 - DNA, 33 bp, Homo sapien
gataacagaataaatatgtcaagctaagcccca

SEQ ID NO: 803497 - DNA, 33 bp, Homo sapien
cttggcagatgtaaataactttctactttgcat

SEQ ID NO: 803498 - DNA, 33 bp, Homo sapien
cttggcagatgtaaatgactttctactttgcat

SEQ ID NO: 803499 - DNA, 33 bp, Homo sapien
ttttccaagtgcacacagcatttgtctgtaaca

SEQ ID NO: 803500 - DNA, 33 bp, Homo sapien
ttttccaagtgcacacggcatttgtctgtaaca

SEQ ID NO: 803501 - DNA, 33 bp, Homo sapien
cgactctcctgcctgaagtcaaacatactccat

SEQ ID NO: 803502 - DNA, 33 bp, Homo sapien
cgactctcctgcctgaggtcaaacatactccat

SEQ ID NO: 803503 - DNA, 33 bp, Homo sapien
ttattgagttctttgaagatagctatggccagc

SEQ ID NO: 803504 - DNA, 33 bp, Homo sapien
ttattgagttctttgaggatagctatggccagc

SEQ ID NO: 803505 - DNA, 33 bp, Homo sapien
attataatcttacgggaacaccttcatatttgc

SEQ ID NO: 803506 - DNA, 33 bp, Homo sapien
attataatcttacggggacaccttcatatttgc

SEQ ID NO: 803507 - DNA, 33 bp, Homo sapien
cccctactgtctagtacaggacacggcaccaag

SEQ ID NO: 803508 - DNA, 33 bp, Homo sapien
cccctactgtctagtataggacacggcaccaag

SEQ ID NO: 803509 - DNA, 33 bp, Homo sapien
gttttcaggaattgggacactcacccaggacac

SEQ ID NO: 803510 - DNA, 33 bp, Homo sapien
gttttcaggaattgggtcactcacccaggacac

SEQ ID NO: 803511 - DNA, 33 bp, Homo sapien
cactaaacatgtacttcaaagcaagcagacata

SEQ ID NO: 803512 - DNA, 33 bp, Homo sapien
cactaaacatgtactttaaagcaagcagacata

SEQ ID NO: 803513 - DNA, 33 bp, Homo sapien
agatcatacttctgcccgaaaacttgcaagaat

SEQ ID NO: 803514 - DNA, 33 bp, Homo sapien
agatcatacttctgcctgaaaacttgcaagaat

SEQ ID NO: 803515 - DNA, 33 bp, Homo sapien
gtagtgaagaatgatgccaagatgtgtcggctt

SEQ ID NO: 803516 - DNA, 33 bp, Homo sapien
gtagtgaagaatgatgtcaagatgtgtcggctt

SEQ ID NO: 803517 - DNA, 33 bp, Homo sapien
ggtgtccactagatataaactaggtgttacata

SEQ ID NO: 803518 - DNA, 33 bp, Homo sapien
ggtgtccactagatatgaactaggtgttacata

SEQ ID NO: 803519 - DNA, 33 bp, Homo sapien
tgcaaggaaaactataaaatgccaatgaaagaa

SEQ ID NO: 803520 - DNA, 33 bp, Homo sapien
tgcaaggaaaactatacaatgccaatgaaagaa

SEQ ID NO: 803521 - DNA, 33 bp, Homo sapien
cccacagtgccttccacattttaatttgtaagt

SEQ ID NO: 803522 - DNA, 33 bp, Homo sapien
cccacagtgccttccatattttaatttgtaagt

SEQ ID NO: 803523 - DNA, 33 bp, Homo sapien
aatatgctccttgatgccaactatttgttgctg

SEQ ID NO: 803524 - DNA, 33 bp, Homo sapien
aatatgctccttgatgtcaactatttgttgctg

SEQ ID NO: 803525 - DNA, 33 bp, Homo sapien
taggcactcaattctaaatggtgcagttctgta

SEQ ID NO: 803526 - DNA, 33 bp, Homo sapien
taggcactcaattctagatggtgcagttctgta

SEQ ID NO: 803527 - DNA, 33 bp, Homo sapien
ccaggtctagaatcccaccctgagaatctgata

SEQ ID NO: 803528 - DNA, 33 bp, Homo sapien
ccaggtctagaatcccgccctgagaatctgata

SEQ ID NO: 803529 - DNA, 33 bp, Homo sapien
cttctcaatagccaaacgttacaagtaatccaa

SEQ ID NO: 803530 - DNA, 33 bp, Homo sapien
cttctcaatagccaaatgttacaagtaatccaa

SEQ ID NO: 803531 - DNA, 33 bp, Homo sapien; identical to SEQ ID NO: 803529

SEQ ID NO: 803532 - DNA, 33 bp, Homo sapien; identical to SEQ ID NO: 803530

SEQ ID NO: 803533 - DNA, 33 bp, Homo sapien
gaccttgcaagttgtcaaatcagaaagagaaag

SEQ ID NO: 803534 - DNA, 33 bp, Homo sapien
gaccttgcaagttgtcgaatcagaaagagaaag

SEQ ID NO: 803535 - DNA, 33 bp, Homo sapien
attgtttcagaggtacaaagtttcaattcgaga

SEQ ID NO: 803536 - DNA, 33 bp, Homo sapien
attgtttcagaggtaccaagtttcaattcgaga

SEQ ID NO: 803537 - DNA, 33 bp, Homo sapien
tgtttggacattctgaatatgtggctcttgcca

SEQ ID NO: 803538 - DNA, 33 bp, Homo sapien
tgtttggacattctgagtatgtggctcttgcca

SEQ ID NO: 803539 - DNA, 33 bp, Homo sapien
aaaggaggtggttcacaaaatggattaatatca

SEQ ID NO: 803540 - DNA, 33 bp, Homo sapien
aaaggaggtggttcacgaaatggattaatatca

SEQ ID NO: 803541 - DNA, 33 bp, Homo sapien
cgtcaccacagaaccacatttgttattaatcaa

SEQ ID NO: 803542 - DNA, 33 bp, Homo sapien
cgtcaccacagaaccatatttgttattaatcaa

SEQ ID NO: 803543 - DNA, 33 bp, Homo sapien
ttttagtatataagcaccaaactagcaagaaat

SEQ ID NO: 803544 - DNA, 33 bp, Homo sapien
ttttagtatataagcatcaaactagcaagaaat

SEQ ID NO: 803545 - DNA, 33 bp, Homo sapien
caatatgttgtaaagacgaaggaaaagaacaaa

SEQ ID NO: 803546 - DNA, 33 bp, Homo sapien
caatatgttgtaaagatgaaggaaaagaacaaa

SEQ ID NO: 803547 - DNA, 33 bp, Homo sapien
caaaggcagatttcaaaagtctataaaaacaat

SEQ ID NO: 803548 - DNA, 33 bp, Homo sapien
caaaggcagatttcaacagtctataaaaacaat

SEQ ID NO: 803549 - DNA, 33 bp, Homo sapien
acccccagtcactgaaataggcaggatcagaca

SEQ ID NO: 803550 - DNA, 33 bp, Homo sapien
acccccagtcactgaattaggcaggatcagaca

SEQ ID NO: 803551 - DNA, 33 bp, Homo sapien
atgttctctttttctaactctggtagcagaagg

SEQ ID NO: 803552 - DNA, 33 bp, Homo sapien
atgttctctttttctagctctggtagcagaagg

SEQ ID NO: 803553 - DNA, 33 bp, Homo sapien
catgtgaaaaggcaaaaagaactgtctgtgtac

SEQ ID NO: 803554 - DNA, 33 bp, Homo sapien
catgtgaaaaggcaaagagaactgtctgtgtac

SEQ ID NO: 803555 - DNA, 33 bp, Homo sapien
tcacacagctcactaactgatccctgatgtaac

SEQ ID NO: 803556 - DNA, 33 bp, Homo sapien
tcacacagctcactaattgatccctgatgtaac

SEQ ID NO: 803557 - DNA, 33 bp, Homo sapien
cctattataatgcttgcaaaatcaggagtgctt

SEQ ID NO: 803558 - DNA, 33 bp, Homo sapien
cctattataatgcttgtaaaatcaggagtgctt

SEQ ID NO: 803559 - DNA, 33 bp, Homo sapien
atatcgaaaccaaaatcaactccttcagtgtcc

SEQ ID NO: 803560 - DNA, 33 bp, Homo sapien
atatcgaaaccaaaatgaactccttcagtgtcc

SEQ ID NO: 803561 - DNA, 33 bp, Homo sapien
tggcaggatccaaggaagaattgatgtatctac

SEQ ID NO: 803562 - DNA, 33 bp, Homo sapien
tggcaggatccaaggaggaattgatgtatctac

SEQ ID NO: 803563 - DNA, 33 bp, Homo sapien
aaggccagctaacactaaaaagttgtgatggtt

SEQ ID NO: 803564 - DNA, 33 bp, Homo sapien
aaggccagctaacactgaaaagttgtgatggtt

SEQ ID NO: 803565 - DNA, 33 bp, Homo sapien
actcatttcctagccccgagagctttgacaagt

SEQ ID NO: 803566 - DNA, 33 bp, Homo sapien
actcatttcctagccctgagagctttgacaagt

SEQ ID NO: 803567 - DNA, 33 bp, Homo sapien
aagcaccaggttacaaaatccagtagaacctga

SEQ ID NO: 803568 - DNA, 33 bp, Homo sapien
aagcaccaggttacaagatccagtagaacctga

SEQ ID NO: 803569 - DNA, 33 bp, Homo sapien
actttacagagaggataagtgacgttttcaagg

SEQ ID NO: 803570 - DNA, 33 bp, Homo sapien
actttacagagaggatgagtgacgttttcaagg

SEQ ID NO: 803571 - DNA, 33 bp, Homo sapien
tgagatacagctgtaactggagggcatgtcatc

SEQ ID NO: 803572 - DNA, 33 bp, Homo sapien
tgagatacagctgtaattggagggcatgtcatc

SEQ ID NO: 803573 - DNA, 33 bp, Homo sapien
gggtctaatacttatacgtggcagggaacacac

SEQ ID NO: 803574 - DNA, 33 bp, Homo sapien
gggtctaatacttatatgtggcagggaacacac

SEQ ID NO: 803575 - DNA, 33 bp, Homo sapien
tgaaagagaccctagaaatcatttagtctactc

SEQ ID NO: 803576 - DNA, 33 bp, Homo sapien
tgaaagagaccctagagatcatttagtctactc

SEQ ID NO: 803577 - DNA, 33 bp, Homo sapien
cagttctgtgaggccactactatcgttacagtt

SEQ ID NO: 803578 - DNA, 33 bp, Homo sapien
cagttctgtgaggccagtactatcgttacagtt

SEQ ID NO: 803579 - DNA, 33 bp, Homo sapien
gaatgcttggtctcataaacaagaatgatataa

SEQ ID NO: 803580 - DNA, 33 bp, Homo sapien
gaatgcttggtctcatgaacaagaatgatataa

SEQ ID NO: 803581 - DNA, 33 bp, Homo sapien
tcatctatctatccacacgaccatttccattcc

SEQ ID NO: 803582 - DNA, 33 bp, Homo sapien
tcatctatctatccacccgaccatttccattcc

SEQ ID NO: 803583 - DNA, 33 bp, Homo sapien
ttagctgtgctgctaaaccgtcttgcatattgc

SEQ ID NO: 803584 - DNA, 33 bp, Homo sapien
ttagctgtgctgctaacccgtcttgcatattgc

SEQ ID NO: 803585 - DNA, 33 bp, Homo sapien
cttacttgcaaacggaagcatttgtaatcctga

SEQ ID NO: 803586 - DNA, 33 bp, Homo sapien
cttacttgcaaacggaggcatttgtaatcctga

SEQ ID NO: 803587 - DNA, 33 bp, Homo sapien
gctttcgtgattgtccaatgtatttacacgtac

SEQ ID NO: 803588 - DNA, 33 bp, Homo sapien
gctttcgtgattgtccgatgtatttacacgtac

SEQ ID NO: 803589 - DNA, 33 bp, Homo sapien
gggccagcaccttttcaccctcttcatttttct

SEQ ID NO: 803590 - DNA, 33 bp, Homo sapien
gggccagcaccttttcgccctcttcatttttct

SEQ ID NO: 803591 - DNA, 33 bp, Homo sapien
ttcaaaatggatgctaggtgaagaagattccgg

SEQ ID NO: 803592 - DNA, 33 bp, Homo sapien
ttcaaaatggatgctatgtgaagaagattccgg

SEQ ID NO: 803593 - DNA, 33 bp, Homo sapien
ctcttcactgagctaacaggcccagagtttcgg

SEQ ID NO: 803594 - DNA, 33 bp, Homo sapien
ctcttcactgagctaataggcccagagtttcgg

SEQ ID NO: 803595 - DNA, 33 bp, Homo sapien
ggtttgactgccctacacatctactcgaggtca

SEQ ID NO: 803596 - DNA, 33 bp, Homo sapien
ggtttgactgccctacgcatctactcgaggtca

SEQ ID NO: 803597 - DNA, 33 bp, Homo sapien
acaacagcacagataaatgaagtttgaaatttt

SEQ ID NO: 803598 - DNA, 33 bp, Homo sapien
acaacagcacagataagtgaagtttgaaatttt

SEQ ID NO: 803599 - DNA, 33 bp, Homo sapien
cacgctggatcgtctagctgattccaaagctgt

SEQ ID NO: 803600 - DNA, 33 bp, Homo sapien
cacgctggatcgtctatctgattccaaagctgt

SEQ ID NO: 803601 - DNA, 33 bp, Homo sapien
atctttgaagtgtaaactaagagctacattttc

SEQ ID NO: 803602 - DNA, 33 bp, Homo sapien
atctttgaagtgtaaattaagagctacattttc

SEQ ID NO: 803603 - DNA, 33 bp, Homo sapien
atagagtgacaatggaggtggtcagtgaaggcc

SEQ ID NO: 803604 - DNA, 33 bp, Homo sapien
atagagtgacaatggatgtggtcagtgaaggcc

SEQ ID NO: 803605 - DNA, 33 bp, Homo sapien
cccaaccccatagcaacgtcctttgatccttct

SEQ ID NO: 803606 - DNA, 33 bp, Homo sapien
cccaaccccatagcaatgtcctttgatccttct

SEQ ID NO: 803607 - DNA, 33 bp, Homo sapien
ctccacagtcccagggaaagttcacagccacag

SEQ ID NO: 803608 - DNA, 33 bp, Homo sapien
ctccacagtcccagggcaagttcacagccacag

SEQ ID NO: 803609 - DNA, 33 bp, Homo sapien
gaactctacatcatcaacacttccctggtttca

SEQ ID NO: 803610 - DNA, 33 bp, Homo sapien
gaactctacatcatcatcacttccctggtttca

SEQ ID NO: 803611 - DNA, 33 bp, Homo sapien
gctacatatatatcaactcagggcttctgaact

SEQ ID NO: 803612 - DNA, 33 bp, Homo sapien
gctacatatatatcaattcagggcttctgaact

SEQ ID NO: 803613 - DNA, 33 bp, Homo sapien
aaatacaaaagaacctcacccaaatgataacaa

SEQ ID NO: 803614 - DNA, 33 bp, Homo sapien
aaatacaaaagaaccttacccaaatgataacaa

SEQ ID NO: 803615 - DNA, 33 bp, Homo sapien
ccttcatctgagtgtacgaatagcctgtactta

SEQ ID NO: 803616 - DNA, 33 bp, Homo sapien
ccttcatctgagtgtatgaatagcctgtactta

SEQ ID NO: 803617 - DNA, 33 bp, Homo sapien
gcactgggtgagggcacaaggagttcctacaca

SEQ ID NO: 803618 - DNA, 33 bp, Homo sapien
gcactgggtgagggcagaaggagttcctacaca

SEQ ID NO: 803619 - DNA, 33 bp, Homo sapien
gcttttagaagtttcaactgacatggagtggtt

SEQ ID NO: 803620 - DNA, 33 bp, Homo sapien
gcttttagaagtttcagctgacatggagtggtt

SEQ ID NO: 803621 - DNA, 33 bp, Homo sapien
aaacagcaggcctacgaagaacagaggaaggaa

SEQ ID NO: 803622 - DNA, 33 bp, Homo sapien
aaacagcaggcctacggagaacagaggaaggaa

SEQ ID NO: 803623 - DNA, 33 bp, Homo sapien
aagcctttgctcctcaatcttctcaggacagaa

SEQ ID NO: 803624 - DNA, 33 bp, Homo sapien
aagcctttgctcctcagtcttctcaggacagaa

SEQ ID NO: 803625 - DNA, 33 bp, Homo sapien
ggaagcagttgctcaaaacattttgttgagtga

SEQ ID NO: 803626 - DNA, 33 bp, Homo sapien
ggaagcagttgctcaatacattttgttgagtga

SEQ ID NO: 803627 - DNA, 33 bp, Homo sapien
atcgaacggctttaacactcacttctttatcaa

SEQ ID NO: 803628 - DNA, 33 bp, Homo sapien
atcgaacggctttaactctcacttctttatcaa

SEQ ID NO: 803629 - DNA, 33 bp, Homo sapien
ctttggtgacacagaacgtgagattaactcctt

SEQ ID NO: 803630 - DNA, 33 bp, Homo sapien
ctttggtgacacagaatgtgagattaactcctt

SEQ ID NO: 803631 - DNA, 33 bp, Homo sapien
tttgctgtagagatcaaacccttactatcatat

SEQ ID NO: 803632 - DNA, 33 bp, Homo sapien
tttgctgtagagatcagacccttactatcatat

SEQ ID NO: 803633 - DNA, 33 bp, Homo sapien
aacaatcactatctcacggggatcctgtaagaa

SEQ ID NO: 803634 - DNA, 33 bp, Homo sapien
aacaatcactatctcatggggatcctgtaagaa

SEQ ID NO: 803635 - DNA, 33 bp, Homo sapien
ttcagcttcacaaagagatttcaactccaacca

SEQ ID NO: 803636 - DNA, 33 bp, Homo sapien
ttcagcttcacaaagatatttcaactccaacca

SEQ ID NO: 803637 - DNA, 33 bp, Homo sapien
ttaccacctagcttcccctgctcttctaaggta

SEQ ID NO: 803638 - DNA, 33 bp, Homo sapien
ttaccacctagcttcctctgctcttctaaggta

SEQ ID NO: 803639 - DNA, 33 bp, Homo sapien
tatgtggcaaggaagacatgcctatgaggtcaa

SEQ ID NO: 803640 - DNA, 33 bp, Homo sapien
tatgtggcaaggaagatatgcctatgaggtcaa

SEQ ID NO: 803641 - DNA, 33 bp, Homo sapien
gaccagcctaaggacacgcagccctgagccact

SEQ ID NO: 803642 - DNA, 33 bp, Homo sapien
gaccagcctaaggacatgcagccctgagccact

SEQ ID NO: 803643 - DNA, 33 bp, Homo sapien
tacaatgaaattactcagagagaaccactgtaa

SEQ ID NO: 803644 - DNA, 33 bp, Homo sapien
tacaatgaaattactcggagagaaccactgtaa

SEQ ID NO: 803645 - DNA, 33 bp, Homo sapien
gaagaaaaaagagcagacaagccactaaaaaac

SEQ ID NO: 803646 - DNA, 33 bp, Homo sapien
gaagaaaaaagagcagtcaagccactaaaaaac

SEQ ID NO: 803647 - DNA, 33 bp, Homo sapien
atgtatctgtaaaccaagcccatcgcgagacag

SEQ ID NO: 803648 - DNA, 33 bp, Homo sapien
atgtatctgtaaaccaggcccatcgcgagacag

SEQ ID NO: 803649 - DNA, 33 bp, Homo sapien
tctgttgggtccgtaaatggatgaaagaataca

SEQ ID NO: 803650 - DNA, 33 bp, Homo sapien
tctgttgggtccgtaagtggatgaaagaataca

SEQ ID NO: 803651 - DNA, 33 bp, Homo sapien
agctttaccggagtgccagaaaaaaggagaggt

SEQ ID NO: 803652 - DNA, 33 bp, Homo sapien
agctttaccggagtgctagaaaaaaggagaggt

SEQ ID NO: 803653 - DNA, 33 bp, Homo sapien
cagacttactgcaagaacatagacaacttataa

SEQ ID NO: 803654 - DNA, 33 bp, Homo sapien
cagacttactgcaagaccatagacaacttataa

SEQ ID NO: 803655 - DNA, 33 bp, Homo sapien
ctcaatatgtatttcccatatgaacaaagtatg

SEQ ID NO: 803656 - DNA, 33 bp, Homo sapien
ctcaatatgtatttcctatatgaacaaagtatg

SEQ ID NO: 803657 - DNA, 33 bp, Homo sapien
gctaacaaaagataaaagagctctcagacatta

SEQ ID NO: 803658 - DNA, 33 bp, Homo sapien
gctaacaaaagataaaggagctctcagacatta

SEQ ID NO: 803659 - DNA, 33 bp, Homo sapien
cccaaaggactgacacagagaaaacagaatgaa

SEQ ID NO: 803660 - DNA, 33 bp, Homo sapien
cccaaaggactgacacggagaaaacagaatgaa

SEQ ID NO: 803661 - DNA, 33 bp, Homo sapien
gtcccatcaataaataagtggtttgtgtctacc

SEQ ID NO: 803662 - DNA, 33 bp, Homo sapien
gtcccatcaataaataggtggtttgtgtctacc

SEQ ID NO: 803663 - DNA, 33 bp, Homo sapien
caaaatggatgaaaaacggtgctgtcttgacat

SEQ ID NO: 803664 - DNA, 33 bp, Homo sapien
caaaatggatgaaaaatggtgctgtcttgacat

SEQ ID NO: 803665 - DNA, 33 bp, Homo sapien
aaattcttagcgatgacctacttcatattagtg

SEQ ID NO: 803666 - DNA, 33 bp, Homo sapien
aaattcttagcgatgatctacttcatattagtg

SEQ ID NO: 803667 - DNA, 33 bp, Homo sapien
cccattttcacttttaagcattgagtttctcag

SEQ ID NO: 803668 - DNA, 33 bp, Homo sapien
cccattttcacttttaggcattgagtttctcag

SEQ ID NO: 803669 - DNA, 33 bp, Homo sapien
tcacttgaataatcaccggaaccgaggcacact

SEQ ID NO: 803670 - DNA, 33 bp, Homo sapien
tcacttgaataatcactggaaccgaggcacact

SEQ ID NO: 803671 - DNA, 33 bp, Homo sapien
ctacaggtacagtcgcagaagtgcagagatata

SEQ ID NO: 803672 - DNA, 33 bp, Homo sapien
ctacaggtacagtcgcggaagtgcagagatata

SEQ ID NO: 803673 - DNA, 33 bp, Homo sapien
tggatcacagtgaccacaacaaaactggtaacg

SEQ ID NO: 803674 - DNA, 33 bp, Homo sapien
tggatcacagtgaccataacaaaactggtaacg

SEQ ID NO: 803675 - DNA, 33 bp, Homo sapien
gagaggttagagtgcacagcttacaagtcagat

SEQ ID NO: 803676 - DNA, 33 bp, Homo sapien
gagaggttagagtgcatagcttacaagtcagat

SEQ ID NO: 803677 - DNA, 33 bp, Homo sapien
gtgtgcagcacttatcaagagcataatatctgt

SEQ ID NO: 803678 - DNA, 33 bp, Homo sapien
gtgtgcagcacttatctagagcataatatctgt

SEQ ID NO: 803679 - DNA, 33 bp, Homo sapien
tggaagttttggccaggataatcagacaagaga

SEQ ID NO: 803680 - DNA, 33 bp, Homo sapien
tggaagttttggccagtataatcagacaagaga

SEQ ID NO: 803681 - DNA, 33 bp, Homo sapien; identical to SEQ ID NO: 803679

SEQ ID NO: 803682 - DNA, 33 bp, Homo sapien; identical to SEQ ID NO: 803680

SEQ ID NO: 803683 - DNA, 33 bp, Homo sapien
ttattgcattacatctcaaacttcaggacataa

SEQ ID NO: 803684 - DNA, 33 bp, Homo sapien
ttattgcattacatcttaaacttcaggacataa

SEQ ID NO: 803685 - DNA, 33 bp, Homo sapien
tacctatttactgacacagctaacagtagggaa

SEQ ID NO: 803686 - DNA, 33 bp, Homo sapien
tacctatttactgacatagctaacagtagggaa

SEQ ID NO: 803687 - DNA, 33 bp, Homo sapien
agtagggaaagttgaacgttaaaatactgtcaa

SEQ ID NO: 803688 - DNA, 33 bp, Homo sapien
agtagggaaagttgaatgttaaaatactgtcaa

SEQ ID NO: 803689 - DNA, 33 bp, Homo sapien
tcaggtatctatgtgaaggagatgatcaaatct

SEQ ID NO: 803690 - DNA, 33 bp, Homo sapien
tcaggtatctatgtgatggagatgatcaaatct

SEQ ID NO: 803691 - DNA, 33 bp, Homo sapien
ctgcttgttctcccaaaagatttgtctatatcc

SEQ ID NO: 803692 - DNA, 33 bp, Homo sapien
ctgcttgttctcccaatagatttgtctatatcc

SEQ ID NO: 803693 - DNA, 33 bp, Homo sapien
gtaagatgaggcaacagtgtgtaatgaagaagt

SEQ ID NO: 803694 - DNA, 33 bp, Homo sapien
gtaagatgaggcaacattgtgtaatgaagaagt

SEQ ID NO: 803695 - DNA, 33 bp, Homo sapien
atagtcacgtattttccacatataaatatctgt

SEQ ID NO: 803696 - DNA, 33 bp, Homo sapien
atagtcacgtattttcgacatataaatatctgt

SEQ ID NO: 803697 - DNA, 33 bp, Homo sapien
agctatgtcaactcataaaaagtaactagagct

SEQ ID NO: 803698 - DNA, 33 bp, Homo sapien
agctatgtcaactcatgaaaagtaactagagct

SEQ ID NO: 803699 - DNA, 33 bp, Homo sapien
atgctcataactgctacgcaataaagctttctc

SEQ ID NO: 803700 - DNA, 33 bp, Homo sapien
atgctcataactgctatgcaataaagctttctc

SEQ ID NO: 803701 - DNA, 33 bp, Homo sapien
atctctccatcacgtaccttcaccgtccttgac

SEQ ID NO: 803702 - DNA, 33 bp, Homo sapien
atctctccatcacgtatcttcaccgtccttgac

SEQ ID NO: 803703 - DNA, 33 bp, Homo sapien
gtgtgtgtgtgtaaaacttggggatgaaactaa

SEQ ID NO: 803704 - DNA, 33 bp, Homo sapien
gtgtgtgtgtgtaaaatttggggatgaaactaa

SEQ ID NO: 803705 - DNA, 33 bp, Homo sapien
atagaatagttttaaaccggaattcctgagagg

SEQ ID NO: 803706 - DNA, 33 bp, Homo sapien
atagaatagttttaaatcggaattcctgagagg

SEQ ID NO: 803707 - DNA, 33 bp, Homo sapien
ttacctgaaactgctcactcttctatcctcatc

SEQ ID NO: 803708 - DNA, 33 bp, Homo sapien
ttacctgaaactgctcgctcttctatcctcatc

SEQ ID NO: 803709 - DNA, 33 bp, Homo sapien
ctggagttgtccttcacgcttcctttgcaaatc

SEQ ID NO: 803710 - DNA, 33 bp, Homo sapien
ctggagttgtccttcatgcttcctttgcaaatc

SEQ ID NO: 803711 - DNA, 33 bp, Homo sapien
gctgaattcattccaaaactaaaagcaaaaaaa

SEQ ID NO: 803712 - DNA, 33 bp, Homo sapien
gctgaattcattccaagactaaaagcaaaaaaa

SEQ ID NO: 803713 - DNA, 33 bp, Homo sapien
cctcactgtaaaatagaaaaagtgctgtattta

SEQ ID NO: 803714 - DNA, 33 bp, Homo sapien
cctcactgtaaaataggaaaagtgctgtattta

SEQ ID NO: 803715 - DNA, 33 bp, Homo sapien
gacagggtagagaaagcacagagatccctgaag

SEQ ID NO: 803716 - DNA, 33 bp, Homo sapien
gacagggtagagaaagtacagagatccctgaag

SEQ ID NO: 803717 - DNA, 33 bp, Homo sapien
gcagtagaaggtagaacgaactaagaaggtgaa

SEQ ID NO: 803718 - DNA, 33 bp, Homo sapien
gcagtagaaggtagaatgaactaagaaggtgaa

SEQ ID NO: 803719 - DNA, 33 bp, Homo sapien
tttaacttttacctgaaacagccattcaagggc

SEQ ID NO: 803720 - DNA, 33 bp, Homo sapien
tttaacttttacctgagacagccattcaagggc

SEQ ID NO: 803721 - DNA, 33 bp, Homo sapien
ttaatttcactcctcaacactgggtaagtcatc

SEQ ID NO: 803722 - DNA, 33 bp, Homo sapien
ttaatttcactcctcagcactgggtaagtcatc

SEQ ID NO: 803723 - DNA, 33 bp, Homo sapien
acagccatgtcccacaaaatgatgtttctgtat

SEQ ID NO: 803724 - DNA, 33 bp, Homo sapien
acagccatgtcccacacaatgatgtttctgtat

SEQ ID NO: 803725 - DNA, 33 bp, Homo sapien
cagaagggacagaaataaacacgtgctcttagt

SEQ ID NO: 803726 - DNA, 33 bp, Homo sapien
cagaagggacagaaatgaacacgtgctcttagt

SEQ ID NO: 803727 - DNA, 33 bp, Homo sapien
tactggttgcacatctaacacagaccccaggca

SEQ ID NO: 803728 - DNA, 33 bp, Homo sapien
tactggttgcacatctgacacagaccccaggca

SEQ ID NO: 803729 - DNA, 33 bp, Homo sapien
ggcttcatgttgtgaacctttgaggtctctcat

SEQ ID NO: 803730 - DNA, 33 bp, Homo sapien
ggcttcatgttgtgaatctttgaggtctctcat

SEQ ID NO: 803731 - DNA, 33 bp, Homo sapien
agaagaaagactaggacgattgtttttttgttt

SEQ ID NO: 803732 - DNA, 33 bp, Homo sapien
agaagaaagactaggatgattgtttttttgttt

SEQ ID NO: 803733 - DNA, 33 bp, Homo sapien
atgaggactgtttggaaggattctcaatgaggc

SEQ ID NO: 803734 - DNA, 33 bp, Homo sapien
atgaggactgtttggagggattctcaatgaggc

SEQ ID NO: 803735 - DNA, 33 bp, Homo sapien
tctagtgggttgtaaacaaagtctgatttatcc

SEQ ID NO: 803736 - DNA, 33 bp, Homo sapien
tctagtgggttgtaaataaagtctgatttatcc

SEQ ID NO: 803737 - DNA, 33 bp, Homo sapien
agaatgaggaggagataaaagtcattgggttgc

SEQ ID NO: 803738 - DNA, 33 bp, Homo sapien
agaatgaggaggagattaaagtcattgggttgc

SEQ ID NO: 803739 - DNA, 33 bp, Homo sapien
gttgcagagagtaaaacgggatatatacctagg

SEQ ID NO: 803740 - DNA, 33 bp, Homo sapien
gttgcagagagtaaaaggggatatatacctagg

SEQ ID NO: 803741 - DNA, 33 bp, Homo sapien
aaaagtaaagtgtgaacactctcaagtggggga

SEQ ID NO: 803742 - DNA, 33 bp, Homo sapien
aaaagtaaagtgtgaagactctcaagtggggga

SEQ ID NO: 803743 - DNA, 33 bp, Homo sapien
ttctttcatttggaagcatacgctgtcaaggtt

SEQ ID NO: 803744 - DNA, 33 bp, Homo sapien
ttctttcatttggaaggatacgctgtcaaggtt

SEQ ID NO: 803745 - DNA, 33 bp, Homo sapien
aatcaggcatgaacaacttgtcagtggatcagg

SEQ ID NO: 803746 - DNA, 33 bp, Homo sapien
aatcaggcatgaacaatttgtcagtggatcagg

SEQ ID NO: 803747 - DNA, 33 bp, Homo sapien
aacccaatctggcaagaccaaagaaagttagaa

SEQ ID NO: 803748 - DNA, 33 bp, Homo sapien
aacccaatctggcaagtccaaagaaagttagaa

SEQ ID NO: 803749 - DNA, 33 bp, Homo sapien
cagccacaactactgaaaaaacagcaagataaa

SEQ ID NO: 803750 - DNA, 33 bp, Homo sapien
cagccacaactactgagaaaacagcaagataaa

SEQ ID NO: 803751 - DNA, 33 bp, Homo sapien
ttctcttacacataaagtgatctcttcaagttc

SEQ ID NO: 803752 - DNA, 33 bp, Homo sapien
ttctcttacacataaattgatctcttcaagttc

SEQ ID NO: 803753 - DNA, 33 bp, Homo sapien
gggtgagatggtcagcccaatttcccaaacaat

SEQ ID NO: 803754 - DNA, 33 bp, Homo sapien
gggtgagatggtcagctcaatttcccaaacaat

SEQ ID NO: 803755 - DNA, 33 bp, Homo sapien
agtcacaattttccaccctagactggaatattg

SEQ ID NO: 803756 - DNA, 33 bp, Homo sapien
agtcacaattttccacgctagactggaatattg

SEQ ID NO: 803757 - DNA, 33 bp, Homo sapien
agcacttcagagaatcccttgggttctatatgt

SEQ ID NO: 803758 - DNA, 33 bp, Homo sapien
agcacttcagagaatctcttgggttctatatgt

SEQ ID NO: 803759 - DNA, 33 bp, Homo sapien
aagaaatctactgtgacagggagtggagaaatg

SEQ ID NO: 803760 - DNA, 33 bp, Homo sapien
aagaaatctactgtgatagggagtggagaaatg

SEQ ID NO: 803761 - DNA, 33 bp, Homo sapien
cacagtctgctgattgcaataactcctttaggt

SEQ ID NO: 803762 - DNA, 33 bp, Homo sapien
cacagtctgctgattggaataactcctttaggt

SEQ ID NO: 803763 - DNA, 33 bp, Homo sapien
tgatcatgaatacaagaaattctttgaggactg

SEQ ID NO: 803764 - DNA, 33 bp, Homo sapien
tgatcatgaatacaagtaattctttgaggactg

SEQ ID NO: 803765 - DNA, 33 bp, Homo sapien
tctgaaagctcacccaatggaatgaccaaacct

SEQ ID NO: 803766 - DNA, 33 bp, Homo sapien
tctgaaagctcacccactggaatgaccaaacct

SEQ ID NO: 803767 - DNA, 33 bp, Homo sapien
ttttggaccatggagtcaaagtagttacagcag

SEQ ID NO: 803768 - DNA, 33 bp, Homo sapien
ttttggaccatggagtgaaagtagttacagcag

SEQ ID NO: 803769 - DNA, 33 bp, Homo sapien
gagttctgtaatctgaaactggttcatcctttt

SEQ ID NO: 803770 - DNA, 33 bp, Homo sapien
gagttctgtaatctgagactggttcatcctttt

SEQ ID NO: 803771 - DNA, 33 bp, Homo sapien
atgactctagaggaagaaaaaactcaaaaggct

SEQ ID NO: 803772 - DNA, 33 bp, Homo sapien
atgactctagaggaaggaaaaactcaaaaggct

SEQ ID NO: 803773 - DNA, 33 bp, Homo sapien
gctaacaaacttatgacccttcaactacaatag

SEQ ID NO: 803774 - DNA, 33 bp, Homo sapien
gctaacaaacttatgatccttcaactacaatag

SEQ ID NO: 803775 - DNA, 33 bp, Homo sapien
tttggatagaataataagcttaagatctaaaat

SEQ ID NO: 803776 - DNA, 33 bp, Homo sapien
tttggatagaataataggcttaagatctaaaat

SEQ ID NO: 803777 - DNA, 33 bp, Homo sapien
aaggacgtatccagatcagttttcccttggttc

SEQ ID NO: 803778 - DNA, 33 bp, Homo sapien
aaggacgtatccagattagttttcccttggttc

SEQ ID NO: 803779 - DNA, 33 bp, Homo sapien
tgtagatgacagagtaaaggaaagaaaagatag

SEQ ID NO: 803780 - DNA, 33 bp, Homo sapien
tgtagatgacagagtagaggaaagaaaagatag

SEQ ID NO: 803781 - DNA, 33 bp, Homo sapien
gagagagagcaatgaaaggcttaataatatgac

SEQ ID NO: 803782 - DNA, 33 bp, Homo sapien
gagagagagcaatgaatggcttaataatatgac

SEQ ID NO: 803783 - DNA, 33 bp, Homo sapien
gtcatgtagaactaataaccatgtcctgtcaac

SEQ ID NO: 803784 - DNA, 33 bp, Homo sapien
gtcatgtagaactaatcaccatgtcctgtcaac

SEQ ID NO: 803785 - DNA, 33 bp, Homo sapien
tatgtactaattgacaaaatgttttcttcaaaa

SEQ ID NO: 803786 - DNA, 33 bp, Homo sapien
tatgtactaattgacagaatgttttcttcaaaa

SEQ ID NO: 803787 - DNA, 33 bp, Homo sapien
acacggtgcagcataacagaggcacggacatgg

SEQ ID NO: 803788 - DNA, 33 bp, Homo sapien
acacggtgcagcataatagaggcacggacatgg

SEQ ID NO: 803789 - DNA, 33 bp, Homo sapien
agtgtgtcctatagtacattttgccttaatcca

SEQ ID NO: 803790 - DNA, 33 bp, Homo sapien
agtgtgtcctatagtagattttgccttaatcca

SEQ ID NO: 803791 - DNA, 33 bp, Homo sapien
aaaaacaaatttggacaaacctcactagattac

SEQ ID NO: 803792 - DNA, 33 bp, Homo sapien
aaaaacaaatttggacgaacctcactagattac

SEQ ID NO: 803793 - DNA, 33 bp, Homo sapien
gcacctgtgagttttaacaatttgtggagaagg

SEQ ID NO: 803794 - DNA, 33 bp, Homo sapien
gcacctgtgagttttagcaatttgtggagaagg

SEQ ID NO: 803795 - DNA, 33 bp, Homo sapien
agtaagaaaaatgctaagatgataactgcaggc

SEQ ID NO: 803796 - DNA, 33 bp, Homo sapien
agtaagaaaaatgctaggatgataactgcaggc

SEQ ID NO: 803797 - DNA, 33 bp, Homo sapien
gcatagcaggtcaggaataagacaagcagtccc

SEQ ID NO: 803798 - DNA, 33 bp, Homo sapien
gcatagcaggtcaggattaagacaagcagtccc

SEQ ID NO: 803799 - DNA, 33 bp, Homo sapien
tgtcaggcgaagtactaagacagccattctggt

SEQ ID NO: 803800 - DNA, 33 bp, Homo sapien
tgtcaggcgaagtactgagacagccattctggt

SEQ ID NO: 803801 - DNA, 33 bp, Homo sapien
tggtccttctttgtgacaccttcatgataacca

SEQ ID NO: 803802 - DNA, 33 bp, Homo sapien
tggtccttctttgtgataccttcatgataacca

SEQ ID NO: 803803 - DNA, 33 bp, Homo sapien
agggtattgaatcaggaccatgcaatgagctag

SEQ ID NO: 803804 - DNA, 33 bp, Homo sapien
agggtattgaatcagggccatgcaatgagctag

SEQ ID NO: 803805 - DNA, 33 bp, Homo sapien
tatgactctctaatccaattcagatccctatgt

SEQ ID NO: 803806 - DNA, 33 bp, Homo sapien
tatgactctctaatccgattcagatccctatgt

SEQ ID NO: 803807 - DNA, 33 bp, Homo sapien
aatgcctgggccaagcaaggaacaccatgttac

SEQ ID NO: 803808 - DNA, 33 bp, Homo sapien
aatgcctgggccaagcgaggaacaccatgttac

SEQ ID NO: 803809 - DNA, 33 bp, Homo sapien
ctgggttggtgtttgcaccctagttgttgaata

SEQ ID NO: 803810 - DNA, 33 bp, Homo sapien
ctgggttggtgtttgcgccctagttgttgaata

SEQ ID NO: 803811 - DNA, 33 bp, Homo sapien
agtcacaacaaggtgcagataactatgatgtca

SEQ ID NO: 803812 - DNA, 33 bp, Homo sapien
agtcacaacaaggtgcggataactatgatgtca

SEQ ID NO: 803813 - DNA, 33 bp, Homo sapien
tgtgtgagaacatggcacactttgatgctaaaa

SEQ ID NO: 803814 - DNA, 33 bp, Homo sapien
tgtgtgagaacatggcccactttgatgctaaaa

SEQ ID NO: 803815 - DNA, 33 bp, Homo sapien
tgtcatcctctttagaatcaacaatagcagctc

SEQ ID NO: 803816 - DNA, 33 bp, Homo sapien
tgtcatcctctttagagtcaacaatagcagctc

SEQ ID NO: 803817 - DNA, 33 bp, Homo sapien; identical to SEQ ID NO: 803815

SEQ ID NO: 803818 - DNA, 33 bp, Homo sapien; identical to SEQ ID NO: 803816

SEQ ID NO: 803819 - DNA, 33 bp, Homo sapien
caagcatttgggcaaaaccttcagtcagcacaa

SEQ ID NO: 803820 - DNA, 33 bp, Homo sapien
caagcatttgggcaaagccttcagtcagcacaa

SEQ ID NO: 803821 - DNA, 33 bp, Homo sapien
aagatgggaatcattaaaggaaactgaacattg

SEQ ID NO: 803822 - DNA, 33 bp, Homo sapien
aagatgggaatcattagaggaaactgaacattg

SEQ ID NO: 803823 - DNA, 33 bp, Homo sapien
acaggtctgagagctacgtgttataattcccat

SEQ ID NO: 803824 - DNA, 33 bp, Homo sapien
acaggtctgagagctaggtgttataattcccat

SEQ ID NO: 803825 - DNA, 33 bp, Homo sapien
acactttcagccaaaacgattaagaaatatttc

SEQ ID NO: 803826 - DNA, 33 bp, Homo sapien
acactttcagccaaaatgattaagaaatatttc

SEQ ID NO: 803827 - DNA, 33 bp, Homo sapien
aagagcaataactaagaccaatgcttgggaatt

SEQ ID NO: 803828 - DNA, 33 bp, Homo sapien
aagagcaataactaaggccaatgcttgggaatt

SEQ ID NO: 803829 - DNA, 33 bp, Homo sapien
tcatttgacagcaaagactcctcaatgtgtttg

SEQ ID NO: 803830 - DNA, 33 bp, Homo sapien
tcatttgacagcaaagtctcctcaatgtgtttg

SEQ ID NO: 803831 - DNA, 33 bp, Homo sapien
tatgttggagttcctactacagagacaatctca

SEQ ID NO: 803832 - DNA, 33 bp, Homo sapien
tatgttggagttcctattacagagacaatctca

SEQ ID NO: 803833 - DNA, 33 bp, Homo sapien
ccatgaaagcaaaataaggaagttacttgatag

SEQ ID NO: 803834 - DNA, 33 bp, Homo sapien
ccatgaaagcaaaatagggaagttacttgatag

SEQ ID NO: 803835 - DNA, 33 bp, Homo sapien
catgagccctgcgcccagctgcaattttgtttt

SEQ ID NO: 803836 - DNA, 33 bp, Homo sapien
catgagccctgcgcccggctgcaattttgtttt

SEQ ID NO: 803837 - DNA, 33 bp, Homo sapien
ggctttatttctgtgccatctattttgttccac

SEQ ID NO: 803838 - DNA, 33 bp, Homo sapien
ggctttatttctgtgctatctattttgttccac

SEQ ID NO: 803839 - DNA, 33 bp, Homo sapien
aaggcaatgttgagggaagaggttggtggggtc

SEQ ID NO: 803840 - DNA, 33 bp, Homo sapien
aaggcaatgttgagggtagaggttggtggggtc

SEQ ID NO: 803841 - DNA, 33 bp, Homo sapien
tctcttctgagttccaagattgtgtacaatagg

SEQ ID NO: 803842 - DNA, 33 bp, Homo sapien
tctcttctgagttccaggattgtgtacaatagg

SEQ ID NO: 803843 - DNA, 33 bp, Homo sapien
cagaaaacatgcaggcaaaagactgttgatgca

SEQ ID NO: 803844 - DNA, 33 bp, Homo sapien
cagaaaacatgcaggcgaaagactgttgatgca

SEQ ID NO: 803845 - DNA, 33 bp, Homo sapien
tcaactttcgcatctgaaattatttcccatttt

SEQ ID NO: 803846 - DNA, 33 bp, Homo sapien
tcaactttcgcatctgtaattatttcccatttt

SEQ ID NO: 803847 - DNA, 33 bp, Homo sapien
gacttgcagtgagcaaacattgaataattctga

SEQ ID NO: 803848 - DNA, 33 bp, Homo sapien
gacttgcagtgagcaaccattgaataattctga

SEQ ID NO: 803849 - DNA, 33 bp, Homo sapien
aatgtcacagttactaaattgactcagtataga

SEQ ID NO: 803850 - DNA, 33 bp, Homo sapien
aatgtcacagttactagattgactcagtataga

SEQ ID NO: 803851 - DNA, 33 bp, Homo sapien
aattggtttcagattacgttgagtcacacaacg

SEQ ID NO: 803852 - DNA, 33 bp, Homo sapien
aattggtttcagattatgttgagtcacacaacg

SEQ ID NO: 803853 - DNA, 33 bp, Homo sapien
acatagtggttcctgacaaagggaatcaaattt

SEQ ID NO: 803854 - DNA, 33 bp, Homo sapien
acatagtggttcctgataaagggaatcaaattt

SEQ ID NO: 803855 - DNA, 33 bp, Homo sapien
tacttagtttctacaccgctctgagaagccaag

SEQ ID NO: 803856 - DNA, 33 bp, Homo sapien
tacttagtttctacactgctctgagaagccaag

SEQ ID NO: 803857 - DNA, 33 bp, Homo sapien
aacagtgtctccaagcaagggtacagaatgagt

SEQ ID NO: 803858 - DNA, 33 bp, Homo sapien
aacagtgtctccaagccagggtacagaatgagt

SEQ ID NO: 803859 - DNA, 33 bp, Homo sapien
cccgcccattacaactcaggtgaagaatgacta

SEQ ID NO: 803860 - DNA, 33 bp, Homo sapien
cccgcccattacaacttaggtgaagaatgacta

SEQ ID NO: 803861 - DNA, 33 bp, Homo sapien
tcaagttctgcttttcaaagattatcaatttaa

SEQ ID NO: 803862 - DNA, 33 bp, Homo sapien
tcaagttctgcttttctaagattatcaatttaa

SEQ ID NO: 803863 - DNA, 33 bp, Homo sapien
agataatctgtactcaaagatcagtaataccat

SEQ ID NO: 803864 - DNA, 33 bp, Homo sapien
agataatctgtactcatagatcagtaataccat

SEQ ID NO: 803865 - DNA, 33 bp, Homo sapien
aagaatgcaattcagacaggaatataggcaggt

SEQ ID NO: 803866 - DNA, 33 bp, Homo sapien
aagaatgcaattcagataggaatataggcaggt

SEQ ID NO: 803867 - DNA, 33 bp, Homo sapien
aagccttgggttctaacgacttccttagtcaag

SEQ ID NO: 803868 - DNA, 33 bp, Homo sapien
aagccttgggttctaatgacttccttagtcaag

SEQ ID NO: 803869 - DNA, 33 bp, Homo sapien
ttaattagactgtaacaaaggtgaataaaaata

SEQ ID NO: 803870 - DNA, 33 bp, Homo sapien
ttaattagactgtaacgaaggtgaataaaaata

SEQ ID NO: 803871 - DNA, 33 bp, Homo sapien
attcattgccagtaacacccacagaactttgaa

SEQ ID NO: 803872 - DNA, 33 bp, Homo sapien
attcattgccagtaacgcccacagaactttgaa

SEQ ID NO: 803873 - DNA, 33 bp, Homo sapien
ataacatgttcagtgcagaaacatacaattctt

SEQ ID NO: 803874 - DNA, 33 bp, Homo sapien
ataacatgttcagtgcggaaacatacaattctt

SEQ ID NO: 803875 - DNA, 33 bp, Homo sapien
gcaattgtttttgacactggacatgatataata

SEQ ID NO: 803876 - DNA, 33 bp, Homo sapien
gcaattgtttttgacattggacatgatataata

SEQ ID NO: 803877 - DNA, 33 bp, Homo sapien
tatgtgaatgctttagaaatgggaaacgttatc

SEQ ID NO: 803878 - DNA, 33 bp, Homo sapien
tatgtgaatgctttagtaatgggaaacgttatc

SEQ ID NO: 803879 - DNA, 33 bp, Homo sapien
aaaatgtgtgcattaaagcccttgagagtacaa

SEQ ID NO: 803880 - DNA, 33 bp, Homo sapien
aaaatgtgtgcattaaggcccttgagagtacaa

SEQ ID NO: 803881 - DNA, 33 bp, Homo sapien
aaattagacattgaaactcctgtcttcttaatc

SEQ ID NO: 803882 - DNA, 33 bp, Homo sapien
aaattagacattgaaattcctgtcttcttaatc

SEQ ID NO: 803883 - DNA, 33 bp, Homo sapien
tatgatgtttggctagaatataaaataaggctt

SEQ ID NO: 803884 - DNA, 33 bp, Homo sapien
tatgatgtttggctaggatataaaataaggctt

SEQ ID NO: 803885 - DNA, 33 bp, Homo sapien
atgttctttcatggtacctcccccagaacgcaa

SEQ ID NO: 803886 - DNA, 33 bp, Homo sapien
atgttctttcatggtatctcccccagaacgcaa

SEQ ID NO: 803887 - DNA, 33 bp, Homo sapien
atcctaaaggatggaaactaaagtggtgtggta

SEQ ID NO: 803888 - DNA, 33 bp, Homo sapien
atcctaaaggatggaagctaaagtggtgtggta

SEQ ID NO: 803889 - DNA, 33 bp, Homo sapien
tcactaggtctttagaataggcctttggaatct

SEQ ID NO: 803890 - DNA, 33 bp, Homo sapien
tcactaggtctttagattaggcctttggaatct

SEQ ID NO: 803891 - DNA, 33 bp, Homo sapien
agaaagagagagaaagccttatgcaattattga

SEQ ID NO: 803892 - DNA, 33 bp, Homo sapien
agaaagagagagaaaggcttatgcaattattga

SEQ ID NO: 803893 - DNA, 33 bp, Homo sapien
gtgtttgagcattgaacattataaaatgtctgc

SEQ ID NO: 803894 - DNA, 33 bp, Homo sapien
gtgtttgagcattgaatattataaaatgtctgc

SEQ ID NO: 803895 - DNA, 33 bp, Homo sapien
aaaaagttgtgttagccaaaagtacatcaaaac

SEQ ID NO: 803896 - DNA, 33 bp, Homo sapien
aaaaagttgtgttagctaaaagtacatcaaaac

SEQ ID NO: 803897 - DNA, 33 bp, Homo sapien
tttccaactccttgcacctcagaaagaattagt

SEQ ID NO: 803898 - DNA, 33 bp, Homo sapien
tttccaactccttgcagctcagaaagaattagt

SEQ ID NO: 803899 - DNA, 33 bp, Homo sapien
gatccagagatacataaattttctaagttacac

SEQ ID NO: 803900 - DNA, 33 bp, Homo sapien
gatccagagatacatacattttctaagttacac

SEQ ID NO: 803901 - DNA, 33 bp, Homo sapien
aaaatgagttttagacagaatagaaactaagtt

SEQ ID NO: 803902 - DNA, 33 bp, Homo sapien
aaaatgagttttagaccgaatagaaactaagtt

SEQ ID NO: 803903 - DNA, 33 bp, Homo sapien
ccatagcaatgtcagacggactgagttcaataa

SEQ ID NO: 803904 - DNA, 33 bp, Homo sapien
ccatagcaatgtcagagggactgagttcaataa

SEQ ID NO: 803905 - DNA, 33 bp, Homo sapien
attccaaggatgatataagtacagactttacag

SEQ ID NO: 803906 - DNA, 33 bp, Homo sapien
attccaaggatgatatcagtacagactttacag

SEQ ID NO: 803907 - DNA, 33 bp, Homo sapien
aatcatagaatcgccacattagaagtgatctca

SEQ ID NO: 803908 - DNA, 33 bp, Homo sapien
aatcatagaatcgccatattagaagtgatctca

SEQ ID NO: 803909 - DNA, 33 bp, Homo sapien
ctctggtgcaaaaaagccgtccgtttttcctgg

SEQ ID NO: 803910 - DNA, 33 bp, Homo sapien
ctctggtgcaaaaaagtcgtccgtttttcctgg

SEQ ID NO: 803911 - DNA, 33 bp, Homo sapien
tctttcctagcttttacagaccatgctatgcaa

SEQ ID NO: 803912 - DNA, 33 bp, Homo sapien
tctttcctagcttttatagaccatgctatgcaa

SEQ ID NO: 803913 - DNA, 33 bp, Homo sapien
atgtgaaagttaggagacattaactttgcacct

SEQ ID NO: 803914 - DNA, 33 bp, Homo sapien
atgtgaaagttaggagtcattaactttgcacct

SEQ ID NO: 803915 - DNA, 33 bp, Homo sapien
ttacttggagaggaaaagtttaagcagtgaaat

SEQ ID NO: 803916 - DNA, 33 bp, Homo sapien
ttacttggagaggaaaggtttaagcagtgaaat

SEQ ID NO: 803917 - DNA, 33 bp, Homo sapien
gtaattaactctttgaacttcagtgattgctta

SEQ ID NO: 803918 - DNA, 33 bp, Homo sapien
gtaattaactctttgatcttcagtgattgctta

SEQ ID NO: 803919 - DNA, 33 bp, Homo sapien
atgggaagctgcaaaaattgttcagataggaca

SEQ ID NO: 803920 - DNA, 33 bp, Homo sapien
atgggaagctgcaaaagttgttcagataggaca

SEQ ID NO: 803921 - DNA, 33 bp, Homo sapien
agcttgcatagctgtcaccacatgacattgact

SEQ ID NO: 803922 - DNA, 33 bp, Homo sapien
agcttgcatagctgtcgccacatgacattgact

SEQ ID NO: 803923 - DNA, 33 bp, Homo sapien
ctacctggacttgtgacacattgagtaaattac

SEQ ID NO: 803924 - DNA, 33 bp, Homo sapien
ctacctggacttgtgagacattgagtaaattac

SEQ ID NO: 803925 - DNA, 33 bp, Homo sapien
tgactcacagaaagaccattcttgccaaaaccc

SEQ ID NO: 803926 - DNA, 33 bp, Homo sapien
tgactcacagaaagacgattcttgccaaaaccc

SEQ ID NO: 803927 - DNA, 33 bp, Homo sapien
tttctcgagtgcagataagttttccatttttca

SEQ ID NO: 803928 - DNA, 33 bp, Homo sapien
tttctcgagtgcagatgagttttccatttttca

SEQ ID NO: 803929 - DNA, 33 bp, Homo sapien
taaaaccaagtttgaaaaaatcactaagccaaa

SEQ ID NO: 803930 - DNA, 33 bp, Homo sapien
taaaaccaagtttgaagaaatcactaagccaaa

SEQ ID NO: 803931 - DNA, 33 bp, Homo sapien
actttgtagagccttcacaagatgaggagtaga

SEQ ID NO: 803932 - DNA, 33 bp, Homo sapien
actttgtagagccttcgcaagatgaggagtaga

SEQ ID NO: 803933 - DNA, 33 bp, Homo sapien
actttcatctgaaggaactagccaatgatgagc

SEQ ID NO: 803934 - DNA, 33 bp, Homo sapien
actttcatctgaaggagctagccaatgatgagc

SEQ ID NO: 803935 - DNA, 33 bp, Homo sapien
tttctaaattctatgagtactttgagtcatgag

SEQ ID NO: 803936 - DNA, 33 bp, Homo sapien
tttctaaattctatgattactttgagtcatgag

SEQ ID NO: 803937 - DNA, 33 bp, Homo sapien
aactgctcctcttcaactgattcttgcttcgct

SEQ ID NO: 803938 - DNA, 33 bp, Homo sapien
aactgctcctcttcaattgattcttgcttcgct

SEQ ID NO: 803939 - DNA, 33 bp, Homo sapien
actgagtaattaatcaataagctttaacatggt

SEQ ID NO: 803940 - DNA, 33 bp, Homo sapien
actgagtaattaatcagtaagctttaacatggt

SEQ ID NO: 803941 - DNA, 33 bp, Homo sapien
tgtcaatagcaggagacggaaataaaacaagaa

SEQ ID NO: 803942 - DNA, 33 bp, Homo sapien
tgtcaatagcaggagatggaaataaaacaagaa

SEQ ID NO: 803943 - DNA, 33 bp, Homo sapien
caatcaagaaagttcaaaagcctcaaacacaag

SEQ ID NO: 803944 - DNA, 33 bp, Homo sapien
caatcaagaaagttcagaagcctcaaacacaag

SEQ ID NO: 803945 - DNA, 33 bp, Homo sapien
gcaattcaagagaggcaatagcatgagaaaaca

SEQ ID NO: 803946 - DNA, 33 bp, Homo sapien
gcaattcaagagaggcgatagcatgagaaaaca

SEQ ID NO: 803947 - DNA, 33 bp, Homo sapien
aggacagaaaagtcacggaggcattgtgtgctg

SEQ ID NO: 803948 - DNA, 33 bp, Homo sapien
aggacagaaaagtcactgaggcattgtgtgctg

SEQ ID NO: 803949 - DNA, 33 bp, Homo sapien
ttctttgtacactatgaaaggttgcctaccatg

SEQ ID NO: 803950 - DNA, 33 bp, Homo sapien
ttctttgtacactatgcaaggttgcctaccatg

SEQ ID NO: 803951 - DNA, 33 bp, Homo sapien
actctcaggatgattgcaagttctttgtacact

SEQ ID NO: 803952 - DNA, 33 bp, Homo sapien
actctcaggatgattggaagttctttgtacact

SEQ ID NO: 803953 - DNA, 33 bp, Homo sapien
gagccatctctactccacccattgtatcctcag

SEQ ID NO: 803954 - DNA, 33 bp, Homo sapien
gagccatctctactccgcccattgtatcctcag

SEQ ID NO: 803955 - DNA, 33 bp, Homo sapien
gggccccacattctcaccagatctattttgcct

SEQ ID NO: 803956 - DNA, 33 bp, Homo sapien
gggccccacattctcagcagatctattttgcct

SEQ ID NO: 803957 - DNA, 33 bp, Homo sapien
gttgcactggaaggagaccatcttgcatttaga

SEQ ID NO: 803958 - DNA, 33 bp, Homo sapien
gttgcactggaaggaggccatcttgcatttaga

SEQ ID NO: 803959 - DNA, 33 bp, Homo sapien
gtctcttatgactgctaacatgaaaggaacttc

SEQ ID NO: 803960 - DNA, 33 bp, Homo sapien
gtctcttatgactgctgacatgaaaggaacttc

SEQ ID NO: 803961 - DNA, 33 bp, Homo sapien
cccccttttgcggtcccagctctgatagtcact

SEQ ID NO: 803962 - DNA, 33 bp, Homo sapien
cccccttttgcggtcctagctctgatagtcact

SEQ ID NO: 803963 - DNA, 33 bp, Homo sapien
gggtaagtgagttatacgtatataggcaacaga

SEQ ID NO: 803964 - DNA, 33 bp, Homo sapien
gggtaagtgagttatatgtatataggcaacaga

SEQ ID NO: 803965 - DNA, 33 bp, Homo sapien
cttgtggaatcttgaaagtcaatctatctaata

SEQ ID NO: 803966 - DNA, 33 bp, Homo sapien
cttgtggaatcttgaaggtcaatctatctaata

SEQ ID NO: 803967 - DNA, 33 bp, Homo sapien
cagaacacatttgagaataggcttcattttaga

SEQ ID NO: 803968 - DNA, 33 bp, Homo sapien
cagaacacatttgagagtaggcttcattttaga

SEQ ID NO: 803969 - DNA, 33 bp, Homo sapien
gctatagactaagcataaatcagtcagtaaata

SEQ ID NO: 803970 - DNA, 33 bp, Homo sapien
gctatagactaagcatgaatcagtcagtaaata

SEQ ID NO: 803971 - DNA, 33 bp, Homo sapien
catttaggttagttataaacatactgactggga

SEQ ID NO: 803972 - DNA, 33 bp, Homo sapien
catttaggttagttatgaacatactgactggga

SEQ ID NO: 803973 - DNA, 33 bp, Homo sapien
ggaagttagtttttccaatttgtagattatcga

SEQ ID NO: 803974 - DNA, 33 bp, Homo sapien
ggaagttagtttttccgatttgtagattatcga

SEQ ID NO: 803975 - DNA, 33 bp, Homo sapien
aaattgaagaaacgaaagcaatgacagaaaact

SEQ ID NO: 803976 - DNA, 33 bp, Homo sapien
aaattgaagaaacgaatgcaatgacagaaaact

SEQ ID NO: 803977 - DNA, 33 bp, Homo sapien
gtctgaaagaaatataagaatcaagtggaagtc

SEQ ID NO: 803978 - DNA, 33 bp, Homo sapien
gtctgaaagaaatataggaatcaagtggaagtc

SEQ ID NO: 803979 - DNA, 33 bp, Homo sapien
cacaaagtggaagcaacgatctttgaaattatt

SEQ ID NO: 803980 - DNA, 33 bp, Homo sapien
cacaaagtggaagcaatgatctttgaaattatt

SEQ ID NO: 803981 - DNA, 33 bp, Homo sapien
ctgtctgtttaaaaaacgcctgaagtttctttg

SEQ ID NO: 803982 - DNA, 33 bp, Homo sapien
ctgtctgtttaaaaaaggcctgaagtttctttg

SEQ ID NO: 803983 - DNA, 33 bp, Homo sapien
aatgtatttccccaaaaagtagagacaccagaa

SEQ ID NO: 803984 - DNA, 33 bp, Homo sapien
aatgtatttccccaaagagtagagacaccagaa

SEQ ID NO: 803985 - DNA, 33 bp, Homo sapien
gggactcctagattaaaaggcctgtttgaccta

SEQ ID NO: 803986 - DNA, 33 bp, Homo sapien
gggactcctagattaagaggcctgtttgaccta

SEQ ID NO: 803987 - DNA, 33 bp, Homo sapien
ttttgccatctgggtacgcaaagtgaagagatg

SEQ ID NO: 803988 - DNA, 33 bp, Homo sapien
ttttgccatctgggtaggcaaagtgaagagatg

SEQ ID NO: 803989 - DNA, 33 bp, Homo sapien
tcaaaattctggcttgaagcaggctcactacac

SEQ ID NO: 803990 - DNA, 33 bp, Homo sapien
tcaaaattctggcttggagcaggctcactacac

SEQ ID NO: 803991 - DNA, 33 bp, Homo sapien
tggattgtgagtataacttagccattcattcaa

SEQ ID NO: 803992 - DNA, 33 bp, Homo sapien
tggattgtgagtataatttagccattcattcaa

SEQ ID NO: 803993 - DNA, 33 bp, Homo sapien
gattgttcactatgggcatacaaaatgctactg

SEQ ID NO: 803994 - DNA, 33 bp, Homo sapien
gattgttcactatgggtatacaaaatgctactg

SEQ ID NO: 803995 - DNA, 33 bp, Homo sapien
aagtggtagtccaaggcaattaggaactggagt

SEQ ID NO: 803996 - DNA, 33 bp, Homo sapien
aagtggtagtccaaggtaattaggaactggagt

SEQ ID NO: 803997 - DNA, 33 bp, Homo sapien
catttttatgtgtgagaattatctggaaagagg

SEQ ID NO: 803998 - DNA, 33 bp, Homo sapien
catttttatgtgtgaggattatctggaaagagg

SEQ ID NO: 803999 - DNA, 33 bp, Homo sapien
gcaagaattctaagtacacatgcataattagcc

SEQ ID NO: 804000 - DNA, 33 bp, Homo sapien
gcaagaattctaagtagacatgcataattagcc

SEQ ID NO: 804001 - DNA, 33 bp, Homo sapien
tgtggcataaagtaggaacatgacattaaatca

SEQ ID NO: 804002 - DNA, 33 bp, Homo sapien
tgtggcataaagtagggacatgacattaaatca

SEQ ID NO: 804003 - DNA, 33 bp, Homo sapien
ttgtttttagtttcccccacagctagcttttcc

SEQ ID NO: 804004 - DNA, 33 bp, Homo sapien
ttgtttttagtttcccgcacagctagcttttcc

SEQ ID NO: 804005 - DNA, 33 bp, Homo sapien
taaactttttgtcagcaccatcctaattctgat

SEQ ID NO: 804006 - DNA, 33 bp, Homo sapien
taaactttttgtcagccccatcctaattctgat

SEQ ID NO: 804007 - DNA, 33 bp, Homo sapien
caggcaaatgatcctgatcttatcttttctatg

SEQ ID NO: 804008 - DNA, 33 bp, Homo sapien
caggcaaatgatcctggtcttatcttttctatg

SEQ ID NO: 804009 - DNA, 33 bp, Homo sapien
tgatactgtatttgcaaaattaatcttcaatct

SEQ ID NO: 804010 - DNA, 33 bp, Homo sapien
tgatactgtatttgcataattaatcttcaatct

SEQ ID NO: 804011 - DNA, 33 bp, Homo sapien
cagttaataaattacaactgatgaaagaaatag

SEQ ID NO: 804012 - DNA, 33 bp, Homo sapien
cagttaataaattacatctgatgaaagaaatag

SEQ ID NO: 804013 - DNA, 33 bp, Homo sapien
ttgaatccacaatacactgactgagtttaactt

SEQ ID NO: 804014 - DNA, 33 bp, Homo sapien
ttgaatccacaatacattgactgagtttaactt

SEQ ID NO: 804015 - DNA, 33 bp, Homo sapien
taaacgtctctcgattaaaaaggatgaggaaag

SEQ ID NO: 804016 - DNA, 33 bp, Homo sapien
taaacgtctctcgattgaaaaggatgaggaaag

SEQ ID NO: 804017 - DNA, 33 bp, Homo sapien
tacatcagaggcttgaagataccataaagactg

SEQ ID NO: 804018 - DNA, 33 bp, Homo sapien
tacatcagaggcttgaggataccataaagactg

SEQ ID NO: 804019 - DNA, 33 bp, Homo sapien
actcctgagacagtaaaatcaacttttcctctt

SEQ ID NO: 804020 - DNA, 33 bp, Homo sapien
actcctgagacagtaagatcaacttttcctctt

SEQ ID NO: 804021 - DNA, 33 bp, Homo sapien
aggaggactttcatcacgtttctctccagtgtc

SEQ ID NO: 804022 - DNA, 33 bp, Homo sapien
aggaggactttcatcatgtttctctccagtgtc

SEQ ID NO: 804023 - DNA, 33 bp, Homo sapien
ttcattataaaactccaccaagcagctcaggag

SEQ ID NO: 804024 - DNA, 33 bp, Homo sapien
ttcattataaaactccgccaagcagctcaggag

SEQ ID NO: 804025 - DNA, 33 bp, Homo sapien
catgggcttaacgcaacctgaacatttacaagg

SEQ ID NO: 804026 - DNA, 33 bp, Homo sapien
catgggcttaacgcaatctgaacatttacaagg

SEQ ID NO: 804027 - DNA, 33 bp, Homo sapien
cattttatgttgcaaaaccatactattgagctc

SEQ ID NO: 804028 - DNA, 33 bp, Homo sapien
cattttatgttgcaaacccatactattgagctc

SEQ ID NO: 804029 - DNA, 33 bp, Homo sapien
tgacatattaaaccgacaaaagaagtgtgctgt

SEQ ID NO: 804030 - DNA, 33 bp, Homo sapien
tgacatattaaaccgataaaagaagtgtgctgt

SEQ ID NO: 804031 - DNA, 33 bp, Homo sapien
acctaaattagaaccaaccataggcttacgagg

SEQ ID NO: 804032 - DNA, 33 bp, Homo sapien
acctaaattagaaccacccataggcttacgagg

SEQ ID NO: 804033 - DNA, 33 bp, Homo sapien
aacagatattcatgtaacttcatggatccctgg

SEQ ID NO: 804034 - DNA, 33 bp, Homo sapien
aacagatattcatgtaccttcatggatccctgg

SEQ ID NO: 804035 - DNA, 33 bp, Homo sapien
gaaacttccttgaagacagtgtttataacattt

SEQ ID NO: 804036 - DNA, 33 bp, Homo sapien
gaaacttccttgaagatagtgtttataacattt

SEQ ID NO: 804037 - DNA, 33 bp, Homo sapien
ttttgaactcctactacgttcattactatatta

SEQ ID NO: 804038 - DNA, 33 bp, Homo sapien
ttttgaactcctactatgttcattactatatta

SEQ ID NO: 804039 - DNA, 33 bp, Homo sapien
gctgctgctggtaaaactacattttctggttat

SEQ ID NO: 804040 - DNA, 33 bp, Homo sapien
gctgctgctggtaaaagtacattttctggttat

SEQ ID NO: 804041 - DNA, 33 bp, Homo sapien
agtggattggtctgaactgtagagaaagagaat

SEQ ID NO: 804042 - DNA, 33 bp, Homo sapien
agtggattggtctgaagtgtagagaaagagaat

SEQ ID NO: 804043 - DNA, 33 bp, Homo sapien
accttttgcttctgtcacaatagccctgaagac

SEQ ID NO: 804044 - DNA, 33 bp, Homo sapien
accttttgcttctgtcgcaatagccctgaagac

SEQ ID NO: 804045 - DNA, 33 bp, Homo sapien
gatgtttggatcattacagtggataccttatta

SEQ ID NO: 804046 - DNA, 33 bp, Homo sapien
gatgtttggatcattagagtggataccttatta

SEQ ID NO: 804047 - DNA, 33 bp, Homo sapien
atgtaactgactgcaaccaactatttactgttt

SEQ ID NO: 804048 - DNA, 33 bp, Homo sapien
atgtaactgactgcaatcaactatttactgttt

SEQ ID NO: 804049 - DNA, 33 bp, Homo sapien
ctgctgtttaacttcacaaaaattttcattaaa

SEQ ID NO: 804050 - DNA, 33 bp, Homo sapien
ctgctgtttaacttcagaaaaattttcattaaa

SEQ ID NO: 804051 - DNA, 33 bp, Homo sapien
gttggtagtagacagaagatgttactcttccaa

SEQ ID NO: 804052 - DNA, 33 bp, Homo sapien
gttggtagtagacagaggatgttactcttccaa

SEQ ID NO: 804053 - DNA, 33 bp, Homo sapien
atggttcggcaccttaagtttcagcttgtctta

SEQ ID NO: 804054 - DNA, 33 bp, Homo sapien
atggttcggcaccttaggtttcagcttgtctta

SEQ ID NO: 804055 - DNA, 33 bp, Homo sapien
gcttctcattgcacagcaaccttcctaagtgac

SEQ ID NO: 804056 - DNA, 33 bp, Homo sapien
gcttctcattgcacaggaaccttcctaagtgac

SEQ ID NO: 804057 - DNA, 33 bp, Homo sapien
actcactaggagaaagccacctggtgggcagag

SEQ ID NO: 804058 - DNA, 33 bp, Homo sapien
actcactaggagaaaggcacctggtgggcagag

SEQ ID NO: 804059 - DNA, 33 bp, Homo sapien
ggcacaggatgacagccgaaaagaggtgcattc

SEQ ID NO: 804060 - DNA, 33 bp, Homo sapien
ggcacaggatgacagctgaaaagaggtgcattc

SEQ ID NO: 804061 - DNA, 33 bp, Homo sapien
tatttcttttgtcacagatagttctgttggaca

SEQ ID NO: 804062 - DNA, 33 bp, Homo sapien
tatttcttttgtcacatatagttctgttggaca

SEQ ID NO: 804063 - DNA, 33 bp, Homo sapien
tagaaaagagagcataccagggacagcaaagat

SEQ ID NO: 804064 - DNA, 33 bp, Homo sapien
tagaaaagagagcatagcagggacagcaaagat

SEQ ID NO: 804065 - DNA, 33 bp, Homo sapien
tggctgaccagggaacaatgaatagtcaaatgt

SEQ ID NO: 804066 - DNA, 33 bp, Homo sapien
tggctgaccagggaaccatgaatagtcaaatgt

SEQ ID NO: 804067 - DNA, 33 bp, Homo sapien
tcctggcacatcttacaaatttcaccttaatcc

SEQ ID NO: 804068 - DNA, 33 bp, Homo sapien
tcctggcacatcttactaatttcaccttaatcc

SEQ ID NO: 804069 - DNA, 33 bp, Homo sapien
ttgcagactgtgagagacgtattcccatgagct

SEQ ID NO: 804070 - DNA, 33 bp, Homo sapien
ttgcagactgtgagaggcgtattcccatgagct

SEQ ID NO: 804071 - DNA, 33 bp, Homo sapien
aagcataagtgaaggacctatcatactggttca

SEQ ID NO: 804072 - DNA, 33 bp, Homo sapien
aagcataagtgaaggatctatcatactggttca

SEQ ID NO: 804073 - DNA, 33 bp, Homo sapien
acttgaagatttgaaccatcaatattagtcaac

SEQ ID NO: 804074 - DNA, 33 bp, Homo sapien
acttgaagatttgaacgatcaatattagtcaac

SEQ ID NO: 804075 - DNA, 33 bp, Homo sapien
acatacgtatgaacataatcaaggtaattccca

SEQ ID NO: 804076 - DNA, 33 bp, Homo sapien
acatacgtatgaacatcatcaaggtaattccca

SEQ ID NO: 804077 - DNA, 33 bp, Homo sapien
ctatggaccagcttatcagtgattttccaaatg

SEQ ID NO: 804078 - DNA, 33 bp, Homo sapien
ctatggaccagcttattagtgattttccaaatg

SEQ ID NO: 804079 - DNA, 33 bp, Homo sapien
aaataagttactcccacctccttgacacctttg

SEQ ID NO: 804080 - DNA, 33 bp, Homo sapien
aaataagttactcccatctccttgacacctttg

SEQ ID NO: 804081 - DNA, 33 bp, Homo sapien
gactactttacctaacgatgccaggatagacat

SEQ ID NO: 804082 - DNA, 33 bp, Homo sapien
gactactttacctaactatgccaggatagacat

SEQ ID NO: 804083 - DNA, 33 bp, Homo sapien
actggaaagcaaccgagaaatttttagtaggtg

SEQ ID NO: 804084 - DNA, 33 bp, Homo sapien
actggaaagcaaccgataaatttttagtaggtg

SEQ ID NO: 804085 - DNA, 33 bp, Homo sapien
gaattttagtgcacaaagggtagccaaaaccat

SEQ ID NO: 804086 - DNA, 33 bp, Homo sapien
gaattttagtgcacaaggggtagccaaaaccat

SEQ ID NO: 804087 - DNA, 33 bp, Homo sapien
ccctgatcaatgaagcagattgaaccagggaac

SEQ ID NO: 804088 - DNA, 33 bp, Homo sapien
ccctgatcaatgaagcggattgaaccagggaac

SEQ ID NO: 804089 - DNA, 33 bp, Homo sapien
tggtggaaggcgaccactggtatgtaatcaaag

SEQ ID NO: 804090 - DNA, 33 bp, Homo sapien
tggtggaaggcgaccattggtatgtaatcaaag

SEQ ID NO: 804091 - DNA, 33 bp, Homo sapien
attagcctagaagtgggcatcctggaaagaagc

SEQ ID NO: 804092 - DNA, 33 bp, Homo sapien
attagcctagaagtggtcatcctggaaagaagc

SEQ ID NO: 804093 - DNA, 33 bp, Homo sapien
gggtaaatcaaagatgaatgaggatgaccttcc

SEQ ID NO: 804094 - DNA, 33 bp, Homo sapien
gggtaaatcaaagatggatgaggatgaccttcc

SEQ ID NO: 804095 - DNA, 33 bp, Homo sapien
gccaagaaccaagttaaataggcaataagttct

SEQ ID NO: 804096 - DNA, 33 bp, Homo sapien
gccaagaaccaagttagataggcaataagttct

SEQ ID NO: 804097 - DNA, 33 bp, Homo sapien
ataaattgtatgtcaacgccctctacttggtta

SEQ ID NO: 804098 - DNA, 33 bp, Homo sapien
ataaattgtatgtcaatgccctctacttggtta

SEQ ID NO: 804099 - DNA, 33 bp, Homo sapien
aaattatattgattacacaacaaagatagggca

SEQ ID NO: 804100 - DNA, 33 bp, Homo sapien
aaattatattgattacgcaacaaagatagggca

SEQ ID NO: 804101 - DNA, 33 bp, Homo sapien
atgtttggctgagcacagaatgctgagatgtga

SEQ ID NO: 804102 - DNA, 33 bp, Homo sapien
atgtttggctgagcactgaatgctgagatgtga

SEQ ID NO: 804103 - DNA, 33 bp, Homo sapien
aggatcggagactaagaaactgttggagaattt

SEQ ID NO: 804104 - DNA, 33 bp, Homo sapien
aggatcggagactaagtaactgttggagaattt

SEQ ID NO: 804105 - DNA, 33 bp, Homo sapien
tctctggataggtaagaacagaacaatgtgcat

SEQ ID NO: 804106 - DNA, 33 bp, Homo sapien
tctctggataggtaaggacagaacaatgtgcat

SEQ ID NO: 804107 - DNA, 33 bp, Homo sapien
aactcagataataatcacattgctaatatgact

SEQ ID NO: 804108 - DNA, 33 bp, Homo sapien
aactcagataataatcgcattgctaatatgact

SEQ ID NO: 804109 - DNA, 33 bp, Homo sapien
cccttgtaaggttctaagtcagtggtcctcaaa

SEQ ID NO: 804110 - DNA, 33 bp, Homo sapien
cccttgtaaggttctaggtcagtggtcctcaaa

SEQ ID NO: 804111 - DNA, 33 bp, Homo sapien
gcaggttactatcagaatatgggaaagtccact

SEQ ID NO: 804112 - DNA, 33 bp, Homo sapien
gcaggttactatcagagtatgggaaagtccact

SEQ ID NO: 804113 - DNA, 33 bp, Homo sapien
cagctgttaccttttacgctcccacacacacta

SEQ ID NO: 804114 - DNA, 33 bp, Homo sapien
cagctgttaccttttatgctcccacacacacta

SEQ ID NO: 804115 - DNA, 33 bp, Homo sapien
cactgttccataaccaacactaaatgaagtgcc

SEQ ID NO: 804116 - DNA, 33 bp, Homo sapien
cactgttccataaccatcactaaatgaagtgcc

SEQ ID NO: 804117 - DNA, 33 bp, Homo sapien
atggtggatattataaagggaggtacacaaggt

SEQ ID NO: 804118 - DNA, 33 bp, Homo sapien
atggtggatattataaggggaggtacacaaggt

SEQ ID NO: 804119 - DNA, 33 bp, Homo sapien
tgtatcgataccagtcaacctatctagaaccta

SEQ ID NO: 804120 - DNA, 33 bp, Homo sapien
tgtatcgataccagtccacctatctagaaccta

SEQ ID NO: 804121 - DNA, 33 bp, Homo sapien
agtggagcttataataacccaagaggaagcaag

SEQ ID NO: 804122 - DNA, 33 bp, Homo sapien
agtggagcttataatatcccaagaggaagcaag

SEQ ID NO: 804123 - DNA, 33 bp, Homo sapien
tgtaggtagggatcaccgctgatctcatctgga

SEQ ID NO: 804124 - DNA, 33 bp, Homo sapien
tgtaggtagggatcactgctgatctcatctgga

SEQ ID NO: 804125 - DNA, 33 bp, Homo sapien
cctcatttaaaacgaaacatacaatatttgtct

SEQ ID NO: 804126 - DNA, 33 bp, Homo sapien
cctcatttaaaacgaatcatacaatatttgtct

SEQ ID NO: 804127 - DNA, 33 bp, Homo sapien
gtcagttccaggactacagcttcaaccacagcc

SEQ ID NO: 804128 - DNA, 33 bp, Homo sapien
gtcagttccaggactagagcttcaaccacagcc

SEQ ID NO: 804129 - DNA, 33 bp, Homo sapien
ctcatagtcaaatcatcagttgctatctcattc

SEQ ID NO: 804130 - DNA, 33 bp, Homo sapien
ctcatagtcaaatcattagttgctatctcattc

SEQ ID NO: 804131 - DNA, 33 bp, Homo sapien
gagcccctcaattctacagcttgtggaagtcta

SEQ ID NO: 804132 - DNA, 33 bp, Homo sapien
gagcccctcaattctagagcttgtggaagtcta

SEQ ID NO: 804133 - DNA, 33 bp, Homo sapien
ctccgacacaaaaaccggctcttccccagtgtt

SEQ ID NO: 804134 - DNA, 33 bp, Homo sapien
ctccgacacaaaaacctgctcttccccagtgtt

SEQ ID NO: 804135 - DNA, 33 bp, Homo sapien
ctaaggtacaagaaatgataccctccatactaa

SEQ ID NO: 804136 - DNA, 33 bp, Homo sapien
ctaaggtacaagaaattataccctccatactaa

SEQ ID NO: 804137 - DNA, 33 bp, Homo sapien
tttagagaagttctaactacttgacatttctcc

SEQ ID NO: 804138 - DNA, 33 bp, Homo sapien
tttagagaagttctaattacttgacatttctcc

SEQ ID NO: 804139 - DNA, 33 bp, Homo sapien
tcacttgagatgtgctcacaatcgttaagttaa

SEQ ID NO: 804140 - DNA, 33 bp, Homo sapien
tcacttgagatgtgcttacaatcgttaagttaa

SEQ ID NO: 804141 - DNA, 33 bp, Homo sapien
agtaagtacatagcagaatatttgtaccagttg

SEQ ID NO: 804142 - DNA, 33 bp, Homo sapien
agtaagtacatagcaggatatttgtaccagttg

SEQ ID NO: 804143 - DNA, 33 bp, Homo sapien
ctacatttcccaaaaagttaatgtgtctgacat

SEQ ID NO: 804144 - DNA, 33 bp, Homo sapien
ctacatttcccaaaaatttaatgtgtctgacat

SEQ ID NO: 804145 - DNA, 33 bp, Homo sapien
acattgctgcaacacaagaggatcaaccagaaa

SEQ ID NO: 804146 - DNA, 33 bp, Homo sapien
acattgctgcaacacaggaggatcaaccagaaa

SEQ ID NO: 804147 - DNA, 33 bp, Homo sapien
tccctggtgtgaaaagaatctcagcaattttgc

SEQ ID NO: 804148 - DNA, 33 bp, Homo sapien
tccctggtgtgaaaaggatctcagcaattttgc

SEQ ID NO: 804149 - DNA, 33 bp, Homo sapien
ggaaagcttgaaccaacacggtttaacaagatg

SEQ ID NO: 804150 - DNA, 33 bp, Homo sapien
ggaaagcttgaaccaatacggtttaacaagatg

SEQ ID NO: 804151 - DNA, 33 bp, Homo sapien
atctattcccaatacccgcctcagttctagcct

SEQ ID NO: 804152 - DNA, 33 bp, Homo sapien
atctattcccaatacctgcctcagttctagcct

SEQ ID NO: 804153 - DNA, 33 bp, Homo sapien
ttatcttttactattaacattaccaccactaac

SEQ ID NO: 804154 - DNA, 33 bp, Homo sapien
ttatcttttactattatcattaccaccactaac

SEQ ID NO: 804155 - DNA, 33 bp, Homo sapien
caccactaactatgaaacatttactgaacatat

SEQ ID NO: 804156 - DNA, 33 bp, Homo sapien
caccactaactatgaagcatttactgaacatat

SEQ ID NO: 804157 - DNA, 33 bp, Homo sapien
gagcttggcttggagacggaaagatcacgcagc

SEQ ID NO: 804158 - DNA, 33 bp, Homo sapien
gagcttggcttggagatggaaagatcacgcagc

SEQ ID NO: 804159 - DNA, 33 bp, Homo sapien
agaggaatttggtaaacagcaggctgaaagttt

SEQ ID NO: 804160 - DNA, 33 bp, Homo sapien
agaggaatttggtaaatagcaggctgaaagttt

SEQ ID NO: 804161 - DNA, 33 bp, Homo sapien
gtatgagagacaaatgaaacatccttggcagca

SEQ ID NO: 804162 - DNA, 33 bp, Homo sapien
gtatgagagacaaatggaacatccttggcagca

SEQ ID NO: 804163 - DNA, 33 bp, Homo sapien
agcaaagtaaaaacaccatgatgagtggagaaa

SEQ ID NO: 804164 - DNA, 33 bp, Homo sapien
agcaaagtaaaaacactatgatgagtggagaaa

SEQ ID NO: 804165 - DNA, 33 bp, Homo sapien
gggatcagaggaaacacgtgtaatctatgggtc

SEQ ID NO: 804166 - DNA, 33 bp, Homo sapien
gggatcagaggaaacaggtgtaatctatgggtc

SEQ ID NO: 804167 - DNA, 33 bp, Homo sapien
cttagcaggagacacacgaattaacagtcatgt

SEQ ID NO: 804168 - DNA, 33 bp, Homo sapien
cttagcaggagacacaggaattaacagtcatgt

SEQ ID NO: 804169 - DNA, 33 bp, Homo sapien
ctctgtgtttgaaagcaagttgattaagttcac

SEQ ID NO: 804170 - DNA, 33 bp, Homo sapien
ctctgtgtttgaaagccagttgattaagttcac

SEQ ID NO: 804171 - DNA, 33 bp, Homo sapien
ggaaggaaaataaccaagtgtgggacattgagc

SEQ ID NO: 804172 - DNA, 33 bp, Homo sapien
ggaaggaaaataaccacgtgtgggacattgagc

SEQ ID NO: 804173 - DNA, 33 bp, Homo sapien
aatagaggatgaataccagatgatgtctgtatg

SEQ ID NO: 804174 - DNA, 33 bp, Homo sapien
aatagaggatgaatactagatgatgtctgtatg

SEQ ID NO: 804175 - DNA, 33 bp, Homo sapien
gtgtcctgttcactgccatatttccaacggcca

SEQ ID NO: 804176 - DNA, 33 bp, Homo sapien
gtgtcctgttcactgctatatttccaacggcca

SEQ ID NO: 804177 - DNA, 33 bp, Homo sapien
cattgtacaatggtcactatgtttaggggagaa

SEQ ID NO: 804178 - DNA, 33 bp, Homo sapien
cattgtacaatggtcattatgtttaggggagaa

SEQ ID NO: 804179 - DNA, 33 bp, Homo sapien
actacaatacagaacacggtgataagtgttgtg

SEQ ID NO: 804180 - DNA, 33 bp, Homo sapien
actacaatacagaacatggtgataagtgttgtg

SEQ ID NO: 804181 - DNA, 33 bp, Homo sapien
aatgaagggcctgaaaaagaattaactaaaaag

SEQ ID NO: 804182 - DNA, 33 bp, Homo sapien
aatgaagggcctgaaagagaattaactaaaaag

SEQ ID NO: 804183 - DNA, 33 bp, Homo sapien
aatccttatgttgacacgagttgtatataaaaa

SEQ ID NO: 804184 - DNA, 33 bp, Homo sapien
aatccttatgttgacatgagttgtatataaaaa

SEQ ID NO: 804185 - DNA, 33 bp, Homo sapien
cctgaagggttgcttacctaaacaccaatctaa

SEQ ID NO: 804186 - DNA, 33 bp, Homo sapien
cctgaagggttgcttatctaaacaccaatctaa

SEQ ID NO: 804187 - DNA, 33 bp, Homo sapien
tcttttgagctacaacaattctcttccattcta

SEQ ID NO: 804188 - DNA, 33 bp, Homo sapien
tcttttgagctacaaccattctcttccattcta

SEQ ID NO: 804189 - DNA, 33 bp, Homo sapien
cccaggaaacttcttacagtcagtagggtggaa

SEQ ID NO: 804190 - DNA, 33 bp, Homo sapien
cccaggaaacttcttatagtcagtagggtggaa

SEQ ID NO: 804191 - DNA, 33 bp, Homo sapien
tttcgagtgcacaagcccataaccaagctgaat

SEQ ID NO: 804192 - DNA, 33 bp, Homo sapien
tttcgagtgcacaagctcataaccaagctgaat

SEQ ID NO: 804193 - DNA, 33 bp, Homo sapien
cacatcactctaccaacaaataaaagtcttgca

SEQ ID NO: 804194 - DNA, 33 bp, Homo sapien
cacatcactctaccaataaataaaagtcttgca

SEQ ID NO: 804195 - DNA, 33 bp, Homo sapien
ttccttcttaccctcacgtgatgtcttggaata

SEQ ID NO: 804196 - DNA, 33 bp, Homo sapien
ttccttcttaccctcatgtgatgtcttggaata

SEQ ID NO: 804197 - DNA, 33 bp, Homo sapien
ggaacagaaaaaatgcaagcctaaatttgcctg

SEQ ID NO: 804198 - DNA, 33 bp, Homo sapien
ggaacagaaaaaatgcgagcctaaatttgcctg

SEQ ID NO: 804199 - DNA, 33 bp, Homo sapien
atttgcaattaacaaacgttagcagcttctttg

SEQ ID NO: 804200 - DNA, 33 bp, Homo sapien
atttgcaattaacaaatgttagcagcttctttg

SEQ ID NO: 804201 - DNA, 33 bp, Homo sapien
tcttcaagtggattaactcacctgcttcattga

SEQ ID NO: 804202 - DNA, 33 bp, Homo sapien
tcttcaagtggattaagtcacctgcttcattga

SEQ ID NO: 804203 - DNA, 33 bp, Homo sapien
ccaaatttgtcatagcactttaatattgaaaac

SEQ ID NO: 804204 - DNA, 33 bp, Homo sapien
ccaaatttgtcatagctctttaatattgaaaac

SEQ ID NO: 804205 - DNA, 33 bp, Homo sapien
gaacagatcagcttccaactctcaaatatttta

SEQ ID NO: 804206 - DNA, 33 bp, Homo sapien
gaacagatcagcttcccactctcaaatatttta

SEQ ID NO: 804207 - DNA, 33 bp, Homo sapien
acttcaactctttgaaagtaggtatcctcatct

SEQ ID NO: 804208 - DNA, 33 bp, Homo sapien
acttcaactctttgaaggtaggtatcctcatct

SEQ ID NO: 804209 - DNA, 33 bp, Homo sapien
cctagggcttattacaagagtaaccgtctctct

SEQ ID NO: 804210 - DNA, 33 bp, Homo sapien
cctagggcttattacaggagtaaccgtctctct

SEQ ID NO: 804211 - DNA, 33 bp, Homo sapien
gaaatttccctcctgacattaccactcattgat

SEQ ID NO: 804212 - DNA, 33 bp, Homo sapien
gaaatttccctcctgatattaccactcattgat

SEQ ID NO: 804213 - DNA, 33 bp, Homo sapien
gaataatagtggcaataagagaaataagtaaca

SEQ ID NO: 804214 - DNA, 33 bp, Homo sapien
gaataatagtggcaatcagagaaataagtaaca

SEQ ID NO: 804215 - DNA, 33 bp, Homo sapien
ggggtcattagggtcccccaacttctactccaa

SEQ ID NO: 804216 - DNA, 33 bp, Homo sapien
ggggtcattagggtcctccaacttctactccaa

SEQ ID NO: 804217 - DNA, 33 bp, Homo sapien
gttgccaagttgctaccgactcaatagctttgg

SEQ ID NO: 804218 - DNA, 33 bp, Homo sapien
gttgccaagttgctactgactcaatagctttgg

SEQ ID NO: 804219 - DNA, 33 bp, Homo sapien
ttttctaatagtataccgcacatcatcgaactt

SEQ ID NO: 804220 - DNA, 33 bp, Homo sapien
ttttctaatagtatactgcacatcatcgaactt

SEQ ID NO: 804221 - DNA, 33 bp, Homo sapien
agactggcagtatagacgggagtattaagaggt

SEQ ID NO: 804222 - DNA, 33 bp, Homo sapien
agactggcagtatagatgggagtattaagaggt

SEQ ID NO: 804223 - DNA, 33 bp, Homo sapien
tactgccagccataaaatgtaggcagttcttca

SEQ ID NO: 804224 - DNA, 33 bp, Homo sapien
tactgccagccataaagtgtaggcagttcttca

SEQ ID NO: 804225 - DNA, 33 bp, Homo sapien
gacatctcttttatgacgacttggagttcttat

SEQ ID NO: 804226 - DNA, 33 bp, Homo sapien
gacatctcttttatgatgacttggagttcttat

SEQ ID NO: 804227 - DNA, 33 bp, Homo sapien
tacaaatgaagaagaccgaggctactacacaga

SEQ ID NO: 804228 - DNA, 33 bp, Homo sapien
tacaaatgaagaagactgaggctactacacaga

SEQ ID NO: 804229 - DNA, 33 bp, Homo sapien
aaagctgtaggcattaagtagatatatatcact

SEQ ID NO: 804230 - DNA, 33 bp, Homo sapien
aaagctgtaggcattatgtagatatatatcact

SEQ ID NO: 804231 - DNA, 33 bp, Homo sapien
ttatccacccaggaaacagccatgtgcagccga

SEQ ID NO: 804232 - DNA, 33 bp, Homo sapien
ttatccacccaggaaatagccatgtgcagccga

SEQ ID NO: 804233 - DNA, 33 bp, Homo sapien
tcatggctgagagtaacgacacctgagccctcg

SEQ ID NO: 804234 - DNA, 33 bp, Homo sapien
tcatggctgagagtaatgacacctgagccctcg

SEQ ID NO: 804235 - DNA, 33 bp, Homo sapien
cgaaataaatggtgtacggacctaaagttgtta

SEQ ID NO: 804236 - DNA, 33 bp, Homo sapien
cgaaataaatggtgtatggacctaaagttgtta

SEQ ID NO: 804237 - DNA, 33 bp, Homo sapien
gtcagtgaccaacaagccctgaggatgcagcac

SEQ ID NO: 804238 - DNA, 33 bp, Homo sapien
gtcagtgaccaacaagtcctgaggatgcagcac

SEQ ID NO: 804239 - DNA, 33 bp, Homo sapien
aggaattgactaatgacgagttactggaaccag

SEQ ID NO: 804240 - DNA, 33 bp, Homo sapien
aggaattgactaatgatgagttactggaaccag

SEQ ID NO: 804241 - DNA, 33 bp, Homo sapien
ttagcaatgttttgaactcatggacaaatgtct

SEQ ID NO: 804242 - DNA, 33 bp, Homo sapien
ttagcaatgttttgaagtcatggacaaatgtct

SEQ ID NO: 804243 - DNA, 33 bp, Homo sapien
ccttctcttcctattacctactatgtaacctga

SEQ ID NO: 804244 - DNA, 33 bp, Homo sapien
ccttctcttcctattatctactatgtaacctga

SEQ ID NO: 804245 - DNA, 33 bp, Homo sapien
agtgcctggcacatcacagttaattggtggtgg

SEQ ID NO: 804246 - DNA, 33 bp, Homo sapien
agtgcctggcacatcatagttaattggtggtgg

SEQ ID NO: 804247 - DNA, 33 bp, Homo sapien
tgggtagaagtgagaaaatggatttcagttcaa

SEQ ID NO: 804248 - DNA, 33 bp, Homo sapien
tgggtagaagtgagaagatggatttcagttcaa

SEQ ID NO: 804249 - DNA, 33 bp, Homo sapien
gaatgtctgaataggagtaagcttccatggtgc

SEQ ID NO: 804250 - DNA, 33 bp, Homo sapien
gaatgtctgaataggattaagcttccatggtgc

SEQ ID NO: 804251 - DNA, 33 bp, Homo sapien
ctgatttgtcgttcccagcctgtcaaacaggaa

SEQ ID NO: 804252 - DNA, 33 bp, Homo sapien
ctgatttgtcgttccctgcctgtcaaacaggaa

SEQ ID NO: 804253 - DNA, 33 bp, Homo sapien
cactaatacatgggaaatcaaaccctgaaaatt

SEQ ID NO: 804254 - DNA, 33 bp, Homo sapien
cactaatacatgggaattcaaaccctgaaaatt

SEQ ID NO: 804255 - DNA, 33 bp, Homo sapien
ggcaatttcacatggcacaacccgaaagattaa

SEQ ID NO: 804256 - DNA, 33 bp, Homo sapien
ggcaatttcacatggcgcaacccgaaagattaa

SEQ ID NO: 804257 - DNA, 33 bp, Homo sapien
ttagcaagtttctccaagtttttccaacacaga

SEQ ID NO: 804258 - DNA, 33 bp, Homo sapien
ttagcaagtttctccaggtttttccaacacaga

SEQ ID NO: 804259 - DNA, 33 bp, Homo sapien
ggcatacattaatcaggcccctctgagaagatt

SEQ ID NO: 804260 - DNA, 33 bp, Homo sapien
ggcatacattaatcagtcccctctgagaagatt

SEQ ID NO: 804261 - DNA, 33 bp, Homo sapien
atcatatggaagtgtacaaaaaacctagatttg

SEQ ID NO: 804262 - DNA, 33 bp, Homo sapien
atcatatggaagtgtataaaaaacctagatttg

SEQ ID NO: 804263 - DNA, 33 bp, Homo sapien
acttctctgtgctccaaatgagtaaatatgcca

SEQ ID NO: 804264 - DNA, 33 bp, Homo sapien
acttctctgtgctccagatgagtaaatatgcca

SEQ ID NO: 804265 - DNA, 33 bp, Homo sapien
gatcagagacactttcccaagagacacagaact

SEQ ID NO: 804266 - DNA, 33 bp, Homo sapien
gatcagagacactttcgcaagagacacagaact

SEQ ID NO: 804267 - DNA, 33 bp, Homo sapien
actagcaaggcatctacatgggaagagtgatga

SEQ ID NO: 804268 - DNA, 33 bp, Homo sapien
actagcaaggcatctagatgggaagagtgatga

SEQ ID NO: 804269 - DNA, 33 bp, Homo sapien
cccattcggcctgagaagatggaaacttccagc

SEQ ID NO: 804270 - DNA, 33 bp, Homo sapien
cccattcggcctgagaggatggaaacttccagc

SEQ ID NO: 804271 - DNA, 33 bp, Homo sapien
attatctggtataaacagtcgatggtaagccag

SEQ ID NO: 804272 - DNA, 33 bp, Homo sapien
attatctggtataaacggtcgatggtaagccag

SEQ ID NO: 804273 - DNA, 33 bp, Homo sapien
tcagggtgagaagagaacatcaggataatctaa

SEQ ID NO: 804274 - DNA, 33 bp, Homo sapien
tcagggtgagaagagaccatcaggataatctaa

SEQ ID NO: 804275 - DNA, 33 bp, Homo sapien
aatccatgcatggactcaaagtactgaatcagc

SEQ ID NO: 804276 - DNA, 33 bp, Homo sapien
aatccatgcatggacttaaagtactgaatcagc

SEQ ID NO: 804277 - DNA, 33 bp, Homo sapien
gcatggccaactgctacgatatcggggtgaaga

SEQ ID NO: 804278 - DNA, 33 bp, Homo sapien
gcatggccaactgctatgatatcggggtgaaga

SEQ ID NO: 804279 - DNA, 33 bp, Homo sapien
ggtgacagatgctagacatggagaacagaccag

SEQ ID NO: 804280 - DNA, 33 bp, Homo sapien
ggtgacagatgctagatatggagaacagaccag

SEQ ID NO: 804281 - DNA, 33 bp, Homo sapien
gcttcccaaaggtgacggacaacttccttgttt

SEQ ID NO: 804282 - DNA, 33 bp, Homo sapien
gcttcccaaaggtgactgacaacttccttgttt

SEQ ID NO: 804283 - DNA, 33 bp, Homo sapien
aagctattacaagtagacctgcaatgaacattt

SEQ ID NO: 804284 - DNA, 33 bp, Homo sapien
aagctattacaagtaggcctgcaatgaacattt

SEQ ID NO: 804285 - DNA, 33 bp, Homo sapien
taagtattcaacaggaaaacaaagaagaaaggg

SEQ ID NO: 804286 - DNA, 33 bp, Homo sapien
taagtattcaacaggagaacaaagaagaaaggg

SEQ ID NO: 804287 - DNA, 33 bp, Homo sapien
gcttcccaaaataaagaatgcctaggtgtggtt

SEQ ID NO: 804288 - DNA, 33 bp, Homo sapien
gcttcccaaaataaaggatgcctaggtgtggtt

SEQ ID NO: 804289 - DNA, 33 bp, Homo sapien
cagaaaatcagaatgaaaggaaggagtagaggc

SEQ ID NO: 804290 - DNA, 33 bp, Homo sapien
cagaaaatcagaatgagaggaaggagtagaggc

SEQ ID NO: 804291 - DNA, 33 bp, Homo sapien
acactgtacttgaggagcttaactgagactgtg

SEQ ID NO: 804292 - DNA, 33 bp, Homo sapien
acactgtacttgaggatcttaactgagactgtg

SEQ ID NO: 804293 - DNA, 33 bp, Homo sapien
gctccactgagtaccaactaacaattttctacc

SEQ ID NO: 804294 - DNA, 33 bp, Homo sapien
gctccactgagtaccagctaacaattttctacc

SEQ ID NO: 804295 - DNA, 33 bp, Homo sapien
cagatggagaacctggaccaagaaagagagagg

SEQ ID NO: 804296 - DNA, 33 bp, Homo sapien
cagatggagaacctggcccaagaaagagagagg

SEQ ID NO: 804297 - DNA, 33 bp, Homo sapien
tgggaaaaacacatcccagagaaaggaagaggc

SEQ ID NO: 804298 - DNA, 33 bp, Homo sapien
tgggaaaaacacatcctagagaaaggaagaggc

SEQ ID NO: 804299 - DNA, 33 bp, Homo sapien
cttctaagtgacaggaacaacatgacaaatgac

SEQ ID NO: 804300 - DNA, 33 bp, Homo sapien
cttctaagtgacaggagcaacatgacaaatgac

SEQ ID NO: 804301 - DNA, 33 bp, Homo sapien
catggggctcaggctactagatgatgcatttca

SEQ ID NO: 804302 - DNA, 33 bp, Homo sapien
catggggctcaggctattagatgatgcatttca

SEQ ID NO: 804303 - DNA, 33 bp, Homo sapien
taaaactagatactgacggtcagaatttaagta

SEQ ID NO: 804304 - DNA, 33 bp, Homo sapien
taaaactagatactgatggtcagaatttaagta

SEQ ID NO: 804305 - DNA, 33 bp, Homo sapien
tattttgcatatattagcacacttagtcctcac

SEQ ID NO: 804306 - DNA, 33 bp, Homo sapien
tattttgcatatattatcacacttagtcctcac

SEQ ID NO: 804307 - DNA, 33 bp, Homo sapien
ccaaaaccagaagtgaccttttctcctcttcac

SEQ ID NO: 804308 - DNA, 33 bp, Homo sapien
ccaaaaccagaagtgagcttttctcctcttcac

SEQ ID NO: 804309 - DNA, 33 bp, Homo sapien
ggtagtagcttctggaccctgattcatggaggt

SEQ ID NO: 804310 - DNA, 33 bp, Homo sapien
ggtagtagcttctggagcctgattcatggaggt

SEQ ID NO: 804311 - DNA, 33 bp, Homo sapien
taaagagacattccaaactactaacttcctcag

SEQ ID NO: 804312 - DNA, 33 bp, Homo sapien
taaagagacattccaagctactaacttcctcag

SEQ ID NO: 804313 - DNA, 33 bp, Homo sapien
ttgctgtgccaacttaccaaccctgggatccac

SEQ ID NO: 804314 - DNA, 33 bp, Homo sapien
ttgctgtgccaacttagcaaccctgggatccac

SEQ ID NO: 804315 - DNA, 33 bp, Homo sapien
agttgggttcaggaagcagtgaggtaagcttca

SEQ ID NO: 804316 - DNA, 33 bp, Homo sapien
agttgggttcaggaaggagtgaggtaagcttca

SEQ ID NO: 804317 - DNA, 33 bp, Homo sapien
tcaccatctcagtcaccatcctgttggcattat

SEQ ID NO: 804318 - DNA, 33 bp, Homo sapien
tcaccatctcagtcactatcctgttggcattat

SEQ ID NO: 804319 - DNA, 33 bp, Homo sapien
atggtggactgggtaaggagccaatgtttacat

SEQ ID NO: 804320 - DNA, 33 bp, Homo sapien
atggtggactgggtaatgagccaatgtttacat

SEQ ID NO: 804321 - DNA, 33 bp, Homo sapien
gtagtgaaggaatagacgtgctttatggtacta

SEQ ID NO: 804322 - DNA, 33 bp, Homo sapien
gtagtgaaggaatagaggtgctttatggtacta

SEQ ID NO: 804323 - DNA, 33 bp, Homo sapien
gcacctgtgacctttacaggcaccatgaaaaca

SEQ ID NO: 804324 - DNA, 33 bp, Homo sapien
gcacctgtgacctttagaggcaccatgaaaaca

SEQ ID NO: 804325 - DNA, 33 bp, Homo sapien
agcagagctggattcaagagaggaataaggatg

SEQ ID NO: 804326 - DNA, 33 bp, Homo sapien
agcagagctggattcacgagaggaataaggatg

SEQ ID NO: 804327 - DNA, 33 bp, Homo sapien
cccacctgttttttcacaggatattcccgtttt

SEQ ID NO: 804328 - DNA, 33 bp, Homo sapien
cccacctgttttttcataggatattcccgtttt

SEQ ID NO: 804329 - DNA, 33 bp, Homo sapien
tagatgttacagcatacataagccatttgtatt

SEQ ID NO: 804330 - DNA, 33 bp, Homo sapien
tagatgttacagcatatataagccatttgtatt

SEQ ID NO: 804331 - DNA, 33 bp, Homo sapien
caaatttcaataaaaacggagatcagcacattt

SEQ ID NO: 804332 - DNA, 33 bp, Homo sapien
caaatttcaataaaaagggagatcagcacattt

SEQ ID NO: 804333 - DNA, 33 bp, Homo sapien
cagtgatgggcaatacactcagccactgccttt

SEQ ID NO: 804334 - DNA, 33 bp, Homo sapien
cagtgatgggcaatacgctcagccactgccttt

SEQ ID NO: 804335 - DNA, 33 bp, Homo sapien
aaattcatatgtacaacgaagaattacactaaa

SEQ ID NO: 804336 - DNA, 33 bp, Homo sapien
aaattcatatgtacaatgaagaattacactaaa

SEQ ID NO: 804337 - DNA, 33 bp, Homo sapien
agagcacacaatgaagaccagttcaaagcctga

SEQ ID NO: 804338 - DNA, 33 bp, Homo sapien
agagcacacaatgaaggccagttcaaagcctga

SEQ ID NO: 804339 - DNA, 33 bp, Homo sapien
cagagcaagtgacacaccagattgaccttatag

SEQ ID NO: 804340 - DNA, 33 bp, Homo sapien
cagagcaagtgacacagcagattgaccttatag

SEQ ID NO: 804341 - DNA, 33 bp, Homo sapien
acagaacttcattgaagacttttcattcactgc

SEQ ID NO: 804342 - DNA, 33 bp, Homo sapien
acagaacttcattgaatacttttcattcactgc

SEQ ID NO: 804343 - DNA, 33 bp, Homo sapien
ctgagctctatcactccacatgaagcgcttaac

SEQ ID NO: 804344 - DNA, 33 bp, Homo sapien
ctgagctctatcactctacatgaagcgcttaac

SEQ ID NO: 804345 - DNA, 33 bp, Homo sapien
cattgtgaggcagtcacagggctgagcattctt

SEQ ID NO: 804346 - DNA, 33 bp, Homo sapien
cattgtgaggcagtcatagggctgagcattctt

SEQ ID NO: 804347 - DNA, 33 bp, Homo sapien
ccttcctgccttctgcactatttgcctaggtcc

SEQ ID NO: 804348 - DNA, 33 bp, Homo sapien
ccttcctgccttctgccctatttgcctaggtcc

SEQ ID NO: 804349 - DNA, 33 bp, Homo sapien
gttctaggcagagggaagagcagggcaacccga

SEQ ID NO: 804350 - DNA, 33 bp, Homo sapien
gttctaggcagagggacgagcagggcaacccga

SEQ ID NO: 804351 - DNA, 33 bp, Homo sapien
agctaaacctgaaggaagcagctaatcatattt

SEQ ID NO: 804352 - DNA, 33 bp, Homo sapien
agctaaacctgaaggaggcagctaatcatattt

SEQ ID NO: 804353 - DNA, 33 bp, Homo sapien
tggtatcattccaaacaactgacccaaagtctg

SEQ ID NO: 804354 - DNA, 33 bp, Homo sapien
tggtatcattccaaactactgacccaaagtctg

SEQ ID NO: 804355 - DNA, 33 bp, Homo sapien
aagagaacttatactcagaaggaggcatctgct

SEQ ID NO: 804356 - DNA, 33 bp, Homo sapien
aagagaacttatactcggaaggaggcatctgct

SEQ ID NO: 804357 - DNA, 33 bp, Homo sapien
acaaaagcctatacacaaatgtttagagtggat

SEQ ID NO: 804358 - DNA, 33 bp, Homo sapien
acaaaagcctatacacgaatgtttagagtggat

SEQ ID NO: 804359 - DNA, 33 bp, Homo sapien
tatgtaacatacccaagttcacacgggcagtaa

SEQ ID NO: 804360 - DNA, 33 bp, Homo sapien
tatgtaacatacccaatttcacacgggcagtaa

SEQ ID NO: 804361 - DNA, 33 bp, Homo sapien
gtccttaagacatgcaagaaaaatattaggtaa

SEQ ID NO: 804362 - DNA, 33 bp, Homo sapien
gtccttaagacatgcaggaaaaatattaggtaa

SEQ ID NO: 804363 - DNA, 33 bp, Homo sapien
aagcagctggaatgaacggagagagaagaacta

SEQ ID NO: 804364 - DNA, 33 bp, Homo sapien
aagcagctggaatgaatggagagagaagaacta

SEQ ID NO: 804365 - DNA, 33 bp, Homo sapien
ttctctcatgggtgaaacatcctggggaaactg

SEQ ID NO: 804366 - DNA, 33 bp, Homo sapien
ttctctcatgggtgaaccatcctggggaaactg

SEQ ID NO: 804367 - DNA, 33 bp, Homo sapien
cctcagcaatatatcacggaggtcaaaacgtct

SEQ ID NO: 804368 - DNA, 33 bp, Homo sapien
cctcagcaatatatcatggaggtcaaaacgtct

SEQ ID NO: 804369 - DNA, 33 bp, Homo sapien
tctaactgcagaccagcaggttggtattgacag

SEQ ID NO: 804370 - DNA, 33 bp, Homo sapien
tctaactgcagaccaggaggttggtattgacag

SEQ ID NO: 804371 - DNA, 33 bp, Homo sapien
accaaatccaatcaccactttactctctgtgga

SEQ ID NO: 804372 - DNA, 33 bp, Homo sapien
accaaatccaatcaccgctttactctctgtgga

SEQ ID NO: 804373 - DNA, 33 bp, Homo sapien
acattctatatgtaaaccgcttgctaaaactct

SEQ ID NO: 804374 - DNA, 33 bp, Homo sapien
acattctatatgtaaatcgcttgctaaaactct

SEQ ID NO: 804375 - DNA, 33 bp, Homo sapien
tgttgaaaggactatgcacgggagattagactg

SEQ ID NO: 804376 - DNA, 33 bp, Homo sapien
tgttgaaaggactatgtacgggagattagactg

SEQ ID NO: 804377 - DNA, 33 bp, Homo sapien
cagcaaactgaaaatacggtccactaaccagca

SEQ ID NO: 804378 - DNA, 33 bp, Homo sapien
cagcaaactgaaaatatggtccactaaccagca

SEQ ID NO: 804379 - DNA, 33 bp, Homo sapien
gggcactggacaagaaagagagaaaaatgaaat

SEQ ID NO: 804380 - DNA, 33 bp, Homo sapien
gggcactggacaagaacgagagaaaaatgaaat

SEQ ID NO: 804381 - DNA, 33 bp, Homo sapien
ctgtgttattgcatggacagctacagagagaga

SEQ ID NO: 804382 - DNA, 33 bp, Homo sapien
ctgtgttattgcatgggcagctacagagagaga

SEQ ID NO: 804383 - DNA, 33 bp, Homo sapien
ctgagcttcctctgtaaaatggaaattataatg

SEQ ID NO: 804384 - DNA, 33 bp, Homo sapien
ctgagcttcctctgtagaatggaaattataatg

SEQ ID NO: 804385 - DNA, 33 bp, Homo sapien
tctacttaagtgtccacagatgtgattgatgat

SEQ ID NO: 804386 - DNA, 33 bp, Homo sapien
tctacttaagtgtccatagatgtgattgatgat

SEQ ID NO: 804387 - DNA, 33 bp, Homo sapien
agcacagagcttggcacggaggagacatacggt

SEQ ID NO: 804388 - DNA, 33 bp, Homo sapien
agcacagagcttggcatggaggagacatacggt

SEQ ID NO: 804389 - DNA, 33 bp, Homo sapien
tgggaagctatagagaaaagtgttggatcaagt

SEQ ID NO: 804390 - DNA, 33 bp, Homo sapien
tgggaagctatagagagaagtgttggatcaagt

SEQ ID NO: 804391 - DNA, 33 bp, Homo sapien
ccaggaggaagcagagacgggcatgggcccagg

SEQ ID NO: 804392 - DNA, 33 bp, Homo sapien
ccaggaggaagcagagccgggcatgggcccagg

SEQ ID NO: 804393 - DNA, 33 bp, Homo sapien
atgaccttgatgacccagaactgctcatggacc

SEQ ID NO: 804394 - DNA, 33 bp, Homo sapien
atgaccttgatgacccggaactgctcatggacc

SEQ ID NO: 804395 - DNA, 33 bp, Homo sapien
tgcgcaagttacaaaacggtgtcccctctctag

SEQ ID NO: 804396 - DNA, 33 bp, Homo sapien
tgcgcaagttacaaaatggtgtcccctctctag

SEQ ID NO: 804397 - DNA, 33 bp, Homo sapien
ataggtactataaaagccattttgctaaaggga

SEQ ID NO: 804398 - DNA, 33 bp, Homo sapien
ataggtactataaaagtcattttgctaaaggga

SEQ ID NO: 804399 - DNA, 33 bp, Homo sapien
ggtgcttccacctagcaatgggcaagcaaaaat

SEQ ID NO: 804400 - DNA, 33 bp, Homo sapien
ggtgcttccacctagcgatgggcaagcaaaaat

SEQ ID NO: 804401 - DNA, 33 bp, Homo sapien
ctgctcccactgcgaagaaatggaaggtcctca

SEQ ID NO: 804402 - DNA, 33 bp, Homo sapien
ctgctcccactgcgaataaatggaaggtcctca

SEQ ID NO: 804403 - DNA, 33 bp, Homo sapien
ataaacttttcaccaaagacaatattcaaacag

SEQ ID NO: 804404 - DNA, 33 bp, Homo sapien
ataaacttttcaccaatgacaatattcaaacag

SEQ ID NO: 804405 - DNA, 33 bp, Homo sapien
gagagagtcagctccacatagactacatagact

SEQ ID NO: 804406 - DNA, 33 bp, Homo sapien
gagagagtcagctccatatagactacatagact

SEQ ID NO: 804407 - DNA, 33 bp, Homo sapien
tgggctgtggccctggaaatgagaagtgagggc

SEQ ID NO: 804408 - DNA, 33 bp, Homo sapien
tgggctgtggccctggcaatgagaagtgagggc

SEQ ID NO: 804409 - DNA, 33 bp, Homo sapien
cttgtttaaaaatataacctcattcactctatg

SEQ ID NO: 804410 - DNA, 33 bp, Homo sapien
cttgtttaaaaatatagcctcattcactctatg

SEQ ID NO: 804411 - DNA, 33 bp, Homo sapien
ttggatggcctctggcgcttttgttaatttgct

SEQ ID NO: 804412 - DNA, 33 bp, Homo sapien
ttggatggcctctggctcttttgttaatttgct

SEQ ID NO: 804413 - DNA, 33 bp, Homo sapien
caacctttttgataaacgtgaatcatcagtata

SEQ ID NO: 804414 - DNA, 33 bp, Homo sapien
caacctttttgataaatgtgaatcatcagtata

SEQ ID NO: 804415 - DNA, 33 bp, Homo sapien
agttaaataagttgtcaaggcaagtaaaagaac

SEQ ID NO: 804416 - DNA, 33 bp, Homo sapien
agttaaataagttgtcgaggcaagtaaaagaac

SEQ ID NO: 804417 - DNA, 33 bp, Homo sapien
tgttatgggatttgaaaagaataatgtacagtg

SEQ ID NO: 804418 - DNA, 33 bp, Homo sapien
tgttatgggatttgaatagaataatgtacagtg

SEQ ID NO: 804419 - DNA, 33 bp, Homo sapien
ggaaacggataaagagcagtgtataacttgtcc

SEQ ID NO: 804420 - DNA, 33 bp, Homo sapien
ggaaacggataaagaggagtgtataacttgtcc

SEQ ID NO: 804421 - DNA, 33 bp, Homo sapien
tgttattcctactgggacacatgatacaacact

SEQ ID NO: 804422 - DNA, 33 bp, Homo sapien
tgttattcctactggggcacatgatacaacact

SEQ ID NO: 804423 - DNA, 33 bp, Homo sapien
tcctctgtttagtgcaagagcttcatccacttg

SEQ ID NO: 804424 - DNA, 33 bp, Homo sapien
tcctctgtttagtgcaggagcttcatccacttg

SEQ ID NO: 804425 - DNA, 33 bp, Homo sapien
ttagactatcagtgaacaccttagcagaaacct

SEQ ID NO: 804426 - DNA, 33 bp, Homo sapien
ttagactatcagtgaataccttagcagaaacct

SEQ ID NO: 804427 - DNA, 33 bp, Homo sapien
gttatactcttgacctaacttgaaagatggtcc

SEQ ID NO: 804428 - DNA, 33 bp, Homo sapien
gttatactcttgacctgacttgaaagatggtcc

SEQ ID NO: 804429 - DNA, 33 bp, Homo sapien
gacagacgtcatgcagcagttacaccatctgca

SEQ ID NO: 804430 - DNA, 33 bp, Homo sapien
gacagacgtcatgcaggagttacaccatctgca

SEQ ID NO: 804431 - DNA, 33 bp, Homo sapien
gagcagattgcgggtcaaatggaggcacttcat

SEQ ID NO: 804432 - DNA, 33 bp, Homo sapien
gagcagattgcgggtcgaatggaggcacttcat

SEQ ID NO: 804433 - DNA, 33 bp, Homo sapien
gatcaccattaagctgaatgagataaaatgaat

SEQ ID NO: 804434 - DNA, 33 bp, Homo sapien
gatcaccattaagctggatgagataaaatgaat

SEQ ID NO: 804435 - DNA, 33 bp, Homo sapien
aacatatgaaacatgaaaaagcaagagaatatg

SEQ ID NO: 804436 - DNA, 33 bp, Homo sapien
aacatatgaaacatgagaaagcaagagaatatg

SEQ ID NO: 804437 - DNA, 33 bp, Homo sapien
ttacttacacataagacaacacctgccaagatt

SEQ ID NO: 804438 - DNA, 33 bp, Homo sapien
ttacttacacataagataacacctgccaagatt

SEQ ID NO: 804439 - DNA, 33 bp, Homo sapien
gaagtccaacagactgaacgaatgcttggttgt

SEQ ID NO: 804440 - DNA, 33 bp, Homo sapien
gaagtccaacagactggacgaatgcttggttgt

SEQ ID NO: 804441 - DNA, 33 bp, Homo sapien
caacccgggttgaaaactgatctagtctaatgc

SEQ ID NO: 804442 - DNA, 33 bp, Homo sapien
caacccgggttgaaaattgatctagtctaatgc

SEQ ID NO: 804443 - DNA, 33 bp, Homo sapien
caggcctgcaccttgacaaagtaccatgcattg

SEQ ID NO: 804444 - DNA, 33 bp, Homo sapien
caggcctgcaccttgagaaagtaccatgcattg

SEQ ID NO: 804445 - DNA, 33 bp, Homo sapien
agtgactaagcaggaaactaaggccaccatgca

SEQ ID NO: 804446 - DNA, 33 bp, Homo sapien
agtgactaagcaggaagctaaggccaccatgca

SEQ ID NO: 804447 - DNA, 33 bp, Homo sapien
aagtgtcatctactgacctacaggttgaaatac

SEQ ID NO: 804448 - DNA, 33 bp, Homo sapien
aagtgtcatctactgatctacaggttgaaatac

SEQ ID NO: 804449 - DNA, 33 bp, Homo sapien
aaagtagaggaaggaaatcaagtgatattatat

SEQ ID NO: 804450 - DNA, 33 bp, Homo sapien
aaagtagaggaaggaagtcaagtgatattatat

SEQ ID NO: 804451 - DNA, 33 bp, Homo sapien
ccaggtataggaagcaatgagtacaaggttccc

SEQ ID NO: 804452 - DNA, 33 bp, Homo sapien
ccaggtataggaagcagtgagtacaaggttccc

SEQ ID NO: 804453 - DNA, 33 bp, Homo sapien
gggtagaggcctaaaacagctttgaaaacgtaa

SEQ ID NO: 804454 - DNA, 33 bp, Homo sapien
gggtagaggcctaaaatagctttgaaaacgtaa

SEQ ID NO: 804455 - DNA, 33 bp, Homo sapien
gaaaatacagtatttacacaaaatgaaaaaaga

SEQ ID NO: 804456 - DNA, 33 bp, Homo sapien
gaaaatacagtatttagacaaaatgaaaaaaga

SEQ ID NO: 804457 - DNA, 33 bp, Homo sapien
agaggctgcctcagtaagtcaggagacaaatga

SEQ ID NO: 804458 - DNA, 33 bp, Homo sapien
agaggctgcctcagtaggtcaggagacaaatga

SEQ ID NO: 804459 - DNA, 33 bp, Homo sapien
ctttgctttctgtgaactatttgctaccttgat

SEQ ID NO: 804460 - DNA, 33 bp, Homo sapien
ctttgctttctgtgaattatttgctaccttgat

SEQ ID NO: 804461 - DNA, 33 bp, Homo sapien
ttttgaagtgccttgggaatattctagtagcca

SEQ ID NO: 804462 - DNA, 33 bp, Homo sapien
ttttgaagtgccttggtaatattctagtagcca

SEQ ID NO: 804463 - DNA, 33 bp, Homo sapien
cgtatattcccagaaaagagtgaccggaacagt

SEQ ID NO: 804464 - DNA, 33 bp, Homo sapien
cgtatattcccagaaatgagtgaccggaacagt

SEQ ID NO: 804465 - DNA, 33 bp, Homo sapien
gcagcaggggcagcccaaggtctattcctatgt

SEQ ID NO: 804466 - DNA, 33 bp, Homo sapien
gcagcaggggcagcccgaggtctattcctatgt

SEQ ID NO: 804467 - DNA, 33 bp, Homo sapien
actgggatcaattttcaccaaacaagattccct

SEQ ID NO: 804468 - DNA, 33 bp, Homo sapien
actgggatcaattttcgccaaacaagattccct

SEQ ID NO: 804469 - DNA, 33 bp, Homo sapien
atgttcacctggttcaccattctatcttccaca

SEQ ID NO: 804470 - DNA, 33 bp, Homo sapien
atgttcacctggttcatcattctatcttccaca

SEQ ID NO: 804471 - DNA, 33 bp, Homo sapien
cttcacaagcaaggagaactaaatggcagccca

SEQ ID NO: 804472 - DNA, 33 bp, Homo sapien
cttcacaagcaaggaggactaaatggcagccca

SEQ ID NO: 804473 - DNA, 33 bp, Homo sapien
gtagtcatccattacccagttgttttaaaaaat

SEQ ID NO: 804474 - DNA, 33 bp, Homo sapien
gtagtcatccattacctagttgttttaaaaaat

SEQ ID NO: 804475 - DNA, 33 bp, Homo sapien
agtctgactttcaaacacgggctcttaccacta

SEQ ID NO: 804476 - DNA, 33 bp, Homo sapien
agtctgactttcaaacccgggctcttaccacta

SEQ ID NO: 804477 - DNA, 33 bp, Homo sapien
tttgaactacctcttacgttagaaactgcctac

SEQ ID NO: 804478 - DNA, 33 bp, Homo sapien
tttgaactacctcttatgttagaaactgcctac

SEQ ID NO: 804479 - DNA, 33 bp, Homo sapien
catttcagggcagttacagattggtaggaagaa

SEQ ID NO: 804480 - DNA, 33 bp, Homo sapien
catttcagggcagttatagattggtaggaagaa

SEQ ID NO: 804481 - DNA, 33 bp, Homo sapien
aagacaaaaatcaaacaaatcagctagttaact

SEQ ID NO: 804482 - DNA, 33 bp, Homo sapien
aagacaaaaatcaaacgaatcagctagttaact

SEQ ID NO: 804483 - DNA, 33 bp, Homo sapien
cagaccagacagctacaaacattccttccaacc

SEQ ID NO: 804484 - DNA, 33 bp, Homo sapien
cagaccagacagctaccaacattccttccaacc

SEQ ID NO: 804485 - DNA, 33 bp, Homo sapien
tgaacagcactttccacaaaactgggaaaatgt

SEQ ID NO: 804486 - DNA, 33 bp, Homo sapien
tgaacagcactttccataaaactgggaaaatgt

SEQ ID NO: 804487 - DNA, 33 bp, Homo sapien
ctgatgatgaattgaaaatactttgcacatcat

SEQ ID NO: 804488 - DNA, 33 bp, Homo sapien
ctgatgatgaattgaagatactttgcacatcat

SEQ ID NO: 804489 - DNA, 33 bp, Homo sapien
tcttatgtcccatggacgcctcaatagggctga

SEQ ID NO: 804490 - DNA, 33 bp, Homo sapien
tcttatgtcccatggatgcctcaatagggctga

SEQ ID NO: 804491 - DNA, 33 bp, Homo sapien
tgtaccactgaaagtcgaagagataggattcat

SEQ ID NO: 804492 - DNA, 33 bp, Homo sapien
tgtaccactgaaagtctaagagataggattcat

SEQ ID NO: 804493 - DNA, 33 bp, Homo sapien
gcccagagctatgctgcagaggtaccaggtgtg

SEQ ID NO: 804494 - DNA, 33 bp, Homo sapien
gcccagagctatgctgtagaggtaccaggtgtg

SEQ ID NO: 804495 - DNA, 33 bp, Homo sapien
agctaaaagttgcaccaaagaattatctatttc

SEQ ID NO: 804496 - DNA, 33 bp, Homo sapien
agctaaaagttgcaccgaagaattatctatttc

SEQ ID NO: 804497 - DNA, 33 bp, Homo sapien
ctgttttgagggtaccaattttttgccattttt

SEQ ID NO: 804498 - DNA, 33 bp, Homo sapien
ctgttttgagggtaccgattttttgccattttt

SEQ ID NO: 804499 - DNA, 33 bp, Homo sapien
gccttgtttgaagaaacattttgcaacgtcagg

SEQ ID NO: 804500 - DNA, 33 bp, Homo sapien
gccttgtttgaagaaatattttgcaacgtcagg

SEQ ID NO: 804501 - DNA, 33 bp, Homo sapien
tacccaagggagtccaaaaccatctaaaagacc

SEQ ID NO: 804502 - DNA, 33 bp, Homo sapien
tacccaagggagtccacaaccatctaaaagacc

SEQ ID NO: 804503 - DNA, 33 bp, Homo sapien
gaggttataacagcccagatgaactacaacatc

SEQ ID NO: 804504 - DNA, 33 bp, Homo sapien
gaggttataacagcccggatgaactacaacatc

SEQ ID NO: 804505 - DNA, 33 bp, Homo sapien
taattccttctcaagacggctatccaatcacag

SEQ ID NO: 804506 - DNA, 33 bp, Homo sapien
taattccttctcaagatggctatccaatcacag

SEQ ID NO: 804507 - DNA, 33 bp, Homo sapien
attcctgctgcaggaaccagtgttatgaggctc

SEQ ID NO: 804508 - DNA, 33 bp, Homo sapien
attcctgctgcaggaatcagtgttatgaggctc

SEQ ID NO: 804509 - DNA, 33 bp, Homo sapien
ctcctctaatgttcataaggaccttgtggcata

SEQ ID NO: 804510 - DNA, 33 bp, Homo sapien
ctcctctaatgttcatgaggaccttgtggcata

SEQ ID NO: 804511 - DNA, 33 bp, Homo sapien
agagaggaaccggaaacgctctctctaataact

SEQ ID NO: 804512 - DNA, 33 bp, Homo sapien
agagaggaaccggaaatgctctctctaataact

SEQ ID NO: 804513 - DNA, 33 bp, Homo sapien
aacccagttgaataataaggaatacccaagtat

SEQ ID NO: 804514 - DNA, 33 bp, Homo sapien
aacccagttgaataattaggaatacccaagtat

SEQ ID NO: 804515 - DNA, 33 bp, Homo sapien
taaagtatatcctagaaacaaagtcagacaaac

SEQ ID NO: 804516 - DNA, 33 bp, Homo sapien
taaagtatatcctagagacaaagtcagacaaac

SEQ ID NO: 804517 - DNA, 33 bp, Homo sapien
ccttgcatttttggtcgcattcatactcagacc

SEQ ID NO: 804518 - DNA, 33 bp, Homo sapien
ccttgcatttttggtctcattcatactcagacc

SEQ ID NO: 804519 - DNA, 33 bp, Homo sapien
tcttgctctcagttaaatagtgggaaatgaggc

SEQ ID NO: 804520 - DNA, 33 bp, Homo sapien
tcttgctctcagttaagtagtgggaaatgaggc

SEQ ID NO: 804521 - DNA, 33 bp, Homo sapien
cttcaaaggaagagacacttttataaagactca

SEQ ID NO: 804522 - DNA, 33 bp, Homo sapien
cttcaaaggaagagacgcttttataaagactca

SEQ ID NO: 804523 - DNA, 33 bp, Homo sapien
tacagttcatgaggacaatgcccagggcagggc

SEQ ID NO: 804524 - DNA, 33 bp, Homo sapien
tacagttcatgaggacgatgcccagggcagggc

SEQ ID NO: 804525 - DNA, 33 bp, Homo sapien
gaagacaggggctacaggactgagtgggtgtag

SEQ ID NO: 804526 - DNA, 33 bp, Homo sapien
gaagacaggggctacatgactgagtgggtgtag

SEQ ID NO: 804527 - DNA, 33 bp, Homo sapien
cttcaagccccaggtcccttcctcggcaccact

SEQ ID NO: 804528 - DNA, 33 bp, Homo sapien
cttcaagccccaggtctcttcctcggcaccact

SEQ ID NO: 804529 - DNA, 33 bp, Homo sapien
gtggtgggttaactgaaacaactgtatggcaat

SEQ ID NO: 804530 - DNA, 33 bp, Homo sapien
gtggtgggttaactgacacaactgtatggcaat

SEQ ID NO: 804531 - DNA, 33 bp, Homo sapien
ctgtggggaatccttcaaggttctgatgtgggc

SEQ ID NO: 804532 - DNA, 33 bp, Homo sapien
ctgtggggaatccttcgaggttctgatgtgggc

SEQ ID NO: 804533 - DNA, 33 bp, Homo sapien
ggaatgagtggctttaagatcacacagcttatt

SEQ ID NO: 804534 - DNA, 33 bp, Homo sapien
ggaatgagtggctttaggatcacacagcttatt

SEQ ID NO: 804535 - DNA, 33 bp, Homo sapien
cacaacacacattgccaaaagtcctgagaagtc

SEQ ID NO: 804536 - DNA, 33 bp, Homo sapien
cacaacacacattgccgaaagtcctgagaagtc

SEQ ID NO: 804537 - DNA, 33 bp, Homo sapien
atcttcctttcatgaacagacataacattttga

SEQ ID NO: 804538 - DNA, 33 bp, Homo sapien
atcttcctttcatgaatagacataacattttga

SEQ ID NO: 804539 - DNA, 33 bp, Homo sapien
tagttgtaattcgcagccacgatacaggctgac

SEQ ID NO: 804540 - DNA, 33 bp, Homo sapien
tagttgtaattcgcagtcacgatacaggctgac

SEQ ID NO: 804541 - DNA, 33 bp, Homo sapien
ctcaggagacttcaggaagagtaagaaaaacaa

SEQ ID NO: 804542 - DNA, 33 bp, Homo sapien
ctcaggagacttcagggagagtaagaaaaacaa

SEQ ID NO: 804543 - DNA, 33 bp, Homo sapien
gcctgatgcaattaaggacagttatttatagct

SEQ ID NO: 804544 - DNA, 33 bp, Homo sapien
gcctgatgcaattaagtacagttatttatagct

SEQ ID NO: 804545 - DNA, 33 bp, Homo sapien
ttcactgccgggagataaggatcctaaccaagt

SEQ ID NO: 804546 - DNA, 33 bp, Homo sapien
ttcactgccgggagatgaggatcctaaccaagt

SEQ ID NO: 804547 - DNA, 33 bp, Homo sapien
aggcttcatcagaagaccattaggaaaccactt

SEQ ID NO: 804548 - DNA, 33 bp, Homo sapien
aggcttcatcagaagagcattaggaaaccactt

SEQ ID NO: 804549 - DNA, 33 bp, Homo sapien
atgtggaaagccaaacaggaacctgtcaggtga

SEQ ID NO: 804550 - DNA, 33 bp, Homo sapien
atgtggaaagccaaacgggaacctgtcaggtga

SEQ ID NO: 804551 - DNA, 33 bp, Homo sapien
acttccaatcaaacaacggaactcatttagaat

SEQ ID NO: 804552 - DNA, 33 bp, Homo sapien
acttccaatcaaacaatggaactcatttagaat

SEQ ID NO: 804553 - DNA, 33 bp, Homo sapien
aaatgaatgaacacgaagacaagcagcaatatg

SEQ ID NO: 804554 - DNA, 33 bp, Homo sapien
aaatgaatgaacacgatgacaagcagcaatatg

SEQ ID NO: 804555 - DNA, 33 bp, Homo sapien
ggtccaggaggaagtgaaaaactgtgacacaca

SEQ ID NO: 804556 - DNA, 33 bp, Homo sapien
ggtccaggaggaagtggaaaactgtgacacaca

SEQ ID NO: 804557 - DNA, 33 bp, Homo sapien
ggcttattcagcctgcacttgtatacctcctgg

SEQ ID NO: 804558 - DNA, 33 bp, Homo sapien
ggcttattcagcctgcgcttgtatacctcctgg

SEQ ID NO: 804559 - DNA, 33 bp, Homo sapien
ggatcaatgtcaaggcaagtctcttttaactcc

SEQ ID NO: 804560 - DNA, 33 bp, Homo sapien
ggatcaatgtcaaggcgagtctcttttaactcc

SEQ ID NO: 804561 - DNA, 33 bp, Homo sapien
ctttccaaagtgctcacattacctctttgtatt

SEQ ID NO: 804562 - DNA, 33 bp, Homo sapien
ctttccaaagtgctcatattacctctttgtatt

SEQ ID NO: 804563 - DNA, 33 bp, Homo sapien
cttgggccaggattaaatgacatccacccactt

SEQ ID NO: 804564 - DNA, 33 bp, Homo sapien
cttgggccaggattaagtgacatccacccactt

SEQ ID NO: 804565 - DNA, 33 bp, Homo sapien
ctccatgtgtctgctgaaaagaaggcctcgggg

SEQ ID NO: 804566 - DNA, 33 bp, Homo sapien
ctccatgtgtctgctggaaagaaggcctcgggg

SEQ ID NO: 804567 - DNA, 33 bp, Homo sapien
tggctcttctagtaccaaatgccatatactagc

SEQ ID NO: 804568 - DNA, 33 bp, Homo sapien
tggctcttctagtaccgaatgccatatactagc

SEQ ID NO: 804569 - DNA, 33 bp, Homo sapien
ttcgtctgtgttataaaagaggaaacagacaca

SEQ ID NO: 804570 - DNA, 33 bp, Homo sapien
ttcgtctgtgttataatagaggaaacagacaca

SEQ ID NO: 804571 - DNA, 33 bp, Homo sapien
ccatcctggacttgtcactagggagacttgggt

SEQ ID NO: 804572 - DNA, 33 bp, Homo sapien
ccatcctggacttgtcgctagggagacttgggt

SEQ ID NO: 804573 - DNA, 33 bp, Homo sapien
tgaggtcatccgacctcacaaacttgtggcctg

SEQ ID NO: 804574 - DNA, 33 bp, Homo sapien
tgaggtcatccgaccttacaaacttgtggcctg

SEQ ID NO: 804575 - DNA, 33 bp, Homo sapien
gtgcctttgctgggtaccatctctctaggaata

SEQ ID NO: 804576 - DNA, 33 bp, Homo sapien
gtgcctttgctgggtatcatctctctaggaata

SEQ ID NO: 804577 - DNA, 33 bp, Homo sapien
cccttgtattctatcccattatctcaaccacag

SEQ ID NO: 804578 - DNA, 33 bp, Homo sapien
cccttgtattctatcctattatctcaaccacag

SEQ ID NO: 804579 - DNA, 33 bp, Homo sapien
tgactttgaaaaccacaaaattgtcctgtcaag

SEQ ID NO: 804580 - DNA, 33 bp, Homo sapien
tgactttgaaaaccacgaaattgtcctgtcaag

SEQ ID NO: 804581 - DNA, 33 bp, Homo sapien
aaagggtgaagtgaagcccatacgatctcaggg

SEQ ID NO: 804582 - DNA, 33 bp, Homo sapien
aaagggtgaagtgaagtccatacgatctcaggg

SEQ ID NO: 804583 - DNA, 33 bp, Homo sapien
cctctgcttgcttcccacttcggactcgccacg

SEQ ID NO: 804584 - DNA, 33 bp, Homo sapien
cctctgcttgcttcccgcttcggactcgccacg

SEQ ID NO: 804585 - DNA, 33 bp, Homo sapien
agtgggaatgaaacccagccagggaatgcccag

SEQ ID NO: 804586 - DNA, 33 bp, Homo sapien
agtgggaatgaaacccggccagggaatgcccag

SEQ ID NO: 804587 - DNA, 33 bp, Homo sapien
acagaaggcacacctacgtttttatttccatgg

SEQ ID NO: 804588 - DNA, 33 bp, Homo sapien
acagaaggcacacctatgtttttatttccatgg

SEQ ID NO: 804589 - DNA, 33 bp, Homo sapien
gtctcactctccaggaccttgctttccagggca

SEQ ID NO: 804590 - DNA, 33 bp, Homo sapien
gtctcactctccaggatcttgctttccagggca

SEQ ID NO: 804591 - DNA, 33 bp, Homo sapien
gcccaaggagagcaacagctgtaacaagtgcac

SEQ ID NO: 804592 - DNA, 33 bp, Homo sapien
gcccaaggagagcaacggctgtaacaagtgcac

SEQ ID NO: 804593 - DNA, 33 bp, Homo sapien
gctgagacaggggaaccgtgggcaaagaggtcc

SEQ ID NO: 804594 - DNA, 33 bp, Homo sapien
gctgagacaggggaactgtgggcaaagaggtcc

SEQ ID NO: 804595 - DNA, 33 bp, Homo sapien
gtcagagaagcaagaactctggagaagcagcct

SEQ ID NO: 804596 - DNA, 33 bp, Homo sapien
gtcagagaagcaagaattctggagaagcagcct

SEQ ID NO: 804597 - DNA, 33 bp, Homo sapien
tagtgaaactcaagaaaacagagcagtttttac

SEQ ID NO: 804598 - DNA, 33 bp, Homo sapien
tagtgaaactcaagaatacagagcagtttttac

SEQ ID NO: 804599 - DNA, 33 bp, Homo sapien
ccaccatgtgcatgaaattaaaaaattggcaag

SEQ ID NO: 804600 - DNA, 33 bp, Homo sapien
ccaccatgtgcatgaacttaaaaaattggcaag

SEQ ID NO: 804601 - DNA, 33 bp, Homo sapien
gccagctccataagataagtggagaaactgagg

SEQ ID NO: 804602 - DNA, 33 bp, Homo sapien
gccagctccataagatgagtggagaaactgagg

SEQ ID NO: 804603 - DNA, 33 bp, Homo sapien
tgaatgtaataagcacaatcatttgtggaattt

SEQ ID NO: 804604 - DNA, 33 bp, Homo sapien
tgaatgtaataagcacgatcatttgtggaattt

SEQ ID NO: 804605 - DNA, 33 bp, Homo sapien
ttacattcattatcacaatgattattccagaca

SEQ ID NO: 804606 - DNA, 33 bp, Homo sapien
ttacattcattatcacgatgattattccagaca

SEQ ID NO: 804607 - DNA, 33 bp, Homo sapien
actgtggtggccttgaagttggatgacatatat

SEQ ID NO: 804608 - DNA, 33 bp, Homo sapien
actgtggtggccttgatgttggatgacatatat

SEQ ID NO: 804609 - DNA, 33 bp, Homo sapien
atttggtggctgattgaatgaccatgtagataa

SEQ ID NO: 804610 - DNA, 33 bp, Homo sapien
atttggtggctgattggatgaccatgtagataa

SEQ ID NO: 804611 - DNA, 33 bp, Homo sapien
caaataacactgatacgagagataatgagattg

SEQ ID NO: 804612 - DNA, 33 bp, Homo sapien
caaataacactgatactagagataatgagattg

SEQ ID NO: 804613 - DNA, 33 bp, Homo sapien
ttcgttcgatttggaacgcagccagagaacaaa

SEQ ID NO: 804614 - DNA, 33 bp, Homo sapien
ttcgttcgatttggaatgcagccagagaacaaa

SEQ ID NO: 804615 - DNA, 33 bp, Homo sapien
agtttcttctccaatgcaggagttctctggctg

SEQ ID NO: 804616 - DNA, 33 bp, Homo sapien
agtttcttctccaatgtaggagttctctggctg

SEQ ID NO: 804617 - DNA, 33 bp, Homo sapien
gtactttatggaaaccatgacatacactaaaga

SEQ ID NO: 804618 - DNA, 33 bp, Homo sapien
gtactttatggaaaccgtgacatacactaaaga

SEQ ID NO: 804619 - DNA, 33 bp, Homo sapien
gttcactgatgcttgacgcttattgcaggtctg

SEQ ID NO: 804620 - DNA, 33 bp, Homo sapien
gttcactgatgcttgatgcttattgcaggtctg

SEQ ID NO: 804621 - DNA, 33 bp, Homo sapien
tttctcatgatttccacgtgttaagaataacgc

SEQ ID NO: 804622 - DNA, 33 bp, Homo sapien
tttctcatgatttccatgtgttaagaataacgc

SEQ ID NO: 804623 - DNA, 33 bp, Homo sapien
agggttgaatcgttggcaaccatttcacagaca

SEQ ID NO: 804624 - DNA, 33 bp, Homo sapien
agggttgaatcgttggtaaccatttcacagaca

SEQ ID NO: 804625 - DNA, 33 bp, Homo sapien
aggcttggggttgaacactgactcactggctta

SEQ ID NO: 804626 - DNA, 33 bp, Homo sapien
aggcttggggttgaacgctgactcactggctta

SEQ ID NO: 804627 - DNA, 33 bp, Homo sapien
atgaatctgacccgacaatgatacaaagcttca

SEQ ID NO: 804628 - DNA, 33 bp, Homo sapien
atgaatctgacccgacgatgatacaaagcttca

SEQ ID NO: 804629 - DNA, 33 bp, Homo sapien
agcacacatatatcaggatcattttacaagctc

SEQ ID NO: 804630 - DNA, 33 bp, Homo sapien
agcacacatatatcagtatcattttacaagctc

SEQ ID NO: 804631 - DNA, 33 bp, Homo sapien
cattcacaggctcccaatggcctacagaatcga

SEQ ID NO: 804632 - DNA, 33 bp, Homo sapien
cattcacaggctcccagtggcctacagaatcga

SEQ ID NO: 804633 - DNA, 33 bp, Homo sapien
tgtgcctggcattcaccatgtccacagtctagg

SEQ ID NO: 804634 - DNA, 33 bp, Homo sapien
tgtgcctggcattcacgatgtccacagtctagg

SEQ ID NO: 804635 - DNA, 33 bp, Homo sapien
gaacttcttggcactacgattagttatacgatg

SEQ ID NO: 804636 - DNA, 33 bp, Homo sapien
gaacttcttggcactatgattagttatacgatg

SEQ ID NO: 804637 - DNA, 33 bp, Homo sapien
taaatttacctaacaaattcattctgataaata

SEQ ID NO: 804638 - DNA, 33 bp, Homo sapien
taaatttacctaacaagttcattctgataaata

SEQ ID NO: 804639 - DNA, 33 bp, Homo sapien
caatctcagatccttgcaagacagccaagattc

SEQ ID NO: 804640 - DNA, 33 bp, Homo sapien
caatctcagatccttgtaagacagccaagattc

SEQ ID NO: 804641 - DNA, 33 bp, Homo sapien
gagatcactctaggaaagcagtaaatgcacgaa

SEQ ID NO: 804642 - DNA, 33 bp, Homo sapien
gagatcactctaggaaggcagtaaatgcacgaa

SEQ ID NO: 804643 - DNA, 33 bp, Homo sapien
gagcctataagccaggcattctgctagatgata

SEQ ID NO: 804644 - DNA, 33 bp, Homo sapien
gagcctataagccaggtattctgctagatgata

SEQ ID NO: 804645 - DNA, 33 bp, Homo sapien
ggagtgttgacacttacgtctaaaaccacagaa

SEQ ID NO: 804646 - DNA, 33 bp, Homo sapien
ggagtgttgacacttatgtctaaaaccacagaa

SEQ ID NO: 804647 - DNA, 33 bp, Homo sapien
attgtaatagtgaaacaggaaacaaacagttgt

SEQ ID NO: 804648 - DNA, 33 bp, Homo sapien
attgtaatagtgaaacgggaaacaaacagttgt

SEQ ID NO: 804649 - DNA, 33 bp, Homo sapien
tataacttctgactcaccaaaaacttaactact

SEQ ID NO: 804650 - DNA, 33 bp, Homo sapien
tataacttctgactcagcaaaaacttaactact

SEQ ID NO: 804651 - DNA, 33 bp, Homo sapien
cctggggcaagcttgacagaaaggaagcgtggt

SEQ ID NO: 804652 - DNA, 33 bp, Homo sapien
cctggggcaagcttgatagaaaggaagcgtggt

SEQ ID NO: 804653 - DNA, 33 bp, Homo sapien
aagatttagctgcatcactaacaattccgtgac

SEQ ID NO: 804654 - DNA, 33 bp, Homo sapien
aagatttagctgcatcgctaacaattccgtgac

SEQ ID NO: 804655 - DNA, 33 bp, Homo sapien
agccaactgcagagacagcctggctaagagata

SEQ ID NO: 804656 - DNA, 33 bp, Homo sapien
agccaactgcagagacggcctggctaagagata

SEQ ID NO: 804657 - DNA, 33 bp, Homo sapien
gcacctctggccaccaactgatgtgtcccaaca

SEQ ID NO: 804658 - DNA, 33 bp, Homo sapien
gcacctctggccaccagctgatgtgtcccaaca

SEQ ID NO: 804659 - DNA, 33 bp, Homo sapien
atgtcatttttgcagacgcgccatgctaatctc

SEQ ID NO: 804660 - DNA, 33 bp, Homo sapien
atgtcatttttgcagaggcgccatgctaatctc

SEQ ID NO: 804661 - DNA, 33 bp, Homo sapien
cagttgcttcctgcaaccatcagaataaaacct

SEQ ID NO: 804662 - DNA, 33 bp, Homo sapien
cagttgcttcctgcaagcatcagaataaaacct

SEQ ID NO: 804663 - DNA, 33 bp, Homo sapien
gaatattaataatgctcacatttggacagtgct

SEQ ID NO: 804664 - DNA, 33 bp, Homo sapien
gaatattaataatgcttacatttggacagtgct

SEQ ID NO: 804665 - DNA, 33 bp, Homo sapien
ctgtcagggtggaaaaagcggccttgcagaggt

SEQ ID NO: 804666 - DNA, 33 bp, Homo sapien
ctgtcagggtggaaaaggcggccttgcagaggt

SEQ ID NO: 804667 - DNA, 33 bp, Homo sapien
cttaccagttctgcgacaggaagcaagtgatgc

SEQ ID NO: 804668 - DNA, 33 bp, Homo sapien
cttaccagttctgcgataggaagcaagtgatgc

SEQ ID NO: 804669 - DNA, 33 bp, Homo sapien
catgtccgtgacatccactttcctgagttggct

SEQ ID NO: 804670 - DNA, 33 bp, Homo sapien
catgtccgtgacatccgctttcctgagttggct

SEQ ID NO: 804671 - DNA, 33 bp, Homo sapien
cccaccccagctcaaagagaaaggagagagaag

SEQ ID NO: 804672 - DNA, 33 bp, Homo sapien
cccaccccagctcaaatagaaaggagagagaag

SEQ ID NO: 804673 - DNA, 33 bp, Homo sapien
ggattctctaaaattccaattcaagttctgaaa

SEQ ID NO: 804674 - DNA, 33 bp, Homo sapien
ggattctctaaaattctaattcaagttctgaaa

SEQ ID NO: 804675 - DNA, 33 bp, Homo sapien
gtgtagccagggtccaagcattctatctccgtg

SEQ ID NO: 804676 - DNA, 33 bp, Homo sapien
gtgtagccagggtccaggcattctatctccgtg

SEQ ID NO: 804677 - DNA, 33 bp, Homo sapien
tgctgatgaggaacaacgggttagttctttgtg

SEQ ID NO: 804678 - DNA, 33 bp, Homo sapien
tgctgatgaggaacaaggggttagttctttgtg

SEQ ID NO: 804679 - DNA, 33 bp, Homo sapien
tgcatgcttagccccacgtcattctcagcacaa

SEQ ID NO: 804680 - DNA, 33 bp, Homo sapien
tgcatgcttagccccatgtcattctcagcacaa

SEQ ID NO: 804681 - DNA, 33 bp, Homo sapien
tccacagatacctaccaaaggcctactgtgtgc

SEQ ID NO: 804682 - DNA, 33 bp, Homo sapien
tccacagatacctaccgaaggcctactgtgtgc

SEQ ID NO: 804683 - DNA, 33 bp, Homo sapien
agttgtggagatgaggacaagattacaatatca

SEQ ID NO: 804684 - DNA, 33 bp, Homo sapien
agttgtggagatgagggcaagattacaatatca

SEQ ID NO: 804685 - DNA, 33 bp, Homo sapien
gagctgccgtgggacacgggaatgggcatctcc

SEQ ID NO: 804686 - DNA, 33 bp, Homo sapien
gagctgccgtgggacatgggaatgggcatctcc

SEQ ID NO: 804687 - DNA, 33 bp, Homo sapien
tcaccactgcactcaccagtttgggtgacagag

SEQ ID NO: 804688 - DNA, 33 bp, Homo sapien
tcaccactgcactcactagtttgggtgacagag

SEQ ID NO: 804689 - DNA, 33 bp, Homo sapien
cgccagagcgtttgaccgccacgtggggtcatt

SEQ ID NO: 804690 - DNA, 33 bp, Homo sapien
cgccagagcgtttgactgccacgtggggtcatt

SEQ ID NO: 804691 - DNA, 33 bp, Homo sapien
tcattgtcagttgcaacgaaggagttcctgagt

SEQ ID NO: 804692 - DNA, 33 bp, Homo sapien
tcattgtcagttgcaatgaaggagttcctgagt

SEQ ID NO: 804693 - DNA, 33 bp, Homo sapien
tcctttggctgagacaagtatatgtaaagggga

SEQ ID NO: 804694 - DNA, 33 bp, Homo sapien
tcctttggctgagacatgtatatgtaaagggga

SEQ ID NO: 804695 - DNA, 33 bp, Homo sapien
acctagctaccctagcacactgttggtaaatgt

SEQ ID NO: 804696 - DNA, 33 bp, Homo sapien
acctagctaccctagcgcactgttggtaaatgt

SEQ ID NO: 804697 - DNA, 33 bp, Homo sapien
acctgatgcttttaaaaatgttgccccaagtga

SEQ ID NO: 804698 - DNA, 33 bp, Homo sapien
acctgatgcttttaaacatgttgccccaagtga

SEQ ID NO: 804699 - DNA, 33 bp, Homo sapien
aataggtatgaagcagcatctcatagtggtatg

SEQ ID NO: 804700 - DNA, 33 bp, Homo sapien
aataggtatgaagcagtatctcatagtggtatg

SEQ ID NO: 804701 - DNA, 33 bp, Homo sapien
atggaatgttccaatcaagtaattgcccagact

SEQ ID NO: 804702 - DNA, 33 bp, Homo sapien
atggaatgttccaatcgagtaattgcccagact

SEQ ID NO: 804703 - DNA, 33 bp, Homo sapien
tctgcaacttctaagagaattccccaagtgtct

SEQ ID NO: 804704 - DNA, 33 bp, Homo sapien
tctgcaacttctaagataattccccaagtgtct

SEQ ID NO: 804705 - DNA, 33 bp, Homo sapien
tttgctgaaggagagaaaccaagggaccataaa

SEQ ID NO: 804706 - DNA, 33 bp, Homo sapien
tttgctgaaggagagagaccaagggaccataaa

SEQ ID NO: 804707 - DNA, 33 bp, Homo sapien
atttggcaacattcatcaaagctttacaagtat

SEQ ID NO: 804708 - DNA, 33 bp, Homo sapien
atttggcaacattcattaaagctttacaagtat

SEQ ID NO: 804709 - DNA, 33 bp, Homo sapien
actacaatttgcttcaacaatcccttattattg

SEQ ID NO: 804710 - DNA, 33 bp, Homo sapien
actacaatttgcttcaccaatcccttattattg

SEQ ID NO: 804711 - DNA, 33 bp, Homo sapien
tttgactatatacttaagagtgggactgctaca

SEQ ID NO: 804712 - DNA, 33 bp, Homo sapien
tttgactatatacttaggagtgggactgctaca

SEQ ID NO: 804713 - DNA, 33 bp, Homo sapien
tgaaatacccagcatacgcagatccatggagct

SEQ ID NO: 804714 - DNA, 33 bp, Homo sapien
tgaaatacccagcataggcagatccatggagct

SEQ ID NO: 804715 - DNA, 33 bp, Homo sapien
cttcccataggatatgcaaagagttctgttggt

SEQ ID NO: 804716 - DNA, 33 bp, Homo sapien
cttcccataggatatgtaaagagttctgttggt

SEQ ID NO: 804717 - DNA, 33 bp, Homo sapien
tttgataaatactgagcacctaccatatgacga

SEQ ID NO: 804718 - DNA, 33 bp, Homo sapien
tttgataaatactgaggacctaccatatgacga

SEQ ID NO: 804719 - DNA, 33 bp, Homo sapien
atggccagttcagtgacgtttctactggattag

SEQ ID NO: 804720 - DNA, 33 bp, Homo sapien
atggccagttcagtgatgtttctactggattag

SEQ ID NO: 804721 - DNA, 33 bp, Homo sapien
tgaaagagacctttgacatcacctaacttgtgg

SEQ ID NO: 804722 - DNA, 33 bp, Homo sapien
tgaaagagacctttgatatcacctaacttgtgg

SEQ ID NO: 804723 - DNA, 33 bp, Homo sapien
taaacaaagacgcacacggttacacttcagaag

SEQ ID NO: 804724 - DNA, 33 bp, Homo sapien
taaacaaagacgcacagggttacacttcagaag

SEQ ID NO: 804725 - DNA, 33 bp, Homo sapien
gtgagatctcacaatgaattattaggcgacagt

SEQ ID NO: 804726 - DNA, 33 bp, Homo sapien
gtgagatctcacaatggattattaggcgacagt

SEQ ID NO: 804727 - DNA, 33 bp, Homo sapien
tcagatgacttaggaacatccaaagggaggcac

SEQ ID NO: 804728 - DNA, 33 bp, Homo sapien
tcagatgacttaggaatatccaaagggaggcac

SEQ ID NO: 804729 - DNA, 33 bp, Homo sapien
atttgtcggtagtgacgaaaatattcaagtcaa

SEQ ID NO: 804730 - DNA, 33 bp, Homo sapien
atttgtcggtagtgactaaaatattcaagtcaa

SEQ ID NO: 804731 - DNA, 33 bp, Homo sapien
ccgtgttgatagaaaacccacacattgcccaac

SEQ ID NO: 804732 - DNA, 33 bp, Homo sapien
ccgtgttgatagaaaagccacacattgcccaac

SEQ ID NO: 804733 - DNA, 33 bp, Homo sapien
tggaaatggagaaggaagacacagaaaagggca

SEQ ID NO: 804734 - DNA, 33 bp, Homo sapien
tggaaatggagaaggaggacacagaaaagggca

SEQ ID NO: 804735 - DNA, 33 bp, Homo sapien
cttcacagatacacaacgaaatagtcacagatg

SEQ ID NO: 804736 - DNA, 33 bp, Homo sapien
cttcacagatacacaatgaaatagtcacagatg

SEQ ID NO: 804737 - DNA, 33 bp, Homo sapien
tctgttcagtgttctccgagaaagcaagaaagt

SEQ ID NO: 804738 - DNA, 33 bp, Homo sapien
tctgttcagtgttctctgagaaagcaagaaagt

SEQ ID NO: 804739 - DNA, 33 bp, Homo sapien
gatggtaataccaaaacgtacttcacactttct

SEQ ID NO: 804740 - DNA, 33 bp, Homo sapien
gatggtaataccaaaatgtacttcacactttct

SEQ ID NO: 804741 - DNA, 33 bp, Homo sapien
agaagcttggggagaactgaaacctacaatgtt

SEQ ID NO: 804742 - DNA, 33 bp, Homo sapien
agaagcttggggagaagtgaaacctacaatgtt

SEQ ID NO: 804743 - DNA, 33 bp, Homo sapien
acatctaacagctagcagaactgagattccaac

SEQ ID NO: 804744 - DNA, 33 bp, Homo sapien
acatctaacagctagcggaactgagattccaac

SEQ ID NO: 804745 - DNA, 33 bp, Homo sapien
cttcgaagggcttatcactagctgaaatcctct

SEQ ID NO: 804746 - DNA, 33 bp, Homo sapien
cttcgaagggcttatccctagctgaaatcctct

SEQ ID NO: 804747 - DNA, 33 bp, Homo sapien
tacccccatgacatgcccttgttttattgtctt

SEQ ID NO: 804748 - DNA, 33 bp, Homo sapien
tacccccatgacatgctcttgttttattgtctt

SEQ ID NO: 804749 - DNA, 33 bp, Homo sapien
aggaactcatcaccacagggattccaagagggc

SEQ ID NO: 804750 - DNA, 33 bp, Homo sapien
aggaactcatcaccacggggattccaagagggc

SEQ ID NO: 804751 - DNA, 33 bp, Homo sapien
ggtaccaaatgggaaacggtagtacctctcctg

SEQ ID NO: 804752 - DNA, 33 bp, Homo sapien
ggtaccaaatgggaaatggtagtacctctcctg

SEQ ID NO: 804753 - DNA, 33 bp, Homo sapien
gttgagagcagggtgaacgtacaaatggaggct

SEQ ID NO: 804754 - DNA, 33 bp, Homo sapien
gttgagagcagggtgagcgtacaaatggaggct

SEQ ID NO: 804755 - DNA, 33 bp, Homo sapien
catcacttaaacaggaagaaattggccatggtg

SEQ ID NO: 804756 - DNA, 33 bp, Homo sapien
catcacttaaacaggatgaaattggccatggtg

SEQ ID NO: 804757 - DNA, 33 bp, Homo sapien
tagaacccaaccactacacaaaatgctctcaac

SEQ ID NO: 804758 - DNA, 33 bp, Homo sapien
tagaacccaaccactagacaaaatgctctcaac

SEQ ID NO: 804759 - DNA, 33 bp, Homo sapien
gggcatagtggtaataagaggtgatatggagcc

SEQ ID NO: 804760 - DNA, 33 bp, Homo sapien
gggcatagtggtaataggaggtgatatggagcc

SEQ ID NO: 804761 - DNA, 33 bp, Homo sapien
aggttcaatgctgagacagtggagagctggaca

SEQ ID NO: 804762 - DNA, 33 bp, Homo sapien
aggttcaatgctgagatagtggagagctggaca

SEQ ID NO: 804763 - DNA, 33 bp, Homo sapien
aaacaggagcatggcaataaccatctttatacc

SEQ ID NO: 804764 - DNA, 33 bp, Homo sapien
aaacaggagcatggcagtaaccatctttatacc

SEQ ID NO: 804765 - DNA, 33 bp, Homo sapien
gcagacattactaggcaatcacaggcctctttc

SEQ ID NO: 804766 - DNA, 33 bp, Homo sapien
gcagacattactaggcgatcacaggcctctttc

SEQ ID NO: 804767 - DNA, 33 bp, Homo sapien
cacatctggacagaaccaacaaggccatttcag

SEQ ID NO: 804768 - DNA, 33 bp, Homo sapien
cacatctggacagaactaacaaggccatttcag

SEQ ID NO: 804769 - DNA, 33 bp, Homo sapien
gattattgcaagaaggacacacaagaatagtag

SEQ ID NO: 804770 - DNA, 33 bp, Homo sapien
gattattgcaagaagggcacacaagaatagtag

SEQ ID NO: 804771 - DNA, 33 bp, Homo sapien
tttgaccagtggtgcgaaaacattggtggtcat

SEQ ID NO: 804772 - DNA, 33 bp, Homo sapien
tttgaccagtggtgcgcaaacattggtggtcat

SEQ ID NO: 804773 - DNA, 33 bp, Homo sapien
actcgcccagttcttcgctctggaacgcacttc

SEQ ID NO: 804774 - DNA, 33 bp, Homo sapien
actcgcccagttcttctctctggaacgcacttc

SEQ ID NO: 804775 - DNA, 33 bp, Homo sapien
aactcatatacacgtaactattttccatataca

SEQ ID NO: 804776 - DNA, 33 bp, Homo sapien
aactcatatacacgtacctattttccatataca

SEQ ID NO: 804777 - DNA, 33 bp, Homo sapien
tttcttaagcaaaatcaatgcatttcactaact

SEQ ID NO: 804778 - DNA, 33 bp, Homo sapien
tttcttaagcaaaatcgatgcatttcactaact

SEQ ID NO: 804779 - DNA, 33 bp, Homo sapien
tttcattagaaatagggcacgtgttttgtaact

SEQ ID NO: 804780 - DNA, 33 bp, Homo sapien
tttcattagaaataggtcacgtgttttgtaact

SEQ ID NO: 804781 - DNA, 33 bp, Homo sapien
gtgcctccttcactgacaagaagttgtatttga

SEQ ID NO: 804782 - DNA, 33 bp, Homo sapien
gtgcctccttcactgataagaagttgtatttga

SEQ ID NO: 804783 - DNA, 33 bp, Homo sapien
agtaagggtgagatgaactgctctctaggcctc

SEQ ID NO: 804784 - DNA, 33 bp, Homo sapien
agtaagggtgagatgagctgctctctaggcctc

SEQ ID NO: 804785 - DNA, 33 bp, Homo sapien
gtttgaatccagttcaacttctgactaggttaa

SEQ ID NO: 804786 - DNA, 33 bp, Homo sapien
gtttgaatccagttcagcttctgactaggttaa

SEQ ID NO: 804787 - DNA, 33 bp, Homo sapien
cttgaacaatggggacaattcctttgctatatt

SEQ ID NO: 804788 - DNA, 33 bp, Homo sapien
cttgaacaatggggacgattcctttgctatatt

SEQ ID NO: 804789 - DNA, 33 bp, Homo sapien
tttgtcagggcttaacagtcatccactgaatga

SEQ ID NO: 804790 - DNA, 33 bp, Homo sapien
tttgtcagggcttaacggtcatccactgaatga

SEQ ID NO: 804791 - DNA, 33 bp, Homo sapien
gctcccatctcttgcaagcatgtgtgtccttca

SEQ ID NO: 804792 - DNA, 33 bp, Homo sapien
gctcccatctcttgcacgcatgtgtgtccttca

SEQ ID NO: 804793 - DNA, 33 bp, Homo sapien
atcatcatcgtcatggaagaaatcgtgtaacag

SEQ ID NO: 804794 - DNA, 33 bp, Homo sapien
atcatcatcgtcatggcagaaatcgtgtaacag

SEQ ID NO: 804795 - DNA, 33 bp, Homo sapien
ggtcccatacttagcaactctgggctctcaggc

SEQ ID NO: 804796 - DNA, 33 bp, Homo sapien
ggtcccatacttagcacctctgggctctcaggc

SEQ ID NO: 804797 - DNA, 33 bp, Homo sapien
tttgactctaagaatacgacagaagttgctgac

SEQ ID NO: 804798 - DNA, 33 bp, Homo sapien
tttgactctaagaatatgacagaagttgctgac

SEQ ID NO: 804799 - DNA, 33 bp, Homo sapien
gcctgcagcttctctcacaggtcagagtgattt

SEQ ID NO: 804800 - DNA, 33 bp, Homo sapien
gcctgcagcttctctcgcaggtcagagtgattt

SEQ ID NO: 804801 - DNA, 33 bp, Homo sapien
gaagccaggcaatgaccgagtctctctctgtcc

SEQ ID NO: 804802 - DNA, 33 bp, Homo sapien
gaagccaggcaatgacggagtctctctctgtcc

SEQ ID NO: 804803 - DNA, 33 bp, Homo sapien
tttacgaagtgccaggcagtttcctttcattct

SEQ ID NO: 804804 - DNA, 33 bp, Homo sapien
tttacgaagtgccaggtagtttcctttcattct

SEQ ID NO: 804805 - DNA, 33 bp, Homo sapien
aaagtggcattcaccaactattaggacaggatt

SEQ ID NO: 804806 - DNA, 33 bp, Homo sapien
aaagtggcattcaccagctattaggacaggatt

SEQ ID NO: 804807 - DNA, 33 bp, Homo sapien
ggagaaatcactctaaaaaaaccaacaggaaca

SEQ ID NO: 804808 - DNA, 33 bp, Homo sapien
ggagaaatcactctaagaaaaccaacaggaaca

SEQ ID NO: 804809 - DNA, 33 bp, Homo sapien
tctacactggaaaatacgagtctcctttggctg

SEQ ID NO: 804810 - DNA, 33 bp, Homo sapien
tctacactggaaaatatgagtctcctttggctg

SEQ ID NO: 804811 - DNA, 33 bp, Homo sapien
ccagaagttgaaaatgacaataacatgctaaaa

SEQ ID NO: 804812 - DNA, 33 bp, Homo sapien
ccagaagttgaaaatggcaataacatgctaaaa

SEQ ID NO: 804813 - DNA, 33 bp, Homo sapien
agacgaaggtgcaaacaaagtcaatgaagccga

SEQ ID NO: 804814 - DNA, 33 bp, Homo sapien
agacgaaggtgcaaacgaagtcaatgaagccga

SEQ ID NO: 804815 - DNA, 33 bp, Homo sapien
aggtgtcaggatggaacagagtaaaggacaaca

SEQ ID NO: 804816 - DNA, 33 bp, Homo sapien
aggtgtcaggatggaatagagtaaaggacaaca

SEQ ID NO: 804817 - DNA, 33 bp, Homo sapien
gaaagaagcaagagtacgccacaaaaatattgt

SEQ ID NO: 804818 - DNA, 33 bp, Homo sapien
gaaagaagcaagagtatgccacaaaaatattgt

SEQ ID NO: 804819 - DNA, 33 bp, Homo sapien
ctagaaaatgtaagtaaagtgtttccctgagat

SEQ ID NO: 804820 - DNA, 33 bp, Homo sapien
ctagaaaatgtaagtagagtgtttccctgagat

SEQ ID NO: 804821 - DNA, 33 bp, Homo sapien
tccacaaagtaggcaccaccatgatcctcactg

SEQ ID NO: 804822 - DNA, 33 bp, Homo sapien
tccacaaagtaggcactaccatgatcctcactg

SEQ ID NO: 804823 - DNA, 33 bp, Homo sapien
aaacctgacttctacaagtttctcaaaattcat

SEQ ID NO: 804824 - DNA, 33 bp, Homo sapien
aaacctgacttctacaggtttctcaaaattcat

SEQ ID NO: 804825 - DNA, 33 bp, Homo sapien
aagcaaagagtgtgaacgttaaaactgaatagg

SEQ ID NO: 804826 - DNA, 33 bp, Homo sapien
aagcaaagagtgtgaatgttaaaactgaatagg

SEQ ID NO: 804827 - DNA, 33 bp, Homo sapien
gcctcagtgaataattcaaaactgtctcgacta

SEQ ID NO: 804828 - DNA, 33 bp, Homo sapien
gcctcagtgaataattgaaaactgtctcgacta

SEQ ID NO: 804829 - DNA, 33 bp, Homo sapien
atggctttatttgagactctagaattgggcaat

SEQ ID NO: 804830 - DNA, 33 bp, Homo sapien
atggctttatttgagattctagaattgggcaat

SEQ ID NO: 804831 - DNA, 33 bp, Homo sapien
cagggttgtctgttaccggtgaggatgagaagc

SEQ ID NO: 804832 - DNA, 33 bp, Homo sapien
cagggttgtctgttactggtgaggatgagaagc

SEQ ID NO: 804833 - DNA, 33 bp, Homo sapien
accagaccaaactgtaataatcccgtcacccag

SEQ ID NO: 804834 - DNA, 33 bp, Homo sapien
accagaccaaactgtagtaatcccgtcacccag

SEQ ID NO: 804835 - DNA, 33 bp, Homo sapien
tttgtatgttggaaaaataatatatgagcacag

SEQ ID NO: 804836 - DNA, 33 bp, Homo sapien
tttgtatgttggaaaagtaatatatgagcacag

SEQ ID NO: 804837 - DNA, 33 bp, Homo sapien
gtggtatacagctttacagacaaccactacctc

SEQ ID NO: 804838 - DNA, 33 bp, Homo sapien
gtggtatacagctttatagacaaccactacctc

SEQ ID NO: 804839 - DNA, 33 bp, Homo sapien
tgctaccaataaacagaaaggaggattcttgta

SEQ ID NO: 804840 - DNA, 33 bp, Homo sapien
tgctaccaataaacaggaaggaggattcttgta

SEQ ID NO: 804841 - DNA, 33 bp, Homo sapien
tcccaagcttgctcccactcctgtgcaggccat

SEQ ID NO: 804842 - DNA, 33 bp, Homo sapien
tcccaagcttgctccctctcctgtgcaggccat

SEQ ID NO: 804843 - DNA, 33 bp, Homo sapien
attggggctcagaatagtattacttaccaagtt

SEQ ID NO: 804844 - DNA, 33 bp, Homo sapien
attggggctcagaatattattacttaccaagtt

SEQ ID NO: 804845 - DNA, 33 bp, Homo sapien
acacaatctaaaaccacaggcagtgagggtcag

SEQ ID NO: 804846 - DNA, 33 bp, Homo sapien
acacaatctaaaaccataggcagtgagggtcag

SEQ ID NO: 804847 - DNA, 33 bp, Homo sapien
atttcagtggtacaaccaggtaagaggtggtgc

SEQ ID NO: 804848 - DNA, 33 bp, Homo sapien
atttcagtggtacaactaggtaagaggtggtgc

SEQ ID NO: 804849 - DNA, 33 bp, Homo sapien
gggttgcaggcccattcaacacagatggatctg

SEQ ID NO: 804850 - DNA, 33 bp, Homo sapien
gggttgcaggcccatttaacacagatggatctg

SEQ ID NO: 804851 - DNA, 33 bp, Homo sapien
aggtggatggccattcgaagctaagtaaacagc

SEQ ID NO: 804852 - DNA, 33 bp, Homo sapien
aggtggatggccattctaagctaagtaaacagc

SEQ ID NO: 804853 - DNA, 33 bp, Homo sapien
gacccaagttctaaaaagatgtcaaaattcagg

SEQ ID NO: 804854 - DNA, 33 bp, Homo sapien
gacccaagttctaaaaggatgtcaaaattcagg

SEQ ID NO: 804855 - DNA, 33 bp, Homo sapien
gttgaggctgatgaaaatatgactcagggaaat

SEQ ID NO: 804856 - DNA, 33 bp, Homo sapien
gttgaggctgatgaaagtatgactcagggaaat

SEQ ID NO: 804857 - DNA, 33 bp, Homo sapien
ctaaccattctagaacaccaaacagtctatctg

SEQ ID NO: 804858 - DNA, 33 bp, Homo sapien
ctaaccattctagaacgccaaacagtctatctg

SEQ ID NO: 804859 - DNA, 33 bp, Homo sapien
atttgagtttgaagcacctatctagggtccaag

SEQ ID NO: 804860 - DNA, 33 bp, Homo sapien
atttgagtttgaagcatctatctagggtccaag

SEQ ID NO: 804861 - DNA, 33 bp, Homo sapien
cagcagtatagcaatgaaaaaaaaggcaggaca

SEQ ID NO: 804862 - DNA, 33 bp, Homo sapien
cagcagtatagcaatgcaaaaaaaggcaggaca

SEQ ID NO: 804863 - DNA, 33 bp, Homo sapien
acttctctgagatcataaggttagagtttaggt

SEQ ID NO: 804864 - DNA, 33 bp, Homo sapien
acttctctgagatcatcaggttagagtttaggt

SEQ ID NO: 804865 - DNA, 33 bp, Homo sapien
ggccaattgtaattaactgaaatagcaacatat

SEQ ID NO: 804866 - DNA, 33 bp, Homo sapien
ggccaattgtaattaagtgaaatagcaacatat

SEQ ID NO: 804867 - DNA, 33 bp, Homo sapien
tggcccattcctcctacgtttcatcaacttaag

SEQ ID NO: 804868 - DNA, 33 bp, Homo sapien
tggcccattcctcctatgtttcatcaacttaag

SEQ ID NO: 804869 - DNA, 33 bp, Homo sapien
aggctgcgtagaggagcacggagtgtgagtgat

SEQ ID NO: 804870 - DNA, 33 bp, Homo sapien
aggctgcgtagaggagtacggagtgtgagtgat

SEQ ID NO: 804871 - DNA, 33 bp, Homo sapien
tgaaccagcaggacttaaaaggtgagcagggca

SEQ ID NO: 804872 - DNA, 33 bp, Homo sapien
tgaaccagcaggacttcaaaggtgagcagggca

SEQ ID NO: 804873 - DNA, 33 bp, Homo sapien
tgatagttgctatgcactgagctaggcaccaca

SEQ ID NO: 804874 - DNA, 33 bp, Homo sapien
tgatagttgctatgcattgagctaggcaccaca

SEQ ID NO: 804875 - DNA, 33 bp, Homo sapien
gtgataatcacgaacccaacctaagccattttc

SEQ ID NO: 804876 - DNA, 33 bp, Homo sapien
gtgataatcacgaacctaacctaagccattttc

SEQ ID NO: 804877 - DNA, 33 bp, Homo sapien
catggtaatccttgcaaaacacattggtaaatt

SEQ ID NO: 804878 - DNA, 33 bp, Homo sapien
catggtaatccttgcagaacacattggtaaatt

SEQ ID NO: 804879 - DNA, 33 bp, Homo sapien
aaagccaggtctagctaaaatagcagctgccat

SEQ ID NO: 804880 - DNA, 33 bp, Homo sapien
aaagccaggtctagctgaaatagcagctgccat

SEQ ID NO: 804881 - DNA, 33 bp, Homo sapien
attaacaatctataccggaccctgttctccctc

SEQ ID NO: 804882 - DNA, 33 bp, Homo sapien
attaacaatctatacctgaccctgttctccctc

SEQ ID NO: 804883 - DNA, 33 bp, Homo sapien
tagagaatgccaacctaagactttgcagattag

SEQ ID NO: 804884 - DNA, 33 bp, Homo sapien
tagagaatgccaacctgagactttgcagattag

SEQ ID NO: 804885 - DNA, 33 bp, Homo sapien
cattttctgttcacttcaaaaaactcatatgga

SEQ ID NO: 804886 - DNA, 33 bp, Homo sapien
cattttctgttcactttaaaaaactcatatgga

SEQ ID NO: 804887 - DNA, 33 bp, Homo sapien
ctcacaaggacaataaactcagaacatcacctc

SEQ ID NO: 804888 - DNA, 33 bp, Homo sapien
ctcacaaggacaataacctcagaacatcacctc

SEQ ID NO: 804889 - DNA, 33 bp, Homo sapien
ctctgactggtatacaaaattaccttgtaccca

SEQ ID NO: 804890 - DNA, 33 bp, Homo sapien
ctctgactggtatacagaattaccttgtaccca

SEQ ID NO: 804891 - DNA, 33 bp, Homo sapien
tctcttagagccattacacagattaagtaagat

SEQ ID NO: 804892 - DNA, 33 bp, Homo sapien
tctcttagagccattatacagattaagtaagat

SEQ ID NO: 804893 - DNA, 33 bp, Homo sapien
atcagcaacacaacagcctaccccgtcattata

SEQ ID NO: 804894 - DNA, 33 bp, Homo sapien
atcagcaacacaacagtctaccccgtcattata

SEQ ID NO: 804895 - DNA, 33 bp, Homo sapien
ttaaaaacataagggcaaatgctaagggaccac

SEQ ID NO: 804896 - DNA, 33 bp, Homo sapien
ttaaaaacataagggcgaatgctaagggaccac

SEQ ID NO: 804897 - DNA, 33 bp, Homo sapien
caataatgactcctccaaggcaaagccagaggc

SEQ ID NO: 804898 - DNA, 33 bp, Homo sapien
caataatgactcctccgaggcaaagccagaggc

SEQ ID NO: 804899 - DNA, 33 bp, Homo sapien
tttgaatcctaacatcaccatgtactgtgtctc

SEQ ID NO: 804900 - DNA, 33 bp, Homo sapien
tttgaatcctaacatctccatgtactgtgtctc

SEQ ID NO: 804901 - DNA, 33 bp, Homo sapien
ggaacccatctggtgacgagaacactctaggct

SEQ ID NO: 804902 - DNA, 33 bp, Homo sapien
ggaacccatctggtgatgagaacactctaggct

SEQ ID NO: 804903 - DNA, 33 bp, Homo sapien
tgagaatgcattttgacaagaaggaatgactaa

SEQ ID NO: 804904 - DNA, 33 bp, Homo sapien
tgagaatgcattttgataagaaggaatgactaa

SEQ ID NO: 804905 - DNA, 33 bp, Homo sapien
acactatttagtaaaaacgaatgaagaaagcct

SEQ ID NO: 804906 - DNA, 33 bp, Homo sapien
acactatttagtaaaatcgaatgaagaaagcct

SEQ ID NO: 804907 - DNA, 33 bp, Homo sapien
ccatctgttttaaacaaatggaactactgaggc

SEQ ID NO: 804908 - DNA, 33 bp, Homo sapien
ccatctgttttaaacagatggaactactgaggc

SEQ ID NO: 804909 - DNA, 33 bp, Homo sapien
tatagctcaaacttgccaggatcattcccatgt

SEQ ID NO: 804910 - DNA, 33 bp, Homo sapien
tatagctcaaacttgctaggatcattcccatgt

SEQ ID NO: 804911 - DNA, 33 bp, Homo sapien
aggggtcagctgctgacggggagtaccatgcta

SEQ ID NO: 804912 - DNA, 33 bp, Homo sapien
aggggtcagctgctgagggggagtaccatgcta

SEQ ID NO: 804913 - DNA, 33 bp, Homo sapien
tgctaagggttgcccacaagaaatgctgatgga

SEQ ID NO: 804914 - DNA, 33 bp, Homo sapien
tgctaagggttgcccataagaaatgctgatgga

SEQ ID NO: 804915 - DNA, 33 bp, Homo sapien
tgcagtccgcccttccaaatcagagcctggaag

SEQ ID NO: 804916 - DNA, 33 bp, Homo sapien
tgcagtccgcccttccgaatcagagcctggaag

SEQ ID NO: 804917 - DNA, 33 bp, Homo sapien
aagacagcaacaaggcaaggaggggattcttca

SEQ ID NO: 804918 - DNA, 33 bp, Homo sapien
aagacagcaacaaggcgaggaggggattcttca

SEQ ID NO: 804919 - DNA, 33 bp, Homo sapien
tgctcagagaaggaacaggtggccccgagagtg

SEQ ID NO: 804920 - DNA, 33 bp, Homo sapien
tgctcagagaaggaacgggtggccccgagagtg

SEQ ID NO: 804921 - DNA, 33 bp, Homo sapien
accaactttctcatcaccccatagccagagctt

SEQ ID NO: 804922 - DNA, 33 bp, Homo sapien
accaactttctcatcatcccatagccagagctt

SEQ ID NO: 804923 - DNA, 33 bp, Homo sapien
ggtggtctagtttaagaaccagaaacttggact

SEQ ID NO: 804924 - DNA, 33 bp, Homo sapien
ggtggtctagtttaagcaccagaaacttggact

SEQ ID NO: 804925 - DNA, 33 bp, Homo sapien
tgttctccaaaacatcactagaactagtagtat

SEQ ID NO: 804926 - DNA, 33 bp, Homo sapien
tgttctccaaaacatcgctagaactagtagtat

SEQ ID NO: 804927 - DNA, 33 bp, Homo sapien
aggccactgcctttgaaagtccctggatggcct

SEQ ID NO: 804928 - DNA, 33 bp, Homo sapien
aggccactgcctttgagagtccctggatggcct

SEQ ID NO: 804929 - DNA, 33 bp, Homo sapien
ggcccataagaggcacagacaaaggaatgcgaa

SEQ ID NO: 804930 - DNA, 33 bp, Homo sapien
ggcccataagaggcacggacaaaggaatgcgaa

SEQ ID NO: 804931 - DNA, 33 bp, Homo sapien
gggcagaggtcaggaaactagtggcccacacaa

SEQ ID NO: 804932 - DNA, 33 bp, Homo sapien
gggcagaggtcaggaagctagtggcccacacaa

SEQ ID NO: 804933 - DNA, 33 bp, Homo sapien
gcatttctgtcttcaactcttctctgtcaccca

SEQ ID NO: 804934 - DNA, 33 bp, Homo sapien
gcatttctgtcttcaattcttctctgtcaccca

SEQ ID NO: 804935 - DNA, 33 bp, Homo sapien
gaggctaccaaaatgacagttagaacccagaga

SEQ ID NO: 804936 - DNA, 33 bp, Homo sapien
gaggctaccaaaatgatagttagaacccagaga

SEQ ID NO: 804937 - DNA, 33 bp, Homo sapien
atccagccgagtaccccacctggtgtcactttc

SEQ ID NO: 804938 - DNA, 33 bp, Homo sapien
atccagccgagtaccctacctggtgtcactttc

SEQ ID NO: 804939 - DNA, 33 bp, Homo sapien
ggatcatgaggtgctgcaatcctgattcaggaa

SEQ ID NO: 804940 - DNA, 33 bp, Homo sapien
ggatcatgaggtgctgtaatcctgattcaggaa

SEQ ID NO: 804941 - DNA, 33 bp, Homo sapien
tcatatccatggcttacagacttgtgtttgtac

SEQ ID NO: 804942 - DNA, 33 bp, Homo sapien
tcatatccatggcttatagacttgtgtttgtac

SEQ ID NO: 804943 - DNA, 33 bp, Homo sapien
atggattttgcaatccacgttgtcagttctggg

SEQ ID NO: 804944 - DNA, 33 bp, Homo sapien
atggattttgcaatccgcgttgtcagttctggg

SEQ ID NO: 804945 - DNA, 33 bp, Homo sapien
cgccagtcagatcccaaaattcccagaaggaat

SEQ ID NO: 804946 - DNA, 33 bp, Homo sapien
cgccagtcagatcccagaattcccagaaggaat

SEQ ID NO: 804947 - DNA, 33 bp, Homo sapien
atgcgatagaagttaactgaggacctactatgt

SEQ ID NO: 804948 - DNA, 33 bp, Homo sapien
atgcgatagaagttaattgaggacctactatgt

SEQ ID NO: 804949 - DNA, 33 bp, Homo sapien
ttcacagaggaggtgacgatgaaactaagatct

SEQ ID NO: 804950 - DNA, 33 bp, Homo sapien
ttcacagaggaggtgatgatgaaactaagatct

SEQ ID NO: 804951 - DNA, 33 bp, Homo sapien
tggacttgcttccttaccttggaaaagggggct

SEQ ID NO: 804952 - DNA, 33 bp, Homo sapien
tggacttgcttccttatcttggaaaagggggct

SEQ ID NO: 804953 - DNA, 33 bp, Homo sapien
gcccacagactgcttacgtcttctagcaaatca

SEQ ID NO: 804954 - DNA, 33 bp, Homo sapien
gcccacagactgcttatgtcttctagcaaatca

SEQ ID NO: 804955 - DNA, 33 bp, Homo sapien
tgcctcatccctgctcactgtccctgtggccct

SEQ ID NO: 804956 - DNA, 33 bp, Homo sapien
tgcctcatccctgctcgctgtccctgtggccct

SEQ ID NO: 804957 - DNA, 33 bp, Homo sapien
gattatgactttctgacacagatcacggcttaa

SEQ ID NO: 804958 - DNA, 33 bp, Homo sapien
gattatgactttctgagacagatcacggcttaa

SEQ ID NO: 804959 - DNA, 33 bp, Homo sapien
cctccgttccgggcaccatattttaagaaagat

SEQ ID NO: 804960 - DNA, 33 bp, Homo sapien
cctccgttccgggcactatattttaagaaagat

SEQ ID NO: 804961 - DNA, 33 bp, Homo sapien
ttatggtcaataaaacaaagccttgtcactgca

SEQ ID NO: 804962 - DNA, 33 bp, Homo sapien
ttatggtcaataaaacgaagccttgtcactgca

SEQ ID NO: 804963 - DNA, 33 bp, Homo sapien
aaaacatttcaagacacggagcctatctgggag

SEQ ID NO: 804964 - DNA, 33 bp, Homo sapien
aaaacatttcaagacatggagcctatctgggag

SEQ ID NO: 804965 - DNA, 33 bp, Homo sapien
cttgaagtggacaaataaatgaactatgtacta

SEQ ID NO: 804966 - DNA, 33 bp, Homo sapien
cttgaagtggacaaatgaatgaactatgtacta

SEQ ID NO: 804967 - DNA, 33 bp, Homo sapien
gttcttatcaagcttaaggtcatacagctaggg

SEQ ID NO: 804968 - DNA, 33 bp, Homo sapien
gttcttatcaagcttacggtcatacagctaggg

SEQ ID NO: 804969 - DNA, 33 bp, Homo sapien
ggaagtaaaggggttacgcaggcttactgccaa

SEQ ID NO: 804970 - DNA, 33 bp, Homo sapien
ggaagtaaaggggttatgcaggcttactgccaa

SEQ ID NO: 804971 - DNA, 33 bp, Homo sapien
cccccaacatttacaccgtgggacatgggcaag

SEQ ID NO: 804972 - DNA, 33 bp, Homo sapien
cccccaacatttacacggtgggacatgggcaag

SEQ ID NO: 804973 - DNA, 33 bp, Homo sapien
gaggctgaaaggaaggcccactcaccctggccc

SEQ ID NO: 804974 - DNA, 33 bp, Homo sapien
gaggctgaaaggaaggtccactcaccctggccc

SEQ ID NO: 804975 - DNA, 33 bp, Homo sapien
caaccaaagcacaaaacgtgacaatcttgcaca

SEQ ID NO: 804976 - DNA, 33 bp, Homo sapien
caaccaaagcacaaaatgtgacaatcttgcaca

SEQ ID NO: 804977 - DNA, 33 bp, Homo sapien
ttcccacggctcttctcaccatacacccgtgtc

SEQ ID NO: 804978 - DNA, 33 bp, Homo sapien
ttcccacggctcttcttaccatacacccgtgtc

SEQ ID NO: 804979 - DNA, 33 bp, Homo sapien
tggactggggaccatcactggaggagaaccgga

SEQ ID NO: 804980 - DNA, 33 bp, Homo sapien
tggactggggaccatcgctggaggagaaccgga

SEQ ID NO: 804981 - DNA, 33 bp, Homo sapien
gggcccactgaagaccaaacactcaggtaacca

SEQ ID NO: 804982 - DNA, 33 bp, Homo sapien
gggcccactgaagaccgaacactcaggtaacca

SEQ ID NO: 804983 - DNA, 33 bp, Homo sapien
ttatctgtacaagggaaagctggctaatgagat

SEQ ID NO: 804984 - DNA, 33 bp, Homo sapien
ttatctgtacaagggagagctggctaatgagat

SEQ ID NO: 804985 - DNA, 33 bp, Homo sapien
ggcatgggttgtgctaaatctttcaggaaacat

SEQ ID NO: 804986 - DNA, 33 bp, Homo sapien
ggcatgggttgtgctagatctttcaggaaacat

SEQ ID NO: 804987 - DNA, 33 bp, Homo sapien
tttcaattttgccatcactgagcctttacagtt

SEQ ID NO: 804988 - DNA, 33 bp, Homo sapien
tttcaattttgccatcgctgagcctttacagtt

SEQ ID NO: 804989 - DNA, 33 bp, Homo sapien
cagaggacagactgtaagatggtggctaccatg

SEQ ID NO: 804990 - DNA, 33 bp, Homo sapien
cagaggacagactgtaggatggtggctaccatg

SEQ ID NO: 804991 - DNA, 33 bp, Homo sapien
ctacctctccttgcataagaattcaattgttat

SEQ ID NO: 804992 - DNA, 33 bp, Homo sapien
ctacctctccttgcatgagaattcaattgttat

SEQ ID NO: 804993 - DNA, 33 bp, Homo sapien
agcgatcaggatggggcaatttgcaaagtcttg

SEQ ID NO: 804994 - DNA, 33 bp, Homo sapien
agcgatcaggatggggtaatttgcaaagtcttg

SEQ ID NO: 804995 - DNA, 33 bp, Homo sapien
cttagtggtgaatgtacatttgaagggaagaag

SEQ ID NO: 804996 - DNA, 33 bp, Homo sapien
cttagtggtgaatgtatatttgaagggaagaag

SEQ ID NO: 804997 - DNA, 33 bp, Homo sapien
ggctttaactatttgcagagtcatggactgctt

SEQ ID NO: 804998 - DNA, 33 bp, Homo sapien
ggctttaactatttgcggagtcatggactgctt

SEQ ID NO: 804999 - DNA, 33 bp, Homo sapien
tggaacccagaatagacaggttagaatgcctgg

SEQ ID NO: 805000 - DNA, 33 bp, Homo sapien
tggaacccagaatagagaggttagaatgcctgg

SEQ ID NO: 805001 - DNA, 33 bp, Homo sapien
gactgctgattcatagccattgctttttccaat

SEQ ID NO: 805002 - DNA, 33 bp, Homo sapien
gactgctgattcatagtcattgctttttccaat

SEQ ID NO: 805003 - DNA, 33 bp, Homo sapien
ctcgcctagaacccaagaattccctgattagcc

SEQ ID NO: 805004 - DNA, 33 bp, Homo sapien
ctcgcctagaacccaataattccctgattagcc

SEQ ID NO: 805005 - DNA, 33 bp, Homo sapien
gatggtccccaggaacaaatgacaggatgcagt

SEQ ID NO: 805006 - DNA, 33 bp, Homo sapien
gatggtccccaggaacgaatgacaggatgcagt

SEQ ID NO: 805007 - DNA, 33 bp, Homo sapien
ctgctctctacagggaaccccaagcgctgtggg

SEQ ID NO: 805008 - DNA, 33 bp, Homo sapien
ctgctctctacagggacccccaagcgctgtggg

SEQ ID NO: 805009 - DNA, 33 bp, Homo sapien
tttctatgttctcagacccagatgtcacctgtc

SEQ ID NO: 805010 - DNA, 33 bp, Homo sapien
tttctatgttctcagatccagatgtcacctgtc

SEQ ID NO: 805011 - DNA, 33 bp, Homo sapien
ctttagcaccagcaggaacttcaaaagtgattg

SEQ ID NO: 805012 - DNA, 33 bp, Homo sapien
ctttagcaccagcagggacttcaaaagtgattg

SEQ ID NO: 805013 - DNA, 33 bp, Homo sapien
tagccacctttcaaaagctagtggtaccaaact

SEQ ID NO: 805014 - DNA, 33 bp, Homo sapien
tagccacctttcaaaatctagtggtaccaaact

SEQ ID NO: 805015 - DNA, 33 bp, Homo sapien
tcagggtacagactgccgaccagaagactaagg

SEQ ID NO: 805016 - DNA, 33 bp, Homo sapien
tcagggtacagactgctgaccagaagactaagg

SEQ ID NO: 805017 - DNA, 33 bp, Homo sapien
tccttgttctgccacacggtaaaggaacctaaa

SEQ ID NO: 805018 - DNA, 33 bp, Homo sapien
tccttgttctgccacatggtaaaggaacctaaa

SEQ ID NO: 805019 - DNA, 33 bp, Homo sapien
gtggcctgagaggtgagagtttaggttccttta

SEQ ID NO: 805020 - DNA, 33 bp, Homo sapien
gtggcctgagaggtgatagtttaggttccttta

SEQ ID NO: 805021 - DNA, 33 bp, Homo sapien
aagggacagagccccactggaaccctggactgt

SEQ ID NO: 805022 - DNA, 33 bp, Homo sapien
aagggacagagccccattggaaccctggactgt

SEQ ID NO: 805023 - DNA, 33 bp, Homo sapien
tgtccgcactgtccgacgactcctcgctgctct

SEQ ID NO: 805024 - DNA, 33 bp, Homo sapien
tgtccgcactgtccgatgactcctcgctgctct

SEQ ID NO: 805025 - DNA, 33 bp, Homo sapien
ttttctgtttaggaccaggagtcttcttgaatc

SEQ ID NO: 805026 - DNA, 33 bp, Homo sapien
ttttctgtttaggaccgggagtcttcttgaatc

SEQ ID NO: 805027 - DNA, 33 bp, Homo sapien
gcctttaactgaactccatgagacaatcaggga

SEQ ID NO: 805028 - DNA, 33 bp, Homo sapien
gcctttaactgaactctatgagacaatcaggga

SEQ ID NO: 805029 - DNA, 33 bp, Homo sapien
ttaatgcaaattgtaaagcacacacaatacata

SEQ ID NO: 805030 - DNA, 33 bp, Homo sapien
ttaatgcaaattgtaaggcacacacaatacata

SEQ ID NO: 805031 - DNA, 33 bp, Homo sapien
ttatacttttgttagaaagtggtaagtgctatg

SEQ ID NO: 805032 - DNA, 33 bp, Homo sapien
ttatacttttgttagagagtggtaagtgctatg

SEQ ID NO: 805033 - DNA, 33 bp, Homo sapien
tgcctcccctcgtcagcatcattggctctccct

SEQ ID NO: 805034 - DNA, 33 bp, Homo sapien
tgcctcccctcgtcagtatcattggctctccct

SEQ ID NO: 805035 - DNA, 33 bp, Homo sapien
acagcatcctctccaccgggtctcactaaccct

SEQ ID NO: 805036 - DNA, 33 bp, Homo sapien
acagcatcctctccactgggtctcactaaccct

SEQ ID NO: 805037 - DNA, 33 bp, Homo sapien
gtggaacaatctccaaaatctgccaagtgaaaa

SEQ ID NO: 805038 - DNA, 33 bp, Homo sapien
gtggaacaatctccaagatctgccaagtgaaaa

SEQ ID NO: 805039 - DNA, 33 bp, Homo sapien
gtatcaactgtggccacatggcaaagtaccatg

SEQ ID NO: 805040 - DNA, 33 bp, Homo sapien
gtatcaactgtggccatatggcaaagtaccatg

SEQ ID NO: 805041 - DNA, 33 bp, Homo sapien
tcagtagaggtagaaagaagtcgctaatatttg

SEQ ID NO: 805042 - DNA, 33 bp, Homo sapien
tcagtagaggtagaaataagtcgctaatatttg

SEQ ID NO: 805043 - DNA, 33 bp, Homo sapien
ataggcttagcttatacacactcagattcttac

SEQ ID NO: 805044 - DNA, 33 bp, Homo sapien
ataggcttagcttatatacactcagattcttac

SEQ ID NO: 805045 - DNA, 33 bp, Homo sapien
ctgggtgggaggcctcaaaaagctccagcccat

SEQ ID NO: 805046 - DNA, 33 bp, Homo sapien
ctgggtgggaggcctccaaaagctccagcccat

SEQ ID NO: 805047 - DNA, 33 bp, Homo sapien
ataataacgataattcacatagattgggctcac

SEQ ID NO: 805048 - DNA, 33 bp, Homo sapien
ataataacgataattcgcatagattgggctcac

SEQ ID NO: 805049 - DNA, 33 bp, Homo sapien
aaccctgtccttaagccatgaaccactttctct

SEQ ID NO: 805050 - DNA, 33 bp, Homo sapien
aaccctgtccttaagctatgaaccactttctct

SEQ ID NO: 805051 - DNA, 33 bp, Homo sapien
gccaagccaatgaagacccttggctagggaaag

SEQ ID NO: 805052 - DNA, 33 bp, Homo sapien
gccaagccaatgaagatccttggctagggaaag

SEQ ID NO: 805053 - DNA, 33 bp, Homo sapien
tactcctccatgctcacgactttccagttcaac

SEQ ID NO: 805054 - DNA, 33 bp, Homo sapien
tactcctccatgctcatgactttccagttcaac

SEQ ID NO: 805055 - DNA, 33 bp, Homo sapien
gccacgccctctcgaacgtcctctccttaacac

SEQ ID NO: 805056 - DNA, 33 bp, Homo sapien
gccacgccctctcgaatgtcctctccttaacac

SEQ ID NO: 805057 - DNA, 33 bp, Homo sapien
atcctggcctccgagaacttggccaccggaggc

SEQ ID NO: 805058 - DNA, 33 bp, Homo sapien
atcctggcctccgagaccttggccaccggaggc

SEQ ID NO: 805059 - DNA, 33 bp, Homo sapien
cacaggaacaaggacaaattgtaccatattcag

SEQ ID NO: 805060 - DNA, 33 bp, Homo sapien
cacaggaacaaggacacattgtaccatattcag

SEQ ID NO: 805061 - DNA, 33 bp, Homo sapien
ttcaccactgatggcaatgaccgggcaggcacc

SEQ ID NO: 805062 - DNA, 33 bp, Homo sapien
ttcaccactgatggcagtgaccgggcaggcacc

SEQ ID NO: 805063 - DNA, 33 bp, Homo sapien
agtgatttgactggaaaaccgtccagtcctcgc

SEQ ID NO: 805064 - DNA, 33 bp, Homo sapien
agtgatttgactggaacaccgtccagtcctcgc

SEQ ID NO: 805065 - DNA, 33 bp, Homo sapien
cgtctgagtccatcccacacctgggcgcagacg

SEQ ID NO: 805066 - DNA, 33 bp, Homo sapien
cgtctgagtccatcccgcacctgggcgcagacg

SEQ ID NO: 805067 - DNA, 33 bp, Homo sapien
actggaagaacacctcaagtagaacacagagca

SEQ ID NO: 805068 - DNA, 33 bp, Homo sapien
actggaagaacacctcgagtagaacacagagca

SEQ ID NO: 805069 - DNA, 33 bp, Homo sapien
accaaaaatacaaataaaggcaccctctttcac

SEQ ID NO: 805070 - DNA, 33 bp, Homo sapien
accaaaaatacaaatagaggcaccctctttcac

SEQ ID NO: 805071 - DNA, 33 bp, Homo sapien
gtacgtaaaactgcctcacatctggtaagtgat

SEQ ID NO: 805072 - DNA, 33 bp, Homo sapien
gtacgtaaaactgcctgacatctggtaagtgat

SEQ ID NO: 805073 - DNA, 33 bp, Homo sapien
tgtttgacacacagaacgaactacgcgcacaca

SEQ ID NO: 805074 - DNA, 33 bp, Homo sapien
tgtttgacacacagaatgaactacgcgcacaca

SEQ ID NO: 805075 - DNA, 33 bp, Homo sapien
gtgacagaggatcaagcaataatcagcattctt

SEQ ID NO: 805076 - DNA, 33 bp, Homo sapien
gtgacagaggatcaaggaataatcagcattctt

SEQ ID NO: 805077 - DNA, 33 bp, Homo sapien
tcctgcactcctggaccaacctccggctgcaga

SEQ ID NO: 805078 - DNA, 33 bp, Homo sapien
tcctgcactcctggacgaacctccggctgcaga

SEQ ID NO: 805079 - DNA, 33 bp, Homo sapien
ggagggcattctcaacacacttgcaccaggttc

SEQ ID NO: 805080 - DNA, 33 bp, Homo sapien
ggagggcattctcaacgcacttgcaccaggttc

SEQ ID NO: 805081 - DNA, 33 bp, Homo sapien
agcgaggccagtcttcaatgtccactaattcac

SEQ ID NO: 805082 - DNA, 33 bp, Homo sapien
agcgaggccagtcttcgatgtccactaattcac

SEQ ID NO: 805083 - DNA, 33 bp, Homo sapien
tttcactgggttataaatggaagatttcccaga

SEQ ID NO: 805084 - DNA, 33 bp, Homo sapien
tttcactgggttataagtggaagatttcccaga

SEQ ID NO: 805085 - DNA, 33 bp, Homo sapien
tgtaagttgaagagaacgaaaggccgaccttcc

SEQ ID NO: 805086 - DNA, 33 bp, Homo sapien
tgtaagttgaagagaatgaaaggccgaccttcc

SEQ ID NO: 805087 - DNA, 33 bp, Homo sapien
aaggcgataattgcaaatgttattcttatcgca

SEQ ID NO: 805088 - DNA, 33 bp, Homo sapien
aaggcgataattgcaattgttattcttatcgca

SEQ ID NO: 805089 - DNA, 33 bp, Homo sapien
ataattcacatgtgtaagaaggtgcaggtacca

SEQ ID NO: 805090 - DNA, 33 bp, Homo sapien
ataattcacatgtgtacgaaggtgcaggtacca

SEQ ID NO: 805091 - DNA, 33 bp, Homo sapien
atggatgcatggatgaatatttggatgtatgga

SEQ ID NO: 805092 - DNA, 33 bp, Homo sapien
atggatgcatggatgagtatttggatgtatgga

SEQ ID NO: 805093 - DNA, 33 bp, Homo sapien
tatcttcaggcagggaataagaatgaggtttgt

SEQ ID NO: 805094 - DNA, 33 bp, Homo sapien
tatcttcaggcagggagtaagaatgaggtttgt

SEQ ID NO: 805095 - DNA, 33 bp, Homo sapien
aagggaagatagtgtacgcatttcacacccacg

SEQ ID NO: 805096 - DNA, 33 bp, Homo sapien
aagggaagatagtgtatgcatttcacacccacg

SEQ ID NO: 805097 - DNA, 33 bp, Homo sapien
ctagaaggggaacctagatggtaggactggcac

SEQ ID NO: 805098 - DNA, 33 bp, Homo sapien
ctagaaggggaacctatatggtaggactggcac

SEQ ID NO: 805099 - DNA, 33 bp, Homo sapien
ctgtcagggcctgttgcaacccagacaggattt

SEQ ID NO: 805100 - DNA, 33 bp, Homo sapien
ctgtcagggcctgttggaacccagacaggattt

SEQ ID NO: 805101 - DNA, 33 bp, Homo sapien
ttcattctttcgctcaacaactacttataccat

SEQ ID NO: 805102 - DNA, 33 bp, Homo sapien
ttcattctttcgctcagcaactacttataccat

SEQ ID NO: 805103 - DNA, 33 bp, Homo sapien
tctgccaaagagggcacgtgagaaggcagtgag

SEQ ID NO: 805104 - DNA, 33 bp, Homo sapien
tctgccaaagagggcatgtgagaaggcagtgag

SEQ ID NO: 805105 - DNA, 33 bp, Homo sapien
tcagccactactaacacgctgagtgacctctag

SEQ ID NO: 805106 - DNA, 33 bp, Homo sapien
tcagccactactaacatgctgagtgacctctag

SEQ ID NO: 805107 - DNA, 33 bp, Homo sapien
gtcttctggaattataagagtaaagtgttgtct

SEQ ID NO: 805108 - DNA, 33 bp, Homo sapien
gtcttctggaattataggagtaaagtgttgtct

SEQ ID NO: 805109 - DNA, 33 bp, Homo sapien
aaaagtatgaacttcacaggattgtttatagga

SEQ ID NO: 805110 - DNA, 33 bp, Homo sapien
aaaagtatgaacttcataggattgtttatagga

SEQ ID NO: 805111 - DNA, 33 bp, Homo sapien
aggagaagggccattaaagaaaacatttttttg

SEQ ID NO: 805112 - DNA, 33 bp, Homo sapien
aggagaagggccattagagaaaacatttttttg

SEQ ID NO: 805113 - DNA, 33 bp, Homo sapien
taaacatgaaatctataagaatgacaagagcca

SEQ ID NO: 805114 - DNA, 33 bp, Homo sapien
taaacatgaaatctatgagaatgacaagagcca

SEQ ID NO: 805115 - DNA, 33 bp, Homo sapien
gggtttgggacttaccagggtgatgttagatct

SEQ ID NO: 805116 - DNA, 33 bp, Homo sapien
gggtttgggacttaccggggtgatgttagatct

SEQ ID NO: 805117 - DNA, 33 bp, Homo sapien
agagaaggggccacccactgggcacctaacagg

SEQ ID NO: 805118 - DNA, 33 bp, Homo sapien
agagaaggggccacccgctgggcacctaacagg

SEQ ID NO: 805119 - DNA, 33 bp, Homo sapien
cccacctcttaacactcaagctcatcctcttac

SEQ ID NO: 805120 - DNA, 33 bp, Homo sapien
cccacctcttaacactgaagctcatcctcttac

SEQ ID NO: 805121 - DNA, 33 bp, Homo sapien
ttcttcagaagccaaactaacttgcagaataat

SEQ ID NO: 805122 - DNA, 33 bp, Homo sapien
ttcttcagaagccaaattaacttgcagaataat

SEQ ID NO: 805123 - DNA, 33 bp, Homo sapien
taaggatcacaatgtcacagatgaaacttaaat

SEQ ID NO: 805124 - DNA, 33 bp, Homo sapien
taaggatcacaatgtcgcagatgaaacttaaat

SEQ ID NO: 805125 - DNA, 33 bp, Homo sapien
agatcagatcaagagacagtacagagtttctca

SEQ ID NO: 805126 - DNA, 33 bp, Homo sapien
agatcagatcaagagatagtacagagtttctca

SEQ ID NO: 805127 - DNA, 33 bp, Homo sapien
cgccccattgaagaaaatgaccagggaacagaa

SEQ ID NO: 805128 - DNA, 33 bp, Homo sapien
cgccccattgaagaaagtgaccagggaacagaa

SEQ ID NO: 805129 - DNA, 33 bp, Homo sapien
tatgtttagacaaaaacagtaagtgacagaccc

SEQ ID NO: 805130 - DNA, 33 bp, Homo sapien
tatgtttagacaaaaatagtaagtgacagaccc

SEQ ID NO: 805131 - DNA, 33 bp, Homo sapien
ttaatggtgatttataacaaagcaaggataatg

SEQ ID NO: 805132 - DNA, 33 bp, Homo sapien
ttaatggtgatttatagcaaagcaaggataatg

SEQ ID NO: 805133 - DNA, 33 bp, Homo sapien
tttgcttttgaaaaaacatagctgctggaagca

SEQ ID NO: 805134 - DNA, 33 bp, Homo sapien
tttgcttttgaaaaaatatagctgctggaagca

SEQ ID NO: 805135 - DNA, 33 bp, Homo sapien
caagtgttggctagaacataggagaatagttct

SEQ ID NO: 805136 - DNA, 33 bp, Homo sapien
caagtgttggctagaatataggagaatagttct

SEQ ID NO: 805137 - DNA, 33 bp, Homo sapien
atttgcatttacatgactactagggaagtcgaa

SEQ ID NO: 805138 - DNA, 33 bp, Homo sapien
atttgcatttacatgattactagggaagtcgaa

SEQ ID NO: 805139 - DNA, 33 bp, Homo sapien
tgttcaccaagcaataacctggcactaatttag

SEQ ID NO: 805140 - DNA, 33 bp, Homo sapien
tgttcaccaagcaatagcctggcactaatttag

SEQ ID NO: 805141 - DNA, 33 bp, Homo sapien
cacccacaatcgttcacactgggactacataga

SEQ ID NO: 805142 - DNA, 33 bp, Homo sapien
cacccacaatcgttcatactgggactacataga

SEQ ID NO: 805143 - DNA, 33 bp, Homo sapien
aatcatcattatcacacgccagtttcttaaggg

SEQ ID NO: 805144 - DNA, 33 bp, Homo sapien
aatcatcattatcacatgccagtttcttaaggg

SEQ ID NO: 805145 - DNA, 33 bp, Homo sapien
atcagaggaaacagcagggagtaagttctaagt

SEQ ID NO: 805146 - DNA, 33 bp, Homo sapien
atcagaggaaacagcatggagtaagttctaagt

SEQ ID NO: 805147 - DNA, 33 bp, Homo sapien
agggtttggaaagagcaatactgccttccccag

SEQ ID NO: 805148 - DNA, 33 bp, Homo sapien
agggtttggaaagagccatactgccttccccag

SEQ ID NO: 805149 - DNA, 33 bp, Homo sapien
agctaagcaaaccataccttcagcatctttaat

SEQ ID NO: 805150 - DNA, 33 bp, Homo sapien
agctaagcaaaccatatcttcagcatctttaat

SEQ ID NO: 805151 - DNA, 33 bp, Homo sapien
atcacagaattatcgaccttacatttgaaagga

SEQ ID NO: 805152 - DNA, 33 bp, Homo sapien
atcacagaattatcgatcttacatttgaaagga

SEQ ID NO: 805153 - DNA, 33 bp, Homo sapien
tgcagaggagaagaacagattttgaatatcaga

SEQ ID NO: 805154 - DNA, 33 bp, Homo sapien
tgcagaggagaagaaccgattttgaatatcaga

SEQ ID NO: 805155 - DNA, 33 bp, Homo sapien
acctttccaagagtagaattgtaatacagaggt

SEQ ID NO: 805156 - DNA, 33 bp, Homo sapien
acctttccaagagtagcattgtaatacagaggt

SEQ ID NO: 805157 - DNA, 33 bp, Homo sapien
gaaatcgtgttttctaaagtttgaagtagaagt

SEQ ID NO: 805158 - DNA, 33 bp, Homo sapien
gaaatcgtgttttctatagtttgaagtagaagt

SEQ ID NO: 805159 - DNA, 33 bp, Homo sapien
aacggactaatacaccactttattgttacatag

SEQ ID NO: 805160 - DNA, 33 bp, Homo sapien
aacggactaatacaccgctttattgttacatag

SEQ ID NO: 805161 - DNA, 33 bp, Homo sapien
ctactaatatacatccaattttcaagcacactc

SEQ ID NO: 805162 - DNA, 33 bp, Homo sapien
ctactaatatacatccgattttcaagcacactc

SEQ ID NO: 805163 - DNA, 33 bp, Homo sapien
cttttactgccatacagatttttttaaattacg

SEQ ID NO: 805164 - DNA, 33 bp, Homo sapien
cttttactgccatacatatttttttaaattacg

SEQ ID NO: 805165 - DNA, 33 bp, Homo sapien
agtgcatcaaatgttcacaatttagcataaata

SEQ ID NO: 805166 - DNA, 33 bp, Homo sapien
agtgcatcaaatgttcgcaatttagcataaata

SEQ ID NO: 805167 - DNA, 33 bp, Homo sapien
tattccatgcaaacaggaactgaaagagagcag

SEQ ID NO: 805168 - DNA, 33 bp, Homo sapien
tattccatgcaaacagtaactgaaagagagcag

SEQ ID NO: 805169 - DNA, 33 bp, Homo sapien
tagtgcattatttagccatattgggcaatgaaa

SEQ ID NO: 805170 - DNA, 33 bp, Homo sapien
tagtgcattatttagctatattgggcaatgaaa

SEQ ID NO: 805171 - DNA, 33 bp, Homo sapien
gcaatgcccatgtgtacgctgttattttgtaat

SEQ ID NO: 805172 - DNA, 33 bp, Homo sapien
gcaatgcccatgtgtatgctgttattttgtaat

SEQ ID NO: 805173 - DNA, 33 bp, Homo sapien
acctagtggttatttaagtcacccgtgaaattc

SEQ ID NO: 805174 - DNA, 33 bp, Homo sapien
acctagtggttatttaggtcacccgtgaaattc

SEQ ID NO: 805175 - DNA, 33 bp, Homo sapien
atgcacatttatgtaacacagacctcatctaca

SEQ ID NO: 805176 - DNA, 33 bp, Homo sapien
atgcacatttatgtaatacagacctcatctaca

SEQ ID NO: 805177 - DNA, 33 bp, Homo sapien
ttataaatccaaagacaggaattttaatggttc

SEQ ID NO: 805178 - DNA, 33 bp, Homo sapien
ttataaatccaaagacgggaattttaatggttc

SEQ ID NO: 805179 - DNA, 33 bp, Homo sapien
ttttaataactgaagaagtttgaaatcaaggac

SEQ ID NO: 805180 - DNA, 33 bp, Homo sapien
ttttaataactgaagacgtttgaaatcaaggac

SEQ ID NO: 805181 - DNA, 33 bp, Homo sapien
gataacctacagggtgcagaaaatatttgcaaa

SEQ ID NO: 805182 - DNA, 33 bp, Homo sapien
gataacctacagggtggagaaaatatttgcaaa

SEQ ID NO: 805183 - DNA, 33 bp, Homo sapien; identical to SEQ ID NO: 805181

SEQ ID NO: 805184 - DNA, 33 bp, Homo sapien; identical to SEQ ID NO: 805182

SEQ ID NO: 805185 - DNA, 33 bp, Homo sapien
agaatgtttttcatagcccaaacccagactgca

SEQ ID NO: 805186 - DNA, 33 bp, Homo sapien
agaatgtttttcatagtccaaacccagactgca

SEQ ID NO: 805187 - DNA, 33 bp, Homo sapien
attactgcaatatcaaattcccttataaggatt

SEQ ID NO: 805188 - DNA, 33 bp, Homo sapien
attactgcaatatcaatttcccttataaggatt

SEQ ID NO: 805189 - DNA, 33 bp, Homo sapien
ggtaaggtacatctcacaactttgttcttcctg

SEQ ID NO: 805190 - DNA, 33 bp, Homo sapien
ggtaaggtacatctcataactttgttcttcctg

SEQ ID NO: 805191 - DNA, 33 bp, Homo sapien
tacctgctgcttgacccgatttcctttgcagtg

SEQ ID NO: 805192 - DNA, 33 bp, Homo sapien
tacctgctgcttgacctgatttcctttgcagtg

SEQ ID NO: 805193 - DNA, 33 bp, Homo sapien
tgttgttgatgactacaacttgcctgacaaatt

SEQ ID NO: 805194 - DNA, 33 bp, Homo sapien
tgttgttgatgactacgacttgcctgacaaatt

SEQ ID NO: 805195 - DNA, 33 bp, Homo sapien
atccacgcacaatttaggtgtcaatgtgtggaa

SEQ ID NO: 805196 - DNA, 33 bp, Homo sapien
atccacgcacaatttatgtgtcaatgtgtggaa

SEQ ID NO: 805197 - DNA, 33 bp, Homo sapien
gatttagcaaagacttaaaagaagctactgtaa

SEQ ID NO: 805198 - DNA, 33 bp, Homo sapien
gatttagcaaagacttcaaagaagctactgtaa

SEQ ID NO: 805199 - DNA, 33 bp, Homo sapien
tgatggtagctaaatgaatctatgccattgtca

SEQ ID NO: 805200 - DNA, 33 bp, Homo sapien
tgatggtagctaaatgcatctatgccattgtca

SEQ ID NO: 805201 - DNA, 33 bp, Homo sapien
aaattggctagaaaacagtaacttacagatcca

SEQ ID NO: 805202 - DNA, 33 bp, Homo sapien
aaattggctagaaaacggtaacttacagatcca

SEQ ID NO: 805203 - DNA, 33 bp, Homo sapien
acaatattgtaagcacaaaggataaaatgttgg

SEQ ID NO: 805204 - DNA, 33 bp, Homo sapien
acaatattgtaagcacgaaggataaaatgttgg

SEQ ID NO: 805205 - DNA, 33 bp, Homo sapien
tacaaaaaggtatgcaatcagaaataaaaatag

SEQ ID NO: 805206 - DNA, 33 bp, Homo sapien
tacaaaaaggtatgcattcagaaataaaaatag

SEQ ID NO: 805207 - DNA, 33 bp, Homo sapien
cacttttttgctagccaggagaaaccaaaaaag

SEQ ID NO: 805208 - DNA, 33 bp, Homo sapien
cacttttttgctagccgggagaaaccaaaaaag

SEQ ID NO: 805209 - DNA, 33 bp, Homo sapien
ggctgtgttatgggcacgtatctttaactttgg

SEQ ID NO: 805210 - DNA, 33 bp, Homo sapien
ggctgtgttatgggcatgtatctttaactttgg

SEQ ID NO: 805211 - DNA, 33 bp, Homo sapien
aaagcttcattccaagaagatgtggccaagaaa

SEQ ID NO: 805212 - DNA, 33 bp, Homo sapien
aaagcttcattccaaggagatgtggccaagaaa

SEQ ID NO: 805213 - DNA, 33 bp, Homo sapien
aaactctgccctaacaatgagctaaggcaagta

SEQ ID NO: 805214 - DNA, 33 bp, Homo sapien
aaactctgccctaacagtgagctaaggcaagta

SEQ ID NO: 805215 - DNA, 33 bp, Homo sapien
cctgactccatctccacataattggcatgtagg

SEQ ID NO: 805216 - DNA, 33 bp, Homo sapien
cctgactccatctccagataattggcatgtagg

SEQ ID NO: 805217 - DNA, 33 bp, Homo sapien
gcattacagttgtcacacctttcctctgtctca

SEQ ID NO: 805218 - DNA, 33 bp, Homo sapien
gcattacagttgtcacccctttcctctgtctca

SEQ ID NO: 805219 - DNA, 33 bp, Homo sapien
gagagagaaacagagcaactcaacagcaaacac

SEQ ID NO: 805220 - DNA, 33 bp, Homo sapien
gagagagaaacagagcgactcaacagcaaacac

SEQ ID NO: 805221 - DNA, 33 bp, Homo sapien
acatgggcttagcagacactgacagcattactc

SEQ ID NO: 805222 - DNA, 33 bp, Homo sapien
acatgggcttagcagagactgacagcattactc

SEQ ID NO: 805223 - DNA, 33 bp, Homo sapien
aggagcagaagcatgagaggaatctggagagga

SEQ ID NO: 805224 - DNA, 33 bp, Homo sapien
aggagcagaagcatgataggaatctggagagga

SEQ ID NO: 805225 - DNA, 33 bp, Homo sapien
gatccttgccggagccacccagaaagggggaga

SEQ ID NO: 805226 - DNA, 33 bp, Homo sapien
gatccttgccggagccgcccagaaagggggaga

SEQ ID NO: 805227 - DNA, 33 bp, Homo sapien
gcccagggccaaaggagagagaataagagaaaa

SEQ ID NO: 805228 - DNA, 33 bp, Homo sapien
gcccagggccaaaggatagagaataagagaaaa

SEQ ID NO: 805229 - DNA, 33 bp, Homo sapien
taagaccttatcagcacctagtacataattaac

SEQ ID NO: 805230 - DNA, 33 bp, Homo sapien
taagaccttatcagcatctagtacataattaac

SEQ ID NO: 805231 - DNA, 33 bp, Homo sapien
gaacttaataactggaagctggatgtgtttctt

SEQ ID NO: 805232 - DNA, 33 bp, Homo sapien
gaacttaataactggaggctggatgtgtttctt

SEQ ID NO: 805233 - DNA, 33 bp, Homo sapien
tttgatttttcagtaacataaacaatgctgaga

SEQ ID NO: 805234 - DNA, 33 bp, Homo sapien
tttgatttttcagtaatataaacaatgctgaga

SEQ ID NO: 805235 - DNA, 33 bp, Homo sapien
taatgcctatgagagcaatacaccaaagactga

SEQ ID NO: 805236 - DNA, 33 bp, Homo sapien
taatgcctatgagagcgatacaccaaagactga

SEQ ID NO: 805237 - DNA, 33 bp, Homo sapien
accttcagttttggaaaggtcaaagaagataca

SEQ ID NO: 805238 - DNA, 33 bp, Homo sapien
accttcagttttggaagggtcaaagaagataca

SEQ ID NO: 805239 - DNA, 33 bp, Homo sapien
tcctctcccgtcttatcactcctatcaatatga

SEQ ID NO: 805240 - DNA, 33 bp, Homo sapien
tcctctcccgtcttattactcctatcaatatga

SEQ ID NO: 805241 - DNA, 33 bp, Homo sapien
atgctgctgcccaaaacggttgtgggaatctgc

SEQ ID NO: 805242 - DNA, 33 bp, Homo sapien
atgctgctgcccaaaatggttgtgggaatctgc

SEQ ID NO: 805243 - DNA, 33 bp, Homo sapien
aatgggaacttgtaaacagaaggaccagcttct

SEQ ID NO: 805244 - DNA, 33 bp, Homo sapien
aatgggaacttgtaaagagaaggaccagcttct

SEQ ID NO: 805245 - DNA, 33 bp, Homo sapien
atggttgacctggttgaagagttggttcagttc

SEQ ID NO: 805246 - DNA, 33 bp, Homo sapien
atggttgacctggttggagagttggttcagttc

SEQ ID NO: 805247 - DNA, 33 bp, Homo sapien
atcaccatgtccatacggcctcttcctcctttc

SEQ ID NO: 805248 - DNA, 33 bp, Homo sapien
atcaccatgtccatactgcctcttcctcctttc

SEQ ID NO: 805249 - DNA, 33 bp, Homo sapien
ttaatattaagtacccaaaaagcacttattaag

SEQ ID NO: 805250 - DNA, 33 bp, Homo sapien
ttaatattaagtacccgaaaagcacttattaag

SEQ ID NO: 805251 - DNA, 33 bp, Homo sapien
tggccctgtagataaggatgaatttcggtaaag

SEQ ID NO: 805252 - DNA, 33 bp, Homo sapien
tggccctgtagataagtatgaatttcggtaaag

SEQ ID NO: 805253 - DNA, 33 bp, Homo sapien
taagatgttgccgttacgggaagtaaaggaagg

SEQ ID NO: 805254 - DNA, 33 bp, Homo sapien
taagatgttgccgttaggggaagtaaaggaagg

SEQ ID NO: 805255 - DNA, 33 bp, Homo sapien
gggcattcaaggaagacgagtggagattaaagg

SEQ ID NO: 805256 - DNA, 33 bp, Homo sapien
gggcattcaaggaagatgagtggagattaaagg

SEQ ID NO: 805257 - DNA, 33 bp, Homo sapien
tgaggcccaaataagaaaatagatttgcatgtc

SEQ ID NO: 805258 - DNA, 33 bp, Homo sapien
tgaggcccaaataagataatagatttgcatgtc

SEQ ID NO: 805259 - DNA, 33 bp, Homo sapien
cccagctgacttctacccttctttgaagtctta

SEQ ID NO: 805260 - DNA, 33 bp, Homo sapien
cccagctgacttctactcttctttgaagtctta

SEQ ID NO: 805261 - DNA, 33 bp, Homo sapien
tggcagtgaacaagagaatggttaggggtccca

SEQ ID NO: 805262 - DNA, 33 bp, Homo sapien
tggcagtgaacaagaggatggttaggggtccca

SEQ ID NO: 805263 - DNA, 33 bp, Homo sapien
tgtggaaggaacaacacgactgaacagccaaat

SEQ ID NO: 805264 - DNA, 33 bp, Homo sapien
tgtggaaggaacaacatgactgaacagccaaat

SEQ ID NO: 805265 - DNA, 33 bp, Homo sapien
gtgccacgaactgggacgcaacagtgaatacaa

SEQ ID NO: 805266 - DNA, 33 bp, Homo sapien
gtgccacgaactgggatgcaacagtgaatacaa

SEQ ID NO: 805267 - DNA, 33 bp, Homo sapien
gaaataaaaaataacagaggttggcaggacccc

SEQ ID NO: 805268 - DNA, 33 bp, Homo sapien
gaaataaaaaataacataggttggcaggacccc

SEQ ID NO: 805269 - DNA, 33 bp, Homo sapien
gggctttagcagcgggcaagtgttcagttataa

SEQ ID NO: 805270 - DNA, 33 bp, Homo sapien
gggctttagcagcggggaagtgttcagttataa

SEQ ID NO: 805271 - DNA, 33 bp, Homo sapien
tgggaatcacaggacagcagagctacagggagc

SEQ ID NO: 805272 - DNA, 33 bp, Homo sapien
tgggaatcacaggacatcagagctacagggagc

SEQ ID NO: 805273 - DNA, 33 bp, Homo sapien
gtaagcccagggagcacggtctctctgctcagg

SEQ ID NO: 805274 - DNA, 33 bp, Homo sapien
gtaagcccagggagcatggtctctctgctcagg

SEQ ID NO: 805275 - DNA, 33 bp, Homo sapien
ttgaagtcccttccaaatctgaccttctggggg

SEQ ID NO: 805276 - DNA, 33 bp, Homo sapien
ttgaagtcccttccaagtctgaccttctggggg

SEQ ID NO: 805277 - DNA, 33 bp, Homo sapien
aggctagagcaaggacaagggcccagcaatcgg

SEQ ID NO: 805278 - DNA, 33 bp, Homo sapien
aggctagagcaaggacgagggcccagcaatcgg

SEQ ID NO: 805279 - DNA, 33 bp, Homo sapien
aactcagccacgatgaaccggccgcaataagag

SEQ ID NO: 805280 - DNA, 33 bp, Homo sapien
aactcagccacgatgacccggccgcaataagag

SEQ ID NO: 805281 - DNA, 33 bp, Homo sapien
gtgggtgcctcccacacggtgtattcatcttgt

SEQ ID NO: 805282 - DNA, 33 bp, Homo sapien
gtgggtgcctcccacatggtgtattcatcttgt

SEQ ID NO: 805283 - DNA, 33 bp, Homo sapien
actcctgggctctgaactccagatactgccaca

SEQ ID NO: 805284 - DNA, 33 bp, Homo sapien
actcctgggctctgaattccagatactgccaca

SEQ ID NO: 805285 - DNA, 33 bp, Homo sapien
aggcaacaaccacagaccgtgaagatggaagtg

SEQ ID NO: 805286 - DNA, 33 bp, Homo sapien
aggcaacaaccacagagcgtgaagatggaagtg

SEQ ID NO: 805287 - DNA, 33 bp, Homo sapien
agattcctagataggggattactgaatcaatca

SEQ ID NO: 805288 - DNA, 33 bp, Homo sapien
agattcctagatagggtattactgaatcaatca

SEQ ID NO: 805289 - DNA, 33 bp, Homo sapien
gaaggagaaatttcaactgattggaaatgtgtt

SEQ ID NO: 805290 - DNA, 33 bp, Homo sapien
gaaggagaaatttcaagtgattggaaatgtgtt

SEQ ID NO: 805291 - DNA, 33 bp, Homo sapien
actcttcagattggaacggatgactggtgagca

SEQ ID NO: 805292 - DNA, 33 bp, Homo sapien
actcttcagattggaatggatgactggtgagca

SEQ ID NO: 805293 - DNA, 33 bp, Homo sapien
aaaaataaaatagtaacgtgacagaaagtgaaa

SEQ ID NO: 805294 - DNA, 33 bp, Homo sapien
aaaaataaaatagtaatgtgacagaaagtgaaa

SEQ ID NO: 805295 - DNA, 33 bp, Homo sapien
atttctaaagacccttcaagcctggcactctga

SEQ ID NO: 805296 - DNA, 33 bp, Homo sapien
atttctaaagacccttgaagcctggcactctga

SEQ ID NO: 805297 - DNA, 33 bp, Homo sapien
agggatggtaagtagaagctagatcatgaaggg

SEQ ID NO: 805298 - DNA, 33 bp, Homo sapien
agggatggtaagtagaggctagatcatgaaggg

SEQ ID NO: 805299 - DNA, 33 bp, Homo sapien
ctaagagctcggtgccagctgaacaaaccacat

SEQ ID NO: 805300 - DNA, 33 bp, Homo sapien
ctaagagctcggtgccggctgaacaaaccacat

SEQ ID NO: 805301 - DNA, 33 bp, Homo sapien
cgggagccttttgcaacggtcctactaagagct

SEQ ID NO: 805302 - DNA, 33 bp, Homo sapien
cgggagccttttgcaatggtcctactaagagct

SEQ ID NO: 805303 - DNA, 33 bp, Homo sapien
tagggatctgacactcacccgcttcctgctaac

SEQ ID NO: 805304 - DNA, 33 bp, Homo sapien
tagggatctgacactcgcccgcttcctgctaac

SEQ ID NO: 805305 - DNA, 33 bp, Homo sapien
ggctccaccctaaagactcagattttggaaaga

SEQ ID NO: 805306 - DNA, 33 bp, Homo sapien
ggctccaccctaaagattcagattttggaaaga

SEQ ID NO: 805307 - DNA, 33 bp, Homo sapien
gaggcgggatagcccgacgaataaaagcatgga

SEQ ID NO: 805308 - DNA, 33 bp, Homo sapien
gaggcgggatagcccggcgaataaaagcatgga

SEQ ID NO: 805309 - DNA, 33 bp, Homo sapien
tgcatcaatgcactttaaaaaaatcttaccaag

SEQ ID NO: 805310 - DNA, 33 bp, Homo sapien
tgcatcaatgcacttttaaaaaatcttaccaag

SEQ ID NO: 805311 - DNA, 33 bp, Homo sapien
aaatgactttcccatcactgtttgctgtgtgcc

SEQ ID NO: 805312 - DNA, 33 bp, Homo sapien
aaatgactttcccatcgctgtttgctgtgtgcc

SEQ ID NO: 805313 - DNA, 33 bp, Homo sapien
ctgcactatgcagagcacaaaattctgtggtta

SEQ ID NO: 805314 - DNA, 33 bp, Homo sapien
ctgcactatgcagagcgcaaaattctgtggtta

SEQ ID NO: 805315 - DNA, 33 bp, Homo sapien
tggggtgggtctcgaacgaaagcaccagcagtt

SEQ ID NO: 805316 - DNA, 33 bp, Homo sapien
tggggtgggtctcgaatgaaagcaccagcagtt

SEQ ID NO: 805317 - DNA, 33 bp, Homo sapien
cctatatttggcaccaatgggaagagtactgca

SEQ ID NO: 805318 - DNA, 33 bp, Homo sapien
cctatatttggcaccagtgggaagagtactgca

SEQ ID NO: 805319 - DNA, 33 bp, Homo sapien
ttaggcaaaccattccagagactgcaacacttg

SEQ ID NO: 805320 - DNA, 33 bp, Homo sapien
ttaggcaaaccattccggagactgcaacacttg

SEQ ID NO: 805321 - DNA, 33 bp, Homo sapien
tgtcccgtctggagtcaaaacagttggcctcag

SEQ ID NO: 805322 - DNA, 33 bp, Homo sapien
tgtcccgtctggagtcgaaacagttggcctcag

SEQ ID NO: 805323 - DNA, 33 bp, Homo sapien
cagctgtcatgtataccggtgctttgttgaaga

SEQ ID NO: 805324 - DNA, 33 bp, Homo sapien
cagctgtcatgtatactggtgctttgttgaaga

SEQ ID NO: 805325 - DNA, 33 bp, Homo sapien
ttgacatctgtctgcaactctctgtgtgcggat

SEQ ID NO: 805326 - DNA, 33 bp, Homo sapien
ttgacatctgtctgcatctctctgtgtgcggat

SEQ ID NO: 805327 - DNA, 33 bp, Homo sapien
gacatggagtaagacccctgttgtttctgagcc

SEQ ID NO: 805328 - DNA, 33 bp, Homo sapien
gacatggagtaagacctctgttgtttctgagcc

SEQ ID NO: 805329 - DNA, 33 bp, Homo sapien
gaggtgattatgtccaatatggcctccttgtca

SEQ ID NO: 805330 - DNA, 33 bp, Homo sapien
gaggtgattatgtccagtatggcctccttgtca

SEQ ID NO: 805331 - DNA, 33 bp, Homo sapien; identical to SEQ ID NO: 805329

SEQ ID NO: 805332 - DNA, 33 bp, Homo sapien; identical to SEQ ID NO: 805330

SEQ ID NO: 805333 - DNA, 33 bp, Homo sapien
tctcagcttgtggttcccaaagtcctttccctc

SEQ ID NO: 805334 - DNA, 33 bp, Homo sapien
tctcagcttgtggttctcaaagtcctttccctc

SEQ ID NO: 805335 - DNA, 33 bp, Homo sapien
gtagagatacatgacaacttcaactacaagaca

SEQ ID NO: 805336 - DNA, 33 bp, Homo sapien
gtagagatacatgacagcttcaactacaagaca

SEQ ID NO: 805337 - DNA, 33 bp, Homo sapien
tctaggccagagaagacggagcagtttgctgtg

SEQ ID NO: 805338 - DNA, 33 bp, Homo sapien
tctaggccagagaagagggagcagtttgctgtg

SEQ ID NO: 805339 - DNA, 33 bp, Homo sapien
aaaatgttactgattacgggcaaaaatccaagg

SEQ ID NO: 805340 - DNA, 33 bp, Homo sapien
aaaatgttactgattatgggcaaaaatccaagg

SEQ ID NO: 805341 - DNA, 33 bp, Homo sapien
tatgcactcatttagcacctatcctagtcaggc

SEQ ID NO: 805342 - DNA, 33 bp, Homo sapien
tatgcactcatttagcgcctatcctagtcaggc

SEQ ID NO: 805343 - DNA, 33 bp, Homo sapien
ttttagagacttcaacccaggattttcacagca

SEQ ID NO: 805344 - DNA, 33 bp, Homo sapien
ttttagagacttcaactcaggattttcacagca

SEQ ID NO: 805345 - DNA, 33 bp, Homo sapien
tgtctcacagtatagacgctggagccagactgc

SEQ ID NO: 805346 - DNA, 33 bp, Homo sapien
tgtctcacagtatagatgctggagccagactgc

SEQ ID NO: 805347 - DNA, 33 bp, Homo sapien
gcctcatgaaggtatcaatctcattctcatttt

SEQ ID NO: 805348 - DNA, 33 bp, Homo sapien
gcctcatgaaggtatcgatctcattctcatttt

SEQ ID NO: 805349 - DNA, 33 bp, Homo sapien
catccggactgtaaccaggctttcctctgaccc

SEQ ID NO: 805350 - DNA, 33 bp, Homo sapien
catccggactgtaaccgggctttcctctgaccc

SEQ ID NO: 805351 - DNA, 33 bp, Homo sapien
tttggcgacttataagaatttgcgggaaagtgt

SEQ ID NO: 805352 - DNA, 33 bp, Homo sapien
tttggcgacttataaggatttgcgggaaagtgt

SEQ ID NO: 805353 - DNA, 33 bp, Homo sapien
ggaatactgtttcaaccagaacctgggagggtt

SEQ ID NO: 805354 - DNA, 33 bp, Homo sapien
ggaatactgtttcaacgagaacctgggagggtt

SEQ ID NO: 805355 - DNA, 33 bp, Homo sapien
tcaaagagtgtccagacgtaactcagtccaggg

SEQ ID NO: 805356 - DNA, 33 bp, Homo sapien
tcaaagagtgtccagaggtaactcagtccaggg

SEQ ID NO: 805357 - DNA, 33 bp, Homo sapien
cgaacaaaatctataccgaatgtttgagatgat

SEQ ID NO: 805358 - DNA, 33 bp, Homo sapien
cgaacaaaatctatacggaatgtttgagatgat

SEQ ID NO: 805359 - DNA, 33 bp, Homo sapien
cctacagcatttatgaagcaggctttgattgtc

SEQ ID NO: 805360 - DNA, 33 bp, Homo sapien
cctacagcatttatgaggcaggctttgattgtc

SEQ ID NO: 805361 - DNA, 33 bp, Homo sapien
tcctggaaggaaagaacgaagaggccctgcaag

SEQ ID NO: 805362 - DNA, 33 bp, Homo sapien
tcctggaaggaaagaatgaagaggccctgcaag

SEQ ID NO: 805363 - DNA, 33 bp, Homo sapien
aaacagtaagccttacacaagcagagaaacacc

SEQ ID NO: 805364 - DNA, 33 bp, Homo sapien
aaacagtaagccttacgcaagcagagaaacacc

SEQ ID NO: 805365 - DNA, 33 bp, Homo sapien
agttggtgagaatttcaatctggtaataaaggg

SEQ ID NO: 805366 - DNA, 33 bp, Homo sapien
agttggtgagaatttcgatctggtaataaaggg

SEQ ID NO: 805367 - DNA, 33 bp, Homo sapien
tggagtgtgtctgtaggagtcaaaaggaggtgg

SEQ ID NO: 805368 - DNA, 33 bp, Homo sapien
tggagtgtgtctgtagtagtcaaaaggaggtgg

SEQ ID NO: 805369 - DNA, 33 bp, Homo sapien
gacagctagccgggcactaccctcaggaagcca

SEQ ID NO: 805370 - DNA, 33 bp, Homo sapien
gacagctagccgggcattaccctcaggaagcca

SEQ ID NO: 805371 - DNA, 33 bp, Homo sapien
cactttcagtctgttcacaaccacaaatcacag

SEQ ID NO: 805372 - DNA, 33 bp, Homo sapien
cactttcagtctgttcgcaaccacaaatcacag

SEQ ID NO: 805373 - DNA, 33 bp, Homo sapien
actccatacctatgaacctgggataacacttat

SEQ ID NO: 805374 - DNA, 33 bp, Homo sapien
actccatacctatgaagctgggataacacttat

SEQ ID NO: 805375 - DNA, 33 bp, Homo sapien
aaccagagctgtcagacaataatgagcagttgg

SEQ ID NO: 805376 - DNA, 33 bp, Homo sapien
aaccagagctgtcagataataatgagcagttgg

SEQ ID NO: 805377 - DNA, 33 bp, Homo sapien
aacagtccagtgtccacacatagggaatgattc

SEQ ID NO: 805378 - DNA, 33 bp, Homo sapien
aacagtccagtgtccatacatagggaatgattc

SEQ ID NO: 805379 - DNA, 33 bp, Homo sapien
agggagcatggcggacagcctaccaggagagcc

SEQ ID NO: 805380 - DNA, 33 bp, Homo sapien
agggagcatggcggacggcctaccaggagagcc

SEQ ID NO: 805381 - DNA, 33 bp, Homo sapien
aatgtaagtggtacaaaatgattttcagtgagg

SEQ ID NO: 805382 - DNA, 33 bp, Homo sapien
aatgtaagtggtacaagatgattttcagtgagg

SEQ ID NO: 805383 - DNA, 33 bp, Homo sapien; identical to SEQ ID NO: 805381

SEQ ID NO: 805384 - DNA, 33 bp, Homo sapien; identical to SEQ ID NO: 805382

SEQ ID NO: 805385 - DNA, 33 bp, Homo sapien
tttaagatcccttcacaagatactaattacaaa

SEQ ID NO: 805386 - DNA, 33 bp, Homo sapien
tttaagatcccttcacgagatactaattacaaa

SEQ ID NO: 805387 - DNA, 33 bp, Homo sapien
tcagataagagatcacaatgtaactggtataga

SEQ ID NO: 805388 - DNA, 33 bp, Homo sapien
tcagataagagatcaccatgtaactggtataga

SEQ ID NO: 805389 - DNA, 33 bp, Homo sapien
tgaaattgctctgacacatccagtccaagcata

SEQ ID NO: 805390 - DNA, 33 bp, Homo sapien
tgaaattgctctgacatatccagtccaagcata

SEQ ID NO: 805391 - DNA, 33 bp, Homo sapien
tttaataagccgcttacagagaaaactcagcat

SEQ ID NO: 805392 - DNA, 33 bp, Homo sapien
tttaataagccgcttatagagaaaactcagcat

SEQ ID NO: 805393 - DNA, 33 bp, Homo sapien
atggatgaataatggacgaagaatgggactttc

SEQ ID NO: 805394 - DNA, 33 bp, Homo sapien
atggatgaataatggatgaagaatgggactttc

SEQ ID NO: 805395 - DNA, 33 bp, Homo sapien
cctagtaggaatgatcacaaacaatactattta

SEQ ID NO: 805396 - DNA, 33 bp, Homo sapien
cctagtaggaatgatcgcaaacaatactattta

SEQ ID NO: 805397 - DNA, 33 bp, Homo sapien
atttttgttactgctcaccgtgataggcatttt

SEQ ID NO: 805398 - DNA, 33 bp, Homo sapien
atttttgttactgctcgccgtgataggcatttt

SEQ ID NO: 805399 - DNA, 33 bp, Homo sapien
aatacaaatgaagtcaacttgcatagaactggc

SEQ ID NO: 805400 - DNA, 33 bp, Homo sapien
aatacaaatgaagtcaccttgcatagaactggc

SEQ ID NO: 805401 - DNA, 33 bp, Homo sapien
tattttttctaatatacaggttgcagagtgatg

SEQ ID NO: 805402 - DNA, 33 bp, Homo sapien
tattttttctaatatagaggttgcagagtgatg

SEQ ID NO: 805403 - DNA, 33 bp, Homo sapien
ctctctaaaactttacactttcttatgatcact

SEQ ID NO: 805404 - DNA, 33 bp, Homo sapien
ctctctaaaactttactctttcttatgatcact

SEQ ID NO: 805405 - DNA, 33 bp, Homo sapien
gactcctgttccaaaccacttgagggcgcatga

SEQ ID NO: 805406 - DNA, 33 bp, Homo sapien
gactcctgttccaaactacttgagggcgcatga

SEQ ID NO: 805407 - DNA, 33 bp, Homo sapien
cagaaatccatgaaaactgctgcataaatgaag

SEQ ID NO: 805408 - DNA, 33 bp, Homo sapien
cagaaatccatgaaaagtgctgcataaatgaag

SEQ ID NO: 805409 - DNA, 33 bp, Homo sapien
atgttacttcagctaaaaggcatgggaaaacat

SEQ ID NO: 805410 - DNA, 33 bp, Homo sapien
atgttacttcagctaataggcatgggaaaacat

SEQ ID NO: 805411 - DNA, 33 bp, Homo sapien
tattccactgtacgtacaaaccacattttcttt

SEQ ID NO: 805412 - DNA, 33 bp, Homo sapien
tattccactgtacgtagaaaccacattttcttt

SEQ ID NO: 805413 - DNA, 33 bp, Homo sapien
tattccaccagaggccaaaggagatggctagag

SEQ ID NO: 805414 - DNA, 33 bp, Homo sapien
tattccaccagaggccgaaggagatggctagag

SEQ ID NO: 805415 - DNA, 33 bp, Homo sapien
tggtacctgctcagaacaggggaatttcaaaaa

SEQ ID NO: 805416 - DNA, 33 bp, Homo sapien
tggtacctgctcagaagaggggaatttcaaaaa

SEQ ID NO: 805417 - DNA, 33 bp, Homo sapien
gtggttccaatgacaactctgcttcttctgtgg

SEQ ID NO: 805418 - DNA, 33 bp, Homo sapien
gtggttccaatgacaattctgcttcttctgtgg

SEQ ID NO: 805419 - DNA, 33 bp, Homo sapien
agtttcgtgagcaggcaaatcatgcagccacat

SEQ ID NO: 805420 - DNA, 33 bp, Homo sapien
agtttcgtgagcaggcgaatcatgcagccacat

SEQ ID NO: 805421 - DNA, 33 bp, Homo sapien
tttagcaactagtatcaatttctcctgatacca

SEQ ID NO: 805422 - DNA, 33 bp, Homo sapien
tttagcaactagtatccatttctcctgatacca

SEQ ID NO: 805423 - DNA, 33 bp, Homo sapien
gtcttactggacaagcaatacaaatcactgcag

SEQ ID NO: 805424 - DNA, 33 bp, Homo sapien
gtcttactggacaagcgatacaaatcactgcag

SEQ ID NO: 805425 - DNA, 33 bp, Homo sapien
ctagttcacatatctgaagatctctgtgtggtt

SEQ ID NO: 805426 - DNA, 33 bp, Homo sapien
ctagttcacatatctgcagatctctgtgtggtt

SEQ ID NO: 805427 - DNA, 33 bp, Homo sapien
actctgcagctaaagacggtcttgggcgtttct

SEQ ID NO: 805428 - DNA, 33 bp, Homo sapien
actctgcagctaaagatggtcttgggcgtttct

SEQ ID NO: 805429 - DNA, 33 bp, Homo sapien
tcataggagattattaccattatttacatccca

SEQ ID NO: 805430 - DNA, 33 bp, Homo sapien
tcataggagattattatcattatttacatccca

SEQ ID NO: 805431 - DNA, 33 bp, Homo sapien
ctgttctatggagtggaaataattgcttctttt

SEQ ID NO: 805432 - DNA, 33 bp, Homo sapien
ctgttctatggagtgggaataattgcttctttt

SEQ ID NO: 805433 - DNA, 33 bp, Homo sapien
aattctagtgggaggacataaacaacaatgggg

SEQ ID NO: 805434 - DNA, 33 bp, Homo sapien
aattctagtgggaggagataaacaacaatgggg

SEQ ID NO: 805435 - DNA, 33 bp, Homo sapien
tcaaatgggatcaataacacattcattcattga

SEQ ID NO: 805436 - DNA, 33 bp, Homo sapien
tcaaatgggatcaataccacattcattcattga

SEQ ID NO: 805437 - DNA, 33 bp, Homo sapien
accagaactatatatacggggggtggcagaagt

SEQ ID NO: 805438 - DNA, 33 bp, Homo sapien
accagaactatatatatggggggtggcagaagt

SEQ ID NO: 805439 - DNA, 33 bp, Homo sapien
caagttgtatttccccgctatggtgaacatctg

SEQ ID NO: 805440 - DNA, 33 bp, Homo sapien
caagttgtatttcccctctatggtgaacatctg

SEQ ID NO: 805441 - DNA, 33 bp, Homo sapien
attctcaagtcccaccccggagtgttgatttag

SEQ ID NO: 805442 - DNA, 33 bp, Homo sapien
attctcaagtcccaccgcggagtgttgatttag

SEQ ID NO: 805443 - DNA, 33 bp, Homo sapien
tatttgctagctgaaaatcttttaggagaatta

SEQ ID NO: 805444 - DNA, 33 bp, Homo sapien
tatttgctagctgaaagtcttttaggagaatta

SEQ ID NO: 805445 - DNA, 33 bp, Homo sapien
caagcagacagtaagacaatcagatttccatat

SEQ ID NO: 805446 - DNA, 33 bp, Homo sapien
caagcagacagtaagagaatcagatttccatat

SEQ ID NO: 805447 - DNA, 33 bp, Homo sapien
atctttgttcaaacaaggctagaatgtcagttt

SEQ ID NO: 805448 - DNA, 33 bp, Homo sapien
atctttgttcaaacaatgctagaatgtcagttt

SEQ ID NO: 805449 - DNA, 33 bp, Homo sapien
catcttggatgaggtcaatggacatctagaggt

SEQ ID NO: 805450 - DNA, 33 bp, Homo sapien
catcttggatgaggtcgatggacatctagaggt

SEQ ID NO: 805451 - DNA, 33 bp, Homo sapien
aggggctgaggagaagcctggcagcaaatgagc

SEQ ID NO: 805452 - DNA, 33 bp, Homo sapien
aggggctgaggagaaggctggcagcaaatgagc

SEQ ID NO: 805453 - DNA, 33 bp, Homo sapien
ctctctgatctcacgtaaattcaattaggaaag

SEQ ID NO: 805454 - DNA, 33 bp, Homo sapien
ctctctgatctcacgtgaattcaattaggaaag

SEQ ID NO: 805455 - DNA, 33 bp, Homo sapien
cttagaggtagaggccaagttatttcaggtccc

SEQ ID NO: 805456 - DNA, 33 bp, Homo sapien
cttagaggtagaggccgagttatttcaggtccc

SEQ ID NO: 805457 - DNA, 33 bp, Homo sapien
aagtcacactcttaagcattctgtaagggctca

SEQ ID NO: 805458 - DNA, 33 bp, Homo sapien
aagtcacactcttaagtattctgtaagggctca

SEQ ID NO: 805459 - DNA, 33 bp, Homo sapien
aagcactttcattcccaatactgcacatgatcg

SEQ ID NO: 805460 - DNA, 33 bp, Homo sapien
aagcactttcattcccgatactgcacatgatcg

SEQ ID NO: 805461 - DNA, 33 bp, Homo sapien
ctgcctttaaggtccaaacactctctgttgtat

SEQ ID NO: 805462 - DNA, 33 bp, Homo sapien
ctgcctttaaggtccagacactctctgttgtat

SEQ ID NO: 805463 - DNA, 33 bp, Homo sapien
acttgacattcttaccacttctcagtaagtcag

SEQ ID NO: 805464 - DNA, 33 bp, Homo sapien
acttgacattcttaccgcttctcagtaagtcag

SEQ ID NO: 805465 - DNA, 33 bp, Homo sapien
tgattcctgttaactcaaggggcaatggttgct

SEQ ID NO: 805466 - DNA, 33 bp, Homo sapien
tgattcctgttaactcgaggggcaatggttgct

SEQ ID NO: 805467 - DNA, 33 bp, Homo sapien
tgcgtcccatgggtaaagactatcatcattatt

SEQ ID NO: 805468 - DNA, 33 bp, Homo sapien
tgcgtcccatgggtaaggactatcatcattatt

SEQ ID NO: 805469 - DNA, 33 bp, Homo sapien
gatactgtactggaaccagaactgaagaaacct

SEQ ID NO: 805470 - DNA, 33 bp, Homo sapien
gatactgtactggaactagaactgaagaaacct

SEQ ID NO: 805471 - DNA, 33 bp, Homo sapien
gggctggaataaaggaagagcaattggagcttt

SEQ ID NO: 805472 - DNA, 33 bp, Homo sapien
gggctggaataaaggatgagcaattggagcttt

SEQ ID NO: 805473 - DNA, 33 bp, Homo sapien
taaccaagtgttcaacaggcgttttggtctcct

SEQ ID NO: 805474 - DNA, 33 bp, Homo sapien
taaccaagtgttcaacgggcgttttggtctcct

SEQ ID NO: 805475 - DNA, 33 bp, Homo sapien
ctgcattcctgacaagcctctaggtaatgctga

SEQ ID NO: 805476 - DNA, 33 bp, Homo sapien
ctgcattcctgacaagtctctaggtaatgctga

SEQ ID NO: 805477 - DNA, 33 bp, Homo sapien
tgggggccttattacaatgcagattctgagtca

SEQ ID NO: 805478 - DNA, 33 bp, Homo sapien
tgggggccttattacagtgcagattctgagtca

SEQ ID NO: 805479 - DNA, 33 bp, Homo sapien
agactttgagtagttcaattgcgctggtccaaa

SEQ ID NO: 805480 - DNA, 33 bp, Homo sapien
agactttgagtagttcgattgcgctggtccaaa

SEQ ID NO: 805481 - DNA, 33 bp, Homo sapien
cataaaactccattgacgtagagattgtgtcta

SEQ ID NO: 805482 - DNA, 33 bp, Homo sapien
cataaaactccattgaggtagagattgtgtcta

SEQ ID NO: 805483 - DNA, 33 bp, Homo sapien
taaggagtgaatgaggacccgtttctctatgaa

SEQ ID NO: 805484 - DNA, 33 bp, Homo sapien
taaggagtgaatgaggccccgtttctctatgaa

SEQ ID NO: 805485 - DNA, 33 bp, Homo sapien
taagaggtgcatgtaaacacaaagaggacagga

SEQ ID NO: 805486 - DNA, 33 bp, Homo sapien
taagaggtgcatgtaagcacaaagaggacagga

SEQ ID NO: 805487 - DNA, 33 bp, Homo sapien
ggaaattgttccaagaccactccgaagggcagt

SEQ ID NO: 805488 - DNA, 33 bp, Homo sapien
ggaaattgttccaagagcactccgaagggcagt

SEQ ID NO: 805489 - DNA, 33 bp, Homo sapien
caataagcccttgatgaactatggagatactgc

SEQ ID NO: 805490 - DNA, 33 bp, Homo sapien
caataagcccttgatggactatggagatactgc

SEQ ID NO: 805491 - DNA, 33 bp, Homo sapien
agagagtgaaatgaggccatagggatagcatca

SEQ ID NO: 805492 - DNA, 33 bp, Homo sapien
agagagtgaaatgaggtcatagggatagcatca

SEQ ID NO: 805493 - DNA, 33 bp, Homo sapien
gacttcttcagaaacccattccaagattcaacg

SEQ ID NO: 805494 - DNA, 33 bp, Homo sapien
gacttcttcagaaacctattccaagattcaacg

SEQ ID NO: 805495 - DNA, 33 bp, Homo sapien
ctgtcaagaactacaggagagcacagatttagc

SEQ ID NO: 805496 - DNA, 33 bp, Homo sapien
ctgtcaagaactacagtagagcacagatttagc

SEQ ID NO: 805497 - DNA, 33 bp, Homo sapien
atagggctgccacgagaattgactcaatcaaca

SEQ ID NO: 805498 - DNA, 33 bp, Homo sapien
atagggctgccacgaggattgactcaatcaaca

SEQ ID NO: 805499 - DNA, 33 bp, Homo sapien
tatgttgtccctttgagctctagacttatggat

SEQ ID NO: 805500 - DNA, 33 bp, Homo sapien
tatgttgtccctttgatctctagacttatggat

SEQ ID NO: 805501 - DNA, 33 bp, Homo sapien
aatttcttaattttccagagtacagctagacaa

SEQ ID NO: 805502 - DNA, 33 bp, Homo sapien
aatttcttaattttccggagtacagctagacaa

SEQ ID NO: 805503 - DNA, 33 bp, Homo sapien
tatgagtgtagcaccaagtataccaatgggaag

SEQ ID NO: 805504 - DNA, 33 bp, Homo sapien
tatgagtgtagcaccacgtataccaatgggaag

SEQ ID NO: 805505 - DNA, 33 bp, Homo sapien
gtttctggagacaagacattaagccctctttgg

SEQ ID NO: 805506 - DNA, 33 bp, Homo sapien
gtttctggagacaagagattaagccctctttgg

SEQ ID NO: 805507 - DNA, 33 bp, Homo sapien
tcttatatccaagttacagagacagtgaagggg

SEQ ID NO: 805508 - DNA, 33 bp, Homo sapien
tcttatatccaagttatagagacagtgaagggg

SEQ ID NO: 805509 - DNA, 33 bp, Homo sapien
cactaaacgcccaggcactaccactatgcagta

SEQ ID NO: 805510 - DNA, 33 bp, Homo sapien
cactaaacgcccaggcgctaccactatgcagta

SEQ ID NO: 805511 - DNA, 33 bp, Homo sapien
tttaggattttttccaaatcagcttttgtcaac

SEQ ID NO: 805512 - DNA, 33 bp, Homo sapien
tttaggattttttccatatcagcttttgtcaac

SEQ ID NO: 805513 - DNA, 33 bp, Homo sapien
gagccatctttagagaacttcacgactatcatc

SEQ ID NO: 805514 - DNA, 33 bp, Homo sapien
gagccatctttagagatcttcacgactatcatc

SEQ ID NO: 805515 - DNA, 33 bp, Homo sapien
gctggaagaggttcctaaggaaaggctcaggtg

SEQ ID NO: 805516 - DNA, 33 bp, Homo sapien
gctggaagaggttcctgaggaaaggctcaggtg

SEQ ID NO: 805517 - DNA, 33 bp, Homo sapien
agaggaagactcagaactgctctcaagaaatca

SEQ ID NO: 805518 - DNA, 33 bp, Homo sapien
agaggaagactcagaattgctctcaagaaatca

SEQ ID NO: 805519 - DNA, 33 bp, Homo sapien
agtgtattattctacacacttactgattgctac

SEQ ID NO: 805520 - DNA, 33 bp, Homo sapien
agtgtattattctacatacttactgattgctac

SEQ ID NO: 805521 - DNA, 33 bp, Homo sapien
catgtctagaaatttacctcacagatatcctca

SEQ ID NO: 805522 - DNA, 33 bp, Homo sapien
catgtctagaaatttatctcacagatatcctca

SEQ ID NO: 805523 - DNA, 33 bp, Homo sapien
gcagggtcacagagctcaagagtatctggccgg

SEQ ID NO: 805524 - DNA, 33 bp, Homo sapien
gcagggtcacagagcttaagagtatctggccgg

SEQ ID NO: 805525 - DNA, 33 bp, Homo sapien
gtcgcccaagaagaaacggactaggaatggttt

SEQ ID NO: 805526 - DNA, 33 bp, Homo sapien
gtcgcccaagaagaaagggactaggaatggttt

SEQ ID NO: 805527 - DNA, 33 bp, Homo sapien
tatcccaatgctgctaactactagttggtggct

SEQ ID NO: 805528 - DNA, 33 bp, Homo sapien
tatcccaatgctgctacctactagttggtggct

SEQ ID NO: 805529 - DNA, 33 bp, Homo sapien
cacaaccgcaatgggcaaagtatgaggaaggca

SEQ ID NO: 805530 - DNA, 33 bp, Homo sapien
cacaaccgcaatgggcgaagtatgaggaaggca

SEQ ID NO: 805531 - DNA, 33 bp, Homo sapien
tctttcagtgactgaagggttaaacatcagtac

SEQ ID NO: 805532 - DNA, 33 bp, Homo sapien
tctttcagtgactgaatggttaaacatcagtac

SEQ ID NO: 805533 - DNA, 33 bp, Homo sapien
cctcctcagctatgtgaaactgtaaatcgaatt

SEQ ID NO: 805534 - DNA, 33 bp, Homo sapien
cctcctcagctatgtggaactgtaaatcgaatt

SEQ ID NO: 805535 - DNA, 33 bp, Homo sapien
gcgcgaaaacagactaatacgtatggtaagccc

SEQ ID NO: 805536 - DNA, 33 bp, Homo sapien
gcgcgaaaacagactagtacgtatggtaagccc

SEQ ID NO: 805537 - DNA, 33 bp, Homo sapien
catagggttgagtcgccgcaggtaatacttgat

SEQ ID NO: 805538 - DNA, 33 bp, Homo sapien
catagggttgagtcgctgcaggtaatacttgat

SEQ ID NO: 805539 - DNA, 33 bp, Homo sapien
ctcagtccccggggcaaagcctgattgactgtg

SEQ ID NO: 805540 - DNA, 33 bp, Homo sapien
ctcagtccccggggcagagcctgattgactgtg

SEQ ID NO: 805541 - DNA, 33 bp, Homo sapien
taggcccatctgtgcaggttgtctctgttggct

SEQ ID NO: 805542 - DNA, 33 bp, Homo sapien
taggcccatctgtgcatgttgtctctgttggct

SEQ ID NO: 805543 - DNA, 33 bp, Homo sapien
ggatgaaactcaccaggaggacttgggatggag

SEQ ID NO: 805544 - DNA, 33 bp, Homo sapien
ggatgaaactcaccagtaggacttgggatggag

SEQ ID NO: 805545 - DNA, 33 bp, Homo sapien
actgacccatctcctcactggaccaggttctct

SEQ ID NO: 805546 - DNA, 33 bp, Homo sapien
actgacccatctcctcgctggaccaggttctct

SEQ ID NO: 805547 - DNA, 33 bp, Homo sapien
aacaacctcaaccaaccggaacccagcaaggcc

SEQ ID NO: 805548 - DNA, 33 bp, Homo sapien
aacaacctcaaccaactggaacccagcaaggcc

SEQ ID NO: 805549 - DNA, 33 bp, Homo sapien
acacatctcgtgaacgaatagcattcccgactg

SEQ ID NO: 805550 - DNA, 33 bp, Homo sapien
acacatctcgtgaacggatagcattcccgactg

SEQ ID NO: 805551 - DNA, 33 bp, Homo sapien
acaagctggggcttagcaatctgtacatttaac

SEQ ID NO: 805552 - DNA, 33 bp, Homo sapien
acaagctggggcttaggaatctgtacatttaac

SEQ ID NO: 805553 - DNA, 33 bp, Homo sapien
tccctagcctttgcacacactcttctcttccgc

SEQ ID NO: 805554 - DNA, 33 bp, Homo sapien
tccctagcctttgcacgcactcttctcttccgc

SEQ ID NO: 805555 - DNA, 33 bp, Homo sapien
aacgaacaaagatgtaagaaagaggaaggagaa

SEQ ID NO: 805556 - DNA, 33 bp, Homo sapien
aacgaacaaagatgtaggaaagaggaaggagaa

SEQ ID NO: 805557 - DNA, 33 bp, Homo sapien
tcagcaaaaatgataacggcaccagggctagtt

SEQ ID NO: 805558 - DNA, 33 bp, Homo sapien
tcagcaaaaatgataatggcaccagggctagtt

SEQ ID NO: 805559 - DNA, 33 bp, Homo sapien
aacaactgggaaataacgtgcaaaacagagctt

SEQ ID NO: 805560 - DNA, 33 bp, Homo sapien
aacaactgggaaataatgtgcaaaacagagctt

SEQ ID NO: 805561 - DNA, 33 bp, Homo sapien
gtttatgggctaaaccaaagctctgttttgcac

SEQ ID NO: 805562 - DNA, 33 bp, Homo sapien
gtttatgggctaaaccgaagctctgttttgcac

SEQ ID NO: 805563 - DNA, 33 bp, Homo sapien
ctctgttctttctaaccgcacatccactccacc

SEQ ID NO: 805564 - DNA, 33 bp, Homo sapien
ctctgttctttctaactgcacatccactccacc

SEQ ID NO: 805565 - DNA, 33 bp, Homo sapien
atcttttctgagaatagcgccagtccacatctg

SEQ ID NO: 805566 - DNA, 33 bp, Homo sapien
atcttttctgagaatatcgccagtccacatctg

SEQ ID NO: 805567 - DNA, 33 bp, Homo sapien
ttactttggcagggacaactgtgatccaggcac

SEQ ID NO: 805568 - DNA, 33 bp, Homo sapien
ttactttggcagggacgactgtgatccaggcac

SEQ ID NO: 805569 - DNA, 33 bp, Homo sapien
aggaaatacaaggacccgagggatatgctatat

SEQ ID NO: 805570 - DNA, 33 bp, Homo sapien
aggaaatacaaggacctgagggatatgctatat

SEQ ID NO: 805571 - DNA, 33 bp, Homo sapien
gacagcttcctgcgacacccttctcccctgcca

SEQ ID NO: 805572 - DNA, 33 bp, Homo sapien
gacagcttcctgcgactcccttctcccctgcca

SEQ ID NO: 805573 - DNA, 33 bp, Homo sapien
ccctcagatgccatgacggtacctgcagcaaag

SEQ ID NO: 805574 - DNA, 33 bp, Homo sapien
ccctcagatgccatgatggtacctgcagcaaag

SEQ ID NO: 805575 - DNA, 33 bp, Homo sapien
cctacagaacatgataccttagccttgcctacc

SEQ ID NO: 805576 - DNA, 33 bp, Homo sapien
cctacagaacatgatagcttagccttgcctacc

SEQ ID NO: 805577 - DNA, 33 bp, Homo sapien
gctctgctttcatttacaagagaccgtccacac

SEQ ID NO: 805578 - DNA, 33 bp, Homo sapien
gctctgctttcatttataagagaccgtccacac

SEQ ID NO: 805579 - DNA, 33 bp, Homo sapien
aatctaggtcttgcccaagctgcctttccatct

SEQ ID NO: 805580 - DNA, 33 bp, Homo sapien
aatctaggtcttgccccagctgcctttccatct

SEQ ID NO: 805581 - DNA, 33 bp, Homo sapien
atttggatataaacacaatagaaccagtttgaa

SEQ ID NO: 805582 - DNA, 33 bp, Homo sapien
atttggatataaacacgatagaaccagtttgaa

SEQ ID NO: 805583 - DNA, 33 bp, Homo sapien
aaacatttgctgagtacgtgaatgaatcttggg

SEQ ID NO: 805584 - DNA, 33 bp, Homo sapien
aaacatttgctgagtatgtgaatgaatcttggg

SEQ ID NO: 805585 - DNA, 33 bp, Homo sapien
tgaagacaatgtggccagatccttccattttta

SEQ ID NO: 805586 - DNA, 33 bp, Homo sapien
tgaagacaatgtggcccgatccttccattttta

SEQ ID NO: 805587 - DNA, 33 bp, Homo sapien
tggcatccgtaacctcaatgtagacttcagtta

SEQ ID NO: 805588 - DNA, 33 bp, Homo sapien
tggcatccgtaacctcgatgtagacttcagtta

SEQ ID NO: 805589 - DNA, 33 bp, Homo sapien
gttctgaagcccaataaagtggaggatagtctt

SEQ ID NO: 805590 - DNA, 33 bp, Homo sapien
gttctgaagcccaatagagtggaggatagtctt

SEQ ID NO: 805591 - DNA, 33 bp, Homo sapien
actggccagtcttggcagatagaccctgtacag

SEQ ID NO: 805592 - DNA, 33 bp, Homo sapien
actggccagtcttggcggatagaccctgtacag

SEQ ID NO: 805593 - DNA, 33 bp, Homo sapien
taatacaactgtttagcacctggcttatactat

SEQ ID NO: 805594 - DNA, 33 bp, Homo sapien
taatacaactgtttagtacctggcttatactat

SEQ ID NO: 805595 - DNA, 33 bp, Homo sapien
ctctaccctcagtgaaatccagttgtcttaaac

SEQ ID NO: 805596 - DNA, 33 bp, Homo sapien
ctctaccctcagtgaattccagttgtcttaaac

SEQ ID NO: 805597 - DNA, 33 bp, Homo sapien
tgaaagcacagggaggaaagatgcagagtaaca

SEQ ID NO: 805598 - DNA, 33 bp, Homo sapien
tgaaagcacagggagggaagatgcagagtaaca

SEQ ID NO: 805599 - DNA, 33 bp, Homo sapien
tactctctaccatgccccctttcaaagttgata

SEQ ID NO: 805600 - DNA, 33 bp, Homo sapien
tactctctaccatgcctcctttcaaagttgata

SEQ ID NO: 805601 - DNA, 33 bp, Homo sapien
acttccaggtgataaagttaggcatgaagctca

SEQ ID NO: 805602 - DNA, 33 bp, Homo sapien
acttccaggtgataaatttaggcatgaagctca

SEQ ID NO: 805603 - DNA, 33 bp, Homo sapien
agggctgtggaaaaccaacacctcaatgattcc

SEQ ID NO: 805604 - DNA, 33 bp, Homo sapien
agggctgtggaaaaccgacacctcaatgattcc

SEQ ID NO: 805605 - DNA, 33 bp, Homo sapien
gcaaaaatcccagatacatgattgcacctgaaa

SEQ ID NO: 805606 - DNA, 33 bp, Homo sapien
gcaaaaatcccagatatatgattgcacctgaaa

SEQ ID NO: 805607 - DNA, 33 bp, Homo sapien
ctgttgagtgcgtgccaacccaggcaaactggc

SEQ ID NO: 805608 - DNA, 33 bp, Homo sapien
ctgttgagtgcgtgccgacccaggcaaactggc

SEQ ID NO: 805609 - DNA, 33 bp, Homo sapien
tatgaccagtcttaggaaggaacacttcaaggt

SEQ ID NO: 805610 - DNA, 33 bp, Homo sapien
tatgaccagtcttagggaggaacacttcaaggt

SEQ ID NO: 805611 - DNA, 33 bp, Homo sapien
ctttcttcataaccacaaactgtatttccagca

SEQ ID NO: 805612 - DNA, 33 bp, Homo sapien
ctttcttcataaccacgaactgtatttccagca

SEQ ID NO: 805613 - DNA, 33 bp, Homo sapien
attcaaaagtgattggcatttgcaagacagaga

SEQ ID NO: 805614 - DNA, 33 bp, Homo sapien
attcaaaagtgattgggatttgcaagacagaga

SEQ ID NO: 805615 - DNA, 33 bp, Homo sapien
tcaagttcaaactttaccctgtgctccacttcc

SEQ ID NO: 805616 - DNA, 33 bp, Homo sapien
tcaagttcaaactttatcctgtgctccacttcc

SEQ ID NO: 805617 - DNA, 33 bp, Homo sapien
actgctctgaactaccaggggatttctgtgggt

SEQ ID NO: 805618 - DNA, 33 bp, Homo sapien
actgctctgaactaccgggggatttctgtgggt

SEQ ID NO: 805619 - DNA, 33 bp, Homo sapien
taatgagccagatgtcaaatatttcaggcttga

SEQ ID NO: 805620 - DNA, 33 bp, Homo sapien
taatgagccagatgtcgaatatttcaggcttga

SEQ ID NO: 805621 - DNA, 33 bp, Homo sapien
agggggcttgagactcagagacagcagttggtg

SEQ ID NO: 805622 - DNA, 33 bp, Homo sapien
agggggcttgagactccgagacagcagttggtg

SEQ ID NO: 805623 - DNA, 33 bp, Homo sapien
tatgtaatatctgagcaagggactctcctatga

SEQ ID NO: 805624 - DNA, 33 bp, Homo sapien
tatgtaatatctgagcgagggactctcctatga

SEQ ID NO: 805625 - DNA, 33 bp, Homo sapien
ttccggtcattgaacacactttattcatttctg

SEQ ID NO: 805626 - DNA, 33 bp, Homo sapien
ttccggtcattgaacatactttattcatttctg

SEQ ID NO: 805627 - DNA, 33 bp, Homo sapien
ttgatcccacactcccaagagaattagtcacta

SEQ ID NO: 805628 - DNA, 33 bp, Homo sapien
ttgatcccacactcccgagagaattagtcacta

SEQ ID NO: 805629 - DNA, 33 bp, Homo sapien
tgttatttccattttacacagtgcttgaatgac

SEQ ID NO: 805630 - DNA, 33 bp, Homo sapien
tgttatttccattttatacagtgcttgaatgac

SEQ ID NO: 805631 - DNA, 33 bp, Homo sapien
gtgacaaactgcgctgaacgacttgcctgtcgc

SEQ ID NO: 805632 - DNA, 33 bp, Homo sapien
gtgacaaactgcgctggacgacttgcctgtcgc

SEQ ID NO: 805633 - DNA, 33 bp, Homo sapien
agtgttaacttaccagaatcagaattatctttc

SEQ ID NO: 805634 - DNA, 33 bp, Homo sapien
agtgttaacttaccagcatcagaattatctttc

SEQ ID NO: 805635 - DNA, 33 bp, Homo sapien
aagtttcagttatagaaatgaagctgtgattat

SEQ ID NO: 805636 - DNA, 33 bp, Homo sapien
aagtttcagttatagagatgaagctgtgattat

SEQ ID NO: 805637 - DNA, 33 bp, Homo sapien
ctctgcaatgtcgcaacagaaattctcacatgg

SEQ ID NO: 805638 - DNA, 33 bp, Homo sapien
ctctgcaatgtcgcaatagaaattctcacatgg

SEQ ID NO: 805639 - DNA, 33 bp, Homo sapien
taacaaggatgtgaaaacattggaccctctgtg

SEQ ID NO: 805640 - DNA, 33 bp, Homo sapien
taacaaggatgtgaaaccattggaccctctgtg

SEQ ID NO: 805641 - DNA, 33 bp, Homo sapien
gtagtgtgaaagcaaccaaatggatgtagcagt

SEQ ID NO: 805642 - DNA, 33 bp, Homo sapien
gtagtgtgaaagcaactaaatggatgtagcagt

SEQ ID NO: 805643 - DNA, 33 bp, Homo sapien
cttcttaatcaactcaatgactcatgtgccatg

SEQ ID NO: 805644 - DNA, 33 bp, Homo sapien
cttcttaatcaactcagtgactcatgtgccatg

SEQ ID NO: 805645 - DNA, 33 bp, Homo sapien
atatggagatgttcaaactcatgtgaaatgtaa

SEQ ID NO: 805646 - DNA, 33 bp, Homo sapien
atatggagatgttcaacctcatgtgaaatgtaa

SEQ ID NO: 805647 - DNA, 33 bp, Homo sapien
gtgtggcattatcttgcaaaatcaaacactcac

SEQ ID NO: 805648 - DNA, 33 bp, Homo sapien
gtgtggcattatcttgtaaaatcaaacactcac

SEQ ID NO: 805649 - DNA, 33 bp, Homo sapien
tctatttatcatctagccattatccatcaacct

SEQ ID NO: 805650 - DNA, 33 bp, Homo sapien
tctatttatcatctaggcattatccatcaacct

SEQ ID NO: 805651 - DNA, 33 bp, Homo sapien
gatagattgattgatcaactgatagataaaagc

SEQ ID NO: 805652 - DNA, 33 bp, Homo sapien
gatagattgattgatcgactgatagataaaagc

SEQ ID NO: 805653 - DNA, 33 bp, Homo sapien
taactctgggacctccaatctaatgagaacaga

SEQ ID NO: 805654 - DNA, 33 bp, Homo sapien
taactctgggacctccgatctaatgagaacaga

SEQ ID NO: 805655 - DNA, 33 bp, Homo sapien
gttatgaacagagtataagtccatgagggcaag

SEQ ID NO: 805656 - DNA, 33 bp, Homo sapien
gttatgaacagagtatgagtccatgagggcaag

SEQ ID NO: 805657 - DNA, 33 bp, Homo sapien
ggcctgctgtgttttgcagtatgcctgggattc

SEQ ID NO: 805658 - DNA, 33 bp, Homo sapien
ggcctgctgtgttttgtagtatgcctgggattc

SEQ ID NO: 805659 - DNA, 33 bp, Homo sapien
gccagctaagggcctcaaagttgtgtgttttct

SEQ ID NO: 805660 - DNA, 33 bp, Homo sapien
gccagctaagggcctcgaagttgtgtgttttct

SEQ ID NO: 805661 - DNA, 33 bp, Homo sapien
tctgaggattcaaaaccaaaatgctattcctaa

SEQ ID NO: 805662 - DNA, 33 bp, Homo sapien
tctgaggattcaaaactaaaatgctattcctaa

SEQ ID NO: 805663 - DNA, 33 bp, Homo sapien
ctccatgacttccccaggtactcaactgcccat

SEQ ID NO: 805664 - DNA, 33 bp, Homo sapien
ctccatgacttccccatgtactcaactgcccat

SEQ ID NO: 805665 - DNA, 33 bp, Homo sapien
aggtgacaaatgttaacaatgcgttggctgcac

SEQ ID NO: 805666 - DNA, 33 bp, Homo sapien
aggtgacaaatgttaataatgcgttggctgcac

SEQ ID NO: 805667 - DNA, 33 bp, Homo sapien
cctttgtctgtttgaaatattgggcttttgtct

SEQ ID NO: 805668 - DNA, 33 bp, Homo sapien
cctttgtctgtttgaagtattgggcttttgtct

SEQ ID NO: 805669 - DNA, 33 bp, Homo sapien
tgggctgaaaataaatcagtgcattccaaactt

SEQ ID NO: 805670 - DNA, 33 bp, Homo sapien
tgggctgaaaataaatgagtgcattccaaactt

SEQ ID NO: 805671 - DNA, 33 bp, Homo sapien
tgctaacacctttctaacacttgctaatctttc

SEQ ID NO: 805672 - DNA, 33 bp, Homo sapien
tgctaacacctttctagcacttgctaatctttc

SEQ ID NO: 805673 - DNA, 33 bp, Homo sapien
gcatatttttgttgggaagattatttcagcatt

SEQ ID NO: 805674 - DNA, 33 bp, Homo sapien
gcatatttttgttgggtagattatttcagcatt

SEQ ID NO: 805675 - DNA, 33 bp, Homo sapien
cttctggcttcagaaccgagctgatgcagtgtc

SEQ ID NO: 805676 - DNA, 33 bp, Homo sapien
cttctggcttcagaacggagctgatgcagtgtc

SEQ ID NO: 805677 - DNA, 33 bp, Homo sapien
ggactgggcctagtaccaacttgttctgatact

SEQ ID NO: 805678 - DNA, 33 bp, Homo sapien
ggactgggcctagtactaacttgttctgatact

SEQ ID NO: 805679 - DNA, 33 bp, Homo sapien
tttgcagatccttcaacgtactaatactgtaat

SEQ ID NO: 805680 - DNA, 33 bp, Homo sapien
tttgcagatccttcaaggtactaatactgtaat

SEQ ID NO: 805681 - DNA, 33 bp, Homo sapien
agtggccacagcccttaaagacatggaaatcta

SEQ ID NO: 805682 - DNA, 33 bp, Homo sapien
agtggccacagcccttgaagacatggaaatcta

SEQ ID NO: 805683 - DNA, 33 bp, Homo sapien
gagatgaccaacatatgaactagtactgccatg

SEQ ID NO: 805684 - DNA, 33 bp, Homo sapien
gagatgaccaacatattaactagtactgccatg

SEQ ID NO: 805685 - DNA, 33 bp, Homo sapien
ctgttttttgtatcataacacaggtatacacca

SEQ ID NO: 805686 - DNA, 33 bp, Homo sapien
ctgttttttgtatcattacacaggtatacacca

SEQ ID NO: 805687 - DNA, 33 bp, Homo sapien
aacacacataccaagaacttattacatgacaga

SEQ ID NO: 805688 - DNA, 33 bp, Homo sapien
aacacacataccaagagcttattacatgacaga

SEQ ID NO: 805689 - DNA, 33 bp, Homo sapien
ataatgatgctttatacagccagtgaagttaat

SEQ ID NO: 805690 - DNA, 33 bp, Homo sapien
ataatgatgctttatatagccagtgaagttaat

SEQ ID NO: 805691 - DNA, 33 bp, Homo sapien
tagtatgtggtacttacctttgagattctccca

SEQ ID NO: 805692 - DNA, 33 bp, Homo sapien
tagtatgtggtacttatctttgagattctccca

SEQ ID NO: 805693 - DNA, 33 bp, Homo sapien
tcatcttcccattttacagattttatggaaaga

SEQ ID NO: 805694 - DNA, 33 bp, Homo sapien
tcatcttcccattttatagattttatggaaaga

SEQ ID NO: 805695 - DNA, 33 bp, Homo sapien
gtaaggatggttccaagtaggttgactatataa

SEQ ID NO: 805696 - DNA, 33 bp, Homo sapien
gtaaggatggttccaattaggttgactatataa

SEQ ID NO: 805697 - DNA, 33 bp, Homo sapien
gagccaaagtagttaacgggctacgaaacattt

SEQ ID NO: 805698 - DNA, 33 bp, Homo sapien
gagccaaagtagttaaggggctacgaaacattt

SEQ ID NO: 805699 - DNA, 33 bp, Homo sapien
gataatttctaggctaaccataatttatgacct

SEQ ID NO: 805700 - DNA, 33 bp, Homo sapien
gataatttctaggctatccataatttatgacct

SEQ ID NO: 805701 - DNA, 33 bp, Homo sapien
ttcctgagcccattctaacttacactttgaaag

SEQ ID NO: 805702 - DNA, 33 bp, Homo sapien
ttcctgagcccattctgacttacactttgaaag

SEQ ID NO: 805703 - DNA, 33 bp, Homo sapien
attttgatggattgaaaaaaagagctatacggt

SEQ ID NO: 805704 - DNA, 33 bp, Homo sapien
attttgatggattgaagaaaagagctatacggt

SEQ ID NO: 805705 - DNA, 33 bp, Homo sapien
gctgccttgctcttgacaactacttgtaccagt

SEQ ID NO: 805706 - DNA, 33 bp, Homo sapien
gctgccttgctcttgagaactacttgtaccagt

SEQ ID NO: 805707 - DNA, 33 bp, Homo sapien
aatctgcaaattttccaaagaaaggcaacaatg

SEQ ID NO: 805708 - DNA, 33 bp, Homo sapien
aatctgcaaattttccgaagaaaggcaacaatg

SEQ ID NO: 805709 - DNA, 33 bp, Homo sapien
ttgagaatgtaggtaaccccagctcaaccctca

SEQ ID NO: 805710 - DNA, 33 bp, Homo sapien
ttgagaatgtaggtaatcccagctcaaccctca

SEQ ID NO: 805711 - DNA, 33 bp, Homo sapien
ccacctgctggttccaataagaatagcaagcct

SEQ ID NO: 805712 - DNA, 33 bp, Homo sapien
ccacctgctggttccagtaagaatagcaagcct

SEQ ID NO: 805713 - DNA, 33 bp, Homo sapien
aggagaggtgctaaaaaacccgaggttcttctc

SEQ ID NO: 805714 - DNA, 33 bp, Homo sapien
aggagaggtgctaaaagacccgaggttcttctc

SEQ ID NO: 805715 - DNA, 33 bp, Homo sapien
ttcaggacataggcccaaacaaagccttcatga

SEQ ID NO: 805716 - DNA, 33 bp, Homo sapien
ttcaggacataggcccgaacaaagccttcatga

SEQ ID NO: 805717 - DNA, 33 bp, Homo sapien
ttggtgtcttcaaaaccctgctttttataatga

SEQ ID NO: 805718 - DNA, 33 bp, Homo sapien
ttggtgtcttcaaaactctgctttttataatga

SEQ ID NO: 805719 - DNA, 33 bp, Homo sapien
atttgcattttgctaacgaataataatgctgag

SEQ ID NO: 805720 - DNA, 33 bp, Homo sapien
atttgcattttgctaatgaataataatgctgag

SEQ ID NO: 805721 - DNA, 33 bp, Homo sapien
aacaactctattgcacactctcttggtgggact

SEQ ID NO: 805722 - DNA, 33 bp, Homo sapien
aacaactctattgcacgctctcttggtgggact

SEQ ID NO: 805723 - DNA, 33 bp, Homo sapien
tgaccttctttccctaccctgggcaactgattt

SEQ ID NO: 805724 - DNA, 33 bp, Homo sapien
tgaccttctttccctatcctgggcaactgattt

SEQ ID NO: 805725 - DNA, 33 bp, Homo sapien
gcagatgcctatggtcacatctactctggaggc

SEQ ID NO: 805726 - DNA, 33 bp, Homo sapien
gcagatgcctatggtcgcatctactctggaggc

SEQ ID NO: 805727 - DNA, 33 bp, Homo sapien
tggtggggttgactcaggtgtttgctggcagca

SEQ ID NO: 805728 - DNA, 33 bp, Homo sapien
tggtggggttgactcatgtgtttgctggcagca

SEQ ID NO: 805729 - DNA, 33 bp, Homo sapien
cagcactgctctcctgaaaagccaaccccaata

SEQ ID NO: 805730 - DNA, 33 bp, Homo sapien
cagcactgctctcctgcaaagccaaccccaata

SEQ ID NO: 805731 - DNA, 33 bp, Homo sapien
ctcatcatcaagagcacgcttggaggaacccga

SEQ ID NO: 805732 - DNA, 33 bp, Homo sapien
ctcatcatcaagagcaggcttggaggaacccga

SEQ ID NO: 805733 - DNA, 33 bp, Homo sapien
acacatgaaaagtacccggcatagttagtgaat

SEQ ID NO: 805734 - DNA, 33 bp, Homo sapien
acacatgaaaagtacctggcatagttagtgaat

SEQ ID NO: 805735 - DNA, 33 bp, Homo sapien
tggcctcataatctcacatcttataagtcccat

SEQ ID NO: 805736 - DNA, 33 bp, Homo sapien
tggcctcataatctcatatcttataagtcccat

SEQ ID NO: 805737 - DNA, 33 bp, Homo sapien
tcccggagagcccttacatctgcagcagacttt

SEQ ID NO: 805738 - DNA, 33 bp, Homo sapien
tcccggagagcccttagatctgcagcagacttt

SEQ ID NO: 805739 - DNA, 33 bp, Homo sapien
aacttttcacagtaaaaaagtttagaatgaatc

SEQ ID NO: 805740 - DNA, 33 bp, Homo sapien
aacttttcacagtaaagaagtttagaatgaatc

SEQ ID NO: 805741 - DNA, 33 bp, Homo sapien
caagcacctgccaaacacccaggattacaaaaa

SEQ ID NO: 805742 - DNA, 33 bp, Homo sapien
caagcacctgccaaacgcccaggattacaaaaa

SEQ ID NO: 805743 - DNA, 33 bp, Homo sapien
ctgctaggtctttggccattttcagatattatg

SEQ ID NO: 805744 - DNA, 33 bp, Homo sapien
ctgctaggtctttggctattttcagatattatg

SEQ ID NO: 805745 - DNA, 33 bp, Homo sapien
ttcaccagggtcacaacctctaatacctagagg

SEQ ID NO: 805746 - DNA, 33 bp, Homo sapien
ttcaccagggtcacaatctctaatacctagagg

SEQ ID NO: 805747 - DNA, 33 bp, Homo sapien
agccccttactgcaataaaataaaatcagaatt

SEQ ID NO: 805748 - DNA, 33 bp, Homo sapien
agccccttactgcaatcaaataaaatcagaatt

SEQ ID NO: 805749 - DNA, 33 bp, Homo sapien
taagaggctgaaaagacgtttgtgaaaatcatg

SEQ ID NO: 805750 - DNA, 33 bp, Homo sapien
taagaggctgaaaagatgtttgtgaaaatcatg

SEQ ID NO: 805751 - DNA, 33 bp, Homo sapien
ttcccggagctccaaaattctcagttataattc

SEQ ID NO: 805752 - DNA, 33 bp, Homo sapien
ttcccggagctccaaagttctcagttataattc

SEQ ID NO: 805753 - DNA, 33 bp, Homo sapien
aggcagagctaggattcaaaattgggtgtgact

SEQ ID NO: 805754 - DNA, 33 bp, Homo sapien
aggcagagctaggattgaaaattgggtgtgact

SEQ ID NO: 805755 - DNA, 33 bp, Homo sapien
aaatatcctctgcttaagtcattaccagtttgg

SEQ ID NO: 805756 - DNA, 33 bp, Homo sapien
aaatatcctctgcttaggtcattaccagtttgg

SEQ ID NO: 805757 - DNA, 33 bp, Homo sapien
caaactctgttagctgcagatcctgaactcatg

SEQ ID NO: 805758 - DNA, 33 bp, Homo sapien
caaactctgttagctgtagatcctgaactcatg

SEQ ID NO: 805759 - DNA, 33 bp, Homo sapien
tcctagtcagatgaggaaccaggacaaaattgc

SEQ ID NO: 805760 - DNA, 33 bp, Homo sapien
tcctagtcagatgagggaccaggacaaaattgc

SEQ ID NO: 805761 - DNA, 33 bp, Homo sapien
agtaggagatgagagacccaatgagaaaaactg

SEQ ID NO: 805762 - DNA, 33 bp, Homo sapien
agtaggagatgagagatccaatgagaaaaactg

SEQ ID NO: 805763 - DNA, 33 bp, Homo sapien
tacattgtgtatgaaaaattatagtggcactgg

SEQ ID NO: 805764 - DNA, 33 bp, Homo sapien
tacattgtgtatgaaagattatagtggcactgg

SEQ ID NO: 805765 - DNA, 33 bp, Homo sapien
gagttcagaggagattcaagtatcttaggatgg

SEQ ID NO: 805766 - DNA, 33 bp, Homo sapien
gagttcagaggagattgaagtatcttaggatgg

SEQ ID NO: 805767 - DNA, 33 bp, Homo sapien
caagatacctgagtcccagtgaactgagatgac

SEQ ID NO: 805768 - DNA, 33 bp, Homo sapien
caagatacctgagtcctagtgaactgagatgac

SEQ ID NO: 805769 - DNA, 33 bp, Homo sapien
cactgagcaggtatgaagatgggccttgtttcc

SEQ ID NO: 805770 - DNA, 33 bp, Homo sapien
cactgagcaggtatgaggatgggccttgtttcc

SEQ ID NO: 805771 - DNA, 33 bp, Homo sapien
ctcgataatctcacaactggtcggtggaatcac

SEQ ID NO: 805772 - DNA, 33 bp, Homo sapien
ctcgataatctcacaattggtcggtggaatcac

SEQ ID NO: 805773 - DNA, 33 bp, Homo sapien
aacataggcctttcacccctgcatggcctaaat

SEQ ID NO: 805774 - DNA, 33 bp, Homo sapien
aacataggcctttcacgcctgcatggcctaaat

SEQ ID NO: 805775 - DNA, 33 bp, Homo sapien
aaagaaacacacactacgtctccatccttcatt

SEQ ID NO: 805776 - DNA, 33 bp, Homo sapien
aaagaaacacacactatgtctccatccttcatt

SEQ ID NO: 805777 - DNA, 33 bp, Homo sapien
tttaacagaacctaggaacattcaaatgtggac

SEQ ID NO: 805778 - DNA, 33 bp, Homo sapien
tttaacagaacctaggcacattcaaatgtggac

SEQ ID NO: 805779 - DNA, 33 bp, Homo sapien
gaaagcaccaactctccgaaaactctcttggag

SEQ ID NO: 805780 - DNA, 33 bp, Homo sapien
gaaagcaccaactctctgaaaactctcttggag

SEQ ID NO: 805781 - DNA, 33 bp, Homo sapien
atgtggccacacaagaagttctgagaggaaaca

SEQ ID NO: 805782 - DNA, 33 bp, Homo sapien
atgtggccacacaagaggttctgagaggaaaca

SEQ ID NO: 805783 - DNA, 33 bp, Homo sapien
gctcaaggaggactacaagtaaaggttgttcat

SEQ ID NO: 805784 - DNA, 33 bp, Homo sapien
gctcaaggaggactacgagtaaaggttgttcat

SEQ ID NO: 805785 - DNA, 33 bp, Homo sapien
tacgttggttaatggacaaaaattgcagtgagc

SEQ ID NO: 805786 - DNA, 33 bp, Homo sapien
tacgttggttaatggataaaaattgcagtgagc

SEQ ID NO: 805787 - DNA, 33 bp, Homo sapien
ctatagctgtaattgtaaaatcaaaatacacaa

SEQ ID NO: 805788 - DNA, 33 bp, Homo sapien
ctatagctgtaattgtgaaatcaaaatacacaa

SEQ ID NO: 805789 - DNA, 33 bp, Homo sapien
ctaaaagtttggaagcagagatatactatgtac

SEQ ID NO: 805790 - DNA, 33 bp, Homo sapien
ctaaaagtttggaagcggagatatactatgtac

SEQ ID NO: 805791 - DNA, 33 bp, Homo sapien
aggtgtgcattaaaccaagccagtttctagtta

SEQ ID NO: 805792 - DNA, 33 bp, Homo sapien
aggtgtgcattaaaccgagccagtttctagtta

SEQ ID NO: 805793 - DNA, 33 bp, Homo sapien
gttgtaatcacatctcactgagggctatagagc

SEQ ID NO: 805794 - DNA, 33 bp, Homo sapien
gttgtaatcacatctcgctgagggctatagagc

SEQ ID NO: 805795 - DNA, 33 bp, Homo sapien
ttccaatgctgagacagacgcgcaagtcctcgg

SEQ ID NO: 805796 - DNA, 33 bp, Homo sapien
ttccaatgctgagacatacgcgcaagtcctcgg

SEQ ID NO: 805797 - DNA, 33 bp, Homo sapien
actcacctctttaagaaactagagggagaaaaa

SEQ ID NO: 805798 - DNA, 33 bp, Homo sapien
actcacctctttaagagactagagggagaaaaa

SEQ ID NO: 805799 - DNA, 33 bp, Homo sapien
cacaatactcaatttagaaccacacttcagtaa

SEQ ID NO: 805800 - DNA, 33 bp, Homo sapien
cacaatactcaatttataaccacacttcagtaa

SEQ ID NO: 805801 - DNA, 33 bp, Homo sapien
atgtatacatatgccacaacgtatcacactgta

SEQ ID NO: 805802 - DNA, 33 bp, Homo sapien
atgtatacatatgccagaacgtatcacactgta

SEQ ID NO: 805803 - DNA, 33 bp, Homo sapien
ttgtacccattagccaactcctttttatcctcc

SEQ ID NO: 805804 - DNA, 33 bp, Homo sapien
ttgtacccattagccagctcctttttatcctcc

SEQ ID NO: 805805 - DNA, 33 bp, Homo sapien
cctcatagcaattctcaagtattcttcttacct

SEQ ID NO: 805806 - DNA, 33 bp, Homo sapien
cctcatagcaattctcgagtattcttcttacct

SEQ ID NO: 805807 - DNA, 33 bp, Homo sapien
cacctgggtgataagcacagtaaccattagcta

SEQ ID NO: 805808 - DNA, 33 bp, Homo sapien
cacctgggtgataagcgcagtaaccattagcta

SEQ ID NO: 805809 - DNA, 33 bp, Homo sapien
tttaaagtgatgaaaacaaagttaatctagaat

SEQ ID NO: 805810 - DNA, 33 bp, Homo sapien
tttaaagtgatgaaaagaaagttaatctagaat

SEQ ID NO: 805811 - DNA, 33 bp, Homo sapien
caagtggtccagcttaacagatcacaaccacac

SEQ ID NO: 805812 - DNA, 33 bp, Homo sapien
caagtggtccagcttagcagatcacaaccacac

SEQ ID NO: 805813 - DNA, 33 bp, Homo sapien
ggccagatgatctctacgtttccttctatcatt

SEQ ID NO: 805814 - DNA, 33 bp, Homo sapien
ggccagatgatctctatgtttccttctatcatt

SEQ ID NO: 805815 - DNA, 33 bp, Homo sapien
tttgaaagtttcaataccaacactatcaaatat

SEQ ID NO: 805816 - DNA, 33 bp, Homo sapien
tttgaaagtttcaatagcaacactatcaaatat

SEQ ID NO: 805817 - DNA, 33 bp, Homo sapien
cagaaatcaagcctgacgtgtagcttctgtttg

SEQ ID NO: 805818 - DNA, 33 bp, Homo sapien
cagaaatcaagcctgaggtgtagcttctgtttg

SEQ ID NO: 805819 - DNA, 33 bp, Homo sapien
cccattctcccctgcaatccacacatcatatat

SEQ ID NO: 805820 - DNA, 33 bp, Homo sapien
cccattctcccctgcagtccacacatcatatat

SEQ ID NO: 805821 - DNA, 33 bp, Homo sapien
tccctgattaataatgccacttctctgtcactt

SEQ ID NO: 805822 - DNA, 33 bp, Homo sapien
tccctgattaataatgtcacttctctgtcactt

SEQ ID NO: 805823 - DNA, 33 bp, Homo sapien
aatcgagagatgtttaagtctaaggctccctga

SEQ ID NO: 805824 - DNA, 33 bp, Homo sapien
aatcgagagatgtttatgtctaaggctccctga

SEQ ID NO: 805825 - DNA, 33 bp, Homo sapien
tcagggtcattaaaacactgctatggtttgtaa

SEQ ID NO: 805826 - DNA, 33 bp, Homo sapien
tcagggtcattaaaacgctgctatggtttgtaa

SEQ ID NO: 805827 - DNA, 33 bp, Homo sapien
gggacagctttgggacaggatcgacattcctaa

SEQ ID NO: 805828 - DNA, 33 bp, Homo sapien
gggacagctttgggacgggatcgacattcctaa

SEQ ID NO: 805829 - DNA, 33 bp, Homo sapien
tagagactgaagtttcaaggagggcaagtgact

SEQ ID NO: 805830 - DNA, 33 bp, Homo sapien
tagagactgaagtttcgaggagggcaagtgact

SEQ ID NO: 805831 - DNA, 33 bp, Homo sapien
ccccttctcatcccaccgcagggatcttttgtc

SEQ ID NO: 805832 - DNA, 33 bp, Homo sapien
ccccttctcatcccactgcagggatcttttgtc

SEQ ID NO: 805833 - DNA, 33 bp, Homo sapien
acctagatttcaccaagcctgaagtttagccct

SEQ ID NO: 805834 - DNA, 33 bp, Homo sapien
acctagatttcaccaatcctgaagtttagccct

SEQ ID NO: 805835 - DNA, 33 bp, Homo sapien
attgtcagactgtacacgtccccgttctgacca

SEQ ID NO: 805836 - DNA, 33 bp, Homo sapien
attgtcagactgtacatgtccccgttctgacca

SEQ ID NO: 805837 - DNA, 33 bp, Homo sapien
ggaagcaattaagaaactcaacatactattcat

SEQ ID NO: 805838 - DNA, 33 bp, Homo sapien
ggaagcaattaagaaattcaacatactattcat

SEQ ID NO: 805839 - DNA, 33 bp, Homo sapien
tttgttactggataaaacggtgcttctgaagaa

SEQ ID NO: 805840 - DNA, 33 bp, Homo sapien
tttgttactggataaagcggtgcttctgaagaa

SEQ ID NO: 805841 - DNA, 33 bp, Homo sapien
actacccagtcttacacctgaatatctctttag

SEQ ID NO: 805842 - DNA, 33 bp, Homo sapien
actacccagtcttacagctgaatatctctttag

SEQ ID NO: 805843 - DNA, 33 bp, Homo sapien
tggctggtcatgcataagacttagaaacgaatg

SEQ ID NO: 805844 - DNA, 33 bp, Homo sapien
tggctggtcatgcataggacttagaaacgaatg

SEQ ID NO: 805845 - DNA, 33 bp, Homo sapien
taataatggccaaaatgaccataatgatcaact

SEQ ID NO: 805846 - DNA, 33 bp, Homo sapien
taataatggccaaaattaccataatgatcaact

SEQ ID NO: 805847 - DNA, 33 bp, Homo sapien
cattcatgtttctccaccctttcagccagctcc

SEQ ID NO: 805848 - DNA, 33 bp, Homo sapien
cattcatgtttctccatcctttcagccagctcc

SEQ ID NO: 805849 - DNA, 33 bp, Homo sapien
gttggttgacatcaacacttggtgttccttggc

SEQ ID NO: 805850 - DNA, 33 bp, Homo sapien
gttggttgacatcaacccttggtgttccttggc

SEQ ID NO: 805851 - DNA, 33 bp, Homo sapien
atacaccagaaaaacaatagactggcagtctgg

SEQ ID NO: 805852 - DNA, 33 bp, Homo sapien
atacaccagaaaaacactagactggcagtctgg

SEQ ID NO: 805853 - DNA, 33 bp, Homo sapien
gtctatatcttttacagtctgtctagagatact

SEQ ID NO: 805854 - DNA, 33 bp, Homo sapien
gtctatatcttttacattctgtctagagatact

SEQ ID NO: 805855 - DNA, 33 bp, Homo sapien
aatgggccatatgtgacaaaattaagagacaac

SEQ ID NO: 805856 - DNA, 33 bp, Homo sapien
aatgggccatatgtgataaaattaagagacaac

SEQ ID NO: 805857 - DNA, 33 bp, Homo sapien
ttggaggaagcctaagaagttcacaattgctat

SEQ ID NO: 805858 - DNA, 33 bp, Homo sapien
ttggaggaagcctaagcagttcacaattgctat

SEQ ID NO: 805859 - DNA, 33 bp, Homo sapien
tcccttatctgtaaaacgaaagccacagtagca

SEQ ID NO: 805860 - DNA, 33 bp, Homo sapien
tcccttatctgtaaaatgaaagccacagtagca

SEQ ID NO: 805861 - DNA, 33 bp, Homo sapien
tgttccatgttctgtaaagggatgaccttgtga

SEQ ID NO: 805862 - DNA, 33 bp, Homo sapien
tgttccatgttctgtagagggatgaccttgtga

SEQ ID NO: 805863 - DNA, 33 bp, Homo sapien
ccctgggcaggtgatcaaacctctctgtgcttc

SEQ ID NO: 805864 - DNA, 33 bp, Homo sapien
ccctgggcaggtgatcgaacctctctgtgcttc

SEQ ID NO: 805865 - DNA, 33 bp, Homo sapien
taatcatacaaactcacaggtcttcaactgtga

SEQ ID NO: 805866 - DNA, 33 bp, Homo sapien
taatcatacaaactcataggtcttcaactgtga

SEQ ID NO: 805867 - DNA, 33 bp, Homo sapien
attgttcttgaaacaaagctaaaagtgaggaaa

SEQ ID NO: 805868 - DNA, 33 bp, Homo sapien
attgttcttgaaacaaggctaaaagtgaggaaa

SEQ ID NO: 805869 - DNA, 33 bp, Homo sapien
atcactgaacattggacggtccaactaccctgt

SEQ ID NO: 805870 - DNA, 33 bp, Homo sapien
atcactgaacattggatggtccaactaccctgt

SEQ ID NO: 805871 - DNA, 33 bp, Homo sapien
tctaattaatcctccaaacaaaaatgatagcct

SEQ ID NO: 805872 - DNA, 33 bp, Homo sapien
tctaattaatcctccacacaaaaatgatagcct

SEQ ID NO: 805873 - DNA, 33 bp, Homo sapien
aaagtagtggtattggacattttgatgctcggg

SEQ ID NO: 805874 - DNA, 33 bp, Homo sapien
aaagtagtggtattgggcattttgatgctcggg

SEQ ID NO: 805875 - DNA, 33 bp, Homo sapien
acccaaggaaagagcccgagtaagtcctaagcc

SEQ ID NO: 805876 - DNA, 33 bp, Homo sapien
acccaaggaaagagcctgagtaagtcctaagcc

SEQ ID NO: 805877 - DNA, 33 bp, Homo sapien
gccatgaatgataagacagccatccaggaagca

SEQ ID NO: 805878 - DNA, 33 bp, Homo sapien
gccatgaatgataagagagccatccaggaagca

SEQ ID NO: 805879 - DNA, 33 bp, Homo sapien
gcaaacctagtaaaaacttctgatgcatccttt

SEQ ID NO: 805880 - DNA, 33 bp, Homo sapien
gcaaacctagtaaaaatttctgatgcatccttt

SEQ ID NO: 805881 - DNA, 33 bp, Homo sapien
ctggaaggaaagatgcaagcagcatagttttgc

SEQ ID NO: 805882 - DNA, 33 bp, Homo sapien
ctggaaggaaagatgcgagcagcatagttttgc

SEQ ID NO: 805883 - DNA, 33 bp, Homo sapien
gaccctctttgctacaagacatcttgcctctca

SEQ ID NO: 805884 - DNA, 33 bp, Homo sapien
gaccctctttgctacaggacatcttgcctctca

SEQ ID NO: 805885 - DNA, 33 bp, Homo sapien
tgtttcctgcaaggtcaatttcccaggtgaaag

SEQ ID NO: 805886 - DNA, 33 bp, Homo sapien
tgtttcctgcaaggtcgatttcccaggtgaaag

SEQ ID NO: 805887 - DNA, 33 bp, Homo sapien
tcttgccacattaagacacagagggaaaaacat

SEQ ID NO: 805888 - DNA, 33 bp, Homo sapien
tcttgccacattaagatacagagggaaaaacat

SEQ ID NO: 805889 - DNA, 33 bp, Homo sapien
gtgtaaatctcagacaggtttttcctgggacct

SEQ ID NO: 805890 - DNA, 33 bp, Homo sapien
gtgtaaatctcagacatgtttttcctgggacct

SEQ ID NO: 805891 - DNA, 33 bp, Homo sapien
tcagacacattaaggcaagaggtcccaggaaaa

SEQ ID NO: 805892 - DNA, 33 bp, Homo sapien
tcagacacattaaggccagaggtcccaggaaaa

SEQ ID NO: 805893 - DNA, 33 bp, Homo sapien
ggttctcatacctttcaccaaactgctattcag

SEQ ID NO: 805894 - DNA, 33 bp, Homo sapien
ggttctcatacctttcgccaaactgctattcag

SEQ ID NO: 805895 - DNA, 33 bp, Homo sapien
gtagaggaaaagagcacggtgccaggaagcaaa

SEQ ID NO: 805896 - DNA, 33 bp, Homo sapien
gtagaggaaaagagcatggtgccaggaagcaaa

SEQ ID NO: 805897 - DNA, 33 bp, Homo sapien
ttaggtagaaaaagataaaagtggtaggcaaag

SEQ ID NO: 805898 - DNA, 33 bp, Homo sapien
ttaggtagaaaaagatgaaagtggtaggcaaag

SEQ ID NO: 805899 - DNA, 33 bp, Homo sapien
gggaggcactcattgccattgtttgattattta

SEQ ID NO: 805900 - DNA, 33 bp, Homo sapien
gggaggcactcattgctattgtttgattattta

SEQ ID NO: 805901 - DNA, 33 bp, Homo sapien
aataaaggttgttcaaattcctaaaataggaag

SEQ ID NO: 805902 - DNA, 33 bp, Homo sapien
aataaaggttgttcaagttcctaaaataggaag

SEQ ID NO: 805903 - DNA, 33 bp, Homo sapien
ttgcattggttattcccctgtctgtcaggaatg

SEQ ID NO: 805904 - DNA, 33 bp, Homo sapien
ttgcattggttattcctctgtctgtcaggaatg

SEQ ID NO: 805905 - DNA, 33 bp, Homo sapien
ccttgcctttgctcaccatgcttcaaacatcct

SEQ ID NO: 805906 - DNA, 33 bp, Homo sapien
ccttgcctttgctcacgatgcttcaaacatcct

SEQ ID NO: 805907 - DNA, 33 bp, Homo sapien
ttaggacacgggcacacgtgagtttaggagtgg

SEQ ID NO: 805908 - DNA, 33 bp, Homo sapien
ttaggacacgggcacatgtgagtttaggagtgg

SEQ ID NO: 805909 - DNA, 33 bp, Homo sapien
gatgttgatagtgttaggctacttagtcaaaga

SEQ ID NO: 805910 - DNA, 33 bp, Homo sapien
gatgttgatagtgttatgctacttagtcaaaga

SEQ ID NO: 805911 - DNA, 33 bp, Homo sapien
agttatctacatttgaagataggatatttcatg

SEQ ID NO: 805912 - DNA, 33 bp, Homo sapien
agttatctacatttgatgataggatatttcatg

SEQ ID NO: 805913 - DNA, 33 bp, Homo sapien
gtaacgctgatgaaaccctttcttctccttcct

SEQ ID NO: 805914 - DNA, 33 bp, Homo sapien
gtaacgctgatgaaactctttcttctccttcct

SEQ ID NO: 805915 - DNA, 33 bp, Homo sapien
atgtagggaattcaaacgtccccatctccatgg

SEQ ID NO: 805916 - DNA, 33 bp, Homo sapien
atgtagggaattcaaatgtccccatctccatgg

SEQ ID NO: 805917 - DNA, 33 bp, Homo sapien
cttctcacaaacagccactagcaagcctgtgcc

SEQ ID NO: 805918 - DNA, 33 bp, Homo sapien
cttctcacaaacagcccctagcaagcctgtgcc

SEQ ID NO: 805919 - DNA, 33 bp, Homo sapien
tatactaattctacaggcaagcagagtgcaggg

SEQ ID NO: 805920 - DNA, 33 bp, Homo sapien
tatactaattctacagtcaagcagagtgcaggg

SEQ ID NO: 805921 - DNA, 33 bp, Homo sapien
tagaatttcgggggcacacataaagagtagcat

SEQ ID NO: 805922 - DNA, 33 bp, Homo sapien
tagaatttcgggggcagacataaagagtagcat

SEQ ID NO: 805923 - DNA, 33 bp, Homo sapien
gtttacttttcagatacggaagctgattaattg

SEQ ID NO: 805924 - DNA, 33 bp, Homo sapien
gtttacttttcagatatggaagctgattaattg

SEQ ID NO: 805925 - DNA, 33 bp, Homo sapien
aagctagaggccgcatgaactggtttgctgagg

SEQ ID NO: 805926 - DNA, 33 bp, Homo sapien
aagctagaggccgcattaactggtttgctgagg

SEQ ID NO: 805927 - DNA, 33 bp, Homo sapien
gctcaccccagcaaataacaattggcaaaatcc

SEQ ID NO: 805928 - DNA, 33 bp, Homo sapien
gctcaccccagcaaatgacaattggcaaaatcc

SEQ ID NO: 805929 - DNA, 33 bp, Homo sapien
tctaaacagcaaaataaatagatgtcatcacaa

SEQ ID NO: 805930 - DNA, 33 bp, Homo sapien
tctaaacagcaaaatacatagatgtcatcacaa

SEQ ID NO: 805931 - DNA, 33 bp, Homo sapien
aggggtctcatgcttacagcacgtgaaatgagc

SEQ ID NO: 805932 - DNA, 33 bp, Homo sapien
aggggtctcatgcttagagcacgtgaaatgagc

SEQ ID NO: 805933 - DNA, 33 bp, Homo sapien
ctgagcttgccatcacaagaaatcttcaagcat

SEQ ID NO: 805934 - DNA, 33 bp, Homo sapien
ctgagcttgccatcacgagaaatcttcaagcat

SEQ ID NO: 805935 - DNA, 33 bp, Homo sapien
ttaatcctcatagcaaaccttcacagtaagtcc

SEQ ID NO: 805936 - DNA, 33 bp, Homo sapien
ttaatcctcatagcaagccttcacagtaagtcc

SEQ ID NO: 805937 - DNA, 33 bp, Homo sapien
gaatctgcccattttacggtagaaacaaatgaa

SEQ ID NO: 805938 - DNA, 33 bp, Homo sapien
gaatctgcccattttatggtagaaacaaatgaa

SEQ ID NO: 805939 - DNA, 33 bp, Homo sapien
accctaataaaaaccaaacattccttgcccaga

SEQ ID NO: 805940 - DNA, 33 bp, Homo sapien
accctaataaaaaccatacattccttgcccaga

SEQ ID NO: 805941 - DNA, 33 bp, Homo sapien
agtcttacagtgaccacgtcctcaggtaaataa

SEQ ID NO: 805942 - DNA, 33 bp, Homo sapien
agtcttacagtgaccatgtcctcaggtaaataa

SEQ ID NO: 805943 - DNA, 33 bp, Homo sapien
cctcctgcccagggacaccataaatcgctgggc

SEQ ID NO: 805944 - DNA, 33 bp, Homo sapien
cctcctgcccagggacgccataaatcgctgggc

SEQ ID NO: 805945 - DNA, 33 bp, Homo sapien
gtggaaattacaaagcaatagaatagagggttg

SEQ ID NO: 805946 - DNA, 33 bp, Homo sapien
gtggaaattacaaagcgatagaatagagggttg

SEQ ID NO: 805947 - DNA, 33 bp, Homo sapien
acccgagattagacaacagagtccaaaatgcct

SEQ ID NO: 805948 - DNA, 33 bp, Homo sapien
acccgagattagacaatagagtccaaaatgcct

SEQ ID NO: 805949 - DNA, 33 bp, Homo sapien
tcgggggagatcttaaagagttgaggtgggagg

SEQ ID NO: 805950 - DNA, 33 bp, Homo sapien
tcgggggagatcttaacgagttgaggtgggagg

SEQ ID NO: 805951 - DNA, 33 bp, Homo sapien
taggattaagtggaaactgagaagtcatctttt

SEQ ID NO: 805952 - DNA, 33 bp, Homo sapien
taggattaagtggaaattgagaagtcatctttt

SEQ ID NO: 805953 - DNA, 33 bp, Homo sapien
agggtttaaagatcaacaaagcatggcactcaa

SEQ ID NO: 805954 - DNA, 33 bp, Homo sapien
agggtttaaagatcaagaaagcatggcactcaa

SEQ ID NO: 805955 - DNA, 33 bp, Homo sapien
tatgagaatgtcatgaataaatttgaactttga

SEQ ID NO: 805956 - DNA, 33 bp, Homo sapien
tatgagaatgtcatgagtaaatttgaactttga

SEQ ID NO: 805957 - DNA, 33 bp, Homo sapien
ctctgccctccacttcaaatcctgtctgttatt

SEQ ID NO: 805958 - DNA, 33 bp, Homo sapien
ctctgccctccacttcgaatcctgtctgttatt

SEQ ID NO: 805959 - DNA, 33 bp, Homo sapien
agccctgagggatgaacgagggctaagggctag

SEQ ID NO: 805960 - DNA, 33 bp, Homo sapien
agccctgagggatgaatgagggctaagggctag

SEQ ID NO: 805961 - DNA, 33 bp, Homo sapien
tgtatatggcttgtcacgtcagagtggagtttc

SEQ ID NO: 805962 - DNA, 33 bp, Homo sapien
tgtatatggcttgtcatgtcagagtggagtttc

SEQ ID NO: 805963 - DNA, 33 bp, Homo sapien
gttctacatgtcgacactattttattttggggt

SEQ ID NO: 805964 - DNA, 33 bp, Homo sapien
gttctacatgtcgacagtattttattttggggt

SEQ ID NO: 805965 - DNA, 33 bp, Homo sapien
tattgccctggtgaagaaccactgttagaaaag

SEQ ID NO: 805966 - DNA, 33 bp, Homo sapien
tattgccctggtgaaggaccactgttagaaaag

SEQ ID NO: 805967 - DNA, 33 bp, Homo sapien
caggactccacagggcacattggaaaacatttg

SEQ ID NO: 805968 - DNA, 33 bp, Homo sapien
caggactccacagggcgcattggaaaacatttg

SEQ ID NO: 805969 - DNA, 33 bp, Homo sapien
tcatacaatgtcagaactgcaaaggaaggtcct

SEQ ID NO: 805970 - DNA, 33 bp, Homo sapien
tcatacaatgtcagaattgcaaaggaaggtcct

SEQ ID NO: 805971 - DNA, 33 bp, Homo sapien
taggactgcttcccaacaagatgaggcagcatt

SEQ ID NO: 805972 - DNA, 33 bp, Homo sapien
taggactgcttcccaagaagatgaggcagcatt

SEQ ID NO: 805973 - DNA, 33 bp, Homo sapien
gctctcacaagaaaccaaatcagccagaacatc

SEQ ID NO: 805974 - DNA, 33 bp, Homo sapien
gctctcacaagaaaccgaatcagccagaacatc

SEQ ID NO: 805975 - DNA, 33 bp, Homo sapien
ggatgtggataagagcaacatggttattttcat

SEQ ID NO: 805976 - DNA, 33 bp, Homo sapien
ggatgtggataagagcgacatggttattttcat

SEQ ID NO: 805977 - DNA, 33 bp, Homo sapien
gacctcaaacaacattcaaacaattaataatca

SEQ ID NO: 805978 - DNA, 33 bp, Homo sapien
gacctcaaacaacattgaaacaattaataatca

SEQ ID NO: 805979 - DNA, 33 bp, Homo sapien
ctggacttgcctcaaagtcatgcggttacattc

SEQ ID NO: 805980 - DNA, 33 bp, Homo sapien
ctggacttgcctcaaattcatgcggttacattc

SEQ ID NO: 805981 - DNA, 33 bp, Homo sapien
gagcccaaacttactgcatgaacaactcccaaa

SEQ ID NO: 805982 - DNA, 33 bp, Homo sapien
gagcccaaacttactgtatgaacaactcccaaa

SEQ ID NO: 805983 - DNA, 33 bp, Homo sapien
agatctgaaactgtaaaactactgaaagaaaac

SEQ ID NO: 805984 - DNA, 33 bp, Homo sapien
agatctgaaactgtaagactactgaaagaaaac

SEQ ID NO: 805985 - DNA, 33 bp, Homo sapien
gataatcgacatgtataagttgattgaatgaag

SEQ ID NO: 805986 - DNA, 33 bp, Homo sapien
gataatcgacatgtattagttgattgaatgaag

SEQ ID NO: 805987 - DNA, 33 bp, Homo sapien
gagatggtttcttcacccctctaagccttagct

SEQ ID NO: 805988 - DNA, 33 bp, Homo sapien
gagatggtttcttcactcctctaagccttagct

SEQ ID NO: 805989 - DNA, 33 bp, Homo sapien
tttgccagtcacttgacaagccatatgctttaa

SEQ ID NO: 805990 - DNA, 33 bp, Homo sapien
tttgccagtcacttgataagccatatgctttaa

SEQ ID NO: 805991 - DNA, 33 bp, Homo sapien
catctgtaaaaagacaatgatgaaccctcagga

SEQ ID NO: 805992 - DNA, 33 bp, Homo sapien
catctgtaaaaagacagtgatgaaccctcagga

SEQ ID NO: 805993 - DNA, 33 bp, Homo sapien
gcagaaattgattggcacagagttcgggaagct

SEQ ID NO: 805994 - DNA, 33 bp, Homo sapien
gcagaaattgattggcgcagagttcgggaagct

SEQ ID NO: 805995 - DNA, 33 bp, Homo sapien
gaggagcataagtgcaactgaaaatagacttgg

SEQ ID NO: 805996 - DNA, 33 bp, Homo sapien
gaggagcataagtgcagctgaaaatagacttgg

SEQ ID NO: 805997 - DNA, 33 bp, Homo sapien
tcataaaaatgagtgacatgatcgattagcaat

SEQ ID NO: 805998 - DNA, 33 bp, Homo sapien
tcataaaaatgagtgatatgatcgattagcaat

SEQ ID NO: 805999 - DNA, 33 bp, Homo sapien
tctgaagcataaaaccaataaccctagtcttat

SEQ ID NO: 806000 - DNA, 33 bp, Homo sapien
tctgaagcataaaaccgataaccctagtcttat

SEQ ID NO: 806001 - DNA, 33 bp, Homo sapien
catcctctacttatcaccattacctacaactat

SEQ ID NO: 806002 - DNA, 33 bp, Homo sapien
catcctctacttatcagcattacctacaactat

SEQ ID NO: 806003 - DNA, 33 bp, Homo sapien
cagtggagctcttgaacaaccaggtgtattgtc

SEQ ID NO: 806004 - DNA, 33 bp, Homo sapien
cagtggagctcttgaataaccaggtgtattgtc

SEQ ID NO: 806005 - DNA, 33 bp, Homo sapien
actacactttgacctacgggttgcagaatgtat

SEQ ID NO: 806006 - DNA, 33 bp, Homo sapien
actacactttgacctatgggttgcagaatgtat

SEQ ID NO: 806007 - DNA, 33 bp, Homo sapien
gcaaagggagactagaaggagaatagattcaga

SEQ ID NO: 806008 - DNA, 33 bp, Homo sapien
gcaaagggagactagatggagaatagattcaga

SEQ ID NO: 806009 - DNA, 33 bp, Homo sapien
cccaatggtacctttgaaacaagctcgcaatcc

SEQ ID NO: 806010 - DNA, 33 bp, Homo sapien
cccaatggtacctttggaacaagctcgcaatcc

SEQ ID NO: 806011 - DNA, 33 bp, Homo sapien
gtatccacacatcctcacagtaaatcaccgtgc

SEQ ID NO: 806012 - DNA, 33 bp, Homo sapien
gtatccacacatcctcgcagtaaatcaccgtgc

SEQ ID NO: 806013 - DNA, 33 bp, Homo sapien
atacaatcccacttgcacatgttgtattcagag

SEQ ID NO: 806014 - DNA, 33 bp, Homo sapien
atacaatcccacttgcccatgttgtattcagag

SEQ ID NO: 806015 - DNA, 33 bp, Homo sapien
aagtgggattgtatagacaaagagtaatgtaga

SEQ ID NO: 806016 - DNA, 33 bp, Homo sapien
aagtgggattgtatagccaaagagtaatgtaga

SEQ ID NO: 806017 - DNA, 33 bp, Homo sapien
ctgcccctggcctcaaagaacatatattagtgg

SEQ ID NO: 806018 - DNA, 33 bp, Homo sapien
ctgcccctggcctcaaggaacatatattagtgg

SEQ ID NO: 806019 - DNA, 33 bp, Homo sapien
aaatcagtgaccttcacgtacgagggcagtgct

SEQ ID NO: 806020 - DNA, 33 bp, Homo sapien
aaatcagtgaccttcatgtacgagggcagtgct

SEQ ID NO: 806021 - DNA, 33 bp, Homo sapien
gtcagtgcaatagtaacgaaaacaaacaaacaa

SEQ ID NO: 806022 - DNA, 33 bp, Homo sapien
gtcagtgcaatagtaatgaaaacaaacaaacaa

SEQ ID NO: 806023 - DNA, 33 bp, Homo sapien
catttatggttaaagacgaaaatgaccactgct

SEQ ID NO: 806024 - DNA, 33 bp, Homo sapien
catttatggttaaagatgaaaatgaccactgct

SEQ ID NO: 806025 - DNA, 33 bp, Homo sapien
agatacctaagaacatcaacgcccattagaagc

SEQ ID NO: 806026 - DNA, 33 bp, Homo sapien
agatacctaagaacatgaacgcccattagaagc

SEQ ID NO: 806027 - DNA, 33 bp, Homo sapien
aaaataaatgtaaaaccgatctcaaaaagctgt

SEQ ID NO: 806028 - DNA, 33 bp, Homo sapien
aaaataaatgtaaaactgatctcaaaaagctgt

SEQ ID NO: 806029 - DNA, 33 bp, Homo sapien
aggctatgaacttccaaagcattggtgaaagca

SEQ ID NO: 806030 - DNA, 33 bp, Homo sapien
aggctatgaacttccagagcattggtgaaagca

SEQ ID NO: 806031 - DNA, 33 bp, Homo sapien
cttggaaaaggccactgaaatacatagcccaag

SEQ ID NO: 806032 - DNA, 33 bp, Homo sapien
cttggaaaaggccacttaaatacatagcccaag

SEQ ID NO: 806033 - DNA, 33 bp, Homo sapien
ccagtagtttaggtcacgttattcttcctatta

SEQ ID NO: 806034 - DNA, 33 bp, Homo sapien
ccagtagtttaggtcaggttattcttcctatta

SEQ ID NO: 806035 - DNA, 33 bp, Homo sapien
taaatatactgcaatgaaatctctagagatgga

SEQ ID NO: 806036 - DNA, 33 bp, Homo sapien
taaatatactgcaatggaatctctagagatgga

SEQ ID NO: 806037 - DNA, 33 bp, Homo sapien
aggtgctgcctgggtaataaaaccttcatgctg

SEQ ID NO: 806038 - DNA, 33 bp, Homo sapien
aggtgctgcctgggtagtaaaaccttcatgctg

SEQ ID NO: 806039 - DNA, 33 bp, Homo sapien
acaaaatgcccactgaagaacaggatgaataat

SEQ ID NO: 806040 - DNA, 33 bp, Homo sapien
acaaaatgcccactgaggaacaggatgaataat

SEQ ID NO: 806041 - DNA, 33 bp, Homo sapien
gacaataacatctgtccgacaatacccaacaat

SEQ ID NO: 806042 - DNA, 33 bp, Homo sapien
gacaataacatctgtcggacaatacccaacaat

SEQ ID NO: 806043 - DNA, 33 bp, Homo sapien
tcaaaactgatagttcaacatttcaaaactaac

SEQ ID NO: 806044 - DNA, 33 bp, Homo sapien
tcaaaactgatagttcgacatttcaaaactaac

SEQ ID NO: 806045 - DNA, 33 bp, Homo sapien
tctgccagatatctgacgtgagctagctttctc

SEQ ID NO: 806046 - DNA, 33 bp, Homo sapien
tctgccagatatctgatgtgagctagctttctc

SEQ ID NO: 806047 - DNA, 33 bp, Homo sapien
agagccatgaaggaatgaatttgcctcaaaagg

SEQ ID NO: 806048 - DNA, 33 bp, Homo sapien
agagccatgaaggaattaatttgcctcaaaagg

SEQ ID NO: 806049 - DNA, 33 bp, Homo sapien
tttttatattttcagtcaaccgattataagtaa

SEQ ID NO: 806050 - DNA, 33 bp, Homo sapien
tttttatattttcagttaaccgattataagtaa

SEQ ID NO: 806051 - DNA, 33 bp, Homo sapien
agtcccttgattataaaaatggctaaactttca

SEQ ID NO: 806052 - DNA, 33 bp, Homo sapien
agtcccttgattataataatggctaaactttca

SEQ ID NO: 806053 - DNA, 33 bp, Homo sapien
ctctcttatgtcagagaagtaaggttttcttgg

SEQ ID NO: 806054 - DNA, 33 bp, Homo sapien
ctctcttatgtcagagcagtaaggttttcttgg

SEQ ID NO: 806055 - DNA, 33 bp, Homo sapien
ctggccaaatcctgcaatagttgatgatatatg

SEQ ID NO: 806056 - DNA, 33 bp, Homo sapien
ctggccaaatcctgcagtagttgatgatatatg

SEQ ID NO: 806057 - DNA, 33 bp, Homo sapien
gtgtcactgtgaggtactaactttacccacggc

SEQ ID NO: 806058 - DNA, 33 bp, Homo sapien
gtgtcactgtgaggtagtaactttacccacggc

SEQ ID NO: 806059 - DNA, 33 bp, Homo sapien
ttctcacagacttcaacattgttgtgacaactt

SEQ ID NO: 806060 - DNA, 33 bp, Homo sapien
ttctcacagacttcaatattgttgtgacaactt

SEQ ID NO: 806061 - DNA, 33 bp, Homo sapien
taacttaactcttttgcaatgagatagtgactt

SEQ ID NO: 806062 - DNA, 33 bp, Homo sapien
taacttaactcttttgtaatgagatagtgactt

SEQ ID NO: 806063 - DNA, 33 bp, Homo sapien
aagagttaagttaccaatacagtcatgtgtcac

SEQ ID NO: 806064 - DNA, 33 bp, Homo sapien
aagagttaagttaccagtacagtcatgtgtcac

SEQ ID NO: 806065 - DNA, 33 bp, Homo sapien
ctgagttttagaataacgatagaagagtccaca

SEQ ID NO: 806066 - DNA, 33 bp, Homo sapien
ctgagttttagaataatgatagaagagtccaca

SEQ ID NO: 806067 - DNA, 33 bp, Homo sapien
tatagtatagatggaaatatggtctactatctt

SEQ ID NO: 806068 - DNA, 33 bp, Homo sapien
tatagtatagatggaagtatggtctactatctt

SEQ ID NO: 806069 - DNA, 33 bp, Homo sapien
catgcctttgggaagaaagatgccagcagattt

SEQ ID NO: 806070 - DNA, 33 bp, Homo sapien
catgcctttgggaagacagatgccagcagattt

SEQ ID NO: 806071 - DNA, 33 bp, Homo sapien
ctatacagcatttctgaacaaaaaataaactgt

SEQ ID NO: 806072 - DNA, 33 bp, Homo sapien
ctatacagcatttctgtacaaaaaataaactgt

SEQ ID NO: 806073 - DNA, 33 bp, Homo sapien
atcaacgatagaatccaaagcctgaaagggcgc

SEQ ID NO: 806074 - DNA, 33 bp, Homo sapien
atcaacgatagaatccgaagcctgaaagggcgc

SEQ ID NO: 806075 - DNA, 33 bp, Homo sapien
gcactgttctgggtaacgaggatttactcagta

SEQ ID NO: 806076 - DNA, 33 bp, Homo sapien
gcactgttctgggtaatgaggatttactcagta

SEQ ID NO: 806077 - DNA, 33 bp, Homo sapien
agggaatataaacgaaaaggccttgtagcaact

SEQ ID NO: 806078 - DNA, 33 bp, Homo sapien
agggaatataaacgaagaggccttgtagcaact

SEQ ID NO: 806079 - DNA, 33 bp, Homo sapien
ataaaaattgaccatgaaacattaaataatgat

SEQ ID NO: 806080 - DNA, 33 bp, Homo sapien
ataaaaattgaccatgtaacattaaataatgat

SEQ ID NO: 806081 - DNA, 33 bp, Homo sapien
tgcagttctagcagaaacatgattcatttgaga

SEQ ID NO: 806082 - DNA, 33 bp, Homo sapien
tgcagttctagcagaagcatgattcatttgaga

SEQ ID NO: 806083 - DNA, 33 bp, Homo sapien
acattttgaaacaatacgtccagctgtagtatg

SEQ ID NO: 806084 - DNA, 33 bp, Homo sapien
acattttgaaacaatatgtccagctgtagtatg

SEQ ID NO: 806085 - DNA, 33 bp, Homo sapien
aaagtacaacagaaaaatgtggtggattatgga

SEQ ID NO: 806086 - DNA, 33 bp, Homo sapien
aaagtacaacagaaaagtgtggtggattatgga

SEQ ID NO: 806087 - DNA, 33 bp, Homo sapien
ccactctcaaatgaagcattttaagttggggat

SEQ ID NO: 806088 - DNA, 33 bp, Homo sapien
ccactctcaaatgaaggattttaagttggggat

SEQ ID NO: 806089 - DNA, 33 bp, Homo sapien
tatatgagacaggtacaattattatgctgagga

SEQ ID NO: 806090 - DNA, 33 bp, Homo sapien
tatatgagacaggtactattattatgctgagga

SEQ ID NO: 806091 - DNA, 33 bp, Homo sapien
gaatgtagggagtaaaggagggagaattgaaaa

SEQ ID NO: 806092 - DNA, 33 bp, Homo sapien
gaatgtagggagtaaatgagggagaattgaaaa

SEQ ID NO: 806093 - DNA, 33 bp, Homo sapien
tttctcctcatgaacccagaacctagcacagtg

SEQ ID NO: 806094 - DNA, 33 bp, Homo sapien
tttctcctcatgaacctagaacctagcacagtg

SEQ ID NO: 806095 - DNA, 33 bp, Homo sapien
agttttgacaaacgtacgcaataatagaaagtg

SEQ ID NO: 806096 - DNA, 33 bp, Homo sapien
agttttgacaaacgtatgcaataatagaaagtg

SEQ ID NO: 806097 - DNA, 33 bp, Homo sapien
ccctccttcagagaccagagaggtgaattttcc

SEQ ID NO: 806098 - DNA, 33 bp, Homo sapien
ccctccttcagagaccggagaggtgaattttcc

SEQ ID NO: 806099 - DNA, 33 bp, Homo sapien
ctgaaagtttgttagccgagttttgaagatcaa

SEQ ID NO: 806100 - DNA, 33 bp, Homo sapien
ctgaaagtttgttagctgagttttgaagatcaa

SEQ ID NO: 806101 - DNA, 33 bp, Homo sapien
ctcaaatgtttcataaaattttggtccacaacc

SEQ ID NO: 806102 - DNA, 33 bp, Homo sapien
ctcaaatgtttcataagattttggtccacaacc

SEQ ID NO: 806103 - DNA, 33 bp, Homo sapien
gtctgaccttaaaaaccatgatcttgacaatga

SEQ ID NO: 806104 - DNA, 33 bp, Homo sapien
gtctgaccttaaaaactatgatcttgacaatga

SEQ ID NO: 806105 - DNA, 33 bp, Homo sapien
tgcctcctataacataacagagccttgactcta

SEQ ID NO: 806106 - DNA, 33 bp, Homo sapien
tgcctcctataacatagcagagccttgactcta

SEQ ID NO: 806107 - DNA, 33 bp, Homo sapien
gttgctgattagctcacgtctaagttatacaaa

SEQ ID NO: 806108 - DNA, 33 bp, Homo sapien
gttgctgattagctcatgtctaagttatacaaa

SEQ ID NO: 806109 - DNA, 33 bp, Homo sapien
acagaaaattgaagtcactcattttggctgcag

SEQ ID NO: 806110 - DNA, 33 bp, Homo sapien
acagaaaattgaagtcgctcattttggctgcag

SEQ ID NO: 806111 - DNA, 33 bp, Homo sapien
cttaccagctctgagaacttagaaagattcctt

SEQ ID NO: 806112 - DNA, 33 bp, Homo sapien
cttaccagctctgagaccttagaaagattcctt

SEQ ID NO: 806113 - DNA, 33 bp, Homo sapien
aacatgagagcttagagattgaatagttaggat

SEQ ID NO: 806114 - DNA, 33 bp, Homo sapien
aacatgagagcttagatattgaatagttaggat

SEQ ID NO: 806115 - DNA, 33 bp, Homo sapien
tgagatattacttctgaaaggagaccatctctg

SEQ ID NO: 806116 - DNA, 33 bp, Homo sapien
tgagatattacttctgtaaggagaccatctctg

SEQ ID NO: 806117 - DNA, 33 bp, Homo sapien
gctggggtggtagtgacgagttgggattttgga

SEQ ID NO: 806118 - DNA, 33 bp, Homo sapien
gctggggtggtagtgaggagttgggattttgga

SEQ ID NO: 806119 - DNA, 33 bp, Homo sapien
tcactggctgctttaacaatagtcagtttatct

SEQ ID NO: 806120 - DNA, 33 bp, Homo sapien
tcactggctgctttaagaatagtcagtttatct

SEQ ID NO: 806121 - DNA, 33 bp, Homo sapien
ttctttgtagttttacagagacttttccagaaa

SEQ ID NO: 806122 - DNA, 33 bp, Homo sapien
ttctttgtagttttacggagacttttccagaaa

SEQ ID NO: 806123 - DNA, 33 bp, Homo sapien
catagaatcctgcaggccagagtatggctcacc

SEQ ID NO: 806124 - DNA, 33 bp, Homo sapien
catagaatcctgcaggtcagagtatggctcacc

SEQ ID NO: 806125 - DNA, 33 bp, Homo sapien
ccaaatccactgctatcaccttgcctctccatc

SEQ ID NO: 806126 - DNA, 33 bp, Homo sapien
ccaaatccactgctattaccttgcctctccatc

SEQ ID NO: 806127 - DNA, 33 bp, Homo sapien
gaaaaaatgtgttaagacaacaaaacgaagacc

SEQ ID NO: 806128 - DNA, 33 bp, Homo sapien
gaaaaaatgtgttaaggcaacaaaacgaagacc

SEQ ID NO: 806129 - DNA, 33 bp, Homo sapien
gagtgagcggaagaaaaagctgacaacatcgaa

SEQ ID NO: 806130 - DNA, 33 bp, Homo sapien
gagtgagcggaagaaacagctgacaacatcgaa

SEQ ID NO: 806131 - DNA, 33 bp, Homo sapien
acccaaatctaagacacccatcaagacttcttg

SEQ ID NO: 806132 - DNA, 33 bp, Homo sapien
acccaaatctaagacatccatcaagacttcttg

SEQ ID NO: 806133 - DNA, 33 bp, Homo sapien
aatgaatgaacagtaacgctgatctatatttta

SEQ ID NO: 806134 - DNA, 33 bp, Homo sapien
aatgaatgaacagtaatgctgatctatatttta

SEQ ID NO: 806135 - DNA, 33 bp, Homo sapien
agctttaactcaaagacatgtgtgtcaaatgct

SEQ ID NO: 806136 - DNA, 33 bp, Homo sapien
agctttaactcaaagatatgtgtgtcaaatgct

SEQ ID NO: 806137 - DNA, 33 bp, Homo sapien
gtagataataaaccgaataagcagataattcat

SEQ ID NO: 806138 - DNA, 33 bp, Homo sapien
gtagataataaaccgagtaagcagataattcat

SEQ ID NO: 806139 - DNA, 33 bp, Homo sapien
gaccttcattggtttcaatcagtctcatcttcc

SEQ ID NO: 806140 - DNA, 33 bp, Homo sapien
gaccttcattggtttcgatcagtctcatcttcc

SEQ ID NO: 806141 - DNA, 33 bp, Homo sapien
gactcaacatttccagcagtattcatatcttgt

SEQ ID NO: 806142 - DNA, 33 bp, Homo sapien
gactcaacatttccagtagtattcatatcttgt

SEQ ID NO: 806143 - DNA, 33 bp, Homo sapien
aatggggctgtaatgcaaactttccaaatccca

SEQ ID NO: 806144 - DNA, 33 bp, Homo sapien
aatggggctgtaatgctaactttccaaatccca

SEQ ID NO: 806145 - DNA, 33 bp, Homo sapien
aagaagggaaaaatagcatgactcggaatgtgc

SEQ ID NO: 806146 - DNA, 33 bp, Homo sapien
aagaagggaaaaataggatgactcggaatgtgc

SEQ ID NO: 806147 - DNA, 33 bp, Homo sapien
atggaatacagtctgaactagcctttcatgaat

SEQ ID NO: 806148 - DNA, 33 bp, Homo sapien
atggaatacagtctgagctagcctttcatgaat

SEQ ID NO: 806149 - DNA, 33 bp, Homo sapien
tttagccattggctgaatatgcgattctaatta

SEQ ID NO: 806150 - DNA, 33 bp, Homo sapien
tttagccattggctgactatgcgattctaatta

SEQ ID NO: 806151 - DNA, 33 bp, Homo sapien
ttcaaccaggaagaaaaggaaatccagaacaga

SEQ ID NO: 806152 - DNA, 33 bp, Homo sapien
ttcaaccaggaagaaatggaaatccagaacaga

SEQ ID NO: 806153 - DNA, 33 bp, Homo sapien
atttccttctggttaagaaccactgttggggag

SEQ ID NO: 806154 - DNA, 33 bp, Homo sapien
atttccttctggttaataaccactgttggggag

SEQ ID NO: 806155 - DNA, 33 bp, Homo sapien
atactctggcttttagcattgtcagagttcttc

SEQ ID NO: 806156 - DNA, 33 bp, Homo sapien
atactctggcttttagtattgtcagagttcttc

SEQ ID NO: 806157 - DNA, 33 bp, Homo sapien
tgaacaaacctacagacgacttcggctcccagt

SEQ ID NO: 806158 - DNA, 33 bp, Homo sapien
tgaacaaacctacagatgacttcggctcccagt

SEQ ID NO: 806159 - DNA, 33 bp, Homo sapien
ctatctcttcctttaaggagcttcaaatttagg

SEQ ID NO: 806160 - DNA, 33 bp, Homo sapien
ctatctcttcctttaatgagcttcaaatttagg

SEQ ID NO: 806161 - DNA, 33 bp, Homo sapien
aaagcagggctccttcacttattttagttgtta

SEQ ID NO: 806162 - DNA, 33 bp, Homo sapien
aaagcagggctccttcgcttattttagttgtta

SEQ ID NO: 806163 - DNA, 33 bp, Homo sapien
atagaactctggagataaaagggaactcatctg

SEQ ID NO: 806164 - DNA, 33 bp, Homo sapien
atagaactctggagatcaaagggaactcatctg

SEQ ID NO: 806165 - DNA, 33 bp, Homo sapien
gaagacatgtcttgaacggttctcctgggatgc

SEQ ID NO: 806166 - DNA, 33 bp, Homo sapien
gaagacatgtcttgaatggttctcctgggatgc

SEQ ID NO: 806167 - DNA, 33 bp, Homo sapien
tgttcaaacttgttgcaaaaagcaaaatattcc

SEQ ID NO: 806168 - DNA, 33 bp, Homo sapien
tgttcaaacttgttgcgaaaagcaaaatattcc

SEQ ID NO: 806169 - DNA, 33 bp, Homo sapien
aacaatgaccgtctgacaagcaatggcaagatg

SEQ ID NO: 806170 - DNA, 33 bp, Homo sapien
aacaatgaccgtctgagaagcaatggcaagatg

SEQ ID NO: 806171 - DNA, 33 bp, Homo sapien
gggagattagatacaaacatgaaggttctcaac

SEQ ID NO: 806172 - DNA, 33 bp, Homo sapien
gggagattagatacaaccatgaaggttctcaac

SEQ ID NO: 806173 - DNA, 33 bp, Homo sapien
ccagtaccagagttgcccttgtagatctccact

SEQ ID NO: 806174 - DNA, 33 bp, Homo sapien
ccagtaccagagttgctcttgtagatctccact

SEQ ID NO: 806175 - DNA, 33 bp, Homo sapien
attataattgaagggaccactatcatacatgtg

SEQ ID NO: 806176 - DNA, 33 bp, Homo sapien
attataattgaagggagcactatcatacatgtg

SEQ ID NO: 806177 - DNA, 33 bp, Homo sapien
aatttggaatcagccccaggactcctcctatcc

SEQ ID NO: 806178 - DNA, 33 bp, Homo sapien
aatttggaatcagcccgaggactcctcctatcc

SEQ ID NO: 806179 - DNA, 33 bp, Homo sapien
ctcacatggcatgaagaagagggcatccaggat

SEQ ID NO: 806180 - DNA, 33 bp, Homo sapien
ctcacatggcatgaaggagagggcatccaggat

SEQ ID NO: 806181 - DNA, 33 bp, Homo sapien
taacttcagttttgaaaccacatatcaattctc

SEQ ID NO: 806182 - DNA, 33 bp, Homo sapien
taacttcagttttgaatccacatatcaattctc

SEQ ID NO: 806183 - DNA, 33 bp, Homo sapien
ggcaatacaagaaactaaagtcagtagaaagtg

SEQ ID NO: 806184 - DNA, 33 bp, Homo sapien
ggcaatacaagaaactcaagtcagtagaaagtg

SEQ ID NO: 806185 - DNA, 33 bp, Homo sapien
gcattaggagcacctgaaggctagtcctcaaga

SEQ ID NO: 806186 - DNA, 33 bp, Homo sapien
gcattaggagcacctggaggctagtcctcaaga

SEQ ID NO: 806187 - DNA, 33 bp, Homo sapien
tgttgaagcagtcagacctatacaatatagaat

SEQ ID NO: 806188 - DNA, 33 bp, Homo sapien
tgttgaagcagtcagagctatacaatatagaat

SEQ ID NO: 806189 - DNA, 33 bp, Homo sapien
ggatttgcatattcagaacatttaatacaaatg

SEQ ID NO: 806190 - DNA, 33 bp, Homo sapien
ggatttgcatattcagtacatttaatacaaatg

SEQ ID NO: 806191 - DNA, 33 bp, Homo sapien
gcacaggtttttagtcacacagggttatcctca

SEQ ID NO: 806192 - DNA, 33 bp, Homo sapien
gcacaggtttttagtcgcacagggttatcctca

SEQ ID NO: 806193 - DNA, 33 bp, Homo sapien
aaagggccttctcaagcaacagaagggttgagc

SEQ ID NO: 806194 - DNA, 33 bp, Homo sapien
aaagggccttctcaagtaacagaagggttgagc

SEQ ID NO: 806195 - DNA, 33 bp, Homo sapien
agtctggtagtcttaactaaacctcaggacact

SEQ ID NO: 806196 - DNA, 33 bp, Homo sapien
agtctggtagtcttaagtaaacctcaggacact

SEQ ID NO: 806197 - DNA, 33 bp, Homo sapien
attgtcgtcctcttcccagtgtatcttatgcca

SEQ ID NO: 806198 - DNA, 33 bp, Homo sapien
attgtcgtcctcttcctagtgtatcttatgcca

SEQ ID NO: 806199 - DNA, 33 bp, Homo sapien
aaataaaatgaggatgaacaccacgtgtatgct

SEQ ID NO: 806200 - DNA, 33 bp, Homo sapien
aaataaaatgaggatggacaccacgtgtatgct

SEQ ID NO: 806201 - DNA, 33 bp, Homo sapien
aaagagacagaggatccctagctgagtgtcaga

SEQ ID NO: 806202 - DNA, 33 bp, Homo sapien
aaagagacagaggatctctagctgagtgtcaga

SEQ ID NO: 806203 - DNA, 33 bp, Homo sapien
gcctcgctttccactgaatcaagtctatggagg

SEQ ID NO: 806204 - DNA, 33 bp, Homo sapien
gcctcgctttccactggatcaagtctatggagg

SEQ ID NO: 806205 - DNA, 33 bp, Homo sapien
tggaaggtggcaggaacctcactattcaattaa

SEQ ID NO: 806206 - DNA, 33 bp, Homo sapien
tggaaggtggcaggaatctcactattcaattaa

SEQ ID NO: 806207 - DNA, 33 bp, Homo sapien
gatgcagtgggatacactctattctcaaggctc

SEQ ID NO: 806208 - DNA, 33 bp, Homo sapien
gatgcagtgggatacattctattctcaaggctc

SEQ ID NO: 806209 - DNA, 33 bp, Homo sapien
aaggagaaaagtctagaaggattcacatgaact

SEQ ID NO: 806210 - DNA, 33 bp, Homo sapien
aaggagaaaagtctaggaggattcacatgaact

SEQ ID NO: 806211 - DNA, 33 bp, Homo sapien
atttcctggacttataaatttaacttctacata

SEQ ID NO: 806212 - DNA, 33 bp, Homo sapien
atttcctggacttatacatttaacttctacata

SEQ ID NO: 806213 - DNA, 33 bp, Homo sapien
ttgaaggcttttcttcccctgattgtatagctt

SEQ ID NO: 806214 - DNA, 33 bp, Homo sapien
ttgaaggcttttcttctcctgattgtatagctt

SEQ ID NO: 806215 - DNA, 33 bp, Homo sapien
agaactgacaaatatccatctaccattcttttt

SEQ ID NO: 806216 - DNA, 33 bp, Homo sapien
agaactgacaaatatcgatctaccattcttttt

SEQ ID NO: 806217 - DNA, 33 bp, Homo sapien
ttttactgggctattacaagaaccgtttcccag

SEQ ID NO: 806218 - DNA, 33 bp, Homo sapien
ttttactgggctattataagaaccgtttcccag

SEQ ID NO: 806219 - DNA, 33 bp, Homo sapien
tacacctcatgtatcccggaaatcatgttatag

SEQ ID NO: 806220 - DNA, 33 bp, Homo sapien
tacacctcatgtatcctggaaatcatgttatag

SEQ ID NO: 806221 - DNA, 33 bp, Homo sapien
caaggaccgggaccaacacaagacaggtttgca

SEQ ID NO: 806222 - DNA, 33 bp, Homo sapien
caaggaccgggaccaatacaagacaggtttgca

SEQ ID NO: 806223 - DNA, 33 bp, Homo sapien
acttttcagattatccaagcttgcagatggcat

SEQ ID NO: 806224 - DNA, 33 bp, Homo sapien
acttttcagattatcccagcttgcagatggcat

SEQ ID NO: 806225 - DNA, 33 bp, Homo sapien
tgtgaaaataacagagacaaaaaatattcccac

SEQ ID NO: 806226 - DNA, 33 bp, Homo sapien
tgtgaaaataacagagtcaaaaaatattcccac

SEQ ID NO: 806227 - DNA, 33 bp, Homo sapien
cataataaagaatcacagagaacactgatcttg

SEQ ID NO: 806228 - DNA, 33 bp, Homo sapien
cataataaagaatcacggagaacactgatcttg

SEQ ID NO: 806229 - DNA, 33 bp, Homo sapien
tggattctcataaaataagttgagtagcttgcc

SEQ ID NO: 806230 - DNA, 33 bp, Homo sapien
tggattctcataaaatgagttgagtagcttgcc

SEQ ID NO: 806231 - DNA, 33 bp, Homo sapien
tttggagaatagaccacgggtagagagagaaaa

SEQ ID NO: 806232 - DNA, 33 bp, Homo sapien
tttggagaatagaccatgggtagagagagaaaa

SEQ ID NO: 806233 - DNA, 33 bp, Homo sapien
accccctgaatactaacaatctgtgctccattt

SEQ ID NO: 806234 - DNA, 33 bp, Homo sapien
accccctgaatactaataatctgtgctccattt

SEQ ID NO: 806235 - DNA, 33 bp, Homo sapien
gggcctcaccctcaccacctaatctgaacctaa

SEQ ID NO: 806236 - DNA, 33 bp, Homo sapien
gggcctcaccctcaccgcctaatctgaacctaa

SEQ ID NO: 806237 - DNA, 33 bp, Homo sapien
actgatatacttcgaactagaccagctgagaaa

SEQ ID NO: 806238 - DNA, 33 bp, Homo sapien
actgatatacttcgaattagaccagctgagaaa

SEQ ID NO: 806239 - DNA, 33 bp, Homo sapien
ctggtaaatttttttcgccagagggcaggtctt

SEQ ID NO: 806240 - DNA, 33 bp, Homo sapien
ctggtaaatttttttctccagagggcaggtctt

SEQ ID NO: 806241 - DNA, 33 bp, Homo sapien
aggtacatgagcagtacagcttttgtgaagatc

SEQ ID NO: 806242 - DNA, 33 bp, Homo sapien
aggtacatgagcagtatagcttttgtgaagatc

SEQ ID NO: 806243 - DNA, 33 bp, Homo sapien
tcacaaaaaagcagcacatccagattatttcaa

SEQ ID NO: 806244 - DNA, 33 bp, Homo sapien
tcacaaaaaagcagcagatccagattatttcaa

SEQ ID NO: 806245 - DNA, 33 bp, Homo sapien
aacttacactgtgatcagagctatgaaggagag

SEQ ID NO: 806246 - DNA, 33 bp, Homo sapien
aacttacactgtgatcggagctatgaaggagag

SEQ ID NO: 806247 - DNA, 33 bp, Homo sapien
tcagagtcagcactcaataaatactggttacta

SEQ ID NO: 806248 - DNA, 33 bp, Homo sapien
tcagagtcagcactcagtaaatactggttacta

SEQ ID NO: 806249 - DNA, 33 bp, Homo sapien
catacccccatttatccccagtgatgaggaact

SEQ ID NO: 806250 - DNA, 33 bp, Homo sapien
catacccccatttatctccagtgatgaggaact

SEQ ID NO: 806251 - DNA, 33 bp, Homo sapien
aaaatcatggagaaataaggtaactcaacaatc

SEQ ID NO: 806252 - DNA, 33 bp, Homo sapien
aaaatcatggagaaatcaggtaactcaacaatc

SEQ ID NO: 806253 - DNA, 33 bp, Homo sapien
cttacctcttcttacactgagatttctttgatc

SEQ ID NO: 806254 - DNA, 33 bp, Homo sapien
cttacctcttcttacattgagatttctttgatc

SEQ ID NO: 806255 - DNA, 33 bp, Homo sapien
tctatatgtcccctgtcaacaaaagcatcaaac

SEQ ID NO: 806256 - DNA, 33 bp, Homo sapien
tctatatgtcccctgtgaacaaaagcatcaaac

SEQ ID NO: 806257 - DNA, 33 bp, Homo sapien
tatgcaaaatttcctacccattgtccatcttag

SEQ ID NO: 806258 - DNA, 33 bp, Homo sapien
tatgcaaaatttcctatccattgtccatcttag

SEQ ID NO: 806259 - DNA, 33 bp, Homo sapien
acacatctgatacacacataaggaaggactcag

SEQ ID NO: 806260 - DNA, 33 bp, Homo sapien
acacatctgatacacatataaggaaggactcag

SEQ ID NO: 806261 - DNA, 33 bp, Homo sapien
aagaaaaagcttgaaggaggtagcataatttga

SEQ ID NO: 806262 - DNA, 33 bp, Homo sapien
aagaaaaagcttgaagtaggtagcataatttga

SEQ ID NO: 806263 - DNA, 33 bp, Homo sapien
aagtcttcttttaacaatcatgtcagttggatg

SEQ ID NO: 806264 - DNA, 33 bp, Homo sapien
aagtcttcttttaacagtcatgtcagttggatg

SEQ ID NO: 806265 - DNA, 33 bp, Homo sapien
aaaattaatattggaaacaaaacagcagcaatg

SEQ ID NO: 806266 - DNA, 33 bp, Homo sapien
aaaattaatattggaagcaaaacagcagcaatg

SEQ ID NO: 806267 - DNA, 33 bp, Homo sapien
gcagagcggacatttaataaaattcaatgggta

SEQ ID NO: 806268 - DNA, 33 bp, Homo sapien
gcagagcggacatttagtaaaattcaatgggta

SEQ ID NO: 806269 - DNA, 33 bp, Homo sapien
tgtcagacatagcaacacagactttatcctgaa

SEQ ID NO: 806270 - DNA, 33 bp, Homo sapien
tgtcagacatagcaacgcagactttatcctgaa

SEQ ID NO: 806271 - DNA, 33 bp, Homo sapien
gttgctatgtctgacacggaagccctttgtgag

SEQ ID NO: 806272 - DNA, 33 bp, Homo sapien
gttgctatgtctgacatggaagccctttgtgag

SEQ ID NO: 806273 - DNA, 33 bp, Homo sapien
tgagttgtccagtttacagaatagatctatggt

SEQ ID NO: 806274 - DNA, 33 bp, Homo sapien
tgagttgtccagtttatagaatagatctatggt

SEQ ID NO: 806275 - DNA, 33 bp, Homo sapien
tatcaattgttaatgacatttccagagaaaatg

SEQ ID NO: 806276 - DNA, 33 bp, Homo sapien
tatcaattgttaatgatatttccagagaaaatg

SEQ ID NO: 806277 - DNA, 33 bp, Homo sapien
gatttttaaaataccaatgaacagccacatacc

SEQ ID NO: 806278 - DNA, 33 bp, Homo sapien
gatttttaaaataccagtgaacagccacatacc

SEQ ID NO: 806279 - DNA, 33 bp, Homo sapien
ctcccctcattctaaaatgaaaaatgtgtctat

SEQ ID NO: 806280 - DNA, 33 bp, Homo sapien
ctcccctcattctaaactgaaaaatgtgtctat

SEQ ID NO: 806281 - DNA, 33 bp, Homo sapien
atgctcttacttgatacccataaaggcagcttt

SEQ ID NO: 806282 - DNA, 33 bp, Homo sapien
atgctcttacttgatatccataaaggcagcttt

SEQ ID NO: 806283 - DNA, 33 bp, Homo sapien
agtttaattggcaatagctatcatttgcttggg

SEQ ID NO: 806284 - DNA, 33 bp, Homo sapien
agtttaattggcaatatctatcatttgcttggg

SEQ ID NO: 806285 - DNA, 33 bp, Homo sapien
aggtcaagaaagtgtacggcaaaaaaggtgaat

SEQ ID NO: 806286 - DNA, 33 bp, Homo sapien
aggtcaagaaagtgtatggcaaaaaaggtgaat

SEQ ID NO: 806287 - DNA, 33 bp, Homo sapien
gtggcactaaaacacacagtaaagaattccttc

SEQ ID NO: 806288 - DNA, 33 bp, Homo sapien
gtggcactaaaacacatagtaaagaattccttc

SEQ ID NO: 806289 - DNA, 33 bp, Homo sapien
gcaaacctaatcagggcaatggaataacacaga

SEQ ID NO: 806290 - DNA, 33 bp, Homo sapien
gcaaacctaatcaggggaatggaataacacaga

SEQ ID NO: 806291 - DNA, 33 bp, Homo sapien
ctgagagtcaatagtaaacttcgggacccaaca

SEQ ID NO: 806292 - DNA, 33 bp, Homo sapien
ctgagagtcaatagtagacttcgggacccaaca

SEQ ID NO: 806293 - DNA, 33 bp, Homo sapien
tgacattcaaaacatgcaataatcagcaagaga

SEQ ID NO: 806294 - DNA, 33 bp, Homo sapien
tgacattcaaaacatgtaataatcagcaagaga

SEQ ID NO: 806295 - DNA, 33 bp, Homo sapien
catataaatgactataaatggatcttgactgag

SEQ ID NO: 806296 - DNA, 33 bp, Homo sapien
catataaatgactatagatggatcttgactgag

SEQ ID NO: 806297 - DNA, 33 bp, Homo sapien
gattctgatgatagaaagccatcacaggcttgt

SEQ ID NO: 806298 - DNA, 33 bp, Homo sapien
gattctgatgatagaaggccatcacaggcttgt

SEQ ID NO: 806299 - DNA, 33 bp, Homo sapien
cagaataatcagagaacagtgaagggagtgagg

SEQ ID NO: 806300 - DNA, 33 bp, Homo sapien
cagaataatcagagaagagtgaagggagtgagg

SEQ ID NO: 806301 - DNA, 33 bp, Homo sapien
tactttcacctcttagcacaaggtccctatttg

SEQ ID NO: 806302 - DNA, 33 bp, Homo sapien
tactttcacctcttagtacaaggtccctatttg

SEQ ID NO: 806303 - DNA, 33 bp, Homo sapien
tattttcaaacatcacaaatatataacatgaat

SEQ ID NO: 806304 - DNA, 33 bp, Homo sapien
tattttcaaacatcacgaatatataacatgaat

SEQ ID NO: 806305 - DNA, 33 bp, Homo sapien
taatccagttttaacaatcctcagcattttgcc

SEQ ID NO: 806306 - DNA, 33 bp, Homo sapien
taatccagttttaacagtcctcagcattttgcc

SEQ ID NO: 806307 - DNA, 33 bp, Homo sapien; identical to SEQ ID NO: 806305

SEQ ID NO: 806308 - DNA, 33 bp, Homo sapien; identical to SEQ ID NO: 806306

SEQ ID NO: 806309 - DNA, 33 bp, Homo sapien
gaggatacagcccaatcatatcactatggttat

SEQ ID NO: 806310 - DNA, 33 bp, Homo sapien
gaggatacagcccaattatatcactatggttat

SEQ ID NO: 806311 - DNA, 33 bp, Homo sapien
taaccagcaactataacacgttctaacaaaaat

SEQ ID NO: 806312 - DNA, 33 bp, Homo sapien
taaccagcaactataatacgttctaacaaaaat

SEQ ID NO: 806313 - DNA, 33 bp, Homo sapien
ttgttactgtgcaaaactccttatgtggattat

SEQ ID NO: 806314 - DNA, 33 bp, Homo sapien
ttgttactgtgcaaaattccttatgtggattat

SEQ ID NO: 806315 - DNA, 33 bp, Homo sapien
taagaaattacaagcacggtttgataaatctag

SEQ ID NO: 806316 - DNA, 33 bp, Homo sapien
taagaaattacaagcatggtttgataaatctag

SEQ ID NO: 806317 - DNA, 33 bp, Homo sapien
gtgtaccaaaattgtaaagcattcagaacggtg

SEQ ID NO: 806318 - DNA, 33 bp, Homo sapien
gtgtaccaaaattgtagagcattcagaacggtg

SEQ ID NO: 806319 - DNA, 33 bp, Homo sapien
actgacatttaccaaacagtgatgatccttgag

SEQ ID NO: 806320 - DNA, 33 bp, Homo sapien
actgacatttaccaaatagtgatgatccttgag

SEQ ID NO: 806321 - DNA, 33 bp, Homo sapien
aggctatgtctataaaattgtacatgaatgatt

SEQ ID NO: 806322 - DNA, 33 bp, Homo sapien
aggctatgtctataaagttgtacatgaatgatt

SEQ ID NO: 806323 - DNA, 33 bp, Homo sapien
taatgcttaagtgagaacaacaatttcactttt

SEQ ID NO: 806324 - DNA, 33 bp, Homo sapien
taatgcttaagtgagaccaacaatttcactttt

SEQ ID NO: 806325 - DNA, 33 bp, Homo sapien
gacaatttctgaggcaacaccctcttcatgaga

SEQ ID NO: 806326 - DNA, 33 bp, Homo sapien
gacaatttctgaggcatcaccctcttcatgaga

SEQ ID NO: 806327 - DNA, 33 bp, Homo sapien
aaagatttcactgtgcaaccagatttgtcagca

SEQ ID NO: 806328 - DNA, 33 bp, Homo sapien
aaagatttcactgtgccaccagatttgtcagca

SEQ ID NO: 806329 - DNA, 33 bp, Homo sapien
ccctcttcctagttctcactttataacagtata

SEQ ID NO: 806330 - DNA, 33 bp, Homo sapien
ccctcttcctagttcttactttataacagtata

SEQ ID NO: 806331 - DNA, 33 bp, Homo sapien
tccttgagaatgtggtaaacctgaatcttttct

SEQ ID NO: 806332 - DNA, 33 bp, Homo sapien
tccttgagaatgtggtgaacctgaatcttttct

SEQ ID NO: 806333 - DNA, 33 bp, Homo sapien
accttaattcccaagagaactttgtacctgctt

SEQ ID NO: 806334 - DNA, 33 bp, Homo sapien
accttaattcccaagataactttgtacctgctt

SEQ ID NO: 806335 - DNA, 33 bp, Homo sapien
tcacctgactgctcacctttaccctacctgcct

SEQ ID NO: 806336 - DNA, 33 bp, Homo sapien
tcacctgactgctcacttttaccctacctgcct

SEQ ID NO: 806337 - DNA, 33 bp, Homo sapien
atgggagggaaagtggcatatgctgaagctgga

SEQ ID NO: 806338 - DNA, 33 bp, Homo sapien
atgggagggaaagtggtatatgctgaagctgga

SEQ ID NO: 806339 - DNA, 33 bp, Homo sapien
ttttgccaccttgtggaaacagtctaatgctaa

SEQ ID NO: 806340 - DNA, 33 bp, Homo sapien
ttttgccaccttgtgggaacagtctaatgctaa

SEQ ID NO: 806341 - DNA, 33 bp, Homo sapien
aggacttgttatctaaacttaatttgcttgata

SEQ ID NO: 806342 - DNA, 33 bp, Homo sapien
aggacttgttatctaaccttaatttgcttgata

SEQ ID NO: 806343 - DNA, 33 bp, Homo sapien
ataagatactttagaaggtgggagcgactttgg

SEQ ID NO: 806344 - DNA, 33 bp, Homo sapien
ataagatactttagaatgtgggagcgactttgg

SEQ ID NO: 806345 - DNA, 33 bp, Homo sapien
tgcacatcaagtgctcagacagtgcaatcaata

SEQ ID NO: 806346 - DNA, 33 bp, Homo sapien
tgcacatcaagtgctctgacagtgcaatcaata

SEQ ID NO: 806347 - DNA, 33 bp, Homo sapien
cattgctcattatccaacctcctttgcagtctg

SEQ ID NO: 806348 - DNA, 33 bp, Homo sapien
cattgctcattatccatcctcctttgcagtctg

SEQ ID NO: 806349 - DNA, 33 bp, Homo sapien
aagttactggttaaccaaatctaaaaacacata

SEQ ID NO: 806350 - DNA, 33 bp, Homo sapien
aagttactggttaaccgaatctaaaaacacata

SEQ ID NO: 806351 - DNA, 33 bp, Homo sapien
ttgactttaccaaagaccagatggctgtaagtg

SEQ ID NO: 806352 - DNA, 33 bp, Homo sapien
ttgactttaccaaagatcagatggctgtaagtg

SEQ ID NO: 806353 - DNA, 33 bp, Homo sapien
attgacaacccaaactcagttcaaggttactta

SEQ ID NO: 806354 - DNA, 33 bp, Homo sapien
attgacaacccaaactgagttcaaggttactta

SEQ ID NO: 806355 - DNA, 33 bp, Homo sapien
ggtcaatttgactagacataggattgattggat

SEQ ID NO: 806356 - DNA, 33 bp, Homo sapien
ggtcaatttgactagagataggattgattggat

SEQ ID NO: 806357 - DNA, 33 bp, Homo sapien
acccacttcctttagacggttgaaaataagtct

SEQ ID NO: 806358 - DNA, 33 bp, Homo sapien
acccacttcctttagatggttgaaaataagtct

SEQ ID NO: 806359 - DNA, 33 bp, Homo sapien
tataagactgggtaaacttgagccactttaaaa

SEQ ID NO: 806360 - DNA, 33 bp, Homo sapien
tataagactgggtaaatttgagccactttaaaa

SEQ ID NO: 806361 - DNA, 33 bp, Homo sapien
gataacagaataccaaagacttgctacttaata

SEQ ID NO: 806362 - DNA, 33 bp, Homo sapien
gataacagaataccaaggacttgctacttaata

SEQ ID NO: 806363 - DNA, 33 bp, Homo sapien
taatatgttccagatacagtgtgctgactgtac

SEQ ID NO: 806364 - DNA, 33 bp, Homo sapien
taatatgttccagatatagtgtgctgactgtac

SEQ ID NO: 806365 - DNA, 33 bp, Homo sapien
gcctttttaaacactgcattgatgatttgtcta

SEQ ID NO: 806366 - DNA, 33 bp, Homo sapien
gcctttttaaacactgtattgatgatttgtcta

SEQ ID NO: 806367 - DNA, 33 bp, Homo sapien
agtcctgttttctaccgctgggaagctcttctg

SEQ ID NO: 806368 - DNA, 33 bp, Homo sapien
agtcctgttttctacctctgggaagctcttctg

SEQ ID NO: 806369 - DNA, 33 bp, Homo sapien
tacacattggatacagcatacactgcttaggtg

SEQ ID NO: 806370 - DNA, 33 bp, Homo sapien
tacacattggatacagtatacactgcttaggtg

SEQ ID NO: 806371 - DNA, 33 bp, Homo sapien
caagagagaagaaaaaactatgagaagtgacct

SEQ ID NO: 806372 - DNA, 33 bp, Homo sapien
caagagagaagaaaaacctatgagaagtgacct

SEQ ID NO: 806373 - DNA, 33 bp, Homo sapien
aaaccatagttgaaagaagtgaaaatgaaaaag

SEQ ID NO: 806374 - DNA, 33 bp, Homo sapien
aaaccatagttgaaaggagtgaaaatgaaaaag

SEQ ID NO: 806375 - DNA, 33 bp, Homo sapien
tgtgagcctgtttaagaaacttcacctttctga

SEQ ID NO: 806376 - DNA, 33 bp, Homo sapien
tgtgagcctgtttaagtaacttcacctttctga

SEQ ID NO: 806377 - DNA, 33 bp, Homo sapien
ggagcacatctgattcaacatccctcctagcac

SEQ ID NO: 806378 - DNA, 33 bp, Homo sapien
ggagcacatctgattcgacatccctcctagcac

SEQ ID NO: 806379 - DNA, 33 bp, Homo sapien
gatgctcctttcagaagacaccaggatgatata

SEQ ID NO: 806380 - DNA, 33 bp, Homo sapien
gatgctcctttcagaatacaccaggatgatata

SEQ ID NO: 806381 - DNA, 33 bp, Homo sapien
actaaagcttaaaagcaagttgttcactaagag

SEQ ID NO: 806382 - DNA, 33 bp, Homo sapien
actaaagcttaaaagccagttgttcactaagag

SEQ ID NO: 806383 - DNA, 33 bp, Homo sapien
tcttatggttatcagcactgtacttctgggttg

SEQ ID NO: 806384 - DNA, 33 bp, Homo sapien
tcttatggttatcagccctgtacttctgggttg

SEQ ID NO: 806385 - DNA, 33 bp, Homo sapien
ccagcagaaggagtgaaagagtgagctcatcta

SEQ ID NO: 806386 - DNA, 33 bp, Homo sapien
ccagcagaaggagtgagagagtgagctcatcta

SEQ ID NO: 806387 - DNA, 33 bp, Homo sapien
ctgcagtcacttccacaagaaatggctgctggc

SEQ ID NO: 806388 - DNA, 33 bp, Homo sapien
ctgcagtcacttccacgagaaatggctgctggc

SEQ ID NO: 806389 - DNA, 33 bp, Homo sapien
gtaatcactttcttcaacttagagagcttcttt

SEQ ID NO: 806390 - DNA, 33 bp, Homo sapien
gtaatcactttcttcagcttagagagcttcttt

SEQ ID NO: 806391 - DNA, 33 bp, Homo sapien
tgtctactgtctaagcactttgagctcattggg

SEQ ID NO: 806392 - DNA, 33 bp, Homo sapien
tgtctactgtctaagcgctttgagctcattggg

SEQ ID NO: 806393 - DNA, 33 bp, Homo sapien
caaacaactctgttaacaataggcaaaggacat

SEQ ID NO: 806394 - DNA, 33 bp, Homo sapien
caaacaactctgttaataataggcaaaggacat

SEQ ID NO: 806395 - DNA, 33 bp, Homo sapien
aaaatgtctgggagaaacatccaaatttattat

SEQ ID NO: 806396 - DNA, 33 bp, Homo sapien
aaaatgtctgggagaagcatccaaatttattat

SEQ ID NO: 806397 - DNA, 33 bp, Homo sapien
tccagaaaaacttctggtactcattaggcccat

SEQ ID NO: 806398 - DNA, 33 bp, Homo sapien
tccagaaaaacttctgttactcattaggcccat

SEQ ID NO: 806399 - DNA, 33 bp, Homo sapien
ctggagaaggaggtggaatgatagggaggaagc

SEQ ID NO: 806400 - DNA, 33 bp, Homo sapien
ctggagaaggaggtgggatgatagggaggaagc

SEQ ID NO: 806401 - DNA, 33 bp, Homo sapien
gtttaaccataggatcacctcctgttatctaac

SEQ ID NO: 806402 - DNA, 33 bp, Homo sapien
gtttaaccataggatctcctcctgttatctaac

SEQ ID NO: 806403 - DNA, 33 bp, Homo sapien
tcaaacaggtctcttcactgtttgttgtaggat

SEQ ID NO: 806404 - DNA, 33 bp, Homo sapien
tcaaacaggtctcttcgctgtttgttgtaggat

SEQ ID NO: 806405 - DNA, 33 bp, Homo sapien
ttttcagattagaacacagtgagtctagggttg

SEQ ID NO: 806406 - DNA, 33 bp, Homo sapien
ttttcagattagaacatagtgagtctagggttg

SEQ ID NO: 806407 - DNA, 33 bp, Homo sapien
agcaagtggcagataccataggaccactgaaat

SEQ ID NO: 806408 - DNA, 33 bp, Homo sapien
agcaagtggcagatacgataggaccactgaaat

SEQ ID NO: 806409 - DNA, 33 bp, Homo sapien
acctgcattagtatgacccatcagagcttttaa

SEQ ID NO: 806410 - DNA, 33 bp, Homo sapien
acctgcattagtatgatccatcagagcttttaa

SEQ ID NO: 806411 - DNA, 33 bp, Homo sapien
aactctcaatcttccaaactactaaagccaggc

SEQ ID NO: 806412 - DNA, 33 bp, Homo sapien
aactctcaatcttccagactactaaagccaggc

SEQ ID NO: 806413 - DNA, 33 bp, Homo sapien
gtgctcaataaacatacactggtctcacaatta

SEQ ID NO: 806414 - DNA, 33 bp, Homo sapien
gtgctcaataaacatatactggtctcacaatta

SEQ ID NO: 806415 - DNA, 33 bp, Homo sapien
atttcacacttcacaacccataaaaatttgtca

SEQ ID NO: 806416 - DNA, 33 bp, Homo sapien
atttcacacttcacaatccataaaaatttgtca

SEQ ID NO: 806417 - DNA, 33 bp, Homo sapien
aatgtggctattcacaaccatagtgcagctcag

SEQ ID NO: 806418 - DNA, 33 bp, Homo sapien
aatgtggctattcacagccatagtgcagctcag

SEQ ID NO: 806419 - DNA, 33 bp, Homo sapien
aaatagaaataatggcaatagaagcaattttta

SEQ ID NO: 806420 - DNA, 33 bp, Homo sapien
aaatagaaataatggcgatagaagcaattttta

SEQ ID NO: 806421 - DNA, 33 bp, Homo sapien
gtggaaatgctgtggcaaagaagcagacaagtc

SEQ ID NO: 806422 - DNA, 33 bp, Homo sapien
gtggaaatgctgtggcgaagaagcagacaagtc

SEQ ID NO: 806423 - DNA, 33 bp, Homo sapien
tgataaatgcaacaacaggcacaagggaaaatg

SEQ ID NO: 806424 - DNA, 33 bp, Homo sapien
tgataaatgcaacaacgggcacaagggaaaatg

SEQ ID NO: 806425 - DNA, 33 bp, Homo sapien
tgggtggaatcattctcaactgccacacagtca

SEQ ID NO: 806426 - DNA, 33 bp, Homo sapien
tgggtggaatcattctgaactgccacacagtca

SEQ ID NO: 806427 - DNA, 33 bp, Homo sapien
acatacttaagactgggaagcaaagtaggtttg

SEQ ID NO: 806428 - DNA, 33 bp, Homo sapien
acatacttaagactggtaagcaaagtaggtttg

SEQ ID NO: 806429 - DNA, 33 bp, Homo sapien
caattagtggagcctaatagcttggagtgataa

SEQ ID NO: 806430 - DNA, 33 bp, Homo sapien
caattagtggagcctattagcttggagtgataa

SEQ ID NO: 806431 - DNA, 33 bp, Homo sapien
tcctctcaattgcttaccaaaatctccattgct

SEQ ID NO: 806432 - DNA, 33 bp, Homo sapien
tcctctcaattgcttatcaaaatctccattgct

SEQ ID NO: 806433 - DNA, 33 bp, Homo sapien
gaaataaattattttcaacatggacctaacatt

SEQ ID NO: 806434 - DNA, 33 bp, Homo sapien
gaaataaattattttcgacatggacctaacatt

SEQ ID NO: 806435 - DNA, 33 bp, Homo sapien
gtattttccagaacagcccattgcaatattatg

SEQ ID NO: 806436 - DNA, 33 bp, Homo sapien
gtattttccagaacagtccattgcaatattatg

SEQ ID NO: 806437 - DNA, 33 bp, Homo sapien
actaagctgtttttaacattgcagtcttccagt

SEQ ID NO: 806438 - DNA, 33 bp, Homo sapien
actaagctgtttttaatattgcagtcttccagt

SEQ ID NO: 806439 - DNA, 33 bp, Homo sapien
caggctcattccatgccgacaaagggctcagaa

SEQ ID NO: 806440 - DNA, 33 bp, Homo sapien
caggctcattccatgctgacaaagggctcagaa

SEQ ID NO: 806441 - DNA, 33 bp, Homo sapien
ggtgtgagttctgaaaagtagtctctcattttt

SEQ ID NO: 806442 - DNA, 33 bp, Homo sapien
ggtgtgagttctgaaaggtagtctctcattttt

SEQ ID NO: 806443 - DNA, 33 bp, Homo sapien
aagcctaaataataaaccatgaaaattcactta

SEQ ID NO: 806444 - DNA, 33 bp, Homo sapien
aagcctaaataataaagcatgaaaattcactta

SEQ ID NO: 806445 - DNA, 33 bp, Homo sapien
gttaaaagtgggtaggaaagaatatttgtgatc

SEQ ID NO: 806446 - DNA, 33 bp, Homo sapien
gttaaaagtgggtagggaagaatatttgtgatc

SEQ ID NO: 806447 - DNA, 33 bp, Homo sapien
cattacaataacatacacttagatgaaactacc

SEQ ID NO: 806448 - DNA, 33 bp, Homo sapien
cattacaataacatacgcttagatgaaactacc

SEQ ID NO: 806449 - DNA, 33 bp, Homo sapien
caacctgattttcctccagatatcttatgtcac

SEQ ID NO: 806450 - DNA, 33 bp, Homo sapien
caacctgattttcctctagatatcttatgtcac

SEQ ID NO: 806451 - DNA, 33 bp, Homo sapien
gtaaagagtagttctaagtctaaagcagagtct

SEQ ID NO: 806452 - DNA, 33 bp, Homo sapien
gtaaagagtagttctacgtctaaagcagagtct

SEQ ID NO: 806453 - DNA, 33 bp, Homo sapien
atttctctaacctcagaacctggtagcttgtgt

SEQ ID NO: 806454 - DNA, 33 bp, Homo sapien
atttctctaacctcaggacctggtagcttgtgt

SEQ ID NO: 806455 - DNA, 33 bp, Homo sapien
taggagatgactaaaacttgactgtattgagag

SEQ ID NO: 806456 - DNA, 33 bp, Homo sapien
taggagatgactaaaagttgactgtattgagag

SEQ ID NO: 806457 - DNA, 33 bp, Homo sapien
ggttcctggaccagtaacagcagtggcatttgc

SEQ ID NO: 806458 - DNA, 33 bp, Homo sapien
ggttcctggaccagtagcagcagtggcatttgc

SEQ ID NO: 806459 - DNA, 33 bp, Homo sapien
aggagatgtcaggaacactttcaatcttttatc

SEQ ID NO: 806460 - DNA, 33 bp, Homo sapien
aggagatgtcaggaacgctttcaatcttttatc

SEQ ID NO: 806461 - DNA, 33 bp, Homo sapien
ttgtttcctttattgaacttgtacctgcaaact

SEQ ID NO: 806462 - DNA, 33 bp, Homo sapien
ttgtttcctttattgagcttgtacctgcaaact

SEQ ID NO: 806463 - DNA, 33 bp, Homo sapien
tactctatttctctacagtacctaatatcatct

SEQ ID NO: 806464 - DNA, 33 bp, Homo sapien
tactctatttctctacggtacctaatatcatct

SEQ ID NO: 806465 - DNA, 33 bp, Homo sapien
taaagatagaagccataaaaataaacttcttgg

SEQ ID NO: 806466 - DNA, 33 bp, Homo sapien
taaagatagaagccatgaaaataaacttcttgg

SEQ ID NO: 806467 - DNA, 33 bp, Homo sapien
cctggtaatatctctacatcactattgcacata

SEQ ID NO: 806468 - DNA, 33 bp, Homo sapien
cctggtaatatctctagatcactattgcacata

SEQ ID NO: 806469 - DNA, 33 bp, Homo sapien
acagccacatgagtacactattttggaagtgcc

SEQ ID NO: 806470 - DNA, 33 bp, Homo sapien
acagccacatgagtacgctattttggaagtgcc

SEQ ID NO: 806471 - DNA, 33 bp, Homo sapien
tctgtgacttgagacaaaggtattcaaaataat

SEQ ID NO: 806472 - DNA, 33 bp, Homo sapien
tctgtgacttgagacagaggtattcaaaataat

SEQ ID NO: 806473 - DNA, 33 bp, Homo sapien
acattttctactgtaacgaggctcctcaaaaac

SEQ ID NO: 806474 - DNA, 33 bp, Homo sapien
acattttctactgtaatgaggctcctcaaaaac

SEQ ID NO: 806475 - DNA, 33 bp, Homo sapien
aatgcagaaatcttgcactgtgattttggtcat

SEQ ID NO: 806476 - DNA, 33 bp, Homo sapien
aatgcagaaatcttgctctgtgattttggtcat

SEQ ID NO: 806477 - DNA, 33 bp, Homo sapien
ggagacaaatgtagtaacaggaacacacagagg

SEQ ID NO: 806478 - DNA, 33 bp, Homo sapien
ggagacaaatgtagtagcaggaacacacagagg

SEQ ID NO: 806479 - DNA, 33 bp, Homo sapien
gagtcatctgctacccactgttacctattgcat

SEQ ID NO: 806480 - DNA, 33 bp, Homo sapien
gagtcatctgctacccgctgttacctattgcat

SEQ ID NO: 806481 - DNA, 33 bp, Homo sapien
tattaatgtgtgtaaacgtagcttagaactact

SEQ ID NO: 806482 - DNA, 33 bp, Homo sapien
tattaatgtgtgtaaatgtagcttagaactact

SEQ ID NO: 806483 - DNA, 33 bp, Homo sapien
cctaaaaagccttcacacatacacatttcagga

SEQ ID NO: 806484 - DNA, 33 bp, Homo sapien
cctaaaaagccttcacgcatacacatttcagga

SEQ ID NO: 806485 - DNA, 33 bp, Homo sapien
aacctcttgctacacaaatcttcaagtgaattc

SEQ ID NO: 806486 - DNA, 33 bp, Homo sapien
aacctcttgctacacacatcttcaagtgaattc

SEQ ID NO: 806487 - DNA, 33 bp, Homo sapien
ctgtttgtgaaaagaaataatcctctttgcttc

SEQ ID NO: 806488 - DNA, 33 bp, Homo sapien
ctgtttgtgaaaagaactaatcctctttgcttc

SEQ ID NO: 806489 - DNA, 33 bp, Homo sapien
agattcccagactctgaaaaaccctagtggcat

SEQ ID NO: 806490 - DNA, 33 bp, Homo sapien
agattcccagactctggaaaaccctagtggcat

SEQ ID NO: 806491 - DNA, 33 bp, Homo sapien
tactgcttcatacttcccctcaaatttgggaag

SEQ ID NO: 806492 - DNA, 33 bp, Homo sapien
tactgcttcatacttctcctcaaatttgggaag

SEQ ID NO: 806493 - DNA, 33 bp, Homo sapien
tctttcaagtttgccaaataaacagagttcaat

SEQ ID NO: 806494 - DNA, 33 bp, Homo sapien
tctttcaagtttgccagataaacagagttcaat

SEQ ID NO: 806495 - DNA, 33 bp, Homo sapien
tcctaacctgaactgacgaatcatatttgtgtg

SEQ ID NO: 806496 - DNA, 33 bp, Homo sapien
tcctaacctgaactgatgaatcatatttgtgtg

SEQ ID NO: 806497 - DNA, 33 bp, Homo sapien
tggttctcctgtgttaccaatgtaatataaccc

SEQ ID NO: 806498 - DNA, 33 bp, Homo sapien
tggttctcctgtgttatcaatgtaatataaccc

SEQ ID NO: 806499 - DNA, 33 bp, Homo sapien
agaaatctaaaggatccatgtgcacccatctct

SEQ ID NO: 806500 - DNA, 33 bp, Homo sapien
agaaatctaaaggatctatgtgcacccatctct

SEQ ID NO: 806501 - DNA, 33 bp, Homo sapien
ttctcttatctgccaacagctgaagtttcctta

SEQ ID NO: 806502 - DNA, 33 bp, Homo sapien
ttctcttatctgccaatagctgaagtttcctta

SEQ ID NO: 806503 - DNA, 33 bp, Homo sapien
tgttatgaaggagcaacgtaccaaagggaacct

SEQ ID NO: 806504 - DNA, 33 bp, Homo sapien
tgttatgaaggagcaatgtaccaaagggaacct

SEQ ID NO: 806505 - DNA, 33 bp, Homo sapien
ttggctgatatttgcaacactctttagctagcc

SEQ ID NO: 806506 - DNA, 33 bp, Homo sapien
ttggctgatatttgcagcactctttagctagcc

SEQ ID NO: 806507 - DNA, 33 bp, Homo sapien
gctctggagggaatacagattgtctggtaaggt

SEQ ID NO: 806508 - DNA, 33 bp, Homo sapien
gctctggagggaatacggattgtctggtaaggt

SEQ ID NO: 806509 - DNA, 33 bp, Homo sapien
taacaagatggatcaacggattgaaaatacgat

SEQ ID NO: 806510 - DNA, 33 bp, Homo sapien
taacaagatggatcaatggattgaaaatacgat

SEQ ID NO: 806511 - DNA, 33 bp, Homo sapien
agacagagagtttagacacctctttcagggggt

SEQ ID NO: 806512 - DNA, 33 bp, Homo sapien
agacagagagtttagatacctctttcagggggt

SEQ ID NO: 806513 - DNA, 33 bp, Homo sapien
ttccttaccccctcaaatattgatgatttccaa

SEQ ID NO: 806514 - DNA, 33 bp, Homo sapien
ttccttaccccctcaagtattgatgatttccaa

SEQ ID NO: 806515 - DNA, 33 bp, Homo sapien
gcttttcttttaatgcccacaatagctcctgag

SEQ ID NO: 806516 - DNA, 33 bp, Homo sapien
gcttttcttttaatgcgcacaatagctcctgag

SEQ ID NO: 806517 - DNA, 33 bp, Homo sapien
gtttcttctggctttaacattttaggtttctag

SEQ ID NO: 806518 - DNA, 33 bp, Homo sapien
gtttcttctggctttagcattttaggtttctag

SEQ ID NO: 806519 - DNA, 33 bp, Homo sapien
agcgcagaaagacatcccagaaatagaagcaat

SEQ ID NO: 806520 - DNA, 33 bp, Homo sapien
agcgcagaaagacatctcagaaatagaagcaat

SEQ ID NO: 806521 - DNA, 33 bp, Homo sapien
gtcctaaataaggtataaggttccatcttctaa

SEQ ID NO: 806522 - DNA, 33 bp, Homo sapien
gtcctaaataaggtatgaggttccatcttctaa

SEQ ID NO: 806523 - DNA, 33 bp, Homo sapien
atatcaattattgaataaacaagtgcaccttcc

SEQ ID NO: 806524 - DNA, 33 bp, Homo sapien
atatcaattattgaatgaacaagtgcaccttcc

SEQ ID NO: 806525 - DNA, 33 bp, Homo sapien
taaaccctggagataccgcagaaaacaaaacca

SEQ ID NO: 806526 - DNA, 33 bp, Homo sapien
taaaccctggagatactgcagaaaacaaaacca

SEQ ID NO: 806527 - DNA, 33 bp, Homo sapien
aagtttttccttctcacagcctccaaccattcc

SEQ ID NO: 806528 - DNA, 33 bp, Homo sapien
aagtttttccttctcagagcctccaaccattcc

SEQ ID NO: 806529 - DNA, 33 bp, Homo sapien
tgtctttgctattcaacggatgctggagagaac

SEQ ID NO: 806530 - DNA, 33 bp, Homo sapien
tgtctttgctattcaatggatgctggagagaac

SEQ ID NO: 806531 - DNA, 33 bp, Homo sapien
aatgttcagctcaatacgtttaaaaagtcactt

SEQ ID NO: 806532 - DNA, 33 bp, Homo sapien
aatgttcagctcaataggtttaaaaagtcactt

SEQ ID NO: 806533 - DNA, 33 bp, Homo sapien
ggggcctaaaacattacctgcttcatggaaatg

SEQ ID NO: 806534 - DNA, 33 bp, Homo sapien
ggggcctaaaacattatctgcttcatggaaatg

SEQ ID NO: 806535 - DNA, 33 bp, Homo sapien
gtgtgcagcaatgccactcaactcacacataaa

SEQ ID NO: 806536 - DNA, 33 bp, Homo sapien
gtgtgcagcaatgccagtcaactcacacataaa

SEQ ID NO: 806537 - DNA, 33 bp, Homo sapien
atgataacaaacttcccaaatgatagagtctga

SEQ ID NO: 806538 - DNA, 33 bp, Homo sapien
atgataacaaacttccgaaatgatagagtctga

SEQ ID NO: 806539 - DNA, 33 bp, Homo sapien
taatactatacagaagacactgggtacaaagac

SEQ ID NO: 806540 - DNA, 33 bp, Homo sapien
taatactatacagaaggcactgggtacaaagac

SEQ ID NO: 806541 - DNA, 33 bp, Homo sapien
gtaaacaatgcttccactcaaaaaagtcaactc

SEQ ID NO: 806542 - DNA, 33 bp, Homo sapien
gtaaacaatgcttccattcaaaaaagtcaactc

SEQ ID NO: 806543 - DNA, 33 bp, Homo sapien
tcatttcagctcttcaaggtactcaagagtagg

SEQ ID NO: 806544 - DNA, 33 bp, Homo sapien
tcatttcagctcttcagggtactcaagagtagg

SEQ ID NO: 806545 - DNA, 33 bp, Homo sapien
cagaggactattgtgaacattaaatgagattat

SEQ ID NO: 806546 - DNA, 33 bp, Homo sapien
cagaggactattgtgagcattaaatgagattat

SEQ ID NO: 806547 - DNA, 33 bp, Homo sapien
tctctgaagacagtgaaatgaatcccacagggg

SEQ ID NO: 806548 - DNA, 33 bp, Homo sapien
tctctgaagacagtgatatgaatcccacagggg

SEQ ID NO: 806549 - DNA, 33 bp, Homo sapien
attctgtatttcaactaaccaacctcattctac

SEQ ID NO: 806550 - DNA, 33 bp, Homo sapien
attctgtatttcaactcaccaacctcattctac

SEQ ID NO: 806551 - DNA, 33 bp, Homo sapien
tgaccaagatgaacaaagtctcttttctcatga

SEQ ID NO: 806552 - DNA, 33 bp, Homo sapien
tgaccaagatgaacaaggtctcttttctcatga

SEQ ID NO: 806553 - DNA, 33 bp, Homo sapien
ctctctgcccttcaaccacaataaaatcttggt

SEQ ID NO: 806554 - DNA, 33 bp, Homo sapien
ctctctgcccttcaactacaataaaatcttggt

SEQ ID NO: 806555 - DNA, 33 bp, Homo sapien
tttttaattttttcaccatgttatccctagcac

SEQ ID NO: 806556 - DNA, 33 bp, Homo sapien
tttttaattttttcactatgttatccctagcac

SEQ ID NO: 806557 - DNA, 33 bp, Homo sapien
gagactagaagccacacgaagacaaataaaatc

SEQ ID NO: 806558 - DNA, 33 bp, Homo sapien
gagactagaagccacatgaagacaaataaaatc

SEQ ID NO: 806559 - DNA, 33 bp, Homo sapien
ctttgcattattcataacccttttgctgtagta

SEQ ID NO: 806560 - DNA, 33 bp, Homo sapien
ctttgcattattcatagcccttttgctgtagta

SEQ ID NO: 806561 - DNA, 33 bp, Homo sapien
aattttagcttctttcccgttggatcaaatgat

SEQ ID NO: 806562 - DNA, 33 bp, Homo sapien
aattttagcttctttctcgttggatcaaatgat

SEQ ID NO: 806563 - DNA, 33 bp, Homo sapien
ggaaaactagagactaagaacataaaatattgt

SEQ ID NO: 806564 - DNA, 33 bp, Homo sapien
ggaaaactagagactaggaacataaaatattgt

SEQ ID NO: 806565 - DNA, 33 bp, Homo sapien
cactctgtgatattcaagcaatggtgaaattgt

SEQ ID NO: 806566 - DNA, 33 bp, Homo sapien
cactctgtgatattcatgcaatggtgaaattgt

SEQ ID NO: 806567 - DNA, 33 bp, Homo sapien
taattactctcaaggaagcttctccaaaactca

SEQ ID NO: 806568 - DNA, 33 bp, Homo sapien
taattactctcaaggaggcttctccaaaactca

SEQ ID NO: 806569 - DNA, 33 bp, Homo sapien
gcagggattttttttaagttgattcctgtattt

SEQ ID NO: 806570 - DNA, 33 bp, Homo sapien
gcagggattttttttaggttgattcctgtattt

SEQ ID NO: 806571 - DNA, 33 bp, Homo sapien
acctttgtctttacccacactaatttgtaccta

SEQ ID NO: 806572 - DNA, 33 bp, Homo sapien
acctttgtctttaccctcactaatttgtaccta

SEQ ID NO: 806573 - DNA, 33 bp, Homo sapien
tggcctctgttctccacgaactacaatttagtt

SEQ ID NO: 806574 - DNA, 33 bp, Homo sapien
tggcctctgttctccatgaactacaatttagtt

SEQ ID NO: 806575 - DNA, 33 bp, Homo sapien
cttagatagtgtccaacaaggcacctcaaaata

SEQ ID NO: 806576 - DNA, 33 bp, Homo sapien
cttagatagtgtccaataaggcacctcaaaata

SEQ ID NO: 806577 - DNA, 33 bp, Homo sapien
gtatctttccacatatcaaaatgatgatgataa

SEQ ID NO: 806578 - DNA, 33 bp, Homo sapien
gtatctttccacatatgaaaatgatgatgataa

SEQ ID NO: 806579 - DNA, 33 bp, Homo sapien
aatctcaggcttctaaatcacaaggaaactcca

SEQ ID NO: 806580 - DNA, 33 bp, Homo sapien
aatctcaggcttctaagtcacaaggaaactcca

SEQ ID NO: 806581 - DNA, 33 bp, Homo sapien
tgccaatgaagttcaacgatttttcacagcctt

SEQ ID NO: 806582 - DNA, 33 bp, Homo sapien
tgccaatgaagttcaatgatttttcacagcctt

SEQ ID NO: 806583 - DNA, 33 bp, Homo sapien
gaagtagaaataaaaactaggtattcagattcc

SEQ ID NO: 806584 - DNA, 33 bp, Homo sapien
gaagtagaaataaaaagtaggtattcagattcc

SEQ ID NO: 806585 - DNA, 33 bp, Homo sapien
tatttctacttctaccacttgttagtaacctat

SEQ ID NO: 806586 - DNA, 33 bp, Homo sapien
tatttctacttctaccgcttgttagtaacctat

SEQ ID NO: 806587 - DNA, 33 bp, Homo sapien
aggctcacagaagttaaatggtggatcaagaat

SEQ ID NO: 806588 - DNA, 33 bp, Homo sapien
aggctcacagaagttagatggtggatcaagaat

SEQ ID NO: 806589 - DNA, 33 bp, Homo sapien
acatgttttaagagctcagagaaaaggaaaaaa

SEQ ID NO: 806590 - DNA, 33 bp, Homo sapien
acatgttttaagagcttagagaaaaggaaaaaa

SEQ ID NO: 806591 - DNA, 33 bp, Homo sapien
agagagggaatcacaggaggaagagaactcttc

SEQ ID NO: 806592 - DNA, 33 bp, Homo sapien
agagagggaatcacagtaggaagagaactcttc

SEQ ID NO: 806593 - DNA, 33 bp, Homo sapien
acatctcattagaagccgaaatttggattcagg

SEQ ID NO: 806594 - DNA, 33 bp, Homo sapien
acatctcattagaagctgaaatttggattcagg

SEQ ID NO: 806595 - DNA, 33 bp, Homo sapien
cactgtctgctgctcaagttcctgctgctatct

SEQ ID NO: 806596 - DNA, 33 bp, Homo sapien
cactgtctgctgctcaggttcctgctgctatct

SEQ ID NO: 806597 - DNA, 33 bp, Homo sapien
gaaagacatcttatgacagctttttcctaaaga

SEQ ID NO: 806598 - DNA, 33 bp, Homo sapien
gaaagacatcttatgagagctttttcctaaaga

SEQ ID NO: 806599 - DNA, 33 bp, Homo sapien
gaaacccagcggcttacgtagcagctcacttcg

SEQ ID NO: 806600 - DNA, 33 bp, Homo sapien
gaaacccagcggcttaggtagcagctcacttcg

SEQ ID NO: 806601 - DNA, 33 bp, Homo sapien
accataagaaagaaagaatctcaggctgagtgt

SEQ ID NO: 806602 - DNA, 33 bp, Homo sapien
accataagaaagaaaggatctcaggctgagtgt

SEQ ID NO: 806603 - DNA, 33 bp, Homo sapien
accccagcttcctccaagttgtactcatgttgc

SEQ ID NO: 806604 - DNA, 33 bp, Homo sapien
accccagcttcctccaggttgtactcatgttgc

SEQ ID NO: 806605 - DNA, 33 bp, Homo sapien
tattccctgagcctaccacattgcctgggacag

SEQ ID NO: 806606 - DNA, 33 bp, Homo sapien
tattccctgagcctactacattgcctgggacag

SEQ ID NO: 806607 - DNA, 33 bp, Homo sapien
gggaatcaatttttgcactccctctataatacc

SEQ ID NO: 806608 - DNA, 33 bp, Homo sapien
gggaatcaatttttgctctccctctataatacc

SEQ ID NO: 806609 - DNA, 33 bp, Homo sapien
caaagggtgcacaaaaagagccagaaggggaga

SEQ ID NO: 806610 - DNA, 33 bp, Homo sapien
caaagggtgcacaaaatgagccagaaggggaga

SEQ ID NO: 806611 - DNA, 33 bp, Homo sapien
cctttgtgacctaggacagattgcttaatcctg

SEQ ID NO: 806612 - DNA, 33 bp, Homo sapien
cctttgtgacctaggatagattgcttaatcctg

SEQ ID NO: 806613 - DNA, 33 bp, Homo sapien
aattcacatttgaagaaataaaccaactgctcg

SEQ ID NO: 806614 - DNA, 33 bp, Homo sapien
aattcacatttgaagagataaaccaactgctcg

SEQ ID NO: 806615 - DNA, 33 bp, Homo sapien
gttctaacttcaagacaatcgccttttttaatt

SEQ ID NO: 806616 - DNA, 33 bp, Homo sapien
gttctaacttcaagacgatcgccttttttaatt

SEQ ID NO: 806617 - DNA, 33 bp, Homo sapien
atctcagccttagagactaaaatgggttgccag

SEQ ID NO: 806618 - DNA, 33 bp, Homo sapien
atctcagccttagagattaaaatgggttgccag

SEQ ID NO: 806619 - DNA, 33 bp, Homo sapien
agcctttactaccttaagcactcaataaatact

SEQ ID NO: 806620 - DNA, 33 bp, Homo sapien
agcctttactaccttaggcactcaataaatact

SEQ ID NO: 806621 - DNA, 33 bp, Homo sapien
gcaaaactatatagcaaactgttttatcacaaa

SEQ ID NO: 806622 - DNA, 33 bp, Homo sapien
gcaaaactatatagcacactgttttatcacaaa

SEQ ID NO: 806623 - DNA, 33 bp, Homo sapien
caaaatgtagacaaaactaaactctaacattta

SEQ ID NO: 806624 - DNA, 33 bp, Homo sapien
caaaatgtagacaaaattaaactctaacattta

SEQ ID NO: 806625 - DNA, 33 bp, Homo sapien
cctaaaatcagtttaaaaagaggagagacaacc

SEQ ID NO: 806626 - DNA, 33 bp, Homo sapien
cctaaaatcagtttaagaagaggagagacaacc

SEQ ID NO: 806627 - DNA, 33 bp, Homo sapien
actatgtaatttggaccaatactcccaatgaga

SEQ ID NO: 806628 - DNA, 33 bp, Homo sapien
actatgtaatttggacgaatactcccaatgaga

SEQ ID NO: 806629 - DNA, 33 bp, Homo sapien
aacctccatttaccaaccatatcatgccagact

SEQ ID NO: 806630 - DNA, 33 bp, Homo sapien
aacctccatttaccaagcatatcatgccagact

SEQ ID NO: 806631 - DNA, 33 bp, Homo sapien
agagttgaacatcctacctcattttctgtggtt

SEQ ID NO: 806632 - DNA, 33 bp, Homo sapien
agagttgaacatcctagctcattttctgtggtt

SEQ ID NO: 806633 - DNA, 33 bp, Homo sapien
aagctgtacaaccctaacaaaggactacatagg

SEQ ID NO: 806634 - DNA, 33 bp, Homo sapien
aagctgtacaaccctagcaaaggactacatagg

SEQ ID NO: 806635 - DNA, 33 bp, Homo sapien
tttcttcaacttagaacgcccactttctattat

SEQ ID NO: 806636 - DNA, 33 bp, Homo sapien
tttcttcaacttagaatgcccactttctattat

SEQ ID NO: 806637 - DNA, 33 bp, Homo sapien
agtctggggaccgaaacaaagaaatgaaaacaa

SEQ ID NO: 806638 - DNA, 33 bp, Homo sapien
agtctggggaccgaaataaagaaatgaaaacaa

SEQ ID NO: 806639 - DNA, 33 bp, Homo sapien
acactctatcagactacggttttaaaatactat

SEQ ID NO: 806640 - DNA, 33 bp, Homo sapien
acactctatcagactagggttttaaaatactat

SEQ ID NO: 806641 - DNA, 33 bp, Homo sapien
tattacggttaaatgtcaaggtgagctggggaa

SEQ ID NO: 806642 - DNA, 33 bp, Homo sapien
tattacggttaaatgtgaaggtgagctggggaa

SEQ ID NO: 806643 - DNA, 33 bp, Homo sapien
ggaccatccaaggtagaactttagaacaggaag

SEQ ID NO: 806644 - DNA, 33 bp, Homo sapien
ggaccatccaaggtaggactttagaacaggaag

SEQ ID NO: 806645 - DNA, 33 bp, Homo sapien
gcgccgtgaggatcaaatgaaggaataagctta

SEQ ID NO: 806646 - DNA, 33 bp, Homo sapien
gcgccgtgaggatcaagtgaaggaataagctta

SEQ ID NO: 806647 - DNA, 33 bp, Homo sapien
ctgtggtagatgctagaacaatagtgataagta

SEQ ID NO: 806648 - DNA, 33 bp, Homo sapien
ctgtggtagatgctaggacaatagtgataagta

SEQ ID NO: 806649 - DNA, 33 bp, Homo sapien
aataacgaaaattgcacggtgctgttacttgtt

SEQ ID NO: 806650 - DNA, 33 bp, Homo sapien
aataacgaaaattgcatggtgctgttacttgtt

SEQ ID NO: 806651 - DNA, 33 bp, Homo sapien
tacttgtatgactttaagtaaatcccacgctct

SEQ ID NO: 806652 - DNA, 33 bp, Homo sapien
tacttgtatgactttaggtaaatcccacgctct

SEQ ID NO: 806653 - DNA, 33 bp, Homo sapien
tacaagacaaacatcacgggagttggagagagt

SEQ ID NO: 806654 - DNA, 33 bp, Homo sapien
tacaagacaaacatcatgggagttggagagagt

SEQ ID NO: 806655 - DNA, 33 bp, Homo sapien
accttctcattgtatactaaatagtcttgtaat

SEQ ID NO: 806656 - DNA, 33 bp, Homo sapien
accttctcattgtatattaaatagtcttgtaat

SEQ ID NO: 806657 - DNA, 33 bp, Homo sapien
gacccctgcaatagtcacagtctgagaagggaa

SEQ ID NO: 806658 - DNA, 33 bp, Homo sapien
gacccctgcaatagtcgcagtctgagaagggaa

SEQ ID NO: 806659 - DNA, 33 bp, Homo sapien
tcctttcaccttcttaactgttttgaaaggcta

SEQ ID NO: 806660 - DNA, 33 bp, Homo sapien
tcctttcaccttcttacctgttttgaaaggcta

SEQ ID NO: 806661 - DNA, 33 bp, Homo sapien
atcagatctgggcaaaacattttccctctgtgg

SEQ ID NO: 806662 - DNA, 33 bp, Homo sapien
atcagatctgggcaaagcattttccctctgtgg

SEQ ID NO: 806663 - DNA, 33 bp, Homo sapien
ttggtctctaactctacaattacaccctaatca

SEQ ID NO: 806664 - DNA, 33 bp, Homo sapien
ttggtctctaactctataattacaccctaatca

SEQ ID NO: 806665 - DNA, 33 bp, Homo sapien
acaggagtctgctgaaacctgtgtaaattctcc

SEQ ID NO: 806666 - DNA, 33 bp, Homo sapien
acaggagtctgctgaaccctgtgtaaattctcc

SEQ ID NO: 806667 - DNA, 33 bp, Homo sapien
acagctgaggtacaaacaggagaagtgacttgc

SEQ ID NO: 806668 - DNA, 33 bp, Homo sapien
acagctgaggtacaaagaggagaagtgacttgc

SEQ ID NO: 806669 - DNA, 33 bp, Homo sapien
ctgtgaaggtgtaaaccggcttttcatcaaaag

SEQ ID NO: 806670 - DNA, 33 bp, Homo sapien
ctgtgaaggtgtaaactggcttttcatcaaaag

SEQ ID NO: 806671 - DNA, 33 bp, Homo sapien
atcagttttctaaagcaaacaaattcagggaaa

SEQ ID NO: 806672 - DNA, 33 bp, Homo sapien
atcagttttctaaagcgaacaaattcagggaaa

SEQ ID NO: 806673 - DNA, 33 bp, Homo sapien
atatggccactgtcaagctatctggtttgactt

SEQ ID NO: 806674 - DNA, 33 bp, Homo sapien
atatggccactgtcaatctatctggtttgactt

SEQ ID NO: 806675 - DNA, 33 bp, Homo sapien
ttggttcctgctcccgaaacttctgtcgccatc

SEQ ID NO: 806676 - DNA, 33 bp, Homo sapien
ttggttcctgctcccggaacttctgtcgccatc

SEQ ID NO: 806677 - DNA, 33 bp, Homo sapien
agtggtttcaagatacacatttctgagaagctt

SEQ ID NO: 806678 - DNA, 33 bp, Homo sapien
agtggtttcaagatacgcatttctgagaagctt

SEQ ID NO: 806679 - DNA, 33 bp, Homo sapien
gtaagacttggcttccccaactagatactaaga

SEQ ID NO: 806680 - DNA, 33 bp, Homo sapien
gtaagacttggcttcctcaactagatactaaga

SEQ ID NO: 806681 - DNA, 33 bp, Homo sapien
ttgtggagaagtctcacgcggcatatttgaggg

SEQ ID NO: 806682 - DNA, 33 bp, Homo sapien
ttgtggagaagtctcatgcggcatatttgaggg

SEQ ID NO: 806683 - DNA, 33 bp, Homo sapien
agataagagaatgcaaagtgttaaagaaatctc

SEQ ID NO: 806684 - DNA, 33 bp, Homo sapien
agataagagaatgcaaggtgttaaagaaatctc

SEQ ID NO: 806685 - DNA, 33 bp, Homo sapien
gggcagtgaactcagacgtactttatgtgtgtt

SEQ ID NO: 806686 - DNA, 33 bp, Homo sapien
gggcagtgaactcagatgtactttatgtgtgtt

SEQ ID NO: 806687 - DNA, 33 bp, Homo sapien
tctgagaatccattcactcatttgcaaaattaa

SEQ ID NO: 806688 - DNA, 33 bp, Homo sapien
tctgagaatccattcattcatttgcaaaattaa

SEQ ID NO: 806689 - DNA, 33 bp, Homo sapien
taaatgtcattccccaacgaagccttctctggc

SEQ ID NO: 806690 - DNA, 33 bp, Homo sapien
taaatgtcattccccagcgaagccttctctggc

SEQ ID NO: 806691 - DNA, 33 bp, Homo sapien
tttcacagaggaagccaaagtccagccaggaga

SEQ ID NO: 806692 - DNA, 33 bp, Homo sapien
tttcacagaggaagccgaagtccagccaggaga

SEQ ID NO: 806693 - DNA, 33 bp, Homo sapien
aggtagatggaaaacaaggagatcaaaaattat

SEQ ID NO: 806694 - DNA, 33 bp, Homo sapien
aggtagatggaaaacacggagatcaaaaattat

SEQ ID NO: 806695 - DNA, 33 bp, Homo sapien
catgaagaattggacacaccgagctctaaaata

SEQ ID NO: 806696 - DNA, 33 bp, Homo sapien
catgaagaattggacataccgagctctaaaata

SEQ ID NO: 806697 - DNA, 33 bp, Homo sapien
aaggtatttgagtagaaagacaacaaaaggcaa

SEQ ID NO: 806698 - DNA, 33 bp, Homo sapien
aaggtatttgagtagagagacaacaaaaggcaa

SEQ ID NO: 806699 - DNA, 33 bp, Homo sapien
ttactgggcagaggaacaggcctgataaggagg

SEQ ID NO: 806700 - DNA, 33 bp, Homo sapien
ttactgggcagaggaataggcctgataaggagg

SEQ ID NO: 806701 - DNA, 33 bp, Homo sapien
gtaattttggagaaaaaaaatctctccgtcaat

SEQ ID NO: 806702 - DNA, 33 bp, Homo sapien
gtaattttggagaaaacaaatctctccgtcaat

SEQ ID NO: 806703 - DNA, 33 bp, Homo sapien
gtcacccagaatcctcacctatcgaattgggat

SEQ ID NO: 806704 - DNA, 33 bp, Homo sapien
gtcacccagaatcctcgcctatcgaattgggat

SEQ ID NO: 806705 - DNA, 33 bp, Homo sapien
ctgtcttccaagaccaacaatcttctgaaggtc

SEQ ID NO: 806706 - DNA, 33 bp, Homo sapien
ctgtcttccaagaccagcaatcttctgaaggtc

SEQ ID NO: 806707 - DNA, 33 bp, Homo sapien
ctccaagctccatgaaagtaaggacctttctgc

SEQ ID NO: 806708 - DNA, 33 bp, Homo sapien
ctccaagctccatgaaggtaaggacctttctgc

SEQ ID NO: 806709 - DNA, 33 bp, Homo sapien
atgcaacaatgtgttacctaccgctttactttc

SEQ ID NO: 806710 - DNA, 33 bp, Homo sapien
atgcaacaatgtgttatctaccgctttactttc

SEQ ID NO: 806711 - DNA, 33 bp, Homo sapien
tattgcagggtgtttaacaatatcactagcctg

SEQ ID NO: 806712 - DNA, 33 bp, Homo sapien
tattgcagggtgtttagcaatatcactagcctg

SEQ ID NO: 806713 - DNA, 33 bp, Homo sapien
ggattagaacttggacccaactgtccttctatc

SEQ ID NO: 806714 - DNA, 33 bp, Homo sapien
ggattagaacttggactcaactgtccttctatc

SEQ ID NO: 806715 - DNA, 33 bp, Homo sapien
ctgcaactagcatcagcatggaaatggaccagc

SEQ ID NO: 806716 - DNA, 33 bp, Homo sapien
ctgcaactagcatcagtatggaaatggaccagc

SEQ ID NO: 806717 - DNA, 33 bp, Homo sapien
tgattatgttatgttcaattgcaaaagggattt

SEQ ID NO: 806718 - DNA, 33 bp, Homo sapien
tgattatgttatgttccattgcaaaagggattt

SEQ ID NO: 806719 - DNA, 33 bp, Homo sapien
cacatcctatgcataacggggtggataatctca

SEQ ID NO: 806720 - DNA, 33 bp, Homo sapien
cacatcctatgcataatggggtggataatctca

SEQ ID NO: 806721 - DNA, 33 bp, Homo sapien
ctccacatatgtccaacgagcatgagattatcc

SEQ ID NO: 806722 - DNA, 33 bp, Homo sapien
ctccacatatgtccaatgagcatgagattatcc

SEQ ID NO: 806723 - DNA, 33 bp, Homo sapien
cacagaggttaaggtccaatggcagagctggac

SEQ ID NO: 806724 - DNA, 33 bp, Homo sapien
cacagaggttaaggtctaatggcagagctggac

SEQ ID NO: 806725 - DNA, 33 bp, Homo sapien
tgaagaaccaggagacaggaatctctaggattg

SEQ ID NO: 806726 - DNA, 33 bp, Homo sapien
tgaagaaccaggagacgggaatctctaggattg

SEQ ID NO: 806727 - DNA, 33 bp, Homo sapien
aaggagatgaattctgccaacaaccagtgagct

SEQ ID NO: 806728 - DNA, 33 bp, Homo sapien
aaggagatgaattctggcaacaaccagtgagct

SEQ ID NO: 806729 - DNA, 33 bp, Homo sapien
gtagaccaggatatacaaattccattaagcagt

SEQ ID NO: 806730 - DNA, 33 bp, Homo sapien
gtagaccaggatatacgaattccattaagcagt

SEQ ID NO: 806731 - DNA, 33 bp, Homo sapien
attgcttgctatgtggaaaagaatgctcctagg

SEQ ID NO: 806732 - DNA, 33 bp, Homo sapien
attgcttgctatgtgggaaagaatgctcctagg

SEQ ID NO: 806733 - DNA, 33 bp, Homo sapien
aacccatgagttttaccaagaaacccaagagtc

SEQ ID NO: 806734 - DNA, 33 bp, Homo sapien
aacccatgagttttacgaagaaacccaagagtc

SEQ ID NO: 806735 - DNA, 33 bp, Homo sapien
cctgttcaatttatcaaggaagtgttattctgg

SEQ ID NO: 806736 - DNA, 33 bp, Homo sapien
cctgttcaatttatcagggaagtgttattctgg

SEQ ID NO: 806737 - DNA, 33 bp, Homo sapien
acaaggcaaaaggaggaaatagtgagacaagaa

SEQ ID NO: 806738 - DNA, 33 bp, Homo sapien
acaaggcaaaaggagggaatagtgagacaagaa

SEQ ID NO: 806739 - DNA, 33 bp, Homo sapien
tgcttctttaccaaaccgtctatatcttgctaa

SEQ ID NO: 806740 - DNA, 33 bp, Homo sapien
tgcttctttaccaaactgtctatatcttgctaa

SEQ ID NO: 806741 - DNA, 33 bp, Homo sapien
gttcaaaggggattcaaatgatagtgtttggca

SEQ ID NO: 806742 - DNA, 33 bp, Homo sapien
gttcaaaggggattcagatgatagtgtttggca

SEQ ID NO: 806743 - DNA, 33 bp, Homo sapien
aacttcttccaaatgcattagcctcctacctgc

SEQ ID NO: 806744 - DNA, 33 bp, Homo sapien
aacttcttccaaatgcgttagcctcctacctgc

SEQ ID NO: 806745 - DNA, 33 bp, Homo sapien
agatatctagttttcacggatgagaaaaaaata

SEQ ID NO: 806746 - DNA, 33 bp, Homo sapien
agatatctagttttcatggatgagaaaaaaata

SEQ ID NO: 806747 - DNA, 33 bp, Homo sapien
tttatacacagatccacgaggaagctgcctctt

SEQ ID NO: 806748 - DNA, 33 bp, Homo sapien
tttatacacagatccatgaggaagctgcctctt

SEQ ID NO: 806749 - DNA, 33 bp, Homo sapien
gtaaaccagggaggcacataccctcttagggcc

SEQ ID NO: 806750 - DNA, 33 bp, Homo sapien
gtaaaccagggaggcagataccctcttagggcc

SEQ ID NO: 806751 - DNA, 33 bp, Homo sapien
agtaaagagtggttgacagtggagctcagaagg

SEQ ID NO: 806752 - DNA, 33 bp, Homo sapien
agtaaagagtggttgatagtggagctcagaagg

SEQ ID NO: 806753 - DNA, 33 bp, Homo sapien
gatagaggataaatgtgaacacgatacactaaa

SEQ ID NO: 806754 - DNA, 33 bp, Homo sapien
gatagaggataaatgttaacacgatacactaaa

SEQ ID NO: 806755 - DNA, 33 bp, Homo sapien
tctgtctcctcctcaaacccatgacttgattta

SEQ ID NO: 806756 - DNA, 33 bp, Homo sapien
tctgtctcctcctcaatcccatgacttgattta

SEQ ID NO: 806757 - DNA, 33 bp, Homo sapien
aggaaggcttcaagacaacagtgagaacagaac

SEQ ID NO: 806758 - DNA, 33 bp, Homo sapien
aggaaggcttcaagacgacagtgagaacagaac

SEQ ID NO: 806759 - DNA, 33 bp, Homo sapien
ttaaaatggaaaactacctctgatttacttcag

SEQ ID NO: 806760 - DNA, 33 bp, Homo sapien
ttaaaatggaaaactatctctgatttacttcag

SEQ ID NO: 806761 - DNA, 33 bp, Homo sapien
tcaggcaatcagacagacctaacaacgtggctc

SEQ ID NO: 806762 - DNA, 33 bp, Homo sapien
tcaggcaatcagacagtcctaacaacgtggctc

SEQ ID NO: 806763 - DNA, 33 bp, Homo sapien
ttttataatataataaatgaacttgaaacctta

SEQ ID NO: 806764 - DNA, 33 bp, Homo sapien
ttttataatataataactgaacttgaaacctta

SEQ ID NO: 806765 - DNA, 33 bp, Homo sapien
aaaagtttattaaataagtacacagaggccata

SEQ ID NO: 806766 - DNA, 33 bp, Homo sapien
aaaagtttattaaatacgtacacagaggccata

SEQ ID NO: 806767 - DNA, 33 bp, Homo sapien
agttgtagtgtgcctacctaagcatcctactca

SEQ ID NO: 806768 - DNA, 33 bp, Homo sapien
agttgtagtgtgcctatctaagcatcctactca

SEQ ID NO: 806769 - DNA, 33 bp, Homo sapien
aacaaactactgatacacgtacaaggatagatc

SEQ ID NO: 806770 - DNA, 33 bp, Homo sapien
aacaaactactgatacccgtacaaggatagatc

SEQ ID NO: 806771 - DNA, 33 bp, Homo sapien
aagtgtatttaccatcaagttataaagcttttc

SEQ ID NO: 806772 - DNA, 33 bp, Homo sapien
aagtgtatttaccatcgagttataaagcttttc

SEQ ID NO: 806773 - DNA, 33 bp, Homo sapien
tggagccctaagcaacggtgtggagaagtttgt

SEQ ID NO: 806774 - DNA, 33 bp, Homo sapien
tggagccctaagcaactgtgtggagaagtttgt

SEQ ID NO: 806775 - DNA, 33 bp, Homo sapien
tatgattagaggaggacgtaggtaagcaactgt

SEQ ID NO: 806776 - DNA, 33 bp, Homo sapien
tatgattagaggaggaggtaggtaagcaactgt

SEQ ID NO: 806777 - DNA, 33 bp, Homo sapien
tgagaactcactattaagacagttgcttaccta

SEQ ID NO: 806778 - DNA, 33 bp, Homo sapien
tgagaactcactattaggacagttgcttaccta

SEQ ID NO: 806779 - DNA, 33 bp, Homo sapien
gggtgggcattttttacatggctactctatgag

SEQ ID NO: 806780 - DNA, 33 bp, Homo sapien
gggtgggcattttttatatggctactctatgag

SEQ ID NO: 806781 - DNA, 33 bp, Homo sapien
atttgctgtatcacaagtagaatttttgtcata

SEQ ID NO: 806782 - DNA, 33 bp, Homo sapien
atttgctgtatcacaattagaatttttgtcata

SEQ ID NO: 806783 - DNA, 33 bp, Homo sapien
aagggagggaaaggtacaagatgctaacagaga

SEQ ID NO: 806784 - DNA, 33 bp, Homo sapien
aagggagggaaaggtataagatgctaacagaga

SEQ ID NO: 806785 - DNA, 33 bp, Homo sapien
acgacaaaataccttacaccagtctctgtgata

SEQ ID NO: 806786 - DNA, 33 bp, Homo sapien
acgacaaaataccttataccagtctctgtgata

SEQ ID NO: 806787 - DNA, 33 bp, Homo sapien
gaggaacaagattgtacggacaaaagcaagggt

SEQ ID NO: 806788 - DNA, 33 bp, Homo sapien
gaggaacaagattgtagggacaaaagcaagggt

SEQ ID NO: 806789 - DNA, 33 bp, Homo sapien
aggagacaaggagaaacggaatgagtctgattc

SEQ ID NO: 806790 - DNA, 33 bp, Homo sapien
aggagacaaggagaaagggaatgagtctgattc

SEQ ID NO: 806791 - DNA, 33 bp, Homo sapien
gggtacaggagcagataaaaacaaaacaagtga

SEQ ID NO: 806792 - DNA, 33 bp, Homo sapien
gggtacaggagcagatgaaaacaaaacaagtga

SEQ ID NO: 806793 - DNA, 33 bp, Homo sapien
accttcctagcttggacgttttaaattacctat

SEQ ID NO: 806794 - DNA, 33 bp, Homo sapien
accttcctagcttggatgttttaaattacctat

SEQ ID NO: 806795 - DNA, 33 bp, Homo sapien
cttttatagcagtctgaatactttgtagttatt

SEQ ID NO: 806796 - DNA, 33 bp, Homo sapien
cttttatagcagtctgcatactttgtagttatt

SEQ ID NO: 806797 - DNA, 33 bp, Homo sapien
aaatgcatgggtagaaaaaccaaattccagaga

SEQ ID NO: 806798 - DNA, 33 bp, Homo sapien
aaatgcatgggtagaagaaccaaattccagaga

SEQ ID NO: 806799 - DNA, 33 bp, Homo sapien
gagggccatctgcctaccaaatgaaacaattta

SEQ ID NO: 806800 - DNA, 33 bp, Homo sapien
gagggccatctgcctatcaaatgaaacaattta

SEQ ID NO: 806801 - DNA, 33 bp, Homo sapien
gagctgactcttgaaaagtattgagtaaaccag

SEQ ID NO: 806802 - DNA, 33 bp, Homo sapien
gagctgactcttgaaaggtattgagtaaaccag

SEQ ID NO: 806803 - DNA, 33 bp, Homo sapien
actgggctttactacaaatcatctctcagagat

SEQ ID NO: 806804 - DNA, 33 bp, Homo sapien
actgggctttactacagatcatctctcagagat

SEQ ID NO: 806805 - DNA, 33 bp, Homo sapien
gacccaggtttcccagactctccccaacaatcc

SEQ ID NO: 806806 - DNA, 33 bp, Homo sapien
gacccaggtttcccagtctctccccaacaatcc

SEQ ID NO: 806807 - DNA, 33 bp, Homo sapien
ctttgcactgaacaaacctcaatgccaaataca

SEQ ID NO: 806808 - DNA, 33 bp, Homo sapien
ctttgcactgaacaaatctcaatgccaaataca

SEQ ID NO: 806809 - DNA, 33 bp, Homo sapien
tccattacctccttcaactctggcaacacaata

SEQ ID NO: 806810 - DNA, 33 bp, Homo sapien
tccattacctccttcatctctggcaacacaata

SEQ ID NO: 806811 - DNA, 33 bp, Homo sapien
tgtatgatggattcagaaacagggtagctagaa

SEQ ID NO: 806812 - DNA, 33 bp, Homo sapien
tgtatgatggattcaggaacagggtagctagaa

SEQ ID NO: 806813 - DNA, 33 bp, Homo sapien
cttcagtgacaaattacctttcctctgaaagtc

SEQ ID NO: 806814 - DNA, 33 bp, Homo sapien
cttcagtgacaaattatctttcctctgaaagtc

SEQ ID NO: 806815 - DNA, 33 bp, Homo sapien
gatcaatactggaaaacgttagaatatacaagt

SEQ ID NO: 806816 - DNA, 33 bp, Homo sapien
gatcaatactggaaaatgttagaatatacaagt

SEQ ID NO: 806817 - DNA, 33 bp, Homo sapien
gatcattcatccatttcaaaatcagattcttag

SEQ ID NO: 806818 - DNA, 33 bp, Homo sapien
gatcattcatccatttgaaaatcagattcttag

SEQ ID NO: 806819 - DNA, 33 bp, Homo sapien
agctgccaaattgataactggtgcttgaagagt

SEQ ID NO: 806820 - DNA, 33 bp, Homo sapien
agctgccaaattgatacctggtgcttgaagagt

SEQ ID NO: 806821 - DNA, 33 bp, Homo sapien
acagaggtgagcaaagcagagtctccagttcaa

SEQ ID NO: 806822 - DNA, 33 bp, Homo sapien
acagaggtgagcaaaggagagtctccagttcaa

SEQ ID NO: 806823 - DNA, 33 bp, Homo sapien
agtgtctttcacctgccatgattctgaggcctc

SEQ ID NO: 806824 - DNA, 33 bp, Homo sapien
agtgtctttcacctgctatgattctgaggcctc

SEQ ID NO: 806825 - DNA, 33 bp, Homo sapien; identical to SEQ ID NO: 806823

SEQ ID NO: 806826 - DNA, 33 bp, Homo sapien; identical to SEQ ID NO: 806824

SEQ ID NO: 806827 - DNA, 33 bp, Homo sapien
ctctgtgaagtgcgaaaaatcctcacttctgtc

SEQ ID NO: 806828 - DNA, 33 bp, Homo sapien
ctctgtgaagtgcgaagaatcctcacttctgtc

SEQ ID NO: 806829 - DNA, 33 bp, Homo sapien
tttcccatgctatggaataagaaagagcccagg

SEQ ID NO: 806830 - DNA, 33 bp, Homo sapien
tttcccatgctatggactaagaaagagcccagg

SEQ ID NO: 806831 - DNA, 33 bp, Homo sapien
aagggagggccagctaaaagttattagacagga

SEQ ID NO: 806832 - DNA, 33 bp, Homo sapien
aagggagggccagctataagttattagacagga

SEQ ID NO: 806833 - DNA, 33 bp, Homo sapien
ggaggacaaaaaagaccaaatgccttaaacaca

SEQ ID NO: 806834 - DNA, 33 bp, Homo sapien
ggaggacaaaaaagactaaatgccttaaacaca

SEQ ID NO: 806835 - DNA, 33 bp, Homo sapien
aagctaagtgcaaaaacaagtgtggtcagtatc

SEQ ID NO: 806836 - DNA, 33 bp, Homo sapien
aagctaagtgcaaaaataagtgtggtcagtatc

SEQ ID NO: 806837 - DNA, 33 bp, Homo sapien
agaggttttgaactcaggtcttctgactctagg

SEQ ID NO: 806838 - DNA, 33 bp, Homo sapien
agaggttttgaactcatgtcttctgactctagg

SEQ ID NO: 806839 - DNA, 33 bp, Homo sapien
atccaagaacacacagcagagttgagcctcaga

SEQ ID NO: 806840 - DNA, 33 bp, Homo sapien
atccaagaacacacaggagagttgagcctcaga

SEQ ID NO: 806841 - DNA, 33 bp, Homo sapien
atttgtgtggtgaatacaattctctccttctta

SEQ ID NO: 806842 - DNA, 33 bp, Homo sapien
atttgtgtggtgaatataattctctccttctta

SEQ ID NO: 806843 - DNA, 33 bp, Homo sapien
gtgctaataggagacccaatcacctgacttcga

SEQ ID NO: 806844 - DNA, 33 bp, Homo sapien
gtgctaataggagacctaatcacctgacttcga

SEQ ID NO: 806845 - DNA, 33 bp, Homo sapien
gttcctgtgggctatcagaatgggtatgcggtc

SEQ ID NO: 806846 - DNA, 33 bp, Homo sapien
gttcctgtgggctatcggaatgggtatgcggtc

SEQ ID NO: 806847 - DNA, 33 bp, Homo sapien
gtcagaggccatgcgaactatgagcagaaataa

SEQ ID NO: 806848 - DNA, 33 bp, Homo sapien
gtcagaggccatgcgagctatgagcagaaataa

SEQ ID NO: 806849 - DNA, 33 bp, Homo sapien
taatgttcataaaccaactgtctgtatcagaat

SEQ ID NO: 806850 - DNA, 33 bp, Homo sapien
taatgttcataaaccagctgtctgtatcagaat

SEQ ID NO: 806851 - DNA, 33 bp, Homo sapien
agacttgatatttatacaccacgagagtttgtg

SEQ ID NO: 806852 - DNA, 33 bp, Homo sapien
agacttgatatttatataccacgagagtttgtg

SEQ ID NO: 806853 - DNA, 33 bp, Homo sapien
tcttcaaagggtgacaatcattccattaccctg

SEQ ID NO: 806854 - DNA, 33 bp, Homo sapien
tcttcaaagggtgacagtcattccattaccctg

SEQ ID NO: 806855 - DNA, 33 bp, Homo sapien
tccttttgagtgtccccatcatgagcacccgga

SEQ ID NO: 806856 - DNA, 33 bp, Homo sapien
tccttttgagtgtccctatcatgagcacccgga

SEQ ID NO: 806857 - DNA, 33 bp, Homo sapien
cgcttaaccctctgaagctctatcatactcatc

SEQ ID NO: 806858 - DNA, 33 bp, Homo sapien
cgcttaaccctctgaatctctatcatactcatc

SEQ ID NO: 806859 - DNA, 33 bp, Homo sapien
ccgtcttattgctgaactggtcactgcctcctg

SEQ ID NO: 806860 - DNA, 33 bp, Homo sapien
ccgtcttattgctgaattggtcactgcctcctg

SEQ ID NO: 806861 - DNA, 33 bp, Homo sapien
tgcagaaacccagtaaaattctggtataacaca

SEQ ID NO: 806862 - DNA, 33 bp, Homo sapien
tgcagaaacccagtaagattctggtataacaca

SEQ ID NO: 806863 - DNA, 33 bp, Homo sapien
ctctaaatcattcagaaccctgagaacagtgag

SEQ ID NO: 806864 - DNA, 33 bp, Homo sapien
ctctaaatcattcagatccctgagaacagtgag

SEQ ID NO: 806865 - DNA, 33 bp, Homo sapien
tgaggcaagaatctgacgagaacagctttctaa

SEQ ID NO: 806866 - DNA, 33 bp, Homo sapien
tgaggcaagaatctgatgagaacagctttctaa

SEQ ID NO: 806867 - DNA, 33 bp, Homo sapien
ctgacctgcaaattccaattgcttcagcattcc

SEQ ID NO: 806868 - DNA, 33 bp, Homo sapien
ctgacctgcaaattccgattgcttcagcattcc

SEQ ID NO: 806869 - DNA, 33 bp, Homo sapien
gggaaatgttttccagcagtcccaagcatgttt

SEQ ID NO: 806870 - DNA, 33 bp, Homo sapien
gggaaatgttttccaggagtcccaagcatgttt

SEQ ID NO: 806871 - DNA, 33 bp, Homo sapien
ggactatggatgtgaactggaggcactgttctt

SEQ ID NO: 806872 - DNA, 33 bp, Homo sapien
ggactatggatgtgaattggaggcactgttctt

SEQ ID NO: 806873 - DNA, 33 bp, Homo sapien
ggcatattaaaactaaagcagactggatgcagc

SEQ ID NO: 806874 - DNA, 33 bp, Homo sapien
ggcatattaaaactaaggcagactggatgcagc

SEQ ID NO: 806875 - DNA, 33 bp, Homo sapien
ttatttggcctgcacaatatttaacctttgcaa

SEQ ID NO: 806876 - DNA, 33 bp, Homo sapien
ttatttggcctgcacagtatttaacctttgcaa

SEQ ID NO: 806877 - DNA, 33 bp, Homo sapien
agacaatgtgactgaaatgtaattatattgtga

SEQ ID NO: 806878 - DNA, 33 bp, Homo sapien
agacaatgtgactgaagtgtaattatattgtga

SEQ ID NO: 806879 - DNA, 33 bp, Homo sapien
tattgcttggtagagaaattttccaaacaagtg

SEQ ID NO: 806880 - DNA, 33 bp, Homo sapien
tattgcttggtagagatattttccaaacaagtg

SEQ ID NO: 806881 - DNA, 33 bp, Homo sapien
ttaagtctagccaaaaaccttctggatgtattc

SEQ ID NO: 806882 - DNA, 33 bp, Homo sapien
ttaagtctagccaaaacccttctggatgtattc

SEQ ID NO: 806883 - DNA, 33 bp, Homo sapien
aggctgtgcgagtggacgaccctgatgacctgg

SEQ ID NO: 806884 - DNA, 33 bp, Homo sapien
aggctgtgcgagtggatgaccctgatgacctgg

SEQ ID NO: 806885 - DNA, 33 bp, Homo sapien
ccatagctcagaattacgtatctgaagtaaaca

SEQ ID NO: 806886 - DNA, 33 bp, Homo sapien
ccatagctcagaattatgtatctgaagtaaaca

SEQ ID NO: 806887 - DNA, 33 bp, Homo sapien
gaccagcatggctccccatattgcagagagggc

SEQ ID NO: 806888 - DNA, 33 bp, Homo sapien
gaccagcatggctcccgatattgcagagagggc

SEQ ID NO: 806889 - DNA, 33 bp, Homo sapien
aagctaaagaactaacaaacctttgctttcaca

SEQ ID NO: 806890 - DNA, 33 bp, Homo sapien
aagctaaagaactaacgaacctttgctttcaca

SEQ ID NO: 806891 - DNA, 33 bp, Homo sapien
gattgcctcggtccaactctcatttattaatta

SEQ ID NO: 806892 - DNA, 33 bp, Homo sapien
gattgcctcggtccaagtctcatttattaatta

SEQ ID NO: 806893 - DNA, 33 bp, Homo sapien
attaccccttctcctcaccttaattctcttgat

SEQ ID NO: 806894 - DNA, 33 bp, Homo sapien
attaccccttctcctcgccttaattctcttgat

SEQ ID NO: 806895 - DNA, 33 bp, Homo sapien
atttattgagttcatacggagtgctttctaata

SEQ ID NO: 806896 - DNA, 33 bp, Homo sapien
atttattgagttcatatggagtgctttctaata

SEQ ID NO: 806897 - DNA, 33 bp, Homo sapien
agtcctttgtctttacagggcttgaaagggtgg

SEQ ID NO: 806898 - DNA, 33 bp, Homo sapien
agtcctttgtctttacggggcttgaaagggtgg

SEQ ID NO: 806899 - DNA, 33 bp, Homo sapien
attagagatattgaaaagtcagattcagaaaat

SEQ ID NO: 806900 - DNA, 33 bp, Homo sapien
attagagatattgaaaggtcagattcagaaaat

SEQ ID NO: 806901 - DNA, 33 bp, Homo sapien
gccttacctggagatgaagaatcatttgtatgc

SEQ ID NO: 806902 - DNA, 33 bp, Homo sapien
gccttacctggagatgcagaatcatttgtatgc

SEQ ID NO: 806903 - DNA, 33 bp, Homo sapien
cagcagggtggctacaatggacattggtttttg

SEQ ID NO: 806904 - DNA, 33 bp, Homo sapien
cagcagggtggctacagtggacattggtttttg

SEQ ID NO: 806905 - DNA, 33 bp, Homo sapien
taccccagctaagggccctagaccaatcagccc

SEQ ID NO: 806906 - DNA, 33 bp, Homo sapien
taccccagctaagggctctagaccaatcagccc

SEQ ID NO: 806907 - DNA, 33 bp, Homo sapien
gtgataactttggtgacggtgaatctctatgta

SEQ ID NO: 806908 - DNA, 33 bp, Homo sapien
gtgataactttggtgagggtgaatctctatgta

SEQ ID NO: 806909 - DNA, 33 bp, Homo sapien
ctaccatttattcaaacattgtcatagaccagg

SEQ ID NO: 806910 - DNA, 33 bp, Homo sapien
ctaccatttattcaaagattgtcatagaccagg

SEQ ID NO: 806911 - DNA, 33 bp, Homo sapien
tgacgcttcctggtgacagcttcttaggcgaaa

SEQ ID NO: 806912 - DNA, 33 bp, Homo sapien
tgacgcttcctggtgatagcttcttaggcgaaa

SEQ ID NO: 806913 - DNA, 33 bp, Homo sapien
gccgagcacttattctcacttataactcttagt

SEQ ID NO: 806914 - DNA, 33 bp, Homo sapien
gccgagcacttattctgacttataactcttagt

SEQ ID NO: 806915 - DNA, 33 bp, Homo sapien
agctttgatgaagcaaatggctatgttggggag

SEQ ID NO: 806916 - DNA, 33 bp, Homo sapien
agctttgatgaagcaagtggctatgttggggag

SEQ ID NO: 806917 - DNA, 33 bp, Homo sapien
aaactgtaaaaaatgaagtgatatgatataatc

SEQ ID NO: 806918 - DNA, 33 bp, Homo sapien
aaactgtaaaaaatgacgtgatatgatataatc

SEQ ID NO: 806919 - DNA, 33 bp, Homo sapien
aacttctagttgagaacaataagaaaagctgga

SEQ ID NO: 806920 - DNA, 33 bp, Homo sapien
aacttctagttgagaagaataagaaaagctgga

SEQ ID NO: 806921 - DNA, 33 bp, Homo sapien
atcaaagggctaacaaaagtagtaaagaatcac

SEQ ID NO: 806922 - DNA, 33 bp, Homo sapien
atcaaagggctaacaagagtagtaaagaatcac

SEQ ID NO: 806923 - DNA, 33 bp, Homo sapien
tttatcactgtcctaacttacccatttgtctcc

SEQ ID NO: 806924 - DNA, 33 bp, Homo sapien
tttatcactgtcctaagttacccatttgtctcc

SEQ ID NO: 806925 - DNA, 33 bp, Homo sapien
gcagtaactgtgcctaacgtcgcgtgtaatcgc

SEQ ID NO: 806926 - DNA, 33 bp, Homo sapien
gcagtaactgtgcctatcgtcgcgtgtaatcgc

SEQ ID NO: 806927 - DNA, 33 bp, Homo sapien
gaaatcttgagaccccaaactcacaatgccaaa

SEQ ID NO: 806928 - DNA, 33 bp, Homo sapien
gaaatcttgagacccctaactcacaatgccaaa

SEQ ID NO: 806929 - DNA, 33 bp, Homo sapien
gttccagtctagtgggcaaggccaattttctac

SEQ ID NO: 806930 - DNA, 33 bp, Homo sapien
gttccagtctagtgggtaaggccaattttctac

SEQ ID NO: 806931 - DNA, 33 bp, Homo sapien
ggatagctttacaattaaagatgtgtttatccc

SEQ ID NO: 806932 - DNA, 33 bp, Homo sapien
ggatagctttacaattgaagatgtgtttatccc

SEQ ID NO: 806933 - DNA, 33 bp, Homo sapien
ctacaaagtagaaaacagagtcattataagtag

SEQ ID NO: 806934 - DNA, 33 bp, Homo sapien
ctacaaagtagaaaacggagtcattataagtag

SEQ ID NO: 806935 - DNA, 33 bp, Homo sapien
agaagtccaacacttacagcattctgggttttg

SEQ ID NO: 806936 - DNA, 33 bp, Homo sapien
agaagtccaacacttatagcattctgggttttg

SEQ ID NO: 806937 - DNA, 33 bp, Homo sapien
tggtggtgctagttgacatcttagatcagctgg

SEQ ID NO: 806938 - DNA, 33 bp, Homo sapien
tggtggtgctagttgatatcttagatcagctgg

SEQ ID NO: 806939 - DNA, 33 bp, Homo sapien
cactgaatcaaaagcaacttgaggcaaacctgg

SEQ ID NO: 806940 - DNA, 33 bp, Homo sapien
cactgaatcaaaagcaccttgaggcaaacctgg

SEQ ID NO: 806941 - DNA, 33 bp, Homo sapien
catcaccatgtttaccaagcacttgttctgtac

SEQ ID NO: 806942 - DNA, 33 bp, Homo sapien
catcaccatgtttaccgagcacttgttctgtac

SEQ ID NO: 806943 - DNA, 33 bp, Homo sapien
aattgcttcgcattccaaagtttcaggaagagg

SEQ ID NO: 806944 - DNA, 33 bp, Homo sapien
aattgcttcgcattccgaagtttcaggaagagg

SEQ ID NO: 806945 - DNA, 33 bp, Homo sapien
gtatataaatctgtcacgcaatgctgtaattgt

SEQ ID NO: 806946 - DNA, 33 bp, Homo sapien
gtatataaatctgtcatgcaatgctgtaattgt

SEQ ID NO: 806947 - DNA, 33 bp, Homo sapien
tctctggactaaaagaccacataaaacacagtg

SEQ ID NO: 806948 - DNA, 33 bp, Homo sapien
tctctggactaaaagatcacataaaacacagtg

SEQ ID NO: 806949 - DNA, 33 bp, Homo sapien
caactgtgaaatgtccacatagcaacttagcac

SEQ ID NO: 806950 - DNA, 33 bp, Homo sapien
caactgtgaaatgtccgcatagcaacttagcac

SEQ ID NO: 806951 - DNA, 33 bp, Homo sapien
ctcatgggttgaatcaagtctctcaaaaagata

SEQ ID NO: 806952 - DNA, 33 bp, Homo sapien
ctcatgggttgaatcatgtctctcaaaaagata

SEQ ID NO: 806953 - DNA, 33 bp, Homo sapien
atacagttaagtgaaaagcagtatgtaccatgt

SEQ ID NO: 806954 - DNA, 33 bp, Homo sapien
atacagttaagtgaaaggcagtatgtaccatgt

SEQ ID NO: 806955 - DNA, 33 bp, Homo sapien
ctgtcttcttattccaagtcccacaggtatgat

SEQ ID NO: 806956 - DNA, 33 bp, Homo sapien
ctgtcttcttattccaggtcccacaggtatgat

SEQ ID NO: 806957 - DNA, 33 bp, Homo sapien
tgtggtgatatcttaacgtggttttaatcttaa

SEQ ID NO: 806958 - DNA, 33 bp, Homo sapien
tgtggtgatatcttaatgtggttttaatcttaa

SEQ ID NO: 806959 - DNA, 33 bp, Homo sapien
tcacatgaacaaaaaacgtcaaataagcttgac

SEQ ID NO: 806960 - DNA, 33 bp, Homo sapien
tcacatgaacaaaaaatgtcaaataagcttgac

SEQ ID NO: 806961 - DNA, 33 bp, Homo sapien
gttagatgtatcccaactcaactttcccaccac

SEQ ID NO: 806962 - DNA, 33 bp, Homo sapien
gttagatgtatcccaagtcaactttcccaccac

SEQ ID NO: 806963 - DNA, 33 bp, Homo sapien
ttgtgtcccaggtagcagagagtttgggatctt

SEQ ID NO: 806964 - DNA, 33 bp, Homo sapien
ttgtgtcccaggtagctgagagtttgggatctt

SEQ ID NO: 806965 - DNA, 33 bp, Homo sapien
atgttaatagtaggtacccttgatgtgatgcaa

SEQ ID NO: 806966 - DNA, 33 bp, Homo sapien
atgttaatagtaggtatccttgatgtgatgcaa

SEQ ID NO: 806967 - DNA, 33 bp, Homo sapien
agccctctctcttttacagaattgcctactcct

SEQ ID NO: 806968 - DNA, 33 bp, Homo sapien
agccctctctcttttatagaattgcctactcct

SEQ ID NO: 806969 - DNA, 33 bp, Homo sapien
catgaactatctcttcacttttatggagtatcc

SEQ ID NO: 806970 - DNA, 33 bp, Homo sapien
catgaactatctcttctcttttatggagtatcc

SEQ ID NO: 806971 - DNA, 33 bp, Homo sapien
cacatttcagactgtacctaattaaatactcta

SEQ ID NO: 806972 - DNA, 33 bp, Homo sapien
cacatttcagactgtagctaattaaatactcta

SEQ ID NO: 806973 - DNA, 33 bp, Homo sapien
cctagagtccatcagaaacgctcttctccacct

SEQ ID NO: 806974 - DNA, 33 bp, Homo sapien
cctagagtccatcagacacgctcttctccacct

SEQ ID NO: 806975 - DNA, 33 bp, Homo sapien
cttctcaacctcttaaagcttctgttcagcatc

SEQ ID NO: 806976 - DNA, 33 bp, Homo sapien
cttctcaacctcttaaggcttctgttcagcatc

SEQ ID NO: 806977 - DNA, 33 bp, Homo sapien
tgttattgtctgtctccaaattgcttttatagc

SEQ ID NO: 806978 - DNA, 33 bp, Homo sapien
tgttattgtctgtctctaaattgcttttatagc

SEQ ID NO: 806979 - DNA, 33 bp, Homo sapien
ttctccacgtccttgccaacacttgttattgtc

SEQ ID NO: 806980 - DNA, 33 bp, Homo sapien
ttctccacgtccttgctaacacttgttattgtc

SEQ ID NO: 806981 - DNA, 33 bp, Homo sapien
cttaaaaggttaaacacacagtgaccatatgac

SEQ ID NO: 806982 - DNA, 33 bp, Homo sapien
cttaaaaggttaaacatacagtgaccatatgac

SEQ ID NO: 806983 - DNA, 33 bp, Homo sapien
gggtaataacttgggaaatatgcataaaccatt

SEQ ID NO: 806984 - DNA, 33 bp, Homo sapien
gggtaataacttgggagatatgcataaaccatt

SEQ ID NO: 806985 - DNA, 33 bp, Homo sapien
taaatagtttgggtcaacttcatgcttttggaa

SEQ ID NO: 806986 - DNA, 33 bp, Homo sapien
taaatagtttgggtcatcttcatgcttttggaa

SEQ ID NO: 806987 - DNA, 33 bp, Homo sapien
gtcttgctggaaaatacgctacttagaaattaa

SEQ ID NO: 806988 - DNA, 33 bp, Homo sapien
gtcttgctggaaaatatgctacttagaaattaa

SEQ ID NO: 806989 - DNA, 33 bp, Homo sapien
tggtctacatacctcactatgttggcaaggaaa

SEQ ID NO: 806990 - DNA, 33 bp, Homo sapien
tggtctacatacctcattatgttggcaaggaaa

SEQ ID NO: 806991 - DNA, 33 bp, Homo sapien
gtcttagagttagaagcctcttagcaatgattt

SEQ ID NO: 806992 - DNA, 33 bp, Homo sapien
gtcttagagttagaaggctcttagcaatgattt

SEQ ID NO: 806993 - DNA, 33 bp, Homo sapien
tgacatattttagacaatgtcccagtggatgcc

SEQ ID NO: 806994 - DNA, 33 bp, Homo sapien
tgacatattttagacagtgtcccagtggatgcc

SEQ ID NO: 806995 - DNA, 33 bp, Homo sapien
tgcatgctttaaaaaactatgcaggaaggaggc

SEQ ID NO: 806996 - DNA, 33 bp, Homo sapien
tgcatgctttaaaaaattatgcaggaaggaggc

SEQ ID NO: 806997 - DNA, 33 bp, Homo sapien
aggaaatatcaactataactcagaaggcaaaaa

SEQ ID NO: 806998 - DNA, 33 bp, Homo sapien
aggaaatatcaactatcactcagaaggcaaaaa

SEQ ID NO: 806999 - DNA, 33 bp, Homo sapien
caagatagtagcataaataagcagcaggtctgt

SEQ ID NO: 807000 - DNA, 33 bp, Homo sapien
caagatagtagcataagtaagcagcaggtctgt

SEQ ID NO: 807001 - DNA, 33 bp, Homo sapien
tggtatattgccttgcccatgataggagctcaa

SEQ ID NO: 807002 - DNA, 33 bp, Homo sapien
tggtatattgccttgctcatgataggagctcaa

SEQ ID NO: 807003 - DNA, 33 bp, Homo sapien
atcaccgtctataaaacgaatgagttgagcttc

SEQ ID NO: 807004 - DNA, 33 bp, Homo sapien
atcaccgtctataaaatgaatgagttgagcttc

SEQ ID NO: 807005 - DNA, 33 bp, Homo sapien
gaaacagaactgtttgaatcttgtcctcccacc

SEQ ID NO: 807006 - DNA, 33 bp, Homo sapien
gaaacagaactgtttgtatcttgtcctcccacc

SEQ ID NO: 807007 - DNA, 33 bp, Homo sapien
gcttgcaaacacagaacggaactgaatcctctc

SEQ ID NO: 807008 - DNA, 33 bp, Homo sapien
gcttgcaaacacagaatggaactgaatcctctc

SEQ ID NO: 807009 - DNA, 33 bp, Homo sapien
aaaaggtacagtgacccataaaccagagttatc

SEQ ID NO: 807010 - DNA, 33 bp, Homo sapien
aaaaggtacagtgacctataaaccagagttatc

SEQ ID NO: 807011 - DNA, 33 bp, Homo sapien
caccaagatttcaaaccgacatactaacttgga

SEQ ID NO: 807012 - DNA, 33 bp, Homo sapien
caccaagatttcaaactgacatactaacttgga

SEQ ID NO: 807013 - DNA, 33 bp, Homo sapien
ttctggtgattcataaagtatattagcatatta

SEQ ID NO: 807014 - DNA, 33 bp, Homo sapien
ttctggtgattcataatgtatattagcatatta

SEQ ID NO: 807015 - DNA, 33 bp, Homo sapien
gagcaatcatattcccagctaaaattcttatta

SEQ ID NO: 807016 - DNA, 33 bp, Homo sapien
gagcaatcatattcccggctaaaattcttatta

SEQ ID NO: 807017 - DNA, 33 bp, Homo sapien
ctagccagaggggttaaggaagcttgcctgagg

SEQ ID NO: 807018 - DNA, 33 bp, Homo sapien
ctagccagaggggttagggaagcttgcctgagg

SEQ ID NO: 807019 - DNA, 33 bp, Homo sapien
ttttgaagctcactgactaagtacataaacatt

SEQ ID NO: 807020 - DNA, 33 bp, Homo sapien
ttttgaagctcactgattaagtacataaacatt

SEQ ID NO: 807021 - DNA, 33 bp, Homo sapien
ttctcagggtctccgacagggatgcacagctgg

SEQ ID NO: 807022 - DNA, 33 bp, Homo sapien
ttctcagggtctccgatagggatgcacagctgg

SEQ ID NO: 807023 - DNA, 33 bp, Homo sapien
atgccatcttatctgaaagcacttccctgaccc

SEQ ID NO: 807024 - DNA, 33 bp, Homo sapien
atgccatcttatctgacagcacttccctgaccc

SEQ ID NO: 807025 - DNA, 33 bp, Homo sapien
aaccacaataaaaacacagcaactcagaaaaaa

SEQ ID NO: 807026 - DNA, 33 bp, Homo sapien
aaccacaataaaaacagagcaactcagaaaaaa

SEQ ID NO: 807027 - DNA, 33 bp, Homo sapien
ttggtccaacaaggaacttatatgctgatcagg

SEQ ID NO: 807028 - DNA, 33 bp, Homo sapien
ttggtccaacaaggaatttatatgctgatcagg

SEQ ID NO: 807029 - DNA, 33 bp, Homo sapien
tcctcagtttagtcccaacacaaagagaaaatc

SEQ ID NO: 807030 - DNA, 33 bp, Homo sapien
tcctcagtttagtccccacacaaagagaaaatc

SEQ ID NO: 807031 - DNA, 33 bp, Homo sapien
taccttacttggaaaaaagaagggttggacgag

SEQ ID NO: 807032 - DNA, 33 bp, Homo sapien
taccttacttggaaaacagaagggttggacgag

SEQ ID NO: 807033 - DNA, 33 bp, Homo sapien
ggcatgggacaccatcaacagatcaaactgaaa

SEQ ID NO: 807034 - DNA, 33 bp, Homo sapien
ggcatgggacaccatccacagatcaaactgaaa

SEQ ID NO: 807035 - DNA, 33 bp, Homo sapien
tctagtgctccagcatcaagccctgatggtaca

SEQ ID NO: 807036 - DNA, 33 bp, Homo sapien
tctagtgctccagcattaagccctgatggtaca

SEQ ID NO: 807037 - DNA, 33 bp, Homo sapien
aatgtattggtttatacaactgaaaaggccagg

SEQ ID NO: 807038 - DNA, 33 bp, Homo sapien
aatgtattggtttatataactgaaaaggccagg

SEQ ID NO: 807039 - DNA, 33 bp, Homo sapien
actatcctttggtttacggtctgattaggtttc

SEQ ID NO: 807040 - DNA, 33 bp, Homo sapien
actatcctttggtttatggtctgattaggtttc

SEQ ID NO: 807041 - DNA, 33 bp, Homo sapien
ggaggctctaggggaacgttgcttgtctgggtt

SEQ ID NO: 807042 - DNA, 33 bp, Homo sapien
ggaggctctaggggaatgttgcttgtctgggtt

SEQ ID NO: 807043 - DNA, 33 bp, Homo sapien
ctattcaatctcctagaaccctatgcttttctt

SEQ ID NO: 807044 - DNA, 33 bp, Homo sapien
ctattcaatctcctagcaccctatgcttttctt

SEQ ID NO: 807045 - DNA, 33 bp, Homo sapien
gtagtccctgcaatcaaaatagacagtctagta

SEQ ID NO: 807046 - DNA, 33 bp, Homo sapien
gtagtccctgcaatcagaatagacagtctagta

SEQ ID NO: 807047 - DNA, 33 bp, Homo sapien
accgacaatgaataaacagctcaacaaacagcc

SEQ ID NO: 807048 - DNA, 33 bp, Homo sapien
accgacaatgaataaatagctcaacaaacagcc

SEQ ID NO: 807049 - DNA, 33 bp, Homo sapien
agttacactgctaaaaaaagtatatgaaaacca

SEQ ID NO: 807050 - DNA, 33 bp, Homo sapien
agttacactgctaaaagaagtatatgaaaacca

SEQ ID NO: 807051 - DNA, 33 bp, Homo sapien
tcaacagctctgcaaacacctgctaagaacttc

SEQ ID NO: 807052 - DNA, 33 bp, Homo sapien
tcaacagctctgcaaatacctgctaagaacttc

SEQ ID NO: 807053 - DNA, 33 bp, Homo sapien
tgttgaaatgcaaagaaggatggggcaaaatgg

SEQ ID NO: 807054 - DNA, 33 bp, Homo sapien
tgttgaaatgcaaagagggatggggcaaaatgg

SEQ ID NO: 807055 - DNA, 33 bp, Homo sapien
gtcagaagcaaactaaagctgctggagagaaga

SEQ ID NO: 807056 - DNA, 33 bp, Homo sapien
gtcagaagcaaactaaggctgctggagagaaga

SEQ ID NO: 807057 - DNA, 33 bp, Homo sapien
cacacagtagaagctcaataaacatgagttctt

SEQ ID NO: 807058 - DNA, 33 bp, Homo sapien
cacacagtagaagctcgataaacatgagttctt

SEQ ID NO: 807059 - DNA, 33 bp, Homo sapien
atctacaggctttctcaattctcttctcctttc

SEQ ID NO: 807060 - DNA, 33 bp, Homo sapien
atctacaggctttctcgattctcttctcctttc

SEQ ID NO: 807061 - DNA, 33 bp, Homo sapien
tctagggacagacacactggaggtgacaagaag

SEQ ID NO: 807062 - DNA, 33 bp, Homo sapien
tctagggacagacacagtggaggtgacaagaag

SEQ ID NO: 807063 - DNA, 33 bp, Homo sapien
gaagacacaaaagcaacgggtgcagaagtctcc

SEQ ID NO: 807064 - DNA, 33 bp, Homo sapien
gaagacacaaaagcaatgggtgcagaagtctcc

SEQ ID NO: 807065 - DNA, 33 bp, Homo sapien
ctaaggcatatgtgggaaatgggccatagggaa

SEQ ID NO: 807066 - DNA, 33 bp, Homo sapien
ctaaggcatatgtgggcaatgggccatagggaa

SEQ ID NO: 807067 - DNA, 33 bp, Homo sapien
acataaccagaggaccaaacagtctttctgtcc

SEQ ID NO: 807068 - DNA, 33 bp, Homo sapien
acataaccagaggaccgaacagtctttctgtcc

SEQ ID NO: 807069 - DNA, 33 bp, Homo sapien
tttttttcagataaacactggcacaaaatcctt

SEQ ID NO: 807070 - DNA, 33 bp, Homo sapien
tttttttcagataaacgctggcacaaaatcctt

SEQ ID NO: 807071 - DNA, 33 bp, Homo sapien
acatgttaatctaagcaatcagtccaggaggcc

SEQ ID NO: 807072 - DNA, 33 bp, Homo sapien
acatgttaatctaagccatcagtccaggaggcc

SEQ ID NO: 807073 - DNA, 33 bp, Homo sapien
tcctcagagccaatgcaaggagaatggggcagg

SEQ ID NO: 807074 - DNA, 33 bp, Homo sapien
tcctcagagccaatgcgaggagaatggggcagg

SEQ ID NO: 807075 - DNA, 33 bp, Homo sapien
gcatctagtgacatgacggctttcctcagatga

SEQ ID NO: 807076 - DNA, 33 bp, Homo sapien
gcatctagtgacatgatggctttcctcagatga

SEQ ID NO: 807077 - DNA, 33 bp, Homo sapien
ttgtaaaaacacaaagccttccctcaagagcag

SEQ ID NO: 807078 - DNA, 33 bp, Homo sapien
ttgtaaaaacacaaaggcttccctcaagagcag

SEQ ID NO: 807079 - DNA, 33 bp, Homo sapien
cagacctgctgaaacaatccttgcgggaggcag

SEQ ID NO: 807080 - DNA, 33 bp, Homo sapien
cagacctgctgaaacagtccttgcgggaggcag

SEQ ID NO: 807081 - DNA, 33 bp, Homo sapien
ggcccttcctggaacacgggcctctctttagac

SEQ ID NO: 807082 - DNA, 33 bp, Homo sapien
ggcccttcctggaacatgggcctctctttagac

SEQ ID NO: 807083 - DNA, 33 bp, Homo sapien
ccctgtttctagcagacggctcttgcaaaggct

SEQ ID NO: 807084 - DNA, 33 bp, Homo sapien
ccctgtttctagcagatggctcttgcaaaggct

SEQ ID NO: 807085 - DNA, 33 bp, Homo sapien
ccgagagtcatgagcaaaatgccttccctgttt

SEQ ID NO: 807086 - DNA, 33 bp, Homo sapien
ccgagagtcatgagcagaatgccttccctgttt

SEQ ID NO: 807087 - DNA, 33 bp, Homo sapien
agctctaggccaaatagacatatcatcccattt

SEQ ID NO: 807088 - DNA, 33 bp, Homo sapien
agctctaggccaaatatacatatcatcccattt

SEQ ID NO: 807089 - DNA, 33 bp, Homo sapien
gtgatactgtttcccaaagtgtgacagaggaga

SEQ ID NO: 807090 - DNA, 33 bp, Homo sapien
gtgatactgtttcccagagtgtgacagaggaga

SEQ ID NO: 807091 - DNA, 33 bp, Homo sapien
tttttctacactgagaacactaactaacaagta

SEQ ID NO: 807092 - DNA, 33 bp, Homo sapien
tttttctacactgagagcactaactaacaagta

SEQ ID NO: 807093 - DNA, 33 bp, Homo sapien
ccaactcttatgctccccttttccaagctccaa

SEQ ID NO: 807094 - DNA, 33 bp, Homo sapien
ccaactcttatgctcctcttttccaagctccaa

SEQ ID NO: 807095 - DNA, 33 bp, Homo sapien
tactttaccaaaaaaaatatatgaatggcaaat

SEQ ID NO: 807096 - DNA, 33 bp, Homo sapien
tactttaccaaaaaaagtatatgaatggcaaat

SEQ ID NO: 807097 - DNA, 33 bp, Homo sapien
gctgtccttgtgcctgaagagtgctaaaattga

SEQ ID NO: 807098 - DNA, 33 bp, Homo sapien
gctgtccttgtgcctggagagtgctaaaattga

SEQ ID NO: 807099 - DNA, 33 bp, Homo sapien
gcaacgcttacgtgttcatcccagtgtcctttt

SEQ ID NO: 807100 - DNA, 33 bp, Homo sapien
gcaacgcttacgtgttgatcccagtgtcctttt

SEQ ID NO: 807101 - DNA, 33 bp, Homo sapien
ccatctctggcactcagaaaaaataataatcct

SEQ ID NO: 807102 - DNA, 33 bp, Homo sapien
ccatctctggcactcataaaaaataataatcct

SEQ ID NO: 807103 - DNA, 33 bp, Homo sapien
acctatttcatcagacccaagaagtgaaataat

SEQ ID NO: 807104 - DNA, 33 bp, Homo sapien
acctatttcatcagactcaagaagtgaaataat

SEQ ID NO: 807105 - DNA, 33 bp, Homo sapien
ataacaacaccagaaactcaattcaggctgttt

SEQ ID NO: 807106 - DNA, 33 bp, Homo sapien
ataacaacaccagaaattcaattcaggctgttt

SEQ ID NO: 807107 - DNA, 33 bp, Homo sapien
cccaatccgttttctaaatgggtaaaatgaagc

SEQ ID NO: 807108 - DNA, 33 bp, Homo sapien
cccaatccgttttctagatgggtaaaatgaagc

SEQ ID NO: 807109 - DNA, 33 bp, Homo sapien
ggacctccaccaggaaagtgcagtcatactgcc

SEQ ID NO: 807110 - DNA, 33 bp, Homo sapien
ggacctccaccaggaacgtgcagtcatactgcc

SEQ ID NO: 807111 - DNA, 33 bp, Homo sapien
taaacaatgctcttgcaaaatattatcttactc

SEQ ID NO: 807112 - DNA, 33 bp, Homo sapien
taaacaatgctcttgcgaaatattatcttactc

SEQ ID NO: 807113 - DNA, 33 bp, Homo sapien
gactataaggttaaccaatggttgcatagacag

SEQ ID NO: 807114 - DNA, 33 bp, Homo sapien
gactataaggttaaccgatggttgcatagacag

SEQ ID NO: 807115 - DNA, 33 bp, Homo sapien
ctgccgatcatccccacgacccattgctagcta

SEQ ID NO: 807116 - DNA, 33 bp, Homo sapien
ctgccgatcatccccatgacccattgctagcta

SEQ ID NO: 807117 - DNA, 33 bp, Homo sapien
tttgttaaaaagtcaacgatggatagaagagcc

SEQ ID NO: 807118 - DNA, 33 bp, Homo sapien
tttgttaaaaagtcaaggatggatagaagagcc

SEQ ID NO: 807119 - DNA, 33 bp, Homo sapien
atgtaccagtcgaccaagcatcaatggatccag

SEQ ID NO: 807120 - DNA, 33 bp, Homo sapien
atgtaccagtcgaccaggcatcaatggatccag

SEQ ID NO: 807121 - DNA, 33 bp, Homo sapien
gcaaagaaagcagcaacgatttaaaactggccc

SEQ ID NO: 807122 - DNA, 33 bp, Homo sapien
gcaaagaaagcagcaatgatttaaaactggccc

SEQ ID NO: 807123 - DNA, 33 bp, Homo sapien
ttcaccaacaatgcaaagagaggaaagaaggca

SEQ ID NO: 807124 - DNA, 33 bp, Homo sapien
ttcaccaacaatgcaaggagaggaaagaaggca

SEQ ID NO: 807125 - DNA, 33 bp, Homo sapien
ttaaatacatattacacgaacatctaccaaggc

SEQ ID NO: 807126 - DNA, 33 bp, Homo sapien
ttaaatacatattacatgaacatctaccaaggc

SEQ ID NO: 807127 - DNA, 33 bp, Homo sapien
taccaaggctatcatgaaaactgtggagccatc

SEQ ID NO: 807128 - DNA, 33 bp, Homo sapien
taccaaggctatcatgcaaactgtggagccatc

SEQ ID NO: 807129 - DNA, 33 bp, Homo sapien
gtggtccaaagagtacactcatcagaatttccc

SEQ ID NO: 807130 - DNA, 33 bp, Homo sapien
gtggtccaaagagtacgctcatcagaatttccc

SEQ ID NO: 807131 - DNA, 33 bp, Homo sapien
agcaagaaagtcctcgccagatgccggcaccat

SEQ ID NO: 807132 - DNA, 33 bp, Homo sapien
agcaagaaagtcctcgtcagatgccggcaccat

SEQ ID NO: 807133 - DNA, 33 bp, Homo sapien
ctggatttttctagtccacggcagagtggggct

SEQ ID NO: 807134 - DNA, 33 bp, Homo sapien
ctggatttttctagtctacggcagagtggggct

SEQ ID NO: 807135 - DNA, 33 bp, Homo sapien
agtactttggatgtcgaaagatgctgtctgtgg

SEQ ID NO: 807136 - DNA, 33 bp, Homo sapien
agtactttggatgtcgcaagatgctgtctgtgg

SEQ ID NO: 807137 - DNA, 33 bp, Homo sapien
atcccactttatctccaaggtcatttttaagga

SEQ ID NO: 807138 - DNA, 33 bp, Homo sapien
atcccactttatctcccaggtcatttttaagga

SEQ ID NO: 807139 - DNA, 33 bp, Homo sapien
gtgtctgttcagcaaactaaccaacattttaac

SEQ ID NO: 807140 - DNA, 33 bp, Homo sapien
gtgtctgttcagcaaattaaccaacattttaac

SEQ ID NO: 807141 - DNA, 33 bp, Homo sapien
ctcttgggaggaataaatcaatagcacaaaaaa

SEQ ID NO: 807142 - DNA, 33 bp, Homo sapien
ctcttgggaggaataagtcaatagcacaaaaaa

SEQ ID NO: 807143 - DNA, 33 bp, Homo sapien
tgaaccgttgttcaagcacaattaaggcaaaaa

SEQ ID NO: 807144 - DNA, 33 bp, Homo sapien
tgaaccgttgttcaagtacaattaaggcaaaaa

SEQ ID NO: 807145 - DNA, 33 bp, Homo sapien
atctcacactaaactacgctacctttaggtgag

SEQ ID NO: 807146 - DNA, 33 bp, Homo sapien
atctcacactaaactatgctacctttaggtgag

SEQ ID NO: 807147 - DNA, 33 bp, Homo sapien
gatagattttgatacacagggattaagggaaca

SEQ ID NO: 807148 - DNA, 33 bp, Homo sapien
gatagattttgatacatagggattaagggaaca

SEQ ID NO: 807149 - DNA, 33 bp, Homo sapien
cacttcaaacatatccagaaatcatcttggtac

SEQ ID NO: 807150 - DNA, 33 bp, Homo sapien
cacttcaaacatatccggaaatcatcttggtac

SEQ ID NO: 807151 - DNA, 33 bp, Homo sapien
gagccaaacaagacagcatggcctaaaaatgac

SEQ ID NO: 807152 - DNA, 33 bp, Homo sapien
gagccaaacaagacaggatggcctaaaaatgac

SEQ ID NO: 807153 - DNA, 33 bp, Homo sapien
caacacagtcctagagagaagaaagacacattc

SEQ ID NO: 807154 - DNA, 33 bp, Homo sapien
caacacagtcctagagggaagaaagacacattc

SEQ ID NO: 807155 - DNA, 33 bp, Homo sapien
ctttcttatggtcacccagtttgtgtgtggcag

SEQ ID NO: 807156 - DNA, 33 bp, Homo sapien
ctttcttatggtcaccgagtttgtgtgtggcag

SEQ ID NO: 807157 - DNA, 33 bp, Homo sapien
gatttgctggccgaaacttacagcccttaagtt

SEQ ID NO: 807158 - DNA, 33 bp, Homo sapien
gatttgctggccgaaatttacagcccttaagtt

SEQ ID NO: 807159 - DNA, 33 bp, Homo sapien
atgactaaaatgggaacggaaagccaacaatac

SEQ ID NO: 807160 - DNA, 33 bp, Homo sapien
atgactaaaatgggaatggaaagccaacaatac

SEQ ID NO: 807161 - DNA, 33 bp, Homo sapien
accagatagagatctgaataaaaatgttctaag

SEQ ID NO: 807162 - DNA, 33 bp, Homo sapien
accagatagagatctggataaaaatgttctaag

SEQ ID NO: 807163 - DNA, 33 bp, Homo sapien
ccacagcatagtcacagggagtaaagtcagggg

SEQ ID NO: 807164 - DNA, 33 bp, Homo sapien
ccacagcatagtcacatggagtaaagtcagggg

SEQ ID NO: 807165 - DNA, 33 bp, Homo sapien
tgctcttacttacacccccagatttgcaatagc

SEQ ID NO: 807166 - DNA, 33 bp, Homo sapien
tgctcttacttacacctccagatttgcaatagc

SEQ ID NO: 807167 - DNA, 33 bp, Homo sapien
aacctgccagtgtaacagaatctcctgggctgc

SEQ ID NO: 807168 - DNA, 33 bp, Homo sapien
aacctgccagtgtaaccgaatctcctgggctgc

SEQ ID NO: 807169 - DNA, 33 bp, Homo sapien
acaaaagaagctgacacagttaactgaaaaaag

SEQ ID NO: 807170 - DNA, 33 bp, Homo sapien
acaaaagaagctgacagagttaactgaaaaaag

SEQ ID NO: 807171 - DNA, 33 bp, Homo sapien; identical to SEQ ID NO: 807169

SEQ ID NO: 807172 - DNA, 33 bp, Homo sapien; identical to SEQ ID NO: 807170

SEQ ID NO: 807173 - DNA, 33 bp, Homo sapien
gcacggatattgtcgacagtaaagaaaattaca

SEQ ID NO: 807174 - DNA, 33 bp, Homo sapien
gcacggatattgtcgagagtaaagaaaattaca

SEQ ID NO: 807175 - DNA, 33 bp, Homo sapien
aactggaatatttgataaacaatactaatgacc

SEQ ID NO: 807176 - DNA, 33 bp, Homo sapien
aactggaatatttgatgaacaatactaatgacc

SEQ ID NO: 807177 - DNA, 33 bp, Homo sapien
ctcctatacctgattacgtgagtctgtgtaatc

SEQ ID NO: 807178 - DNA, 33 bp, Homo sapien
ctcctatacctgattatgtgagtctgtgtaatc

SEQ ID NO: 807179 - DNA, 33 bp, Homo sapien
aatcacatagcaacaactgtcaacattttactg

SEQ ID NO: 807180 - DNA, 33 bp, Homo sapien
aatcacatagcaacaattgtcaacattttactg

SEQ ID NO: 807181 - DNA, 33 bp, Homo sapien
tgaaagagactttggacattatatagctcatcc

SEQ ID NO: 807182 - DNA, 33 bp, Homo sapien
tgaaagagactttggagattatatagctcatcc

SEQ ID NO: 807183 - DNA, 33 bp, Homo sapien
tacggttctgttggaccacaccactttcctgtt

SEQ ID NO: 807184 - DNA, 33 bp, Homo sapien
tacggttctgttggactacaccactttcctgtt

SEQ ID NO: 807185 - DNA, 33 bp, Homo sapien
tgcctttttcattacccagacaatagtgcaaca

SEQ ID NO: 807186 - DNA, 33 bp, Homo sapien
tgcctttttcattacctagacaatagtgcaaca

SEQ ID NO: 807187 - DNA, 33 bp, Homo sapien
cttttgagaaatgtgaactgctaatgaaatgtc

SEQ ID NO: 807188 - DNA, 33 bp, Homo sapien
cttttgagaaatgtgagctgctaatgaaatgtc

SEQ ID NO: 807189 - DNA, 33 bp, Homo sapien
ctccagataaagacaacgaaaagctgggctggg

SEQ ID NO: 807190 - DNA, 33 bp, Homo sapien
ctccagataaagacaaggaaaagctgggctggg

SEQ ID NO: 807191 - DNA, 33 bp, Homo sapien
cactctaaggactctgaattttactctgctaag

SEQ ID NO: 807192 - DNA, 33 bp, Homo sapien
cactctaaggactctggattttactctgctaag

SEQ ID NO: 807193 - DNA, 33 bp, Homo sapien
cagtgcataataaaaaatctctgcaagaaacac

SEQ ID NO: 807194 - DNA, 33 bp, Homo sapien
cagtgcataataaaaagtctctgcaagaaacac

SEQ ID NO: 807195 - DNA, 33 bp, Homo sapien
ttaagcctctattttcaagtgtgtctaacaccc

SEQ ID NO: 807196 - DNA, 33 bp, Homo sapien
ttaagcctctattttctagtgtgtctaacaccc

SEQ ID NO: 807197 - DNA, 33 bp, Homo sapien
ttgtgtaaaacatttacgtggttctagagtctc

SEQ ID NO: 807198 - DNA, 33 bp, Homo sapien
ttgtgtaaaacatttatgtggttctagagtctc

SEQ ID NO: 807199 - DNA, 33 bp, Homo sapien
tttttctgttccccacaaaagtgtctagccaac

SEQ ID NO: 807200 - DNA, 33 bp, Homo sapien
tttttctgttccccacgaaagtgtctagccaac

SEQ ID NO: 807201 - DNA, 33 bp, Homo sapien
gctattcttcctcagacagaaagtagatagcca

SEQ ID NO: 807202 - DNA, 33 bp, Homo sapien
gctattcttcctcagatagaaagtagatagcca

SEQ ID NO: 807203 - DNA, 33 bp, Homo sapien
gtgggcatcaatcacacagcaagcttttcaaag

SEQ ID NO: 807204 - DNA, 33 bp, Homo sapien
gtgggcatcaatcacatagcaagcttttcaaag

SEQ ID NO: 807205 - DNA, 33 bp, Homo sapien
aagaagatacaagaaaccaaagagagaattgca

SEQ ID NO: 807206 - DNA, 33 bp, Homo sapien
aagaagatacaagaaagcaaagagagaattgca

SEQ ID NO: 807207 - DNA, 33 bp, Homo sapien
tgcattttgctttataacaactgacacttttta

SEQ ID NO: 807208 - DNA, 33 bp, Homo sapien
tgcattttgctttatagcaactgacacttttta

SEQ ID NO: 807209 - DNA, 33 bp, Homo sapien
tttactaatacactgaagtaccatagtcattac

SEQ ID NO: 807210 - DNA, 33 bp, Homo sapien
tttactaatacactgaggtaccatagtcattac

SEQ ID NO: 807211 - DNA, 33 bp, Homo sapien
ctggtgaataatgaaacagaagtagtggccaca

SEQ ID NO: 807212 - DNA, 33 bp, Homo sapien
ctggtgaataatgaaagagaagtagtggccaca

SEQ ID NO: 807213 - DNA, 33 bp, Homo sapien
acttgctaaaaaaacaatctatgtggctgggcg

SEQ ID NO: 807214 - DNA, 33 bp, Homo sapien
acttgctaaaaaaacagtctatgtggctgggcg

SEQ ID NO: 807215 - DNA, 33 bp, Homo sapien
atgacttctagcataactctcaccatggttctc

SEQ ID NO: 807216 - DNA, 33 bp, Homo sapien
atgacttctagcataattctcaccatggttctc

SEQ ID NO: 807217 - DNA, 33 bp, Homo sapien
gttcctcttagtcactcaggaataggagcttat

SEQ ID NO: 807218 - DNA, 33 bp, Homo sapien
gttcctcttagtcacttaggaataggagcttat

SEQ ID NO: 807219 - DNA, 33 bp, Homo sapien
tcacaatcacaagagcacactgaacaaaggaga

SEQ ID NO: 807220 - DNA, 33 bp, Homo sapien
tcacaatcacaagagcgcactgaacaaaggaga

SEQ ID NO: 807221 - DNA, 33 bp, Homo sapien
gttctatttcttatcaaccaagaagcagaccca

SEQ ID NO: 807222 - DNA, 33 bp, Homo sapien
gttctatttcttatcacccaagaagcagaccca

SEQ ID NO: 807223 - DNA, 33 bp, Homo sapien
cagcctttctccctgacggtaagtgacttcctg

SEQ ID NO: 807224 - DNA, 33 bp, Homo sapien
cagcctttctccctgatggtaagtgacttcctg

SEQ ID NO: 807225 - DNA, 33 bp, Homo sapien
aaaagaaactgtccaactgtttttcaaagtata

SEQ ID NO: 807226 - DNA, 33 bp, Homo sapien
aaaagaaactgtccaattgtttttcaaagtata

SEQ ID NO: 807227 - DNA, 33 bp, Homo sapien
atctacacattctgaaacatcaattgtttgatt

SEQ ID NO: 807228 - DNA, 33 bp, Homo sapien
atctacacattctgaagcatcaattgtttgatt

SEQ ID NO: 807229 - DNA, 33 bp, Homo sapien
ccatttctaccaagaactgcaaaataaaagcaa

SEQ ID NO: 807230 - DNA, 33 bp, Homo sapien
ccatttctaccaagaattgcaaaataaaagcaa

SEQ ID NO: 807231 - DNA, 33 bp, Homo sapien
gaggttcccactgaccaaatctgggacaactgt

SEQ ID NO: 807232 - DNA, 33 bp, Homo sapien
gaggttcccactgaccgaatctgggacaactgt

SEQ ID NO: 807233 - DNA, 33 bp, Homo sapien
gtactaaatgtttacaatgcttaaccttgtgaa

SEQ ID NO: 807234 - DNA, 33 bp, Homo sapien
gtactaaatgtttacagtgcttaaccttgtgaa

SEQ ID NO: 807235 - DNA, 33 bp, Homo sapien
cagctcagactcctagcatgaacctctgatcca

SEQ ID NO: 807236 - DNA, 33 bp, Homo sapien
cagctcagactcctagtatgaacctctgatcca

SEQ ID NO: 807237 - DNA, 33 bp, Homo sapien
tacacttgaagtgactaaagctcagaaaagtaa

SEQ ID NO: 807238 - DNA, 33 bp, Homo sapien
tacacttgaagtgactgaagctcagaaaagtaa

SEQ ID NO: 807239 - DNA, 33 bp, Homo sapien
ctctgaagtcagaactaaatttcagaatcactt

SEQ ID NO: 807240 - DNA, 33 bp, Homo sapien
ctctgaagtcagaactgaatttcagaatcactt

SEQ ID NO: 807241 - DNA, 33 bp, Homo sapien
ataacacacagtctgcactgtaaaagcttgtta

SEQ ID NO: 807242 - DNA, 33 bp, Homo sapien
ataacacacagtctgcgctgtaaaagcttgtta

SEQ ID NO: 807243 - DNA, 33 bp, Homo sapien
gtcagagaggaaggggcagtcataaatcatata

SEQ ID NO: 807244 - DNA, 33 bp, Homo sapien
gtcagagaggaagggggagtcataaatcatata

SEQ ID NO: 807245 - DNA, 33 bp, Homo sapien
ccttccattttgataactgtaaggttaaattac

SEQ ID NO: 807246 - DNA, 33 bp, Homo sapien
ccttccattttgataattgtaaggttaaattac

SEQ ID NO: 807247 - DNA, 33 bp, Homo sapien
ttctggagaagaaagacgtaaaataaaatgata

SEQ ID NO: 807248 - DNA, 33 bp, Homo sapien
ttctggagaagaaagatgtaaaataaaatgata

SEQ ID NO: 807249 - DNA, 33 bp, Homo sapien
ttgggatcatggagaaagtttattgccattatt

SEQ ID NO: 807250 - DNA, 33 bp, Homo sapien
ttgggatcatggagaaggtttattgccattatt

SEQ ID NO: 807251 - DNA, 33 bp, Homo sapien
cagtaactcgaaactacaggagtttattagata

SEQ ID NO: 807252 - DNA, 33 bp, Homo sapien
cagtaactcgaaactataggagtttattagata

SEQ ID NO: 807253 - DNA, 33 bp, Homo sapien
atctttcccattgtgacatccggctagttttcg

SEQ ID NO: 807254 - DNA, 33 bp, Homo sapien
atctttcccattgtgatatccggctagttttcg

SEQ ID NO: 807255 - DNA, 33 bp, Homo sapien
tatttttgatgttttcgaagtgaaatatatatt

SEQ ID NO: 807256 - DNA, 33 bp, Homo sapien
tatttttgatgttttctaagtgaaatatatatt

SEQ ID NO: 807257 - DNA, 33 bp, Homo sapien
aggtgattaacaagaaattattactgatgagta

SEQ ID NO: 807258 - DNA, 33 bp, Homo sapien
aggtgattaacaagaagttattactgatgagta

SEQ ID NO: 807259 - DNA, 33 bp, Homo sapien
aagcctgcatacgtggaaagtgatgccccagct

SEQ ID NO: 807260 - DNA, 33 bp, Homo sapien
aagcctgcatacgtgggaagtgatgccccagct

SEQ ID NO: 807261 - DNA, 33 bp, Homo sapien
aaaccatgagaggcaaagtgatatgcccaagcc

SEQ ID NO: 807262 - DNA, 33 bp, Homo sapien
aaaccatgagaggcaaggtgatatgcccaagcc

SEQ ID NO: 807263 - DNA, 33 bp, Homo sapien
ctcatattgcctcttacggtctcgttctttcaa

SEQ ID NO: 807264 - DNA, 33 bp, Homo sapien
ctcatattgcctcttatggtctcgttctttcaa

SEQ ID NO: 807265 - DNA, 33 bp, Homo sapien
gcttcctcagtactgaccataacctcaatttca

SEQ ID NO: 807266 - DNA, 33 bp, Homo sapien
gcttcctcagtactgatcataacctcaatttca

SEQ ID NO: 807267 - DNA, 33 bp, Homo sapien
aacagtagatgggctaaggtttatttacttaac

SEQ ID NO: 807268 - DNA, 33 bp, Homo sapien
aacagtagatgggctacggtttatttacttaac

SEQ ID NO: 807269 - DNA, 33 bp, Homo sapien
actgagcagccagatcacgtaaggtctcctagg

SEQ ID NO: 807270 - DNA, 33 bp, Homo sapien
actgagcagccagatcgcgtaaggtctcctagg

SEQ ID NO: 807271 - DNA, 33 bp, Homo sapien
tcttgccagtcttggaacactgataggacccag

SEQ ID NO: 807272 - DNA, 33 bp, Homo sapien
tcttgccagtcttggaccactgataggacccag

SEQ ID NO: 807273 - DNA, 33 bp, Homo sapien
cagcataccctaatcacctagaagagagtaaag

SEQ ID NO: 807274 - DNA, 33 bp, Homo sapien
cagcataccctaatcatctagaagagagtaaag

SEQ ID NO: 807275 - DNA, 33 bp, Homo sapien
agagcaagactccttcgcaacaagcaaaaaaca

SEQ ID NO: 807276 - DNA, 33 bp, Homo sapien
agagcaagactccttctcaacaagcaaaaaaca

SEQ ID NO: 807277 - DNA, 33 bp, Homo sapien
tgttatgtaggtgaaacctcagacagaaaaggt

SEQ ID NO: 807278 - DNA, 33 bp, Homo sapien
tgttatgtaggtgaaatctcagacagaaaaggt

SEQ ID NO: 807279 - DNA, 33 bp, Homo sapien
tagcttcactgtcccaagtgctaatggaaaaac

SEQ ID NO: 807280 - DNA, 33 bp, Homo sapien
tagcttcactgtcccaggtgctaatggaaaaac

SEQ ID NO: 807281 - DNA, 33 bp, Homo sapien
tgtagagctagattagcccttcagaattgtcct

SEQ ID NO: 807282 - DNA, 33 bp, Homo sapien
tgtagagctagattagtccttcagaattgtcct

SEQ ID NO: 807283 - DNA, 33 bp, Homo sapien
aaacaccggcctaaaccgtaacagcttatttta

SEQ ID NO: 807284 - DNA, 33 bp, Homo sapien
aaacaccggcctaaactgtaacagcttatttta

SEQ ID NO: 807285 - DNA, 33 bp, Homo sapien
tacaaatcatgtcatcactcatgtactaagcct

SEQ ID NO: 807286 - DNA, 33 bp, Homo sapien
tacaaatcatgtcatcgctcatgtactaagcct

SEQ ID NO: 807287 - DNA, 33 bp, Homo sapien
ctccacgccccttcaccggattccttaccatgg

SEQ ID NO: 807288 - DNA, 33 bp, Homo sapien
ctccacgccccttcactggattccttaccatgg

SEQ ID NO: 807289 - DNA, 33 bp, Homo sapien
tcccacacacttctcaaaactccaggttcctct

SEQ ID NO: 807290 - DNA, 33 bp, Homo sapien
tcccacacacttctcagaactccaggttcctct

SEQ ID NO: 807291 - DNA, 33 bp, Homo sapien
agtttgctgagaatcacacaggaagacaagaat

SEQ ID NO: 807292 - DNA, 33 bp, Homo sapien
agtttgctgagaatcatacaggaagacaagaat

SEQ ID NO: 807293 - DNA, 33 bp, Homo sapien
acctcacaataaaacacgacaaaatgtccatca

SEQ ID NO: 807294 - DNA, 33 bp, Homo sapien
acctcacaataaaacatgacaaaatgtccatca

SEQ ID NO: 807295 - DNA, 33 bp, Homo sapien
atatcgtttctaactacgtatgtgagatcgagc

SEQ ID NO: 807296 - DNA, 33 bp, Homo sapien
atatcgtttctaactaggtatgtgagatcgagc

SEQ ID NO: 807297 - DNA, 33 bp, Homo sapien
atgctcagttctggaaagggcattttcagggga

SEQ ID NO: 807298 - DNA, 33 bp, Homo sapien
atgctcagttctggaatgggcattttcagggga

SEQ ID NO: 807299 - DNA, 33 bp, Homo sapien
actattcgtgcttacccatttcaaaaaatttac

SEQ ID NO: 807300 - DNA, 33 bp, Homo sapien
actattcgtgcttacctatttcaaaaaatttac

SEQ ID NO: 807301 - DNA, 33 bp, Homo sapien
ctgaattttgaagaacagtgttatgtttaacat

SEQ ID NO: 807302 - DNA, 33 bp, Homo sapien
ctgaattttgaagaacggtgttatgtttaacat

SEQ ID NO: 807303 - DNA, 33 bp, Homo sapien
acagttaatgtttgtaaagaacgatggagatga

SEQ ID NO: 807304 - DNA, 33 bp, Homo sapien
acagttaatgtttgtatagaacgatggagatga

SEQ ID NO: 807305 - DNA, 33 bp, Homo sapien
tttcataaaaccaatcactctatgaaaaagcaa

SEQ ID NO: 807306 - DNA, 33 bp, Homo sapien
tttcataaaaccaatcgctctatgaaaaagcaa

SEQ ID NO: 807307 - DNA, 33 bp, Homo sapien
cttgtttgttttctggaaaggagccaagataat

SEQ ID NO: 807308 - DNA, 33 bp, Homo sapien
cttgtttgttttctggcaaggagccaagataat

SEQ ID NO: 807309 - DNA, 33 bp, Homo sapien
tatcttacaaataccgaaggacactagccttca

SEQ ID NO: 807310 - DNA, 33 bp, Homo sapien
tatcttacaaataccggaggacactagccttca

SEQ ID NO: 807311 - DNA, 33 bp, Homo sapien
atttattgagataaaaatttcagtacagttttt

SEQ ID NO: 807312 - DNA, 33 bp, Homo sapien
atttattgagataaaattttcagtacagttttt

SEQ ID NO: 807313 - DNA, 33 bp, Homo sapien
gagtatgccaatgactaaagtttgcattatctc

SEQ ID NO: 807314 - DNA, 33 bp, Homo sapien
gagtatgccaatgactgaagtttgcattatctc

SEQ ID NO: 807315 - DNA, 33 bp, Homo sapien
atcagcttgaaagaaccagtatggccttggggt

SEQ ID NO: 807316 - DNA, 33 bp, Homo sapien
atcagcttgaaagaactagtatggccttggggt

SEQ ID NO: 807317 - DNA, 33 bp, Homo sapien
tctgggttaagaatgacggatctaggctgcctc

SEQ ID NO: 807318 - DNA, 33 bp, Homo sapien
tctgggttaagaatgatggatctaggctgcctc

SEQ ID NO: 807319 - DNA, 33 bp, Homo sapien
aattacaatgtgtgataactaagtatggagatt

SEQ ID NO: 807320 - DNA, 33 bp, Homo sapien
aattacaatgtgtgatgactaagtatggagatt

SEQ ID NO: 807321 - DNA, 33 bp, Homo sapien
agctttaacagaagacagtagctcattcagctt

SEQ ID NO: 807322 - DNA, 33 bp, Homo sapien
agctttaacagaagacggtagctcattcagctt

SEQ ID NO: 807323 - DNA, 33 bp, Homo sapien
ctcactagatagcaacaactgcaacatgcttgt

SEQ ID NO: 807324 - DNA, 33 bp, Homo sapien
ctcactagatagcaacgactgcaacatgcttgt

SEQ ID NO: 807325 - DNA, 33 bp, Homo sapien
gatagttgctattaacagcttggattttcttct

SEQ ID NO: 807326 - DNA, 33 bp, Homo sapien
gatagttgctattaacggcttggattttcttct

SEQ ID NO: 807327 - DNA, 33 bp, Homo sapien
gttcactggcctctccactattttaatgaacta

SEQ ID NO: 807328 - DNA, 33 bp, Homo sapien
gttcactggcctctccgctattttaatgaacta

SEQ ID NO: 807329 - DNA, 33 bp, Homo sapien
ttgtcagaagcgagtaaacattcacagacttta

SEQ ID NO: 807330 - DNA, 33 bp, Homo sapien
ttgtcagaagcgagtacacattcacagacttta

SEQ ID NO: 807331 - DNA, 33 bp, Homo sapien
ctagtccaaccttgagacagtaataactcatgg

SEQ ID NO: 807332 - DNA, 33 bp, Homo sapien
ctagtccaaccttgagccagtaataactcatgg

SEQ ID NO: 807333 - DNA, 33 bp, Homo sapien
gcaaagttagggtgagaatggaattaggtgaca

SEQ ID NO: 807334 - DNA, 33 bp, Homo sapien
gcaaagttagggtgaggatggaattaggtgaca

SEQ ID NO: 807335 - DNA, 33 bp, Homo sapien
cggggagcgttaactaagtggcctcaaggcttt

SEQ ID NO: 807336 - DNA, 33 bp, Homo sapien
cggggagcgttaactaggtggcctcaaggcttt

SEQ ID NO: 807337 - DNA, 33 bp, Homo sapien
agattcccaggttcaactatgggcagccttact

SEQ ID NO: 807338 - DNA, 33 bp, Homo sapien
agattcccaggttcaattatgggcagccttact

SEQ ID NO: 807339 - DNA, 33 bp, Homo sapien
ggaatctagggtctaccgctagtgagatgagtc

SEQ ID NO: 807340 - DNA, 33 bp, Homo sapien
ggaatctagggtctactgctagtgagatgagtc

SEQ ID NO: 807341 - DNA, 33 bp, Homo sapien
ggaggtaacagccactgaaagagtccaatatga

SEQ ID NO: 807342 - DNA, 33 bp, Homo sapien
ggaggtaacagccacttaaagagtccaatatga

SEQ ID NO: 807343 - DNA, 33 bp, Homo sapien
ctggaaagtggggtctcagaatctagatgttta

SEQ ID NO: 807344 - DNA, 33 bp, Homo sapien
ctggaaagtggggtctgagaatctagatgttta

SEQ ID NO: 807345 - DNA, 33 bp, Homo sapien
gacttgcccgagtttaagatttgagcatcttaa

SEQ ID NO: 807346 - DNA, 33 bp, Homo sapien
gacttgcccgagtttaggatttgagcatcttaa

SEQ ID NO: 807347 - DNA, 33 bp, Homo sapien
atttcctacatagccaaacttttaaattgctgg

SEQ ID NO: 807348 - DNA, 33 bp, Homo sapien
atttcctacatagccacacttttaaattgctgg

SEQ ID NO: 807349 - DNA, 33 bp, Homo sapien
agctttatctcaagacactatgctcacttcaca

SEQ ID NO: 807350 - DNA, 33 bp, Homo sapien
agctttatctcaagacgctatgctcacttcaca

SEQ ID NO: 807351 - DNA, 33 bp, Homo sapien
tctggcctgtacacccaggagacaatactcctc

SEQ ID NO: 807352 - DNA, 33 bp, Homo sapien
tctggcctgtacacccgggagacaatactcctc

SEQ ID NO: 807353 - DNA, 33 bp, Homo sapien
aaaaaagaaaatcagcaccctcatttgaaagct

SEQ ID NO: 807354 - DNA, 33 bp, Homo sapien
aaaaaagaaaatcagcgccctcatttgaaagct

SEQ ID NO: 807355 - DNA, 33 bp, Homo sapien
gtggggatagaaatcacggagtctggctgaggc

SEQ ID NO: 807356 - DNA, 33 bp, Homo sapien
gtggggatagaaatcatggagtctggctgaggc

SEQ ID NO: 807357 - DNA, 33 bp, Homo sapien
tgttcatacgagccagaccctaaactttagcat

SEQ ID NO: 807358 - DNA, 33 bp, Homo sapien
tgttcatacgagccaggccctaaactttagcat

SEQ ID NO: 807359 - DNA, 33 bp, Homo sapien
gtggaattgagcctacacttgttattatctaac

SEQ ID NO: 807360 - DNA, 33 bp, Homo sapien
gtggaattgagcctacgcttgttattatctaac

SEQ ID NO: 807361 - DNA, 33 bp, Homo sapien
aaaacaccgtctagtccataggctggcaaagta

SEQ ID NO: 807362 - DNA, 33 bp, Homo sapien
aaaacaccgtctagtctataggctggcaaagta

SEQ ID NO: 807363 - DNA, 33 bp, Homo sapien
tttcaggatatgctcacgcaaaactgattgaaa

SEQ ID NO: 807364 - DNA, 33 bp, Homo sapien
tttcaggatatgctcatgcaaaactgattgaaa

SEQ ID NO: 807365 - DNA, 33 bp, Homo sapien
ctgcttatagcaaacaatgatgtagttacttgg

SEQ ID NO: 807366 - DNA, 33 bp, Homo sapien
ctgcttatagcaaacactgatgtagttacttgg

SEQ ID NO: 807367 - DNA, 33 bp, Homo sapien
gtgagaagtaggtgaacgtacgggtgcagccag

SEQ ID NO: 807368 - DNA, 33 bp, Homo sapien
gtgagaagtaggtgaatgtacgggtgcagccag

SEQ ID NO: 807369 - DNA, 33 bp, Homo sapien
tggtttctaaggcacaacatcagctcctacata

SEQ ID NO: 807370 - DNA, 33 bp, Homo sapien
tggtttctaaggcacaccatcagctcctacata

SEQ ID NO: 807371 - DNA, 33 bp, Homo sapien
tccaatccatctggaaagtataacagggatcaa

SEQ ID NO: 807372 - DNA, 33 bp, Homo sapien
tccaatccatctggaaggtataacagggatcaa

SEQ ID NO: 807373 - DNA, 33 bp, Homo sapien
tctagatttacaaaataataatgcctgcttatc

SEQ ID NO: 807374 - DNA, 33 bp, Homo sapien
tctagatttacaaaatgataatgcctgcttatc

SEQ ID NO: 807375 - DNA, 33 bp, Homo sapien
gtagtgaggcctaaggcaaatggaaaagaacat

SEQ ID NO: 807376 - DNA, 33 bp, Homo sapien
gtagtgaggcctaaggtaaatggaaaagaacat

SEQ ID NO: 807377 - DNA, 33 bp, Homo sapien
tggtggtggtgttatccacagccttatccccac

SEQ ID NO: 807378 - DNA, 33 bp, Homo sapien
tggtggtggtgttatctacagccttatccccac

SEQ ID NO: 807379 - DNA, 33 bp, Homo sapien
tattattattgactccacaatgaaaacaatctt

SEQ ID NO: 807380 - DNA, 33 bp, Homo sapien
tattattattgactccgcaatgaaaacaatctt

SEQ ID NO: 807381 - DNA, 33 bp, Homo sapien
ttttccaattagactaagatctgaacatttcca

SEQ ID NO: 807382 - DNA, 33 bp, Homo sapien
ttttccaattagactaggatctgaacatttcca

SEQ ID NO: 807383 - DNA, 33 bp, Homo sapien
gatttgtttgtcctgacgacacttgaattattg

SEQ ID NO: 807384 - DNA, 33 bp, Homo sapien
gatttgtttgtcctgatgacacttgaattattg

SEQ ID NO: 807385 - DNA, 33 bp, Homo sapien
caacaaaagtagaccactattccatggtgtata

SEQ ID NO: 807386 - DNA, 33 bp, Homo sapien
caacaaaagtagaccagtattccatggtgtata

SEQ ID NO: 807387 - DNA, 33 bp, Homo sapien
cgccatgtgtataaagcagtagaaggctgcggg

SEQ ID NO: 807388 - DNA, 33 bp, Homo sapien
cgccatgtgtataaagtagtagaaggctgcggg

SEQ ID NO: 807389 - DNA, 33 bp, Homo sapien
actcactggagaccaacacttcacacagttcct

SEQ ID NO: 807390 - DNA, 33 bp, Homo sapien
actcactggagaccaatacttcacacagttcct

SEQ ID NO: 807391 - DNA, 33 bp, Homo sapien
tgttcttcctgattccagagtagtagcttccag

SEQ ID NO: 807392 - DNA, 33 bp, Homo sapien
tgttcttcctgattcctgagtagtagcttccag

SEQ ID NO: 807393 - DNA, 33 bp, Homo sapien
taaagggatcaccacaagctcatagtagaaaag

SEQ ID NO: 807394 - DNA, 33 bp, Homo sapien
taaagggatcaccacaggctcatagtagaaaag

SEQ ID NO: 807395 - DNA, 33 bp, Homo sapien
caggaagaatgaccagaactgtgagagggactc

SEQ ID NO: 807396 - DNA, 33 bp, Homo sapien
caggaagaatgaccaggactgtgagagggactc

SEQ ID NO: 807397 - DNA, 33 bp, Homo sapien
tgatttactttggggaaaaattagaagttaatt

SEQ ID NO: 807398 - DNA, 33 bp, Homo sapien
tgatttactttggggagaaattagaagttaatt

SEQ ID NO: 807399 - DNA, 33 bp, Homo sapien
accctgactcctcttcactccacacatccacag

SEQ ID NO: 807400 - DNA, 33 bp, Homo sapien
accctgactcctcttcgctccacacatccacag

SEQ ID NO: 807401 - DNA, 33 bp, Homo sapien
tctaagtctaccagtgccaaagcctcataataa

SEQ ID NO: 807402 - DNA, 33 bp, Homo sapien
tctaagtctaccagtggcaaagcctcataataa

SEQ ID NO: 807403 - DNA, 33 bp, Homo sapien
aggattacacacaacacggagacatagaagtga

SEQ ID NO: 807404 - DNA, 33 bp, Homo sapien
aggattacacacaacatggagacatagaagtga

SEQ ID NO: 807405 - DNA, 33 bp, Homo sapien
gatgtttctaccactaccatcccaaatcccaag

SEQ ID NO: 807406 - DNA, 33 bp, Homo sapien
gatgtttctaccactatcatcccaaatcccaag

SEQ ID NO: 807407 - DNA, 33 bp, Homo sapien
ttgcatgcacacgctgaattgtagcactgagat

SEQ ID NO: 807408 - DNA, 33 bp, Homo sapien
ttgcatgcacacgctggattgtagcactgagat

SEQ ID NO: 807409 - DNA, 33 bp, Homo sapien
gggtctattacataaacggaccactgtaaacta

SEQ ID NO: 807410 - DNA, 33 bp, Homo sapien
gggtctattacataaatggaccactgtaaacta

SEQ ID NO: 807411 - DNA, 33 bp, Homo sapien
aactcttgttttactcaatgaatgtgccttaaa

SEQ ID NO: 807412 - DNA, 33 bp, Homo sapien
aactcttgttttactcgatgaatgtgccttaaa

SEQ ID NO: 807413 - DNA, 33 bp, Homo sapien
tatgtagtctcagcaactagacaatgaattaac

SEQ ID NO: 807414 - DNA, 33 bp, Homo sapien
tatgtagtctcagcaattagacaatgaattaac

SEQ ID NO: 807415 - DNA, 33 bp, Homo sapien
gtataaagttaaaaaagttctccaaagatgtat

SEQ ID NO: 807416 - DNA, 33 bp, Homo sapien
gtataaagttaaaaaatttctccaaagatgtat

SEQ ID NO: 807417 - DNA, 33 bp, Homo sapien
tttcttcttcagctgacaaacccttcctcatcc

SEQ ID NO: 807418 - DNA, 33 bp, Homo sapien
tttcttcttcagctgataaacccttcctcatcc

SEQ ID NO: 807419 - DNA, 33 bp, Homo sapien
tggagtaggccagtgactatgatatcccattag

SEQ ID NO: 807420 - DNA, 33 bp, Homo sapien
tggagtaggccagtgattatgatatcccattag

SEQ ID NO: 807421 - DNA, 33 bp, Homo sapien
acaaagttgacagccaaaaatcaattgcatttc

SEQ ID NO: 807422 - DNA, 33 bp, Homo sapien
acaaagttgacagccagaaatcaattgcatttc

SEQ ID NO: 807423 - DNA, 33 bp, Homo sapien
acttttttcatcttcaagatcattttcaccatt

SEQ ID NO: 807424 - DNA, 33 bp, Homo sapien
acttttttcatcttcatgatcattttcaccatt

SEQ ID NO: 807425 - DNA, 33 bp, Homo sapien
actggcattttccatacgcagtaggcagaatct

SEQ ID NO: 807426 - DNA, 33 bp, Homo sapien
actggcattttccatatgcagtaggcagaatct

SEQ ID NO: 807427 - DNA, 33 bp, Homo sapien
gtgacttttgagaagacaatataatatgcaaca

SEQ ID NO: 807428 - DNA, 33 bp, Homo sapien
gtgacttttgagaagagaatataatatgcaaca

SEQ ID NO: 807429 - DNA, 33 bp, Homo sapien
ttttttccatcaaaacagcactaaagggcattc

SEQ ID NO: 807430 - DNA, 33 bp, Homo sapien
ttttttccatcaaaacggcactaaagggcattc

SEQ ID NO: 807431 - DNA, 33 bp, Homo sapien
tattcttaaggccagcaattgactgattatgtg

SEQ ID NO: 807432 - DNA, 33 bp, Homo sapien
tattcttaaggccagcgattgactgattatgtg

SEQ ID NO: 807433 - DNA, 33 bp, Homo sapien
tgctacacatcctgtcactttgcaagaaccagc

SEQ ID NO: 807434 - DNA, 33 bp, Homo sapien
tgctacacatcctgtcgctttgcaagaaccagc

SEQ ID NO: 807435 - DNA, 33 bp, Homo sapien
attaatgatcctaaccgcaaagaattgttaaga

SEQ ID NO: 807436 - DNA, 33 bp, Homo sapien
attaatgatcctaacctcaaagaattgttaaga

SEQ ID NO: 807437 - DNA, 33 bp, Homo sapien
tattacttaggcagaaagcaatgttctaccgaa

SEQ ID NO: 807438 - DNA, 33 bp, Homo sapien
tattacttaggcagaatgcaatgttctaccgaa

SEQ ID NO: 807439 - DNA, 33 bp, Homo sapien
tttctactgtgctttacagcttacgaaagcatt

SEQ ID NO: 807440 - DNA, 33 bp, Homo sapien
tttctactgtgctttagagcttacgaaagcatt

SEQ ID NO: 807441 - DNA, 33 bp, Homo sapien
gcattgatgctacaaacagctaaatcccacagg

SEQ ID NO: 807442 - DNA, 33 bp, Homo sapien
gcattgatgctacaaagagctaaatcccacagg

SEQ ID NO: 807443 - DNA, 33 bp, Homo sapien
ttctaggatgtcttctaactcaaggtctgagat

SEQ ID NO: 807444 - DNA, 33 bp, Homo sapien
ttctaggatgtcttcttactcaaggtctgagat

SEQ ID NO: 807445 - DNA, 33 bp, Homo sapien
ctgtaaatggtatccacagagagcagagaatat

SEQ ID NO: 807446 - DNA, 33 bp, Homo sapien
ctgtaaatggtatccatagagagcagagaatat

SEQ ID NO: 807447 - DNA, 33 bp, Homo sapien
tgggaatgattacacccggagtgggattttttg

SEQ ID NO: 807448 - DNA, 33 bp, Homo sapien
tgggaatgattacacctggagtgggattttttg

SEQ ID NO: 807449 - DNA, 33 bp, Homo sapien
gttcacttctggtgaacaaatagcattttgcac

SEQ ID NO: 807450 - DNA, 33 bp, Homo sapien
gttcacttctggtgaataaatagcattttgcac

SEQ ID NO: 807451 - DNA, 33 bp, Homo sapien
tcccactcagttctcaactttatcctccacccc

SEQ ID NO: 807452 - DNA, 33 bp, Homo sapien
tcccactcagttctcatctttatcctccacccc

SEQ ID NO: 807453 - DNA, 33 bp, Homo sapien
taatgggaaatctccactgaaatagaaagcaaa

SEQ ID NO: 807454 - DNA, 33 bp, Homo sapien
taatgggaaatctccagtgaaatagaaagcaaa

SEQ ID NO: 807455 - DNA, 33 bp, Homo sapien
ttccagtgcattttgcaattctctaagtgtgtc

SEQ ID NO: 807456 - DNA, 33 bp, Homo sapien
ttccagtgcattttgcgattctctaagtgtgtc

SEQ ID NO: 807457 - DNA, 33 bp, Homo sapien
gttatgctaactccaaattcaatgttgcttctg

SEQ ID NO: 807458 - DNA, 33 bp, Homo sapien
gttatgctaactccaagttcaatgttgcttctg

SEQ ID NO: 807459 - DNA, 33 bp, Homo sapien
ggctggcttctgtcacaggagaacctgtctaaa

SEQ ID NO: 807460 - DNA, 33 bp, Homo sapien
ggctggcttctgtcacgggagaacctgtctaaa

SEQ ID NO: 807461 - DNA, 33 bp, Homo sapien
gaggatcaagtagacactctctagatcaagagc

SEQ ID NO: 807462 - DNA, 33 bp, Homo sapien
gaggatcaagtagacattctctagatcaagagc

SEQ ID NO: 807463 - DNA, 33 bp, Homo sapien
tctctacggtctgtccgagaaattcatcaaaga

SEQ ID NO: 807464 - DNA, 33 bp, Homo sapien
tctctacggtctgtcctagaaattcatcaaaga

SEQ ID NO: 807465 - DNA, 33 bp, Homo sapien
tctgccatgttccagtcaaggggggcaaaggca

SEQ ID NO: 807466 - DNA, 33 bp, Homo sapien
tctgccatgttccagtgaaggggggcaaaggca

SEQ ID NO: 807467 - DNA, 33 bp, Homo sapien
gagagttaggaagagacagtgaaatgataagga

SEQ ID NO: 807468 - DNA, 33 bp, Homo sapien
gagagttaggaagagagagtgaaatgataagga

SEQ ID NO: 807469 - DNA, 33 bp, Homo sapien
cccactggggtggcaaagtcagtataatggccc

SEQ ID NO: 807470 - DNA, 33 bp, Homo sapien
cccactggggtggcaatgtcagtataatggccc

SEQ ID NO: 807471 - DNA, 33 bp, Homo sapien
gtcaataatacctcaccaagctgttttttaaaa

SEQ ID NO: 807472 - DNA, 33 bp, Homo sapien
gtcaataatacctcactaagctgttttttaaaa

SEQ ID NO: 807473 - DNA, 33 bp, Homo sapien
ccaggtcctcagttcacgacagcagagatgaca

SEQ ID NO: 807474 - DNA, 33 bp, Homo sapien
ccaggtcctcagttcatgacagcagagatgaca

SEQ ID NO: 807475 - DNA, 33 bp, Homo sapien
gcttgcattctgtgcacctgcaagcttaccacc

SEQ ID NO: 807476 - DNA, 33 bp, Homo sapien
gcttgcattctgtgcatctgcaagcttaccacc

SEQ ID NO: 807477 - DNA, 33 bp, Homo sapien
gcatcacttctctcaccgcaagaactaagtcac

SEQ ID NO: 807478 - DNA, 33 bp, Homo sapien
gcatcacttctctcactgcaagaactaagtcac

SEQ ID NO: 807479 - DNA, 33 bp, Homo sapien
atggaattaacaacaggccatttggagacctga

SEQ ID NO: 807480 - DNA, 33 bp, Homo sapien
atggaattaacaacagtccatttggagacctga

SEQ ID NO: 807481 - DNA, 33 bp, Homo sapien
aggagagaagaggaacagcatttttagagctaa

SEQ ID NO: 807482 - DNA, 33 bp, Homo sapien
aggagagaagaggaacggcatttttagagctaa

SEQ ID NO: 807483 - DNA, 33 bp, Homo sapien
aattccagtttcacaaatgatgtggatccattt

SEQ ID NO: 807484 - DNA, 33 bp, Homo sapien
aattccagtttcacaagtgatgtggatccattt

SEQ ID NO: 807485 - DNA, 33 bp, Homo sapien
taattcctattcccacacatcaatcttggaatg

SEQ ID NO: 807486 - DNA, 33 bp, Homo sapien
taattcctattcccacgcatcaatcttggaatg

SEQ ID NO: 807487 - DNA, 33 bp, Homo sapien
aattggctggaaacccaaacaccttatcacata

SEQ ID NO: 807488 - DNA, 33 bp, Homo sapien
aattggctggaaacccgaacaccttatcacata

SEQ ID NO: 807489 - DNA, 33 bp, Homo sapien
caagattagaagcataaacagatctgacataaa

SEQ ID NO: 807490 - DNA, 33 bp, Homo sapien
caagattagaagcatagacagatctgacataaa

SEQ ID NO: 807491 - DNA, 33 bp, Homo sapien
ggagttaatcaaaagacagactcccacatgggt

SEQ ID NO: 807492 - DNA, 33 bp, Homo sapien
ggagttaatcaaaagagagactcccacatgggt

SEQ ID NO: 807493 - DNA, 33 bp, Homo sapien
agaaggtgaagtatcaaaaagacactcccctgc

SEQ ID NO: 807494 - DNA, 33 bp, Homo sapien
agaaggtgaagtatcagaaagacactcccctgc

SEQ ID NO: 807495 - DNA, 33 bp, Homo sapien
tgacttcggcctgcaaaacccagagtggaggac

SEQ ID NO: 807496 - DNA, 33 bp, Homo sapien
tgacttcggcctgcaagacccagagtggaggac

SEQ ID NO: 807497 - DNA, 33 bp, Homo sapien
tgcctcctggagtttaaggtaggatcaaatgag

SEQ ID NO: 807498 - DNA, 33 bp, Homo sapien
tgcctcctggagtttagggtaggatcaaatgag

SEQ ID NO: 807499 - DNA, 33 bp, Homo sapien
attcaagagatgagtacgctgaaagcccagact

SEQ ID NO: 807500 - DNA, 33 bp, Homo sapien
attcaagagatgagtatgctgaaagcccagact

SEQ ID NO: 807501 - DNA, 33 bp, Homo sapien
ctggtcaatttcactacaaaaactactctaaaa

SEQ ID NO: 807502 - DNA, 33 bp, Homo sapien
ctggtcaatttcactataaaaactactctaaaa

SEQ ID NO: 807503 - DNA, 33 bp, Homo sapien
caaccactggagcctagaattatccagaagtgc

SEQ ID NO: 807504 - DNA, 33 bp, Homo sapien
caaccactggagcctataattatccagaagtgc

SEQ ID NO: 807505 - DNA, 33 bp, Homo sapien
gaatggcttcgtgaaactgactgttacagctat

SEQ ID NO: 807506 - DNA, 33 bp, Homo sapien
gaatggcttcgtgaaattgactgttacagctat

SEQ ID NO: 807507 - DNA, 33 bp, Homo sapien
gagaaatgaaagctaacctgggtaacggtgtta

SEQ ID NO: 807508 - DNA, 33 bp, Homo sapien
gagaaatgaaagctaatctgggtaacggtgtta

SEQ ID NO: 807509 - DNA, 33 bp, Homo sapien
aggtattcctttatatcaacacagatggactaa

SEQ ID NO: 807510 - DNA, 33 bp, Homo sapien
aggtattcctttatattaacacagatggactaa

SEQ ID NO: 807511 - DNA, 33 bp, Homo sapien
atgagaagcagaggaccaatatcaattgtcatt

SEQ ID NO: 807512 - DNA, 33 bp, Homo sapien
atgagaagcagaggacgaatatcaattgtcatt

SEQ ID NO: 807513 - DNA, 33 bp, Homo sapien
gaggtctgcaagggaaccctgctatggaaactt

SEQ ID NO: 807514 - DNA, 33 bp, Homo sapien
gaggtctgcaagggaatcctgctatggaaactt

SEQ ID NO: 807515 - DNA, 33 bp, Homo sapien
gagaggagagttgaaaacttgacgaagaaggat

SEQ ID NO: 807516 - DNA, 33 bp, Homo sapien
gagaggagagttgaaagcttgacgaagaaggat

SEQ ID NO: 807517 - DNA, 33 bp, Homo sapien
gtcccatcagatagaactcattgtcatacatgg

SEQ ID NO: 807518 - DNA, 33 bp, Homo sapien
gtcccatcagatagaattcattgtcatacatgg

SEQ ID NO: 807519 - DNA, 33 bp, Homo sapien
agatgttctgtgtaaacaaagggaaaagtgtat

SEQ ID NO: 807520 - DNA, 33 bp, Homo sapien
agatgttctgtgtaaataaagggaaaagtgtat

SEQ ID NO: 807521 - DNA, 33 bp, Homo sapien
aatatgtatggcacaaagtaagagctcaatgaa

SEQ ID NO: 807522 - DNA, 33 bp, Homo sapien
aatatgtatggcacaaggtaagagctcaatgaa

SEQ ID NO: 807523 - DNA, 33 bp, Homo sapien
agcaccaaagacattcactgtgacttcaaatgt

SEQ ID NO: 807524 - DNA, 33 bp, Homo sapien
agcaccaaagacattcgctgtgacttcaaatgt

SEQ ID NO: 807525 - DNA, 33 bp, Homo sapien
tgttgttgttgttttcccttgatccatcttgga

SEQ ID NO: 807526 - DNA, 33 bp, Homo sapien
tgttgttgttgttttctcttgatccatcttgga

SEQ ID NO: 807527 - DNA, 33 bp, Homo sapien
ggattagttgttcacacgttcctgactggtaga

SEQ ID NO: 807528 - DNA, 33 bp, Homo sapien
ggattagttgttcacatgttcctgactggtaga

SEQ ID NO: 807529 - DNA, 33 bp, Homo sapien
aaagtgtacaaaaatacactcaaatagaataag

SEQ ID NO: 807530 - DNA, 33 bp, Homo sapien
aaagtgtacaaaaatagactcaaatagaataag

SEQ ID NO: 807531 - DNA, 33 bp, Homo sapien
tacataaaaagataaaaatcacaagacaaaaaa

SEQ ID NO: 807532 - DNA, 33 bp, Homo sapien
tacataaaaagataaacatcacaagacaaaaaa

SEQ ID NO: 807533 - DNA, 33 bp, Homo sapien
caggtcagagagcataaccatttgaaatgttca

SEQ ID NO: 807534 - DNA, 33 bp, Homo sapien
caggtcagagagcatacccatttgaaatgttca

SEQ ID NO: 807535 - DNA, 33 bp, Homo sapien
gagagcctgcttacaagctagggatagagccca

SEQ ID NO: 807536 - DNA, 33 bp, Homo sapien
gagagcctgcttacaatctagggatagagccca

SEQ ID NO: 807537 - DNA, 33 bp, Homo sapien
tctggcatttcagtaacacaccttatggttagc

SEQ ID NO: 807538 - DNA, 33 bp, Homo sapien
tctggcatttcagtaatacaccttatggttagc

SEQ ID NO: 807539 - DNA, 33 bp, Homo sapien
cttttatctgtggacacggagagatgggtagtg

SEQ ID NO: 807540 - DNA, 33 bp, Homo sapien
cttttatctgtggacagggagagatgggtagtg

SEQ ID NO: 807541 - DNA, 33 bp, Homo sapien
aaagacaactgcccagaaaaatgggaggacttc

SEQ ID NO: 807542 - DNA, 33 bp, Homo sapien
aaagacaactgcccagcaaaatgggaggacttc

SEQ ID NO: 807543 - DNA, 33 bp, Homo sapien
caggggagtaggagaacgcaaaggcctcagtca

SEQ ID NO: 807544 - DNA, 33 bp, Homo sapien
caggggagtaggagaaggcaaaggcctcagtca

SEQ ID NO: 807545 - DNA, 33 bp, Homo sapien
tttacacctccagttaggttacagttcaccatg

SEQ ID NO: 807546 - DNA, 33 bp, Homo sapien
tttacacctccagttatgttacagttcaccatg

SEQ ID NO: 807547 - DNA, 33 bp, Homo sapien
tttacctaccagctccacatacttcacttttct

SEQ ID NO: 807548 - DNA, 33 bp, Homo sapien
tttacctaccagctccgcatacttcacttttct

SEQ ID NO: 807549 - DNA, 33 bp, Homo sapien
tgatggtatacacctcaaaataatgagatccgg

SEQ ID NO: 807550 - DNA, 33 bp, Homo sapien
tgatggtatacacctccaaataatgagatccgg

SEQ ID NO: 807551 - DNA, 33 bp, Homo sapien
aggtacactttcaaaaacaattcctgaccacag

SEQ ID NO: 807552 - DNA, 33 bp, Homo sapien
aggtacactttcaaaagcaattcctgaccacag

SEQ ID NO: 807553 - DNA, 33 bp, Homo sapien
aacctgaacatgggctcaacatttttcttgaca

SEQ ID NO: 807554 - DNA, 33 bp, Homo sapien
aacctgaacatgggcttaacatttttcttgaca

SEQ ID NO: 807555 - DNA, 33 bp, Homo sapien
aacaatataacaacaaaagcataagaagaatgt

SEQ ID NO: 807556 - DNA, 33 bp, Homo sapien
aacaatataacaacaacagcataagaagaatgt

SEQ ID NO: 807557 - DNA, 33 bp, Homo sapien
tggaatgctaattaaggcatttaacccactcta

SEQ ID NO: 807558 - DNA, 33 bp, Homo sapien
tggaatgctaattaagtcatttaacccactcta

SEQ ID NO: 807559 - DNA, 33 bp, Homo sapien
agttttccttgactcaaaatctcctggaagcat

SEQ ID NO: 807560 - DNA, 33 bp, Homo sapien
agttttccttgactcacaatctcctggaagcat

SEQ ID NO: 807561 - DNA, 33 bp, Homo sapien
accagaaacatgtgaaagttccagtgtcttggt

SEQ ID NO: 807562 - DNA, 33 bp, Homo sapien
accagaaacatgtgaacgttccagtgtcttggt

SEQ ID NO: 807563 - DNA, 33 bp, Homo sapien
ttcatagaatttgtgacacagtgcccaaagcaa

SEQ ID NO: 807564 - DNA, 33 bp, Homo sapien
ttcatagaatttgtgatacagtgcccaaagcaa

SEQ ID NO: 807565 - DNA, 33 bp, Homo sapien
gtcaataatgtcacaaaaaggtaaggcctggtg

SEQ ID NO: 807566 - DNA, 33 bp, Homo sapien
gtcaataatgtcacaagaaggtaaggcctggtg

SEQ ID NO: 807567 - DNA, 33 bp, Homo sapien
tatgtctatggcaaaaaattggacaatatattg

SEQ ID NO: 807568 - DNA, 33 bp, Homo sapien
tatgtctatggcaaaacattggacaatatattg

SEQ ID NO: 807569 - DNA, 33 bp, Homo sapien
gaggaatctagttgtcaaaagcattacatgaga

SEQ ID NO: 807570 - DNA, 33 bp, Homo sapien
gaggaatctagttgtcgaaagcattacatgaga

SEQ ID NO: 807571 - DNA, 33 bp, Homo sapien
tttgtctttactcctaagtatgactctggaaat

SEQ ID NO: 807572 - DNA, 33 bp, Homo sapien
tttgtctttactcctacgtatgactctggaaat

SEQ ID NO: 807573 - DNA, 33 bp, Homo sapien
tctaatagcttattgactaggaatggacttgac

SEQ ID NO: 807574 - DNA, 33 bp, Homo sapien
tctaatagcttattgagtaggaatggacttgac

SEQ ID NO: 807575 - DNA, 33 bp, Homo sapien
agcggcttattcagacgcagagtgcaggcatct

SEQ ID NO: 807576 - DNA, 33 bp, Homo sapien
agcggcttattcagactcagagtgcaggcatct

SEQ ID NO: 807577 - DNA, 33 bp, Homo sapien
gccctgtatgcctgaacagatacctgatgcatt

SEQ ID NO: 807578 - DNA, 33 bp, Homo sapien
gccctgtatgcctgaatagatacctgatgcatt

SEQ ID NO: 807579 - DNA, 33 bp, Homo sapien
agttaattctgctaaaaaatgcctaatttcaaa

SEQ ID NO: 807580 - DNA, 33 bp, Homo sapien
agttaattctgctaaataatgcctaatttcaaa

SEQ ID NO: 807581 - DNA, 33 bp, Homo sapien
ccactggctgccaggaggacagttaatggatgc

SEQ ID NO: 807582 - DNA, 33 bp, Homo sapien
ccactggctgccaggatgacagttaatggatgc

SEQ ID NO: 807583 - DNA, 33 bp, Homo sapien
atttatctcctagaaccgcaacttactagctgt

SEQ ID NO: 807584 - DNA, 33 bp, Homo sapien
atttatctcctagaactgcaacttactagctgt

SEQ ID NO: 807585 - DNA, 33 bp, Homo sapien
ttgatataacccaaacacctaatacatggcagg

SEQ ID NO: 807586 - DNA, 33 bp, Homo sapien
ttgatataacccaaacgcctaatacatggcagg

SEQ ID NO: 807587 - DNA, 33 bp, Homo sapien
aaccaacagttggaacaaagagtctaacacaaa

SEQ ID NO: 807588 - DNA, 33 bp, Homo sapien
aaccaacagttggaacgaagagtctaacacaaa

SEQ ID NO: 807589 - DNA, 33 bp, Homo sapien
ccagccacccaacatacatatcagatttgcatc

SEQ ID NO: 807590 - DNA, 33 bp, Homo sapien
ccagccacccaacatatatatcagatttgcatc

SEQ ID NO: 807591 - DNA, 33 bp, Homo sapien
agatctgaaaggttaacgcagactgcaagtggg

SEQ ID NO: 807592 - DNA, 33 bp, Homo sapien
agatctgaaaggttaatgcagactgcaagtggg

SEQ ID NO: 807593 - DNA, 33 bp, Homo sapien
tagaggtttaggcaaacgggggagagcagggca

SEQ ID NO: 807594 - DNA, 33 bp, Homo sapien
tagaggtttaggcaaatgggggagagcagggca

SEQ ID NO: 807595 - DNA, 33 bp, Homo sapien
ttcagtcaactcagtcacccacttactcttggg

SEQ ID NO: 807596 - DNA, 33 bp, Homo sapien
ttcagtcaactcagtcgcccacttactcttggg

SEQ ID NO: 807597 - DNA, 33 bp, Homo sapien
cataaaacagtagttcaatagagaaaaactgag

SEQ ID NO: 807598 - DNA, 33 bp, Homo sapien
cataaaacagtagttcgatagagaaaaactgag

SEQ ID NO: 807599 - DNA, 33 bp, Homo sapien
acaaaagaaggtcataataagtctttcctcagt

SEQ ID NO: 807600 - DNA, 33 bp, Homo sapien
acaaaagaaggtcatagtaagtctttcctcagt

SEQ ID NO: 807601 - DNA, 33 bp, Homo sapien
agaaaaaacaactgacaaatagacccacacatt

SEQ ID NO: 807602 - DNA, 33 bp, Homo sapien
agaaaaaacaactgaccaatagacccacacatt

SEQ ID NO: 807603 - DNA, 33 bp, Homo sapien
ataataatttagacaacgtagtactggcatata

SEQ ID NO: 807604 - DNA, 33 bp, Homo sapien
ataataatttagacaatgtagtactggcatata

SEQ ID NO: 807605 - DNA, 33 bp, Homo sapien
taaacttgatactctaagaaaatgagccccatc

SEQ ID NO: 807606 - DNA, 33 bp, Homo sapien
taaacttgatactctaggaaaatgagccccatc

SEQ ID NO: 807607 - DNA, 33 bp, Homo sapien
gtgagggtcattgctcactcagtaaaactccca

SEQ ID NO: 807608 - DNA, 33 bp, Homo sapien
gtgagggtcattgctcgctcagtaaaactccca

SEQ ID NO: 807609 - DNA, 33 bp, Homo sapien
atttgacaacgttgggcccagtggcagagtgca

SEQ ID NO: 807610 - DNA, 33 bp, Homo sapien
atttgacaacgttgggtccagtggcagagtgca

SEQ ID NO: 807611 - DNA, 33 bp, Homo sapien
aatccttacaaaaatacgccagtgaagtgtcat

SEQ ID NO: 807612 - DNA, 33 bp, Homo sapien
aatccttacaaaaatatgccagtgaagtgtcat

SEQ ID NO: 807613 - DNA, 33 bp, Homo sapien
tggagatgagtctaaacgaaacctaaacaagac

SEQ ID NO: 807614 - DNA, 33 bp, Homo sapien
tggagatgagtctaaatgaaacctaaacaagac

SEQ ID NO: 807615 - DNA, 33 bp, Homo sapien
tgttcaagatttcaaaaagtctggcatatagta

SEQ ID NO: 807616 - DNA, 33 bp, Homo sapien
tgttcaagatttcaaacagtctggcatatagta

SEQ ID NO: 807617 - DNA, 33 bp, Homo sapien
gaggtagaattgagataaagcctgaatgttgaa

SEQ ID NO: 807618 - DNA, 33 bp, Homo sapien
gaggtagaattgagatgaagcctgaatgttgaa

SEQ ID NO: 807619 - DNA, 33 bp, Homo sapien
caatgaatggggtagcaagattatccttgttca

SEQ ID NO: 807620 - DNA, 33 bp, Homo sapien
caatgaatggggtagcgagattatccttgttca

SEQ ID NO: 807621 - DNA, 33 bp, Homo sapien
gctcaacttaatagggaagctttatcatgtgcc

SEQ ID NO: 807622 - DNA, 33 bp, Homo sapien
gctcaacttaataggggagctttatcatgtgcc

SEQ ID NO: 807623 - DNA, 33 bp, Homo sapien
actgtcatgcaaagaaactaataatactcatga

SEQ ID NO: 807624 - DNA, 33 bp, Homo sapien
actgtcatgcaaagaagctaataatactcatga

SEQ ID NO: 807625 - DNA, 33 bp, Homo sapien
atattctagtccctaaaaggccacactgcaaca

SEQ ID NO: 807626 - DNA, 33 bp, Homo sapien
atattctagtccctaagaggccacactgcaaca

SEQ ID NO: 807627 - DNA, 33 bp, Homo sapien
ttgtgttaagtgaaataagtcaggaacagaaat

SEQ ID NO: 807628 - DNA, 33 bp, Homo sapien
ttgtgttaagtgaaatcagtcaggaacagaaat

SEQ ID NO: 807629 - DNA, 33 bp, Homo sapien
tacaaagctatagtgaacaaaacagcacgatat

SEQ ID NO: 807630 - DNA, 33 bp, Homo sapien
tacaaagctatagtgaccaaaacagcacgatat

SEQ ID NO: 807631 - DNA, 33 bp, Homo sapien
atcacaccaccgttagcagcctgggtaacaaag

SEQ ID NO: 807632 - DNA, 33 bp, Homo sapien
atcacaccaccgttagtagcctgggtaacaaag

SEQ ID NO: 807633 - DNA, 33 bp, Homo sapien
ccatcttgtgatttcaactgagtaatatgtgct

SEQ ID NO: 807634 - DNA, 33 bp, Homo sapien
ccatcttgtgatttcagctgagtaatatgtgct

SEQ ID NO: 807635 - DNA, 33 bp, Homo sapien
cgtcctatttttttaaagcttgatctacctatt

SEQ ID NO: 807636 - DNA, 33 bp, Homo sapien
cgtcctatttttttaatgcttgatctacctatt

SEQ ID NO: 807637 - DNA, 33 bp, Homo sapien
acacatatttgacatcaagatgatcccctctag

SEQ ID NO: 807638 - DNA, 33 bp, Homo sapien
acacatatttgacatccagatgatcccctctag

SEQ ID NO: 807639 - DNA, 33 bp, Homo sapien
atggttagaagcattagggacacagaagacaaa

SEQ ID NO: 807640 - DNA, 33 bp, Homo sapien
atggttagaagcattatggacacagaagacaaa

SEQ ID NO: 807641 - DNA, 33 bp, Homo sapien
gcccactgacttcataacatatacccaagcaga

SEQ ID NO: 807642 - DNA, 33 bp, Homo sapien
gcccactgacttcatagcatatacccaagcaga

SEQ ID NO: 807643 - DNA, 33 bp, Homo sapien
cagccttttagtggtacagccttttggccaact

SEQ ID NO: 807644 - DNA, 33 bp, Homo sapien
cagccttttagtggtatagccttttggccaact

SEQ ID NO: 807645 - DNA, 33 bp, Homo sapien
tgtaaagcatccttaaactaaaagtagcttttc

SEQ ID NO: 807646 - DNA, 33 bp, Homo sapien
tgtaaagcatccttaagctaaaagtagcttttc

SEQ ID NO: 807647 - DNA, 33 bp, Homo sapien
ggtagatctgtattccacaatgctcacgaaaaa

SEQ ID NO: 807648 - DNA, 33 bp, Homo sapien
ggtagatctgtattcctcaatgctcacgaaaaa

SEQ ID NO: 807649 - DNA, 33 bp, Homo sapien
gaccaaatcaatattaggagaaaggcaggaaat

SEQ ID NO: 807650 - DNA, 33 bp, Homo sapien
gaccaaatcaatattatgagaaaggcaggaaat

SEQ ID NO: 807651 - DNA, 33 bp, Homo sapien
gattctaagtcccagacgattacacctcttcta

SEQ ID NO: 807652 - DNA, 33 bp, Homo sapien
gattctaagtcccagatgattacacctcttcta

SEQ ID NO: 807653 - DNA, 33 bp, Homo sapien
tcttcccctcttaagcaatcctgtacagggata

SEQ ID NO: 807654 - DNA, 33 bp, Homo sapien
tcttcccctcttaagccatcctgtacagggata

SEQ ID NO: 807655 - DNA, 33 bp, Homo sapien
ggttctcactcctgaaagcctattagtttttca

SEQ ID NO: 807656 - DNA, 33 bp, Homo sapien
ggttctcactcctgaaggcctattagtttttca

SEQ ID NO: 807657 - DNA, 33 bp, Homo sapien
atacacagcctgcaacagcacaattcccagatg

SEQ ID NO: 807658 - DNA, 33 bp, Homo sapien
atacacagcctgcaactgcacaattcccagatg

SEQ ID NO: 807659 - DNA, 33 bp, Homo sapien
gagtttgcccgatcagcaaataatttcaggtct

SEQ ID NO: 807660 - DNA, 33 bp, Homo sapien
gagtttgcccgatcagtaaataatttcaggtct

SEQ ID NO: 807661 - DNA, 33 bp, Homo sapien
caatgaaaagcattatcagtctgggtggttctt

SEQ ID NO: 807662 - DNA, 33 bp, Homo sapien
caatgaaaagcattattagtctgggtggttctt

SEQ ID NO: 807663 - DNA, 33 bp, Homo sapien
tttgagaatgattttcccaggtaatgctaggag

SEQ ID NO: 807664 - DNA, 33 bp, Homo sapien
tttgagaatgattttctcaggtaatgctaggag

SEQ ID NO: 807665 - DNA, 33 bp, Homo sapien
ctgattcctcagatgaaaaatatctatgcaaag

SEQ ID NO: 807666 - DNA, 33 bp, Homo sapien
ctgattcctcagatgacaaatatctatgcaaag

SEQ ID NO: 807667 - DNA, 33 bp, Homo sapien
catagttctagttgggaaaccattcagggaaca

SEQ ID NO: 807668 - DNA, 33 bp, Homo sapien
catagttctagttggggaaccattcagggaaca

SEQ ID NO: 807669 - DNA, 33 bp, Homo sapien
aacaaaagtcaaaacaaaatgatttctaatgta

SEQ ID NO: 807670 - DNA, 33 bp, Homo sapien
aacaaaagtcaaaacagaatgatttctaatgta

SEQ ID NO: 807671 - DNA, 33 bp, Homo sapien
cttcttgttttggaaacggagatactttattta

SEQ ID NO: 807672 - DNA, 33 bp, Homo sapien
cttcttgttttggaaatggagatactttattta

SEQ ID NO: 807673 - DNA, 33 bp, Homo sapien
gacttaagaattgaaaccctgatctgcttggtg

SEQ ID NO: 807674 - DNA, 33 bp, Homo sapien
gacttaagaattgaaatcctgatctgcttggtg

SEQ ID NO: 807675 - DNA, 33 bp, Homo sapien
aacattgatctgatttaaaaaaatgatagtttg

SEQ ID NO: 807676 - DNA, 33 bp, Homo sapien
aacattgatctgattttaaaaaatgatagtttg

SEQ ID NO: 807677 - DNA, 33 bp, Homo sapien
tgcagactggttgtagccctttcatggaaacta

SEQ ID NO: 807678 - DNA, 33 bp, Homo sapien
tgcagactggttgtagtcctttcatggaaacta

SEQ ID NO: 807679 - DNA, 33 bp, Homo sapien
tcaggtgagcagcggaaagtgtagttcatctag

SEQ ID NO: 807680 - DNA, 33 bp, Homo sapien
tcaggtgagcagcggagagtgtagttcatctag

SEQ ID NO: 807681 - DNA, 33 bp, Homo sapien
tctaataattttagatcaggtcaacctatttgg

SEQ ID NO: 807682 - DNA, 33 bp, Homo sapien
tctaataattttagatgaggtcaacctatttgg

SEQ ID NO: 807683 - DNA, 33 bp, Homo sapien
aattattagttgcttacctatgtgcccctcctt

SEQ ID NO: 807684 - DNA, 33 bp, Homo sapien
aattattagttgcttatctatgtgcccctcctt

SEQ ID NO: 807685 - DNA, 33 bp, Homo sapien
tgataatcattatttcaattgcccatctcgcct

SEQ ID NO: 807686 - DNA, 33 bp, Homo sapien
tgataatcattatttcgattgcccatctcgcct

SEQ ID NO: 807687 - DNA, 33 bp, Homo sapien
taatttgtctcccatcaaagtactaagcaggcc

SEQ ID NO: 807688 - DNA, 33 bp, Homo sapien
taatttgtctcccatccaagtactaagcaggcc

SEQ ID NO: 807689 - DNA, 33 bp, Homo sapien
tcagatcttttccccacggaatttcaaataagc

SEQ ID NO: 807690 - DNA, 33 bp, Homo sapien
tcagatcttttccccatggaatttcaaataagc

SEQ ID NO: 807691 - DNA, 33 bp, Homo sapien
ggaaactaaagctgtcacaggcattactcacct

SEQ ID NO: 807692 - DNA, 33 bp, Homo sapien
ggaaactaaagctgtcgcaggcattactcacct

SEQ ID NO: 807693 - DNA, 33 bp, Homo sapien
gtatccaggctatattaaaaaagagaacaattt

SEQ ID NO: 807694 - DNA, 33 bp, Homo sapien
gtatccaggctatatttaaaaagagaacaattt

SEQ ID NO: 807695 - DNA, 33 bp, Homo sapien
cccagtttcttccccaatgatataacacagagg

SEQ ID NO: 807696 - DNA, 33 bp, Homo sapien
cccagtttcttccccagtgatataacacagagg

SEQ ID NO: 807697 - DNA, 33 bp, Homo sapien
ctatatccaaacaatccacaccaataacttgtg

SEQ ID NO: 807698 - DNA, 33 bp, Homo sapien
ctatatccaaacaatctacaccaataacttgtg

SEQ ID NO: 807699 - DNA, 33 bp, Homo sapien
tggtggtggtgggagaataagagttcagtcggc

SEQ ID NO: 807700 - DNA, 33 bp, Homo sapien
tggtggtggtgggagagtaagagttcagtcggc

SEQ ID NO: 807701 - DNA, 33 bp, Homo sapien
atcaagcaggacatgaaagaatgaagcggccag

SEQ ID NO: 807702 - DNA, 33 bp, Homo sapien
atcaagcaggacatgacagaatgaagcggccag

SEQ ID NO: 807703 - DNA, 33 bp, Homo sapien
aaaagattgcaagtcaccgaaggctcagatgat

SEQ ID NO: 807704 - DNA, 33 bp, Homo sapien
aaaagattgcaagtcatcgaaggctcagatgat

SEQ ID NO: 807705 - DNA, 33 bp, Homo sapien
attgtatgggtatgatcacaaacatgatactac

SEQ ID NO: 807706 - DNA, 33 bp, Homo sapien
attgtatgggtatgatgacaaacatgatactac

SEQ ID NO: 807707 - DNA, 33 bp, Homo sapien
tgagttactcattaccaaagaagttcaaaacct

SEQ ID NO: 807708 - DNA, 33 bp, Homo sapien
tgagttactcattaccgaagaagttcaaaacct

SEQ ID NO: 807709 - DNA, 33 bp, Homo sapien
aggaaatactcatcacaaatgcacaaaagaaga

SEQ ID NO: 807710 - DNA, 33 bp, Homo sapien
aggaaatactcatcactaatgcacaaaagaaga

SEQ ID NO: 807711 - DNA, 33 bp, Homo sapien
tatgaaatttgcctagaagaatacctttggatg

SEQ ID NO: 807712 - DNA, 33 bp, Homo sapien
tatgaaatttgcctaggagaatacctttggatg

SEQ ID NO: 807713 - DNA, 33 bp, Homo sapien
agctattgttgtaacaaaattcagtccatacag

SEQ ID NO: 807714 - DNA, 33 bp, Homo sapien
agctattgttgtaacacaattcagtccatacag

SEQ ID NO: 807715 - DNA, 33 bp, Homo sapien
gggtctacaacagctgcaaaaggtacttttatt

SEQ ID NO: 807716 - DNA, 33 bp, Homo sapien
gggtctacaacagctggaaaaggtacttttatt

SEQ ID NO: 807717 - DNA, 33 bp, Homo sapien
tcttaatgtacagatccaggtttttctccctca

SEQ ID NO: 807718 - DNA, 33 bp, Homo sapien
tcttaatgtacagatcgaggtttttctccctca

SEQ ID NO: 807719 - DNA, 33 bp, Homo sapien
gcacagtttcttgtacaaagtaggtgcttacta

SEQ ID NO: 807720 - DNA, 33 bp, Homo sapien
gcacagtttcttgtacgaagtaggtgcttacta

SEQ ID NO: 807721 - DNA, 33 bp, Homo sapien
ggatttactgactctcaaactctatttacagac

SEQ ID NO: 807722 - DNA, 33 bp, Homo sapien
ggatttactgactctcgaactctatttacagac

SEQ ID NO: 807723 - DNA, 33 bp, Homo sapien
gttgtgttctgttctcaactctatacttttgat

SEQ ID NO: 807724 - DNA, 33 bp, Homo sapien
gttgtgttctgttctcgactctatacttttgat

SEQ ID NO: 807725 - DNA, 33 bp, Homo sapien
gcagttagaagacagaaagttgaatatgggtcc

SEQ ID NO: 807726 - DNA, 33 bp, Homo sapien
gcagttagaagacagagagttgaatatgggtcc

SEQ ID NO: 807727 - DNA, 33 bp, Homo sapien
aagttgtaacaaaaggaaagtgtgcttctgaaa

SEQ ID NO: 807728 - DNA, 33 bp, Homo sapien
aagttgtaacaaaagggaagtgtgcttctgaaa

SEQ ID NO: 807729 - DNA, 33 bp, Homo sapien
ttaagacactgattcccgataaaaccaccagga

SEQ ID NO: 807730 - DNA, 33 bp, Homo sapien
ttaagacactgattcctgataaaaccaccagga

SEQ ID NO: 807731 - DNA, 33 bp, Homo sapien
gatgggcctacagctaaggtatttgcccagctc

SEQ ID NO: 807732 - DNA, 33 bp, Homo sapien
gatgggcctacagctagggtatttgcccagctc

SEQ ID NO: 807733 - DNA, 33 bp, Homo sapien
agtaatgctaaatctacattggcattcatttgt

SEQ ID NO: 807734 - DNA, 33 bp, Homo sapien
agtaatgctaaatctatattggcattcatttgt

SEQ ID NO: 807735 - DNA, 33 bp, Homo sapien
gttctcaggcaagcacagaattatactctccca

SEQ ID NO: 807736 - DNA, 33 bp, Homo sapien
gttctcaggcaagcacggaattatactctccca

SEQ ID NO: 807737 - DNA, 33 bp, Homo sapien
cacccatcacaggcaaagtgtagctcagcctca

SEQ ID NO: 807738 - DNA, 33 bp, Homo sapien
cacccatcacaggcaaggtgtagctcagcctca

SEQ ID NO: 807739 - DNA, 33 bp, Homo sapien
ggtaactgaaactatgcaaagagaaacttcaga

SEQ ID NO: 807740 - DNA, 33 bp, Homo sapien
ggtaactgaaactatggaaagagaaacttcaga

SEQ ID NO: 807741 - DNA, 33 bp, Homo sapien
agtccacaagttccaaaaatgtagcagtgcaac

SEQ ID NO: 807742 - DNA, 33 bp, Homo sapien
agtccacaagttccaacaatgtagcagtgcaac

SEQ ID NO: 807743 - DNA, 33 bp, Homo sapien
gacatgctgggaaatacatagtctttaagccaa

SEQ ID NO: 807744 - DNA, 33 bp, Homo sapien
gacatgctgggaaatatatagtctttaagccaa

SEQ ID NO: 807745 - DNA, 33 bp, Homo sapien
cataagtgcatccgtgaatgaaaatttcatgac

SEQ ID NO: 807746 - DNA, 33 bp, Homo sapien
cataagtgcatccgtggatgaaaatttcatgac

SEQ ID NO: 807747 - DNA, 33 bp, Homo sapien
taggttttataaagtgaaagttactctgagtgg

SEQ ID NO: 807748 - DNA, 33 bp, Homo sapien
taggttttataaagtggaagttactctgagtgg

SEQ ID NO: 807749 - DNA, 33 bp, Homo sapien
tggtttatacatcacacgtattttcctgcatga

SEQ ID NO: 807750 - DNA, 33 bp, Homo sapien
tggtttatacatcacaggtattttcctgcatga

SEQ ID NO: 807751 - DNA, 33 bp, Homo sapien
cgtttacttctaatgaaattatcagagaaaatc

SEQ ID NO: 807752 - DNA, 33 bp, Homo sapien
cgtttacttctaatgagattatcagagaaaatc

SEQ ID NO: 807753 - DNA, 33 bp, Homo sapien
aaccaaaacatatctcagagacaaaaagcatga

SEQ ID NO: 807754 - DNA, 33 bp, Homo sapien
aaccaaaacatatctcggagacaaaaagcatga

SEQ ID NO: 807755 - DNA, 33 bp, Homo sapien
agctgctcctcgaatcactcttctcatgctttc

SEQ ID NO: 807756 - DNA, 33 bp, Homo sapien
agctgctcctcgaatcgctcttctcatgctttc

SEQ ID NO: 807757 - DNA, 33 bp, Homo sapien
tttctgggggaagaaacgctgcttaatgagtag

SEQ ID NO: 807758 - DNA, 33 bp, Homo sapien
tttctgggggaagaaaggctgcttaatgagtag

SEQ ID NO: 807759 - DNA, 33 bp, Homo sapien
ctgtgtgcagggaatacagcagtgaccaaaata

SEQ ID NO: 807760 - DNA, 33 bp, Homo sapien
ctgtgtgcagggaatatagcagtgaccaaaata

SEQ ID NO: 807761 - DNA, 33 bp, Homo sapien
cacttaattttttataccaaagatgccagccaa

SEQ ID NO: 807762 - DNA, 33 bp, Homo sapien
cacttaattttttatatcaaagatgccagccaa

SEQ ID NO: 807763 - DNA, 33 bp, Homo sapien
gcaggttaaagttgcacgagtagatggtagaat

SEQ ID NO: 807764 - DNA, 33 bp, Homo sapien
gcaggttaaagttgcatgagtagatggtagaat

SEQ ID NO: 807765 - DNA, 33 bp, Homo sapien
gaatatttttgttgctcaatcgtccttccatcc

SEQ ID NO: 807766 - DNA, 33 bp, Homo sapien
gaatatttttgttgcttaatcgtccttccatcc

SEQ ID NO: 807767 - DNA, 33 bp, Homo sapien
atgtaattttaaagagactcaatacaagcccac

SEQ ID NO: 807768 - DNA, 33 bp, Homo sapien
atgtaattttaaagaggctcaatacaagcccac

SEQ ID NO: 807769 - DNA, 33 bp, Homo sapien
gaatgggatttgtgcacctataagaagagacat

SEQ ID NO: 807770 - DNA, 33 bp, Homo sapien
gaatgggatttgtgcatctataagaagagacat

SEQ ID NO: 807771 - DNA, 33 bp, Homo sapien
ctctgctacctaaggacacagtgagaagccaga

SEQ ID NO: 807772 - DNA, 33 bp, Homo sapien
ctctgctacctaaggatacagtgagaagccaga

SEQ ID NO: 807773 - DNA, 33 bp, Homo sapien
cttttcctctgtcacaatcaaactacagaatac

SEQ ID NO: 807774 - DNA, 33 bp, Homo sapien
cttttcctctgtcacagtcaaactacagaatac

SEQ ID NO: 807775 - DNA, 33 bp, Homo sapien
aagctctccaaaagaaatatgaaaacagatttg

SEQ ID NO: 807776 - DNA, 33 bp, Homo sapien
aagctctccaaaagaagtatgaaaacagatttg

SEQ ID NO: 807777 - DNA, 33 bp, Homo sapien
atcttcagaataaatccagcagctgaccttttt

SEQ ID NO: 807778 - DNA, 33 bp, Homo sapien
atcttcagaataaatcgagcagctgaccttttt

SEQ ID NO: 807779 - DNA, 33 bp, Homo sapien
ggaaaagatgattttacagcttacaaccacatg

SEQ ID NO: 807780 - DNA, 33 bp, Homo sapien
ggaaaagatgattttatagcttacaaccacatg

SEQ ID NO: 807781 - DNA, 33 bp, Homo sapien
attcatgactagctaaaagcatacaccacactt

SEQ ID NO: 807782 - DNA, 33 bp, Homo sapien
attcatgactagctaagagcatacaccacactt

SEQ ID NO: 807783 - DNA, 33 bp, Homo sapien
atacacccagaaagtaaaaccatctggacttga

SEQ ID NO: 807784 - DNA, 33 bp, Homo sapien
atacacccagaaagtagaaccatctggacttga

SEQ ID NO: 807785 - DNA, 33 bp, Homo sapien
aaatggtctcttaaaggagtaagtgtatcaaaa

SEQ ID NO: 807786 - DNA, 33 bp, Homo sapien
aaatggtctcttaaagtagtaagtgtatcaaaa

SEQ ID NO: 807787 - DNA, 33 bp, Homo sapien
aggggttccatgagtgaatacctttgtcaaaat

SEQ ID NO: 807788 - DNA, 33 bp, Homo sapien
aggggttccatgagtgtatacctttgtcaaaat

SEQ ID NO: 807789 - DNA, 33 bp, Homo sapien
ggatatgtaaattcaaacacttctcttccttca

SEQ ID NO: 807790 - DNA, 33 bp, Homo sapien
ggatatgtaaattcaatcacttctcttccttca

SEQ ID NO: 807791 - DNA, 33 bp, Homo sapien
taagcagactgaatcacgttttggatgtcattc

SEQ ID NO: 807792 - DNA, 33 bp, Homo sapien
taagcagactgaatcatgttttggatgtcattc

SEQ ID NO: 807793 - DNA, 33 bp, Homo sapien
aaacgtttgaacaagaaaacacagcaagttagc

SEQ ID NO: 807794 - DNA, 33 bp, Homo sapien
aaacgtttgaacaagacaacacagcaagttagc

SEQ ID NO: 807795 - DNA, 33 bp, Homo sapien
agaaatcggatcttcaagaaaataagtaaacat

SEQ ID NO: 807796 - DNA, 33 bp, Homo sapien
agaaatcggatcttcaggaaaataagtaaacat

SEQ ID NO: 807797 - DNA, 33 bp, Homo sapien
tctctattgatttccacgtgtagctgacatcaa

SEQ ID NO: 807798 - DNA, 33 bp, Homo sapien
tctctattgatttccatgtgtagctgacatcaa

SEQ ID NO: 807799 - DNA, 33 bp, Homo sapien
gtgggttgacttcagaccctgccctgctttagg

SEQ ID NO: 807800 - DNA, 33 bp, Homo sapien
gtgggttgacttcagatcctgccctgctttagg

SEQ ID NO: 807801 - DNA, 33 bp, Homo sapien
tgaagtgaggattccaaattagagcagtggtta

SEQ ID NO: 807802 - DNA, 33 bp, Homo sapien
tgaagtgaggattccagattagagcagtggtta

SEQ ID NO: 807803 - DNA, 33 bp, Homo sapien
ttcttacttggtgaaactagaatagctaaaagt

SEQ ID NO: 807804 - DNA, 33 bp, Homo sapien
ttcttacttggtgaaagtagaatagctaaaagt

SEQ ID NO: 807805 - DNA, 33 bp, Homo sapien
gtgtgtctaggcatagaaagttaccttaacatg

SEQ ID NO: 807806 - DNA, 33 bp, Homo sapien
gtgtgtctaggcataggaagttaccttaacatg

SEQ ID NO: 807807 - DNA, 33 bp, Homo sapien
gtgtctttgcggtttgaacattggaaatataca

SEQ ID NO: 807808 - DNA, 33 bp, Homo sapien
gtgtctttgcggtttggacattggaaatataca

SEQ ID NO: 807809 - DNA, 33 bp, Homo sapien
agcaccaactgtctcaactctgtactttgctct

SEQ ID NO: 807810 - DNA, 33 bp, Homo sapien
agcaccaactgtctcatctctgtactttgctct

SEQ ID NO: 807811 - DNA, 33 bp, Homo sapien
tccccttctatagaacaatggcattctgatgga

SEQ ID NO: 807812 - DNA, 33 bp, Homo sapien
tccccttctatagaacgatggcattctgatgga

SEQ ID NO: 807813 - DNA, 33 bp, Homo sapien
ttcctaataggtccaacgcatagtcactgtttt

SEQ ID NO: 807814 - DNA, 33 bp, Homo sapien
ttcctaataggtccaatgcatagtcactgtttt

SEQ ID NO: 807815 - DNA, 33 bp, Homo sapien
tctcagaatcaaaataagaaaaatgactgttga

SEQ ID NO: 807816 - DNA, 33 bp, Homo sapien
tctcagaatcaaaataggaaaaatgactgttga

SEQ ID NO: 807817 - DNA, 33 bp, Homo sapien
cactgggaaaaccacaaagtgattacccactct

SEQ ID NO: 807818 - DNA, 33 bp, Homo sapien
cactgggaaaaccacagagtgattacccactct

SEQ ID NO: 807819 - DNA, 33 bp, Homo sapien
actcaaaaaaggtagacgcattaaaaggagtgt

SEQ ID NO: 807820 - DNA, 33 bp, Homo sapien
actcaaaaaaggtagatgcattaaaaggagtgt

SEQ ID NO: 807821 - DNA, 33 bp, Homo sapien
aaactctacgcccatcaatcaataattccttct

SEQ ID NO: 807822 - DNA, 33 bp, Homo sapien
aaactctacgcccatctatcaataattccttct

SEQ ID NO: 807823 - DNA, 33 bp, Homo sapien
aaataaaatggtataacggagcatgacactcaa

SEQ ID NO: 807824 - DNA, 33 bp, Homo sapien
aaataaaatggtataatggagcatgacactcaa

SEQ ID NO: 807825 - DNA, 33 bp, Homo sapien
cacttatttgtgtatcaactctctttttacctg

SEQ ID NO: 807826 - DNA, 33 bp, Homo sapien
cacttatttgtgtatctactctctttttacctg

SEQ ID NO: 807827 - DNA, 33 bp, Homo sapien
cagagttataagagtacctagaaacaggatctt

SEQ ID NO: 807828 - DNA, 33 bp, Homo sapien
cagagttataagagtagctagaaacaggatctt

SEQ ID NO: 807829 - DNA, 33 bp, Homo sapien
attttggattaaaagaaattgtgtgagtatcct

SEQ ID NO: 807830 - DNA, 33 bp, Homo sapien
attttggattaaaagacattgtgtgagtatcct

SEQ ID NO: 807831 - DNA, 33 bp, Homo sapien
taaacccagcagaaaagtataagttcttttaag

SEQ ID NO: 807832 - DNA, 33 bp, Homo sapien
taaacccagcagaaaattataagttcttttaag

SEQ ID NO: 807833 - DNA, 33 bp, Homo sapien
ggtatacttgagttgggataagaattcaagact

SEQ ID NO: 807834 - DNA, 33 bp, Homo sapien
ggtatacttgagttggtataagaattcaagact

SEQ ID NO: 807835 - DNA, 33 bp, Homo sapien
ccgatacaattgttgactaatacactgataata

SEQ ID NO: 807836 - DNA, 33 bp, Homo sapien
ccgatacaattgttgagtaatacactgataata

SEQ ID NO: 807837 - DNA, 33 bp, Homo sapien
tggcatgctttaaaaacgactagagcattgttc

SEQ ID NO: 807838 - DNA, 33 bp, Homo sapien
tggcatgctttaaaaatgactagagcattgttc

SEQ ID NO: 807839 - DNA, 33 bp, Homo sapien
ttggtcgaaagcatgaagttaagtgagaggaga

SEQ ID NO: 807840 - DNA, 33 bp, Homo sapien
ttggtcgaaagcatgatgttaagtgagaggaga

SEQ ID NO: 807841 - DNA, 33 bp, Homo sapien
aggaagtttgtagcaacctcatcaaaattacta

SEQ ID NO: 807842 - DNA, 33 bp, Homo sapien
aggaagtttgtagcaatctcatcaaaattacta

SEQ ID NO: 807843 - DNA, 33 bp, Homo sapien
gggagaagtgagcaacacaatagtgatgataac

SEQ ID NO: 807844 - DNA, 33 bp, Homo sapien
gggagaagtgagcaacccaatagtgatgataac

SEQ ID NO: 807845 - DNA, 33 bp, Homo sapien
ttcacagtctcaacaaaaggaagacttaagatg

SEQ ID NO: 807846 - DNA, 33 bp, Homo sapien
ttcacagtctcaacaacaggaagacttaagatg

SEQ ID NO: 807847 - DNA, 33 bp, Homo sapien
agttgtttactattgcagaaaaacttaagagtc

SEQ ID NO: 807848 - DNA, 33 bp, Homo sapien
agttgtttactattgcggaaaaacttaagagtc

SEQ ID NO: 807849 - DNA, 33 bp, Homo sapien
atggcccttgtcataacgcggatctcatccttg

SEQ ID NO: 807850 - DNA, 33 bp, Homo sapien
atggcccttgtcataatgcggatctcatccttg

SEQ ID NO: 807851 - DNA, 33 bp, Homo sapien
gaaaataggacagatcactatccacagggtaga

SEQ ID NO: 807852 - DNA, 33 bp, Homo sapien
gaaaataggacagatctctatccacagggtaga

SEQ ID NO: 807853 - DNA, 33 bp, Homo sapien
cttgagttcccattccacaaagccttcctccta

SEQ ID NO: 807854 - DNA, 33 bp, Homo sapien
cttgagttcccattccgcaaagccttcctccta

SEQ ID NO: 807855 - DNA, 33 bp, Homo sapien
ttgagaagcagtgttcaacctcagaatagaaga

SEQ ID NO: 807856 - DNA, 33 bp, Homo sapien
ttgagaagcagtgttcgacctcagaatagaaga

SEQ ID NO: 807857 - DNA, 33 bp, Homo sapien
ttctcagtgaatcccaaaaagctgtttgcatca

SEQ ID NO: 807858 - DNA, 33 bp, Homo sapien
ttctcagtgaatcccagaaagctgtttgcatca

SEQ ID NO: 807859 - DNA, 33 bp, Homo sapien
aattcaagataaaacacagaagaaattcagagt

SEQ ID NO: 807860 - DNA, 33 bp, Homo sapien
aattcaagataaaacatagaagaaattcagagt

SEQ ID NO: 807861 - DNA, 33 bp, Homo sapien
cagcaactgttgcacaaccctccagtgttgcaa

SEQ ID NO: 807862 - DNA, 33 bp, Homo sapien
cagcaactgttgcacatccctccagtgttgcaa

SEQ ID NO: 807863 - DNA, 33 bp, Homo sapien
aagtgtctgaaacataccaagcactcaaataat

SEQ ID NO: 807864 - DNA, 33 bp, Homo sapien
aagtgtctgaaacatatcaagcactcaaataat

SEQ ID NO: 807865 - DNA, 33 bp, Homo sapien
atgctggcacatctaacgaaagaatgtgccatt

SEQ ID NO: 807866 - DNA, 33 bp, Homo sapien
atgctggcacatctaatgaaagaatgtgccatt

SEQ ID NO: 807867 - DNA, 33 bp, Homo sapien
aggatggggggagagaggtactcaatcataaaa

SEQ ID NO: 807868 - DNA, 33 bp, Homo sapien
aggatggggggagagatgtactcaatcataaaa

SEQ ID NO: 807869 - DNA, 33 bp, Homo sapien
atctctaaaatggacaagacaaaagtatctgcc

SEQ ID NO: 807870 - DNA, 33 bp, Homo sapien
atctctaaaatggacatgacaaaagtatctgcc

SEQ ID NO: 807871 - DNA, 33 bp, Homo sapien
aataagagaattttctcgggtgatagaaatgtt

SEQ ID NO: 807872 - DNA, 33 bp, Homo sapien
aataagagaattttcttgggtgatagaaatgtt

SEQ ID NO: 807873 - DNA, 33 bp, Homo sapien
attactcacaggctgaagcaaagacttaacttt

SEQ ID NO: 807874 - DNA, 33 bp, Homo sapien
attactcacaggctgaggcaaagacttaacttt

SEQ ID NO: 807875 - DNA, 33 bp, Homo sapien
ttgtggtgtaagaggaactcagttttaaatctc

SEQ ID NO: 807876 - DNA, 33 bp, Homo sapien
ttgtggtgtaagaggatctcagttttaaatctc

SEQ ID NO: 807877 - DNA, 33 bp, Homo sapien
tgtaggccttcatggaacatttcagttagccat

SEQ ID NO: 807878 - DNA, 33 bp, Homo sapien
tgtaggccttcatggagcatttcagttagccat

SEQ ID NO: 807879 - DNA, 33 bp, Homo sapien
gaggatgaactagttaaatgctaagcacagtag

SEQ ID NO: 807880 - DNA, 33 bp, Homo sapien
gaggatgaactagttacatgctaagcacagtag

SEQ ID NO: 807881 - DNA, 33 bp, Homo sapien
gatttgggaatcttcaacaagtgatagtctagt

SEQ ID NO: 807882 - DNA, 33 bp, Homo sapien
gatttgggaatcttcagcaagtgatagtctagt

SEQ ID NO: 807883 - DNA, 33 bp, Homo sapien
aaaatgtacaagcaaaagcaagaaagtgtgact

SEQ ID NO: 807884 - DNA, 33 bp, Homo sapien
aaaatgtacaagcaaaggcaagaaagtgtgact

SEQ ID NO: 807885 - DNA, 33 bp, Homo sapien
tcagagaaatgtttaagcaggagagcaagatat

SEQ ID NO: 807886 - DNA, 33 bp, Homo sapien
tcagagaaatgtttaatcaggagagcaagatat

SEQ ID NO: 807887 - DNA, 33 bp, Homo sapien
gctacacgaagaataaagaaactggatccttgt

SEQ ID NO: 807888 - DNA, 33 bp, Homo sapien
gctacacgaagaataatgaaactggatccttgt

SEQ ID NO: 807889 - DNA, 33 bp, Homo sapien
gtataactaatgccaacaatatcactttcaccc

SEQ ID NO: 807890 - DNA, 33 bp, Homo sapien
gtataactaatgccaataatatcactttcaccc

SEQ ID NO: 807891 - DNA, 33 bp, Homo sapien
aaggtataaaacacagaaagtttcaaaccaaat

SEQ ID NO: 807892 - DNA, 33 bp, Homo sapien
aaggtataaaacacaggaagtttcaaaccaaat

SEQ ID NO: 807893 - DNA, 33 bp, Homo sapien
acacattcattctgtcccatttcttcctttcaa

SEQ ID NO: 807894 - DNA, 33 bp, Homo sapien
acacattcattctgtctcatttcttcctttcaa

SEQ ID NO: 807895 - DNA, 33 bp, Homo sapien
actgagccagtattcacgaggtaaagggttaaa

SEQ ID NO: 807896 - DNA, 33 bp, Homo sapien
actgagccagtattcatgaggtaaagggttaaa

SEQ ID NO: 807897 - DNA, 33 bp, Homo sapien
gaaaccattcacttaactgagactaggaaataa

SEQ ID NO: 807898 - DNA, 33 bp, Homo sapien
gaaaccattcacttaattgagactaggaaataa

SEQ ID NO: 807899 - DNA, 33 bp, Homo sapien
tgctgaaaatcatcatcactgtaagaaatacgg

SEQ ID NO: 807900 - DNA, 33 bp, Homo sapien
tgctgaaaatcatcattactgtaagaaatacgg

SEQ ID NO: 807901 - DNA, 33 bp, Homo sapien
tgagaccaccaagccaatgatcataatcacatt

SEQ ID NO: 807902 - DNA, 33 bp, Homo sapien
tgagaccaccaagccagtgatcataatcacatt

SEQ ID NO: 807903 - DNA, 33 bp, Homo sapien
taatgactatgatttccagcatctttgtatgtg

SEQ ID NO: 807904 - DNA, 33 bp, Homo sapien
taatgactatgatttctagcatctttgtatgtg

SEQ ID NO: 807905 - DNA, 33 bp, Homo sapien
aagatagtatatgatacgctttcagaaacaggt

SEQ ID NO: 807906 - DNA, 33 bp, Homo sapien
aagatagtatatgatatgctttcagaaacaggt

SEQ ID NO: 807907 - DNA, 33 bp, Homo sapien
agaaaactgtagtgcaaatgaactcaaaaacaa

SEQ ID NO: 807908 - DNA, 33 bp, Homo sapien
agaaaactgtagtgcagatgaactcaaaaacaa

SEQ ID NO: 807909 - DNA, 33 bp, Homo sapien
aaagcaaagaggctgacgaaaaaacagagtgcc

SEQ ID NO: 807910 - DNA, 33 bp, Homo sapien
aaagcaaagaggctgatgaaaaaacagagtgcc

SEQ ID NO: 807911 - DNA, 33 bp, Homo sapien
gacatggaatatcggtcaatgtacaatagctct

SEQ ID NO: 807912 - DNA, 33 bp, Homo sapien
gacatggaatatcggttaatgtacaatagctct

SEQ ID NO: 807913 - DNA, 33 bp, Homo sapien
gggtgaggggactggacagttattgcttaatga

SEQ ID NO: 807914 - DNA, 33 bp, Homo sapien
gggtgaggggactggagagttattgcttaatga

SEQ ID NO: 807915 - DNA, 33 bp, Homo sapien
agctgatgtcatgggaaaggaatgagagagact

SEQ ID NO: 807916 - DNA, 33 bp, Homo sapien
agctgatgtcatgggagaggaatgagagagact

SEQ ID NO: 807917 - DNA, 33 bp, Homo sapien
cccacaagttgttgaaatatgtatggttttatc

SEQ ID NO: 807918 - DNA, 33 bp, Homo sapien
cccacaagttgttgaagtatgtatggttttatc

SEQ ID NO: 807919 - DNA, 33 bp, Homo sapien
gtaccttagttttagtcaccagaatgcccttat

SEQ ID NO: 807920 - DNA, 33 bp, Homo sapien
gtaccttagttttagttaccagaatgcccttat

SEQ ID NO: 807921 - DNA, 33 bp, Homo sapien
ctctgtgataaagatacgggggactgagcttga

SEQ ID NO: 807922 - DNA, 33 bp, Homo sapien
ctctgtgataaagatatgggggactgagcttga

SEQ ID NO: 807923 - DNA, 33 bp, Homo sapien
taaacatgtacacacccaaatacatataaatat

SEQ ID NO: 807924 - DNA, 33 bp, Homo sapien
taaacatgtacacaccgaaatacatataaatat

SEQ ID NO: 807925 - DNA, 33 bp, Homo sapien
attgttaaatattaccaacattcccattttttg

SEQ ID NO: 807926 - DNA, 33 bp, Homo sapien
attgttaaatattaccgacattcccattttttg

SEQ ID NO: 807927 - DNA, 33 bp, Homo sapien
catcattacctgatagaagatctggatttgagg

SEQ ID NO: 807928 - DNA, 33 bp, Homo sapien
catcattacctgataggagatctggatttgagg

SEQ ID NO: 807929 - DNA, 33 bp, Homo sapien
ataatactatttatgaacagtcaggaatgaaca

SEQ ID NO: 807930 - DNA, 33 bp, Homo sapien
ataatactatttatgagcagtcaggaatgaaca

SEQ ID NO: 807931 - DNA, 33 bp, Homo sapien
ctcagtataacagtgaaagatagcaacaagaca

SEQ ID NO: 807932 - DNA, 33 bp, Homo sapien
ctcagtataacagtgatagatagcaacaagaca

SEQ ID NO: 807933 - DNA, 33 bp, Homo sapien
ccttctggctaccctacctgctgagagctactc

SEQ ID NO: 807934 - DNA, 33 bp, Homo sapien
ccttctggctaccctatctgctgagagctactc

SEQ ID NO: 807935 - DNA, 33 bp, Homo sapien
cccatgtgctcctcccaacatccagccacctgt

SEQ ID NO: 807936 - DNA, 33 bp, Homo sapien
cccatgtgctcctcccgacatccagccacctgt

SEQ ID NO: 807937 - DNA, 33 bp, Homo sapien
agttctgttttatatacggtctggccatcatcc

SEQ ID NO: 807938 - DNA, 33 bp, Homo sapien
agttctgttttatatatggtctggccatcatcc

SEQ ID NO: 807939 - DNA, 33 bp, Homo sapien
aaatagaccttaaaagcctcagaccaaaatatc

SEQ ID NO: 807940 - DNA, 33 bp, Homo sapien
aaatagaccttaaaagtctcagaccaaaatatc

SEQ ID NO: 807941 - DNA, 33 bp, Homo sapien
gtacataagtcattgccaaacaagtgactgaaa

SEQ ID NO: 807942 - DNA, 33 bp, Homo sapien
gtacataagtcattgctaaacaagtgactgaaa

SEQ ID NO: 807943 - DNA, 33 bp, Homo sapien
ttttgtatattatctgaagtgtctaggaggtta

SEQ ID NO: 807944 - DNA, 33 bp, Homo sapien
ttttgtatattatctgcagtgtctaggaggtta

SEQ ID NO: 807945 - DNA, 33 bp, Homo sapien
ggcatcaggcaactacaaaggagtatacgagca

SEQ ID NO: 807946 - DNA, 33 bp, Homo sapien
ggcatcaggcaactaccaaggagtatacgagca

SEQ ID NO: 807947 - DNA, 33 bp, Homo sapien
tacagcaacccatgacaaagaaatactgctcgc

SEQ ID NO: 807948 - DNA, 33 bp, Homo sapien
tacagcaacccatgacgaagaaatactgctcgc

SEQ ID NO: 807949 - DNA, 33 bp, Homo sapien
tcttattttgaaatcacgccctgagctatttgg

SEQ ID NO: 807950 - DNA, 33 bp, Homo sapien
tcttattttgaaatcatgccctgagctatttgg

SEQ ID NO: 807951 - DNA, 33 bp, Homo sapien
agcaactaataatctccctgaaactcagtttcc

SEQ ID NO: 807952 - DNA, 33 bp, Homo sapien
agcaactaataatctctctgaaactcagtttcc

SEQ ID NO: 807953 - DNA, 33 bp, Homo sapien
tccaggtaaattcaaggacgtcctgaagcacaa

SEQ ID NO: 807954 - DNA, 33 bp, Homo sapien
tccaggtaaattcaagtacgtcctgaagcacaa

SEQ ID NO: 807955 - DNA, 33 bp, Homo sapien
tgccaacatgaatagcaacagcatcatgtgatt

SEQ ID NO: 807956 - DNA, 33 bp, Homo sapien
tgccaacatgaatagcgacagcatcatgtgatt

SEQ ID NO: 807957 - DNA, 33 bp, Homo sapien
tgggataacacaggtcattaaaggtctgcaggg

SEQ ID NO: 807958 - DNA, 33 bp, Homo sapien
tgggataacacaggtcgttaaaggtctgcaggg

SEQ ID NO: 807959 - DNA, 33 bp, Homo sapien
aatggaagtttctgtaacattcaatctaataca

SEQ ID NO: 807960 - DNA, 33 bp, Homo sapien
aatggaagtttctgtagcattcaatctaataca

SEQ ID NO: 807961 - DNA, 33 bp, Homo sapien
aaaacctgctcaatcgcatagaactgatctctt

SEQ ID NO: 807962 - DNA, 33 bp, Homo sapien
aaaacctgctcaatcgtatagaactgatctctt

SEQ ID NO: 807963 - DNA, 33 bp, Homo sapien
gagaaattctgaagtcaaaaaagtttctttttt

SEQ ID NO: 807964 - DNA, 33 bp, Homo sapien
gagaaattctgaagtcgaaaaagtttctttttt

SEQ ID NO: 807965 - DNA, 33 bp, Homo sapien
gcttttcagatcccaaagtttttgcaaagaaga

SEQ ID NO: 807966 - DNA, 33 bp, Homo sapien
gcttttcagatcccaacgtttttgcaaagaaga

SEQ ID NO: 807967 - DNA, 33 bp, Homo sapien
tgggagtatacaaaagcaagagttcatggggtg

SEQ ID NO: 807968 - DNA, 33 bp, Homo sapien
tgggagtatacaaaaggaagagttcatggggtg

SEQ ID NO: 807969 - DNA, 33 bp, Homo sapien
tttataaagccagagaagacagtgttgctgctt

SEQ ID NO: 807970 - DNA, 33 bp, Homo sapien
tttataaagccagagaggacagtgttgctgctt

SEQ ID NO: 807971 - DNA, 33 bp, Homo sapien
aagtattcattaccaacagcagagaacaatagt

SEQ ID NO: 807972 - DNA, 33 bp, Homo sapien
aagtattcattaccaatagcagagaacaatagt

SEQ ID NO: 807973 - DNA, 33 bp, Homo sapien
ctttgtcagtgtatccacaggcaatgctgtttg

SEQ ID NO: 807974 - DNA, 33 bp, Homo sapien
ctttgtcagtgtatccgcaggcaatgctgtttg

SEQ ID NO: 807975 - DNA, 33 bp, Homo sapien
aggtggtgtctgatcaatcaggattaatgatgc

SEQ ID NO: 807976 - DNA, 33 bp, Homo sapien
aggtggtgtctgatcagtcaggattaatgatgc

SEQ ID NO: 807977 - DNA, 33 bp, Homo sapien
ctgggtgtcacagtccgaatgtcaggtatttaa

SEQ ID NO: 807978 - DNA, 33 bp, Homo sapien
ctgggtgtcacagtcctaatgtcaggtatttaa

SEQ ID NO: 807979 - DNA, 33 bp, Homo sapien
ccgtgagaggcaggtacaaagatgtgaaaggga

SEQ ID NO: 807980 - DNA, 33 bp, Homo sapien
ccgtgagaggcaggtataaagatgtgaaaggga

SEQ ID NO: 807981 - DNA, 33 bp, Homo sapien
tgaagataaagcaagaagggaataaatgtggga

SEQ ID NO: 807982 - DNA, 33 bp, Homo sapien
tgaagataaagcaagatgggaataaatgtggga

SEQ ID NO: 807983 - DNA, 33 bp, Homo sapien
gttttttgagtccaggacccatcacttactagt

SEQ ID NO: 807984 - DNA, 33 bp, Homo sapien
gttttttgagtccaggtcccatcacttactagt

SEQ ID NO: 807985 - DNA, 33 bp, Homo sapien
tgctttgtcatctgtacccctgagtgactaccc

SEQ ID NO: 807986 - DNA, 33 bp, Homo sapien
tgctttgtcatctgtatccctgagtgactaccc

SEQ ID NO: 807987 - DNA, 33 bp, Homo sapien
aactaagaatgctattcaagttttgagagctgt

SEQ ID NO: 807988 - DNA, 33 bp, Homo sapien
aactaagaatgctatttaagttttgagagctgt

SEQ ID NO: 807989 - DNA, 33 bp, Homo sapien
gatatgtccacaaaaactgaaatcaagtatatt

SEQ ID NO: 807990 - DNA, 33 bp, Homo sapien
gatatgtccacaaaaattgaaatcaagtatatt

SEQ ID NO: 807991 - DNA, 33 bp, Homo sapien
tagcatttattaagcaactattattgttccaca

SEQ ID NO: 807992 - DNA, 33 bp, Homo sapien
tagcatttattaagcacctattattgttccaca

SEQ ID NO: 807993 - DNA, 33 bp, Homo sapien
tgctgctgctggccacaactcgagcagctgctg

SEQ ID NO: 807994 - DNA, 33 bp, Homo sapien
tgctgctgctggccacgactcgagcagctgctg

SEQ ID NO: 807995 - DNA, 33 bp, Homo sapien
gtgtaagaatatcgaaacactctaccatatttt

SEQ ID NO: 807996 - DNA, 33 bp, Homo sapien
gtgtaagaatatcgaaccactctaccatatttt

SEQ ID NO: 807997 - DNA, 33 bp, Homo sapien
gaagaaagccctgagaaaagtatcaatggattg

SEQ ID NO: 807998 - DNA, 33 bp, Homo sapien
gaagaaagccctgagataagtatcaatggattg

SEQ ID NO: 807999 - DNA, 33 bp, Homo sapien
tgtgatattctgaaaaaaaatctctgacaaaac

SEQ ID NO: 808000 - DNA, 33 bp, Homo sapien
tgtgatattctgaaaacaaatctctgacaaaac

SEQ ID NO: 808001 - DNA, 33 bp, Homo sapien
caaagagtaggaaaaaaagctgatgctattaga

SEQ ID NO: 808002 - DNA, 33 bp, Homo sapien
caaagagtaggaaaaagagctgatgctattaga

SEQ ID NO: 808003 - DNA, 33 bp, Homo sapien
tggggttttgccctaaatcagctaaaaagtctg

SEQ ID NO: 808004 - DNA, 33 bp, Homo sapien
tggggttttgccctaagtcagctaaaaagtctg

SEQ ID NO: 808005 - DNA, 33 bp, Homo sapien
atggttagacagccataaagtagaatttcagtt

SEQ ID NO: 808006 - DNA, 33 bp, Homo sapien
atggttagacagccatgaagtagaatttcagtt

SEQ ID NO: 808007 - DNA, 33 bp, Homo sapien
gaaaattcgacagtcactgaatgaaagaacaaa

SEQ ID NO: 808008 - DNA, 33 bp, Homo sapien
gaaaattcgacagtcattgaatgaaagaacaaa

SEQ ID NO: 808009 - DNA, 33 bp, Homo sapien
attgtggatctttgaacgtattccctgaagata

SEQ ID NO: 808010 - DNA, 33 bp, Homo sapien
attgtggatctttgaatgtattccctgaagata

SEQ ID NO: 808011 - DNA, 33 bp, Homo sapien
ttcattgccacataaacatagcctacaggtgca

SEQ ID NO: 808012 - DNA, 33 bp, Homo sapien
ttcattgccacataaatatagcctacaggtgca

SEQ ID NO: 808013 - DNA, 33 bp, Homo sapien
tcttaatcactacatagaaagcagaaactgacc

SEQ ID NO: 808014 - DNA, 33 bp, Homo sapien
tcttaatcactacatataaagcagaaactgacc

SEQ ID NO: 808015 - DNA, 33 bp, Homo sapien
acacaaaggtacacaaattatgttgacatagga

SEQ ID NO: 808016 - DNA, 33 bp, Homo sapien
acacaaaggtacacaagttatgttgacatagga

SEQ ID NO: 808017 - DNA, 33 bp, Homo sapien
gataaggaaatcagaaggagacataaaattaag

SEQ ID NO: 808018 - DNA, 33 bp, Homo sapien
gataaggaaatcagaatgagacataaaattaag

SEQ ID NO: 808019 - DNA, 33 bp, Homo sapien
taactatcatgtgaagcattgtttcctgtgaaa

SEQ ID NO: 808020 - DNA, 33 bp, Homo sapien
taactatcatgtgaagtattgtttcctgtgaaa

SEQ ID NO: 808021 - DNA, 33 bp, Homo sapien
gacattggagtcttagaatagtttgattctttt

SEQ ID NO: 808022 - DNA, 33 bp, Homo sapien
gacattggagtcttagtatagtttgattctttt

SEQ ID NO: 808023 - DNA, 33 bp, Homo sapien
atgaataaagatagccaacaagatttatgagac

SEQ ID NO: 808024 - DNA, 33 bp, Homo sapien
atgaataaagatagcctacaagatttatgagac

SEQ ID NO: 808025 - DNA, 33 bp, Homo sapien
gaaagtaagctggatacccccagtagtccttat

SEQ ID NO: 808026 - DNA, 33 bp, Homo sapien
gaaagtaagctggatatccccagtagtccttat

SEQ ID NO: 808027 - DNA, 33 bp, Homo sapien
tatcactgcttggtaaggtttataatcaaaatt

SEQ ID NO: 808028 - DNA, 33 bp, Homo sapien
tatcactgcttggtaatgtttataatcaaaatt

SEQ ID NO: 808029 - DNA, 33 bp, Homo sapien
aaaggtgttcttctaacgtgaattggtataaga

SEQ ID NO: 808030 - DNA, 33 bp, Homo sapien
aaaggtgttcttctaatgtgaattggtataaga

SEQ ID NO: 808031 - DNA, 33 bp, Homo sapien
agagaaaaaagaagtcacatggcccctgagagg

SEQ ID NO: 808032 - DNA, 33 bp, Homo sapien
agagaaaaaagaagtcccatggcccctgagagg

SEQ ID NO: 808033 - DNA, 33 bp, Homo sapien
atgatttgatagaaaacacaaaaccataggaga

SEQ ID NO: 808034 - DNA, 33 bp, Homo sapien
atgatttgatagaaaagacaaaaccataggaga

SEQ ID NO: 808035 - DNA, 33 bp, Homo sapien
gtacttctctcataaacctattgtgaggattag

SEQ ID NO: 808036 - DNA, 33 bp, Homo sapien
gtacttctctcataaagctattgtgaggattag

SEQ ID NO: 808037 - DNA, 33 bp, Homo sapien
aggccattcttagcaaaagatgaatatcatgtg

SEQ ID NO: 808038 - DNA, 33 bp, Homo sapien
aggccattcttagcaagagatgaatatcatgtg

SEQ ID NO: 808039 - DNA, 33 bp, Homo sapien
cttccatcacagacacaaaggttcactgcactc

SEQ ID NO: 808040 - DNA, 33 bp, Homo sapien
cttccatcacagacacgaaggttcactgcactc

SEQ ID NO: 808041 - DNA, 33 bp, Homo sapien
tagagatgcatagcctaaagaacatggagcaga

SEQ ID NO: 808042 - DNA, 33 bp, Homo sapien
tagagatgcatagcctgaagaacatggagcaga

SEQ ID NO: 808043 - DNA, 33 bp, Homo sapien
gaatcctacaaggaaactttacagttgaaagga

SEQ ID NO: 808044 - DNA, 33 bp, Homo sapien
gaatcctacaaggaaattttacagttgaaagga

SEQ ID NO: 808045 - DNA, 33 bp, Homo sapien
cttaaaaagagagaaaagataacgtagaatgtc

SEQ ID NO: 808046 - DNA, 33 bp, Homo sapien
cttaaaaagagagaaaggataacgtagaatgtc

SEQ ID NO: 808047 - DNA, 33 bp, Homo sapien
taactgtgaagagagacggaggatatcatttga

SEQ ID NO: 808048 - DNA, 33 bp, Homo sapien
taactgtgaagagagatggaggatatcatttga

SEQ ID NO: 808049 - DNA, 33 bp, Homo sapien
taaatgacaatatccccattatctccccaactg

SEQ ID NO: 808050 - DNA, 33 bp, Homo sapien
taaatgacaatatcccgattatctccccaactg

SEQ ID NO: 808051 - DNA, 33 bp, Homo sapien
gtacctacttaacaaaagtttagtgaagtgaag

SEQ ID NO: 808052 - DNA, 33 bp, Homo sapien
gtacctacttaacaaatgtttagtgaagtgaag

SEQ ID NO: 808053 - DNA, 33 bp, Homo sapien
tacaaacctgtcagcaactgagtaagctttgta

SEQ ID NO: 808054 - DNA, 33 bp, Homo sapien
tacaaacctgtcagcatctgagtaagctttgta

SEQ ID NO: 808055 - DNA, 33 bp, Homo sapien
ccagatatgctcatgccgcaccagacaatgcta

SEQ ID NO: 808056 - DNA, 33 bp, Homo sapien
ccagatatgctcatgctgcaccagacaatgcta

SEQ ID NO: 808057 - DNA, 33 bp, Homo sapien
atgccagttcccaggacattgtagcattgtctg

SEQ ID NO: 808058 - DNA, 33 bp, Homo sapien
atgccagttcccaggagattgtagcattgtctg

SEQ ID NO: 808059 - DNA, 33 bp, Homo sapien
tccccaacagatgtacacacaccactatctcac

SEQ ID NO: 808060 - DNA, 33 bp, Homo sapien
tccccaacagatgtactcacaccactatctcac

SEQ ID NO: 808061 - DNA, 33 bp, Homo sapien
agccaggtgtactacaaaacacttcagctttga

SEQ ID NO: 808062 - DNA, 33 bp, Homo sapien
agccaggtgtactacagaacacttcagctttga

SEQ ID NO: 808063 - DNA, 33 bp, Homo sapien
aaactgtatggtccaccgaacctaaaatattac

SEQ ID NO: 808064 - DNA, 33 bp, Homo sapien
aaactgtatggtccactgaacctaaaatattac

SEQ ID NO: 808065 - DNA, 33 bp, Homo sapien
ctgcttttgaactacaatggcagggttgagtaa

SEQ ID NO: 808066 - DNA, 33 bp, Homo sapien
ctgcttttgaactacagtggcagggttgagtaa

SEQ ID NO: 808067 - DNA, 33 bp, Homo sapien
caagcgtctggaaaccaggatgtctttctatgg

SEQ ID NO: 808068 - DNA, 33 bp, Homo sapien
caagcgtctggaaaccgggatgtctttctatgg

SEQ ID NO: 808069 - DNA, 33 bp, Homo sapien
tataaattggagaacaactttcaacttggtggg

SEQ ID NO: 808070 - DNA, 33 bp, Homo sapien
tataaattggagaacatctttcaacttggtggg

SEQ ID NO: 808071 - DNA, 33 bp, Homo sapien
aaagtggcatttaagagaagtagtagctaagtg

SEQ ID NO: 808072 - DNA, 33 bp, Homo sapien
aaagtggcatttaagataagtagtagctaagtg

SEQ ID NO: 808073 - DNA, 33 bp, Homo sapien
taagtgaacagtggggcaaagtgtttagtggga

SEQ ID NO: 808074 - DNA, 33 bp, Homo sapien
taagtgaacagtgggggaaagtgtttagtggga

SEQ ID NO: 808075 - DNA, 33 bp, Homo sapien
atagaagcctggcggacatctggacagaactat

SEQ ID NO: 808076 - DNA, 33 bp, Homo sapien
atagaagcctggcggatatctggacagaactat

SEQ ID NO: 808077 - DNA, 33 bp, Homo sapien
gactatgacccataacacagccccaggcggtcc

SEQ ID NO: 808078 - DNA, 33 bp, Homo sapien
gactatgacccataacgcagccccaggcggtcc

SEQ ID NO: 808079 - DNA, 33 bp, Homo sapien
tcacgtatgctggagtaaataggaaactagagc

SEQ ID NO: 808080 - DNA, 33 bp, Homo sapien
tcacgtatgctggagtgaataggaaactagagc

SEQ ID NO: 808081 - DNA, 33 bp, Homo sapien
atgggctagtttgaggaatttttcagtggtgtt

SEQ ID NO: 808082 - DNA, 33 bp, Homo sapien
atgggctagtttgagggatttttcagtggtgtt

SEQ ID NO: 808083 - DNA, 33 bp, Homo sapien
gaaaggaaggcatgatcaaggttagagatcaga

SEQ ID NO: 808084 - DNA, 33 bp, Homo sapien
gaaaggaaggcatgattaaggttagagatcaga

SEQ ID NO: 808085 - DNA, 33 bp, Homo sapien
aatgccaatattacataagtcatgaactaaata

SEQ ID NO: 808086 - DNA, 33 bp, Homo sapien
aatgccaatattacatgagtcatgaactaaata

SEQ ID NO: 808087 - DNA, 33 bp, Homo sapien
ctctgagatttgtcacaaagttattcttctctg

SEQ ID NO: 808088 - DNA, 33 bp, Homo sapien
ctctgagatttgtcacgaagttattcttctctg

SEQ ID NO: 808089 - DNA, 33 bp, Homo sapien
tcatattccctgggccaaaaactacacatcttc

SEQ ID NO: 808090 - DNA, 33 bp, Homo sapien
tcatattccctgggccgaaaactacacatcttc

SEQ ID NO: 808091 - DNA, 33 bp, Homo sapien
cagaatagtttggtgaaaaagaaagcttgaaat

SEQ ID NO: 808092 - DNA, 33 bp, Homo sapien
cagaatagtttggtgacaaagaaagcttgaaat

SEQ ID NO: 808093 - DNA, 33 bp, Homo sapien
agggttgcctgtaacccggactattgtaactgt

SEQ ID NO: 808094 - DNA, 33 bp, Homo sapien
agggttgcctgtaacctggactattgtaactgt

SEQ ID NO: 808095 - DNA, 33 bp, Homo sapien
tgcctcttcaagcagccacaaactgcaaaccac

SEQ ID NO: 808096 - DNA, 33 bp, Homo sapien
tgcctcttcaagcagctacaaactgcaaaccac

SEQ ID NO: 808097 - DNA, 33 bp, Homo sapien
ccacacacacagataactgagtattacaatttt

SEQ ID NO: 808098 - DNA, 33 bp, Homo sapien
ccacacacacagataattgagtattacaatttt

SEQ ID NO: 808099 - DNA, 33 bp, Homo sapien
cattacttagaaagaccgtacattcaaatgctt

SEQ ID NO: 808100 - DNA, 33 bp, Homo sapien
cattacttagaaagactgtacattcaaatgctt

SEQ ID NO: 808101 - DNA, 33 bp, Homo sapien
accatcaaggacaataataaaagaatcaaaaca

SEQ ID NO: 808102 - DNA, 33 bp, Homo sapien
accatcaaggacaatagtaaaagaatcaaaaca

SEQ ID NO: 808103 - DNA, 33 bp, Homo sapien
ttcagagattcttacaatcatgtagcattcttt

SEQ ID NO: 808104 - DNA, 33 bp, Homo sapien
ttcagagattcttacagtcatgtagcattcttt

SEQ ID NO: 808105 - DNA, 33 bp, Homo sapien
agtcatatgaaggaagaagttgactctgggaga

SEQ ID NO: 808106 - DNA, 33 bp, Homo sapien
agtcatatgaaggaaggagttgactctgggaga

SEQ ID NO: 808107 - DNA, 33 bp, Homo sapien
aaataaaaaatcaatacgaatacacgcattatt

SEQ ID NO: 808108 - DNA, 33 bp, Homo sapien
aaataaaaaatcaatatgaatacacgcattatt

SEQ ID NO: 808109 - DNA, 33 bp, Homo sapien
ctctagatggttcttacgtgatttgggcatgat

SEQ ID NO: 808110 - DNA, 33 bp, Homo sapien
ctctagatggttcttatgtgatttgggcatgat

SEQ ID NO: 808111 - DNA, 33 bp, Homo sapien
aagaaaggccattgaaacttaaactatattaag

SEQ ID NO: 808112 - DNA, 33 bp, Homo sapien
aagaaaggccattgaaccttaaactatattaag

SEQ ID NO: 808113 - DNA, 33 bp, Homo sapien
tagctattcagcagcaatacattgtaggaggaa

SEQ ID NO: 808114 - DNA, 33 bp, Homo sapien
tagctattcagcagcagtacattgtaggaggaa

SEQ ID NO: 808115 - DNA, 33 bp, Homo sapien
ctttaatttgttctaaagcaccagcagtttatt

SEQ ID NO: 808116 - DNA, 33 bp, Homo sapien
ctttaatttgttctaaggcaccagcagtttatt

SEQ ID NO: 808117 - DNA, 33 bp, Homo sapien
ataatatgagctatacaagaccaaacatatcag

SEQ ID NO: 808118 - DNA, 33 bp, Homo sapien
ataatatgagctatacgagaccaaacatatcag

SEQ ID NO: 808119 - DNA, 33 bp, Homo sapien
ggtagaatgggaacaaagaacattttacttcca

SEQ ID NO: 808120 - DNA, 33 bp, Homo sapien
ggtagaatgggaacaacgaacattttacttcca

SEQ ID NO: 808121 - DNA, 33 bp, Homo sapien
atattgccaatgagtaacaaagtgagcactcaa

SEQ ID NO: 808122 - DNA, 33 bp, Homo sapien
atattgccaatgagtagcaaagtgagcactcaa

SEQ ID NO: 808123 - DNA, 33 bp, Homo sapien
ccagcagcattattgacaaattctgaaagaccc

SEQ ID NO: 808124 - DNA, 33 bp, Homo sapien
ccagcagcattattgataaattctgaaagaccc

SEQ ID NO: 808125 - DNA, 33 bp, Homo sapien
ctgtgaaagacagcaacgttttttctaccttgc

SEQ ID NO: 808126 - DNA, 33 bp, Homo sapien
ctgtgaaagacagcaatgttttttctaccttgc

SEQ ID NO: 808127 - DNA, 33 bp, Homo sapien
ctaagctaaggaaataaactgaaatcaaacata

SEQ ID NO: 808128 - DNA, 33 bp, Homo sapien
ctaagctaaggaaatacactgaaatcaaacata

SEQ ID NO: 808129 - DNA, 33 bp, Homo sapien
ttattgtaagggacaggctagttgctaaaaacc

SEQ ID NO: 808130 - DNA, 33 bp, Homo sapien
ttattgtaagggacagtctagttgctaaaaacc

SEQ ID NO: 808131 - DNA, 33 bp, Homo sapien
gaaaataacactttccaccagctttggaattcc

SEQ ID NO: 808132 - DNA, 33 bp, Homo sapien
gaaaataacactttccgccagctttggaattcc

SEQ ID NO: 808133 - DNA, 33 bp, Homo sapien
atttattatagccataagactcacccaaacctc

SEQ ID NO: 808134 - DNA, 33 bp, Homo sapien
atttattatagccataggactcacccaaacctc

SEQ ID NO: 808135 - DNA, 33 bp, Homo sapien
gtttgcttgtgcatatgaatttgctctgtttcc

SEQ ID NO: 808136 - DNA, 33 bp, Homo sapien
gtttgcttgtgcatattaatttgctctgtttcc

SEQ ID NO: 808137 - DNA, 33 bp, Homo sapien
gtgccactcaacattaaggctactcaaatttat

SEQ ID NO: 808138 - DNA, 33 bp, Homo sapien
gtgccactcaacattagggctactcaaatttat

SEQ ID NO: 808139 - DNA, 33 bp, Homo sapien
gtgaacactgcattcacagtagtttccacacag

SEQ ID NO: 808140 - DNA, 33 bp, Homo sapien
gtgaacactgcattcatagtagtttccacacag

SEQ ID NO: 808141 - DNA, 33 bp, Homo sapien
ctctccttttatgcccagctttcagagttcatt

SEQ ID NO: 808142 - DNA, 33 bp, Homo sapien
ctctccttttatgcccggctttcagagttcatt

SEQ ID NO: 808143 - DNA, 33 bp, Homo sapien
acattatcaagagctacataaaagttggtgtca

SEQ ID NO: 808144 - DNA, 33 bp, Homo sapien
acattatcaagagctatataaaagttggtgtca

SEQ ID NO: 808145 - DNA, 33 bp, Homo sapien
gaacctctagccaaaacaagtccaacaaggcca

SEQ ID NO: 808146 - DNA, 33 bp, Homo sapien
gaacctctagccaaaagaagtccaacaaggcca

SEQ ID NO: 808147 - DNA, 33 bp, Homo sapien
tactgtttaatgctgacgttttccaggatccct

SEQ ID NO: 808148 - DNA, 33 bp, Homo sapien
tactgtttaatgctgatgttttccaggatccct

SEQ ID NO: 808149 - DNA, 33 bp, Homo sapien
ctgacataaatacctacactgttaacaacctca

SEQ ID NO: 808150 - DNA, 33 bp, Homo sapien
ctgacataaatacctatactgttaacaacctca

SEQ ID NO: 808151 - DNA, 33 bp, Homo sapien
acaataaagtgtgtaaaagctcaggttcaagca

SEQ ID NO: 808152 - DNA, 33 bp, Homo sapien
acaataaagtgtgtaagagctcaggttcaagca

SEQ ID NO: 808153 - DNA, 33 bp, Homo sapien
tgtagcacaaattcaaattgaatgcactgaaaa

SEQ ID NO: 808154 - DNA, 33 bp, Homo sapien
tgtagcacaaattcaagttgaatgcactgaaaa

SEQ ID NO: 808155 - DNA, 33 bp, Homo sapien
ttcagtggttaatggacaatgggatcagtggat

SEQ ID NO: 808156 - DNA, 33 bp, Homo sapien
ttcagtggttaatggataatgggatcagtggat

SEQ ID NO: 808157 - DNA, 33 bp, Homo sapien
ggatacattacccaaacggtcacaggtcaaagg

SEQ ID NO: 808158 - DNA, 33 bp, Homo sapien
ggatacattacccaaatggtcacaggtcaaagg

SEQ ID NO: 808159 - DNA, 33 bp, Homo sapien
ccattttacaataaagccatgacgccagagaag

SEQ ID NO: 808160 - DNA, 33 bp, Homo sapien
ccattttacaataaaggcatgacgccagagaag

SEQ ID NO: 808161 - DNA, 33 bp, Homo sapien
taaagagtcctttataataccaatactttcttt

SEQ ID NO: 808162 - DNA, 33 bp, Homo sapien
taaagagtcctttatagtaccaatactttcttt

SEQ ID NO: 808163 - DNA, 33 bp, Homo sapien
gagaattctgttaacccgggtactggctagcac

SEQ ID NO: 808164 - DNA, 33 bp, Homo sapien
gagaattctgttaacctgggtactggctagcac

SEQ ID NO: 808165 - DNA, 33 bp, Homo sapien
ggtagctatgaaggagaaggaagtcctttggaa

SEQ ID NO: 808166 - DNA, 33 bp, Homo sapien
ggtagctatgaaggaggaggaagtcctttggaa

SEQ ID NO: 808167 - DNA, 33 bp, Homo sapien
tcaagttggagctagacggtttattagattcag

SEQ ID NO: 808168 - DNA, 33 bp, Homo sapien
tcaagttggagctagatggtttattagattcag

SEQ ID NO: 808169 - DNA, 33 bp, Homo sapien
ctagacaccaaaagcaagatctgtaaaaggaaa

SEQ ID NO: 808170 - DNA, 33 bp, Homo sapien
ctagacaccaaaagcatgatctgtaaaaggaaa

SEQ ID NO: 808171 - DNA, 33 bp, Homo sapien
taagtatctttccacactctcatttgccacctg

SEQ ID NO: 808172 - DNA, 33 bp, Homo sapien
taagtatctttccacattctcatttgccacctg

SEQ ID NO: 808173 - DNA, 33 bp, Homo sapien
aaagccatatgacacaagccaaaggaagaactg

SEQ ID NO: 808174 - DNA, 33 bp, Homo sapien
aaagccatatgacacaggccaaaggaagaactg

SEQ ID NO: 808175 - DNA, 33 bp, Homo sapien
catttggggtcacttaagcagttgctatcagat

SEQ ID NO: 808176 - DNA, 33 bp, Homo sapien
catttggggtcacttatgcagttgctatcagat

SEQ ID NO: 808177 - DNA, 33 bp, Homo sapien
cagatgattacagtccaagccatcatctgatag

SEQ ID NO: 808178 - DNA, 33 bp, Homo sapien
cagatgattacagtcccagccatcatctgatag

SEQ ID NO: 808179 - DNA, 33 bp, Homo sapien
gctcttattcagaaccaaactgtcataatgaaa

SEQ ID NO: 808180 - DNA, 33 bp, Homo sapien
gctcttattcagaaccgaactgtcataatgaaa

SEQ ID NO: 808181 - DNA, 33 bp, Homo sapien
ggcagaggtgatgttacgggaacttttgaagtt

SEQ ID NO: 808182 - DNA, 33 bp, Homo sapien
ggcagaggtgatgttatgggaacttttgaagtt

SEQ ID NO: 808183 - DNA, 33 bp, Homo sapien
tacttcattaaagccaaaaaggaagagagccat

SEQ ID NO: 808184 - DNA, 33 bp, Homo sapien
tacttcattaaagccagaaaggaagagagccat

SEQ ID NO: 808185 - DNA, 33 bp, Homo sapien
gccactgtccagattcaagcatggtggcaccac

SEQ ID NO: 808186 - DNA, 33 bp, Homo sapien
gccactgtccagattccagcatggtggcaccac

SEQ ID NO: 808187 - DNA, 33 bp, Homo sapien
atgtttagcttggctacgtggtatagaaggaaa

SEQ ID NO: 808188 - DNA, 33 bp, Homo sapien
atgtttagcttggctatgtggtatagaaggaaa

SEQ ID NO: 808189 - DNA, 33 bp, Homo sapien
ggatgaaccaccatgccgagactgtttttaaat

SEQ ID NO: 808190 - DNA, 33 bp, Homo sapien
ggatgaaccaccatgctgagactgtttttaaat

SEQ ID NO: 808191 - DNA, 33 bp, Homo sapien
tttccagctaagatgtaacacaaacagatctta

SEQ ID NO: 808192 - DNA, 33 bp, Homo sapien
tttccagctaagatgttacacaaacagatctta

SEQ ID NO: 808193 - DNA, 33 bp, Homo sapien
ggaaggactcaggaacaactggggtaaggcaca

SEQ ID NO: 808194 - DNA, 33 bp, Homo sapien
ggaaggactcaggaacgactggggtaaggcaca

SEQ ID NO: 808195 - DNA, 33 bp, Homo sapien
gcaatatcaggtattccagactccaggagcccc

SEQ ID NO: 808196 - DNA, 33 bp, Homo sapien
gcaatatcaggtattcgagactccaggagcccc

SEQ ID NO: 808197 - DNA, 33 bp, Homo sapien
tgccgagaagataatgccatgaagaagtgttca

SEQ ID NO: 808198 - DNA, 33 bp, Homo sapien
tgccgagaagataatgtcatgaagaagtgttca

SEQ ID NO: 808199 - DNA, 33 bp, Homo sapien
tgataggcaccagaagacttaaacaattttaca

SEQ ID NO: 808200 - DNA, 33 bp, Homo sapien
tgataggcaccagaagtcttaaacaattttaca

SEQ ID NO: 808201 - DNA, 33 bp, Homo sapien
tcatttctggatgttaaagttatggtttattta

SEQ ID NO: 808202 - DNA, 33 bp, Homo sapien
tcatttctggatgttagagttatggtttattta

SEQ ID NO: 808203 - DNA, 33 bp, Homo sapien
atataaagcaaaatggaaaaagtgctcatttct

SEQ ID NO: 808204 - DNA, 33 bp, Homo sapien
atataaagcaaaatggcaaaagtgctcatttct

SEQ ID NO: 808205 - DNA, 33 bp, Homo sapien
cacattaccttctggcaatgaaaagttgaatga

SEQ ID NO: 808206 - DNA, 33 bp, Homo sapien
cacattaccttctggcgatgaaaagttgaatga

SEQ ID NO: 808207 - DNA, 33 bp, Homo sapien
aacagtcattgtcgtcagaacagtcgttgtcgt

SEQ ID NO: 808208 - DNA, 33 bp, Homo sapien
aacagtcattgtcgtcggaacagtcgttgtcgt

SEQ ID NO: 808209 - DNA, 33 bp, Homo sapien
acctacatcatatgcactaatagcactagctga

SEQ ID NO: 808210 - DNA, 33 bp, Homo sapien
acctacatcatatgcagtaatagcactagctga

SEQ ID NO: 808211 - DNA, 33 bp, Homo sapien
cttgtccccattttaaccttttgatgctggaag

SEQ ID NO: 808212 - DNA, 33 bp, Homo sapien
cttgtccccattttaatcttttgatgctggaag

SEQ ID NO: 808213 - DNA, 33 bp, Homo sapien
ccccagacatatgtgcccacttagcgtgtgcac

SEQ ID NO: 808214 - DNA, 33 bp, Homo sapien
ccccagacatatgtgctcacttagcgtgtgcac

SEQ ID NO: 808215 - DNA, 33 bp, Homo sapien
tgtatatgtacctatacggaaaagttacaggaa

SEQ ID NO: 808216 - DNA, 33 bp, Homo sapien
tgtatatgtacctatatggaaaagttacaggaa

SEQ ID NO: 808217 - DNA, 33 bp, Homo sapien
ctgagattgcatagtaacttttgggtagaagtt

SEQ ID NO: 808218 - DNA, 33 bp, Homo sapien
ctgagattgcatagtagcttttgggtagaagtt

SEQ ID NO: 808219 - DNA, 33 bp, Homo sapien
tccaggtgattctagtcaacagtcagggctgag

SEQ ID NO: 808220 - DNA, 33 bp, Homo sapien
tccaggtgattctagtgaacagtcagggctgag

SEQ ID NO: 808221 - DNA, 33 bp, Homo sapien
ggatcaaagagaagaacgtcatttcagaagcca

SEQ ID NO: 808222 - DNA, 33 bp, Homo sapien
ggatcaaagagaagaatgtcatttcagaagcca

SEQ ID NO: 808223 - DNA, 33 bp, Homo sapien
cagaaaatcaagttaactagagcaatagcaata

SEQ ID NO: 808224 - DNA, 33 bp, Homo sapien
cagaaaatcaagttaattagagcaatagcaata

SEQ ID NO: 808225 - DNA, 33 bp, Homo sapien
tgcataccttgtatcccaatccagagcacacag

SEQ ID NO: 808226 - DNA, 33 bp, Homo sapien
tgcataccttgtatcctaatccagagcacacag

SEQ ID NO: 808227 - DNA, 33 bp, Homo sapien
gattaaataagagaacagctacaaagcacttag

SEQ ID NO: 808228 - DNA, 33 bp, Homo sapien
gattaaataagagaacggctacaaagcacttag

SEQ ID NO: 808229 - DNA, 33 bp, Homo sapien
aaaaccagtttttggccactttgaaaatctttg

SEQ ID NO: 808230 - DNA, 33 bp, Homo sapien
aaaaccagtttttggctactttgaaaatctttg

SEQ ID NO: 808231 - DNA, 33 bp, Homo sapien
tatttttctgaacctacggattatactaaaact

SEQ ID NO: 808232 - DNA, 33 bp, Homo sapien
tatttttctgaacctatggattatactaaaact

SEQ ID NO: 808233 - DNA, 33 bp, Homo sapien
acatttcaccgcctacaacttagtcatatgttc

SEQ ID NO: 808234 - DNA, 33 bp, Homo sapien
acatttcaccgcctacgacttagtcatatgttc

SEQ ID NO: 808235 - DNA, 33 bp, Homo sapien
ccggccttaatgatgcactttggatgagagtca

SEQ ID NO: 808236 - DNA, 33 bp, Homo sapien
ccggccttaatgatgccctttggatgagagtca

SEQ ID NO: 808237 - DNA, 33 bp, Homo sapien
aacctgggcttctgacagagacagattttatga

SEQ ID NO: 808238 - DNA, 33 bp, Homo sapien
aacctgggcttctgacggagacagattttatga

SEQ ID NO: 808239 - DNA, 33 bp, Homo sapien
cttgcttgaggttacccatctgactggttgaaa

SEQ ID NO: 808240 - DNA, 33 bp, Homo sapien
cttgcttgaggttacctatctgactggttgaaa

SEQ ID NO: 808241 - DNA, 33 bp, Homo sapien
tgatagccaggaaggacataacgtagcatatac

SEQ ID NO: 808242 - DNA, 33 bp, Homo sapien
tgatagccaggaaggatataacgtagcatatac

SEQ ID NO: 808243 - DNA, 33 bp, Homo sapien
caaaatccgcttcacaaagaacacaacttacaa

SEQ ID NO: 808244 - DNA, 33 bp, Homo sapien
caaaatccgcttcacagagaacacaacttacaa

SEQ ID NO: 808245 - DNA, 33 bp, Homo sapien
cgctggtatttaacgacgacatcagaggttttg

SEQ ID NO: 808246 - DNA, 33 bp, Homo sapien
cgctggtatttaacgatgacatcagaggttttg

SEQ ID NO: 808247 - DNA, 33 bp, Homo sapien
tttgaccatgacttgacaattgctaaagctggc

SEQ ID NO: 808248 - DNA, 33 bp, Homo sapien
tttgaccatgacttgataattgctaaagctggc

SEQ ID NO: 808249 - DNA, 33 bp, Homo sapien
atccgatatcagtcacatgcaactaagtatgct

SEQ ID NO: 808250 - DNA, 33 bp, Homo sapien
atccgatatcagtcacgtgcaactaagtatgct

SEQ ID NO: 808251 - DNA, 33 bp, Homo sapien
tcacttcaagaagccccgctatgtgtcttaaaa

SEQ ID NO: 808252 - DNA, 33 bp, Homo sapien
tcacttcaagaagccctgctatgtgtcttaaaa

SEQ ID NO: 808253 - DNA, 33 bp, Homo sapien
gacactgactttaaacaaaaccatctcacctat

SEQ ID NO: 808254 - DNA, 33 bp, Homo sapien
gacactgactttaaaccaaaccatctcacctat

SEQ ID NO: 808255 - DNA, 33 bp, Homo sapien
gcagagttggggcaagaatttgttggtgagttt

SEQ ID NO: 808256 - DNA, 33 bp, Homo sapien
gcagagttggggcaaggatttgttggtgagttt

SEQ ID NO: 808257 - DNA, 33 bp, Homo sapien
tcctcaggtttacaagcccaggaactcatgttt

SEQ ID NO: 808258 - DNA, 33 bp, Homo sapien
tcctcaggtttacaagtccaggaactcatgttt

SEQ ID NO: 808259 - DNA, 33 bp, Homo sapien
aaggtctttgaaggaacattcacagctcagaga

SEQ ID NO: 808260 - DNA, 33 bp, Homo sapien
aaggtctttgaaggaatattcacagctcagaga

SEQ ID NO: 808261 - DNA, 33 bp, Homo sapien
atgatgcacgcccttgaaaccgcataaccccat

SEQ ID NO: 808262 - DNA, 33 bp, Homo sapien
atgatgcacgcccttgtaaccgcataaccccat

SEQ ID NO: 808263 - DNA, 33 bp, Homo sapien
agtttcaaaaacatcacagtgtcaacttagatg

SEQ ID NO: 808264 - DNA, 33 bp, Homo sapien
agtttcaaaaacatcatagtgtcaacttagatg

SEQ ID NO: 808265 - DNA, 33 bp, Homo sapien
gaaataatacaagaagaaaaacattccaagctg

SEQ ID NO: 808266 - DNA, 33 bp, Homo sapien
gaaataatacaagaagtaaaacattccaagctg

SEQ ID NO: 808267 - DNA, 33 bp, Homo sapien
tgcttcctggcttagcacttgctgggactttcc

SEQ ID NO: 808268 - DNA, 33 bp, Homo sapien
tgcttcctggcttagcgcttgctgggactttcc

SEQ ID NO: 808269 - DNA, 33 bp, Homo sapien
gtaatgcagacagaataacaagtaagaatgaga

SEQ ID NO: 808270 - DNA, 33 bp, Homo sapien
gtaatgcagacagaattacaagtaagaatgaga

SEQ ID NO: 808271 - DNA, 33 bp, Homo sapien
tgagaattcagctatgaaattcagctatggaac

SEQ ID NO: 808272 - DNA, 33 bp, Homo sapien
tgagaattcagctatggaattcagctatggaac

SEQ ID NO: 808273 - DNA, 33 bp, Homo sapien
gaacatatttttaacacggcatagaaaagaact

SEQ ID NO: 808274 - DNA, 33 bp, Homo sapien
gaacatatttttaacatggcatagaaaagaact

SEQ ID NO: 808275 - DNA, 33 bp, Homo sapien
gtctgagccacttgaaatcatttctctcctcac

SEQ ID NO: 808276 - DNA, 33 bp, Homo sapien
gtctgagccacttgaagtcatttctctcctcac

SEQ ID NO: 808277 - DNA, 33 bp, Homo sapien
attttggttcaagatggaaaatatccatggtca

SEQ ID NO: 808278 - DNA, 33 bp, Homo sapien
attttggttcaagatgtaaaatatccatggtca

SEQ ID NO: 808279 - DNA, 33 bp, Homo sapien
atccatgggaactcaactcttcctcttacagtc

SEQ ID NO: 808280 - DNA, 33 bp, Homo sapien
atccatgggaactcaagtcttcctcttacagtc

SEQ ID NO: 808281 - DNA, 33 bp, Homo sapien
ctggcggaattaagcacgtcctgtttggctcca

SEQ ID NO: 808282 - DNA, 33 bp, Homo sapien
ctggcggaattaagcatgtcctgtttggctcca

SEQ ID NO: 808283 - DNA, 33 bp, Homo sapien
atttacctatgacgcacaagtacaaggaactta

SEQ ID NO: 808284 - DNA, 33 bp, Homo sapien
atttacctatgacgcataagtacaaggaactta

SEQ ID NO: 808285 - DNA, 33 bp, Homo sapien
ttgcatatagaagtgcccaagccagagtaggca

SEQ ID NO: 808286 - DNA, 33 bp, Homo sapien
ttgcatatagaagtgctcaagccagagtaggca

SEQ ID NO: 808287 - DNA, 33 bp, Homo sapien
tgtacctaacaaagagccatagtagatgaatgg

SEQ ID NO: 808288 - DNA, 33 bp, Homo sapien
tgtacctaacaaagagtcatagtagatgaatgg

SEQ ID NO: 808289 - DNA, 33 bp, Homo sapien
ttctcaggcatctcgcaagaaggtcctatttac

SEQ ID NO: 808290 - DNA, 33 bp, Homo sapien
ttctcaggcatctcgccagaaggtcctatttac

SEQ ID NO: 808291 - DNA, 33 bp, Homo sapien
caggttctgacatttacagcttaaaccctgttt

SEQ ID NO: 808292 - DNA, 33 bp, Homo sapien
caggttctgacatttagagcttaaaccctgttt

SEQ ID NO: 808293 - DNA, 33 bp, Homo sapien
ccaaacacagctgcaaattctcagtggcgggca

SEQ ID NO: 808294 - DNA, 33 bp, Homo sapien
ccaaacacagctgcaacttctcagtggcgggca

SEQ ID NO: 808295 - DNA, 33 bp, Homo sapien
cagatcaatttacttacgacagttctgttttca

SEQ ID NO: 808296 - DNA, 33 bp, Homo sapien
cagatcaatttacttatgacagttctgttttca

SEQ ID NO: 808297 - DNA, 33 bp, Homo sapien
taagcaagtagcaaaacagtatgtacagcagat

SEQ ID NO: 808298 - DNA, 33 bp, Homo sapien
taagcaagtagcaaaagagtatgtacagcagat

SEQ ID NO: 808299 - DNA, 33 bp, Homo sapien
atcatcatgtaattaacgggtcccatggcaaca

SEQ ID NO: 808300 - DNA, 33 bp, Homo sapien
atcatcatgtaattaatgggtcccatggcaaca

SEQ ID NO: 808301 - DNA, 33 bp, Homo sapien
agccaaggtaagcacaaggacattcttcatact

SEQ ID NO: 808302 - DNA, 33 bp, Homo sapien
agccaaggtaagcacagggacattcttcatact

SEQ ID NO: 808303 - DNA, 33 bp, Homo sapien
ggaccattttcatctcacagagtttagttggac

SEQ ID NO: 808304 - DNA, 33 bp, Homo sapien
ggaccattttcatctcccagagtttagttggac

SEQ ID NO: 808305 - DNA, 33 bp, Homo sapien
gcagtgagtaaggtccactgtgctcccttatgg

SEQ ID NO: 808306 - DNA, 33 bp, Homo sapien
gcagtgagtaaggtccgctgtgctcccttatgg

SEQ ID NO: 808307 - DNA, 33 bp, Homo sapien
acaatggaataatggccaaggaaggcttatgga

SEQ ID NO: 808308 - DNA, 33 bp, Homo sapien
acaatggaataatggctaaggaaggcttatgga

SEQ ID NO: 808309 - DNA, 33 bp, Homo sapien
catgaacagccttctcccattctttatacacgc

SEQ ID NO: 808310 - DNA, 33 bp, Homo sapien
catgaacagccttctctcattctttatacacgc

SEQ ID NO: 808311 - DNA, 33 bp, Homo sapien
gaatcctccagggaaccctacagagccgatacc

SEQ ID NO: 808312 - DNA, 33 bp, Homo sapien
gaatcctccagggaacgctacagagccgatacc

SEQ ID NO: 808313 - DNA, 33 bp, Homo sapien
cttccgatgacgctaccatgtgactctgaagcc

SEQ ID NO: 808314 - DNA, 33 bp, Homo sapien
cttccgatgacgctactatgtgactctgaagcc

SEQ ID NO: 808315 - DNA, 33 bp, Homo sapien
tctgagcaagaaaacaacatcggttgccctaat

SEQ ID NO: 808316 - DNA, 33 bp, Homo sapien
tctgagcaagaaaacagcatcggttgccctaat

SEQ ID NO: 808317 - DNA, 33 bp, Homo sapien
ggcctttgatcatggcaatcacctgggcaggaa

SEQ ID NO: 808318 - DNA, 33 bp, Homo sapien
ggcctttgatcatggcgatcacctgggcaggaa

SEQ ID NO: 808319 - DNA, 33 bp, Homo sapien
tttcaccatgggaaaaagtcactacaagcttgt

SEQ ID NO: 808320 - DNA, 33 bp, Homo sapien
tttcaccatgggaaaacgtcactacaagcttgt

SEQ ID NO: 808321 - DNA, 33 bp, Homo sapien
tctttcgaattgcctgcaggacgctggggaagg

SEQ ID NO: 808322 - DNA, 33 bp, Homo sapien
tctttcgaattgcctgtaggacgctggggaagg

SEQ ID NO: 808323 - DNA, 33 bp, Homo sapien
acctcaacccttgatactacacagaactgtttg

SEQ ID NO: 808324 - DNA, 33 bp, Homo sapien
acctcaacccttgatattacacagaactgtttg

SEQ ID NO: 808325 - DNA, 33 bp, Homo sapien
cactcatgtcttaaaacttacagaaacacttga

SEQ ID NO: 808326 - DNA, 33 bp, Homo sapien
cactcatgtcttaaaatttacagaaacacttga

SEQ ID NO: 808327 - DNA, 33 bp, Homo sapien
tctcacattatctacaaaaatactccttcctct

SEQ ID NO: 808328 - DNA, 33 bp, Homo sapien
tctcacattatctacacaaatactccttcctct

SEQ ID NO: 808329 - DNA, 33 bp, Homo sapien
gtttctctaatagcgcccccagctctggttgtc

SEQ ID NO: 808330 - DNA, 33 bp, Homo sapien
gtttctctaatagcgctcccagctctggttgtc

SEQ ID NO: 808331 - DNA, 33 bp, Homo sapien
tagagttggatatcaactggacagcacccacaa

SEQ ID NO: 808332 - DNA, 33 bp, Homo sapien
tagagttggatatcaattggacagcacccacaa

SEQ ID NO: 808333 - DNA, 33 bp, Homo sapien
acttgagaggccgtcacgagaagagtgcttctc

SEQ ID NO: 808334 - DNA, 33 bp, Homo sapien
acttgagaggccgtcatgagaagagtgcttctc

SEQ ID NO: 808335 - DNA, 33 bp, Homo sapien
agtcacatttaaaagcaccttccttcaaacttt

SEQ ID NO: 808336 - DNA, 33 bp, Homo sapien
agtcacatttaaaagcgccttccttcaaacttt

SEQ ID NO: 808337 - DNA, 33 bp, Homo sapien
tcatcggcttttagtcaatgtctgtctttcctg

SEQ ID NO: 808338 - DNA, 33 bp, Homo sapien
tcatcggcttttagtcgatgtctgtctttcctg

SEQ ID NO: 808339 - DNA, 33 bp, Homo sapien
gcatgactttttggaccggaataggtggtactg

SEQ ID NO: 808340 - DNA, 33 bp, Homo sapien
gcatgactttttggactggaataggtggtactg

SEQ ID NO: 808341 - DNA, 33 bp, Homo sapien
tgccttactcttccaccgggttatgaaactttg

SEQ ID NO: 808342 - DNA, 33 bp, Homo sapien
tgccttactcttccactgggttatgaaactttg

SEQ ID NO: 808343 - DNA, 33 bp, Homo sapien
aagcagtttcttgggacgcttgtgttcagagga

SEQ ID NO: 808344 - DNA, 33 bp, Homo sapien
aagcagtttcttgggatgcttgtgttcagagga

SEQ ID NO: 808345 - DNA, 33 bp, Homo sapien
gtagctcagatagatggagacctgaataaattt

SEQ ID NO: 808346 - DNA, 33 bp, Homo sapien
gtagctcagatagatgtagacctgaataaattt

SEQ ID NO: 808347 - DNA, 33 bp, Homo sapien
tgtagtcaacagcccaatcaggatgtagagctt

SEQ ID NO: 808348 - DNA, 33 bp, Homo sapien
tgtagtcaacagcccagtcaggatgtagagctt

SEQ ID NO: 808349 - DNA, 33 bp, Homo sapien
aagcgctgaaggacaaaatcaggatttctgagt

SEQ ID NO: 808350 - DNA, 33 bp, Homo sapien
aagcgctgaaggacaatatcaggatttctgagt

SEQ ID NO: 808351 - DNA, 33 bp, Homo sapien
agacatctctaatcaggcatcatgcttctttcc

SEQ ID NO: 808352 - DNA, 33 bp, Homo sapien
agacatctctaatcagtcatcatgcttctttcc

SEQ ID NO: 808353 - DNA, 33 bp, Homo sapien
caatgtgtaacctccacacaatgacttataact

SEQ ID NO: 808354 - DNA, 33 bp, Homo sapien
caatgtgtaacctccatacaatgacttataact

SEQ ID NO: 808355 - DNA, 33 bp, Homo sapien
tgagggtctctgactacaaattttcatcagtaa

SEQ ID NO: 808356 - DNA, 33 bp, Homo sapien
tgagggtctctgactataaattttcatcagtaa

SEQ ID NO: 808357 - DNA, 33 bp, Homo sapien
agaaacaggagacagaagtaataggaaagattt

SEQ ID NO: 808358 - DNA, 33 bp, Homo sapien
agaaacaggagacagaggtaataggaaagattt

SEQ ID NO: 808359 - DNA, 33 bp, Homo sapien
ttctttttattggctagctttatgttcgctttc

SEQ ID NO: 808360 - DNA, 33 bp, Homo sapien
ttctttttattggctatctttatgttcgctttc

SEQ ID NO: 808361 - DNA, 33 bp, Homo sapien
tatttggtgcattcccagaagaaaatgacaaat

SEQ ID NO: 808362 - DNA, 33 bp, Homo sapien
tatttggtgcattcccggaagaaaatgacaaat

SEQ ID NO: 808363 - DNA, 33 bp, Homo sapien
tcctgctgcacctgaactggtgtcagaatcctc

SEQ ID NO: 808364 - DNA, 33 bp, Homo sapien
tcctgctgcacctgaattggtgtcagaatcctc

SEQ ID NO: 808365 - DNA, 33 bp, Homo sapien
tcaggaaatcataaaaaggtatccttcctcagg

SEQ ID NO: 808366 - DNA, 33 bp, Homo sapien
tcaggaaatcataaaatggtatccttcctcagg

SEQ ID NO: 808367 - DNA, 33 bp, Homo sapien
acagagcaagcactcaatagatatttggtgacc

SEQ ID NO: 808368 - DNA, 33 bp, Homo sapien
acagagcaagcactcagtagatatttggtgacc

SEQ ID NO: 808369 - DNA, 33 bp, Homo sapien
atctgcttttgaactcacattccggcggtcctc

SEQ ID NO: 808370 - DNA, 33 bp, Homo sapien
atctgcttttgaactcgcattccggcggtcctc

SEQ ID NO: 808371 - DNA, 33 bp, Homo sapien
caattctgtgccaagaagttgtccctaatttgg

SEQ ID NO: 808372 - DNA, 33 bp, Homo sapien
caattctgtgccaagacgttgtccctaatttgg

SEQ ID NO: 808373 - DNA, 33 bp, Homo sapien
cttccattttctagaccgaaccaaaagtcttct

SEQ ID NO: 808374 - DNA, 33 bp, Homo sapien
cttccattttctagactgaaccaaaagtcttct

SEQ ID NO: 808375 - DNA, 33 bp, Homo sapien
catctaatgtttctcacggatagtttctatttt

SEQ ID NO: 808376 - DNA, 33 bp, Homo sapien
catctaatgtttctcatggatagtttctatttt

SEQ ID NO: 808377 - DNA, 33 bp, Homo sapien
aactaagcaaaatataaactaaagctacaaagg

SEQ ID NO: 808378 - DNA, 33 bp, Homo sapien
aactaagcaaaatatagactaaagctacaaagg

SEQ ID NO: 808379 - DNA, 33 bp, Homo sapien
gttttgtctgtagttaagattgcaacctttact

SEQ ID NO: 808380 - DNA, 33 bp, Homo sapien
gttttgtctgtagttaggattgcaacctttact

SEQ ID NO: 808381 - DNA, 33 bp, Homo sapien
ttacataatggtaaacagttcaatttaataaga

SEQ ID NO: 808382 - DNA, 33 bp, Homo sapien
ttacataatggtaaacggttcaatttaataaga

SEQ ID NO: 808383 - DNA, 33 bp, Homo sapien
ttgataggctatttataactgattcaattttag

SEQ ID NO: 808384 - DNA, 33 bp, Homo sapien
ttgataggctatttattactgattcaattttag

SEQ ID NO: 808385 - DNA, 33 bp, Homo sapien
aggtatgttccttctacgcctactatgttggaa

SEQ ID NO: 808386 - DNA, 33 bp, Homo sapien
aggtatgttccttctatgcctactatgttggaa

SEQ ID NO: 808387 - DNA, 33 bp, Homo sapien
aggacttccagtgctacgtttattaagagtggt

SEQ ID NO: 808388 - DNA, 33 bp, Homo sapien
aggacttccagtgctatgtttattaagagtggt

SEQ ID NO: 808389 - DNA, 33 bp, Homo sapien
tgcctttgcaccctgacagcttagctcctactt

SEQ ID NO: 808390 - DNA, 33 bp, Homo sapien
tgcctttgcaccctgatagcttagctcctactt

SEQ ID NO: 808391 - DNA, 33 bp, Homo sapien
tgttggtgggttgaacgaacacttttacactgt

SEQ ID NO: 808392 - DNA, 33 bp, Homo sapien
tgttggtgggttgaactaacacttttacactgt

SEQ ID NO: 808393 - DNA, 33 bp, Homo sapien
cttggcaaactctttacctcttaagaacccaga

SEQ ID NO: 808394 - DNA, 33 bp, Homo sapien
cttggcaaactctttagctcttaagaacccaga

SEQ ID NO: 808395 - DNA, 33 bp, Homo sapien
agcatcgtacaaggagaaccagcttttgagcca

SEQ ID NO: 808396 - DNA, 33 bp, Homo sapien
agcatcgtacaaggagcaccagcttttgagcca

SEQ ID NO: 808397 - DNA, 33 bp, Homo sapien
cttttatgcaaaattccaacaggcatactgata

SEQ ID NO: 808398 - DNA, 33 bp, Homo sapien
cttttatgcaaaattctaacaggcatactgata

SEQ ID NO: 808399 - DNA, 33 bp, Homo sapien
atattaaccaaaagtcccctgcaggcttgaagg

SEQ ID NO: 808400 - DNA, 33 bp, Homo sapien
atattaaccaaaagtctcctgcaggcttgaagg

SEQ ID NO: 808401 - DNA, 33 bp, Homo sapien
gcctgttttctacttacagcacatcacgattca

SEQ ID NO: 808402 - DNA, 33 bp, Homo sapien
gcctgttttctacttatagcacatcacgattca

SEQ ID NO: 808403 - DNA, 33 bp, Homo sapien
atgtgctccggattaacgctgcctgagttctaa

SEQ ID NO: 808404 - DNA, 33 bp, Homo sapien
atgtgctccggattaatgctgcctgagttctaa

SEQ ID NO: 808405 - DNA, 33 bp, Homo sapien
gctaacaagtaccagcccattaacatttcttct

SEQ ID NO: 808406 - DNA, 33 bp, Homo sapien
gctaacaagtaccagctcattaacatttcttct

SEQ ID NO: 808407 - DNA, 33 bp, Homo sapien
gcttttaattacagacagaaatccacattcatc

SEQ ID NO: 808408 - DNA, 33 bp, Homo sapien
gcttttaattacagacggaaatccacattcatc

SEQ ID NO: 808409 - DNA, 33 bp, Homo sapien
ggaaatagactctctaagaagctcctaaaccat

SEQ ID NO: 808410 - DNA, 33 bp, Homo sapien
ggaaatagactctctaggaagctcctaaaccat

SEQ ID NO: 808411 - DNA, 33 bp, Homo sapien
gccggccaattccccccgcaccaaattgcatcg

SEQ ID NO: 808412 - DNA, 33 bp, Homo sapien
gccggccaattccccctgcaccaaattgcatcg

SEQ ID NO: 808413 - DNA, 33 bp, Homo sapien
ctctccaaacagtttacgtcaactcctgggtct

SEQ ID NO: 808414 - DNA, 33 bp, Homo sapien
ctctccaaacagtttatgtcaactcctgggtct

SEQ ID NO: 808415 - DNA, 33 bp, Homo sapien
attgatgaaaagtgtacggggctccacagatct

SEQ ID NO: 808416 - DNA, 33 bp, Homo sapien
attgatgaaaagtgtatggggctccacagatct

SEQ ID NO: 808417 - DNA, 33 bp, Homo sapien
aaaaaaaggccaagatcataagttttatttcat

SEQ ID NO: 808418 - DNA, 33 bp, Homo sapien
aaaaaaaggccaagatgataagttttatttcat

SEQ ID NO: 808419 - DNA, 33 bp, Homo sapien
agcttgcgcctccaaccgagaaaggaccagagg

SEQ ID NO: 808420 - DNA, 33 bp, Homo sapien
agcttgcgcctccaactgagaaaggaccagagg

SEQ ID NO: 808421 - DNA, 33 bp, Homo sapien
ttaatctcaagctccaacagaatgaaaggaagg

SEQ ID NO: 808422 - DNA, 33 bp, Homo sapien
ttaatctcaagctccaccagaatgaaaggaagg

SEQ ID NO: 808423 - DNA, 33 bp, Homo sapien
tcctgctctctctcagaatctcattttcccttt

SEQ ID NO: 808424 - DNA, 33 bp, Homo sapien
tcctgctctctctcaggatctcattttcccttt

SEQ ID NO: 808425 - DNA, 33 bp, Homo sapien
ctctaaacaaagtcaccgcagttctgccaccag

SEQ ID NO: 808426 - DNA, 33 bp, Homo sapien
ctctaaacaaagtcactgcagttctgccaccag

SEQ ID NO: 808427 - DNA, 33 bp, Homo sapien
cagcttataaatagaaaggctgtcgtaaatcaa

SEQ ID NO: 808428 - DNA, 33 bp, Homo sapien
cagcttataaatagaagggctgtcgtaaatcaa

SEQ ID NO: 808429 - DNA, 33 bp, Homo sapien
cagacccctgatgtaaagaaaggactgtctcaa

SEQ ID NO: 808430 - DNA, 33 bp, Homo sapien
cagacccctgatgtaacgaaaggactgtctcaa

SEQ ID NO: 808431 - DNA, 33 bp, Homo sapien
gcacttagtacttatacgatggagtcactaaac

SEQ ID NO: 808432 - DNA, 33 bp, Homo sapien
gcacttagtacttatatgatggagtcactaaac

SEQ ID NO: 808433 - DNA, 33 bp, Homo sapien
agaattggaggtaacagctggctaatttaggca

SEQ ID NO: 808434 - DNA, 33 bp, Homo sapien
agaattggaggtaacatctggctaatttaggca

SEQ ID NO: 808435 - DNA, 33 bp, Homo sapien
gtgctgttactgcaaactctgcgatgcctgggg

SEQ ID NO: 808436 - DNA, 33 bp, Homo sapien
gtgctgttactgcaaattctgcgatgcctgggg

SEQ ID NO: 808437 - DNA, 33 bp, Homo sapien
aagagagaggtcctgccaatttacagtggcaaa

SEQ ID NO: 808438 - DNA, 33 bp, Homo sapien
aagagagaggtcctgcgaatttacagtggcaaa

SEQ ID NO: 808439 - DNA, 33 bp, Homo sapien
ttaagcatggtagagaatattgctgtaattata

SEQ ID NO: 808440 - DNA, 33 bp, Homo sapien
ttaagcatggtagagattattgctgtaattata

SEQ ID NO: 808441 - DNA, 33 bp, Homo sapien
acagaaaatcaactgaaaagttctgaccagaat

SEQ ID NO: 808442 - DNA, 33 bp, Homo sapien
acagaaaatcaactgagaagttctgaccagaat

SEQ ID NO: 808443 - DNA, 33 bp, Homo sapien
tgggaattcataagcaactcttccaaccccaca

SEQ ID NO: 808444 - DNA, 33 bp, Homo sapien
tgggaattcataagcatctcttccaaccccaca

SEQ ID NO: 808445 - DNA, 33 bp, Homo sapien
ttcaagtggtaaccctcaaaccaccacacggaa

SEQ ID NO: 808446 - DNA, 33 bp, Homo sapien
ttcaagtggtaaccctgaaaccaccacacggaa

SEQ ID NO: 808447 - DNA, 33 bp, Homo sapien
taaacatcttctgcaacccctgagataatcacc

SEQ ID NO: 808448 - DNA, 33 bp, Homo sapien
taaacatcttctgcaatccctgagataatcacc

SEQ ID NO: 808449 - DNA, 33 bp, Homo sapien
agctttttaggagaaactagaaattggttacca

SEQ ID NO: 808450 - DNA, 33 bp, Homo sapien
agctttttaggagaaagtagaaattggttacca

SEQ ID NO: 808451 - DNA, 33 bp, Homo sapien
taaaaagctgtctacacagttatggagaaggga

SEQ ID NO: 808452 - DNA, 33 bp, Homo sapien
taaaaagctgtctacatagttatggagaaggga

SEQ ID NO: 808453 - DNA, 33 bp, Homo sapien
gcatagtcctggctcagtatgctttgggctctt

SEQ ID NO: 808454 - DNA, 33 bp, Homo sapien
gcatagtcctggctcattatgctttgggctctt

SEQ ID NO: 808455 - DNA, 33 bp, Homo sapien
tgcagcttcatgatacacttgtctaaggtatca

SEQ ID NO: 808456 - DNA, 33 bp, Homo sapien
tgcagcttcatgatacgcttgtctaaggtatca

SEQ ID NO: 808457 - DNA, 33 bp, Homo sapien
gcctcaaaaactccataaagtggcaaaggatct

SEQ ID NO: 808458 - DNA, 33 bp, Homo sapien
gcctcaaaaactccatgaagtggcaaaggatct

SEQ ID NO: 808459 - DNA, 33 bp, Homo sapien
tattgggcaacatatacgagcaagattatagca

SEQ ID NO: 808460 - DNA, 33 bp, Homo sapien
tattgggcaacatataggagcaagattatagca

SEQ ID NO: 808461 - DNA, 33 bp, Homo sapien
agaacaccaggaaaacacataggctttatcaaa

SEQ ID NO: 808462 - DNA, 33 bp, Homo sapien
agaacaccaggaaaacgcataggctttatcaaa

SEQ ID NO: 808463 - DNA, 33 bp, Homo sapien
gaaagacaaggaaagcaagttactgctcctagc

SEQ ID NO: 808464 - DNA, 33 bp, Homo sapien
gaaagacaaggaaagctagttactgctcctagc

SEQ ID NO: 808465 - DNA, 33 bp, Homo sapien
cacatcctcaggctcaaaggtttttttcttagc

SEQ ID NO: 808466 - DNA, 33 bp, Homo sapien
cacatcctcaggctcagaggtttttttcttagc

SEQ ID NO: 808467 - DNA, 33 bp, Homo sapien
acgatccttgtttatacccaatctctctttttc

SEQ ID NO: 808468 - DNA, 33 bp, Homo sapien
acgatccttgtttatatccaatctctctttttc

SEQ ID NO: 808469 - DNA, 33 bp, Homo sapien
catgcctgaagtcagccgcctcaacttttcaac

SEQ ID NO: 808470 - DNA, 33 bp, Homo sapien
catgcctgaagtcagctgcctcaacttttcaac

SEQ ID NO: 808471 - DNA, 33 bp, Homo sapien
cagtcttttaacaatgaagatacacataatact

SEQ ID NO: 808472 - DNA, 33 bp, Homo sapien
cagtcttttaacaatgcagatacacataatact

SEQ ID NO: 808473 - DNA, 33 bp, Homo sapien
agacaaaagttgtgaaaataaatacattcaaaa

SEQ ID NO: 808474 - DNA, 33 bp, Homo sapien
agacaaaagttgtgaacataaatacattcaaaa

SEQ ID NO: 808475 - DNA, 33 bp, Homo sapien
aagagaattttcaaagacatcacaataaaacta

SEQ ID NO: 808476 - DNA, 33 bp, Homo sapien
aagagaattttcaaaggcatcacaataaaacta

SEQ ID NO: 808477 - DNA, 33 bp, Homo sapien
gtctcgtgtgagctaacagaatctatgcaattc

SEQ ID NO: 808478 - DNA, 33 bp, Homo sapien
gtctcgtgtgagctaatagaatctatgcaattc

SEQ ID NO: 808479 - DNA, 33 bp, Homo sapien
aattacaacaaagaacaatgtatgccaaatgga

SEQ ID NO: 808480 - DNA, 33 bp, Homo sapien
aattacaacaaagaacgatgtatgccaaatgga

SEQ ID NO: 808481 - DNA, 33 bp, Homo sapien
cccaaccactgagtgtaaattcttagcatagct

SEQ ID NO: 808482 - DNA, 33 bp, Homo sapien
cccaaccactgagtgtcaattcttagcatagct

SEQ ID NO: 808483 - DNA, 33 bp, Homo sapien
catgtatggaaaaatacgtgagtgaaggtgaga

SEQ ID NO: 808484 - DNA, 33 bp, Homo sapien
catgtatggaaaaatatgtgagtgaaggtgaga

SEQ ID NO: 808485 - DNA, 33 bp, Homo sapien
tctctaaataatataaagccaagttgatgagaa

SEQ ID NO: 808486 - DNA, 33 bp, Homo sapien
tctctaaataatataacgccaagttgatgagaa

SEQ ID NO: 808487 - DNA, 33 bp, Homo sapien
agattaggattacttcacagcagggcagacatc

SEQ ID NO: 808488 - DNA, 33 bp, Homo sapien
agattaggattacttcgcagcagggcagacatc

SEQ ID NO: 808489 - DNA, 33 bp, Homo sapien
ttttttcctctctcaaggagtctgtagggcagg

SEQ ID NO: 808490 - DNA, 33 bp, Homo sapien
ttttttcctctctcaatgagtctgtagggcagg

SEQ ID NO: 808491 - DNA, 33 bp, Homo sapien
acccatcctctcagccaccttgttgagaagcat

SEQ ID NO: 808492 - DNA, 33 bp, Homo sapien
acccatcctctcagccgccttgttgagaagcat

SEQ ID NO: 808493 - DNA, 33 bp, Homo sapien
gaactaagatgaatcaagaaactggttatggta

SEQ ID NO: 808494 - DNA, 33 bp, Homo sapien
gaactaagatgaatcaggaaactggttatggta

SEQ ID NO: 808495 - DNA, 33 bp, Homo sapien
atcttacataataccccgcatcctgaatatgtc

SEQ ID NO: 808496 - DNA, 33 bp, Homo sapien
atcttacataataccctgcatcctgaatatgtc

SEQ ID NO: 808497 - DNA, 33 bp, Homo sapien
agtaagcagggctaaactgtaggcaaaaagctt

SEQ ID NO: 808498 - DNA, 33 bp, Homo sapien
agtaagcagggctaaattgtaggcaaaaagctt

SEQ ID NO: 808499 - DNA, 33 bp, Homo sapien
cgagagagactatgaccgccctacggctagagt

SEQ ID NO: 808500 - DNA, 33 bp, Homo sapien
cgagagagactatgactgccctacggctagagt

SEQ ID NO: 808501 - DNA, 33 bp, Homo sapien
cccacattctacacgcggaaaggaaagggccag

SEQ ID NO: 808502 - DNA, 33 bp, Homo sapien
cccacattctacacgctgaaaggaaagggccag

SEQ ID NO: 808503 - DNA, 33 bp, Homo sapien
actgaggccagcatgaacataaatgtgtaaagc

SEQ ID NO: 808504 - DNA, 33 bp, Homo sapien
actgaggccagcatgaccataaatgtgtaaagc

SEQ ID NO: 808505 - DNA, 33 bp, Homo sapien
aggtttatggtgagaaataaatggcatgatgca

SEQ ID NO: 808506 - DNA, 33 bp, Homo sapien
aggtttatggtgagaattaaatggcatgatgca

SEQ ID NO: 808507 - DNA, 33 bp, Homo sapien
tagacttcttgaaaaacattctcacatagcctc

SEQ ID NO: 808508 - DNA, 33 bp, Homo sapien
tagacttcttgaaaaagattctcacatagcctc

SEQ ID NO: 808509 - DNA, 33 bp, Homo sapien
agtcccttctaattcacgctactctttggctgg

SEQ ID NO: 808510 - DNA, 33 bp, Homo sapien
agtcccttctaattcatgctactctttggctgg

SEQ ID NO: 808511 - DNA, 33 bp, Homo sapien
aatggaaaattgggaaacttgccctacatgaaa

SEQ ID NO: 808512 - DNA, 33 bp, Homo sapien
aatggaaaattgggaatcttgccctacatgaaa

SEQ ID NO: 808513 - DNA, 33 bp, Homo sapien
ccagaaggattctcaacatttccttccagcatt

SEQ ID NO: 808514 - DNA, 33 bp, Homo sapien
ccagaaggattctcaatatttccttccagcatt

SEQ ID NO: 808515 - DNA, 33 bp, Homo sapien
tggctggaaataaccgacccagaggttccagct

SEQ ID NO: 808516 - DNA, 33 bp, Homo sapien
tggctggaaataaccgtcccagaggttccagct

SEQ ID NO: 808517 - DNA, 33 bp, Homo sapien
gcgctttcagttgttcaagaccctgctgtccat

SEQ ID NO: 808518 - DNA, 33 bp, Homo sapien
gcgctttcagttgttcgagaccctgctgtccat

SEQ ID NO: 808519 - DNA, 33 bp, Homo sapien
agcattatgatgtcaccatcgttttcactattg

SEQ ID NO: 808520 - DNA, 33 bp, Homo sapien
agcattatgatgtcactatcgttttcactattg

SEQ ID NO: 808521 - DNA, 33 bp, Homo sapien
aagacatgaggacctaagagttgattgttaacc

SEQ ID NO: 808522 - DNA, 33 bp, Homo sapien
aagacatgaggacctatgagttgattgttaacc

SEQ ID NO: 808523 - DNA, 33 bp, Homo sapien
tgtggtctatcctcaccggaaaaaaatgatttt

SEQ ID NO: 808524 - DNA, 33 bp, Homo sapien
tgtggtctatcctcactggaaaaaaatgatttt

SEQ ID NO: 808525 - DNA, 33 bp, Homo sapien
aatttattgtggtaaaattcttctgtctgtttt

SEQ ID NO: 808526 - DNA, 33 bp, Homo sapien
aatttattgtggtaaagttcttctgtctgtttt

SEQ ID NO: 808527 - DNA, 33 bp, Homo sapien
acttattatagcaaacaagttaggagttaggga

SEQ ID NO: 808528 - DNA, 33 bp, Homo sapien
acttattatagcaaacgagttaggagttaggga

SEQ ID NO: 808529 - DNA, 33 bp, Homo sapien
cataccaaattccacactcattttctatactta

SEQ ID NO: 808530 - DNA, 33 bp, Homo sapien
cataccaaattccacattcattttctatactta

SEQ ID NO: 808531 - DNA, 33 bp, Homo sapien
agtgaaaggaaattggacattaaatctttagca

SEQ ID NO: 808532 - DNA, 33 bp, Homo sapien
agtgaaaggaaattgggcattaaatctttagca

SEQ ID NO: 808533 - DNA, 33 bp, Homo sapien
aaactactgtttgcaccggagaagacaaaccac

SEQ ID NO: 808534 - DNA, 33 bp, Homo sapien
aaactactgtttgcactggagaagacaaaccac

SEQ ID NO: 808535 - DNA, 33 bp, Homo sapien
caaataatgctcaagactcactaatttcatata

SEQ ID NO: 808536 - DNA, 33 bp, Homo sapien
caaataatgctcaagagtcactaatttcatata

SEQ ID NO: 808537 - DNA, 33 bp, Homo sapien
attcttgaacattgatcagatatggagcttcca

SEQ ID NO: 808538 - DNA, 33 bp, Homo sapien
attcttgaacattgattagatatggagcttcca

SEQ ID NO: 808539 - DNA, 33 bp, Homo sapien
tatcttaaaaaatacaactgaaggaactccaat

SEQ ID NO: 808540 - DNA, 33 bp, Homo sapien
tatcttaaaaaatacagctgaaggaactccaat

SEQ ID NO: 808541 - DNA, 33 bp, Homo sapien
atcaggaagtatgctcaaacagtagttcagaac

SEQ ID NO: 808542 - DNA, 33 bp, Homo sapien
atcaggaagtatgctctaacagtagttcagaac

SEQ ID NO: 808543 - DNA, 33 bp, Homo sapien
ttgctgcacttattaacctgataaaacaagata

SEQ ID NO: 808544 - DNA, 33 bp, Homo sapien
ttgctgcacttattaatctgataaaacaagata

SEQ ID NO: 808545 - DNA, 33 bp, Homo sapien
attattgctttaacagcatggctattttataac

SEQ ID NO: 808546 - DNA, 33 bp, Homo sapien
attattgctttaacagtatggctattttataac

SEQ ID NO: 808547 - DNA, 33 bp, Homo sapien
ttttctattatgtcacactgtactaaaatcata

SEQ ID NO: 808548 - DNA, 33 bp, Homo sapien
ttttctattatgtcacgctgtactaaaatcata

SEQ ID NO: 808549 - DNA, 33 bp, Homo sapien
acaaaagtatatgaacactaacaactatataaa

SEQ ID NO: 808550 - DNA, 33 bp, Homo sapien
acaaaagtatatgaacgctaacaactatataaa

SEQ ID NO: 808551 - DNA, 33 bp, Homo sapien
ctaaaacttttgtgacaacttatccttttcctg

SEQ ID NO: 808552 - DNA, 33 bp, Homo sapien
ctaaaacttttgtgacgacttatccttttcctg

SEQ ID NO: 808553 - DNA, 33 bp, Homo sapien
taatgcttacataatcgctgataaagaagactc

SEQ ID NO: 808554 - DNA, 33 bp, Homo sapien
taatgcttacataatctctgataaagaagactc

SEQ ID NO: 808555 - DNA, 33 bp, Homo sapien
tataaacaattcaaaaaccaaaagcagttgcaa

SEQ ID NO: 808556 - DNA, 33 bp, Homo sapien
tataaacaattcaaaagccaaaagcagttgcaa

SEQ ID NO: 808557 - DNA, 33 bp, Homo sapien
acagaactttgtcccacgtgccaactctggact

SEQ ID NO: 808558 - DNA, 33 bp, Homo sapien
acagaactttgtcccatgtgccaactctggact

SEQ ID NO: 808559 - DNA, 33 bp, Homo sapien
ccactagctattcccacatttattaaacaccat

SEQ ID NO: 808560 - DNA, 33 bp, Homo sapien
ccactagctattcccagatttattaaacaccat

SEQ ID NO: 808561 - DNA, 33 bp, Homo sapien
atatacacatgtaaacaaattcttccttgctaa

SEQ ID NO: 808562 - DNA, 33 bp, Homo sapien
atatacacatgtaaacgaattcttccttgctaa

SEQ ID NO: 808563 - DNA, 33 bp, Homo sapien
tcctgttgcacctaaaataatctaagaaggctg

SEQ ID NO: 808564 - DNA, 33 bp, Homo sapien
tcctgttgcacctaaattaatctaagaaggctg

SEQ ID NO: 808565 - DNA, 33 bp, Homo sapien
cttcatagtatgaaaacggacttggtcgggcac

SEQ ID NO: 808566 - DNA, 33 bp, Homo sapien
cttcatagtatgaaaatggacttggtcgggcac

SEQ ID NO: 808567 - DNA, 33 bp, Homo sapien
accagaggccataagacgcaagtgatcctcctg

SEQ ID NO: 808568 - DNA, 33 bp, Homo sapien
accagaggccataagatgcaagtgatcctcctg

SEQ ID NO: 808569 - DNA, 33 bp, Homo sapien
actgtggctgaaatccagcttcaggaccaaccg

SEQ ID NO: 808570 - DNA, 33 bp, Homo sapien
actgtggctgaaatccggcttcaggaccaaccg

SEQ ID NO: 808571 - DNA, 33 bp, Homo sapien
ggggcagtggtaggctaaaaggctcctcaagca

SEQ ID NO: 808572 - DNA, 33 bp, Homo sapien
ggggcagtggtaggctgaaaggctcctcaagca

SEQ ID NO: 808573 - DNA, 33 bp, Homo sapien
agcttctctatcctcacgatgacaaattttgag

SEQ ID NO: 808574 - DNA, 33 bp, Homo sapien
agcttctctatcctcatgatgacaaattttgag

SEQ ID NO: 808575 - DNA, 33 bp, Homo sapien
gagaacttagtcgaaaccaaaatgtttacacca

SEQ ID NO: 808576 - DNA, 33 bp, Homo sapien
gagaacttagtcgaaatcaaaatgtttacacca

SEQ ID NO: 808577 - DNA, 33 bp, Homo sapien
ctgccagacatcaataacagcctgtcaagcccg

SEQ ID NO: 808578 - DNA, 33 bp, Homo sapien
ctgccagacatcaatagcagcctgtcaagcccg

SEQ ID NO: 808579 - DNA, 33 bp, Homo sapien
gctcagttgcaaatcaacacctgtcattaggag

SEQ ID NO: 808580 - DNA, 33 bp, Homo sapien
gctcagttgcaaatcagcacctgtcattaggag

SEQ ID NO: 808581 - DNA, 33 bp, Homo sapien
acatgatttgcaaaaaggttgtgcagcttctct

SEQ ID NO: 808582 - DNA, 33 bp, Homo sapien
acatgatttgcaaaaatgttgtgcagcttctct

SEQ ID NO: 808583 - DNA, 33 bp, Homo sapien
attgcctgagcgtagcagagtgtctagtgtata

SEQ ID NO: 808584 - DNA, 33 bp, Homo sapien
attgcctgagcgtagcggagtgtctagtgtata

SEQ ID NO: 808585 - DNA, 33 bp, Homo sapien
ggcctactctatgacacccacaaaaaataaata

SEQ ID NO: 808586 - DNA, 33 bp, Homo sapien
ggcctactctatgacatccacaaaaaataaata

SEQ ID NO: 808587 - DNA, 33 bp, Homo sapien
aatggcaaaaagaatactatggtaacttatggg

SEQ ID NO: 808588 - DNA, 33 bp, Homo sapien
aatggcaaaaagaatattatggtaacttatggg

SEQ ID NO: 808589 - DNA, 33 bp, Homo sapien
aatgcagtggcatgaacaaggctgactacagcc

SEQ ID NO: 808590 - DNA, 33 bp, Homo sapien
aatgcagtggcatgaataaggctgactacagcc

SEQ ID NO: 808591 - DNA, 33 bp, Homo sapien
tgagataccattaaacaatccttagaatggcta

SEQ ID NO: 808592 - DNA, 33 bp, Homo sapien
tgagataccattaaacgatccttagaatggcta

SEQ ID NO: 808593 - DNA, 33 bp, Homo sapien
tctctgtgtacatttccacttgacaatctcagc

SEQ ID NO: 808594 - DNA, 33 bp, Homo sapien
tctctgtgtacatttctacttgacaatctcagc

SEQ ID NO: 808595 - DNA, 33 bp, Homo sapien
tcaaagagattaaaccacttgtccaagatcgaa

SEQ ID NO: 808596 - DNA, 33 bp, Homo sapien
tcaaagagattaaaccgcttgtccaagatcgaa

SEQ ID NO: 808597 - DNA, 33 bp, Homo sapien
ctaccagtctttggaacaaaaatcttgagcatg

SEQ ID NO: 808598 - DNA, 33 bp, Homo sapien
ctaccagtctttggaagaaaaatcttgagcatg

SEQ ID NO: 808599 - DNA, 33 bp, Homo sapien
atttcagagtctcttaagatgctgcagtcaagc

SEQ ID NO: 808600 - DNA, 33 bp, Homo sapien
atttcagagtctcttaggatgctgcagtcaagc

SEQ ID NO: 808601 - DNA, 33 bp, Homo sapien
cgatgtcagaaaagtcaagggtttctcattcca

SEQ ID NO: 808602 - DNA, 33 bp, Homo sapien
cgatgtcagaaaagtccagggtttctcattcca

SEQ ID NO: 808603 - DNA, 33 bp, Homo sapien
cctgaatcaaatgtgacggtggaagtctttttt

SEQ ID NO: 808604 - DNA, 33 bp, Homo sapien
cctgaatcaaatgtgatggtggaagtctttttt

SEQ ID NO: 808605 - DNA, 33 bp, Homo sapien
cttactacacagtgtaaagcaaaagaacagtaa

SEQ ID NO: 808606 - DNA, 33 bp, Homo sapien
cttactacacagtgtatagcaaaagaacagtaa

SEQ ID NO: 808607 - DNA, 33 bp, Homo sapien
gttagcctttccctccacaacctagtagtctaa

SEQ ID NO: 808608 - DNA, 33 bp, Homo sapien
gttagcctttccctccgcaacctagtagtctaa

SEQ ID NO: 808609 - DNA, 33 bp, Homo sapien
tgagtaatgggcagaaagctaactatggagcct

SEQ ID NO: 808610 - DNA, 33 bp, Homo sapien
tgagtaatgggcagaaggctaactatggagcct

SEQ ID NO: 808611 - DNA, 33 bp, Homo sapien
tggttttctttaacaacgaaggagattaaggtt

SEQ ID NO: 808612 - DNA, 33 bp, Homo sapien
tggttttctttaacaatgaaggagattaaggtt

SEQ ID NO: 808613 - DNA, 33 bp, Homo sapien
gatagtgtctgctgtacattactgtcaccagaa

SEQ ID NO: 808614 - DNA, 33 bp, Homo sapien
gatagtgtctgctgtatattactgtcaccagaa

SEQ ID NO: 808615 - DNA, 33 bp, Homo sapien
tatttctttcacatgagagcagccctcgtggtg

SEQ ID NO: 808616 - DNA, 33 bp, Homo sapien
tatttctttcacatgatagcagccctcgtggtg

SEQ ID NO: 808617 - DNA, 33 bp, Homo sapien
cctgcctacttttgtacgtaaaacatgagtcat

SEQ ID NO: 808618 - DNA, 33 bp, Homo sapien
cctgcctacttttgtatgtaaaacatgagtcat

SEQ ID NO: 808619 - DNA, 33 bp, Homo sapien
cacggtgtcaggattacagcctaagccacaaca

SEQ ID NO: 808620 - DNA, 33 bp, Homo sapien
cacggtgtcaggattatagcctaagccacaaca

SEQ ID NO: 808621 - DNA, 33 bp, Homo sapien
ccctgcattccaggaaacacaagcattatagtg

SEQ ID NO: 808622 - DNA, 33 bp, Homo sapien
ccctgcattccaggaagcacaagcattatagtg

SEQ ID NO: 808623 - DNA, 33 bp, Homo sapien
tgttgtgctactcttgccaacaacttgattctt

SEQ ID NO: 808624 - DNA, 33 bp, Homo sapien
tgttgtgctactcttgtcaacaacttgattctt

SEQ ID NO: 808625 - DNA, 33 bp, Homo sapien
cattaaacattcattacccctctgattctaaaa

SEQ ID NO: 808626 - DNA, 33 bp, Homo sapien
cattaaacattcattagccctctgattctaaaa

SEQ ID NO: 808627 - DNA, 33 bp, Homo sapien
gtgttatcagtttaaccgctgagttgaggtgtc

SEQ ID NO: 808628 - DNA, 33 bp, Homo sapien
gtgttatcagtttaactgctgagttgaggtgtc

SEQ ID NO: 808629 - DNA, 33 bp, Homo sapien
tcacttgctttggtaaatgaacagaatatttgt

SEQ ID NO: 808630 - DNA, 33 bp, Homo sapien
tcacttgctttggtaagtgaacagaatatttgt

SEQ ID NO: 808631 - DNA, 33 bp, Homo sapien
ggcccagggtatttaactacaacgatgtcgcct

SEQ ID NO: 808632 - DNA, 33 bp, Homo sapien
ggcccagggtatttaattacaacgatgtcgcct

SEQ ID NO: 808633 - DNA, 33 bp, Homo sapien
tggtcatgccttaaccatgggtaacagtcatgg

SEQ ID NO: 808634 - DNA, 33 bp, Homo sapien
tggtcatgccttaaccgtgggtaacagtcatgg

SEQ ID NO: 808635 - DNA, 33 bp, Homo sapien
tcaatcaatacgaaccaccaaaccagatcactg

SEQ ID NO: 808636 - DNA, 33 bp, Homo sapien
tcaatcaatacgaaccgccaaaccagatcactg

SEQ ID NO: 808637 - DNA, 33 bp, Homo sapien
gggcatggacctatcacagtctgggagatatta

SEQ ID NO: 808638 - DNA, 33 bp, Homo sapien
gggcatggacctatcagagtctgggagatatta

SEQ ID NO: 808639 - DNA, 33 bp, Homo sapien
agtattaatctagaaacaaacctgcatgtcaat

SEQ ID NO: 808640 - DNA, 33 bp, Homo sapien
agtattaatctagaaataaacctgcatgtcaat

SEQ ID NO: 808641 - DNA, 33 bp, Homo sapien
aagagaatccactgccaactgaaaaatgcaact

SEQ ID NO: 808642 - DNA, 33 bp, Homo sapien
aagagaatccactgcccactgaaaaatgcaact

SEQ ID NO: 808643 - DNA, 33 bp, Homo sapien
caatggggtactattcaaccacaaaaatgattg

SEQ ID NO: 808644 - DNA, 33 bp, Homo sapien
caatggggtactattccaccacaaaaatgattg

SEQ ID NO: 808645 - DNA, 33 bp, Homo sapien
cttctagggtgtacccacaggatcttacaatat

SEQ ID NO: 808646 - DNA, 33 bp, Homo sapien
cttctagggtgtacccccaggatcttacaatat

SEQ ID NO: 808647 - DNA, 33 bp, Homo sapien
ctaaattatagctaaccgcattcaccctatatt

SEQ ID NO: 808648 - DNA, 33 bp, Homo sapien
ctaaattatagctaactgcattcaccctatatt

SEQ ID NO: 808649 - DNA, 33 bp, Homo sapien
tctgccaagggaagtacaagcggaataaacaga

SEQ ID NO: 808650 - DNA, 33 bp, Homo sapien
tctgccaagggaagtataagcggaataaacaga

SEQ ID NO: 808651 - DNA, 33 bp, Homo sapien
attgagaaacagataacagtggtcacctgtgga

SEQ ID NO: 808652 - DNA, 33 bp, Homo sapien
attgagaaacagataatagtggtcacctgtgga

SEQ ID NO: 808653 - DNA, 33 bp, Homo sapien
gtgtccagtggaatgacagtgtcttattggaaa

SEQ ID NO: 808654 - DNA, 33 bp, Homo sapien
gtgtccagtggaatgatagtgtcttattggaaa

SEQ ID NO: 808655 - DNA, 33 bp, Homo sapien
ctacttctgctgaaaacgggcactgccaaataa

SEQ ID NO: 808656 - DNA, 33 bp, Homo sapien
ctacttctgctgaaaatgggcactgccaaataa

SEQ ID NO: 808657 - DNA, 33 bp, Homo sapien
gataattattttaacaaatgttggggactcaaa

SEQ ID NO: 808658 - DNA, 33 bp, Homo sapien
gataattattttaacacatgttggggactcaaa

SEQ ID NO: 808659 - DNA, 33 bp, Homo sapien
ggcaaggtgaaattcggaagtgatgcaggattt

SEQ ID NO: 808660 - DNA, 33 bp, Homo sapien
ggcaaggtgaaattcgtaagtgatgcaggattt

SEQ ID NO: 808661 - DNA, 33 bp, Homo sapien
ggccagacctgattggaattataccttggaata

SEQ ID NO: 808662 - DNA, 33 bp, Homo sapien
ggccagacctgattgggattataccttggaata

SEQ ID NO: 808663 - DNA, 33 bp, Homo sapien
aattacattttttccacgacggacatgcctttc

SEQ ID NO: 808664 - DNA, 33 bp, Homo sapien
aattacattttttccatgacggacatgcctttc

SEQ ID NO: 808665 - DNA, 33 bp, Homo sapien
cagtgatcaccattcacacaccagtggctttgt

SEQ ID NO: 808666 - DNA, 33 bp, Homo sapien
cagtgatcaccattcatacaccagtggctttgt

SEQ ID NO: 808667 - DNA, 33 bp, Homo sapien
tttactcagactagaactgtagtcaatcagtga

SEQ ID NO: 808668 - DNA, 33 bp, Homo sapien
tttactcagactagaagtgtagtcaatcagtga

SEQ ID NO: 808669 - DNA, 33 bp, Homo sapien
tagtctgagtaaatggaaacagcttcctgttat

SEQ ID NO: 808670 - DNA, 33 bp, Homo sapien
tagtctgagtaaatggcaacagcttcctgttat

SEQ ID NO: 808671 - DNA, 33 bp, Homo sapien
caatgaatcaggagacaaatgaatcagaacatg

SEQ ID NO: 808672 - DNA, 33 bp, Homo sapien
caatgaatcaggagacgaatgaatcagaacatg

SEQ ID NO: 808673 - DNA, 33 bp, Homo sapien
cttatcaacatgagaaaagaagggaagcttatg

SEQ ID NO: 808674 - DNA, 33 bp, Homo sapien
cttatcaacatgagaacagaagggaagcttatg

SEQ ID NO: 808675 - DNA, 33 bp, Homo sapien
tggaaatccaaaggaaagcagcaagcaggcatt

SEQ ID NO: 808676 - DNA, 33 bp, Homo sapien
tggaaatccaaaggaaggcagcaagcaggcatt

SEQ ID NO: 808677 - DNA, 33 bp, Homo sapien
ccattagaaacacaacactagactcttcaagtg

SEQ ID NO: 808678 - DNA, 33 bp, Homo sapien
ccattagaaacacaactctagactcttcaagtg

SEQ ID NO: 808679 - DNA, 33 bp, Homo sapien
tatcaatttcaacaggccaaggaacattaacat

SEQ ID NO: 808680 - DNA, 33 bp, Homo sapien
tatcaatttcaacaggtcaaggaacattaacat

SEQ ID NO: 808681 - DNA, 33 bp, Homo sapien
cataaggttctgattggagcttgactatgtgcc

SEQ ID NO: 808682 - DNA, 33 bp, Homo sapien
cataaggttctgattgtagcttgactatgtgcc

SEQ ID NO: 808683 - DNA, 33 bp, Homo sapien
tcttgggaagcagagcaaggcaatgtggaggca

SEQ ID NO: 808684 - DNA, 33 bp, Homo sapien
tcttgggaagcagagcgaggcaatgtggaggca

SEQ ID NO: 808685 - DNA, 33 bp, Homo sapien
gctcagaaaatgccaaatggctcaggagagata

SEQ ID NO: 808686 - DNA, 33 bp, Homo sapien
gctcagaaaatgccaagtggctcaggagagata

SEQ ID NO: 808687 - DNA, 33 bp, Homo sapien
acttccataataacaacgaacaagactctaagg

SEQ ID NO: 808688 - DNA, 33 bp, Homo sapien
acttccataataacaatgaacaagactctaagg

SEQ ID NO: 808689 - DNA, 33 bp, Homo sapien
cctattctacagtcaaaaaaaacaactgattgg

SEQ ID NO: 808690 - DNA, 33 bp, Homo sapien
cctattctacagtcaacaaaaacaactgattgg

SEQ ID NO: 808691 - DNA, 33 bp, Homo sapien
agctcctaatccacatcagctttgatggcaaac

SEQ ID NO: 808692 - DNA, 33 bp, Homo sapien
agctcctaatccacattagctttgatggcaaac

SEQ ID NO: 808693 - DNA, 33 bp, Homo sapien
gaaaggaaccttgaaccaaagcagcagaggtta

SEQ ID NO: 808694 - DNA, 33 bp, Homo sapien
gaaaggaaccttgaacgaaagcagcagaggtta

SEQ ID NO: 808695 - DNA, 33 bp, Homo sapien
atcagagatcaatggaaactttcagcacagaag

SEQ ID NO: 808696 - DNA, 33 bp, Homo sapien
atcagagatcaatggagactttcagcacagaag

SEQ ID NO: 808697 - DNA, 33 bp, Homo sapien
tgagtagatgggtcaacgtcagagggtagaggg

SEQ ID NO: 808698 - DNA, 33 bp, Homo sapien
tgagtagatgggtcaatgtcagagggtagaggg

SEQ ID NO: 808699 - DNA, 33 bp, Homo sapien
agtcacacagcaaataaggggccaagctagaaa

SEQ ID NO: 808700 - DNA, 33 bp, Homo sapien
agtcacacagcaaatagggggccaagctagaaa

SEQ ID NO: 808701 - DNA, 33 bp, Homo sapien
ttttccatacagaaacccaacagatcaaaccat

SEQ ID NO: 808702 - DNA, 33 bp, Homo sapien
ttttccatacagaaactcaacagatcaaaccat

SEQ ID NO: 808703 - DNA, 33 bp, Homo sapien
ttctacacactggtgacgcaggaacaaacaaca

SEQ ID NO: 808704 - DNA, 33 bp, Homo sapien
ttctacacactggtgatgcaggaacaaacaaca

SEQ ID NO: 808705 - DNA, 33 bp, Homo sapien
gttaccataaaacttcacatcttggattttata

SEQ ID NO: 808706 - DNA, 33 bp, Homo sapien
gttaccataaaacttcgcatcttggattttata

SEQ ID NO: 808707 - DNA, 33 bp, Homo sapien
agttccaactagttccaaccagtgtgctatgta

SEQ ID NO: 808708 - DNA, 33 bp, Homo sapien
agttccaactagttccgaccagtgtgctatgta

SEQ ID NO: 808709 - DNA, 33 bp, Homo sapien
ctcaaggcagccatcactaagcaagcacagcac

SEQ ID NO: 808710 - DNA, 33 bp, Homo sapien
ctcaaggcagccatcagtaagcaagcacagcac

SEQ ID NO: 808711 - DNA, 33 bp, Homo sapien
aaaaaaagtcctattcaatctcattcttcctgc

SEQ ID NO: 808712 - DNA, 33 bp, Homo sapien
aaaaaaagtcctattcgatctcattcttcctgc

SEQ ID NO: 808713 - DNA, 33 bp, Homo sapien
caagccgaggaggaacagcactagaaatctcga

SEQ ID NO: 808714 - DNA, 33 bp, Homo sapien
caagccgaggaggaacggcactagaaatctcga

SEQ ID NO: 808715 - DNA, 33 bp, Homo sapien
gaactctctgggcatcaagaagaagcttttcaa

SEQ ID NO: 808716 - DNA, 33 bp, Homo sapien
gaactctctgggcatcgagaagaagcttttcaa

SEQ ID NO: 808717 - DNA, 33 bp, Homo sapien
ctcaaagttttccccagtcaaaagcatttgaaa

SEQ ID NO: 808718 - DNA, 33 bp, Homo sapien
ctcaaagttttccccattcaaaagcatttgaaa

SEQ ID NO: 808719 - DNA, 33 bp, Homo sapien
ctccccagctcacactcaaaaactatttgttgg

SEQ ID NO: 808720 - DNA, 33 bp, Homo sapien
ctccccagctcacactgaaaaactatttgttgg

SEQ ID NO: 808721 - DNA, 33 bp, Homo sapien
gttcatttttcatgcaatattagccaatgtcac

SEQ ID NO: 808722 - DNA, 33 bp, Homo sapien
gttcatttttcatgcactattagccaatgtcac

SEQ ID NO: 808723 - DNA, 33 bp, Homo sapien
gatggccactagaaaccgaaaaggacaagaaaa

SEQ ID NO: 808724 - DNA, 33 bp, Homo sapien
gatggccactagaaactgaaaaggacaagaaaa

SEQ ID NO: 808725 - DNA, 33 bp, Homo sapien
cttacaccgatgtctcaataggtggtctcccag

SEQ ID NO: 808726 - DNA, 33 bp, Homo sapien
cttacaccgatgtctcgataggtggtctcccag

SEQ ID NO: 808727 - DNA, 33 bp, Homo sapien
aagagaaaacagccgcacaattagctggagttc

SEQ ID NO: 808728 - DNA, 33 bp, Homo sapien
aagagaaaacagccgcgcaattagctggagttc

SEQ ID NO: 808729 - DNA, 33 bp, Homo sapien
agcatacacttttctaggccgttttacaaggtg

SEQ ID NO: 808730 - DNA, 33 bp, Homo sapien
agcatacacttttctatgccgttttacaaggtg

SEQ ID NO: 808731 - DNA, 33 bp, Homo sapien
actatgaagtctcttgaagccattttaatgcaa

SEQ ID NO: 808732 - DNA, 33 bp, Homo sapien
actatgaagtctcttgcagccattttaatgcaa

SEQ ID NO: 808733 - DNA, 33 bp, Homo sapien
gaaaccccacccaagagatacctcatactgggt

SEQ ID NO: 808734 - DNA, 33 bp, Homo sapien
gaaaccccacccaagatatacctcatactgggt

SEQ ID NO: 808735 - DNA, 33 bp, Homo sapien
ggggtttcatatcaagccaatggaggcattctt

SEQ ID NO: 808736 - DNA, 33 bp, Homo sapien
ggggtttcatatcaaggcaatggaggcattctt

SEQ ID NO: 808737 - DNA, 33 bp, Homo sapien
ccactgcatgtagcaagaagtgaaacacacttc

SEQ ID NO: 808738 - DNA, 33 bp, Homo sapien
ccactgcatgtagcaataagtgaaacacacttc

SEQ ID NO: 808739 - DNA, 33 bp, Homo sapien
gggattgttgtgttcaatctctgagatacagcc

SEQ ID NO: 808740 - DNA, 33 bp, Homo sapien
gggattgttgtgttcagtctctgagatacagcc

SEQ ID NO: 808741 - DNA, 33 bp, Homo sapien
taggctttgctgaagacgttggagttatagaga

SEQ ID NO: 808742 - DNA, 33 bp, Homo sapien
taggctttgctgaagatgttggagttatagaga

SEQ ID NO: 808743 - DNA, 33 bp, Homo sapien
aggttccagggagatacgtaatcaactgaccca

SEQ ID NO: 808744 - DNA, 33 bp, Homo sapien
aggttccagggagatatgtaatcaactgaccca

SEQ ID NO: 808745 - DNA, 33 bp, Homo sapien
atagtgcttgaagtcacagaagaaagaaaaagt

SEQ ID NO: 808746 - DNA, 33 bp, Homo sapien
atagtgcttgaagtcatagaagaaagaaaaagt

SEQ ID NO: 808747 - DNA, 33 bp, Homo sapien
agtggaaattaagaacagccataactaagcaaa

SEQ ID NO: 808748 - DNA, 33 bp, Homo sapien
agtggaaattaagaacggccataactaagcaaa

SEQ ID NO: 808749 - DNA, 33 bp, Homo sapien
cattgaagcttgtctaaagaaggcctgaactaa

SEQ ID NO: 808750 - DNA, 33 bp, Homo sapien
cattgaagcttgtctatagaaggcctgaactaa

SEQ ID NO: 808751 - DNA, 33 bp, Homo sapien
gtattagtttgtggcccatgtaagcatatttta

SEQ ID NO: 808752 - DNA, 33 bp, Homo sapien
gtattagtttgtggcctatgtaagcatatttta

SEQ ID NO: 808753 - DNA, 33 bp, Homo sapien
atatgtcatttccgaacgattgactatgattct

SEQ ID NO: 808754 - DNA, 33 bp, Homo sapien
atatgtcatttccgaatgattgactatgattct

SEQ ID NO: 808755 - DNA, 33 bp, Homo sapien
cctgtttttctgccaacggactgtgtgtgaaga

SEQ ID NO: 808756 - DNA, 33 bp, Homo sapien
cctgtttttctgccaatggactgtgtgtgaaga

SEQ ID NO: 808757 - DNA, 33 bp, Homo sapien
atattctcttcttaccacgaaaggaaaaagact

SEQ ID NO: 808758 - DNA, 33 bp, Homo sapien
atattctcttcttaccgcgaaaggaaaaagact

SEQ ID NO: 808759 - DNA, 33 bp, Homo sapien
atgttaggcactaaatcattaatgcattatctc

SEQ ID NO: 808760 - DNA, 33 bp, Homo sapien
atgttaggcactaaatgattaatgcattatctc

SEQ ID NO: 808761 - DNA, 33 bp, Homo sapien
gcctaaatgtgaggaactgaggatttgaatgac

SEQ ID NO: 808762 - DNA, 33 bp, Homo sapien
gcctaaatgtgaggaattgaggatttgaatgac

SEQ ID NO: 808763 - DNA, 33 bp, Homo sapien
tatgccagaatccagacgtaagatggaagttct

SEQ ID NO: 808764 - DNA, 33 bp, Homo sapien
tatgccagaatccagatgtaagatggaagttct

SEQ ID NO: 808765 - DNA, 33 bp, Homo sapien
atggaagttctcaaaaataagtctagaaactgt

SEQ ID NO: 808766 - DNA, 33 bp, Homo sapien
atggaagttctcaaaactaagtctagaaactgt

SEQ ID NO: 808767 - DNA, 33 bp, Homo sapien
aatagaaggtgataaaatgttagcactggttat

SEQ ID NO: 808768 - DNA, 33 bp, Homo sapien
aatagaaggtgataaactgttagcactggttat

SEQ ID NO: 808769 - DNA, 33 bp, Homo sapien
atgtcaaggatcaacaagtaaggtgaacagacg

SEQ ID NO: 808770 - DNA, 33 bp, Homo sapien
atgtcaaggatcaacatgtaaggtgaacagacg

SEQ ID NO: 808771 - DNA, 33 bp, Homo sapien
gatattgtattacagacgcttccagaggtaaaa

SEQ ID NO: 808772 - DNA, 33 bp, Homo sapien
gatattgtattacagatgcttccagaggtaaaa

SEQ ID NO: 808773 - DNA, 33 bp, Homo sapien
aagcttagcctttaccagggaagacagataatt

SEQ ID NO: 808774 - DNA, 33 bp, Homo sapien
aagcttagcctttaccggggaagacagataatt

SEQ ID NO: 808775 - DNA, 33 bp, Homo sapien
tatacctggagatgcaaaggaaaactctaattt

SEQ ID NO: 808776 - DNA, 33 bp, Homo sapien
tatacctggagatgcagaggaaaactctaattt

SEQ ID NO: 808777 - DNA, 33 bp, Homo sapien
tggctactatgttctaacccttctccctgctgt

SEQ ID NO: 808778 - DNA, 33 bp, Homo sapien
tggctactatgttctatcccttctccctgctgt

SEQ ID NO: 808779 - DNA, 33 bp, Homo sapien
cctgaacgtagccagcaatcaggttactgtcaa

SEQ ID NO: 808780 - DNA, 33 bp, Homo sapien
cctgaacgtagccagcgatcaggttactgtcaa

SEQ ID NO: 808781 - DNA, 33 bp, Homo sapien
agacttaaataaccacacaataatagtgggagg

SEQ ID NO: 808782 - DNA, 33 bp, Homo sapien
agacttaaataaccacgcaataatagtgggagg

SEQ ID NO: 808783 - DNA, 33 bp, Homo sapien
ttagtggatgagtgacacatgagtctaatgcca

SEQ ID NO: 808784 - DNA, 33 bp, Homo sapien
ttagtggatgagtgacccatgagtctaatgcca

SEQ ID NO: 808785 - DNA, 33 bp, Homo sapien
agtctttcagttaagagaaatagtaggtagcag

SEQ ID NO: 808786 - DNA, 33 bp, Homo sapien
agtctttcagttaagataaatagtaggtagcag

SEQ ID NO: 808787 - DNA, 33 bp, Homo sapien
ggagaagagcaacaaaactcaccagtagataaa

SEQ ID NO: 808788 - DNA, 33 bp, Homo sapien
ggagaagagcaacaaagctcaccagtagataaa

SEQ ID NO: 808789 - DNA, 33 bp, Homo sapien
ggcaacacatggggaacgttgacaaggcccatc

SEQ ID NO: 808790 - DNA, 33 bp, Homo sapien
ggcaacacatggggaatgttgacaaggcccatc

SEQ ID NO: 808791 - DNA, 33 bp, Homo sapien
agtttggatccttgaaaaaatgactatagtcca

SEQ ID NO: 808792 - DNA, 33 bp, Homo sapien
agtttggatccttgaacaaatgactatagtcca

SEQ ID NO: 808793 - DNA, 33 bp, Homo sapien
taaccaattgcctgcaacagttcaggcttcctt

SEQ ID NO: 808794 - DNA, 33 bp, Homo sapien
taaccaattgcctgcagcagttcaggcttcctt

SEQ ID NO: 808795 - DNA, 33 bp, Homo sapien
gtaaagctgtatagaccgcaaaaaaggctctaa

SEQ ID NO: 808796 - DNA, 33 bp, Homo sapien
gtaaagctgtatagactgcaaaaaaggctctaa

SEQ ID NO: 808797 - DNA, 33 bp, Homo sapien
aatttctggaataatgaaacaactgcttccagg

SEQ ID NO: 808798 - DNA, 33 bp, Homo sapien
aatttctggaataatgtaacaactgcttccagg

SEQ ID NO: 808799 - DNA, 33 bp, Homo sapien
aatatgcggaaggggacgttggtacctttcact

SEQ ID NO: 808800 - DNA, 33 bp, Homo sapien
aatatgcggaaggggatgttggtacctttcact

SEQ ID NO: 808801 - DNA, 33 bp, Homo sapien
ataaatttgtgagtgacagtctataaaacagtc

SEQ ID NO: 808802 - DNA, 33 bp, Homo sapien
ataaatttgtgagtgatagtctataaaacagtc

SEQ ID NO: 808803 - DNA, 33 bp, Homo sapien
aaatatcctgtgatgagctcctggagtctaaat

SEQ ID NO: 808804 - DNA, 33 bp, Homo sapien
aaatatcctgtgatgatctcctggagtctaaat

SEQ ID NO: 808805 - DNA, 33 bp, Homo sapien
cctcccaaagtaaagcagaataagagacagaaa

SEQ ID NO: 808806 - DNA, 33 bp, Homo sapien
cctcccaaagtaaagctgaataagagacagaaa

SEQ ID NO: 808807 - DNA, 33 bp, Homo sapien
ctgattggatcaaggcaaaaagcaccagtgtat

SEQ ID NO: 808808 - DNA, 33 bp, Homo sapien
ctgattggatcaaggccaaaagcaccagtgtat

SEQ ID NO: 808809 - DNA, 33 bp, Homo sapien
attctcctaacttcacaactttgtgcttttttg

SEQ ID NO: 808810 - DNA, 33 bp, Homo sapien
attctcctaacttcactactttgtgcttttttg

SEQ ID NO: 808811 - DNA, 33 bp, Homo sapien
acctgctaagtatcagaacttttcattgtattc

SEQ ID NO: 808812 - DNA, 33 bp, Homo sapien
acctgctaagtatcaggacttttcattgtattc

SEQ ID NO: 808813 - DNA, 33 bp, Homo sapien
ggctgagttcagcttacgggttatagttagcca

SEQ ID NO: 808814 - DNA, 33 bp, Homo sapien
ggctgagttcagcttatgggttatagttagcca

SEQ ID NO: 808815 - DNA, 33 bp, Homo sapien
acttcctaagcattaccgagagcaaagctcatc

SEQ ID NO: 808816 - DNA, 33 bp, Homo sapien
acttcctaagcattactgagagcaaagctcatc

SEQ ID NO: 808817 - DNA, 33 bp, Homo sapien
gaagaaatgtttgagtaaaagtttgtcttgagg

SEQ ID NO: 808818 - DNA, 33 bp, Homo sapien
gaagaaatgtttgagtgaaagtttgtcttgagg

SEQ ID NO: 808819 - DNA, 33 bp, Homo sapien
tcagttcagccttagcaaccttcctttcccctg

SEQ ID NO: 808820 - DNA, 33 bp, Homo sapien
tcagttcagccttagcgaccttcctttcccctg

SEQ ID NO: 808821 - DNA, 33 bp, Homo sapien
atttgcttcaggaagacggatttggaaaggaag

SEQ ID NO: 808822 - DNA, 33 bp, Homo sapien
atttgcttcaggaagatggatttggaaaggaag

SEQ ID NO: 808823 - DNA, 33 bp, Homo sapien
ttcaaggctcctaaaacgaatgactgagggtta

SEQ ID NO: 808824 - DNA, 33 bp, Homo sapien
ttcaaggctcctaaaatgaatgactgagggtta

SEQ ID NO: 808825 - DNA, 33 bp, Homo sapien
ctgaaaaagttgcttcccaaggtttagtgttgc

SEQ ID NO: 808826 - DNA, 33 bp, Homo sapien
ctgaaaaagttgcttctcaaggtttagtgttgc

SEQ ID NO: 808827 - DNA, 33 bp, Homo sapien
aattagatgggagataaagttgtaaagttaggg

SEQ ID NO: 808828 - DNA, 33 bp, Homo sapien
aattagatgggagatacagttgtaaagttaggg

SEQ ID NO: 808829 - DNA, 33 bp, Homo sapien
aactggcatggattaaaaaaccatacgtccagt

SEQ ID NO: 808830 - DNA, 33 bp, Homo sapien
aactggcatggattaagaaaccatacgtccagt

SEQ ID NO: 808831 - DNA, 33 bp, Homo sapien
ctttacgggattgttacgaagatgtgattggtt

SEQ ID NO: 808832 - DNA, 33 bp, Homo sapien
ctttacgggattgttaggaagatgtgattggtt

SEQ ID NO: 808833 - DNA, 33 bp, Homo sapien
ttaacatcttcctagcaatggaaagaatgctga

SEQ ID NO: 808834 - DNA, 33 bp, Homo sapien
ttaacatcttcctagcgatggaaagaatgctga

SEQ ID NO: 808835 - DNA, 33 bp, Homo sapien
agatatgcagtgctgacgtagactgaattgtga

SEQ ID NO: 808836 - DNA, 33 bp, Homo sapien
agatatgcagtgctgatgtagactgaattgtga

SEQ ID NO: 808837 - DNA, 33 bp, Homo sapien
ctgaaatggctttgggaatgaaactcatgaagc

SEQ ID NO: 808838 - DNA, 33 bp, Homo sapien
ctgaaatggctttggggatgaaactcatgaagc

SEQ ID NO: 808839 - DNA, 33 bp, Homo sapien
tttccattttgaccataagtaattctcagatga

SEQ ID NO: 808840 - DNA, 33 bp, Homo sapien
tttccattttgaccatgagtaattctcagatga

SEQ ID NO: 808841 - DNA, 33 bp, Homo sapien
ggtttttttctggaaacgggactgtggtacaca

SEQ ID NO: 808842 - DNA, 33 bp, Homo sapien
ggtttttttctggaaatgggactgtggtacaca

SEQ ID NO: 808843 - DNA, 33 bp, Homo sapien
cactgtgactctagaaaacaggaaaaagtatgc

SEQ ID NO: 808844 - DNA, 33 bp, Homo sapien
cactgtgactctagaatacaggaaaaagtatgc

SEQ ID NO: 808845 - DNA, 33 bp, Homo sapien
aatcactgggatgaaacgttttggagaaggtga

SEQ ID NO: 808846 - DNA, 33 bp, Homo sapien
aatcactgggatgaaatgttttggagaaggtga

SEQ ID NO: 808847 - DNA, 33 bp, Homo sapien
cctccttctcaccaagaactagatccatgacct

SEQ ID NO: 808848 - DNA, 33 bp, Homo sapien
cctccttctcaccaaggactagatccatgacct

SEQ ID NO: 808849 - DNA, 33 bp, Homo sapien
gcttttataaataaacggagtcagcgataggtt

SEQ ID NO: 808850 - DNA, 33 bp, Homo sapien
gcttttataaataaactgagtcagcgataggtt

SEQ ID NO: 808851 - DNA, 33 bp, Homo sapien
acacaatatcacagaaagagtctcagccattga

SEQ ID NO: 808852 - DNA, 33 bp, Homo sapien
acacaatatcacagaaggagtctcagccattga

SEQ ID NO: 808853 - DNA, 33 bp, Homo sapien
acttttgtgcatttaagtcttgtctcctcaatt

SEQ ID NO: 808854 - DNA, 33 bp, Homo sapien
acttttgtgcatttaattcttgtctcctcaatt

SEQ ID NO: 808855 - DNA, 33 bp, Homo sapien
gcaaggtgataggaccaaggaaggcacagtaag

SEQ ID NO: 808856 - DNA, 33 bp, Homo sapien
gcaaggtgataggaccgaggaaggcacagtaag

SEQ ID NO: 808857 - DNA, 33 bp, Homo sapien
atgactatatttgacaccttttggaatgtttat

SEQ ID NO: 808858 - DNA, 33 bp, Homo sapien
atgactatatttgacagcttttggaatgtttat

SEQ ID NO: 808859 - DNA, 33 bp, Homo sapien
gaaatgaaagagaagacgggacctgagaatgcc

SEQ ID NO: 808860 - DNA, 33 bp, Homo sapien
gaaatgaaagagaagatgggacctgagaatgcc

SEQ ID NO: 808861 - DNA, 33 bp, Homo sapien
aaacatttcaaagttacgttacaggcctagata

SEQ ID NO: 808862 - DNA, 33 bp, Homo sapien
aaacatttcaaagttatgttacaggcctagata

SEQ ID NO: 808863 - DNA, 33 bp, Homo sapien
gatttcaagattaataataggccaattagagaa

SEQ ID NO: 808864 - DNA, 33 bp, Homo sapien
gatttcaagattaatagtaggccaattagagaa

SEQ ID NO: 808865 - DNA, 33 bp, Homo sapien
cacaggctcagttcctcacttctgcaggccttt

SEQ ID NO: 808866 - DNA, 33 bp, Homo sapien
cacaggctcagttcctgacttctgcaggccttt

SEQ ID NO: 808867 - DNA, 33 bp, Homo sapien
cagggatctatgcagacgatgacaagattatga

SEQ ID NO: 808868 - DNA, 33 bp, Homo sapien
cagggatctatgcagatgatgacaagattatga

SEQ ID NO: 808869 - DNA, 33 bp, Homo sapien
acagtcaatttctctacgaaagccaaaactatt

SEQ ID NO: 808870 - DNA, 33 bp, Homo sapien
acagtcaatttctctatgaaagccaaaactatt

SEQ ID NO: 808871 - DNA, 33 bp, Homo sapien
aacaggacgatgtttcccagtgcagaagaggag

SEQ ID NO: 808872 - DNA, 33 bp, Homo sapien
aacaggacgatgtttctcagtgcagaagaggag

SEQ ID NO: 808873 - DNA, 33 bp, Homo sapien
agagatttgatttacactgctcattaggctacc

SEQ ID NO: 808874 - DNA, 33 bp, Homo sapien
agagatttgatttacattgctcattaggctacc

SEQ ID NO: 808875 - DNA, 33 bp, Homo sapien
caaggaattactggtggactttcatgtcagtgt

SEQ ID NO: 808876 - DNA, 33 bp, Homo sapien
caaggaattactggtgtactttcatgtcagtgt

SEQ ID NO: 808877 - DNA, 33 bp, Homo sapien
cttggtgttcttcccacggtatcccaggctcct

SEQ ID NO: 808878 - DNA, 33 bp, Homo sapien
cttggtgttcttcccatggtatcccaggctcct

SEQ ID NO: 808879 - DNA, 33 bp, Homo sapien
ggtgactcctttagtgaaagaacacattctttc

SEQ ID NO: 808880 - DNA, 33 bp, Homo sapien
ggtgactcctttagtggaagaacacattctttc

SEQ ID NO: 808881 - DNA, 33 bp, Homo sapien
aatggatgctgggaaaggatgaggccaaatgtc

SEQ ID NO: 808882 - DNA, 33 bp, Homo sapien
aatggatgctgggaaatgatgaggccaaatgtc

SEQ ID NO: 808883 - DNA, 33 bp, Homo sapien
tcagagccacataagaagacatccagcatgata

SEQ ID NO: 808884 - DNA, 33 bp, Homo sapien
tcagagccacataagaggacatccagcatgata

SEQ ID NO: 808885 - DNA, 33 bp, Homo sapien
ttttctttgtagaaaacctaatggtcactggaa

SEQ ID NO: 808886 - DNA, 33 bp, Homo sapien
ttttctttgtagaaaatctaatggtcactggaa

SEQ ID NO: 808887 - DNA, 33 bp, Homo sapien
cggtcacactataatccccacgagacagcagga

SEQ ID NO: 808888 - DNA, 33 bp, Homo sapien
cggtcacactataatcgccacgagacagcagga

SEQ ID NO: 808889 - DNA, 33 bp, Homo sapien
tactagtcacatacaggctaggccattcaataa

SEQ ID NO: 808890 - DNA, 33 bp, Homo sapien
tactagtcacatacagtctaggccattcaataa

SEQ ID NO: 808891 - DNA, 33 bp, Homo sapien
aaatctaaggtgttatcaagctataagatataa

SEQ ID NO: 808892 - DNA, 33 bp, Homo sapien
aaatctaaggtgttatgaagctataagatataa

SEQ ID NO: 808893 - DNA, 33 bp, Homo sapien
ccttcttttatatcaagtgaccaggatgatacc

SEQ ID NO: 808894 - DNA, 33 bp, Homo sapien
ccttcttttatatcaattgaccaggatgatacc

SEQ ID NO: 808895 - DNA, 33 bp, Homo sapien
aatgaatggtagccacaatatttgtcctttatt

SEQ ID NO: 808896 - DNA, 33 bp, Homo sapien
aatgaatggtagccacgatatttgtcctttatt

SEQ ID NO: 808897 - DNA, 33 bp, Homo sapien
aagtatttgtggagaaactacataggcaagaca

SEQ ID NO: 808898 - DNA, 33 bp, Homo sapien
aagtatttgtggagaagctacataggcaagaca

SEQ ID NO: 808899 - DNA, 33 bp, Homo sapien
atttgcacattgtagaatatactgaaaatctat

SEQ ID NO: 808900 - DNA, 33 bp, Homo sapien
atttgcacattgtagagtatactgaaaatctat

SEQ ID NO: 808901 - DNA, 33 bp, Homo sapien
tggtgatttctaagagccaacatggattcacca

SEQ ID NO: 808902 - DNA, 33 bp, Homo sapien
tggtgatttctaagagtcaacatggattcacca

SEQ ID NO: 808903 - DNA, 33 bp, Homo sapien
cttgaatgaatgaaaacgtgataaccactggga

SEQ ID NO: 808904 - DNA, 33 bp, Homo sapien
cttgaatgaatgaaaatgtgataaccactggga

SEQ ID NO: 808905 - DNA, 33 bp, Homo sapien
aagaattgggttggaacgagaagcatggaaaat

SEQ ID NO: 808906 - DNA, 33 bp, Homo sapien
aagaattgggttggaatgagaagcatggaaaat

SEQ ID NO: 808907 - DNA, 33 bp, Homo sapien
acgtgatgactaagaaaaaaacactgatccacg

SEQ ID NO: 808908 - DNA, 33 bp, Homo sapien
acgtgatgactaagaacaaaacactgatccacg

SEQ ID NO: 808909 - DNA, 33 bp, Homo sapien
gtatgagagacatttaacaggagaccttaggag

SEQ ID NO: 808910 - DNA, 33 bp, Homo sapien
gtatgagagacatttagcaggagaccttaggag

SEQ ID NO: 808911 - DNA, 33 bp, Homo sapien
acatggctattggcaaaagatcttagcttcttg

SEQ ID NO: 808912 - DNA, 33 bp, Homo sapien
acatggctattggcaacagatcttagcttcttg

SEQ ID NO: 808913 - DNA, 33 bp, Homo sapien
gtgacagagcctgcaaagtccacaaagcctaaa

SEQ ID NO: 808914 - DNA, 33 bp, Homo sapien
gtgacagagcctgcaaggtccacaaagcctaaa

SEQ ID NO: 808915 - DNA, 33 bp, Homo sapien
acacagggtgtctccccatccagaggcctttcc

SEQ ID NO: 808916 - DNA, 33 bp, Homo sapien
acacagggtgtctccctatccagaggcctttcc

SEQ ID NO: 808917 - DNA, 33 bp, Homo sapien
catctcagtggattagcaccataaacatttatt

SEQ ID NO: 808918 - DNA, 33 bp, Homo sapien
catctcagtggattaggaccataaacatttatt

SEQ ID NO: 808919 - DNA, 33 bp, Homo sapien
ccactgcatcagtgtaagagttggcaggggctg

SEQ ID NO: 808920 - DNA, 33 bp, Homo sapien
ccactgcatcagtgtaggagttggcaggggctg

SEQ ID NO: 808921 - DNA, 33 bp, Homo sapien
atggggatttgagcacaaggcaagccagacagc

SEQ ID NO: 808922 - DNA, 33 bp, Homo sapien
atggggatttgagcacgaggcaagccagacagc

SEQ ID NO: 808923 - DNA, 33 bp, Homo sapien
atgcacaaagttcttacgagtttaggcgtcctt

SEQ ID NO: 808924 - DNA, 33 bp, Homo sapien
atgcacaaagttcttatgagtttaggcgtcctt

SEQ ID NO: 808925 - DNA, 33 bp, Homo sapien
ttctatccaccaagcacatggacttacattgaa

SEQ ID NO: 808926 - DNA, 33 bp, Homo sapien
ttctatccaccaagcagatggacttacattgaa

SEQ ID NO: 808927 - DNA, 33 bp, Homo sapien
gagggaaagccgctggcaactggaagggagaca

SEQ ID NO: 808928 - DNA, 33 bp, Homo sapien
gagggaaagccgctggtaactggaagggagaca

SEQ ID NO: 808929 - DNA, 33 bp, Homo sapien
cctgggctgctcatgaaagtggactggaagtgg

SEQ ID NO: 808930 - DNA, 33 bp, Homo sapien
cctgggctgctcatgagagtggactggaagtgg

SEQ ID NO: 808931 - DNA, 33 bp, Homo sapien
cccaaaatataccttcaatgcatctagtctcca

SEQ ID NO: 808932 - DNA, 33 bp, Homo sapien
cccaaaatataccttccatgcatctagtctcca

SEQ ID NO: 808933 - DNA, 33 bp, Homo sapien
gcaaggaaggcaaatgcacaattagtatcaggg

SEQ ID NO: 808934 - DNA, 33 bp, Homo sapien
gcaaggaaggcaaatgtacaattagtatcaggg

SEQ ID NO: 808935 - DNA, 33 bp, Homo sapien
gggcatttctatgtgcagatgaaataggtggca

SEQ ID NO: 808936 - DNA, 33 bp, Homo sapien
gggcatttctatgtgcggatgaaataggtggca

SEQ ID NO: 808937 - DNA, 33 bp, Homo sapien
attgtttgaactacagcatcaagtattacttat

SEQ ID NO: 808938 - DNA, 33 bp, Homo sapien
attgtttgaactacaggatcaagtattacttat

SEQ ID NO: 808939 - DNA, 33 bp, Homo sapien
taatactcacgacaacaccaagaggcagattcc

SEQ ID NO: 808940 - DNA, 33 bp, Homo sapien
taatactcacgacaaccccaagaggcagattcc

SEQ ID NO: 808941 - DNA, 33 bp, Homo sapien
ttcttttaacctagcacagttattgtcaaccaa

SEQ ID NO: 808942 - DNA, 33 bp, Homo sapien
ttcttttaacctagcatagttattgtcaaccaa

SEQ ID NO: 808943 - DNA, 33 bp, Homo sapien
tgaagaggacggaagaactttatgatgatccac

SEQ ID NO: 808944 - DNA, 33 bp, Homo sapien
tgaagaggacggaagacctttatgatgatccac

SEQ ID NO: 808945 - DNA, 33 bp, Homo sapien
gtggggctccagcaaacggtctccaggaagtga

SEQ ID NO: 808946 - DNA, 33 bp, Homo sapien
gtggggctccagcaaatggtctccaggaagtga

SEQ ID NO: 808947 - DNA, 33 bp, Homo sapien
tttctccaaaacctcaccagaatctgttgtttt

SEQ ID NO: 808948 - DNA, 33 bp, Homo sapien
tttctccaaaacctcatcagaatctgttgtttt

SEQ ID NO: 808949 - DNA, 33 bp, Homo sapien
ctcagttgtgaaaaccaaaacattaccaaaggc

SEQ ID NO: 808950 - DNA, 33 bp, Homo sapien
ctcagttgtgaaaaccgaaacattaccaaaggc

SEQ ID NO: 808951 - DNA, 33 bp, Homo sapien
ttcttacactaggttgcacattgaagtcacaga

SEQ ID NO: 808952 - DNA, 33 bp, Homo sapien
ttcttacactaggttgtacattgaagtcacaga

SEQ ID NO: 808953 - DNA, 33 bp, Homo sapien
agaatatctcacaaagactccagaacccttgag

SEQ ID NO: 808954 - DNA, 33 bp, Homo sapien
agaatatctcacaaagtctccagaacccttgag

SEQ ID NO: 808955 - DNA, 33 bp, Homo sapien
gtcttctgttatattgaaaacaagtatttgttt

SEQ ID NO: 808956 - DNA, 33 bp, Homo sapien
gtcttctgttatattggaaacaagtatttgttt

SEQ ID NO: 808957 - DNA, 33 bp, Homo sapien
aaagcgtagatgtctcaaggatggatggttttc

SEQ ID NO: 808958 - DNA, 33 bp, Homo sapien
aaagcgtagatgtctcgaggatggatggttttc

SEQ ID NO: 808959 - DNA, 33 bp, Homo sapien
atttaaaaaaaaaatcagacagcacagctaaag

SEQ ID NO: 808960 - DNA, 33 bp, Homo sapien
atttaaaaaaaaaatcggacagcacagctaaag

SEQ ID NO: 808961 - DNA, 33 bp, Homo sapien
tcaaccacttgcttacaataataccttcaaaaa

SEQ ID NO: 808962 - DNA, 33 bp, Homo sapien
tcaaccacttgcttacgataataccttcaaaaa

SEQ ID NO: 808963 - DNA, 33 bp, Homo sapien
gagctctttacctcaactccaccagaccccaaa

SEQ ID NO: 808964 - DNA, 33 bp, Homo sapien
gagctctttacctcaattccaccagaccccaaa

SEQ ID NO: 808965 - DNA, 33 bp, Homo sapien
ggagactctaaggacccagaaagctggatttgg

SEQ ID NO: 808966 - DNA, 33 bp, Homo sapien
ggagactctaaggaccgagaaagctggatttgg

SEQ ID NO: 808967 - DNA, 33 bp, Homo sapien
ataggccagcctaagaccatcttctaagctcag

SEQ ID NO: 808968 - DNA, 33 bp, Homo sapien
ataggccagcctaagatcatcttctaagctcag

SEQ ID NO: 808969 - DNA, 33 bp, Homo sapien
gggtcaaataccgaaggcctaatgtgttttgtt

SEQ ID NO: 808970 - DNA, 33 bp, Homo sapien
gggtcaaataccgaagtcctaatgtgttttgtt

SEQ ID NO: 808971 - DNA, 33 bp, Homo sapien
aacttgaatccagtacaccctacctccagtcat

SEQ ID NO: 808972 - DNA, 33 bp, Homo sapien
aacttgaatccagtacgccctacctccagtcat

SEQ ID NO: 808973 - DNA, 33 bp, Homo sapien
catttactaactgtacaccatgcagattactta

SEQ ID NO: 808974 - DNA, 33 bp, Homo sapien
catttactaactgtacgccatgcagattactta

SEQ ID NO: 808975 - DNA, 33 bp, Homo sapien
aaatcttctcaatttgaatgacaaatattaatg

SEQ ID NO: 808976 - DNA, 33 bp, Homo sapien
aaatcttctcaatttggatgacaaatattaatg

SEQ ID NO: 808977 - DNA, 33 bp, Homo sapien
ctaacaataaagaagccaagcctagaacagtgg

SEQ ID NO: 808978 - DNA, 33 bp, Homo sapien
ctaacaataaagaagctaagcctagaacagtgg

SEQ ID NO: 808979 - DNA, 33 bp, Homo sapien
gcttcttcagtgccccaatgctggaacctctag

SEQ ID NO: 808980 - DNA, 33 bp, Homo sapien
gcttcttcagtgccccgatgctggaacctctag

SEQ ID NO: 808981 - DNA, 33 bp, Homo sapien
gcttgcacacctttaaatgagctgttactggtt

SEQ ID NO: 808982 - DNA, 33 bp, Homo sapien
gcttgcacacctttaagtgagctgttactggtt

SEQ ID NO: 808983 - DNA, 33 bp, Homo sapien
gatgcaaattagcatacatctgcacataaaagg

SEQ ID NO: 808984 - DNA, 33 bp, Homo sapien
gatgcaaattagcatagatctgcacataaaagg

SEQ ID NO: 808985 - DNA, 33 bp, Homo sapien
ctttgttactttgttacagttgcaaactcccat

SEQ ID NO: 808986 - DNA, 33 bp, Homo sapien
ctttgttactttgttatagttgcaaactcccat

SEQ ID NO: 808987 - DNA, 33 bp, Homo sapien
tccacgaggtatccagcagaacggagaaaccag

SEQ ID NO: 808988 - DNA, 33 bp, Homo sapien
tccacgaggtatccagtagaacggagaaaccag

SEQ ID NO: 808989 - DNA, 33 bp, Homo sapien
taggctgtaggccaacagaaacttgatggccag

SEQ ID NO: 808990 - DNA, 33 bp, Homo sapien
taggctgtaggccaacggaaacttgatggccag

SEQ ID NO: 808991 - DNA, 33 bp, Homo sapien
gtgaggacctgatagacgttagctgctgggatt

SEQ ID NO: 808992 - DNA, 33 bp, Homo sapien
gtgaggacctgatagaggttagctgctgggatt

SEQ ID NO: 808993 - DNA, 33 bp, Homo sapien
aatgccaggcacgcagaatagattttggtggaa

SEQ ID NO: 808994 - DNA, 33 bp, Homo sapien
aatgccaggcacgcaggatagattttggtggaa

SEQ ID NO: 808995 - DNA, 33 bp, Homo sapien
gcacggtacctggcaccgaaaaaatggtattat

SEQ ID NO: 808996 - DNA, 33 bp, Homo sapien
gcacggtacctggcactgaaaaaatggtattat

SEQ ID NO: 808997 - DNA, 33 bp, Homo sapien
gcaggctaaatatggaagtccacctaagtaaaa

SEQ ID NO: 808998 - DNA, 33 bp, Homo sapien
gcaggctaaatatggaggtccacctaagtaaaa

SEQ ID NO: 808999 - DNA, 33 bp, Homo sapien
aagatggtaggaccaaatgatggcgacaatctt

SEQ ID NO: 809000 - DNA, 33 bp, Homo sapien
aagatggtaggaccaagtgatggcgacaatctt

SEQ ID NO: 809001 - DNA, 33 bp, Homo sapien
gtctgcagtctagctaaggagaatgatgactaa

SEQ ID NO: 809002 - DNA, 33 bp, Homo sapien
gtctgcagtctagctatggagaatgatgactaa

SEQ ID NO: 809003 - DNA, 33 bp, Homo sapien
agctagaaggaaaggaaaccggagtagaagccg

SEQ ID NO: 809004 - DNA, 33 bp, Homo sapien
agctagaaggaaaggataccggagtagaagccg

SEQ ID NO: 809005 - DNA, 33 bp, Homo sapien
aggctcatgcctggtgacaataaaggcgaatag

SEQ ID NO: 809006 - DNA, 33 bp, Homo sapien
aggctcatgcctggtgtcaataaaggcgaatag

SEQ ID NO: 809007 - DNA, 33 bp, Homo sapien
actaaattgaaaacaaaacacttatgccacgtt

SEQ ID NO: 809008 - DNA, 33 bp, Homo sapien
actaaattgaaaacaatacacttatgccacgtt

SEQ ID NO: 809009 - DNA, 33 bp, Homo sapien
gagatactgcagaaaaactcaggcctgatatta

SEQ ID NO: 809010 - DNA, 33 bp, Homo sapien
gagatactgcagaaaatctcaggcctgatatta

SEQ ID NO: 809011 - DNA, 33 bp, Homo sapien
tatttcatgcccctaccgatttaaagtaacata

SEQ ID NO: 809012 - DNA, 33 bp, Homo sapien
tatttcatgcccctactgatttaaagtaacata

SEQ ID NO: 809013 - DNA, 33 bp, Homo sapien
ctgattccctgaaatgaagttgttggtgatggg

SEQ ID NO: 809014 - DNA, 33 bp, Homo sapien
ctgattccctgaaatgcagttgttggtgatggg

SEQ ID NO: 809015 - DNA, 33 bp, Homo sapien
tttgaagtgtctgaaacgacaggtggacgtgac

SEQ ID NO: 809016 - DNA, 33 bp, Homo sapien
tttgaagtgtctgaaatgacaggtggacgtgac

SEQ ID NO: 809017 - DNA, 33 bp, Homo sapien
gcctatagttgtgttactaaaaatcccaaaaga

SEQ ID NO: 809018 - DNA, 33 bp, Homo sapien
gcctatagttgtgttattaaaaatcccaaaaga

SEQ ID NO: 809019 - DNA, 33 bp, Homo sapien
ttatctctttgtgtgaaagcaacttccgctctg

SEQ ID NO: 809020 - DNA, 33 bp, Homo sapien
ttatctctttgtgtgagagcaacttccgctctg

SEQ ID NO: 809021 - DNA, 33 bp, Homo sapien
caggcagattcatttacacaggtaagaaccaca

SEQ ID NO: 809022 - DNA, 33 bp, Homo sapien
caggcagattcatttatacaggtaagaaccaca

SEQ ID NO: 809023 - DNA, 33 bp, Homo sapien
tttactgtttcacaaaaattctggtttcctttt

SEQ ID NO: 809024 - DNA, 33 bp, Homo sapien
tttactgtttcacaaacattctggtttcctttt

SEQ ID NO: 809025 - DNA, 33 bp, Homo sapien
tgtacaaaggagaatgcaaagtagagatagata

SEQ ID NO: 809026 - DNA, 33 bp, Homo sapien
tgtacaaaggagaatggaaagtagagatagata

SEQ ID NO: 809027 - DNA, 33 bp, Homo sapien
acccaactatattcacccacaggtctcccccag

SEQ ID NO: 809028 - DNA, 33 bp, Homo sapien
acccaactatattcactcacaggtctcccccag

SEQ ID NO: 809029 - DNA, 33 bp, Homo sapien
accttcttaactttcacaatttagcctgtgcca

SEQ ID NO: 809030 - DNA, 33 bp, Homo sapien
accttcttaactttcataatttagcctgtgcca

SEQ ID NO: 809031 - DNA, 33 bp, Homo sapien
catgcttgttctgagagcctgagctgctgcatt

SEQ ID NO: 809032 - DNA, 33 bp, Homo sapien
catgcttgttctgagatcctgagctgctgcatt

SEQ ID NO: 809033 - DNA, 33 bp, Homo sapien
ctcctgaaattgacaacaattctagccaggtag

SEQ ID NO: 809034 - DNA, 33 bp, Homo sapien
ctcctgaaattgacaagaattctagccaggtag

SEQ ID NO: 809035 - DNA, 33 bp, Homo sapien
ggcacagagtgctataagtaccctgttgtaaag

SEQ ID NO: 809036 - DNA, 33 bp, Homo sapien
ggcacagagtgctataggtaccctgttgtaaag

SEQ ID NO: 809037 - DNA, 33 bp, Homo sapien
ctttctaagccacttacgaaaaactaaatcaat

SEQ ID NO: 809038 - DNA, 33 bp, Homo sapien
ctttctaagccacttaggaaaaactaaatcaat

SEQ ID NO: 809039 - DNA, 33 bp, Homo sapien
ctgagtggctgccacaaggctatgttcagcgct

SEQ ID NO: 809040 - DNA, 33 bp, Homo sapien
ctgagtggctgccacagggctatgttcagcgct

SEQ ID NO: 809041 - DNA, 33 bp, Homo sapien
catgcatgaatgtaaaacacgatctctgtctct

SEQ ID NO: 809042 - DNA, 33 bp, Homo sapien
catgcatgaatgtaaagcacgatctctgtctct

SEQ ID NO: 809043 - DNA, 33 bp, Homo sapien
acagcaaaataaagtactaccctcacatcaaca

SEQ ID NO: 809044 - DNA, 33 bp, Homo sapien
acagcaaaataaagtattaccctcacatcaaca

SEQ ID NO: 809045 - DNA, 33 bp, Homo sapien
agattcttttcagaacactaccacacaaatgat

SEQ ID NO: 809046 - DNA, 33 bp, Homo sapien
agattcttttcagaacgctaccacacaaatgat

SEQ ID NO: 809047 - DNA, 33 bp, Homo sapien
actgaaggaaaccagacaaaaatttgaatcaag

SEQ ID NO: 809048 - DNA, 33 bp, Homo sapien
actgaaggaaaccagataaaaatttgaatcaag

SEQ ID NO: 809049 - DNA, 33 bp, Homo sapien
ccaaccagatctgacaaagccttatgtgtaaac

SEQ ID NO: 809050 - DNA, 33 bp, Homo sapien
ccaaccagatctgacacagccttatgtgtaaac

SEQ ID NO: 809051 - DNA, 33 bp, Homo sapien
aggagatataacttggacatcttcaagaatcaa

SEQ ID NO: 809052 - DNA, 33 bp, Homo sapien
aggagatataacttgggcatcttcaagaatcaa

SEQ ID NO: 809053 - DNA, 33 bp, Homo sapien
caaaagcatggacatacacatcattacagtatt

SEQ ID NO: 809054 - DNA, 33 bp, Homo sapien
caaaagcatggacatatacatcattacagtatt

SEQ ID NO: 809055 - DNA, 33 bp, Homo sapien
ctcctgaacggtgacacatgataaacatgaaaa

SEQ ID NO: 809056 - DNA, 33 bp, Homo sapien
ctcctgaacggtgacatatgataaacatgaaaa

SEQ ID NO: 809057 - DNA, 33 bp, Homo sapien
agacagaaactgcagaggtcaggcatgtatttt

SEQ ID NO: 809058 - DNA, 33 bp, Homo sapien
agacagaaactgcagatgtcaggcatgtatttt

SEQ ID NO: 809059 - DNA, 33 bp, Homo sapien
cggttaaaaatcagaccgaagcatggttttaac

SEQ ID NO: 809060 - DNA, 33 bp, Homo sapien
cggttaaaaatcagactgaagcatggttttaac

SEQ ID NO: 809061 - DNA, 33 bp, Homo sapien
ctttcactcaccctcaaaggcaacagagacata

SEQ ID NO: 809062 - DNA, 33 bp, Homo sapien
ctttcactcaccctcagaggcaacagagacata

SEQ ID NO: 809063 - DNA, 33 bp, Homo sapien
aaacagaaaaacacctaaggatgacagtgagtt

SEQ ID NO: 809064 - DNA, 33 bp, Homo sapien
aaacagaaaaacacctgaggatgacagtgagtt

SEQ ID NO: 809065 - DNA, 33 bp, Homo sapien
gtttatagggcttaaactgcatgttgtcgttgg

SEQ ID NO: 809066 - DNA, 33 bp, Homo sapien
gtttatagggcttaaattgcatgttgtcgttgg

SEQ ID NO: 809067 - DNA, 33 bp, Homo sapien
gtgctgttgttatagacgatcccagtgttacat

SEQ ID NO: 809068 - DNA, 33 bp, Homo sapien
gtgctgttgttatagaggatcccagtgttacat

SEQ ID NO: 809069 - DNA, 33 bp, Homo sapien
actgagagaagtcccacatgaatccctctgctc

SEQ ID NO: 809070 - DNA, 33 bp, Homo sapien
actgagagaagtcccagatgaatccctctgctc

SEQ ID NO: 809071 - DNA, 33 bp, Homo sapien
tgctaggaaccaaaacactttctttgacattga

SEQ ID NO: 809072 - DNA, 33 bp, Homo sapien
tgctaggaaccaaaacgctttctttgacattga

SEQ ID NO: 809073 - DNA, 33 bp, Homo sapien
ggggctgtagcttaacactgacttctggctatc

SEQ ID NO: 809074 - DNA, 33 bp, Homo sapien
ggggctgtagcttaacgctgacttctggctatc

SEQ ID NO: 809075 - DNA, 33 bp, Homo sapien
gttcatgtgtggtagaaaagatgtttatcctca

SEQ ID NO: 809076 - DNA, 33 bp, Homo sapien
gttcatgtgtggtagagaagatgtttatcctca

SEQ ID NO: 809077 - DNA, 33 bp, Homo sapien
tgttgtacagagtaaactgatacatgcaaagca

SEQ ID NO: 809078 - DNA, 33 bp, Homo sapien
tgttgtacagagtaaattgatacatgcaaagca

SEQ ID NO: 809079 - DNA, 33 bp, Homo sapien
ctttccattcctgacaactccttgcacagctgt

SEQ ID NO: 809080 - DNA, 33 bp, Homo sapien
ctttccattcctgacagctccttgcacagctgt

SEQ ID NO: 809081 - DNA, 33 bp, Homo sapien
agtctatattatagacaatccaataagcctgtg

SEQ ID NO: 809082 - DNA, 33 bp, Homo sapien
agtctatattatagacgatccaataagcctgtg

SEQ ID NO: 809083 - DNA, 33 bp, Homo sapien
taaagctcactgtctaaggagccaagacagctg

SEQ ID NO: 809084 - DNA, 33 bp, Homo sapien
taaagctcactgtctagggagccaagacagctg

SEQ ID NO: 809085 - DNA, 33 bp, Homo sapien
aggagccacctctcacaatttccactgagatag

SEQ ID NO: 809086 - DNA, 33 bp, Homo sapien
aggagccacctctcacgatttccactgagatag

SEQ ID NO: 809087 - DNA, 33 bp, Homo sapien
aggctgtcctgagaaaaaggaaagttcaagtgg

SEQ ID NO: 809088 - DNA, 33 bp, Homo sapien
aggctgtcctgagaaagaggaaagttcaagtgg

SEQ ID NO: 809089 - DNA, 33 bp, Homo sapien
gataggaaagtaatggccaacaactcagtaatt

SEQ ID NO: 809090 - DNA, 33 bp, Homo sapien
gataggaaagtaatggtcaacaactcagtaatt

SEQ ID NO: 809091 - DNA, 33 bp, Homo sapien
ggtaccattcgatgtgcagaacggatcacagaa

SEQ ID NO: 809092 - DNA, 33 bp, Homo sapien
ggtaccattcgatgtggagaacggatcacagaa

SEQ ID NO: 809093 - DNA, 33 bp, Homo sapien
gagtagaaaacagataactaagcgtgaacagtg

SEQ ID NO: 809094 - DNA, 33 bp, Homo sapien
gagtagaaaacagatacctaagcgtgaacagtg

SEQ ID NO: 809095 - DNA, 33 bp, Homo sapien
ttttctctgtctaggccataagtccttgagggt

SEQ ID NO: 809096 - DNA, 33 bp, Homo sapien
ttttctctgtctaggctataagtccttgagggt

SEQ ID NO: 809097 - DNA, 33 bp, Homo sapien
gataaatgattcaccccgacaaaaagtacactc

SEQ ID NO: 809098 - DNA, 33 bp, Homo sapien
gataaatgattcaccctgacaaaaagtacactc

SEQ ID NO: 809099 - DNA, 33 bp, Homo sapien
aagtttcattctggaactatggaccagaatcaa

SEQ ID NO: 809100 - DNA, 33 bp, Homo sapien
aagtttcattctggaattatggaccagaatcaa

SEQ ID NO: 809101 - DNA, 33 bp, Homo sapien
aactgagtttgcaatacggttgtcaaagcggat

SEQ ID NO: 809102 - DNA, 33 bp, Homo sapien
aactgagtttgcaatagggttgtcaaagcggat

SEQ ID NO: 809103 - DNA, 33 bp, Homo sapien
caccaataaacttgaaaaaattatgcaaaacaa

SEQ ID NO: 809104 - DNA, 33 bp, Homo sapien
caccaataaacttgaagaaattatgcaaaacaa

SEQ ID NO: 809105 - DNA, 33 bp, Homo sapien
ataggacaaacctgaactaattaagcaataagc

SEQ ID NO: 809106 - DNA, 33 bp, Homo sapien
ataggacaaacctgaattaattaagcaataagc

SEQ ID NO: 809107 - DNA, 33 bp, Homo sapien
gtttattatactccagacactatgcttggaatg

SEQ ID NO: 809108 - DNA, 33 bp, Homo sapien
gtttattatactccaggcactatgcttggaatg

SEQ ID NO: 809109 - DNA, 33 bp, Homo sapien
tcactctttccctatacgctgactcttgagaag

SEQ ID NO: 809110 - DNA, 33 bp, Homo sapien
tcactctttccctatatgctgactcttgagaag

SEQ ID NO: 809111 - DNA, 33 bp, Homo sapien
caataatcaccttctactacaatcagattaaat

SEQ ID NO: 809112 - DNA, 33 bp, Homo sapien
caataatcaccttctattacaatcagattaaat

SEQ ID NO: 809113 - DNA, 33 bp, Homo sapien
tggaatctgccggggccagaccttgacattcat

SEQ ID NO: 809114 - DNA, 33 bp, Homo sapien
tggaatctgccggggctagaccttgacattcat

SEQ ID NO: 809115 - DNA, 33 bp, Homo sapien
atgtgattcctgctaactactgtcaccaccaac

SEQ ID NO: 809116 - DNA, 33 bp, Homo sapien
atgtgattcctgctaagtactgtcaccaccaac

SEQ ID NO: 809117 - DNA, 33 bp, Homo sapien
ggaaggacatggcccaatacacaagcagaggac

SEQ ID NO: 809118 - DNA, 33 bp, Homo sapien
ggaaggacatggcccagtacacaagcagaggac

SEQ ID NO: 809119 - DNA, 33 bp, Homo sapien
cttgaactttaccattaaaagattcagtccttg

SEQ ID NO: 809120 - DNA, 33 bp, Homo sapien
cttgaactttaccattgaaagattcagtccttg

SEQ ID NO: 809121 - DNA, 33 bp, Homo sapien
gatccagattacaagcaactcaagaaactagtt

SEQ ID NO: 809122 - DNA, 33 bp, Homo sapien
gatccagattacaagcgactcaagaaactagtt

SEQ ID NO: 809123 - DNA, 33 bp, Homo sapien
atccacagttcagtacaccacaatttggtaccc

SEQ ID NO: 809124 - DNA, 33 bp, Homo sapien
atccacagttcagtaccccacaatttggtaccc

SEQ ID NO: 809125 - DNA, 33 bp, Homo sapien
agcacctactgtctaactgaatcaggtacctat

SEQ ID NO: 809126 - DNA, 33 bp, Homo sapien
agcacctactgtctaattgaatcaggtacctat

SEQ ID NO: 809127 - DNA, 33 bp, Homo sapien
atccagcttcttcacaagtagtaaaaaggaggt

SEQ ID NO: 809128 - DNA, 33 bp, Homo sapien
atccagcttcttcacaggtagtaaaaaggaggt

SEQ ID NO: 809129 - DNA, 33 bp, Homo sapien
ttgttgtcattgttaactgaaaaatgataaaac

SEQ ID NO: 809130 - DNA, 33 bp, Homo sapien
ttgttgtcattgttaagtgaaaaatgataaaac

SEQ ID NO: 809131 - DNA, 33 bp, Homo sapien
actcaaaattacaccgaacaactaaaacagatt

SEQ ID NO: 809132 - DNA, 33 bp, Homo sapien
actcaaaattacaccggacaactaaaacagatt

SEQ ID NO: 809133 - DNA, 33 bp, Homo sapien
ttcttcactgccgacagccttcttataagagtc

SEQ ID NO: 809134 - DNA, 33 bp, Homo sapien
ttcttcactgccgacatccttcttataagagtc

SEQ ID NO: 809135 - DNA, 33 bp, Homo sapien
ctttatatagtacatacagatgctacaagacta

SEQ ID NO: 809136 - DNA, 33 bp, Homo sapien
ctttatatagtacatagagatgctacaagacta

SEQ ID NO: 809137 - DNA, 33 bp, Homo sapien
tatcaggtttctcttcccagctagacttcttga

SEQ ID NO: 809138 - DNA, 33 bp, Homo sapien
tatcaggtttctcttcgcagctagacttcttga

SEQ ID NO: 809139 - DNA, 33 bp, Homo sapien
ggccttctctggagcgcagggaatcggaaacag

SEQ ID NO: 809140 - DNA, 33 bp, Homo sapien
ggccttctctggagcgtagggaatcggaaacag

SEQ ID NO: 809141 - DNA, 33 bp, Homo sapien
tacagctcagctccagacaggcgatgcgggttc

SEQ ID NO: 809142 - DNA, 33 bp, Homo sapien
tacagctcagctccaggcaggcgatgcgggttc

SEQ ID NO: 809143 - DNA, 33 bp, Homo sapien
atcttaacataagaaactgaagtcgtagtctaa

SEQ ID NO: 809144 - DNA, 33 bp, Homo sapien
atcttaacataagaaagtgaagtcgtagtctaa

SEQ ID NO: 809145 - DNA, 33 bp, Homo sapien
aaaacaacagtcggaaattcccaggacaatttg

SEQ ID NO: 809146 - DNA, 33 bp, Homo sapien
aaaacaacagtcggaagttcccaggacaatttg

SEQ ID NO: 809147 - DNA, 33 bp, Homo sapien
attaaactatccaaccaaaacatggagaaggaa

SEQ ID NO: 809148 - DNA, 33 bp, Homo sapien
attaaactatccaaccgaaacatggagaaggaa

SEQ ID NO: 809149 - DNA, 33 bp, Homo sapien
gaaggaaaaataaaaacgagagtaagacacaag

SEQ ID NO: 809150 - DNA, 33 bp, Homo sapien
gaaggaaaaataaaaatgagagtaagacacaag

SEQ ID NO: 809151 - DNA, 33 bp, Homo sapien
tagcaaattaaatctaactcaccaggaaaagaa

SEQ ID NO: 809152 - DNA, 33 bp, Homo sapien
tagcaaattaaatctacctcaccaggaaaagaa

SEQ ID NO: 809153 - DNA, 33 bp, Homo sapien
taaagcttgtttctgcaattacaagccgtggga

SEQ ID NO: 809154 - DNA, 33 bp, Homo sapien
taaagcttgtttctgcgattacaagccgtggga

SEQ ID NO: 809155 - DNA, 33 bp, Homo sapien
tcacagttatgattccccccatcaatgtgtttt

SEQ ID NO: 809156 - DNA, 33 bp, Homo sapien
tcacagttatgattcctcccatcaatgtgtttt

SEQ ID NO: 809157 - DNA, 33 bp, Homo sapien
aaccaaaccaaaagcccattagccaacgaatgg

SEQ ID NO: 809158 - DNA, 33 bp, Homo sapien
aaccaaaccaaaagcctattagccaacgaatgg

SEQ ID NO: 809159 - DNA, 33 bp, Homo sapien
gaaacctcgtgcaatacgttaagtactataaaa

SEQ ID NO: 809160 - DNA, 33 bp, Homo sapien
gaaacctcgtgcaataggttaagtactataaaa

SEQ ID NO: 809161 - DNA, 33 bp, Homo sapien
tctaacttgagaattacgacgcttttcctttcc

SEQ ID NO: 809162 - DNA, 33 bp, Homo sapien
tctaacttgagaattaggacgcttttcctttcc

SEQ ID NO: 809163 - DNA, 33 bp, Homo sapien
caggtgaaggcctggacaataaaccacatctaa

SEQ ID NO: 809164 - DNA, 33 bp, Homo sapien
caggtgaaggcctggagaataaaccacatctaa

SEQ ID NO: 809165 - DNA, 33 bp, Homo sapien
aaagtaatctgcaaaacttactattcctagatc

SEQ ID NO: 809166 - DNA, 33 bp, Homo sapien
aaagtaatctgcaaaagttactattcctagatc

SEQ ID NO: 809167 - DNA, 33 bp, Homo sapien
ctagcctttgcattgacgaatatttagcagcat

SEQ ID NO: 809168 - DNA, 33 bp, Homo sapien
ctagcctttgcattgaggaatatttagcagcat

SEQ ID NO: 809169 - DNA, 33 bp, Homo sapien
ggggagatgagagtaacggcttaatgagtactg

SEQ ID NO: 809170 - DNA, 33 bp, Homo sapien
ggggagatgagagtaatggcttaatgagtactg

SEQ ID NO: 809171 - DNA, 33 bp, Homo sapien
atgttcaaaagcagaaaacatgtcaaacagtga

SEQ ID NO: 809172 - DNA, 33 bp, Homo sapien
atgttcaaaagcagaacacatgtcaaacagtga

SEQ ID NO: 809173 - DNA, 33 bp, Homo sapien
gaaaactttgagagacaatgaatactaactatg

SEQ ID NO: 809174 - DNA, 33 bp, Homo sapien
gaaaactttgagagacgatgaatactaactatg

SEQ ID NO: 809175 - DNA, 33 bp, Homo sapien
attccacctgtgcttccctttggtgcagaagag

SEQ ID NO: 809176 - DNA, 33 bp, Homo sapien
attccacctgtgcttctctttggtgcagaagag

SEQ ID NO: 809177 - DNA, 33 bp, Homo sapien
atctcttgaacaacaacgtttagggatgttctg

SEQ ID NO: 809178 - DNA, 33 bp, Homo sapien
atctcttgaacaacaaggtttagggatgttctg

SEQ ID NO: 809179 - DNA, 33 bp, Homo sapien
gcttccagtgcttttcactatctcaacactgga

SEQ ID NO: 809180 - DNA, 33 bp, Homo sapien
gcttccagtgcttttcgctatctcaacactgga

SEQ ID NO: 809181 - DNA, 33 bp, Homo sapien
aggtgatttggccttacaggcttggctgaaggg

SEQ ID NO: 809182 - DNA, 33 bp, Homo sapien
aggtgatttggccttagaggcttggctgaaggg

SEQ ID NO: 809183 - DNA, 33 bp, Homo sapien
taaacaatgataacacactcctctctatcaagg

SEQ ID NO: 809184 - DNA, 33 bp, Homo sapien
taaacaatgataacacgctcctctctatcaagg

SEQ ID NO: 809185 - DNA, 33 bp, Homo sapien
gagggtaagaaggtcactaatgttgcataatta

SEQ ID NO: 809186 - DNA, 33 bp, Homo sapien
gagggtaagaaggtcagtaatgttgcataatta

SEQ ID NO: 809187 - DNA, 33 bp, Homo sapien
taaaacacagaatctacagtttgcccatttttt

SEQ ID NO: 809188 - DNA, 33 bp, Homo sapien
taaaacacagaatctatagtttgcccatttttt

SEQ ID NO: 809189 - DNA, 33 bp, Homo sapien
ctcctgcttcctctccccaactccctttaggct

SEQ ID NO: 809190 - DNA, 33 bp, Homo sapien
ctcctgcttcctctcctcaactccctttaggct

SEQ ID NO: 809191 - DNA, 33 bp, Homo sapien
tggtccctgggctaaccaacagcattgacctca

SEQ ID NO: 809192 - DNA, 33 bp, Homo sapien
tggtccctgggctaacgaacagcattgacctca

SEQ ID NO: 809193 - DNA, 33 bp, Homo sapien
ttatctgtaagatacaagtaatccatgctcaaa

SEQ ID NO: 809194 - DNA, 33 bp, Homo sapien
ttatctgtaagatacaggtaatccatgctcaaa

SEQ ID NO: 809195 - DNA, 33 bp, Homo sapien
aaacagaaaccattaaagacaacataaccactt

SEQ ID NO: 809196 - DNA, 33 bp, Homo sapien
aaacagaaaccattaaggacaacataaccactt

SEQ ID NO: 809197 - DNA, 33 bp, Homo sapien
gctcaaatgttggttacgaaaacaaagtttctt

SEQ ID NO: 809198 - DNA, 33 bp, Homo sapien
gctcaaatgttggttaggaaaacaaagtttctt

SEQ ID NO: 809199 - DNA, 33 bp, Homo sapien
cacctgtttctatgccaacgtgggcagatcttt

SEQ ID NO: 809200 - DNA, 33 bp, Homo sapien
cacctgtttctatgccgacgtgggcagatcttt

SEQ ID NO: 809201 - DNA, 33 bp, Homo sapien
aaatctatgcacctaactgacttcacttgctcc

SEQ ID NO: 809202 - DNA, 33 bp, Homo sapien
aaatctatgcacctaattgacttcacttgctcc

SEQ ID NO: 809203 - DNA, 33 bp, Homo sapien
ttattttatagcttcaataaagaattctgctgt

SEQ ID NO: 809204 - DNA, 33 bp, Homo sapien
ttattttatagcttcagtaaagaattctgctgt

SEQ ID NO: 809205 - DNA, 33 bp, Homo sapien
aatttctctgctacacacaagttactggtaatt

SEQ ID NO: 809206 - DNA, 33 bp, Homo sapien
aatttctctgctacactcaagttactggtaatt

SEQ ID NO: 809207 - DNA, 33 bp, Homo sapien
gagtcatggagatagtaaatacttagtgcagtg

SEQ ID NO: 809208 - DNA, 33 bp, Homo sapien
gagtcatggagatagtgaatacttagtgcagtg

SEQ ID NO: 809209 - DNA, 33 bp, Homo sapien
aatagtcatttacagaacattttgcatttgtac

SEQ ID NO: 809210 - DNA, 33 bp, Homo sapien
aatagtcatttacagagcattttgcatttgtac

SEQ ID NO: 809211 - DNA, 33 bp, Homo sapien
ttgtttactgaaactacgggcgaggagaatgag

SEQ ID NO: 809212 - DNA, 33 bp, Homo sapien
ttgtttactgaaactatgggcgaggagaatgag

SEQ ID NO: 809213 - DNA, 33 bp, Homo sapien
ggatacatcccccccaaaaaatgagaataaagc

SEQ ID NO: 809214 - DNA, 33 bp, Homo sapien
ggatacatcccccccagaaaatgagaataaagc

SEQ ID NO: 809215 - DNA, 33 bp, Homo sapien
ttcaacaggttttatacacttacagagttgtgc

SEQ ID NO: 809216 - DNA, 33 bp, Homo sapien
ttcaacaggttttatagacttacagagttgtgc

SEQ ID NO: 809217 - DNA, 33 bp, Homo sapien
agttggtaacctataactgattggaggtttgct

SEQ ID NO: 809218 - DNA, 33 bp, Homo sapien
agttggtaacctataattgattggaggtttgct

SEQ ID NO: 809219 - DNA, 33 bp, Homo sapien
tggtcttccttaaccacgcattaccttgacaca

SEQ ID NO: 809220 - DNA, 33 bp, Homo sapien
tggtcttccttaaccatgcattaccttgacaca

SEQ ID NO: 809221 - DNA, 33 bp, Homo sapien
acttctttttccctccccatgaatatgaaggtt

SEQ ID NO: 809222 - DNA, 33 bp, Homo sapien
acttctttttccctcctcatgaatatgaaggtt

SEQ ID NO: 809223 - DNA, 33 bp, Homo sapien
tgcttttgcgacatgacctcttagcattcgatt

SEQ ID NO: 809224 - DNA, 33 bp, Homo sapien
tgcttttgcgacatgatctcttagcattcgatt

SEQ ID NO: 809225 - DNA, 33 bp, Homo sapien
cacacttgacagcatacggttgttaataacaag

SEQ ID NO: 809226 - DNA, 33 bp, Homo sapien
cacacttgacagcatatggttgttaataacaag

SEQ ID NO: 809227 - DNA, 33 bp, Homo sapien
atgagcatttagcatcgaactatacaaatacag

SEQ ID NO: 809228 - DNA, 33 bp, Homo sapien
atgagcatttagcatctaactatacaaatacag

SEQ ID NO: 809229 - DNA, 33 bp, Homo sapien
atatggtatttctcaaaatctcagggatggcta

SEQ ID NO: 809230 - DNA, 33 bp, Homo sapien
atatggtatttctcaatatctcagggatggcta

SEQ ID NO: 809231 - DNA, 33 bp, Homo sapien
gcttcccagcttcctcaccttacagcagaattc

SEQ ID NO: 809232 - DNA, 33 bp, Homo sapien
gcttcccagcttcctcgccttacagcagaattc

SEQ ID NO: 809233 - DNA, 33 bp, Homo sapien
ccttggtcagttttacagaggcccaccataaag

SEQ ID NO: 809234 - DNA, 33 bp, Homo sapien
ccttggtcagttttacggaggcccaccataaag

SEQ ID NO: 809235 - DNA, 33 bp, Homo sapien
tcagaactgctactaactctaggcggaccttgc

SEQ ID NO: 809236 - DNA, 33 bp, Homo sapien
tcagaactgctactaagtctaggcggaccttgc

SEQ ID NO: 809237 - DNA, 33 bp, Homo sapien
ataaaacacagataccaaattgttcccttacct

SEQ ID NO: 809238 - DNA, 33 bp, Homo sapien
ataaaacacagataccgaattgttcccttacct

SEQ ID NO: 809239 - DNA, 33 bp, Homo sapien
gccatggttctaagaaacaactcccattttagt

SEQ ID NO: 809240 - DNA, 33 bp, Homo sapien
gccatggttctaagaagcaactcccattttagt

SEQ ID NO: 809241 - DNA, 33 bp, Homo sapien
caaaagaaataccaaacagattcattgattaac

SEQ ID NO: 809242 - DNA, 33 bp, Homo sapien
caaaagaaataccaaatagattcattgattaac

SEQ ID NO: 809243 - DNA, 33 bp, Homo sapien
gaatgtgatccagctaaggaaacagacgagagc

SEQ ID NO: 809244 - DNA, 33 bp, Homo sapien
gaatgtgatccagctagggaaacagacgagagc

SEQ ID NO: 809245 - DNA, 33 bp, Homo sapien
catgttttagctagagccaaacacaacaaaatg

SEQ ID NO: 809246 - DNA, 33 bp, Homo sapien
catgttttagctagaggcaaacacaacaaaatg

SEQ ID NO: 809247 - DNA, 33 bp, Homo sapien
ttgtggaaagattccacaaatgcctctaaagtt

SEQ ID NO: 809248 - DNA, 33 bp, Homo sapien
ttgtggaaagattccagaaatgcctctaaagtt

SEQ ID NO: 809249 - DNA, 33 bp, Homo sapien
agactcaaggcaggaggcccatcagagcagtcc

SEQ ID NO: 809250 - DNA, 33 bp, Homo sapien
agactcaaggcaggagtcccatcagagcagtcc

SEQ ID NO: 809251 - DNA, 33 bp, Homo sapien
agtgtagtgtagtggtcaatagtctggatttac

SEQ ID NO: 809252 - DNA, 33 bp, Homo sapien
agtgtagtgtagtggtgaatagtctggatttac

SEQ ID NO: 809253 - DNA, 33 bp, Homo sapien
tggggaatgcaaaatgcatatggagcaggaaag

SEQ ID NO: 809254 - DNA, 33 bp, Homo sapien
tggggaatgcaaaatggatatggagcaggaaag

SEQ ID NO: 809255 - DNA, 33 bp, Homo sapien
gttctgcagctcactgaaactggacagtctttt

SEQ ID NO: 809256 - DNA, 33 bp, Homo sapien
gttctgcagctcactggaactggacagtctttt

SEQ ID NO: 809257 - DNA, 33 bp, Homo sapien
gttgctaaaatgacagaccaggttggagtccat

SEQ ID NO: 809258 - DNA, 33 bp, Homo sapien
gttgctaaaatgacaggccaggttggagtccat

SEQ ID NO: 809259 - DNA, 33 bp, Homo sapien
cttcacagtaatcctacgcaatttagtcactat

SEQ ID NO: 809260 - DNA, 33 bp, Homo sapien
cttcacagtaatcctatgcaatttagtcactat

SEQ ID NO: 809261 - DNA, 33 bp, Homo sapien
atactctgtggcttatcagtgcctgtattgtca

SEQ ID NO: 809262 - DNA, 33 bp, Homo sapien
atactctgtggcttattagtgcctgtattgtca

SEQ ID NO: 809263 - DNA, 33 bp, Homo sapien
tgaatcaatatatctccaaggagtcccagaaat

SEQ ID NO: 809264 - DNA, 33 bp, Homo sapien
tgaatcaatatatctctaaggagtcccagaaat

SEQ ID NO: 809265 - DNA, 33 bp, Homo sapien
cttatcaatgctgtcacacaggaccaggaacag

SEQ ID NO: 809266 - DNA, 33 bp, Homo sapien
cttatcaatgctgtcatacaggaccaggaacag

SEQ ID NO: 809267 - DNA, 33 bp, Homo sapien
tgcctgttgacaatcacggatgtgcacacacac

SEQ ID NO: 809268 - DNA, 33 bp, Homo sapien
tgcctgttgacaatcatggatgtgcacacacac

SEQ ID NO: 809269 - DNA, 33 bp, Homo sapien
gccagggaatctgacgaaaaattctttgagggt

SEQ ID NO: 809270 - DNA, 33 bp, Homo sapien
gccagggaatctgacggaaaattctttgagggt

SEQ ID NO: 809271 - DNA, 33 bp, Homo sapien
atgtgctgccatcttaccctcattttctcagct

SEQ ID NO: 809272 - DNA, 33 bp, Homo sapien
atgtgctgccatcttatcctcattttctcagct

SEQ ID NO: 809273 - DNA, 33 bp, Homo sapien
tactctggcgatactacgtacagtgcttgctga

SEQ ID NO: 809274 - DNA, 33 bp, Homo sapien
tactctggcgatactatgtacagtgcttgctga

SEQ ID NO: 809275 - DNA, 33 bp, Homo sapien
ctgaggcgagtttgagcaactttctattactcg

SEQ ID NO: 809276 - DNA, 33 bp, Homo sapien
ctgaggcgagtttgaggaactttctattactcg

SEQ ID NO: 809277 - DNA, 33 bp, Homo sapien
gcctggtgtctgcctacctgtggttcagtcagc

SEQ ID NO: 809278 - DNA, 33 bp, Homo sapien
gcctggtgtctgcctatctgtggttcagtcagc

SEQ ID NO: 809279 - DNA, 33 bp, Homo sapien
atagtgggggaatgccaaagaaacactcagagt

SEQ ID NO: 809280 - DNA, 33 bp, Homo sapien
atagtgggggaatgccgaagaaacactcagagt

SEQ ID NO: 809281 - DNA, 33 bp, Homo sapien
aaaagctgggatatcaagtattttaactgaaca

SEQ ID NO: 809282 - DNA, 33 bp, Homo sapien
aaaagctgggatatcacgtattttaactgaaca

SEQ ID NO: 809283 - DNA, 33 bp, Homo sapien
attcatcttattcaccactattccagatacttg

SEQ ID NO: 809284 - DNA, 33 bp, Homo sapien
attcatcttattcaccgctattccagatacttg

SEQ ID NO: 809285 - DNA, 33 bp, Homo sapien
cgtatatgatgcttgacgagtcattttcatgat

SEQ ID NO: 809286 - DNA, 33 bp, Homo sapien
cgtatatgatgcttgatgagtcattttcatgat

SEQ ID NO: 809287 - DNA, 33 bp, Homo sapien
ctcagtcatcagacccaaagtgtttaatatgag

SEQ ID NO: 809288 - DNA, 33 bp, Homo sapien
ctcagtcatcagacccgaagtgtttaatatgag

SEQ ID NO: 809289 - DNA, 33 bp, Homo sapien
ttctcctttattgggccataatcaaagagtcca

SEQ ID NO: 809290 - DNA, 33 bp, Homo sapien
ttctcctttattgggctataatcaaagagtcca

SEQ ID NO: 809291 - DNA, 33 bp, Homo sapien
ttcatatattgaaacccccagtaccttcagaat

SEQ ID NO: 809292 - DNA, 33 bp, Homo sapien
ttcatatattgaaacctccagtaccttcagaat

SEQ ID NO: 809293 - DNA, 33 bp, Homo sapien
ttctattgtcgatccaatgatgtcctcacagcc

SEQ ID NO: 809294 - DNA, 33 bp, Homo sapien
ttctattgtcgatccagtgatgtcctcacagcc

SEQ ID NO: 809295 - DNA, 33 bp, Homo sapien
tctggaagttataggaatagatggagttgtcaa

SEQ ID NO: 809296 - DNA, 33 bp, Homo sapien
tctggaagttataggagtagatggagttgtcaa

SEQ ID NO: 809297 - DNA, 33 bp, Homo sapien
ctcttttctcctagacgatctggattaagattc

SEQ ID NO: 809298 - DNA, 33 bp, Homo sapien
ctcttttctcctagactatctggattaagattc

SEQ ID NO: 809299 - DNA, 33 bp, Homo sapien
catgcagagattatggaaaaagcagagaaaagt

SEQ ID NO: 809300 - DNA, 33 bp, Homo sapien
catgcagagattatgggaaaagcagagaaaagt

SEQ ID NO: 809301 - DNA, 33 bp, Homo sapien
aatctctgcatgtgaacggagacctgtttatgg

SEQ ID NO: 809302 - DNA, 33 bp, Homo sapien
aatctctgcatgtgaatggagacctgtttatgg

SEQ ID NO: 809303 - DNA, 33 bp, Homo sapien
accccctgtctctccccgatattttggcttcat

SEQ ID NO: 809304 - DNA, 33 bp, Homo sapien
accccctgtctctcccggatattttggcttcat

SEQ ID NO: 809305 - DNA, 33 bp, Homo sapien
ggaaaggctttgagacaaaagcaaggaagacat

SEQ ID NO: 809306 - DNA, 33 bp, Homo sapien
ggaaaggctttgagacgaaagcaaggaagacat

SEQ ID NO: 809307 - DNA, 33 bp, Homo sapien
atgttgaagccaggcaaccttggatatgaatcc

SEQ ID NO: 809308 - DNA, 33 bp, Homo sapien
atgttgaagccaggcacccttggatatgaatcc

SEQ ID NO: 809309 - DNA, 33 bp, Homo sapien
tccagtcaccattttcaataaacttcttggaca

SEQ ID NO: 809310 - DNA, 33 bp, Homo sapien
tccagtcaccattttcgataaacttcttggaca

SEQ ID NO: 809311 - DNA, 33 bp, Homo sapien
ctggagaggaatgaacaagagtttaagagatgg

SEQ ID NO: 809312 - DNA, 33 bp, Homo sapien
ctggagaggaatgaaccagagtttaagagatgg

SEQ ID NO: 809313 - DNA, 33 bp, Homo sapien
ggctgactgagactgacgtttggtgtctgaagt

SEQ ID NO: 809314 - DNA, 33 bp, Homo sapien
ggctgactgagactgatgtttggtgtctgaagt

SEQ ID NO: 809315 - DNA, 33 bp, Homo sapien
agataataagcagtcaataaatgacagaaatta

SEQ ID NO: 809316 - DNA, 33 bp, Homo sapien
agataataagcagtcagtaaatgacagaaatta

SEQ ID NO: 809317 - DNA, 33 bp, Homo sapien
gtttattatagaaagacaggctgtgtcatggca

SEQ ID NO: 809318 - DNA, 33 bp, Homo sapien
gtttattatagaaagataggctgtgtcatggca

SEQ ID NO: 809319 - DNA, 33 bp, Homo sapien
gttgctattagaatgacggctttttattagcct

SEQ ID NO: 809320 - DNA, 33 bp, Homo sapien
gttgctattagaatgatggctttttattagcct

SEQ ID NO: 809321 - DNA, 33 bp, Homo sapien
acagggctttaatcaaagtgtcagtccggactc

SEQ ID NO: 809322 - DNA, 33 bp, Homo sapien
acagggctttaatcaaggtgtcagtccggactc

SEQ ID NO: 809323 - DNA, 33 bp, Homo sapien
tttggggtacactgaaataagaagcagaccctt

SEQ ID NO: 809324 - DNA, 33 bp, Homo sapien
tttggggtacactgaagtaagaagcagaccctt

SEQ ID NO: 809325 - DNA, 33 bp, Homo sapien
aaagaaaatgtgggcacctagacagtggaggca

SEQ ID NO: 809326 - DNA, 33 bp, Homo sapien
aaagaaaatgtgggcatctagacagtggaggca

SEQ ID NO: 809327 - DNA, 33 bp, Homo sapien
gaaaagtttgtcataactgtatggtaatcctaa

SEQ ID NO: 809328 - DNA, 33 bp, Homo sapien
gaaaagtttgtcataattgtatggtaatcctaa

SEQ ID NO: 809329 - DNA, 33 bp, Homo sapien
cttggttttgaggctaacaagtaaagctgaaga

SEQ ID NO: 809330 - DNA, 33 bp, Homo sapien
cttggttttgaggctaccaagtaaagctgaaga

SEQ ID NO: 809331 - DNA, 33 bp, Homo sapien
cagagaggagaccgtgaagtaggtagctgtttt

SEQ ID NO: 809332 - DNA, 33 bp, Homo sapien
cagagaggagaccgtggagtaggtagctgtttt

SEQ ID NO: 809333 - DNA, 33 bp, Homo sapien
atggctgctaggacccaccaatgtaatgtgtgg

SEQ ID NO: 809334 - DNA, 33 bp, Homo sapien
atggctgctaggaccctccaatgtaatgtgtgg

SEQ ID NO: 809335 - DNA, 33 bp, Homo sapien
tccacctctgtttcaacgactagaacaaagaaa

SEQ ID NO: 809336 - DNA, 33 bp, Homo sapien
tccacctctgtttcaatgactagaacaaagaaa

SEQ ID NO: 809337 - DNA, 33 bp, Homo sapien
attgtttccagatcacaaaataatttttcgcaa

SEQ ID NO: 809338 - DNA, 33 bp, Homo sapien
attgtttccagatcacgaaataatttttcgcaa

SEQ ID NO: 809339 - DNA, 33 bp, Homo sapien
ggtatttttattaccaatcggagtaggcttgtc

SEQ ID NO: 809340 - DNA, 33 bp, Homo sapien
ggtatttttattaccagtcggagtaggcttgtc

SEQ ID NO: 809341 - DNA, 33 bp, Homo sapien
tttgagaagcaatctaataaactaagcaaagca

SEQ ID NO: 809342 - DNA, 33 bp, Homo sapien
tttgagaagcaatctagtaaactaagcaaagca

SEQ ID NO: 809343 - DNA, 33 bp, Homo sapien
tcaggtccaattgcaaatccaagttagctaaat

SEQ ID NO: 809344 - DNA, 33 bp, Homo sapien
tcaggtccaattgcaactccaagttagctaaat

SEQ ID NO: 809345 - DNA, 33 bp, Homo sapien
acaactggccagatgacggtatcctcaagtgac

SEQ ID NO: 809346 - DNA, 33 bp, Homo sapien
acaactggccagatgatggtatcctcaagtgac

SEQ ID NO: 809347 - DNA, 33 bp, Homo sapien
tagaaaatgagacaggaaaagacaaacaaggac

SEQ ID NO: 809348 - DNA, 33 bp, Homo sapien
tagaaaatgagacagggaaagacaaacaaggac

SEQ ID NO: 809349 - DNA, 33 bp, Homo sapien
tagtaatagatagaagcagatcataacacagtg

SEQ ID NO: 809350 - DNA, 33 bp, Homo sapien
tagtaatagatagaagtagatcataacacagtg

SEQ ID NO: 809351 - DNA, 33 bp, Homo sapien
cacaactctaaacctaccatgtcccaccagcat

SEQ ID NO: 809352 - DNA, 33 bp, Homo sapien
cacaactctaaacctatcatgtcccaccagcat

SEQ ID NO: 809353 - DNA, 33 bp, Homo sapien
tactccttgctatttaccaaagactgagagtaa

SEQ ID NO: 809354 - DNA, 33 bp, Homo sapien
tactccttgctatttatcaaagactgagagtaa

SEQ ID NO: 809355 - DNA, 33 bp, Homo sapien
attagatgaccccccacgaaaattggcatcaaa

SEQ ID NO: 809356 - DNA, 33 bp, Homo sapien
attagatgaccccccatgaaaattggcatcaaa

SEQ ID NO: 809357 - DNA, 33 bp, Homo sapien
ataagcaaaacatttacatcctcccccaacctt

SEQ ID NO: 809358 - DNA, 33 bp, Homo sapien
ataagcaaaacatttatatcctcccccaacctt

SEQ ID NO: 809359 - DNA, 33 bp, Homo sapien
ggcttcctccattaccaataccaattcgcttga

SEQ ID NO: 809360 - DNA, 33 bp, Homo sapien
ggcttcctccattaccgataccaattcgcttga

SEQ ID NO: 809361 - DNA, 33 bp, Homo sapien
ctccaatcttcccaggaatctccagacttgcat

SEQ ID NO: 809362 - DNA, 33 bp, Homo sapien
ctccaatcttcccagggatctccagacttgcat

SEQ ID NO: 809363 - DNA, 33 bp, Homo sapien
agacagttgtcttcaacctttcatgtcaacagg

SEQ ID NO: 809364 - DNA, 33 bp, Homo sapien
agacagttgtcttcaatctttcatgtcaacagg

SEQ ID NO: 809365 - DNA, 33 bp, Homo sapien
ggcagcactgctcaaagaatgttagatgggccc

SEQ ID NO: 809366 - DNA, 33 bp, Homo sapien
ggcagcactgctcaaataatgttagatgggccc

SEQ ID NO: 809367 - DNA, 33 bp, Homo sapien
atgaacaagactcatcactcttcaaggtccagg

SEQ ID NO: 809368 - DNA, 33 bp, Homo sapien
atgaacaagactcatcgctcttcaaggtccagg

SEQ ID NO: 809369 - DNA, 33 bp, Homo sapien
tgcagctgagcctgaacgtgcaaataggtcagt

SEQ ID NO: 809370 - DNA, 33 bp, Homo sapien
tgcagctgagcctgaatgtgcaaataggtcagt

SEQ ID NO: 809371 - DNA, 33 bp, Homo sapien
ggaggtatttgggttacggaggcagatctctca

SEQ ID NO: 809372 - DNA, 33 bp, Homo sapien
ggaggtatttgggttatggaggcagatctctca

SEQ ID NO: 809373 - DNA, 33 bp, Homo sapien
ccgtcctgttggagcacgaaggaaaactggacc

SEQ ID NO: 809374 - DNA, 33 bp, Homo sapien
ccgtcctgttggagcatgaaggaaaactggacc

SEQ ID NO: 809375 - DNA, 33 bp, Homo sapien
gcagcattcattacccactaagtgaagagcccg

SEQ ID NO: 809376 - DNA, 33 bp, Homo sapien
gcagcattcattacccgctaagtgaagagcccg

SEQ ID NO: 809377 - DNA, 33 bp, Homo sapien
acagtcgggtagaacaccaagcatgctcttaga

SEQ ID NO: 809378 - DNA, 33 bp, Homo sapien
acagtcgggtagaacagcaagcatgctcttaga

SEQ ID NO: 809379 - DNA, 33 bp, Homo sapien
ctcagtgccagcccaacacaacagacatgggga

SEQ ID NO: 809380 - DNA, 33 bp, Homo sapien
ctcagtgccagcccaagacaacagacatgggga

SEQ ID NO: 809381 - DNA, 33 bp, Homo sapien
cacaattcaaaacacaatgatgctcttccaaca

SEQ ID NO: 809382 - DNA, 33 bp, Homo sapien
cacaattcaaaacacagtgatgctcttccaaca

SEQ ID NO: 809383 - DNA, 33 bp, Homo sapien
aaccatcagatctcacaataactaactcattat

SEQ ID NO: 809384 - DNA, 33 bp, Homo sapien
aaccatcagatctcacgataactaactcattat

SEQ ID NO: 809385 - DNA, 33 bp, Homo sapien
gagcctcaccaacctcagaaggtgtacctcttc

SEQ ID NO: 809386 - DNA, 33 bp, Homo sapien
gagcctcaccaacctcggaaggtgtacctcttc

SEQ ID NO: 809387 - DNA, 33 bp, Homo sapien
agggagtgattcagtacatctttctttgatctg

SEQ ID NO: 809388 - DNA, 33 bp, Homo sapien
agggagtgattcagtagatctttctttgatctg

SEQ ID NO: 809389 - DNA, 33 bp, Homo sapien
taattagtgagctgcacatcaaaagaagtgaag

SEQ ID NO: 809390 - DNA, 33 bp, Homo sapien
taattagtgagctgcatatcaaaagaagtgaag

SEQ ID NO: 809391 - DNA, 33 bp, Homo sapien
ggctcatgaaatcacactgtatggggtatcacc

SEQ ID NO: 809392 - DNA, 33 bp, Homo sapien
ggctcatgaaatcacattgtatggggtatcacc

SEQ ID NO: 809393 - DNA, 33 bp, Homo sapien
ttatctaagggttctaccatatttgtgcctttc

SEQ ID NO: 809394 - DNA, 33 bp, Homo sapien
ttatctaagggttctatcatatttgtgcctttc

SEQ ID NO: 809395 - DNA, 33 bp, Homo sapien
tagagttctcactataggattaaaaaacactat

SEQ ID NO: 809396 - DNA, 33 bp, Homo sapien
tagagttctcactatatgattaaaaaacactat

SEQ ID NO: 809397 - DNA, 33 bp, Homo sapien
gacaccagcttctccaatggaaactaactggtg

SEQ ID NO: 809398 - DNA, 33 bp, Homo sapien
gacaccagcttctccagtggaaactaactggtg

SEQ ID NO: 809399 - DNA, 33 bp, Homo sapien
ctctacaaattcttccagaaaatactgagaaaa

SEQ ID NO: 809400 - DNA, 33 bp, Homo sapien
ctctacaaattcttccggaaaatactgagaaaa

SEQ ID NO: 809401 - DNA, 33 bp, Homo sapien
tccaaattatcaaccacagtcaactaatcattt

SEQ ID NO: 809402 - DNA, 33 bp, Homo sapien
tccaaattatcaaccatagtcaactaatcattt

SEQ ID NO: 809403 - DNA, 33 bp, Homo sapien
ttggcttctaatacaacgtttttataatgctta

SEQ ID NO: 809404 - DNA, 33 bp, Homo sapien
ttggcttctaatacaatgtttttataatgctta

SEQ ID NO: 809405 - DNA, 33 bp, Homo sapien
gcactacttattggccggccttctaagaatgaa

SEQ ID NO: 809406 - DNA, 33 bp, Homo sapien
gcactacttattggcctgccttctaagaatgaa

SEQ ID NO: 809407 - DNA, 33 bp, Homo sapien
atcttgtctggtccagaagttgaaatgtgttgt

SEQ ID NO: 809408 - DNA, 33 bp, Homo sapien
atcttgtctggtccagcagttgaaatgtgttgt

SEQ ID NO: 809409 - DNA, 33 bp, Homo sapien
ctgtaaaataggactacgatcatctatctttta

SEQ ID NO: 809410 - DNA, 33 bp, Homo sapien
ctgtaaaataggactatgatcatctatctttta

SEQ ID NO: 809411 - DNA, 33 bp, Homo sapien
gctggcaccaaagtcaaggcgcagagctgtctg

SEQ ID NO: 809412 - DNA, 33 bp, Homo sapien
gctggcaccaaagtcagggcgcagagctgtctg

SEQ ID NO: 809413 - DNA, 33 bp, Homo sapien
aaacaagcagattcataataattagcaaatatt

SEQ ID NO: 809414 - DNA, 33 bp, Homo sapien
aaacaagcagattcatgataattagcaaatatt

SEQ ID NO: 809415 - DNA, 33 bp, Homo sapien
ctctgtcttccaaggacgctccaggcagccatg

SEQ ID NO: 809416 - DNA, 33 bp, Homo sapien
ctctgtcttccaaggatgctccaggcagccatg

SEQ ID NO: 809417 - DNA, 33 bp, Homo sapien
aacattgtgttctagcaagacaggttcatattc

SEQ ID NO: 809418 - DNA, 33 bp, Homo sapien
aacattgtgttctagcgagacaggttcatattc

SEQ ID NO: 809419 - DNA, 33 bp, Homo sapien
tcctagactccacatacggacaaggtggctgga

SEQ ID NO: 809420 - DNA, 33 bp, Homo sapien
tcctagactccacatatggacaaggtggctgga

SEQ ID NO: 809421 - DNA, 33 bp, Homo sapien
ttcaagtctagtgtgcaaaaggatccattttat

SEQ ID NO: 809422 - DNA, 33 bp, Homo sapien
ttcaagtctagtgtgcgaaaggatccattttat

SEQ ID NO: 809423 - DNA, 33 bp, Homo sapien
gcgtcgggatgataaccagccacacctgtcctc

SEQ ID NO: 809424 - DNA, 33 bp, Homo sapien
gcgtcgggatgataactagccacacctgtcctc

SEQ ID NO: 809425 - DNA, 33 bp, Homo sapien
ttgataatcatttatacggcgctttaaagtttt

SEQ ID NO: 809426 - DNA, 33 bp, Homo sapien
ttgataatcatttatatggcgctttaaagtttt

SEQ ID NO: 809427 - DNA, 33 bp, Homo sapien
tgttgagtaaggattgcatctaccggatgtccc

SEQ ID NO: 809428 - DNA, 33 bp, Homo sapien
tgttgagtaaggattgtatctaccggatgtccc

SEQ ID NO: 809429 - DNA, 33 bp, Homo sapien
cgcaggctgtgctttgcaaggggttgatagaat

SEQ ID NO: 809430 - DNA, 33 bp, Homo sapien
cgcaggctgtgctttgtaaggggttgatagaat

SEQ ID NO: 809431 - DNA, 33 bp, Homo sapien
gagagatcttgacactcagagacatgactgtgg

SEQ ID NO: 809432 - DNA, 33 bp, Homo sapien
gagagatcttgacacttagagacatgactgtgg

SEQ ID NO: 809433 - DNA, 33 bp, Homo sapien
ccttacagggacatgaacttcagatggcgtgcc

SEQ ID NO: 809434 - DNA, 33 bp, Homo sapien
ccttacagggacatgaccttcagatggcgtgcc

SEQ ID NO: 809435 - DNA, 33 bp, Homo sapien
ctggtacaatttaatcactcttccaactctagg

SEQ ID NO: 809436 - DNA, 33 bp, Homo sapien
ctggtacaatttaatcgctcttccaactctagg

SEQ ID NO: 809437 - DNA, 33 bp, Homo sapien
atgacagctggaattcaatctcaattacagggc

SEQ ID NO: 809438 - DNA, 33 bp, Homo sapien
atgacagctggaattccatctcaattacagggc

SEQ ID NO: 809439 - DNA, 33 bp, Homo sapien
ctttatacatatctcaaactgtttgaaagaatc

SEQ ID NO: 809440 - DNA, 33 bp, Homo sapien
ctttatacatatctcatactgtttgaaagaatc

SEQ ID NO: 809441 - DNA, 33 bp, Homo sapien
gtgaggggagaaaaacaatcagaaggccacaga

SEQ ID NO: 809442 - DNA, 33 bp, Homo sapien
gtgaggggagaaaaaccatcagaaggccacaga

SEQ ID NO: 809443 - DNA, 33 bp, Homo sapien
actaaattctgaccaacgatatgtgagcagaaa

SEQ ID NO: 809444 - DNA, 33 bp, Homo sapien
actaaattctgaccaatgatatgtgagcagaaa

SEQ ID NO: 809445 - DNA, 33 bp, Homo sapien
ttgccttcagcacctgaaatggtccctgacata

SEQ ID NO: 809446 - DNA, 33 bp, Homo sapien
ttgccttcagcacctgcaatggtccctgacata

SEQ ID NO: 809447 - DNA, 33 bp, Homo sapien
taactctctttcacaaatgaaccatcatatagt

SEQ ID NO: 809448 - DNA, 33 bp, Homo sapien
taactctctttcacaattgaaccatcatatagt

SEQ ID NO: 809449 - DNA, 33 bp, Homo sapien
gatgtcagagaataaacgcctgacaggagccag

SEQ ID NO: 809450 - DNA, 33 bp, Homo sapien
gatgtcagagaataaatgcctgacaggagccag

SEQ ID NO: 809451 - DNA, 33 bp, Homo sapien
ttcaaaccgggacataaggggaacatggtttta

SEQ ID NO: 809452 - DNA, 33 bp, Homo sapien
ttcaaaccgggacatagggggaacatggtttta

SEQ ID NO: 809453 - DNA, 33 bp, Homo sapien
taaccaggacagcaccaccagggtcacaagcct

SEQ ID NO: 809454 - DNA, 33 bp, Homo sapien
taaccaggacagcaccgccagggtcacaagcct

SEQ ID NO: 809455 - DNA, 33 bp, Homo sapien
aaaaaggaaggacttacataggtctaaggcggt

SEQ ID NO: 809456 - DNA, 33 bp, Homo sapien
aaaaaggaaggacttatataggtctaaggcggt

SEQ ID NO: 809457 - DNA, 33 bp, Homo sapien
ttatttgttttgttcacaggcccttaaagttag

SEQ ID NO: 809458 - DNA, 33 bp, Homo sapien
ttatttgttttgttcagaggcccttaaagttag

SEQ ID NO: 809459 - DNA, 33 bp, Homo sapien
ctctgcaaccagataaatctaattcaagggtgg

SEQ ID NO: 809460 - DNA, 33 bp, Homo sapien
ctctgcaaccagataagtctaattcaagggtgg

SEQ ID NO: 809461 - DNA, 33 bp, Homo sapien
tggatacctctgtgagaccaaatggaatatgat

SEQ ID NO: 809462 - DNA, 33 bp, Homo sapien
tggatacctctgtgaggccaaatggaatatgat

SEQ ID NO: 809463 - DNA, 33 bp, Homo sapien
gtacacctgaatgtctaaattctcatataatat

SEQ ID NO: 809464 - DNA, 33 bp, Homo sapien
gtacacctgaatgtctgaattctcatataatat

SEQ ID NO: 809465 - DNA, 33 bp, Homo sapien
gagaccctcacaattaccttgtttatcaccacc

SEQ ID NO: 809466 - DNA, 33 bp, Homo sapien
gagaccctcacaattagcttgtttatcaccacc

SEQ ID NO: 809467 - DNA, 33 bp, Homo sapien
aataagccctgaattaagacaccgaaagacctg

SEQ ID NO: 809468 - DNA, 33 bp, Homo sapien
aataagccctgaattaggacaccgaaagacctg

SEQ ID NO: 809469 - DNA, 33 bp, Homo sapien
gactcaccgccttctacgtgacttgactctcct

SEQ ID NO: 809470 - DNA, 33 bp, Homo sapien
gactcaccgccttctatgtgacttgactctcct

SEQ ID NO: 809471 - DNA, 33 bp, Homo sapien
agagactagatctacaatgaaattctggagtga

SEQ ID NO: 809472 - DNA, 33 bp, Homo sapien
agagactagatctacagtgaaattctggagtga

SEQ ID NO: 809473 - DNA, 33 bp, Homo sapien
atgtgtgcctaagtgaagctctccatgtgtctg

SEQ ID NO: 809474 - DNA, 33 bp, Homo sapien
atgtgtgcctaagtgaggctctccatgtgtctg

SEQ ID NO: 809475 - DNA, 33 bp, Homo sapien
gaatagaattaagtaaatagcacaagatcacaa

SEQ ID NO: 809476 - DNA, 33 bp, Homo sapien
gaatagaattaagtaagtagcacaagatcacaa

SEQ ID NO: 809477 - DNA, 33 bp, Homo sapien
atgctaacctgtcctgcagagcttacaattttg

SEQ ID NO: 809478 - DNA, 33 bp, Homo sapien
atgctaacctgtcctgtagagcttacaattttg

SEQ ID NO: 809479 - DNA, 33 bp, Homo sapien
agaaaagtcctgctagacacagtggtgtgcacc

SEQ ID NO: 809480 - DNA, 33 bp, Homo sapien
agaaaagtcctgctaggcacagtggtgtgcacc

SEQ ID NO: 809481 - DNA, 33 bp, Homo sapien
tgatgactgacaagtgcattaaaaagaaaagtc

SEQ ID NO: 809482 - DNA, 33 bp, Homo sapien
tgatgactgacaagtggattaaaaagaaaagtc

SEQ ID NO: 809483 - DNA, 33 bp, Homo sapien
gggtttgcaatgtttaagtgctaaggataagta

SEQ ID NO: 809484 - DNA, 33 bp, Homo sapien
gggtttgcaatgtttaggtgctaaggataagta

SEQ ID NO: 809485 - DNA, 33 bp, Homo sapien
tgtccaaagttacttcaagctctaagagtctat

SEQ ID NO: 809486 - DNA, 33 bp, Homo sapien
tgtccaaagttacttcgagctctaagagtctat

SEQ ID NO: 809487 - DNA, 33 bp, Homo sapien
atcccattagcaaatacgtgcttatgtctcatt

SEQ ID NO: 809488 - DNA, 33 bp, Homo sapien
atcccattagcaaatatgtgcttatgtctcatt

SEQ ID NO: 809489 - DNA, 33 bp, Homo sapien
agatgaaatcaattagcatgggagacctgccaa

SEQ ID NO: 809490 - DNA, 33 bp, Homo sapien
agatgaaatcaattaggatgggagacctgccaa

SEQ ID NO: 809491 - DNA, 33 bp, Homo sapien
acaaatacacatctacacattgatatacccata

SEQ ID NO: 809492 - DNA, 33 bp, Homo sapien
acaaatacacatctactcattgatatacccata

SEQ ID NO: 809493 - DNA, 33 bp, Homo sapien
tgccagagtctatttacctgccattgttcattt

SEQ ID NO: 809494 - DNA, 33 bp, Homo sapien
tgccagagtctatttatctgccattgttcattt

SEQ ID NO: 809495 - DNA, 33 bp, Homo sapien
ttcttggctgctattgaaaggaggttgggggtt

SEQ ID NO: 809496 - DNA, 33 bp, Homo sapien
ttcttggctgctattggaaggaggttgggggtt

SEQ ID NO: 809497 - DNA, 33 bp, Homo sapien
ataaatcacctcaaaacgtagaggcttaaaaca

SEQ ID NO: 809498 - DNA, 33 bp, Homo sapien
ataaatcacctcaaaatgtagaggcttaaaaca

SEQ ID NO: 809499 - DNA, 33 bp, Homo sapien
gctgatccccagaaacaatgagaggtaataaat

SEQ ID NO: 809500 - DNA, 33 bp, Homo sapien
gctgatccccagaaacgatgagaggtaataaat

SEQ ID NO: 809501 - DNA, 33 bp, Homo sapien
ttctactcaccataacaaccaaatatgcaatgc

SEQ ID NO: 809502 - DNA, 33 bp, Homo sapien
ttctactcaccataaccaccaaatatgcaatgc

SEQ ID NO: 809503 - DNA, 33 bp, Homo sapien
ccatgaaagtgacgaaacttaatcagaaatagc

SEQ ID NO: 809504 - DNA, 33 bp, Homo sapien
ccatgaaagtgacgaaccttaatcagaaatagc

SEQ ID NO: 809505 - DNA, 33 bp, Homo sapien
gagaaaatagttttaactggactatgaaaacaa

SEQ ID NO: 809506 - DNA, 33 bp, Homo sapien
gagaaaatagttttaattggactatgaaaacaa

SEQ ID NO: 809507 - DNA, 33 bp, Homo sapien
aggaggggaatagacacacgccagaggcatagg

SEQ ID NO: 809508 - DNA, 33 bp, Homo sapien
aggaggggaatagacatacgccagaggcatagg

SEQ ID NO: 809509 - DNA, 33 bp, Homo sapien
cctgtaagtgggtagcactccaaagggcagggg

SEQ ID NO: 809510 - DNA, 33 bp, Homo sapien
cctgtaagtgggtagcgctccaaagggcagggg

SEQ ID NO: 809511 - DNA, 33 bp, Homo sapien
attcacaacaatgcaacggaggaattctctcca

SEQ ID NO: 809512 - DNA, 33 bp, Homo sapien
attcacaacaatgcaagggaggaattctctcca

SEQ ID NO: 809513 - DNA, 33 bp, Homo sapien
ttattatgaattaacacctgaggattagctcat

SEQ ID NO: 809514 - DNA, 33 bp, Homo sapien
ttattatgaattaacatctgaggattagctcat

SEQ ID NO: 809515 - DNA, 33 bp, Homo sapien
gtgataagagaattaacagccagtaaggcaggc

SEQ ID NO: 809516 - DNA, 33 bp, Homo sapien
gtgataagagaattaatagccagtaaggcaggc

SEQ ID NO: 809517 - DNA, 33 bp, Homo sapien
aagtgacattggaatcaatctttttccaccctc

SEQ ID NO: 809518 - DNA, 33 bp, Homo sapien
aagtgacattggaatcgatctttttccaccctc

SEQ ID NO: 809519 - DNA, 33 bp, Homo sapien
tacaaagacagttcttgaaactggtgagctaaa

SEQ ID NO: 809520 - DNA, 33 bp, Homo sapien
tacaaagacagttctttaaactggtgagctaaa

SEQ ID NO: 809521 - DNA, 33 bp, Homo sapien
aaagactgacagtacccaagaggtccccataaa

SEQ ID NO: 809522 - DNA, 33 bp, Homo sapien
aaagactgacagtaccgaagaggtccccataaa

SEQ ID NO: 809523 - DNA, 33 bp, Homo sapien
gactgccatattggaccgcacagatttagaacg

SEQ ID NO: 809524 - DNA, 33 bp, Homo sapien
gactgccatattggactgcacagatttagaacg

SEQ ID NO: 809525 - DNA, 33 bp, Homo sapien
tttccttacctgcttacggatagacttttaggt

SEQ ID NO: 809526 - DNA, 33 bp, Homo sapien
tttccttacctgcttatggatagacttttaggt

SEQ ID NO: 809527 - DNA, 33 bp, Homo sapien
gaaaggaaccttcacaaaaatgatgattcaaag

SEQ ID NO: 809528 - DNA, 33 bp, Homo sapien
gaaaggaaccttcacagaaatgatgattcaaag

SEQ ID NO: 809529 - DNA, 33 bp, Homo sapien
ttgcagggaggagctaaaagggtcatcatctct

SEQ ID NO: 809530 - DNA, 33 bp, Homo sapien
ttgcagggaggagctacaagggtcatcatctct

SEQ ID NO: 809531 - DNA, 33 bp, Homo sapien; identical to SEQ ID NO: 809529

SEQ ID NO: 809532 - DNA, 33 bp, Homo sapien; identical to SEQ ID NO: 809530

SEQ ID NO: 809533 - DNA, 33 bp, Homo sapien
actgagaagtgcaaggatcaaaggctcacattg

SEQ ID NO: 809534 - DNA, 33 bp, Homo sapien
actgagaagtgcaagggtcaaaggctcacattg

SEQ ID NO: 809535 - DNA, 33 bp, Homo sapien
cttggagggtacattgcaagaaaacagaggcaa

SEQ ID NO: 809536 - DNA, 33 bp, Homo sapien
cttggagggtacattgtaagaaaacagaggcaa

SEQ ID NO: 809537 - DNA, 33 bp, Homo sapien
tatgctgatgggaatacgtacaccacagaaatt

SEQ ID NO: 809538 - DNA, 33 bp, Homo sapien
tatgctgatgggaatatgtacaccacagaaatt

SEQ ID NO: 809539 - DNA, 33 bp, Homo sapien
ctactatcatcttcaccgggctactgcattaga

SEQ ID NO: 809540 - DNA, 33 bp, Homo sapien
ctactatcatcttcactgggctactgcattaga

SEQ ID NO: 809541 - DNA, 33 bp, Homo sapien
ctctgaaatatatcccaaaatcatacacttctc

SEQ ID NO: 809542 - DNA, 33 bp, Homo sapien
ctctgaaatatatcccgaaatcatacacttctc

SEQ ID NO: 809543 - DNA, 33 bp, Homo sapien
ctttattgtgtctaagcatcacaggaaatgtat

SEQ ID NO: 809544 - DNA, 33 bp, Homo sapien
ctttattgtgtctaagtatcacaggaaatgtat

SEQ ID NO: 809545 - DNA, 33 bp, Homo sapien
caagcttctattccaacctactcaagctatgca

SEQ ID NO: 809546 - DNA, 33 bp, Homo sapien
caagcttctattccaagctactcaagctatgca

SEQ ID NO: 809547 - DNA, 33 bp, Homo sapien
aaatgatttttactgccccagacttaatagact

SEQ ID NO: 809548 - DNA, 33 bp, Homo sapien
aaatgatttttactgcgccagacttaatagact

SEQ ID NO: 809549 - DNA, 33 bp, Homo sapien
agttacctcatttctcacttcacttgtatttcc

SEQ ID NO: 809550 - DNA, 33 bp, Homo sapien
agttacctcatttctcgcttcacttgtatttcc

SEQ ID NO: 809551 - DNA, 33 bp, Homo sapien
agataagtttcaagtaactgctctaggtcaagg

SEQ ID NO: 809552 - DNA, 33 bp, Homo sapien
agataagtttcaagtagctgctctaggtcaagg

SEQ ID NO: 809553 - DNA, 33 bp, Homo sapien
aaggttgagtgaggaaactgctttaaggaaaga

SEQ ID NO: 809554 - DNA, 33 bp, Homo sapien
aaggttgagtgaggaagctgctttaaggaaaga

SEQ ID NO: 809555 - DNA, 33 bp, Homo sapien
atttatcaactgaacccagtggcaagcactcgg

SEQ ID NO: 809556 - DNA, 33 bp, Homo sapien
atttatcaactgaaccgagtggcaagcactcgg

SEQ ID NO: 809557 - DNA, 33 bp, Homo sapien
gagttataaaatgctacgagagtcaggaagggg

SEQ ID NO: 809558 - DNA, 33 bp, Homo sapien
gagttataaaatgctatgagagtcaggaagggg

SEQ ID NO: 809559 - DNA, 33 bp, Homo sapien
ttcacattagtttcaccgaccatcacttaaggg

SEQ ID NO: 809560 - DNA, 33 bp, Homo sapien
ttcacattagtttcactgaccatcacttaaggg

SEQ ID NO: 809561 - DNA, 33 bp, Homo sapien
agactaccattgccacaagtgtagaggttttgt

SEQ ID NO: 809562 - DNA, 33 bp, Homo sapien
agactaccattgccacgagtgtagaggttttgt

SEQ ID NO: 809563 - DNA, 33 bp, Homo sapien
ccaatgctggccttcacataagaaagcgtaagt

SEQ ID NO: 809564 - DNA, 33 bp, Homo sapien
ccaatgctggccttcatataagaaagcgtaagt

SEQ ID NO: 809565 - DNA, 33 bp, Homo sapien
taggttagcatgttgactatatgcactatttga

SEQ ID NO: 809566 - DNA, 33 bp, Homo sapien
taggttagcatgttgattatatgcactatttga

SEQ ID NO: 809567 - DNA, 33 bp, Homo sapien
tttctcactctgagcacggtgatgaaataaatg

SEQ ID NO: 809568 - DNA, 33 bp, Homo sapien
tttctcactctgagcatggtgatgaaataaatg

SEQ ID NO: 809569 - DNA, 33 bp, Homo sapien
ttgttgtgaaggttaaatagactaatagcttgc

SEQ ID NO: 809570 - DNA, 33 bp, Homo sapien
ttgttgtgaaggttaattagactaatagcttgc

SEQ ID NO: 809571 - DNA, 33 bp, Homo sapien
ttaactggaacatttacattaccacatgcatta

SEQ ID NO: 809572 - DNA, 33 bp, Homo sapien
ttaactggaacatttatattaccacatgcatta

SEQ ID NO: 809573 - DNA, 33 bp, Homo sapien
gggagctgagtttggacgaggaagcggctgtca

SEQ ID NO: 809574 - DNA, 33 bp, Homo sapien
gggagctgagtttggatgaggaagcggctgtca

SEQ ID NO: 809575 - DNA, 33 bp, Homo sapien
ctgtcccaccatctatcaatccacctcctgacc

SEQ ID NO: 809576 - DNA, 33 bp, Homo sapien
ctgtcccaccatctattaatccacctcctgacc

SEQ ID NO: 809577 - DNA, 33 bp, Homo sapien
gcgggcagatggggcgacccattagtgaactga

SEQ ID NO: 809578 - DNA, 33 bp, Homo sapien
gcgggcagatggggcgtcccattagtgaactga

SEQ ID NO: 809579 - DNA, 33 bp, Homo sapien
tgaacaaacttgcctccgaacaaacttggagtt

SEQ ID NO: 809580 - DNA, 33 bp, Homo sapien
tgaacaaacttgcctctgaacaaacttggagtt

SEQ ID NO: 809581 - DNA, 33 bp, Homo sapien
acagggtatagagcaacgtggctccctctttct

SEQ ID NO: 809582 - DNA, 33 bp, Homo sapien
acagggtatagagcaatgtggctccctctttct

SEQ ID NO: 809583 - DNA, 33 bp, Homo sapien
cagcagaggatgcaaacgcccgttgagtccttt

SEQ ID NO: 809584 - DNA, 33 bp, Homo sapien
cagcagaggatgcaaatgcccgttgagtccttt

SEQ ID NO: 809585 - DNA, 33 bp, Homo sapien
acactctcacattacaaaatccaatgacaggta

SEQ ID NO: 809586 - DNA, 33 bp, Homo sapien
acactctcacattacagaatccaatgacaggta

SEQ ID NO: 809587 - DNA, 33 bp, Homo sapien
gtttagacgtgggtagaaaaaaataatgttgcc

SEQ ID NO: 809588 - DNA, 33 bp, Homo sapien
gtttagacgtgggtaggaaaaaataatgttgcc

SEQ ID NO: 809589 - DNA, 33 bp, Homo sapien
ccttcgtccatacagaagaaaaacctactttgc

SEQ ID NO: 809590 - DNA, 33 bp, Homo sapien
ccttcgtccatacagatgaaaaacctactttgc

SEQ ID NO: 809591 - DNA, 33 bp, Homo sapien
atttccaccatagggaaagattccttcatgttt

SEQ ID NO: 809592 - DNA, 33 bp, Homo sapien
atttccaccatagggatagattccttcatgttt

SEQ ID NO: 809593 - DNA, 33 bp, Homo sapien
tgcaggacactcgttgcaatttagccttattaa

SEQ ID NO: 809594 - DNA, 33 bp, Homo sapien
tgcaggacactcgttgtaatttagccttattaa

SEQ ID NO: 809595 - DNA, 33 bp, Homo sapien
gccttgtgctagtaagaacttattgagtgaatg

SEQ ID NO: 809596 - DNA, 33 bp, Homo sapien
gccttgtgctagtaagtacttattgagtgaatg

SEQ ID NO: 809597 - DNA, 33 bp, Homo sapien
gtcagagctaactggaacctctgagaacaatat

SEQ ID NO: 809598 - DNA, 33 bp, Homo sapien
gtcagagctaactggagcctctgagaacaatat

SEQ ID NO: 809599 - DNA, 33 bp, Homo sapien
ctagggatcgatgccaactagtatttcagattt

SEQ ID NO: 809600 - DNA, 33 bp, Homo sapien
ctagggatcgatgccagctagtatttcagattt

SEQ ID NO: 809601 - DNA, 33 bp, Homo sapien
accctctaactctgcaaccaaagcacttgagca

SEQ ID NO: 809602 - DNA, 33 bp, Homo sapien
accctctaactctgcagccaaagcacttgagca

SEQ ID NO: 809603 - DNA, 33 bp, Homo sapien
tgtagcaagtccattaagtaagtacagttgtta

SEQ ID NO: 809604 - DNA, 33 bp, Homo sapien
tgtagcaagtccattaggtaagtacagttgtta

SEQ ID NO: 809605 - DNA, 33 bp, Homo sapien
taaccctttgattgcactgacctgagagtgatg

SEQ ID NO: 809606 - DNA, 33 bp, Homo sapien
taaccctttgattgcattgacctgagagtgatg

SEQ ID NO: 809607 - DNA, 33 bp, Homo sapien
aatcaatggtatcttgaaaactgcctcatgatt

SEQ ID NO: 809608 - DNA, 33 bp, Homo sapien
aatcaatggtatcttgcaaactgcctcatgatt

SEQ ID NO: 809609 - DNA, 33 bp, Homo sapien
ttatatgcaggcagccagaaacctagaaactta

SEQ ID NO: 809610 - DNA, 33 bp, Homo sapien
ttatatgcaggcagccggaaacctagaaactta

SEQ ID NO: 809611 - DNA, 33 bp, Homo sapien
aggtcaaagctgcccaaagaggaagagcctcct

SEQ ID NO: 809612 - DNA, 33 bp, Homo sapien
aggtcaaagctgcccagagaggaagagcctcct

SEQ ID NO: 809613 - DNA, 33 bp, Homo sapien
atagccatggaatctccgacttctctgatgcac

SEQ ID NO: 809614 - DNA, 33 bp, Homo sapien
atagccatggaatctctgacttctctgatgcac

SEQ ID NO: 809615 - DNA, 33 bp, Homo sapien
tcgtgaggatccgtgcaatgtgtgtaaagtgcc

SEQ ID NO: 809616 - DNA, 33 bp, Homo sapien
tcgtgaggatccgtgcgatgtgtgtaaagtgcc

SEQ ID NO: 809617 - DNA, 33 bp, Homo sapien
tattatgttgtaaaaaactttgttggtttgata

SEQ ID NO: 809618 - DNA, 33 bp, Homo sapien
tattatgttgtaaaaatctttgttggtttgata

SEQ ID NO: 809619 - DNA, 33 bp, Homo sapien
gtttagtttgagaatccagctgatcacttcgct

SEQ ID NO: 809620 - DNA, 33 bp, Homo sapien
gtttagtttgagaatctagctgatcacttcgct

SEQ ID NO: 809621 - DNA, 33 bp, Homo sapien
aacactgattagcgcccatcctgatctaatatg

SEQ ID NO: 809622 - DNA, 33 bp, Homo sapien
aacactgattagcgcctatcctgatctaatatg

SEQ ID NO: 809623 - DNA, 33 bp, Homo sapien
gcccaatgaacatcaactcccttcacttacagg

SEQ ID NO: 809624 - DNA, 33 bp, Homo sapien
gcccaatgaacatcaattcccttcacttacagg

SEQ ID NO: 809625 - DNA, 33 bp, Homo sapien
cagcctttttcatagtaaacattattcttggag

SEQ ID NO: 809626 - DNA, 33 bp, Homo sapien
cagcctttttcatagtgaacattattcttggag

SEQ ID NO: 809627 - DNA, 33 bp, Homo sapien
aggggcacacgtagcaagcaagaaaccccacat

SEQ ID NO: 809628 - DNA, 33 bp, Homo sapien
aggggcacacgtagcaggcaagaaaccccacat

SEQ ID NO: 809629 - DNA, 33 bp, Homo sapien
ggactagttcaccaaaaatcatgtatctactga

SEQ ID NO: 809630 - DNA, 33 bp, Homo sapien
ggactagttcaccaaacatcatgtatctactga

SEQ ID NO: 809631 - DNA, 33 bp, Homo sapien
tctcatatttgacaaactggggctcccaacgtc

SEQ ID NO: 809632 - DNA, 33 bp, Homo sapien
tctcatatttgacaaagtggggctcccaacgtc

SEQ ID NO: 809633 - DNA, 33 bp, Homo sapien
ggtcaggtgaggataactgcttgtggttgtatg

SEQ ID NO: 809634 - DNA, 33 bp, Homo sapien
ggtcaggtgaggataattgcttgtggttgtatg

SEQ ID NO: 809635 - DNA, 33 bp, Homo sapien
tccctcaggatccatacgcaaatctcagggaaa

SEQ ID NO: 809636 - DNA, 33 bp, Homo sapien
tccctcaggatccataggcaaatctcagggaaa

SEQ ID NO: 809637 - DNA, 33 bp, Homo sapien
atgcctgagtaatgccactgctgtgcaaccagg

SEQ ID NO: 809638 - DNA, 33 bp, Homo sapien
atgcctgagtaatgcccctgctgtgcaaccagg

SEQ ID NO: 809639 - DNA, 33 bp, Homo sapien
taggcaaaaataaggacgcagtttgattgtatt

SEQ ID NO: 809640 - DNA, 33 bp, Homo sapien
taggcaaaaataaggatgcagtttgattgtatt

SEQ ID NO: 809641 - DNA, 33 bp, Homo sapien
gaactggccgcccttacggagactggaataatc

SEQ ID NO: 809642 - DNA, 33 bp, Homo sapien
gaactggccgcccttatggagactggaataatc

SEQ ID NO: 809643 - DNA, 33 bp, Homo sapien
ctgaattgagatccgccgcaagtgtgaaataca

SEQ ID NO: 809644 - DNA, 33 bp, Homo sapien
ctgaattgagatccgctgcaagtgtgaaataca

SEQ ID NO: 809645 - DNA, 33 bp, Homo sapien
acctttacacgttactcaatctctccccttcag

SEQ ID NO: 809646 - DNA, 33 bp, Homo sapien
acctttacacgttacttaatctctccccttcag

SEQ ID NO: 809647 - DNA, 33 bp, Homo sapien
cctcttaatgtaacgacaccactcatactggat

SEQ ID NO: 809648 - DNA, 33 bp, Homo sapien
cctcttaatgtaacgataccactcatactggat

SEQ ID NO: 809649 - DNA, 33 bp, Homo sapien
gcatcccattcctatacacattgtgcacagtct

SEQ ID NO: 809650 - DNA, 33 bp, Homo sapien
gcatcccattcctatatacattgtgcacagtct

SEQ ID NO: 809651 - DNA, 33 bp, Homo sapien
ggcttcatgtagcatgcaatccaaaatacttgt

SEQ ID NO: 809652 - DNA, 33 bp, Homo sapien
ggcttcatgtagcatggaatccaaaatacttgt

SEQ ID NO: 809653 - DNA, 33 bp, Homo sapien
ccctcatatggcattacaacaatgaatacagtt

SEQ ID NO: 809654 - DNA, 33 bp, Homo sapien
ccctcatatggcattagaacaatgaatacagtt

SEQ ID NO: 809655 - DNA, 33 bp, Homo sapien
tcatcctcatagcacaaccccaaaatgatcagt

SEQ ID NO: 809656 - DNA, 33 bp, Homo sapien
tcatcctcatagcacatccccaaaatgatcagt

SEQ ID NO: 809657 - DNA, 33 bp, Homo sapien
tgtataatttttgtcacatgttgctggattgag

SEQ ID NO: 809658 - DNA, 33 bp, Homo sapien
tgtataatttttgtcatatgttgctggattgag

SEQ ID NO: 809659 - DNA, 33 bp, Homo sapien
gcagtctcatggttaccggctccaacagagttc

SEQ ID NO: 809660 - DNA, 33 bp, Homo sapien
gcagtctcatggttactggctccaacagagttc

SEQ ID NO: 809661 - DNA, 33 bp, Homo sapien
aacctgaagggaaatgaaacctgactaccaaat

SEQ ID NO: 809662 - DNA, 33 bp, Homo sapien
aacctgaagggaaatggaacctgactaccaaat

SEQ ID NO: 809663 - DNA, 33 bp, Homo sapien
tcctaaataccacaaaagcgcaagtgcaaattg

SEQ ID NO: 809664 - DNA, 33 bp, Homo sapien
tcctaaataccacaaacgcgcaagtgcaaattg

SEQ ID NO: 809665 - DNA, 33 bp, Homo sapien
gattgtgtacgtggaacaagaaatcgtttgttt

SEQ ID NO: 809666 - DNA, 33 bp, Homo sapien
gattgtgtacgtggaagaagaaatcgtttgttt

SEQ ID NO: 809667 - DNA, 33 bp, Homo sapien
agaagggctgactccaaagctctttcaggcaat

SEQ ID NO: 809668 - DNA, 33 bp, Homo sapien
agaagggctgactccagagctctttcaggcaat

SEQ ID NO: 809669 - DNA, 33 bp, Homo sapien
ggaggtaagttgataaccatttgtcctgaattt

SEQ ID NO: 809670 - DNA, 33 bp, Homo sapien
ggaggtaagttgataatcatttgtcctgaattt

SEQ ID NO: 809671 - DNA, 33 bp, Homo sapien
ttcatacaacttttacagagtgggcactttacg

SEQ ID NO: 809672 - DNA, 33 bp, Homo sapien
ttcatacaacttttaccgagtgggcactttacg

SEQ ID NO: 809673 - DNA, 33 bp, Homo sapien
gtcaccaacttccccagtcatttcatagtcccc

SEQ ID NO: 809674 - DNA, 33 bp, Homo sapien
gtcaccaacttccccattcatttcatagtcccc

SEQ ID NO: 809675 - DNA, 33 bp, Homo sapien
tgactcacactcacacaaagatcaacatgctag

SEQ ID NO: 809676 - DNA, 33 bp, Homo sapien
tgactcacactcacacgaagatcaacatgctag

SEQ ID NO: 809677 - DNA, 33 bp, Homo sapien
aaatatgggttagtgacagtggaagtcttatta

SEQ ID NO: 809678 - DNA, 33 bp, Homo sapien
aaatatgggttagtgagagtggaagtcttatta

SEQ ID NO: 809679 - DNA, 33 bp, Homo sapien
ttctgacccagaggacagcaattaactggtaag

SEQ ID NO: 809680 - DNA, 33 bp, Homo sapien
ttctgacccagaggacggcaattaactggtaag

SEQ ID NO: 809681 - DNA, 33 bp, Homo sapien
ctgcatttctctacaccacctctgagcctgcct

SEQ ID NO: 809682 - DNA, 33 bp, Homo sapien
ctgcatttctctacactacctctgagcctgcct

SEQ ID NO: 809683 - DNA, 33 bp, Homo sapien
aaggggatggaaaagaccccagtggttaatcat

SEQ ID NO: 809684 - DNA, 33 bp, Homo sapien
aaggggatggaaaagatcccagtggttaatcat

SEQ ID NO: 809685 - DNA, 33 bp, Homo sapien
gaaaggcaggcatggactcataccttgaaaaag

SEQ ID NO: 809686 - DNA, 33 bp, Homo sapien
gaaaggcaggcatggattcataccttgaaaaag

SEQ ID NO: 809687 - DNA, 33 bp, Homo sapien
aagaaaaaaaaatcaactgaatggccactatga

SEQ ID NO: 809688 - DNA, 33 bp, Homo sapien
aagaaaaaaaaatcaattgaatggccactatga

SEQ ID NO: 809689 - DNA, 33 bp, Homo sapien
tctctgttcaaaagtaccttctcaatgaggccc

SEQ ID NO: 809690 - DNA, 33 bp, Homo sapien
tctctgttcaaaagtagcttctcaatgaggccc

SEQ ID NO: 809691 - DNA, 33 bp, Homo sapien
agaggaagctgcgactaactgagaaggcaggag

SEQ ID NO: 809692 - DNA, 33 bp, Homo sapien
agaggaagctgcgactgactgagaaggcaggag

SEQ ID NO: 809693 - DNA, 33 bp, Homo sapien
ggaatatatgagcctccacctgcagcctcagag

SEQ ID NO: 809694 - DNA, 33 bp, Homo sapien
ggaatatatgagcctctacctgcagcctcagag

SEQ ID NO: 809695 - DNA, 33 bp, Homo sapien
actaaacagtgatacccgagaaatagaaacaaa

SEQ ID NO: 809696 - DNA, 33 bp, Homo sapien
actaaacagtgatacctgagaaatagaaacaaa

SEQ ID NO: 809697 - DNA, 33 bp, Homo sapien
ttgtgaaataaaagtgaagaattaaggctacat

SEQ ID NO: 809698 - DNA, 33 bp, Homo sapien
ttgtgaaataaaagtggagaattaaggctacat

SEQ ID NO: 809699 - DNA, 33 bp, Homo sapien
caatgttctaataggacatgtggagagtaacag

SEQ ID NO: 809700 - DNA, 33 bp, Homo sapien
caatgttctaataggatatgtggagagtaacag

SEQ ID NO: 809701 - DNA, 33 bp, Homo sapien
gaacagtgtcagcctacattaggcccctgagac

SEQ ID NO: 809702 - DNA, 33 bp, Homo sapien
gaacagtgtcagcctatattaggcccctgagac

SEQ ID NO: 809703 - DNA, 33 bp, Homo sapien
tgaccttaactaaagacagaggaaacacagaag

SEQ ID NO: 809704 - DNA, 33 bp, Homo sapien
tgaccttaactaaagagagaggaaacacagaag

SEQ ID NO: 809705 - DNA, 33 bp, Homo sapien
agctgaaaatctgcatcagaaaaataccggata

SEQ ID NO: 809706 - DNA, 33 bp, Homo sapien
agctgaaaatctgcattagaaaaataccggata

SEQ ID NO: 809707 - DNA, 33 bp, Homo sapien
tttgtttatgtctccaagagccagacagtgggg

SEQ ID NO: 809708 - DNA, 33 bp, Homo sapien
tttgtttatgtctccaggagccagacagtgggg

SEQ ID NO: 809709 - DNA, 33 bp, Homo sapien
gaagaactgaatttcacaggtctgacactgaca

SEQ ID NO: 809710 - DNA, 33 bp, Homo sapien
gaagaactgaatttcagaggtctgacactgaca

SEQ ID NO: 809711 - DNA, 33 bp, Homo sapien
gatgagttcccaaaagacaaatcacatccctta

SEQ ID NO: 809712 - DNA, 33 bp, Homo sapien
gatgagttcccaaaagtcaaatcacatccctta

SEQ ID NO: 809713 - DNA, 33 bp, Homo sapien
acaacaggatggcaaactgaaaaacacgtaacc

SEQ ID NO: 809714 - DNA, 33 bp, Homo sapien
acaacaggatggcaaattgaaaaacacgtaacc

SEQ ID NO: 809715 - DNA, 33 bp, Homo sapien
ccatgttctacagatgcaaaggggtgcttggtt

SEQ ID NO: 809716 - DNA, 33 bp, Homo sapien
ccatgttctacagatggaaaggggtgcttggtt

SEQ ID NO: 809717 - DNA, 33 bp, Homo sapien
tacataaactgaatcaaagacaccaagttattt

SEQ ID NO: 809718 - DNA, 33 bp, Homo sapien
tacataaactgaatcatagacaccaagttattt

SEQ ID NO: 809719 - DNA, 33 bp, Homo sapien
aaaaaaatcacttgcaatcttaacacccactac

SEQ ID NO: 809720 - DNA, 33 bp, Homo sapien
aaaaaaatcacttgcagtcttaacacccactac

SEQ ID NO: 809721 - DNA, 33 bp, Homo sapien
gacataacttaatccagagcaaaagtgattccc

SEQ ID NO: 809722 - DNA, 33 bp, Homo sapien
gacataacttaatccatagcaaaagtgattccc

SEQ ID NO: 809723 - DNA, 33 bp, Homo sapien
caatttcacggatagaagattcattcatactgt

SEQ ID NO: 809724 - DNA, 33 bp, Homo sapien
caatttcacggatagacgattcattcatactgt

SEQ ID NO: 809725 - DNA, 33 bp, Homo sapien
taaacttagtccaaccccaaatctttcaaaaag

SEQ ID NO: 809726 - DNA, 33 bp, Homo sapien
taaacttagtccaacctcaaatctttcaaaaag

SEQ ID NO: 809727 - DNA, 33 bp, Homo sapien
ccagatcagtactcgcactcccactgtgtcact

SEQ ID NO: 809728 - DNA, 33 bp, Homo sapien
ccagatcagtactcgcgctcccactgtgtcact

SEQ ID NO: 809729 - DNA, 33 bp, Homo sapien
cgaggtactggggatacgatgatgaccaagaga

SEQ ID NO: 809730 - DNA, 33 bp, Homo sapien
cgaggtactggggatatgatgatgaccaagaga

SEQ ID NO: 809731 - DNA, 33 bp, Homo sapien
tgcacacgatgcagtcactgtctggaacattcg

SEQ ID NO: 809732 - DNA, 33 bp, Homo sapien
tgcacacgatgcagtcgctgtctggaacattcg

SEQ ID NO: 809733 - DNA, 33 bp, Homo sapien
tgccaggtatccactacgtgcttcataaatgtc

SEQ ID NO: 809734 - DNA, 33 bp, Homo sapien
tgccaggtatccactaggtgcttcataaatgtc

SEQ ID NO: 809735 - DNA, 33 bp, Homo sapien
tcaataagtttgtatacagctgggcatggtaac

SEQ ID NO: 809736 - DNA, 33 bp, Homo sapien
tcaataagtttgtatatagctgggcatggtaac

SEQ ID NO: 809737 - DNA, 33 bp, Homo sapien
taaagtctgatgagtacgtagaaggaaaatggg

SEQ ID NO: 809738 - DNA, 33 bp, Homo sapien
taaagtctgatgagtatgtagaaggaaaatggg

SEQ ID NO: 809739 - DNA, 33 bp, Homo sapien
taaatgagatcaacccaaagtttgtagctacta

SEQ ID NO: 809740 - DNA, 33 bp, Homo sapien
taaatgagatcaaccccaagtttgtagctacta

SEQ ID NO: 809741 - DNA, 33 bp, Homo sapien
tatgaaggaggatgacagaaaagaaggcgatat

SEQ ID NO: 809742 - DNA, 33 bp, Homo sapien
tatgaaggaggatgacggaaaagaaggcgatat

SEQ ID NO: 809743 - DNA, 33 bp, Homo sapien
ggcatctggactcaatcaaaaaactgaagattt

SEQ ID NO: 809744 - DNA, 33 bp, Homo sapien
ggcatctggactcaattaaaaaactgaagattt

SEQ ID NO: 809745 - DNA, 33 bp, Homo sapien
cagaatagcttgaactaaattaaaaatgactaa

SEQ ID NO: 809746 - DNA, 33 bp, Homo sapien
cagaatagcttgaactgaattaaaaatgactaa

SEQ ID NO: 809747 - DNA, 33 bp, Homo sapien
tgaaatactatgaataaggtatggatccaaaac

SEQ ID NO: 809748 - DNA, 33 bp, Homo sapien
tgaaatactatgaatatggtatggatccaaaac

SEQ ID NO: 809749 - DNA, 33 bp, Homo sapien
gcatccttaccaagagacctccttcttcttttt

SEQ ID NO: 809750 - DNA, 33 bp, Homo sapien
gcatccttaccaagaggcctccttcttcttttt

SEQ ID NO: 809751 - DNA, 33 bp, Homo sapien
ctgagtcaactgtgaactggtgaaggattccca

SEQ ID NO: 809752 - DNA, 33 bp, Homo sapien
ctgagtcaactgtgaagtggtgaaggattccca

SEQ ID NO: 809753 - DNA, 33 bp, Homo sapien
cttctctgaagacttacggaatcaggacctctg

SEQ ID NO: 809754 - DNA, 33 bp, Homo sapien
cttctctgaagacttatggaatcaggacctctg

SEQ ID NO: 809755 - DNA, 33 bp, Homo sapien
ctgagaatgctttggaaagaagtaagtgctgta

SEQ ID NO: 809756 - DNA, 33 bp, Homo sapien
ctgagaatgctttggagagaagtaagtgctgta

SEQ ID NO: 809757 - DNA, 33 bp, Homo sapien
cagtttcccaactctccatcaagtttaacaggt

SEQ ID NO: 809758 - DNA, 33 bp, Homo sapien
cagtttcccaactctctatcaagtttaacaggt

SEQ ID NO: 809759 - DNA, 33 bp, Homo sapien
tttttctatgtcatcacgttttttcatagatca

SEQ ID NO: 809760 - DNA, 33 bp, Homo sapien
tttttctatgtcatcatgttttttcatagatca

SEQ ID NO: 809761 - DNA, 33 bp, Homo sapien
gctctaattggtaaacggtgcatcctgatgtga

SEQ ID NO: 809762 - DNA, 33 bp, Homo sapien
gctctaattggtaaactgtgcatcctgatgtga

SEQ ID NO: 809763 - DNA, 33 bp, Homo sapien
tgtggccttctgaaaagttctacttcctccctt

SEQ ID NO: 809764 - DNA, 33 bp, Homo sapien
tgtggccttctgaaaatttctacttcctccctt

SEQ ID NO: 809765 - DNA, 33 bp, Homo sapien
tctgtttcatgtggaaatggaacttctgggata

SEQ ID NO: 809766 - DNA, 33 bp, Homo sapien
tctgtttcatgtggaattggaacttctgggata

SEQ ID NO: 809767 - DNA, 33 bp, Homo sapien
aacaaggtgatatgaggagttctggaaagatct

SEQ ID NO: 809768 - DNA, 33 bp, Homo sapien
aacaaggtgatatgagtagttctggaaagatct

SEQ ID NO: 809769 - DNA, 33 bp, Homo sapien
ggaagagctcttgacactggagaaaaacatttt

SEQ ID NO: 809770 - DNA, 33 bp, Homo sapien
ggaagagctcttgacattggagaaaaacatttt

SEQ ID NO: 809771 - DNA, 33 bp, Homo sapien
gggcctgcctttgtcccaagtgggtagcatttg

SEQ ID NO: 809772 - DNA, 33 bp, Homo sapien
gggcctgcctttgtcctaagtgggtagcatttg

SEQ ID NO: 809773 - DNA, 33 bp, Homo sapien
ggaacatcatcatcaaattcactgctctgacta

SEQ ID NO: 809774 - DNA, 33 bp, Homo sapien
ggaacatcatcatcaagttcactgctctgacta

SEQ ID NO: 809775 - DNA, 33 bp, Homo sapien
agagagagtgggctgcagaatagaacactggcc

SEQ ID NO: 809776 - DNA, 33 bp, Homo sapien
agagagagtgggctgcggaatagaacactggcc

SEQ ID NO: 809777 - DNA, 33 bp, Homo sapien
aaattcaaattgtgcacgaaattgccagtgttt

SEQ ID NO: 809778 - DNA, 33 bp, Homo sapien
aaattcaaattgtgcatgaaattgccagtgttt

SEQ ID NO: 809779 - DNA, 33 bp, Homo sapien
taccctcctgccttacaaattttttgtgtagta

SEQ ID NO: 809780 - DNA, 33 bp, Homo sapien
taccctcctgccttactaattttttgtgtagta

SEQ ID NO: 809781 - DNA, 33 bp, Homo sapien
ctctgtttctgaaacagtagcctcaaggatgcc

SEQ ID NO: 809782 - DNA, 33 bp, Homo sapien
ctctgtttctgaaacattagcctcaaggatgcc

SEQ ID NO: 809783 - DNA, 33 bp, Homo sapien
tactcaataagtctaaacaagcaaatatactgc

SEQ ID NO: 809784 - DNA, 33 bp, Homo sapien
tactcaataagtctaagcaagcaaatatactgc

SEQ ID NO: 809785 - DNA, 33 bp, Homo sapien
acatatatgtgtgcaaaagtgtttctgaggtat

SEQ ID NO: 809786 - DNA, 33 bp, Homo sapien
acatatatgtgtgcaagagtgtttctgaggtat

SEQ ID NO: 809787 - DNA, 33 bp, Homo sapien
aaaaatgagtactttaaattcctctagctgttt

SEQ ID NO: 809788 - DNA, 33 bp, Homo sapien
aaaaatgagtactttacattcctctagctgttt

SEQ ID NO: 809789 - DNA, 33 bp, Homo sapien
tccaaacaattctaccagaccccattcacagtg

SEQ ID NO: 809790 - DNA, 33 bp, Homo sapien
tccaaacaattctacccgaccccattcacagtg

SEQ ID NO: 809791 - DNA, 33 bp, Homo sapien
taatgattgataacaacgaataactgagtactt

SEQ ID NO: 809792 - DNA, 33 bp, Homo sapien
taatgattgataacaatgaataactgagtactt

SEQ ID NO: 809793 - DNA, 33 bp, Homo sapien
aagccttctcaggcatcaatctttgtgccttcc

SEQ ID NO: 809794 - DNA, 33 bp, Homo sapien
aagccttctcaggcattaatctttgtgccttcc

SEQ ID NO: 809795 - DNA, 33 bp, Homo sapien
tactcaaggaatttgccatgcagtcagcacttt

SEQ ID NO: 809796 - DNA, 33 bp, Homo sapien
tactcaaggaatttgctatgcagtcagcacttt

SEQ ID NO: 809797 - DNA, 33 bp, Homo sapien
ccatcctggagtttcaacgttacagagtgcttc

SEQ ID NO: 809798 - DNA, 33 bp, Homo sapien
ccatcctggagtttcagcgttacagagtgcttc

SEQ ID NO: 809799 - DNA, 33 bp, Homo sapien
ctatgacttccacatacgaaaccaatttcagag

SEQ ID NO: 809800 - DNA, 33 bp, Homo sapien
ctatgacttccacatatgaaaccaatttcagag

SEQ ID NO: 809801 - DNA, 33 bp, Homo sapien
gatgagggcctaaagcaaacacataccaactga

SEQ ID NO: 809802 - DNA, 33 bp, Homo sapien
gatgagggcctaaagcgaacacataccaactga

SEQ ID NO: 809803 - DNA, 33 bp, Homo sapien
tggtttgaacggactacggttataaaagtctta

SEQ ID NO: 809804 - DNA, 33 bp, Homo sapien
tggtttgaacggactatggttataaaagtctta

SEQ ID NO: 809805 - DNA, 33 bp, Homo sapien
ttcaaacaggccaatacgagacccagcaggtgg

SEQ ID NO: 809806 - DNA, 33 bp, Homo sapien
ttcaaacaggccaataggagacccagcaggtgg

SEQ ID NO: 809807 - DNA, 33 bp, Homo sapien
ctaattatgtagggaagttcaaacaggccaata

SEQ ID NO: 809808 - DNA, 33 bp, Homo sapien
ctaattatgtagggaatttcaaacaggccaata

SEQ ID NO: 809809 - DNA, 33 bp, Homo sapien
catgcagagggactcacggaatatttgatgctt

SEQ ID NO: 809810 - DNA, 33 bp, Homo sapien
catgcagagggactcagggaatatttgatgctt

SEQ ID NO: 809811 - DNA, 33 bp, Homo sapien
aggttcctggcagcctaagcaagaaggtaaact

SEQ ID NO: 809812 - DNA, 33 bp, Homo sapien
aggttcctggcagccttagcaagaaggtaaact

SEQ ID NO: 809813 - DNA, 33 bp, Homo sapien
tctgccagagtctgggaataaagagaactaatt

SEQ ID NO: 809814 - DNA, 33 bp, Homo sapien
tctgccagagtctggggataaagagaactaatt

SEQ ID NO: 809815 - DNA, 33 bp, Homo sapien
gccataccaggtgacactacaacttgagcttct

SEQ ID NO: 809816 - DNA, 33 bp, Homo sapien
gccataccaggtgacagtacaacttgagcttct

SEQ ID NO: 809817 - DNA, 33 bp, Homo sapien
ataaattggccatgatcacccagtgtgtaggga

SEQ ID NO: 809818 - DNA, 33 bp, Homo sapien
ataaattggccatgattacccagtgtgtaggga

SEQ ID NO: 809819 - DNA, 33 bp, Homo sapien
aaagtgtgatcagaggaatacaggagtatacat

SEQ ID NO: 809820 - DNA, 33 bp, Homo sapien
aaagtgtgatcagaggcatacaggagtatacat

SEQ ID NO: 809821 - DNA, 33 bp, Homo sapien
gattccagggaccatccagtgtttgtcatcaag

SEQ ID NO: 809822 - DNA, 33 bp, Homo sapien
gattccagggaccatctagtgtttgtcatcaag

SEQ ID NO: 809823 - DNA, 33 bp, Homo sapien
tttccattgtagaccacctaaaatgcatacaaa

SEQ ID NO: 809824 - DNA, 33 bp, Homo sapien
tttccattgtagaccatctaaaatgcatacaaa

SEQ ID NO: 809825 - DNA, 33 bp, Homo sapien
ataccaaaaatgttgcagaccactgcgttaaag

SEQ ID NO: 809826 - DNA, 33 bp, Homo sapien
ataccaaaaatgttgcggaccactgcgttaaag

SEQ ID NO: 809827 - DNA, 33 bp, Homo sapien
gactttgggtgagtgaccctctttgtacttcaa

SEQ ID NO: 809828 - DNA, 33 bp, Homo sapien
gactttgggtgagtgatcctctttgtacttcaa

SEQ ID NO: 809829 - DNA, 33 bp, Homo sapien
cctataaaaagtataacagaccatccttgtaaa

SEQ ID NO: 809830 - DNA, 33 bp, Homo sapien
cctataaaaagtataatagaccatccttgtaaa

SEQ ID NO: 809831 - DNA, 33 bp, Homo sapien
aagtaccttaaaatcaatacatactttcactgc

SEQ ID NO: 809832 - DNA, 33 bp, Homo sapien
aagtaccttaaaatcagtacatactttcactgc

SEQ ID NO: 809833 - DNA, 33 bp, Homo sapien
caacagtaacaatgagaaatgtataaaatatta

SEQ ID NO: 809834 - DNA, 33 bp, Homo sapien
caacagtaacaatgaggaatgtataaaatatta

SEQ ID NO: 809835 - DNA, 33 bp, Homo sapien
acagctctcataaaaccctttttgtgtgattga

SEQ ID NO: 809836 - DNA, 33 bp, Homo sapien
acagctctcataaaacgctttttgtgtgattga

SEQ ID NO: 809837 - DNA, 33 bp, Homo sapien
cacatagtaaaagaccagggaacagttggtatt

SEQ ID NO: 809838 - DNA, 33 bp, Homo sapien
cacatagtaaaagaccggggaacagttggtatt

SEQ ID NO: 809839 - DNA, 33 bp, Homo sapien
atgacttacttagcataaagataggcacatagt

SEQ ID NO: 809840 - DNA, 33 bp, Homo sapien
atgacttacttagcatgaagataggcacatagt

SEQ ID NO: 809841 - DNA, 33 bp, Homo sapien
tctgtggaagagtagacgtgtcatgcccagtgc

SEQ ID NO: 809842 - DNA, 33 bp, Homo sapien
tctgtggaagagtagatgtgtcatgcccagtgc

SEQ ID NO: 809843 - DNA, 33 bp, Homo sapien
ggataatgcctttgggaatgtggggtatcagtt

SEQ ID NO: 809844 - DNA, 33 bp, Homo sapien
ggataatgcctttggggatgtggggtatcagtt

SEQ ID NO: 809845 - DNA, 33 bp, Homo sapien
tttttttaatgaatgcccccaaagtcatatgga

SEQ ID NO: 809846 - DNA, 33 bp, Homo sapien
tttttttaatgaatgctcccaaagtcatatgga

SEQ ID NO: 809847 - DNA, 33 bp, Homo sapien
gggttggcattgaaaaagttaagcttgagatga

SEQ ID NO: 809848 - DNA, 33 bp, Homo sapien
gggttggcattgaaaaggttaagcttgagatga

SEQ ID NO: 809849 - DNA, 33 bp, Homo sapien
tgtgagatggactgagaaagaacagaacccata

SEQ ID NO: 809850 - DNA, 33 bp, Homo sapien
tgtgagatggactgaggaagaacagaacccata

SEQ ID NO: 809851 - DNA, 33 bp, Homo sapien
tctagtctgactcccaaatttcacaaaagtgga

SEQ ID NO: 809852 - DNA, 33 bp, Homo sapien
tctagtctgactcccagatttcacaaaagtgga

SEQ ID NO: 809853 - DNA, 33 bp, Homo sapien
ggccatttatcagtccatgagtaatactgcttt

SEQ ID NO: 809854 - DNA, 33 bp, Homo sapien
ggccatttatcagtccgtgagtaatactgcttt

SEQ ID NO: 809855 - DNA, 33 bp, Homo sapien
tcacctgtggccggaacctcaaaggagagtgat

SEQ ID NO: 809856 - DNA, 33 bp, Homo sapien
tcacctgtggccggaatctcaaaggagagtgat

SEQ ID NO: 809857 - DNA, 33 bp, Homo sapien
aaatcagttggattgacgaaagctatgagaaga

SEQ ID NO: 809858 - DNA, 33 bp, Homo sapien
aaatcagttggattgatgaaagctatgagaaga

SEQ ID NO: 809859 - DNA, 33 bp, Homo sapien
tgttggcaagagaccaaggatgtttagaaaaac

SEQ ID NO: 809860 - DNA, 33 bp, Homo sapien
tgttggcaagagaccatggatgtttagaaaaac

SEQ ID NO: 809861 - DNA, 33 bp, Homo sapien
ctctgatttatctgcacaatgacaacaatgcaa

SEQ ID NO: 809862 - DNA, 33 bp, Homo sapien
ctctgatttatctgcataatgacaacaatgcaa

SEQ ID NO: 809863 - DNA, 33 bp, Homo sapien
aggggtctttaatccacgagataattcaagaac

SEQ ID NO: 809864 - DNA, 33 bp, Homo sapien
aggggtctttaatccatgagataattcaagaac

SEQ ID NO: 809865 - DNA, 33 bp, Homo sapien
ttctttgcgatgactagcttcttatttcaacaa

SEQ ID NO: 809866 - DNA, 33 bp, Homo sapien
ttctttgcgatgactatcttcttatttcaacaa

SEQ ID NO: 809867 - DNA, 33 bp, Homo sapien
cagtctcccagtcatccgaaactttaaagataa

SEQ ID NO: 809868 - DNA, 33 bp, Homo sapien
cagtctcccagtcatctgaaactttaaagataa

SEQ ID NO: 809869 - DNA, 33 bp, Homo sapien
tgtattccttcagagaactaaacacagtctgat

SEQ ID NO: 809870 - DNA, 33 bp, Homo sapien
tgtattccttcagagagctaaacacagtctgat

SEQ ID NO: 809871 - DNA, 33 bp, Homo sapien
gtttcatcgtcttacccagatctaattttctgg

SEQ ID NO: 809872 - DNA, 33 bp, Homo sapien
gtttcatcgtcttacctagatctaattttctgg

SEQ ID NO: 809873 - DNA, 33 bp, Homo sapien
ccttctctctacagaactataatcaaaaagaaa

SEQ ID NO: 809874 - DNA, 33 bp, Homo sapien
ccttctctctacagaattataatcaaaaagaaa

SEQ ID NO: 809875 - DNA, 33 bp, Homo sapien
atctttactcacaaacggcaaacaaggctgact

SEQ ID NO: 809876 - DNA, 33 bp, Homo sapien
atctttactcacaaactgcaaacaaggctgact

SEQ ID NO: 809877 - DNA, 33 bp, Homo sapien
ccagtcaaactcttgcaaagccattaggagcag

SEQ ID NO: 809878 - DNA, 33 bp, Homo sapien
ccagtcaaactcttgcgaagccattaggagcag

SEQ ID NO: 809879 - DNA, 33 bp, Homo sapien
cagttttattacttacaaaatggggcagcgata

SEQ ID NO: 809880 - DNA, 33 bp, Homo sapien
cagttttattacttacgaaatggggcagcgata

SEQ ID NO: 809881 - DNA, 33 bp, Homo sapien
acatgatgaacaccagaccattctattttctat

SEQ ID NO: 809882 - DNA, 33 bp, Homo sapien
acatgatgaacaccagcccattctattttctat

SEQ ID NO: 809883 - DNA, 33 bp, Homo sapien
taaagaagagataggacggtccctcctgaatac

SEQ ID NO: 809884 - DNA, 33 bp, Homo sapien
taaagaagagataggatggtccctcctgaatac

SEQ ID NO: 809885 - DNA, 33 bp, Homo sapien
acctttctatcaatcaagctacagatccagata

SEQ ID NO: 809886 - DNA, 33 bp, Homo sapien
acctttctatcaatcaggctacagatccagata

SEQ ID NO: 809887 - DNA, 33 bp, Homo sapien
agcaggttctgaattacgacgtcacttattata

SEQ ID NO: 809888 - DNA, 33 bp, Homo sapien
agcaggttctgaattatgacgtcacttattata

SEQ ID NO: 809889 - DNA, 33 bp, Homo sapien
atacataccatgggtgcaactcagtatgataag

SEQ ID NO: 809890 - DNA, 33 bp, Homo sapien
atacataccatgggtggaactcagtatgataag

SEQ ID NO: 809891 - DNA, 33 bp, Homo sapien
gcaatggaggaaagtaccaagagttttggaata

SEQ ID NO: 809892 - DNA, 33 bp, Homo sapien
gcaatggaggaaagtatcaagagttttggaata

SEQ ID NO: 809893 - DNA, 33 bp, Homo sapien
aatctgaacatcaagaaagggatcaaatttcat

SEQ ID NO: 809894 - DNA, 33 bp, Homo sapien
aatctgaacatcaagagagggatcaaatttcat

SEQ ID NO: 809895 - DNA, 33 bp, Homo sapien
tgtctttcagtgtgcaacaaatggtatacatgg

SEQ ID NO: 809896 - DNA, 33 bp, Homo sapien
tgtctttcagtgtgcatcaaatggtatacatgg

SEQ ID NO: 809897 - DNA, 33 bp, Homo sapien
tgactgtgtttattataaagattgacaggagag

SEQ ID NO: 809898 - DNA, 33 bp, Homo sapien
tgactgtgtttattatcaagattgacaggagag

SEQ ID NO: 809899 - DNA, 33 bp, Homo sapien
aggctgggcgcctttacagccaatagcctgcag

SEQ ID NO: 809900 - DNA, 33 bp, Homo sapien
aggctgggcgcctttatagccaatagcctgcag

SEQ ID NO: 809901 - DNA, 33 bp, Homo sapien
ttaattctagttgtagaagcaaatgtctgcaag

SEQ ID NO: 809902 - DNA, 33 bp, Homo sapien
ttaattctagttgtagcagcaaatgtctgcaag

SEQ ID NO: 809903 - DNA, 33 bp, Homo sapien
catagtacaattagtaccattgccatagcacaa

SEQ ID NO: 809904 - DNA, 33 bp, Homo sapien
catagtacaattagtagcattgccatagcacaa

SEQ ID NO: 809905 - DNA, 33 bp, Homo sapien
acaaagagaagtgataagaggtaactgtctttt

SEQ ID NO: 809906 - DNA, 33 bp, Homo sapien
acaaagagaagtgataggaggtaactgtctttt

SEQ ID NO: 809907 - DNA, 33 bp, Homo sapien
gtcttttaaagcccacaagagccagtgtttggg

SEQ ID NO: 809908 - DNA, 33 bp, Homo sapien
gtcttttaaagcccacgagagccagtgtttggg

SEQ ID NO: 809909 - DNA, 33 bp, Homo sapien
gaggctaagtaacccgaaggtcacagaaccaca

SEQ ID NO: 809910 - DNA, 33 bp, Homo sapien
gaggctaagtaacccggaggtcacagaaccaca

SEQ ID NO: 809911 - DNA, 33 bp, Homo sapien
agcctagtcatctctacgcttataacaatatgt

SEQ ID NO: 809912 - DNA, 33 bp, Homo sapien
agcctagtcatctctatgcttataacaatatgt

SEQ ID NO: 809913 - DNA, 33 bp, Homo sapien
ggttaaagcagaaagaactctcgaaaataagaa

SEQ ID NO: 809914 - DNA, 33 bp, Homo sapien
ggttaaagcagaaagatctctcgaaaataagaa

SEQ ID NO: 809915 - DNA, 33 bp, Homo sapien
tctgcatttctaaggaagtagtaggtgctgtgg

SEQ ID NO: 809916 - DNA, 33 bp, Homo sapien
tctgcatttctaaggaggtagtaggtgctgtgg

SEQ ID NO: 809917 - DNA, 33 bp, Homo sapien
gagctaactgaacaaacaccctgtacccatcac

SEQ ID NO: 809918 - DNA, 33 bp, Homo sapien
gagctaactgaacaaataccctgtacccatcac

SEQ ID NO: 809919 - DNA, 33 bp, Homo sapien
gtgttccctgttcaccacctccaagccaacatt

SEQ ID NO: 809920 - DNA, 33 bp, Homo sapien
gtgttccctgttcaccgcctccaagccaacatt

SEQ ID NO: 809921 - DNA, 33 bp, Homo sapien
tgcatatgcacacacacatactctataaaaggc

SEQ ID NO: 809922 - DNA, 33 bp, Homo sapien
tgcatatgcacacacagatactctataaaaggc

SEQ ID NO: 809923 - DNA, 33 bp, Homo sapien
gagggcttcaacaagaaccaggctgcatcttgg

SEQ ID NO: 809924 - DNA, 33 bp, Homo sapien
gagggcttcaacaagagccaggctgcatcttgg

SEQ ID NO: 809925 - DNA, 33 bp, Homo sapien
cggtgatggtcaaactgaattcccagcctacat

SEQ ID NO: 809926 - DNA, 33 bp, Homo sapien
cggtgatggtcaaacttaattcccagcctacat

SEQ ID NO: 809927 - DNA, 33 bp, Homo sapien
aaaatgacagtgacttaaacacctaaagtcatc

SEQ ID NO: 809928 - DNA, 33 bp, Homo sapien
aaaatgacagtgacttgaacacctaaagtcatc

SEQ ID NO: 809929 - DNA, 33 bp, Homo sapien
taaggtagactggaaaatggagttaggagaaag

SEQ ID NO: 809930 - DNA, 33 bp, Homo sapien
taaggtagactggaaattggagttaggagaaag

SEQ ID NO: 809931 - DNA, 33 bp, Homo sapien
agaaggatccagtcaaaccaagagctgaggagg

SEQ ID NO: 809932 - DNA, 33 bp, Homo sapien
agaaggatccagtcaagccaagagctgaggagg

SEQ ID NO: 809933 - DNA, 33 bp, Homo sapien
catccattgatttttaagttcatactgaagtgg

SEQ ID NO: 809934 - DNA, 33 bp, Homo sapien
catccattgatttttaggttcatactgaagtgg

SEQ ID NO: 809935 - DNA, 33 bp, Homo sapien
aactctaatacgctgaaaactctaaatgctgcc

SEQ ID NO: 809936 - DNA, 33 bp, Homo sapien
aactctaatacgctgagaactctaaatgctgcc

SEQ ID NO: 809937 - DNA, 33 bp, Homo sapien
aaataggtttgtaatgcactgtttgctggctct

SEQ ID NO: 809938 - DNA, 33 bp, Homo sapien
aaataggtttgtaatgtactgtttgctggctct

SEQ ID NO: 809939 - DNA, 33 bp, Homo sapien
tttactctgccatttacagataagtgaccttga

SEQ ID NO: 809940 - DNA, 33 bp, Homo sapien
tttactctgccatttatagataagtgaccttga

SEQ ID NO: 809941 - DNA, 33 bp, Homo sapien
tattaagtctagcatgcataagctattttttct

SEQ ID NO: 809942 - DNA, 33 bp, Homo sapien
tattaagtctagcatgtataagctattttttct

SEQ ID NO: 809943 - DNA, 33 bp, Homo sapien
atatacaaaaacagcacgtccttcatggggttt

SEQ ID NO: 809944 - DNA, 33 bp, Homo sapien
atatacaaaaacagcaggtccttcatggggttt

SEQ ID NO: 809945 - DNA, 33 bp, Homo sapien
gtgaatgtatttagagaaatgctggtatgctag

SEQ ID NO: 809946 - DNA, 33 bp, Homo sapien
gtgaatgtatttagaggaatgctggtatgctag

SEQ ID NO: 809947 - DNA, 33 bp, Homo sapien
ttaaagagtatagcaggataacatcacatatgg

SEQ ID NO: 809948 - DNA, 33 bp, Homo sapien
ttaaagagtatagcagtataacatcacatatgg

SEQ ID NO: 809949 - DNA, 33 bp, Homo sapien
tctagaatcacagatacggttaaattgcagaat

SEQ ID NO: 809950 - DNA, 33 bp, Homo sapien
tctagaatcacagatatggttaaattgcagaat

SEQ ID NO: 809951 - DNA, 33 bp, Homo sapien
ttgggcagcaagaatacaaaagctagacatgac

SEQ ID NO: 809952 - DNA, 33 bp, Homo sapien
ttgggcagcaagaatataaaagctagacatgac

SEQ ID NO: 809953 - DNA, 33 bp, Homo sapien
tctctcacttaatgaccagtaaacaccacaagg

SEQ ID NO: 809954 - DNA, 33 bp, Homo sapien
tctctcacttaatgactagtaaacaccacaagg

SEQ ID NO: 809955 - DNA, 33 bp, Homo sapien
tgctttgtatataccaacaatagtcaagtggaa

SEQ ID NO: 809956 - DNA, 33 bp, Homo sapien
tgctttgtatataccagcaatagtcaagtggaa

SEQ ID NO: 809957 - DNA, 33 bp, Homo sapien
taatgttgtacttgttcaaataaacccaatgtg

SEQ ID NO: 809958 - DNA, 33 bp, Homo sapien
taatgttgtacttgttgaaataaacccaatgtg

SEQ ID NO: 809959 - DNA, 33 bp, Homo sapien
ctatcagaagtctctcgatgtctaggcggcttc

SEQ ID NO: 809960 - DNA, 33 bp, Homo sapien
ctatcagaagtctctctatgtctaggcggcttc

SEQ ID NO: 809961 - DNA, 33 bp, Homo sapien
cttctctctggaatcaagaagcagaggggagga

SEQ ID NO: 809962 - DNA, 33 bp, Homo sapien
cttctctctggaatcaggaagcagaggggagga

SEQ ID NO: 809963 - DNA, 33 bp, Homo sapien
ggcagaggcaagcagcaaaacattcatgtagac

SEQ ID NO: 809964 - DNA, 33 bp, Homo sapien
ggcagaggcaagcagcgaaacattcatgtagac

SEQ ID NO: 809965 - DNA, 33 bp, Homo sapien
agaggttaaaccctcggatgtcaaagggtaagg

SEQ ID NO: 809966 - DNA, 33 bp, Homo sapien
agaggttaaaccctcgtatgtcaaagggtaagg

SEQ ID NO: 809967 - DNA, 33 bp, Homo sapien
catagaagtagtgggagacagtaaataaagaca

SEQ ID NO: 809968 - DNA, 33 bp, Homo sapien
catagaagtagtgggatacagtaaataaagaca

SEQ ID NO: 809969 - DNA, 33 bp, Homo sapien
ctcatcttatgctgaaaatcttctcatatctac

SEQ ID NO: 809970 - DNA, 33 bp, Homo sapien
ctcatcttatgctgaacatcttctcatatctac

SEQ ID NO: 809971 - DNA, 33 bp, Homo sapien
ttcaattacaaaaaaaactcagcagggtcataa

SEQ ID NO: 809972 - DNA, 33 bp, Homo sapien
ttcaattacaaaaaaagctcagcagggtcataa

SEQ ID NO: 809973 - DNA, 33 bp, Homo sapien
gtctggctttcacttaacaatgtttctgaaatt

SEQ ID NO: 809974 - DNA, 33 bp, Homo sapien
gtctggctttcacttagcaatgtttctgaaatt

SEQ ID NO: 809975 - DNA, 33 bp, Homo sapien
gcctggcaggtagcacacttcaatataaaacag

SEQ ID NO: 809976 - DNA, 33 bp, Homo sapien
gcctggcaggtagcacgcttcaatataaaacag

SEQ ID NO: 809977 - DNA, 33 bp, Homo sapien
gctatcagtgagtctacggatatttggaagaaa

SEQ ID NO: 809978 - DNA, 33 bp, Homo sapien
gctatcagtgagtctatggatatttggaagaaa

SEQ ID NO: 809979 - DNA, 33 bp, Homo sapien
ccagtcttgggtctgacctaagcaagctataca

SEQ ID NO: 809980 - DNA, 33 bp, Homo sapien
ccagtcttgggtctgatctaagcaagctataca

SEQ ID NO: 809981 - DNA, 33 bp, Homo sapien
gtaacttcttggggcagatttctgtgtataata

SEQ ID NO: 809982 - DNA, 33 bp, Homo sapien
gtaacttcttggggcatatttctgtgtataata

SEQ ID NO: 809983 - DNA, 33 bp, Homo sapien
aactcttgagttatggcatatccctagtctaca

SEQ ID NO: 809984 - DNA, 33 bp, Homo sapien
aactcttgagttatggtatatccctagtctaca

SEQ ID NO: 809985 - DNA, 33 bp, Homo sapien
ccaagtctatgtgaccacccttatcatgtctgg

SEQ ID NO: 809986 - DNA, 33 bp, Homo sapien
ccaagtctatgtgaccgcccttatcatgtctgg

SEQ ID NO: 809987 - DNA, 33 bp, Homo sapien
gcaaaacactgacttacgtatctgggaacattg

SEQ ID NO: 809988 - DNA, 33 bp, Homo sapien
gcaaaacactgacttatgtatctgggaacattg

SEQ ID NO: 809989 - DNA, 33 bp, Homo sapien
ttatgaaagctcaccacgtgattgtgaagggca

SEQ ID NO: 809990 - DNA, 33 bp, Homo sapien
ttatgaaagctcaccaggtgattgtgaagggca

SEQ ID NO: 809991 - DNA, 33 bp, Homo sapien
ctactgtatcccatgcaaggaattaataacata

SEQ ID NO: 809992 - DNA, 33 bp, Homo sapien
ctactgtatcccatgcgaggaattaataacata

SEQ ID NO: 809993 - DNA, 33 bp, Homo sapien
ctgatgtatccataagcattgccaggtaatata

SEQ ID NO: 809994 - DNA, 33 bp, Homo sapien
ctgatgtatccataaggattgccaggtaatata

SEQ ID NO: 809995 - DNA, 33 bp, Homo sapien
aatagcaatatcagcactgaacttttactgaga

SEQ ID NO: 809996 - DNA, 33 bp, Homo sapien
aatagcaatatcagcagtgaacttttactgaga

SEQ ID NO: 809997 - DNA, 33 bp, Homo sapien
caaatgaagactagcgcagggaaatagaacaag

SEQ ID NO: 809998 - DNA, 33 bp, Homo sapien
caaatgaagactagcgtagggaaatagaacaag

SEQ ID NO: 809999 - DNA, 33 bp, Homo sapien
cacaattctcaattccaagagagcccaggaatt

SEQ ID NO: 810000 - DNA, 33 bp, Homo sapien
cacaattctcaattccgagagagcccaggaatt

SEQ ID NO: 810001 - DNA, 33 bp, Homo sapien
cttgcacctgtacttgaagaaatactgcctcag

SEQ ID NO: 810002 - DNA, 33 bp, Homo sapien
cttgcacctgtacttggagaaatactgcctcag

SEQ ID NO: 810003 - DNA, 33 bp, Homo sapien
acaatgcagatgccaacagtttttgccctggga

SEQ ID NO: 810004 - DNA, 33 bp, Homo sapien
acaatgcagatgccaatagtttttgccctggga

SEQ ID NO: 810005 - DNA, 33 bp, Homo sapien
tgctaatgtcttgccaagctagtctgacaatgt

SEQ ID NO: 810006 - DNA, 33 bp, Homo sapien
tgctaatgtcttgccacgctagtctgacaatgt

SEQ ID NO: 810007 - DNA, 33 bp, Homo sapien
cattatgttctgacacacagagttttaacaaga

SEQ ID NO: 810008 - DNA, 33 bp, Homo sapien
cattatgttctgacacgcagagttttaacaaga

SEQ ID NO: 810009 - DNA, 33 bp, Homo sapien
tatctcaaatattccaatgacccaatttctcct

SEQ ID NO: 810010 - DNA, 33 bp, Homo sapien
tatctcaaatattccagtgacccaatttctcct

SEQ ID NO: 810011 - DNA, 33 bp, Homo sapien
tgcctttgcttgtcacagcactagtcttgctat

SEQ ID NO: 810012 - DNA, 33 bp, Homo sapien
tgcctttgcttgtcacggcactagtcttgctat

SEQ ID NO: 810013 - DNA, 33 bp, Homo sapien
ggtctctccttgcccactctccagctggcggtg

SEQ ID NO: 810014 - DNA, 33 bp, Homo sapien
ggtctctccttgcccattctccagctggcggtg

SEQ ID NO: 810015 - DNA, 33 bp, Homo sapien
ggtttacattcgtaaaacttggtcacaaaataa

SEQ ID NO: 810016 - DNA, 33 bp, Homo sapien
ggtttacattcgtaaagcttggtcacaaaataa

SEQ ID NO: 810017 - DNA, 33 bp, Homo sapien
aaattgtcccatgcacacaactcattttccaaa

SEQ ID NO: 810018 - DNA, 33 bp, Homo sapien
aaattgtcccatgcactcaactcattttccaaa

SEQ ID NO: 810019 - DNA, 33 bp, Homo sapien
gtggttatgggtcctgaatttaatgaggtctag

SEQ ID NO: 810020 - DNA, 33 bp, Homo sapien
gtggttatgggtcctgtatttaatgaggtctag

SEQ ID NO: 810021 - DNA, 33 bp, Homo sapien
atccagacattatcagaagtatcttagagtcat

SEQ ID NO: 810022 - DNA, 33 bp, Homo sapien
atccagacattatcagcagtatcttagagtcat

SEQ ID NO: 810023 - DNA, 33 bp, Homo sapien
gtgctgtaaacaattagcaatgctggctttggg

SEQ ID NO: 810024 - DNA, 33 bp, Homo sapien
gtgctgtaaacaattatcaatgctggctttggg

SEQ ID NO: 810025 - DNA, 33 bp, Homo sapien
tttgggtttaagaaagccacatgtgtctcaatc

SEQ ID NO: 810026 - DNA, 33 bp, Homo sapien
tttgggtttaagaaagtcacatgtgtctcaatc

SEQ ID NO: 810027 - DNA, 33 bp, Homo sapien
cacttaagctgtgaccaccctcttcactgaaca

SEQ ID NO: 810028 - DNA, 33 bp, Homo sapien
cacttaagctgtgacccccctcttcactgaaca

SEQ ID NO: 810029 - DNA, 33 bp, Homo sapien
tgttacctggcaaatactatccccaccatcagg

SEQ ID NO: 810030 - DNA, 33 bp, Homo sapien
tgttacctggcaaatagtatccccaccatcagg

SEQ ID NO: 810031 - DNA, 33 bp, Homo sapien
ctgatggatacagaaaagtcaataaagatagag

SEQ ID NO: 810032 - DNA, 33 bp, Homo sapien
ctgatggatacagaaaggtcaataaagatagag

SEQ ID NO: 810033 - DNA, 33 bp, Homo sapien
ggtaattctgtttttcacaaatgattgcctctg

SEQ ID NO: 810034 - DNA, 33 bp, Homo sapien
ggtaattctgtttttcgcaaatgattgcctctg

SEQ ID NO: 810035 - DNA, 33 bp, Homo sapien
aaatcagaggttgtaacatggaagacttcagga

SEQ ID NO: 810036 - DNA, 33 bp, Homo sapien
aaatcagaggttgtaatatggaagacttcagga

SEQ ID NO: 810037 - DNA, 33 bp, Homo sapien
gtttttcacattgagaatcctggagtttttagg

SEQ ID NO: 810038 - DNA, 33 bp, Homo sapien
gtttttcacattgagagtcctggagtttttagg

SEQ ID NO: 810039 - DNA, 33 bp, Homo sapien
actgggtacaaaattacaggcagatggaaggat

SEQ ID NO: 810040 - DNA, 33 bp, Homo sapien
actgggtacaaaattataggcagatggaaggat

SEQ ID NO: 810041 - DNA, 33 bp, Homo sapien
gctgtgggagtagaccagggaggttttaagact

SEQ ID NO: 810042 - DNA, 33 bp, Homo sapien
gctgtgggagtagacctgggaggttttaagact

SEQ ID NO: 810043 - DNA, 33 bp, Homo sapien
tagctgcctgccaaatcacctcaaaatttcaga

SEQ ID NO: 810044 - DNA, 33 bp, Homo sapien
tagctgcctgccaaatgacctcaaaatttcaga

SEQ ID NO: 810045 - DNA, 33 bp, Homo sapien
gacttcaaccatattacgccatttaaacctatg

SEQ ID NO: 810046 - DNA, 33 bp, Homo sapien
gacttcaaccatattaggccatttaaacctatg

SEQ ID NO: 810047 - DNA, 33 bp, Homo sapien
cttacactaactggcaatacaaactcttaatat

SEQ ID NO: 810048 - DNA, 33 bp, Homo sapien
cttacactaactggcagtacaaactcttaatat

SEQ ID NO: 810049 - DNA, 33 bp, Homo sapien
atacaaatgtaggagcactctttaacttcccac

SEQ ID NO: 810050 - DNA, 33 bp, Homo sapien
atacaaatgtaggagcgctctttaacttcccac

SEQ ID NO: 810051 - DNA, 33 bp, Homo sapien
tggtaccattcagctgaaaatagacaagaggtt

SEQ ID NO: 810052 - DNA, 33 bp, Homo sapien
tggtaccattcagctggaaatagacaagaggtt

SEQ ID NO: 810053 - DNA, 33 bp, Homo sapien
aaatgtaaaacattcagaaatatgcacaaaaca

SEQ ID NO: 810054 - DNA, 33 bp, Homo sapien
aaatgtaaaacattcataaatatgcacaaaaca

SEQ ID NO: 810055 - DNA, 33 bp, Homo sapien
tctgtagcctttcatgcattcctcacatctcaa

SEQ ID NO: 810056 - DNA, 33 bp, Homo sapien
tctgtagcctttcatgtattcctcacatctcaa

SEQ ID NO: 810057 - DNA, 33 bp, Homo sapien
attattggattataacccaaaggattgtaaatc

SEQ ID NO: 810058 - DNA, 33 bp, Homo sapien
attattggattataacgcaaaggattgtaaatc

SEQ ID NO: 810059 - DNA, 33 bp, Homo sapien; identical to SEQ ID NO: 810057

SEQ ID NO: 810060 - DNA, 33 bp, Homo sapien; identical to SEQ ID NO: 810058

SEQ ID NO: 810061 - DNA, 33 bp, Homo sapien
agagaaaaatctcctaggcagaatagttccaaa

SEQ ID NO: 810062 - DNA, 33 bp, Homo sapien
agagaaaaatctcctatgcagaatagttccaaa

SEQ ID NO: 810063 - DNA, 33 bp, Homo sapien
ggattttgagtttgggaaggatgaccacgaaag

SEQ ID NO: 810064 - DNA, 33 bp, Homo sapien
ggattttgagtttggggaggatgaccacgaaag

SEQ ID NO: 810065 - DNA, 33 bp, Homo sapien
tgggtatcagggcaaacgaatgaggtaaatgtg

SEQ ID NO: 810066 - DNA, 33 bp, Homo sapien
tgggtatcagggcaaatgaatgaggtaaatgtg

SEQ ID NO: 810067 - DNA, 33 bp, Homo sapien
gggatggattgatccacaaatcttaagagtgta

SEQ ID NO: 810068 - DNA, 33 bp, Homo sapien
gggatggattgatccagaaatcttaagagtgta

SEQ ID NO: 810069 - DNA, 33 bp, Homo sapien
ctactgcttttctacccattccaaaagcatggg

SEQ ID NO: 810070 - DNA, 33 bp, Homo sapien
ctactgcttttctacctattccaaaagcatggg

SEQ ID NO: 810071 - DNA, 33 bp, Homo sapien
acatgatatatgtatacaggtcttccaaattct

SEQ ID NO: 810072 - DNA, 33 bp, Homo sapien
acatgatatatgtatataggtcttccaaattct

SEQ ID NO: 810073 - DNA, 33 bp, Homo sapien
tcattagatgtgaagacgtagtgtgctatgcca

SEQ ID NO: 810074 - DNA, 33 bp, Homo sapien
tcattagatgtgaagatgtagtgtgctatgcca

SEQ ID NO: 810075 - DNA, 33 bp, Homo sapien
tttaaatactatttacagacatgaatcatcttt

SEQ ID NO: 810076 - DNA, 33 bp, Homo sapien
tttaaatactatttacggacatgaatcatcttt

SEQ ID NO: 810077 - DNA, 33 bp, Homo sapien
atcatagattcttaatcaggccaagaggaaatt

SEQ ID NO: 810078 - DNA, 33 bp, Homo sapien
atcatagattcttaattaggccaagaggaaatt

SEQ ID NO: 810079 - DNA, 33 bp, Homo sapien
ccctgatttctttaaccgtcaaatgtggttaaa

SEQ ID NO: 810080 - DNA, 33 bp, Homo sapien
ccctgatttctttaactgtcaaatgtggttaaa

SEQ ID NO: 810081 - DNA, 33 bp, Homo sapien
gggagatacaacctaaaagacaaaataacattt

SEQ ID NO: 810082 - DNA, 33 bp, Homo sapien
gggagatacaacctaagagacaaaataacattt

SEQ ID NO: 810083 - DNA, 33 bp, Homo sapien
gactgaagtactagaaaaaaaacgtctgaattc

SEQ ID NO: 810084 - DNA, 33 bp, Homo sapien
gactgaagtactagaagaaaaacgtctgaattc

SEQ ID NO: 810085 - DNA, 33 bp, Homo sapien
tcaacaattatttaccaaattcaaacagaagga

SEQ ID NO: 810086 - DNA, 33 bp, Homo sapien
tcaacaattatttaccgaattcaaacagaagga

SEQ ID NO: 810087 - DNA, 33 bp, Homo sapien
gatatagagactaccactgactttttaaaaaca

SEQ ID NO: 810088 - DNA, 33 bp, Homo sapien
gatatagagactaccattgactttttaaaaaca

SEQ ID NO: 810089 - DNA, 33 bp, Homo sapien
tctcctagagtgtataacagatgtcaccttcca

SEQ ID NO: 810090 - DNA, 33 bp, Homo sapien
tctcctagagtgtatagcagatgtcaccttcca

SEQ ID NO: 810091 - DNA, 33 bp, Homo sapien
acatctctacacttcaaaaagagaaaagcagag

SEQ ID NO: 810092 - DNA, 33 bp, Homo sapien
acatctctacacttcagaaagagaaaagcagag

SEQ ID NO: 810093 - DNA, 33 bp, Homo sapien
gaagtttatataactacgtaagggcagaccctg

SEQ ID NO: 810094 - DNA, 33 bp, Homo sapien
gaagtttatataactatgtaagggcagaccctg

SEQ ID NO: 810095 - DNA, 33 bp, Homo sapien
acaaatgaagatcatgacataccaaaatttcag

SEQ ID NO: 810096 - DNA, 33 bp, Homo sapien
acaaatgaagatcatggcataccaaaatttcag

SEQ ID NO: 810097 - DNA, 33 bp, Homo sapien
gcctgataaagtgtgacggtttgatggctcagg

SEQ ID NO: 810098 - DNA, 33 bp, Homo sapien
gcctgataaagtgtgatggtttgatggctcagg

SEQ ID NO: 810099 - DNA, 33 bp, Homo sapien
agacccagggttaccactgaagattccaacagc

SEQ ID NO: 810100 - DNA, 33 bp, Homo sapien
agacccagggttaccattgaagattccaacagc

SEQ ID NO: 810101 - DNA, 33 bp, Homo sapien
attctctatgacaaaaacctgtaaccatcttct

SEQ ID NO: 810102 - DNA, 33 bp, Homo sapien
attctctatgacaaaagcctgtaaccatcttct

SEQ ID NO: 810103 - DNA, 33 bp, Homo sapien
tttgttgtctatattcgcactgtattgcagact

SEQ ID NO: 810104 - DNA, 33 bp, Homo sapien
tttgttgtctatattctcactgtattgcagact

SEQ ID NO: 810105 - DNA, 33 bp, Homo sapien
atgtaagccacaaaaaagaaaccatttaattca

SEQ ID NO: 810106 - DNA, 33 bp, Homo sapien
atgtaagccacaaaaaggaaaccatttaattca

SEQ ID NO: 810107 - DNA, 33 bp, Homo sapien
taattgatacataccaagtattaggcatagctc

SEQ ID NO: 810108 - DNA, 33 bp, Homo sapien
taattgatacataccaggtattaggcatagctc

SEQ ID NO: 810109 - DNA, 33 bp, Homo sapien
attggggtacacaaaactcacaaatattatctc

SEQ ID NO: 810110 - DNA, 33 bp, Homo sapien
attggggtacacaaaattcacaaatattatctc

SEQ ID NO: 810111 - DNA, 33 bp, Homo sapien
cctggatgaccatcaacggtagattgaatagag

SEQ ID NO: 810112 - DNA, 33 bp, Homo sapien
cctggatgaccatcaatggtagattgaatagag

SEQ ID NO: 810113 - DNA, 33 bp, Homo sapien
gaccactatacttcccagaatggccaaagtgtt

SEQ ID NO: 810114 - DNA, 33 bp, Homo sapien
gaccactatacttcccggaatggccaaagtgtt

SEQ ID NO: 810115 - DNA, 33 bp, Homo sapien
tatagccccattctggaacagttgtgaataaac

SEQ ID NO: 810116 - DNA, 33 bp, Homo sapien
tatagccccattctgggacagttgtgaataaac

SEQ ID NO: 810117 - DNA, 33 bp, Homo sapien
gtggacccatgcccataaataactttggtcttt

SEQ ID NO: 810118 - DNA, 33 bp, Homo sapien
gtggacccatgcccatcaataactttggtcttt

SEQ ID NO: 810119 - DNA, 33 bp, Homo sapien
tagagtagcaggtagagtcataatgttcccaac

SEQ ID NO: 810120 - DNA, 33 bp, Homo sapien
tagagtagcaggtagattcataatgttcccaac

SEQ ID NO: 810121 - DNA, 33 bp, Homo sapien
ttaaacaaatttcctaagagaaggacacctggt

SEQ ID NO: 810122 - DNA, 33 bp, Homo sapien
ttaaacaaatttcctatgagaaggacacctggt

SEQ ID NO: 810123 - DNA, 33 bp, Homo sapien
gaggtggtcaccaggaataagttgtgtaaggca

SEQ ID NO: 810124 - DNA, 33 bp, Homo sapien
gaggtggtcaccaggagtaagttgtgtaaggca

SEQ ID NO: 810125 - DNA, 33 bp, Homo sapien
aatgtaccaactgatacggttttcatttctgtc

SEQ ID NO: 810126 - DNA, 33 bp, Homo sapien
aatgtaccaactgatatggttttcatttctgtc

SEQ ID NO: 810127 - DNA, 33 bp, Homo sapien
atagacaattaacagacaatgtaccaactgata

SEQ ID NO: 810128 - DNA, 33 bp, Homo sapien
atagacaattaacagagaatgtaccaactgata

SEQ ID NO: 810129 - DNA, 33 bp, Homo sapien
aatccaaaatacttacgcacaaggaaggggaaa

SEQ ID NO: 810130 - DNA, 33 bp, Homo sapien
aatccaaaatacttactcacaaggaaggggaaa

SEQ ID NO: 810131 - DNA, 33 bp, Homo sapien
cgctggtccgcaagccacaatttacaagaagct

SEQ ID NO: 810132 - DNA, 33 bp, Homo sapien
cgctggtccgcaagccgcaatttacaagaagct

SEQ ID NO: 810133 - DNA, 33 bp, Homo sapien
cctcagcacaccctaactggagagatacacaaa

SEQ ID NO: 810134 - DNA, 33 bp, Homo sapien
cctcagcacaccctaattggagagatacacaaa

SEQ ID NO: 810135 - DNA, 33 bp, Homo sapien
ctttgataaacggagagtccaagaagtctttag

SEQ ID NO: 810136 - DNA, 33 bp, Homo sapien
ctttgataaacggagattccaagaagtctttag

SEQ ID NO: 810137 - DNA, 33 bp, Homo sapien
ttttccataaagaaaacaccaacccaagatgac

SEQ ID NO: 810138 - DNA, 33 bp, Homo sapien
ttttccataaagaaaataccaacccaagatgac

SEQ ID NO: 810139 - DNA, 33 bp, Homo sapien
accattgtggaaaaaagtataaaagcattccct

SEQ ID NO: 810140 - DNA, 33 bp, Homo sapien
accattgtggaaaaaattataaaagcattccct

SEQ ID NO: 810141 - DNA, 33 bp, Homo sapien
gatagaatcttcagtacgatgtctaatacgtgt

SEQ ID NO: 810142 - DNA, 33 bp, Homo sapien
gatagaatcttcagtatgatgtctaatacgtgt

SEQ ID NO: 810143 - DNA, 33 bp, Homo sapien
taatttgcaaaagaagcctgatgaaatattatt

SEQ ID NO: 810144 - DNA, 33 bp, Homo sapien
taatttgcaaaagaaggctgatgaaatattatt

SEQ ID NO: 810145 - DNA, 33 bp, Homo sapien
gtgagctgccaacatcacttctatttctctcac

SEQ ID NO: 810146 - DNA, 33 bp, Homo sapien
gtgagctgccaacatcgcttctatttctctcac

SEQ ID NO: 810147 - DNA, 33 bp, Homo sapien
tttacaacatggtcccaagaaaagcagagagca

SEQ ID NO: 810148 - DNA, 33 bp, Homo sapien
tttacaacatggtcccgagaaaagcagagagca

SEQ ID NO: 810149 - DNA, 33 bp, Homo sapien
cagttttacacacttcaagcaagataaacagta

SEQ ID NO: 810150 - DNA, 33 bp, Homo sapien
cagttttacacacttcgagcaagataaacagta

SEQ ID NO: 810151 - DNA, 33 bp, Homo sapien
gagaaatggaataagaaaaggattctgaagccc

SEQ ID NO: 810152 - DNA, 33 bp, Homo sapien
gagaaatggaataagacaaggattctgaagccc

SEQ ID NO: 810153 - DNA, 33 bp, Homo sapien
aaaaaagcccataataaatggattcacacccaa

SEQ ID NO: 810154 - DNA, 33 bp, Homo sapien
aaaaaagcccataatagatggattcacacccaa

SEQ ID NO: 810155 - DNA, 33 bp, Homo sapien
gggactccattaagtgcattggcatgacataac

SEQ ID NO: 810156 - DNA, 33 bp, Homo sapien
gggactccattaagtgtattggcatgacataac

SEQ ID NO: 810157 - DNA, 33 bp, Homo sapien
aaaagtagaagaggaaaaattgttctatcttaa

SEQ ID NO: 810158 - DNA, 33 bp, Homo sapien
aaaagtagaagaggaagaattgttctatcttaa

SEQ ID NO: 810159 - DNA, 33 bp, Homo sapien
attctgtgaggcaaccgaagattatcagttttt

SEQ ID NO: 810160 - DNA, 33 bp, Homo sapien
attctgtgaggcaacctaagattatcagttttt

SEQ ID NO: 810161 - DNA, 33 bp, Homo sapien
aggccggtccactatcagactgcgtagaggtgg

SEQ ID NO: 810162 - DNA, 33 bp, Homo sapien
aggccggtccactatcggactgcgtagaggtgg

SEQ ID NO: 810163 - DNA, 33 bp, Homo sapien
ttctaacttaaacacagtcaacacccaatttcc

SEQ ID NO: 810164 - DNA, 33 bp, Homo sapien
ttctaacttaaacacattcaacacccaatttcc

SEQ ID NO: 810165 - DNA, 33 bp, Homo sapien
aacactcattatacaaagtattctagcatcaac

SEQ ID NO: 810166 - DNA, 33 bp, Homo sapien
aacactcattatacaatgtattctagcatcaac

SEQ ID NO: 810167 - DNA, 33 bp, Homo sapien
tagtgcatggcagaggacaaagcaaagcagacc

SEQ ID NO: 810168 - DNA, 33 bp, Homo sapien
tagtgcatggcagaggtcaaagcaaagcagacc

SEQ ID NO: 810169 - DNA, 33 bp, Homo sapien
tattatattgtaatggaagtgtatcgggtacaa

SEQ ID NO: 810170 - DNA, 33 bp, Homo sapien
tattatattgtaatgggagtgtatcgggtacaa

SEQ ID NO: 810171 - DNA, 33 bp, Homo sapien
actctggaaagaccctcactgtctcatggctga

SEQ ID NO: 810172 - DNA, 33 bp, Homo sapien
actctggaaagacccttactgtctcatggctga

SEQ ID NO: 810173 - DNA, 33 bp, Homo sapien
tatccatgacctttaaccattagatgccagtag

SEQ ID NO: 810174 - DNA, 33 bp, Homo sapien
tatccatgacctttaatcattagatgccagtag

SEQ ID NO: 810175 - DNA, 33 bp, Homo sapien
ggctttacagcagacaccaaacgccattcccat

SEQ ID NO: 810176 - DNA, 33 bp, Homo sapien
ggctttacagcagacatcaaacgccattcccat

SEQ ID NO: 810177 - DNA, 33 bp, Homo sapien
gtgagtgttagagcacagagtcagctggaaagg

SEQ ID NO: 810178 - DNA, 33 bp, Homo sapien
gtgagtgttagagcacggagtcagctggaaagg

SEQ ID NO: 810179 - DNA, 33 bp, Homo sapien
aataatgaaaaggctggagaaatagatttagat

SEQ ID NO: 810180 - DNA, 33 bp, Homo sapien
aataatgaaaaggctgtagaaatagatttagat

SEQ ID NO: 810181 - DNA, 33 bp, Homo sapien
ttcattattccaaaaactaagatggatatttca

SEQ ID NO: 810182 - DNA, 33 bp, Homo sapien
ttcattattccaaaaattaagatggatatttca

SEQ ID NO: 810183 - DNA, 33 bp, Homo sapien
gctctgctatagacagcatgcagaatttagatc

SEQ ID NO: 810184 - DNA, 33 bp, Homo sapien
gctctgctatagacagtatgcagaatttagatc

SEQ ID NO: 810185 - DNA, 33 bp, Homo sapien
tcatgtgcttttgacaccaaaatgtagttgtaa

SEQ ID NO: 810186 - DNA, 33 bp, Homo sapien
tcatgtgcttttgacatcaaaatgtagttgtaa

SEQ ID NO: 810187 - DNA, 33 bp, Homo sapien
aggagtttggtttacactgggaggcatgctagt

SEQ ID NO: 810188 - DNA, 33 bp, Homo sapien
aggagtttggtttacattgggaggcatgctagt

SEQ ID NO: 810189 - DNA, 33 bp, Homo sapien
tgttgaaataacagtaaaggataggtgtcccat

SEQ ID NO: 810190 - DNA, 33 bp, Homo sapien
tgttgaaataacagtataggataggtgtcccat

SEQ ID NO: 810191 - DNA, 33 bp, Homo sapien
aggcaccattagatcacagactcttcattttag

SEQ ID NO: 810192 - DNA, 33 bp, Homo sapien
aggcaccattagatcatagactcttcattttag

SEQ ID NO: 810193 - DNA, 33 bp, Homo sapien
aggtcaagagcaaaagaataggagattgacagg

SEQ ID NO: 810194 - DNA, 33 bp, Homo sapien
aggtcaagagcaaaagtataggagattgacagg

SEQ ID NO: 810195 - DNA, 33 bp, Homo sapien
tttctgttcccaattaccaaactatacaactgc

SEQ ID NO: 810196 - DNA, 33 bp, Homo sapien
tttctgttcccaattatcaaactatacaactgc

SEQ ID NO: 810197 - DNA, 33 bp, Homo sapien
cgcttctacagattccaagttacatttggttct

SEQ ID NO: 810198 - DNA, 33 bp, Homo sapien
cgcttctacagattccgagttacatttggttct

SEQ ID NO: 810199 - DNA, 33 bp, Homo sapien
ttgctttaggataacgaccaggcgtggtggctc

SEQ ID NO: 810200 - DNA, 33 bp, Homo sapien
ttgctttaggataacggccaggcgtggtggctc

SEQ ID NO: 810201 - DNA, 33 bp, Homo sapien
tattcattctgattaacgattcaaaaaacacca

SEQ ID NO: 810202 - DNA, 33 bp, Homo sapien
tattcattctgattaatgattcaaaaaacacca

SEQ ID NO: 810203 - DNA, 33 bp, Homo sapien
actttcctggtagataacaacttcaaagttacc

SEQ ID NO: 810204 - DNA, 33 bp, Homo sapien
actttcctggtagatatcaacttcaaagttacc

SEQ ID NO: 810205 - DNA, 33 bp, Homo sapien
gcttggtctccaagagcattagtttaataaata

SEQ ID NO: 810206 - DNA, 33 bp, Homo sapien
gcttggtctccaagaggattagtttaataaata

SEQ ID NO: 810207 - DNA, 33 bp, Homo sapien
ggatctgctatcgatacattgactgataaaaaa

SEQ ID NO: 810208 - DNA, 33 bp, Homo sapien
ggatctgctatcgatatattgactgataaaaaa

SEQ ID NO: 810209 - DNA, 33 bp, Homo sapien
gcatctaaacaaagaaacagcatgacagctatg

SEQ ID NO: 810210 - DNA, 33 bp, Homo sapien
gcatctaaacaaagaagcagcatgacagctatg

SEQ ID NO: 810211 - DNA, 33 bp, Homo sapien
aaaattacacaaagtacagtgaaaatcacctgc

SEQ ID NO: 810212 - DNA, 33 bp, Homo sapien
aaaattacacaaagtatagtgaaaatcacctgc

SEQ ID NO: 810213 - DNA, 33 bp, Homo sapien
taatttctgtcttatacaactgctgagaagaat

SEQ ID NO: 810214 - DNA, 33 bp, Homo sapien
taatttctgtcttatagaactgctgagaagaat

SEQ ID NO: 810215 - DNA, 33 bp, Homo sapien
tccaatggcaactctacaactttccatctgtgt

SEQ ID NO: 810216 - DNA, 33 bp, Homo sapien
tccaatggcaactctataactttccatctgtgt

SEQ ID NO: 810217 - DNA, 33 bp, Homo sapien
aatgtctcaaaatgacagctataaagaggacac

SEQ ID NO: 810218 - DNA, 33 bp, Homo sapien
aatgtctcaaaatgacggctataaagaggacac

SEQ ID NO: 810219 - DNA, 33 bp, Homo sapien
atgtcttttttgtatcgattacaggaacaataa

SEQ ID NO: 810220 - DNA, 33 bp, Homo sapien
atgtcttttttgtatctattacaggaacaataa

SEQ ID NO: 810221 - DNA, 33 bp, Homo sapien
gtgaatcaaacatacccctcctctgtaattgtt

SEQ ID NO: 810222 - DNA, 33 bp, Homo sapien
gtgaatcaaacatacctctcctctgtaattgtt

SEQ ID NO: 810223 - DNA, 33 bp, Homo sapien
gaagtgttatcattatcaggattcttccccttc

SEQ ID NO: 810224 - DNA, 33 bp, Homo sapien
gaagtgttatcattattaggattcttccccttc

SEQ ID NO: 810225 - DNA, 33 bp, Homo sapien
taaaatgtctctactcaaactatccatttcata

SEQ ID NO: 810226 - DNA, 33 bp, Homo sapien
taaaatgtctctactccaactatccatttcata

SEQ ID NO: 810227 - DNA, 33 bp, Homo sapien
actgctaagcaatatacagtgatcatgaaaggt

SEQ ID NO: 810228 - DNA, 33 bp, Homo sapien
actgctaagcaatatatagtgatcatgaaaggt

SEQ ID NO: 810229 - DNA, 33 bp, Homo sapien
tgatgattcttgaccaaccaggataaaaaagta

SEQ ID NO: 810230 - DNA, 33 bp, Homo sapien
tgatgattcttgaccatccaggataaaaaagta

SEQ ID NO: 810231 - DNA, 33 bp, Homo sapien
ataaatatccttacataaacagcacatgaaacc

SEQ ID NO: 810232 - DNA, 33 bp, Homo sapien
ataaatatccttacatgaacagcacatgaaacc

SEQ ID NO: 810233 - DNA, 33 bp, Homo sapien
gtagggagaaaataaacatgtaccctgcatttt

SEQ ID NO: 810234 - DNA, 33 bp, Homo sapien
gtagggagaaaataaatatgtaccctgcatttt

SEQ ID NO: 810235 - DNA, 33 bp, Homo sapien
gaaaatttgaaaaccacaaatgctgcaaagaca

SEQ ID NO: 810236 - DNA, 33 bp, Homo sapien
gaaaatttgaaaaccataaatgctgcaaagaca

SEQ ID NO: 810237 - DNA, 33 bp, Homo sapien
tgttataaactgcaaaactaaaagatagcagag

SEQ ID NO: 810238 - DNA, 33 bp, Homo sapien
tgttataaactgcaaagctaaaagatagcagag

SEQ ID NO: 810239 - DNA, 33 bp, Homo sapien
tgttttctaatccataagagaattcagaatttg

SEQ ID NO: 810240 - DNA, 33 bp, Homo sapien
tgttttctaatccatatgagaattcagaatttg

SEQ ID NO: 810241 - DNA, 33 bp, Homo sapien
ttcctcctaggagtgacagtgaaataatctgaa

SEQ ID NO: 810242 - DNA, 33 bp, Homo sapien
ttcctcctaggagtgagagtgaaataatctgaa

SEQ ID NO: 810243 - DNA, 33 bp, Homo sapien
aaatctgccatggatccgaactgaaattttcaa

SEQ ID NO: 810244 - DNA, 33 bp, Homo sapien
aaatctgccatggatctgaactgaaattttcaa

SEQ ID NO: 810245 - DNA, 33 bp, Homo sapien
ctagtgacttgggtataaaggatatgtcttaat

SEQ ID NO: 810246 - DNA, 33 bp, Homo sapien
ctagtgacttgggtatgaaggatatgtcttaat

SEQ ID NO: 810247 - DNA, 33 bp, Homo sapien
gttacttggcacaagcaaaaatatgtaggactt

SEQ ID NO: 810248 - DNA, 33 bp, Homo sapien
gttacttggcacaagcgaaaatatgtaggactt

SEQ ID NO: 810249 - DNA, 33 bp, Homo sapien
ggcaataaaaggaatacgctaacagcctggaag

SEQ ID NO: 810250 - DNA, 33 bp, Homo sapien
ggcaataaaaggaatatgctaacagcctggaag

SEQ ID NO: 810251 - DNA, 33 bp, Homo sapien
atcaggactccaagtgaactattttggctccaa

SEQ ID NO: 810252 - DNA, 33 bp, Homo sapien
atcaggactccaagtggactattttggctccaa

SEQ ID NO: 810253 - DNA, 33 bp, Homo sapien
cttacgttcctttaccaaacactgtgctcccac

SEQ ID NO: 810254 - DNA, 33 bp, Homo sapien
cttacgttcctttacctaacactgtgctcccac

SEQ ID NO: 810255 - DNA, 33 bp, Homo sapien
actcttttttgtaaaggattgacagatgaatga

SEQ ID NO: 810256 - DNA, 33 bp, Homo sapien
actcttttttgtaaagtattgacagatgaatga

SEQ ID NO: 810257 - DNA, 33 bp, Homo sapien
cacctcgtaagcatacaccaaacagattattta

SEQ ID NO: 810258 - DNA, 33 bp, Homo sapien
cacctcgtaagcatacgccaaacagattattta

SEQ ID NO: 810259 - DNA, 33 bp, Homo sapien
aaccagagtcgcaatacggagagaacttttcac

SEQ ID NO: 810260 - DNA, 33 bp, Homo sapien
aaccagagtcgcaatatggagagaacttttcac

SEQ ID NO: 810261 - DNA, 33 bp, Homo sapien
tattgtgaaaatctcacgcatcttagacaagga

SEQ ID NO: 810262 - DNA, 33 bp, Homo sapien
tattgtgaaaatctcaggcatcttagacaagga

SEQ ID NO: 810263 - DNA, 33 bp, Homo sapien
tccataagaactgtcccaacaaaatcagtagga

SEQ ID NO: 810264 - DNA, 33 bp, Homo sapien
tccataagaactgtcctaacaaaatcagtagga

SEQ ID NO: 810265 - DNA, 33 bp, Homo sapien
tctggttagcattctgaactgttctgcagcact

SEQ ID NO: 810266 - DNA, 33 bp, Homo sapien
tctggttagcattctggactgttctgcagcact

SEQ ID NO: 810267 - DNA, 33 bp, Homo sapien
taatcaaagtgtgagaaatactactataagagt

SEQ ID NO: 810268 - DNA, 33 bp, Homo sapien
taatcaaagtgtgagagatactactataagagt

SEQ ID NO: 810269 - DNA, 33 bp, Homo sapien
attgcagatccaattacaggtcatggtaatatt

SEQ ID NO: 810270 - DNA, 33 bp, Homo sapien
attgcagatccaattataggtcatggtaatatt

SEQ ID NO: 810271 - DNA, 33 bp, Homo sapien
tctgctcataactttacggtatagtcaattaca

SEQ ID NO: 810272 - DNA, 33 bp, Homo sapien
tctgctcataactttatggtatagtcaattaca

SEQ ID NO: 810273 - DNA, 33 bp, Homo sapien
atcactttgaacaaacagatctctctgcactct

SEQ ID NO: 810274 - DNA, 33 bp, Homo sapien
atcactttgaacaaaccgatctctctgcactct

SEQ ID NO: 810275 - DNA, 33 bp, Homo sapien
tttcaatcaagaatcacccctactacatgaaac

SEQ ID NO: 810276 - DNA, 33 bp, Homo sapien
tttcaatcaagaatcatccctactacatgaaac

SEQ ID NO: 810277 - DNA, 33 bp, Homo sapien
gataacatattgcatcaaacaccattcccaacc

SEQ ID NO: 810278 - DNA, 33 bp, Homo sapien
gataacatattgcatcgaacaccattcccaacc

SEQ ID NO: 810279 - DNA, 33 bp, Homo sapien
tatttgcctataataactgagaaagtggcaaca

SEQ ID NO: 810280 - DNA, 33 bp, Homo sapien
tatttgcctataataattgagaaagtggcaaca

SEQ ID NO: 810281 - DNA, 33 bp, Homo sapien
tcaaatgtacctttgaaaagaaggcaaaagctc

SEQ ID NO: 810282 - DNA, 33 bp, Homo sapien
tcaaatgtacctttgagaagaaggcaaaagctc

SEQ ID NO: 810283 - DNA, 33 bp, Homo sapien
tgtttaccgatttctacagtggacataaataag

SEQ ID NO: 810284 - DNA, 33 bp, Homo sapien
tgtttaccgatttctatagtggacataaataag

SEQ ID NO: 810285 - DNA, 33 bp, Homo sapien
tatactcattcattcaaaacatacctgttagat

SEQ ID NO: 810286 - DNA, 33 bp, Homo sapien
tatactcattcattcagaacatacctgttagat

SEQ ID NO: 810287 - DNA, 33 bp, Homo sapien
ataatttattgtctccacgttgcgtatttcatt

SEQ ID NO: 810288 - DNA, 33 bp, Homo sapien
ataatttattgtctcctcgttgcgtatttcatt

SEQ ID NO: 810289 - DNA, 33 bp, Homo sapien
gcccttcttcaaatgacggcaggaaagagaaga

SEQ ID NO: 810290 - DNA, 33 bp, Homo sapien
gcccttcttcaaatgatggcaggaaagagaaga

SEQ ID NO: 810291 - DNA, 33 bp, Homo sapien
actatcatgagaacagaatagaggaaaccacct

SEQ ID NO: 810292 - DNA, 33 bp, Homo sapien
actatcatgagaacaggatagaggaaaccacct

SEQ ID NO: 810293 - DNA, 33 bp, Homo sapien
ggtgcttacacttttacagaatgttgacagaat

SEQ ID NO: 810294 - DNA, 33 bp, Homo sapien
ggtgcttacacttttatagaatgttgacagaat

SEQ ID NO: 810295 - DNA, 33 bp, Homo sapien
gaagaccagaacactgaagattagttcaaaaat

SEQ ID NO: 810296 - DNA, 33 bp, Homo sapien
gaagaccagaacactggagattagttcaaaaat

SEQ ID NO: 810297 - DNA, 33 bp, Homo sapien
aatagacaaagactgaaaacaatctaggtatcc

SEQ ID NO: 810298 - DNA, 33 bp, Homo sapien
aatagacaaagactgagaacaatctaggtatcc

SEQ ID NO: 810299 - DNA, 33 bp, Homo sapien
gatatcaagttttataacacaagcaagactgaa

SEQ ID NO: 810300 - DNA, 33 bp, Homo sapien
gatatcaagttttatagcacaagcaagactgaa

SEQ ID NO: 810301 - DNA, 33 bp, Homo sapien
tggatgggagagataactgaattcacttagaag

SEQ ID NO: 810302 - DNA, 33 bp, Homo sapien
tggatgggagagataattgaattcacttagaag

SEQ ID NO: 810303 - DNA, 33 bp, Homo sapien
attcaaacctgtttaccaaatctgatagggata

SEQ ID NO: 810304 - DNA, 33 bp, Homo sapien
attcaaacctgtttactaaatctgatagggata

SEQ ID NO: 810305 - DNA, 33 bp, Homo sapien
cacaagaggtgaaacccggtaacaggcagttca

SEQ ID NO: 810306 - DNA, 33 bp, Homo sapien
cacaagaggtgaaacctggtaacaggcagttca

SEQ ID NO: 810307 - DNA, 33 bp, Homo sapien
tctcaggtgggatttaataaaatgaatactaat

SEQ ID NO: 810308 - DNA, 33 bp, Homo sapien
tctcaggtgggatttagtaaaatgaatactaat

SEQ ID NO: 810309 - DNA, 33 bp, Homo sapien
catcttatccaagtccaacagaatccatgttta

SEQ ID NO: 810310 - DNA, 33 bp, Homo sapien
catcttatccaagtccgacagaatccatgttta

SEQ ID NO: 810311 - DNA, 33 bp, Homo sapien
tctctggttgaaaaaaagttgtgattaatctga

SEQ ID NO: 810312 - DNA, 33 bp, Homo sapien
tctctggttgaaaaaacgttgtgattaatctga

SEQ ID NO: 810313 - DNA, 33 bp, Homo sapien
tcaagtgtgactgttacggctgtgctagatgtc

SEQ ID NO: 810314 - DNA, 33 bp, Homo sapien
tcaagtgtgactgttatggctgtgctagatgtc

SEQ ID NO: 810315 - DNA, 33 bp, Homo sapien
aatgggaaagtgctaagaaaactgttttacatg

SEQ ID NO: 810316 - DNA, 33 bp, Homo sapien
aatgggaaagtgctaataaaactgttttacatg

SEQ ID NO: 810317 - DNA, 33 bp, Homo sapien
aactgattttgcaaccaggtgcatataaagatt

SEQ ID NO: 810318 - DNA, 33 bp, Homo sapien
aactgattttgcaaccgggtgcatataaagatt

SEQ ID NO: 810319 - DNA, 33 bp, Homo sapien
tagaaagtaagtcgtcaataaatatttgtcaat

SEQ ID NO: 810320 - DNA, 33 bp, Homo sapien
tagaaagtaagtcgtccataaatatttgtcaat

SEQ ID NO: 810321 - DNA, 33 bp, Homo sapien
attcaacactgctactcacttccattgtatctt

SEQ ID NO: 810322 - DNA, 33 bp, Homo sapien
attcaacactgctactgacttccattgtatctt

SEQ ID NO: 810323 - DNA, 33 bp, Homo sapien
taccctatgacctcaaagaactcagtctaggga

SEQ ID NO: 810324 - DNA, 33 bp, Homo sapien
taccctatgacctcaaggaactcagtctaggga

SEQ ID NO: 810325 - DNA, 33 bp, Homo sapien
tagcactgcaccttcacgtcctaagtgcttctg

SEQ ID NO: 810326 - DNA, 33 bp, Homo sapien
tagcactgcaccttcatgtcctaagtgcttctg

SEQ ID NO: 810327 - DNA, 33 bp, Homo sapien
catgcattaatttgtgaagtcaattactcagaa

SEQ ID NO: 810328 - DNA, 33 bp, Homo sapien
catgcattaatttgtggagtcaattactcagaa

SEQ ID NO: 810329 - DNA, 33 bp, Homo sapien
ataactgtcatgagcacatgaaaatctttattc

SEQ ID NO: 810330 - DNA, 33 bp, Homo sapien
ataactgtcatgagcatatgaaaatctttattc

SEQ ID NO: 810331 - DNA, 33 bp, Homo sapien
tgcttatctgccaatgacatatcctatttgata

SEQ ID NO: 810332 - DNA, 33 bp, Homo sapien
tgcttatctgccaatgccatatcctatttgata

SEQ ID NO: 810333 - DNA, 33 bp, Homo sapien
ttgccactccaactcaacaaggatcagccccac

SEQ ID NO: 810334 - DNA, 33 bp, Homo sapien
ttgccactccaactcagcaaggatcagccccac

SEQ ID NO: 810335 - DNA, 33 bp, Homo sapien
aaacccacactcaatagcatactgaatgggcaa

SEQ ID NO: 810336 - DNA, 33 bp, Homo sapien
aaacccacactcaatatcatactgaatgggcaa

SEQ ID NO: 810337 - DNA, 33 bp, Homo sapien
caatcttgtggtagcacagtacataaacatcat

SEQ ID NO: 810338 - DNA, 33 bp, Homo sapien
caatcttgtggtagcatagtacataaacatcat

SEQ ID NO: 810339 - DNA, 33 bp, Homo sapien
caataataatttgccaaacctaaccatgatcta

SEQ ID NO: 810340 - DNA, 33 bp, Homo sapien
caataataatttgccagacctaaccatgatcta

SEQ ID NO: 810341 - DNA, 33 bp, Homo sapien
ggattcagaaatattgaaaactggaagagttat

SEQ ID NO: 810342 - DNA, 33 bp, Homo sapien
ggattcagaaatattggaaactggaagagttat

SEQ ID NO: 810343 - DNA, 33 bp, Homo sapien
tttttagctgaacttaccctgagtaaaaacatg

SEQ ID NO: 810344 - DNA, 33 bp, Homo sapien
tttttagctgaacttatcctgagtaaaaacatg

SEQ ID NO: 810345 - DNA, 33 bp, Homo sapien
ttcctctttaaggtcacgatgcataattatatt

SEQ ID NO: 810346 - DNA, 33 bp, Homo sapien
ttcctctttaaggtcatgatgcataattatatt

SEQ ID NO: 810347 - DNA, 33 bp, Homo sapien
agggatgcagattatcaatgtacactacagttt

SEQ ID NO: 810348 - DNA, 33 bp, Homo sapien
agggatgcagattatcgatgtacactacagttt

SEQ ID NO: 810349 - DNA, 33 bp, Homo sapien
ttctcaactttatcagcaatccctactcatccc

SEQ ID NO: 810350 - DNA, 33 bp, Homo sapien
ttctcaactttatcagtaatccctactcatccc

SEQ ID NO: 810351 - DNA, 33 bp, Homo sapien
ttattcaatatgctaccgaactttgaaatttaa

SEQ ID NO: 810352 - DNA, 33 bp, Homo sapien
ttattcaatatgctactgaactttgaaatttaa

SEQ ID NO: 810353 - DNA, 33 bp, Homo sapien
tgctttctttcacaagaccactggaatgtctgc

SEQ ID NO: 810354 - DNA, 33 bp, Homo sapien
tgctttctttcacaaggccactggaatgtctgc

SEQ ID NO: 810355 - DNA, 33 bp, Homo sapien
aggtgggtttcctaaaatgaggatctatctact

SEQ ID NO: 810356 - DNA, 33 bp, Homo sapien
aggtgggtttcctaaattgaggatctatctact

SEQ ID NO: 810357 - DNA, 33 bp, Homo sapien
ttgagtcctgactctaactataaattgtgactg

SEQ ID NO: 810358 - DNA, 33 bp, Homo sapien
ttgagtcctgactctagctataaattgtgactg

SEQ ID NO: 810359 - DNA, 33 bp, Homo sapien
tgttatttgaaaatcacgtctctctaaatgcat

SEQ ID NO: 810360 - DNA, 33 bp, Homo sapien
tgttatttgaaaatcatgtctctctaaatgcat

SEQ ID NO: 810361 - DNA, 33 bp, Homo sapien
tcaggcgattgtcataaccatctaggagtctgt

SEQ ID NO: 810362 - DNA, 33 bp, Homo sapien
tcaggcgattgtcatagccatctaggagtctgt

SEQ ID NO: 810363 - DNA, 33 bp, Homo sapien
ctgaatacagccaaaactaagtagctctacata

SEQ ID NO: 810364 - DNA, 33 bp, Homo sapien
ctgaatacagccaaaattaagtagctctacata

SEQ ID NO: 810365 - DNA, 33 bp, Homo sapien
atggaaatgaagattaaccagcgagtgttgctc

SEQ ID NO: 810366 - DNA, 33 bp, Homo sapien
atggaaatgaagattacccagcgagtgttgctc

SEQ ID NO: 810367 - DNA, 33 bp, Homo sapien
ggagactgtaacgtcacgagagaaggacatact

SEQ ID NO: 810368 - DNA, 33 bp, Homo sapien
ggagactgtaacgtcatgagagaaggacatact

SEQ ID NO: 810369 - DNA, 33 bp, Homo sapien
gatcacagttgtatcacgcacattgccctcggg

SEQ ID NO: 810370 - DNA, 33 bp, Homo sapien
gatcacagttgtatcatgcacattgccctcggg

SEQ ID NO: 810371 - DNA, 33 bp, Homo sapien
aggtcatgttaaatgcaaaggtcatgataaatg

SEQ ID NO: 810372 - DNA, 33 bp, Homo sapien
aggtcatgttaaatgcgaaggtcatgataaatg

SEQ ID NO: 810373 - DNA, 33 bp, Homo sapien
aactgaagctccataacaggaagtaaatttgcc

SEQ ID NO: 810374 - DNA, 33 bp, Homo sapien
aactgaagctccataagaggaagtaaatttgcc

SEQ ID NO: 810375 - DNA, 33 bp, Homo sapien
ctcctagaatttcaacaatggtatagacagtgg

SEQ ID NO: 810376 - DNA, 33 bp, Homo sapien
ctcctagaatttcaaccatggtatagacagtgg

SEQ ID NO: 810377 - DNA, 33 bp, Homo sapien
tctctcacttctataaacttaggccttcaggat

SEQ ID NO: 810378 - DNA, 33 bp, Homo sapien
tctctcacttctataaccttaggccttcaggat

SEQ ID NO: 810379 - DNA, 33 bp, Homo sapien
gaggagatgcattatacagcacctgcagaagct

SEQ ID NO: 810380 - DNA, 33 bp, Homo sapien
gaggagatgcattatatagcacctgcagaagct

SEQ ID NO: 810381 - DNA, 33 bp, Homo sapien
gtccaggagcctgtacacccatctggtctttta

SEQ ID NO: 810382 - DNA, 33 bp, Homo sapien
gtccaggagcctgtacgcccatctggtctttta

SEQ ID NO: 810383 - DNA, 33 bp, Homo sapien
gaattgtaactgaatgcataggttttgctggca

SEQ ID NO: 810384 - DNA, 33 bp, Homo sapien
gaattgtaactgaatggataggttttgctggca

SEQ ID NO: 810385 - DNA, 33 bp, Homo sapien
tatgatgagtatagataaacccagactacaggt

SEQ ID NO: 810386 - DNA, 33 bp, Homo sapien
tatgatgagtatagatgaacccagactacaggt

SEQ ID NO: 810387 - DNA, 33 bp, Homo sapien
gtatattttttctaaccgtagatgagtagattg

SEQ ID NO: 810388 - DNA, 33 bp, Homo sapien
gtatattttttctaactgtagatgagtagattg

SEQ ID NO: 810389 - DNA, 33 bp, Homo sapien
aatgacaaagctagaccctagtacaatgtaaag

SEQ ID NO: 810390 - DNA, 33 bp, Homo sapien
aatgacaaagctagactctagtacaatgtaaag

SEQ ID NO: 810391 - DNA, 33 bp, Homo sapien
acgaagaactagaaatcagaactttgtcctcca

SEQ ID NO: 810392 - DNA, 33 bp, Homo sapien
acgaagaactagaaattagaactttgtcctcca

SEQ ID NO: 810393 - DNA, 33 bp, Homo sapien
agaattaaaaacaaaaatcatacgatcatctca

SEQ ID NO: 810394 - DNA, 33 bp, Homo sapien
agaattaaaaacaaaagtcatacgatcatctca

SEQ ID NO: 810395 - DNA, 33 bp, Homo sapien
ctccccaatactgtataagctctgaaatgtttg

SEQ ID NO: 810396 - DNA, 33 bp, Homo sapien
ctccccaatactgtatgagctctgaaatgtttg

SEQ ID NO: 810397 - DNA, 33 bp, Homo sapien
tgcttggagatattccaccgggattttatagtt

SEQ ID NO: 810398 - DNA, 33 bp, Homo sapien
tgcttggagatattccgccgggattttatagtt

SEQ ID NO: 810399 - DNA, 33 bp, Homo sapien
gtgacctcaactattcacaagcaattgttccct

SEQ ID NO: 810400 - DNA, 33 bp, Homo sapien
gtgacctcaactattcgcaagcaattgttccct

SEQ ID NO: 810401 - DNA, 33 bp, Homo sapien
aactaaagcaatttagcacgctgaggaaataaa

SEQ ID NO: 810402 - DNA, 33 bp, Homo sapien
aactaaagcaatttagtacgctgaggaaataaa

SEQ ID NO: 810403 - DNA, 33 bp, Homo sapien
atttccatttttatcaacactgaatgaatattg

SEQ ID NO: 810404 - DNA, 33 bp, Homo sapien
atttccatttttatcagcactgaatgaatattg

SEQ ID NO: 810405 - DNA, 33 bp, Homo sapien
ttgaattttagctgacacaagaaagaagtagtc

SEQ ID NO: 810406 - DNA, 33 bp, Homo sapien
ttgaattttagctgacgcaagaaagaagtagtc

SEQ ID NO: 810407 - DNA, 33 bp, Homo sapien
ttaaaaatctgcctgacaagtgggaaggacttg

SEQ ID NO: 810408 - DNA, 33 bp, Homo sapien
ttaaaaatctgcctgataagtgggaaggacttg

SEQ ID NO: 810409 - DNA, 33 bp, Homo sapien
atcataacgaatcacaaggaaatataccacatt

SEQ ID NO: 810410 - DNA, 33 bp, Homo sapien
atcataacgaatcacagggaaatataccacatt

SEQ ID NO: 810411 - DNA, 33 bp, Homo sapien
tatattccttgtgataaaaatcaggaaaatata

SEQ ID NO: 810412 - DNA, 33 bp, Homo sapien
tatattccttgtgatacaaatcaggaaaatata

SEQ ID NO: 810413 - DNA, 33 bp, Homo sapien
atttatgatacataagaccagttgcagaatgtc

SEQ ID NO: 810414 - DNA, 33 bp, Homo sapien
atttatgatacataagcccagttgcagaatgtc

SEQ ID NO: 810415 - DNA, 33 bp, Homo sapien
ttcatttgataagctcgcttgaatcaaggcatg

SEQ ID NO: 810416 - DNA, 33 bp, Homo sapien
ttcatttgataagctctcttgaatcaaggcatg

SEQ ID NO: 810417 - DNA, 33 bp, Homo sapien
ctattatttgactttgaatttcactgatccctt

SEQ ID NO: 810418 - DNA, 33 bp, Homo sapien
ctattatttgactttggatttcactgatccctt

SEQ ID NO: 810419 - DNA, 33 bp, Homo sapien
gatcagtatgctaaaaatgtttccttccatcta

SEQ ID NO: 810420 - DNA, 33 bp, Homo sapien
gatcagtatgctaaaattgtttccttccatcta

SEQ ID NO: 810421 - DNA, 33 bp, Homo sapien
ttctgagaaagagaaaccttgtctgttatttaa

SEQ ID NO: 810422 - DNA, 33 bp, Homo sapien
ttctgagaaagagaaatcttgtctgttatttaa

SEQ ID NO: 810423 - DNA, 33 bp, Homo sapien
ctgttttcatcttggagcccaaactgctgagcc

SEQ ID NO: 810424 - DNA, 33 bp, Homo sapien
ctgttttcatcttggatcccaaactgctgagcc

SEQ ID NO: 810425 - DNA, 33 bp, Homo sapien
caactggtctagcaggaaatttgacaagtagta

SEQ ID NO: 810426 - DNA, 33 bp, Homo sapien
caactggtctagcagggaatttgacaagtagta

SEQ ID NO: 810427 - DNA, 33 bp, Homo sapien
ttaatgttaaccacaccgaaattcttgaggtag

SEQ ID NO: 810428 - DNA, 33 bp, Homo sapien
ttaatgttaaccacactgaaattcttgaggtag

SEQ ID NO: 810429 - DNA, 33 bp, Homo sapien
taagttgtccaaattaagttgtagttgtcctta

SEQ ID NO: 810430 - DNA, 33 bp, Homo sapien
taagttgtccaaattacgttgtagttgtcctta

SEQ ID NO: 810431 - DNA, 33 bp, Homo sapien
agctagcgatatgccaaaaattaaaactggaac

SEQ ID NO: 810432 - DNA, 33 bp, Homo sapien
agctagcgatatgccagaaattaaaactggaac

SEQ ID NO: 810433 - DNA, 33 bp, Homo sapien; identical to SEQ ID NO: 810431

SEQ ID NO: 810434 - DNA, 33 bp, Homo sapien; identical to SEQ ID NO: 810432

SEQ ID NO: 810435 - DNA, 33 bp, Homo sapien
gccctgacaaatttgactacaatgcaaactatc

SEQ ID NO: 810436 - DNA, 33 bp, Homo sapien
gccctgacaaatttgattacaatgcaaactatc

SEQ ID NO: 810437 - DNA, 33 bp, Homo sapien
ttgattggatttgcacagcattagttattagag

SEQ ID NO: 810438 - DNA, 33 bp, Homo sapien
ttgattggatttgcacggcattagttattagag

SEQ ID NO: 810439 - DNA, 33 bp, Homo sapien
ggtgtggtatgagaataaagtccacacattggg

SEQ ID NO: 810440 - DNA, 33 bp, Homo sapien
ggtgtggtatgagaatgaagtccacacattggg

SEQ ID NO: 810441 - DNA, 33 bp, Homo sapien
ggcttacgaaagaaagaaaatccacaggtgcta

SEQ ID NO: 810442 - DNA, 33 bp, Homo sapien
ggcttacgaaagaaaggaaatccacaggtgcta

SEQ ID NO: 810443 - DNA, 33 bp, Homo sapien
ttaccaacgaactatccactgccttcaagagac

SEQ ID NO: 810444 - DNA, 33 bp, Homo sapien
ttaccaacgaactatctactgccttcaagagac

SEQ ID NO: 810445 - DNA, 33 bp, Homo sapien; identical to SEQ ID NO: 810443

SEQ ID NO: 810446 - DNA, 33 bp, Homo sapien; identical to SEQ ID NO: 810444

SEQ ID NO: 810447 - DNA, 33 bp, Homo sapien
taaaaatagtctctaactgttgactcctactat

SEQ ID NO: 810448 - DNA, 33 bp, Homo sapien
taaaaatagtctctaattgttgactcctactat

SEQ ID NO: 810449 - DNA, 33 bp, Homo sapien
tctggacctttttgtacgaatgcattctaagag

SEQ ID NO: 810450 - DNA, 33 bp, Homo sapien
tctggacctttttgtatgaatgcattctaagag

SEQ ID NO: 810451 - DNA, 33 bp, Homo sapien
ccatggaaaggggcaaaattgctccaagttggc

SEQ ID NO: 810452 - DNA, 33 bp, Homo sapien
ccatggaaaggggcaacattgctccaagttggc

SEQ ID NO: 810453 - DNA, 33 bp, Homo sapien
agtggatttcccagcaaggagattatccatccc

SEQ ID NO: 810454 - DNA, 33 bp, Homo sapien
agtggatttcccagcatggagattatccatccc

SEQ ID NO: 810455 - DNA, 33 bp, Homo sapien
ggcctataagctataaggtcaccagggcaccag

SEQ ID NO: 810456 - DNA, 33 bp, Homo sapien
ggcctataagctataatgtcaccagggcaccag

SEQ ID NO: 810457 - DNA, 33 bp, Homo sapien
ctcccaccgaattccacgtggtctcattttgat

SEQ ID NO: 810458 - DNA, 33 bp, Homo sapien
ctcccaccgaattccaggtggtctcattttgat

SEQ ID NO: 810459 - DNA, 33 bp, Homo sapien
aatgaaccctgagtaaaaatgaagatactattt

SEQ ID NO: 810460 - DNA, 33 bp, Homo sapien
aatgaaccctgagtaagaatgaagatactattt

SEQ ID NO: 810461 - DNA, 33 bp, Homo sapien
aaaattttggcaagaacgttggacaaatagtat

SEQ ID NO: 810462 - DNA, 33 bp, Homo sapien
aaaattttggcaagaatgttggacaaatagtat

SEQ ID NO: 810463 - DNA, 33 bp, Homo sapien
ttatataacaaacttccataggcaagcaaccca

SEQ ID NO: 810464 - DNA, 33 bp, Homo sapien
ttatataacaaacttctataggcaagcaaccca

SEQ ID NO: 810465 - DNA, 33 bp, Homo sapien
taaaaatatgtaacaaaagcattcatttcaaaa

SEQ ID NO: 810466 - DNA, 33 bp, Homo sapien
taaaaatatgtaacaagagcattcatttcaaaa

SEQ ID NO: 810467 - DNA, 33 bp, Homo sapien
cagtgtggaggacataagaaaaggcatgagact

SEQ ID NO: 810468 - DNA, 33 bp, Homo sapien
cagtgtggaggacatatgaaaaggcatgagact

SEQ ID NO: 810469 - DNA, 33 bp, Homo sapien
attttcaattctaatacgcatcagtttctcctg

SEQ ID NO: 810470 - DNA, 33 bp, Homo sapien
attttcaattctaatatgcatcagtttctcctg

SEQ ID NO: 810471 - DNA, 33 bp, Homo sapien
taggacaagtgaaaaactgaagaaaaagcttca

SEQ ID NO: 810472 - DNA, 33 bp, Homo sapien
taggacaagtgaaaaattgaagaaaaagcttca

SEQ ID NO: 810473 - DNA, 33 bp, Homo sapien
ctacctagtaagctaactgtgcttctaagaagt

SEQ ID NO: 810474 - DNA, 33 bp, Homo sapien
ctacctagtaagctaattgtgcttctaagaagt

SEQ ID NO: 810475 - DNA, 33 bp, Homo sapien
cactggctggaactaacgaataatagaacatga

SEQ ID NO: 810476 - DNA, 33 bp, Homo sapien
cactggctggaactaaggaataatagaacatga

SEQ ID NO: 810477 - DNA, 33 bp, Homo sapien
ttaagagaaagttgatgaaatgacagatattta

SEQ ID NO: 810478 - DNA, 33 bp, Homo sapien
ttaagagaaagttgattaaatgacagatattta

SEQ ID NO: 810479 - DNA, 33 bp, Homo sapien
taaactgaccagaacaaaggtaggattttaaat

SEQ ID NO: 810480 - DNA, 33 bp, Homo sapien
taaactgaccagaacacaggtaggattttaaat

SEQ ID NO: 810481 - DNA, 33 bp, Homo sapien
tggctcaagaacctaaccactatgctgtcctat

SEQ ID NO: 810482 - DNA, 33 bp, Homo sapien
tggctcaagaacctaatcactatgctgtcctat

SEQ ID NO: 810483 - DNA, 33 bp, Homo sapien
aacttgacattgaaacactgctaattaaatgca

SEQ ID NO: 810484 - DNA, 33 bp, Homo sapien
aacttgacattgaaacgctgctaattaaatgca

SEQ ID NO: 810485 - DNA, 33 bp, Homo sapien
tccacagaaagtgtaacgatgattaatgaactc

SEQ ID NO: 810486 - DNA, 33 bp, Homo sapien
tccacagaaagtgtaatgatgattaatgaactc

SEQ ID NO: 810487 - DNA, 33 bp, Homo sapien
tttaagacaggaaaggacaattttcaaattgtt

SEQ ID NO: 810488 - DNA, 33 bp, Homo sapien
tttaagacaggaaagggcaattttcaaattgtt

SEQ ID NO: 810489 - DNA, 33 bp, Homo sapien
aatttccacataaaccaccctttaatctacatg

SEQ ID NO: 810490 - DNA, 33 bp, Homo sapien
aatttccacataaaccgccctttaatctacatg

SEQ ID NO: 810491 - DNA, 33 bp, Homo sapien
tttgatcctatccttacgttgttagcttgattg

SEQ ID NO: 810492 - DNA, 33 bp, Homo sapien
tttgatcctatccttatgttgttagcttgattg

SEQ ID NO: 810493 - DNA, 33 bp, Homo sapien
ctagttctcccgcaataatccttaaccaggatg

SEQ ID NO: 810494 - DNA, 33 bp, Homo sapien
ctagttctcccgcaatgatccttaaccaggatg

SEQ ID NO: 810495 - DNA, 33 bp, Homo sapien
gctttaatttaggagactagctatttccaaaca

SEQ ID NO: 810496 - DNA, 33 bp, Homo sapien
gctttaatttaggagattagctatttccaaaca

SEQ ID NO: 810497 - DNA, 33 bp, Homo sapien
ggctctttgaaaagcacagtgttcaaccaaatt

SEQ ID NO: 810498 - DNA, 33 bp, Homo sapien
ggctctttgaaaagcatagtgttcaaccaaatt

SEQ ID NO: 810499 - DNA, 33 bp, Homo sapien
ctaaactctgttagtccacagttgaaacccaca

SEQ ID NO: 810500 - DNA, 33 bp, Homo sapien
ctaaactctgttagtctacagttgaaacccaca

SEQ ID NO: 810501 - DNA, 33 bp, Homo sapien
attcaggtgatgggtacagcaaaagcccacact

SEQ ID NO: 810502 - DNA, 33 bp, Homo sapien
attcaggtgatgggtatagcaaaagcccacact

SEQ ID NO: 810503 - DNA, 33 bp, Homo sapien
caagagcgaaaatccacgtcaaaaaaattgaaa

SEQ ID NO: 810504 - DNA, 33 bp, Homo sapien
caagagcgaaaatccatgtcaaaaaaattgaaa

SEQ ID NO: 810505 - DNA, 33 bp, Homo sapien
ttttctcctatctcagaattcaacaaatgcaca

SEQ ID NO: 810506 - DNA, 33 bp, Homo sapien
ttttctcctatctcaggattcaacaaatgcaca

SEQ ID NO: 810507 - DNA, 33 bp, Homo sapien
gctcccttgtcatttccctgcttttagctgtcc

SEQ ID NO: 810508 - DNA, 33 bp, Homo sapien
gctcccttgtcatttctctgcttttagctgtcc

SEQ ID NO: 810509 - DNA, 33 bp, Homo sapien
tgatccctaaagaaaactattcaaacattacat

SEQ ID NO: 810510 - DNA, 33 bp, Homo sapien
tgatccctaaagaaaattattcaaacattacat

SEQ ID NO: 810511 - DNA, 33 bp, Homo sapien
ccctatcatttacttacgcattttgcttagtaa

SEQ ID NO: 810512 - DNA, 33 bp, Homo sapien
ccctatcatttacttatgcattttgcttagtaa

SEQ ID NO: 810513 - DNA, 33 bp, Homo sapien
cctacacataagaaaaaaaatgaggtaagattt

SEQ ID NO: 810514 - DNA, 33 bp, Homo sapien
cctacacataagaaaacaaatgaggtaagattt

SEQ ID NO: 810515 - DNA, 33 bp, Homo sapien
tcatcaagtttgcgtacaattgctaagagaaat

SEQ ID NO: 810516 - DNA, 33 bp, Homo sapien
tcatcaagtttgcgtataattgctaagagaaat

SEQ ID NO: 810517 - DNA, 33 bp, Homo sapien
gtctttgttttactgaagttcttaggggtctca

SEQ ID NO: 810518 - DNA, 33 bp, Homo sapien
gtctttgttttactgacgttcttaggggtctca

SEQ ID NO: 810519 - DNA, 33 bp, Homo sapien
atttgaaagcaaagcaacactatgacaacttag

SEQ ID NO: 810520 - DNA, 33 bp, Homo sapien
atttgaaagcaaagcagcactatgacaacttag

SEQ ID NO: 810521 - DNA, 33 bp, Homo sapien
taaggtgtatatgcaccgtagaattgttaaatc

SEQ ID NO: 810522 - DNA, 33 bp, Homo sapien
taaggtgtatatgcactgtagaattgttaaatc

SEQ ID NO: 810523 - DNA, 33 bp, Homo sapien
cacaatcgaaacctctcaaacacaagcgaaaac

SEQ ID NO: 810524 - DNA, 33 bp, Homo sapien
cacaatcgaaacctctgaaacacaagcgaaaac

SEQ ID NO: 810525 - DNA, 33 bp, Homo sapien
aagcatcctcttagccacagaactatagagccc

SEQ ID NO: 810526 - DNA, 33 bp, Homo sapien
aagcatcctcttagccgcagaactatagagccc

SEQ ID NO: 810527 - DNA, 33 bp, Homo sapien
tggtcaagagaacagcaactgagtgattggact

SEQ ID NO: 810528 - DNA, 33 bp, Homo sapien
tggtcaagagaacagccactgagtgattggact

SEQ ID NO: 810529 - DNA, 33 bp, Homo sapien
ccttagtcggggtagaagtaaccagccagatgc

SEQ ID NO: 810530 - DNA, 33 bp, Homo sapien
ccttagtcggggtagaggtaaccagccagatgc

SEQ ID NO: 810531 - DNA, 33 bp, Homo sapien
gctgtacctagataaacttcagttattgtagaa

SEQ ID NO: 810532 - DNA, 33 bp, Homo sapien
gctgtacctagataaatttcagttattgtagaa

SEQ ID NO: 810533 - DNA, 33 bp, Homo sapien
tccacattctagtctgaaagctaaaaggatcag

SEQ ID NO: 810534 - DNA, 33 bp, Homo sapien
tccacattctagtctggaagctaaaaggatcag

SEQ ID NO: 810535 - DNA, 33 bp, Homo sapien
tgtagtgaggacaacaaagtgtagcattcccta

SEQ ID NO: 810536 - DNA, 33 bp, Homo sapien
tgtagtgaggacaacagagtgtagcattcccta

SEQ ID NO: 810537 - DNA, 33 bp, Homo sapien
ctagcactctgtgatggatatgaggcatgagaa

SEQ ID NO: 810538 - DNA, 33 bp, Homo sapien
ctagcactctgtgatgtatatgaggcatgagaa

SEQ ID NO: 810539 - DNA, 33 bp, Homo sapien
gcagttgtttctttgcaatcatttgaaaggagc

SEQ ID NO: 810540 - DNA, 33 bp, Homo sapien
gcagttgtttctttgcgatcatttgaaaggagc

SEQ ID NO: 810541 - DNA, 33 bp, Homo sapien
ctgtgcattatgaaaagcaaacggcatgctttt

SEQ ID NO: 810542 - DNA, 33 bp, Homo sapien
ctgtgcattatgaaaatcaaacggcatgctttt

SEQ ID NO: 810543 - DNA, 33 bp, Homo sapien
ttgcttggccaatataaaaattcatagttaggc

SEQ ID NO: 810544 - DNA, 33 bp, Homo sapien
ttgcttggccaatatacaaattcatagttaggc

SEQ ID NO: 810545 - DNA, 33 bp, Homo sapien
taactgcatccccaaacgaaggagcccaatatt

SEQ ID NO: 810546 - DNA, 33 bp, Homo sapien
taactgcatccccaaatgaaggagcccaatatt

SEQ ID NO: 810547 - DNA, 33 bp, Homo sapien
aagagataatctgtgaatagcctttggtttctt

SEQ ID NO: 810548 - DNA, 33 bp, Homo sapien
aagagataatctgtgagtagcctttggtttctt

SEQ ID NO: 810549 - DNA, 33 bp, Homo sapien
tgctggttttatagaaagaggctaaaatttaaa

SEQ ID NO: 810550 - DNA, 33 bp, Homo sapien
tgctggttttatagaaggaggctaaaatttaaa

SEQ ID NO: 810551 - DNA, 33 bp, Homo sapien
aagtcttggaaacagactagaaaggacctagga

SEQ ID NO: 810552 - DNA, 33 bp, Homo sapien
aagtcttggaaacagattagaaaggacctagga

SEQ ID NO: 810553 - DNA, 33 bp, Homo sapien
tacttcatatgcatcaccttcttgaaatctcac

SEQ ID NO: 810554 - DNA, 33 bp, Homo sapien
tacttcatatgcatcatcttcttgaaatctcac

SEQ ID NO: 810555 - DNA, 33 bp, Homo sapien
gaagatgttggttaaaagctttgagatgggaaa

SEQ ID NO: 810556 - DNA, 33 bp, Homo sapien
gaagatgttggttaaatgctttgagatgggaaa

SEQ ID NO: 810557 - DNA, 33 bp, Homo sapien
gcaccattgtactccaagcaacaagagtgaaac

SEQ ID NO: 810558 - DNA, 33 bp, Homo sapien
gcaccattgtactccaggcaacaagagtgaaac

SEQ ID NO: 810559 - DNA, 33 bp, Homo sapien
tgttgattctttctgccgatgattttactcccc

SEQ ID NO: 810560 - DNA, 33 bp, Homo sapien
tgttgattctttctgctgatgattttactcccc

SEQ ID NO: 810561 - DNA, 33 bp, Homo sapien
ggattagagagagagaagccttctggatagggt

SEQ ID NO: 810562 - DNA, 33 bp, Homo sapien
ggattagagagagagatgccttctggatagggt

SEQ ID NO: 810563 - DNA, 33 bp, Homo sapien
gtataagtgccattacagatgaatatgtgagat

SEQ ID NO: 810564 - DNA, 33 bp, Homo sapien
gtataagtgccattacggatgaatatgtgagat

SEQ ID NO: 810565 - DNA, 33 bp, Homo sapien
tccttgtaactgctcaaagactgcagtccaact

SEQ ID NO: 810566 - DNA, 33 bp, Homo sapien
tccttgtaactgctcagagactgcagtccaact

SEQ ID NO: 810567 - DNA, 33 bp, Homo sapien
ttcataatgtttttagaagacagttctacaatt

SEQ ID NO: 810568 - DNA, 33 bp, Homo sapien
ttcataatgtttttaggagacagttctacaatt

SEQ ID NO: 810569 - DNA, 33 bp, Homo sapien
aaagggattgctccagacaagaatgctataaac

SEQ ID NO: 810570 - DNA, 33 bp, Homo sapien
aaagggattgctccaggcaagaatgctataaac

SEQ ID NO: 810571 - DNA, 33 bp, Homo sapien
attcatccatcttcccgggcatatgttaatcat

SEQ ID NO: 810572 - DNA, 33 bp, Homo sapien
attcatccatcttccctggcatatgttaatcat

SEQ ID NO: 810573 - DNA, 33 bp, Homo sapien
aaattatgactctgaaatagttaagaaatcaaa

SEQ ID NO: 810574 - DNA, 33 bp, Homo sapien
aaattatgactctgaagtagttaagaaatcaaa

SEQ ID NO: 810575 - DNA, 33 bp, Homo sapien
tgcataatctccatcaatctatttcaaagttta

SEQ ID NO: 810576 - DNA, 33 bp, Homo sapien
tgcataatctccatcagtctatttcaaagttta

SEQ ID NO: 810577 - DNA, 33 bp, Homo sapien
aatgaaaaataaaccaatctcattcaacaatga

SEQ ID NO: 810578 - DNA, 33 bp, Homo sapien
aatgaaaaataaaccattctcattcaacaatga

SEQ ID NO: 810579 - DNA, 33 bp, Homo sapien
ttctgtctctaggggcactatattaaatgttat

SEQ ID NO: 810580 - DNA, 33 bp, Homo sapien
ttctgtctctaggggcgctatattaaatgttat

SEQ ID NO: 810581 - DNA, 33 bp, Homo sapien
aaggaatcaataaaaaatgaatgggaagacatt

SEQ ID NO: 810582 - DNA, 33 bp, Homo sapien
aaggaatcaataaaaagtgaatgggaagacatt

SEQ ID NO: 810583 - DNA, 33 bp, Homo sapien
tgaggaattatgaccaccagaatatatggggac

SEQ ID NO: 810584 - DNA, 33 bp, Homo sapien
tgaggaattatgaccatcagaatatatggggac

SEQ ID NO: 810585 - DNA, 33 bp, Homo sapien
tctaagcttgcagaaaacttatggaataataga

SEQ ID NO: 810586 - DNA, 33 bp, Homo sapien
tctaagcttgcagaaatcttatggaataataga

SEQ ID NO: 810587 - DNA, 33 bp, Homo sapien
ctaaatctttatcaccaatcatgttaattaacc

SEQ ID NO: 810588 - DNA, 33 bp, Homo sapien
ctaaatctttatcacccatcatgttaattaacc

SEQ ID NO: 810589 - DNA, 33 bp, Homo sapien
tgcccattttccaattcaagcatcttgtgtgca

SEQ ID NO: 810590 - DNA, 33 bp, Homo sapien
tgcccattttccaattgaagcatcttgtgtgca

SEQ ID NO: 810591 - DNA, 33 bp, Homo sapien
aaacatagttccagaaaattaatcactttgtac

SEQ ID NO: 810592 - DNA, 33 bp, Homo sapien
aaacatagttccagaatattaatcactttgtac

SEQ ID NO: 810593 - DNA, 33 bp, Homo sapien
aagttccacatcaactcaccttttcaacccact

SEQ ID NO: 810594 - DNA, 33 bp, Homo sapien
aagttccacatcaacttaccttttcaacccact

SEQ ID NO: 810595 - DNA, 33 bp, Homo sapien
atgggatattgatagacgacaaaatgttgttga

SEQ ID NO: 810596 - DNA, 33 bp, Homo sapien
atgggatattgatagatgacaaaatgttgttga

SEQ ID NO: 810597 - DNA, 33 bp, Homo sapien
cttgattagagagatacgagatagatcagatag

SEQ ID NO: 810598 - DNA, 33 bp, Homo sapien
cttgattagagagataggagatagatcagatag

SEQ ID NO: 810599 - DNA, 33 bp, Homo sapien
cagcttatatttggcccaatgcagccacagaac

SEQ ID NO: 810600 - DNA, 33 bp, Homo sapien
cagcttatatttggccgaatgcagccacagaac

SEQ ID NO: 810601 - DNA, 33 bp, Homo sapien
ttagcaggttaagaagcatttgtcactatagcc

SEQ ID NO: 810602 - DNA, 33 bp, Homo sapien
ttagcaggttaagaagtatttgtcactatagcc

SEQ ID NO: 810603 - DNA, 33 bp, Homo sapien
caattgaaaaataatgccaaaagggaggagaag

SEQ ID NO: 810604 - DNA, 33 bp, Homo sapien
caattgaaaaataatggcaaaagggaggagaag

SEQ ID NO: 810605 - DNA, 33 bp, Homo sapien
ttggttagaactgcttcaagacctactttgctg

SEQ ID NO: 810606 - DNA, 33 bp, Homo sapien
ttggttagaactgctttaagacctactttgctg

SEQ ID NO: 810607 - DNA, 33 bp, Homo sapien
aattgaaatcactttcactttcttgacccacac

SEQ ID NO: 810608 - DNA, 33 bp, Homo sapien
aattgaaatcactttcgctttcttgacccacac

SEQ ID NO: 810609 - DNA, 33 bp, Homo sapien
aacctgccatcataataaggaatcacgacctta

SEQ ID NO: 810610 - DNA, 33 bp, Homo sapien
aacctgccatcataatgaggaatcacgacctta

SEQ ID NO: 810611 - DNA, 33 bp, Homo sapien
gtaatgtacctgtgttaaaagaaacaatattgt

SEQ ID NO: 810612 - DNA, 33 bp, Homo sapien
gtaatgtacctgtgttgaaagaaacaatattgt

SEQ ID NO: 810613 - DNA, 33 bp, Homo sapien
ccctgttaaaattctacgtacttcacatctcta

SEQ ID NO: 810614 - DNA, 33 bp, Homo sapien
ccctgttaaaattctatgtacttcacatctcta

SEQ ID NO: 810615 - DNA, 33 bp, Homo sapien
atcatactgattctggaataaatagagactgaa

SEQ ID NO: 810616 - DNA, 33 bp, Homo sapien
atcatactgattctgggataaatagagactgaa

SEQ ID NO: 810617 - DNA, 33 bp, Homo sapien
ctatataaagatttctcaatgtgtttcagtttt

SEQ ID NO: 810618 - DNA, 33 bp, Homo sapien
ctatataaagatttctgaatgtgtttcagtttt

SEQ ID NO: 810619 - DNA, 33 bp, Homo sapien
cattgtgcatggtacacggtaagtgtttaatag

SEQ ID NO: 810620 - DNA, 33 bp, Homo sapien
cattgtgcatggtacatggtaagtgtttaatag

SEQ ID NO: 810621 - DNA, 33 bp, Homo sapien
cagtcaacaacttcacacaaagtctatacttct

SEQ ID NO: 810622 - DNA, 33 bp, Homo sapien
cagtcaacaacttcactcaaagtctatacttct

SEQ ID NO: 810623 - DNA, 33 bp, Homo sapien
taataacttgcgaagaagaaagatatatagctc

SEQ ID NO: 810624 - DNA, 33 bp, Homo sapien
taataacttgcgaagaggaaagatatatagctc

SEQ ID NO: 810625 - DNA, 33 bp, Homo sapien
gaactaatttatgctcccaccaatagtgtaaaa

SEQ ID NO: 810626 - DNA, 33 bp, Homo sapien
gaactaatttatgctctcaccaatagtgtaaaa

SEQ ID NO: 810627 - DNA, 33 bp, Homo sapien
aaacagccagctaagaaaggttataccccgatt

SEQ ID NO: 810628 - DNA, 33 bp, Homo sapien
aaacagccagctaagagaggttataccccgatt

SEQ ID NO: 810629 - DNA, 33 bp, Homo sapien
ttgccacactgtcttccacaacaattgaactaa

SEQ ID NO: 810630 - DNA, 33 bp, Homo sapien
ttgccacactgtcttctacaacaattgaactaa

SEQ ID NO: 810631 - DNA, 33 bp, Homo sapien
gggctagtctcagaccacttttttcacatgata

SEQ ID NO: 810632 - DNA, 33 bp, Homo sapien
gggctagtctcagaccgcttttttcacatgata

SEQ ID NO: 810633 - DNA, 33 bp, Homo sapien
gtattggatcatttggccatactgaattaatta

SEQ ID NO: 810634 - DNA, 33 bp, Homo sapien
gtattggatcatttggtcatactgaattaatta

SEQ ID NO: 810635 - DNA, 33 bp, Homo sapien
ggaatagaatgtcccacgagctagaggtaggat

SEQ ID NO: 810636 - DNA, 33 bp, Homo sapien
ggaatagaatgtcccatgagctagaggtaggat

SEQ ID NO: 810637 - DNA, 33 bp, Homo sapien
tcagagagatgcaaagcatgaaaactaactgtg

SEQ ID NO: 810638 - DNA, 33 bp, Homo sapien
tcagagagatgcaaagtatgaaaactaactgtg

SEQ ID NO: 810639 - DNA, 33 bp, Homo sapien
cagatcgcatggaacactattttttaagtgcaa

SEQ ID NO: 810640 - DNA, 33 bp, Homo sapien
cagatcgcatggaacattattttttaagtgcaa

SEQ ID NO: 810641 - DNA, 33 bp, Homo sapien
gggcttggataaggaggatgaatttaccaaata

SEQ ID NO: 810642 - DNA, 33 bp, Homo sapien
gggcttggataaggagtatgaatttaccaaata

SEQ ID NO: 810643 - DNA, 33 bp, Homo sapien
gtatctattgttaaaaataatagtgatcatggt

SEQ ID NO: 810644 - DNA, 33 bp, Homo sapien
gtatctattgttaaaagtaatagtgatcatggt

SEQ ID NO: 810645 - DNA, 33 bp, Homo sapien
attatgtgctaggtgccatattaggtgcttcat

SEQ ID NO: 810646 - DNA, 33 bp, Homo sapien
attatgtgctaggtgctatattaggtgcttcat

SEQ ID NO: 810647 - DNA, 33 bp, Homo sapien
tcctcaataatgaaaacttctttattctacagt

SEQ ID NO: 810648 - DNA, 33 bp, Homo sapien
tcctcaataatgaaaagttctttattctacagt

SEQ ID NO: 810649 - DNA, 33 bp, Homo sapien
caggcaaagacaatataagaaaatgttgtgtgt

SEQ ID NO: 810650 - DNA, 33 bp, Homo sapien
caggcaaagacaatatgagaaaatgttgtgtgt

SEQ ID NO: 810651 - DNA, 33 bp, Homo sapien
atgtgaaataaaaaccaaagggaagagagagag

SEQ ID NO: 810652 - DNA, 33 bp, Homo sapien
atgtgaaataaaaaccgaagggaagagagagag

SEQ ID NO: 810653 - DNA, 33 bp, Homo sapien
actttcctttcaagaaaaccataacgagcttcc

SEQ ID NO: 810654 - DNA, 33 bp, Homo sapien
actttcctttcaagaacaccataacgagcttcc

SEQ ID NO: 810655 - DNA, 33 bp, Homo sapien
tcaaaaaaagcttgaacgaaagcaatctctctt

SEQ ID NO: 810656 - DNA, 33 bp, Homo sapien
tcaaaaaaagcttgaatgaaagcaatctctctt

SEQ ID NO: 810657 - DNA, 33 bp, Homo sapien
ctactttgtcagcctgaattatggaacaaagac

SEQ ID NO: 810658 - DNA, 33 bp, Homo sapien
ctactttgtcagcctggattatggaacaaagac

SEQ ID NO: 810659 - DNA, 33 bp, Homo sapien
taaatgtccagtgttcaagagtttcaatttatt

SEQ ID NO: 810660 - DNA, 33 bp, Homo sapien
taaatgtccagtgttcgagagtttcaatttatt

SEQ ID NO: 810661 - DNA, 33 bp, Homo sapien
aagcaaaaaatccagcaaatggggtttctatac

SEQ ID NO: 810662 - DNA, 33 bp, Homo sapien
aagcaaaaaatccagcgaatggggtttctatac

SEQ ID NO: 810663 - DNA, 33 bp, Homo sapien
cttaacacaatttctaccacaaagtaggcactt

SEQ ID NO: 810664 - DNA, 33 bp, Homo sapien
cttaacacaatttctatcacaaagtaggcactt

SEQ ID NO: 810665 - DNA, 33 bp, Homo sapien
tgttgccttgtctttacagtaactagatttggt

SEQ ID NO: 810666 - DNA, 33 bp, Homo sapien
tgttgccttgtctttatagtaactagatttggt

SEQ ID NO: 810667 - DNA, 33 bp, Homo sapien
tttctgtcattagaaacgttcaggcataggcta

SEQ ID NO: 810668 - DNA, 33 bp, Homo sapien
tttctgtcattagaaaggttcaggcataggcta

SEQ ID NO: 810669 - DNA, 33 bp, Homo sapien
ccagtatttaatctgacacatttgatcttcatt

SEQ ID NO: 810670 - DNA, 33 bp, Homo sapien
ccagtatttaatctgagacatttgatcttcatt

SEQ ID NO: 810671 - DNA, 33 bp, Homo sapien
gatccaccaataattccacattgtctgtatcat

SEQ ID NO: 810672 - DNA, 33 bp, Homo sapien
gatccaccaataattctacattgtctgtatcat

SEQ ID NO: 810673 - DNA, 33 bp, Homo sapien
caaatgactttaaatgacattgacttaatttct

SEQ ID NO: 810674 - DNA, 33 bp, Homo sapien
caaatgactttaaatggcattgacttaatttct

SEQ ID NO: 810675 - DNA, 33 bp, Homo sapien
tggatttttgaaaatacggtatgcctacataat

SEQ ID NO: 810676 - DNA, 33 bp, Homo sapien
tggatttttgaaaatatggtatgcctacataat

SEQ ID NO: 810677 - DNA, 33 bp, Homo sapien
ctctaattgcatgatacagggtttaatctttaa

SEQ ID NO: 810678 - DNA, 33 bp, Homo sapien
ctctaattgcatgatagagggtttaatctttaa

SEQ ID NO: 810679 - DNA, 33 bp, Homo sapien
aagaccttttgatgtcccaaatcatgcattgtg

SEQ ID NO: 810680 - DNA, 33 bp, Homo sapien
aagaccttttgatgtctcaaatcatgcattgtg

SEQ ID NO: 810681 - DNA, 33 bp, Homo sapien
aagaaatggacaagcaaaacaagccccaatatc

SEQ ID NO: 810682 - DNA, 33 bp, Homo sapien
aagaaatggacaagcagaacaagccccaatatc

SEQ ID NO: 810683 - DNA, 33 bp, Homo sapien
ctcccaatctaaaataactgtaaccatactctc

SEQ ID NO: 810684 - DNA, 33 bp, Homo sapien
ctcccaatctaaaatagctgtaaccatactctc

SEQ ID NO: 810685 - DNA, 33 bp, Homo sapien
cagcggacaacaaaggccaagccacctagagca

SEQ ID NO: 810686 - DNA, 33 bp, Homo sapien
cagcggacaacaaaggtcaagccacctagagca

SEQ ID NO: 810687 - DNA, 33 bp, Homo sapien
attacaaaggtgaccactaaccccacagaaata

SEQ ID NO: 810688 - DNA, 33 bp, Homo sapien
attacaaaggtgaccattaaccccacagaaata

SEQ ID NO: 810689 - DNA, 33 bp, Homo sapien
tagctgcctaaacttaccaaaggcaaaagggac

SEQ ID NO: 810690 - DNA, 33 bp, Homo sapien
tagctgcctaaacttatcaaaggcaaaagggac

SEQ ID NO: 810691 - DNA, 33 bp, Homo sapien
agaattttactttcaaagtgccttcaatagact

SEQ ID NO: 810692 - DNA, 33 bp, Homo sapien
agaattttactttcaatgtgccttcaatagact

SEQ ID NO: 810693 - DNA, 33 bp, Homo sapien
agctttgttcttttcaatcaggacttaatgtta

SEQ ID NO: 810694 - DNA, 33 bp, Homo sapien
agctttgttcttttcagtcaggacttaatgtta

SEQ ID NO: 810695 - DNA, 33 bp, Homo sapien
attgttttcagtgctacgccaattagcattatt

SEQ ID NO: 810696 - DNA, 33 bp, Homo sapien
attgttttcagtgctaggccaattagcattatt

SEQ ID NO: 810697 - DNA, 33 bp, Homo sapien
atcagagaagcttgcaaaggaagtaagagggcc

SEQ ID NO: 810698 - DNA, 33 bp, Homo sapien
atcagagaagcttgcacaggaagtaagagggcc

SEQ ID NO: 810699 - DNA, 33 bp, Homo sapien
taacccagtggctcaacttagcctctaatgcct

SEQ ID NO: 810700 - DNA, 33 bp, Homo sapien
taacccagtggctcaatttagcctctaatgcct

SEQ ID NO: 810701 - DNA, 33 bp, Homo sapien
tttcaaaacccaaatcaacaaaccagagaagcc

SEQ ID NO: 810702 - DNA, 33 bp, Homo sapien
tttcaaaacccaaatcgacaaaccagagaagcc

SEQ ID NO: 810703 - DNA, 33 bp, Homo sapien
cactggaaaatgagggccataagatggaagtcc

SEQ ID NO: 810704 - DNA, 33 bp, Homo sapien
cactggaaaatgagggtcataagatggaagtcc

SEQ ID NO: 810705 - DNA, 33 bp, Homo sapien
cttcatgtaagtttcacgtaagctggtgttatc

SEQ ID NO: 810706 - DNA, 33 bp, Homo sapien
cttcatgtaagtttcatgtaagctggtgttatc

SEQ ID NO: 810707 - DNA, 33 bp, Homo sapien
cactttcttaggtaaaaggaataatgtctgcca

SEQ ID NO: 810708 - DNA, 33 bp, Homo sapien
cactttcttaggtaaacggaataatgtctgcca

SEQ ID NO: 810709 - DNA, 33 bp, Homo sapien
taagccaagtatttcaactgtaatttcatctga

SEQ ID NO: 810710 - DNA, 33 bp, Homo sapien
taagccaagtatttcagctgtaatttcatctga

SEQ ID NO: 810711 - DNA, 33 bp, Homo sapien
ctggccactcctcagacgtagaaaggggtacaa

SEQ ID NO: 810712 - DNA, 33 bp, Homo sapien
ctggccactcctcagatgtagaaaggggtacaa

SEQ ID NO: 810713 - DNA, 33 bp, Homo sapien
ccaactcaaaaggaagaatgtcaatagtctgat

SEQ ID NO: 810714 - DNA, 33 bp, Homo sapien
ccaactcaaaaggaagtatgtcaatagtctgat

SEQ ID NO: 810715 - DNA, 33 bp, Homo sapien
agtgtgggcttgattaacagcttcatggtctat

SEQ ID NO: 810716 - DNA, 33 bp, Homo sapien
agtgtgggcttgattaccagcttcatggtctat

SEQ ID NO: 810717 - DNA, 33 bp, Homo sapien
ctctcacagactctcaacttcttaggcatatcg

SEQ ID NO: 810718 - DNA, 33 bp, Homo sapien
ctctcacagactctcaccttcttaggcatatcg

SEQ ID NO: 810719 - DNA, 33 bp, Homo sapien
aatgtacaaaagatagcatagcggctaaatatt

SEQ ID NO: 810720 - DNA, 33 bp, Homo sapien
aatgtacaaaagatagtatagcggctaaatatt

SEQ ID NO: 810721 - DNA, 33 bp, Homo sapien
gtttgaattattcccaataacgcaaatgtgtca

SEQ ID NO: 810722 - DNA, 33 bp, Homo sapien
gtttgaattattcccagtaacgcaaatgtgtca

SEQ ID NO: 810723 - DNA, 33 bp, Homo sapien
actgcatgaatgtctccaattctttggtttctg

SEQ ID NO: 810724 - DNA, 33 bp, Homo sapien
actgcatgaatgtctctaattctttggtttctg

SEQ ID NO: 810725 - DNA, 33 bp, Homo sapien
attattttcacttacaatccaatccttgtgacc

SEQ ID NO: 810726 - DNA, 33 bp, Homo sapien
attattttcacttacactccaatccttgtgacc

SEQ ID NO: 810727 - DNA, 33 bp, Homo sapien
tgacaaagatcaggtaagaaacatagagactta

SEQ ID NO: 810728 - DNA, 33 bp, Homo sapien
tgacaaagatcaggtaggaaacatagagactta

SEQ ID NO: 810729 - DNA, 33 bp, Homo sapien
aaatacaaattaaacacgactgggatgttgtgg

SEQ ID NO: 810730 - DNA, 33 bp, Homo sapien
aaatacaaattaaacatgactgggatgttgtgg

SEQ ID NO: 810731 - DNA, 33 bp, Homo sapien
gtgatatttggcacagcattcttatagttgtca

SEQ ID NO: 810732 - DNA, 33 bp, Homo sapien
gtgatatttggcacagtattcttatagttgtca

SEQ ID NO: 810733 - DNA, 33 bp, Homo sapien
tgcctgtatttgcagtaacctaccattaaatac

SEQ ID NO: 810734 - DNA, 33 bp, Homo sapien
tgcctgtatttgcagttacctaccattaaatac

SEQ ID NO: 810735 - DNA, 33 bp, Homo sapien
ttgcttggcaaaaatgcagattcattagctcac

SEQ ID NO: 810736 - DNA, 33 bp, Homo sapien
ttgcttggcaaaaatgtagattcattagctcac

SEQ ID NO: 810737 - DNA, 33 bp, Homo sapien
tattggtaaccaaaaccgatcttcacgtcctga

SEQ ID NO: 810738 - DNA, 33 bp, Homo sapien
tattggtaaccaaaactgatcttcacgtcctga

SEQ ID NO: 810739 - DNA, 33 bp, Homo sapien
cacttcagggaaaaaacacttggcatagtgtaa

SEQ ID NO: 810740 - DNA, 33 bp, Homo sapien
cacttcagggaaaaaatacttggcatagtgtaa

SEQ ID NO: 810741 - DNA, 33 bp, Homo sapien
ccactgcacctggccaacagctaacttttgcct

SEQ ID NO: 810742 - DNA, 33 bp, Homo sapien
ccactgcacctggccagcagctaacttttgcct

SEQ ID NO: 810743 - DNA, 33 bp, Homo sapien
aatagtaacagcaaagcagaactaggataattt

SEQ ID NO: 810744 - DNA, 33 bp, Homo sapien
aatagtaacagcaaagtagaactaggataattt

SEQ ID NO: 810745 - DNA, 33 bp, Homo sapien
tatttggaaaagtgaacgtacgcacatacataa

SEQ ID NO: 810746 - DNA, 33 bp, Homo sapien
tatttggaaaagtgaatgtacgcacatacataa

SEQ ID NO: 810747 - DNA, 33 bp, Homo sapien
ccctttctccttttccactcttttctcctctct

SEQ ID NO: 810748 - DNA, 33 bp, Homo sapien
ccctttctccttttccgctcttttctcctctct

SEQ ID NO: 810749 - DNA, 33 bp, Homo sapien
atgttcttttgtcacaatctgcattccatattt

SEQ ID NO: 810750 - DNA, 33 bp, Homo sapien
atgttcttttgtcacagtctgcattccatattt

SEQ ID NO: 810751 - DNA, 33 bp, Homo sapien
tgcctgttggtgcaacacttgccacctttttca

SEQ ID NO: 810752 - DNA, 33 bp, Homo sapien
tgcctgttggtgcaacgcttgccacctttttca

SEQ ID NO: 810753 - DNA, 33 bp, Homo sapien
gtaatatattatctggaaaatgatacaagtgcc

SEQ ID NO: 810754 - DNA, 33 bp, Homo sapien
gtaatatattatctggcaaatgatacaagtgcc

SEQ ID NO: 810755 - DNA, 33 bp, Homo sapien
tggttataggatctcaaagattaagtgctttcc

SEQ ID NO: 810756 - DNA, 33 bp, Homo sapien
tggttataggatctcagagattaagtgctttcc

SEQ ID NO: 810757 - DNA, 33 bp, Homo sapien
taaaatgaatctctgccctatcatgtagattaa

SEQ ID NO: 810758 - DNA, 33 bp, Homo sapien
taaaatgaatctctgctctatcatgtagattaa

SEQ ID NO: 810759 - DNA, 33 bp, Homo sapien
ttttttcgactgcctcaaacattctactctcaa

SEQ ID NO: 810760 - DNA, 33 bp, Homo sapien
ttttttcgactgcctcgaacattctactctcaa

SEQ ID NO: 810761 - DNA, 33 bp, Homo sapien
cactacaagggatagacgaatctgtagtgttca

SEQ ID NO: 810762 - DNA, 33 bp, Homo sapien
cactacaagggatagatgaatctgtagtgttca

SEQ ID NO: 810763 - DNA, 33 bp, Homo sapien
ttgttgttactacaaccggcaggaaccatgttt

SEQ ID NO: 810764 - DNA, 33 bp, Homo sapien
ttgttgttactacaactggcaggaaccatgttt

SEQ ID NO: 810765 - DNA, 33 bp, Homo sapien
aataagagatttgagaacccttccaaagagtct

SEQ ID NO: 810766 - DNA, 33 bp, Homo sapien
aataagagatttgagaccccttccaaagagtct

SEQ ID NO: 810767 - DNA, 33 bp, Homo sapien
tggaataggatgtaacaagattaactcacaata

SEQ ID NO: 810768 - DNA, 33 bp, Homo sapien
tggaataggatgtaacgagattaactcacaata

SEQ ID NO: 810769 - DNA, 33 bp, Homo sapien
tataacattcaattaaatgctgggagccagttg

SEQ ID NO: 810770 - DNA, 33 bp, Homo sapien
tataacattcaattaagtgctgggagccagttg

SEQ ID NO: 810771 - DNA, 33 bp, Homo sapien
catcatacttttcaaaggttgttgttgcaaata

SEQ ID NO: 810772 - DNA, 33 bp, Homo sapien
catcatacttttcaaatgttgttgttgcaaata

SEQ ID NO: 810773 - DNA, 33 bp, Homo sapien
acaaattcctcatttaacaaacatatatgtgtg

SEQ ID NO: 810774 - DNA, 33 bp, Homo sapien
acaaattcctcatttagcaaacatatatgtgtg

SEQ ID NO: 810775 - DNA, 33 bp, Homo sapien
aaaactcttcagaaaaccagtatgaatctagtt

SEQ ID NO: 810776 - DNA, 33 bp, Homo sapien
aaaactcttcagaaaatcagtatgaatctagtt

SEQ ID NO: 810777 - DNA, 33 bp, Homo sapien
tgggtactatgctctgaatctgggtgacagaat

SEQ ID NO: 810778 - DNA, 33 bp, Homo sapien
tgggtactatgctctggatctgggtgacagaat

SEQ ID NO: 810779 - DNA, 33 bp, Homo sapien
ccgaatagagaaccaaaaaataagactgtacac

SEQ ID NO: 810780 - DNA, 33 bp, Homo sapien
ccgaatagagaaccaagaaataagactgtacac

SEQ ID NO: 810781 - DNA, 33 bp, Homo sapien
attatttatgtgcttcaaatattgagaggttta

SEQ ID NO: 810782 - DNA, 33 bp, Homo sapien
attatttatgtgcttcgaatattgagaggttta

SEQ ID NO: 810783 - DNA, 33 bp, Homo sapien
tgtaatcagtagtttacagttggtgacttcatg

SEQ ID NO: 810784 - DNA, 33 bp, Homo sapien
tgtaatcagtagtttatagttggtgacttcatg

SEQ ID NO: 810785 - DNA, 33 bp, Homo sapien
cttctatctggcttcaaagtctgccctctttct

SEQ ID NO: 810786 - DNA, 33 bp, Homo sapien
cttctatctggcttcacagtctgccctctttct

SEQ ID NO: 810787 - DNA, 33 bp, Homo sapien
ctgcctttcacctccacgattgctgccacattt

SEQ ID NO: 810788 - DNA, 33 bp, Homo sapien
ctgcctttcacctccatgattgctgccacattt

SEQ ID NO: 810789 - DNA, 33 bp, Homo sapien
aaatactgactaatgggaattttgaacagatat

SEQ ID NO: 810790 - DNA, 33 bp, Homo sapien
aaatactgactaatggtaattttgaacagatat

SEQ ID NO: 810791 - DNA, 33 bp, Homo sapien
tattataatgaatgaacacaagtggataaaaat

SEQ ID NO: 810792 - DNA, 33 bp, Homo sapien
tattataatgaatgaatacaagtggataaaaat

SEQ ID NO: 810793 - DNA, 33 bp, Homo sapien
ctaggtgttctggttacgttcatcagttaattt

SEQ ID NO: 810794 - DNA, 33 bp, Homo sapien
ctaggtgttctggttatgttcatcagttaattt

SEQ ID NO: 810795 - DNA, 33 bp, Homo sapien
gtcttattgaaagaaaacctgacttgatgtgaa

SEQ ID NO: 810796 - DNA, 33 bp, Homo sapien
gtcttattgaaagaaagcctgacttgatgtgaa

SEQ ID NO: 810797 - DNA, 33 bp, Homo sapien
ggattcctgataaactcacccagcaggattctt

SEQ ID NO: 810798 - DNA, 33 bp, Homo sapien
ggattcctgataaactgacccagcaggattctt

SEQ ID NO: 810799 - DNA, 33 bp, Homo sapien
agactggtatatatgcggactttttaccctagt

SEQ ID NO: 810800 - DNA, 33 bp, Homo sapien
agactggtatatatgctgactttttaccctagt

SEQ ID NO: 810801 - DNA, 33 bp, Homo sapien
taattcgacataaaacagttatggtgctcttaa

SEQ ID NO: 810802 - DNA, 33 bp, Homo sapien
taattcgacataaaacggttatggtgctcttaa

SEQ ID NO: 810803 - DNA, 33 bp, Homo sapien
tacttctatctctttccatcttagcagacagtg

SEQ ID NO: 810804 - DNA, 33 bp, Homo sapien
tacttctatctctttctatcttagcagacagtg

SEQ ID NO: 810805 - DNA, 33 bp, Homo sapien
taacctgcatgaatcactaatatttcttcaatt

SEQ ID NO: 810806 - DNA, 33 bp, Homo sapien
taacctgcatgaatcattaatatttcttcaatt

SEQ ID NO: 810807 - DNA, 33 bp, Homo sapien
ctcccaagccaaatccaactgaataatatttat

SEQ ID NO: 810808 - DNA, 33 bp, Homo sapien
ctcccaagccaaatccgactgaataatatttat

SEQ ID NO: 810809 - DNA, 33 bp, Homo sapien
gacttaacaaattgaccgaattctgaatgcatc

SEQ ID NO: 810810 - DNA, 33 bp, Homo sapien
gacttaacaaattgactgaattctgaatgcatc

SEQ ID NO: 810811 - DNA, 33 bp, Homo sapien
ctagagatcggactcactcctacaaccttgaaa

SEQ ID NO: 810812 - DNA, 33 bp, Homo sapien
ctagagatcggactcattcctacaaccttgaaa

SEQ ID NO: 810813 - DNA, 33 bp, Homo sapien
ttattgagagatacaaagtttctgtgagagatg

SEQ ID NO: 810814 - DNA, 33 bp, Homo sapien
ttattgagagatacaaggtttctgtgagagatg

SEQ ID NO: 810815 - DNA, 33 bp, Homo sapien
agctggttagtgacaacgtctagatttctattt

SEQ ID NO: 810816 - DNA, 33 bp, Homo sapien
agctggttagtgacaatgtctagatttctattt

SEQ ID NO: 810817 - DNA, 33 bp, Homo sapien
ggacagttggtatcagaaaattctaaatgacag

SEQ ID NO: 810818 - DNA, 33 bp, Homo sapien
ggacagttggtatcagcaaattctaaatgacag

SEQ ID NO: 810819 - DNA, 33 bp, Homo sapien
gccttgaaatattggccaagagggtacataatc

SEQ ID NO: 810820 - DNA, 33 bp, Homo sapien
gccttgaaatattggctaagagggtacataatc

SEQ ID NO: 810821 - DNA, 33 bp, Homo sapien
ttcttgagctggctgccaaaatgttgggagaca

SEQ ID NO: 810822 - DNA, 33 bp, Homo sapien
ttcttgagctggctgctaaaatgttgggagaca

SEQ ID NO: 810823 - DNA, 33 bp, Homo sapien
attaatttgagttttgaatttcttcttttgata

SEQ ID NO: 810824 - DNA, 33 bp, Homo sapien
attaatttgagttttggatttcttcttttgata

SEQ ID NO: 810825 - DNA, 33 bp, Homo sapien
actagctaaagtttcaaaattatgtaaatgagc

SEQ ID NO: 810826 - DNA, 33 bp, Homo sapien
actagctaaagtttcagaattatgtaaatgagc

SEQ ID NO: 810827 - DNA, 33 bp, Homo sapien
cctgttagttgctgaaataggggcttaatgctt

SEQ ID NO: 810828 - DNA, 33 bp, Homo sapien
cctgttagttgctgaagtaggggcttaatgctt

SEQ ID NO: 810829 - DNA, 33 bp, Homo sapien
acaaagacttgcccacaaatagtcacagcaact

SEQ ID NO: 810830 - DNA, 33 bp, Homo sapien
acaaagacttgcccaccaatagtcacagcaact

SEQ ID NO: 810831 - DNA, 33 bp, Homo sapien
tggaggaagtattgccagaaggattgagtcaga

SEQ ID NO: 810832 - DNA, 33 bp, Homo sapien
tggaggaagtattgccggaaggattgagtcaga

SEQ ID NO: 810833 - DNA, 33 bp, Homo sapien
ctacacagagattagacgccagcctcagctact

SEQ ID NO: 810834 - DNA, 33 bp, Homo sapien
ctacacagagattagatgccagcctcagctact

SEQ ID NO: 810835 - DNA, 33 bp, Homo sapien
caggcaatggttcaagaatgggactttgtgaat

SEQ ID NO: 810836 - DNA, 33 bp, Homo sapien
caggcaatggttcaaggatgggactttgtgaat

SEQ ID NO: 810837 - DNA, 33 bp, Homo sapien
ggctgtgtgagatcaagggtgcccactttctct

SEQ ID NO: 810838 - DNA, 33 bp, Homo sapien
ggctgtgtgagatcaatggtgcccactttctct

SEQ ID NO: 810839 - DNA, 33 bp, Homo sapien
cttgcttatattcatcgaaaagaggtccaaata

SEQ ID NO: 810840 - DNA, 33 bp, Homo sapien
cttgcttatattcatctaaaagaggtccaaata

SEQ ID NO: 810841 - DNA, 33 bp, Homo sapien
gaactagaagtcatccgctgaatatcgacccta

SEQ ID NO: 810842 - DNA, 33 bp, Homo sapien
gaactagaagtcatcctctgaatatcgacccta

SEQ ID NO: 810843 - DNA, 33 bp, Homo sapien
agaaaattgaggaataataatgttgggtaactc

SEQ ID NO: 810844 - DNA, 33 bp, Homo sapien
agaaaattgaggaatagtaatgttgggtaactc

SEQ ID NO: 810845 - DNA, 33 bp, Homo sapien
cttaggcattttcctcacggtgaacaattatta

SEQ ID NO: 810846 - DNA, 33 bp, Homo sapien
cttaggcattttcctctcggtgaacaattatta

SEQ ID NO: 810847 - DNA, 33 bp, Homo sapien
acctcataatgacaaactgttaagctaattatt

SEQ ID NO: 810848 - DNA, 33 bp, Homo sapien
acctcataatgacaaattgttaagctaattatt

SEQ ID NO: 810849 - DNA, 33 bp, Homo sapien
aaaatcatgatattaacgtcttgtaaaggtttc

SEQ ID NO: 810850 - DNA, 33 bp, Homo sapien
aaaatcatgatattaatgtcttgtaaaggtttc

SEQ ID NO: 810851 - DNA, 33 bp, Homo sapien
aaggaaacgttattcacctcctgcaatatctta

SEQ ID NO: 810852 - DNA, 33 bp, Homo sapien
aaggaaacgttattcatctcctgcaatatctta

SEQ ID NO: 810853 - DNA, 33 bp, Homo sapien
tgctacacttccagcaacgccatgccactttac

SEQ ID NO: 810854 - DNA, 33 bp, Homo sapien
tgctacacttccagcagcgccatgccactttac

SEQ ID NO: 810855 - DNA, 33 bp, Homo sapien
aacttggtgattagcacgagtgtaggctacggt

SEQ ID NO: 810856 - DNA, 33 bp, Homo sapien
aacttggtgattagcatgagtgtaggctacggt

SEQ ID NO: 810857 - DNA, 33 bp, Homo sapien
tcaccagtaaatactaactctttctagatggtt

SEQ ID NO: 810858 - DNA, 33 bp, Homo sapien
tcaccagtaaatactacctctttctagatggtt

SEQ ID NO: 810859 - DNA, 33 bp, Homo sapien
tgaatgcttttctatgacaataaatgtgcatct

SEQ ID NO: 810860 - DNA, 33 bp, Homo sapien
tgaatgcttttctatgtcaataaatgtgcatct

SEQ ID NO: 810861 - DNA, 33 bp, Homo sapien
aaaagcacctttgtgaaaaagaccaggtgtgga

SEQ ID NO: 810862 - DNA, 33 bp, Homo sapien
aaaagcacctttgtgagaaagaccaggtgtgga

SEQ ID NO: 810863 - DNA, 33 bp, Homo sapien
aaggcttctggttagactaatgatatctaggtg

SEQ ID NO: 810864 - DNA, 33 bp, Homo sapien
aaggcttctggttagattaatgatatctaggtg

SEQ ID NO: 810865 - DNA, 33 bp, Homo sapien
tatgttctccaacacaaagtatcattagaagat

SEQ ID NO: 810866 - DNA, 33 bp, Homo sapien
tatgttctccaacacagagtatcattagaagat

SEQ ID NO: 810867 - DNA, 33 bp, Homo sapien
ttgtacatgtgcaaaacaatgttcaaatatgtt

SEQ ID NO: 810868 - DNA, 33 bp, Homo sapien
ttgtacatgtgcaaaagaatgttcaaatatgtt

SEQ ID NO: 810869 - DNA, 33 bp, Homo sapien
ggagctcaggtgataacgcaagcaatggggagt

SEQ ID NO: 810870 - DNA, 33 bp, Homo sapien
ggagctcaggtgataatgcaagcaatggggagt

SEQ ID NO: 810871 - DNA, 33 bp, Homo sapien
tagctgcgtaattggcaccattaaaccatcttt

SEQ ID NO: 810872 - DNA, 33 bp, Homo sapien
tagctgcgtaattggcgccattaaaccatcttt

SEQ ID NO: 810873 - DNA, 33 bp, Homo sapien; identical to SEQ ID NO: 810871

SEQ ID NO: 810874 - DNA, 33 bp, Homo sapien; identical to SEQ ID NO: 810872

SEQ ID NO: 810875 - DNA, 33 bp, Homo sapien
cgacctgttgaggagccgaaaagaacaaaaagg

SEQ ID NO: 810876 - DNA, 33 bp, Homo sapien
cgacctgttgaggagctgaaaagaacaaaaagg

SEQ ID NO: 810877 - DNA, 33 bp, Homo sapien
ttttctgttttatatacaaccctgactagcctc

SEQ ID NO: 810878 - DNA, 33 bp, Homo sapien
ttttctgttttatatataaccctgactagcctc

SEQ ID NO: 810879 - DNA, 33 bp, Homo sapien
tgactgaaaatgtccaatagattgatacagcat

SEQ ID NO: 810880 - DNA, 33 bp, Homo sapien
tgactgaaaatgtccagtagattgatacagcat

SEQ ID NO: 810881 - DNA, 33 bp, Homo sapien
gaagagcagaccgtaacgaagagactttaatga

SEQ ID NO: 810882 - DNA, 33 bp, Homo sapien
gaagagcagaccgtaatgaagagactttaatga

SEQ ID NO: 810883 - DNA, 33 bp, Homo sapien
catgataacctggacaccgattggtttttctga

SEQ ID NO: 810884 - DNA, 33 bp, Homo sapien
catgataacctggacatcgattggtttttctga

SEQ ID NO: 810885 - DNA, 33 bp, Homo sapien
ggagagaggtaacacaccaatagacaggtttcc

SEQ ID NO: 810886 - DNA, 33 bp, Homo sapien
ggagagaggtaacacatcaatagacaggtttcc

SEQ ID NO: 810887 - DNA, 33 bp, Homo sapien
ccctgtagctccaagaagcaagagtaagggttt

SEQ ID NO: 810888 - DNA, 33 bp, Homo sapien
ccctgtagctccaagaggcaagagtaagggttt

SEQ ID NO: 810889 - DNA, 33 bp, Homo sapien
ctggaacccatgagtaccgcaaatgttgcagat

SEQ ID NO: 810890 - DNA, 33 bp, Homo sapien
ctggaacccatgagtatcgcaaatgttgcagat

SEQ ID NO: 810891 - DNA, 33 bp, Homo sapien
ataaaggatagataaaaaagtgaagcaaactaa

SEQ ID NO: 810892 - DNA, 33 bp, Homo sapien
ataaaggatagataaagaagtgaagcaaactaa

SEQ ID NO: 810893 - DNA, 33 bp, Homo sapien
cagaagcctatgggaacagagggatgaacccca

SEQ ID NO: 810894 - DNA, 33 bp, Homo sapien
cagaagcctatgggaagagagggatgaacccca

SEQ ID NO: 810895 - DNA, 33 bp, Homo sapien
cagagattctataaggaagacagaaaatacttt

SEQ ID NO: 810896 - DNA, 33 bp, Homo sapien
cagagattctataagggagacagaaaatacttt

SEQ ID NO: 810897 - DNA, 33 bp, Homo sapien
ccccatgtgaggaagaaccaaaagattgccttg

SEQ ID NO: 810898 - DNA, 33 bp, Homo sapien
ccccatgtgaggaagagccaaaagattgccttg

SEQ ID NO: 810899 - DNA, 33 bp, Homo sapien
tgtgtgctaaatttaccaagaaagggcaagtat

SEQ ID NO: 810900 - DNA, 33 bp, Homo sapien
tgtgtgctaaatttacgaagaaagggcaagtat

SEQ ID NO: 810901 - DNA, 33 bp, Homo sapien
catgtatatgcgtatagcaagtatgtgtgctaa

SEQ ID NO: 810902 - DNA, 33 bp, Homo sapien
catgtatatgcgtatatcaagtatgtgtgctaa

SEQ ID NO: 810903 - DNA, 33 bp, Homo sapien
aacttttatcaaaacaaagcaaatgctcattta

SEQ ID NO: 810904 - DNA, 33 bp, Homo sapien
aacttttatcaaaacacagcaaatgctcattta

SEQ ID NO: 810905 - DNA, 33 bp, Homo sapien
tgctcatttattcacacattgtgtcacgctttc

SEQ ID NO: 810906 - DNA, 33 bp, Homo sapien
tgctcatttattcacatattgtgtcacgctttc

SEQ ID NO: 810907 - DNA, 33 bp, Homo sapien
tatttttttcagtttaaggcacatttttgagac

SEQ ID NO: 810908 - DNA, 33 bp, Homo sapien
tatttttttcagtttagggcacatttttgagac

SEQ ID NO: 810909 - DNA, 33 bp, Homo sapien
cagcagattgttccttcaaatagctcaactcca

SEQ ID NO: 810910 - DNA, 33 bp, Homo sapien
cagcagattgttcctttaaatagctcaactcca

SEQ ID NO: 810911 - DNA, 33 bp, Homo sapien
tttggccttagcgacgcactatttctaaacctg

SEQ ID NO: 810912 - DNA, 33 bp, Homo sapien
tttggccttagcgacggactatttctaaacctg

SEQ ID NO: 810913 - DNA, 33 bp, Homo sapien
gaaactaatgcattaaccaagaaacatcatgta

SEQ ID NO: 810914 - DNA, 33 bp, Homo sapien
gaaactaatgcattaagcaagaaacatcatgta

SEQ ID NO: 810915 - DNA, 33 bp, Homo sapien
gacgctatgactccaagcagctttttccatagg

SEQ ID NO: 810916 - DNA, 33 bp, Homo sapien
gacgctatgactccaatcagctttttccatagg

SEQ ID NO: 810917 - DNA, 33 bp, Homo sapien
aaaaaaacgaatagccaaaacaatactgagtaa

SEQ ID NO: 810918 - DNA, 33 bp, Homo sapien
aaaaaaacgaatagccgaaacaatactgagtaa

SEQ ID NO: 810919 - DNA, 33 bp, Homo sapien
aaataacagatcctgacaagactacagagaaaa

SEQ ID NO: 810920 - DNA, 33 bp, Homo sapien
aaataacagatcctgagaagactacagagaaaa

SEQ ID NO: 810921 - DNA, 33 bp, Homo sapien
gtgtaatttgaagcaaactttcaaattgcattg

SEQ ID NO: 810922 - DNA, 33 bp, Homo sapien
gtgtaatttgaagcaacctttcaaattgcattg

SEQ ID NO: 810923 - DNA, 33 bp, Homo sapien
ttcacaagtggaaaagcatattcgcagttctat

SEQ ID NO: 810924 - DNA, 33 bp, Homo sapien
ttcacaagtggaaaaggatattcgcagttctat

SEQ ID NO: 810925 - DNA, 33 bp, Homo sapien
ctattatagtaacggccgcaatagttctgtcac

SEQ ID NO: 810926 - DNA, 33 bp, Homo sapien
ctattatagtaacggctgcaatagttctgtcac

SEQ ID NO: 810927 - DNA, 33 bp, Homo sapien
agtatggttcagcacaacgttattactgatcct

SEQ ID NO: 810928 - DNA, 33 bp, Homo sapien
agtatggttcagcacagcgttattactgatcct

SEQ ID NO: 810929 - DNA, 33 bp, Homo sapien
cactgagcaaaattacaaaaatgtagcttcaaa

SEQ ID NO: 810930 - DNA, 33 bp, Homo sapien
cactgagcaaaattacgaaaatgtagcttcaaa

SEQ ID NO: 810931 - DNA, 33 bp, Homo sapien
tccttttttatgatgcactgtgttagataccga

SEQ ID NO: 810932 - DNA, 33 bp, Homo sapien
tccttttttatgatgcgctgtgttagataccga

SEQ ID NO: 810933 - DNA, 33 bp, Homo sapien
gcctgtcttcagtgcacggaagaaatatttgtt

SEQ ID NO: 810934 - DNA, 33 bp, Homo sapien
gcctgtcttcagtgcatggaagaaatatttgtt

SEQ ID NO: 810935 - DNA, 33 bp, Homo sapien
gattagaatgggttaaatgtatgaatcaaggtt

SEQ ID NO: 810936 - DNA, 33 bp, Homo sapien
gattagaatgggttaagtgtatgaatcaaggtt

SEQ ID NO: 810937 - DNA, 33 bp, Homo sapien
ggctatgcttccatacagaacaacatagctcta

SEQ ID NO: 810938 - DNA, 33 bp, Homo sapien
ggctatgcttccatacggaacaacatagctcta

SEQ ID NO: 810939 - DNA, 33 bp, Homo sapien
tcgaatgttggctttcaaccaagagtatgtcag

SEQ ID NO: 810940 - DNA, 33 bp, Homo sapien
tcgaatgttggctttcgaccaagagtatgtcag

SEQ ID NO: 810941 - DNA, 33 bp, Homo sapien
aggcaaagctaatttacgatgatgtaagtgaga

SEQ ID NO: 810942 - DNA, 33 bp, Homo sapien
aggcaaagctaatttatgatgatgtaagtgaga

SEQ ID NO: 810943 - DNA, 33 bp, Homo sapien
tagctcatatcttcacaactgcattacctgcta

SEQ ID NO: 810944 - DNA, 33 bp, Homo sapien
tagctcatatcttcaccactgcattacctgcta

SEQ ID NO: 810945 - DNA, 33 bp, Homo sapien
acagtcactatgttcacggaaagagaggaaggc

SEQ ID NO: 810946 - DNA, 33 bp, Homo sapien
acagtcactatgttcatggaaagagaggaaggc

SEQ ID NO: 810947 - DNA, 33 bp, Homo sapien
ttgtccaggatataaccgcagccacagggagct

SEQ ID NO: 810948 - DNA, 33 bp, Homo sapien
ttgtccaggatataactgcagccacagggagct

SEQ ID NO: 810949 - DNA, 33 bp, Homo sapien
ggagttttggcttaaacactgcagactctcttt

SEQ ID NO: 810950 - DNA, 33 bp, Homo sapien
ggagttttggcttaaatactgcagactctcttt

SEQ ID NO: 810951 - DNA, 33 bp, Homo sapien
ttaaaaaaagaaaaaacctgtgtgtgagatatc

SEQ ID NO: 810952 - DNA, 33 bp, Homo sapien
ttaaaaaaagaaaaaatctgtgtgtgagatatc

SEQ ID NO: 810953 - DNA, 33 bp, Homo sapien
cagacttactgctctcaaaacctgtagaattaa

SEQ ID NO: 810954 - DNA, 33 bp, Homo sapien
cagacttactgctctctaaacctgtagaattaa

SEQ ID NO: 810955 - DNA, 33 bp, Homo sapien
tcagtcgtatctatagaagcaagacaaattgta

SEQ ID NO: 810956 - DNA, 33 bp, Homo sapien
tcagtcgtatctataggagcaagacaaattgta

SEQ ID NO: 810957 - DNA, 33 bp, Homo sapien
gctgtgatcgatctaccgtacttcaccctgggc

SEQ ID NO: 810958 - DNA, 33 bp, Homo sapien
gctgtgatcgatctactgtacttcaccctgggc

SEQ ID NO: 810959 - DNA, 33 bp, Homo sapien
gacagcaaccgaattcccagttcttttttttga

SEQ ID NO: 810960 - DNA, 33 bp, Homo sapien
gacagcaaccgaattctcagttcttttttttga

SEQ ID NO: 810961 - DNA, 33 bp, Homo sapien
aaattgaaattgttcaataatatgtagcatgta

SEQ ID NO: 810962 - DNA, 33 bp, Homo sapien
aaattgaaattgttcagtaatatgtagcatgta

SEQ ID NO: 810963 - DNA, 33 bp, Homo sapien
gttgtagcatatgtcgaatttttttaaggctga

SEQ ID NO: 810964 - DNA, 33 bp, Homo sapien
gttgtagcatatgtcggatttttttaaggctga

SEQ ID NO: 810965 - DNA, 33 bp, Homo sapien
tctagcaaggagttcaaaattgtttgccctatt

SEQ ID NO: 810966 - DNA, 33 bp, Homo sapien
tctagcaaggagttcagaattgtttgccctatt

SEQ ID NO: 810967 - DNA, 33 bp, Homo sapien
ttgaggaaaaaaatccaagtagtttagaagagt

SEQ ID NO: 810968 - DNA, 33 bp, Homo sapien
ttgaggaaaaaaatccgagtagtttagaagagt

SEQ ID NO: 810969 - DNA, 33 bp, Homo sapien
gaaatgttttgaatgaagaaatgaagtggagca

SEQ ID NO: 810970 - DNA, 33 bp, Homo sapien
gaaatgttttgaatgaggaaatgaagtggagca

SEQ ID NO: 810971 - DNA, 33 bp, Homo sapien
tacctcatcatgtttaccctgcagcccaatctt

SEQ ID NO: 810972 - DNA, 33 bp, Homo sapien
tacctcatcatgtttatcctgcagcccaatctt

SEQ ID NO: 810973 - DNA, 33 bp, Homo sapien
ctttctggggacaaaacggaaagctttatcttt

SEQ ID NO: 810974 - DNA, 33 bp, Homo sapien
ctttctggggacaaaatggaaagctttatcttt

SEQ ID NO: 810975 - DNA, 33 bp, Homo sapien
aatcacaagctattgcaaagtttcaggtacact

SEQ ID NO: 810976 - DNA, 33 bp, Homo sapien
aatcacaagctattgccaagtttcaggtacact

SEQ ID NO: 810977 - DNA, 33 bp, Homo sapien
gtcataacaacataaacaagtgctaagaaagca

SEQ ID NO: 810978 - DNA, 33 bp, Homo sapien
gtcataacaacataaagaagtgctaagaaagca

SEQ ID NO: 810979 - DNA, 33 bp, Homo sapien
tctaaagtagtgcaacccatgtaagagagagta

SEQ ID NO: 810980 - DNA, 33 bp, Homo sapien
tctaaagtagtgcaactcatgtaagagagagta

SEQ ID NO: 810981 - DNA, 33 bp, Homo sapien
tgcttgtatgtttaaaagcatcataaaaaagaa

SEQ ID NO: 810982 - DNA, 33 bp, Homo sapien
tgcttgtatgtttaaaggcatcataaaaaagaa

SEQ ID NO: 810983 - DNA, 33 bp, Homo sapien
taagcatcagctcttacggtattaaaaatggaa

SEQ ID NO: 810984 - DNA, 33 bp, Homo sapien
taagcatcagctcttatggtattaaaaatggaa

SEQ ID NO: 810985 - DNA, 33 bp, Homo sapien
tgttatttagtttcccggaatttgtttcaccgg

SEQ ID NO: 810986 - DNA, 33 bp, Homo sapien
tgttatttagtttccctgaatttgtttcaccgg

SEQ ID NO: 810987 - DNA, 33 bp, Homo sapien
cactgtcttgtgtagacggctctggttgggaat

SEQ ID NO: 810988 - DNA, 33 bp, Homo sapien
cactgtcttgtgtagatggctctggttgggaat

SEQ ID NO: 810989 - DNA, 33 bp, Homo sapien
agctaccaggccctgaaaaattgagctaaactg

SEQ ID NO: 810990 - DNA, 33 bp, Homo sapien
agctaccaggccctgataaattgagctaaactg

SEQ ID NO: 810991 - DNA, 33 bp, Homo sapien
aaaacaccttgtaaaacgcaacatacggccagt

SEQ ID NO: 810992 - DNA, 33 bp, Homo sapien
aaaacaccttgtaaaaggcaacatacggccagt

SEQ ID NO: 810993 - DNA, 33 bp, Homo sapien
aatgtacttctgaaaaagtgtcagatttttatt

SEQ ID NO: 810994 - DNA, 33 bp, Homo sapien
aatgtacttctgaaaaggtgtcagatttttatt

SEQ ID NO: 810995 - DNA, 33 bp, Homo sapien
caaagtactcagtacacggcaaatgctctatcg

SEQ ID NO: 810996 - DNA, 33 bp, Homo sapien
caaagtactcagtacatggcaaatgctctatcg

SEQ ID NO: 810997 - DNA, 33 bp, Homo sapien
actatttcaagctgtggatatatcacaatctac

SEQ ID NO: 810998 - DNA, 33 bp, Homo sapien
actatttcaagctgtgtatatatcacaatctac

SEQ ID NO: 810999 - DNA, 33 bp, Homo sapien
aaaatggaaatgatgccatctatttaatcctta

SEQ ID NO: 811000 - DNA, 33 bp, Homo sapien
aaaatggaaatgatgctatctatttaatcctta

SEQ ID NO: 811001 - DNA, 33 bp, Homo sapien
taaaactccatttgaaaaaaacaatcattctcc

SEQ ID NO: 811002 - DNA, 33 bp, Homo sapien
taaaactccatttgaagaaaacaatcattctcc

SEQ ID NO: 811003 - DNA, 33 bp, Homo sapien
ggaatgccttataagacaggattttggttacta

SEQ ID NO: 811004 - DNA, 33 bp, Homo sapien
ggaatgccttataagataggattttggttacta

SEQ ID NO: 811005 - DNA, 33 bp, Homo sapien
taaccaggtcagtacaaatattgccagtatacc

SEQ ID NO: 811006 - DNA, 33 bp, Homo sapien
taaccaggtcagtacacatattgccagtatacc

SEQ ID NO: 811007 - DNA, 33 bp, Homo sapien
gttaactattctttcaataggcagtccttgttt

SEQ ID NO: 811008 - DNA, 33 bp, Homo sapien
gttaactattctttcagtaggcagtccttgttt

SEQ ID NO: 811009 - DNA, 33 bp, Homo sapien
gatttgttgattattacgatattccaggcacag

SEQ ID NO: 811010 - DNA, 33 bp, Homo sapien
gatttgttgattattatgatattccaggcacag

SEQ ID NO: 811011 - DNA, 33 bp, Homo sapien
aagcaatatagaagcaagctatcaggactctga

SEQ ID NO: 811012 - DNA, 33 bp, Homo sapien
aagcaatatagaagcaggctatcaggactctga

SEQ ID NO: 811013 - DNA, 33 bp, Homo sapien
accaaaatggatgagactcatgtaatccacctg

SEQ ID NO: 811014 - DNA, 33 bp, Homo sapien
accaaaatggatgagagtcatgtaatccacctg

SEQ ID NO: 811015 - DNA, 33 bp, Homo sapien
caagactcaccaactacctgaaggactcagttt

SEQ ID NO: 811016 - DNA, 33 bp, Homo sapien
caagactcaccaactagctgaaggactcagttt

SEQ ID NO: 811017 - DNA, 33 bp, Homo sapien
aggtcagccctgcccaaattgcaaaagtgttaa

SEQ ID NO: 811018 - DNA, 33 bp, Homo sapien
aggtcagccctgcccacattgcaaaagtgttaa

SEQ ID NO: 811019 - DNA, 33 bp, Homo sapien
catttgcagctctccaactatgtaaaacgcaac

SEQ ID NO: 811020 - DNA, 33 bp, Homo sapien
catttgcagctctccagctatgtaaaacgcaac

SEQ ID NO: 811021 - DNA, 33 bp, Homo sapien
ggactgaattaagtagaagaattccacccctga

SEQ ID NO: 811022 - DNA, 33 bp, Homo sapien
ggactgaattaagtagcagaattccacccctga

SEQ ID NO: 811023 - DNA, 33 bp, Homo sapien
gataattgattctctcaacctagccttcctgag

SEQ ID NO: 811024 - DNA, 33 bp, Homo sapien
gataattgattctctcgacctagccttcctgag

SEQ ID NO: 811025 - DNA, 33 bp, Homo sapien
gctgtggttgaaagggccactgggttaccgatc

SEQ ID NO: 811026 - DNA, 33 bp, Homo sapien
gctgtggttgaaagggtcactgggttaccgatc

SEQ ID NO: 811027 - DNA, 33 bp, Homo sapien
ctgatagctgccataccgagaaagacagcaatc

SEQ ID NO: 811028 - DNA, 33 bp, Homo sapien
ctgatagctgccatactgagaaagacagcaatc

SEQ ID NO: 811029 - DNA, 33 bp, Homo sapien
aatggacagactattacgacatgcacgtggatt

SEQ ID NO: 811030 - DNA, 33 bp, Homo sapien
aatggacagactattatgacatgcacgtggatt

SEQ ID NO: 811031 - DNA, 33 bp, Homo sapien
tctctaaatcaaactacaaggtcactgtttgag

SEQ ID NO: 811032 - DNA, 33 bp, Homo sapien
tctctaaatcaaactataaggtcactgtttgag

SEQ ID NO: 811033 - DNA, 33 bp, Homo sapien
ccttaagtacaacaaccaggaaacaagagtata

SEQ ID NO: 811034 - DNA, 33 bp, Homo sapien
ccttaagtacaacaactaggaaacaagagtata

SEQ ID NO: 811035 - DNA, 33 bp, Homo sapien
aaaaggagttgctacaacagataatcagtggtg

SEQ ID NO: 811036 - DNA, 33 bp, Homo sapien
aaaaggagttgctacagcagataatcagtggtg

SEQ ID NO: 811037 - DNA, 33 bp, Homo sapien
gttcattcactaaaaacgcaagaaccatctgga

SEQ ID NO: 811038 - DNA, 33 bp, Homo sapien
gttcattcactaaaaatgcaagaaccatctgga

SEQ ID NO: 811039 - DNA, 33 bp, Homo sapien
gttatatgagtagcacagtaggcaaccgcagca

SEQ ID NO: 811040 - DNA, 33 bp, Homo sapien
gttatatgagtagcacggtaggcaaccgcagca

SEQ ID NO: 811041 - DNA, 33 bp, Homo sapien
tatcctacagagcagactcattatgtttagttg

SEQ ID NO: 811042 - DNA, 33 bp, Homo sapien
tatcctacagagcagattcattatgtttagttg

SEQ ID NO: 811043 - DNA, 33 bp, Homo sapien
gaactgtgctacaaagacattttctgttgctgc

SEQ ID NO: 811044 - DNA, 33 bp, Homo sapien
gaactgtgctacaaaggcattttctgttgctgc

SEQ ID NO: 811045 - DNA, 33 bp, Homo sapien
cttggcaccagcagaaacattaatacagaaatg

SEQ ID NO: 811046 - DNA, 33 bp, Homo sapien
cttggcaccagcagaagcattaatacagaaatg

SEQ ID NO: 811047 - DNA, 33 bp, Homo sapien
agtaggcagataggcactgaatcacttcctggc

SEQ ID NO: 811048 - DNA, 33 bp, Homo sapien
agtaggcagataggcattgaatcacttcctggc

SEQ ID NO: 811049 - DNA, 33 bp, Homo sapien
aaccccttcctacagaacttgtccaaagtggga

SEQ ID NO: 811050 - DNA, 33 bp, Homo sapien
aaccccttcctacagaccttgtccaaagtggga

SEQ ID NO: 811051 - DNA, 33 bp, Homo sapien
agaggatgacaatacaagctgatgacctgagcc

SEQ ID NO: 811052 - DNA, 33 bp, Homo sapien
agaggatgacaatacaggctgatgacctgagcc

SEQ ID NO: 811053 - DNA, 33 bp, Homo sapien
ttcaaacattgacagtaaagggcatcacctcac

SEQ ID NO: 811054 - DNA, 33 bp, Homo sapien
ttcaaacattgacagtgaagggcatcacctcac

SEQ ID NO: 811055 - DNA, 33 bp, Homo sapien
ccctactgcaaggataaaacctgtccctggatt

SEQ ID NO: 811056 - DNA, 33 bp, Homo sapien
ccctactgcaaggatataacctgtccctggatt

SEQ ID NO: 811057 - DNA, 33 bp, Homo sapien
gatactctgtttaaaacatcacaaggattattt

SEQ ID NO: 811058 - DNA, 33 bp, Homo sapien
gatactctgtttaaaatatcacaaggattattt

SEQ ID NO: 811059 - DNA, 33 bp, Homo sapien
gtcaatagaggtcaataaaggtcgtaatcgttt

SEQ ID NO: 811060 - DNA, 33 bp, Homo sapien
gtcaatagaggtcaatgaaggtcgtaatcgttt

SEQ ID NO: 811061 - DNA, 33 bp, Homo sapien
aaagaataaatctaaccggtcttccacgaaaga

SEQ ID NO: 811062 - DNA, 33 bp, Homo sapien
aaagaataaatctaactggtcttccacgaaaga

SEQ ID NO: 811063 - DNA, 33 bp, Homo sapien
tccagcattgtgagagaatacatcactgttgtt

SEQ ID NO: 811064 - DNA, 33 bp, Homo sapien
tccagcattgtgagaggatacatcactgttgtt

SEQ ID NO: 811065 - DNA, 33 bp, Homo sapien
acataaatactgttaccatctctatcccacaaa

SEQ ID NO: 811066 - DNA, 33 bp, Homo sapien
acataaatactgttacgatctctatcccacaaa

SEQ ID NO: 811067 - DNA, 33 bp, Homo sapien
tctaaaaggctctcaacataaagactgcttcta

SEQ ID NO: 811068 - DNA, 33 bp, Homo sapien
tctaaaaggctctcaatataaagactgcttcta

SEQ ID NO: 811069 - DNA, 33 bp, Homo sapien
atattgaatgtggaaaagcatggaatacaaaga

SEQ ID NO: 811070 - DNA, 33 bp, Homo sapien
atattgaatgtggaaaggcatggaatacaaaga

SEQ ID NO: 811071 - DNA, 33 bp, Homo sapien
ataatgtggtgctaaacctgtgaaccagggttc

SEQ ID NO: 811072 - DNA, 33 bp, Homo sapien
ataatgtggtgctaaatctgtgaaccagggttc

SEQ ID NO: 811073 - DNA, 33 bp, Homo sapien
ttcagaagagtggaacacacaaagtgcttgtta

SEQ ID NO: 811074 - DNA, 33 bp, Homo sapien
ttcagaagagtggaacgcacaaagtgcttgtta

SEQ ID NO: 811075 - DNA, 33 bp, Homo sapien
actcatcagcattacactgaggcattttctctt

SEQ ID NO: 811076 - DNA, 33 bp, Homo sapien
actcatcagcattacattgaggcattttctctt

SEQ ID NO: 811077 - DNA, 33 bp, Homo sapien
aagagtagtgtccatccgagaaagtggttgtga

SEQ ID NO: 811078 - DNA, 33 bp, Homo sapien
aagagtagtgtccatctgagaaagtggttgtga

SEQ ID NO: 811079 - DNA, 33 bp, Homo sapien
ggaggactggaataacaaagggtttgaaaagaa

SEQ ID NO: 811080 - DNA, 33 bp, Homo sapien
ggaggactggaataacgaagggtttgaaaagaa

SEQ ID NO: 811081 - DNA, 33 bp, Homo sapien
tgggagctctggaagaaaaggagacactaggca

SEQ ID NO: 811082 - DNA, 33 bp, Homo sapien
tgggagctctggaagagaaggagacactaggca

SEQ ID NO: 811083 - DNA, 33 bp, Homo sapien
ctctttacaatccacagtacatagatatgaaag

SEQ ID NO: 811084 - DNA, 33 bp, Homo sapien
ctctttacaatccacattacatagatatgaaag

SEQ ID NO: 811085 - DNA, 33 bp, Homo sapien
aaaagaaacaaaactgaacgcagttaatgtgtt

SEQ ID NO: 811086 - DNA, 33 bp, Homo sapien
aaaagaaacaaaactggacgcagttaatgtgtt

SEQ ID NO: 811087 - DNA, 33 bp, Homo sapien
taaatgtcaccagcaaataggagccaacagaaa

SEQ ID NO: 811088 - DNA, 33 bp, Homo sapien
taaatgtcaccagcaagtaggagccaacagaaa

SEQ ID NO: 811089 - DNA, 33 bp, Homo sapien
gtgaagtggccattagaaatcttcaaagaaaga

SEQ ID NO: 811090 - DNA, 33 bp, Homo sapien
gtgaagtggccattaggaatcttcaaagaaaga

SEQ ID NO: 811091 - DNA, 33 bp, Homo sapien
tttgagatttttatacccgtgtctaagtgtaca

SEQ ID NO: 811092 - DNA, 33 bp, Homo sapien
tttgagatttttatactcgtgtctaagtgtaca

SEQ ID NO: 811093 - DNA, 33 bp, Homo sapien
tccctatcacatctaacgagagttgtctccccc

SEQ ID NO: 811094 - DNA, 33 bp, Homo sapien
tccctatcacatctaatgagagttgtctccccc

SEQ ID NO: 811095 - DNA, 33 bp, Homo sapien
tactctatttatatcacgtcattccaaaaacag

SEQ ID NO: 811096 - DNA, 33 bp, Homo sapien
tactctatttatatcatgtcattccaaaaacag

SEQ ID NO: 811097 - DNA, 33 bp, Homo sapien
actgagtagaaagttaagctatgttcaaggatg

SEQ ID NO: 811098 - DNA, 33 bp, Homo sapien
actgagtagaaagttatgctatgttcaaggatg

SEQ ID NO: 811099 - DNA, 33 bp, Homo sapien
tcagccctcagcaaaaaagacacaaatgtctta

SEQ ID NO: 811100 - DNA, 33 bp, Homo sapien
tcagccctcagcaaaagagacacaaatgtctta

SEQ ID NO: 811101 - DNA, 33 bp, Homo sapien
tacttccatgtgtttacacaagcaacaacagcc

SEQ ID NO: 811102 - DNA, 33 bp, Homo sapien
tacttccatgtgtttatacaagcaacaacagcc

SEQ ID NO: 811103 - DNA, 33 bp, Homo sapien
ctaagagaaaatgacaaacttttacatgacagt

SEQ ID NO: 811104 - DNA, 33 bp, Homo sapien
ctaagagaaaatgacagacttttacatgacagt

SEQ ID NO: 811105 - DNA, 33 bp, Homo sapien
gcatttctatacattaataacattcaaggtaag

SEQ ID NO: 811106 - DNA, 33 bp, Homo sapien
gcatttctatacattagtaacattcaaggtaag

SEQ ID NO: 811107 - DNA, 33 bp, Homo sapien
caaatccacacatttaggaccagttggtttttg

SEQ ID NO: 811108 - DNA, 33 bp, Homo sapien
caaatccacacatttatgaccagttggtttttg

SEQ ID NO: 811109 - DNA, 33 bp, Homo sapien
acttggcggtacagcacaagggaacagccccac

SEQ ID NO: 811110 - DNA, 33 bp, Homo sapien
acttggcggtacagcataagggaacagccccac

SEQ ID NO: 811111 - DNA, 33 bp, Homo sapien
cgcaggtttggcaggagacttggcggtacagca

SEQ ID NO: 811112 - DNA, 33 bp, Homo sapien
cgcaggtttggcaggatacttggcggtacagca

SEQ ID NO: 811113 - DNA, 33 bp, Homo sapien
ctgttggcattcccaccgcaggttgtgcttacg

SEQ ID NO: 811114 - DNA, 33 bp, Homo sapien
ctgttggcattcccactgcaggttgtgcttacg

SEQ ID NO: 811115 - DNA, 33 bp, Homo sapien
atctgatgacattcccaaattcctcccactcct

SEQ ID NO: 811116 - DNA, 33 bp, Homo sapien
atctgatgacattcccgaattcctcccactcct

SEQ ID NO: 811117 - DNA, 33 bp, Homo sapien
ttctctatatactagacagcactttggcaagac

SEQ ID NO: 811118 - DNA, 33 bp, Homo sapien
ttctctatatactagatagcactttggcaagac

SEQ ID NO: 811119 - DNA, 33 bp, Homo sapien
acttgctgttgaatgaatatagacttaaggagg

SEQ ID NO: 811120 - DNA, 33 bp, Homo sapien
acttgctgttgaatgagtatagacttaaggagg

SEQ ID NO: 811121 - DNA, 33 bp, Homo sapien
tcttttcagttactacaatgttagaggtaggct

SEQ ID NO: 811122 - DNA, 33 bp, Homo sapien
tcttttcagttactacgatgttagaggtaggct

SEQ ID NO: 811123 - DNA, 33 bp, Homo sapien
ctgccagaaacatccaatctcccactgtgggaa

SEQ ID NO: 811124 - DNA, 33 bp, Homo sapien
ctgccagaaacatccagtctcccactgtgggaa

SEQ ID NO: 811125 - DNA, 33 bp, Homo sapien
atacacctgaataggaagccatgtattttgaag

SEQ ID NO: 811126 - DNA, 33 bp, Homo sapien
atacacctgaataggaggccatgtattttgaag

SEQ ID NO: 811127 - DNA, 33 bp, Homo sapien
cagggagagaaatacactggagcacgtgacgtt

SEQ ID NO: 811128 - DNA, 33 bp, Homo sapien
cagggagagaaatacattggagcacgtgacgtt

SEQ ID NO: 811129 - DNA, 33 bp, Homo sapien
tgattaaaaatccctacaaatgctacataactg

SEQ ID NO: 811130 - DNA, 33 bp, Homo sapien
tgattaaaaatccctagaaatgctacataactg

SEQ ID NO: 811131 - DNA, 33 bp, Homo sapien
aggtatttctgatcacactatccggtatcccat

SEQ ID NO: 811132 - DNA, 33 bp, Homo sapien
aggtatttctgatcactctatccggtatcccat

SEQ ID NO: 811133 - DNA, 33 bp, Homo sapien
ttgtctggagttacaaactgtctaatctgctcc

SEQ ID NO: 811134 - DNA, 33 bp, Homo sapien
ttgtctggagttacaatctgtctaatctgctcc

SEQ ID NO: 811135 - DNA, 33 bp, Homo sapien
aaatcctacactctctcaacaatccgttccaag

SEQ ID NO: 811136 - DNA, 33 bp, Homo sapien
aaatcctacactctcttaacaatccgttccaag

SEQ ID NO: 811137 - DNA, 33 bp, Homo sapien
ctggaaacccccatatcaaaatcctcagatgct

SEQ ID NO: 811138 - DNA, 33 bp, Homo sapien
ctggaaacccccatatgaaaatcctcagatgct

SEQ ID NO: 811139 - DNA, 33 bp, Homo sapien
ctaaaattctgatgtaactagctccaaaggctc

SEQ ID NO: 811140 - DNA, 33 bp, Homo sapien
ctaaaattctgatgtatctagctccaaaggctc

SEQ ID NO: 811141 - DNA, 33 bp, Homo sapien
gagaagaaatattcaccataccaactgctagcg

SEQ ID NO: 811142 - DNA, 33 bp, Homo sapien
gagaagaaatattcactataccaactgctagcg

SEQ ID NO: 811143 - DNA, 33 bp, Homo sapien
acttaataactggaaacattcttctgtgaatgc

SEQ ID NO: 811144 - DNA, 33 bp, Homo sapien
acttaataactggaaatattcttctgtgaatgc

SEQ ID NO: 811145 - DNA, 33 bp, Homo sapien
aagttattttatgtcaccaaatgtaactggcat

SEQ ID NO: 811146 - DNA, 33 bp, Homo sapien
aagttattttatgtcatcaaatgtaactggcat

SEQ ID NO: 811147 - DNA, 33 bp, Homo sapien
aaatagatgtgcatgacagaaaactttccaaat

SEQ ID NO: 811148 - DNA, 33 bp, Homo sapien
aaatagatgtgcatgatagaaaactttccaaat

SEQ ID NO: 811149 - DNA, 33 bp, Homo sapien
accatcataggattcactcacgtaaggatatat

SEQ ID NO: 811150 - DNA, 33 bp, Homo sapien
accatcataggattcagtcacgtaaggatatat

SEQ ID NO: 811151 - DNA, 33 bp, Homo sapien
atgaactcctattttacgtggcatcaaggctga

SEQ ID NO: 811152 - DNA, 33 bp, Homo sapien
atgaactcctattttatgtggcatcaaggctga

SEQ ID NO: 811153 - DNA, 33 bp, Homo sapien
ttctatgggctaaaaggacttcctagaatgaca

SEQ ID NO: 811154 - DNA, 33 bp, Homo sapien
ttctatgggctaaaagtacttcctagaatgaca

SEQ ID NO: 811155 - DNA, 33 bp, Homo sapien
tttattggctgtgcaaacttatgcaattactta

SEQ ID NO: 811156 - DNA, 33 bp, Homo sapien
tttattggctgtgcaaccttatgcaattactta

SEQ ID NO: 811157 - DNA, 33 bp, Homo sapien
atagtcactaatactaccattatcagtcaccat

SEQ ID NO: 811158 - DNA, 33 bp, Homo sapien
atagtcactaatactatcattatcagtcaccat

SEQ ID NO: 811159 - DNA, 33 bp, Homo sapien
cgcaggaaggaccttcacctgattagttttgcc

SEQ ID NO: 811160 - DNA, 33 bp, Homo sapien
cgcaggaaggaccttcgcctgattagttttgcc

SEQ ID NO: 811161 - DNA, 33 bp, Homo sapien
gttacaccatatgttaagcaatggaggcaaaac

SEQ ID NO: 811162 - DNA, 33 bp, Homo sapien
gttacaccatatgttaggcaatggaggcaaaac

SEQ ID NO: 811163 - DNA, 33 bp, Homo sapien
tatatcaccaggccacaggacagttcaagatta

SEQ ID NO: 811164 - DNA, 33 bp, Homo sapien
tatatcaccaggccacgggacagttcaagatta

SEQ ID NO: 811165 - DNA, 33 bp, Homo sapien
atgaaagataattaacccatgctatcaagagtt

SEQ ID NO: 811166 - DNA, 33 bp, Homo sapien
atgaaagataattaactcatgctatcaagagtt

SEQ ID NO: 811167 - DNA, 33 bp, Homo sapien
atctagacaagaaagagaaattttgagtggttg

SEQ ID NO: 811168 - DNA, 33 bp, Homo sapien
atctagacaagaaagataaattttgagtggttg

SEQ ID NO: 811169 - DNA, 33 bp, Homo sapien
tctcttgagtccttaaacagctcttaataattt

SEQ ID NO: 811170 - DNA, 33 bp, Homo sapien
tctcttgagtccttaagcagctcttaataattt

SEQ ID NO: 811171 - DNA, 33 bp, Homo sapien
tatataaaatgtgttgcaactaattatgtttcc

SEQ ID NO: 811172 - DNA, 33 bp, Homo sapien
tatataaaatgtgttgtaactaattatgtttcc

SEQ ID NO: 811173 - DNA, 33 bp, Homo sapien
ttacagtgtcttttgcagagtgtatataaactt

SEQ ID NO: 811174 - DNA, 33 bp, Homo sapien
ttacagtgtcttttgcggagtgtatataaactt

SEQ ID NO: 811175 - DNA, 33 bp, Homo sapien
agcattttgctttaccacaacacccaagatatt

SEQ ID NO: 811176 - DNA, 33 bp, Homo sapien
agcattttgctttacctcaacacccaagatatt

SEQ ID NO: 811177 - DNA, 33 bp, Homo sapien
atgcacccagttacctaagagctctgatgaaga

SEQ ID NO: 811178 - DNA, 33 bp, Homo sapien
atgcacccagttacctgagagctctgatgaaga

SEQ ID NO: 811179 - DNA, 33 bp, Homo sapien
ggggaagtgggtgatacgtcgagaaggatttta

SEQ ID NO: 811180 - DNA, 33 bp, Homo sapien
ggggaagtgggtgatatgtcgagaaggatttta

SEQ ID NO: 811181 - DNA, 33 bp, Homo sapien
aactaaattctcaccaatggcacgagagaaggg

SEQ ID NO: 811182 - DNA, 33 bp, Homo sapien
aactaaattctcaccagtggcacgagagaaggg

SEQ ID NO: 811183 - DNA, 33 bp, Homo sapien
agctgctgtaaagatacgccgaaatgtggaagt

SEQ ID NO: 811184 - DNA, 33 bp, Homo sapien
agctgctgtaaagatatgccgaaatgtggaagt

SEQ ID NO: 811185 - DNA, 33 bp, Homo sapien
cactgtgtaagcaagaccaggttagttctctca

SEQ ID NO: 811186 - DNA, 33 bp, Homo sapien
cactgtgtaagcaagatcaggttagttctctca

SEQ ID NO: 811187 - DNA, 33 bp, Homo sapien
ccattgatctttagcacctttgtctaaaattaa

SEQ ID NO: 811188 - DNA, 33 bp, Homo sapien
ccattgatctttagcatctttgtctaaaattaa

SEQ ID NO: 811189 - DNA, 33 bp, Homo sapien
agatgatgctggagatgaattcaagattctact

SEQ ID NO: 811190 - DNA, 33 bp, Homo sapien
agatgatgctggagattaattcaagattctact

SEQ ID NO: 811191 - DNA, 33 bp, Homo sapien
ttatgtttcaggtcctcactggagcatcctacc

SEQ ID NO: 811192 - DNA, 33 bp, Homo sapien
ttatgtttcaggtccttactggagcatcctacc

SEQ ID NO: 811193 - DNA, 33 bp, Homo sapien
tctgtgaattacaaataaataaagatgctgatc

SEQ ID NO: 811194 - DNA, 33 bp, Homo sapien
tctgtgaattacaaatcaataaagatgctgatc

SEQ ID NO: 811195 - DNA, 33 bp, Homo sapien
ctggagaggataagagaataagaacacacacac

SEQ ID NO: 811196 - DNA, 33 bp, Homo sapien
ctggagaggataagaggataagaacacacacac

SEQ ID NO: 811197 - DNA, 33 bp, Homo sapien
ttgctaacctgtactgaatttatactgccttag

SEQ ID NO: 811198 - DNA, 33 bp, Homo sapien
ttgctaacctgtactgcatttatactgccttag

SEQ ID NO: 811199 - DNA, 33 bp, Homo sapien
tacaagtcccgagctaactagttgcaagaaagg

SEQ ID NO: 811200 - DNA, 33 bp, Homo sapien
tacaagtcccgagctagctagttgcaagaaagg

SEQ ID NO: 811201 - DNA, 33 bp, Homo sapien
aagttgccatgttgtagctataacttgacagca

SEQ ID NO: 811202 - DNA, 33 bp, Homo sapien
aagttgccatgttgtatctataacttgacagca

SEQ ID NO: 811203 - DNA, 33 bp, Homo sapien
gcgtactgtgcttttcccgtggatttttgcaat

SEQ ID NO: 811204 - DNA, 33 bp, Homo sapien
gcgtactgtgcttttctcgtggatttttgcaat

SEQ ID NO: 811205 - DNA, 33 bp, Homo sapien
agaaagataaatgaaaccgagtccagagattaa

SEQ ID NO: 811206 - DNA, 33 bp, Homo sapien
agaaagataaatgaaatcgagtccagagattaa

SEQ ID NO: 811207 - DNA, 33 bp, Homo sapien
caagaaacttcacacaacactaatttgagattt

SEQ ID NO: 811208 - DNA, 33 bp, Homo sapien
caagaaacttcacacatcactaatttgagattt

SEQ ID NO: 811209 - DNA, 33 bp, Homo sapien
taggactaaatgaagacgtgagggcagtgtcca

SEQ ID NO: 811210 - DNA, 33 bp, Homo sapien
taggactaaatgaagaggtgagggcagtgtcca

SEQ ID NO: 811211 - DNA, 33 bp, Homo sapien
aatgaaatggacagcaactcaccccttcccctt

SEQ ID NO: 811212 - DNA, 33 bp, Homo sapien
aatgaaatggacagcagctcaccccttcccctt

SEQ ID NO: 811213 - DNA, 33 bp, Homo sapien
ggtaaagctgaggatcagagtagtcgtttaagg

SEQ ID NO: 811214 - DNA, 33 bp, Homo sapien
ggtaaagctgaggatcggagtagtcgtttaagg

SEQ ID NO: 811215 - DNA, 33 bp, Homo sapien
gatggagatgagaaaacattaggtgtcattttg

SEQ ID NO: 811216 - DNA, 33 bp, Homo sapien
gatggagatgagaaaatattaggtgtcattttg

SEQ ID NO: 811217 - DNA, 33 bp, Homo sapien
cacgcggtttatattcaccaactcagaaaagga

SEQ ID NO: 811218 - DNA, 33 bp, Homo sapien
cacgcggtttatattcgccaactcagaaaagga

SEQ ID NO: 811219 - DNA, 33 bp, Homo sapien
agaaaacatttgtatgaacgagagttcctggtt

SEQ ID NO: 811220 - DNA, 33 bp, Homo sapien
agaaaacatttgtatgtacgagagttcctggtt

SEQ ID NO: 811221 - DNA, 33 bp, Homo sapien
aaaccacctgagaaaacgttgaataagtcaaat

SEQ ID NO: 811222 - DNA, 33 bp, Homo sapien
aaaccacctgagaaaatgttgaataagtcaaat

SEQ ID NO: 811223 - DNA, 33 bp, Homo sapien
ttcattcatgttgttgaaggtagcagtagttca

SEQ ID NO: 811224 - DNA, 33 bp, Homo sapien
ttcattcatgttgttgcaggtagcagtagttca

SEQ ID NO: 811225 - DNA, 33 bp, Homo sapien
tttggaattataggcccgaacattctcgtgaac

SEQ ID NO: 811226 - DNA, 33 bp, Homo sapien
tttggaattataggcctgaacattctcgtgaac

SEQ ID NO: 811227 - DNA, 33 bp, Homo sapien
ctgctctgtaaatacgaaaataccattcaacca

SEQ ID NO: 811228 - DNA, 33 bp, Homo sapien
ctgctctgtaaatacgcaaataccattcaacca

SEQ ID NO: 811229 - DNA, 33 bp, Homo sapien
ttttagggttgatttcacctaacagattatcca

SEQ ID NO: 811230 - DNA, 33 bp, Homo sapien
ttttagggttgatttcgcctaacagattatcca

SEQ ID NO: 811231 - DNA, 33 bp, Homo sapien
tgcttaaagttaacagcctcaatctaaggatct

SEQ ID NO: 811232 - DNA, 33 bp, Homo sapien
tgcttaaagttaacaggctcaatctaaggatct

SEQ ID NO: 811233 - DNA, 33 bp, Homo sapien
aaatggacatgacctaacctatttctcctccct

SEQ ID NO: 811234 - DNA, 33 bp, Homo sapien
aaatggacatgacctatcctatttctcctccct

SEQ ID NO: 811235 - DNA, 33 bp, Homo sapien
actacccatattaaagcctgaaatgtctttttc

SEQ ID NO: 811236 - DNA, 33 bp, Homo sapien
actacccatattaaaggctgaaatgtctttttc

SEQ ID NO: 811237 - DNA, 33 bp, Homo sapien
ctaccttttcacaaatgatcactccttcaaaac

SEQ ID NO: 811238 - DNA, 33 bp, Homo sapien
ctaccttttcacaaattatcactccttcaaaac

SEQ ID NO: 811239 - DNA, 33 bp, Homo sapien
aaatgtttttccaagaggtagtaatctctaagc

SEQ ID NO: 811240 - DNA, 33 bp, Homo sapien
aaatgtttttccaagatgtagtaatctctaagc

SEQ ID NO: 811241 - DNA, 33 bp, Homo sapien
cctctctttacttataggtttgctaattggtgg

SEQ ID NO: 811242 - DNA, 33 bp, Homo sapien
cctctctttacttatatgtttgctaattggtgg

SEQ ID NO: 811243 - DNA, 33 bp, Homo sapien
ctacttgtacatactcgcctagtcaatctagcc

SEQ ID NO: 811244 - DNA, 33 bp, Homo sapien
ctacttgtacatactctcctagtcaatctagcc

SEQ ID NO: 811245 - DNA, 33 bp, Homo sapien
aattgggggttgtcaaggtaaaagaagaaccta

SEQ ID NO: 811246 - DNA, 33 bp, Homo sapien
aattgggggttgtcaatgtaaaagaagaaccta

SEQ ID NO: 811247 - DNA, 33 bp, Homo sapien
gtactcttatcaggcaagacatttccatggcct

SEQ ID NO: 811248 - DNA, 33 bp, Homo sapien
gtactcttatcaggcaggacatttccatggcct

SEQ ID NO: 811249 - DNA, 33 bp, Homo sapien
ataggcctgactgataacattattcatcatttg

SEQ ID NO: 811250 - DNA, 33 bp, Homo sapien
ataggcctgactgataccattattcatcatttg

SEQ ID NO: 811251 - DNA, 33 bp, Homo sapien
aaagctggtatatcacaaagcttgatttgcttg

SEQ ID NO: 811252 - DNA, 33 bp, Homo sapien
aaagctggtatatcacgaagcttgatttgcttg

SEQ ID NO: 811253 - DNA, 33 bp, Homo sapien
aacagattgtattaaaagctgaaccagtattat

SEQ ID NO: 811254 - DNA, 33 bp, Homo sapien
aacagattgtattaaatgctgaaccagtattat

SEQ ID NO: 811255 - DNA, 33 bp, Homo sapien
atcttcctagtcatgtcacaagatcctagtttt

SEQ ID NO: 811256 - DNA, 33 bp, Homo sapien
atcttcctagtcatgtgacaagatcctagtttt

SEQ ID NO: 811257 - DNA, 33 bp, Homo sapien
aggaggattcagaaaaactgttatactcacagt

SEQ ID NO: 811258 - DNA, 33 bp, Homo sapien
aggaggattcagaaaagctgttatactcacagt

SEQ ID NO: 811259 - DNA, 33 bp, Homo sapien
ggcttttgtgaatagacatgtgtatatatgtgt

SEQ ID NO: 811260 - DNA, 33 bp, Homo sapien
ggcttttgtgaatagatatgtgtatatatgtgt

SEQ ID NO: 811261 - DNA, 33 bp, Homo sapien
tcagctcactttatcaataagaaatggacccag

SEQ ID NO: 811262 - DNA, 33 bp, Homo sapien
tcagctcactttatcagtaagaaatggacccag

SEQ ID NO: 811263 - DNA, 33 bp, Homo sapien
ataaagtgagctgaaaatatttgagaaactctt

SEQ ID NO: 811264 - DNA, 33 bp, Homo sapien
ataaagtgagctgaaagtatttgagaaactctt

SEQ ID NO: 811265 - DNA, 33 bp, Homo sapien
gatcagtcaagacttaagtgtatgcttactgat

SEQ ID NO: 811266 - DNA, 33 bp, Homo sapien
gatcagtcaagacttaggtgtatgcttactgat

SEQ ID NO: 811267 - DNA, 33 bp, Homo sapien
tgagcctaggaagagacgatgagttcattgatg

SEQ ID NO: 811268 - DNA, 33 bp, Homo sapien
tgagcctaggaagagatgatgagttcattgatg

SEQ ID NO: 811269 - DNA, 33 bp, Homo sapien
aagatttcacaaactacagtcattagaaatgtg

SEQ ID NO: 811270 - DNA, 33 bp, Homo sapien
aagatttcacaaactatagtcattagaaatgtg

SEQ ID NO: 811271 - DNA, 33 bp, Homo sapien
agctacctgcctacaaatcttgtgttagcaatt

SEQ ID NO: 811272 - DNA, 33 bp, Homo sapien
agctacctgcctacaagtcttgtgttagcaatt

SEQ ID NO: 811273 - DNA, 33 bp, Homo sapien
taaaccacctataaacacacataaagacttaaa

SEQ ID NO: 811274 - DNA, 33 bp, Homo sapien
taaaccacctataaactcacataaagacttaaa

SEQ ID NO: 811275 - DNA, 33 bp, Homo sapien
tatctgatagccatccaagaaatgtatcatttg

SEQ ID NO: 811276 - DNA, 33 bp, Homo sapien
tatctgatagccatccgagaaatgtatcatttg

SEQ ID NO: 811277 - DNA, 33 bp, Homo sapien
atattgagctctaaaaatgtgggagcaaagcta

SEQ ID NO: 811278 - DNA, 33 bp, Homo sapien
atattgagctctaaaattgtgggagcaaagcta

SEQ ID NO: 811279 - DNA, 33 bp, Homo sapien
aaataacagtataagcaattcccaggcttaatc

SEQ ID NO: 811280 - DNA, 33 bp, Homo sapien
aaataacagtataagcgattcccaggcttaatc

SEQ ID NO: 811281 - DNA, 33 bp, Homo sapien
aacttgcacattacagccatcctttaagattca

SEQ ID NO: 811282 - DNA, 33 bp, Homo sapien
aacttgcacattacagtcatcctttaagattca

SEQ ID NO: 811283 - DNA, 33 bp, Homo sapien
ttgtgctagtttttccagataatggtagaagtc

SEQ ID NO: 811284 - DNA, 33 bp, Homo sapien
ttgtgctagtttttccggataatggtagaagtc

SEQ ID NO: 811285 - DNA, 33 bp, Homo sapien
caactcacactagggaatcagtatttgaaaagt

SEQ ID NO: 811286 - DNA, 33 bp, Homo sapien
caactcacactagggactcagtatttgaaaagt

SEQ ID NO: 811287 - DNA, 33 bp, Homo sapien
ttgagggaacagtaaccctttggccagtgaacc

SEQ ID NO: 811288 - DNA, 33 bp, Homo sapien
ttgagggaacagtaactctttggccagtgaacc

SEQ ID NO: 811289 - DNA, 33 bp, Homo sapien
tactatttgctgcattgaaacgtgcatttatga

SEQ ID NO: 811290 - DNA, 33 bp, Homo sapien
tactatttgctgcatttaaacgtgcatttatga

SEQ ID NO: 811291 - DNA, 33 bp, Homo sapien
caagatgatgatagaaactagtagtacaaacct

SEQ ID NO: 811292 - DNA, 33 bp, Homo sapien
caagatgatgatagaacctagtagtacaaacct

SEQ ID NO: 811293 - DNA, 33 bp, Homo sapien
ctacatatgaacgttaaaaacagcctgcacaca

SEQ ID NO: 811294 - DNA, 33 bp, Homo sapien
ctacatatgaacgttataaacagcctgcacaca

SEQ ID NO: 811295 - DNA, 33 bp, Homo sapien
ggcagctgcccaggaccatgctagcacactcca

SEQ ID NO: 811296 - DNA, 33 bp, Homo sapien
ggcagctgcccaggacgatgctagcacactcca

SEQ ID NO: 811297 - DNA, 33 bp, Homo sapien
ttaaaagagtaaaataaatggaaaatgtacaga

SEQ ID NO: 811298 - DNA, 33 bp, Homo sapien
ttaaaagagtaaaatacatggaaaatgtacaga

SEQ ID NO: 811299 - DNA, 33 bp, Homo sapien
attccgtttcagaaaaatagactcaatccctat

SEQ ID NO: 811300 - DNA, 33 bp, Homo sapien
attccgtttcagaaaattagactcaatccctat

SEQ ID NO: 811301 - DNA, 33 bp, Homo sapien
gtgttccccatgactgcaaccctgctttccaaa

SEQ ID NO: 811302 - DNA, 33 bp, Homo sapien
gtgttccccatgactgtaaccctgctttccaaa

SEQ ID NO: 811303 - DNA, 33 bp, Homo sapien
ataaaataaatgtcaagcaaagtggtgtaaggg

SEQ ID NO: 811304 - DNA, 33 bp, Homo sapien
ataaaataaatgtcaatcaaagtggtgtaaggg

SEQ ID NO: 811305 - DNA, 33 bp, Homo sapien
agacctcaatttaggaaaacatccggcgtgctt

SEQ ID NO: 811306 - DNA, 33 bp, Homo sapien
agacctcaatttaggagaacatccggcgtgctt

SEQ ID NO: 811307 - DNA, 33 bp, Homo sapien
tgatcatcctttcatacggttgtttgccatctc

SEQ ID NO: 811308 - DNA, 33 bp, Homo sapien
tgatcatcctttcatatggttgtttgccatctc

SEQ ID NO: 811309 - DNA, 33 bp, Homo sapien
taatttttcatgtccaaatttaaactggaaaaa

SEQ ID NO: 811310 - DNA, 33 bp, Homo sapien
taatttttcatgtccagatttaaactggaaaaa

SEQ ID NO: 811311 - DNA, 33 bp, Homo sapien
ttcagtgagggttctacgtgaactttggactct

SEQ ID NO: 811312 - DNA, 33 bp, Homo sapien
ttcagtgagggttctaggtgaactttggactct

SEQ ID NO: 811313 - DNA, 33 bp, Homo sapien
catattttctttctacgggacccattgttacta

SEQ ID NO: 811314 - DNA, 33 bp, Homo sapien
catattttctttctactggacccattgttacta

SEQ ID NO: 811315 - DNA, 33 bp, Homo sapien
tccttctaagaaaccaaagaaacatggctgtta

SEQ ID NO: 811316 - DNA, 33 bp, Homo sapien
tccttctaagaaaccagagaaacatggctgtta

SEQ ID NO: 811317 - DNA, 33 bp, Homo sapien
aagcaatggtttagtacacagcatgggtttgcc

SEQ ID NO: 811318 - DNA, 33 bp, Homo sapien
aagcaatggtttagtatacagcatgggtttgcc

SEQ ID NO: 811319 - DNA, 33 bp, Homo sapien
ttatactgaattttcacgtttggatactaggat

SEQ ID NO: 811320 - DNA, 33 bp, Homo sapien
ttatactgaattttcatgtttggatactaggat

SEQ ID NO: 811321 - DNA, 33 bp, Homo sapien
ctaggtgagctggataaacacgcctaattaaag

SEQ ID NO: 811322 - DNA, 33 bp, Homo sapien
ctaggtgagctggatacacacgcctaattaaag

SEQ ID NO: 811323 - DNA, 33 bp, Homo sapien
taatctggaaaatgaccctggttaatatttaga

SEQ ID NO: 811324 - DNA, 33 bp, Homo sapien
taatctggaaaatgactctggttaatatttaga

SEQ ID NO: 811325 - DNA, 33 bp, Homo sapien
tcaggatgctaaataacccatatggctatatgt

SEQ ID NO: 811326 - DNA, 33 bp, Homo sapien
tcaggatgctaaataatccatatggctatatgt

SEQ ID NO: 811327 - DNA, 33 bp, Homo sapien
agtgtttggaccaacaagaggctccaaagtacg

SEQ ID NO: 811328 - DNA, 33 bp, Homo sapien
agtgtttggaccaacaggaggctccaaagtacg

SEQ ID NO: 811329 - DNA, 33 bp, Homo sapien
taatcaagagttgctcacaaggtttgcttggcc

SEQ ID NO: 811330 - DNA, 33 bp, Homo sapien
taatcaagagttgctcgcaaggtttgcttggcc

SEQ ID NO: 811331 - DNA, 33 bp, Homo sapien
aaaaaaaaaaccatcaggaacatatcctttatc

SEQ ID NO: 811332 - DNA, 33 bp, Homo sapien
aaaaaaaaaaccatcatgaacatatcctttatc

SEQ ID NO: 811333 - DNA, 33 bp, Homo sapien
tctcaatattcacaaaagatagttacaacaatc

SEQ ID NO: 811334 - DNA, 33 bp, Homo sapien
tctcaatattcacaaaggatagttacaacaatc

SEQ ID NO: 811335 - DNA, 33 bp, Homo sapien
aatttggaaaaactacaatctactcacttttcc

SEQ ID NO: 811336 - DNA, 33 bp, Homo sapien
aatttggaaaaactaccatctactcacttttcc

SEQ ID NO: 811337 - DNA, 33 bp, Homo sapien
cttcctctgtaaggccaaatagtaaaagtttca

SEQ ID NO: 811338 - DNA, 33 bp, Homo sapien
cttcctctgtaaggccgaatagtaaaagtttca

SEQ ID NO: 811339 - DNA, 33 bp, Homo sapien
tagtagggttggattaccttcaggagctctggg

SEQ ID NO: 811340 - DNA, 33 bp, Homo sapien
tagtagggttggattatcttcaggagctctggg

SEQ ID NO: 811341 - DNA, 33 bp, Homo sapien
tggtcctgcccaattaacccattttgcacactg

SEQ ID NO: 811342 - DNA, 33 bp, Homo sapien
tggtcctgcccaattagcccattttgcacactg

SEQ ID NO: 811343 - DNA, 33 bp, Homo sapien
gcaaatagaaggcttccgaaaacctggccttgt

SEQ ID NO: 811344 - DNA, 33 bp, Homo sapien
gcaaatagaaggcttctgaaaacctggccttgt

SEQ ID NO: 811345 - DNA, 33 bp, Homo sapien
gcaaaattatgaacaccgatcaagggaaacttt

SEQ ID NO: 811346 - DNA, 33 bp, Homo sapien
gcaaaattatgaacactgatcaagggaaacttt

SEQ ID NO: 811347 - DNA, 33 bp, Homo sapien
ctaaaggtttcatgtcccctaatacataaggca

SEQ ID NO: 811348 - DNA, 33 bp, Homo sapien
ctaaaggtttcatgtctcctaatacataaggca

SEQ ID NO: 811349 - DNA, 33 bp, Homo sapien
agacaagagacagagaatagcatgacaaaatgg

SEQ ID NO: 811350 - DNA, 33 bp, Homo sapien
agacaagagacagagagtagcatgacaaaatgg

SEQ ID NO: 811351 - DNA, 33 bp, Homo sapien
ctttttaatttcaagactattttgcattattta

SEQ ID NO: 811352 - DNA, 33 bp, Homo sapien
ctttttaatttcaagagtattttgcattattta

SEQ ID NO: 811353 - DNA, 33 bp, Homo sapien
gctacagcccctgggaactggttggagcctgtc

SEQ ID NO: 811354 - DNA, 33 bp, Homo sapien
gctacagcccctgggatctggttggagcctgtc

SEQ ID NO: 811355 - DNA, 33 bp, Homo sapien
ggaactgcatacctagacggatgaaatagtaaa

SEQ ID NO: 811356 - DNA, 33 bp, Homo sapien
ggaactgcatacctaggcggatgaaatagtaaa

SEQ ID NO: 811357 - DNA, 33 bp, Homo sapien
agctatgagacagagcaaaatcacattgacaga

SEQ ID NO: 811358 - DNA, 33 bp, Homo sapien
agctatgagacagagcgaaatcacattgacaga

SEQ ID NO: 811359 - DNA, 33 bp, Homo sapien
atgacttgaaattaaacgtatgaagttgttctc

SEQ ID NO: 811360 - DNA, 33 bp, Homo sapien
atgacttgaaattaaatgtatgaagttgttctc

SEQ ID NO: 811361 - DNA, 33 bp, Homo sapien
taagcatatagttgccaaatggcctaatatttt

SEQ ID NO: 811362 - DNA, 33 bp, Homo sapien
taagcatatagttgccgaatggcctaatatttt

SEQ ID NO: 811363 - DNA, 33 bp, Homo sapien
gcaataagtgtcctcaactagataaaccgctgt

SEQ ID NO: 811364 - DNA, 33 bp, Homo sapien
gcaataagtgtcctcagctagataaaccgctgt

SEQ ID NO: 811365 - DNA, 33 bp, Homo sapien
caccttattcaacaacaaggatgctgactcaaa

SEQ ID NO: 811366 - DNA, 33 bp, Homo sapien
caccttattcaacaacgaggatgctgactcaaa

SEQ ID NO: 811367 - DNA, 33 bp, Homo sapien
tttctaaaacaatcaacatgctgagaatatttc

SEQ ID NO: 811368 - DNA, 33 bp, Homo sapien
tttctaaaacaatcaatatgctgagaatatttc

SEQ ID NO: 811369 - DNA, 33 bp, Homo sapien
aagaatttatgagtaacacctcaaagacaaacg

SEQ ID NO: 811370 - DNA, 33 bp, Homo sapien
aagaatttatgagtaagacctcaaagacaaacg

SEQ ID NO: 811371 - DNA, 33 bp, Homo sapien
ttgtatgtcataagcacaaaggtaagttgggtt

SEQ ID NO: 811372 - DNA, 33 bp, Homo sapien
ttgtatgtcataagcataaaggtaagttgggtt

SEQ ID NO: 811373 - DNA, 33 bp, Homo sapien
tcttttccgtagccaacttgccatctagtcagt

SEQ ID NO: 811374 - DNA, 33 bp, Homo sapien
tcttttccgtagccaagttgccatctagtcagt

SEQ ID NO: 811375 - DNA, 33 bp, Homo sapien
ccctacgttacagaaaatgtaatgaacaattgg

SEQ ID NO: 811376 - DNA, 33 bp, Homo sapien
ccctacgttacagaaattgtaatgaacaattgg

SEQ ID NO: 811377 - DNA, 33 bp, Homo sapien
tttccaatcttttttccctcctgtcctagtctc

SEQ ID NO: 811378 - DNA, 33 bp, Homo sapien
tttccaatcttttttcgctcctgtcctagtctc

SEQ ID NO: 811379 - DNA, 33 bp, Homo sapien
tgtgtgactatctgaactagtttttaatcttgt

SEQ ID NO: 811380 - DNA, 33 bp, Homo sapien
tgtgtgactatctgaattagtttttaatcttgt

SEQ ID NO: 811381 - DNA, 33 bp, Homo sapien
atgcacttaactgaaacggaatcctagaaaata

SEQ ID NO: 811382 - DNA, 33 bp, Homo sapien
atgcacttaactgaaatggaatcctagaaaata

SEQ ID NO: 811383 - DNA, 33 bp, Homo sapien
atctcctacttgcaaacttgtataactttatga

SEQ ID NO: 811384 - DNA, 33 bp, Homo sapien
atctcctacttgcaaatttgtataactttatga

SEQ ID NO: 811385 - DNA, 33 bp, Homo sapien
ttgagctcaaagaatacaggcaaaggtgattag

SEQ ID NO: 811386 - DNA, 33 bp, Homo sapien
ttgagctcaaagaatataggcaaaggtgattag

SEQ ID NO: 811387 - DNA, 33 bp, Homo sapien
gtttctatcacttctacctgtttgtctcagctt

SEQ ID NO: 811388 - DNA, 33 bp, Homo sapien
gtttctatcacttctatctgtttgtctcagctt

SEQ ID NO: 811389 - DNA, 33 bp, Homo sapien
caaatattgagagcaaaaaagagactctataaa

SEQ ID NO: 811390 - DNA, 33 bp, Homo sapien
caaatattgagagcaacaaagagactctataaa

SEQ ID NO: 811391 - DNA, 33 bp, Homo sapien
agaatgatagtgcccacgtttagaagggaccat

SEQ ID NO: 811392 - DNA, 33 bp, Homo sapien
agaatgatagtgcccatgtttagaagggaccat

SEQ ID NO: 811393 - DNA, 33 bp, Homo sapien
tgccaagctaaaaccgacatcaaattaaatcct

SEQ ID NO: 811394 - DNA, 33 bp, Homo sapien
tgccaagctaaaaccgtcatcaaattaaatcct

SEQ ID NO: 811395 - DNA, 33 bp, Homo sapien
taagtgtttttgagaaattaagatgcaatattc

SEQ ID NO: 811396 - DNA, 33 bp, Homo sapien
taagtgtttttgagaagttaagatgcaatattc

SEQ ID NO: 811397 - DNA, 33 bp, Homo sapien
acctcattgtttcgctcaatatttatccttttg

SEQ ID NO: 811398 - DNA, 33 bp, Homo sapien
acctcattgtttcgcttaatatttatccttttg

SEQ ID NO: 811399 - DNA, 33 bp, Homo sapien
taacaggtgtaagaaaatgggatttagattagg

SEQ ID NO: 811400 - DNA, 33 bp, Homo sapien
taacaggtgtaagaaagtgggatttagattagg

SEQ ID NO: 811401 - DNA, 33 bp, Homo sapien
gccattctctatcaaaaagtctaacttcactta

SEQ ID NO: 811402 - DNA, 33 bp, Homo sapien
gccattctctatcaaagagtctaacttcactta

SEQ ID NO: 811403 - DNA, 33 bp, Homo sapien
cagatgcccttataaaagagagctagagggaaa

SEQ ID NO: 811404 - DNA, 33 bp, Homo sapien
cagatgcccttataaaggagagctagagggaaa

SEQ ID NO: 811405 - DNA, 33 bp, Homo sapien
tcagtgctatcaaaacaagcatatcggcagggc

SEQ ID NO: 811406 - DNA, 33 bp, Homo sapien
tcagtgctatcaaaacgagcatatcggcagggc

SEQ ID NO: 811407 - DNA, 33 bp, Homo sapien
tttagttttatcaaagaatacatgaaaagaaat

SEQ ID NO: 811408 - DNA, 33 bp, Homo sapien
tttagttttatcaaaggatacatgaaaagaaat

SEQ ID NO: 811409 - DNA, 33 bp, Homo sapien
aaagaggaatttgtaacagttttaggcagaaac

SEQ ID NO: 811410 - DNA, 33 bp, Homo sapien
aaagaggaatttgtaagagttttaggcagaaac

SEQ ID NO: 811411 - DNA, 33 bp, Homo sapien
acttcattactttgggaatatcgaagtcatttt

SEQ ID NO: 811412 - DNA, 33 bp, Homo sapien
acttcattactttggggatatcgaagtcatttt

SEQ ID NO: 811413 - DNA, 33 bp, Homo sapien
tgctataaaatgaaaaccaggctattgacattg

SEQ ID NO: 811414 - DNA, 33 bp, Homo sapien
tgctataaaatgaaaagcaggctattgacattg

SEQ ID NO: 811415 - DNA, 33 bp, Homo sapien
atttcatcaagaaaaaatagagtccatgttacc

SEQ ID NO: 811416 - DNA, 33 bp, Homo sapien
atttcatcaagaaaaagtagagtccatgttacc

SEQ ID NO: 811417 - DNA, 33 bp, Homo sapien
ctcactaaagcgtgtaagaagtcaataggtttt

SEQ ID NO: 811418 - DNA, 33 bp, Homo sapien
ctcactaaagcgtgtatgaagtcaataggtttt

SEQ ID NO: 811419 - DNA, 33 bp, Homo sapien
tctccttcttttattcaacgcctacacctcatc

SEQ ID NO: 811420 - DNA, 33 bp, Homo sapien
tctccttcttttattcgacgcctacacctcatc

SEQ ID NO: 811421 - DNA, 33 bp, Homo sapien
ggagatcttaggaatacgcagtccctgaagcag

SEQ ID NO: 811422 - DNA, 33 bp, Homo sapien
ggagatcttaggaatatgcagtccctgaagcag

SEQ ID NO: 811423 - DNA, 33 bp, Homo sapien
tgaatgattgacttaaaactgattaaaaaaaga

SEQ ID NO: 811424 - DNA, 33 bp, Homo sapien
tgaatgattgacttaagactgattaaaaaaaga

SEQ ID NO: 811425 - DNA, 33 bp, Homo sapien
aaataataactgtacacagcttaaaaggccaga

SEQ ID NO: 811426 - DNA, 33 bp, Homo sapien
aaataataactgtacatagcttaaaaggccaga

SEQ ID NO: 811427 - DNA, 33 bp, Homo sapien
gttgtctgttagtagcacttggaaaattttgta

SEQ ID NO: 811428 - DNA, 33 bp, Homo sapien
gttgtctgttagtagcgcttggaaaattttgta

SEQ ID NO: 811429 - DNA, 33 bp, Homo sapien
agctgtacttccaatacctagaaaactacgtgg

SEQ ID NO: 811430 - DNA, 33 bp, Homo sapien
agctgtacttccaatatctagaaaactacgtgg

SEQ ID NO: 811431 - DNA, 33 bp, Homo sapien
ccataagcagttcagtaaattgagttaaaaaat

SEQ ID NO: 811432 - DNA, 33 bp, Homo sapien
ccataagcagttcagtgaattgagttaaaaaat

SEQ ID NO: 811433 - DNA, 33 bp, Homo sapien
ctccaaccttctgccaacatacgtgaaactgtg

SEQ ID NO: 811434 - DNA, 33 bp, Homo sapien
ctccaaccttctgccatcatacgtgaaactgtg

SEQ ID NO: 811435 - DNA, 33 bp, Homo sapien
ggctctaagctccttgcagtatggatatccaat

SEQ ID NO: 811436 - DNA, 33 bp, Homo sapien
ggctctaagctccttgtagtatggatatccaat

SEQ ID NO: 811437 - DNA, 33 bp, Homo sapien
ttctctgtatgttctcacctcaattcaacagtt

SEQ ID NO: 811438 - DNA, 33 bp, Homo sapien
ttctctgtatgttctctcctcaattcaacagtt

SEQ ID NO: 811439 - DNA, 33 bp, Homo sapien
taaagtggatcctgtagggaattgagtttatag

SEQ ID NO: 811440 - DNA, 33 bp, Homo sapien
taaagtggatcctgtatggaattgagtttatag

SEQ ID NO: 811441 - DNA, 33 bp, Homo sapien
gagcaggtaatctatactagtgtgttcatcggg

SEQ ID NO: 811442 - DNA, 33 bp, Homo sapien
gagcaggtaatctatattagtgtgttcatcggg

SEQ ID NO: 811443 - DNA, 33 bp, Homo sapien
ggacggagcacatactcaatactttttatgtaa

SEQ ID NO: 811444 - DNA, 33 bp, Homo sapien
ggacggagcacatactgaatactttttatgtaa

SEQ ID NO: 811445 - DNA, 33 bp, Homo sapien
aacatcagtgacagtaccagtataacatcagta

SEQ ID NO: 811446 - DNA, 33 bp, Homo sapien
aacatcagtgacagtatcagtataacatcagta

SEQ ID NO: 811447 - DNA, 33 bp, Homo sapien
taggttgtcaacccaacagatgattttctagtt

SEQ ID NO: 811448 - DNA, 33 bp, Homo sapien
taggttgtcaacccaagagatgattttctagtt

SEQ ID NO: 811449 - DNA, 33 bp, Homo sapien
ccctggggatgaaagacgaaatagcaatgatac

SEQ ID NO: 811450 - DNA, 33 bp, Homo sapien
ccctggggatgaaagatgaaatagcaatgatac

SEQ ID NO: 811451 - DNA, 33 bp, Homo sapien
atctgaagaaaccagacgcattttcagagaaag

SEQ ID NO: 811452 - DNA, 33 bp, Homo sapien
atctgaagaaaccagatgcattttcagagaaag

SEQ ID NO: 811453 - DNA, 33 bp, Homo sapien
tgtgtgtgtgctagagcagacaagatgaacaat

SEQ ID NO: 811454 - DNA, 33 bp, Homo sapien
tgtgtgtgtgctagagtagacaagatgaacaat

SEQ ID NO: 811455 - DNA, 33 bp, Homo sapien
acttgacaaagaaaccactactgtatatagata

SEQ ID NO: 811456 - DNA, 33 bp, Homo sapien
acttgacaaagaaaccgctactgtatatagata

SEQ ID NO: 811457 - DNA, 33 bp, Homo sapien
gacactttttgtgtacccccacatggtactgtg

SEQ ID NO: 811458 - DNA, 33 bp, Homo sapien
gacactttttgtgtactcccacatggtactgtg

SEQ ID NO: 811459 - DNA, 33 bp, Homo sapien
aaaacttatgcagggaagtcaaaggaaaaataa

SEQ ID NO: 811460 - DNA, 33 bp, Homo sapien
aaaacttatgcagggacgtcaaaggaaaaataa

SEQ ID NO: 811461 - DNA, 33 bp, Homo sapien
tactattttccattccaagataatatttacaca

SEQ ID NO: 811462 - DNA, 33 bp, Homo sapien
tactattttccattcccagataatatttacaca

SEQ ID NO: 811463 - DNA, 33 bp, Homo sapien
tgtttatgtgccatcaagtgatataggctgaca

SEQ ID NO: 811464 - DNA, 33 bp, Homo sapien
tgtttatgtgccatcatgtgatataggctgaca

SEQ ID NO: 811465 - DNA, 33 bp, Homo sapien
attgtacttaaaaatacgaggcatttaagactg

SEQ ID NO: 811466 - DNA, 33 bp, Homo sapien
attgtacttaaaaatatgaggcatttaagactg

SEQ ID NO: 811467 - DNA, 33 bp, Homo sapien
aaaggattgtcttgaaatagataaagctgaaga

SEQ ID NO: 811468 - DNA, 33 bp, Homo sapien
aaaggattgtcttgaattagataaagctgaaga

SEQ ID NO: 811469 - DNA, 33 bp, Homo sapien
acttttactttgctgagtatcttcccatccatg

SEQ ID NO: 811470 - DNA, 33 bp, Homo sapien
acttttactttgctgattatcttcccatccatg

SEQ ID NO: 811471 - DNA, 33 bp, Homo sapien
gatgggtaaccaattaccttcagtctgtatttc

SEQ ID NO: 811472 - DNA, 33 bp, Homo sapien
gatgggtaaccaattatcttcagtctgtatttc

SEQ ID NO: 811473 - DNA, 33 bp, Homo sapien
tatttttgggttctcactcatataattaaacaa

SEQ ID NO: 811474 - DNA, 33 bp, Homo sapien
tatttttgggttctcattcatataattaaacaa

SEQ ID NO: 811475 - DNA, 33 bp, Homo sapien
aaatgaattgaacttgaacaaaaggcccaattt

SEQ ID NO: 811476 - DNA, 33 bp, Homo sapien
aaatgaattgaacttggacaaaaggcccaattt

SEQ ID NO: 811477 - DNA, 33 bp, Homo sapien
gaaggaagtagacccactgagacaggagggttc

SEQ ID NO: 811478 - DNA, 33 bp, Homo sapien
gaaggaagtagacccattgagacaggagggttc

SEQ ID NO: 811479 - DNA, 33 bp, Homo sapien
ctaaaggtgataatgaaccaaattattagatat

SEQ ID NO: 811480 - DNA, 33 bp, Homo sapien
ctaaaggtgataatgagccaaattattagatat

SEQ ID NO: 811481 - DNA, 33 bp, Homo sapien
tttatgcctcatatcacagtgtgtcaaaattct

SEQ ID NO: 811482 - DNA, 33 bp, Homo sapien
tttatgcctcatatcatagtgtgtcaaaattct

SEQ ID NO: 811483 - DNA, 33 bp, Homo sapien
tacataattcttgcaacagctttccaatctatg

SEQ ID NO: 811484 - DNA, 33 bp, Homo sapien
tacataattcttgcaatagctttccaatctatg

SEQ ID NO: 811485 - DNA, 33 bp, Homo sapien
gataattctatcaaagcccatgcagacaatggg

SEQ ID NO: 811486 - DNA, 33 bp, Homo sapien
gataattctatcaaagtccatgcagacaatggg

SEQ ID NO: 811487 - DNA, 33 bp, Homo sapien
ttactggaaagcagaacgttaagaaatatgcgg

SEQ ID NO: 811488 - DNA, 33 bp, Homo sapien
ttactggaaagcagaatgttaagaaatatgcgg

SEQ ID NO: 811489 - DNA, 33 bp, Homo sapien
aaaagctatttcaaaactactgcaataaatact

SEQ ID NO: 811490 - DNA, 33 bp, Homo sapien
aaaagctatttcaaaagtactgcaataaatact

SEQ ID NO: 811491 - DNA, 33 bp, Homo sapien
acccctgcccaggcaacttccactcatgtttta

SEQ ID NO: 811492 - DNA, 33 bp, Homo sapien
acccctgcccaggcaatttccactcatgtttta

SEQ ID NO: 811493 - DNA, 33 bp, Homo sapien
gtgctttacatacttacagactgggagtaatgg

SEQ ID NO: 811494 - DNA, 33 bp, Homo sapien
gtgctttacatacttatagactgggagtaatgg

SEQ ID NO: 811495 - DNA, 33 bp, Homo sapien
catgactttagttctacgcaaaccacatcctat

SEQ ID NO: 811496 - DNA, 33 bp, Homo sapien
catgactttagttctatgcaaaccacatcctat

SEQ ID NO: 811497 - DNA, 33 bp, Homo sapien
ttctaaacctctaagacactccctgttcatgtc

SEQ ID NO: 811498 - DNA, 33 bp, Homo sapien
ttctaaacctctaagatactccctgttcatgtc

SEQ ID NO: 811499 - DNA, 33 bp, Homo sapien
cacatcaattcaaacaccattcccatctccttt

SEQ ID NO: 811500 - DNA, 33 bp, Homo sapien
cacatcaattcaaacatcattcccatctccttt

SEQ ID NO: 811501 - DNA, 33 bp, Homo sapien
gcatttgtgcacatcaatgaaacacagtagagt

SEQ ID NO: 811502 - DNA, 33 bp, Homo sapien
gcatttgtgcacatcagtgaaacacagtagagt

SEQ ID NO: 811503 - DNA, 33 bp, Homo sapien
aaaaaggtgccctaaaatagagaactagagtat

SEQ ID NO: 811504 - DNA, 33 bp, Homo sapien
aaaaaggtgccctaaagtagagaactagagtat

SEQ ID NO: 811505 - DNA, 33 bp, Homo sapien
ggtaagaggtatctaaatcccaatgttctggga

SEQ ID NO: 811506 - DNA, 33 bp, Homo sapien
ggtaagaggtatctaagtcccaatgttctggga

SEQ ID NO: 811507 - DNA, 33 bp, Homo sapien
ttctcatttccatttcaccagaattaaaaaata

SEQ ID NO: 811508 - DNA, 33 bp, Homo sapien
ttctcatttccatttcgccagaattaaaaaata

SEQ ID NO: 811509 - DNA, 33 bp, Homo sapien
ataagtagcattaaaaattaacagcaactcagc

SEQ ID NO: 811510 - DNA, 33 bp, Homo sapien
ataagtagcattaaaatttaacagcaactcagc

SEQ ID NO: 811511 - DNA, 33 bp, Homo sapien
attctctgtaaccatccactcaaaactaatatt

SEQ ID NO: 811512 - DNA, 33 bp, Homo sapien
attctctgtaaccatctactcaaaactaatatt

SEQ ID NO: 811513 - DNA, 33 bp, Homo sapien
aatacaaagcgtcaatgaaacaatagaaaatct

SEQ ID NO: 811514 - DNA, 33 bp, Homo sapien
aatacaaagcgtcaattaaacaatagaaaatct

SEQ ID NO: 811515 - DNA, 33 bp, Homo sapien
ctctttttacctaatgcaactcctagaaagcat

SEQ ID NO: 811516 - DNA, 33 bp, Homo sapien
ctctttttacctaatggaactcctagaaagcat

SEQ ID NO: 811517 - DNA, 33 bp, Homo sapien
attccggtcataagaactgagttagaaataatt

SEQ ID NO: 811518 - DNA, 33 bp, Homo sapien
attccggtcataagaattgagttagaaataatt

SEQ ID NO: 811519 - DNA, 33 bp, Homo sapien
cgagtcctaacttatgccagtaatagagttgta

SEQ ID NO: 811520 - DNA, 33 bp, Homo sapien
cgagtcctaacttatggcagtaatagagttgta

SEQ ID NO: 811521 - DNA, 33 bp, Homo sapien
agtagctatcctaaaagaatcatggactccaat

SEQ ID NO: 811522 - DNA, 33 bp, Homo sapien
agtagctatcctaaaataatcatggactccaat

SEQ ID NO: 811523 - DNA, 33 bp, Homo sapien
tgagcatacaagtttcccttaaatctccagtga

SEQ ID NO: 811524 - DNA, 33 bp, Homo sapien
tgagcatacaagtttctcttaaatctccagtga

SEQ ID NO: 811525 - DNA, 33 bp, Homo sapien
gattaaagacaattaaaacacttggcctcttca

SEQ ID NO: 811526 - DNA, 33 bp, Homo sapien
gattaaagacaattaagacacttggcctcttca

SEQ ID NO: 811527 - DNA, 33 bp, Homo sapien
caaatgaggtgcctaacaatagagggcagaact

SEQ ID NO: 811528 - DNA, 33 bp, Homo sapien
caaatgaggtgcctaataatagagggcagaact

SEQ ID NO: 811529 - DNA, 33 bp, Homo sapien
gtgttagtaataggacagaaaactagctttatc

SEQ ID NO: 811530 - DNA, 33 bp, Homo sapien
gtgttagtaataggactgaaaactagctttatc

SEQ ID NO: 811531 - DNA, 33 bp, Homo sapien
gatcacttgtactgtacaataaaggatctgttt

SEQ ID NO: 811532 - DNA, 33 bp, Homo sapien
gatcacttgtactgtataataaaggatctgttt

SEQ ID NO: 811533 - DNA, 33 bp, Homo sapien
agaaggtatgatctcaacgacagaaacagatcc

SEQ ID NO: 811534 - DNA, 33 bp, Homo sapien
agaaggtatgatctcatcgacagaaacagatcc

SEQ ID NO: 811535 - DNA, 33 bp, Homo sapien
agaaactattgtgactcaagcctcatttccctc

SEQ ID NO: 811536 - DNA, 33 bp, Homo sapien
agaaactattgtgactgaagcctcatttccctc

SEQ ID NO: 811537 - DNA, 33 bp, Homo sapien
cctgtattaaaatagacgcaaccaattctgatg

SEQ ID NO: 811538 - DNA, 33 bp, Homo sapien
cctgtattaaaatagatgcaaccaattctgatg

SEQ ID NO: 811539 - DNA, 33 bp, Homo sapien
ctggttttagaggttacgttaatgttcatgaaa

SEQ ID NO: 811540 - DNA, 33 bp, Homo sapien
ctggttttagaggttatgttaatgttcatgaaa

SEQ ID NO: 811541 - DNA, 33 bp, Homo sapien
taacattaaacattccactaaactaatgtgata

SEQ ID NO: 811542 - DNA, 33 bp, Homo sapien
taacattaaacattccgctaaactaatgtgata

SEQ ID NO: 811543 - DNA, 33 bp, Homo sapien
atctatacatctactaaaatctaggcggaggtt

SEQ ID NO: 811544 - DNA, 33 bp, Homo sapien
atctatacatctactacaatctaggcggaggtt

SEQ ID NO: 811545 - DNA, 33 bp, Homo sapien
ccttcatatgctagaaagttagatctactgaca

SEQ ID NO: 811546 - DNA, 33 bp, Homo sapien
ccttcatatgctagaatgttagatctactgaca

SEQ ID NO: 811547 - DNA, 33 bp, Homo sapien
cataggttgactaagacgagaattatttgcatt

SEQ ID NO: 811548 - DNA, 33 bp, Homo sapien
cataggttgactaagatgagaattatttgcatt

SEQ ID NO: 811549 - DNA, 33 bp, Homo sapien
tttaagtattcttctacggatcgagtgtatata

SEQ ID NO: 811550 - DNA, 33 bp, Homo sapien
tttaagtattcttctatggatcgagtgtatata

SEQ ID NO: 811551 - DNA, 33 bp, Homo sapien
tttaaggtctgtaatccgagcgtaagtttagaa

SEQ ID NO: 811552 - DNA, 33 bp, Homo sapien
tttaaggtctgtaatctgagcgtaagtttagaa

SEQ ID NO: 811553 - DNA, 33 bp, Homo sapien
gaaaatggagcttttacgtggatgcaagattgt

SEQ ID NO: 811554 - DNA, 33 bp, Homo sapien
gaaaatggagcttttatgtggatgcaagattgt

SEQ ID NO: 811555 - DNA, 33 bp, Homo sapien
aatcaacagtcagttgcaaagtggacttcttga

SEQ ID NO: 811556 - DNA, 33 bp, Homo sapien
aatcaacagtcagttggaaagtggacttcttga

SEQ ID NO: 811557 - DNA, 33 bp, Homo sapien
ggattgttttggatatcaaggatacagtagaaa

SEQ ID NO: 811558 - DNA, 33 bp, Homo sapien
ggattgttttggatatgaaggatacagtagaaa

SEQ ID NO: 811559 - DNA, 33 bp, Homo sapien
agccaaattccaaataaccctggaaaggtcact

SEQ ID NO: 811560 - DNA, 33 bp, Homo sapien
agccaaattccaaatacccctggaaaggtcact

SEQ ID NO: 811561 - DNA, 33 bp, Homo sapien
ctataatgaatgattcacaaaggagagtcacaa

SEQ ID NO: 811562 - DNA, 33 bp, Homo sapien
ctataatgaatgattcgcaaaggagagtcacaa

SEQ ID NO: 811563 - DNA, 33 bp, Homo sapien
gtactaacaaagataactgcttccaagtaacag

SEQ ID NO: 811564 - DNA, 33 bp, Homo sapien
gtactaacaaagataattgcttccaagtaacag

SEQ ID NO: 811565 - DNA, 33 bp, Homo sapien
tatttttctaatgacaacattcacttggtactt

SEQ ID NO: 811566 - DNA, 33 bp, Homo sapien
tatttttctaatgacagcattcacttggtactt

SEQ ID NO: 811567 - DNA, 33 bp, Homo sapien
ttctgcttttgattcaaaaaattttggatgggc

SEQ ID NO: 811568 - DNA, 33 bp, Homo sapien
ttctgcttttgattcagaaaattttggatgggc

SEQ ID NO: 811569 - DNA, 33 bp, Homo sapien
gtacattattttgaaacacaatactggtggggg

SEQ ID NO: 811570 - DNA, 33 bp, Homo sapien
gtacattattttgaaagacaatactggtggggg

SEQ ID NO: 811571 - DNA, 33 bp, Homo sapien
cattggtatggagagccgattcttagggtattc

SEQ ID NO: 811572 - DNA, 33 bp, Homo sapien
cattggtatggagagcggattcttagggtattc

SEQ ID NO: 811573 - DNA, 33 bp, Homo sapien
cacacgtcgaagaactaaacttttgctattgtt

SEQ ID NO: 811574 - DNA, 33 bp, Homo sapien
cacacgtcgaagaactgaacttttgctattgtt

SEQ ID NO: 811575 - DNA, 33 bp, Homo sapien
agggtatacttgggcactcagaagttccccggc

SEQ ID NO: 811576 - DNA, 33 bp, Homo sapien
agggtatacttgggcattcagaagttccccggc

SEQ ID NO: 811577 - DNA, 33 bp, Homo sapien
ttctgctgttttttataaccacaaagtatagca

SEQ ID NO: 811578 - DNA, 33 bp, Homo sapien
ttctgctgttttttatgaccacaaagtatagca

SEQ ID NO: 811579 - DNA, 33 bp, Homo sapien
tggatatgttcctaggaataaaaattgctgagt

SEQ ID NO: 811580 - DNA, 33 bp, Homo sapien
tggatatgttcctaggtataaaaattgctgagt

SEQ ID NO: 811581 - DNA, 33 bp, Homo sapien
atcacacaaaaaattaggctgagtaaacaaagt

SEQ ID NO: 811582 - DNA, 33 bp, Homo sapien
atcacacaaaaaattatgctgagtaaacaaagt

SEQ ID NO: 811583 - DNA, 33 bp, Homo sapien
cattaactgtcaaagaagagaaccatgtatttt

SEQ ID NO: 811584 - DNA, 33 bp, Homo sapien
cattaactgtcaaagaggagaaccatgtatttt

SEQ ID NO: 811585 - DNA, 33 bp, Homo sapien
attgtgctgtccattacggtaatcattagtcaa

SEQ ID NO: 811586 - DNA, 33 bp, Homo sapien
attgtgctgtccattatggtaatcattagtcaa

SEQ ID NO: 811587 - DNA, 33 bp, Homo sapien
agttggtagcccatgactaaaatatttggttcc

SEQ ID NO: 811588 - DNA, 33 bp, Homo sapien
agttggtagcccatgattaaaatatttggttcc

SEQ ID NO: 811589 - DNA, 33 bp, Homo sapien
aagggcccatcaataaccacaacagttttctgc

SEQ ID NO: 811590 - DNA, 33 bp, Homo sapien
aagggcccatcaataatcacaacagttttctgc

SEQ ID NO: 811591 - DNA, 33 bp, Homo sapien
agaatcaaaattgaaaataccttcagatgactg

SEQ ID NO: 811592 - DNA, 33 bp, Homo sapien
agaatcaaaattgaaagtaccttcagatgactg

SEQ ID NO: 811593 - DNA, 33 bp, Homo sapien
gcagatggatactaaacaggcctgctaaaagaa

SEQ ID NO: 811594 - DNA, 33 bp, Homo sapien
gcagatggatactaaataggcctgctaaaagaa

SEQ ID NO: 811595 - DNA, 33 bp, Homo sapien
cagacatcgtagaaaggatacctgtactctaaa

SEQ ID NO: 811596 - DNA, 33 bp, Homo sapien
cagacatcgtagaaagtatacctgtactctaaa

SEQ ID NO: 811597 - DNA, 33 bp, Homo sapien
aagccagagtacaaaacagccagagaaatagtg

SEQ ID NO: 811598 - DNA, 33 bp, Homo sapien
aagccagagtacaaaagagccagagaaatagtg

SEQ ID NO: 811599 - DNA, 33 bp, Homo sapien
tttggaactaaagaaaacattccatatgaacat

SEQ ID NO: 811600 - DNA, 33 bp, Homo sapien
tttggaactaaagaaagcattccatatgaacat

SEQ ID NO: 811601 - DNA, 33 bp, Homo sapien
ggaagtcttttgtggacatttaaagatatagaa

SEQ ID NO: 811602 - DNA, 33 bp, Homo sapien
ggaagtcttttgtggagatttaaagatatagaa

SEQ ID NO: 811603 - DNA, 33 bp, Homo sapien
cactcatttatattccaatcactagatgcctta

SEQ ID NO: 811604 - DNA, 33 bp, Homo sapien
cactcatttatattcccatcactagatgcctta

SEQ ID NO: 811605 - DNA, 33 bp, Homo sapien
aaaattaaggagtaaagctttgagcaaatatca

SEQ ID NO: 811606 - DNA, 33 bp, Homo sapien
aaaattaaggagtaaatctttgagcaaatatca

SEQ ID NO: 811607 - DNA, 33 bp, Homo sapien
catgtccatctcaggaaaattgtatttaaaaca

SEQ ID NO: 811608 - DNA, 33 bp, Homo sapien
catgtccatctcaggagaattgtatttaaaaca

SEQ ID NO: 811609 - DNA, 33 bp, Homo sapien
ggttcactgaaggaaccgaaagcagggcaaaga

SEQ ID NO: 811610 - DNA, 33 bp, Homo sapien
ggttcactgaaggaactgaaagcagggcaaaga

SEQ ID NO: 811611 - DNA, 33 bp, Homo sapien
gctcataggtgaaaagcaggcaacagaaagaga

SEQ ID NO: 811612 - DNA, 33 bp, Homo sapien
gctcataggtgaaaagtaggcaacagaaagaga

SEQ ID NO: 811613 - DNA, 33 bp, Homo sapien
cttggaaaaatgtgtccagagcaaaaagatcgg

SEQ ID NO: 811614 - DNA, 33 bp, Homo sapien
cttggaaaaatgtgtctagagcaaaaagatcgg

SEQ ID NO: 811615 - DNA, 33 bp, Homo sapien
cgaaggatcaaattgaagaacttttccagaaag

SEQ ID NO: 811616 - DNA, 33 bp, Homo sapien
cgaaggatcaaattgaggaacttttccagaaag

SEQ ID NO: 811617 - DNA, 33 bp, Homo sapien
tatctacttatgtatccactcttacacaaatat

SEQ ID NO: 811618 - DNA, 33 bp, Homo sapien
tatctacttatgtatctactcttacacaaatat

SEQ ID NO: 811619 - DNA, 33 bp, Homo sapien
caacacaattttattacgcgtaacaattttcta

SEQ ID NO: 811620 - DNA, 33 bp, Homo sapien
caacacaattttattatgcgtaacaattttcta

SEQ ID NO: 811621 - DNA, 33 bp, Homo sapien
ttatggtgctctgcaaattattattgtcctgaa

SEQ ID NO: 811622 - DNA, 33 bp, Homo sapien
ttatggtgctctgcaagttattattgtcctgaa

SEQ ID NO: 811623 - DNA, 33 bp, Homo sapien
tcattctcttaggtcaagaagtttaaagcaaac

SEQ ID NO: 811624 - DNA, 33 bp, Homo sapien
tcattctcttaggtcatgaagtttaaagcaaac

SEQ ID NO: 811625 - DNA, 33 bp, Homo sapien
tgaggagcattaaacacagctgtatataatcct

SEQ ID NO: 811626 - DNA, 33 bp, Homo sapien
tgaggagcattaaacatagctgtatataatcct

SEQ ID NO: 811627 - DNA, 33 bp, Homo sapien
ttaaaagatttctcaacgtgcaaaatttttaag

SEQ ID NO: 811628 - DNA, 33 bp, Homo sapien
ttaaaagatttctcaatgtgcaaaatttttaag

SEQ ID NO: 811629 - DNA, 33 bp, Homo sapien
tgcatctctgtattaactggcagactcaaggga

SEQ ID NO: 811630 - DNA, 33 bp, Homo sapien
tgcatctctgtattaattggcagactcaaggga

SEQ ID NO: 811631 - DNA, 33 bp, Homo sapien
aggcactctaaatgacaaattgagctcaaacat

SEQ ID NO: 811632 - DNA, 33 bp, Homo sapien
aggcactctaaatgacgaattgagctcaaacat

SEQ ID NO: 811633 - DNA, 33 bp, Homo sapien
agtcagactagcaagcgataacaaatgcacttt

SEQ ID NO: 811634 - DNA, 33 bp, Homo sapien
agtcagactagcaagctataacaaatgcacttt

SEQ ID NO: 811635 - DNA, 33 bp, Homo sapien
caccgttaaaccttcaaactagcactgcaaaaa

SEQ ID NO: 811636 - DNA, 33 bp, Homo sapien
caccgttaaaccttcagactagcactgcaaaaa

SEQ ID NO: 811637 - DNA, 33 bp, Homo sapien
aattgaagagttacaaacttgcccattttcctt

SEQ ID NO: 811638 - DNA, 33 bp, Homo sapien
aattgaagagttacaagcttgcccattttcctt

SEQ ID NO: 811639 - DNA, 33 bp, Homo sapien
atgcaacaattgtaaaatttaagagcctggaaa

SEQ ID NO: 811640 - DNA, 33 bp, Homo sapien
atgcaacaattgtaaattttaagagcctggaaa

SEQ ID NO: 811641 - DNA, 33 bp, Homo sapien
gtgagctaacctgaacacttgaaattttcaaaa

SEQ ID NO: 811642 - DNA, 33 bp, Homo sapien
gtgagctaacctgaacgcttgaaattttcaaaa

SEQ ID NO: 811643 - DNA, 33 bp, Homo sapien
actttgatgaggaaaacagagtgtgagcaaaat

SEQ ID NO: 811644 - DNA, 33 bp, Homo sapien
actttgatgaggaaaagagagtgtgagcaaaat

SEQ ID NO: 811645 - DNA, 33 bp, Homo sapien
caaagaagattaccgacgggcaaactataggag

SEQ ID NO: 811646 - DNA, 33 bp, Homo sapien
caaagaagattaccgatgggcaaactataggag

SEQ ID NO: 811647 - DNA, 33 bp, Homo sapien
gcatttctgattaaaaattgtaccccagatcaa

SEQ ID NO: 811648 - DNA, 33 bp, Homo sapien
gcatttctgattaaaatttgtaccccagatcaa

SEQ ID NO: 811649 - DNA, 33 bp, Homo sapien
taaaatagatttttatcaaatacacaccagaca

SEQ ID NO: 811650 - DNA, 33 bp, Homo sapien
taaaatagatttttatgaaatacacaccagaca

SEQ ID NO: 811651 - DNA, 33 bp, Homo sapien
tgattaatgtagaatgccatcaattttcttaat

SEQ ID NO: 811652 - DNA, 33 bp, Homo sapien
tgattaatgtagaatgtcatcaattttcttaat

SEQ ID NO: 811653 - DNA, 33 bp, Homo sapien
cctaagatcataaacaagcaaagaagttctttc

SEQ ID NO: 811654 - DNA, 33 bp, Homo sapien
cctaagatcataaacaggcaaagaagttctttc

SEQ ID NO: 811655 - DNA, 33 bp, Homo sapien
aaacacaccagaggcacgaaatacgtactcaaa

SEQ ID NO: 811656 - DNA, 33 bp, Homo sapien
aaacacaccagaggcatgaaatacgtactcaaa

SEQ ID NO: 811657 - DNA, 33 bp, Homo sapien
aaagaagtcacactacaccagtcatattcttct

SEQ ID NO: 811658 - DNA, 33 bp, Homo sapien
aaagaagtcacactactccagtcatattcttct

SEQ ID NO: 811659 - DNA, 33 bp, Homo sapien
aagcccatagtcagaactgtagtaagctagaca

SEQ ID NO: 811660 - DNA, 33 bp, Homo sapien
aagcccatagtcagaattgtagtaagctagaca

SEQ ID NO: 811661 - DNA, 33 bp, Homo sapien
tgatgtcagtcattcaagaaggtaaatcaacta

SEQ ID NO: 811662 - DNA, 33 bp, Homo sapien
tgatgtcagtcattcatgaaggtaaatcaacta

SEQ ID NO: 811663 - DNA, 33 bp, Homo sapien
aaggtgagggcgccataaactaggacaaaacat

SEQ ID NO: 811664 - DNA, 33 bp, Homo sapien
aaggtgagggcgccatgaactaggacaaaacat

SEQ ID NO: 811665 - DNA, 33 bp, Homo sapien
ctatttctctccattacattagtcccatcagca

SEQ ID NO: 811666 - DNA, 33 bp, Homo sapien
ctatttctctccattatattagtcccatcagca

SEQ ID NO: 811667 - DNA, 33 bp, Homo sapien
agaaatgtgtctcccaggaagtacctcgaaatg

SEQ ID NO: 811668 - DNA, 33 bp, Homo sapien
agaaatgtgtctcccatgaagtacctcgaaatg

SEQ ID NO: 811669 - DNA, 33 bp, Homo sapien
tcagttacaatgatatcaagtggagaatatatt

SEQ ID NO: 811670 - DNA, 33 bp, Homo sapien
tcagttacaatgatatgaagtggagaatatatt

SEQ ID NO: 811671 - DNA, 33 bp, Homo sapien
tggtttaaaggatttcaaaggccaatccaaaaa

SEQ ID NO: 811672 - DNA, 33 bp, Homo sapien
tggtttaaaggatttcgaaggccaatccaaaaa

SEQ ID NO: 811673 - DNA, 33 bp, Homo sapien
tggcaaacagagtctaaggaataaataatatgt

SEQ ID NO: 811674 - DNA, 33 bp, Homo sapien
tggcaaacagagtctagggaataaataatatgt

SEQ ID NO: 811675 - DNA, 33 bp, Homo sapien
tctcattaatcagacacgaaaaattgtttgtaa

SEQ ID NO: 811676 - DNA, 33 bp, Homo sapien
tctcattaatcagacatgaaaaattgtttgtaa

SEQ ID NO: 811677 - DNA, 33 bp, Homo sapien
ttattaaaatattcaccgcattgacaggctagg

SEQ ID NO: 811678 - DNA, 33 bp, Homo sapien
ttattaaaatattcactgcattgacaggctagg

SEQ ID NO: 811679 - DNA, 33 bp, Homo sapien
ctcatgatagtagaaaatggtgaaaaacactga

SEQ ID NO: 811680 - DNA, 33 bp, Homo sapien
ctcatgatagtagaaactggtgaaaaacactga

SEQ ID NO: 811681 - DNA, 33 bp, Homo sapien
caatctacgagacatacgctagaaatattgaaa

SEQ ID NO: 811682 - DNA, 33 bp, Homo sapien
caatctacgagacatatgctagaaatattgaaa

SEQ ID NO: 811683 - DNA, 33 bp, Homo sapien
atgtgattcagttgtacacaatgagtaatctga

SEQ ID NO: 811684 - DNA, 33 bp, Homo sapien
atgtgattcagttgtagacaatgagtaatctga

SEQ ID NO: 811685 - DNA, 33 bp, Homo sapien
tgaagaatgctaaaaggaacaatgggcaatttt

SEQ ID NO: 811686 - DNA, 33 bp, Homo sapien
tgaagaatgctaaaagtaacaatgggcaatttt

SEQ ID NO: 811687 - DNA, 33 bp, Homo sapien
tagacagtaaatgagaaggaaggcatcccaagt

SEQ ID NO: 811688 - DNA, 33 bp, Homo sapien
tagacagtaaatgagacggaaggcatcccaagt

SEQ ID NO: 811689 - DNA, 33 bp, Homo sapien
ctctgggcaattttccactgagtctttcatggt

SEQ ID NO: 811690 - DNA, 33 bp, Homo sapien
ctctgggcaattttccgctgagtctttcatggt

SEQ ID NO: 811691 - DNA, 33 bp, Homo sapien
caccatatctgctaaacagagaaaaaagaaaag

SEQ ID NO: 811692 - DNA, 33 bp, Homo sapien
caccatatctgctaaatagagaaaaaagaaaag

SEQ ID NO: 811693 - DNA, 33 bp, Homo sapien
aacaaagaaaattctaaattagagagcaagagg

SEQ ID NO: 811694 - DNA, 33 bp, Homo sapien
aacaaagaaaattctatattagagagcaagagg

SEQ ID NO: 811695 - DNA, 33 bp, Homo sapien
ttgttattcaagactacgttccaggtatgtggc

SEQ ID NO: 811696 - DNA, 33 bp, Homo sapien
ttgttattcaagactatgttccaggtatgtggc

SEQ ID NO: 811697 - DNA, 33 bp, Homo sapien
aaagtgagtataatgacagtctccctccaaacc

SEQ ID NO: 811698 - DNA, 33 bp, Homo sapien
aaagtgagtataatgagagtctccctccaaacc

SEQ ID NO: 811699 - DNA, 33 bp, Homo sapien
atgcagaacaatatacgcaataactgcaaaata

SEQ ID NO: 811700 - DNA, 33 bp, Homo sapien
atgcagaacaatatactcaataactgcaaaata

SEQ ID NO: 811701 - DNA, 33 bp, Homo sapien
aagagggaaggtttcacgtggcagtccatataa

SEQ ID NO: 811702 - DNA, 33 bp, Homo sapien
aagagggaaggtttcatgtggcagtccatataa

SEQ ID NO: 811703 - DNA, 33 bp, Homo sapien
gtggaagttgacacccaggatattctcctttct

SEQ ID NO: 811704 - DNA, 33 bp, Homo sapien
gtggaagttgacacccgggatattctcctttct

SEQ ID NO: 811705 - DNA, 33 bp, Homo sapien
attatcatacaactaactgacgttcatagaaat

SEQ ID NO: 811706 - DNA, 33 bp, Homo sapien
attatcatacaactaagtgacgttcatagaaat

SEQ ID NO: 811707 - DNA, 33 bp, Homo sapien
tgatttctttagactacgtttgacaatttaaat

SEQ ID NO: 811708 - DNA, 33 bp, Homo sapien
tgatttctttagactatgtttgacaatttaaat

SEQ ID NO: 811709 - DNA, 33 bp, Homo sapien
ttgttgtttccacagactaaaaatagaaaccga

SEQ ID NO: 811710 - DNA, 33 bp, Homo sapien
ttgttgtttccacagattaaaaatagaaaccga

SEQ ID NO: 811711 - DNA, 33 bp, Homo sapien
agggtcagatcccatcccattataaaaagcttg

SEQ ID NO: 811712 - DNA, 33 bp, Homo sapien
agggtcagatcccatcgcattataaaaagcttg

SEQ ID NO: 811713 - DNA, 33 bp, Homo sapien
atatgggacatggagagagaaaagacatgtttt

SEQ ID NO: 811714 - DNA, 33 bp, Homo sapien
atatgggacatggagatagaaaagacatgtttt

SEQ ID NO: 811715 - DNA, 33 bp, Homo sapien
ctggggctcaaatgagaagttgtcagtttcatg

SEQ ID NO: 811716 - DNA, 33 bp, Homo sapien
ctggggctcaaatgagcagttgtcagtttcatg

SEQ ID NO: 811717 - DNA, 33 bp, Homo sapien
caaagagaaaggcaaacgtattgtgtatctaaa

SEQ ID NO: 811718 - DNA, 33 bp, Homo sapien
caaagagaaaggcaaatgtattgtgtatctaaa

SEQ ID NO: 811719 - DNA, 33 bp, Homo sapien
ccaatcaatggggttaaagaaagtcgttatatt

SEQ ID NO: 811720 - DNA, 33 bp, Homo sapien
ccaatcaatggggttagagaaagtcgttatatt

SEQ ID NO: 811721 - DNA, 33 bp, Homo sapien
ttaattttctctgtgaaacgggcattttgctac

SEQ ID NO: 811722 - DNA, 33 bp, Homo sapien
ttaattttctctgtgatacgggcattttgctac

SEQ ID NO: 811723 - DNA, 33 bp, Homo sapien
caagctacctaaactcactgagactcggtttcc

SEQ ID NO: 811724 - DNA, 33 bp, Homo sapien
caagctacctaaactcgctgagactcggtttcc

SEQ ID NO: 811725 - DNA, 33 bp, Homo sapien
aaaatttgaatccatcaaactgcatattgttgt

SEQ ID NO: 811726 - DNA, 33 bp, Homo sapien
aaaatttgaatccatcgaactgcatattgttgt

SEQ ID NO: 811727 - DNA, 33 bp, Homo sapien
aagcctcagaatgaagaccatctagcagaagac

SEQ ID NO: 811728 - DNA, 33 bp, Homo sapien
aagcctcagaatgaaggccatctagcagaagac

SEQ ID NO: 811729 - DNA, 33 bp, Homo sapien
cttaatttctcacgacactatgaggcagatact

SEQ ID NO: 811730 - DNA, 33 bp, Homo sapien
cttaatttctcacgacgctatgaggcagatact

SEQ ID NO: 811731 - DNA, 33 bp, Homo sapien
agaagttatgtttgagcacaatggaaacagata

SEQ ID NO: 811732 - DNA, 33 bp, Homo sapien
agaagttatgtttgaggacaatggaaacagata

SEQ ID NO: 811733 - DNA, 33 bp, Homo sapien
ctgcttagggtgctcaaaatacagacatttaaa

SEQ ID NO: 811734 - DNA, 33 bp, Homo sapien
ctgcttagggtgctcagaatacagacatttaaa

SEQ ID NO: 811735 - DNA, 33 bp, Homo sapien
ctatatgattatggaccagaaaggtaattcttc

SEQ ID NO: 811736 - DNA, 33 bp, Homo sapien
ctatatgattatggactagaaaggtaattcttc

SEQ ID NO: 811737 - DNA, 33 bp, Homo sapien
tgcagctggataaaagaacaatggaaacaaaga

SEQ ID NO: 811738 - DNA, 33 bp, Homo sapien
tgcagctggataaaagtacaatggaaacaaaga

SEQ ID NO: 811739 - DNA, 33 bp, Homo sapien
ggcatcattcaaattacagtcagctttgtctta

SEQ ID NO: 811740 - DNA, 33 bp, Homo sapien
ggcatcattcaaattagagtcagctttgtctta

SEQ ID NO: 811741 - DNA, 33 bp, Homo sapien
catgctccttcccagacgctagtgctcatgcct

SEQ ID NO: 811742 - DNA, 33 bp, Homo sapien
catgctccttcccagatgctagtgctcatgcct

SEQ ID NO: 811743 - DNA, 33 bp, Homo sapien
atcctgaatggataaagcaatgggaagacagaa

SEQ ID NO: 811744 - DNA, 33 bp, Homo sapien
atcctgaatggataaatcaatgggaagacagaa

SEQ ID NO: 811745 - DNA, 33 bp, Homo sapien
ttaaaaaataccatgcaaatagtaaccaaataa

SEQ ID NO: 811746 - DNA, 33 bp, Homo sapien
ttaaaaaataccatgccaatagtaaccaaataa

SEQ ID NO: 811747 - DNA, 33 bp, Homo sapien
atcatggaggtcctgacgcagagatgggtagcc

SEQ ID NO: 811748 - DNA, 33 bp, Homo sapien
atcatggaggtcctgatgcagagatgggtagcc

SEQ ID NO: 811749 - DNA, 33 bp, Homo sapien
ttacttaaggctggataacaacctcctaagcag

SEQ ID NO: 811750 - DNA, 33 bp, Homo sapien
ttacttaaggctggatgacaacctcctaagcag

SEQ ID NO: 811751 - DNA, 33 bp, Homo sapien
gttccatatctgaaaaggttccctacgtatttc

SEQ ID NO: 811752 - DNA, 33 bp, Homo sapien
gttccatatctgaaaatgttccctacgtatttc

SEQ ID NO: 811753 - DNA, 33 bp, Homo sapien
gcacatcttgaaccaaatcacattattgggcta

SEQ ID NO: 811754 - DNA, 33 bp, Homo sapien
gcacatcttgaaccaagtcacattattgggcta

SEQ ID NO: 811755 - DNA, 33 bp, Homo sapien
catatgatcaccttgccccaatttaaaattgtg

SEQ ID NO: 811756 - DNA, 33 bp, Homo sapien
catatgatcaccttgctccaatttaaaattgtg

SEQ ID NO: 811757 - DNA, 33 bp, Homo sapien
cattatctatcattaaatcgaaaaatctgtcag

SEQ ID NO: 811758 - DNA, 33 bp, Homo sapien
cattatctatcattaagtcgaaaaatctgtcag

SEQ ID NO: 811759 - DNA, 33 bp, Homo sapien
tggtaataaaactgaacggttcactaccataag

SEQ ID NO: 811760 - DNA, 33 bp, Homo sapien
tggtaataaaactgaatggttcactaccataag

SEQ ID NO: 811761 - DNA, 33 bp, Homo sapien
ggtctctgcttttcaaactttagcaggtttaat

SEQ ID NO: 811762 - DNA, 33 bp, Homo sapien
ggtctctgcttttcaacctttagcaggtttaat

SEQ ID NO: 811763 - DNA, 33 bp, Homo sapien
agcactcgaatatgaaaactcggtggggtaggg

SEQ ID NO: 811764 - DNA, 33 bp, Homo sapien
agcactcgaatatgaagactcggtggggtaggg

SEQ ID NO: 811765 - DNA, 33 bp, Homo sapien
attttcaggtgtgttacagttagccaagaagct

SEQ ID NO: 811766 - DNA, 33 bp, Homo sapien
attttcaggtgtgttatagttagccaagaagct

SEQ ID NO: 811767 - DNA, 33 bp, Homo sapien
ttctccttttggaaacggtacattaaagactag

SEQ ID NO: 811768 - DNA, 33 bp, Homo sapien
ttctccttttggaaactgtacattaaagactag

SEQ ID NO: 811769 - DNA, 33 bp, Homo sapien
gatgtggataccctgcacagtgttagtggaaac

SEQ ID NO: 811770 - DNA, 33 bp, Homo sapien
gatgtggataccctgcgcagtgttagtggaaac

SEQ ID NO: 811771 - DNA, 33 bp, Homo sapien
ttcttataatgaaggacgattacaattaaaatt

SEQ ID NO: 811772 - DNA, 33 bp, Homo sapien
ttcttataatgaaggatgattacaattaaaatt

SEQ ID NO: 811773 - DNA, 33 bp, Homo sapien
gttagttatttcaaaactgagagaatatggcca

SEQ ID NO: 811774 - DNA, 33 bp, Homo sapien
gttagttatttcaaaattgagagaatatggcca

SEQ ID NO: 811775 - DNA, 33 bp, Homo sapien
tgaccattaccaccaccattacattaaaaaatc

SEQ ID NO: 811776 - DNA, 33 bp, Homo sapien
tgaccattaccaccacgattacattaaaaaatc

SEQ ID NO: 811777 - DNA, 33 bp, Homo sapien
tttgtagtttatcatacgtatatcctggaaaat

SEQ ID NO: 811778 - DNA, 33 bp, Homo sapien
tttgtagtttatcataggtatatcctggaaaat

SEQ ID NO: 811779 - DNA, 33 bp, Homo sapien
gtgcaatgtgacagaacgtgccctttcttatgc

SEQ ID NO: 811780 - DNA, 33 bp, Homo sapien
gtgcaatgtgacagaatgtgccctttcttatgc

SEQ ID NO: 811781 - DNA, 33 bp, Homo sapien
tgcagcttttatgtcaccacattaagcacccca

SEQ ID NO: 811782 - DNA, 33 bp, Homo sapien
tgcagcttttatgtcagcacattaagcacccca

SEQ ID NO: 811783 - DNA, 33 bp, Homo sapien
gaacattaggtaggcacctttcaaatcatcaat

SEQ ID NO: 811784 - DNA, 33 bp, Homo sapien
gaacattaggtaggcagctttcaaatcatcaat

SEQ ID NO: 811785 - DNA, 33 bp, Homo sapien
agggtcaggaaaataacctgcttcactaatgtt

SEQ ID NO: 811786 - DNA, 33 bp, Homo sapien
agggtcaggaaaataatctgcttcactaatgtt

SEQ ID NO: 811787 - DNA, 33 bp, Homo sapien
cgagtgggtacttaacacttggcagaatgctaa

SEQ ID NO: 811788 - DNA, 33 bp, Homo sapien
cgagtgggtacttaacgcttggcagaatgctaa

SEQ ID NO: 811789 - DNA, 33 bp, Homo sapien
agaaagagaaagctaaaaactggaagcacaagg

SEQ ID NO: 811790 - DNA, 33 bp, Homo sapien
agaaagagaaagctaagaactggaagcacaagg

SEQ ID NO: 811791 - DNA, 33 bp, Homo sapien
agaggttcagggtggaataataaatgtggaaga

SEQ ID NO: 811792 - DNA, 33 bp, Homo sapien
agaggttcagggtggactaataaatgtggaaga

SEQ ID NO: 811793 - DNA, 33 bp, Homo sapien
gttttctcttctttaaacacctctcttcacttg

SEQ ID NO: 811794 - DNA, 33 bp, Homo sapien
gttttctcttctttaatcacctctcttcacttg

SEQ ID NO: 811795 - DNA, 33 bp, Homo sapien
tatagtgagaacaatacgtggtagggaaaacaa

SEQ ID NO: 811796 - DNA, 33 bp, Homo sapien
tatagtgagaacaatatgtggtagggaaaacaa

SEQ ID NO: 811797 - DNA, 33 bp, Homo sapien
acatcgcctcctgtaactggcttgttcttttca

SEQ ID NO: 811798 - DNA, 33 bp, Homo sapien
acatcgcctcctgtaattggcttgttcttttca

SEQ ID NO: 811799 - DNA, 33 bp, Homo sapien
ttgttttgatattctaagatggagcctaagaaa

SEQ ID NO: 811800 - DNA, 33 bp, Homo sapien
ttgttttgatattctacgatggagcctaagaaa

SEQ ID NO: 811801 - DNA, 33 bp, Homo sapien
agctgtccctttcactcagagtgagagccaaat

SEQ ID NO: 811802 - DNA, 33 bp, Homo sapien
agctgtccctttcactgagagtgagagccaaat

SEQ ID NO: 811803 - DNA, 33 bp, Homo sapien
cctacacactgctaaaaactgtcaagaggacaa

SEQ ID NO: 811804 - DNA, 33 bp, Homo sapien
cctacacactgctaaagactgtcaagaggacaa

SEQ ID NO: 811805 - DNA, 33 bp, Homo sapien
atgtgtgtatcctagaactttattttgctggtt

SEQ ID NO: 811806 - DNA, 33 bp, Homo sapien
atgtgtgtatcctagatctttattttgctggtt

SEQ ID NO: 811807 - DNA, 33 bp, Homo sapien
gccctcttctgggaaaacaagtatcaaacagga

SEQ ID NO: 811808 - DNA, 33 bp, Homo sapien
gccctcttctgggaaatcaagtatcaaacagga

SEQ ID NO: 811809 - DNA, 33 bp, Homo sapien
gttccagggtcaccccacatctctgcatatatc

SEQ ID NO: 811810 - DNA, 33 bp, Homo sapien
gttccagggtcaccccgcatctctgcatatatc

SEQ ID NO: 811811 - DNA, 33 bp, Homo sapien
acaggtttgaactgcaaggatctacttatatgt

SEQ ID NO: 811812 - DNA, 33 bp, Homo sapien
acaggtttgaactgcatggatctacttatatgt

SEQ ID NO: 811813 - DNA, 33 bp, Homo sapien
cttttaataatatggcaaacagctcatcagaga

SEQ ID NO: 811814 - DNA, 33 bp, Homo sapien
cttttaataatatggcgaacagctcatcagaga

SEQ ID NO: 811815 - DNA, 33 bp, Homo sapien
ttgtgaaccatgagacacacaaccttctctgtc

SEQ ID NO: 811816 - DNA, 33 bp, Homo sapien
ttgtgaaccatgagacgcacaaccttctctgtc

SEQ ID NO: 811817 - DNA, 33 bp, Homo sapien
attgttttgcatggtaacaattttttaaacaat

SEQ ID NO: 811818 - DNA, 33 bp, Homo sapien
attgttttgcatggtatcaattttttaaacaat

SEQ ID NO: 811819 - DNA, 33 bp, Homo sapien
caaaagcaagtaacaacgcacagtgaggtattt

SEQ ID NO: 811820 - DNA, 33 bp, Homo sapien
caaaagcaagtaacaatgcacagtgaggtattt

SEQ ID NO: 811821 - DNA, 33 bp, Homo sapien
tatttgatgatctctacgaatagccatcaaaga

SEQ ID NO: 811822 - DNA, 33 bp, Homo sapien
tatttgatgatctctatgaatagccatcaaaga

SEQ ID NO: 811823 - DNA, 33 bp, Homo sapien
aaggaaatcataactacagctcagatgacattg

SEQ ID NO: 811824 - DNA, 33 bp, Homo sapien
aaggaaatcataactatagctcagatgacattg

SEQ ID NO: 811825 - DNA, 33 bp, Homo sapien
cattttgacagtaacaagaaatagaatcaggaa

SEQ ID NO: 811826 - DNA, 33 bp, Homo sapien
cattttgacagtaacaggaaatagaatcaggaa

SEQ ID NO: 811827 - DNA, 33 bp, Homo sapien
tttcaaaacttactgcaaaactagagtaagcaa

SEQ ID NO: 811828 - DNA, 33 bp, Homo sapien
tttcaaaacttactgcgaaactagagtaagcaa

SEQ ID NO: 811829 - DNA, 33 bp, Homo sapien
tatatgtagaatctcaacggaccttgcatagcc

SEQ ID NO: 811830 - DNA, 33 bp, Homo sapien
tatatgtagaatctcagcggaccttgcatagcc

SEQ ID NO: 811831 - DNA, 33 bp, Homo sapien
tacttcaggtcaatccactcgggtccccttcca

SEQ ID NO: 811832 - DNA, 33 bp, Homo sapien
tacttcaggtcaatccgctcgggtccccttcca

SEQ ID NO: 811833 - DNA, 33 bp, Homo sapien
cagtgaagatgaaaacagccttctattggaaga

SEQ ID NO: 811834 - DNA, 33 bp, Homo sapien
cagtgaagatgaaaacggccttctattggaaga

SEQ ID NO: 811835 - DNA, 33 bp, Homo sapien
ataattcatgtccaaaatctgaattgtaatact

SEQ ID NO: 811836 - DNA, 33 bp, Homo sapien
ataattcatgtccaaagtctgaattgtaatact

SEQ ID NO: 811837 - DNA, 33 bp, Homo sapien
atctcatttaattatcacattgaggtagatatt

SEQ ID NO: 811838 - DNA, 33 bp, Homo sapien
atctcatttaattatcgcattgaggtagatatt

SEQ ID NO: 811839 - DNA, 33 bp, Homo sapien
tttgtgtagtgatggaaatttatgtgatgtcaa

SEQ ID NO: 811840 - DNA, 33 bp, Homo sapien
tttgtgtagtgatggacatttatgtgatgtcaa

SEQ ID NO: 811841 - DNA, 33 bp, Homo sapien
atgacaaaatcaataacaagtgaattgctttga

SEQ ID NO: 811842 - DNA, 33 bp, Homo sapien
atgacaaaatcaataagaagtgaattgctttga

SEQ ID NO: 811843 - DNA, 33 bp, Homo sapien
acacaaaatgtctatacgtgttcggtgcggatg

SEQ ID NO: 811844 - DNA, 33 bp, Homo sapien
acacaaaatgtctatatgtgttcggtgcggatg

SEQ ID NO: 811845 - DNA, 33 bp, Homo sapien
agaccttgcaggaactaacagagtaaaaaacac

SEQ ID NO: 811846 - DNA, 33 bp, Homo sapien
agaccttgcaggaactgacagagtaaaaaacac

SEQ ID NO: 811847 - DNA, 33 bp, Homo sapien
aaccacctgtaataatcacttgcacatacttaa

SEQ ID NO: 811848 - DNA, 33 bp, Homo sapien
aaccacctgtaataattacttgcacatacttaa

SEQ ID NO: 811849 - DNA, 33 bp, Homo sapien
agtcatgacttaagtaagcatgttagaaaataa

SEQ ID NO: 811850 - DNA, 33 bp, Homo sapien
agtcatgacttaagtaggcatgttagaaaataa

SEQ ID NO: 811851 - DNA, 33 bp, Homo sapien
tgttgtgtacctcatccaagttattttcccacc

SEQ ID NO: 811852 - DNA, 33 bp, Homo sapien
tgttgtgtacctcatctaagttattttcccacc

SEQ ID NO: 811853 - DNA, 33 bp, Homo sapien
tgttgaagagtgatagcatcagatttagcttat

SEQ ID NO: 811854 - DNA, 33 bp, Homo sapien
tgttgaagagtgatagtatcagatttagcttat

SEQ ID NO: 811855 - DNA, 33 bp, Homo sapien
aacagacagacagtagacagcaatagctctacc

SEQ ID NO: 811856 - DNA, 33 bp, Homo sapien
aacagacagacagtagtcagcaatagctctacc

SEQ ID NO: 811857 - DNA, 33 bp, Homo sapien
tccagatcatagaatacctggacgttaaatagt

SEQ ID NO: 811858 - DNA, 33 bp, Homo sapien
tccagatcatagaatatctggacgttaaatagt

SEQ ID NO: 811859 - DNA, 33 bp, Homo sapien
ttatttctatacagtaataaccagctaaataac

SEQ ID NO: 811860 - DNA, 33 bp, Homo sapien
ttatttctatacagtagtaaccagctaaataac

SEQ ID NO: 811861 - DNA, 33 bp, Homo sapien
taattcactgccaggccagcaaattttcagcga

SEQ ID NO: 811862 - DNA, 33 bp, Homo sapien
taattcactgccaggctagcaaattttcagcga

SEQ ID NO: 811863 - DNA, 33 bp, Homo sapien
caacatgtattttcaacgagaggcaaaaaatag

SEQ ID NO: 811864 - DNA, 33 bp, Homo sapien
caacatgtattttcaatgagaggcaaaaaatag

SEQ ID NO: 811865 - DNA, 33 bp, Homo sapien
tgttttgtctagaaggccacagaatgctgagat

SEQ ID NO: 811866 - DNA, 33 bp, Homo sapien
tgttttgtctagaaggtcacagaatgctgagat

SEQ ID NO: 811867 - DNA, 33 bp, Homo sapien
cctttcttagcctgaaagtcatgtgaaacaaac

SEQ ID NO: 811868 - DNA, 33 bp, Homo sapien
cctttcttagcctgaatgtcatgtgaaacaaac

SEQ ID NO: 811869 - DNA, 33 bp, Homo sapien
cacccagtcggggacaatatgggtactcactgc

SEQ ID NO: 811870 - DNA, 33 bp, Homo sapien
cacccagtcggggacactatgggtactcactgc

SEQ ID NO: 811871 - DNA, 33 bp, Homo sapien
ttgggaagagccaggacggaataacatagttgg

SEQ ID NO: 811872 - DNA, 33 bp, Homo sapien
ttgggaagagccaggatggaataacatagttgg

SEQ ID NO: 811873 - DNA, 33 bp, Homo sapien
aagagagaaattggccaaaagaagggggctact

SEQ ID NO: 811874 - DNA, 33 bp, Homo sapien
aagagagaaattggccgaaagaagggggctact

SEQ ID NO: 811875 - DNA, 33 bp, Homo sapien
ttcaaccctactgaacagaactacatggactaa

SEQ ID NO: 811876 - DNA, 33 bp, Homo sapien
ttcaaccctactgaactgaactacatggactaa

SEQ ID NO: 811877 - DNA, 33 bp, Homo sapien
tttcttggttctataacgccttttttttcattg

SEQ ID NO: 811878 - DNA, 33 bp, Homo sapien
tttcttggttctataatgccttttttttcattg

SEQ ID NO: 811879 - DNA, 33 bp, Homo sapien
ctatttatacatgacaacttcgcacactcagta

SEQ ID NO: 811880 - DNA, 33 bp, Homo sapien
ctatttatacatgacaccttcgcacactcagta

SEQ ID NO: 811881 - DNA, 33 bp, Homo sapien
gtcttagtcataatcaagaaagttcaatcttag

SEQ ID NO: 811882 - DNA, 33 bp, Homo sapien
gtcttagtcataatcaggaaagttcaatcttag

SEQ ID NO: 811883 - DNA, 33 bp, Homo sapien
ccaggatctatttagaaccaagcattcccaatg

SEQ ID NO: 811884 - DNA, 33 bp, Homo sapien
ccaggatctatttagagccaagcattcccaatg

SEQ ID NO: 811885 - DNA, 33 bp, Homo sapien
ttggagggttgaaacaatgttagctaagtcttc

SEQ ID NO: 811886 - DNA, 33 bp, Homo sapien
ttggagggttgaaacagtgttagctaagtcttc

SEQ ID NO: 811887 - DNA, 33 bp, Homo sapien
agtaaagctagagaaactgttctgtaaaatgcc

SEQ ID NO: 811888 - DNA, 33 bp, Homo sapien
agtaaagctagagaaattgttctgtaaaatgcc

SEQ ID NO: 811889 - DNA, 33 bp, Homo sapien
aatataataaatttgaactgatgtctaaactga

SEQ ID NO: 811890 - DNA, 33 bp, Homo sapien
aatataataaatttgagctgatgtctaaactga

SEQ ID NO: 811891 - DNA, 33 bp, Homo sapien
aaaaaaataagatcacacagttcctatcttatg

SEQ ID NO: 811892 - DNA, 33 bp, Homo sapien
aaaaaaataagatcacgcagttcctatcttatg

SEQ ID NO: 811893 - DNA, 33 bp, Homo sapien
tagtgattacatgataccacatttctaaggagc

SEQ ID NO: 811894 - DNA, 33 bp, Homo sapien
tagtgattacatgatagcacatttctaaggagc

SEQ ID NO: 811895 - DNA, 33 bp, Homo sapien
ctatatacagtacactaagcaaacagctgttag

SEQ ID NO: 811896 - DNA, 33 bp, Homo sapien
ctatatacagtacactgagcaaacagctgttag

SEQ ID NO: 811897 - DNA, 33 bp, Homo sapien
gctttgacctgggttccattagacaagcctcct

SEQ ID NO: 811898 - DNA, 33 bp, Homo sapien
gctttgacctgggttctattagacaagcctcct

SEQ ID NO: 811899 - DNA, 33 bp, Homo sapien
taattggatgtcaagtaaaagaagtggctggaa

SEQ ID NO: 811900 - DNA, 33 bp, Homo sapien
taattggatgtcaagttaaagaagtggctggaa

SEQ ID NO: 811901 - DNA, 33 bp, Homo sapien
gagcaaacagagaatacacacttcaatggaaaa

SEQ ID NO: 811902 - DNA, 33 bp, Homo sapien
gagcaaacagagaatatacacttcaatggaaaa

SEQ ID NO: 811903 - DNA, 33 bp, Homo sapien
ttgcgtaaatctgatgcaatcttttagactagc

SEQ ID NO: 811904 - DNA, 33 bp, Homo sapien
ttgcgtaaatctgatggaatcttttagactagc

SEQ ID NO: 811905 - DNA, 33 bp, Homo sapien
aggcaggtgtctgtcactatccaaacaatgcaa

SEQ ID NO: 811906 - DNA, 33 bp, Homo sapien
aggcaggtgtctgtcagtatccaaacaatgcaa

SEQ ID NO: 811907 - DNA, 33 bp, Homo sapien
taattttcagagaaaaagaatggcaaatgaaca

SEQ ID NO: 811908 - DNA, 33 bp, Homo sapien
taattttcagagaaaaggaatggcaaatgaaca

SEQ ID NO: 811909 - DNA, 33 bp, Homo sapien
gtgatgacactgtgacactaagaactagcagac

SEQ ID NO: 811910 - DNA, 33 bp, Homo sapien
gtgatgacactgtgacgctaagaactagcagac

SEQ ID NO: 811911 - DNA, 33 bp, Homo sapien
tggtaagagaccatgaggattacgcaaatttgg

SEQ ID NO: 811912 - DNA, 33 bp, Homo sapien
tggtaagagaccatgatgattacgcaaatttgg

SEQ ID NO: 811913 - DNA, 33 bp, Homo sapien
ataaatgaatatacaccgaggtctcattttaaa

SEQ ID NO: 811914 - DNA, 33 bp, Homo sapien
ataaatgaatatacactgaggtctcattttaaa

SEQ ID NO: 811915 - DNA, 33 bp, Homo sapien
gcttggtggcttgcaaccaactactcaggaggc

SEQ ID NO: 811916 - DNA, 33 bp, Homo sapien
gcttggtggcttgcaatcaactactcaggaggc

SEQ ID NO: 811917 - DNA, 33 bp, Homo sapien
cttattcgtctttctagacagctttaatgtcaa

SEQ ID NO: 811918 - DNA, 33 bp, Homo sapien
cttattcgtctttctatacagctttaatgtcaa

SEQ ID NO: 811919 - DNA, 33 bp, Homo sapien
gtaaattggaataaaacggtagtagcgcactgt

SEQ ID NO: 811920 - DNA, 33 bp, Homo sapien
gtaaattggaataaaatggtagtagcgcactgt

SEQ ID NO: 811921 - DNA, 33 bp, Homo sapien
caataggatttaaaacactgctatacggagtta

SEQ ID NO: 811922 - DNA, 33 bp, Homo sapien
caataggatttaaaacgctgctatacggagtta

SEQ ID NO: 811923 - DNA, 33 bp, Homo sapien
agctaaatcagacaaacgaacttgccaaaattc

SEQ ID NO: 811924 - DNA, 33 bp, Homo sapien
agctaaatcagacaaatgaacttgccaaaattc

SEQ ID NO: 811925 - DNA, 33 bp, Homo sapien
aaagtatctgaattgaagttgtagactctctta

SEQ ID NO: 811926 - DNA, 33 bp, Homo sapien
aaagtatctgaattgaggttgtagactctctta

SEQ ID NO: 811927 - DNA, 33 bp, Homo sapien
aaaatagggagctcaaatatgttgaataatcaa

SEQ ID NO: 811928 - DNA, 33 bp, Homo sapien
aaaatagggagctcaagtatgttgaataatcaa

SEQ ID NO: 811929 - DNA, 33 bp, Homo sapien
taaaattaggcaacgaataacgtacttttgaaa

SEQ ID NO: 811930 - DNA, 33 bp, Homo sapien
taaaattaggcaacgagtaacgtacttttgaaa

SEQ ID NO: 811931 - DNA, 33 bp, Homo sapien
aagagctatatgctaccaggatttactacatat

SEQ ID NO: 811932 - DNA, 33 bp, Homo sapien
aagagctatatgctactaggatttactacatat

SEQ ID NO: 811933 - DNA, 33 bp, Homo sapien
gaggtgaaatggtcataaattaactgaaatgta

SEQ ID NO: 811934 - DNA, 33 bp, Homo sapien
gaggtgaaatggtcattaattaactgaaatgta

SEQ ID NO: 811935 - DNA, 33 bp, Homo sapien
ctatttaaagtctaaacggagaattcttcccaa

SEQ ID NO: 811936 - DNA, 33 bp, Homo sapien
ctatttaaagtctaaatggagaattcttcccaa

SEQ ID NO: 811937 - DNA, 33 bp, Homo sapien
atgccattaattgttacgccaaatcagtttaac

SEQ ID NO: 811938 - DNA, 33 bp, Homo sapien
atgccattaattgttatgccaaatcagtttaac

SEQ ID NO: 811939 - DNA, 33 bp, Homo sapien
agttgggtaagtaggaaaagatcaaagtagtct

SEQ ID NO: 811940 - DNA, 33 bp, Homo sapien
agttgggtaagtaggacaagatcaaagtagtct

SEQ ID NO: 811941 - DNA, 33 bp, Homo sapien
acagagtaatgacacacagtattcagttagcaa

SEQ ID NO: 811942 - DNA, 33 bp, Homo sapien
acagagtaatgacacatagtattcagttagcaa

SEQ ID NO: 811943 - DNA, 33 bp, Homo sapien
ttcactttcacagtcaaagttacacaccaataa

SEQ ID NO: 811944 - DNA, 33 bp, Homo sapien
ttcactttcacagtcagagttacacaccaataa

SEQ ID NO: 811945 - DNA, 33 bp, Homo sapien
tgtcatcaaactcatgacaactgcgttctataa

SEQ ID NO: 811946 - DNA, 33 bp, Homo sapien
tgtcatcaaactcatgtcaactgcgttctataa

SEQ ID NO: 811947 - DNA, 33 bp, Homo sapien
actcagcatggacaacagatatgcaaactctat

SEQ ID NO: 811948 - DNA, 33 bp, Homo sapien
actcagcatggacaacggatatgcaaactctat

SEQ ID NO: 811949 - DNA, 33 bp, Homo sapien
ggcctttgagatttatcaccaggcagctcatat

SEQ ID NO: 811950 - DNA, 33 bp, Homo sapien
ggcctttgagatttatgaccaggcagctcatat

SEQ ID NO: 811951 - DNA, 33 bp, Homo sapien
tctggaaaattcttcagcaattcttcttgatag

SEQ ID NO: 811952 - DNA, 33 bp, Homo sapien
tctggaaaattcttcatcaattcttcttgatag

SEQ ID NO: 811953 - DNA, 33 bp, Homo sapien
atgaagtattgtaaataatctgagcatgtgtta

SEQ ID NO: 811954 - DNA, 33 bp, Homo sapien
atgaagtattgtaaatgatctgagcatgtgtta

SEQ ID NO: 811955 - DNA, 33 bp, Homo sapien
gaacctctgtgaaccacaaactatatatctaag

SEQ ID NO: 811956 - DNA, 33 bp, Homo sapien
gaacctctgtgaaccataaactatatatctaag

SEQ ID NO: 811957 - DNA, 33 bp, Homo sapien
aacagcatacacttgaataatatgtgtcacatt

SEQ ID NO: 811958 - DNA, 33 bp, Homo sapien
aacagcatacacttgagtaatatgtgtcacatt

SEQ ID NO: 811959 - DNA, 33 bp, Homo sapien
gtattaagtcagttgcacattcctatgtcactt

SEQ ID NO: 811960 - DNA, 33 bp, Homo sapien
gtattaagtcagttgcgcattcctatgtcactt

SEQ ID NO: 811961 - DNA, 33 bp, Homo sapien
ttttgaggtaaattagacctcgaatagtagcag

SEQ ID NO: 811962 - DNA, 33 bp, Homo sapien
ttttgaggtaaattaggcctcgaatagtagcag

SEQ ID NO: 811963 - DNA, 33 bp, Homo sapien
aataatagtccctttcaatgaggcagttagtta

SEQ ID NO: 811964 - DNA, 33 bp, Homo sapien
aataatagtccctttcgatgaggcagttagtta

SEQ ID NO: 811965 - DNA, 33 bp, Homo sapien
gtaccagtcaaatgaaactaaactatgcacact

SEQ ID NO: 811966 - DNA, 33 bp, Homo sapien
gtaccagtcaaatgaagctaaactatgcacact

SEQ ID NO: 811967 - DNA, 33 bp, Homo sapien
acacttctcagcaatactaaatttgcttcctct

SEQ ID NO: 811968 - DNA, 33 bp, Homo sapien
acacttctcagcaatattaaatttgcttcctct

SEQ ID NO: 811969 - DNA, 33 bp, Homo sapien
aatatgcgcatgtctccacattgggccactgat

SEQ ID NO: 811970 - DNA, 33 bp, Homo sapien
aatatgcgcatgtctctacattgggccactgat

SEQ ID NO: 811971 - DNA, 33 bp, Homo sapien
gaagtaattaaaagtacgcggaaatagtaggtg

SEQ ID NO: 811972 - DNA, 33 bp, Homo sapien
gaagtaattaaaagtatgcggaaatagtaggtg

SEQ ID NO: 811973 - DNA, 33 bp, Homo sapien
cttaccagtgtccaaaactaacctgttaatcat

SEQ ID NO: 811974 - DNA, 33 bp, Homo sapien
cttaccagtgtccaaagctaacctgttaatcat

SEQ ID NO: 811975 - DNA, 33 bp, Homo sapien
caaatgctgtgctacaggattgcatttatacaa

SEQ ID NO: 811976 - DNA, 33 bp, Homo sapien
caaatgctgtgctacatgattgcatttatacaa

SEQ ID NO: 811977 - DNA, 33 bp, Homo sapien
tagcaaagagattttacggggacagataacagt

SEQ ID NO: 811978 - DNA, 33 bp, Homo sapien
tagcaaagagattttagggggacagataacagt

SEQ ID NO: 811979 - DNA, 33 bp, Homo sapien
ttaagtgcatcagagacaaatttttagtaacat

SEQ ID NO: 811980 - DNA, 33 bp, Homo sapien
ttaagtgcatcagagagaaatttttagtaacat

SEQ ID NO: 811981 - DNA, 33 bp, Homo sapien
ctattttatggtcgcaaaatataccaggacaca

SEQ ID NO: 811982 - DNA, 33 bp, Homo sapien
ctattttatggtcgcagaatataccaggacaca

SEQ ID NO: 811983 - DNA, 33 bp, Homo sapien
gtgttccacattcatacgtggtgttcagaaaac

SEQ ID NO: 811984 - DNA, 33 bp, Homo sapien
gtgttccacattcataggtggtgttcagaaaac

SEQ ID NO: 811985 - DNA, 33 bp, Homo sapien
catgccttcatgctgacagaaataacgattctt

SEQ ID NO: 811986 - DNA, 33 bp, Homo sapien
catgccttcatgctgagagaaataacgattctt

SEQ ID NO: 811987 - DNA, 33 bp, Homo sapien
acatctctttcaaggacgtgacaggaagtttat

SEQ ID NO: 811988 - DNA, 33 bp, Homo sapien
acatctctttcaaggatgtgacaggaagtttat

SEQ ID NO: 811989 - DNA, 33 bp, Homo sapien
cactcctatgcaaaaggcactgtgaaaacactg

SEQ ID NO: 811990 - DNA, 33 bp, Homo sapien
cactcctatgcaaaagtcactgtgaaaacactg

SEQ ID NO: 811991 - DNA, 33 bp, Homo sapien
taggtaggtgcagtaacactaatgtgctgagac

SEQ ID NO: 811992 - DNA, 33 bp, Homo sapien
taggtaggtgcagtaatactaatgtgctgagac

SEQ ID NO: 811993 - DNA, 33 bp, Homo sapien
catgtaggaacaggaaacctttctagagtatgg

SEQ ID NO: 811994 - DNA, 33 bp, Homo sapien
catgtaggaacaggaatcctttctagagtatgg

SEQ ID NO: 811995 - DNA, 33 bp, Homo sapien
cattcagtgattatcacagttactattcatttc

SEQ ID NO: 811996 - DNA, 33 bp, Homo sapien
cattcagtgattatcatagttactattcatttc

SEQ ID NO: 811997 - DNA, 33 bp, Homo sapien
tcactggtactcttccaggaaccattctagctc

SEQ ID NO: 811998 - DNA, 33 bp, Homo sapien
tcactggtactcttccgggaaccattctagctc

SEQ ID NO: 811999 - DNA, 33 bp, Homo sapien
tcgcgtgaactttggaatatggaagaatctaac

SEQ ID NO: 812000 - DNA, 33 bp, Homo sapien
tcgcgtgaactttggactatggaagaatctaac

SEQ ID NO: 812001 - DNA, 33 bp, Homo sapien
ttcaaatgtagcctaccaagtaaattaaattct

SEQ ID NO: 812002 - DNA, 33 bp, Homo sapien
ttcaaatgtagcctactaagtaaattaaattct

SEQ ID NO: 812003 - DNA, 33 bp, Homo sapien
ctattgtccaagaccacgtatttcaaaagaaaa

SEQ ID NO: 812004 - DNA, 33 bp, Homo sapien
ctattgtccaagaccatgtatttcaaaagaaaa

SEQ ID NO: 812005 - DNA, 33 bp, Homo sapien
taccacttctcttaaaagcctttgatatacatg

SEQ ID NO: 812006 - DNA, 33 bp, Homo sapien
taccacttctcttaaaggcctttgatatacatg

SEQ ID NO: 812007 - DNA, 33 bp, Homo sapien
catagtagcgagagggacagaagcttatgaaaa

SEQ ID NO: 812008 - DNA, 33 bp, Homo sapien
catagtagcgagaggggcagaagcttatgaaaa

SEQ ID NO: 812009 - DNA, 33 bp, Homo sapien
gcagatgatttagtaacggtgataacagaaata

SEQ ID NO: 812010 - DNA, 33 bp, Homo sapien
gcagatgatttagtaatggtgataacagaaata

SEQ ID NO: 812011 - DNA, 33 bp, Homo sapien
tatttgcatttgacacggaaggaaagatgtgaa

SEQ ID NO: 812012 - DNA, 33 bp, Homo sapien
tatttgcatttgacactgaaggaaagatgtgaa

SEQ ID NO: 812013 - DNA, 33 bp, Homo sapien
acattccagccaatgaaccattcaaaatattac

SEQ ID NO: 812014 - DNA, 33 bp, Homo sapien
acattccagccaatgagccattcaaaatattac

SEQ ID NO: 812015 - DNA, 33 bp, Homo sapien
gttttcccacctgtaccggagttggttcctaat

SEQ ID NO: 812016 - DNA, 33 bp, Homo sapien
gttttcccacctgtactggagttggttcctaat

SEQ ID NO: 812017 - DNA, 33 bp, Homo sapien
tttgcactctgggagaaagattggactcaactc

SEQ ID NO: 812018 - DNA, 33 bp, Homo sapien
tttgcactctgggagagagattggactcaactc

SEQ ID NO: 812019 - DNA, 33 bp, Homo sapien
aaccctctgaacctcaagaatgtagagaaccag

SEQ ID NO: 812020 - DNA, 33 bp, Homo sapien
aaccctctgaacctcatgaatgtagagaaccag

SEQ ID NO: 812021 - DNA, 33 bp, Homo sapien
cccagatcatagctacgatttgcctaaggaaaa

SEQ ID NO: 812022 - DNA, 33 bp, Homo sapien
cccagatcatagctactatttgcctaaggaaaa

SEQ ID NO: 812023 - DNA, 33 bp, Homo sapien
aaaaacaaagcaaaaaacctcagaatggccagg

SEQ ID NO: 812024 - DNA, 33 bp, Homo sapien
aaaaacaaagcaaaaaccctcagaatggccagg

SEQ ID NO: 812025 - DNA, 33 bp, Homo sapien
ctttttaataatgagccgatacacagtgcttct

SEQ ID NO: 812026 - DNA, 33 bp, Homo sapien
ctttttaataatgagctgatacacagtgcttct

SEQ ID NO: 812027 - DNA, 33 bp, Homo sapien
gatagcaaataatcagaacccagaagctgtcat

SEQ ID NO: 812028 - DNA, 33 bp, Homo sapien
gatagcaaataatcaggacccagaagctgtcat

SEQ ID NO: 812029 - DNA, 33 bp, Homo sapien
gaggtgactatggtaacacctctgtctttcatt

SEQ ID NO: 812030 - DNA, 33 bp, Homo sapien
gaggtgactatggtaatacctctgtctttcatt

SEQ ID NO: 812031 - DNA, 33 bp, Homo sapien
gattttttaaaacgccacataagtttaatgaga

SEQ ID NO: 812032 - DNA, 33 bp, Homo sapien
gattttttaaaacgccgcataagtttaatgaga

SEQ ID NO: 812033 - DNA, 33 bp, Homo sapien
cccctgtgacttaccccagagaaataatagttg

SEQ ID NO: 812034 - DNA, 33 bp, Homo sapien
cccctgtgacttaccctagagaaataatagttg

SEQ ID NO: 812035 - DNA, 33 bp, Homo sapien
ataccaagaggcaaaagtcactgggggccactt

SEQ ID NO: 812036 - DNA, 33 bp, Homo sapien
ataccaagaggcaaaattcactgggggccactt

SEQ ID NO: 812037 - DNA, 33 bp, Homo sapien
tgaaaagttaaaacataatggcttcaggctaga

SEQ ID NO: 812038 - DNA, 33 bp, Homo sapien
tgaaaagttaaaacattatggcttcaggctaga

SEQ ID NO: 812039 - DNA, 33 bp, Homo sapien
tgcatatgtagttgtacgtctctatatgtgtat

SEQ ID NO: 812040 - DNA, 33 bp, Homo sapien
tgcatatgtagttgtatgtctctatatgtgtat

SEQ ID NO: 812041 - DNA, 33 bp, Homo sapien
atttttcttaaatgtcaataagttggtgttaat

SEQ ID NO: 812042 - DNA, 33 bp, Homo sapien
atttttcttaaatgtccataagttggtgttaat

SEQ ID NO: 812043 - DNA, 33 bp, Homo sapien
aaacaagagagtgaaactggaataaaagtaaaa

SEQ ID NO: 812044 - DNA, 33 bp, Homo sapien
aaacaagagagtgaaattggaataaaagtaaaa

SEQ ID NO: 812045 - DNA, 33 bp, Homo sapien
gacacagatgattttcccaagggtttcataggc

SEQ ID NO: 812046 - DNA, 33 bp, Homo sapien
gacacagatgattttctcaagggtttcataggc

SEQ ID NO: 812047 - DNA, 33 bp, Homo sapien
gctactgccttctgaaatggggggaccaagaaa

SEQ ID NO: 812048 - DNA, 33 bp, Homo sapien
gctactgccttctgaactggggggaccaagaaa

SEQ ID NO: 812049 - DNA, 33 bp, Homo sapien
ttccatccagtgcttcaccgtgttgttttcttt

SEQ ID NO: 812050 - DNA, 33 bp, Homo sapien
ttccatccagtgcttcgccgtgttgttttcttt

SEQ ID NO: 812051 - DNA, 33 bp, Homo sapien
aagaagaacatctaagaaaattaatagctagaa

SEQ ID NO: 812052 - DNA, 33 bp, Homo sapien
aagaagaacatctaaggaaattaatagctagaa

SEQ ID NO: 812053 - DNA, 33 bp, Homo sapien
gggagctggggaaaaaaactgataggtgacaga

SEQ ID NO: 812054 - DNA, 33 bp, Homo sapien
gggagctggggaaaaatactgataggtgacaga

SEQ ID NO: 812055 - DNA, 33 bp, Homo sapien
ttctagtacagtaagaaatgaacactgttgaag

SEQ ID NO: 812056 - DNA, 33 bp, Homo sapien
ttctagtacagtaagagatgaacactgttgaag

SEQ ID NO: 812057 - DNA, 33 bp, Homo sapien
tttcaacctggggcaaaacatcatatactgaga

SEQ ID NO: 812058 - DNA, 33 bp, Homo sapien
tttcaacctggggcaatacatcatatactgaga

SEQ ID NO: 812059 - DNA, 33 bp, Homo sapien
tattccgtgataatccaattgatggttttatag

SEQ ID NO: 812060 - DNA, 33 bp, Homo sapien
tattccgtgataatcctattgatggttttatag

SEQ ID NO: 812061 - DNA, 33 bp, Homo sapien
atatagcattcaaatcaatcttgccttattggt

SEQ ID NO: 812062 - DNA, 33 bp, Homo sapien
atatagcattcaaatctatcttgccttattggt

SEQ ID NO: 812063 - DNA, 33 bp, Homo sapien
tagtacaagttttatacgacacaggagtattca

SEQ ID NO: 812064 - DNA, 33 bp, Homo sapien
tagtacaagttttatatgacacaggagtattca

SEQ ID NO: 812065 - DNA, 33 bp, Homo sapien
atttgtctgtcacttacgttggagtgcaatgga

SEQ ID NO: 812066 - DNA, 33 bp, Homo sapien
atttgtctgtcacttaggttggagtgcaatgga

SEQ ID NO: 812067 - DNA, 33 bp, Homo sapien
actgctctaatttccccatgtcggttactattc

SEQ ID NO: 812068 - DNA, 33 bp, Homo sapien
actgctctaatttccctatgtcggttactattc

SEQ ID NO: 812069 - DNA, 33 bp, Homo sapien
ctattctgtttccccagtctgagaagagtaacc

SEQ ID NO: 812070 - DNA, 33 bp, Homo sapien
ctattctgtttccccattctgagaagagtaacc

SEQ ID NO: 812071 - DNA, 33 bp, Homo sapien
ttgttaccttacaggcaaaccctgagaccaaat

SEQ ID NO: 812072 - DNA, 33 bp, Homo sapien
ttgttaccttacaggcgaaccctgagaccaaat

SEQ ID NO: 812073 - DNA, 33 bp, Homo sapien
tggacagataaactacgaattgtgggtatggac

SEQ ID NO: 812074 - DNA, 33 bp, Homo sapien
tggacagataaactactaattgtgggtatggac

SEQ ID NO: 812075 - DNA, 33 bp, Homo sapien
aaattgttaatagagacgagtttgttaattaaa

SEQ ID NO: 812076 - DNA, 33 bp, Homo sapien
aaattgttaatagagatgagtttgttaattaaa

SEQ ID NO: 812077 - DNA, 33 bp, Homo sapien
tatcagtgcgtagaaactcatgatgtttaactt

SEQ ID NO: 812078 - DNA, 33 bp, Homo sapien
tatcagtgcgtagaaattcatgatgtttaactt

SEQ ID NO: 812079 - DNA, 33 bp, Homo sapien
atgtaacctgattttccacaagtcatatagaag

SEQ ID NO: 812080 - DNA, 33 bp, Homo sapien
atgtaacctgattttctacaagtcatatagaag

SEQ ID NO: 812081 - DNA, 33 bp, Homo sapien
gtggaagagtaagctgcaacaattgagatgaac

SEQ ID NO: 812082 - DNA, 33 bp, Homo sapien
gtggaagagtaagctggaacaattgagatgaac

SEQ ID NO: 812083 - DNA, 33 bp, Homo sapien
gagatatttggtataaagcaattgaagttaaag

SEQ ID NO: 812084 - DNA, 33 bp, Homo sapien
gagatatttggtataaggcaattgaagttaaag

SEQ ID NO: 812085 - DNA, 33 bp, Homo sapien
gctggaacctggtaaaagtgagattcaaacaag

SEQ ID NO: 812086 - DNA, 33 bp, Homo sapien
gctggaacctggtaaatgtgagattcaaacaag

SEQ ID NO: 812087 - DNA, 33 bp, Homo sapien
aaaaaaagagccctggaaaagaaatatcctgta

SEQ ID NO: 812088 - DNA, 33 bp, Homo sapien
aaaaaaagagccctggcaaagaaatatcctgta

SEQ ID NO: 812089 - DNA, 33 bp, Homo sapien
tgttttcacttttttcactattagaagcaatgc

SEQ ID NO: 812090 - DNA, 33 bp, Homo sapien
tgttttcacttttttcgctattagaagcaatgc

SEQ ID NO: 812091 - DNA, 33 bp, Homo sapien
cagtcacactgaaaacagcagtcttaccagaaa

SEQ ID NO: 812092 - DNA, 33 bp, Homo sapien
cagtcacactgaaaacggcagtcttaccagaaa

SEQ ID NO: 812093 - DNA, 33 bp, Homo sapien
caaatgtaatacagaacggtaatcattagagca

SEQ ID NO: 812094 - DNA, 33 bp, Homo sapien
caaatgtaatacagaatggtaatcattagagca

SEQ ID NO: 812095 - DNA, 33 bp, Homo sapien
cctaattgcataatcacccgagtcctgtagagg

SEQ ID NO: 812096 - DNA, 33 bp, Homo sapien
cctaattgcataatcatccgagtcctgtagagg

SEQ ID NO: 812097 - DNA, 33 bp, Homo sapien
agtgacacatgatgccgaccttcttatcagaaa

SEQ ID NO: 812098 - DNA, 33 bp, Homo sapien
agtgacacatgatgcctaccttcttatcagaaa

SEQ ID NO: 812099 - DNA, 33 bp, Homo sapien
aactgtacatgaggaactgcagaagcaacagag

SEQ ID NO: 812100 - DNA, 33 bp, Homo sapien
aactgtacatgaggaattgcagaagcaacagag

SEQ ID NO: 812101 - DNA, 33 bp, Homo sapien
tctgattggtgtcaagaaacagtgttttaattc

SEQ ID NO: 812102 - DNA, 33 bp, Homo sapien
tctgattggtgtcaaggaacagtgttttaattc

SEQ ID NO: 812103 - DNA, 33 bp, Homo sapien
gtctgagctgagatacaaatgaaggatgaaaac

SEQ ID NO: 812104 - DNA, 33 bp, Homo sapien
gtctgagctgagatacgaatgaaggatgaaaac

SEQ ID NO: 812105 - DNA, 33 bp, Homo sapien
gaacaccaattcagaaagaatcactgtgtaaat

SEQ ID NO: 812106 - DNA, 33 bp, Homo sapien
gaacaccaattcagaaggaatcactgtgtaaat

SEQ ID NO: 812107 - DNA, 33 bp, Homo sapien
atatgcaggaaacagagatttatgccaaaagtc

SEQ ID NO: 812108 - DNA, 33 bp, Homo sapien
atatgcaggaaacagatatttatgccaaaagtc

SEQ ID NO: 812109 - DNA, 33 bp, Homo sapien
atcacctgttctgcacaagttatcattttattc

SEQ ID NO: 812110 - DNA, 33 bp, Homo sapien
atcacctgttctgcaccagttatcattttattc

SEQ ID NO: 812111 - DNA, 33 bp, Homo sapien
gacaaccttctatgaacgcagtcccagtgtaaa

SEQ ID NO: 812112 - DNA, 33 bp, Homo sapien
gacaaccttctatgaatgcagtcccagtgtaaa

SEQ ID NO: 812113 - DNA, 33 bp, Homo sapien
atcttttattttgctaccagttaagatgtttat

SEQ ID NO: 812114 - DNA, 33 bp, Homo sapien
atcttttattttgctatcagttaagatgtttat

SEQ ID NO: 812115 - DNA, 33 bp, Homo sapien
tttaggaagtaaatacaatgatatgtgtgatgt

SEQ ID NO: 812116 - DNA, 33 bp, Homo sapien
tttaggaagtaaatactatgatatgtgtgatgt

SEQ ID NO: 812117 - DNA, 33 bp, Homo sapien
caaaatagtcttgaaaatcttctgtgctctgat

SEQ ID NO: 812118 - DNA, 33 bp, Homo sapien
caaaatagtcttgaaactcttctgtgctctgat

SEQ ID NO: 812119 - DNA, 33 bp, Homo sapien
aattaatgacatgatcaaacaatggcatactac

SEQ ID NO: 812120 - DNA, 33 bp, Homo sapien
aattaatgacatgatcgaacaatggcatactac

SEQ ID NO: 812121 - DNA, 33 bp, Homo sapien
agacaaagcctgggccaaaactggatgaatgag

SEQ ID NO: 812122 - DNA, 33 bp, Homo sapien
agacaaagcctgggccgaaactggatgaatgag

SEQ ID NO: 812123 - DNA, 33 bp, Homo sapien
ttagtgccttaaaaaacggtgtctgcctgagcc

SEQ ID NO: 812124 - DNA, 33 bp, Homo sapien
ttagtgccttaaaaaatggtgtctgcctgagcc

SEQ ID NO: 812125 - DNA, 33 bp, Homo sapien
ttaggcagtaccacaacgaataaaaggacgctg

SEQ ID NO: 812126 - DNA, 33 bp, Homo sapien
ttaggcagtaccacaatgaataaaaggacgctg

SEQ ID NO: 812127 - DNA, 33 bp, Homo sapien
atgctgtcatttctcacggttaaaccagcttat

SEQ ID NO: 812128 - DNA, 33 bp, Homo sapien
atgctgtcatttctcatggttaaaccagcttat

SEQ ID NO: 812129 - DNA, 33 bp, Homo sapien
aaagtcaaatgtacatgaaattttcagccctca

SEQ ID NO: 812130 - DNA, 33 bp, Homo sapien
aaagtcaaatgtacattaaattttcagccctca

SEQ ID NO: 812131 - DNA, 33 bp, Homo sapien
tctgcccaagttccaccgatatattattgagga

SEQ ID NO: 812132 - DNA, 33 bp, Homo sapien
tctgcccaagttccactgatatattattgagga

SEQ ID NO: 812133 - DNA, 33 bp, Homo sapien
tatctgagagaggatgaagtatacggcatttcc

SEQ ID NO: 812134 - DNA, 33 bp, Homo sapien
tatctgagagaggatgcagtatacggcatttcc

SEQ ID NO: 812135 - DNA, 33 bp, Homo sapien
aagatggctttcataccgcccaaagttttaatg

SEQ ID NO: 812136 - DNA, 33 bp, Homo sapien
aagatggctttcatactgcccaaagttttaatg

SEQ ID NO: 812137 - DNA, 33 bp, Homo sapien
tgcccctagttaaaacagctttcagaacctacg

SEQ ID NO: 812138 - DNA, 33 bp, Homo sapien
tgcccctagttaaaacggctttcagaacctacg

SEQ ID NO: 812139 - DNA, 33 bp, Homo sapien
ccctcaggtcatataacccgagcatgctcaaat

SEQ ID NO: 812140 - DNA, 33 bp, Homo sapien
ccctcaggtcatataatccgagcatgctcaaat

SEQ ID NO: 812141 - DNA, 33 bp, Homo sapien
aggtgctttggaaataccatttattgcccccat

SEQ ID NO: 812142 - DNA, 33 bp, Homo sapien
aggtgctttggaaatatcatttattgcccccat

SEQ ID NO: 812143 - DNA, 33 bp, Homo sapien
cgatgtgttcaagaaccgtgaggaatcaggcaa

SEQ ID NO: 812144 - DNA, 33 bp, Homo sapien
cgatgtgttcaagaactgtgaggaatcaggcaa

SEQ ID NO: 812145 - DNA, 33 bp, Homo sapien
gtcagaggaaacaagaactgacatgggcttcag

SEQ ID NO: 812146 - DNA, 33 bp, Homo sapien
gtcagaggaaacaagagctgacatgggcttcag

SEQ ID NO: 812147 - DNA, 33 bp, Homo sapien
ttggtccagtaacacaatgatttggctttgaag

SEQ ID NO: 812148 - DNA, 33 bp, Homo sapien
ttggtccagtaacacagtgatttggctttgaag

SEQ ID NO: 812149 - DNA, 33 bp, Homo sapien
cagtcctattaatagacatgagtggatggtgag

SEQ ID NO: 812150 - DNA, 33 bp, Homo sapien
cagtcctattaatagatatgagtggatggtgag

SEQ ID NO: 812151 - DNA, 33 bp, Homo sapien
cactgtgcccacacacaagattcattttctaag

SEQ ID NO: 812152 - DNA, 33 bp, Homo sapien
cactgtgcccacacacgagattcattttctaag

SEQ ID NO: 812153 - DNA, 33 bp, Homo sapien
atttctctttctcaaacggcaaaataggcacag

SEQ ID NO: 812154 - DNA, 33 bp, Homo sapien
atttctctttctcaaatggcaaaataggcacag

SEQ ID NO: 812155 - DNA, 33 bp, Homo sapien
ctgcctaaactcagtacatcaatagctagcagg

SEQ ID NO: 812156 - DNA, 33 bp, Homo sapien
ctgcctaaactcagtagatcaatagctagcagg

SEQ ID NO: 812157 - DNA, 33 bp, Homo sapien
ggaatggcccttgactaagaaattttctctctt

SEQ ID NO: 812158 - DNA, 33 bp, Homo sapien
ggaatggcccttgactcagaaattttctctctt

SEQ ID NO: 812159 - DNA, 33 bp, Homo sapien
tcatcaagtccttatacgtgcaagcattatgtt

SEQ ID NO: 812160 - DNA, 33 bp, Homo sapien
tcatcaagtccttatatgtgcaagcattatgtt

SEQ ID NO: 812161 - DNA, 33 bp, Homo sapien
cttaagtcctaggaaactctgtgattatggttc

SEQ ID NO: 812162 - DNA, 33 bp, Homo sapien
cttaagtcctaggaaagtctgtgattatggttc

SEQ ID NO: 812163 - DNA, 33 bp, Homo sapien
actagtctaaagatgacggcaagaatgcgacta

SEQ ID NO: 812164 - DNA, 33 bp, Homo sapien
actagtctaaagatgatggcaagaatgcgacta

SEQ ID NO: 812165 - DNA, 33 bp, Homo sapien
tcatggaaaatgagtaacaaattcaaaagaaaa

SEQ ID NO: 812166 - DNA, 33 bp, Homo sapien
tcatggaaaatgagtatcaaattcaaaagaaaa

SEQ ID NO: 812167 - DNA, 33 bp, Homo sapien
attatacagccacatgcaaagaagaatggaggc

SEQ ID NO: 812168 - DNA, 33 bp, Homo sapien
attatacagccacatggaaagaagaatggaggc

SEQ ID NO: 812169 - DNA, 33 bp, Homo sapien
gaattgttagaagaacagaatggcaaaataatt

SEQ ID NO: 812170 - DNA, 33 bp, Homo sapien
gaattgttagaagaacggaatggcaaaataatt

SEQ ID NO: 812171 - DNA, 33 bp, Homo sapien
tagatattttgaagaggatgaagagcgcaaggg

SEQ ID NO: 812172 - DNA, 33 bp, Homo sapien
tagatattttgaagagtatgaagagcgcaaggg

SEQ ID NO: 812173 - DNA, 33 bp, Homo sapien
gaaatggctctttctaagacttactgtaaatac

SEQ ID NO: 812174 - DNA, 33 bp, Homo sapien
gaaatggctctttctacgacttactgtaaatac

SEQ ID NO: 812175 - DNA, 33 bp, Homo sapien
gcacgacctaggataccctccctattttaaggt

SEQ ID NO: 812176 - DNA, 33 bp, Homo sapien
gcacgacctaggatactctccctattttaaggt

SEQ ID NO: 812177 - DNA, 33 bp, Homo sapien
aattccaattgatggcacgtcaaaataaaatct

SEQ ID NO: 812178 - DNA, 33 bp, Homo sapien
aattccaattgatggcgcgtcaaaataaaatct

SEQ ID NO: 812179 - DNA, 33 bp, Homo sapien
ctgtcttcctgtataaagccatgaagagctcca

SEQ ID NO: 812180 - DNA, 33 bp, Homo sapien
ctgtcttcctgtataaggccatgaagagctcca

SEQ ID NO: 812181 - DNA, 33 bp, Homo sapien
agaaatagatgttggacagcaaaaacaacaaaa

SEQ ID NO: 812182 - DNA, 33 bp, Homo sapien
agaaatagatgttggatagcaaaaacaacaaaa

SEQ ID NO: 812183 - DNA, 33 bp, Homo sapien
gaggaccattttctgaaatccttcaacttcatg

SEQ ID NO: 812184 - DNA, 33 bp, Homo sapien
gaggaccattttctgagatccttcaacttcatg

SEQ ID NO: 812185 - DNA, 33 bp, Homo sapien
agaactaaagttctgaagtcacgtatctctgat

SEQ ID NO: 812186 - DNA, 33 bp, Homo sapien
agaactaaagttctgaggtcacgtatctctgat

SEQ ID NO: 812187 - DNA, 33 bp, Homo sapien
gaaaaatatcttccaccgcttagcatatgggtc

SEQ ID NO: 812188 - DNA, 33 bp, Homo sapien
gaaaaatatcttccactgcttagcatatgggtc

SEQ ID NO: 812189 - DNA, 33 bp, Homo sapien
gctcctacacacataacggttatcctagtgcct

SEQ ID NO: 812190 - DNA, 33 bp, Homo sapien
gctcctacacacataagggttatcctagtgcct

SEQ ID NO: 812191 - DNA, 33 bp, Homo sapien
cactgtgtgaatactaaagaaattttggatgta

SEQ ID NO: 812192 - DNA, 33 bp, Homo sapien
cactgtgtgaatactagagaaattttggatgta

SEQ ID NO: 812193 - DNA, 33 bp, Homo sapien
ttttgcacatcatacacaaagtcatgaaatgga

SEQ ID NO: 812194 - DNA, 33 bp, Homo sapien
ttttgcacatcatacagaaagtcatgaaatgga

SEQ ID NO: 812195 - DNA, 33 bp, Homo sapien
acccaatgactacccaataagagacccttaata

SEQ ID NO: 812196 - DNA, 33 bp, Homo sapien
acccaatgactacccagtaagagacccttaata

SEQ ID NO: 812197 - DNA, 33 bp, Homo sapien
aataggtcctaagggcagatttataacaatact

SEQ ID NO: 812198 - DNA, 33 bp, Homo sapien
aataggtcctaagggcggatttataacaatact

SEQ ID NO: 812199 - DNA, 33 bp, Homo sapien
cgtccaaatacagaaactaacctatttgcatat

SEQ ID NO: 812200 - DNA, 33 bp, Homo sapien
cgtccaaatacagaaagtaacctatttgcatat

SEQ ID NO: 812201 - DNA, 33 bp, Homo sapien
tttaaaagtttcatccaaagtaaatagtctgct

SEQ ID NO: 812202 - DNA, 33 bp, Homo sapien
tttaaaagtttcatccgaagtaaatagtctgct

SEQ ID NO: 812203 - DNA, 33 bp, Homo sapien
attcatgtgattgtgaagatagccaatatgttt

SEQ ID NO: 812204 - DNA, 33 bp, Homo sapien
attcatgtgattgtgaggatagccaatatgttt

SEQ ID NO: 812205 - DNA, 33 bp, Homo sapien
cttctagggctgccataataaagtgtttaagct

SEQ ID NO: 812206 - DNA, 33 bp, Homo sapien
cttctagggctgccatgataaagtgtttaagct

SEQ ID NO: 812207 - DNA, 33 bp, Homo sapien
gttggtgtccaagccacgcttactattatgtat

SEQ ID NO: 812208 - DNA, 33 bp, Homo sapien
gttggtgtccaagccatgcttactattatgtat

SEQ ID NO: 812209 - DNA, 33 bp, Homo sapien
ttcaaatgtaaaacaccattcagctaccactgc

SEQ ID NO: 812210 - DNA, 33 bp, Homo sapien
ttcaaatgtaaaacactattcagctaccactgc

SEQ ID NO: 812211 - DNA, 33 bp, Homo sapien
ctgaggaaatgcaccaagtaaaacacaaatgct

SEQ ID NO: 812212 - DNA, 33 bp, Homo sapien
ctgaggaaatgcaccaggtaaaacacaaatgct

SEQ ID NO: 812213 - DNA, 33 bp, Homo sapien
gttttcctctccataccatgagcataataactc

SEQ ID NO: 812214 - DNA, 33 bp, Homo sapien
gttttcctctccatactatgagcataataactc

SEQ ID NO: 812215 - DNA, 33 bp, Homo sapien
tttcaatacagtaacaaggggaatgctttgcaa

SEQ ID NO: 812216 - DNA, 33 bp, Homo sapien
tttcaatacagtaacacggggaatgctttgcaa

SEQ ID NO: 812217 - DNA, 33 bp, Homo sapien
aaagtgaattatctgaactcttagcaattttca

SEQ ID NO: 812218 - DNA, 33 bp, Homo sapien
aaagtgaattatctgatctcttagcaattttca

SEQ ID NO: 812219 - DNA, 33 bp, Homo sapien
tcttttaaaattttaagtcagatcacagctcag

SEQ ID NO: 812220 - DNA, 33 bp, Homo sapien
tcttttaaaattttaattcagatcacagctcag

SEQ ID NO: 812221 - DNA, 33 bp, Homo sapien
tctggttcctttttaccgaagaatggtattata

SEQ ID NO: 812222 - DNA, 33 bp, Homo sapien
tctggttcctttttactgaagaatggtattata

SEQ ID NO: 812223 - DNA, 33 bp, Homo sapien
actccagcctgtgtgaaagagtctatctcaaaa

SEQ ID NO: 812224 - DNA, 33 bp, Homo sapien
actccagcctgtgtgacagagtctatctcaaaa

SEQ ID NO: 812225 - DNA, 33 bp, Homo sapien
tttctctgggtctctaccttcttacaggtccta

SEQ ID NO: 812226 - DNA, 33 bp, Homo sapien
tttctctgggtctctatcttcttacaggtccta

SEQ ID NO: 812227 - DNA, 33 bp, Homo sapien
aggcatataatattgaacttttgcaaaccaaag

SEQ ID NO: 812228 - DNA, 33 bp, Homo sapien
aggcatataatattgagcttttgcaaaccaaag

SEQ ID NO: 812229 - DNA, 33 bp, Homo sapien
tctctgctctccatagaaactgctttttggagc

SEQ ID NO: 812230 - DNA, 33 bp, Homo sapien
tctctgctctccataggaactgctttttggagc

SEQ ID NO: 812231 - DNA, 33 bp, Homo sapien
aggaaaggaggaaagcagaatgagagggaaaaa

SEQ ID NO: 812232 - DNA, 33 bp, Homo sapien
aggaaaggaggaaagcggaatgagagggaaaaa

SEQ ID NO: 812233 - DNA, 33 bp, Homo sapien
gggttactaatgagcaagcaataagaaaaaaat

SEQ ID NO: 812234 - DNA, 33 bp, Homo sapien
gggttactaatgagcaggcaataagaaaaaaat

SEQ ID NO: 812235 - DNA, 33 bp, Homo sapien
caggtacagcttgaagaccagaggatgttatca

SEQ ID NO: 812236 - DNA, 33 bp, Homo sapien
caggtacagcttgaaggccagaggatgttatca

SEQ ID NO: 812237 - DNA, 33 bp, Homo sapien
ctgctcattttgaagtgaaagataattcacctg

SEQ ID NO: 812238 - DNA, 33 bp, Homo sapien
ctgctcattttgaagttaaagataattcacctg

SEQ ID NO: 812239 - DNA, 33 bp, Homo sapien
tactctaggaactgaaaatcacagctgtggatc

SEQ ID NO: 812240 - DNA, 33 bp, Homo sapien
tactctaggaactgaacatcacagctgtggatc

SEQ ID NO: 812241 - DNA, 33 bp, Homo sapien
ctataacattagtcaaggcctctcatcaagtca

SEQ ID NO: 812242 - DNA, 33 bp, Homo sapien
ctataacattagtcaatgcctctcatcaagtca

SEQ ID NO: 812243 - DNA, 33 bp, Homo sapien
atgttttcacctagcactgccatccttgttcac

SEQ ID NO: 812244 - DNA, 33 bp, Homo sapien
atgttttcacctagcattgccatccttgttcac

SEQ ID NO: 812245 - DNA, 33 bp, Homo sapien
cttatgaataaaatccagacatttaggcattca

SEQ ID NO: 812246 - DNA, 33 bp, Homo sapien
cttatgaataaaatccggacatttaggcattca

SEQ ID NO: 812247 - DNA, 33 bp, Homo sapien
ccctttctaccacaaaacatgaataagaatgta

SEQ ID NO: 812248 - DNA, 33 bp, Homo sapien
ccctttctaccacaaagcatgaataagaatgta

SEQ ID NO: 812249 - DNA, 33 bp, Homo sapien
gatttgtataaagttacagtaattcccttccct

SEQ ID NO: 812250 - DNA, 33 bp, Homo sapien
gatttgtataaagttatagtaattcccttccct

SEQ ID NO: 812251 - DNA, 33 bp, Homo sapien
cctctgtaaacaatggaagggaagagaaaagct

SEQ ID NO: 812252 - DNA, 33 bp, Homo sapien
cctctgtaaacaatgggagggaagagaaaagct

SEQ ID NO: 812253 - DNA, 33 bp, Homo sapien
ggcccaatggttgcagaatagacaatgtttggg

SEQ ID NO: 812254 - DNA, 33 bp, Homo sapien
ggcccaatggttgcaggatagacaatgtttggg

SEQ ID NO: 812255 - DNA, 33 bp, Homo sapien
atccatcagttttacagaacactgagacaaaga

SEQ ID NO: 812256 - DNA, 33 bp, Homo sapien
atccatcagttttacataacactgagacaaaga

SEQ ID NO: 812257 - DNA, 33 bp, Homo sapien
atcagtgcagatactgggttttccgtccaacag

SEQ ID NO: 812258 - DNA, 33 bp, Homo sapien
atcagtgcagatactgtgttttccgtccaacag

SEQ ID NO: 812259 - DNA, 33 bp, Homo sapien
tgtgctttctctgcccactttgtgggagaacct

SEQ ID NO: 812260 - DNA, 33 bp, Homo sapien
tgtgctttctctgcccgctttgtgggagaacct

SEQ ID NO: 812261 - DNA, 33 bp, Homo sapien
tagatgcctaatctgcaaattacaatgctaata

SEQ ID NO: 812262 - DNA, 33 bp, Homo sapien
tagatgcctaatctgccaattacaatgctaata

SEQ ID NO: 812263 - DNA, 33 bp, Homo sapien
tagggcattagctagacagaagtacaagatgag

SEQ ID NO: 812264 - DNA, 33 bp, Homo sapien
tagggcattagctagatagaagtacaagatgag

SEQ ID NO: 812265 - DNA, 33 bp, Homo sapien
gaatacaaccagggaaaggattcagtaaacact

SEQ ID NO: 812266 - DNA, 33 bp, Homo sapien
gaatacaaccagggaatggattcagtaaacact

SEQ ID NO: 812267 - DNA, 33 bp, Homo sapien
taagctatccagtccacgaataaacacttctgg

SEQ ID NO: 812268 - DNA, 33 bp, Homo sapien
taagctatccagtccatgaataaacacttctgg

SEQ ID NO: 812269 - DNA, 33 bp, Homo sapien
aaaacgaccagagctaaaaagtgacagcagaat

SEQ ID NO: 812270 - DNA, 33 bp, Homo sapien
aaaacgaccagagctacaaagtgacagcagaat

SEQ ID NO: 812271 - DNA, 33 bp, Homo sapien
tgtccttataatcaagcctgtttactcacttgt

SEQ ID NO: 812272 - DNA, 33 bp, Homo sapien
tgtccttataatcaagtctgtttactcacttgt

SEQ ID NO: 812273 - DNA, 33 bp, Homo sapien
atatcacacagctttaacacttaattatatcct

SEQ ID NO: 812274 - DNA, 33 bp, Homo sapien
atatcacacagctttagcacttaattatatcct

SEQ ID NO: 812275 - DNA, 33 bp, Homo sapien
tgccaagtgctttcacagaattttatattttat

SEQ ID NO: 812276 - DNA, 33 bp, Homo sapien
tgccaagtgctttcacggaattttatattttat

SEQ ID NO: 812277 - DNA, 33 bp, Homo sapien
tcaatgcctacctttcaccctcctttctgtgca

SEQ ID NO: 812278 - DNA, 33 bp, Homo sapien
tcaatgcctacctttcgccctcctttctgtgca

SEQ ID NO: 812279 - DNA, 33 bp, Homo sapien
gccatgcaaagatctacgtaaagaacattttta

SEQ ID NO: 812280 - DNA, 33 bp, Homo sapien
gccatgcaaagatctatgtaaagaacattttta

SEQ ID NO: 812281 - DNA, 33 bp, Homo sapien
cttttctttccccgcccgagagagtcaaacgct

SEQ ID NO: 812282 - DNA, 33 bp, Homo sapien
cttttctttccccgcctgagagagtcaaacgct

SEQ ID NO: 812283 - DNA, 33 bp, Homo sapien
gaacataaactcggagaaaaaaatgggaggaaa

SEQ ID NO: 812284 - DNA, 33 bp, Homo sapien
gaacataaactcggaggaaaaaatgggaggaaa

SEQ ID NO: 812285 - DNA, 33 bp, Homo sapien
cttatcagccatgggaacttgaacaaggtcttt

SEQ ID NO: 812286 - DNA, 33 bp, Homo sapien
cttatcagccatgggatcttgaacaaggtcttt

SEQ ID NO: 812287 - DNA, 33 bp, Homo sapien
tagctggttataaataatacttctgcctctgta

SEQ ID NO: 812288 - DNA, 33 bp, Homo sapien
tagctggttataaatagtacttctgcctctgta

SEQ ID NO: 812289 - DNA, 33 bp, Homo sapien
tttcttggaactgtacggcaatctgagacttgc

SEQ ID NO: 812290 - DNA, 33 bp, Homo sapien
tttcttggaactgtactgcaatctgagacttgc

SEQ ID NO: 812291 - DNA, 33 bp, Homo sapien
attcttaatctgaatcaaggaaaatcacaaaag

SEQ ID NO: 812292 - DNA, 33 bp, Homo sapien
attcttaatctgaatcgaggaaaatcacaaaag

SEQ ID NO: 812293 - DNA, 33 bp, Homo sapien
ctacagagctagcatccatcaatagcattttca

SEQ ID NO: 812294 - DNA, 33 bp, Homo sapien
ctacagagctagcatcgatcaatagcattttca

SEQ ID NO: 812295 - DNA, 33 bp, Homo sapien
ccaaaagcagaaactcaaatacctgtggagtta

SEQ ID NO: 812296 - DNA, 33 bp, Homo sapien
ccaaaagcagaaactcgaatacctgtggagtta

SEQ ID NO: 812297 - DNA, 33 bp, Homo sapien
gtgatgtggcaaaagcagagattggacggatgt

SEQ ID NO: 812298 - DNA, 33 bp, Homo sapien
gtgatgtggcaaaagcggagattggacggatgt

SEQ ID NO: 812299 - DNA, 33 bp, Homo sapien
tgtgtatccaacattacattaaggattcaccaa

SEQ ID NO: 812300 - DNA, 33 bp, Homo sapien
tgtgtatccaacattatattaaggattcaccaa

SEQ ID NO: 812301 - DNA, 33 bp, Homo sapien
acatccaaacctttgaagcccttgccagcagtt

SEQ ID NO: 812302 - DNA, 33 bp, Homo sapien
acatccaaacctttgacgcccttgccagcagtt

SEQ ID NO: 812303 - DNA, 33 bp, Homo sapien
ccaacttcctgtttcccctttctctgctttact

SEQ ID NO: 812304 - DNA, 33 bp, Homo sapien
ccaacttcctgtttcctctttctctgctttact

SEQ ID NO: 812305 - DNA, 33 bp, Homo sapien
taatatctgcattctccatgctttaagaaaata

SEQ ID NO: 812306 - DNA, 33 bp, Homo sapien
taatatctgcattctctatgctttaagaaaata

SEQ ID NO: 812307 - DNA, 33 bp, Homo sapien
tcttaaatgaaaacctcagaagacaaccctcca

SEQ ID NO: 812308 - DNA, 33 bp, Homo sapien
tcttaaatgaaaaccttagaagacaaccctcca

SEQ ID NO: 812309 - DNA, 33 bp, Homo sapien
attttgcttagccttaataaacggaacatcttc

SEQ ID NO: 812310 - DNA, 33 bp, Homo sapien
attttgcttagccttactaaacggaacatcttc

SEQ ID NO: 812311 - DNA, 33 bp, Homo sapien
tatatgtattattcccaatgtctaaaatgacat

SEQ ID NO: 812312 - DNA, 33 bp, Homo sapien
tatatgtattattcccgatgtctaaaatgacat

SEQ ID NO: 812313 - DNA, 33 bp, Homo sapien
ccactaaccaagaaagaaatacgtgtagttaca

SEQ ID NO: 812314 - DNA, 33 bp, Homo sapien
ccactaaccaagaaaggaatacgtgtagttaca

SEQ ID NO: 812315 - DNA, 33 bp, Homo sapien
attatgcgcaaaatttaaaacaatatgatttct

SEQ ID NO: 812316 - DNA, 33 bp, Homo sapien
attatgcgcaaaatttgaaacaatatgatttct

SEQ ID NO: 812317 - DNA, 33 bp, Homo sapien
ttctgcatcacgtataagtgcatgactggtagc

SEQ ID NO: 812318 - DNA, 33 bp, Homo sapien
ttctgcatcacgtataggtgcatgactggtagc

SEQ ID NO: 812319 - DNA, 33 bp, Homo sapien
ctaggtcagttctgggcataaagcacaaaaaat

SEQ ID NO: 812320 - DNA, 33 bp, Homo sapien
ctaggtcagttctgggtataaagcacaaaaaat

SEQ ID NO: 812321 - DNA, 33 bp, Homo sapien
agactgatgagtacagcaaatgcagtggaatat

SEQ ID NO: 812322 - DNA, 33 bp, Homo sapien
agactgatgagtacagtaaatgcagtggaatat

SEQ ID NO: 812323 - DNA, 33 bp, Homo sapien
tatttattgcataatcccaaacgacgtagaatt

SEQ ID NO: 812324 - DNA, 33 bp, Homo sapien
tatttattgcataatctcaaacgacgtagaatt

SEQ ID NO: 812325 - DNA, 33 bp, Homo sapien
ccaccttttcctcaaacgttgtaataaaagtcc

SEQ ID NO: 812326 - DNA, 33 bp, Homo sapien
ccaccttttcctcaaatgttgtaataaaagtcc

SEQ ID NO: 812327 - DNA, 33 bp, Homo sapien
ctgcaataaaagcaaactcaattccctaagaga

SEQ ID NO: 812328 - DNA, 33 bp, Homo sapien
ctgcaataaaagcaaattcaattccctaagaga

SEQ ID NO: 812329 - DNA, 33 bp, Homo sapien
aggagatgtttctgacaataaatatagacattt

SEQ ID NO: 812330 - DNA, 33 bp, Homo sapien
aggagatgtttctgaccataaatatagacattt

SEQ ID NO: 812331 - DNA, 33 bp, Homo sapien
tgtcatggctaatagacacttttcatttagttc

SEQ ID NO: 812332 - DNA, 33 bp, Homo sapien
tgtcatggctaatagatacttttcatttagttc

SEQ ID NO: 812333 - DNA, 33 bp, Homo sapien
acgggtaagtggatgaacccaacgcgatgttag

SEQ ID NO: 812334 - DNA, 33 bp, Homo sapien
acgggtaagtggatgatcccaacgcgatgttag

SEQ ID NO: 812335 - DNA, 33 bp, Homo sapien
cctgttgtgaatctgacaagtgtacatctccat

SEQ ID NO: 812336 - DNA, 33 bp, Homo sapien
cctgttgtgaatctgagaagtgtacatctccat

SEQ ID NO: 812337 - DNA, 33 bp, Homo sapien
acttacgagaagtacaagttgtgagagaattaa

SEQ ID NO: 812338 - DNA, 33 bp, Homo sapien
acttacgagaagtacaggttgtgagagaattaa

SEQ ID NO: 812339 - DNA, 33 bp, Homo sapien
catgtgtgcttggaaaatgtgaggtcagaaaac

SEQ ID NO: 812340 - DNA, 33 bp, Homo sapien
catgtgtgcttggaaattgtgaggtcagaaaac

SEQ ID NO: 812341 - DNA, 33 bp, Homo sapien
ttcacatttcatgaaccggcgtgacttttatct

SEQ ID NO: 812342 - DNA, 33 bp, Homo sapien
ttcacatttcatgaactggcgtgacttttatct

SEQ ID NO: 812343 - DNA, 33 bp, Homo sapien
aattaatattggttctaaaaagagattgctaga

SEQ ID NO: 812344 - DNA, 33 bp, Homo sapien
aattaatattggttctcaaaagagattgctaga

SEQ ID NO: 812345 - DNA, 33 bp, Homo sapien
tgagaagatgcatttggatttaactgctcttgt

SEQ ID NO: 812346 - DNA, 33 bp, Homo sapien
tgagaagatgcatttgtatttaactgctcttgt

SEQ ID NO: 812347 - DNA, 33 bp, Homo sapien
ttaacattcaagaaagacagcatggttacacct

SEQ ID NO: 812348 - DNA, 33 bp, Homo sapien
ttaacattcaagaaagccagcatggttacacct

SEQ ID NO: 812349 - DNA, 33 bp, Homo sapien
gtggctgtcagggttaagaagggtatgatggtg

SEQ ID NO: 812350 - DNA, 33 bp, Homo sapien
gtggctgtcagggttatgaagggtatgatggtg

SEQ ID NO: 812351 - DNA, 33 bp, Homo sapien
gggcaaatgatctgaacgaaagtggacttatta

SEQ ID NO: 812352 - DNA, 33 bp, Homo sapien
gggcaaatgatctgaatgaaagtggacttatta

SEQ ID NO: 812353 - DNA, 33 bp, Homo sapien
gagatctctgggttgcaagctccatgtctggga

SEQ ID NO: 812354 - DNA, 33 bp, Homo sapien
gagatctctgggttgccagctccatgtctggga

SEQ ID NO: 812355 - DNA, 33 bp, Homo sapien
caatgatgaaaatccaaaacattgactctctga

SEQ ID NO: 812356 - DNA, 33 bp, Homo sapien
caatgatgaaaatccacaacattgactctctga

SEQ ID NO: 812357 - DNA, 33 bp, Homo sapien
catcttcaaagagatcactccaaagaataaagc

SEQ ID NO: 812358 - DNA, 33 bp, Homo sapien
catcttcaaagagatcgctccaaagaataaagc

SEQ ID NO: 812359 - DNA, 33 bp, Homo sapien
gcctttctgaccagaaactttgggaaaactgca

SEQ ID NO: 812360 - DNA, 33 bp, Homo sapien
gcctttctgaccagaacctttgggaaaactgca

SEQ ID NO: 812361 - DNA, 33 bp, Homo sapien
tgtccattgaaactaacttaactcgctggaact

SEQ ID NO: 812362 - DNA, 33 bp, Homo sapien
tgtccattgaaactaatttaactcgctggaact

SEQ ID NO: 812363 - DNA, 33 bp, Homo sapien
cccaacagctttgagactcagagcccacaagtg

SEQ ID NO: 812364 - DNA, 33 bp, Homo sapien
cccaacagctttgagagtcagagcccacaagtg

SEQ ID NO: 812365 - DNA, 33 bp, Homo sapien
aggtcctaccttctaactcagagcatatagtac

SEQ ID NO: 812366 - DNA, 33 bp, Homo sapien
aggtcctaccttctaagtcagagcatatagtac

SEQ ID NO: 812367 - DNA, 33 bp, Homo sapien
gagcatatagtacaggaaaatgataggattcaa

SEQ ID NO: 812368 - DNA, 33 bp, Homo sapien
gagcatatagtacagggaaatgataggattcaa

SEQ ID NO: 812369 - DNA, 33 bp, Homo sapien
aaggtcacggctaagaagaattcaaactcagat

SEQ ID NO: 812370 - DNA, 33 bp, Homo sapien
aaggtcacggctaagacgaattcaaactcagat

SEQ ID NO: 812371 - DNA, 33 bp, Homo sapien
agaattttggatgcgaccacttctcttctctct

SEQ ID NO: 812372 - DNA, 33 bp, Homo sapien
agaattttggatgcgatcacttctcttctctct

SEQ ID NO: 812373 - DNA, 33 bp, Homo sapien
tgtacatctgtggttaagaatattgtagaagcg

SEQ ID NO: 812374 - DNA, 33 bp, Homo sapien
tgtacatctgtggttaggaatattgtagaagcg

SEQ ID NO: 812375 - DNA, 33 bp, Homo sapien
cttctctgtacttttccatgactttccttaaaa

SEQ ID NO: 812376 - DNA, 33 bp, Homo sapien
cttctctgtacttttctatgactttccttaaaa

SEQ ID NO: 812377 - DNA, 33 bp, Homo sapien
ttgatttatatttttccagtccaaacttatctc

SEQ ID NO: 812378 - DNA, 33 bp, Homo sapien
ttgatttatatttttctagtccaaacttatctc

SEQ ID NO: 812379 - DNA, 33 bp, Homo sapien
atataaaactacaaaacgataagcaatgaaatg

SEQ ID NO: 812380 - DNA, 33 bp, Homo sapien
atataaaactacaaaatgataagcaatgaaatg

SEQ ID NO: 812381 - DNA, 33 bp, Homo sapien
aagttgcaaagtaaaaggtgcacaagtaagcac

SEQ ID NO: 812382 - DNA, 33 bp, Homo sapien
aagttgcaaagtaaaatgtgcacaagtaagcac

SEQ ID NO: 812383 - DNA, 33 bp, Homo sapien
gagttttctgactgaagaggcttccaatcgtga

SEQ ID NO: 812384 - DNA, 33 bp, Homo sapien
gagttttctgactgaataggcttccaatcgtga

SEQ ID NO: 812385 - DNA, 33 bp, Homo sapien
accccaaattaacacaactcttcatctgagagt

SEQ ID NO: 812386 - DNA, 33 bp, Homo sapien
accccaaattaacacatctcttcatctgagagt

SEQ ID NO: 812387 - DNA, 33 bp, Homo sapien
taaatccctgctcttgaatcgatccgacattaa

SEQ ID NO: 812388 - DNA, 33 bp, Homo sapien
taaatccctgctcttgcatcgatccgacattaa

SEQ ID NO: 812389 - DNA, 33 bp, Homo sapien
ctacaatgaccctctccatgcgtgttggtcatc

SEQ ID NO: 812390 - DNA, 33 bp, Homo sapien
ctacaatgaccctctctatgcgtgttggtcatc

SEQ ID NO: 812391 - DNA, 33 bp, Homo sapien
ctatggtcacaaagtagattgatggatgctgct

SEQ ID NO: 812392 - DNA, 33 bp, Homo sapien
ctatggtcacaaagtatattgatggatgctgct

SEQ ID NO: 812393 - DNA, 33 bp, Homo sapien
agtctttcatttagcacgatgttcttgaaatta

SEQ ID NO: 812394 - DNA, 33 bp, Homo sapien
agtctttcatttagcatgatgttcttgaaatta

SEQ ID NO: 812395 - DNA, 33 bp, Homo sapien
aatttgtcttgattagaaaaatagcaatcaaag

SEQ ID NO: 812396 - DNA, 33 bp, Homo sapien
aatttgtcttgattaggaaaatagcaatcaaag

SEQ ID NO: 812397 - DNA, 33 bp, Homo sapien
tctctgatttgccagagattctccccataaagt

SEQ ID NO: 812398 - DNA, 33 bp, Homo sapien
tctctgatttgccagatattctccccataaagt

SEQ ID NO: 812399 - DNA, 33 bp, Homo sapien
attgaccatgggcatacaagaaatatacaatgt

SEQ ID NO: 812400 - DNA, 33 bp, Homo sapien
attgaccatgggcatagaagaaatatacaatgt

SEQ ID NO: 812401 - DNA, 33 bp, Homo sapien
agagaatgagaatcaacagaaatgggtttgtcc

SEQ ID NO: 812402 - DNA, 33 bp, Homo sapien
agagaatgagaatcaagagaaatgggtttgtcc

SEQ ID NO: 812403 - DNA, 33 bp, Homo sapien
agcaaaggcaggattcaatttgagatgtttaca

SEQ ID NO: 812404 - DNA, 33 bp, Homo sapien
agcaaaggcaggattcgatttgagatgtttaca

SEQ ID NO: 812405 - DNA, 33 bp, Homo sapien
tttgactcttttttcagtcagtgatattttctg

SEQ ID NO: 812406 - DNA, 33 bp, Homo sapien
tttgactcttttttcattcagtgatattttctg

SEQ ID NO: 812407 - DNA, 33 bp, Homo sapien
caagaatgtttatcacagcattttgtataataa

SEQ ID NO: 812408 - DNA, 33 bp, Homo sapien
caagaatgtttatcacggcattttgtataataa

SEQ ID NO: 812409 - DNA, 33 bp, Homo sapien
tcccctgttttcaagtgaaaggtgacattattt

SEQ ID NO: 812410 - DNA, 33 bp, Homo sapien
tcccctgttttcaagttaaaggtgacattattt

SEQ ID NO: 812411 - DNA, 33 bp, Homo sapien
tcatttggagcatttcaagttttggatttttgg

SEQ ID NO: 812412 - DNA, 33 bp, Homo sapien
tcatttggagcatttcgagttttggatttttgg

SEQ ID NO: 812413 - DNA, 33 bp, Homo sapien
ttccatgtggtatgaaaggggtcaggtgttact

SEQ ID NO: 812414 - DNA, 33 bp, Homo sapien
ttccatgtggtatgaatggggtcaggtgttact

SEQ ID NO: 812415 - DNA, 33 bp, Homo sapien
ccccctgcagacataacgcctcaacaagagtga

SEQ ID NO: 812416 - DNA, 33 bp, Homo sapien
ccccctgcagacataatgcctcaacaagagtga

SEQ ID NO: 812417 - DNA, 33 bp, Homo sapien
gactttggacaaatcacattgcaccttttcttg

SEQ ID NO: 812418 - DNA, 33 bp, Homo sapien
gactttggacaaatcatattgcaccttttcttg

SEQ ID NO: 812419 - DNA, 33 bp, Homo sapien
caggcttggatcatcagagccatagtgattcag

SEQ ID NO: 812420 - DNA, 33 bp, Homo sapien
caggcttggatcatcatagccatagtgattcag

SEQ ID NO: 812421 - DNA, 33 bp, Homo sapien
agttgtcattgaccaaaagaccgttcaagggtg

SEQ ID NO: 812422 - DNA, 33 bp, Homo sapien
agttgtcattgaccaagagaccgttcaagggtg

SEQ ID NO: 812423 - DNA, 33 bp, Homo sapien
agtgtgctatagaggaacaaggagtggaggagg

SEQ ID NO: 812424 - DNA, 33 bp, Homo sapien
agtgtgctatagaggagcaaggagtggaggagg

SEQ ID NO: 812425 - DNA, 33 bp, Homo sapien
gtgtgctactgttttccaggtttctcattcatt

SEQ ID NO: 812426 - DNA, 33 bp, Homo sapien
gtgtgctactgttttcgaggtttctcattcatt

SEQ ID NO: 812427 - DNA, 33 bp, Homo sapien
atgttatcatggtgcaagatatcagccactatg

SEQ ID NO: 812428 - DNA, 33 bp, Homo sapien
atgttatcatggtgcaggatatcagccactatg

SEQ ID NO: 812429 - DNA, 33 bp, Homo sapien
ttacctaaggtgagtacattagtccattctcac

SEQ ID NO: 812430 - DNA, 33 bp, Homo sapien
ttacctaaggtgagtatattagtccattctcac

SEQ ID NO: 812431 - DNA, 33 bp, Homo sapien
tattgtagattgtgaggcaatgtccagtagggg

SEQ ID NO: 812432 - DNA, 33 bp, Homo sapien
tattgtagattgtgagtcaatgtccagtagggg

SEQ ID NO: 812433 - DNA, 33 bp, Homo sapien
ttacttttcccattcacccaataagcaaatact

SEQ ID NO: 812434 - DNA, 33 bp, Homo sapien
ttacttttcccattcatccaataagcaaatact

SEQ ID NO: 812435 - DNA, 33 bp, Homo sapien
tgaaggactgaaacaaacaaggctcaatggcca

SEQ ID NO: 812436 - DNA, 33 bp, Homo sapien
tgaaggactgaaacaagcaaggctcaatggcca

SEQ ID NO: 812437 - DNA, 33 bp, Homo sapien
agatgagctttaatcgaaggaccaaatctgtgt

SEQ ID NO: 812438 - DNA, 33 bp, Homo sapien
agatgagctttaatcggaggaccaaatctgtgt

SEQ ID NO: 812439 - DNA, 33 bp, Homo sapien
gatatactttctaccaatctcagtacatgagat

SEQ ID NO: 812440 - DNA, 33 bp, Homo sapien
gatatactttctaccagtctcagtacatgagat

SEQ ID NO: 812441 - DNA, 33 bp, Homo sapien
aacaggtcaaaagtcaccaagcgaatgaacaaa

SEQ ID NO: 812442 - DNA, 33 bp, Homo sapien
aacaggtcaaaagtcatcaagcgaatgaacaaa

SEQ ID NO: 812443 - DNA, 33 bp, Homo sapien
ttccaaggttgcaagcagcgtagaaaactctgg

SEQ ID NO: 812444 - DNA, 33 bp, Homo sapien
ttccaaggttgcaagcggcgtagaaaactctgg

SEQ ID NO: 812445 - DNA, 33 bp, Homo sapien
tatggcagcgtttctcaaaatgtaatgtgtgta

SEQ ID NO: 812446 - DNA, 33 bp, Homo sapien
tatggcagcgtttctcgaaatgtaatgtgtgta

SEQ ID NO: 812447 - DNA, 33 bp, Homo sapien
ccagggtaaatggataaattgtcatagatgacc

SEQ ID NO: 812448 - DNA, 33 bp, Homo sapien
ccagggtaaatggatatattgtcatagatgacc

SEQ ID NO: 812449 - DNA, 33 bp, Homo sapien
gtaaatttaggctcaaacaacaaggaagcaagg

SEQ ID NO: 812450 - DNA, 33 bp, Homo sapien
gtaaatttaggctcaagcaacaaggaagcaagg

SEQ ID NO: 812451 - DNA, 33 bp, Homo sapien
ccgccattttagtcaacggtcactctgtgtact

SEQ ID NO: 812452 - DNA, 33 bp, Homo sapien
ccgccattttagtcaatggtcactctgtgtact

SEQ ID NO: 812453 - DNA, 33 bp, Homo sapien
tccactgtctattataggattccacatttatag

SEQ ID NO: 812454 - DNA, 33 bp, Homo sapien
tccactgtctattatatgattccacatttatag

SEQ ID NO: 812455 - DNA, 33 bp, Homo sapien
gcttcagtagtacagcaaaccagcagaacgtac

SEQ ID NO: 812456 - DNA, 33 bp, Homo sapien
gcttcagtagtacagcgaaccagcagaacgtac

SEQ ID NO: 812457 - DNA, 33 bp, Homo sapien
agctggaaacagatgacagaggcaaaatgactc

SEQ ID NO: 812458 - DNA, 33 bp, Homo sapien
agctggaaacagatgagagaggcaaaatgactc

SEQ ID NO: 812459 - DNA, 33 bp, Homo sapien
tgtgtgcgtgtacacaaaccattggcatgtgaa

SEQ ID NO: 812460 - DNA, 33 bp, Homo sapien
tgtgtgcgtgtacacagaccattggcatgtgaa

SEQ ID NO: 812461 - DNA, 33 bp, Homo sapien
cttggctttctgggcacattcagctaattctcc

SEQ ID NO: 812462 - DNA, 33 bp, Homo sapien
cttggctttctgggcatattcagctaattctcc

SEQ ID NO: 812463 - DNA, 33 bp, Homo sapien
ctgttctgcactaactaaggtaaattattgtcc

SEQ ID NO: 812464 - DNA, 33 bp, Homo sapien
ctgttctgcactaactgaggtaaattattgtcc

SEQ ID NO: 812465 - DNA, 33 bp, Homo sapien
ggaggaaacacccaaacagagtgtgaaagtaat

SEQ ID NO: 812466 - DNA, 33 bp, Homo sapien
ggaggaaacacccaaagagagtgtgaaagtaat

SEQ ID NO: 812467 - DNA, 33 bp, Homo sapien
ttttttgaaaacggaaaacagcaaacagacatt

SEQ ID NO: 812468 - DNA, 33 bp, Homo sapien
ttttttgaaaacggaacacagcaaacagacatt

SEQ ID NO: 812469 - DNA, 33 bp, Homo sapien
gtggaaaatagagagaaaagaaggatgatgccc

SEQ ID NO: 812470 - DNA, 33 bp, Homo sapien
gtggaaaatagagagagaagaaggatgatgccc

SEQ ID NO: 812471 - DNA, 33 bp, Homo sapien
taatccccagaatagaatcgttattttagttgg

SEQ ID NO: 812472 - DNA, 33 bp, Homo sapien
taatccccagaatagactcgttattttagttgg

SEQ ID NO: 812473 - DNA, 33 bp, Homo sapien
atatctttaaggcccaatatatttctctatgct

SEQ ID NO: 812474 - DNA, 33 bp, Homo sapien
atatctttaaggcccagtatatttctctatgct

SEQ ID NO: 812475 - DNA, 33 bp, Homo sapien
tctgagaaggtgaacaatgagccctgggaatat

SEQ ID NO: 812476 - DNA, 33 bp, Homo sapien
tctgagaaggtgaacagtgagccctgggaatat

SEQ ID NO: 812477 - DNA, 33 bp, Homo sapien
ttcatttatgattggaacccatttaattcatct

SEQ ID NO: 812478 - DNA, 33 bp, Homo sapien
ttcatttatgattggaccccatttaattcatct

SEQ ID NO: 812479 - DNA, 33 bp, Homo sapien
cacatatttttatgtacgctgttgagagtgtaa

SEQ ID NO: 812480 - DNA, 33 bp, Homo sapien
cacatatttttatgtatgctgttgagagtgtaa

SEQ ID NO: 812481 - DNA, 33 bp, Homo sapien
tgagatcaagtgatacagcatttgccaggaggt

SEQ ID NO: 812482 - DNA, 33 bp, Homo sapien
tgagatcaagtgatacggcatttgccaggaggt

SEQ ID NO: 812483 - DNA, 33 bp, Homo sapien
aacaaggggaaaggcacaatttatgttcataag

SEQ ID NO: 812484 - DNA, 33 bp, Homo sapien
aacaaggggaaaggcagaatttatgttcataag

SEQ ID NO: 812485 - DNA, 33 bp, Homo sapien
aaaggcaccatgaatgaagtctgtcaacagtgc

SEQ ID NO: 812486 - DNA, 33 bp, Homo sapien
aaaggcaccatgaatggagtctgtcaacagtgc

SEQ ID NO: 812487 - DNA, 33 bp, Homo sapien
cctggacagcatcttaaatttcatctttcactg

SEQ ID NO: 812488 - DNA, 33 bp, Homo sapien
cctggacagcatcttagatttcatctttcactg

SEQ ID NO: 812489 - DNA, 33 bp, Homo sapien
gtgagtgaggaatctacacctttgccagtattt

SEQ ID NO: 812490 - DNA, 33 bp, Homo sapien
gtgagtgaggaatctatacctttgccagtattt

SEQ ID NO: 812491 - DNA, 33 bp, Homo sapien
tagtacataagttagacggtaaatattggcaaa

SEQ ID NO: 812492 - DNA, 33 bp, Homo sapien
tagtacataagttagatggtaaatattggcaaa

SEQ ID NO: 812493 - DNA, 33 bp, Homo sapien
ttgtgaatcccacagcaattaagttttttaccc

SEQ ID NO: 812494 - DNA, 33 bp, Homo sapien
ttgtgaatcccacagcgattaagttttttaccc

SEQ ID NO: 812495 - DNA, 33 bp, Homo sapien
gtgagttttgttgaaacgtttttgacagtagat

SEQ ID NO: 812496 - DNA, 33 bp, Homo sapien
gtgagttttgttgaaatgtttttgacagtagat

SEQ ID NO: 812497 - DNA, 33 bp, Homo sapien
gacagaaggatgttaaactaagtgttctgagca

SEQ ID NO: 812498 - DNA, 33 bp, Homo sapien
gacagaaggatgttaacctaagtgttctgagca

SEQ ID NO: 812499 - DNA, 33 bp, Homo sapien
tgggctggtatctccaaagaaactggcatggct

SEQ ID NO: 812500 - DNA, 33 bp, Homo sapien
tgggctggtatctccagagaaactggcatggct

SEQ ID NO: 812501 - DNA, 33 bp, Homo sapien
ttgcaaaaattgaaacaatactgaacaatacac

SEQ ID NO: 812502 - DNA, 33 bp, Homo sapien
ttgcaaaaattgaaactatactgaacaatacac

SEQ ID NO: 812503 - DNA, 33 bp, Homo sapien
ggaggcagctattcaacgtcaacacccatgcat

SEQ ID NO: 812504 - DNA, 33 bp, Homo sapien
ggaggcagctattcaatgtcaacacccatgcat

SEQ ID NO: 812505 - DNA, 33 bp, Homo sapien
aagcagttgttctctacctcatctattccagta

SEQ ID NO: 812506 - DNA, 33 bp, Homo sapien
aagcagttgttctctagctcatctattccagta

SEQ ID NO: 812507 - DNA, 33 bp, Homo sapien
ttggaactaaatggtcaccaaaaccacttgata

SEQ ID NO: 812508 - DNA, 33 bp, Homo sapien
ttggaactaaatggtcgccaaaaccacttgata

SEQ ID NO: 812509 - DNA, 33 bp, Homo sapien
ttcaatgatacaaacactccaccattctctttt

SEQ ID NO: 812510 - DNA, 33 bp, Homo sapien
ttcaatgatacaaacattccaccattctctttt

SEQ ID NO: 812511 - DNA, 33 bp, Homo sapien
ctttatgtcaatcttaagagaaacatactttta

SEQ ID NO: 812512 - DNA, 33 bp, Homo sapien
ctttatgtcaatcttatgagaaacatactttta

SEQ ID NO: 812513 - DNA, 33 bp, Homo sapien
actgtgctagcattgacgttgagagttcacaga

SEQ ID NO: 812514 - DNA, 33 bp, Homo sapien
actgtgctagcattgatgttgagagttcacaga

SEQ ID NO: 812515 - DNA, 33 bp, Homo sapien
aaatgtctccgttagcacgaaggccctgcttgc

SEQ ID NO: 812516 - DNA, 33 bp, Homo sapien
aaatgtctccgttagcgcgaaggccctgcttgc

SEQ ID NO: 812517 - DNA, 33 bp, Homo sapien
ttcttaattatgatgaagcaggagggtgaaaca

SEQ ID NO: 812518 - DNA, 33 bp, Homo sapien
ttcttaattatgatgatgcaggagggtgaaaca

SEQ ID NO: 812519 - DNA, 33 bp, Homo sapien
gtgtgcattgtatgtacgtacttgtgtgtttga

SEQ ID NO: 812520 - DNA, 33 bp, Homo sapien
gtgtgcattgtatgtatgtacttgtgtgtttga

SEQ ID NO: 812521 - DNA, 33 bp, Homo sapien
tgcctctcatgctaaacgcttacttaattcatc

SEQ ID NO: 812522 - DNA, 33 bp, Homo sapien
tgcctctcatgctaaatgcttacttaattcatc

SEQ ID NO: 812523 - DNA, 33 bp, Homo sapien
tgaaattagagagttaagggcttgagttaaggg

SEQ ID NO: 812524 - DNA, 33 bp, Homo sapien
tgaaattagagagttaggggcttgagttaaggg

SEQ ID NO: 812525 - DNA, 33 bp, Homo sapien
agttattgtaactccaatacaaactctttcctt

SEQ ID NO: 812526 - DNA, 33 bp, Homo sapien
agttattgtaactccagtacaaactctttcctt

SEQ ID NO: 812527 - DNA, 33 bp, Homo sapien
tttccttgacttcagaaaacactttgccttgca

SEQ ID NO: 812528 - DNA, 33 bp, Homo sapien
tttccttgacttcagataacactttgccttgca

SEQ ID NO: 812529 - DNA, 33 bp, Homo sapien
catagtccgaagtgtacggggttgaattttggc

SEQ ID NO: 812530 - DNA, 33 bp, Homo sapien
catagtccgaagtgtatggggttgaattttggc

SEQ ID NO: 812531 - DNA, 33 bp, Homo sapien
catttgcatcgatctacgtatccatgtcaaaat

SEQ ID NO: 812532 - DNA, 33 bp, Homo sapien
catttgcatcgatctatgtatccatgtcaaaat

SEQ ID NO: 812533 - DNA, 33 bp, Homo sapien
ggctgtttgtcattcaccttttgtttcctcact

SEQ ID NO: 812534 - DNA, 33 bp, Homo sapien
ggctgtttgtcattcatcttttgtttcctcact

SEQ ID NO: 812535 - DNA, 33 bp, Homo sapien
caaataaatgtcagaaataagattacctgttgt

SEQ ID NO: 812536 - DNA, 33 bp, Homo sapien
caaataaatgtcagaactaagattacctgttgt

SEQ ID NO: 812537 - DNA, 33 bp, Homo sapien
cttgattaactgcttccatggtataccaatcac

SEQ ID NO: 812538 - DNA, 33 bp, Homo sapien
cttgattaactgcttctatggtataccaatcac

SEQ ID NO: 812539 - DNA, 33 bp, Homo sapien
ttatgctataaaataacagtcctgacatacttc

SEQ ID NO: 812540 - DNA, 33 bp, Homo sapien
ttatgctataaaataagagtcctgacatacttc

SEQ ID NO: 812541 - DNA, 33 bp, Homo sapien
aaagctaaaactatagcccagctagttctctgt

SEQ ID NO: 812542 - DNA, 33 bp, Homo sapien
aaagctaaaactatagtccagctagttctctgt

SEQ ID NO: 812543 - DNA, 33 bp, Homo sapien
cactgatctaccccatcaacccagaatgccgtc

SEQ ID NO: 812544 - DNA, 33 bp, Homo sapien
cactgatctaccccatgaacccagaatgccgtc

SEQ ID NO: 812545 - DNA, 33 bp, Homo sapien
tacctctgtgcttctacctctggctcagcagat

SEQ ID NO: 812546 - DNA, 33 bp, Homo sapien
tacctctgtgcttctatctctggctcagcagat

SEQ ID NO: 812547 - DNA, 33 bp, Homo sapien
agcctttctgataagcagagatcaataccagga

SEQ ID NO: 812548 - DNA, 33 bp, Homo sapien
agcctttctgataagcggagatcaataccagga

SEQ ID NO: 812549 - DNA, 33 bp, Homo sapien
tcccaaacactgattggatcaaatagcacagtg

SEQ ID NO: 812550 - DNA, 33 bp, Homo sapien
tcccaaacactgattgtatcaaatagcacagtg

SEQ ID NO: 812551 - DNA, 33 bp, Homo sapien
ctgagaactagtagagacaagcttccaaatcat

SEQ ID NO: 812552 - DNA, 33 bp, Homo sapien
ctgagaactagtagaggcaagcttccaaatcat

SEQ ID NO: 812553 - DNA, 33 bp, Homo sapien
tggcccaaagtcatacaaagtcattcaataaca

SEQ ID NO: 812554 - DNA, 33 bp, Homo sapien
tggcccaaagtcatacgaagtcattcaataaca

SEQ ID NO: 812555 - DNA, 33 bp, Homo sapien
aactcattattgtgataaaagtgtcattagtaa

SEQ ID NO: 812556 - DNA, 33 bp, Homo sapien
aactcattattgtgatgaaagtgtcattagtaa

SEQ ID NO: 812557 - DNA, 33 bp, Homo sapien
atgttggctttgtaccaaaattcagatacctgg

SEQ ID NO: 812558 - DNA, 33 bp, Homo sapien
atgttggctttgtaccgaaattcagatacctgg

SEQ ID NO: 812559 - DNA, 33 bp, Homo sapien
atgctgagctatgacacgggatagttagcaaaa

SEQ ID NO: 812560 - DNA, 33 bp, Homo sapien
atgctgagctatgacatgggatagttagcaaaa

SEQ ID NO: 812561 - DNA, 33 bp, Homo sapien
tttctggaatttattacatcttcctttgttcta

SEQ ID NO: 812562 - DNA, 33 bp, Homo sapien
tttctggaatttattagatcttcctttgttcta

SEQ ID NO: 812563 - DNA, 33 bp, Homo sapien
acattctaggctcttaacagggttattgtacat

SEQ ID NO: 812564 - DNA, 33 bp, Homo sapien
acattctaggctcttagcagggttattgtacat

SEQ ID NO: 812565 - DNA, 33 bp, Homo sapien
tgctggtatctacctgaagtcagcaaccgtctt

SEQ ID NO: 812566 - DNA, 33 bp, Homo sapien
tgctggtatctacctgcagtcagcaaccgtctt

SEQ ID NO: 812567 - DNA, 33 bp, Homo sapien
atagacagagctgataggcttagaatgtcagtc

SEQ ID NO: 812568 - DNA, 33 bp, Homo sapien
atagacagagctgatatgcttagaatgtcagtc

SEQ ID NO: 812569 - DNA, 33 bp, Homo sapien
ggggctttggaccatgcagtattagcttgacct

SEQ ID NO: 812570 - DNA, 33 bp, Homo sapien
ggggctttggaccatgtagtattagcttgacct

SEQ ID NO: 812571 - DNA, 33 bp, Homo sapien
gtggctttgagtaagacggccgggcatttaata

SEQ ID NO: 812572 - DNA, 33 bp, Homo sapien
gtggctttgagtaagagggccgggcatttaata

SEQ ID NO: 812573 - DNA, 33 bp, Homo sapien
attccagtttaagaagacctggtagcatagaac

SEQ ID NO: 812574 - DNA, 33 bp, Homo sapien
attccagtttaagaagccctggtagcatagaac

SEQ ID NO: 812575 - DNA, 33 bp, Homo sapien
aacaaatgttacatctcaaagctaaatgaaaaa

SEQ ID NO: 812576 - DNA, 33 bp, Homo sapien
aacaaatgttacatctgaaagctaaatgaaaaa

SEQ ID NO: 812577 - DNA, 33 bp, Homo sapien
gatgatctttctgtccacaaggttcttatttcc

SEQ ID NO: 812578 - DNA, 33 bp, Homo sapien
gatgatctttctgtccgcaaggttcttatttcc

SEQ ID NO: 812579 - DNA, 33 bp, Homo sapien
ccttaatacataaaaacgtttgtcagcatcttt

SEQ ID NO: 812580 - DNA, 33 bp, Homo sapien
ccttaatacataaaaatgtttgtcagcatcttt

SEQ ID NO: 812581 - DNA, 33 bp, Homo sapien
cacttacctcaattcgaaacaacactttgattt

SEQ ID NO: 812582 - DNA, 33 bp, Homo sapien
cacttacctcaattcgcaacaacactttgattt

SEQ ID NO: 812583 - DNA, 33 bp, Homo sapien
gttggtgcacatggtaaaaaggaatttgcagct

SEQ ID NO: 812584 - DNA, 33 bp, Homo sapien
gttggtgcacatggtacaaaggaatttgcagct

SEQ ID NO: 812585 - DNA, 33 bp, Homo sapien
ttataggagaactataccttcagggcttttaaa

SEQ ID NO: 812586 - DNA, 33 bp, Homo sapien
ttataggagaactatatcttcagggcttttaaa

SEQ ID NO: 812587 - DNA, 33 bp, Homo sapien
atattatctaaggttccctctaaagctaacatt

SEQ ID NO: 812588 - DNA, 33 bp, Homo sapien
atattatctaaggttctctctaaagctaacatt

SEQ ID NO: 812589 - DNA, 33 bp, Homo sapien
agagttgataaaattacagtgttgagctggaaa

SEQ ID NO: 812590 - DNA, 33 bp, Homo sapien
agagttgataaaattatagtgttgagctggaaa

SEQ ID NO: 812591 - DNA, 33 bp, Homo sapien
tgactggaaatggtagcagtgtcaagatgacta

SEQ ID NO: 812592 - DNA, 33 bp, Homo sapien
tgactggaaatggtagtagtgtcaagatgacta

SEQ ID NO: 812593 - DNA, 33 bp, Homo sapien
gagtctggcacaagataacatagagtttaaact

SEQ ID NO: 812594 - DNA, 33 bp, Homo sapien
gagtctggcacaagatgacatagagtttaaact

SEQ ID NO: 812595 - DNA, 33 bp, Homo sapien
gacgtgaataacatacccaaaggtaagaatcaa

SEQ ID NO: 812596 - DNA, 33 bp, Homo sapien
gacgtgaataacatactcaaaggtaagaatcaa

SEQ ID NO: 812597 - DNA, 33 bp, Homo sapien
ttgaaccaaatgaaccaataaatagcattaaat

SEQ ID NO: 812598 - DNA, 33 bp, Homo sapien
ttgaaccaaatgaacccataaatagcattaaat

SEQ ID NO: 812599 - DNA, 33 bp, Homo sapien
tggggagcctctaacactgggacagcttggtcc

SEQ ID NO: 812600 - DNA, 33 bp, Homo sapien
tggggagcctctaacattgggacagcttggtcc

SEQ ID NO: 812601 - DNA, 33 bp, Homo sapien
tttcaagaaggcacaaaggaaaagaaggaaaag

SEQ ID NO: 812602 - DNA, 33 bp, Homo sapien
tttcaagaaggcacaagggaaaagaaggaaaag

SEQ ID NO: 812603 - DNA, 33 bp, Homo sapien
aaattgctggacctacaaactacacatttacgt

SEQ ID NO: 812604 - DNA, 33 bp, Homo sapien
aaattgctggacctacgaactacacatttacgt

SEQ ID NO: 812605 - DNA, 33 bp, Homo sapien
gtaagtcacttgtgtcaacattaaattgtcacc

SEQ ID NO: 812606 - DNA, 33 bp, Homo sapien
gtaagtcacttgtgtctacattaaattgtcacc

SEQ ID NO: 812607 - DNA, 33 bp, Homo sapien
aacagaaaaaataccacagggcatgatgagaaa

SEQ ID NO: 812608 - DNA, 33 bp, Homo sapien
aacagaaaaaataccatagggcatgatgagaaa

SEQ ID NO: 812609 - DNA, 33 bp, Homo sapien
tccttcccaaggaagacgcaggttagacaaaca

SEQ ID NO: 812610 - DNA, 33 bp, Homo sapien
tccttcccaaggaagatgcaggttagacaaaca

SEQ ID NO: 812611 - DNA, 33 bp, Homo sapien
tgttattttggattcaaacctctctgtccttcc

SEQ ID NO: 812612 - DNA, 33 bp, Homo sapien
tgttattttggattcacacctctctgtccttcc

SEQ ID NO: 812613 - DNA, 33 bp, Homo sapien
aacaaatgaagaaagaactgttattttggattc

SEQ ID NO: 812614 - DNA, 33 bp, Homo sapien
aacaaatgaagaaagagctgttattttggattc

SEQ ID NO: 812615 - DNA, 33 bp, Homo sapien
attttcatctcaatgaccttttgcatctccctg

SEQ ID NO: 812616 - DNA, 33 bp, Homo sapien
attttcatctcaatgatcttttgcatctccctg

SEQ ID NO: 812617 - DNA, 33 bp, Homo sapien
agagcgacatgtaaagcaatattctaagcagac

SEQ ID NO: 812618 - DNA, 33 bp, Homo sapien
agagcgacatgtaaagtaatattctaagcagac

SEQ ID NO: 812619 - DNA, 33 bp, Homo sapien
acttatctcatggataaaacagaggatagacta

SEQ ID NO: 812620 - DNA, 33 bp, Homo sapien
acttatctcatggatagaacagaggatagacta

SEQ ID NO: 812621 - DNA, 33 bp, Homo sapien
gacagggctatctcttaaaaggcctgggggcat

SEQ ID NO: 812622 - DNA, 33 bp, Homo sapien
gacagggctatctcttcaaaggcctgggggcat

SEQ ID NO: 812623 - DNA, 33 bp, Homo sapien
tactatgccgccatgaaaagtacaagatcacgt

SEQ ID NO: 812624 - DNA, 33 bp, Homo sapien
tactatgccgccatgagaagtacaagatcacgt

SEQ ID NO: 812625 - DNA, 33 bp, Homo sapien; identical to SEQ ID NO: 812623

SEQ ID NO: 812626 - DNA, 33 bp, Homo sapien; identical to SEQ ID NO: 812624

SEQ ID NO: 812627 - DNA, 33 bp, Homo sapien
ttctgttgggtctacacatatgcacatctcaat

SEQ ID NO: 812628 - DNA, 33 bp, Homo sapien
ttctgttgggtctacatatatgcacatctcaat

SEQ ID NO: 812629 - DNA, 33 bp, Homo sapien
atgtatgttgttttcacgtttcagctcatgtat

SEQ ID NO: 812630 - DNA, 33 bp, Homo sapien
atgtatgttgttttcatgtttcagctcatgtat

SEQ ID NO: 812631 - DNA, 33 bp, Homo sapien
ataggcactgctcagacgtaactgtgtaataaa

SEQ ID NO: 812632 - DNA, 33 bp, Homo sapien
ataggcactgctcagatgtaactgtgtaataaa

SEQ ID NO: 812633 - DNA, 33 bp, Homo sapien
cctcaaagctctgcaccacctcacggatgctgc

SEQ ID NO: 812634 - DNA, 33 bp, Homo sapien
cctcaaagctctgcactacctcacggatgctgc

SEQ ID NO: 812635 - DNA, 33 bp, Homo sapien
ccttgcctttttgacaccacgatctcgcctggc

SEQ ID NO: 812636 - DNA, 33 bp, Homo sapien
ccttgcctttttgacagcacgatctcgcctggc

SEQ ID NO: 812637 - DNA, 33 bp, Homo sapien
ctggcaggcaaaagccacagaccaactcaggcc

SEQ ID NO: 812638 - DNA, 33 bp, Homo sapien
ctggcaggcaaaagccgcagaccaactcaggcc

SEQ ID NO: 812639 - DNA, 33 bp, Homo sapien
ctgggctgtgaccaaactaacattgaatgtggc

SEQ ID NO: 812640 - DNA, 33 bp, Homo sapien
ctgggctgtgaccaaattaacattgaatgtggc

SEQ ID NO: 812641 - DNA, 33 bp, Homo sapien
tggttgacttctcaaacgtcccacgactttact

SEQ ID NO: 812642 - DNA, 33 bp, Homo sapien
tggttgacttctcaaatgtcccacgactttact

SEQ ID NO: 812643 - DNA, 33 bp, Homo sapien
aaaccaaaagttcttcaaagtcattcaacttga

SEQ ID NO: 812644 - DNA, 33 bp, Homo sapien
aaaccaaaagttcttcgaagtcattcaacttga

SEQ ID NO: 812645 - DNA, 33 bp, Homo sapien
ctcatgcatcagtttaagttcttcaatttttta

SEQ ID NO: 812646 - DNA, 33 bp, Homo sapien
ctcatgcatcagtttacgttcttcaatttttta

SEQ ID NO: 812647 - DNA, 33 bp, Homo sapien
tcttccaggcttcacccatatcagttacagatg

SEQ ID NO: 812648 - DNA, 33 bp, Homo sapien
tcttccaggcttcacctatatcagttacagatg

SEQ ID NO: 812649 - DNA, 33 bp, Homo sapien
aataataaaagctactaacatgggctgacactt

SEQ ID NO: 812650 - DNA, 33 bp, Homo sapien
aataataaaagctactcacatgggctgacactt

SEQ ID NO: 812651 - DNA, 33 bp, Homo sapien
gagggcctctagattcacaagtccatggcctct

SEQ ID NO: 812652 - DNA, 33 bp, Homo sapien
gagggcctctagattctcaagtccatggcctct

SEQ ID NO: 812653 - DNA, 33 bp, Homo sapien
agtttgctttgggttaagtttctgttgtatgag

SEQ ID NO: 812654 - DNA, 33 bp, Homo sapien
agtttgctttgggttaggtttctgttgtatgag

SEQ ID NO: 812655 - DNA, 33 bp, Homo sapien
aggccctccttcataccatacttgaaatataga

SEQ ID NO: 812656 - DNA, 33 bp, Homo sapien
aggccctccttcatactatacttgaaatataga

SEQ ID NO: 812657 - DNA, 33 bp, Homo sapien
tctttcttcacactatcaagttaggcaaaataa

SEQ ID NO: 812658 - DNA, 33 bp, Homo sapien
tctttcttcacactatgaagttaggcaaaataa

SEQ ID NO: 812659 - DNA, 33 bp, Homo sapien
aattctctctagctagccatttggcctcctctt

SEQ ID NO: 812660 - DNA, 33 bp, Homo sapien
aattctctctagctaggcatttggcctcctctt

SEQ ID NO: 812661 - DNA, 33 bp, Homo sapien
cttgacacactgaaacaaacgactcactgaaaa

SEQ ID NO: 812662 - DNA, 33 bp, Homo sapien
cttgacacactgaaacgaacgactcactgaaaa

SEQ ID NO: 812663 - DNA, 33 bp, Homo sapien
tgactctcattctccacgacttccaataatttt

SEQ ID NO: 812664 - DNA, 33 bp, Homo sapien
tgactctcattctccatgacttccaataatttt

SEQ ID NO: 812665 - DNA, 33 bp, Homo sapien
tcacacaaagtgctatcacagccaaaaggatca

SEQ ID NO: 812666 - DNA, 33 bp, Homo sapien
tcacacaaagtgctattacagccaaaaggatca

SEQ ID NO: 812667 - DNA, 33 bp, Homo sapien
agtgtgtctttggaccccttccaggctgtttcc

SEQ ID NO: 812668 - DNA, 33 bp, Homo sapien
agtgtgtctttggacctcttccaggctgtttcc

SEQ ID NO: 812669 - DNA, 33 bp, Homo sapien
cttagctcttttaggccaaactttctcaatgca

SEQ ID NO: 812670 - DNA, 33 bp, Homo sapien
cttagctcttttaggcgaaactttctcaatgca

SEQ ID NO: 812671 - DNA, 33 bp, Homo sapien
agaaggctatttttcacgagagagttctttctc

SEQ ID NO: 812672 - DNA, 33 bp, Homo sapien
agaaggctatttttcatgagagagttctttctc

SEQ ID NO: 812673 - DNA, 33 bp, Homo sapien
gaaggggaaaaagtaaacgttcatcttcttcaa

SEQ ID NO: 812674 - DNA, 33 bp, Homo sapien
gaaggggaaaaagtaagcgttcatcttcttcaa

SEQ ID NO: 812675 - DNA, 33 bp, Homo sapien
taatttactctcagaaccagacttagaaagctg

SEQ ID NO: 812676 - DNA, 33 bp, Homo sapien
taatttactctcagaagcagacttagaaagctg

SEQ ID NO: 812677 - DNA, 33 bp, Homo sapien
ggtaatggagtctcagcaaacctcttctttgtt

SEQ ID NO: 812678 - DNA, 33 bp, Homo sapien
ggtaatggagtctcaggaaacctcttctttgtt

SEQ ID NO: 812679 - DNA, 33 bp, Homo sapien
gctatgtacaacagaaactatgcaatttagaat

SEQ ID NO: 812680 - DNA, 33 bp, Homo sapien
gctatgtacaacagaatctatgcaatttagaat

SEQ ID NO: 812681 - DNA, 33 bp, Homo sapien
ttttatctaaagcaacaaattgaaatttcaaaa

SEQ ID NO: 812682 - DNA, 33 bp, Homo sapien
ttttatctaaagcaactaattgaaatttcaaaa

SEQ ID NO: 812683 - DNA, 33 bp, Homo sapien
atgaactagccagaacaattgtatcttaagcac

SEQ ID NO: 812684 - DNA, 33 bp, Homo sapien
atgaactagccagaaccattgtatcttaagcac

SEQ ID NO: 812685 - DNA, 33 bp, Homo sapien
tccattcaggtttccacagtagattagaacact

SEQ ID NO: 812686 - DNA, 33 bp, Homo sapien
tccattcaggtttccatagtagattagaacact

SEQ ID NO: 812687 - DNA, 33 bp, Homo sapien
cagtttatagtaatgacagctcctgatcaactt

SEQ ID NO: 812688 - DNA, 33 bp, Homo sapien
cagtttatagtaatgagagctcctgatcaactt

SEQ ID NO: 812689 - DNA, 33 bp, Homo sapien
gggggttttgctaaaacaatggcatgtccaggg

SEQ ID NO: 812690 - DNA, 33 bp, Homo sapien
gggggttttgctaaaataatggcatgtccaggg

SEQ ID NO: 812691 - DNA, 33 bp, Homo sapien
atgaatcaatcaatctaactggcctacaacact

SEQ ID NO: 812692 - DNA, 33 bp, Homo sapien
atgaatcaatcaatctgactggcctacaacact

SEQ ID NO: 812693 - DNA, 33 bp, Homo sapien
ctacaacacttatagcgcactctcaggtagcct

SEQ ID NO: 812694 - DNA, 33 bp, Homo sapien
ctacaacacttatagctcactctcaggtagcct

SEQ ID NO: 812695 - DNA, 33 bp, Homo sapien
ctaggttcttggaaaaaatggatgtgtccccca

SEQ ID NO: 812696 - DNA, 33 bp, Homo sapien
ctaggttcttggaaaagatggatgtgtccccca

SEQ ID NO: 812697 - DNA, 33 bp, Homo sapien
aggtggaaaaactagcaattctgacgacgggaa

SEQ ID NO: 812698 - DNA, 33 bp, Homo sapien
aggtggaaaaactagcgattctgacgacgggaa

SEQ ID NO: 812699 - DNA, 33 bp, Homo sapien
atttcaggataacagacaagagattgtggccta

SEQ ID NO: 812700 - DNA, 33 bp, Homo sapien
atttcaggataacagataagagattgtggccta

SEQ ID NO: 812701 - DNA, 33 bp, Homo sapien
aaaggggtcttcctgaactgcacaccagtccta

SEQ ID NO: 812702 - DNA, 33 bp, Homo sapien
aaaggggtcttcctgagctgcacaccagtccta

SEQ ID NO: 812703 - DNA, 33 bp, Homo sapien
gccatgctcacaggtcaccacctccctgaagca

SEQ ID NO: 812704 - DNA, 33 bp, Homo sapien
gccatgctcacaggtcgccacctccctgaagca

SEQ ID NO: 812705 - DNA, 33 bp, Homo sapien
attggatgaaacagaccccccatgccttcaaga

SEQ ID NO: 812706 - DNA, 33 bp, Homo sapien
attggatgaaacagactccccatgccttcaaga

SEQ ID NO: 812707 - DNA, 33 bp, Homo sapien
catctcttaatttgcccaccaagtgtcagccac

SEQ ID NO: 812708 - DNA, 33 bp, Homo sapien
catctcttaatttgcctaccaagtgtcagccac

SEQ ID NO: 812709 - DNA, 33 bp, Homo sapien
tatgcttatgaatttaccagaggagaagaatga

SEQ ID NO: 812710 - DNA, 33 bp, Homo sapien
tatgcttatgaatttatcagaggagaagaatga

SEQ ID NO: 812711 - DNA, 33 bp, Homo sapien
tttcaaatcagtttgcaattaaggtaaaacatg

SEQ ID NO: 812712 - DNA, 33 bp, Homo sapien
tttcaaatcagtttgccattaaggtaaaacatg

SEQ ID NO: 812713 - DNA, 33 bp, Homo sapien
gagcgccctgtgccacgcagcgatggcatacct

SEQ ID NO: 812714 - DNA, 33 bp, Homo sapien
gagcgccctgtgccactcagcgatggcatacct

SEQ ID NO: 812715 - DNA, 33 bp, Homo sapien
gaatcatatcagagcacctgcgataggaatgtg

SEQ ID NO: 812716 - DNA, 33 bp, Homo sapien
gaatcatatcagagcatctgcgataggaatgtg

SEQ ID NO: 812717 - DNA, 33 bp, Homo sapien
ctagagattgagaccactccaaccagtttggca

SEQ ID NO: 812718 - DNA, 33 bp, Homo sapien
ctagagattgagaccattccaaccagtttggca

SEQ ID NO: 812719 - DNA, 33 bp, Homo sapien
attcacttggtccaaccagggcacaagagtcta

SEQ ID NO: 812720 - DNA, 33 bp, Homo sapien
attcacttggtccaacgagggcacaagagtcta

SEQ ID NO: 812721 - DNA, 33 bp, Homo sapien
cctcttctagccacacaatgtgccgtctgcgct

SEQ ID NO: 812722 - DNA, 33 bp, Homo sapien
cctcttctagccacacgatgtgccgtctgcgct

SEQ ID NO: 812723 - DNA, 33 bp, Homo sapien
tctgctcattaacacacgctaacatctacttta

SEQ ID NO: 812724 - DNA, 33 bp, Homo sapien
tctgctcattaacacatgctaacatctacttta

SEQ ID NO: 812725 - DNA, 33 bp, Homo sapien
aggtgccacaagtcagaacagttttcttttccc

SEQ ID NO: 812726 - DNA, 33 bp, Homo sapien
aggtgccacaagtcagtacagttttcttttccc

SEQ ID NO: 812727 - DNA, 33 bp, Homo sapien
tgtggagccatccttaccaccaggcctgtggaa

SEQ ID NO: 812728 - DNA, 33 bp, Homo sapien
tgtggagccatccttatcaccaggcctgtggaa

SEQ ID NO: 812729 - DNA, 33 bp, Homo sapien
aggtctaaagttcccacgattaccaccctctgc

SEQ ID NO: 812730 - DNA, 33 bp, Homo sapien
aggtctaaagttcccatgattaccaccctctgc

SEQ ID NO: 812731 - DNA, 33 bp, Homo sapien
actttacgtcattctcacctaccccatgtatgg

SEQ ID NO: 812732 - DNA, 33 bp, Homo sapien
actttacgtcattctcgcctaccccatgtatgg

SEQ ID NO: 812733 - DNA, 33 bp, Homo sapien
cagaaagtattttacacaaagcagctaggtgga

SEQ ID NO: 812734 - DNA, 33 bp, Homo sapien
cagaaagtattttacataaagcagctaggtgga

SEQ ID NO: 812735 - DNA, 33 bp, Homo sapien
cagcatgaggctgatacataaagaaggtagttg

SEQ ID NO: 812736 - DNA, 33 bp, Homo sapien
cagcatgaggctgatagataaagaaggtagttg

SEQ ID NO: 812737 - DNA, 33 bp, Homo sapien
aacttattggagctccagaaaagctaagcaaca

SEQ ID NO: 812738 - DNA, 33 bp, Homo sapien
aacttattggagctccggaaaagctaagcaaca

SEQ ID NO: 812739 - DNA, 33 bp, Homo sapien
ctctgtctttacttggcacatgttcccaattcc

SEQ ID NO: 812740 - DNA, 33 bp, Homo sapien
ctctgtctttacttggtacatgttcccaattcc

SEQ ID NO: 812741 - DNA, 33 bp, Homo sapien
gcccacctttatcatgaatctaaagccatctat

SEQ ID NO: 812742 - DNA, 33 bp, Homo sapien
gcccacctttatcatggatctaaagccatctat

SEQ ID NO: 812743 - DNA, 33 bp, Homo sapien
ttctctccgcgtctccactctcagccatgtctg

SEQ ID NO: 812744 - DNA, 33 bp, Homo sapien
ttctctccgcgtctcctctctcagccatgtctg

SEQ ID NO: 812745 - DNA, 33 bp, Homo sapien
ggtacaaagtgtcagcaatacaagataaataca

SEQ ID NO: 812746 - DNA, 33 bp, Homo sapien
ggtacaaagtgtcagcgatacaagataaataca

SEQ ID NO: 812747 - DNA, 33 bp, Homo sapien
atcagccattgcttcccgaggttacatgagtgg

SEQ ID NO: 812748 - DNA, 33 bp, Homo sapien
atcagccattgcttcctgaggttacatgagtgg

SEQ ID NO: 812749 - DNA, 33 bp, Homo sapien
agcaaagggactgtcaagtgtatgggtgtcagg

SEQ ID NO: 812750 - DNA, 33 bp, Homo sapien
agcaaagggactgtcacgtgtatgggtgtcagg

SEQ ID NO: 812751 - DNA, 33 bp, Homo sapien
gacatgagagaaagcgcagcccattgttaagga

SEQ ID NO: 812752 - DNA, 33 bp, Homo sapien
gacatgagagaaagcgtagcccattgttaagga

SEQ ID NO: 812753 - DNA, 33 bp, Homo sapien
attgagccagtgatacaatgtgccttgactgag

SEQ ID NO: 812754 - DNA, 33 bp, Homo sapien
attgagccagtgatacgatgtgccttgactgag

SEQ ID NO: 812755 - DNA, 33 bp, Homo sapien
agactcattgaacttacagtctagtgtgaagaa

SEQ ID NO: 812756 - DNA, 33 bp, Homo sapien
agactcattgaacttatagtctagtgtgaagaa

SEQ ID NO: 812757 - DNA, 33 bp, Homo sapien
atgcaaaaaggctaaaatatagagtccccggca

SEQ ID NO: 812758 - DNA, 33 bp, Homo sapien
atgcaaaaaggctaaactatagagtccccggca

SEQ ID NO: 812759 - DNA, 33 bp, Homo sapien
ggaaaagcattgtgaacgaagggaacggcaaat

SEQ ID NO: 812760 - DNA, 33 bp, Homo sapien
ggaaaagcattgtgaatgaagggaacggcaaat

SEQ ID NO: 812761 - DNA, 33 bp, Homo sapien
attcctacaactcacaaatacactttcacccta

SEQ ID NO: 812762 - DNA, 33 bp, Homo sapien
attcctacaactcacagatacactttcacccta

SEQ ID NO: 812763 - DNA, 33 bp, Homo sapien
gtaccctctgaatgtcacaggacttatgaaggg

SEQ ID NO: 812764 - DNA, 33 bp, Homo sapien
gtaccctctgaatgtcgcaggacttatgaaggg

SEQ ID NO: 812765 - DNA, 33 bp, Homo sapien
aatgatgatgcaagaactcacacagcctcctcc

SEQ ID NO: 812766 - DNA, 33 bp, Homo sapien
aatgatgatgcaagaattcacacagcctcctcc

SEQ ID NO: 812767 - DNA, 33 bp, Homo sapien
tgagcattcattatacaacactgctctgagtac

SEQ ID NO: 812768 - DNA, 33 bp, Homo sapien
tgagcattcattatacgacactgctctgagtac

SEQ ID NO: 812769 - DNA, 33 bp, Homo sapien
ttttggctttggaggacggccatgttactcttc

SEQ ID NO: 812770 - DNA, 33 bp, Homo sapien
ttttggctttggaggatggccatgttactcttc

SEQ ID NO: 812771 - DNA, 33 bp, Homo sapien
acagaagagagtcaaacgtcttgaagtaaaatt

SEQ ID NO: 812772 - DNA, 33 bp, Homo sapien
acagaagagagtcaaatgtcttgaagtaaaatt

SEQ ID NO: 812773 - DNA, 33 bp, Homo sapien
gccctcaaagagatgaaattctaaggccaggtg

SEQ ID NO: 812774 - DNA, 33 bp, Homo sapien
gccctcaaagagatgagattctaaggccaggtg

SEQ ID NO: 812775 - DNA, 33 bp, Homo sapien
attagctcttcttcacactgcagggtctcaatg

SEQ ID NO: 812776 - DNA, 33 bp, Homo sapien
attagctcttcttcacgctgcagggtctcaatg

SEQ ID NO: 812777 - DNA, 33 bp, Homo sapien
gtggtgtttcagatggcagaattgagatggatt

SEQ ID NO: 812778 - DNA, 33 bp, Homo sapien
gtggtgtttcagatgggagaattgagatggatt

SEQ ID NO: 812779 - DNA, 33 bp, Homo sapien
ctctacactctccaacaacttgatccttcaccc

SEQ ID NO: 812780 - DNA, 33 bp, Homo sapien
ctctacactctccaacgacttgatccttcaccc

SEQ ID NO: 812781 - DNA, 33 bp, Homo sapien
gtcagtcagagctcagaagttatcagcatcatt

SEQ ID NO: 812782 - DNA, 33 bp, Homo sapien
gtcagtcagagctcaggagttatcagcatcatt

SEQ ID NO: 812783 - DNA, 33 bp, Homo sapien
ttcagggaagggacaaagagagtttaatgccct

SEQ ID NO: 812784 - DNA, 33 bp, Homo sapien
ttcagggaagggacaaggagagtttaatgccct

SEQ ID NO: 812785 - DNA, 33 bp, Homo sapien
tgcattgacaaagtccgctgtcttcttctcagg

SEQ ID NO: 812786 - DNA, 33 bp, Homo sapien
tgcattgacaaagtcctctgtcttcttctcagg

SEQ ID NO: 812787 - DNA, 33 bp, Homo sapien
gggattaaatcaatcacactggatattgctaat

SEQ ID NO: 812788 - DNA, 33 bp, Homo sapien
gggattaaatcaatcatactggatattgctaat

SEQ ID NO: 812789 - DNA, 33 bp, Homo sapien
agtcatttcagattaaaggggaagttctgattg

SEQ ID NO: 812790 - DNA, 33 bp, Homo sapien
agtcatttcagattaacggggaagttctgattg

SEQ ID NO: 812791 - DNA, 33 bp, Homo sapien
ggacacttgaataaaacagaaagctaggggtac

SEQ ID NO: 812792 - DNA, 33 bp, Homo sapien
ggacacttgaataaaatagaaagctaggggtac

SEQ ID NO: 812793 - DNA, 33 bp, Homo sapien
cctccctcatgtttctcaaatcactagctcccg

SEQ ID NO: 812794 - DNA, 33 bp, Homo sapien
cctccctcatgtttctgaaatcactagctcccg

SEQ ID NO: 812795 - DNA, 33 bp, Homo sapien
tgctgtcatattgcaccgtcatccagtacatga

SEQ ID NO: 812796 - DNA, 33 bp, Homo sapien
tgctgtcatattgcactgtcatccagtacatga

SEQ ID NO: 812797 - DNA, 33 bp, Homo sapien
ctgcttgtgttattaacattgtcattactagag

SEQ ID NO: 812798 - DNA, 33 bp, Homo sapien
ctgcttgtgttattaatattgtcattactagag

SEQ ID NO: 812799 - DNA, 33 bp, Homo sapien
gggacctttcggacccagaagttatggccaagc

SEQ ID NO: 812800 - DNA, 33 bp, Homo sapien
gggacctttcggacccggaagttatggccaagc

SEQ ID NO: 812801 - DNA, 33 bp, Homo sapien
tgatacatgatataaaaatgaaaaaataggaag

SEQ ID NO: 812802 - DNA, 33 bp, Homo sapien
tgatacatgatataaagatgaaaaaataggaag

SEQ ID NO: 812803 - DNA, 33 bp, Homo sapien
ctgggcaggaacacaaattagcctccaggagca

SEQ ID NO: 812804 - DNA, 33 bp, Homo sapien
ctgggcaggaacacaagttagcctccaggagca

SEQ ID NO: 812805 - DNA, 33 bp, Homo sapien
tctttttctccagtaacgcttgcctttttctca

SEQ ID NO: 812806 - DNA, 33 bp, Homo sapien
tctttttctccagtaatgcttgcctttttctca

SEQ ID NO: 812807 - DNA, 33 bp, Homo sapien
gctgggcccaagcaacccaaagacagagaagct

SEQ ID NO: 812808 - DNA, 33 bp, Homo sapien
gctgggcccaagcaactcaaagacagagaagct

SEQ ID NO: 812809 - DNA, 33 bp, Homo sapien
acgctgtgttaagagagaaactcaagttagcag

SEQ ID NO: 812810 - DNA, 33 bp, Homo sapien
acgctgtgttaagagataaactcaagttagcag

SEQ ID NO: 812811 - DNA, 33 bp, Homo sapien
ggaagaggcacaaatacctgtcttgtgggtggg

SEQ ID NO: 812812 - DNA, 33 bp, Homo sapien
ggaagaggcacaaatatctgtcttgtgggtggg

SEQ ID NO: 812813 - DNA, 33 bp, Homo sapien
tgaagggttatggaaaagtgagcagcagagtgt

SEQ ID NO: 812814 - DNA, 33 bp, Homo sapien
tgaagggttatggaaaggtgagcagcagagtgt

SEQ ID NO: 812815 - DNA, 33 bp, Homo sapien
gatcagggcctaagacgccattgacaccaactt

SEQ ID NO: 812816 - DNA, 33 bp, Homo sapien
gatcagggcctaagactccattgacaccaactt

SEQ ID NO: 812817 - DNA, 33 bp, Homo sapien
ccgagaatctcaactcacattttctttccgctt

SEQ ID NO: 812818 - DNA, 33 bp, Homo sapien
ccgagaatctcaactctcattttctttccgctt

SEQ ID NO: 812819 - DNA, 33 bp, Homo sapien
cttggaaaagggtaagcaagtagcttctatgaa

SEQ ID NO: 812820 - DNA, 33 bp, Homo sapien
cttggaaaagggtaagtaagtagcttctatgaa

SEQ ID NO: 812821 - DNA, 33 bp, Homo sapien
taaaatgaggtcacaaaatagaatgcttagctc

SEQ ID NO: 812822 - DNA, 33 bp, Homo sapien
taaaatgaggtcacaatatagaatgcttagctc

SEQ ID NO: 812823 - DNA, 33 bp, Homo sapien
attttcttggagtctcaaagatgtagattatgt

SEQ ID NO: 812824 - DNA, 33 bp, Homo sapien
attttcttggagtctcgaagatgtagattatgt

SEQ ID NO: 812825 - DNA, 33 bp, Homo sapien
cttattagctacgcaaccttgggcaagttttca

SEQ ID NO: 812826 - DNA, 33 bp, Homo sapien
cttattagctacgcaatcttgggcaagttttca

SEQ ID NO: 812827 - DNA, 33 bp, Homo sapien
agaggataaagttagaaagttctgtagtcagaa

SEQ ID NO: 812828 - DNA, 33 bp, Homo sapien
agaggataaagttagacagttctgtagtcagaa

SEQ ID NO: 812829 - DNA, 33 bp, Homo sapien
tcttcccttctcaccaaattacacttgatttgc

SEQ ID NO: 812830 - DNA, 33 bp, Homo sapien
tcttcccttctcaccagattacacttgatttgc

SEQ ID NO: 812831 - DNA, 33 bp, Homo sapien
tgggcttttgtgccaccgggattaattccatga

SEQ ID NO: 812832 - DNA, 33 bp, Homo sapien
tgggcttttgtgccactgggattaattccatga

SEQ ID NO: 812833 - DNA, 33 bp, Homo sapien
caagtctctataatgcacaaggttgcaatgtct

SEQ ID NO: 812834 - DNA, 33 bp, Homo sapien
caagtctctataatgcgcaaggttgcaatgtct

SEQ ID NO: 812835 - DNA, 33 bp, Homo sapien
caccaggcctgcctgagggatgcttaacatatc

SEQ ID NO: 812836 - DNA, 33 bp, Homo sapien
caccaggcctgcctgatggatgcttaacatatc

SEQ ID NO: 812837 - DNA, 33 bp, Homo sapien
acagacggtaagggagacagaaattcaatgacc

SEQ ID NO: 812838 - DNA, 33 bp, Homo sapien
acagacggtaagggaggcagaaattcaatgacc

SEQ ID NO: 812839 - DNA, 33 bp, Homo sapien
gtgtccctaggacccaatatccatggagccttg

SEQ ID NO: 812840 - DNA, 33 bp, Homo sapien
gtgtccctaggacccattatccatggagccttg

SEQ ID NO: 812841 - DNA, 33 bp, Homo sapien
agaagtcatcctcgcaatatgaatgaataattc

SEQ ID NO: 812842 - DNA, 33 bp, Homo sapien
agaagtcatcctcgcagtatgaatgaataattc

SEQ ID NO: 812843 - DNA, 33 bp, Homo sapien
cctggggccctgataggacacctttggtaggca

SEQ ID NO: 812844 - DNA, 33 bp, Homo sapien
cctggggccctgatagtacacctttggtaggca

SEQ ID NO: 812845 - DNA, 33 bp, Homo sapien
ttcattcatgcacggacaagactcaacacagca

SEQ ID NO: 812846 - DNA, 33 bp, Homo sapien
ttcattcatgcacggagaagactcaacacagca

SEQ ID NO: 812847 - DNA, 33 bp, Homo sapien
atgtgattcttcacaacgcgcagaactctctga

SEQ ID NO: 812848 - DNA, 33 bp, Homo sapien
atgtgattcttcacaatgcgcagaactctctga

SEQ ID NO: 812849 - DNA, 33 bp, Homo sapien
ctaggaatctttgtaacggattgggatacttgg

SEQ ID NO: 812850 - DNA, 33 bp, Homo sapien
ctaggaatctttgtaatggattgggatacttgg

SEQ ID NO: 812851 - DNA, 33 bp, Homo sapien
cgcctcatctctagtcaatccagtagggtctca

SEQ ID NO: 812852 - DNA, 33 bp, Homo sapien
cgcctcatctctagtcgatccagtagggtctca

SEQ ID NO: 812853 - DNA, 33 bp, Homo sapien
ttctccatgttctgccacagggtaggcacagaa

SEQ ID NO: 812854 - DNA, 33 bp, Homo sapien
ttctccatgttctgccgcagggtaggcacagaa

SEQ ID NO: 812855 - DNA, 33 bp, Homo sapien
ttgtggtttcctgctaaagaccaaactgtcctg

SEQ ID NO: 812856 - DNA, 33 bp, Homo sapien
ttgtggtttcctgctacagaccaaactgtcctg

SEQ ID NO: 812857 - DNA, 33 bp, Homo sapien
gaccccctgtcagtgcagaagccgtccttcaac

SEQ ID NO: 812858 - DNA, 33 bp, Homo sapien
gaccccctgtcagtgcggaagccgtccttcaac

SEQ ID NO: 812859 - DNA, 33 bp, Homo sapien
aagatgcatgcacaaaagttttagtacaataaa

SEQ ID NO: 812860 - DNA, 33 bp, Homo sapien
aagatgcatgcacaaatgttttagtacaataaa

SEQ ID NO: 812861 - DNA, 33 bp, Homo sapien
catccattccttcctacactaagttgcctggcc

SEQ ID NO: 812862 - DNA, 33 bp, Homo sapien
catccattccttcctagactaagttgcctggcc

SEQ ID NO: 812863 - DNA, 33 bp, Homo sapien
aaagttgtctcaaagccgatcttgatagattac

SEQ ID NO: 812864 - DNA, 33 bp, Homo sapien
aaagttgtctcaaagctgatcttgatagattac

SEQ ID NO: 812865 - DNA, 33 bp, Homo sapien
gaagggaaacagaatacgagtcagaaggatgaa

SEQ ID NO: 812866 - DNA, 33 bp, Homo sapien
gaagggaaacagaatatgagtcagaaggatgaa

SEQ ID NO: 812867 - DNA, 33 bp, Homo sapien
gagcctgtgcgctagcaagtatcctgcatgact

SEQ ID NO: 812868 - DNA, 33 bp, Homo sapien
gagcctgtgcgctagcgagtatcctgcatgact

SEQ ID NO: 812869 - DNA, 33 bp, Homo sapien
ccttgatcctggacctcaactgttcctgagctt

SEQ ID NO: 812870 - DNA, 33 bp, Homo sapien
ccttgatcctggaccttaactgttcctgagctt

SEQ ID NO: 812871 - DNA, 33 bp, Homo sapien
cttgtctgtgatttcacggatttagttgtccag

SEQ ID NO: 812872 - DNA, 33 bp, Homo sapien
cttgtctgtgatttcatggatttagttgtccag

SEQ ID NO: 812873 - DNA, 33 bp, Homo sapien
atggaaggtataataacatgcaggtctttcagc

SEQ ID NO: 812874 - DNA, 33 bp, Homo sapien
atggaaggtataataatatgcaggtctttcagc

SEQ ID NO: 812875 - DNA, 33 bp, Homo sapien
tagtctagtagacacacgagagcagcccaggtc

SEQ ID NO: 812876 - DNA, 33 bp, Homo sapien
tagtctagtagacacatgagagcagcccaggtc

SEQ ID NO: 812877 - DNA, 33 bp, Homo sapien
agagcagcccaggtcacgagtttgtgagggcac

SEQ ID NO: 812878 - DNA, 33 bp, Homo sapien
agagcagcccaggtcatgagtttgtgagggcac

SEQ ID NO: 812879 - DNA, 33 bp, Homo sapien
ggctgagatatggtccaaaagccagaggtctct

SEQ ID NO: 812880 - DNA, 33 bp, Homo sapien
ggctgagatatggtccgaaagccagaggtctct

SEQ ID NO: 812881 - DNA, 33 bp, Homo sapien
acacagaagcagtcagcaaatatcgactagaat

SEQ ID NO: 812882 - DNA, 33 bp, Homo sapien
acacagaagcagtcagtaaatatcgactagaat

SEQ ID NO: 812883 - DNA, 33 bp, Homo sapien
gatcaaggcccagaaaagctaagtaagctgcca

SEQ ID NO: 812884 - DNA, 33 bp, Homo sapien
gatcaaggcccagaaaggctaagtaagctgcca

SEQ ID NO: 812885 - DNA, 33 bp, Homo sapien
gggctacaattcatcaagatgcactggaacgtg

SEQ ID NO: 812886 - DNA, 33 bp, Homo sapien
gggctacaattcatcaggatgcactggaacgtg

SEQ ID NO: 812887 - DNA, 33 bp, Homo sapien
gacatagaagagaggtaaaaggagataagtact

SEQ ID NO: 812888 - DNA, 33 bp, Homo sapien
gacatagaagagaggtgaaaggagataagtact

SEQ ID NO: 812889 - DNA, 33 bp, Homo sapien
ttttggatctctactcccaactctgcaattaaa

SEQ ID NO: 812890 - DNA, 33 bp, Homo sapien
ttttggatctctactcgcaactctgcaattaaa

SEQ ID NO: 812891 - DNA, 33 bp, Homo sapien
tgtctttcagaagtcaagatgggaatagagata

SEQ ID NO: 812892 - DNA, 33 bp, Homo sapien
tgtctttcagaagtcatgatgggaatagagata

SEQ ID NO: 812893 - DNA, 33 bp, Homo sapien
ctatttggtcaaagtcaatcaacccacaaatgt

SEQ ID NO: 812894 - DNA, 33 bp, Homo sapien
ctatttggtcaaagtcgatcaacccacaaatgt

SEQ ID NO: 812895 - DNA, 33 bp, Homo sapien
caagtaataataaggtaacaacattctctacca

SEQ ID NO: 812896 - DNA, 33 bp, Homo sapien
caagtaataataaggtgacaacattctctacca

SEQ ID NO: 812897 - DNA, 33 bp, Homo sapien
aggttgctaagccttcaagatataaacctggga

SEQ ID NO: 812898 - DNA, 33 bp, Homo sapien
aggttgctaagccttcgagatataaacctggga

SEQ ID NO: 812899 - DNA, 33 bp, Homo sapien
aacaataggggcccatgacaggaacacaaagtc

SEQ ID NO: 812900 - DNA, 33 bp, Homo sapien
aacaataggggcccattacaggaacacaaagtc

SEQ ID NO: 812901 - DNA, 33 bp, Homo sapien
ggcacagactgggtaccctacgtatttcatgaa

SEQ ID NO: 812902 - DNA, 33 bp, Homo sapien
ggcacagactgggtactctacgtatttcatgaa

SEQ ID NO: 812903 - DNA, 33 bp, Homo sapien
aataaatatatcccaaatctaaagtagcctaat

SEQ ID NO: 812904 - DNA, 33 bp, Homo sapien
aataaatatatcccaactctaaagtagcctaat

SEQ ID NO: 812905 - DNA, 33 bp, Homo sapien
tttttttactatttgaaaggtcaagttttctag

SEQ ID NO: 812906 - DNA, 33 bp, Homo sapien
tttttttactatttgagaggtcaagttttctag

SEQ ID NO: 812907 - DNA, 33 bp, Homo sapien
gccaggaaacggaataactgtggatctgaggaa

SEQ ID NO: 812908 - DNA, 33 bp, Homo sapien
gccaggaaacggaatacctgtggatctgaggaa

SEQ ID NO: 812909 - DNA, 33 bp, Homo sapien
agcagaggaagctttaggattacatgattacag

SEQ ID NO: 812910 - DNA, 33 bp, Homo sapien
agcagaggaagctttatgattacatgattacag

SEQ ID NO: 812911 - DNA, 33 bp, Homo sapien
cagcaagttctgccaagtctgtctctaaaatat

SEQ ID NO: 812912 - DNA, 33 bp, Homo sapien
cagcaagttctgccaattctgtctctaaaatat

SEQ ID NO: 812913 - DNA, 33 bp, Homo sapien
tatgttggtgcaataaaccgggcacagaaagac

SEQ ID NO: 812914 - DNA, 33 bp, Homo sapien
tatgttggtgcaataagccgggcacagaaagac

SEQ ID NO: 812915 - DNA, 33 bp, Homo sapien
aatacgaaaggcaggcaaaaaaactgcagcaag

SEQ ID NO: 812916 - DNA, 33 bp, Homo sapien
aatacgaaaggcaggccaaaaaactgcagcaag

SEQ ID NO: 812917 - DNA, 33 bp, Homo sapien
agaaaaatgtgtagtaaaatatgctgtacttcc

SEQ ID NO: 812918 - DNA, 33 bp, Homo sapien
agaaaaatgtgtagtagaatatgctgtacttcc

SEQ ID NO: 812919 - DNA, 33 bp, Homo sapien
tgagagcattctcctagctatataagagctaat

SEQ ID NO: 812920 - DNA, 33 bp, Homo sapien
tgagagcattctcctatctatataagagctaat

SEQ ID NO: 812921 - DNA, 33 bp, Homo sapien
cagcatgtttatcttccattaaaagcatatgtg

SEQ ID NO: 812922 - DNA, 33 bp, Homo sapien
cagcatgtttatcttctattaaaagcatatgtg

SEQ ID NO: 812923 - DNA, 33 bp, Homo sapien
ttcagttaaaaatatacaagcagatccatcata

SEQ ID NO: 812924 - DNA, 33 bp, Homo sapien
ttcagttaaaaatatataagcagatccatcata

SEQ ID NO: 812925 - DNA, 33 bp, Homo sapien
taaggaaagagaatagcacgcaaggcaagagca

SEQ ID NO: 812926 - DNA, 33 bp, Homo sapien
taaggaaagagaatagtacgcaaggcaagagca

SEQ ID NO: 812927 - DNA, 33 bp, Homo sapien
ttgatttttaacatacaccaataaacaaagcaa

SEQ ID NO: 812928 - DNA, 33 bp, Homo sapien
ttgatttttaacatacgccaataaacaaagcaa

SEQ ID NO: 812929 - DNA, 33 bp, Homo sapien
aaattatggatgatgtgaaaatttgtctttaaa

SEQ ID NO: 812930 - DNA, 33 bp, Homo sapien
aaattatggatgatgttaaaatttgtctttaaa

SEQ ID NO: 812931 - DNA, 33 bp, Homo sapien
gcacatcctcaataaacagatgtacaaggaata

SEQ ID NO: 812932 - DNA, 33 bp, Homo sapien
gcacatcctcaataaatagatgtacaaggaata

SEQ ID NO: 812933 - DNA, 33 bp, Homo sapien
atgcgtatctgaataccgagagctttaaaaaaa

SEQ ID NO: 812934 - DNA, 33 bp, Homo sapien
atgcgtatctgaatactgagagctttaaaaaaa

SEQ ID NO: 812935 - DNA, 33 bp, Homo sapien
ctggaaacagagtacaacttataagacttataa

SEQ ID NO: 812936 - DNA, 33 bp, Homo sapien
ctggaaacagagtacagcttataagacttataa

SEQ ID NO: 812937 - DNA, 33 bp, Homo sapien
actgtttgcttttttaaaatcatgtggacacaa

SEQ ID NO: 812938 - DNA, 33 bp, Homo sapien
actgtttgcttttttacaatcatgtggacacaa

SEQ ID NO: 812939 - DNA, 33 bp, Homo sapien
ctgtgagagatacttaccctgttttacaagtaa

SEQ ID NO: 812940 - DNA, 33 bp, Homo sapien
ctgtgagagatacttagcctgttttacaagtaa

SEQ ID NO: 812941 - DNA, 33 bp, Homo sapien
tgatgttccagtatacaaacttatcatgacctt

SEQ ID NO: 812942 - DNA, 33 bp, Homo sapien
tgatgttccagtatacgaacttatcatgacctt

SEQ ID NO: 812943 - DNA, 33 bp, Homo sapien
ttttggaaaatattcaacttatagcaagaatgg

SEQ ID NO: 812944 - DNA, 33 bp, Homo sapien
ttttggaaaatattcaccttatagcaagaatgg

SEQ ID NO: 812945 - DNA, 33 bp, Homo sapien
aggaaagagagctgcgaaattgctaataaaagc

SEQ ID NO: 812946 - DNA, 33 bp, Homo sapien
aggaaagagagctgcggaattgctaataaaagc

SEQ ID NO: 812947 - DNA, 33 bp, Homo sapien
ggaaatagacatgtaccgcattcactctcttct

SEQ ID NO: 812948 - DNA, 33 bp, Homo sapien
ggaaatagacatgtacggcattcactctcttct

SEQ ID NO: 812949 - DNA, 33 bp, Homo sapien
tgaaggagcccccaacaaaagactggcagtttc

SEQ ID NO: 812950 - DNA, 33 bp, Homo sapien
tgaaggagcccccaacgaaagactggcagtttc

SEQ ID NO: 812951 - DNA, 33 bp, Homo sapien
aaagattgattgattacaggctgaaagataaaa

SEQ ID NO: 812952 - DNA, 33 bp, Homo sapien
aaagattgattgattataggctgaaagataaaa

SEQ ID NO: 812953 - DNA, 33 bp, Homo sapien
acagacttgtaacaaaaattcagagtcgattat

SEQ ID NO: 812954 - DNA, 33 bp, Homo sapien
acagacttgtaacaaatattcagagtcgattat

SEQ ID NO: 812955 - DNA, 33 bp, Homo sapien
aggaaccaatattctactacttaaggctgggca

SEQ ID NO: 812956 - DNA, 33 bp, Homo sapien
aggaaccaatattctagtacttaaggctgggca

SEQ ID NO: 812957 - DNA, 33 bp, Homo sapien
gatacccgctcagtaaaggcaaaatgaagatgt

SEQ ID NO: 812958 - DNA, 33 bp, Homo sapien
gatacccgctcagtaagggcaaaatgaagatgt

SEQ ID NO: 812959 - DNA, 33 bp, Homo sapien
gtttaggtttctgttacagtagcaacacacttc

SEQ ID NO: 812960 - DNA, 33 bp, Homo sapien
gtttaggtttctgttatagtagcaacacacttc

SEQ ID NO: 812961 - DNA, 33 bp, Homo sapien
tgctttctgtttcaacaggagggagtctgcacc

SEQ ID NO: 812962 - DNA, 33 bp, Homo sapien
tgctttctgtttcaacgggagggagtctgcacc

SEQ ID NO: 812963 - DNA, 33 bp, Homo sapien
atgtgtaggtttgttacgtatgtgtcatgagta

SEQ ID NO: 812964 - DNA, 33 bp, Homo sapien
atgtgtaggtttgttatgtatgtgtcatgagta

SEQ ID NO: 812965 - DNA, 33 bp, Homo sapien
ttggcctgttcttgaactccatgtaaatggaat

SEQ ID NO: 812966 - DNA, 33 bp, Homo sapien
ttggcctgttcttgaattccatgtaaatggaat

SEQ ID NO: 812967 - DNA, 33 bp, Homo sapien
cagaaattcaggaagggcctctataagatatga

SEQ ID NO: 812968 - DNA, 33 bp, Homo sapien
cagaaattcaggaaggtcctctataagatatga

SEQ ID NO: 812969 - DNA, 33 bp, Homo sapien
ggtcttattattttgacctatgaaggtttgtcc

SEQ ID NO: 812970 - DNA, 33 bp, Homo sapien
ggtcttattattttgatctatgaaggtttgtcc

SEQ ID NO: 812971 - DNA, 33 bp, Homo sapien
tgagagatcccagctacgctctttctgaattcc

SEQ ID NO: 812972 - DNA, 33 bp, Homo sapien
tgagagatcccagctaggctctttctgaattcc

SEQ ID NO: 812973 - DNA, 33 bp, Homo sapien
ccaagcacctgtcccacattctctttcctccat

SEQ ID NO: 812974 - DNA, 33 bp, Homo sapien
ccaagcacctgtcccagattctctttcctccat

SEQ ID NO: 812975 - DNA, 33 bp, Homo sapien
cagattaagcctttacacagacatgtcaaggac

SEQ ID NO: 812976 - DNA, 33 bp, Homo sapien
cagattaagcctttacgcagacatgtcaaggac

SEQ ID NO: 812977 - DNA, 33 bp, Homo sapien
ggtcagcaaagacagacgaggagcaaagaaaag

SEQ ID NO: 812978 - DNA, 33 bp, Homo sapien
ggtcagcaaagacagatgaggagcaaagaaaag

SEQ ID NO: 812979 - DNA, 33 bp, Homo sapien
gcaagctcagaggacacaggcttacaccagcac

SEQ ID NO: 812980 - DNA, 33 bp, Homo sapien
gcaagctcagaggacataggcttacaccagcac

SEQ ID NO: 812981 - DNA, 33 bp, Homo sapien
cgtaaagatcagcagtaaactgaagtcaaatca

SEQ ID NO: 812982 - DNA, 33 bp, Homo sapien
cgtaaagatcagcagtgaactgaagtcaaatca

SEQ ID NO: 812983 - DNA, 33 bp, Homo sapien
cgacttcacattagaagaggaagactatctgtc

SEQ ID NO: 812984 - DNA, 33 bp, Homo sapien
cgacttcacattagaataggaagactatctgtc

SEQ ID NO: 812985 - DNA, 33 bp, Homo sapien
caaaacatgaaagcataaaagtgtcagcgacaa

SEQ ID NO: 812986 - DNA, 33 bp, Homo sapien
caaaacatgaaagcatgaaagtgtcagcgacaa

SEQ ID NO: 812987 - DNA, 33 bp, Homo sapien
ctgggacaaatgatgccgaggaaagagaaaacc

SEQ ID NO: 812988 - DNA, 33 bp, Homo sapien
ctgggacaaatgatgctgaggaaagagaaaacc

SEQ ID NO: 812989 - DNA, 33 bp, Homo sapien
cataattacaatgagacgttcttatcttaagcc

SEQ ID NO: 812990 - DNA, 33 bp, Homo sapien
cataattacaatgagatgttcttatcttaagcc

SEQ ID NO: 812991 - DNA, 33 bp, Homo sapien
atatatatatatcctcagagaaaattctcccct

SEQ ID NO: 812992 - DNA, 33 bp, Homo sapien
atatatatatatcctcggagaaaattctcccct

SEQ ID NO: 812993 - DNA, 33 bp, Homo sapien
attcataagtttggtcactttatgtactctcac

SEQ ID NO: 812994 - DNA, 33 bp, Homo sapien
attcataagtttggtcgctttatgtactctcac

SEQ ID NO: 812995 - DNA, 33 bp, Homo sapien
gaagaatacagtgaccaccagtttcatttggta

SEQ ID NO: 812996 - DNA, 33 bp, Homo sapien
gaagaatacagtgaccgccagtttcatttggta

SEQ ID NO: 812997 - DNA, 33 bp, Homo sapien
cactttgctttattgcactttgtagatattgcg

SEQ ID NO: 812998 - DNA, 33 bp, Homo sapien
cactttgctttattgcgctttgtagatattgcg

SEQ ID NO: 812999 - DNA, 33 bp, Homo sapien
cctatttccggagacaaagtacaatattgaaat

SEQ ID NO: 813000 - DNA, 33 bp, Homo sapien
cctatttccggagacacagtacaatattgaaat

SEQ ID NO: 813001 - DNA, 33 bp, Homo sapien
gggattacggatactcaccaccataactggcta

SEQ ID NO: 813002 - DNA, 33 bp, Homo sapien
gggattacggatactcgccaccataactggcta

SEQ ID NO: 813003 - DNA, 33 bp, Homo sapien
tatagatttataccagaaacttgctgaaggagg

SEQ ID NO: 813004 - DNA, 33 bp, Homo sapien
tatagatttataccaggaacttgctgaaggagg

SEQ ID NO: 813005 - DNA, 33 bp, Homo sapien
aaggaatactcacttacgaaagaagaggttcaa

SEQ ID NO: 813006 - DNA, 33 bp, Homo sapien
aaggaatactcacttatgaaagaagaggttcaa

SEQ ID NO: 813007 - DNA, 33 bp, Homo sapien
agtaatatccacatagccaaaggaatactcact

SEQ ID NO: 813008 - DNA, 33 bp, Homo sapien
agtaatatccacatagtcaaaggaatactcact

SEQ ID NO: 813009 - DNA, 33 bp, Homo sapien
actagcaatggggcacaggtatctaaggtatat

SEQ ID NO: 813010 - DNA, 33 bp, Homo sapien
actagcaatggggcacgggtatctaaggtatat

SEQ ID NO: 813011 - DNA, 33 bp, Homo sapien
tgtataacactcaactaaaaccatgaagcatca

SEQ ID NO: 813012 - DNA, 33 bp, Homo sapien
tgtataacactcaactgaaaccatgaagcatca

SEQ ID NO: 813013 - DNA, 33 bp, Homo sapien
tcacactcggtgaaggaccacagagccatcgga

SEQ ID NO: 813014 - DNA, 33 bp, Homo sapien
tcacactcggtgaaggtccacagagccatcgga

SEQ ID NO: 813015 - DNA, 33 bp, Homo sapien
agttccatgcttgcatcatctttcttagtctcc

SEQ ID NO: 813016 - DNA, 33 bp, Homo sapien
agttccatgcttgcattatctttcttagtctcc

SEQ ID NO: 813017 - DNA, 33 bp, Homo sapien
caatttgctcgtcctcacggcattttaaattgg

SEQ ID NO: 813018 - DNA, 33 bp, Homo sapien
caatttgctcgtcctcgcggcattttaaattgg

SEQ ID NO: 813019 - DNA, 33 bp, Homo sapien
tctcagtctctctccacgtaaaatgggaatcaa

SEQ ID NO: 813020 - DNA, 33 bp, Homo sapien
tctcagtctctctccatgtaaaatgggaatcaa

SEQ ID NO: 813021 - DNA, 33 bp, Homo sapien
aaccaggaagccactcaaataactgtggggata

SEQ ID NO: 813022 - DNA, 33 bp, Homo sapien
aaccaggaagccactcgaataactgtggggata

SEQ ID NO: 813023 - DNA, 33 bp, Homo sapien
cccaaaggatgatacaaaatgcataccgttgat

SEQ ID NO: 813024 - DNA, 33 bp, Homo sapien
cccaaaggatgatacagaatgcataccgttgat

SEQ ID NO: 813025 - DNA, 33 bp, Homo sapien
atcagataacaatgaacttatgactcccagtca

SEQ ID NO: 813026 - DNA, 33 bp, Homo sapien
atcagataacaatgaatttatgactcccagtca

SEQ ID NO: 813027 - DNA, 33 bp, Homo sapien
catgtggaacctataacatactgtggtcaaagg

SEQ ID NO: 813028 - DNA, 33 bp, Homo sapien
catgtggaacctataatatactgtggtcaaagg

SEQ ID NO: 813029 - DNA, 33 bp, Homo sapien
gtcccattattctcacaggaacctgggcagatg

SEQ ID NO: 813030 - DNA, 33 bp, Homo sapien
gtcccattattctcacgggaacctgggcagatg

SEQ ID NO: 813031 - DNA, 33 bp, Homo sapien
tcatcttgtcaagaaacactgaactattcagta

SEQ ID NO: 813032 - DNA, 33 bp, Homo sapien
tcatcttgtcaagaaatactgaactattcagta

SEQ ID NO: 813033 - DNA, 33 bp, Homo sapien
tgtgtgcttttcccacacactttccaggcacta

SEQ ID NO: 813034 - DNA, 33 bp, Homo sapien
tgtgtgcttttcccacgcactttccaggcacta

SEQ ID NO: 813035 - DNA, 33 bp, Homo sapien
gaaggcatattaatgcagaaggtttggctctat

SEQ ID NO: 813036 - DNA, 33 bp, Homo sapien
gaaggcatattaatgcggaaggtttggctctat

SEQ ID NO: 813037 - DNA, 33 bp, Homo sapien
cacccacttaaaggacggattggtaaccatgtg

SEQ ID NO: 813038 - DNA, 33 bp, Homo sapien
cacccacttaaaggactgattggtaaccatgtg

SEQ ID NO: 813039 - DNA, 33 bp, Homo sapien
cagaatttaagtctacccaatggctttccaggt

SEQ ID NO: 813040 - DNA, 33 bp, Homo sapien
cagaatttaagtctactcaatggctttccaggt

SEQ ID NO: 813041 - DNA, 33 bp, Homo sapien
cctcaagaacgcatcgccaagtcagtctgcttc

SEQ ID NO: 813042 - DNA, 33 bp, Homo sapien
cctcaagaacgcatcgtcaagtcagtctgcttc

SEQ ID NO: 813043 - DNA, 33 bp, Homo sapien
ctgcagatcaaaaaaccggctctgcagatctgc

SEQ ID NO: 813044 - DNA, 33 bp, Homo sapien
ctgcagatcaaaaaactggctctgcagatctgc

SEQ ID NO: 813045 - DNA, 33 bp, Homo sapien
gtgatttcgccagctaaagggataaactagaca

SEQ ID NO: 813046 - DNA, 33 bp, Homo sapien
gtgatttcgccagctagagggataaactagaca

SEQ ID NO: 813047 - DNA, 33 bp, Homo sapien
acagtatgaggtgagacgccccacggtttggag

SEQ ID NO: 813048 - DNA, 33 bp, Homo sapien
acagtatgaggtgagatgccccacggtttggag

SEQ ID NO: 813049 - DNA, 33 bp, Homo sapien
tgaatgggttcatcccagccagaaatgtgcatc

SEQ ID NO: 813050 - DNA, 33 bp, Homo sapien
tgaatgggttcatcccggccagaaatgtgcatc

SEQ ID NO: 813051 - DNA, 33 bp, Homo sapien
aaaatccaagagtcaccgatgtccatgatttct

SEQ ID NO: 813052 - DNA, 33 bp, Homo sapien
aaaatccaagagtcactgatgtccatgatttct

SEQ ID NO: 813053 - DNA, 33 bp, Homo sapien
aatatagtatatcctacggaccagacacaatgc

SEQ ID NO: 813054 - DNA, 33 bp, Homo sapien
aatatagtatatcctatggaccagacacaatgc

SEQ ID NO: 813055 - DNA, 33 bp, Homo sapien
gggagctgaattctccagcgacagttgttgggg

SEQ ID NO: 813056 - DNA, 33 bp, Homo sapien
gggagctgaattctccggcgacagttgttgggg

SEQ ID NO: 813057 - DNA, 33 bp, Homo sapien
catgaaaatatgctgccagaatccaaagagcat

SEQ ID NO: 813058 - DNA, 33 bp, Homo sapien
catgaaaatatgctgctagaatccaaagagcat

SEQ ID NO: 813059 - DNA, 33 bp, Homo sapien
ctgtctttgtgccaaacggggcagaaactacaa

SEQ ID NO: 813060 - DNA, 33 bp, Homo sapien
ctgtctttgtgccaaatggggcagaaactacaa

SEQ ID NO: 813061 - DNA, 33 bp, Homo sapien
gtccattaaatctgaacgcctcactctttctcc

SEQ ID NO: 813062 - DNA, 33 bp, Homo sapien
gtccattaaatctgaatgcctcactctttctcc

SEQ ID NO: 813063 - DNA, 33 bp, Homo sapien
ttggagtcaaacttacaaaagggctatttattt

SEQ ID NO: 813064 - DNA, 33 bp, Homo sapien
ttggagtcaaacttaccaaagggctatttattt

SEQ ID NO: 813065 - DNA, 33 bp, Homo sapien
caaagcgtcctagaaccggttagaaaatatttt

SEQ ID NO: 813066 - DNA, 33 bp, Homo sapien
caaagcgtcctagaactggttagaaaatatttt

SEQ ID NO: 813067 - DNA, 33 bp, Homo sapien
tgttaattacgactgacaggagactagctccag

SEQ ID NO: 813068 - DNA, 33 bp, Homo sapien
tgttaattacgactgagaggagactagctccag

SEQ ID NO: 813069 - DNA, 33 bp, Homo sapien
gtactgtggagatagacaagggagatggtcagc

SEQ ID NO: 813070 - DNA, 33 bp, Homo sapien
gtactgtggagatagagaagggagatggtcagc

SEQ ID NO: 813071 - DNA, 33 bp, Homo sapien
gctattgtaatgcaaaagcagatcgacaataca

SEQ ID NO: 813072 - DNA, 33 bp, Homo sapien
gctattgtaatgcaaacgcagatcgacaataca

SEQ ID NO: 813073 - DNA, 33 bp, Homo sapien
ggtagttgacacacagaccatatggcttgcaaa

SEQ ID NO: 813074 - DNA, 33 bp, Homo sapien
ggtagttgacacacaggccatatggcttgcaaa

SEQ ID NO: 813075 - DNA, 33 bp, Homo sapien
aacacgcagattacaaccagagccaggaaagca

SEQ ID NO: 813076 - DNA, 33 bp, Homo sapien
aacacgcagattacaatcagagccaggaaagca

SEQ ID NO: 813077 - DNA, 33 bp, Homo sapien
agctgagtgcaatttacagcttgggctaactgg

SEQ ID NO: 813078 - DNA, 33 bp, Homo sapien
agctgagtgcaatttagagcttgggctaactgg

SEQ ID NO: 813079 - DNA, 33 bp, Homo sapien
tccagtgcttactcaacgggtttctggtcatcc

SEQ ID NO: 813080 - DNA, 33 bp, Homo sapien
tccagtgcttactcaatgggtttctggtcatcc

SEQ ID NO: 813081 - DNA, 33 bp, Homo sapien
gctcagggaaaagtagcaatgttgatcctgttc

SEQ ID NO: 813082 - DNA, 33 bp, Homo sapien
gctcagggaaaagtaggaatgttgatcctgttc

SEQ ID NO: 813083 - DNA, 33 bp, Homo sapien
tcacagtggcaagtacaaggggactactctttc

SEQ ID NO: 813084 - DNA, 33 bp, Homo sapien
tcacagtggcaagtacgaggggactactctttc

SEQ ID NO: 813085 - DNA, 33 bp, Homo sapien
ccataaaacttctttcaatcgaggctgacaatg

SEQ ID NO: 813086 - DNA, 33 bp, Homo sapien
ccataaaacttctttccatcgaggctgacaatg

SEQ ID NO: 813087 - DNA, 33 bp, Homo sapien
ccttcctctcaaataacgtggagaggctctctc

SEQ ID NO: 813088 - DNA, 33 bp, Homo sapien
ccttcctctcaaataatgtggagaggctctctc

SEQ ID NO: 813089 - DNA, 33 bp, Homo sapien
tcctaaaaataaaaaactacacagtcacaggtt

SEQ ID NO: 813090 - DNA, 33 bp, Homo sapien
tcctaaaaataaaaaattacacagtcacaggtt

SEQ ID NO: 813091 - DNA, 33 bp, Homo sapien
ttaggggtcgagaagacgtggtgagactccgtg

SEQ ID NO: 813092 - DNA, 33 bp, Homo sapien
ttaggggtcgagaagatgtggtgagactccgtg

SEQ ID NO: 813093 - DNA, 33 bp, Homo sapien
cctgcaacatgcacgccatcactcgggaggcat

SEQ ID NO: 813094 - DNA, 33 bp, Homo sapien
cctgcaacatgcacgctatcactcgggaggcat

SEQ ID NO: 813095 - DNA, 33 bp, Homo sapien
gaatgagtccttctagaaaaaggtgtcagggct

SEQ ID NO: 813096 - DNA, 33 bp, Homo sapien
gaatgagtccttctaggaaaaggtgtcagggct

SEQ ID NO: 813097 - DNA, 33 bp, Homo sapien
tcccttaaacctttcaatataattcagctgtga

SEQ ID NO: 813098 - DNA, 33 bp, Homo sapien
tcccttaaacctttcagtataattcagctgtga

SEQ ID NO: 813099 - DNA, 33 bp, Homo sapien
aaaaaaattatcttcaaaagaaacgcatatact

SEQ ID NO: 813100 - DNA, 33 bp, Homo sapien
aaaaaaattatcttcataagaaacgcatatact

SEQ ID NO: 813101 - DNA, 33 bp, Homo sapien
agcaaatgacaaaatcaataaagtgggaattgc

SEQ ID NO: 813102 - DNA, 33 bp, Homo sapien
agcaaatgacaaaatcgataaagtgggaattgc

SEQ ID NO: 813103 - DNA, 33 bp, Homo sapien
tttggttttcaagcaacgtggttttcaatttta

SEQ ID NO: 813104 - DNA, 33 bp, Homo sapien
tttggttttcaagcaatgtggttttcaatttta

SEQ ID NO: 813105 - DNA, 33 bp, Homo sapien
aatatgtcatacggtccaaatttctccttttaa

SEQ ID NO: 813106 - DNA, 33 bp, Homo sapien
aatatgtcatacggtctaaatttctccttttaa

SEQ ID NO: 813107 - DNA, 33 bp, Homo sapien
aacattctctgcattaagtactacctttagtct

SEQ ID NO: 813108 - DNA, 33 bp, Homo sapien
aacattctctgcattaggtactacctttagtct

SEQ ID NO: 813109 - DNA, 33 bp, Homo sapien
ttctcaaagaacaggcaatcaatgacaagagtc

SEQ ID NO: 813110 - DNA, 33 bp, Homo sapien
ttctcaaagaacaggctatcaatgacaagagtc

SEQ ID NO: 813111 - DNA, 33 bp, Homo sapien
cgtgttatgttaagacactcagtttgtggtaat

SEQ ID NO: 813112 - DNA, 33 bp, Homo sapien
cgtgttatgttaagacgctcagtttgtggtaat

SEQ ID NO: 813113 - DNA, 33 bp, Homo sapien
gaggaggttgacataaaggtgaagtgctcagac

SEQ ID NO: 813114 - DNA, 33 bp, Homo sapien
gaggaggttgacataatggtgaagtgctcagac

SEQ ID NO: 813115 - DNA, 33 bp, Homo sapien
taagctgttgtgaaaacgaaagaattacctgca

SEQ ID NO: 813116 - DNA, 33 bp, Homo sapien
taagctgttgtgaaaatgaaagaattacctgca

SEQ ID NO: 813117 - DNA, 33 bp, Homo sapien
actttgtccatcgaaccgcctgtctctctttaa

SEQ ID NO: 813118 - DNA, 33 bp, Homo sapien
actttgtccatcgaactgcctgtctctctttaa

SEQ ID NO: 813119 - DNA, 33 bp, Homo sapien
ctcagtgaagggactggacgcctgcccctccag

SEQ ID NO: 813120 - DNA, 33 bp, Homo sapien
ctcagtgaagggactgtacgcctgcccctccag

SEQ ID NO: 813121 - DNA, 33 bp, Homo sapien
aacttttatcagagccaagagaaaggacgcagg

SEQ ID NO: 813122 - DNA, 33 bp, Homo sapien
aacttttatcagagcccagagaaaggacgcagg

SEQ ID NO: 813123 - DNA, 33 bp, Homo sapien
cagaagtgtccatggcaaaagtccaaaagatgg

SEQ ID NO: 813124 - DNA, 33 bp, Homo sapien
cagaagtgtccatggcgaaagtccaaaagatgg

SEQ ID NO: 813125 - DNA, 33 bp, Homo sapien
tatgtgtaacaccatacgctttactacacggag

SEQ ID NO: 813126 - DNA, 33 bp, Homo sapien
tatgtgtaacaccatatgctttactacacggag

SEQ ID NO: 813127 - DNA, 33 bp, Homo sapien
gtgttacacataggcccaactggttgtcatttt

SEQ ID NO: 813128 - DNA, 33 bp, Homo sapien
gtgttacacataggcctaactggttgtcatttt

SEQ ID NO: 813129 - DNA, 33 bp, Homo sapien
aataacttagtcctacacttgatgcatgaaagg

SEQ ID NO: 813130 - DNA, 33 bp, Homo sapien
aataacttagtcctacgcttgatgcatgaaagg

SEQ ID NO: 813131 - DNA, 33 bp, Homo sapien
cccctgtggacttagcagaaagcttttggtgtt

SEQ ID NO: 813132 - DNA, 33 bp, Homo sapien
cccctgtggacttagcggaaagcttttggtgtt

SEQ ID NO: 813133 - DNA, 33 bp, Homo sapien
ctccaatggtagcatccgacataaccgcagtac

SEQ ID NO: 813134 - DNA, 33 bp, Homo sapien
ctccaatggtagcatctgacataaccgcagtac

SEQ ID NO: 813135 - DNA, 33 bp, Homo sapien
tgcttccagtccaaacagaagctttcttcattt

SEQ ID NO: 813136 - DNA, 33 bp, Homo sapien
tgcttccagtccaaacggaagctttcttcattt

SEQ ID NO: 813137 - DNA, 33 bp, Homo sapien
caaaatcgcagttgtaacccctgaagtgtatat

SEQ ID NO: 813138 - DNA, 33 bp, Homo sapien
caaaatcgcagttgtaccccctgaagtgtatat

SEQ ID NO: 813139 - DNA, 33 bp, Homo sapien
agctggagttcacaccaaggtcttttaggctcc

SEQ ID NO: 813140 - DNA, 33 bp, Homo sapien
agctggagttcacaccgaggtcttttaggctcc

SEQ ID NO: 813141 - DNA, 33 bp, Homo sapien
agattcaagtgtataacgcatgatcagtgttca

SEQ ID NO: 813142 - DNA, 33 bp, Homo sapien
agattcaagtgtataatgcatgatcagtgttca

SEQ ID NO: 813143 - DNA, 33 bp, Homo sapien
tcgctttggcatctcaaagtattaggattacag

SEQ ID NO: 813144 - DNA, 33 bp, Homo sapien
tcgctttggcatctcacagtattaggattacag

SEQ ID NO: 813145 - DNA, 33 bp, Homo sapien
atcatgtctagaaataagcctggagagcgcttg

SEQ ID NO: 813146 - DNA, 33 bp, Homo sapien
atcatgtctagaaataggcctggagagcgcttg

SEQ ID NO: 813147 - DNA, 33 bp, Homo sapien
caccactgagaaagaacgaatctccccagaagg

SEQ ID NO: 813148 - DNA, 33 bp, Homo sapien
caccactgagaaagaatgaatctccccagaagg

SEQ ID NO: 813149 - DNA, 33 bp, Homo sapien
aagttaaaattgactaagttttcattgtccaag

SEQ ID NO: 813150 - DNA, 33 bp, Homo sapien
aagttaaaattgactaggttttcattgtccaag

SEQ ID NO: 813151 - DNA, 33 bp, Homo sapien
catcaagtcaccatacaaagtagcttaggggat

SEQ ID NO: 813152 - DNA, 33 bp, Homo sapien
catcaagtcaccatacgaagtagcttaggggat

SEQ ID NO: 813153 - DNA, 33 bp, Homo sapien
cagtcacaaggagaaaaattggccccaggtaga

SEQ ID NO: 813154 - DNA, 33 bp, Homo sapien
cagtcacaaggagaaacattggccccaggtaga

SEQ ID NO: 813155 - DNA, 33 bp, Homo sapien
ggattcaaagaaatagcaagtgcttagtaaagg

SEQ ID NO: 813156 - DNA, 33 bp, Homo sapien
ggattcaaagaaataggaagtgcttagtaaagg

SEQ ID NO: 813157 - DNA, 33 bp, Homo sapien
atcttagctactatgaacatccattactcctca

SEQ ID NO: 813158 - DNA, 33 bp, Homo sapien
atcttagctactatgatcatccattactcctca

SEQ ID NO: 813159 - DNA, 33 bp, Homo sapien
attagcttcacgttacagaggagaaccagctgt

SEQ ID NO: 813160 - DNA, 33 bp, Homo sapien
attagcttcacgttacggaggagaaccagctgt

SEQ ID NO: 813161 - DNA, 33 bp, Homo sapien
atgactgtattctagaagtcgtcaactcagatg

SEQ ID NO: 813162 - DNA, 33 bp, Homo sapien
atgactgtattctagacgtcgtcaactcagatg

SEQ ID NO: 813163 - DNA, 33 bp, Homo sapien
taatgaggtccttgaaaccctattcaccactag

SEQ ID NO: 813164 - DNA, 33 bp, Homo sapien
taatgaggtccttgaagccctattcaccactag

SEQ ID NO: 813165 - DNA, 33 bp, Homo sapien
tggcgaattagaaataccacatatctgagaact

SEQ ID NO: 813166 - DNA, 33 bp, Homo sapien
tggcgaattagaaatagcacatatctgagaact

SEQ ID NO: 813167 - DNA, 33 bp, Homo sapien
catatctgagaacttcaaagcctgggttttaat

SEQ ID NO: 813168 - DNA, 33 bp, Homo sapien
catatctgagaacttcgaagcctgggttttaat

SEQ ID NO: 813169 - DNA, 33 bp, Homo sapien
atccatggactcctcagtacacaggtgaggaga

SEQ ID NO: 813170 - DNA, 33 bp, Homo sapien
atccatggactcctcattacacaggtgaggaga

SEQ ID NO: 813171 - DNA, 33 bp, Homo sapien
ggggtgctgagatggacagtttcggggagactt

SEQ ID NO: 813172 - DNA, 33 bp, Homo sapien
ggggtgctgagatggatagtttcggggagactt

SEQ ID NO: 813173 - DNA, 33 bp, Homo sapien
gacaaaaggtaagaagccaggtggattgagtga

SEQ ID NO: 813174 - DNA, 33 bp, Homo sapien
gacaaaaggtaagaagtcaggtggattgagtga

SEQ ID NO: 813175 - DNA, 33 bp, Homo sapien
gtcagcaaggctaaggaaactgctcagcaccat

SEQ ID NO: 813176 - DNA, 33 bp, Homo sapien
gtcagcaaggctaaggcaactgctcagcaccat

SEQ ID NO: 813177 - DNA, 33 bp, Homo sapien
tccttctgcttctgaaatcatcagtgcacagta

SEQ ID NO: 813178 - DNA, 33 bp, Homo sapien
tccttctgcttctgaagtcatcagtgcacagta

SEQ ID NO: 813179 - DNA, 33 bp, Homo sapien
cttaccccactgagccaattcctctattttctc

SEQ ID NO: 813180 - DNA, 33 bp, Homo sapien
cttaccccactgagccgattcctctattttctc

SEQ ID NO: 813181 - DNA, 33 bp, Homo sapien
tggacgaaaatagacaaagctaacctgtgcaat

SEQ ID NO: 813182 - DNA, 33 bp, Homo sapien
tggacgaaaatagacagagctaacctgtgcaat

SEQ ID NO: 813183 - DNA, 33 bp, Homo sapien
actcccaatcccgaaacagacttcataactgca

SEQ ID NO: 813184 - DNA, 33 bp, Homo sapien
actcccaatcccgaaatagacttcataactgca

SEQ ID NO: 813185 - DNA, 33 bp, Homo sapien
tattgataacagcagaagtttgggagaaaagta

SEQ ID NO: 813186 - DNA, 33 bp, Homo sapien
tattgataacagcagacgtttgggagaaaagta

SEQ ID NO: 813187 - DNA, 33 bp, Homo sapien
ttgggaaggaagacacacctctaaatgtcagac

SEQ ID NO: 813188 - DNA, 33 bp, Homo sapien
ttgggaaggaagacacgcctctaaatgtcagac

SEQ ID NO: 813189 - DNA, 33 bp, Homo sapien
agacacaaagtgaagacgggcacagaaatctat

SEQ ID NO: 813190 - DNA, 33 bp, Homo sapien
agacacaaagtgaagatgggcacagaaatctat

SEQ ID NO: 813191 - DNA, 33 bp, Homo sapien
gagacgttagcaatggaattcaccacaggacat

SEQ ID NO: 813192 - DNA, 33 bp, Homo sapien
gagacgttagcaatggcattcaccacaggacat

SEQ ID NO: 813193 - DNA, 33 bp, Homo sapien
ctaagagatgcgacaacgagagagttggcagat

SEQ ID NO: 813194 - DNA, 33 bp, Homo sapien
ctaagagatgcgacaatgagagagttggcagat

SEQ ID NO: 813195 - DNA, 33 bp, Homo sapien
gctttttgccctcctgcaagtttggttctgtaa

SEQ ID NO: 813196 - DNA, 33 bp, Homo sapien
gctttttgccctcctgtaagtttggttctgtaa

SEQ ID NO: 813197 - DNA, 33 bp, Homo sapien
cctaatgttgtattaagtgctttacataatttt

SEQ ID NO: 813198 - DNA, 33 bp, Homo sapien
cctaatgttgtattaattgctttacataatttt

SEQ ID NO: 813199 - DNA, 33 bp, Homo sapien
gtgctgagttacttgaagatttaaagcagttgc

SEQ ID NO: 813200 - DNA, 33 bp, Homo sapien
gtgctgagttacttgaggatttaaagcagttgc

SEQ ID NO: 813201 - DNA, 33 bp, Homo sapien
gaagctcttaaggaaaggaaagcagccaccttg

SEQ ID NO: 813202 - DNA, 33 bp, Homo sapien
gaagctcttaaggaaatgaaagcagccaccttg

SEQ ID NO: 813203 - DNA, 33 bp, Homo sapien
ttcataacacttaggcaaggcctcgctggcagc

SEQ ID NO: 813204 - DNA, 33 bp, Homo sapien
ttcataacacttaggccaggcctcgctggcagc

SEQ ID NO: 813205 - DNA, 33 bp, Homo sapien
agatttagcccattgccatgcagaggcttgtgg

SEQ ID NO: 813206 - DNA, 33 bp, Homo sapien
agatttagcccattgctatgcagaggcttgtgg

SEQ ID NO: 813207 - DNA, 33 bp, Homo sapien
gcaacccacaatttaacgcaaagcaaagggcag

SEQ ID NO: 813208 - DNA, 33 bp, Homo sapien
gcaacccacaatttaatgcaaagcaaagggcag

SEQ ID NO: 813209 - DNA, 33 bp, Homo sapien
caagataaccacaaagaaacagaggaagtacat

SEQ ID NO: 813210 - DNA, 33 bp, Homo sapien
caagataaccacaaaggaacagaggaagtacat

SEQ ID NO: 813211 - DNA, 33 bp, Homo sapien
tggagcaacccctatcaaacgactccttatcac

SEQ ID NO: 813212 - DNA, 33 bp, Homo sapien
tggagcaacccctatcgaacgactccttatcac

SEQ ID NO: 813213 - DNA, 33 bp, Homo sapien
aatgatgattgatgcactaatgtgagactgata

SEQ ID NO: 813214 - DNA, 33 bp, Homo sapien
aatgatgattgatgcattaatgtgagactgata

SEQ ID NO: 813215 - DNA, 33 bp, Homo sapien
agaagacgacaatgcactcctgttgtgccctgc

SEQ ID NO: 813216 - DNA, 33 bp, Homo sapien
agaagacgacaatgcattcctgttgtgccctgc

SEQ ID NO: 813217 - DNA, 33 bp, Homo sapien
ggagcagatcagaactcagaggtaaactgcaca

SEQ ID NO: 813218 - DNA, 33 bp, Homo sapien
ggagcagatcagaactgagaggtaaactgcaca

SEQ ID NO: 813219 - DNA, 33 bp, Homo sapien
atctgctagacagaaaactaaactctaaagtgg

SEQ ID NO: 813220 - DNA, 33 bp, Homo sapien
atctgctagacagaaacctaaactctaaagtgg

SEQ ID NO: 813221 - DNA, 33 bp, Homo sapien
atatttgcttttcctacgcttagaatacttcaa

SEQ ID NO: 813222 - DNA, 33 bp, Homo sapien
atatttgcttttcctatgcttagaatacttcaa

SEQ ID NO: 813223 - DNA, 33 bp, Homo sapien
cccttcccttttctggaagcccgctttgcttag

SEQ ID NO: 813224 - DNA, 33 bp, Homo sapien
cccttcccttttctgggagcccgctttgcttag

SEQ ID NO: 813225 - DNA, 33 bp, Homo sapien
agccttaataagcactaaacaaatggggtagat

SEQ ID NO: 813226 - DNA, 33 bp, Homo sapien
agccttaataagcactgaacaaatggggtagat

SEQ ID NO: 813227 - DNA, 33 bp, Homo sapien
tactatgatctcctccacggccaaggcaaggag

SEQ ID NO: 813228 - DNA, 33 bp, Homo sapien
tactatgatctcctccgcggccaaggcaaggag

SEQ ID NO: 813229 - DNA, 33 bp, Homo sapien
ccctgctttctatgccaagtctaaagccttcaa

SEQ ID NO: 813230 - DNA, 33 bp, Homo sapien
ccctgctttctatgccgagtctaaagccttcaa

SEQ ID NO: 813231 - DNA, 33 bp, Homo sapien
accaatccaggcttagaacttcttgcaacaggt

SEQ ID NO: 813232 - DNA, 33 bp, Homo sapien
accaatccaggcttagcacttcttgcaacaggt

SEQ ID NO: 813233 - DNA, 33 bp, Homo sapien
actttcagaacttacaatagtggttgccagttc

SEQ ID NO: 813234 - DNA, 33 bp, Homo sapien
actttcagaacttacagtagtggttgccagttc

SEQ ID NO: 813235 - DNA, 33 bp, Homo sapien
aatcaaactgatgtcaatattagcatggattca

SEQ ID NO: 813236 - DNA, 33 bp, Homo sapien
aatcaaactgatgtcagtattagcatggattca

SEQ ID NO: 813237 - DNA, 33 bp, Homo sapien
tagaaggcagtcaaggccaagttaattatacca

SEQ ID NO: 813238 - DNA, 33 bp, Homo sapien
tagaaggcagtcaagggcaagttaattatacca

SEQ ID NO: 813239 - DNA, 33 bp, Homo sapien
aacttatcactcaagtaaatctatggttacaaa

SEQ ID NO: 813240 - DNA, 33 bp, Homo sapien
aacttatcactcaagttaatctatggttacaaa

SEQ ID NO: 813241 - DNA, 33 bp, Homo sapien
tcacctgcatacacaagtcacctgcattaaatt

SEQ ID NO: 813242 - DNA, 33 bp, Homo sapien
tcacctgcatacacaattcacctgcattaaatt

SEQ ID NO: 813243 - DNA, 33 bp, Homo sapien
ttggtcccattcttcccacccattcaacctgta

SEQ ID NO: 813244 - DNA, 33 bp, Homo sapien
ttggtcccattcttcctacccattcaacctgta

SEQ ID NO: 813245 - DNA, 33 bp, Homo sapien
agagtcatcttgcaccaaaaaccacatctgact

SEQ ID NO: 813246 - DNA, 33 bp, Homo sapien
agagtcatcttgcaccgaaaaccacatctgact

SEQ ID NO: 813247 - DNA, 33 bp, Homo sapien
ggtcacttcactcaagaaactcacattctgttg

SEQ ID NO: 813248 - DNA, 33 bp, Homo sapien
ggtcacttcactcaaggaactcacattctgttg

SEQ ID NO: 813249 - DNA, 33 bp, Homo sapien
cattttacagaggtggaaaccagagcacacaaa

SEQ ID NO: 813250 - DNA, 33 bp, Homo sapien
cattttacagaggtggcaaccagagcacacaaa

SEQ ID NO: 813251 - DNA, 33 bp, Homo sapien
ctttaaaaactaacagccaatttcacacagggg

SEQ ID NO: 813252 - DNA, 33 bp, Homo sapien
ctttaaaaactaacaggcaatttcacacagggg

SEQ ID NO: 813253 - DNA, 33 bp, Homo sapien
ctcaccacagtcatcacggcgtgtctgcatttc

SEQ ID NO: 813254 - DNA, 33 bp, Homo sapien
ctcaccacagtcatcatggcgtgtctgcatttc

SEQ ID NO: 813255 - DNA, 33 bp, Homo sapien
agaccatagttcctcaccaaaagtaggagccct

SEQ ID NO: 813256 - DNA, 33 bp, Homo sapien
agaccatagttcctcatcaaaagtaggagccct

SEQ ID NO: 813257 - DNA, 33 bp, Homo sapien
ttacccactgacattaaagctggcagccgtggg

SEQ ID NO: 813258 - DNA, 33 bp, Homo sapien
ttacccactgacattatagctggcagccgtggg

SEQ ID NO: 813259 - DNA, 33 bp, Homo sapien
tgatgaagtcctaacactgtatcctgacatctg

SEQ ID NO: 813260 - DNA, 33 bp, Homo sapien
tgatgaagtcctaacattgtatcctgacatctg

SEQ ID NO: 813261 - DNA, 33 bp, Homo sapien
agcataactaagaaaaaacgctctcatacaggc

SEQ ID NO: 813262 - DNA, 33 bp, Homo sapien
agcataactaagaaaagacgctctcatacaggc

SEQ ID NO: 813263 - DNA, 33 bp, Homo sapien
catcctctttctggagacacctaaacataggcc

SEQ ID NO: 813264 - DNA, 33 bp, Homo sapien
catcctctttctggaggcacctaaacataggcc

SEQ ID NO: 813265 - DNA, 33 bp, Homo sapien
aggctgtaaagcaaaaacatgaactccctgtac

SEQ ID NO: 813266 - DNA, 33 bp, Homo sapien
aggctgtaaagcaaaagcatgaactccctgtac

SEQ ID NO: 813267 - DNA, 33 bp, Homo sapien
aaggaatgcctgtggacgataacggggtaaaga

SEQ ID NO: 813268 - DNA, 33 bp, Homo sapien
aaggaatgcctgtggatgataacggggtaaaga

SEQ ID NO: 813269 - DNA, 33 bp, Homo sapien
cctttacaaacttgctcagaacttactactttg

SEQ ID NO: 813270 - DNA, 33 bp, Homo sapien
cctttacaaacttgctgagaacttactactttg

SEQ ID NO: 813271 - DNA, 33 bp, Homo sapien
tcccacctcgagaaggaaagtgatccctgacaa

SEQ ID NO: 813272 - DNA, 33 bp, Homo sapien
tcccacctcgagaagggaagtgatccctgacaa

SEQ ID NO: 813273 - DNA, 33 bp, Homo sapien
gatgcacagtttaagtcaagtcctatggaaaag

SEQ ID NO: 813274 - DNA, 33 bp, Homo sapien
gatgcacagtttaagttaagtcctatggaaaag

SEQ ID NO: 813275 - DNA, 33 bp, Homo sapien
gccatgtgactctgcccattgtgagtgctctct

SEQ ID NO: 813276 - DNA, 33 bp, Homo sapien
gccatgtgactctgcctattgtgagtgctctct

SEQ ID NO: 813277 - DNA, 33 bp, Homo sapien
ctcaataaatgtttgacaagtaagtgaatgatg

SEQ ID NO: 813278 - DNA, 33 bp, Homo sapien
ctcaataaatgtttgataagtaagtgaatgatg

SEQ ID NO: 813279 - DNA, 33 bp, Homo sapien
cctgggcagaaaaagacgggctttgtcctaagc

SEQ ID NO: 813280 - DNA, 33 bp, Homo sapien
cctgggcagaaaaagatgggctttgtcctaagc

SEQ ID NO: 813281 - DNA, 33 bp, Homo sapien
cgaattgagaaaagaaatagcaagacggaaaat

SEQ ID NO: 813282 - DNA, 33 bp, Homo sapien
cgaattgagaaaagaagtagcaagacggaaaat

SEQ ID NO: 813283 - DNA, 33 bp, Homo sapien
tgctaagtgttgcacaagctttattctatttgc

SEQ ID NO: 813284 - DNA, 33 bp, Homo sapien
tgctaagtgttgcacaggctttattctatttgc

SEQ ID NO: 813285 - DNA, 33 bp, Homo sapien
ctactaacctttcagcaataataacaaaactaa

SEQ ID NO: 813286 - DNA, 33 bp, Homo sapien
ctactaacctttcagccataataacaaaactaa

SEQ ID NO: 813287 - DNA, 33 bp, Homo sapien
tctgagtgatgtggcaagtgaccatttcagttg

SEQ ID NO: 813288 - DNA, 33 bp, Homo sapien
tctgagtgatgtggcaggtgaccatttcagttg

SEQ ID NO: 813289 - DNA, 33 bp, Homo sapien
ttctaggatctgcagaagtattccctggctgtg

SEQ ID NO: 813290 - DNA, 33 bp, Homo sapien
ttctaggatctgcagacgtattccctggctgtg

SEQ ID NO: 813291 - DNA, 33 bp, Homo sapien
catttacactgtaaataaaggttaatagcctag

SEQ ID NO: 813292 - DNA, 33 bp, Homo sapien
catttacactgtaaatgaaggttaatagcctag

SEQ ID NO: 813293 - DNA, 33 bp, Homo sapien
gacatctaaacataaccacacattcgaaagtct

SEQ ID NO: 813294 - DNA, 33 bp, Homo sapien
gacatctaaacataacgacacattcgaaagtct

SEQ ID NO: 813295 - DNA, 33 bp, Homo sapien
ggaaagctttctccgacggaattgaattagccg

SEQ ID NO: 813296 - DNA, 33 bp, Homo sapien
ggaaagctttctccgagggaattgaattagccg

SEQ ID NO: 813297 - DNA, 33 bp, Homo sapien
tagaaggccaagtttaccccagtgcatatatac

SEQ ID NO: 813298 - DNA, 33 bp, Homo sapien
tagaaggccaagtttatcccagtgcatatatac

SEQ ID NO: 813299 - DNA, 33 bp, Homo sapien
tgatgcaatttacacaaaagtatgagaaacctc

SEQ ID NO: 813300 - DNA, 33 bp, Homo sapien
tgatgcaatttacacagaagtatgagaaacctc

SEQ ID NO: 813301 - DNA, 33 bp, Homo sapien
cacttagaatagtgcaagatgcatagtatgtgc

SEQ ID NO: 813302 - DNA, 33 bp, Homo sapien
cacttagaatagtgcaggatgcatagtatgtgc

SEQ ID NO: 813303 - DNA, 33 bp, Homo sapien
aaacacataaagcaaccggtatgttggacagtg

SEQ ID NO: 813304 - DNA, 33 bp, Homo sapien
aaacacataaagcaactggtatgttggacagtg

SEQ ID NO: 813305 - DNA, 33 bp, Homo sapien
gtctccatggcaaagacggctaaaaaacaaagg

SEQ ID NO: 813306 - DNA, 33 bp, Homo sapien
gtctccatggcaaagatggctaaaaaacaaagg

SEQ ID NO: 813307 - DNA, 33 bp, Homo sapien
tcactagcatgcagaccgagatgtgtgtgactc

SEQ ID NO: 813308 - DNA, 33 bp, Homo sapien
tcactagcatgcagacggagatgtgtgtgactc

SEQ ID NO: 813309 - DNA, 33 bp, Homo sapien
cctgatccccttcaagacctcaaactgtcaggg

SEQ ID NO: 813310 - DNA, 33 bp, Homo sapien
cctgatccccttcaaggcctcaaactgtcaggg

SEQ ID NO: 813311 - DNA, 33 bp, Homo sapien
ctagtgctttggtggaaggagaggagcatagag

SEQ ID NO: 813312 - DNA, 33 bp, Homo sapien
ctagtgctttggtggagggagaggagcatagag

SEQ ID NO: 813313 - DNA, 33 bp, Homo sapien
aggatttgaatcttgaaggttagataacatagc

SEQ ID NO: 813314 - DNA, 33 bp, Homo sapien
aggatttgaatcttgagggttagataacatagc

SEQ ID NO: 813315 - DNA, 33 bp, Homo sapien
accacagcagtcttgacgtctcctccactgtat

SEQ ID NO: 813316 - DNA, 33 bp, Homo sapien
accacagcagtcttgatgtctcctccactgtat

SEQ ID NO: 813317 - DNA, 33 bp, Homo sapien
atacagagactggagcaaacacacttcagccag

SEQ ID NO: 813318 - DNA, 33 bp, Homo sapien
atacagagactggagctaacacacttcagccag

SEQ ID NO: 813319 - DNA, 33 bp, Homo sapien
gtctttccaacttggaagctgatcatacatatc

SEQ ID NO: 813320 - DNA, 33 bp, Homo sapien
gtctttccaacttggaggctgatcatacatatc

SEQ ID NO: 813321 - DNA, 33 bp, Homo sapien
gtggttgggatgctgaatatagaacccagaaat

SEQ ID NO: 813322 - DNA, 33 bp, Homo sapien
gtggttgggatgctgagtatagaacccagaaat

SEQ ID NO: 813323 - DNA, 33 bp, Homo sapien
gttgtccctggacacacacttctcttcctagaa

SEQ ID NO: 813324 - DNA, 33 bp, Homo sapien
gttgtccctggacacatacttctcttcctagaa

SEQ ID NO: 813325 - DNA, 33 bp, Homo sapien
actcactactttcatacgtagtaaagagagtac

SEQ ID NO: 813326 - DNA, 33 bp, Homo sapien
actcactactttcatatgtagtaaagagagtac

SEQ ID NO: 813327 - DNA, 33 bp, Homo sapien
tttcagctgtatgtgcaaggaggtgagcttgtc

SEQ ID NO: 813328 - DNA, 33 bp, Homo sapien
tttcagctgtatgtgcgaggaggtgagcttgtc

SEQ ID NO: 813329 - DNA, 33 bp, Homo sapien
atggtggtacattgaaaagctgatggcaagaca

SEQ ID NO: 813330 - DNA, 33 bp, Homo sapien
atggtggtacattgaacagctgatggcaagaca

SEQ ID NO: 813331 - DNA, 33 bp, Homo sapien
gattcagttggtcccacatttcaccattatctc

SEQ ID NO: 813332 - DNA, 33 bp, Homo sapien
gattcagttggtcccagatttcaccattatctc

SEQ ID NO: 813333 - DNA, 33 bp, Homo sapien
ctcactctggtccatgacatgactctaggatga

SEQ ID NO: 813334 - DNA, 33 bp, Homo sapien
ctcactctggtccatggcatgactctaggatga

SEQ ID NO: 813335 - DNA, 33 bp, Homo sapien
cttggagcatgtatacacgacacctgtgataaa

SEQ ID NO: 813336 - DNA, 33 bp, Homo sapien
cttggagcatgtatacgcgacacctgtgataaa

SEQ ID NO: 813337 - DNA, 33 bp, Homo sapien
actgtgtatcctgaaacctttggcaagttactt

SEQ ID NO: 813338 - DNA, 33 bp, Homo sapien
actgtgtatcctgaaagctttggcaagttactt

SEQ ID NO: 813339 - DNA, 33 bp, Homo sapien
ggagttgcaacaagcactgaggtaaattaccct

SEQ ID NO: 813340 - DNA, 33 bp, Homo sapien
ggagttgcaacaagcattgaggtaaattaccct

SEQ ID NO: 813341 - DNA, 33 bp, Homo sapien
tccctttgcctttaaactgatgcttatgtctca

SEQ ID NO: 813342 - DNA, 33 bp, Homo sapien
tccctttgcctttaaattgatgcttatgtctca

SEQ ID NO: 813343 - DNA, 33 bp, Homo sapien
aatttattttaaaaggacactttgctggaacaa

SEQ ID NO: 813344 - DNA, 33 bp, Homo sapien
aatttattttaaaagggcactttgctggaacaa

SEQ ID NO: 813345 - DNA, 33 bp, Homo sapien
agtcaggttgggaatgcaaagcaaaggtcagtc

SEQ ID NO: 813346 - DNA, 33 bp, Homo sapien
agtcaggttgggaatggaaagcaaaggtcagtc

SEQ ID NO: 813347 - DNA, 33 bp, Homo sapien
tactatctgctcccacaatcactgtttaggatc

SEQ ID NO: 813348 - DNA, 33 bp, Homo sapien
tactatctgctcccacgatcactgtttaggatc

SEQ ID NO: 813349 - DNA, 33 bp, Homo sapien
ttggatgttggccaacagagccagtttctctta

SEQ ID NO: 813350 - DNA, 33 bp, Homo sapien
ttggatgttggccaacggagccagtttctctta

SEQ ID NO: 813351 - DNA, 33 bp, Homo sapien
cactgttatccttaatcaggtcttcatgcagag

SEQ ID NO: 813352 - DNA, 33 bp, Homo sapien
cactgttatccttaattaggtcttcatgcagag

SEQ ID NO: 813353 - DNA, 33 bp, Homo sapien
tctaacagccaattcaagctttttttttcctgc

SEQ ID NO: 813354 - DNA, 33 bp, Homo sapien
tctaacagccaattcaggctttttttttcctgc

SEQ ID NO: 813355 - DNA, 33 bp, Homo sapien
gcttacagactcaataaccagggccattttagt

SEQ ID NO: 813356 - DNA, 33 bp, Homo sapien
gcttacagactcaatacccagggccattttagt

SEQ ID NO: 813357 - DNA, 33 bp, Homo sapien
gctattaggactttcacaacttacaaactaaaa

SEQ ID NO: 813358 - DNA, 33 bp, Homo sapien
gctattaggactttcagaacttacaaactaaaa

SEQ ID NO: 813359 - DNA, 33 bp, Homo sapien
ataccatatggaacaaaccctttatgtgagtgt

SEQ ID NO: 813360 - DNA, 33 bp, Homo sapien
ataccatatggaacaagccctttatgtgagtgt

SEQ ID NO: 813361 - DNA, 33 bp, Homo sapien
cacttcgtccttaaagaaactcttgaagcagac

SEQ ID NO: 813362 - DNA, 33 bp, Homo sapien
cacttcgtccttaaagcaactcttgaagcagac

SEQ ID NO: 813363 - DNA, 33 bp, Homo sapien
ctcttgcagctttccccggatcagagtttttgc

SEQ ID NO: 813364 - DNA, 33 bp, Homo sapien
ctcttgcagctttccctggatcagagtttttgc

SEQ ID NO: 813365 - DNA, 33 bp, Homo sapien
gaggaatggtgacaaacgacaaagtctatgaat

SEQ ID NO: 813366 - DNA, 33 bp, Homo sapien
gaggaatggtgacaaatgacaaagtctatgaat

SEQ ID NO: 813367 - DNA, 33 bp, Homo sapien
ccacataaggtttctacatgagaagagtgaggg

SEQ ID NO: 813368 - DNA, 33 bp, Homo sapien
ccacataaggtttctatatgagaagagtgaggg

SEQ ID NO: 813369 - DNA, 33 bp, Homo sapien
gtaggaatgaatgaatcaaagtaagaggagaaa

SEQ ID NO: 813370 - DNA, 33 bp, Homo sapien
gtaggaatgaatgaatgaaagtaagaggagaaa

SEQ ID NO: 813371 - DNA, 33 bp, Homo sapien
gaataaataaatgataaatttcaaaggccaagt

SEQ ID NO: 813372 - DNA, 33 bp, Homo sapien
gaataaataaatgatacatttcaaaggccaagt

SEQ ID NO: 813373 - DNA, 33 bp, Homo sapien
tgtaaattagggataaaaataggcatgaactct

SEQ ID NO: 813374 - DNA, 33 bp, Homo sapien
tgtaaattagggataataataggcatgaactct

SEQ ID NO: 813375 - DNA, 33 bp, Homo sapien
ccaacaaaagcaaataactcattgagaagctgg

SEQ ID NO: 813376 - DNA, 33 bp, Homo sapien
ccaacaaaagcaaatacctcattgagaagctgg

SEQ ID NO: 813377 - DNA, 33 bp, Homo sapien
tcaatccacagcttggccacatatttattcctc

SEQ ID NO: 813378 - DNA, 33 bp, Homo sapien
tcaatccacagcttggtcacatatttattcctc

SEQ ID NO: 813379 - DNA, 33 bp, Homo sapien
cagctgaagtacgtggaaatcccagggctcgac

SEQ ID NO: 813380 - DNA, 33 bp, Homo sapien
cagctgaagtacgtggcaatcccagggctcgac

SEQ ID NO: 813381 - DNA, 33 bp, Homo sapien
gatatcaccttcgccacgaattggtaagtggat

SEQ ID NO: 813382 - DNA, 33 bp, Homo sapien
gatatcaccttcgccatgaattggtaagtggat

SEQ ID NO: 813383 - DNA, 33 bp, Homo sapien
gttaaccacatctatacgcatgatcttaagtaa

SEQ ID NO: 813384 - DNA, 33 bp, Homo sapien
gttaaccacatctatatgcatgatcttaagtaa

SEQ ID NO: 813385 - DNA, 33 bp, Homo sapien
taggaatagacaccccagaatgtgtcaccactg

SEQ ID NO: 813386 - DNA, 33 bp, Homo sapien
taggaatagacaccccggaatgtgtcaccactg

SEQ ID NO: 813387 - DNA, 33 bp, Homo sapien
catataaaagacagacaacaatagctacatttg

SEQ ID NO: 813388 - DNA, 33 bp, Homo sapien
catataaaagacagacgacaatagctacatttg

SEQ ID NO: 813389 - DNA, 33 bp, Homo sapien
cccttctacttgaaccaaaaactgaggtgtttt

SEQ ID NO: 813390 - DNA, 33 bp, Homo sapien
cccttctacttgaacccaaaactgaggtgtttt

SEQ ID NO: 813391 - DNA, 33 bp, Homo sapien
actaagagtaagttacagcatagcttgtcagtt

SEQ ID NO: 813392 - DNA, 33 bp, Homo sapien
actaagagtaagttacggcatagcttgtcagtt

SEQ ID NO: 813393 - DNA, 33 bp, Homo sapien
tgacataccatgtgccaggatgagaaatacctc

SEQ ID NO: 813394 - DNA, 33 bp, Homo sapien
tgacataccatgtgccgggatgagaaatacctc

SEQ ID NO: 813395 - DNA, 33 bp, Homo sapien
tctctaagtaatgacacgggtgccgtcatcagg

SEQ ID NO: 813396 - DNA, 33 bp, Homo sapien
tctctaagtaatgacatgggtgccgtcatcagg

SEQ ID NO: 813397 - DNA, 33 bp, Homo sapien
tggttagaaacaaacaatggagaaagctagaat

SEQ ID NO: 813398 - DNA, 33 bp, Homo sapien
tggttagaaacaaacagtggagaaagctagaat

SEQ ID NO: 813399 - DNA, 33 bp, Homo sapien
aatagatgcttgtttaccttctcactttatttt

SEQ ID NO: 813400 - DNA, 33 bp, Homo sapien
aatagatgcttgtttatcttctcactttatttt

SEQ ID NO: 813401 - DNA, 33 bp, Homo sapien
cttcacaagtaatcacaaaaataatcagaaaat

SEQ ID NO: 813402 - DNA, 33 bp, Homo sapien
cttcacaagtaatcacgaaaataatcagaaaat

SEQ ID NO: 813403 - DNA, 33 bp, Homo sapien
ttcctgaccacagcaaatgtttcagaaatgcct

SEQ ID NO: 813404 - DNA, 33 bp, Homo sapien
ttcctgaccacagcaattgtttcagaaatgcct

SEQ ID NO: 813405 - DNA, 33 bp, Homo sapien
tctcacctcgttcccacaataactcgggagcct

SEQ ID NO: 813406 - DNA, 33 bp, Homo sapien
tctcacctcgttcccagaataactcgggagcct

SEQ ID NO: 813407 - DNA, 33 bp, Homo sapien
atggctaaggatagacagtaaaacaatagcaaa

SEQ ID NO: 813408 - DNA, 33 bp, Homo sapien
atggctaaggatagacggtaaaacaatagcaaa

SEQ ID NO: 813409 - DNA, 33 bp, Homo sapien
gtgagcacaagtaagacgatgatgttggcagga

SEQ ID NO: 813410 - DNA, 33 bp, Homo sapien
gtgagcacaagtaagatgatgatgttggcagga

SEQ ID NO: 813411 - DNA, 33 bp, Homo sapien
caagcagctgggcatgcagtccctagttcatca

SEQ ID NO: 813412 - DNA, 33 bp, Homo sapien
caagcagctgggcatgtagtccctagttcatca

SEQ ID NO: 813413 - DNA, 33 bp, Homo sapien
atgaagtctgcagttaaatccaattacctacct

SEQ ID NO: 813414 - DNA, 33 bp, Homo sapien
atgaagtctgcagttagatccaattacctacct

SEQ ID NO: 813415 - DNA, 33 bp, Homo sapien
tggtatataaataagtgaatgtgcagctgaaca

SEQ ID NO: 813416 - DNA, 33 bp, Homo sapien
tggtatataaataagttaatgtgcagctgaaca

SEQ ID NO: 813417 - DNA, 33 bp, Homo sapien
caattgaacgctacacaaaattcacatcagctt

SEQ ID NO: 813418 - DNA, 33 bp, Homo sapien
caattgaacgctacacgaaattcacatcagctt

SEQ ID NO: 813419 - DNA, 33 bp, Homo sapien
ttaactatttttaagcacacagtttagtggcac

SEQ ID NO: 813420 - DNA, 33 bp, Homo sapien
ttaactatttttaagcgcacagtttagtggcac

SEQ ID NO: 813421 - DNA, 33 bp, Homo sapien
cttacatgaagtgtccagcatatttccagaata

SEQ ID NO: 813422 - DNA, 33 bp, Homo sapien
cttacatgaagtgtccggcatatttccagaata

SEQ ID NO: 813423 - DNA, 33 bp, Homo sapien
tggcatggaagagcagcaccttatgttaggcag

SEQ ID NO: 813424 - DNA, 33 bp, Homo sapien
tggcatggaagagcaggaccttatgttaggcag

SEQ ID NO: 813425 - DNA, 33 bp, Homo sapien
cgcaaatacaatagccaagaggaactggacaga

SEQ ID NO: 813426 - DNA, 33 bp, Homo sapien
cgcaaatacaatagcctagaggaactggacaga

SEQ ID NO: 813427 - DNA, 33 bp, Homo sapien
caaggggaaacttccacgtagctcaggctttct

SEQ ID NO: 813428 - DNA, 33 bp, Homo sapien
caaggggaaacttccatgtagctcaggctttct

SEQ ID NO: 813429 - DNA, 33 bp, Homo sapien
ttgatttttgaaaatacgttgattttgtcttat

SEQ ID NO: 813430 - DNA, 33 bp, Homo sapien
ttgatttttgaaaatatgttgattttgtcttat

SEQ ID NO: 813431 - DNA, 33 bp, Homo sapien
gaactggaaatcctgaacacttaaaccacaggg

SEQ ID NO: 813432 - DNA, 33 bp, Homo sapien
gaactggaaatcctgagcacttaaaccacaggg

SEQ ID NO: 813433 - DNA, 33 bp, Homo sapien
aaacacagcaagttgacggcaataaaggggcta

SEQ ID NO: 813434 - DNA, 33 bp, Homo sapien
aaacacagcaagttgatggcaataaaggggcta

SEQ ID NO: 813435 - DNA, 33 bp, Homo sapien
tggcatttgaagtatgcatgggtttgctgatgt

SEQ ID NO: 813436 - DNA, 33 bp, Homo sapien
tggcatttgaagtatgtatgggtttgctgatgt

SEQ ID NO: 813437 - DNA, 33 bp, Homo sapien
ggtttgctgatgtcaacgagagggagaagggtt

SEQ ID NO: 813438 - DNA, 33 bp, Homo sapien
ggtttgctgatgtcaatgagagggagaagggtt

SEQ ID NO: 813439 - DNA, 33 bp, Homo sapien
agtgataatcaaagcaatgacttaggaatcctg

SEQ ID NO: 813440 - DNA, 33 bp, Homo sapien
agtgataatcaaagcagtgacttaggaatcctg

SEQ ID NO: 813441 - DNA, 33 bp, Homo sapien
gaagattttagagcaaattatccagtatctcac

SEQ ID NO: 813442 - DNA, 33 bp, Homo sapien
gaagattttagagcaacttatccagtatctcac

SEQ ID NO: 813443 - DNA, 33 bp, Homo sapien
actatgcattgaatgaacatccattaaatacat

SEQ ID NO: 813444 - DNA, 33 bp, Homo sapien
actatgcattgaatgagcatccattaaatacat

SEQ ID NO: 813445 - DNA, 33 bp, Homo sapien
attagagtcagaaaaccgaaggctcaagaaatc

SEQ ID NO: 813446 - DNA, 33 bp, Homo sapien
attagagtcagaaaactgaaggctcaagaaatc

SEQ ID NO: 813447 - DNA, 33 bp, Homo sapien
ttagttagtatccatcacttctaaccttgatta

SEQ ID NO: 813448 - DNA, 33 bp, Homo sapien
ttagttagtatccatcccttctaaccttgatta

SEQ ID NO: 813449 - DNA, 33 bp, Homo sapien
ctctgtttcatgtaacaattttgtaggcaaaac

SEQ ID NO: 813450 - DNA, 33 bp, Homo sapien
ctctgtttcatgtaaccattttgtaggcaaaac

SEQ ID NO: 813451 - DNA, 33 bp, Homo sapien
aatgggaaagataataaatgcttcactgtgatg

SEQ ID NO: 813452 - DNA, 33 bp, Homo sapien
aatgggaaagataatagatgcttcactgtgatg

SEQ ID NO: 813453 - DNA, 33 bp, Homo sapien
caccacgaatgaaagactactttaaccgcattt

SEQ ID NO: 813454 - DNA, 33 bp, Homo sapien
caccacgaatgaaagattactttaaccgcattt

SEQ ID NO: 813455 - DNA, 33 bp, Homo sapien
atagtaagccaggataataagtggaagagaaaa

SEQ ID NO: 813456 - DNA, 33 bp, Homo sapien
atagtaagccaggatagtaagtggaagagaaaa

SEQ ID NO: 813457 - DNA, 33 bp, Homo sapien
cttcttacctttcaccaagattctgcctaatca

SEQ ID NO: 813458 - DNA, 33 bp, Homo sapien
cttcttacctttcaccgagattctgcctaatca

SEQ ID NO: 813459 - DNA, 33 bp, Homo sapien
tgtgatgaataggttgaagatgggtgagaatgg

SEQ ID NO: 813460 - DNA, 33 bp, Homo sapien
tgtgatgaataggttggagatgggtgagaatgg

SEQ ID NO: 813461 - DNA, 33 bp, Homo sapien
tttttcctctcacctgaaatggttccacaaagc

SEQ ID NO: 813462 - DNA, 33 bp, Homo sapien
tttttcctctcacctggaatggttccacaaagc

SEQ ID NO: 813463 - DNA, 33 bp, Homo sapien
ctgctcctatgtcacaaaaaatacaaacacgca

SEQ ID NO: 813464 - DNA, 33 bp, Homo sapien
ctgctcctatgtcacagaaaatacaaacacgca

SEQ ID NO: 813465 - DNA, 33 bp, Homo sapien
gaatctgaatccaataaattctttagatctaac

SEQ ID NO: 813466 - DNA, 33 bp, Homo sapien
gaatctgaatccaatacattctttagatctaac

SEQ ID NO: 813467 - DNA, 33 bp, Homo sapien
tctcttgtattttccaaaaattgatagttagat

SEQ ID NO: 813468 - DNA, 33 bp, Homo sapien
tctcttgtattttccacaaattgatagttagat

SEQ ID NO: 813469 - DNA, 33 bp, Homo sapien
ttaatatctcactatcaaggttccctcaagtac

SEQ ID NO: 813470 - DNA, 33 bp, Homo sapien
ttaatatctcactatccaggttccctcaagtac

SEQ ID NO: 813471 - DNA, 33 bp, Homo sapien
ttctagttccttgctcactcttcttgctacatg

SEQ ID NO: 813472 - DNA, 33 bp, Homo sapien
ttctagttccttgctcgctcttcttgctacatg

SEQ ID NO: 813473 - DNA, 33 bp, Homo sapien
aaaggagcacggataacggtcacttcacagcct

SEQ ID NO: 813474 - DNA, 33 bp, Homo sapien
aaaggagcacggataatggtcacttcacagcct

SEQ ID NO: 813475 - DNA, 33 bp, Homo sapien
ggaaagactgcatgagacccatatggcagggca

SEQ ID NO: 813476 - DNA, 33 bp, Homo sapien
ggaaagactgcatgaggcccatatggcagggca

SEQ ID NO: 813477 - DNA, 33 bp, Homo sapien
aaaccatctgattgcacggcctctctcagtctt

SEQ ID NO: 813478 - DNA, 33 bp, Homo sapien
aaaccatctgattgcatggcctctctcagtctt

SEQ ID NO: 813479 - DNA, 33 bp, Homo sapien
catttgcaatctggtcaatctggtttccaactg

SEQ ID NO: 813480 - DNA, 33 bp, Homo sapien
catttgcaatctggtcgatctggtttccaactg

SEQ ID NO: 813481 - DNA, 33 bp, Homo sapien
atgtgctctggggcaacgctgtctgtccttcca

SEQ ID NO: 813482 - DNA, 33 bp, Homo sapien
atgtgctctggggcaatgctgtctgtccttcca

SEQ ID NO: 813483 - DNA, 33 bp, Homo sapien
ggattacagcttagtacaccaagacctagagaa

SEQ ID NO: 813484 - DNA, 33 bp, Homo sapien
ggattacagcttagtataccaagacctagagaa

SEQ ID NO: 813485 - DNA, 33 bp, Homo sapien
gaatggtaaattgatcactgattaatggaaagc

SEQ ID NO: 813486 - DNA, 33 bp, Homo sapien
gaatggtaaattgatctctgattaatggaaagc

SEQ ID NO: 813487 - DNA, 33 bp, Homo sapien
tagaccatacagtttcaccaaggcagggacttc

SEQ ID NO: 813488 - DNA, 33 bp, Homo sapien
tagaccatacagtttcgccaaggcagggacttc

SEQ ID NO: 813489 - DNA, 33 bp, Homo sapien
ctgaacaaacagaaaaatagattgatgcttgct

SEQ ID NO: 813490 - DNA, 33 bp, Homo sapien
ctgaacaaacagaaaagtagattgatgcttgct

SEQ ID NO: 813491 - DNA, 33 bp, Homo sapien
tgctctatctcagttgaacttgctgttttttct

SEQ ID NO: 813492 - DNA, 33 bp, Homo sapien
tgctctatctcagttgcacttgctgttttttct

SEQ ID NO: 813493 - DNA, 33 bp, Homo sapien
tatttacttgttgaggaaaccaaatcatttgtc

SEQ ID NO: 813494 - DNA, 33 bp, Homo sapien
tatttacttgttgagggaaccaaatcatttgtc

SEQ ID NO: 813495 - DNA, 33 bp, Homo sapien
cccaaattgattaagaaaacatacagccctaag

SEQ ID NO: 813496 - DNA, 33 bp, Homo sapien
cccaaattgattaagacaacatacagccctaag

SEQ ID NO: 813497 - DNA, 33 bp, Homo sapien
tctgggtctttccagagagcgtcacatagtagc

SEQ ID NO: 813498 - DNA, 33 bp, Homo sapien
tctgggtctttccagatagcgtcacatagtagc

SEQ ID NO: 813499 - DNA, 33 bp, Homo sapien
tcccacataaattttaagcaaagaggcttactt

SEQ ID NO: 813500 - DNA, 33 bp, Homo sapien
tcccacataaattttatgcaaagaggcttactt

SEQ ID NO: 813501 - DNA, 33 bp, Homo sapien
ctccagaatcttaggcaactatgtgcaaggagg

SEQ ID NO: 813502 - DNA, 33 bp, Homo sapien
ctccagaatcttaggcgactatgtgcaaggagg

SEQ ID NO: 813503 - DNA, 33 bp, Homo sapien
ggacatagacaaagtaaccctctcttaatcacc

SEQ ID NO: 813504 - DNA, 33 bp, Homo sapien
ggacatagacaaagtacccctctcttaatcacc

SEQ ID NO: 813505 - DNA, 33 bp, Homo sapien
caggatgcaataaagaacattcatggaacaaat

SEQ ID NO: 813506 - DNA, 33 bp, Homo sapien
caggatgcaataaagagcattcatggaacaaat

SEQ ID NO: 813507 - DNA, 33 bp, Homo sapien
ataataacggtatttacggtatgtatagagttc

SEQ ID NO: 813508 - DNA, 33 bp, Homo sapien
ataataacggtatttatggtatgtatagagttc

SEQ ID NO: 813509 - DNA, 33 bp, Homo sapien
gtaacaaagtgataaactggaagataagtcatc

SEQ ID NO: 813510 - DNA, 33 bp, Homo sapien
gtaacaaagtgataaagtggaagataagtcatc

SEQ ID NO: 813511 - DNA, 33 bp, Homo sapien
gacacagatgataacaatagtagacaaggacat

SEQ ID NO: 813512 - DNA, 33 bp, Homo sapien
gacacagatgataacattagtagacaaggacat

SEQ ID NO: 813513 - DNA, 33 bp, Homo sapien
acactagttgagttgcaaggccctctttccagg

SEQ ID NO: 813514 - DNA, 33 bp, Homo sapien
acactagttgagttgcgaggccctctttccagg

SEQ ID NO: 813515 - DNA, 33 bp, Homo sapien
gcccagaatgtgtctacaaatgtcatctaggag

SEQ ID NO: 813516 - DNA, 33 bp, Homo sapien
gcccagaatgtgtctagaaatgtcatctaggag

SEQ ID NO: 813517 - DNA, 33 bp, Homo sapien
ctgccagactgtgaccaatgttcctgtaaggcc

SEQ ID NO: 813518 - DNA, 33 bp, Homo sapien
ctgccagactgtgaccgatgttcctgtaaggcc

SEQ ID NO: 813519 - DNA, 33 bp, Homo sapien
gtgtgaagtaatgaggcccggcttagaagacta

SEQ ID NO: 813520 - DNA, 33 bp, Homo sapien
gtgtgaagtaatgaggtccggcttagaagacta

SEQ ID NO: 813521 - DNA, 33 bp, Homo sapien
tcagaattggaaggaccgaaaatattatcaaga

SEQ ID NO: 813522 - DNA, 33 bp, Homo sapien
tcagaattggaaggactgaaaatattatcaaga

SEQ ID NO: 813523 - DNA, 33 bp, Homo sapien
ataagtgggggccaaacattgagtacacatgga

SEQ ID NO: 813524 - DNA, 33 bp, Homo sapien
ataagtgggggccaaagattgagtacacatgga

SEQ ID NO: 813525 - DNA, 33 bp, Homo sapien
gaaaccagttatagaaaagcctctttgtagttt

SEQ ID NO: 813526 - DNA, 33 bp, Homo sapien
gaaaccagttatagaagagcctctttgtagttt

SEQ ID NO: 813527 - DNA, 33 bp, Homo sapien
tgaggccatttgggtacgttgtgcaaaaatcaa

SEQ ID NO: 813528 - DNA, 33 bp, Homo sapien
tgaggccatttgggtatgttgtgcaaaaatcaa

SEQ ID NO: 813529 - DNA, 33 bp, Homo sapien
cacccagctttctatacggtagagacatgagaa

SEQ ID NO: 813530 - DNA, 33 bp, Homo sapien
cacccagctttctatatggtagagacatgagaa

SEQ ID NO: 813531 - DNA, 33 bp, Homo sapien
attggctcatgtggtacagaagttgagaagtcc

SEQ ID NO: 813532 - DNA, 33 bp, Homo sapien
attggctcatgtggtatagaagttgagaagtcc

SEQ ID NO: 813533 - DNA, 33 bp, Homo sapien
ggctcacagttctgcaggttgtacaagggcacc

SEQ ID NO: 813534 - DNA, 33 bp, Homo sapien
ggctcacagttctgcatgttgtacaagggcacc

SEQ ID NO: 813535 - DNA, 33 bp, Homo sapien
cccattgatatgacctaagggggatctcttggg

SEQ ID NO: 813536 - DNA, 33 bp, Homo sapien
cccattgatatgacctgagggggatctcttggg

SEQ ID NO: 813537 - DNA, 33 bp, Homo sapien
gggatcaactgtctacgcaagctacagaagcac

SEQ ID NO: 813538 - DNA, 33 bp, Homo sapien
gggatcaactgtctactcaagctacagaagcac

SEQ ID NO: 813539 - DNA, 33 bp, Homo sapien
agaaaagaggcatttgcatttctctaagaatac

SEQ ID NO: 813540 - DNA, 33 bp, Homo sapien
agaaaagaggcatttgtatttctctaagaatac

SEQ ID NO: 813541 - DNA, 33 bp, Homo sapien
tgtgctattgaagttacggcattaatgctttct

SEQ ID NO: 813542 - DNA, 33 bp, Homo sapien
tgtgctattgaagttagggcattaatgctttct

SEQ ID NO: 813543 - DNA, 33 bp, Homo sapien
tctgacttaagctttccaaaatctggacacaca

SEQ ID NO: 813544 - DNA, 33 bp, Homo sapien
tctgacttaagctttctaaaatctggacacaca

SEQ ID NO: 813545 - DNA, 33 bp, Homo sapien
tttgccataacaggatcaattttgttatcatgg

SEQ ID NO: 813546 - DNA, 33 bp, Homo sapien
tttgccataacaggatgaattttgttatcatgg

SEQ ID NO: 813547 - DNA, 33 bp, Homo sapien
aaatgccgagacaagacggctaaattaaatgac

SEQ ID NO: 813548 - DNA, 33 bp, Homo sapien
aaatgccgagacaagatggctaaattaaatgac

SEQ ID NO: 813549 - DNA, 33 bp, Homo sapien
gagtgctactgatggaaggacttcgaccagaac

SEQ ID NO: 813550 - DNA, 33 bp, Homo sapien
gagtgctactgatggagggacttcgaccagaac

SEQ ID NO: 813551 - DNA, 33 bp, Homo sapien
caattggtttctatccccggctatctcctgtaa

SEQ ID NO: 813552 - DNA, 33 bp, Homo sapien
caattggtttctatcctcggctatctcctgtaa

SEQ ID NO: 813553 - DNA, 33 bp, Homo sapien
tcattctttgtttcccagactctccaatactcc

SEQ ID NO: 813554 - DNA, 33 bp, Homo sapien
tcattctttgtttcccggactctccaatactcc

SEQ ID NO: 813555 - DNA, 33 bp, Homo sapien
tgcaaatatttctgtaagatagagccctaaaaa

SEQ ID NO: 813556 - DNA, 33 bp, Homo sapien
tgcaaatatttctgtaggatagagccctaaaaa

SEQ ID NO: 813557 - DNA, 33 bp, Homo sapien
ttcaaaaatctgtttccaaggaaaggagatgta

SEQ ID NO: 813558 - DNA, 33 bp, Homo sapien
ttcaaaaatctgtttctaaggaaaggagatgta

SEQ ID NO: 813559 - DNA, 33 bp, Homo sapien
aaggtcaagggtctaacacaaggacaggactac

SEQ ID NO: 813560 - DNA, 33 bp, Homo sapien
aaggtcaagggtctaatacaaggacaggactac

SEQ ID NO: 813561 - DNA, 33 bp, Homo sapien
agttattgagtaaatcccagaatccaagctcaa

SEQ ID NO: 813562 - DNA, 33 bp, Homo sapien
agttattgagtaaatctcagaatccaagctcaa

SEQ ID NO: 813563 - DNA, 33 bp, Homo sapien
tgatgtaggtaactaactccattgataaaggga

SEQ ID NO: 813564 - DNA, 33 bp, Homo sapien
tgatgtaggtaactaattccattgataaaggga

SEQ ID NO: 813565 - DNA, 33 bp, Homo sapien
tgcatatttaagtcacaggaaatggtctttata

SEQ ID NO: 813566 - DNA, 33 bp, Homo sapien
tgcatatttaagtcacgggaaatggtctttata

SEQ ID NO: 813567 - DNA, 33 bp, Homo sapien
acccaagacccttctacaactcctgctttcagt

SEQ ID NO: 813568 - DNA, 33 bp, Homo sapien
acccaagacccttctataactcctgctttcagt

SEQ ID NO: 813569 - DNA, 33 bp, Homo sapien
tcaaaagtacagtcacaagaaatgttaggtgtt

SEQ ID NO: 813570 - DNA, 33 bp, Homo sapien
tcaaaagtacagtcacgagaaatgttaggtgtt

SEQ ID NO: 813571 - DNA, 33 bp, Homo sapien
catgtttcaggcactacggtacttgctgggaga

SEQ ID NO: 813572 - DNA, 33 bp, Homo sapien
catgtttcaggcactatggtacttgctgggaga

SEQ ID NO: 813573 - DNA, 33 bp, Homo sapien
agggctgtaaatgctacgcaagtggtatgtgcc

SEQ ID NO: 813574 - DNA, 33 bp, Homo sapien
agggctgtaaatgctatgcaagtggtatgtgcc

SEQ ID NO: 813575 - DNA, 33 bp, Homo sapien
aaaaggtagaaacaaacgatgcatttcagtgag

SEQ ID NO: 813576 - DNA, 33 bp, Homo sapien
aaaaggtagaaacaaaggatgcatttcagtgag

SEQ ID NO: 813577 - DNA, 33 bp, Homo sapien
aaaatcagtttctatacacacaccagtagtcag

SEQ ID NO: 813578 - DNA, 33 bp, Homo sapien
aaaatcagtttctatatacacaccagtagtcag

SEQ ID NO: 813579 - DNA, 33 bp, Homo sapien
gcctctaacaatcccactgcatgcagacatcct

SEQ ID NO: 813580 - DNA, 33 bp, Homo sapien
gcctctaacaatcccattgcatgcagacatcct

SEQ ID NO: 813581 - DNA, 33 bp, Homo sapien
gtgcttttactgttgaatattacatttagtagc

SEQ ID NO: 813582 - DNA, 33 bp, Homo sapien
gtgcttttactgttgagtattacatttagtagc

SEQ ID NO: 813583 - DNA, 33 bp, Homo sapien
gtgggtgtattacaaaagagaaaggccaacagt

SEQ ID NO: 813584 - DNA, 33 bp, Homo sapien
gtgggtgtattacaaacgagaaaggccaacagt

SEQ ID NO: 813585 - DNA, 33 bp, Homo sapien
tcttaagttgccataaaaacaacaaacccagtt

SEQ ID NO: 813586 - DNA, 33 bp, Homo sapien
tcttaagttgccataataacaacaaacccagtt

SEQ ID NO: 813587 - DNA, 33 bp, Homo sapien
ggatgcttcagtggaaaggagcacaggctgtcc

SEQ ID NO: 813588 - DNA, 33 bp, Homo sapien
ggatgcttcagtggaacggagcacaggctgtcc

SEQ ID NO: 813589 - DNA, 33 bp, Homo sapien
caaatggtagaattagacagccagggccttgta

SEQ ID NO: 813590 - DNA, 33 bp, Homo sapien
caaatggtagaattaggcagccagggccttgta

SEQ ID NO: 813591 - DNA, 33 bp, Homo sapien
gcggtcacctgcaggaatagccatctttggtcc

SEQ ID NO: 813592 - DNA, 33 bp, Homo sapien
gcggtcacctgcaggagtagccatctttggtcc

SEQ ID NO: 813593 - DNA, 33 bp, Homo sapien
aagtggttatctcatgaaaacggttagcaaaaa

SEQ ID NO: 813594 - DNA, 33 bp, Homo sapien
aagtggttatctcatggaaacggttagcaaaaa

SEQ ID NO: 813595 - DNA, 33 bp, Homo sapien
gcagaagtaaaaatgccagaaaaaagtcataag

SEQ ID NO: 813596 - DNA, 33 bp, Homo sapien
gcagaagtaaaaatgctagaaaaaagtcataag

SEQ ID NO: 813597 - DNA, 33 bp, Homo sapien
tgtctagttggtgaaaaggggcaactaaaggag

SEQ ID NO: 813598 - DNA, 33 bp, Homo sapien
tgtctagttggtgaaacggggcaactaaaggag

SEQ ID NO: 813599 - DNA, 33 bp, Homo sapien
ctgctctcatggagacaatagtgaaatgtgagg

SEQ ID NO: 813600 - DNA, 33 bp, Homo sapien
ctgctctcatggagacgatagtgaaatgtgagg

SEQ ID NO: 813601 - DNA, 33 bp, Homo sapien
tcctgactagagtaaacggacttactgctattc

SEQ ID NO: 813602 - DNA, 33 bp, Homo sapien
tcctgactagagtaaatggacttactgctattc

SEQ ID NO: 813603 - DNA, 33 bp, Homo sapien
caggggtggtaacaacagcacgcaagcacagcc

SEQ ID NO: 813604 - DNA, 33 bp, Homo sapien
caggggtggtaacaacggcacgcaagcacagcc

SEQ ID NO: 813605 - DNA, 33 bp, Homo sapien
atgcaggagctgtgtaaggtgcaggggctgtgt

SEQ ID NO: 813606 - DNA, 33 bp, Homo sapien
atgcaggagctgtgtagggtgcaggggctgtgt

SEQ ID NO: 813607 - DNA, 33 bp, Homo sapien
gttttaaagatggaaacgatgtggatatgtaga

SEQ ID NO: 813608 - DNA, 33 bp, Homo sapien
gttttaaagatggaaaggatgtggatatgtaga

SEQ ID NO: 813609 - DNA, 33 bp, Homo sapien
tgtttggttgttttcaagggacaggatcaattc

SEQ ID NO: 813610 - DNA, 33 bp, Homo sapien
tgtttggttgttttcatgggacaggatcaattc

SEQ ID NO: 813611 - DNA, 33 bp, Homo sapien
cagagggagagagagacaagagttagtgtggat

SEQ ID NO: 813612 - DNA, 33 bp, Homo sapien
cagagggagagagagataagagttagtgtggat

SEQ ID NO: 813613 - DNA, 33 bp, Homo sapien
agggagaggaaaagtacgtctttacaagcagag

SEQ ID NO: 813614 - DNA, 33 bp, Homo sapien
agggagaggaaaagtatgtctttacaagcagag

SEQ ID NO: 813615 - DNA, 33 bp, Homo sapien
acactgcactaaccaaactcaaaaggtgttgaa

SEQ ID NO: 813616 - DNA, 33 bp, Homo sapien
acactgcactaaccaagctcaaaaggtgttgaa

SEQ ID NO: 813617 - DNA, 33 bp, Homo sapien
cactgtgagtgatcaaatagccaagcagggcgg

SEQ ID NO: 813618 - DNA, 33 bp, Homo sapien
cactgtgagtgatcaagtagccaagcagggcgg

SEQ ID NO: 813619 - DNA, 33 bp, Homo sapien
tgaggctaataaccaccgctggcaaatttggga

SEQ ID NO: 813620 - DNA, 33 bp, Homo sapien
tgaggctaataaccactgctggcaaatttggga

SEQ ID NO: 813621 - DNA, 33 bp, Homo sapien
aaaaagttctctaccacggaagttggataaaag

SEQ ID NO: 813622 - DNA, 33 bp, Homo sapien
aaaaagttctctaccagggaagttggataaaag

SEQ ID NO: 813623 - DNA, 33 bp, Homo sapien
ccagaatacctgcttacctactcatcttggata

SEQ ID NO: 813624 - DNA, 33 bp, Homo sapien
ccagaatacctgcttatctactcatcttggata

SEQ ID NO: 813625 - DNA, 33 bp, Homo sapien
tgcacctagagcaggaagagaaatcaatatttc

SEQ ID NO: 813626 - DNA, 33 bp, Homo sapien
tgcacctagagcaggaggagaaatcaatatttc

SEQ ID NO: 813627 - DNA, 33 bp, Homo sapien
ttgtgcttccgaggtagggaaaaggaatgagct

SEQ ID NO: 813628 - DNA, 33 bp, Homo sapien
ttgtgcttccgaggtatggaaaaggaatgagct

SEQ ID NO: 813629 - DNA, 33 bp, Homo sapien
cagcaggctgaatcacaaaagctggccacatac

SEQ ID NO: 813630 - DNA, 33 bp, Homo sapien
cagcaggctgaatcaccaaagctggccacatac

SEQ ID NO: 813631 - DNA, 33 bp, Homo sapien
agcagcaactctttgcaatgaatttctacagct

SEQ ID NO: 813632 - DNA, 33 bp, Homo sapien
agcagcaactctttgcgatgaatttctacagct

SEQ ID NO: 813633 - DNA, 33 bp, Homo sapien
aatgctcggtagtcaacgagttttgggacgtgc

SEQ ID NO: 813634 - DNA, 33 bp, Homo sapien
aatgctcggtagtcaatgagttttgggacgtgc

SEQ ID NO: 813635 - DNA, 33 bp, Homo sapien
aacagagctcagaacacaatgagttaaagggcc

SEQ ID NO: 813636 - DNA, 33 bp, Homo sapien
aacagagctcagaacataatgagttaaagggcc

SEQ ID NO: 813637 - DNA, 33 bp, Homo sapien
tccctggggatgaagacaaagtcacatttgcct

SEQ ID NO: 813638 - DNA, 33 bp, Homo sapien
tccctggggatgaagataaagtcacatttgcct

SEQ ID NO: 813639 - DNA, 33 bp, Homo sapien
tcagtgaaaacaactaccaaagctggattttaa

SEQ ID NO: 813640 - DNA, 33 bp, Homo sapien
tcagtgaaaacaactatcaaagctggattttaa

SEQ ID NO: 813641 - DNA, 33 bp, Homo sapien
aaactaagttttatggcccagtatgcatgggac

SEQ ID NO: 813642 - DNA, 33 bp, Homo sapien
aaactaagttttatggtccagtatgcatgggac

SEQ ID NO: 813643 - DNA, 33 bp, Homo sapien
gtttctatctcaaaataagttcaaatacgtgtc

SEQ ID NO: 813644 - DNA, 33 bp, Homo sapien
gtttctatctcaaaatgagttcaaatacgtgtc

SEQ ID NO: 813645 - DNA, 33 bp, Homo sapien
gactggacattgcctaaaagggtaggaaggggt

SEQ ID NO: 813646 - DNA, 33 bp, Homo sapien
gactggacattgcctagaagggtaggaaggggt

SEQ ID NO: 813647 - DNA, 33 bp, Homo sapien
gagcagtaggatgaccaagggcccaccaggctg

SEQ ID NO: 813648 - DNA, 33 bp, Homo sapien
gagcagtaggatgaccgagggcccaccaggctg

SEQ ID NO: 813649 - DNA, 33 bp, Homo sapien
tttgaaatttgggaacacccaaggaatgtggag

SEQ ID NO: 813650 - DNA, 33 bp, Homo sapien
tttgaaatttgggaacgcccaaggaatgtggag

SEQ ID NO: 813651 - DNA, 33 bp, Homo sapien
gaaccgtctctttcacaaatcctttgcatgcct

SEQ ID NO: 813652 - DNA, 33 bp, Homo sapien
gaaccgtctctttcacgaatcctttgcatgcct

SEQ ID NO: 813653 - DNA, 33 bp, Homo sapien
gggagagaatacacatcactccttgactcttgt

SEQ ID NO: 813654 - DNA, 33 bp, Homo sapien
gggagagaatacacatgactccttgactcttgt

SEQ ID NO: 813655 - DNA, 33 bp, Homo sapien
tagttgtctttatgaaaatgctgatttctttct

SEQ ID NO: 813656 - DNA, 33 bp, Homo sapien
tagttgtctttatgaagatgctgatttctttct

SEQ ID NO: 813657 - DNA, 33 bp, Homo sapien
gatttctttcttcttacagttcaggaagcaaaa

SEQ ID NO: 813658 - DNA, 33 bp, Homo sapien
gatttctttcttcttatagttcaggaagcaaaa

SEQ ID NO: 813659 - DNA, 33 bp, Homo sapien
taaagccattagcagaatctagtacatagtcaa

SEQ ID NO: 813660 - DNA, 33 bp, Homo sapien
taaagccattagcagagtctagtacatagtcaa

SEQ ID NO: 813661 - DNA, 33 bp, Homo sapien
ccacagattaggctgcagatatttcacggttgg

SEQ ID NO: 813662 - DNA, 33 bp, Homo sapien
ccacagattaggctgcggatatttcacggttgg

SEQ ID NO: 813663 - DNA, 33 bp, Homo sapien
tcagattttcaaagtaacttggaaatatcaagg

SEQ ID NO: 813664 - DNA, 33 bp, Homo sapien
tcagattttcaaagtatcttggaaatatcaagg

SEQ ID NO: 813665 - DNA, 33 bp, Homo sapien
accccctcaataatcccctaaattacacatttg

SEQ ID NO: 813666 - DNA, 33 bp, Homo sapien
accccctcaataatcctctaaattacacatttg

SEQ ID NO: 813667 - DNA, 33 bp, Homo sapien
ctaaatagtgttaggacgttcagttattcagtt

SEQ ID NO: 813668 - DNA, 33 bp, Homo sapien
ctaaatagtgttaggatgttcagttattcagtt

SEQ ID NO: 813669 - DNA, 33 bp, Homo sapien
cagtgttttaaatcccaccagagatcttcaagg

SEQ ID NO: 813670 - DNA, 33 bp, Homo sapien
cagtgttttaaatcccgccagagatcttcaagg

SEQ ID NO: 813671 - DNA, 33 bp, Homo sapien
ctttcaaacagagtgaccagtgttggtgccagt

SEQ ID NO: 813672 - DNA, 33 bp, Homo sapien
ctttcaaacagagtgatcagtgttggtgccagt

SEQ ID NO: 813673 - DNA, 33 bp, Homo sapien
gatgcctccaaactcaaagggacttgtctgctg

SEQ ID NO: 813674 - DNA, 33 bp, Homo sapien
gatgcctccaaactcagagggacttgtctgctg

SEQ ID NO: 813675 - DNA, 33 bp, Homo sapien
tgatcacctaattagcaagatagcattttcctg

SEQ ID NO: 813676 - DNA, 33 bp, Homo sapien
tgatcacctaattagcgagatagcattttcctg

SEQ ID NO: 813677 - DNA, 33 bp, Homo sapien
ggtgccagcaccaaacactcccagaaggcagag

SEQ ID NO: 813678 - DNA, 33 bp, Homo sapien
ggtgccagcaccaaacgctcccagaaggcagag

SEQ ID NO: 813679 - DNA, 33 bp, Homo sapien
catactagccaccaaaaagttgcaaattacaca

SEQ ID NO: 813680 - DNA, 33 bp, Homo sapien
catactagccaccaaagagttgcaaattacaca

SEQ ID NO: 813681 - DNA, 33 bp, Homo sapien
tcaaagtcagaatggaaagcatgtaccaaccaa

SEQ ID NO: 813682 - DNA, 33 bp, Homo sapien
tcaaagtcagaatggagagcatgtaccaaccaa

SEQ ID NO: 813683 - DNA, 33 bp, Homo sapien
aaagatataggcacaactatttccatccctctt

SEQ ID NO: 813684 - DNA, 33 bp, Homo sapien
aaagatataggcacaattatttccatccctctt

SEQ ID NO: 813685 - DNA, 33 bp, Homo sapien
gctcagagatgttaaagaagatcaccaaagtaa

SEQ ID NO: 813686 - DNA, 33 bp, Homo sapien
gctcagagatgttaaataagatcaccaaagtaa

SEQ ID NO: 813687 - DNA, 33 bp, Homo sapien
aaattacttaactttccaggccattaggttttt

SEQ ID NO: 813688 - DNA, 33 bp, Homo sapien
aaattacttaactttctaggccattaggttttt

SEQ ID NO: 813689 - DNA, 33 bp, Homo sapien
tcacatggagaaggaagaattaccaagtcaata

SEQ ID NO: 813690 - DNA, 33 bp, Homo sapien
tcacatggagaaggaataattaccaagtcaata

SEQ ID NO: 813691 - DNA, 33 bp, Homo sapien
gagaacaaagcctctccctctcaggatgtgctc

SEQ ID NO: 813692 - DNA, 33 bp, Homo sapien
gagaacaaagcctctctctctcaggatgtgctc

SEQ ID NO: 813693 - DNA, 33 bp, Homo sapien
aaggtacaaagagagacgacagccccactatga

SEQ ID NO: 813694 - DNA, 33 bp, Homo sapien
aaggtacaaagagagatgacagccccactatga

SEQ ID NO: 813695 - DNA, 33 bp, Homo sapien
attatttctttcataactgagaaagtgcaagcc

SEQ ID NO: 813696 - DNA, 33 bp, Homo sapien
attatttctttcataattgagaaagtgcaagcc

SEQ ID NO: 813697 - DNA, 33 bp, Homo sapien
gcaggatgtcagccgaacatgaaaggccagtgt

SEQ ID NO: 813698 - DNA, 33 bp, Homo sapien
gcaggatgtcagccgatcatgaaaggccagtgt

SEQ ID NO: 813699 - DNA, 33 bp, Homo sapien
gccataaaattgactacagccagtgtccttcaa

SEQ ID NO: 813700 - DNA, 33 bp, Homo sapien
gccataaaattgactatagccagtgtccttcaa

SEQ ID NO: 813701 - DNA, 33 bp, Homo sapien
tccaactccttaactcaaggacaacacagtctg

SEQ ID NO: 813702 - DNA, 33 bp, Homo sapien
tccaactccttaactcgaggacaacacagtctg

SEQ ID NO: 813703 - DNA, 33 bp, Homo sapien
gcccagagatagtcaaattcagcaattgagaga

SEQ ID NO: 813704 - DNA, 33 bp, Homo sapien
gcccagagatagtcaacttcagcaattgagaga

SEQ ID NO: 813705 - DNA, 33 bp, Homo sapien
ttcccctagctgtaaactctgctctatgactga

SEQ ID NO: 813706 - DNA, 33 bp, Homo sapien
ttcccctagctgtaaattctgctctatgactga

SEQ ID NO: 813707 - DNA, 33 bp, Homo sapien
caggaagctggtgttacgtaagcacaaggaaaa

SEQ ID NO: 813708 - DNA, 33 bp, Homo sapien
caggaagctggtgttatgtaagcacaaggaaaa

SEQ ID NO: 813709 - DNA, 33 bp, Homo sapien
gtcttttccattgggacgtcatctttcttcttt

SEQ ID NO: 813710 - DNA, 33 bp, Homo sapien
gtcttttccattgggatgtcatctttcttcttt

SEQ ID NO: 813711 - DNA, 33 bp, Homo sapien
tccttaaggatttaccacctaactatattttct

SEQ ID NO: 813712 - DNA, 33 bp, Homo sapien
tccttaaggatttaccgcctaactatattttct

SEQ ID NO: 813713 - DNA, 33 bp, Homo sapien
ctctagttgagataccacacataaatcccatta

SEQ ID NO: 813714 - DNA, 33 bp, Homo sapien
ctctagttgagataccgcacataaatcccatta

SEQ ID NO: 813715 - DNA, 33 bp, Homo sapien
aaggtcattctgttagaactctagttgagatac

SEQ ID NO: 813716 - DNA, 33 bp, Homo sapien
aaggtcattctgttagcactctagttgagatac

SEQ ID NO: 813717 - DNA, 33 bp, Homo sapien
attcctgggaattaaacagtaatgcaaagaggc

SEQ ID NO: 813718 - DNA, 33 bp, Homo sapien
attcctgggaattaaatagtaatgcaaagaggc

SEQ ID NO: 813719 - DNA, 33 bp, Homo sapien
taagaacacacactgccagttagaaggtgctgg

SEQ ID NO: 813720 - DNA, 33 bp, Homo sapien
taagaacacacactgctagttagaaggtgctgg

SEQ ID NO: 813721 - DNA, 33 bp, Homo sapien
actaaaagaatataaccgcattgactgtaacac

SEQ ID NO: 813722 - DNA, 33 bp, Homo sapien
actaaaagaatataactgcattgactgtaacac

SEQ ID NO: 813723 - DNA, 33 bp, Homo sapien
gaaataatgaatagaccactgaggccaagtgct

SEQ ID NO: 813724 - DNA, 33 bp, Homo sapien
gaaataatgaatagactactgaggccaagtgct

SEQ ID NO: 813725 - DNA, 33 bp, Homo sapien
tcagtcaaaccacggacattaattattgagtat

SEQ ID NO: 813726 - DNA, 33 bp, Homo sapien
tcagtcaaaccacggagattaattattgagtat

SEQ ID NO: 813727 - DNA, 33 bp, Homo sapien
tggattccactgagtagaaaaaataaaattagt

SEQ ID NO: 813728 - DNA, 33 bp, Homo sapien
tggattccactgagtataaaaaataaaattagt

SEQ ID NO: 813729 - DNA, 33 bp, Homo sapien
accaacaaggaaagagaatagttaatggcaact

SEQ ID NO: 813730 - DNA, 33 bp, Homo sapien
accaacaaggaaagagtatagttaatggcaact

SEQ ID NO: 813731 - DNA, 33 bp, Homo sapien
caacacacgaattagaaagatttagtaacttgc

SEQ ID NO: 813732 - DNA, 33 bp, Homo sapien
caacacacgaattagagagatttagtaacttgc

SEQ ID NO: 813733 - DNA, 33 bp, Homo sapien
ccagcgctaaattgagcataccagcaagggtgg

SEQ ID NO: 813734 - DNA, 33 bp, Homo sapien
ccagcgctaaattgagtataccagcaagggtgg

SEQ ID NO: 813735 - DNA, 33 bp, Homo sapien
gtaggccagaggaaaaagttcctagtggacatg

SEQ ID NO: 813736 - DNA, 33 bp, Homo sapien
gtaggccagaggaaaaggttcctagtggacatg

SEQ ID NO: 813737 - DNA, 33 bp, Homo sapien
gctatcctcatgagaacatgagctccaggaaag

SEQ ID NO: 813738 - DNA, 33 bp, Homo sapien
gctatcctcatgagaatatgagctccaggaaag

SEQ ID NO: 813739 - DNA, 33 bp, Homo sapien
gtactgccagtcctatcagccttttgtttgatg

SEQ ID NO: 813740 - DNA, 33 bp, Homo sapien
gtactgccagtcctatgagccttttgtttgatg

SEQ ID NO: 813741 - DNA, 33 bp, Homo sapien
ctgctgcctaccaaatgaagtcataaatgcatt

SEQ ID NO: 813742 - DNA, 33 bp, Homo sapien
ctgctgcctaccaaattaagtcataaatgcatt

SEQ ID NO: 813743 - DNA, 33 bp, Homo sapien
tgaaatcatacaattcaaggtcatttgtgtctg

SEQ ID NO: 813744 - DNA, 33 bp, Homo sapien
tgaaatcatacaattcgaggtcatttgtgtctg

SEQ ID NO: 813745 - DNA, 33 bp, Homo sapien
catgctccctttctcaccacaaaagctaaattc

SEQ ID NO: 813746 - DNA, 33 bp, Homo sapien
catgctccctttctcagcacaaaagctaaattc

SEQ ID NO: 813747 - DNA, 33 bp, Homo sapien
tgattagtgatgttgagaatttagatagaatat

SEQ ID NO: 813748 - DNA, 33 bp, Homo sapien
tgattagtgatgttgataatttagatagaatat

SEQ ID NO: 813749 - DNA, 33 bp, Homo sapien
ggcctagcagaatgacaagagtttcgcagactg

SEQ ID NO: 813750 - DNA, 33 bp, Homo sapien
ggcctagcagaatgacgagagtttcgcagactg

SEQ ID NO: 813751 - DNA, 33 bp, Homo sapien
aaggacaacgaacaaccggaaagatggcctagc

SEQ ID NO: 813752 - DNA, 33 bp, Homo sapien
aaggacaacgaacaactggaaagatggcctagc

SEQ ID NO: 813753 - DNA, 33 bp, Homo sapien
ttgagtgcctgctacacaccacggatggaagga

SEQ ID NO: 813754 - DNA, 33 bp, Homo sapien
ttgagtgcctgctacataccacggatggaagga

SEQ ID NO: 813755 - DNA, 33 bp, Homo sapien
gagacatttcaaggaaaagcagtccaggggaag

SEQ ID NO: 813756 - DNA, 33 bp, Homo sapien
gagacatttcaaggaagagcagtccaggggaag

SEQ ID NO: 813757 - DNA, 33 bp, Homo sapien
aggctgctacatatcaataactttgcaaattct

SEQ ID NO: 813758 - DNA, 33 bp, Homo sapien
aggctgctacatatcagtaactttgcaaattct

SEQ ID NO: 813759 - DNA, 33 bp, Homo sapien
ccatatcagaatacaaaaatagcatttggatgg

SEQ ID NO: 813760 - DNA, 33 bp, Homo sapien
ccatatcagaatacaagaatagcatttggatgg

SEQ ID NO: 813761 - DNA, 33 bp, Homo sapien
tgtcacgatgatcacacgaagccccgcgtgtcc

SEQ ID NO: 813762 - DNA, 33 bp, Homo sapien
tgtcacgatgatcacatgaagccccgcgtgtcc

SEQ ID NO: 813763 - DNA, 33 bp, Homo sapien
ttagaaatttacaaaaccttacatcagtacatc

SEQ ID NO: 813764 - DNA, 33 bp, Homo sapien
ttagaaatttacaaaagcttacatcagtacatc

SEQ ID NO: 813765 - DNA, 33 bp, Homo sapien
taaggctaagataaaacacaacactgtttctca

SEQ ID NO: 813766 - DNA, 33 bp, Homo sapien
taaggctaagataaaatacaacactgtttctca

SEQ ID NO: 813767 - DNA, 33 bp, Homo sapien
atgcactggactgaaagaacatagtaatctgca

SEQ ID NO: 813768 - DNA, 33 bp, Homo sapien
atgcactggactgaaataacatagtaatctgca

SEQ ID NO: 813769 - DNA, 33 bp, Homo sapien
tgcagtggctgattcaacaaatggtaatgatta

SEQ ID NO: 813770 - DNA, 33 bp, Homo sapien
tgcagtggctgattcagcaaatggtaatgatta

SEQ ID NO: 813771 - DNA, 33 bp, Homo sapien
tcatttgtcacttgaacgtgaattgaccttttt

SEQ ID NO: 813772 - DNA, 33 bp, Homo sapien
tcatttgtcacttgaatgtgaattgaccttttt

SEQ ID NO: 813773 - DNA, 33 bp, Homo sapien
agatatgactggaaaaatagagaagggagtgag

SEQ ID NO: 813774 - DNA, 33 bp, Homo sapien
agatatgactggaaaagtagagaagggagtgag

SEQ ID NO: 813775 - DNA, 33 bp, Homo sapien
cacaggaagtgagtggcaattggctctaaacca

SEQ ID NO: 813776 - DNA, 33 bp, Homo sapien
cacaggaagtgagtggtaattggctctaaacca

SEQ ID NO: 813777 - DNA, 33 bp, Homo sapien
ggtcagctgaagtaaggaactccatacaccctt

SEQ ID NO: 813778 - DNA, 33 bp, Homo sapien
ggtcagctgaagtaagtaactccatacaccctt

SEQ ID NO: 813779 - DNA, 33 bp, Homo sapien
cgtctgcagcctccataatgatgtatgtttgct

SEQ ID NO: 813780 - DNA, 33 bp, Homo sapien
cgtctgcagcctccatgatgatgtatgtttgct

SEQ ID NO: 813781 - DNA, 33 bp, Homo sapien
ctggactctgcagtgcaccatccaccctggtac

SEQ ID NO: 813782 - DNA, 33 bp, Homo sapien
ctggactctgcagtgcgccatccaccctggtac

SEQ ID NO: 813783 - DNA, 33 bp, Homo sapien
ggaagagaaggggggaagtttatggtctgatct

SEQ ID NO: 813784 - DNA, 33 bp, Homo sapien
ggaagagaaggggggatgtttatggtctgatct

SEQ ID NO: 813785 - DNA, 33 bp, Homo sapien
acttggcttcctaatacataaagtgcaagatgg

SEQ ID NO: 813786 - DNA, 33 bp, Homo sapien
acttggcttcctaatatataaagtgcaagatgg

SEQ ID NO: 813787 - DNA, 33 bp, Homo sapien
acataccaatcgtgtacgaatttctgtttatta

SEQ ID NO: 813788 - DNA, 33 bp, Homo sapien
acataccaatcgtgtatgaatttctgtttatta

SEQ ID NO: 813789 - DNA, 33 bp, Homo sapien
tgatgtgcataggtacacagttagcccatgccc

SEQ ID NO: 813790 - DNA, 33 bp, Homo sapien
tgatgtgcataggtacgcagttagcccatgccc

SEQ ID NO: 813791 - DNA, 33 bp, Homo sapien
aataagagggttagacaaattagatcactttgt

SEQ ID NO: 813792 - DNA, 33 bp, Homo sapien
aataagagggttagaccaattagatcactttgt

SEQ ID NO: 813793 - DNA, 33 bp, Homo sapien
gcaaaagcaccagtaaccactaatattaattgc

SEQ ID NO: 813794 - DNA, 33 bp, Homo sapien
gcaaaagcaccagtaagcactaatattaattgc

SEQ ID NO: 813795 - DNA, 33 bp, Homo sapien
tatatagccaggcaaactggaaatgagtcaaaa

SEQ ID NO: 813796 - DNA, 33 bp, Homo sapien
tatatagccaggcaaattggaaatgagtcaaaa

SEQ ID NO: 813797 - DNA, 33 bp, Homo sapien
agtgtgggattcatacagaacctcttctaaaca

SEQ ID NO: 813798 - DNA, 33 bp, Homo sapien
agtgtgggattcatacggaacctcttctaaaca

SEQ ID NO: 813799 - DNA, 33 bp, Homo sapien
acagtcttctcccagaactcttaatcgaacttt

SEQ ID NO: 813800 - DNA, 33 bp, Homo sapien
acagtcttctcccagagctcttaatcgaacttt

SEQ ID NO: 813801 - DNA, 33 bp, Homo sapien
tatctgtctgtgggaccgataagagaaattcac

SEQ ID NO: 813802 - DNA, 33 bp, Homo sapien
tatctgtctgtgggactgataagagaaattcac

SEQ ID NO: 813803 - DNA, 33 bp, Homo sapien
cggattatggtctgcactgatcttctgtgagct

SEQ ID NO: 813804 - DNA, 33 bp, Homo sapien
cggattatggtctgcattgatcttctgtgagct

SEQ ID NO: 813805 - DNA, 33 bp, Homo sapien
tacccatgtgagatgaacttgttggtgtcaatg

SEQ ID NO: 813806 - DNA, 33 bp, Homo sapien
tacccatgtgagatgatcttgttggtgtcaatg

SEQ ID NO: 813807 - DNA, 33 bp, Homo sapien
gggctaatgtgactgaagaatagaactttattt

SEQ ID NO: 813808 - DNA, 33 bp, Homo sapien
gggctaatgtgactgaggaatagaactttattt

SEQ ID NO: 813809 - DNA, 33 bp, Homo sapien
cttcattcatggtaaaggagtaaaaatctgcct

SEQ ID NO: 813810 - DNA, 33 bp, Homo sapien
cttcattcatggtaaatgagtaaaaatctgcct

SEQ ID NO: 813811 - DNA, 33 bp, Homo sapien
attttgagtcatgaaaattaccttcctacagag

SEQ ID NO: 813812 - DNA, 33 bp, Homo sapien
attttgagtcatgaaagttaccttcctacagag

SEQ ID NO: 813813 - DNA, 33 bp, Homo sapien
agtgtttgtatatttacaggaaaggatcagaga

SEQ ID NO: 813814 - DNA, 33 bp, Homo sapien
agtgtttgtatatttataggaaaggatcagaga

SEQ ID NO: 813815 - DNA, 33 bp, Homo sapien
tatctcttcctcccaccgtcaagcccttctaac

SEQ ID NO: 813816 - DNA, 33 bp, Homo sapien
tatctcttcctcccactgtcaagcccttctaac

SEQ ID NO: 813817 - DNA, 33 bp, Homo sapien
gagaagggtgtagaaactaaataattcaccttt

SEQ ID NO: 813818 - DNA, 33 bp, Homo sapien
gagaagggtgtagaaagtaaataattcaccttt

SEQ ID NO: 813819 - DNA, 33 bp, Homo sapien
ccaaggtcagacagcccggaagcaaagagcagg

SEQ ID NO: 813820 - DNA, 33 bp, Homo sapien
ccaaggtcagacagcctggaagcaaagagcagg

SEQ ID NO: 813821 - DNA, 33 bp, Homo sapien
atactccgtagcacccaatcggttcagtcctat

SEQ ID NO: 813822 - DNA, 33 bp, Homo sapien
atactccgtagcaccccatcggttcagtcctat

SEQ ID NO: 813823 - DNA, 33 bp, Homo sapien
acctatttgcagatgacactacaatcaatttat

SEQ ID NO: 813824 - DNA, 33 bp, Homo sapien
acctatttgcagatgatactacaatcaatttat

SEQ ID NO: 813825 - DNA, 33 bp, Homo sapien
ggtaaataaagcattacacattgccaaaacaac

SEQ ID NO: 813826 - DNA, 33 bp, Homo sapien
ggtaaataaagcattatacattgccaaaacaac

SEQ ID NO: 813827 - DNA, 33 bp, Homo sapien
gaaagtagtatagaaactgattgtgctatgctg

SEQ ID NO: 813828 - DNA, 33 bp, Homo sapien
gaaagtagtatagaaagtgattgtgctatgctg

SEQ ID NO: 813829 - DNA, 33 bp, Homo sapien
gccaacatactgactgcagccatctaagattct

SEQ ID NO: 813830 - DNA, 33 bp, Homo sapien
gccaacatactgactgtagccatctaagattct

SEQ ID NO: 813831 - DNA, 33 bp, Homo sapien
ggagtccacgtgggcaagaagctaagcagcagt

SEQ ID NO: 813832 - DNA, 33 bp, Homo sapien
ggagtccacgtgggcaggaagctaagcagcagt

SEQ ID NO: 813833 - DNA, 33 bp, Homo sapien
caaatttactcagaaacggcaatggcatgctgc

SEQ ID NO: 813834 - DNA, 33 bp, Homo sapien
caaatttactcagaaatggcaatggcatgctgc

SEQ ID NO: 813835 - DNA, 33 bp, Homo sapien
gaccaatagaatgatcaatgcctttaggtctag

SEQ ID NO: 813836 - DNA, 33 bp, Homo sapien
gaccaatagaatgatccatgcctttaggtctag

SEQ ID NO: 813837 - DNA, 33 bp, Homo sapien
aaaggatgggacttgaaatttataggtgacaga

SEQ ID NO: 813838 - DNA, 33 bp, Homo sapien
aaaggatgggacttgacatttataggtgacaga

SEQ ID NO: 813839 - DNA, 33 bp, Homo sapien
aggtccctggaccctaccgtcaactgttctgaa

SEQ ID NO: 813840 - DNA, 33 bp, Homo sapien
aggtccctggaccctatcgtcaactgttctgaa

SEQ ID NO: 813841 - DNA, 33 bp, Homo sapien
atgttctaccaaacagaaaggattatcaaaaat

SEQ ID NO: 813842 - DNA, 33 bp, Homo sapien
atgttctaccaaacaggaaggattatcaaaaat

SEQ ID NO: 813843 - DNA, 33 bp, Homo sapien
caccatgtatgctgtaggtatttatgctgtatg

SEQ ID NO: 813844 - DNA, 33 bp, Homo sapien
caccatgtatgctgtatgtatttatgctgtatg

SEQ ID NO: 813845 - DNA, 33 bp, Homo sapien
cattccataaataaaaagtaaatgtcacaccgt

SEQ ID NO: 813846 - DNA, 33 bp, Homo sapien
cattccataaataaaaggtaaatgtcacaccgt

SEQ ID NO: 813847 - DNA, 33 bp, Homo sapien
aagaaatcaaattctaacctgatcatggcattc

SEQ ID NO: 813848 - DNA, 33 bp, Homo sapien
aagaaatcaaattctagcctgatcatggcattc

SEQ ID NO: 813849 - DNA, 33 bp, Homo sapien
agagacccgaatattaccacacaagtacaggtg

SEQ ID NO: 813850 - DNA, 33 bp, Homo sapien
agagacccgaatattagcacacaagtacaggtg

SEQ ID NO: 813851 - DNA, 33 bp, Homo sapien
agataaaatgggctgcaaatgtgtacagtaaga

SEQ ID NO: 813852 - DNA, 33 bp, Homo sapien
agataaaatgggctgcgaatgtgtacagtaaga

SEQ ID NO: 813853 - DNA, 33 bp, Homo sapien
cacctgtaatgtggtaacttaatcatatgctca

SEQ ID NO: 813854 - DNA, 33 bp, Homo sapien
cacctgtaatgtggtatcttaatcatatgctca

SEQ ID NO: 813855 - DNA, 33 bp, Homo sapien
aggtggaaatgaacaaagtgcctgggtacagca

SEQ ID NO: 813856 - DNA, 33 bp, Homo sapien
aggtggaaatgaacaaggtgcctgggtacagca

SEQ ID NO: 813857 - DNA, 33 bp, Homo sapien
gctatcatttttgcaaacatggtatgatcttat

SEQ ID NO: 813858 - DNA, 33 bp, Homo sapien
gctatcatttttgcaaccatggtatgatcttat

SEQ ID NO: 813859 - DNA, 33 bp, Homo sapien
tatagggccataacaaaggaagaaaaaaccaga

SEQ ID NO: 813860 - DNA, 33 bp, Homo sapien
tatagggccataacaagggaagaaaaaaccaga

SEQ ID NO: 813861 - DNA, 33 bp, Homo sapien
catttcaagggctaaacacatgttagatactag

SEQ ID NO: 813862 - DNA, 33 bp, Homo sapien
catttcaagggctaaatacatgttagatactag

SEQ ID NO: 813863 - DNA, 33 bp, Homo sapien
agatgagcccactggactcaaagataagtggaa

SEQ ID NO: 813864 - DNA, 33 bp, Homo sapien
agatgagcccactggattcaaagataagtggaa

SEQ ID NO: 813865 - DNA, 33 bp, Homo sapien
tgtgaaaagcacaaatcatgttttaaatgttga

SEQ ID NO: 813866 - DNA, 33 bp, Homo sapien
tgtgaaaagcacaaattatgttttaaatgttga

SEQ ID NO: 813867 - DNA, 33 bp, Homo sapien
aataactgtcttcatcaaaaacttagttcccca

SEQ ID NO: 813868 - DNA, 33 bp, Homo sapien
aataactgtcttcatcgaaaacttagttcccca

SEQ ID NO: 813869 - DNA, 33 bp, Homo sapien
ccatggtcctctctcaactatttatagtatttg

SEQ ID NO: 813870 - DNA, 33 bp, Homo sapien
ccatggtcctctctcacctatttatagtatttg

SEQ ID NO: 813871 - DNA, 33 bp, Homo sapien
gtcatagggctaagaaagggttgcacgagaaca

SEQ ID NO: 813872 - DNA, 33 bp, Homo sapien
gtcatagggctaagaaggggttgcacgagaaca

SEQ ID NO: 813873 - DNA, 33 bp, Homo sapien
tgctcatgaaattcaacaaatatttggtggttg

SEQ ID NO: 813874 - DNA, 33 bp, Homo sapien
tgctcatgaaattcaataaatatttggtggttg

SEQ ID NO: 813875 - DNA, 33 bp, Homo sapien
ggatggagaagccaatgagccgtctcatgtccc

SEQ ID NO: 813876 - DNA, 33 bp, Homo sapien
ggatggagaagccaattagccgtctcatgtccc

SEQ ID NO: 813877 - DNA, 33 bp, Homo sapien
ttatgaggttggagtacgttttgtggaccacgc

SEQ ID NO: 813878 - DNA, 33 bp, Homo sapien
ttatgaggttggagtatgttttgtggaccacgc

SEQ ID NO: 813879 - DNA, 33 bp, Homo sapien
tttactaaccaacatcaagcactgtggtaggct

SEQ ID NO: 813880 - DNA, 33 bp, Homo sapien
tttactaaccaacatcgagcactgtggtaggct

SEQ ID NO: 813881 - DNA, 33 bp, Homo sapien
tgagtaaacaaatagacggatggccactctaat

SEQ ID NO: 813882 - DNA, 33 bp, Homo sapien
tgagtaaacaaatagatggatggccactctaat

SEQ ID NO: 813883 - DNA, 33 bp, Homo sapien
gatggtgatctccaaacacagtgtgacctcaat

SEQ ID NO: 813884 - DNA, 33 bp, Homo sapien
gatggtgatctccaaatacagtgtgacctcaat

SEQ ID NO: 813885 - DNA, 33 bp, Homo sapien
agcagctgatgaaatacagaggtgtgagcttca

SEQ ID NO: 813886 - DNA, 33 bp, Homo sapien
agcagctgatgaaatatagaggtgtgagcttca

SEQ ID NO: 813887 - DNA, 33 bp, Homo sapien
ccccgagaagggagacaaacttgatcaacatta

SEQ ID NO: 813888 - DNA, 33 bp, Homo sapien
ccccgagaagggagactaacttgatcaacatta

SEQ ID NO: 813889 - DNA, 33 bp, Homo sapien
gcccagtggttaagggcaccaactctggagcca

SEQ ID NO: 813890 - DNA, 33 bp, Homo sapien
gcccagtggttaagggtaccaactctggagcca

SEQ ID NO: 813891 - DNA, 33 bp, Homo sapien
caaacactcaatccaaactttcaccttccactc

SEQ ID NO: 813892 - DNA, 33 bp, Homo sapien
caaacactcaatccaagctttcaccttccactc

SEQ ID NO: 813893 - DNA, 33 bp, Homo sapien
ccacgtaaagggcacacgccatgagacgaaggg

SEQ ID NO: 813894 - DNA, 33 bp, Homo sapien
ccacgtaaagggcacatgccatgagacgaaggg

SEQ ID NO: 813895 - DNA, 33 bp, Homo sapien
ccccttgccccgagtacaccagctgtcttgctg

SEQ ID NO: 813896 - DNA, 33 bp, Homo sapien
ccccttgccccgagtagaccagctgtcttgctg

SEQ ID NO: 813897 - DNA, 33 bp, Homo sapien
gctattgtttctgcccacttggcattccttcat

SEQ ID NO: 813898 - DNA, 33 bp, Homo sapien
gctattgtttctgcccgcttggcattccttcat

SEQ ID NO: 813899 - DNA, 33 bp, Homo sapien
cattccacagttaagaagtaatgaaagtagaca

SEQ ID NO: 813900 - DNA, 33 bp, Homo sapien
cattccacagttaagacgtaatgaaagtagaca

SEQ ID NO: 813901 - DNA, 33 bp, Homo sapien
ggcattgtgtggtagacagaaagacatcaatat

SEQ ID NO: 813902 - DNA, 33 bp, Homo sapien
ggcattgtgtggtagagagaaagacatcaatat

SEQ ID NO: 813903 - DNA, 33 bp, Homo sapien
ccttgctgactgtacacggcactttataagcac

SEQ ID NO: 813904 - DNA, 33 bp, Homo sapien
ccttgctgactgtacatggcactttataagcac

SEQ ID NO: 813905 - DNA, 33 bp, Homo sapien
ttacagtatattcaccaaatggaattctatgaa

SEQ ID NO: 813906 - DNA, 33 bp, Homo sapien
ttacagtatattcaccgaatggaattctatgaa

SEQ ID NO: 813907 - DNA, 33 bp, Homo sapien
tagtaagaccattgaccagcccagttttgaagg

SEQ ID NO: 813908 - DNA, 33 bp, Homo sapien
tagtaagaccattgactagcccagttttgaagg

SEQ ID NO: 813909 - DNA, 33 bp, Homo sapien
ggcatgaatcaaatcaacagatacataacagca

SEQ ID NO: 813910 - DNA, 33 bp, Homo sapien
ggcatgaatcaaatcatcagatacataacagca

SEQ ID NO: 813911 - DNA, 33 bp, Homo sapien
gttattacctattatcactgtgaactagattcc

SEQ ID NO: 813912 - DNA, 33 bp, Homo sapien
gttattacctattatccctgtgaactagattcc

SEQ ID NO: 813913 - DNA, 33 bp, Homo sapien
agacacaccggcagctcaaggagacgctctacg

SEQ ID NO: 813914 - DNA, 33 bp, Homo sapien
agacacaccggcagctgaaggagacgctctacg

SEQ ID NO: 813915 - DNA, 33 bp, Homo sapien
cagatataaagatggacgagacacagactctac

SEQ ID NO: 813916 - DNA, 33 bp, Homo sapien
cagatataaagatggatgagacacagactctac

SEQ ID NO: 813917 - DNA, 33 bp, Homo sapien
ctttcttcttcttaccatcctatgtacagcttc

SEQ ID NO: 813918 - DNA, 33 bp, Homo sapien
ctttcttcttcttaccgtcctatgtacagcttc

SEQ ID NO: 813919 - DNA, 33 bp, Homo sapien
aaggactaaagacagacctagaagaggcatgac

SEQ ID NO: 813920 - DNA, 33 bp, Homo sapien
aaggactaaagacagatctagaagaggcatgac

SEQ ID NO: 813921 - DNA, 33 bp, Homo sapien
aggcacagatattggaaaagcactatgtgggtc

SEQ ID NO: 813922 - DNA, 33 bp, Homo sapien
aggcacagatattggagaagcactatgtgggtc

SEQ ID NO: 813923 - DNA, 33 bp, Homo sapien
agctcagcttgggtctcaacctcccctcacctt

SEQ ID NO: 813924 - DNA, 33 bp, Homo sapien
agctcagcttgggtcttaacctcccctcacctt

SEQ ID NO: 813925 - DNA, 33 bp, Homo sapien
taagagtgacttttgcacaggctttcctgacaa

SEQ ID NO: 813926 - DNA, 33 bp, Homo sapien
taagagtgacttttgcccaggctttcctgacaa

SEQ ID NO: 813927 - DNA, 33 bp, Homo sapien
gggtttctacgtgctgacaatgcctgaatgccc

SEQ ID NO: 813928 - DNA, 33 bp, Homo sapien
gggtttctacgtgctggcaatgcctgaatgccc

SEQ ID NO: 813929 - DNA, 33 bp, Homo sapien
cattgcagaatctctaggtcttacaacagtgcc

SEQ ID NO: 813930 - DNA, 33 bp, Homo sapien
cattgcagaatctctatgtcttacaacagtgcc

SEQ ID NO: 813931 - DNA, 33 bp, Homo sapien
ctgagctgctgggttcactgaaaagagaggggc

SEQ ID NO: 813932 - DNA, 33 bp, Homo sapien
ctgagctgctgggttcgctgaaaagagaggggc

SEQ ID NO: 813933 - DNA, 33 bp, Homo sapien
acctcacatatactacactaattctaaggttcc

SEQ ID NO: 813934 - DNA, 33 bp, Homo sapien
acctcacatatactaccctaattctaaggttcc

SEQ ID NO: 813935 - DNA, 33 bp, Homo sapien
gttggctcttaacttaccaactctgagactgcg

SEQ ID NO: 813936 - DNA, 33 bp, Homo sapien
gttggctcttaacttatcaactctgagactgcg

SEQ ID NO: 813937 - DNA, 33 bp, Homo sapien
ctgaggatgggaacgaatcaaagcctggccttc

SEQ ID NO: 813938 - DNA, 33 bp, Homo sapien
ctgaggatgggaacgagtcaaagcctggccttc

SEQ ID NO: 813939 - DNA, 33 bp, Homo sapien
gtctgactctggagaacgtgaatggtcccatgt

SEQ ID NO: 813940 - DNA, 33 bp, Homo sapien
gtctgactctggagaatgtgaatggtcccatgt

SEQ ID NO: 813941 - DNA, 33 bp, Homo sapien
ccagactgcaaataagaagttgaagagaaagtc

SEQ ID NO: 813942 - DNA, 33 bp, Homo sapien
ccagactgcaaataaggagttgaagagaaagtc

SEQ ID NO: 813943 - DNA, 33 bp, Homo sapien
taacacatctgatcctaaaggtaatatgaaatc

SEQ ID NO: 813944 - DNA, 33 bp, Homo sapien
taacacatctgatcctcaaggtaatatgaaatc

SEQ ID NO: 813945 - DNA, 33 bp, Homo sapien
gccctggtcttcctcacgaatctgaatagtgga

SEQ ID NO: 813946 - DNA, 33 bp, Homo sapien
gccctggtcttcctcatgaatctgaatagtgga

SEQ ID NO: 813947 - DNA, 33 bp, Homo sapien
gagagcactggatgaagtggtccctaagggtcc

SEQ ID NO: 813948 - DNA, 33 bp, Homo sapien
gagagcactggatgaattggtccctaagggtcc

SEQ ID NO: 813949 - DNA, 33 bp, Homo sapien
actcagaccctttgggaataagaggtctgagca

SEQ ID NO: 813950 - DNA, 33 bp, Homo sapien
actcagaccctttggggataagaggtctgagca

SEQ ID NO: 813951 - DNA, 33 bp, Homo sapien
taaaacacagatctgcaaattttgagtctgctc

SEQ ID NO: 813952 - DNA, 33 bp, Homo sapien
taaaacacagatctgccaattttgagtctgctc

SEQ ID NO: 813953 - DNA, 33 bp, Homo sapien
tgtctgtctctaaataagaatcgaatcttgaca

SEQ ID NO: 813954 - DNA, 33 bp, Homo sapien
tgtctgtctctaaatatgaatcgaatcttgaca

SEQ ID NO: 813955 - DNA, 33 bp, Homo sapien
caggcttccactcagaacttcctactgtaatgg

SEQ ID NO: 813956 - DNA, 33 bp, Homo sapien
caggcttccactcagaccttcctactgtaatgg

SEQ ID NO: 813957 - DNA, 33 bp, Homo sapien
gaaattgtgacccctcactcagctttcagatct

SEQ ID NO: 813958 - DNA, 33 bp, Homo sapien
gaaattgtgacccctcgctcagctttcagatct

SEQ ID NO: 813959 - DNA, 33 bp, Homo sapien
aagatcatggagattacgcaggattatccagat

SEQ ID NO: 813960 - DNA, 33 bp, Homo sapien
aagatcatggagattatgcaggattatccagat

SEQ ID NO: 813961 - DNA, 33 bp, Homo sapien
aaagcagtaaaacatgaaacacgtgggcctgag

SEQ ID NO: 813962 - DNA, 33 bp, Homo sapien
aaagcagtaaaacatggaacacgtgggcctgag

SEQ ID NO: 813963 - DNA, 33 bp, Homo sapien
ggattatgatgcaaaaacagagggagaaatatt

SEQ ID NO: 813964 - DNA, 33 bp, Homo sapien
ggattatgatgcaaaagcagagggagaaatatt

SEQ ID NO: 813965 - DNA, 33 bp, Homo sapien
tggtgaaaaagggaacgatgccagtacttaact

SEQ ID NO: 813966 - DNA, 33 bp, Homo sapien
tggtgaaaaagggaactatgccagtacttaact

SEQ ID NO: 813967 - DNA, 33 bp, Homo sapien
tttctaaaactcagagacctgcagagaggcatg

SEQ ID NO: 813968 - DNA, 33 bp, Homo sapien
tttctaaaactcagaggcctgcagagaggcatg

SEQ ID NO: 813969 - DNA, 33 bp, Homo sapien
tgccttctgtccaccaacatttagtgccagcct

SEQ ID NO: 813970 - DNA, 33 bp, Homo sapien
tgccttctgtccaccagcatttagtgccagcct

SEQ ID NO: 813971 - DNA, 33 bp, Homo sapien
aagtaaaaggatgggacgtggtgtcagactgtc

SEQ ID NO: 813972 - DNA, 33 bp, Homo sapien
aagtaaaaggatgggatgtggtgtcagactgtc

SEQ ID NO: 813973 - DNA, 33 bp, Homo sapien
aatgcaagtccctgaaacccagactaggatttt

SEQ ID NO: 813974 - DNA, 33 bp, Homo sapien
aatgcaagtccctgaagcccagactaggatttt

SEQ ID NO: 813975 - DNA, 33 bp, Homo sapien
tttggtgacagagggacctagtgtgataaaaaa

SEQ ID NO: 813976 - DNA, 33 bp, Homo sapien
tttggtgacagagggatctagtgtgataaaaaa

SEQ ID NO: 813977 - DNA, 33 bp, Homo sapien
gcacaaaattcaatgacgggcacaagcagaaag

SEQ ID NO: 813978 - DNA, 33 bp, Homo sapien
gcacaaaattcaatgatgggcacaagcagaaag

SEQ ID NO: 813979 - DNA, 33 bp, Homo sapien
cgtgctgtgcatggacactccatgattagcctc

SEQ ID NO: 813980 - DNA, 33 bp, Homo sapien
cgtgctgtgcatggacgctccatgattagcctc

SEQ ID NO: 813981 - DNA, 33 bp, Homo sapien
cccctgccctatacaccgacttcctgcctgccc

SEQ ID NO: 813982 - DNA, 33 bp, Homo sapien
cccctgccctatacactgacttcctgcctgccc

SEQ ID NO: 813983 - DNA, 33 bp, Homo sapien
tatgtccaaggggtcacatgggggcccacaagt

SEQ ID NO: 813984 - DNA, 33 bp, Homo sapien
tatgtccaaggggtcatatgggggcccacaagt

SEQ ID NO: 813985 - DNA, 33 bp, Homo sapien
agattaatgacttgtacgaaattgtatccatcc

SEQ ID NO: 813986 - DNA, 33 bp, Homo sapien
agattaatgacttgtaggaaattgtatccatcc

SEQ ID NO: 813987 - DNA, 33 bp, Homo sapien
gtctctaactcctaacacagtgctgggtacatc

SEQ ID NO: 813988 - DNA, 33 bp, Homo sapien
gtctctaactcctaacgcagtgctgggtacatc

SEQ ID NO: 813989 - DNA, 33 bp, Homo sapien
aagaagcctagtctcactaatgatcaaagaaaa

SEQ ID NO: 813990 - DNA, 33 bp, Homo sapien
aagaagcctagtctcagtaatgatcaaagaaaa

SEQ ID NO: 813991 - DNA, 33 bp, Homo sapien
attgtcatgttaattacgatcaatttcttgtgt

SEQ ID NO: 813992 - DNA, 33 bp, Homo sapien
attgtcatgttaattatgatcaatttcttgtgt

SEQ ID NO: 813993 - DNA, 33 bp, Homo sapien
tggaaaaggcagatcccccctgttctcttctcc

SEQ ID NO: 813994 - DNA, 33 bp, Homo sapien
tggaaaaggcagatccgccctgttctcttctcc

SEQ ID NO: 813995 - DNA, 33 bp, Homo sapien
acctgtagagagtctacctttggcctgagtaaa

SEQ ID NO: 813996 - DNA, 33 bp, Homo sapien
acctgtagagagtctatctttggcctgagtaaa

SEQ ID NO: 813997 - DNA, 33 bp, Homo sapien
tggagttcaagctcaacgtaggcttaagattcc

SEQ ID NO: 813998 - DNA, 33 bp, Homo sapien
tggagttcaagctcaatgtaggcttaagattcc

SEQ ID NO: 813999 - DNA, 33 bp, Homo sapien
ggccacagcatttagacacacttctgctcaaat

SEQ ID NO: 814000 - DNA, 33 bp, Homo sapien
ggccacagcatttagatacacttctgctcaaat

SEQ ID NO: 814001 - DNA, 33 bp, Homo sapien
atgtgtgccaacaggcaagtgactgaacacatc

SEQ ID NO: 814002 - DNA, 33 bp, Homo sapien
atgtgtgccaacaggcgagtgactgaacacatc

SEQ ID NO: 814003 - DNA, 33 bp, Homo sapien
agggccctgagtaggcactgtataccaatcatt

SEQ ID NO: 814004 - DNA, 33 bp, Homo sapien
agggccctgagtaggcgctgtataccaatcatt

SEQ ID NO: 814005 - DNA, 33 bp, Homo sapien
acttatttggttttcaactacatcttgctctgc

SEQ ID NO: 814006 - DNA, 33 bp, Homo sapien
acttatttggttttcagctacatcttgctctgc

SEQ ID NO: 814007 - DNA, 33 bp, Homo sapien
cttagtaaacggtaggaagtctccaagctcatc

SEQ ID NO: 814008 - DNA, 33 bp, Homo sapien
cttagtaaacggtagggagtctccaagctcatc

SEQ ID NO: 814009 - DNA, 33 bp, Homo sapien
ctgcgtagataacacccgaggatcaggaagtaa

SEQ ID NO: 814010 - DNA, 33 bp, Homo sapien
ctgcgtagataacacctgaggatcaggaagtaa

SEQ ID NO: 814011 - DNA, 33 bp, Homo sapien
ttgtcagcctcaggccaagatcaaaataagagt

SEQ ID NO: 814012 - DNA, 33 bp, Homo sapien
ttgtcagcctcaggccgagatcaaaataagagt

SEQ ID NO: 814013 - DNA, 33 bp, Homo sapien
tgatttccttctttgtcaagtggagacaccaat

SEQ ID NO: 814014 - DNA, 33 bp, Homo sapien
tgatttccttctttgtgaagtggagacaccaat

SEQ ID NO: 814015 - DNA, 33 bp, Homo sapien
atcagaagccaacacactagaaaagttgcaaga

SEQ ID NO: 814016 - DNA, 33 bp, Homo sapien
atcagaagccaacacattagaaaagttgcaaga

SEQ ID NO: 814017 - DNA, 33 bp, Homo sapien
aaaggctgcccgtgcacaaaactcacacgtgac

SEQ ID NO: 814018 - DNA, 33 bp, Homo sapien
aaaggctgcccgtgcagaaaactcacacgtgac

SEQ ID NO: 814019 - DNA, 33 bp, Homo sapien
aataatccaagccgcaagagtttctattaaaag

SEQ ID NO: 814020 - DNA, 33 bp, Homo sapien
aataatccaagccgcaggagtttctattaaaag

SEQ ID NO: 814021 - DNA, 33 bp, Homo sapien
gagctgctaagataaaacatggcagtaagctcg

SEQ ID NO: 814022 - DNA, 33 bp, Homo sapien
gagctgctaagataaaccatggcagtaagctcg

SEQ ID NO: 814023 - DNA, 33 bp, Homo sapien
ggatctacagtcaaaacggatttccgagaggaa

SEQ ID NO: 814024 - DNA, 33 bp, Homo sapien
ggatctacagtcaaaatggatttccgagaggaa

SEQ ID NO: 814025 - DNA, 33 bp, Homo sapien
caaagaaaagaggaaaacatatccgagagtgga

SEQ ID NO: 814026 - DNA, 33 bp, Homo sapien
caaagaaaagaggaaaccatatccgagagtgga

SEQ ID NO: 814027 - DNA, 33 bp, Homo sapien
acagggtgaagaggacccatttattgaagcaac

SEQ ID NO: 814028 - DNA, 33 bp, Homo sapien
acagggtgaagaggactcatttattgaagcaac

SEQ ID NO: 814029 - DNA, 33 bp, Homo sapien
gagtgctaagcagacaataaaacaaggaagtca

SEQ ID NO: 814030 - DNA, 33 bp, Homo sapien
gagtgctaagcagacattaaaacaaggaagtca

SEQ ID NO: 814031 - DNA, 33 bp, Homo sapien
ctgttggtcaaacaaacggcccttgtaggtgtg

SEQ ID NO: 814032 - DNA, 33 bp, Homo sapien
ctgttggtcaaacaaatggcccttgtaggtgtg

SEQ ID NO: 814033 - DNA, 33 bp, Homo sapien
gccaagagagaaagagaagatggggtgaaatgt

SEQ ID NO: 814034 - DNA, 33 bp, Homo sapien
gccaagagagaaagagcagatggggtgaaatgt

SEQ ID NO: 814035 - DNA, 33 bp, Homo sapien
attcgttgtgctttcaaggggaaattcagttta

SEQ ID NO: 814036 - DNA, 33 bp, Homo sapien
attcgttgtgctttcacggggaaattcagttta

SEQ ID NO: 814037 - DNA, 33 bp, Homo sapien
agaatatggaactttaaccttggagcagcattt

SEQ ID NO: 814038 - DNA, 33 bp, Homo sapien
agaatatggaactttagccttggagcagcattt

SEQ ID NO: 814039 - DNA, 33 bp, Homo sapien
tttctattctgtaccgccctgagatcagctttt

SEQ ID NO: 814040 - DNA, 33 bp, Homo sapien
tttctattctgtaccgtcctgagatcagctttt

SEQ ID NO: 814041 - DNA, 33 bp, Homo sapien
ccctaaatgtcaaaagcacctgccaggatcatt

SEQ ID NO: 814042 - DNA, 33 bp, Homo sapien
ccctaaatgtcaaaagtacctgccaggatcatt

SEQ ID NO: 814043 - DNA, 33 bp, Homo sapien
gtttaatgtgagatgacagtggaatcttcaacc

SEQ ID NO: 814044 - DNA, 33 bp, Homo sapien
gtttaatgtgagatgatagtggaatcttcaacc

SEQ ID NO: 814045 - DNA, 33 bp, Homo sapien
caaggtcatttctcaaagtctagagcatacctc

SEQ ID NO: 814046 - DNA, 33 bp, Homo sapien
caaggtcatttctcaaggtctagagcatacctc

SEQ ID NO: 814047 - DNA, 33 bp, Homo sapien
cttgtattttgtgcaaagagtcagagctccaca

SEQ ID NO: 814048 - DNA, 33 bp, Homo sapien
cttgtattttgtgcaacgagtcagagctccaca

SEQ ID NO: 814049 - DNA, 33 bp, Homo sapien
ttcttgagttccttccaaatacaatgtattgat

SEQ ID NO: 814050 - DNA, 33 bp, Homo sapien
ttcttgagttccttccgaatacaatgtattgat

SEQ ID NO: 814051 - DNA, 33 bp, Homo sapien
agcagctgctgaaagacagccgatcctgtgccc

SEQ ID NO: 814052 - DNA, 33 bp, Homo sapien
agcagctgctgaaagatagccgatcctgtgccc

SEQ ID NO: 814053 - DNA, 33 bp, Homo sapien
cttatgatcagtaacacgcttcttacccatctg

SEQ ID NO: 814054 - DNA, 33 bp, Homo sapien
cttatgatcagtaacaggcttcttacccatctg

SEQ ID NO: 814055 - DNA, 33 bp, Homo sapien
gcatattaggcactcactatttggtgcctaacg

SEQ ID NO: 814056 - DNA, 33 bp, Homo sapien
gcatattaggcactcattatttggtgcctaacg

SEQ ID NO: 814057 - DNA, 33 bp, Homo sapien
aattattaattgatggaatgagtttttattaat

SEQ ID NO: 814058 - DNA, 33 bp, Homo sapien
aattattaattgatggtatgagtttttattaat

SEQ ID NO: 814059 - DNA, 33 bp, Homo sapien
ggaagaaccagtctacaatagaagacaacgagg

SEQ ID NO: 814060 - DNA, 33 bp, Homo sapien
ggaagaaccagtctactatagaagacaacgagg

SEQ ID NO: 814061 - DNA, 33 bp, Homo sapien
ctgagtaccaattacaagctaggaattctgcta

SEQ ID NO: 814062 - DNA, 33 bp, Homo sapien
ctgagtaccaattacaggctaggaattctgcta

SEQ ID NO: 814063 - DNA, 33 bp, Homo sapien
gtgtcatgataaaaagcagttcgcacaaaatat

SEQ ID NO: 814064 - DNA, 33 bp, Homo sapien
gtgtcatgataaaaagtagttcgcacaaaatat

SEQ ID NO: 814065 - DNA, 33 bp, Homo sapien
tctgcacagtgcatcaaagacctttgccccagc

SEQ ID NO: 814066 - DNA, 33 bp, Homo sapien
tctgcacagtgcatcagagacctttgccccagc

SEQ ID NO: 814067 - DNA, 33 bp, Homo sapien
ctaatggcagaaacaacgtactgaggcatctcc

SEQ ID NO: 814068 - DNA, 33 bp, Homo sapien
ctaatggcagaaacaatgtactgaggcatctcc

SEQ ID NO: 814069 - DNA, 33 bp, Homo sapien
catttattacttgaaacagactgacctttattt

SEQ ID NO: 814070 - DNA, 33 bp, Homo sapien
catttattacttgaaatagactgacctttattt

SEQ ID NO: 814071 - DNA, 33 bp, Homo sapien
ttgcccatgggttaagaaagaccctgactgcac

SEQ ID NO: 814072 - DNA, 33 bp, Homo sapien
ttgcccatgggttaaggaagaccctgactgcac

SEQ ID NO: 814073 - DNA, 33 bp, Homo sapien
gcatggaaagaaacaccgaggtcgtctctgggc

SEQ ID NO: 814074 - DNA, 33 bp, Homo sapien
gcatggaaagaaacactgaggtcgtctctgggc

SEQ ID NO: 814075 - DNA, 33 bp, Homo sapien
attgtttaagtcagaacctcagaaccgagttat

SEQ ID NO: 814076 - DNA, 33 bp, Homo sapien
attgtttaagtcagaatctcagaaccgagttat

SEQ ID NO: 814077 - DNA, 33 bp, Homo sapien
ggctccatagatgggacgtgctttcaatatcaa

SEQ ID NO: 814078 - DNA, 33 bp, Homo sapien
ggctccatagatgggatgtgctttcaatatcaa

SEQ ID NO: 814079 - DNA, 33 bp, Homo sapien
cagttaatagagaaggaaaaagggcagaaggaa

SEQ ID NO: 814080 - DNA, 33 bp, Homo sapien
cagttaatagagaaggtaaaagggcagaaggaa

SEQ ID NO: 814081 - DNA, 33 bp, Homo sapien
gaagataagacagcaacgctctggtcccagcac

SEQ ID NO: 814082 - DNA, 33 bp, Homo sapien
gaagataagacagcaaggctctggtcccagcac

SEQ ID NO: 814083 - DNA, 33 bp, Homo sapien
agcagaagccctcaaaagagtatgtgcctatta

SEQ ID NO: 814084 - DNA, 33 bp, Homo sapien
agcagaagccctcaaatgagtatgtgcctatta

SEQ ID NO: 814085 - DNA, 33 bp, Homo sapien
acctcaaggaccaacacagcatcacttagtaaa

SEQ ID NO: 814086 - DNA, 33 bp, Homo sapien
acctcaaggaccaacatagcatcacttagtaaa

SEQ ID NO: 814087 - DNA, 33 bp, Homo sapien
tgagctcttcctatgggccagagagcacaagct

SEQ ID NO: 814088 - DNA, 33 bp, Homo sapien
tgagctcttcctatggtccagagagcacaagct

SEQ ID NO: 814089 - DNA, 33 bp, Homo sapien
ctacttgctgggttcaaggggcaagtagttcac

SEQ ID NO: 814090 - DNA, 33 bp, Homo sapien
ctacttgctgggttcagggggcaagtagttcac

SEQ ID NO: 814091 - DNA, 33 bp, Homo sapien
gagcctgcgaaactcacgtagcattagattgct

SEQ ID NO: 814092 - DNA, 33 bp, Homo sapien
gagcctgcgaaactcatgtagcattagattgct

SEQ ID NO: 814093 - DNA, 33 bp, Homo sapien
tcagctgggtgtccaaccttgagccccttttaa

SEQ ID NO: 814094 - DNA, 33 bp, Homo sapien
tcagctgggtgtccaatcttgagccccttttaa

SEQ ID NO: 814095 - DNA, 33 bp, Homo sapien
taagttgcacaaggtcacacagcaggagtgtaa

SEQ ID NO: 814096 - DNA, 33 bp, Homo sapien
taagttgcacaaggtctcacagcaggagtgtaa

SEQ ID NO: 814097 - DNA, 33 bp, Homo sapien
ccacatcttcattttcaaatctgaatacgttaa

SEQ ID NO: 814098 - DNA, 33 bp, Homo sapien
ccacatcttcattttcgaatctgaatacgttaa

SEQ ID NO: 814099 - DNA, 33 bp, Homo sapien
ccgggaccatgtacgcccatgtctggaaggaag

SEQ ID NO: 814100 - DNA, 33 bp, Homo sapien
ccgggaccatgtacgcgcatgtctggaaggaag

SEQ ID NO: 814101 - DNA, 33 bp, Homo sapien
gtgacgacaggaacaactatgccttcattgagc

SEQ ID NO: 814102 - DNA, 33 bp, Homo sapien
gtgacgacaggaacaagtatgccttcattgagc

SEQ ID NO: 814103 - DNA, 33 bp, Homo sapien
gcaccctgtgtgtgtaaagcaatccaggcgcca

SEQ ID NO: 814104 - DNA, 33 bp, Homo sapien
gcaccctgtgtgtgtagagcaatccaggcgcca

SEQ ID NO: 814105 - DNA, 33 bp, Homo sapien
gggctgccactttggaactaagtccctttaaag

SEQ ID NO: 814106 - DNA, 33 bp, Homo sapien
gggctgccactttggagctaagtccctttaaag

SEQ ID NO: 814107 - DNA, 33 bp, Homo sapien
gcagtgcaagtcctcaacatggtcctctagcat

SEQ ID NO: 814108 - DNA, 33 bp, Homo sapien
gcagtgcaagtcctcaccatggtcctctagcat

SEQ ID NO: 814109 - DNA, 33 bp, Homo sapien
aaaaagctctttcaaaatcttctctcttggtgg

SEQ ID NO: 814110 - DNA, 33 bp, Homo sapien
aaaaagctctttcaaagtcttctctcttggtgg

SEQ ID NO: 814111 - DNA, 33 bp, Homo sapien
caatctgtctccaggaaacaaatgcactagtca

SEQ ID NO: 814112 - DNA, 33 bp, Homo sapien
caatctgtctccaggacacaaatgcactagtca

SEQ ID NO: 814113 - DNA, 33 bp, Homo sapien
ttaaatggatgtcgtggacttagaaaatttgta

SEQ ID NO: 814114 - DNA, 33 bp, Homo sapien
ttaaatggatgtcgtgtacttagaaaatttgta

SEQ ID NO: 814115 - DNA, 33 bp, Homo sapien
cttcagttattttactcactgggctattcccat

SEQ ID NO: 814116 - DNA, 33 bp, Homo sapien
cttcagttattttacttactgggctattcccat

SEQ ID NO: 814117 - DNA, 33 bp, Homo sapien
gactctcagatatacactgccccacagaatacc

SEQ ID NO: 814118 - DNA, 33 bp, Homo sapien
gactctcagatatacattgccccacagaatacc

SEQ ID NO: 814119 - DNA, 33 bp, Homo sapien
gtgagggccaaagataaaagctgcttccgccca

SEQ ID NO: 814120 - DNA, 33 bp, Homo sapien
gtgagggccaaagatagaagctgcttccgccca

SEQ ID NO: 814121 - DNA, 33 bp, Homo sapien
gatggctgtaacacaacggtgagtattcgtcta

SEQ ID NO: 814122 - DNA, 33 bp, Homo sapien
gatggctgtaacacaatggtgagtattcgtcta

SEQ ID NO: 814123 - DNA, 33 bp, Homo sapien
ccattaaacatcaaaacagagaccctaagacag

SEQ ID NO: 814124 - DNA, 33 bp, Homo sapien
ccattaaacatcaaaatagagaccctaagacag

SEQ ID NO: 814125 - DNA, 33 bp, Homo sapien
atgctacttttctgtcactttcccatcaaaata

SEQ ID NO: 814126 - DNA, 33 bp, Homo sapien
atgctacttttctgtctctttcccatcaaaata

SEQ ID NO: 814127 - DNA, 33 bp, Homo sapien
ttcctttggagccctccacagcatttgcctggc

SEQ ID NO: 814128 - DNA, 33 bp, Homo sapien
ttcctttggagccctctacagcatttgcctggc

SEQ ID NO: 814129 - DNA, 33 bp, Homo sapien
tctggagtcctgaacacctgttgtgtgcccagt

SEQ ID NO: 814130 - DNA, 33 bp, Homo sapien
tctggagtcctgaacagctgttgtgtgcccagt

SEQ ID NO: 814131 - DNA, 33 bp, Homo sapien
tgtctagtcacatagacggtaggtggtagtttt

SEQ ID NO: 814132 - DNA, 33 bp, Homo sapien
tgtctagtcacatagatggtaggtggtagtttt

SEQ ID NO: 814133 - DNA, 33 bp, Homo sapien
ggagcagcagcaataacctttgccgttgacgta

SEQ ID NO: 814134 - DNA, 33 bp, Homo sapien
ggagcagcagcaataatctttgccgttgacgta

SEQ ID NO: 814135 - DNA, 33 bp, Homo sapien
agcatatgttgtttgacctgacaaatcctatga

SEQ ID NO: 814136 - DNA, 33 bp, Homo sapien
agcatatgttgtttgatctgacaaatcctatga

SEQ ID NO: 814137 - DNA, 33 bp, Homo sapien
tgggattttacaaaataacaatgagagcagaga

SEQ ID NO: 814138 - DNA, 33 bp, Homo sapien
tgggattttacaaaatgacaatgagagcagaga

SEQ ID NO: 814139 - DNA, 33 bp, Homo sapien
tgctatctgtaatgagaaaagaaaaccttccag

SEQ ID NO: 814140 - DNA, 33 bp, Homo sapien
tgctatctgtaatgaggaaagaaaaccttccag

SEQ ID NO: 814141 - DNA, 33 bp, Homo sapien
aaggagtgcctccaaaaagtgacatctaagctg

SEQ ID NO: 814142 - DNA, 33 bp, Homo sapien
aaggagtgcctccaaacagtgacatctaagctg

SEQ ID NO: 814143 - DNA, 33 bp, Homo sapien
gattgtgtcttaaccgcatctgtcttctttgct

SEQ ID NO: 814144 - DNA, 33 bp, Homo sapien
gattgtgtcttaaccgtatctgtcttctttgct

SEQ ID NO: 814145 - DNA, 33 bp, Homo sapien
cctacctctccagccccaagctagagcctgcca

SEQ ID NO: 814146 - DNA, 33 bp, Homo sapien
cctacctctccagccctaagctagagcctgcca

SEQ ID NO: 814147 - DNA, 33 bp, Homo sapien
agctgaaggttctaaccctctaatcatggcttg

SEQ ID NO: 814148 - DNA, 33 bp, Homo sapien
agctgaaggttctaactctctaatcatggcttg

SEQ ID NO: 814149 - DNA, 33 bp, Homo sapien
gtgcttctccactttacatttggtgcttgaact

SEQ ID NO: 814150 - DNA, 33 bp, Homo sapien
gtgcttctccactttatatttggtgcttgaact

SEQ ID NO: 814151 - DNA, 33 bp, Homo sapien
cagcttccagggtggcacctcatataaatccag

SEQ ID NO: 814152 - DNA, 33 bp, Homo sapien
cagcttccagggtggcgcctcatataaatccag

SEQ ID NO: 814153 - DNA, 33 bp, Homo sapien
gggattacatttaggagctacatggataatcca

SEQ ID NO: 814154 - DNA, 33 bp, Homo sapien
gggattacatttaggatctacatggataatcca

SEQ ID NO: 814155 - DNA, 33 bp, Homo sapien
cagagatatttagaaacgctcaaaactgggaag

SEQ ID NO: 814156 - DNA, 33 bp, Homo sapien
cagagatatttagaaatgctcaaaactgggaag

SEQ ID NO: 814157 - DNA, 33 bp, Homo sapien
caaccttggtgcccaacaacagcagattagata

SEQ ID NO: 814158 - DNA, 33 bp, Homo sapien
caaccttggtgcccaagaacagcagattagata

SEQ ID NO: 814159 - DNA, 33 bp, Homo sapien
actcactaaggctcaaatcaggcctgggacagg

SEQ ID NO: 814160 - DNA, 33 bp, Homo sapien
actcactaaggctcaagtcaggcctgggacagg

SEQ ID NO: 814161 - DNA, 33 bp, Homo sapien
tgacaaggcttcagaaagttctgagaacatgtg

SEQ ID NO: 814162 - DNA, 33 bp, Homo sapien
tgacaaggcttcagaaggttctgagaacatgtg

SEQ ID NO: 814163 - DNA, 33 bp, Homo sapien
aaggtcatgatgttagcaccttagagccgaaac

SEQ ID NO: 814164 - DNA, 33 bp, Homo sapien
aaggtcatgatgttagtaccttagagccgaaac

SEQ ID NO: 814165 - DNA, 33 bp, Homo sapien
cagattcagttaggaaagattcaagagcagagg

SEQ ID NO: 814166 - DNA, 33 bp, Homo sapien
cagattcagttaggaacgattcaagagcagagg

SEQ ID NO: 814167 - DNA, 33 bp, Homo sapien
gggcctgagctatgcccgaacattcagagataa

SEQ ID NO: 814168 - DNA, 33 bp, Homo sapien
gggcctgagctatgcctgaacattcagagataa

SEQ ID NO: 814169 - DNA, 33 bp, Homo sapien
catattgtagtagaaaacagctcctaagcttcc

SEQ ID NO: 814170 - DNA, 33 bp, Homo sapien
catattgtagtagaaaccagctcctaagcttcc

SEQ ID NO: 814171 - DNA, 33 bp, Homo sapien
cacttgttctgtcaataatgtccaagtttgccc

SEQ ID NO: 814172 - DNA, 33 bp, Homo sapien
cacttgttctgtcaatgatgtccaagtttgccc

SEQ ID NO: 814173 - DNA, 33 bp, Homo sapien
aagataacattaacagccaaatgacaacagcta

SEQ ID NO: 814174 - DNA, 33 bp, Homo sapien
aagataacattaacaggcaaatgacaacagcta

SEQ ID NO: 814175 - DNA, 33 bp, Homo sapien
accagtgttcacatcccggatctgcctcttagg

SEQ ID NO: 814176 - DNA, 33 bp, Homo sapien
accagtgttcacatcctggatctgcctcttagg

SEQ ID NO: 814177 - DNA, 33 bp, Homo sapien
gtgtttcatctctccaactagactgaagctagg

SEQ ID NO: 814178 - DNA, 33 bp, Homo sapien
gtgtttcatctctccagctagactgaagctagg

SEQ ID NO: 814179 - DNA, 33 bp, Homo sapien
attcattcagccagcaggcaccgtcacttgcta

SEQ ID NO: 814180 - DNA, 33 bp, Homo sapien
attcattcagccagcatgcaccgtcacttgcta

SEQ ID NO: 814181 - DNA, 33 bp, Homo sapien
ataaatgttggacccaatgaaaagaaaggacaa

SEQ ID NO: 814182 - DNA, 33 bp, Homo sapien
ataaatgttggacccagtgaaaagaaaggacaa

SEQ ID NO: 814183 - DNA, 33 bp, Homo sapien
ttggagtcagaaattacgtgaaattatagaaga

SEQ ID NO: 814184 - DNA, 33 bp, Homo sapien
ttggagtcagaaattatgtgaaattatagaaga

SEQ ID NO: 814185 - DNA, 33 bp, Homo sapien
ccaagtgcttaatatacgtgatctcatttcacc

SEQ ID NO: 814186 - DNA, 33 bp, Homo sapien
ccaagtgcttaatatatgtgatctcatttcacc

SEQ ID NO: 814187 - DNA, 33 bp, Homo sapien
tactgtgagggtcagacgtaggacagccacaaa

SEQ ID NO: 814188 - DNA, 33 bp, Homo sapien
tactgtgagggtcagatgtaggacagccacaaa

SEQ ID NO: 814189 - DNA, 33 bp, Homo sapien
tgtgtttccgttggccagagaagagaaacagtg

SEQ ID NO: 814190 - DNA, 33 bp, Homo sapien
tgtgtttccgttggccggagaagagaaacagtg

SEQ ID NO: 814191 - DNA, 33 bp, Homo sapien
gccaagacagaagaaacgtttttactgtgaatt

SEQ ID NO: 814192 - DNA, 33 bp, Homo sapien
gccaagacagaagaaaggtttttactgtgaatt

SEQ ID NO: 814193 - DNA, 33 bp, Homo sapien
caaatatttttactgaaccacaattaaacattt

SEQ ID NO: 814194 - DNA, 33 bp, Homo sapien
caaatatttttactgagccacaattaaacattt

SEQ ID NO: 814195 - DNA, 33 bp, Homo sapien
atgaatgatttatgtccagcctaatggttacat

SEQ ID NO: 814196 - DNA, 33 bp, Homo sapien
atgaatgatttatgtctagcctaatggttacat

SEQ ID NO: 814197 - DNA, 33 bp, Homo sapien
taaaatccaagcttcacggcattggaggctcac

SEQ ID NO: 814198 - DNA, 33 bp, Homo sapien
taaaatccaagcttcatggcattggaggctcac

SEQ ID NO: 814199 - DNA, 33 bp, Homo sapien
gtcaggggaataaaaaacatttcagttgcttca

SEQ ID NO: 814200 - DNA, 33 bp, Homo sapien
gtcaggggaataaaaagcatttcagttgcttca

SEQ ID NO: 814201 - DNA, 33 bp, Homo sapien
tgtccataatcacataacaaggcaggaataagc

SEQ ID NO: 814202 - DNA, 33 bp, Homo sapien
tgtccataatcacatagcaaggcaggaataagc

SEQ ID NO: 814203 - DNA, 33 bp, Homo sapien
ccagatacctaaacagaaaagtgtgataaggcc

SEQ ID NO: 814204 - DNA, 33 bp, Homo sapien
ccagatacctaaacaggaaagtgtgataaggcc

SEQ ID NO: 814205 - DNA, 33 bp, Homo sapien
gtttcccatttctgccaagacaatctggagaag

SEQ ID NO: 814206 - DNA, 33 bp, Homo sapien
gtttcccatttctgcccagacaatctggagaag

SEQ ID NO: 814207 - DNA, 33 bp, Homo sapien
gggggtggggaatgagccatttttatgtggcag

SEQ ID NO: 814208 - DNA, 33 bp, Homo sapien
gggggtggggaatgaggcatttttatgtggcag

SEQ ID NO: 814209 - DNA, 33 bp, Homo sapien
tggggtgttcaccgaacgtgtaataaatagcag

SEQ ID NO: 814210 - DNA, 33 bp, Homo sapien
tggggtgttcaccgaatgtgtaataaatagcag

SEQ ID NO: 814211 - DNA, 33 bp, Homo sapien
cttatgaaggactgaacgaaacagagagccatg

SEQ ID NO: 814212 - DNA, 33 bp, Homo sapien
cttatgaaggactgaatgaaacagagagccatg

SEQ ID NO: 814213 - DNA, 33 bp, Homo sapien
ccctatcttgacttcaacgttgccaataaagat

SEQ ID NO: 814214 - DNA, 33 bp, Homo sapien
ccctatcttgacttcagcgttgccaataaagat

SEQ ID NO: 814215 - DNA, 33 bp, Homo sapien
tatggcagtgaaaacactgaactgagtacggta

SEQ ID NO: 814216 - DNA, 33 bp, Homo sapien
tatggcagtgaaaacattgaactgagtacggta

SEQ ID NO: 814217 - DNA, 33 bp, Homo sapien
aatagatacttcctaacctcaagggacagtcca

SEQ ID NO: 814218 - DNA, 33 bp, Homo sapien
aatagatacttcctaatctcaagggacagtcca

SEQ ID NO: 814219 - DNA, 33 bp, Homo sapien
gcagagaaggcttcttgaactaggacctaagaa

SEQ ID NO: 814220 - DNA, 33 bp, Homo sapien
gcagagaaggcttctttaactaggacctaagaa

SEQ ID NO: 814221 - DNA, 33 bp, Homo sapien
cccaacacctgcttaaatagcaaatttcttccc

SEQ ID NO: 814222 - DNA, 33 bp, Homo sapien
cccaacacctgcttaactagcaaatttcttccc

SEQ ID NO: 814223 - DNA, 33 bp, Homo sapien
ccttaacccatcacaaaactgaaaaatctttga

SEQ ID NO: 814224 - DNA, 33 bp, Homo sapien
ccttaacccatcacaacactgaaaaatctttga

SEQ ID NO: 814225 - DNA, 33 bp, Homo sapien
actctaagaaagtaacagagaaaatataagaat

SEQ ID NO: 814226 - DNA, 33 bp, Homo sapien
actctaagaaagtaactgagaaaatataagaat

SEQ ID NO: 814227 - DNA, 33 bp, Homo sapien
ctgcctcataaatttccactcattcctcaagag

SEQ ID NO: 814228 - DNA, 33 bp, Homo sapien
ctgcctcataaatttctactcattcctcaagag

SEQ ID NO: 814229 - DNA, 33 bp, Homo sapien
ctgccagtccctggggaatctgctgtctgtgat

SEQ ID NO: 814230 - DNA, 33 bp, Homo sapien
ctgccagtccctggggtatctgctgtctgtgat

SEQ ID NO: 814231 - DNA, 33 bp, Homo sapien
gattcctgcaggtctgacaatctcactccttcc

SEQ ID NO: 814232 - DNA, 33 bp, Homo sapien
gattcctgcaggtctggcaatctcactccttcc

SEQ ID NO: 814233 - DNA, 33 bp, Homo sapien
tgacactggggttgcgcatcagtctgcttggaa

SEQ ID NO: 814234 - DNA, 33 bp, Homo sapien
tgacactggggttgcgtatcagtctgcttggaa

SEQ ID NO: 814235 - DNA, 33 bp, Homo sapien
aacacgcatctgagaaatagtgaggggtctggg

SEQ ID NO: 814236 - DNA, 33 bp, Homo sapien
aacacgcatctgagaagtagtgaggggtctggg

SEQ ID NO: 814237 - DNA, 33 bp, Homo sapien
acatgatatggaccaacgtatagagtggtcact

SEQ ID NO: 814238 - DNA, 33 bp, Homo sapien
acatgatatggaccaatgtatagagtggtcact

SEQ ID NO: 814239 - DNA, 33 bp, Homo sapien
caatcacaacaatacaaatgacaacagccaatt

SEQ ID NO: 814240 - DNA, 33 bp, Homo sapien
caatcacaacaatacatatgacaacagccaatt

SEQ ID NO: 814241 - DNA, 33 bp, Homo sapien
gggacgctcaggcggacgtaaagcaaacaccaa

SEQ ID NO: 814242 - DNA, 33 bp, Homo sapien
gggacgctcaggcggaggtaaagcaaacaccaa

SEQ ID NO: 814243 - DNA, 33 bp, Homo sapien
gaatctttcttaacacaatgcttcaagcagtca

SEQ ID NO: 814244 - DNA, 33 bp, Homo sapien
gaatctttcttaacacgatgcttcaagcagtca

SEQ ID NO: 814245 - DNA, 33 bp, Homo sapien
cagtagccttcttccacgtagtcactcagggac

SEQ ID NO: 814246 - DNA, 33 bp, Homo sapien
cagtagccttcttccatgtagtcactcagggac

SEQ ID NO: 814247 - DNA, 33 bp, Homo sapien
caagatgaccacatagcacctgggctcagactc

SEQ ID NO: 814248 - DNA, 33 bp, Homo sapien
caagatgaccacatagtacctgggctcagactc

SEQ ID NO: 814249 - DNA, 33 bp, Homo sapien
gatgagtctgggttcaccaagaaacattattgt

SEQ ID NO: 814250 - DNA, 33 bp, Homo sapien
gatgagtctgggttcagcaagaaacattattgt

SEQ ID NO: 814251 - DNA, 33 bp, Homo sapien
attcttgttctgcatgacagttgcatttctcat

SEQ ID NO: 814252 - DNA, 33 bp, Homo sapien
attcttgttctgcatggcagttgcatttctcat

SEQ ID NO: 814253 - DNA, 33 bp, Homo sapien
gcatggataattacacaattcagagcctgctgg

SEQ ID NO: 814254 - DNA, 33 bp, Homo sapien
gcatggataattacacgattcagagcctgctgg

SEQ ID NO: 814255 - DNA, 33 bp, Homo sapien
catgccagccatgcagaagagcccattctatag

SEQ ID NO: 814256 - DNA, 33 bp, Homo sapien
catgccagccatgcaggagagcccattctatag

SEQ ID NO: 814257 - DNA, 33 bp, Homo sapien
aagaagatacttggaaacaaatgtccaagggcg

SEQ ID NO: 814258 - DNA, 33 bp, Homo sapien
aagaagatacttggaaccaaatgtccaagggcg

SEQ ID NO: 814259 - DNA, 33 bp, Homo sapien
taacatcacactgaggaaccacttgccccaaac

SEQ ID NO: 814260 - DNA, 33 bp, Homo sapien
taacatcacactgaggcaccacttgccccaaac

SEQ ID NO: 814261 - DNA, 33 bp, Homo sapien
aattctccaaacttagaaaaagcatccagtaga

SEQ ID NO: 814262 - DNA, 33 bp, Homo sapien
aattctccaaacttaggaaaagcatccagtaga

SEQ ID NO: 814263 - DNA, 33 bp, Homo sapien
tgtcaatggatgtcaacacagaaagaagactga

SEQ ID NO: 814264 - DNA, 33 bp, Homo sapien
tgtcaatggatgtcaatacagaaagaagactga

SEQ ID NO: 814265 - DNA, 33 bp, Homo sapien
aatccagcaagtctaacgcccaggagatgcatg

SEQ ID NO: 814266 - DNA, 33 bp, Homo sapien
aatccagcaagtctaatgcccaggagatgcatg

SEQ ID NO: 814267 - DNA, 33 bp, Homo sapien
tcttattttgacaagcactgtaattatccctca

SEQ ID NO: 814268 - DNA, 33 bp, Homo sapien
tcttattttgacaagcgctgtaattatccctca

SEQ ID NO: 814269 - DNA, 33 bp, Homo sapien
gcctcgggaatggtgacgtatctggttattgag

SEQ ID NO: 814270 - DNA, 33 bp, Homo sapien
gcctcgggaatggtgatgtatctggttattgag

SEQ ID NO: 814271 - DNA, 33 bp, Homo sapien
gatgatccctgacttacgacggtctgacttcag

SEQ ID NO: 814272 - DNA, 33 bp, Homo sapien
gatgatccctgacttatgacggtctgacttcag

SEQ ID NO: 814273 - DNA, 33 bp, Homo sapien
gcaaactgactacaacacttatttgcacagcac

SEQ ID NO: 814274 - DNA, 33 bp, Homo sapien
gcaaactgactacaacgcttatttgcacagcac

SEQ ID NO: 814275 - DNA, 33 bp, Homo sapien
ggagaccgagctgttaagcactgaccgtggcat

SEQ ID NO: 814276 - DNA, 33 bp, Homo sapien
ggagaccgagctgttaggcactgaccgtggcat

SEQ ID NO: 814277 - DNA, 33 bp, Homo sapien
gttaagatgcctaatacgtagggaaatgacaaa

SEQ ID NO: 814278 - DNA, 33 bp, Homo sapien
gttaagatgcctaatatgtagggaaatgacaaa

SEQ ID NO: 814279 - DNA, 33 bp, Homo sapien
tagtcagtcaggagatgaggatcatagaggaga

SEQ ID NO: 814280 - DNA, 33 bp, Homo sapien
tagtcagtcaggagattaggatcatagaggaga

SEQ ID NO: 814281 - DNA, 33 bp, Homo sapien
tttagaactccattgacctggctccgtagcccg

SEQ ID NO: 814282 - DNA, 33 bp, Homo sapien
tttagaactccattgatctggctccgtagcccg

SEQ ID NO: 814283 - DNA, 33 bp, Homo sapien
tgtaacctctgttatcaatcccatttttatagg

SEQ ID NO: 814284 - DNA, 33 bp, Homo sapien
tgtaacctctgttatcgatcccatttttatagg

SEQ ID NO: 814285 - DNA, 33 bp, Homo sapien
atacccggaatgcaccaaatggctgggatttgt

SEQ ID NO: 814286 - DNA, 33 bp, Homo sapien
atacccggaatgcaccgaatggctgggatttgt

SEQ ID NO: 814287 - DNA, 33 bp, Homo sapien
gaagcatttgatcctacggcagagaggaaacag

SEQ ID NO: 814288 - DNA, 33 bp, Homo sapien
gaagcatttgatcctatggcagagaggaaacag

SEQ ID NO: 814289 - DNA, 33 bp, Homo sapien
aaggataaaactgctccgagagatctttgcttt

SEQ ID NO: 814290 - DNA, 33 bp, Homo sapien
aaggataaaactgctctgagagatctttgcttt

SEQ ID NO: 814291 - DNA, 33 bp, Homo sapien
tcctgcatctaatatacacaaggcactgggaag

SEQ ID NO: 814292 - DNA, 33 bp, Homo sapien
tcctgcatctaatatatacaaggcactgggaag

SEQ ID NO: 814293 - DNA, 33 bp, Homo sapien
aaatccttaagttgatcacatctgcaaaatctc

SEQ ID NO: 814294 - DNA, 33 bp, Homo sapien
aaatccttaagttgattacatctgcaaaatctc

SEQ ID NO: 814295 - DNA, 33 bp, Homo sapien
tcaccacctaactgggaaggattaactataact

SEQ ID NO: 814296 - DNA, 33 bp, Homo sapien
tcaccacctaactggggaggattaactataact

SEQ ID NO: 814297 - DNA, 33 bp, Homo sapien
taactataactctgaccattcctgggactgtct

SEQ ID NO: 814298 - DNA, 33 bp, Homo sapien
taactataactctgacgattcctgggactgtct

SEQ ID NO: 814299 - DNA, 33 bp, Homo sapien
ctcttcagcaagctaaatagagcttccaccgct

SEQ ID NO: 814300 - DNA, 33 bp, Homo sapien
ctcttcagcaagctaagtagagcttccaccgct

SEQ ID NO: 814301 - DNA, 33 bp, Homo sapien
atatataaaaggtcagaaagaacatgaaaagat

SEQ ID NO: 814302 - DNA, 33 bp, Homo sapien
atatataaaaggtcagtaagaacatgaaaagat

SEQ ID NO: 814303 - DNA, 33 bp, Homo sapien
tgtgttagctcattcaatctttctaacatctct

SEQ ID NO: 814304 - DNA, 33 bp, Homo sapien
tgtgttagctcattcagtctttctaacatctct

SEQ ID NO: 814305 - DNA, 33 bp, Homo sapien
agcagctgtgacaaataaagggactgactctca

SEQ ID NO: 814306 - DNA, 33 bp, Homo sapien
agcagctgtgacaaatgaagggactgactctca

SEQ ID NO: 814307 - DNA, 33 bp, Homo sapien
tggcatggagggagacacctctttgcaagcaca

SEQ ID NO: 814308 - DNA, 33 bp, Homo sapien
tggcatggagggagacgcctctttgcaagcaca

SEQ ID NO: 814309 - DNA, 33 bp, Homo sapien
atcactttaaaaggaccgaagtgctgtgtagaa

SEQ ID NO: 814310 - DNA, 33 bp, Homo sapien
atcactttaaaaggacggaagtgctgtgtagaa

SEQ ID NO: 814311 - DNA, 33 bp, Homo sapien
gcagtgttgccaaacactcattggccatctgct

SEQ ID NO: 814312 - DNA, 33 bp, Homo sapien
gcagtgttgccaaacattcattggccatctgct

SEQ ID NO: 814313 - DNA, 33 bp, Homo sapien
ctgcagtgccttttaaatacaccagctcctggt

SEQ ID NO: 814314 - DNA, 33 bp, Homo sapien
ctgcagtgccttttaagtacaccagctcctggt

SEQ ID NO: 814315 - DNA, 33 bp, Homo sapien
gcctcattctaagacacagccctggagctggag

SEQ ID NO: 814316 - DNA, 33 bp, Homo sapien
gcctcattctaagacagagccctggagctggag

SEQ ID NO: 814317 - DNA, 33 bp, Homo sapien
aaaaagccatgcgagacggaagaaggaaattga

SEQ ID NO: 814318 - DNA, 33 bp, Homo sapien
aaaaagccatgcgagatggaagaaggaaattga

SEQ ID NO: 814319 - DNA, 33 bp, Homo sapien
ggggcaggtgcccagtaacagcagttggaaaaa

SEQ ID NO: 814320 - DNA, 33 bp, Homo sapien
ggggcaggtgcccagttacagcagttggaaaaa

SEQ ID NO: 814321 - DNA, 33 bp, Homo sapien
caagtcatagcagggaagtaatttacaggaatt

SEQ ID NO: 814322 - DNA, 33 bp, Homo sapien
caagtcatagcagggaggtaatttacaggaatt

SEQ ID NO: 814323 - DNA, 33 bp, Homo sapien
ctggaggctaaataacaagctgaaagtgacagt

SEQ ID NO: 814324 - DNA, 33 bp, Homo sapien
ctggaggctaaataacgagctgaaagtgacagt

SEQ ID NO: 814325 - DNA, 33 bp, Homo sapien
gattccggagggcagcaatccctaaggtggagc

SEQ ID NO: 814326 - DNA, 33 bp, Homo sapien
gattccggagggcagcgatccctaaggtggagc

SEQ ID NO: 814327 - DNA, 33 bp, Homo sapien
gtctgttagcccattgaatttttacagcaactc

SEQ ID NO: 814328 - DNA, 33 bp, Homo sapien
gtctgttagcccattggatttttacagcaactc

SEQ ID NO: 814329 - DNA, 33 bp, Homo sapien
ataagtgaaagaaccccgcacatactaggtact

SEQ ID NO: 814330 - DNA, 33 bp, Homo sapien
ataagtgaaagaaccctgcacatactaggtact

SEQ ID NO: 814331 - DNA, 33 bp, Homo sapien
ctcgattaatccacaaacacttaactgtctacc

SEQ ID NO: 814332 - DNA, 33 bp, Homo sapien
ctcgattaatccacaagcacttaactgtctacc

SEQ ID NO: 814333 - DNA, 33 bp, Homo sapien
tctgcgaaggagccacagtcttaatgaaactgt

SEQ ID NO: 814334 - DNA, 33 bp, Homo sapien
tctgcgaaggagccacggtcttaatgaaactgt

SEQ ID NO: 814335 - DNA, 33 bp, Homo sapien
gcagaagcacacggaacgcagactgacaagcct

SEQ ID NO: 814336 - DNA, 33 bp, Homo sapien
gcagaagcacacggaatgcagactgacaagcct

SEQ ID NO: 814337 - DNA, 33 bp, Homo sapien
tggtgaggtctgaatgcaaggacagcagctggg

SEQ ID NO: 814338 - DNA, 33 bp, Homo sapien
tggtgaggtctgaatgtaaggacagcagctggg

SEQ ID NO: 814339 - DNA, 33 bp, Homo sapien
cttctctgagcctcccaaaaaattgagaataac

SEQ ID NO: 814340 - DNA, 33 bp, Homo sapien
cttctctgagcctccccaaaaattgagaataac

SEQ ID NO: 814341 - DNA, 33 bp, Homo sapien
aaaattcaacctgatacggctttaaaaatagag

SEQ ID NO: 814342 - DNA, 33 bp, Homo sapien
aaaattcaacctgatatggctttaaaaatagag

SEQ ID NO: 814343 - DNA, 33 bp, Homo sapien
cgcaggggctttcccgaatggaattttagaaac

SEQ ID NO: 814344 - DNA, 33 bp, Homo sapien
cgcaggggctttcccggatggaattttagaaac

SEQ ID NO: 814345 - DNA, 33 bp, Homo sapien
aaatgaatacccaggcaagcgagcaagagagac

SEQ ID NO: 814346 - DNA, 33 bp, Homo sapien
aaatgaatacccaggcgagcgagcaagagagac

SEQ ID NO: 814347 - DNA, 33 bp, Homo sapien
agggcagggaaggagaagagagttgttatctgg

SEQ ID NO: 814348 - DNA, 33 bp, Homo sapien
agggcagggaaggagaggagagttgttatctgg

SEQ ID NO: 814349 - DNA, 33 bp, Homo sapien
cctctgaccttagcccaagcctcaacagcctgc

SEQ ID NO: 814350 - DNA, 33 bp, Homo sapien
cctctgaccttagcccgagcctcaacagcctgc

SEQ ID NO: 814351 - DNA, 33 bp, Homo sapien
cttcttttatgtgtgaaagaaatcaacttctct

SEQ ID NO: 814352 - DNA, 33 bp, Homo sapien
cttcttttatgtgtgagagaaatcaacttctct

SEQ ID NO: 814353 - DNA, 33 bp, Homo sapien
gcaattagagccctgacggctgcctgcagatcc

SEQ ID NO: 814354 - DNA, 33 bp, Homo sapien
gcaattagagccctgatggctgcctgcagatcc

SEQ ID NO: 814355 - DNA, 33 bp, Homo sapien
agtgacagaacaggaaagtgtataactcacttg

SEQ ID NO: 814356 - DNA, 33 bp, Homo sapien
agtgacagaacaggaacgtgtataactcacttg

SEQ ID NO: 814357 - DNA, 33 bp, Homo sapien
atcacaggataagaaaaggatttaatatggtcc

SEQ ID NO: 814358 - DNA, 33 bp, Homo sapien
atcacaggataagaaatggatttaatatggtcc

SEQ ID NO: 814359 - DNA, 33 bp, Homo sapien
cccattcctttcagtacgagccaagagggatgg

SEQ ID NO: 814360 - DNA, 33 bp, Homo sapien
cccattcctttcagtatgagccaagagggatgg

SEQ ID NO: 814361 - DNA, 33 bp, Homo sapien
atcccaaagatgctgccatccctggtttgtttg

SEQ ID NO: 814362 - DNA, 33 bp, Homo sapien
atcccaaagatgctgctatccctggtttgtttg

SEQ ID NO: 814363 - DNA, 33 bp, Homo sapien
caagtcctctgctgggccaagaatgcagctgct

SEQ ID NO: 814364 - DNA, 33 bp, Homo sapien
caagtcctctgctgggtcaagaatgcagctgct

SEQ ID NO: 814365 - DNA, 33 bp, Homo sapien
ttgtgaacttatttggcatccccagcaacctta

SEQ ID NO: 814366 - DNA, 33 bp, Homo sapien
ttgtgaacttatttggtatccccagcaacctta

SEQ ID NO: 814367 - DNA, 33 bp, Homo sapien
tgagacaaactttggaatcagacagacctgagt

SEQ ID NO: 814368 - DNA, 33 bp, Homo sapien
tgagacaaactttggagtcagacagacctgagt

SEQ ID NO: 814369 - DNA, 33 bp, Homo sapien
acttggtggttgagaaacatggctgcgctggca

SEQ ID NO: 814370 - DNA, 33 bp, Homo sapien
acttggtggttgagaagcatggctgcgctggca

SEQ ID NO: 814371 - DNA, 33 bp, Homo sapien
gtggcctttggacagcaccttagcaggaatgtg

SEQ ID NO: 814372 - DNA, 33 bp, Homo sapien
gtggcctttggacagcgccttagcaggaatgtg

SEQ ID NO: 814373 - DNA, 33 bp, Homo sapien
tcccatgcctcacatacctccaaggggctctgt

SEQ ID NO: 814374 - DNA, 33 bp, Homo sapien
tcccatgcctcacatatctccaaggggctctgt

SEQ ID NO: 814375 - DNA, 33 bp, Homo sapien
aagacaaagaactagaaacttaaggatgtaagg

SEQ ID NO: 814376 - DNA, 33 bp, Homo sapien
aagacaaagaactagagacttaaggatgtaagg

SEQ ID NO: 814377 - DNA, 33 bp, Homo sapien
tcagaaggtagaaaaagattgttagtcattgtt

SEQ ID NO: 814378 - DNA, 33 bp, Homo sapien
tcagaaggtagaaaaatattgttagtcattgtt

SEQ ID NO: 814379 - DNA, 33 bp, Homo sapien
cactttaaagggcaaacgtggagaactcttcag

SEQ ID NO: 814380 - DNA, 33 bp, Homo sapien
cactttaaagggcaaatgtggagaactcttcag

SEQ ID NO: 814381 - DNA, 33 bp, Homo sapien
cataagcaaaaaagaacgtaacagccatccata

SEQ ID NO: 814382 - DNA, 33 bp, Homo sapien
cataagcaaaaaagaatgtaacagccatccata

SEQ ID NO: 814383 - DNA, 33 bp, Homo sapien
tatctaagagagagatgatatagacaaagatga

SEQ ID NO: 814384 - DNA, 33 bp, Homo sapien
tatctaagagagagattatatagacaaagatga

SEQ ID NO: 814385 - DNA, 33 bp, Homo sapien
agagaagatgggtacacgatagatattttctgt

SEQ ID NO: 814386 - DNA, 33 bp, Homo sapien
agagaagatgggtacatgatagatattttctgt

SEQ ID NO: 814387 - DNA, 33 bp, Homo sapien
acttcttcagctaagaaatggcccgtaacagtg

SEQ ID NO: 814388 - DNA, 33 bp, Homo sapien
acttcttcagctaagagatggcccgtaacagtg

SEQ ID NO: 814389 - DNA, 33 bp, Homo sapien
ttaatgtatccttgtactaactgcctgtcttgg

SEQ ID NO: 814390 - DNA, 33 bp, Homo sapien
ttaatgtatccttgtattaactgcctgtcttgg

SEQ ID NO: 814391 - DNA, 33 bp, Homo sapien
taaatattcccttcacagcccagttcaggctgt

SEQ ID NO: 814392 - DNA, 33 bp, Homo sapien
taaatattcccttcacggcccagttcaggctgt

SEQ ID NO: 814393 - DNA, 33 bp, Homo sapien
taaatcctttttatccagttgttctcaagggat

SEQ ID NO: 814394 - DNA, 33 bp, Homo sapien
taaatcctttttatccggttgttctcaagggat

SEQ ID NO: 814395 - DNA, 33 bp, Homo sapien
tctctatagttgtacactcatcatctgtcctca

SEQ ID NO: 814396 - DNA, 33 bp, Homo sapien
tctctatagttgtacattcatcatctgtcctca

SEQ ID NO: 814397 - DNA, 33 bp, Homo sapien
gagaaactgtgagggcagaatatacacaaactc

SEQ ID NO: 814398 - DNA, 33 bp, Homo sapien
gagaaactgtgagggcggaatatacacaaactc

SEQ ID NO: 814399 - DNA, 33 bp, Homo sapien
cctgacctgtattccacgtgagacacttacttt

SEQ ID NO: 814400 - DNA, 33 bp, Homo sapien
cctgacctgtattccatgtgagacacttacttt

SEQ ID NO: 814401 - DNA, 33 bp, Homo sapien
ggagaaaaagagaacacagaaatccaggccatt

SEQ ID NO: 814402 - DNA, 33 bp, Homo sapien
ggagaaaaagagaacatagaaatccaggccatt

SEQ ID NO: 814403 - DNA, 33 bp, Homo sapien
ttatctggaaccagagaagatggcattggaatg

SEQ ID NO: 814404 - DNA, 33 bp, Homo sapien
ttatctggaaccagaggagatggcattggaatg

SEQ ID NO: 814405 - DNA, 33 bp, Homo sapien
agcttaagcagagggaacttccatagggcagca

SEQ ID NO: 814406 - DNA, 33 bp, Homo sapien
agcttaagcagagggaccttccatagggcagca

SEQ ID NO: 814407 - DNA, 33 bp, Homo sapien
gaattattaagcatgacattgtctgatgaccca

SEQ ID NO: 814408 - DNA, 33 bp, Homo sapien
gaattattaagcatgatattgtctgatgaccca

SEQ ID NO: 814409 - DNA, 33 bp, Homo sapien
atggctcagaccacgcacttcattcgcagctct

SEQ ID NO: 814410 - DNA, 33 bp, Homo sapien
atggctcagaccacgcgcttcattcgcagctct

SEQ ID NO: 814411 - DNA, 33 bp, Homo sapien
tggacacactctgtgaaggttagagtcacagac

SEQ ID NO: 814412 - DNA, 33 bp, Homo sapien
tggacacactctgtgatggttagagtcacagac

SEQ ID NO: 814413 - DNA, 33 bp, Homo sapien
catgtggcttccttccagcaatgaactgtctgg

SEQ ID NO: 814414 - DNA, 33 bp, Homo sapien
catgtggcttccttccggcaatgaactgtctgg

SEQ ID NO: 814415 - DNA, 33 bp, Homo sapien
gcaatcatttctacaaacttcatttcatttaat

SEQ ID NO: 814416 - DNA, 33 bp, Homo sapien
gcaatcatttctacaaccttcatttcatttaat

SEQ ID NO: 814417 - DNA, 33 bp, Homo sapien
aaatgattgcaccaccgggtacattatagatcc

SEQ ID NO: 814418 - DNA, 33 bp, Homo sapien
aaatgattgcaccacctggtacattatagatcc

SEQ ID NO: 814419 - DNA, 33 bp, Homo sapien
gagtcgtctggtaaaaagagttaattgccttgc

SEQ ID NO: 814420 - DNA, 33 bp, Homo sapien
gagtcgtctggtaaaacgagttaattgccttgc

SEQ ID NO: 814421 - DNA, 33 bp, Homo sapien
tggtcggcaccccccacgtcctgcatcccattg

SEQ ID NO: 814422 - DNA, 33 bp, Homo sapien
tggtcggcaccccccatgtcctgcatcccattg

SEQ ID NO: 814423 - DNA, 33 bp, Homo sapien
accctggcaactttgaaggaaagcgtgctcgga

SEQ ID NO: 814424 - DNA, 33 bp, Homo sapien
accctggcaactttgacggaaagcgtgctcgga

SEQ ID NO: 814425 - DNA, 33 bp, Homo sapien
gctcatccagtgaagacagaaaggctgggctga

SEQ ID NO: 814426 - DNA, 33 bp, Homo sapien
gctcatccagtgaagagagaaaggctgggctga

SEQ ID NO: 814427 - DNA, 33 bp, Homo sapien
aggaaggtggacgttcaccgtggatgcagagga

SEQ ID NO: 814428 - DNA, 33 bp, Homo sapien
aggaaggtggacgttcgccgtggatgcagagga

SEQ ID NO: 814429 - DNA, 33 bp, Homo sapien
ctgatgctgacaataaccctgtgacataggcat

SEQ ID NO: 814430 - DNA, 33 bp, Homo sapien
ctgatgctgacaataatcctgtgacataggcat

SEQ ID NO: 814431 - DNA, 33 bp, Homo sapien
ctgagcttgccttgcaaaactcatgaagggtgc

SEQ ID NO: 814432 - DNA, 33 bp, Homo sapien
ctgagcttgccttgcagaactcatgaagggtgc

SEQ ID NO: 814433 - DNA, 33 bp, Homo sapien
gagtgaatgaatccaaaggagctcaggagtgaa

SEQ ID NO: 814434 - DNA, 33 bp, Homo sapien
gagtgaatgaatccaagggagctcaggagtgaa

SEQ ID NO: 814435 - DNA, 33 bp, Homo sapien
gactgaatagtgtatacggtacgtgtgtcttgt

SEQ ID NO: 814436 - DNA, 33 bp, Homo sapien
gactgaatagtgtatatggtacgtgtgtcttgt

SEQ ID NO: 814437 - DNA, 33 bp, Homo sapien
gtttgtaccacaaggaaatgatgaatgcttgag

SEQ ID NO: 814438 - DNA, 33 bp, Homo sapien
gtttgtaccacaaggacatgatgaatgcttgag

SEQ ID NO: 814439 - DNA, 33 bp, Homo sapien
tgtaaagctggctaacaatgacggggcatgatg

SEQ ID NO: 814440 - DNA, 33 bp, Homo sapien
tgtaaagctggctaacgatgacggggcatgatg

SEQ ID NO: 814441 - DNA, 33 bp, Homo sapien
ctcagtgagcactgtccaagcacttctgttagg

SEQ ID NO: 814442 - DNA, 33 bp, Homo sapien
ctcagtgagcactgtcgaagcacttctgttagg

SEQ ID NO: 814443 - DNA, 33 bp, Homo sapien
gtctatgctgaagtgacaaggataggaaaactg

SEQ ID NO: 814444 - DNA, 33 bp, Homo sapien
gtctatgctgaagtgataaggataggaaaactg

SEQ ID NO: 814445 - DNA, 33 bp, Homo sapien
cttacaactgtgccacacatatctagaatcctc

SEQ ID NO: 814446 - DNA, 33 bp, Homo sapien
cttacaactgtgccacgcatatctagaatcctc

SEQ ID NO: 814447 - DNA, 33 bp, Homo sapien
aaaaacataatcctccaaaatgaagtcattcct

SEQ ID NO: 814448 - DNA, 33 bp, Homo sapien
aaaaacataatcctcccaaatgaagtcattcct

SEQ ID NO: 814449 - DNA, 33 bp, Homo sapien
gagaaggagctgtaaccgaaaggtatggaaaga

SEQ ID NO: 814450 - DNA, 33 bp, Homo sapien
gagaaggagctgtaactgaaaggtatggaaaga

SEQ ID NO: 814451 - DNA, 33 bp, Homo sapien
actctacttgtctgagccatgtttgtagagaaa

SEQ ID NO: 814452 - DNA, 33 bp, Homo sapien
actctacttgtctgagtcatgtttgtagagaaa

SEQ ID NO: 814453 - DNA, 33 bp, Homo sapien
aaagattttcattatccccatattactgtttaa

SEQ ID NO: 814454 - DNA, 33 bp, Homo sapien
aaagattttcattatctccatattactgtttaa

SEQ ID NO: 814455 - DNA, 33 bp, Homo sapien
gatgactaacctactcactgtctgtatgaattt

SEQ ID NO: 814456 - DNA, 33 bp, Homo sapien
gatgactaacctactcgctgtctgtatgaattt

SEQ ID NO: 814457 - DNA, 33 bp, Homo sapien
gtaatacttcctgccacgtttgcaataattaga

SEQ ID NO: 814458 - DNA, 33 bp, Homo sapien
gtaatacttcctgccatgtttgcaataattaga

SEQ ID NO: 814459 - DNA, 33 bp, Homo sapien
tcatggacacatttaacgaacaagaattgtggc

SEQ ID NO: 814460 - DNA, 33 bp, Homo sapien
tcatggacacatttaatgaacaagaattgtggc

SEQ ID NO: 814461 - DNA, 33 bp, Homo sapien
taatatttttcgaagcaatgaaagctttattat

SEQ ID NO: 814462 - DNA, 33 bp, Homo sapien
taatatttttcgaagcgatgaaagctttattat

SEQ ID NO: 814463 - DNA, 33 bp, Homo sapien
ctaattgccaatcgggaagtcttggaattcatc

SEQ ID NO: 814464 - DNA, 33 bp, Homo sapien
ctaattgccaatcggggagtcttggaattcatc

SEQ ID NO: 814465 - DNA, 33 bp, Homo sapien
ctaaaacatgtaaaacaaaactgtagcctgaac

SEQ ID NO: 814466 - DNA, 33 bp, Homo sapien
ctaaaacatgtaaaaccaaactgtagcctgaac

SEQ ID NO: 814467 - DNA, 33 bp, Homo sapien
gaaaccagataaaagaagtgaatttgctcatag

SEQ ID NO: 814468 - DNA, 33 bp, Homo sapien
gaaaccagataaaagaggtgaatttgctcatag

SEQ ID NO: 814469 - DNA, 33 bp, Homo sapien
tctgttgagcattatgcaagaactaaaacaggt

SEQ ID NO: 814470 - DNA, 33 bp, Homo sapien
tctgttgagcattatggaagaactaaaacaggt

SEQ ID NO: 814471 - DNA, 33 bp, Homo sapien
catgataaaaacaacacggaaccactctgtgga

SEQ ID NO: 814472 - DNA, 33 bp, Homo sapien
catgataaaaacaacatggaaccactctgtgga

SEQ ID NO: 814473 - DNA, 33 bp, Homo sapien
cttgttccgaaactccagcctttgctcctagcc

SEQ ID NO: 814474 - DNA, 33 bp, Homo sapien
cttgttccgaaactccggcctttgctcctagcc

SEQ ID NO: 814475 - DNA, 33 bp, Homo sapien
aaaaaggcacctcaaacgaatggtgtagtgttg

SEQ ID NO: 814476 - DNA, 33 bp, Homo sapien
aaaaaggcacctcaaatgaatggtgtagtgttg

SEQ ID NO: 814477 - DNA, 33 bp, Homo sapien
cagcactatttgctgaaaagacttttctcatat

SEQ ID NO: 814478 - DNA, 33 bp, Homo sapien
cagcactatttgctgagaagacttttctcatat

SEQ ID NO: 814479 - DNA, 33 bp, Homo sapien
acacaataccgaacacaataccgaacacaatac

SEQ ID NO: 814480 - DNA, 33 bp, Homo sapien
acacaataccgaacaccataccgaacacaatac

SEQ ID NO: 814481 - DNA, 33 bp, Homo sapien
aattggaacattcttacagtttgtgtaaaaagc

SEQ ID NO: 814482 - DNA, 33 bp, Homo sapien
aattggaacattcttatagtttgtgtaaaaagc

SEQ ID NO: 814483 - DNA, 33 bp, Homo sapien
gcaacaaagcttagaaacatattactgtgattc

SEQ ID NO: 814484 - DNA, 33 bp, Homo sapien
gcaacaaagcttagaaccatattactgtgattc

SEQ ID NO: 814485 - DNA, 33 bp, Homo sapien
aaaaatgctaggtgaacgcagaaaaccgaaacc

SEQ ID NO: 814486 - DNA, 33 bp, Homo sapien
aaaaatgctaggtgaatgcagaaaaccgaaacc

SEQ ID NO: 814487 - DNA, 33 bp, Homo sapien
ttattttgtcatggaccagtaacaaactatttt

SEQ ID NO: 814488 - DNA, 33 bp, Homo sapien
ttattttgtcatggacgagtaacaaactatttt

SEQ ID NO: 814489 - DNA, 33 bp, Homo sapien
gagccagataaattcacgtagtatccataacag

SEQ ID NO: 814490 - DNA, 33 bp, Homo sapien
gagccagataaattcatgtagtatccataacag

SEQ ID NO: 814491 - DNA, 33 bp, Homo sapien
acacaaagtagttatgaaacctatacccaatgt

SEQ ID NO: 814492 - DNA, 33 bp, Homo sapien
acacaaagtagttatggaacctatacccaatgt

SEQ ID NO: 814493 - DNA, 33 bp, Homo sapien
caagactgttgcgactaaaagacagaaggctgt

SEQ ID NO: 814494 - DNA, 33 bp, Homo sapien
caagactgttgcgactgaaagacagaaggctgt

SEQ ID NO: 814495 - DNA, 33 bp, Homo sapien
aaaggtaggtactttacggtgagaaaagagaca

SEQ ID NO: 814496 - DNA, 33 bp, Homo sapien
aaaggtaggtactttatggtgagaaaagagaca

SEQ ID NO: 814497 - DNA, 33 bp, Homo sapien
aaaagactaaatcactaaaatcattgtcaacag

SEQ ID NO: 814498 - DNA, 33 bp, Homo sapien
aaaagactaaatcactcaaatcattgtcaacag

SEQ ID NO: 814499 - DNA, 33 bp, Homo sapien
taagtgtggtcaactacatcctctgaaaggcct

SEQ ID NO: 814500 - DNA, 33 bp, Homo sapien
taagtgtggtcaactagatcctctgaaaggcct

SEQ ID NO: 814501 - DNA, 33 bp, Homo sapien
gatcacactggtactaacatgacattgaccatt

SEQ ID NO: 814502 - DNA, 33 bp, Homo sapien
gatcacactggtactatcatgacattgaccatt

SEQ ID NO: 814503 - DNA, 33 bp, Homo sapien
aagaggaagataaaagaagcagctggaataaag

SEQ ID NO: 814504 - DNA, 33 bp, Homo sapien
aagaggaagataaaagcagcagctggaataaag

SEQ ID NO: 814505 - DNA, 33 bp, Homo sapien
gtactaaccaaaattacagtctattcactaaca

SEQ ID NO: 814506 - DNA, 33 bp, Homo sapien
gtactaaccaaaattatagtctattcactaaca

SEQ ID NO: 814507 - DNA, 33 bp, Homo sapien
gaacacacagagagacagcaccaactatgaaaa

SEQ ID NO: 814508 - DNA, 33 bp, Homo sapien
gaacacacagagagacggcaccaactatgaaaa

SEQ ID NO: 814509 - DNA, 33 bp, Homo sapien
caggcaaaaaaaaaaacgagagcctgtgcagga

SEQ ID NO: 814510 - DNA, 33 bp, Homo sapien
caggcaaaaaaaaaaatgagagcctgtgcagga

SEQ ID NO: 814511 - DNA, 33 bp, Homo sapien
caaccatcgactctatcaaatatcactgggatt

SEQ ID NO: 814512 - DNA, 33 bp, Homo sapien
caaccatcgactctattaaatatcactgggatt

SEQ ID NO: 814513 - DNA, 33 bp, Homo sapien
cataactatgaaatcaaaatgctccagaacaga

SEQ ID NO: 814514 - DNA, 33 bp, Homo sapien
cataactatgaaatcagaatgctccagaacaga

SEQ ID NO: 814515 - DNA, 33 bp, Homo sapien
gctgagaggcggttgacaatctgtagggctctg

SEQ ID NO: 814516 - DNA, 33 bp, Homo sapien
gctgagaggcggttgagaatctgtagggctctg

SEQ ID NO: 814517 - DNA, 33 bp, Homo sapien
gactttcggactattccatgtgttgttggattg

SEQ ID NO: 814518 - DNA, 33 bp, Homo sapien
gactttcggactattctatgtgttgttggattg

SEQ ID NO: 814519 - DNA, 33 bp, Homo sapien
tcattgtgtctttgccaggatgtaccacatttt

SEQ ID NO: 814520 - DNA, 33 bp, Homo sapien
tcattgtgtctttgccgggatgtaccacatttt

SEQ ID NO: 814521 - DNA, 33 bp, Homo sapien
cattacatctgatcccagaaaaatacaaaggat

SEQ ID NO: 814522 - DNA, 33 bp, Homo sapien
cattacatctgatcccggaaaaatacaaaggat

SEQ ID NO: 814523 - DNA, 33 bp, Homo sapien
caagaatgaaaagtcaagtgctgaatgggagaa

SEQ ID NO: 814524 - DNA, 33 bp, Homo sapien
caagaatgaaaagtcaggtgctgaatgggagaa

SEQ ID NO: 814525 - DNA, 33 bp, Homo sapien
gtttgtaacaattctaacaactatgacatagca

SEQ ID NO: 814526 - DNA, 33 bp, Homo sapien
gtttgtaacaattctagcaactatgacatagca

SEQ ID NO: 814527 - DNA, 33 bp, Homo sapien
tcttctcttttagggcaattttaaatttgtata

SEQ ID NO: 814528 - DNA, 33 bp, Homo sapien
tcttctcttttagggcgattttaaatttgtata

SEQ ID NO: 814529 - DNA, 33 bp, Homo sapien
gggatattgttggaaaaaaatatgattaggatt

SEQ ID NO: 814530 - DNA, 33 bp, Homo sapien
gggatattgttggaaagaaatatgattaggatt

SEQ ID NO: 814531 - DNA, 33 bp, Homo sapien
tttttacaaaacttccgcgtgtgattatattgt

SEQ ID NO: 814532 - DNA, 33 bp, Homo sapien
tttttacaaaacttcctcgtgtgattatattgt

SEQ ID NO: 814533 - DNA, 33 bp, Homo sapien
gaaaagaacaggagccactctgtctgataaaca

SEQ ID NO: 814534 - DNA, 33 bp, Homo sapien
gaaaagaacaggagccgctctgtctgataaaca

SEQ ID NO: 814535 - DNA, 33 bp, Homo sapien
aatatcccaagtaaaacagacggtcgcttggag

SEQ ID NO: 814536 - DNA, 33 bp, Homo sapien
aatatcccaagtaaaagagacggtcgcttggag

SEQ ID NO: 814537 - DNA, 33 bp, Homo sapien
ccatctcactctaatcaatatccaatcaatcaa

SEQ ID NO: 814538 - DNA, 33 bp, Homo sapien
ccatctcactctaatcgatatccaatcaatcaa

SEQ ID NO: 814539 - DNA, 33 bp, Homo sapien
agaattgtacattagaaaaagatttatacagag

SEQ ID NO: 814540 - DNA, 33 bp, Homo sapien
agaattgtacattagagaaagatttatacagag

SEQ ID NO: 814541 - DNA, 33 bp, Homo sapien
gaaggcttaattttagcagaggattttgggacc

SEQ ID NO: 814542 - DNA, 33 bp, Homo sapien
gaaggcttaattttagtagaggattttgggacc

SEQ ID NO: 814543 - DNA, 33 bp, Homo sapien
aatttccacacgaatacgtttcctccactattt

SEQ ID NO: 814544 - DNA, 33 bp, Homo sapien
aatttccacacgaatatgtttcctccactattt

SEQ ID NO: 814545 - DNA, 33 bp, Homo sapien
tttcaacatgggtacactgatttatatttttta

SEQ ID NO: 814546 - DNA, 33 bp, Homo sapien
tttcaacatgggtacattgatttatatttttta

SEQ ID NO: 814547 - DNA, 33 bp, Homo sapien
aatgcccactgtatgaagttttgaaactataaa

SEQ ID NO: 814548 - DNA, 33 bp, Homo sapien
aatgcccactgtatgatgttttgaaactataaa

SEQ ID NO: 814549 - DNA, 33 bp, Homo sapien
actcagttacatctcccacttgcctaaggtagc

SEQ ID NO: 814550 - DNA, 33 bp, Homo sapien
actcagttacatctccgacttgcctaaggtagc

SEQ ID NO: 814551 - DNA, 33 bp, Homo sapien
caaattaagtttttacaagccacaaatttggaa

SEQ ID NO: 814552 - DNA, 33 bp, Homo sapien
caaattaagtttttaccagccacaaatttggaa

SEQ ID NO: 814553 - DNA, 33 bp, Homo sapien
tccatgacttggcagacattatctgaaaaatag

SEQ ID NO: 814554 - DNA, 33 bp, Homo sapien
tccatgacttggcagagattatctgaaaaatag

SEQ ID NO: 814555 - DNA, 33 bp, Homo sapien
ggtcctaatgccattacaggatgccttgcagag

SEQ ID NO: 814556 - DNA, 33 bp, Homo sapien
ggtcctaatgccattataggatgccttgcagag

SEQ ID NO: 814557 - DNA, 33 bp, Homo sapien
attgcgctccctaacccgcacagatatacatac

SEQ ID NO: 814558 - DNA, 33 bp, Homo sapien
attgcgctccctaacctgcacagatatacatac

SEQ ID NO: 814559 - DNA, 33 bp, Homo sapien
aacagtggcttgtataacactttacaaattcaa

SEQ ID NO: 814560 - DNA, 33 bp, Homo sapien
aacagtggcttgtataccactttacaaattcaa

SEQ ID NO: 814561 - DNA, 33 bp, Homo sapien
tcagcacagctttcaacgatgggtcttagtgag

SEQ ID NO: 814562 - DNA, 33 bp, Homo sapien
tcagcacagctttcaatgatgggtcttagtgag

SEQ ID NO: 814563 - DNA, 33 bp, Homo sapien
tagacactgggttcaaagagttatataagacaa

SEQ ID NO: 814564 - DNA, 33 bp, Homo sapien
tagacactgggttcaaggagttatataagacaa

SEQ ID NO: 814565 - DNA, 33 bp, Homo sapien
gagctattaagattcacgagatataatttctct

SEQ ID NO: 814566 - DNA, 33 bp, Homo sapien
gagctattaagattcatgagatataatttctct

SEQ ID NO: 814567 - DNA, 33 bp, Homo sapien
tgtttgactgaaaagcccaagttcttactactc

SEQ ID NO: 814568 - DNA, 33 bp, Homo sapien
tgtttgactgaaaagcgcaagttcttactactc

SEQ ID NO: 814569 - DNA, 33 bp, Homo sapien
ttacttagcatggcacaatggactattggcata

SEQ ID NO: 814570 - DNA, 33 bp, Homo sapien
ttacttagcatggcacgatggactattggcata

SEQ ID NO: 814571 - DNA, 33 bp, Homo sapien
ggttctgggcaaataaataacttgttcaaggta

SEQ ID NO: 814572 - DNA, 33 bp, Homo sapien
ggttctgggcaaataagtaacttgttcaaggta

SEQ ID NO: 814573 - DNA, 33 bp, Homo sapien
ctctggaagcttataacgctgcctgtagaaact

SEQ ID NO: 814574 - DNA, 33 bp, Homo sapien
ctctggaagcttataaggctgcctgtagaaact

SEQ ID NO: 814575 - DNA, 33 bp, Homo sapien
ctgtaaacctcaaaaagaatcttgtcaaggaag

SEQ ID NO: 814576 - DNA, 33 bp, Homo sapien
ctgtaaacctcaaaaataatcttgtcaaggaag

SEQ ID NO: 814577 - DNA, 33 bp, Homo sapien
tatccctgctaataaagttgacctattgttcgt

SEQ ID NO: 814578 - DNA, 33 bp, Homo sapien
tatccctgctaataaatttgacctattgttcgt

SEQ ID NO: 814579 - DNA, 33 bp, Homo sapien
aagcagattctcatggaacatatccacaagctg

SEQ ID NO: 814580 - DNA, 33 bp, Homo sapien
aagcagattctcatgggacatatccacaagctg

SEQ ID NO: 814581 - DNA, 33 bp, Homo sapien
gctcatggctgcagccacagcagagaagagaga

SEQ ID NO: 814582 - DNA, 33 bp, Homo sapien
gctcatggctgcagccgcagcagagaagagaga

SEQ ID NO: 814583 - DNA, 33 bp, Homo sapien
tgaacacagaggtacaccatccgcttccctgat

SEQ ID NO: 814584 - DNA, 33 bp, Homo sapien
tgaacacagaggtacagcatccgcttccctgat

SEQ ID NO: 814585 - DNA, 33 bp, Homo sapien
gatcgcttataatgacaaataggccctggtgtt

SEQ ID NO: 814586 - DNA, 33 bp, Homo sapien
gatcgcttataatgacgaataggccctggtgtt

SEQ ID NO: 814587 - DNA, 33 bp, Homo sapien
gctgcgtctgttggtaaatactgatcccagggt

SEQ ID NO: 814588 - DNA, 33 bp, Homo sapien
gctgcgtctgttggtagatactgatcccagggt

SEQ ID NO: 814589 - DNA, 33 bp, Homo sapien
ctcagcacggataatgaacaagataaaattcac

SEQ ID NO: 814590 - DNA, 33 bp, Homo sapien
ctcagcacggataatgcacaagataaaattcac

SEQ ID NO: 814591 - DNA, 33 bp, Homo sapien
tccattatgcaaggaacgtagtgcactggttgc

SEQ ID NO: 814592 - DNA, 33 bp, Homo sapien
tccattatgcaaggaatgtagtgcactggttgc

SEQ ID NO: 814593 - DNA, 33 bp, Homo sapien
cccccagtcaagcagacgagagacctaaccctc

SEQ ID NO: 814594 - DNA, 33 bp, Homo sapien
cccccagtcaagcagatgagagacctaaccctc

SEQ ID NO: 814595 - DNA, 33 bp, Homo sapien
atcactttccttggcaatagttgaagaatgcat

SEQ ID NO: 814596 - DNA, 33 bp, Homo sapien
atcactttccttggcagtagttgaagaatgcat

SEQ ID NO: 814597 - DNA, 33 bp, Homo sapien
cagacacaagcacataataggtggttccattta

SEQ ID NO: 814598 - DNA, 33 bp, Homo sapien
cagacacaagcacatactaggtggttccattta

SEQ ID NO: 814599 - DNA, 33 bp, Homo sapien
gtcctttctagctttccctagcaccccacagca

SEQ ID NO: 814600 - DNA, 33 bp, Homo sapien
gtcctttctagctttctctagcaccccacagca

SEQ ID NO: 814601 - DNA, 33 bp, Homo sapien
caactcaaagtgtaaccgggggctgccgtcagt

SEQ ID NO: 814602 - DNA, 33 bp, Homo sapien
caactcaaagtgtaactgggggctgccgtcagt

SEQ ID NO: 814603 - DNA, 33 bp, Homo sapien
aggaaaagatttggacacagcatacctaatcaa

SEQ ID NO: 814604 - DNA, 33 bp, Homo sapien
aggaaaagatttggacccagcatacctaatcaa

SEQ ID NO: 814605 - DNA, 33 bp, Homo sapien
tcagttgctgagcacacagttagaacctaggac

SEQ ID NO: 814606 - DNA, 33 bp, Homo sapien
tcagttgctgagcacagagttagaacctaggac

SEQ ID NO: 814607 - DNA, 33 bp, Homo sapien
cattcttcatttattcaatcaatgcacaaaaac

SEQ ID NO: 814608 - DNA, 33 bp, Homo sapien
cattcttcatttattcgatcaatgcacaaaaac

SEQ ID NO: 814609 - DNA, 33 bp, Homo sapien
ccacagaggtaaaggcactctcctgcggtcaca

SEQ ID NO: 814610 - DNA, 33 bp, Homo sapien
ccacagaggtaaaggcgctctcctgcggtcaca

SEQ ID NO: 814611 - DNA, 33 bp, Homo sapien
tcaatattcatgcatcgctgtgttctctgctcc

SEQ ID NO: 814612 - DNA, 33 bp, Homo sapien
tcaatattcatgcatctctgtgttctctgctcc

SEQ ID NO: 814613 - DNA, 33 bp, Homo sapien
taaacattccaaagaaaatgcagacttgcaaaa

SEQ ID NO: 814614 - DNA, 33 bp, Homo sapien
taaacattccaaagaagatgcagacttgcaaaa

SEQ ID NO: 814615 - DNA, 33 bp, Homo sapien
tgagtgaaaggacaaaagactgtgccgaaggat

SEQ ID NO: 814616 - DNA, 33 bp, Homo sapien
tgagtgaaaggacaaaggactgtgccgaaggat

SEQ ID NO: 814617 - DNA, 33 bp, Homo sapien
tcccacgccaagcaggacaagactgatgctggg

SEQ ID NO: 814618 - DNA, 33 bp, Homo sapien
tcccacgccaagcagggcaagactgatgctggg

SEQ ID NO: 814619 - DNA, 33 bp, Homo sapien
actagcctggcaatgcaacaacaaaaatgcagg

SEQ ID NO: 814620 - DNA, 33 bp, Homo sapien
actagcctggcaatgccacaacaaaaatgcagg

SEQ ID NO: 814621 - DNA, 33 bp, Homo sapien
cctgtctgcctgctaactggggtgcagaacttg

SEQ ID NO: 814622 - DNA, 33 bp, Homo sapien
cctgtctgcctgctaattggggtgcagaacttg

SEQ ID NO: 814623 - DNA, 33 bp, Homo sapien
atggatgtctcagctcaagcagaggaggcagtc

SEQ ID NO: 814624 - DNA, 33 bp, Homo sapien
atggatgtctcagctccagcagaggaggcagtc

SEQ ID NO: 814625 - DNA, 33 bp, Homo sapien
tctattccttaaactccagccgctcatgtcccc

SEQ ID NO: 814626 - DNA, 33 bp, Homo sapien
tctattccttaaactctagccgctcatgtcccc

SEQ ID NO: 814627 - DNA, 33 bp, Homo sapien
tgttgaatcaatctcagtagtatgaaagtatgg

SEQ ID NO: 814628 - DNA, 33 bp, Homo sapien
tgttgaatcaatctcattagtatgaaagtatgg

SEQ ID NO: 814629 - DNA, 33 bp, Homo sapien
cagaaaggacagatagaatttgcaaaggtcttg

SEQ ID NO: 814630 - DNA, 33 bp, Homo sapien
cagaaaggacagatagcatttgcaaaggtcttg

SEQ ID NO: 814631 - DNA, 33 bp, Homo sapien
tgaatgctcaacgtggaaggaagatgactgatc

SEQ ID NO: 814632 - DNA, 33 bp, Homo sapien
tgaatgctcaacgtgggaggaagatgactgatc

SEQ ID NO: 814633 - DNA, 33 bp, Homo sapien
gggaactgcgtgcaggcaagccaaccccactca

SEQ ID NO: 814634 - DNA, 33 bp, Homo sapien
gggaactgcgtgcagggaagccaaccccactca

SEQ ID NO: 814635 - DNA, 33 bp, Homo sapien
actctgattgtgccccaacaagtgccactgctc

SEQ ID NO: 814636 - DNA, 33 bp, Homo sapien
actctgattgtgcccccacaagtgccactgctc

SEQ ID NO: 814637 - DNA, 33 bp, Homo sapien
ggcccgcagaccatgaaagaagagttaaaaccc

SEQ ID NO: 814638 - DNA, 33 bp, Homo sapien
ggcccgcagaccatgagagaagagttaaaaccc

SEQ ID NO: 814639 - DNA, 33 bp, Homo sapien
cagcatcagtctacaactctgcaaggcggagct

SEQ ID NO: 814640 - DNA, 33 bp, Homo sapien
cagcatcagtctacaattctgcaaggcggagct

SEQ ID NO: 814641 - DNA, 33 bp, Homo sapien
ctccagcccgcacacaactgattctgaaaggag

SEQ ID NO: 814642 - DNA, 33 bp, Homo sapien
ctccagcccgcacacagctgattctgaaaggag

SEQ ID NO: 814643 - DNA, 33 bp, Homo sapien
ggaattaccttccaaagaaacatgtgtgctcac

SEQ ID NO: 814644 - DNA, 33 bp, Homo sapien
ggaattaccttccaaataaacatgtgtgctcac

SEQ ID NO: 814645 - DNA, 33 bp, Homo sapien
gcttcctcccatttcccattgaggagcagggat

SEQ ID NO: 814646 - DNA, 33 bp, Homo sapien
gcttcctcccatttcctattgaggagcagggat

SEQ ID NO: 814647 - DNA, 33 bp, Homo sapien
agagtggggacctcctaacaattttcaccctag

SEQ ID NO: 814648 - DNA, 33 bp, Homo sapien
agagtggggacctccttacaattttcaccctag

SEQ ID NO: 814649 - DNA, 33 bp, Homo sapien
tcctccagcaactctcagaaaggtctctttgct

SEQ ID NO: 814650 - DNA, 33 bp, Homo sapien
tcctccagcaactctcggaaaggtctctttgct

SEQ ID NO: 814651 - DNA, 33 bp, Homo sapien
tttgaggctcatcaaaagtgttcaagcaaacca

SEQ ID NO: 814652 - DNA, 33 bp, Homo sapien
tttgaggctcatcaaaggtgttcaagcaaacca

SEQ ID NO: 814653 - DNA, 33 bp, Homo sapien
cccctgggcaaattcacgacacgtctgagaccc

SEQ ID NO: 814654 - DNA, 33 bp, Homo sapien
cccctgggcaaattcaggacacgtctgagaccc

SEQ ID NO: 814655 - DNA, 33 bp, Homo sapien
aactatcagcaaactacgagtagaagggaatta

SEQ ID NO: 814656 - DNA, 33 bp, Homo sapien
aactatcagcaaactatgagtagaagggaatta

SEQ ID NO: 814657 - DNA, 33 bp, Homo sapien
gctaaacgtaagcaaacctgccataaatacaga

SEQ ID NO: 814658 - DNA, 33 bp, Homo sapien
gctaaacgtaagcaaagctgccataaatacaga

SEQ ID NO: 814659 - DNA, 33 bp, Homo sapien
ccatatttggaaatgacctactacacttgcaaa

SEQ ID NO: 814660 - DNA, 33 bp, Homo sapien
ccatatttggaaatgatctactacacttgcaaa

SEQ ID NO: 814661 - DNA, 33 bp, Homo sapien
gagtgcagatttggccggctttcttagagcatg

SEQ ID NO: 814662 - DNA, 33 bp, Homo sapien
gagtgcagatttggcctgctttcttagagcatg

SEQ ID NO: 814663 - DNA, 33 bp, Homo sapien
tcacatctttgcctgaaatggaaatcggggagt

SEQ ID NO: 814664 - DNA, 33 bp, Homo sapien
tcacatctttgcctgagatggaaatcggggagt

SEQ ID NO: 814665 - DNA, 33 bp, Homo sapien
atactcatttattcaacgtgtatttcacagggt

SEQ ID NO: 814666 - DNA, 33 bp, Homo sapien
atactcatttattcaatgtgtatttcacagggt

SEQ ID NO: 814667 - DNA, 33 bp, Homo sapien
tttagactttggagcccattttcttctttcata

SEQ ID NO: 814668 - DNA, 33 bp, Homo sapien
tttagactttggagcctattttcttctttcata

SEQ ID NO: 814669 - DNA, 33 bp, Homo sapien
agagacgctgagtagacgagaacagccaacatc

SEQ ID NO: 814670 - DNA, 33 bp, Homo sapien
agagacgctgagtagatgagaacagccaacatc

SEQ ID NO: 814671 - DNA, 33 bp, Homo sapien
gggcttgtcatgagaaccaagtttgttgttttc

SEQ ID NO: 814672 - DNA, 33 bp, Homo sapien
gggcttgtcatgagaatcaagtttgttgttttc

SEQ ID NO: 814673 - DNA, 33 bp, Homo sapien
tgcttgcttttcttcaactttccaaaatcccag

SEQ ID NO: 814674 - DNA, 33 bp, Homo sapien
tgcttgcttttcttcatctttccaaaatcccag

SEQ ID NO: 814675 - DNA, 33 bp, Homo sapien
accttcccagacactaacaggagaatatggaaa

SEQ ID NO: 814676 - DNA, 33 bp, Homo sapien
accttcccagacactagcaggagaatatggaaa

SEQ ID NO: 814677 - DNA, 33 bp, Homo sapien
gacaggcttactgactaactgaggagctaaccg

SEQ ID NO: 814678 - DNA, 33 bp, Homo sapien
gacaggcttactgactgactgaggagctaaccg

SEQ ID NO: 814679 - DNA, 33 bp, Homo sapien
catgacgtacaggagcaatgaggagtttcctgg

SEQ ID NO: 814680 - DNA, 33 bp, Homo sapien
catgacgtacaggagcgatgaggagtttcctgg

SEQ ID NO: 814681 - DNA, 33 bp, Homo sapien
gcaatgtgagagaaaaagtctggcacatcgtac

SEQ ID NO: 814682 - DNA, 33 bp, Homo sapien
gcaatgtgagagaaaacgtctggcacatcgtac

SEQ ID NO: 814683 - DNA, 33 bp, Homo sapien
aaaataatggaaaatacctcattcataacttta

SEQ ID NO: 814684 - DNA, 33 bp, Homo sapien
aaaataatggaaaatatctcattcataacttta

SEQ ID NO: 814685 - DNA, 33 bp, Homo sapien
taataacaatggtcaacgaatatctgcttgttt

SEQ ID NO: 814686 - DNA, 33 bp, Homo sapien
taataacaatggtcaatgaatatctgcttgttt

SEQ ID NO: 814687 - DNA, 33 bp, Homo sapien
tctgttcatagacaccaaaataaaaaagaccag

SEQ ID NO: 814688 - DNA, 33 bp, Homo sapien
tctgttcatagacaccgaaataaaaaagaccag

SEQ ID NO: 814689 - DNA, 33 bp, Homo sapien
ttcaaccaaagctctacggttagaaagcagttc

SEQ ID NO: 814690 - DNA, 33 bp, Homo sapien
ttcaaccaaagctctatggttagaaagcagttc

SEQ ID NO: 814691 - DNA, 33 bp, Homo sapien
tttcatttacctcatacctagtgtttcatctca

SEQ ID NO: 814692 - DNA, 33 bp, Homo sapien
tttcatttacctcatatctagtgtttcatctca

SEQ ID NO: 814693 - DNA, 33 bp, Homo sapien
gctaataaatcagaaaacttgtttgaatcccaa

SEQ ID NO: 814694 - DNA, 33 bp, Homo sapien
gctaataaatcagaaaccttgtttgaatcccaa

SEQ ID NO: 814695 - DNA, 33 bp, Homo sapien
gcacttcaggcagccacaaccaatcaaccccaa

SEQ ID NO: 814696 - DNA, 33 bp, Homo sapien
gcacttcaggcagccataaccaatcaaccccaa

SEQ ID NO: 814697 - DNA, 33 bp, Homo sapien
tgttccgagccacaacggtctgagaaggtaaag

SEQ ID NO: 814698 - DNA, 33 bp, Homo sapien
tgttccgagccacaactgtctgagaaggtaaag

SEQ ID NO: 814699 - DNA, 33 bp, Homo sapien
acttttaggggaattaactccaggttccagagt

SEQ ID NO: 814700 - DNA, 33 bp, Homo sapien
acttttaggggaattagctccaggttccagagt

SEQ ID NO: 814701 - DNA, 33 bp, Homo sapien
gaatttgttggtcaaactgcagaataattactg

SEQ ID NO: 814702 - DNA, 33 bp, Homo sapien
gaatttgttggtcaaattgcagaataattactg

SEQ ID NO: 814703 - DNA, 33 bp, Homo sapien
cacactctgagattggaattgactagaatgctt

SEQ ID NO: 814704 - DNA, 33 bp, Homo sapien
cacactctgagattgggattgactagaatgctt

SEQ ID NO: 814705 - DNA, 33 bp, Homo sapien
tctgaagtccgctaagcacatgttccagcctac

SEQ ID NO: 814706 - DNA, 33 bp, Homo sapien
tctgaagtccgctaagtacatgttccagcctac

SEQ ID NO: 814707 - DNA, 33 bp, Homo sapien
atgctcacgtgatatccaccattgtctcttggc

SEQ ID NO: 814708 - DNA, 33 bp, Homo sapien
atgctcacgtgatatctaccattgtctcttggc

SEQ ID NO: 814709 - DNA, 33 bp, Homo sapien
ataaaaaagcattacaatagggattgcaacctg

SEQ ID NO: 814710 - DNA, 33 bp, Homo sapien
ataaaaaagcattacagtagggattgcaacctg

SEQ ID NO: 814711 - DNA, 33 bp, Homo sapien
ttgcccccacacaataaagacagaagatgtgga

SEQ ID NO: 814712 - DNA, 33 bp, Homo sapien
ttgcccccacacaatagagacagaagatgtgga

SEQ ID NO: 814713 - DNA, 33 bp, Homo sapien
tccacagagggaaggacgtcgccagttgggaag

SEQ ID NO: 814714 - DNA, 33 bp, Homo sapien
tccacagagggaaggatgtcgccagttgggaag

SEQ ID NO: 814715 - DNA, 33 bp, Homo sapien
attcacctgggatacacgtcaaaatgatgtaga

SEQ ID NO: 814716 - DNA, 33 bp, Homo sapien
attcacctgggatacatgtcaaaatgatgtaga

SEQ ID NO: 814717 - DNA, 33 bp, Homo sapien
tcaggaaaacaatataactagcacgtcgacccc

SEQ ID NO: 814718 - DNA, 33 bp, Homo sapien
tcaggaaaacaatatatctagcacgtcgacccc

SEQ ID NO: 814719 - DNA, 33 bp, Homo sapien
gccacctctgtgatgacgtatgtccttaaacac

SEQ ID NO: 814720 - DNA, 33 bp, Homo sapien
gccacctctgtgatgatgtatgtccttaaacac

SEQ ID NO: 814721 - DNA, 33 bp, Homo sapien
acaagagtgacaatgcaccagggcttcccacgg

SEQ ID NO: 814722 - DNA, 33 bp, Homo sapien
acaagagtgacaatgcgccagggcttcccacgg

SEQ ID NO: 814723 - DNA, 33 bp, Homo sapien
tccctgccttggcttacacagtaccgtctgcct

SEQ ID NO: 814724 - DNA, 33 bp, Homo sapien
tccctgccttggcttatacagtaccgtctgcct

SEQ ID NO: 814725 - DNA, 33 bp, Homo sapien
gaggcaggaaatagtaccaagcactccaggatc

SEQ ID NO: 814726 - DNA, 33 bp, Homo sapien
gaggcaggaaatagtagcaagcactccaggatc

SEQ ID NO: 814727 - DNA, 33 bp, Homo sapien
agcactctgggcatcacggtttgtaagcagctg

SEQ ID NO: 814728 - DNA, 33 bp, Homo sapien
agcactctgggcatcatggtttgtaagcagctg

SEQ ID NO: 814729 - DNA, 33 bp, Homo sapien
gatcatcgagagaacccgcagatgccctgggga

SEQ ID NO: 814730 - DNA, 33 bp, Homo sapien
gatcatcgagagaacctgcagatgccctgggga

SEQ ID NO: 814731 - DNA, 33 bp, Homo sapien
acacactagccccacaaaattctacctgtaggt

SEQ ID NO: 814732 - DNA, 33 bp, Homo sapien
acacactagccccacagaattctacctgtaggt

SEQ ID NO: 814733 - DNA, 33 bp, Homo sapien
tctgttatggtctgaacatggtctccagaattc

SEQ ID NO: 814734 - DNA, 33 bp, Homo sapien
tctgttatggtctgaatatggtctccagaattc

SEQ ID NO: 814735 - DNA, 33 bp, Homo sapien
gtataaattggaaagaataaggcgacacatgta

SEQ ID NO: 814736 - DNA, 33 bp, Homo sapien
gtataaattggaaagagtaaggcgacacatgta

SEQ ID NO: 814737 - DNA, 33 bp, Homo sapien
tgagtctggagaaaaaagtgccaggaaagaagt

SEQ ID NO: 814738 - DNA, 33 bp, Homo sapien
tgagtctggagaaaaaggtgccaggaaagaagt

SEQ ID NO: 814739 - DNA, 33 bp, Homo sapien
gggtgctcagtttaagacatttatctcctcaag

SEQ ID NO: 814740 - DNA, 33 bp, Homo sapien
gggtgctcagtttaagtcatttatctcctcaag

SEQ ID NO: 814741 - DNA, 33 bp, Homo sapien
acaatagctgctattaggtgcttaccctgggct

SEQ ID NO: 814742 - DNA, 33 bp, Homo sapien
acaatagctgctattatgtgcttaccctgggct

SEQ ID NO: 814743 - DNA, 33 bp, Homo sapien
ctaaacatggaaaagcagagttcatttgcccca

SEQ ID NO: 814744 - DNA, 33 bp, Homo sapien
ctaaacatggaaaagctgagttcatttgcccca

SEQ ID NO: 814745 - DNA, 33 bp, Homo sapien
acagtgttaccttatcacatcctcatcacatcc

SEQ ID NO: 814746 - DNA, 33 bp, Homo sapien
acagtgttaccttatcgcatcctcatcacatcc

SEQ ID NO: 814747 - DNA, 33 bp, Homo sapien
gtgcacagaggatagacgaaacctgggacgatc

SEQ ID NO: 814748 - DNA, 33 bp, Homo sapien
gtgcacagaggatagatgaaacctgggacgatc

SEQ ID NO: 814749 - DNA, 33 bp, Homo sapien
acatgaactaacatcactgaagaccaggcccaa

SEQ ID NO: 814750 - DNA, 33 bp, Homo sapien
acatgaactaacatcattgaagaccaggcccaa

SEQ ID NO: 814751 - DNA, 33 bp, Homo sapien
caacatatcctcacaaatgtgatctgtctccct

SEQ ID NO: 814752 - DNA, 33 bp, Homo sapien
caacatatcctcacaagtgtgatctgtctccct

SEQ ID NO: 814753 - DNA, 33 bp, Homo sapien
gtccatctcaggtcccgacagctgtgcctgggg

SEQ ID NO: 814754 - DNA, 33 bp, Homo sapien
gtccatctcaggtccctacagctgtgcctgggg

SEQ ID NO: 814755 - DNA, 33 bp, Homo sapien
cacgttctaggcaacaaagctgagagcattgcc

SEQ ID NO: 814756 - DNA, 33 bp, Homo sapien
cacgttctaggcaacacagctgagagcattgcc

SEQ ID NO: 814757 - DNA, 33 bp, Homo sapien
gtgtggcatgtcacccagactctactaatcaga

SEQ ID NO: 814758 - DNA, 33 bp, Homo sapien
gtgtggcatgtcacccggactctactaatcaga

SEQ ID NO: 814759 - DNA, 33 bp, Homo sapien
tgtgggatttttaacaacattcttgctctctat

SEQ ID NO: 814760 - DNA, 33 bp, Homo sapien
tgtgggatttttaacagcattcttgctctctat

SEQ ID NO: 814761 - DNA, 33 bp, Homo sapien
aatgattcttgatacacgatgagccctcaagag

SEQ ID NO: 814762 - DNA, 33 bp, Homo sapien
aatgattcttgatacatgatgagccctcaagag

SEQ ID NO: 814763 - DNA, 33 bp, Homo sapien
ttatgaagccataaaacgcgggagctaggacca

SEQ ID NO: 814764 - DNA, 33 bp, Homo sapien
ttatgaagccataaaatgcgggagctaggacca

SEQ ID NO: 814765 - DNA, 33 bp, Homo sapien
gacatagaaatccagagatcttatattaagatc

SEQ ID NO: 814766 - DNA, 33 bp, Homo sapien
gacatagaaatccagatatcttatattaagatc

SEQ ID NO: 814767 - DNA, 33 bp, Homo sapien
agaaattttctggcataaaaggggcctcttaga

SEQ ID NO: 814768 - DNA, 33 bp, Homo sapien
agaaattttctggcatgaaaggggcctcttaga

SEQ ID NO: 814769 - DNA, 33 bp, Homo sapien
ttactgtctctctacactcaccaaattataagc

SEQ ID NO: 814770 - DNA, 33 bp, Homo sapien
ttactgtctctctacattcaccaaattataagc

SEQ ID NO: 814771 - DNA, 33 bp, Homo sapien
aactaaggctaaatgagagtcaaaagggaaaga

SEQ ID NO: 814772 - DNA, 33 bp, Homo sapien
aactaaggctaaatgatagtcaaaagggaaaga

SEQ ID NO: 814773 - DNA, 33 bp, Homo sapien
ccatatcctgaaactaataaagtggtgtgtttt

SEQ ID NO: 814774 - DNA, 33 bp, Homo sapien
ccatatcctgaaactattaaagtggtgtgtttt

SEQ ID NO: 814775 - DNA, 33 bp, Homo sapien
cgaagtgcacacacaagaaatgcacaaatggcg

SEQ ID NO: 814776 - DNA, 33 bp, Homo sapien
cgaagtgcacacacaataaatgcacaaatggcg

SEQ ID NO: 814777 - DNA, 33 bp, Homo sapien
gccaacagcaatcgcaacaaccaggtgttagga

SEQ ID NO: 814778 - DNA, 33 bp, Homo sapien
gccaacagcaatcgcagcaaccaggtgttagga

SEQ ID NO: 814779 - DNA, 33 bp, Homo sapien
caaaattctattcctacgttaattttccataag

SEQ ID NO: 814780 - DNA, 33 bp, Homo sapien
caaaattctattcctatgttaattttccataag

SEQ ID NO: 814781 - DNA, 33 bp, Homo sapien
agacactgaaccagaaaggaatactggggtaaa

SEQ ID NO: 814782 - DNA, 33 bp, Homo sapien
agacactgaaccagaacggaatactggggtaaa

SEQ ID NO: 814783 - DNA, 33 bp, Homo sapien
caaaagtaatgaattacggtcacaaaaagtaat

SEQ ID NO: 814784 - DNA, 33 bp, Homo sapien
caaaagtaatgaattatggtcacaaaaagtaat

SEQ ID NO: 814785 - DNA, 33 bp, Homo sapien
tgaatttcagccctgagaatgaatcctccagga

SEQ ID NO: 814786 - DNA, 33 bp, Homo sapien
tgaatttcagccctgataatgaatcctccagga

SEQ ID NO: 814787 - DNA, 33 bp, Homo sapien
gggctgaaattcaaaactcatgtgggatttcgt

SEQ ID NO: 814788 - DNA, 33 bp, Homo sapien
gggctgaaattcaaaagtcatgtgggatttcgt

SEQ ID NO: 814789 - DNA, 33 bp, Homo sapien
tctcttagatgctatcaacctcgttcacagagg

SEQ ID NO: 814790 - DNA, 33 bp, Homo sapien
tctcttagatgctatcgacctcgttcacagagg

SEQ ID NO: 814791 - DNA, 33 bp, Homo sapien
caactgggacatatcaagatttgaaaacacatc

SEQ ID NO: 814792 - DNA, 33 bp, Homo sapien
caactgggacatatcaggatttgaaaacacatc

SEQ ID NO: 814793 - DNA, 33 bp, Homo sapien
tcttgctgctggtttccatactgtgctgcatgg

SEQ ID NO: 814794 - DNA, 33 bp, Homo sapien
tcttgctgctggtttctatactgtgctgcatgg

SEQ ID NO: 814795 - DNA, 33 bp, Homo sapien
aaagtagttgggaaataaagtccgctgttcaca

SEQ ID NO: 814796 - DNA, 33 bp, Homo sapien
aaagtagttgggaaatgaagtccgctgttcaca

SEQ ID NO: 814797 - DNA, 33 bp, Homo sapien
cccctggaacaaacacaggcttcagagccagcc

SEQ ID NO: 814798 - DNA, 33 bp, Homo sapien
cccctggaacaaacacgggcttcagagccagcc

SEQ ID NO: 814799 - DNA, 33 bp, Homo sapien
aaggctccagctcttaacactgtcacattgagt

SEQ ID NO: 814800 - DNA, 33 bp, Homo sapien
aaggctccagctcttatcactgtcacattgagt

SEQ ID NO: 814801 - DNA, 33 bp, Homo sapien
tggaaaaagtctttgcaaattatgatcccaatt

SEQ ID NO: 814802 - DNA, 33 bp, Homo sapien
tggaaaaagtctttgcgaattatgatcccaatt

SEQ ID NO: 814803 - DNA, 33 bp, Homo sapien
aatcctctcaataggcccgggagatgtatagac

SEQ ID NO: 814804 - DNA, 33 bp, Homo sapien
aatcctctcaataggctcgggagatgtatagac

SEQ ID NO: 814805 - DNA, 33 bp, Homo sapien
ggccagtcatgctgtacagagggatcagcaaag

SEQ ID NO: 814806 - DNA, 33 bp, Homo sapien
ggccagtcatgctgtagagagggatcagcaaag

SEQ ID NO: 814807 - DNA, 33 bp, Homo sapien
accatgttggttcttccctccaaaatattgcta

SEQ ID NO: 814808 - DNA, 33 bp, Homo sapien
accatgttggttcttctctccaaaatattgcta

SEQ ID NO: 814809 - DNA, 33 bp, Homo sapien
ctattcaggttcttaaataggtgcatggatggc

SEQ ID NO: 814810 - DNA, 33 bp, Homo sapien
ctattcaggttcttaattaggtgcatggatggc

SEQ ID NO: 814811 - DNA, 33 bp, Homo sapien
ctctaaagtagtgagcagaaaaataatcaagtt

SEQ ID NO: 814812 - DNA, 33 bp, Homo sapien
ctctaaagtagtgagcggaaaaataatcaagtt

SEQ ID NO: 814813 - DNA, 33 bp, Homo sapien
ccttgcctggatcggacgtcattatctctcatg

SEQ ID NO: 814814 - DNA, 33 bp, Homo sapien
ccttgcctggatcggatgtcattatctctcatg

SEQ ID NO: 814815 - DNA, 33 bp, Homo sapien
tttgtgcttttgttgacgattttgctgtgtata

SEQ ID NO: 814816 - DNA, 33 bp, Homo sapien
tttgtgcttttgttgatgattttgctgtgtata

SEQ ID NO: 814817 - DNA, 33 bp, Homo sapien
tgatctctcctcttcagcatttttcatccctga

SEQ ID NO: 814818 - DNA, 33 bp, Homo sapien
tgatctctcctcttcatcatttttcatccctga

SEQ ID NO: 814819 - DNA, 33 bp, Homo sapien
gcaggagagctcagaaaaagctgtggattgggc

SEQ ID NO: 814820 - DNA, 33 bp, Homo sapien
gcaggagagctcagaagaagctgtggattgggc

SEQ ID NO: 814821 - DNA, 33 bp, Homo sapien
tttaccatcattggataaactttcacagaacca

SEQ ID NO: 814822 - DNA, 33 bp, Homo sapien
tttaccatcattggatcaactttcacagaacca

SEQ ID NO: 814823 - DNA, 33 bp, Homo sapien
gcaggtaagctctgcaccgtccagattgcaggg

SEQ ID NO: 814824 - DNA, 33 bp, Homo sapien
gcaggtaagctctgcagcgtccagattgcaggg

SEQ ID NO: 814825 - DNA, 33 bp, Homo sapien
aattccctttcaatacagcctgttcctggatag

SEQ ID NO: 814826 - DNA, 33 bp, Homo sapien
aattccctttcaatacggcctgttcctggatag

SEQ ID NO: 814827 - DNA, 33 bp, Homo sapien
gctgaagagagggcaaatgtttactgcaatttt

SEQ ID NO: 814828 - DNA, 33 bp, Homo sapien
gctgaagagagggcaactgtttactgcaatttt

SEQ ID NO: 814829 - DNA, 33 bp, Homo sapien
gtgcccgcttttcataacacaaaagataggtcc

SEQ ID NO: 814830 - DNA, 33 bp, Homo sapien
gtgcccgcttttcatagcacaaaagataggtcc

SEQ ID NO: 814831 - DNA, 33 bp, Homo sapien
ggagtatatgtcccacagtgatggtgccagtag

SEQ ID NO: 814832 - DNA, 33 bp, Homo sapien
ggagtatatgtcccacggtgatggtgccagtag

SEQ ID NO: 814833 - DNA, 33 bp, Homo sapien
tcctggggatgtggccagccctttttaagggat

SEQ ID NO: 814834 - DNA, 33 bp, Homo sapien
tcctggggatgtggccggccctttttaagggat

SEQ ID NO: 814835 - DNA, 33 bp, Homo sapien
tgaccagaggccgaccaatgagactcagttctg

SEQ ID NO: 814836 - DNA, 33 bp, Homo sapien
tgaccagaggccgaccgatgagactcagttctg

SEQ ID NO: 814837 - DNA, 33 bp, Homo sapien
agccagacagaaagtacgtccacccttttcaca

SEQ ID NO: 814838 - DNA, 33 bp, Homo sapien
agccagacagaaagtatgtccacccttttcaca

SEQ ID NO: 814839 - DNA, 33 bp, Homo sapien
agactagttctcaacacgaacaataactttgtt

SEQ ID NO: 814840 - DNA, 33 bp, Homo sapien
agactagttctcaacatgaacaataactttgtt

SEQ ID NO: 814841 - DNA, 33 bp, Homo sapien
ctagaagagaaggagacaagtggtggtttcaga

SEQ ID NO: 814842 - DNA, 33 bp, Homo sapien
ctagaagagaaggagagaagtggtggtttcaga

SEQ ID NO: 814843 - DNA, 33 bp, Homo sapien
aggagagagatgctaaagtccagaatagggaac

SEQ ID NO: 814844 - DNA, 33 bp, Homo sapien
aggagagagatgctaaggtccagaatagggaac

SEQ ID NO: 814845 - DNA, 33 bp, Homo sapien
tccagaggggacgggaaaatttcatgccttcag

SEQ ID NO: 814846 - DNA, 33 bp, Homo sapien
tccagaggggacgggagaatttcatgccttcag

SEQ ID NO: 814847 - DNA, 33 bp, Homo sapien
aagcagatttgcagggcaagagttcttagctag

SEQ ID NO: 814848 - DNA, 33 bp, Homo sapien
aagcagatttgcaggggaagagttcttagctag

SEQ ID NO: 814849 - DNA, 33 bp, Homo sapien
ctcagctaactcctgaagttcaagctagctttc

SEQ ID NO: 814850 - DNA, 33 bp, Homo sapien
ctcagctaactcctgaggttcaagctagctttc

SEQ ID NO: 814851 - DNA, 33 bp, Homo sapien
aacatgaaaaaaattacagccatgtgataccat

SEQ ID NO: 814852 - DNA, 33 bp, Homo sapien
aacatgaaaaaaattatagccatgtgataccat

SEQ ID NO: 814853 - DNA, 33 bp, Homo sapien
agtggcttacaggtcaatcctgcaaggcagaca

SEQ ID NO: 814854 - DNA, 33 bp, Homo sapien
agtggcttacaggtcactcctgcaaggcagaca

SEQ ID NO: 814855 - DNA, 33 bp, Homo sapien
cttccaaaggcaacacacccaccagtcactact

SEQ ID NO: 814856 - DNA, 33 bp, Homo sapien
cttccaaaggcaacactcccaccagtcactact

SEQ ID NO: 814857 - DNA, 33 bp, Homo sapien
tggagagattgagaacgcttggtacctattcac

SEQ ID NO: 814858 - DNA, 33 bp, Homo sapien
tggagagattgagaactcttggtacctattcac

SEQ ID NO: 814859 - DNA, 33 bp, Homo sapien
caactgtaaatctttccagatgaccttatatat

SEQ ID NO: 814860 - DNA, 33 bp, Homo sapien
caactgtaaatctttctagatgaccttatatat

SEQ ID NO: 814861 - DNA, 33 bp, Homo sapien
agggatatgatgatgaagaagacatgtccttgc

SEQ ID NO: 814862 - DNA, 33 bp, Homo sapien
agggatatgatgatgaggaagacatgtccttgc

SEQ ID NO: 814863 - DNA, 33 bp, Homo sapien
ctgaagcgtaagtgcaatacagcctcattgtgg

SEQ ID NO: 814864 - DNA, 33 bp, Homo sapien
ctgaagcgtaagtgcagtacagcctcattgtgg

SEQ ID NO: 814865 - DNA, 33 bp, Homo sapien; identical to SEQ ID NO: 814863

SEQ ID NO: 814866 - DNA, 33 bp, Homo sapien; identical to SEQ ID NO: 814864

SEQ ID NO: 814867 - DNA, 33 bp, Homo sapien
atgtttagtttcgtaagaatgccaaactgcctt

SEQ ID NO: 814868 - DNA, 33 bp, Homo sapien
atgtttagtttcgtaataatgccaaactgcctt

SEQ ID NO: 814869 - DNA, 33 bp, Homo sapien
agatgcagtctgattccataggtttctgggttt

SEQ ID NO: 814870 - DNA, 33 bp, Homo sapien
agatgcagtctgattctataggtttctgggttt

SEQ ID NO: 814871 - DNA, 33 bp, Homo sapien
atgaaaaacaggactaagtgatggctaagatcc

SEQ ID NO: 814872 - DNA, 33 bp, Homo sapien
atgaaaaacaggactacgtgatggctaagatcc

SEQ ID NO: 814873 - DNA, 33 bp, Homo sapien
agtaacaactcatttacggatagcagtctctct

SEQ ID NO: 814874 - DNA, 33 bp, Homo sapien
agtaacaactcatttatggatagcagtctctct

SEQ ID NO: 814875 - DNA, 33 bp, Homo sapien
tgggatgcccacattgcaagaggttgtgtgtgt

SEQ ID NO: 814876 - DNA, 33 bp, Homo sapien
tgggatgcccacattgtaagaggttgtgtgtgt

SEQ ID NO: 814877 - DNA, 33 bp, Homo sapien
ttggattggcatcaaacttctcgaaacaacaca

SEQ ID NO: 814878 - DNA, 33 bp, Homo sapien
ttggattggcatcaaatttctcgaaacaacaca

SEQ ID NO: 814879 - DNA, 33 bp, Homo sapien
taacattcaatcttgccagcccccatggtcatg

SEQ ID NO: 814880 - DNA, 33 bp, Homo sapien
taacattcaatcttgctagcccccatggtcatg

SEQ ID NO: 814881 - DNA, 33 bp, Homo sapien
tagagggatcctgtcaagacattcaatgacccc

SEQ ID NO: 814882 - DNA, 33 bp, Homo sapien
tagagggatcctgtcacgacattcaatgacccc

SEQ ID NO: 814883 - DNA, 33 bp, Homo sapien
ttaacagaagactttgaagggtcaaaaattgcc

SEQ ID NO: 814884 - DNA, 33 bp, Homo sapien
ttaacagaagactttggagggtcaaaaattgcc

SEQ ID NO: 814885 - DNA, 33 bp, Homo sapien
agaatgaggaaaaccaaaatttactatctgcca

SEQ ID NO: 814886 - DNA, 33 bp, Homo sapien
agaatgaggaaaaccacaatttactatctgcca

SEQ ID NO: 814887 - DNA, 33 bp, Homo sapien
gttgcctgcaggattcaaacaatgtgaagggaa

SEQ ID NO: 814888 - DNA, 33 bp, Homo sapien
gttgcctgcaggattcgaacaatgtgaagggaa

SEQ ID NO: 814889 - DNA, 33 bp, Homo sapien
cgaactttgatccctaccgcaaccataaaaaac

SEQ ID NO: 814890 - DNA, 33 bp, Homo sapien
cgaactttgatccctatcgcaaccataaaaaac

SEQ ID NO: 814891 - DNA, 33 bp, Homo sapien
ctaatgttcacagtcaactcccttctcaaccac

SEQ ID NO: 814892 - DNA, 33 bp, Homo sapien
ctaatgttcacagtcacctcccttctcaaccac

SEQ ID NO: 814893 - DNA, 33 bp, Homo sapien
ttaaatgctcatgacccggatgttgatagaaat

SEQ ID NO: 814894 - DNA, 33 bp, Homo sapien
ttaaatgctcatgacctggatgttgatagaaat

SEQ ID NO: 814895 - DNA, 33 bp, Homo sapien
attcagttataaccaacgttgagaaaatttcca

SEQ ID NO: 814896 - DNA, 33 bp, Homo sapien
attcagttataaccaatgttgagaaaatttcca

SEQ ID NO: 814897 - DNA, 33 bp, Homo sapien
ggacttctcttcaggaagaaaaagcatcagggg

SEQ ID NO: 814898 - DNA, 33 bp, Homo sapien
ggacttctcttcaggaggaaaaagcatcagggg

SEQ ID NO: 814899 - DNA, 33 bp, Homo sapien
agcccacaactcaagacgattgcacaagaacaa

SEQ ID NO: 814900 - DNA, 33 bp, Homo sapien
agcccacaactcaagatgattgcacaagaacaa

SEQ ID NO: 814901 - DNA, 33 bp, Homo sapien
ttttttttctttttgccagggtctcaatctgtc

SEQ ID NO: 814902 - DNA, 33 bp, Homo sapien
ttttttttctttttgcgagggtctcaatctgtc

SEQ ID NO: 814903 - DNA, 33 bp, Homo sapien
ttttcattctggaacaaattccaggcagaacag

SEQ ID NO: 814904 - DNA, 33 bp, Homo sapien
ttttcattctggaacagattccaggcagaacag

SEQ ID NO: 814905 - DNA, 33 bp, Homo sapien
ctacctcattagaccacgttggctgatctgagc

SEQ ID NO: 814906 - DNA, 33 bp, Homo sapien
ctacctcattagaccatgttggctgatctgagc

SEQ ID NO: 814907 - DNA, 33 bp, Homo sapien
gcaccagggtaggcccagcttcctgatattgtc

SEQ ID NO: 814908 - DNA, 33 bp, Homo sapien
gcaccagggtaggcccggcttcctgatattgtc

SEQ ID NO: 814909 - DNA, 33 bp, Homo sapien
aatttaaaactaaacaatacaatgtctgaaatt

SEQ ID NO: 814910 - DNA, 33 bp, Homo sapien
aatttaaaactaaacagtacaatgtctgaaatt

SEQ ID NO: 814911 - DNA, 33 bp, Homo sapien
tggtgatcacagaggacggtcattcatttgaag

SEQ ID NO: 814912 - DNA, 33 bp, Homo sapien
tggtgatcacagaggagggtcattcatttgaag

SEQ ID NO: 814913 - DNA, 33 bp, Homo sapien
aaataattattagcaaagtagttgaacagggac

SEQ ID NO: 814914 - DNA, 33 bp, Homo sapien
aaataattattagcaaggtagttgaacagggac

SEQ ID NO: 814915 - DNA, 33 bp, Homo sapien
acaaaaagcctaaaagcagtacagaaagaaggc

SEQ ID NO: 814916 - DNA, 33 bp, Homo sapien
acaaaaagcctaaaaggagtacagaaagaaggc

SEQ ID NO: 814917 - DNA, 33 bp, Homo sapien
gctctcagaaggaaagacaagcaaagagaaggc

SEQ ID NO: 814918 - DNA, 33 bp, Homo sapien
gctctcagaaggaaaggcaagcaaagagaaggc

SEQ ID NO: 814919 - DNA, 33 bp, Homo sapien
tttgctcatctatatactaggaacagctgttat

SEQ ID NO: 814920 - DNA, 33 bp, Homo sapien
tttgctcatctatatattaggaacagctgttat

SEQ ID NO: 814921 - DNA, 33 bp, Homo sapien
tgctcctgctgctgaccggggtgatggtggtga

SEQ ID NO: 814922 - DNA, 33 bp, Homo sapien
tgctcctgctgctgacgggggtgatggtggtga

SEQ ID NO: 814923 - DNA, 33 bp, Homo sapien
ggtgagcagatgtccacaggaagggaaggagca

SEQ ID NO: 814924 - DNA, 33 bp, Homo sapien
ggtgagcagatgtccataggaagggaaggagca

SEQ ID NO: 814925 - DNA, 33 bp, Homo sapien
gggtggccagtgccacagaaggagatccacagt

SEQ ID NO: 814926 - DNA, 33 bp, Homo sapien
gggtggccagtgccacggaaggagatccacagt

SEQ ID NO: 814927 - DNA, 33 bp, Homo sapien
caaggcactcccaacacagagctggcattcagg

SEQ ID NO: 814928 - DNA, 33 bp, Homo sapien
caaggcactcccaacatagagctggcattcagg

SEQ ID NO: 814929 - DNA, 33 bp, Homo sapien
gacagggcctacacgacgcccttttcatcatgg

SEQ ID NO: 814930 - DNA, 33 bp, Homo sapien
gacagggcctacacgatgcccttttcatcatgg

SEQ ID NO: 814931 - DNA, 33 bp, Homo sapien
tgtgtgagaccatgaaagacacgccctacgact

SEQ ID NO: 814932 - DNA, 33 bp, Homo sapien
tgtgtgagaccatgaaggacacgccctacgact

SEQ ID NO: 814933 - DNA, 33 bp, Homo sapien
cctttcagacttgcaacgtgaaacaaggaggca

SEQ ID NO: 814934 - DNA, 33 bp, Homo sapien
cctttcagacttgcaatgtgaaacaaggaggca

SEQ ID NO: 814935 - DNA, 33 bp, Homo sapien
acagccaaaaagaatgaaaaattggaaatcatc

SEQ ID NO: 814936 - DNA, 33 bp, Homo sapien
acagccaaaaagaatggaaaattggaaatcatc

SEQ ID NO: 814937 - DNA, 33 bp, Homo sapien
ttacagggagagattacgggcagttgcacagag

SEQ ID NO: 814938 - DNA, 33 bp, Homo sapien
ttacagggagagattatgggcagttgcacagag

SEQ ID NO: 814939 - DNA, 33 bp, Homo sapien
cacactctcaggaggtaaaaccgagatacccga

SEQ ID NO: 814940 - DNA, 33 bp, Homo sapien
cacactctcaggaggtgaaaccgagatacccga

SEQ ID NO: 814941 - DNA, 33 bp, Homo sapien
tttttgagaactaaaagttatggacatgccatc

SEQ ID NO: 814942 - DNA, 33 bp, Homo sapien
tttttgagaactaaaatttatggacatgccatc

SEQ ID NO: 814943 - DNA, 33 bp, Homo sapien
ctccagaggtcagcaccaggaaagctcgtgcat

SEQ ID NO: 814944 - DNA, 33 bp, Homo sapien
ctccagaggtcagcactaggaaagctcgtgcat

SEQ ID NO: 814945 - DNA, 33 bp, Homo sapien
gaggctcctcaggatcagaaagctaaaggcctc

SEQ ID NO: 814946 - DNA, 33 bp, Homo sapien
gaggctcctcaggatcggaaagctaaaggcctc

SEQ ID NO: 814947 - DNA, 33 bp, Homo sapien
gtccccaggcttgccacgcactaggagctcaga

SEQ ID NO: 814948 - DNA, 33 bp, Homo sapien
gtccccaggcttgccatgcactaggagctcaga

SEQ ID NO: 814949 - DNA, 33 bp, Homo sapien
caggtccctgccccaaaatcaccagctgaggga

SEQ ID NO: 814950 - DNA, 33 bp, Homo sapien
caggtccctgccccaagatcaccagctgaggga

SEQ ID NO: 814951 - DNA, 33 bp, Homo sapien
gggaagggtaaaggcactcctggcagaacacag

SEQ ID NO: 814952 - DNA, 33 bp, Homo sapien
gggaagggtaaaggcattcctggcagaacacag

SEQ ID NO: 814953 - DNA, 33 bp, Homo sapien
ggggctggaatcaggacacctgagttcttcttt

SEQ ID NO: 814954 - DNA, 33 bp, Homo sapien
ggggctggaatcaggagacctgagttcttcttt

SEQ ID NO: 814955 - DNA, 33 bp, Homo sapien
agttatgtgttcatgcactgttagttgtctccc

SEQ ID NO: 814956 - DNA, 33 bp, Homo sapien
agttatgtgttcatgcgctgttagttgtctccc

SEQ ID NO: 814957 - DNA, 33 bp, Homo sapien
gttcgaaatgtggcgacggtagagacctaaatg

SEQ ID NO: 814958 - DNA, 33 bp, Homo sapien
gttcgaaatgtggcgagggtagagacctaaatg

SEQ ID NO: 814959 - DNA, 33 bp, Homo sapien
ctgcaaagaggagatacaggaggtcaacaaggc

SEQ ID NO: 814960 - DNA, 33 bp, Homo sapien
ctgcaaagaggagatagaggaggtcaacaaggc

SEQ ID NO: 814961 - DNA, 33 bp, Homo sapien
gtgggcacttacgcagactgccttttcattcta

SEQ ID NO: 814962 - DNA, 33 bp, Homo sapien
gtgggcacttacgcagtctgccttttcattcta

SEQ ID NO: 814963 - DNA, 33 bp, Homo sapien
tgtacttgttcaacaccggaaccccatgcagca

SEQ ID NO: 814964 - DNA, 33 bp, Homo sapien
tgtacttgttcaacactggaaccccatgcagca

SEQ ID NO: 814965 - DNA, 33 bp, Homo sapien
tgtcctggaacacagaaagtgctcagtcagtgt

SEQ ID NO: 814966 - DNA, 33 bp, Homo sapien
tgtcctggaacacagagagtgctcagtcagtgt

SEQ ID NO: 814967 - DNA, 33 bp, Homo sapien
ctaacgctggccttaacggtttgttggcagatg

SEQ ID NO: 814968 - DNA, 33 bp, Homo sapien
ctaacgctggccttaatggtttgttggcagatg

SEQ ID NO: 814969 - DNA, 33 bp, Homo sapien
gtgaacgcattactgaaaagaatagaaactgat

SEQ ID NO: 814970 - DNA, 33 bp, Homo sapien
gtgaacgcattactgacaagaatagaaactgat

SEQ ID NO: 814971 - DNA, 33 bp, Homo sapien
gctttggctcctgcaaagtaaagaggtgccatc

SEQ ID NO: 814972 - DNA, 33 bp, Homo sapien
gctttggctcctgcaaggtaaagaggtgccatc

SEQ ID NO: 814973 - DNA, 33 bp, Homo sapien
ttcagctcaacgacaaatgagatggccaagttt

SEQ ID NO: 814974 - DNA, 33 bp, Homo sapien
ttcagctcaacgacaagtgagatggccaagttt

SEQ ID NO: 814975 - DNA, 33 bp, Homo sapien
gccctcagatgttagcgctccaaaaccaatggg

SEQ ID NO: 814976 - DNA, 33 bp, Homo sapien
gccctcagatgttagctctccaaaaccaatggg

SEQ ID NO: 814977 - DNA, 33 bp, Homo sapien
cggaccatagcagggaacaagtcaagagagctt

SEQ ID NO: 814978 - DNA, 33 bp, Homo sapien
cggaccatagcagggaccaagtcaagagagctt

SEQ ID NO: 814979 - DNA, 33 bp, Homo sapien
ggagggactgccagtaacactgtttttcttctg

SEQ ID NO: 814980 - DNA, 33 bp, Homo sapien
ggagggactgccagtagcactgtttttcttctg

SEQ ID NO: 814981 - DNA, 33 bp, Homo sapien
aatatgaaaaaaacaaacatggcaatacactta

SEQ ID NO: 814982 - DNA, 33 bp, Homo sapien
aatatgaaaaaaacaagcatggcaatacactta

SEQ ID NO: 814983 - DNA, 33 bp, Homo sapien
acacactccatggagcagacagatatgtacaca

SEQ ID NO: 814984 - DNA, 33 bp, Homo sapien
acacactccatggagcggacagatatgtacaca

SEQ ID NO: 814985 - DNA, 33 bp, Homo sapien
gaccaggattcaaattcaaggtcaattagatgc

SEQ ID NO: 814986 - DNA, 33 bp, Homo sapien
gaccaggattcaaatttaaggtcaattagatgc

SEQ ID NO: 814987 - DNA, 33 bp, Homo sapien
cagttcctgtatattacgtccacctttcccaaa

SEQ ID NO: 814988 - DNA, 33 bp, Homo sapien
cagttcctgtatattatgtccacctttcccaaa

SEQ ID NO: 814989 - DNA, 33 bp, Homo sapien
taggacctaacaaggaacaataggaaacaattc

SEQ ID NO: 814990 - DNA, 33 bp, Homo sapien
taggacctaacaaggatcaataggaaacaattc

SEQ ID NO: 814991 - DNA, 33 bp, Homo sapien
aggctttggaagaggcccatagtgctacaaaaa

SEQ ID NO: 814992 - DNA, 33 bp, Homo sapien
aggctttggaagaggctcatagtgctacaaaaa

SEQ ID NO: 814993 - DNA, 33 bp, Homo sapien
agtttaagccttctgaatcagaaaagagaagtc

SEQ ID NO: 814994 - DNA, 33 bp, Homo sapien
agtttaagccttctgactcagaaaagagaagtc

SEQ ID NO: 814995 - DNA, 33 bp, Homo sapien
gcaaatttttgtattaggaactcttctacttct

SEQ ID NO: 814996 - DNA, 33 bp, Homo sapien
gcaaatttttgtattatgaactcttctacttct

SEQ ID NO: 814997 - DNA, 33 bp, Homo sapien
ccttaaaactgtggtgaagtgttacacaagctc

SEQ ID NO: 814998 - DNA, 33 bp, Homo sapien
ccttaaaactgtggtgcagtgttacacaagctc

SEQ ID NO: 814999 - DNA, 33 bp, Homo sapien
tatcccagcaattcaaatgtaaaagctctcctc

SEQ ID NO: 815000 - DNA, 33 bp, Homo sapien
tatcccagcaattcaagtgtaaaagctctcctc

SEQ ID NO: 815001 - DNA, 33 bp, Homo sapien
aagtcaatcaagggcaccagtgacaatattaac

SEQ ID NO: 815002 - DNA, 33 bp, Homo sapien
aagtcaatcaagggcatcagtgacaatattaac

SEQ ID NO: 815003 - DNA, 33 bp, Homo sapien
aataatcaagccaatacctgagcctttctcttt

SEQ ID NO: 815004 - DNA, 33 bp, Homo sapien
aataatcaagccaatatctgagcctttctcttt

SEQ ID NO: 815005 - DNA, 33 bp, Homo sapien
tctgagcccacatccaataggatatgcatgagg

SEQ ID NO: 815006 - DNA, 33 bp, Homo sapien
tctgagcccacatccagtaggatatgcatgagg

SEQ ID NO: 815007 - DNA, 33 bp, Homo sapien
tgaaaaacagaggatacggacatcaaaaagaga

SEQ ID NO: 815008 - DNA, 33 bp, Homo sapien
tgaaaaacagaggatatggacatcaaaaagaga

SEQ ID NO: 815009 - DNA, 33 bp, Homo sapien
tcaggcttattccagcactactactacataaca

SEQ ID NO: 815010 - DNA, 33 bp, Homo sapien
tcaggcttattccagcgctactactacataaca

SEQ ID NO: 815011 - DNA, 33 bp, Homo sapien
cactttcaacttataaatacttagcatctacaa

SEQ ID NO: 815012 - DNA, 33 bp, Homo sapien
cactttcaacttataagtacttagcatctacaa

SEQ ID NO: 815013 - DNA, 33 bp, Homo sapien
cctgtttgtatgctcagatcattggtaagggga

SEQ ID NO: 815014 - DNA, 33 bp, Homo sapien
cctgtttgtatgctcatatcattggtaagggga

SEQ ID NO: 815015 - DNA, 33 bp, Homo sapien
acttaccaatagcttacacaattgaagttccac

SEQ ID NO: 815016 - DNA, 33 bp, Homo sapien
acttaccaatagcttatacaattgaagttccac

SEQ ID NO: 815017 - DNA, 33 bp, Homo sapien
tagcagagaaactgaaatgctaatcaagagcca

SEQ ID NO: 815018 - DNA, 33 bp, Homo sapien
tagcagagaaactgaactgctaatcaagagcca

SEQ ID NO: 815019 - DNA, 33 bp, Homo sapien
caaatcttcccataaaatacttatcatttgcat

SEQ ID NO: 815020 - DNA, 33 bp, Homo sapien
caaatcttcccataaagtacttatcatttgcat

SEQ ID NO: 815021 - DNA, 33 bp, Homo sapien
cgagtgagacacttaacctgtaacaagagctct

SEQ ID NO: 815022 - DNA, 33 bp, Homo sapien
cgagtgagacacttaatctgtaacaagagctct

SEQ ID NO: 815023 - DNA, 33 bp, Homo sapien
tggagcaccacgtgtacgatgttcagactgggg

SEQ ID NO: 815024 - DNA, 33 bp, Homo sapien
tggagcaccacgtgtatgatgttcagactgggg

SEQ ID NO: 815025 - DNA, 33 bp, Homo sapien
ttaatcatgagaggaccatattctgcctagccc

SEQ ID NO: 815026 - DNA, 33 bp, Homo sapien
ttaatcatgagaggactatattctgcctagccc

SEQ ID NO: 815027 - DNA, 33 bp, Homo sapien
ttttattacatggataagttgcatagtgttgaa

SEQ ID NO: 815028 - DNA, 33 bp, Homo sapien
ttttattacatggatacgttgcatagtgttgaa

SEQ ID NO: 815029 - DNA, 33 bp, Homo sapien
gtgagttgcaagacgccgaagaatctcatgtgg

SEQ ID NO: 815030 - DNA, 33 bp, Homo sapien
gtgagttgcaagacgctgaagaatctcatgtgg

SEQ ID NO: 815031 - DNA, 33 bp, Homo sapien
ggatcttcgggatcaaagaacagaaacctatgc

SEQ ID NO: 815032 - DNA, 33 bp, Homo sapien
ggatcttcgggatcaaggaacagaaacctatgc

SEQ ID NO: 815033 - DNA, 33 bp, Homo sapien
attgctcctaactagaataagtttccacgaggg

SEQ ID NO: 815034 - DNA, 33 bp, Homo sapien
attgctcctaactagagtaagtttccacgaggg

SEQ ID NO: 815035 - DNA, 33 bp, Homo sapien
acaagtacaagaagaccagcaacgcgtcgagac

SEQ ID NO: 815036 - DNA, 33 bp, Homo sapien
acaagtacaagaagacgagcaacgcgtcgagac

SEQ ID NO: 815037 - DNA, 33 bp, Homo sapien
cctggcctgaaaaatacctatctttgaacacag

SEQ ID NO: 815038 - DNA, 33 bp, Homo sapien
cctggcctgaaaaatatctatctttgaacacag

SEQ ID NO: 815039 - DNA, 33 bp, Homo sapien
atattgtcttgctccaaattctcatgattgtac

SEQ ID NO: 815040 - DNA, 33 bp, Homo sapien
atattgtcttgctccagattctcatgattgtac

SEQ ID NO: 815041 - DNA, 33 bp, Homo sapien
atgagagcttattacaccttgtgctacagatga

SEQ ID NO: 815042 - DNA, 33 bp, Homo sapien
atgagagcttattacatcttgtgctacagatga

SEQ ID NO: 815043 - DNA, 33 bp, Homo sapien
agaacctaaatttgaaaacggataatgatagta

SEQ ID NO: 815044 - DNA, 33 bp, Homo sapien
agaacctaaatttgaagacggataatgatagta

SEQ ID NO: 815045 - DNA, 33 bp, Homo sapien
cacacaagacagacgacatcactgtttctcaca

SEQ ID NO: 815046 - DNA, 33 bp, Homo sapien
cacacaagacagacgagatcactgtttctcaca

SEQ ID NO: 815047 - DNA, 33 bp, Homo sapien
cagagaaccttccctacgcatgtcctgaatggt

SEQ ID NO: 815048 - DNA, 33 bp, Homo sapien
cagagaaccttccctatgcatgtcctgaatggt

SEQ ID NO: 815049 - DNA, 33 bp, Homo sapien
tattagataataaatacgtgctgtcggccgggc

SEQ ID NO: 815050 - DNA, 33 bp, Homo sapien
tattagataataaatatgtgctgtcggccgggc

SEQ ID NO: 815051 - DNA, 33 bp, Homo sapien
ttaggttagattccaacaagtgaaacagctgga

SEQ ID NO: 815052 - DNA, 33 bp, Homo sapien
ttaggttagattccaagaagtgaaacagctgga

SEQ ID NO: 815053 - DNA, 33 bp, Homo sapien
cactcattctcaggaactggaaagtcacatggc

SEQ ID NO: 815054 - DNA, 33 bp, Homo sapien
cactcattctcaggaattggaaagtcacatggc

SEQ ID NO: 815055 - DNA, 33 bp, Homo sapien
aaccatgactccaaataactcagtcactcaccc

SEQ ID NO: 815056 - DNA, 33 bp, Homo sapien
aaccatgactccaaatgactcagtcactcaccc

SEQ ID NO: 815057 - DNA, 33 bp, Homo sapien
gccaatgtggacttcggaacttccagaatccag

SEQ ID NO: 815058 - DNA, 33 bp, Homo sapien
gccaatgtggacttcgtaacttccagaatccag

SEQ ID NO: 815059 - DNA, 33 bp, Homo sapien
atgtggaaatataaagaatccagaatagtcaaa

SEQ ID NO: 815060 - DNA, 33 bp, Homo sapien
atgtggaaatataaaggatccagaatagtcaaa

SEQ ID NO: 815061 - DNA, 33 bp, Homo sapien
tccctgttccctgacaacactgtctttgctctc

SEQ ID NO: 815062 - DNA, 33 bp, Homo sapien
tccctgttccctgacagcactgtctttgctctc

SEQ ID NO: 815063 - DNA, 33 bp, Homo sapien
gtggcggatggtaaccaatttaagggctattaa

SEQ ID NO: 815064 - DNA, 33 bp, Homo sapien
gtggcggatggtaaccgatttaagggctattaa

SEQ ID NO: 815065 - DNA, 33 bp, Homo sapien
gtctgactccaggcacaaattttggagccagcc

SEQ ID NO: 815066 - DNA, 33 bp, Homo sapien
gtctgactccaggcacgaattttggagccagcc

SEQ ID NO: 815067 - DNA, 33 bp, Homo sapien
catgtggcctgagtgaactatgccaagatgctc

SEQ ID NO: 815068 - DNA, 33 bp, Homo sapien
catgtggcctgagtgagctatgccaagatgctc

SEQ ID NO: 815069 - DNA, 33 bp, Homo sapien
tgagagggacagatctcaagtgccagagtgact

SEQ ID NO: 815070 - DNA, 33 bp, Homo sapien
tgagagggacagatcttaagtgccagagtgact

SEQ ID NO: 815071 - DNA, 33 bp, Homo sapien
acagtcaggtccacctaaaagcaatgatcgagg

SEQ ID NO: 815072 - DNA, 33 bp, Homo sapien
acagtcaggtccaccttaaagcaatgatcgagg

SEQ ID NO: 815073 - DNA, 33 bp, Homo sapien
ctgtctctgaatgacaatggaccaagcatttcc

SEQ ID NO: 815074 - DNA, 33 bp, Homo sapien
ctgtctctgaatgacagtggaccaagcatttcc

SEQ ID NO: 815075 - DNA, 33 bp, Homo sapien
tcttggattcacaaaaagaaggctgccttttcc

SEQ ID NO: 815076 - DNA, 33 bp, Homo sapien
tcttggattcacaaaaggaaggctgccttttcc

SEQ ID NO: 815077 - DNA, 33 bp, Homo sapien
gcatttcacctgctcaatagctaccaggaggct

SEQ ID NO: 815078 - DNA, 33 bp, Homo sapien
gcatttcacctgctcagtagctaccaggaggct

SEQ ID NO: 815079 - DNA, 33 bp, Homo sapien
caccaagaccagctcgacaaggaaagcttgcag

SEQ ID NO: 815080 - DNA, 33 bp, Homo sapien
caccaagaccagctcggcaaggaaagcttgcag

SEQ ID NO: 815081 - DNA, 33 bp, Homo sapien
cacctccggtctgtccacttctctccatactta

SEQ ID NO: 815082 - DNA, 33 bp, Homo sapien
cacctccggtctgtccgcttctctccatactta

SEQ ID NO: 815083 - DNA, 33 bp, Homo sapien
gttgcctttttccacacagttagcaattcttta

SEQ ID NO: 815084 - DNA, 33 bp, Homo sapien
gttgcctttttccacatagttagcaattcttta

SEQ ID NO: 815085 - DNA, 33 bp, Homo sapien
ttccctcacagaaggcacagttaaacatttgct

SEQ ID NO: 815086 - DNA, 33 bp, Homo sapien
ttccctcacagaaggcgcagttaaacatttgct

SEQ ID NO: 815087 - DNA, 33 bp, Homo sapien
ccactccgcttctcatcaaatctcttccagatg

SEQ ID NO: 815088 - DNA, 33 bp, Homo sapien
ccactccgcttctcattaaatctcttccagatg

SEQ ID NO: 815089 - DNA, 33 bp, Homo sapien
tggcctcggtggagccactggaccacgtgaccc

SEQ ID NO: 815090 - DNA, 33 bp, Homo sapien
tggcctcggtggagccgctggaccacgtgaccc

SEQ ID NO: 815091 - DNA, 33 bp, Homo sapien
tccaccctgcttcaccaagactccagcatggag

SEQ ID NO: 815092 - DNA, 33 bp, Homo sapien
tccaccctgcttcaccgagactccagcatggag

SEQ ID NO: 815093 - DNA, 33 bp, Homo sapien
ctgggcaggaccccgaagtctgcatgagggtgg

SEQ ID NO: 815094 - DNA, 33 bp, Homo sapien
ctgggcaggaccccgacgtctgcatgagggtgg

SEQ ID NO: 815095 - DNA, 33 bp, Homo sapien
cacaagacggatgagaaccaattccaggacttt

SEQ ID NO: 815096 - DNA, 33 bp, Homo sapien
cacaagacggatgagacccaattccaggacttt

SEQ ID NO: 815097 - DNA, 33 bp, Homo sapien
agacctcatctcagaaaaatgaaaaataaccac

SEQ ID NO: 815098 - DNA, 33 bp, Homo sapien
agacctcatctcagaagaatgaaaaataaccac

SEQ ID NO: 815099 - DNA, 33 bp, Homo sapien
tccatatgtcctcttgcatgaagtgtctcttta

SEQ ID NO: 815100 - DNA, 33 bp, Homo sapien
tccatatgtcctcttggatgaagtgtctcttta

SEQ ID NO: 815101 - DNA, 33 bp, Homo sapien
agtgggtgctaaggagacctatagcaggggcac

SEQ ID NO: 815102 - DNA, 33 bp, Homo sapien
agtgggtgctaaggagtcctatagcaggggcac

SEQ ID NO: 815103 - DNA, 33 bp, Homo sapien
caatgatgctgctgctcacagtttctctttatg

SEQ ID NO: 815104 - DNA, 33 bp, Homo sapien
caatgatgctgctgctgacagtttctctttatg

SEQ ID NO: 815105 - DNA, 33 bp, Homo sapien
gcagcatcattgtgagcagaaggtcacaaaggt

SEQ ID NO: 815106 - DNA, 33 bp, Homo sapien
gcagcatcattgtgaggagaaggtcacaaaggt

SEQ ID NO: 815107 - DNA, 33 bp, Homo sapien
ttctttttacctaagacaatgcctgaacttttc

SEQ ID NO: 815108 - DNA, 33 bp, Homo sapien
ttctttttacctaagataatgcctgaacttttc

SEQ ID NO: 815109 - DNA, 33 bp, Homo sapien
gccccagaactccatcaatacgctgtccccagg

SEQ ID NO: 815110 - DNA, 33 bp, Homo sapien
gccccagaactccatcgatacgctgtccccagg

SEQ ID NO: 815111 - DNA, 33 bp, Homo sapien
attgcatcccaggaccaaaatgtaataactttg

SEQ ID NO: 815112 - DNA, 33 bp, Homo sapien
attgcatcccaggaccgaaatgtaataactttg

SEQ ID NO: 815113 - DNA, 33 bp, Homo sapien
tggtgtaacgcagtaaaattttgttttttggtg

SEQ ID NO: 815114 - DNA, 33 bp, Homo sapien
tggtgtaacgcagtaacattttgttttttggtg

SEQ ID NO: 815115 - DNA, 33 bp, Homo sapien
tcaggctatagaggcaagattcatagtcaggta

SEQ ID NO: 815116 - DNA, 33 bp, Homo sapien
tcaggctatagaggcaggattcatagtcaggta

SEQ ID NO: 815117 - DNA, 33 bp, Homo sapien
cacgggccatctggaaggaccacatattaagaa

SEQ ID NO: 815118 - DNA, 33 bp, Homo sapien
cacgggccatctggaatgaccacatattaagaa

SEQ ID NO: 815119 - DNA, 33 bp, Homo sapien
atctggaaagagcgggcatgaaggcagctattg

SEQ ID NO: 815120 - DNA, 33 bp, Homo sapien
atctggaaagagcgggtatgaaggcagctattg

SEQ ID NO: 815121 - DNA, 33 bp, Homo sapien
caacaacgtcagaaaacgcctgctaaaacctac

SEQ ID NO: 815122 - DNA, 33 bp, Homo sapien
caacaacgtcagaaaatgcctgctaaaacctac

SEQ ID NO: 815123 - DNA, 33 bp, Homo sapien
tgctttcaacttaaaccgtggtatacatatctt

SEQ ID NO: 815124 - DNA, 33 bp, Homo sapien
tgctttcaacttaaactgtggtatacatatctt

SEQ ID NO: 815125 - DNA, 33 bp, Homo sapien
cacctacagatgaagacagtcactgttacctca

SEQ ID NO: 815126 - DNA, 33 bp, Homo sapien
cacctacagatgaagatagtcactgttacctca

SEQ ID NO: 815127 - DNA, 33 bp, Homo sapien
tcatggaacagctggagattgtgaaaatacaga

SEQ ID NO: 815128 - DNA, 33 bp, Homo sapien
tcatggaacagctggatattgtgaaaatacaga

SEQ ID NO: 815129 - DNA, 33 bp, Homo sapien
atgcatggggtgatgacagtttgcggttgctgg

SEQ ID NO: 815130 - DNA, 33 bp, Homo sapien
atgcatggggtgatgatagtttgcggttgctgg

SEQ ID NO: 815131 - DNA, 33 bp, Homo sapien
gtggccaggccagtcacaagtccaccgtggagt

SEQ ID NO: 815132 - DNA, 33 bp, Homo sapien
gtggccaggccagtcagaagtccaccgtggagt

SEQ ID NO: 815133 - DNA, 33 bp, Homo sapien
ggactatgagaagatcagaaagggacccacgca

SEQ ID NO: 815134 - DNA, 33 bp, Homo sapien
ggactatgagaagatcggaaagggacccacgca

SEQ ID NO: 815135 - DNA, 33 bp, Homo sapien
aagggcattcagcctacaagatagtcaagggaa

SEQ ID NO: 815136 - DNA, 33 bp, Homo sapien
aagggcattcagcctataagatagtcaagggaa

SEQ ID NO: 815137 - DNA, 33 bp, Homo sapien
tttaaacacccgtttaacactcttttgcagctg

SEQ ID NO: 815138 - DNA, 33 bp, Homo sapien
tttaaacacccgtttagcactcttttgcagctg

SEQ ID NO: 815139 - DNA, 33 bp, Homo sapien
tctgtgtttgaggaggcatgagagcagttacac

SEQ ID NO: 815140 - DNA, 33 bp, Homo sapien
tctgtgtttgaggaggtatgagagcagttacac

SEQ ID NO: 815141 - DNA, 33 bp, Homo sapien
tgacagagactggacaccatcttgtaagccaca

SEQ ID NO: 815142 - DNA, 33 bp, Homo sapien
tgacagagactggacagcatcttgtaagccaca

SEQ ID NO: 815143 - DNA, 33 bp, Homo sapien
accacccatgagagccacaagccaggaacacag

SEQ ID NO: 815144 - DNA, 33 bp, Homo sapien
accacccatgagagccgcaagccaggaacacag

SEQ ID NO: 815145 - DNA, 33 bp, Homo sapien
cccagagaactctttcccagagaactcggcatc

SEQ ID NO: 815146 - DNA, 33 bp, Homo sapien
cccagagaactctttcgcagagaactcggcatc

SEQ ID NO: 815147 - DNA, 33 bp, Homo sapien
cttccacagctgataaacaaacattactcagta

SEQ ID NO: 815148 - DNA, 33 bp, Homo sapien
cttccacagctgataagcaaacattactcagta

SEQ ID NO: 815149 - DNA, 33 bp, Homo sapien
ctagtgggtatgaaaaagtatctgaatggtttt

SEQ ID NO: 815150 - DNA, 33 bp, Homo sapien
ctagtgggtatgaaaaggtatctgaatggtttt

SEQ ID NO: 815151 - DNA, 33 bp, Homo sapien
acacctgtcttgctcaagattctcaggattttg

SEQ ID NO: 815152 - DNA, 33 bp, Homo sapien
acacctgtcttgctcaggattctcaggattttg

SEQ ID NO: 815153 - DNA, 33 bp, Homo sapien
tgtccctggaatacaaaatcatccctgattgag

SEQ ID NO: 815154 - DNA, 33 bp, Homo sapien
tgtccctggaatacaagatcatccctgattgag

SEQ ID NO: 815155 - DNA, 33 bp, Homo sapien
gtgccttaagtggccacaagagacaaacaagcc

SEQ ID NO: 815156 - DNA, 33 bp, Homo sapien
gtgccttaagtggccataagagacaaacaagcc

SEQ ID NO: 815157 - DNA, 33 bp, Homo sapien
gatgtcttcagattaacttgaaaaccactcccc

SEQ ID NO: 815158 - DNA, 33 bp, Homo sapien
gatgtcttcagattaagttgaaaaccactcccc

SEQ ID NO: 815159 - DNA, 33 bp, Homo sapien
tagtttacaactgctgaatatgtgcctagataa

SEQ ID NO: 815160 - DNA, 33 bp, Homo sapien
tagtttacaactgctggatatgtgcctagataa

SEQ ID NO: 815161 - DNA, 33 bp, Homo sapien
cagagttacgctgacacacaaaaatgacacagg

SEQ ID NO: 815162 - DNA, 33 bp, Homo sapien
cagagttacgctgacatacaaaaatgacacagg

SEQ ID NO: 815163 - DNA, 33 bp, Homo sapien
tgctctgaggtttaaaggcgttactgctaattg

SEQ ID NO: 815164 - DNA, 33 bp, Homo sapien
tgctctgaggtttaaatgcgttactgctaattg

SEQ ID NO: 815165 - DNA, 33 bp, Homo sapien
accatttctcttaagaactctctctctgcagag

SEQ ID NO: 815166 - DNA, 33 bp, Homo sapien
accatttctcttaagacctctctctctgcagag

SEQ ID NO: 815167 - DNA, 33 bp, Homo sapien
aagaaaaaggccaccaaattctcctcaaggtca

SEQ ID NO: 815168 - DNA, 33 bp, Homo sapien
aagaaaaaggccaccagattctcctcaaggtca

SEQ ID NO: 815169 - DNA, 33 bp, Homo sapien
aagtatttatggggaaaccttgtcgagatcagc

SEQ ID NO: 815170 - DNA, 33 bp, Homo sapien
aagtatttatggggaagccttgtcgagatcagc

SEQ ID NO: 815171 - DNA, 33 bp, Homo sapien
cccgcatccaggcagaggatgtgtttgctgtcc

SEQ ID NO: 815172 - DNA, 33 bp, Homo sapien
cccgcatccaggcagatgatgtgtttgctgtcc

SEQ ID NO: 815173 - DNA, 33 bp, Homo sapien
tgtggcctcttcggaacggctgcatctctaaac

SEQ ID NO: 815174 - DNA, 33 bp, Homo sapien
tgtggcctcttcggaatggctgcatctctaaac

SEQ ID NO: 815175 - DNA, 33 bp, Homo sapien
aacctccagatttgcaaaacgaaatgaaaatga

SEQ ID NO: 815176 - DNA, 33 bp, Homo sapien
aacctccagatttgcagaacgaaatgaaaatga

SEQ ID NO: 815177 - DNA, 33 bp, Homo sapien
cttcatctgccagggacaagtccaagatacttg

SEQ ID NO: 815178 - DNA, 33 bp, Homo sapien
cttcatctgccagggataagtccaagatacttg

SEQ ID NO: 815179 - DNA, 33 bp, Homo sapien
aggacagagacaagacaatgtcacatactgcag

SEQ ID NO: 815180 - DNA, 33 bp, Homo sapien
aggacagagacaagacgatgtcacatactgcag

SEQ ID NO: 815181 - DNA, 33 bp, Homo sapien
ccagccgtgcagtggacagccggcgtcagagag

SEQ ID NO: 815182 - DNA, 33 bp, Homo sapien
ccagccgtgcagtggatagccggcgtcagagag

SEQ ID NO: 815183 - DNA, 33 bp, Homo sapien
ggacatttgttcattcacatcccttgctgctgc

SEQ ID NO: 815184 - DNA, 33 bp, Homo sapien
ggacatttgttcattcgcatcccttgctgctgc

SEQ ID NO: 815185 - DNA, 33 bp, Homo sapien
tcaacttcctcgtctacaaaatgggagtgataa

SEQ ID NO: 815186 - DNA, 33 bp, Homo sapien
tcaacttcctcgtctataaaatgggagtgataa

SEQ ID NO: 815187 - DNA, 33 bp, Homo sapien
aaccttcaagatacaacaagagagaaagccagg

SEQ ID NO: 815188 - DNA, 33 bp, Homo sapien
aaccttcaagatacaataagagagaaagccagg

SEQ ID NO: 815189 - DNA, 33 bp, Homo sapien
agtagggtcaagcagcagacctgagtttgagac

SEQ ID NO: 815190 - DNA, 33 bp, Homo sapien
agtagggtcaagcagccgacctgagtttgagac

SEQ ID NO: 815191 - DNA, 33 bp, Homo sapien
agaagctgagaacccaatgagtttgcacaggat

SEQ ID NO: 815192 - DNA, 33 bp, Homo sapien
agaagctgagaacccagtgagtttgcacaggat

SEQ ID NO: 815193 - DNA, 33 bp, Homo sapien
ttttcatgagaagatcagatatgcagacttttt

SEQ ID NO: 815194 - DNA, 33 bp, Homo sapien
ttttcatgagaagatcggatatgcagacttttt

SEQ ID NO: 815195 - DNA, 33 bp, Homo sapien
atggatttagcttggcccatcaatattttaaag

SEQ ID NO: 815196 - DNA, 33 bp, Homo sapien
atggatttagcttggctcatcaatattttaaag

SEQ ID NO: 815197 - DNA, 33 bp, Homo sapien
ctattccttatatacccacacaaggcagagact

SEQ ID NO: 815198 - DNA, 33 bp, Homo sapien
ctattccttatatacctacacaaggcagagact

SEQ ID NO: 815199 - DNA, 33 bp, Homo sapien
ccccaccattagagccactcctttgcaggaagt

SEQ ID NO: 815200 - DNA, 33 bp, Homo sapien
ccccaccattagagccgctcctttgcaggaagt

SEQ ID NO: 815201 - DNA, 33 bp, Homo sapien
ggaacgaattagagtgaagcgggtgatcagaat

SEQ ID NO: 815202 - DNA, 33 bp, Homo sapien
ggaacgaattagagtggagcgggtgatcagaat

SEQ ID NO: 815203 - DNA, 33 bp, Homo sapien
agactatttgagtcagcccctcacgtccccatg

SEQ ID NO: 815204 - DNA, 33 bp, Homo sapien
agactatttgagtcagtccctcacgtccccatg

SEQ ID NO: 815205 - DNA, 33 bp, Homo sapien
accaggaccagactcaaacagataccctgtcac

SEQ ID NO: 815206 - DNA, 33 bp, Homo sapien
accaggaccagactcatacagataccctgtcac

SEQ ID NO: 815207 - DNA, 33 bp, Homo sapien
ctgaagtactcagtaacataagtagtttcctaa

SEQ ID NO: 815208 - DNA, 33 bp, Homo sapien
ctgaagtactcagtaatataagtagtttcctaa

SEQ ID NO: 815209 - DNA, 33 bp, Homo sapien
ccacctggctttgtgaccagatcctttgaaaga

SEQ ID NO: 815210 - DNA, 33 bp, Homo sapien
ccacctggctttgtgatcagatcctttgaaaga

SEQ ID NO: 815211 - DNA, 33 bp, Homo sapien
aaatatctccactactaaccctaagaatccagg

SEQ ID NO: 815212 - DNA, 33 bp, Homo sapien
aaatatctccactactcaccctaagaatccagg

SEQ ID NO: 815213 - DNA, 33 bp, Homo sapien
cagggttttcccacaaaatgcagggctgaaaag

SEQ ID NO: 815214 - DNA, 33 bp, Homo sapien
cagggttttcccacaagatgcagggctgaaaag

SEQ ID NO: 815215 - DNA, 33 bp, Homo sapien
gcagcacagttcctgacacagagaaggcactca

SEQ ID NO: 815216 - DNA, 33 bp, Homo sapien
gcagcacagttcctgatacagagaaggcactca

SEQ ID NO: 815217 - DNA, 33 bp, Homo sapien
aataacagctaagaaagaagaagctctgcctat

SEQ ID NO: 815218 - DNA, 33 bp, Homo sapien
aataacagctaagaaataagaagctctgcctat

SEQ ID NO: 815219 - DNA, 33 bp, Homo sapien
ttcccagaggaaaagcaagttgtcattggatac

SEQ ID NO: 815220 - DNA, 33 bp, Homo sapien
ttcccagaggaaaagcgagttgtcattggatac

SEQ ID NO: 815221 - DNA, 33 bp, Homo sapien
aggaagtagacaaatgacaggaaccatgtctat

SEQ ID NO: 815222 - DNA, 33 bp, Homo sapien
aggaagtagacaaatgtcaggaaccatgtctat

SEQ ID NO: 815223 - DNA, 33 bp, Homo sapien
tcagcggctcccaggacgatagtgattcagata

SEQ ID NO: 815224 - DNA, 33 bp, Homo sapien
tcagcggctcccaggatgatagtgattcagata

SEQ ID NO: 815225 - DNA, 33 bp, Homo sapien
tttggtaaaggggtgcaaaatgtgtctctgaaa

SEQ ID NO: 815226 - DNA, 33 bp, Homo sapien
tttggtaaaggggtgcgaaatgtgtctctgaaa

SEQ ID NO: 815227 - DNA, 33 bp, Homo sapien
gcaaatcaatctaacacgacaaatctctgctct

SEQ ID NO: 815228 - DNA, 33 bp, Homo sapien
gcaaatcaatctaacatgacaaatctctgctct

SEQ ID NO: 815229 - DNA, 33 bp, Homo sapien
atgctctggctccagtaaagttatgagactccc

SEQ ID NO: 815230 - DNA, 33 bp, Homo sapien
atgctctggctccagtgaagttatgagactccc

SEQ ID NO: 815231 - DNA, 33 bp, Homo sapien
cctcaagaacagggacaagatctagttcactgt

SEQ ID NO: 815232 - DNA, 33 bp, Homo sapien
cctcaagaacagggacgagatctagttcactgt

SEQ ID NO: 815233 - DNA, 33 bp, Homo sapien
ttacgacagtgaaagacaccacacctaactgac

SEQ ID NO: 815234 - DNA, 33 bp, Homo sapien
ttacgacagtgaaagataccacacctaactgac

SEQ ID NO: 815235 - DNA, 33 bp, Homo sapien
tcatttgttaattatcacagtaaacattaattc

SEQ ID NO: 815236 - DNA, 33 bp, Homo sapien
tcatttgttaattatcgcagtaaacattaattc

SEQ ID NO: 815237 - DNA, 33 bp, Homo sapien
tttgacttttacggaacctaatgattttctagc

SEQ ID NO: 815238 - DNA, 33 bp, Homo sapien
tttgacttttacggaatctaatgattttctagc

SEQ ID NO: 815239 - DNA, 33 bp, Homo sapien
cgtgcgcctcttgtcacgatgtgcttaggacac

SEQ ID NO: 815240 - DNA, 33 bp, Homo sapien
cgtgcgcctcttgtcatgatgtgcttaggacac

SEQ ID NO: 815241 - DNA, 33 bp, Homo sapien
caagcaccacagtgaactggagcagattggcga

SEQ ID NO: 815242 - DNA, 33 bp, Homo sapien
caagcaccacagtgaattggagcagattggcga

SEQ ID NO: 815243 - DNA, 33 bp, Homo sapien
acctgtgttattcaaaagttaactgtacaccct

SEQ ID NO: 815244 - DNA, 33 bp, Homo sapien
acctgtgttattcaaaggttaactgtacaccct

SEQ ID NO: 815245 - DNA, 33 bp, Homo sapien
gagcctttcaattttacccagaaagcagttggg

SEQ ID NO: 815246 - DNA, 33 bp, Homo sapien
gagcctttcaattttatccagaaagcagttggg

SEQ ID NO: 815247 - DNA, 33 bp, Homo sapien
aggcagagactatttacccctccactatttcac

SEQ ID NO: 815248 - DNA, 33 bp, Homo sapien
aggcagagactatttatccctccactatttcac

SEQ ID NO: 815249 - DNA, 33 bp, Homo sapien
tattcacactcaaatacgtttgctcacacaata

SEQ ID NO: 815250 - DNA, 33 bp, Homo sapien
tattcacactcaaatatgtttgctcacacaata

SEQ ID NO: 815251 - DNA, 33 bp, Homo sapien
atattactaagtgaaacacattgatctgaaaag

SEQ ID NO: 815252 - DNA, 33 bp, Homo sapien
atattactaagtgaaagacattgatctgaaaag

SEQ ID NO: 815253 - DNA, 33 bp, Homo sapien
gatgatgatgaggacacgacgaaggagagtggc

SEQ ID NO: 815254 - DNA, 33 bp, Homo sapien
gatgatgatgaggacatgacgaaggagagtggc

SEQ ID NO: 815255 - DNA, 33 bp, Homo sapien
tcaatctctgcttggaataaggtgatgtggggt

SEQ ID NO: 815256 - DNA, 33 bp, Homo sapien
tcaatctctgcttggattaaggtgatgtggggt

SEQ ID NO: 815257 - DNA, 33 bp, Homo sapien
gacagtgaggagtagcagaaagaagggttcagg

SEQ ID NO: 815258 - DNA, 33 bp, Homo sapien
gacagtgaggagtagcggaaagaagggttcagg

SEQ ID NO: 815259 - DNA, 33 bp, Homo sapien
ttgtctcttattatgactaacagtggaaatcta

SEQ ID NO: 815260 - DNA, 33 bp, Homo sapien
ttgtctcttattatgattaacagtggaaatcta

SEQ ID NO: 815261 - DNA, 33 bp, Homo sapien
ctattttctctccataatatatgctgggcatga

SEQ ID NO: 815262 - DNA, 33 bp, Homo sapien
ctattttctctccatagtatatgctgggcatga

SEQ ID NO: 815263 - DNA, 33 bp, Homo sapien
cccaggctgctttgtcaagaaaaatctctgact

SEQ ID NO: 815264 - DNA, 33 bp, Homo sapien
cccaggctgctttgtcgagaaaaatctctgact

SEQ ID NO: 815265 - DNA, 33 bp, Homo sapien
tcttgatcaatgctcactgaatgaaggaagtaa

SEQ ID NO: 815266 - DNA, 33 bp, Homo sapien
tcttgatcaatgctcattgaatgaaggaagtaa

SEQ ID NO: 815267 - DNA, 33 bp, Homo sapien
acataagatgatagtactaagaagagaaaccta

SEQ ID NO: 815268 - DNA, 33 bp, Homo sapien
acataagatgatagtagtaagaagagaaaccta

SEQ ID NO: 815269 - DNA, 33 bp, Homo sapien
agaccagcctgtgacaaatggtaaaactgcacc

SEQ ID NO: 815270 - DNA, 33 bp, Homo sapien
agaccagcctgtgacacatggtaaaactgcacc

SEQ ID NO: 815271 - DNA, 33 bp, Homo sapien
actatatgtataggcacgaagagttagctcttc

SEQ ID NO: 815272 - DNA, 33 bp, Homo sapien
actatatgtataggcatgaagagttagctcttc

SEQ ID NO: 815273 - DNA, 33 bp, Homo sapien
tgagcatcaccaccacagatgagtcttgcctga

SEQ ID NO: 815274 - DNA, 33 bp, Homo sapien
tgagcatcaccaccacggatgagtcttgcctga

SEQ ID NO: 815275 - DNA, 33 bp, Homo sapien
tgcttcctagatgacaaagctaagaagatatat

SEQ ID NO: 815276 - DNA, 33 bp, Homo sapien
tgcttcctagatgacagagctaagaagatatat

SEQ ID NO: 815277 - DNA, 33 bp, Homo sapien
aaacaacttttggtgacgttttggacgggagtg

SEQ ID NO: 815278 - DNA, 33 bp, Homo sapien
aaacaacttttggtgatgttttggacgggagtg

SEQ ID NO: 815279 - DNA, 33 bp, Homo sapien
aacatttggattcagaaaacattcggtgttata

SEQ ID NO: 815280 - DNA, 33 bp, Homo sapien
aacatttggattcagagaacattcggtgttata

SEQ ID NO: 815281 - DNA, 33 bp, Homo sapien
cccttctgaatcctcccggaggaaccagcactg

SEQ ID NO: 815282 - DNA, 33 bp, Homo sapien
cccttctgaatcctcctggaggaaccagcactg

SEQ ID NO: 815283 - DNA, 33 bp, Homo sapien
cactctgaacttcccccaggttctgtcactggc

SEQ ID NO: 815284 - DNA, 33 bp, Homo sapien
cactctgaacttccccgaggttctgtcactggc

SEQ ID NO: 815285 - DNA, 33 bp, Homo sapien
gtgagtttcccctactcaggtcttgtgtgacct

SEQ ID NO: 815286 - DNA, 33 bp, Homo sapien
gtgagtttcccctacttaggtcttgtgtgacct

SEQ ID NO: 815287 - DNA, 33 bp, Homo sapien
tcgaccatccccatgcaccttcctccgcttcag

SEQ ID NO: 815288 - DNA, 33 bp, Homo sapien
tcgaccatccccatgcgccttcctccgcttcag

SEQ ID NO: 815289 - DNA, 33 bp, Homo sapien
ggaggggctatcacaacgccagtccccagtaca

SEQ ID NO: 815290 - DNA, 33 bp, Homo sapien
ggaggggctatcacaatgccagtccccagtaca

SEQ ID NO: 815291 - DNA, 33 bp, Homo sapien
gaaaggaaagctaatgcatggaggggctatcac

SEQ ID NO: 815292 - DNA, 33 bp, Homo sapien
gaaaggaaagctaatgtatggaggggctatcac

SEQ ID NO: 815293 - DNA, 33 bp, Homo sapien
tagtcctgtgcacctcaccgagccgtgatagat

SEQ ID NO: 815294 - DNA, 33 bp, Homo sapien
tagtcctgtgcacctcgccgagccgtgatagat

SEQ ID NO: 815295 - DNA, 33 bp, Homo sapien
tcttctggtaggtggacgtggtaaaaccagggc

SEQ ID NO: 815296 - DNA, 33 bp, Homo sapien
tcttctggtaggtggatgtggtaaaaccagggc

SEQ ID NO: 815297 - DNA, 33 bp, Homo sapien
ggtgtgtcactccaaaaggacctgggccagccc

SEQ ID NO: 815298 - DNA, 33 bp, Homo sapien
ggtgtgtcactccaaagggacctgggccagccc

SEQ ID NO: 815299 - DNA, 33 bp, Homo sapien
acctgacttgaggatgcactgagggaatccaag

SEQ ID NO: 815300 - DNA, 33 bp, Homo sapien
acctgacttgaggatggactgagggaatccaag

SEQ ID NO: 815301 - DNA, 33 bp, Homo sapien
ccctccgtggataccccccatctactcagctgt

SEQ ID NO: 815302 - DNA, 33 bp, Homo sapien
ccctccgtggataccctccatctactcagctgt

SEQ ID NO: 815303 - DNA, 33 bp, Homo sapien
aggtatcattctagaaactggggacatagtgct

SEQ ID NO: 815304 - DNA, 33 bp, Homo sapien
aggtatcattctagaagctggggacatagtgct

SEQ ID NO: 815305 - DNA, 33 bp, Homo sapien
ccccaatagcctggaaccatcatgaaggtggaa

SEQ ID NO: 815306 - DNA, 33 bp, Homo sapien
ccccaatagcctggaatcatcatgaaggtggaa

SEQ ID NO: 815307 - DNA, 33 bp, Homo sapien
ttggctggttcacccactgacaggtagaggcct

SEQ ID NO: 815308 - DNA, 33 bp, Homo sapien
ttggctggttcacccattgacaggtagaggcct

SEQ ID NO: 815309 - DNA, 33 bp, Homo sapien
attaagccgtgcatacaaaatgcctgaagcata

SEQ ID NO: 815310 - DNA, 33 bp, Homo sapien
attaagccgtgcatacgaaatgcctgaagcata

SEQ ID NO: 815311 - DNA, 33 bp, Homo sapien
gaaaaaaaaatgtcctaaaggtcacagtgccgt

SEQ ID NO: 815312 - DNA, 33 bp, Homo sapien
gaaaaaaaaatgtcctgaaggtcacagtgccgt

SEQ ID NO: 815313 - DNA, 33 bp, Homo sapien
aatgcgtgtgtcagccaaagtgtgaattactgg

SEQ ID NO: 815314 - DNA, 33 bp, Homo sapien
aatgcgtgtgtcagcccaagtgtgaattactgg

SEQ ID NO: 815315 - DNA, 33 bp, Homo sapien
cttattctgccccaccaatcaccctgagtttta

SEQ ID NO: 815316 - DNA, 33 bp, Homo sapien
cttattctgccccacctatcaccctgagtttta

SEQ ID NO: 815317 - DNA, 33 bp, Homo sapien
gtagaaacgtagaaagacatagtttacctcaag

SEQ ID NO: 815318 - DNA, 33 bp, Homo sapien
gtagaaacgtagaaagccatagtttacctcaag

SEQ ID NO: 815319 - DNA, 33 bp, Homo sapien
tccactggaaagtttagaaattcctgccaagaa

SEQ ID NO: 815320 - DNA, 33 bp, Homo sapien
tccactggaaagtttataaattcctgccaagaa

SEQ ID NO: 815321 - DNA, 33 bp, Homo sapien
gcttggtatttcaatccccacggattttcagag

SEQ ID NO: 815322 - DNA, 33 bp, Homo sapien
gcttggtatttcaatctccacggattttcagag

SEQ ID NO: 815323 - DNA, 33 bp, Homo sapien
gttcacaaactgataacactcaggccaaatctg

SEQ ID NO: 815324 - DNA, 33 bp, Homo sapien
gttcacaaactgataatactcaggccaaatctg

SEQ ID NO: 815325 - DNA, 33 bp, Homo sapien
ggactgcattcacaaaaaacagcacggcccaca

SEQ ID NO: 815326 - DNA, 33 bp, Homo sapien
ggactgcattcacaaacaacagcacggcccaca

SEQ ID NO: 815327 - DNA, 33 bp, Homo sapien
taaaccagcacctaaaattcagcacctcaaatt

SEQ ID NO: 815328 - DNA, 33 bp, Homo sapien
taaaccagcacctaaacttcagcacctcaaatt

SEQ ID NO: 815329 - DNA, 33 bp, Homo sapien
taagatgctaacataacgggaagcccagtgaag

SEQ ID NO: 815330 - DNA, 33 bp, Homo sapien
taagatgctaacataaggggaagcccagtgaag

SEQ ID NO: 815331 - DNA, 33 bp, Homo sapien
gacacaccctctccgagcctgttccctggtttt

SEQ ID NO: 815332 - DNA, 33 bp, Homo sapien
gacacaccctctccgatcctgttccctggtttt

SEQ ID NO: 815333 - DNA, 33 bp, Homo sapien
attatccccattctacagatgaggaacctgagg

SEQ ID NO: 815334 - DNA, 33 bp, Homo sapien
attatccccattctacggatgaggaacctgagg

SEQ ID NO: 815335 - DNA, 33 bp, Homo sapien
gtcactgcgtagaaaaactctgggaggacacac

SEQ ID NO: 815336 - DNA, 33 bp, Homo sapien
gtcactgcgtagaaaacctctgggaggacacac

SEQ ID NO: 815337 - DNA, 33 bp, Homo sapien
tctcatgggttagaaacgaagccttcacacggt

SEQ ID NO: 815338 - DNA, 33 bp, Homo sapien
tctcatgggttagaaatgaagccttcacacggt

SEQ ID NO: 815339 - DNA, 33 bp, Homo sapien
ccacaatctcgggtcacggactacagagctaaa

SEQ ID NO: 815340 - DNA, 33 bp, Homo sapien
ccacaatctcgggtcatggactacagagctaaa

SEQ ID NO: 815341 - DNA, 33 bp, Homo sapien
gcgtgaggtaactggaatccaatgctgggctga

SEQ ID NO: 815342 - DNA, 33 bp, Homo sapien
gcgtgaggtaactggagtccaatgctgggctga

SEQ ID NO: 815343 - DNA, 33 bp, Homo sapien
ggtttcagtattaaaaagaaaagagcctatcaa

SEQ ID NO: 815344 - DNA, 33 bp, Homo sapien
ggtttcagtattaaaacgaaaagagcctatcaa

SEQ ID NO: 815345 - DNA, 33 bp, Homo sapien
aagtcatggagaagacaccaggccttagtgggc

SEQ ID NO: 815346 - DNA, 33 bp, Homo sapien
aagtcatggagaagacgccaggccttagtgggc

SEQ ID NO: 815347 - DNA, 33 bp, Homo sapien
ggtaccccagtggttcaatttggcctccagttg

SEQ ID NO: 815348 - DNA, 33 bp, Homo sapien
ggtaccccagtggttcgatttggcctccagttg

SEQ ID NO: 815349 - DNA, 33 bp, Homo sapien
attgggaagatgtgaaaccctgggaacccacat

SEQ ID NO: 815350 - DNA, 33 bp, Homo sapien
attgggaagatgtgaagccctgggaacccacat

SEQ ID NO: 815351 - DNA, 33 bp, Homo sapien
ctagggtggcacaagaacacatggatgagagga

SEQ ID NO: 815352 - DNA, 33 bp, Homo sapien
ctagggtggcacaagagcacatggatgagagga

SEQ ID NO: 815353 - DNA, 33 bp, Homo sapien
ggactaatcaaactaacgttatgttttactcaa

SEQ ID NO: 815354 - DNA, 33 bp, Homo sapien
ggactaatcaaactaatgttatgttttactcaa

SEQ ID NO: 815355 - DNA, 33 bp, Homo sapien
attgtgcttactgctacgaagaaaaaataaaga

SEQ ID NO: 815356 - DNA, 33 bp, Homo sapien
attgtgcttactgctatgaagaaaaaataaaga

SEQ ID NO: 815357 - DNA, 33 bp, Homo sapien
agtaagcagttaatgactacatagacaaataca

SEQ ID NO: 815358 - DNA, 33 bp, Homo sapien
agtaagcagttaatgagtacatagacaaataca

SEQ ID NO: 815359 - DNA, 33 bp, Homo sapien
atttttattcactacaaacctctcaaaggaatt

SEQ ID NO: 815360 - DNA, 33 bp, Homo sapien
atttttattcactacatacctctcaaaggaatt

SEQ ID NO: 815361 - DNA, 33 bp, Homo sapien
ttctgggaagatgccaaacttttaaacttcaga

SEQ ID NO: 815362 - DNA, 33 bp, Homo sapien
ttctgggaagatgccagacttttaaacttcaga

SEQ ID NO: 815363 - DNA, 33 bp, Homo sapien
gctgccgcagtcaggccctttccttttaaaaat

SEQ ID NO: 815364 - DNA, 33 bp, Homo sapien
gctgccgcagtcaggctctttccttttaaaaat

SEQ ID NO: 815365 - DNA, 33 bp, Homo sapien
aagcactttgttgttcgctaactccagtaggaa

SEQ ID NO: 815366 - DNA, 33 bp, Homo sapien
aagcactttgttgttctctaactccagtaggaa

SEQ ID NO: 815367 - DNA, 33 bp, Homo sapien
tggtctttaagaaaggaattgtcagtgctatta

SEQ ID NO: 815368 - DNA, 33 bp, Homo sapien
tggtctttaagaaagggattgtcagtgctatta

SEQ ID NO: 815369 - DNA, 33 bp, Homo sapien
tctaagttttcacacacagcatcttacttaaaa

SEQ ID NO: 815370 - DNA, 33 bp, Homo sapien
tctaagttttcacacatagcatcttacttaaaa

SEQ ID NO: 815371 - DNA, 33 bp, Homo sapien
tggctcgaggccagaacgtggtacctctttgat

SEQ ID NO: 815372 - DNA, 33 bp, Homo sapien
tggctcgaggccagaatgtggtacctctttgat

SEQ ID NO: 815373 - DNA, 33 bp, Homo sapien
cctagcgccactaaaacgacctctcatctcaac

SEQ ID NO: 815374 - DNA, 33 bp, Homo sapien
cctagcgccactaaaatgacctctcatctcaac

SEQ ID NO: 815375 - DNA, 33 bp, Homo sapien
agaagtcaagagtgatgaaaaagccaggggcag

SEQ ID NO: 815376 - DNA, 33 bp, Homo sapien
agaagtcaagagtgattaaaaagccaggggcag

SEQ ID NO: 815377 - DNA, 33 bp, Homo sapien
tttcttcaccacaaggaatcaaaagtaaaactg

SEQ ID NO: 815378 - DNA, 33 bp, Homo sapien
tttcttcaccacaagggatcaaaagtaaaactg

SEQ ID NO: 815379 - DNA, 33 bp, Homo sapien
gatacctaacaggaaactaaaagcataaatctc

SEQ ID NO: 815380 - DNA, 33 bp, Homo sapien
gatacctaacaggaaagtaaaagcataaatctc

SEQ ID NO: 815381 - DNA, 33 bp, Homo sapien
atgcctggccatgacccctaatttaaataaatc

SEQ ID NO: 815382 - DNA, 33 bp, Homo sapien
atgcctggccatgacctctaatttaaataaatc

SEQ ID NO: 815383 - DNA, 33 bp, Homo sapien
atgtggcacaaaaataacaattccaaacaggat

SEQ ID NO: 815384 - DNA, 33 bp, Homo sapien
atgtggcacaaaaatagcaattccaaacaggat

SEQ ID NO: 815385 - DNA, 33 bp, Homo sapien
ggtattgataggtaagaatttactgttaaccat

SEQ ID NO: 815386 - DNA, 33 bp, Homo sapien
ggtattgataggtaaggatttactgttaaccat

SEQ ID NO: 815387 - DNA, 33 bp, Homo sapien
aagtgtagagattttacatatagccgaagttaa

SEQ ID NO: 815388 - DNA, 33 bp, Homo sapien
aagtgtagagattttatatatagccgaagttaa

SEQ ID NO: 815389 - DNA, 33 bp, Homo sapien
tgtctgcgttttgtcacgttatccattgtaaat

SEQ ID NO: 815390 - DNA, 33 bp, Homo sapien
tgtctgcgttttgtcatgttatccattgtaaat

SEQ ID NO: 815391 - DNA, 33 bp, Homo sapien
taagtctccaaactaaactgggcgtatatatag

SEQ ID NO: 815392 - DNA, 33 bp, Homo sapien
taagtctccaaactaagctgggcgtatatatag

SEQ ID NO: 815393 - DNA, 33 bp, Homo sapien
ggacccctgagaaacaatatgtctgtgtcctgt

SEQ ID NO: 815394 - DNA, 33 bp, Homo sapien
ggacccctgagaaacagtatgtctgtgtcctgt

SEQ ID NO: 815395 - DNA, 33 bp, Homo sapien
aacaatgacgaaatacaagcacactgatccccc

SEQ ID NO: 815396 - DNA, 33 bp, Homo sapien
aacaatgacgaaatacgagcacactgatccccc

SEQ ID NO: 815397 - DNA, 33 bp, Homo sapien
cagcaaatggccatggcaaacaatccaaaaggc

SEQ ID NO: 815398 - DNA, 33 bp, Homo sapien
cagcaaatggccatggtaaacaatccaaaaggc

SEQ ID NO: 815399 - DNA, 33 bp, Homo sapien
tgtctcattaaatcagcactcacgggtgcccac

SEQ ID NO: 815400 - DNA, 33 bp, Homo sapien
tgtctcattaaatcaggactcacgggtgcccac

SEQ ID NO: 815401 - DNA, 33 bp, Homo sapien
gtttcctagagctacacgtaacaaagtaccgaa

SEQ ID NO: 815402 - DNA, 33 bp, Homo sapien
gtttcctagagctacatgtaacaaagtaccgaa

SEQ ID NO: 815403 - DNA, 33 bp, Homo sapien
ggaggagaaaaaaagaactctgtaactggtggt

SEQ ID NO: 815404 - DNA, 33 bp, Homo sapien
ggaggagaaaaaaagacctctgtaactggtggt

SEQ ID NO: 815405 - DNA, 33 bp, Homo sapien
ggagacacttgggcaaaggccatcaaaggcagc

SEQ ID NO: 815406 - DNA, 33 bp, Homo sapien
ggagacacttgggcaagggccatcaaaggcagc

SEQ ID NO: 815407 - DNA, 33 bp, Homo sapien
aaggtgacaggtcaaccgcaaacaggcatattt

SEQ ID NO: 815408 - DNA, 33 bp, Homo sapien
aaggtgacaggtcaactgcaaacaggcatattt

SEQ ID NO: 815409 - DNA, 33 bp, Homo sapien
cctccatgtctttttacggcttgatggctcatt

SEQ ID NO: 815410 - DNA, 33 bp, Homo sapien
cctccatgtctttttatggcttgatggctcatt

SEQ ID NO: 815411 - DNA, 33 bp, Homo sapien
gcgcggcctggagccagtctgtctgcatcttta

SEQ ID NO: 815412 - DNA, 33 bp, Homo sapien
gcgcggcctggagccattctgtctgcatcttta

SEQ ID NO: 815413 - DNA, 33 bp, Homo sapien
tgtatccaaaatattacgcaagtcaattataaa

SEQ ID NO: 815414 - DNA, 33 bp, Homo sapien
tgtatccaaaatattatgcaagtcaattataaa

SEQ ID NO: 815415 - DNA, 33 bp, Homo sapien
gatgtagaaagatctccgaaacaggctggtaag

SEQ ID NO: 815416 - DNA, 33 bp, Homo sapien
gatgtagaaagatctctgaaacaggctggtaag

SEQ ID NO: 815417 - DNA, 33 bp, Homo sapien
agaccctgtctccaaaaaaaggaaagcagaaga

SEQ ID NO: 815418 - DNA, 33 bp, Homo sapien
agaccctgtctccaaacaaaggaaagcagaaga

SEQ ID NO: 815419 - DNA, 33 bp, Homo sapien
aaatgactgtgtatgaactctgactagtgttgg

SEQ ID NO: 815420 - DNA, 33 bp, Homo sapien
aaatgactgtgtatgacctctgactagtgttgg

SEQ ID NO: 815421 - DNA, 33 bp, Homo sapien
aatgcaattatgggggaaaagaaatgagaaaaa

SEQ ID NO: 815422 - DNA, 33 bp, Homo sapien
aatgcaattatggggggaaagaaatgagaaaaa

SEQ ID NO: 815423 - DNA, 33 bp, Homo sapien
ttttgtttattgctgaaatgaacgaatccttca

SEQ ID NO: 815424 - DNA, 33 bp, Homo sapien
ttttgtttattgctgagatgaacgaatccttca

SEQ ID NO: 815425 - DNA, 33 bp, Homo sapien
ggggcaattagatgacaatcaccagatagttga

SEQ ID NO: 815426 - DNA, 33 bp, Homo sapien
ggggcaattagatgacgatcaccagatagttga

SEQ ID NO: 815427 - DNA, 33 bp, Homo sapien
aggacgatgcagatcccagcccaggttgaattg

SEQ ID NO: 815428 - DNA, 33 bp, Homo sapien
aggacgatgcagatccgagcccaggttgaattg

SEQ ID NO: 815429 - DNA, 33 bp, Homo sapien
attatttctagtttacaggggactcgatgggag

SEQ ID NO: 815430 - DNA, 33 bp, Homo sapien
attatttctagtttacgggggactcgatgggag

SEQ ID NO: 815431 - DNA, 33 bp, Homo sapien
agagagtgtgttggtcaagagcaatccctctga

SEQ ID NO: 815432 - DNA, 33 bp, Homo sapien
agagagtgtgttggtcgagagcaatccctctga

SEQ ID NO: 815433 - DNA, 33 bp, Homo sapien
atgtcctcagtgcacactcattagtgctgacca

SEQ ID NO: 815434 - DNA, 33 bp, Homo sapien
atgtcctcagtgcacattcattagtgctgacca

SEQ ID NO: 815435 - DNA, 33 bp, Homo sapien
agaacctgactctgaacaaagcagagatgggcc

SEQ ID NO: 815436 - DNA, 33 bp, Homo sapien
agaacctgactctgaagaaagcagagatgggcc

SEQ ID NO: 815437 - DNA, 33 bp, Homo sapien
acacccggcattgtccactctccctgctctctt

SEQ ID NO: 815438 - DNA, 33 bp, Homo sapien
acacccggcattgtccgctctccctgctctctt

SEQ ID NO: 815439 - DNA, 33 bp, Homo sapien
aaaaaatattgtctcacgatgccccccagtaag

SEQ ID NO: 815440 - DNA, 33 bp, Homo sapien
aaaaaatattgtctcatgatgccccccagtaag

SEQ ID NO: 815441 - DNA, 33 bp, Homo sapien
ctcatcttgcaccaggcaaatctctttggggat

SEQ ID NO: 815442 - DNA, 33 bp, Homo sapien
ctcatcttgcaccaggtaaatctctttggggat

SEQ ID NO: 815443 - DNA, 33 bp, Homo sapien
agccccaaggttgttccaatccaactgttctgg

SEQ ID NO: 815444 - DNA, 33 bp, Homo sapien
agccccaaggttgttctaatccaactgttctgg

SEQ ID NO: 815445 - DNA, 33 bp, Homo sapien
tagtaattcccatcagaaaatgctgacctttta

SEQ ID NO: 815446 - DNA, 33 bp, Homo sapien
tagtaattcccatcaggaaatgctgacctttta

SEQ ID NO: 815447 - DNA, 33 bp, Homo sapien
agtaatttctatcttgcagcatctttgggaaag

SEQ ID NO: 815448 - DNA, 33 bp, Homo sapien
agtaatttctatcttgtagcatctttgggaaag

SEQ ID NO: 815449 - DNA, 33 bp, Homo sapien
aggcagtttgctgaaacggccagtctaggccgc

SEQ ID NO: 815450 - DNA, 33 bp, Homo sapien
aggcagtttgctgaaatggccagtctaggccgc

SEQ ID NO: 815451 - DNA, 33 bp, Homo sapien
cttggcctcagttataaagctaaaggaatcagc

SEQ ID NO: 815452 - DNA, 33 bp, Homo sapien
cttggcctcagttatagagctaaaggaatcagc

SEQ ID NO: 815453 - DNA, 33 bp, Homo sapien
tgatttgcaggaacagactacattaagacccta

SEQ ID NO: 815454 - DNA, 33 bp, Homo sapien
tgatttgcaggaacagcctacattaagacccta

SEQ ID NO: 815455 - DNA, 33 bp, Homo sapien
tccgcaaatagtaagtaaccacctaccatgtgt

SEQ ID NO: 815456 - DNA, 33 bp, Homo sapien
tccgcaaatagtaagtgaccacctaccatgtgt

SEQ ID NO: 815457 - DNA, 33 bp, Homo sapien
aatgacaaccttgcatcaagacagcgtttctac

SEQ ID NO: 815458 - DNA, 33 bp, Homo sapien
aatgacaaccttgcattaagacagcgtttctac

SEQ ID NO: 815459 - DNA, 33 bp, Homo sapien
ctttcctaaaatacggaagggatgagcacagaa

SEQ ID NO: 815460 - DNA, 33 bp, Homo sapien
ctttcctaaaatacgggagggatgagcacagaa

SEQ ID NO: 815461 - DNA, 33 bp, Homo sapien
aaaagggtaaaaatcaaagctgacagtcaggta

SEQ ID NO: 815462 - DNA, 33 bp, Homo sapien
aaaagggtaaaaatcagagctgacagtcaggta

SEQ ID NO: 815463 - DNA, 33 bp, Homo sapien
gattgccccttgagagcctccaaaaagatccaa

SEQ ID NO: 815464 - DNA, 33 bp, Homo sapien
gattgccccttgagagtctccaaaaagatccaa

SEQ ID NO: 815465 - DNA, 33 bp, Homo sapien
tgcaggccataatgaactacatagcatcttggc

SEQ ID NO: 815466 - DNA, 33 bp, Homo sapien
tgcaggccataatgaagtacatagcatcttggc

SEQ ID NO: 815467 - DNA, 33 bp, Homo sapien
gagattgggttaccacggagcttgtcaacaggg

SEQ ID NO: 815468 - DNA, 33 bp, Homo sapien
gagattgggttaccactgagcttgtcaacaggg

SEQ ID NO: 815469 - DNA, 33 bp, Homo sapien
atgtaaatcaatttagccactgtggaaagcaat

SEQ ID NO: 815470 - DNA, 33 bp, Homo sapien
atgtaaatcaatttagtcactgtggaaagcaat

SEQ ID NO: 815471 - DNA, 33 bp, Homo sapien
tggaaattagaaaacaatctagttgcatcacca

SEQ ID NO: 815472 - DNA, 33 bp, Homo sapien
tggaaattagaaaacagtctagttgcatcacca

SEQ ID NO: 815473 - DNA, 33 bp, Homo sapien
gagagagagactgagacagacacaaacaaaagc

SEQ ID NO: 815474 - DNA, 33 bp, Homo sapien
gagagagagactgagagagacacaaacaaaagc

SEQ ID NO: 815475 - DNA, 33 bp, Homo sapien
tatttgctccatcgaaaggtggatgaaacttca

SEQ ID NO: 815476 - DNA, 33 bp, Homo sapien
tatttgctccatcgaagggtggatgaaacttca

SEQ ID NO: 815477 - DNA, 33 bp, Homo sapien
aatagaataagaacgccagcatggtggttgtgg

SEQ ID NO: 815478 - DNA, 33 bp, Homo sapien
aatagaataagaacgctagcatggtggttgtgg

SEQ ID NO: 815479 - DNA, 33 bp, Homo sapien
aaatgtggtgaccttgaaatttttattaaagtt

SEQ ID NO: 815480 - DNA, 33 bp, Homo sapien
aaatgtggtgaccttgtaatttttattaaagtt

SEQ ID NO: 815481 - DNA, 33 bp, Homo sapien
gggaaagtgggtgaaagtgtggcgcgtgtatca

SEQ ID NO: 815482 - DNA, 33 bp, Homo sapien
gggaaagtgggtgaaattgtggcgcgtgtatca

SEQ ID NO: 815483 - DNA, 33 bp, Homo sapien
atggttggtggtacagaatatggtaaaagagga

SEQ ID NO: 815484 - DNA, 33 bp, Homo sapien
atggttggtggtacagtatatggtaaaagagga

SEQ ID NO: 815485 - DNA, 33 bp, Homo sapien
ccatcctcctcaggacaccactacagcacttcc

SEQ ID NO: 815486 - DNA, 33 bp, Homo sapien
ccatcctcctcaggacgccactacagcacttcc

SEQ ID NO: 815487 - DNA, 33 bp, Homo sapien
accatctctactcagcactgttaagggcatgag

SEQ ID NO: 815488 - DNA, 33 bp, Homo sapien
accatctctactcagcgctgttaagggcatgag

SEQ ID NO: 815489 - DNA, 33 bp, Homo sapien
ttccccagactttgaactggactgatcttttat

SEQ ID NO: 815490 - DNA, 33 bp, Homo sapien
ttccccagactttgaattggactgatcttttat

SEQ ID NO: 815491 - DNA, 33 bp, Homo sapien
cagcctgccttatgtcaagaactgtcagagagg

SEQ ID NO: 815492 - DNA, 33 bp, Homo sapien
cagcctgccttatgtcgagaactgtcagagagg

SEQ ID NO: 815493 - DNA, 33 bp, Homo sapien
cccatgtcaaacaatcaagtctcaccagcctgg

SEQ ID NO: 815494 - DNA, 33 bp, Homo sapien
cccatgtcaaacaatcgagtctcaccagcctgg

SEQ ID NO: 815495 - DNA, 33 bp, Homo sapien
gggtgagcgggtggtcaaagtctggccaatcag

SEQ ID NO: 815496 - DNA, 33 bp, Homo sapien
gggtgagcgggtggtcgaagtctggccaatcag

SEQ ID NO: 815497 - DNA, 33 bp, Homo sapien
tctgttcccgggggcacgggcaaactgtatagt

SEQ ID NO: 815498 - DNA, 33 bp, Homo sapien
tctgttcccgggggcatgggcaaactgtatagt

SEQ ID NO: 815499 - DNA, 33 bp, Homo sapien
gacaacatacaaccacacgggctcttcttccct

SEQ ID NO: 815500 - DNA, 33 bp, Homo sapien
gacaacatacaaccacgcgggctcttcttccct

SEQ ID NO: 815501 - DNA, 33 bp, Homo sapien
gtctctacatctccaacatctaacacaaggcct

SEQ ID NO: 815502 - DNA, 33 bp, Homo sapien
gtctctacatctccaatatctaacacaaggcct

SEQ ID NO: 815503 - DNA, 33 bp, Homo sapien
gtctgctgaaataccacgtgacaaagcagggcc

SEQ ID NO: 815504 - DNA, 33 bp, Homo sapien
gtctgctgaaataccatgtgacaaagcagggcc

SEQ ID NO: 815505 - DNA, 33 bp, Homo sapien
ggggccacagaagcacccactactgacatcagt

SEQ ID NO: 815506 - DNA, 33 bp, Homo sapien
ggggccacagaagcactcactactgacatcagt

SEQ ID NO: 815507 - DNA, 33 bp, Homo sapien
gccacagctgggagagacctagtttgtatcaag

SEQ ID NO: 815508 - DNA, 33 bp, Homo sapien
gccacagctgggagagtcctagtttgtatcaag

SEQ ID NO: 815509 - DNA, 33 bp, Homo sapien
cagaactgggtatggacggtctcagaatgctga

SEQ ID NO: 815510 - DNA, 33 bp, Homo sapien
cagaactgggtatggatggtctcagaatgctga

SEQ ID NO: 815511 - DNA, 33 bp, Homo sapien
cattaggaaatagaagcccaagaatcttgctat

SEQ ID NO: 815512 - DNA, 33 bp, Homo sapien
cattaggaaatagaaggccaagaatcttgctat

SEQ ID NO: 815513 - DNA, 33 bp, Homo sapien
gctgcagactgaccgacgtcctgcaggaggtga

SEQ ID NO: 815514 - DNA, 33 bp, Homo sapien
gctgcagactgaccgatgtcctgcaggaggtga

SEQ ID NO: 815515 - DNA, 33 bp, Homo sapien
tgatacttctgctcacccccaggtttggctttc

SEQ ID NO: 815516 - DNA, 33 bp, Homo sapien
tgatacttctgctcactcccaggtttggctttc

SEQ ID NO: 815517 - DNA, 33 bp, Homo sapien
tttatgagatatgagcaaatgtaaccaaggctt

SEQ ID NO: 815518 - DNA, 33 bp, Homo sapien
tttatgagatatgagcgaatgtaaccaaggctt

SEQ ID NO: 815519 - DNA, 33 bp, Homo sapien
tgcattgacacacctaacaagtcaaagtattgt

SEQ ID NO: 815520 - DNA, 33 bp, Homo sapien
tgcattgacacacctatcaagtcaaagtattgt

SEQ ID NO: 815521 - DNA, 33 bp, Homo sapien
atcctacatttcccccagcaggtcctctccctc

SEQ ID NO: 815522 - DNA, 33 bp, Homo sapien
atcctacatttcccccggcaggtcctctccctc

SEQ ID NO: 815523 - DNA, 33 bp, Homo sapien
agtagaatctattcccaggagatatttgaaatc

SEQ ID NO: 815524 - DNA, 33 bp, Homo sapien
agtagaatctattccctggagatatttgaaatc

SEQ ID NO: 815525 - DNA, 33 bp, Homo sapien
gctcaaatgccttacactatcccatccacttac

SEQ ID NO: 815526 - DNA, 33 bp, Homo sapien
gctcaaatgccttacagtatcccatccacttac

SEQ ID NO: 815527 - DNA, 33 bp, Homo sapien
tctggacttgcgcaatgacaggaaaggccacta

SEQ ID NO: 815528 - DNA, 33 bp, Homo sapien
tctggacttgcgcaattacaggaaaggccacta

SEQ ID NO: 815529 - DNA, 33 bp, Homo sapien
acattttgaagggcccggcatggaaggttatgg

SEQ ID NO: 815530 - DNA, 33 bp, Homo sapien
acattttgaagggccctgcatggaaggttatgg

SEQ ID NO: 815531 - DNA, 33 bp, Homo sapien
catacatttcaattacaaaaacaacttttagtc

SEQ ID NO: 815532 - DNA, 33 bp, Homo sapien
catacatttcaattaccaaaacaacttttagtc

SEQ ID NO: 815533 - DNA, 33 bp, Homo sapien
ttatttaagcatttaaaaatcatgacatgtttc

SEQ ID NO: 815534 - DNA, 33 bp, Homo sapien
ttatttaagcatttaataatcatgacatgtttc

SEQ ID NO: 815535 - DNA, 33 bp, Homo sapien
cactgaagtagcaccaatatattccacagtctc

SEQ ID NO: 815536 - DNA, 33 bp, Homo sapien
cactgaagtagcaccagtatattccacagtctc

SEQ ID NO: 815537 - DNA, 33 bp, Homo sapien
ccataaggaccagttacgtatattatccaaaag

SEQ ID NO: 815538 - DNA, 33 bp, Homo sapien
ccataaggaccagttatgtatattatccaaaag

SEQ ID NO: 815539 - DNA, 33 bp, Homo sapien
tttcttcacaccaaatcatgggcaagttttttc

SEQ ID NO: 815540 - DNA, 33 bp, Homo sapien
tttcttcacaccaaatgatgggcaagttttttc

SEQ ID NO: 815541 - DNA, 33 bp, Homo sapien
acatctatctttttccacagacacagctcccct

SEQ ID NO: 815542 - DNA, 33 bp, Homo sapien
acatctatctttttccgcagacacagctcccct

SEQ ID NO: 815543 - DNA, 33 bp, Homo sapien
ctgtagcatttctgacactaggtacacttcgct

SEQ ID NO: 815544 - DNA, 33 bp, Homo sapien
ctgtagcatttctgacgctaggtacacttcgct

SEQ ID NO: 815545 - DNA, 33 bp, Homo sapien
gcatctcgggggcttcactatttggtttgtgtg

SEQ ID NO: 815546 - DNA, 33 bp, Homo sapien
gcatctcgggggcttcgctatttggtttgtgtg

SEQ ID NO: 815547 - DNA, 33 bp, Homo sapien
gcaatcctgatcatgccccagggttaaacaggt

SEQ ID NO: 815548 - DNA, 33 bp, Homo sapien
gcaatcctgatcatgctccagggttaaacaggt

SEQ ID NO: 815549 - DNA, 33 bp, Homo sapien
agagctggggatggagaagattagtatattcat

SEQ ID NO: 815550 - DNA, 33 bp, Homo sapien
agagctggggatggaggagattagtatattcat

SEQ ID NO: 815551 - DNA, 33 bp, Homo sapien
ttctctcggatttaccaccaaaaattggttctg

SEQ ID NO: 815552 - DNA, 33 bp, Homo sapien
ttctctcggatttacccccaaaaattggttctg

SEQ ID NO: 815553 - DNA, 33 bp, Homo sapien
ctaaggttgagcaaaagaagttaaacacagaag

SEQ ID NO: 815554 - DNA, 33 bp, Homo sapien
ctaaggttgagcaaaataagttaaacacagaag

SEQ ID NO: 815555 - DNA, 33 bp, Homo sapien
ctcattaatgtttgtaagtgtagaggtcctaca

SEQ ID NO: 815556 - DNA, 33 bp, Homo sapien
ctcattaatgtttgtatgtgtagaggtcctaca

SEQ ID NO: 815557 - DNA, 33 bp, Homo sapien
aacacaggaagcagcaactctgtttggcaaatc

SEQ ID NO: 815558 - DNA, 33 bp, Homo sapien
aacacaggaagcagcacctctgtttggcaaatc

SEQ ID NO: 815559 - DNA, 33 bp, Homo sapien
cagatcatgaaacccactcgtcaaacagttttc

SEQ ID NO: 815560 - DNA, 33 bp, Homo sapien
cagatcatgaaacccattcgtcaaacagttttc

SEQ ID NO: 815561 - DNA, 33 bp, Homo sapien
tgaaaagttctttggaagtggaaaccgtttcag

SEQ ID NO: 815562 - DNA, 33 bp, Homo sapien
tgaaaagttctttggatgtggaaaccgtttcag

SEQ ID NO: 815563 - DNA, 33 bp, Homo sapien
tctgtaactccagtacaagcctgtggatggtga

SEQ ID NO: 815564 - DNA, 33 bp, Homo sapien
tctgtaactccagtactagcctgtggatggtga

SEQ ID NO: 815565 - DNA, 33 bp, Homo sapien
aaccagcttcaagtcagggaaacagggtgaagc

SEQ ID NO: 815566 - DNA, 33 bp, Homo sapien
aaccagcttcaagtcatggaaacagggtgaagc

SEQ ID NO: 815567 - DNA, 33 bp, Homo sapien
cgagcactctgtttcccatatagcagcaaggtg

SEQ ID NO: 815568 - DNA, 33 bp, Homo sapien
cgagcactctgtttcctatatagcagcaaggtg

SEQ ID NO: 815569 - DNA, 33 bp, Homo sapien
aatgtgaagtgaaacaaccgggcacagaaagac

SEQ ID NO: 815570 - DNA, 33 bp, Homo sapien
aatgtgaagtgaaacagccgggcacagaaagac

SEQ ID NO: 815571 - DNA, 33 bp, Homo sapien
tgcctgtgctcaccatcaaatcgcttgcccata

SEQ ID NO: 815572 - DNA, 33 bp, Homo sapien
tgcctgtgctcaccattaaatcgcttgcccata

SEQ ID NO: 815573 - DNA, 33 bp, Homo sapien
cctcagggcctttgaacatcttgtttcttcttc

SEQ ID NO: 815574 - DNA, 33 bp, Homo sapien
cctcagggcctttgaatatcttgtttcttcttc

SEQ ID NO: 815575 - DNA, 33 bp, Homo sapien
gactattcctgttcaaatctagggagcttccaa

SEQ ID NO: 815576 - DNA, 33 bp, Homo sapien
gactattcctgttcaactctagggagcttccaa

SEQ ID NO: 815577 - DNA, 33 bp, Homo sapien
tgtcacagggagcgccaagtgccatctccgaag

SEQ ID NO: 815578 - DNA, 33 bp, Homo sapien
tgtcacagggagcgccgagtgccatctccgaag

SEQ ID NO: 815579 - DNA, 33 bp, Homo sapien
ccttgagacatcacaaatactgtgtgagatagg

SEQ ID NO: 815580 - DNA, 33 bp, Homo sapien
ccttgagacatcacaagtactgtgtgagatagg

SEQ ID NO: 815581 - DNA, 33 bp, Homo sapien
gcatcactgatagctacgctttattgtattcag

SEQ ID NO: 815582 - DNA, 33 bp, Homo sapien
gcatcactgatagctatgctttattgtattcag

SEQ ID NO: 815583 - DNA, 33 bp, Homo sapien
atcttttccaacttgaagtcttgaagccatctc

SEQ ID NO: 815584 - DNA, 33 bp, Homo sapien
atcttttccaacttgacgtcttgaagccatctc

SEQ ID NO: 815585 - DNA, 33 bp, Homo sapien
gaaacctgcgatgggtaaaagccactccatccc

SEQ ID NO: 815586 - DNA, 33 bp, Homo sapien
gaaacctgcgatgggtgaaagccactccatccc

SEQ ID NO: 815587 - DNA, 33 bp, Homo sapien
atcgtcgcttgcattaactctaatgatgggaat

SEQ ID NO: 815588 - DNA, 33 bp, Homo sapien
atcgtcgcttgcattatctctaatgatgggaat

SEQ ID NO: 815589 - DNA, 33 bp, Homo sapien
cagtctacactatgaaccctggcagggtgactt

SEQ ID NO: 815590 - DNA, 33 bp, Homo sapien
cagtctacactatgaatcctggcagggtgactt

SEQ ID NO: 815591 - DNA, 33 bp, Homo sapien
tgatactcatttaacaaacattggttgggcacc

SEQ ID NO: 815592 - DNA, 33 bp, Homo sapien
tgatactcatttaacagacattggttgggcacc

SEQ ID NO: 815593 - DNA, 33 bp, Homo sapien
atgatttccgctcacaaactaacttctctgatt

SEQ ID NO: 815594 - DNA, 33 bp, Homo sapien
atgatttccgctcacagactaacttctctgatt

SEQ ID NO: 815595 - DNA, 33 bp, Homo sapien
taacaaagtgcactaaaaaggctgttcacaaac

SEQ ID NO: 815596 - DNA, 33 bp, Homo sapien
taacaaagtgcactaacaaggctgttcacaaac

SEQ ID NO: 815597 - DNA, 33 bp, Homo sapien
acaaagaaattcaagcagattttccatgaggga

SEQ ID NO: 815598 - DNA, 33 bp, Homo sapien
acaaagaaattcaagcggattttccatgaggga

SEQ ID NO: 815599 - DNA, 33 bp, Homo sapien
agggaaactaaggtaacaagagaagattgcaga

SEQ ID NO: 815600 - DNA, 33 bp, Homo sapien
agggaaactaaggtaagaagagaagattgcaga

SEQ ID NO: 815601 - DNA, 33 bp, Homo sapien
gaagtcatagccagaaaagagctacaaattagt

SEQ ID NO: 815602 - DNA, 33 bp, Homo sapien
gaagtcatagccagaagagagctacaaattagt

SEQ ID NO: 815603 - DNA, 33 bp, Homo sapien
attcagggtcatgatgcagtcacggaaggacgg

SEQ ID NO: 815604 - DNA, 33 bp, Homo sapien
attcagggtcatgatgtagtcacggaaggacgg

SEQ ID NO: 815605 - DNA, 33 bp, Homo sapien
tgaggaagcacagttaagttaaccaatgcggac

SEQ ID NO: 815606 - DNA, 33 bp, Homo sapien
tgaggaagcacagttaggttaaccaatgcggac

SEQ ID NO: 815607 - DNA, 33 bp, Homo sapien
actgcaggtctgatacagattgacaggtgccac

SEQ ID NO: 815608 - DNA, 33 bp, Homo sapien
actgcaggtctgatacggattgacaggtgccac

SEQ ID NO: 815609 - DNA, 33 bp, Homo sapien
cctggagcctccggaaaagaccagctcagatga

SEQ ID NO: 815610 - DNA, 33 bp, Homo sapien
cctggagcctccggaagagaccagctcagatga

SEQ ID NO: 815611 - DNA, 33 bp, Homo sapien
aggttttgtgcaagacccaattccttcaggact

SEQ ID NO: 815612 - DNA, 33 bp, Homo sapien
aggttttgtgcaagacgcaattccttcaggact

SEQ ID NO: 815613 - DNA, 33 bp, Homo sapien
ccccaattaccaggaaacaatatcatctttttg

SEQ ID NO: 815614 - DNA, 33 bp, Homo sapien
ccccaattaccaggaagcaatatcatctttttg

SEQ ID NO: 815615 - DNA, 33 bp, Homo sapien
acacaactgctgggaacgggaaagtttcaacct

SEQ ID NO: 815616 - DNA, 33 bp, Homo sapien
acacaactgctgggaatgggaaagtttcaacct

SEQ ID NO: 815617 - DNA, 33 bp, Homo sapien
ttctccatctgtataacggacgataacactagc

SEQ ID NO: 815618 - DNA, 33 bp, Homo sapien
ttctccatctgtataatggacgataacactagc

SEQ ID NO: 815619 - DNA, 33 bp, Homo sapien
gacttcccaattcttcccacttagccagctgcc

SEQ ID NO: 815620 - DNA, 33 bp, Homo sapien
gacttcccaattcttctcacttagccagctgcc

SEQ ID NO: 815621 - DNA, 33 bp, Homo sapien
ctttctaatttttgctaacctgatgagtgtaca

SEQ ID NO: 815622 - DNA, 33 bp, Homo sapien
ctttctaatttttgctgacctgatgagtgtaca

SEQ ID NO: 815623 - DNA, 33 bp, Homo sapien
ggtagcttacgttagacactatgttcaaattca

SEQ ID NO: 815624 - DNA, 33 bp, Homo sapien
ggtagcttacgttagatactatgttcaaattca

SEQ ID NO: 815625 - DNA, 33 bp, Homo sapien
ctccatgcagggagtgacaaggaatttgggacc

SEQ ID NO: 815626 - DNA, 33 bp, Homo sapien
ctccatgcagggagtgtcaaggaatttgggacc

SEQ ID NO: 815627 - DNA, 33 bp, Homo sapien
tgaatgtggtgccaacagaggtcactccatggt

SEQ ID NO: 815628 - DNA, 33 bp, Homo sapien
tgaatgtggtgccaacggaggtcactccatggt

SEQ ID NO: 815629 - DNA, 33 bp, Homo sapien
ctatttgttttttgcaatctgctatttttcagg

SEQ ID NO: 815630 - DNA, 33 bp, Homo sapien
ctatttgttttttgcagtctgctatttttcagg

SEQ ID NO: 815631 - DNA, 33 bp, Homo sapien
agggttctctcacaaacgaaaatgcctcaaata

SEQ ID NO: 815632 - DNA, 33 bp, Homo sapien
agggttctctcacaaatgaaaatgcctcaaata

SEQ ID NO: 815633 - DNA, 33 bp, Homo sapien
gagcttaacagctctgcagatacattcatttcc

SEQ ID NO: 815634 - DNA, 33 bp, Homo sapien
gagcttaacagctctggagatacattcatttcc

SEQ ID NO: 815635 - DNA, 33 bp, Homo sapien
cctgcttctcttcaccacaaggtggcactgttg

SEQ ID NO: 815636 - DNA, 33 bp, Homo sapien
cctgcttctcttcaccgcaaggtggcactgttg

SEQ ID NO: 815637 - DNA, 33 bp, Homo sapien
tactttgatagggtcaacctggtcttacctgac

SEQ ID NO: 815638 - DNA, 33 bp, Homo sapien
tactttgatagggtcaccctggtcttacctgac

SEQ ID NO: 815639 - DNA, 33 bp, Homo sapien
gctcattgatcccacacaggcacatcatctgta

SEQ ID NO: 815640 - DNA, 33 bp, Homo sapien
gctcattgatcccacataggcacatcatctgta

SEQ ID NO: 815641 - DNA, 33 bp, Homo sapien
gctctggagtgaaaccaccctgcgcttttatcc

SEQ ID NO: 815642 - DNA, 33 bp, Homo sapien
gctctggagtgaaacccccctgcgcttttatcc

SEQ ID NO: 815643 - DNA, 33 bp, Homo sapien
tcctcattaagtctacgctgggaacgtcttgtg

SEQ ID NO: 815644 - DNA, 33 bp, Homo sapien
tcctcattaagtctactctgggaacgtcttgtg

SEQ ID NO: 815645 - DNA, 33 bp, Homo sapien
atttggtgaaagtccacgcaaccattttcacaa

SEQ ID NO: 815646 - DNA, 33 bp, Homo sapien
atttggtgaaagtccatgcaaccattttcacaa

SEQ ID NO: 815647 - DNA, 33 bp, Homo sapien
ccatgtgcagtctccacgttcaagtataaaagt

SEQ ID NO: 815648 - DNA, 33 bp, Homo sapien
ccatgtgcagtctccatgttcaagtataaaagt

SEQ ID NO: 815649 - DNA, 33 bp, Homo sapien
tctgataccttcagaaagtcaatcagtaccaaa

SEQ ID NO: 815650 - DNA, 33 bp, Homo sapien
tctgataccttcagaatgtcaatcagtaccaaa

SEQ ID NO: 815651 - DNA, 33 bp, Homo sapien
gaaaaagggcggtctcacagccagaatcacaaa

SEQ ID NO: 815652 - DNA, 33 bp, Homo sapien
gaaaaagggcggtctcgcagccagaatcacaaa

SEQ ID NO: 815653 - DNA, 33 bp, Homo sapien
gctgaaaagagctgagaaaaagttagagctaat

SEQ ID NO: 815654 - DNA, 33 bp, Homo sapien
gctgaaaagagctgaggaaaagttagagctaat

SEQ ID NO: 815655 - DNA, 33 bp, Homo sapien
ccgcattggaaaacaaatcactctatctgccat

SEQ ID NO: 815656 - DNA, 33 bp, Homo sapien
ccgcattggaaaacaagtcactctatctgccat

SEQ ID NO: 815657 - DNA, 33 bp, Homo sapien
gccaaaggcatggaaccgattctagccccatca

SEQ ID NO: 815658 - DNA, 33 bp, Homo sapien
gccaaaggcatggaactgattctagccccatca

SEQ ID NO: 815659 - DNA, 33 bp, Homo sapien
ttatccaaaattcaaactgggctggcattctgt

SEQ ID NO: 815660 - DNA, 33 bp, Homo sapien
ttatccaaaattcaaattgggctggcattctgt

SEQ ID NO: 815661 - DNA, 33 bp, Homo sapien
ttattaagtgacattacgatgaagcttttccat

SEQ ID NO: 815662 - DNA, 33 bp, Homo sapien
ttattaagtgacattatgatgaagcttttccat

SEQ ID NO: 815663 - DNA, 33 bp, Homo sapien
gccagtggatctcccaagctaattcttgctggc

SEQ ID NO: 815664 - DNA, 33 bp, Homo sapien
gccagtggatctcccaggctaattcttgctggc

SEQ ID NO: 815665 - DNA, 33 bp, Homo sapien
atggactaatacatacactaagtcaaacaagac

SEQ ID NO: 815666 - DNA, 33 bp, Homo sapien
atggactaatacatacgctaagtcaaacaagac

SEQ ID NO: 815667 - DNA, 33 bp, Homo sapien
ctctgttctgacttgccgatgtgtcacattata

SEQ ID NO: 815668 - DNA, 33 bp, Homo sapien
ctctgttctgacttgctgatgtgtcacattata

SEQ ID NO: 815669 - DNA, 33 bp, Homo sapien
tctaaaactagtccctaaggctaagttccaaca

SEQ ID NO: 815670 - DNA, 33 bp, Homo sapien
tctaaaactagtccctgaggctaagttccaaca

SEQ ID NO: 815671 - DNA, 33 bp, Homo sapien
ttgccttctcacatatcagtgcaggtgcaggtc

SEQ ID NO: 815672 - DNA, 33 bp, Homo sapien
ttgccttctcacatattagtgcaggtgcaggtc

SEQ ID NO: 815673 - DNA, 33 bp, Homo sapien
agacacagctggaaaaaatgggctcctgggaca

SEQ ID NO: 815674 - DNA, 33 bp, Homo sapien
agacacagctggaaaagatgggctcctgggaca

SEQ ID NO: 815675 - DNA, 33 bp, Homo sapien
gactaagcctgtttcagtctctaggaagcaatg

SEQ ID NO: 815676 - DNA, 33 bp, Homo sapien
gactaagcctgtttcattctctaggaagcaatg

SEQ ID NO: 815677 - DNA, 33 bp, Homo sapien
gaactagagaatctcaaataaccctttagctct

SEQ ID NO: 815678 - DNA, 33 bp, Homo sapien
gaactagagaatctcagataaccctttagctct

SEQ ID NO: 815679 - DNA, 33 bp, Homo sapien
tcataatttatagtgacattttcaagagccaat

SEQ ID NO: 815680 - DNA, 33 bp, Homo sapien
tcataatttatagtgagattttcaagagccaat

SEQ ID NO: 815681 - DNA, 33 bp, Homo sapien
gcttttggttttcaaaaacaacatcattttgcc

SEQ ID NO: 815682 - DNA, 33 bp, Homo sapien
gcttttggttttcaaacacaacatcattttgcc

SEQ ID NO: 815683 - DNA, 33 bp, Homo sapien
caatacttatcatgcaatctcccttgttttcaa

SEQ ID NO: 815684 - DNA, 33 bp, Homo sapien
caatacttatcatgcagtctcccttgttttcaa

SEQ ID NO: 815685 - DNA, 33 bp, Homo sapien
aagctgaaaaccaggacattctgaaacacattt

SEQ ID NO: 815686 - DNA, 33 bp, Homo sapien
aagctgaaaaccaggatattctgaaacacattt

SEQ ID NO: 815687 - DNA, 33 bp, Homo sapien
gtgtccttacaatacacgcagagaggagaagcc

SEQ ID NO: 815688 - DNA, 33 bp, Homo sapien
gtgtccttacaatacatgcagagaggagaagcc

SEQ ID NO: 815689 - DNA, 33 bp, Homo sapien
cttataacaggataacagtcatttaaaatgtta

SEQ ID NO: 815690 - DNA, 33 bp, Homo sapien
cttataacaggataacggtcatttaaaatgtta

SEQ ID NO: 815691 - DNA, 33 bp, Homo sapien
cactcctacctattccaaagtgttgaattcaca

SEQ ID NO: 815692 - DNA, 33 bp, Homo sapien
cactcctacctattccgaagtgttgaattcaca

SEQ ID NO: 815693 - DNA, 33 bp, Homo sapien
ataaagacctcctttaagttagtgatttaggtt

SEQ ID NO: 815694 - DNA, 33 bp, Homo sapien
ataaagacctcctttaggttagtgatttaggtt

SEQ ID NO: 815695 - DNA, 33 bp, Homo sapien
gacaagtattaagtcacgaatgctgcaggcttc

SEQ ID NO: 815696 - DNA, 33 bp, Homo sapien
gacaagtattaagtcatgaatgctgcaggcttc

SEQ ID NO: 815697 - DNA, 33 bp, Homo sapien
aaatagccacaggtctaaactggctactgcttc

SEQ ID NO: 815698 - DNA, 33 bp, Homo sapien
aaatagccacaggtctcaactggctactgcttc

SEQ ID NO: 815699 - DNA, 33 bp, Homo sapien
actttgatagggattaccagaggagctgtgaga

SEQ ID NO: 815700 - DNA, 33 bp, Homo sapien
actttgatagggattagcagaggagctgtgaga

SEQ ID NO: 815701 - DNA, 33 bp, Homo sapien
cctccactagactacccactccccaaaggcaaa

SEQ ID NO: 815702 - DNA, 33 bp, Homo sapien
cctccactagactacctactccccaaaggcaaa

SEQ ID NO: 815703 - DNA, 33 bp, Homo sapien
atttattcattcactcgataaccatttgcagca

SEQ ID NO: 815704 - DNA, 33 bp, Homo sapien
atttattcattcactctataaccatttgcagca

SEQ ID NO: 815705 - DNA, 33 bp, Homo sapien
acctcagtgcggctgaacatcagtccggtagag

SEQ ID NO: 815706 - DNA, 33 bp, Homo sapien
acctcagtgcggctgaccatcagtccggtagag

SEQ ID NO: 815707 - DNA, 33 bp, Homo sapien
gtgagttaccactgaccattttctgggtcttga

SEQ ID NO: 815708 - DNA, 33 bp, Homo sapien
gtgagttaccactgactattttctgggtcttga

SEQ ID NO: 815709 - DNA, 33 bp, Homo sapien
tgctgtgtcacaaagagactggaaaggggcaag

SEQ ID NO: 815710 - DNA, 33 bp, Homo sapien
tgctgtgtcacaaagatactggaaaggggcaag

SEQ ID NO: 815711 - DNA, 33 bp, Homo sapien
ttgtttagaaatccataaataggtcataaaagt

SEQ ID NO: 815712 - DNA, 33 bp, Homo sapien
ttgtttagaaatccattaataggtcataaaagt

SEQ ID NO: 815713 - DNA, 33 bp, Homo sapien
cagaacgtgcctgaaacgctgagcaaccaggag

SEQ ID NO: 815714 - DNA, 33 bp, Homo sapien
cagaacgtgcctgaaatgctgagcaaccaggag

SEQ ID NO: 815715 - DNA, 33 bp, Homo sapien
cctatttacgagtgaaagagtccacaccatgct

SEQ ID NO: 815716 - DNA, 33 bp, Homo sapien
cctatttacgagtgaaggagtccacaccatgct

SEQ ID NO: 815717 - DNA, 33 bp, Homo sapien
gtcaacttctgtcccacatcagaatcatgtgca

SEQ ID NO: 815718 - DNA, 33 bp, Homo sapien
gtcaacttctgtcccatatcagaatcatgtgca

SEQ ID NO: 815719 - DNA, 33 bp, Homo sapien
gtaagttttatccacaccaacaacccatttcca

SEQ ID NO: 815720 - DNA, 33 bp, Homo sapien
gtaagttttatccacatcaacaacccatttcca

SEQ ID NO: 815721 - DNA, 33 bp, Homo sapien
gtgaatggcatcagaagtggggtcagtcttgtg

SEQ ID NO: 815722 - DNA, 33 bp, Homo sapien
gtgaatggcatcagaattggggtcagtcttgtg

SEQ ID NO: 815723 - DNA, 33 bp, Homo sapien
taacccggtaataataagcaaagtgccttcctg

SEQ ID NO: 815724 - DNA, 33 bp, Homo sapien
taacccggtaataataggcaaagtgccttcctg

SEQ ID NO: 815725 - DNA, 33 bp, Homo sapien
agctctgaagtggacaagctctccaacccaagg

SEQ ID NO: 815726 - DNA, 33 bp, Homo sapien
agctctgaagtggacacgctctccaacccaagg

SEQ ID NO: 815727 - DNA, 33 bp, Homo sapien
gatgttaaaataattacgtggctgactctacag

SEQ ID NO: 815728 - DNA, 33 bp, Homo sapien
gatgttaaaataattatgtggctgactctacag

SEQ ID NO: 815729 - DNA, 33 bp, Homo sapien
gctatcttggagctaacgtaacaacgtcttttc

SEQ ID NO: 815730 - DNA, 33 bp, Homo sapien
gctatcttggagctaatgtaacaacgtcttttc

SEQ ID NO: 815731 - DNA, 33 bp, Homo sapien
aagaaaggtaaagtcaagagcccaaatttgtac

SEQ ID NO: 815732 - DNA, 33 bp, Homo sapien
aagaaaggtaaagtcaggagcccaaatttgtac

SEQ ID NO: 815733 - DNA, 33 bp, Homo sapien
tcccagaagtgaagcaaatttctcaaagctcat

SEQ ID NO: 815734 - DNA, 33 bp, Homo sapien
tcccagaagtgaagcacatttctcaaagctcat

SEQ ID NO: 815735 - DNA, 33 bp, Homo sapien
tccattttctcctctacgaaacagcaaattaca

SEQ ID NO: 815736 - DNA, 33 bp, Homo sapien
tccattttctcctctatgaaacagcaaattaca

SEQ ID NO: 815737 - DNA, 33 bp, Homo sapien
gctatgggttttctcacgtgcatctcgacagct

SEQ ID NO: 815738 - DNA, 33 bp, Homo sapien
gctatgggttttctcatgtgcatctcgacagct

SEQ ID NO: 815739 - DNA, 33 bp, Homo sapien
tctctccagcacaccaggacgggatgtagctat

SEQ ID NO: 815740 - DNA, 33 bp, Homo sapien
tctctccagcacaccatgacgggatgtagctat

SEQ ID NO: 815741 - DNA, 33 bp, Homo sapien
gcttcacactgctcacagagtaggcaacaggac

SEQ ID NO: 815742 - DNA, 33 bp, Homo sapien
gcttcacactgctcacggagtaggcaacaggac

SEQ ID NO: 815743 - DNA, 33 bp, Homo sapien
ctatcctggtggtacaatcatagagtggagttc

SEQ ID NO: 815744 - DNA, 33 bp, Homo sapien
ctatcctggtggtacagtcatagagtggagttc

SEQ ID NO: 815745 - DNA, 33 bp, Homo sapien
tgtttgtaagttcagaggctccttcttaaagag

SEQ ID NO: 815746 - DNA, 33 bp, Homo sapien
tgtttgtaagttcagatgctccttcttaaagag

SEQ ID NO: 815747 - DNA, 33 bp, Homo sapien
aaaatacaaaaaactaataaagtgtggtggtag

SEQ ID NO: 815748 - DNA, 33 bp, Homo sapien
aaaatacaaaaaactagtaaagtgtggtggtag

SEQ ID NO: 815749 - DNA, 33 bp, Homo sapien
taatggcgccatctcaaatcagtgccaggggaa

SEQ ID NO: 815750 - DNA, 33 bp, Homo sapien
taatggcgccatctcagatcagtgccaggggaa

SEQ ID NO: 815751 - DNA, 33 bp, Homo sapien
cagcctgccatttgcacctgatagtgttctata

SEQ ID NO: 815752 - DNA, 33 bp, Homo sapien
cagcctgccatttgcatctgatagtgttctata

SEQ ID NO: 815753 - DNA, 33 bp, Homo sapien
agtcctctggaaccaccagttatgggcgtgctt

SEQ ID NO: 815754 - DNA, 33 bp, Homo sapien
agtcctctggaaccacgagttatgggcgtgctt

SEQ ID NO: 815755 - DNA, 33 bp, Homo sapien
tttttgactatctcaactccctaagaagcaatt

SEQ ID NO: 815756 - DNA, 33 bp, Homo sapien
tttttgactatctcaattccctaagaagcaatt

SEQ ID NO: 815757 - DNA, 33 bp, Homo sapien
cttcacgcacactaaactagtccatcttgcatg

SEQ ID NO: 815758 - DNA, 33 bp, Homo sapien
cttcacgcacactaaagtagtccatcttgcatg

SEQ ID NO: 815759 - DNA, 33 bp, Homo sapien
attcattgtgcgtgtacgtatttagttctacta

SEQ ID NO: 815760 - DNA, 33 bp, Homo sapien
attcattgtgcgtgtatgtatttagttctacta

SEQ ID NO: 815761 - DNA, 33 bp, Homo sapien
ctttgtcacctacagaaagctgtacacttcatg

SEQ ID NO: 815762 - DNA, 33 bp, Homo sapien
ctttgtcacctacagagagctgtacacttcatg

SEQ ID NO: 815763 - DNA, 33 bp, Homo sapien
taatgaagagaatgaaaccgtgtatgttatatt

SEQ ID NO: 815764 - DNA, 33 bp, Homo sapien
taatgaagagaatgaatccgtgtatgttatatt

SEQ ID NO: 815765 - DNA, 33 bp, Homo sapien
tcagcgttatctctgaggctttaactctttttt

SEQ ID NO: 815766 - DNA, 33 bp, Homo sapien
tcagcgttatctctgatgctttaactctttttt

SEQ ID NO: 815767 - DNA, 33 bp, Homo sapien
ttatttatatcttgcaacaggaagcccgagagg

SEQ ID NO: 815768 - DNA, 33 bp, Homo sapien
ttatttatatcttgcatcaggaagcccgagagg

SEQ ID NO: 815769 - DNA, 33 bp, Homo sapien
ccatattgagaaagtaacatgggtacttggctt

SEQ ID NO: 815770 - DNA, 33 bp, Homo sapien
ccatattgagaaagtagcatgggtacttggctt

SEQ ID NO: 815771 - DNA, 33 bp, Homo sapien
agcatagagcttgccacgctatagaaccaaata

SEQ ID NO: 815772 - DNA, 33 bp, Homo sapien
agcatagagcttgccatgctatagaaccaaata

SEQ ID NO: 815773 - DNA, 33 bp, Homo sapien
ctgccaacaagaaggcccaatcaagatcctccc

SEQ ID NO: 815774 - DNA, 33 bp, Homo sapien
ctgccaacaagaaggctcaatcaagatcctccc

SEQ ID NO: 815775 - DNA, 33 bp, Homo sapien
cacctggcggctgcaacagtccaaacctccact

SEQ ID NO: 815776 - DNA, 33 bp, Homo sapien
cacctggcggctgcaatagtccaaacctccact

SEQ ID NO: 815777 - DNA, 33 bp, Homo sapien
atttgtcattagtttacgttgcatagggtaaga

SEQ ID NO: 815778 - DNA, 33 bp, Homo sapien
atttgtcattagtttatgttgcatagggtaaga

SEQ ID NO: 815779 - DNA, 33 bp, Homo sapien
ttggctcagaaaaagcaagaagccatgaatagc

SEQ ID NO: 815780 - DNA, 33 bp, Homo sapien
ttggctcagaaaaagcgagaagccatgaatagc

SEQ ID NO: 815781 - DNA, 33 bp, Homo sapien
ctagcataagcaggacaccgttatgggcctgtg

SEQ ID NO: 815782 - DNA, 33 bp, Homo sapien
ctagcataagcaggactccgttatgggcctgtg

SEQ ID NO: 815783 - DNA, 33 bp, Homo sapien
aatagtgctgtacgcacctgtgaacaagtgtcg

SEQ ID NO: 815784 - DNA, 33 bp, Homo sapien
aatagtgctgtacgcagctgtgaacaagtgtcg

SEQ ID NO: 815785 - DNA, 33 bp, Homo sapien
atgtgagtcttaagtacctgccatgtgacccac

SEQ ID NO: 815786 - DNA, 33 bp, Homo sapien
atgtgagtcttaagtagctgccatgtgacccac

SEQ ID NO: 815787 - DNA, 33 bp, Homo sapien
caatatatcacacctaccaagcacatacttgca

SEQ ID NO: 815788 - DNA, 33 bp, Homo sapien
caatatatcacacctatcaagcacatacttgca

SEQ ID NO: 815789 - DNA, 33 bp, Homo sapien
tgctgcttttagagaaatgctatgggttccctg

SEQ ID NO: 815790 - DNA, 33 bp, Homo sapien
tgctgcttttagagaactgctatgggttccctg

SEQ ID NO: 815791 - DNA, 33 bp, Homo sapien
ctctggctgtgcgttacgaattaatactttcaa

SEQ ID NO: 815792 - DNA, 33 bp, Homo sapien
ctctggctgtgcgttatgaattaatactttcaa

SEQ ID NO: 815793 - DNA, 33 bp, Homo sapien
catgttggtcagctaactccctttctgtctcct

SEQ ID NO: 815794 - DNA, 33 bp, Homo sapien
catgttggtcagctaattccctttctgtctcct

SEQ ID NO: 815795 - DNA, 33 bp, Homo sapien
ttatatccatccaagaaattcattttattcagt

SEQ ID NO: 815796 - DNA, 33 bp, Homo sapien
ttatatccatccaagatattcattttattcagt

SEQ ID NO: 815797 - DNA, 33 bp, Homo sapien
ttattagtttttacaaattatcaactgacaaca

SEQ ID NO: 815798 - DNA, 33 bp, Homo sapien
ttattagtttttacaagttatcaactgacaaca

SEQ ID NO: 815799 - DNA, 33 bp, Homo sapien
ggctagatacatgtgcacccagaaatggatccc

SEQ ID NO: 815800 - DNA, 33 bp, Homo sapien
ggctagatacatgtgcgcccagaaatggatccc

SEQ ID NO: 815801 - DNA, 33 bp, Homo sapien
cataagatgcagactacagccaggcgtttcccg

SEQ ID NO: 815802 - DNA, 33 bp, Homo sapien
cataagatgcagactagagccaggcgtttcccg

SEQ ID NO: 815803 - DNA, 33 bp, Homo sapien
agcttagaaattgcccaaatgtcacagaagctg

SEQ ID NO: 815804 - DNA, 33 bp, Homo sapien
agcttagaaattgcccgaatgtcacagaagctg

SEQ ID NO: 815805 - DNA, 33 bp, Homo sapien
gctgctcagagttaaacgatttcacagacttta

SEQ ID NO: 815806 - DNA, 33 bp, Homo sapien
gctgctcagagttaaatgatttcacagacttta

SEQ ID NO: 815807 - DNA, 33 bp, Homo sapien
caacaaaggcatctccaagttgaaacttagaag

SEQ ID NO: 815808 - DNA, 33 bp, Homo sapien
caacaaaggcatctccgagttgaaacttagaag

SEQ ID NO: 815809 - DNA, 33 bp, Homo sapien
tctagcatttcaaagaagtgttcacatcatgtt

SEQ ID NO: 815810 - DNA, 33 bp, Homo sapien
tctagcatttcaaagaggtgttcacatcatgtt

SEQ ID NO: 815811 - DNA, 33 bp, Homo sapien
tgctttaaacagaaataaattgaattatgcgct

SEQ ID NO: 815812 - DNA, 33 bp, Homo sapien
tgctttaaacagaaatgaattgaattatgcgct

SEQ ID NO: 815813 - DNA, 33 bp, Homo sapien
tgctgaggaagttcctaagatatattttcctct

SEQ ID NO: 815814 - DNA, 33 bp, Homo sapien
tgctgaggaagttcctgagatatattttcctct

SEQ ID NO: 815815 - DNA, 33 bp, Homo sapien
tggagaatgagttgggaaaggaagtctgctgag

SEQ ID NO: 815816 - DNA, 33 bp, Homo sapien
tggagaatgagttggggaaggaagtctgctgag

SEQ ID NO: 815817 - DNA, 33 bp, Homo sapien
gatttgcctagggacaaccatgagacccggctt

SEQ ID NO: 815818 - DNA, 33 bp, Homo sapien
gatttgcctagggacagccatgagacccggctt

SEQ ID NO: 815819 - DNA, 33 bp, Homo sapien
cctgtgctccaatttacagtccatatctcaatg

SEQ ID NO: 815820 - DNA, 33 bp, Homo sapien
cctgtgctccaatttatagtccatatctcaatg

SEQ ID NO: 815821 - DNA, 33 bp, Homo sapien
agagcagtgcctatagaagagtcctagggagtc

SEQ ID NO: 815822 - DNA, 33 bp, Homo sapien
agagcagtgcctatagtagagtcctagggagtc

SEQ ID NO: 815823 - DNA, 33 bp, Homo sapien
tccaatcatctggtcaagtcacatctctcctta

SEQ ID NO: 815824 - DNA, 33 bp, Homo sapien
tccaatcatctggtcatgtcacatctctcctta

SEQ ID NO: 815825 - DNA, 33 bp, Homo sapien
acaagcctagcagtcaatattcttactcccatt

SEQ ID NO: 815826 - DNA, 33 bp, Homo sapien
acaagcctagcagtcagtattcttactcccatt

SEQ ID NO: 815827 - DNA, 33 bp, Homo sapien
ctcaaggtggcttctacgataagcacattttta

SEQ ID NO: 815828 - DNA, 33 bp, Homo sapien
ctcaaggtggcttctatgataagcacattttta

SEQ ID NO: 815829 - DNA, 33 bp, Homo sapien
ttacctccctgttttaagattcaggctccttgt

SEQ ID NO: 815830 - DNA, 33 bp, Homo sapien
ttacctccctgttttaggattcaggctccttgt

SEQ ID NO: 815831 - DNA, 33 bp, Homo sapien
ttcagcgcaaatattcaccactttactaaccct

SEQ ID NO: 815832 - DNA, 33 bp, Homo sapien
ttcagcgcaaatattcgccactttactaaccct

SEQ ID NO: 815833 - DNA, 33 bp, Homo sapien
aaatgaccaaggttcaaatttcaggttagttat

SEQ ID NO: 815834 - DNA, 33 bp, Homo sapien
aaatgaccaaggttcagatttcaggttagttat

SEQ ID NO: 815835 - DNA, 33 bp, Homo sapien
caatcccggaaacaggccactatcactgggatc

SEQ ID NO: 815836 - DNA, 33 bp, Homo sapien
caatcccggaaacaggtcactatcactgggatc

SEQ ID NO: 815837 - DNA, 33 bp, Homo sapien
tgcacagtgcaaagcaatctccaggctgagaac

SEQ ID NO: 815838 - DNA, 33 bp, Homo sapien
tgcacagtgcaaagcagtctccaggctgagaac

SEQ ID NO: 815839 - DNA, 33 bp, Homo sapien
gatctaatgaagttaacagcacctactcggtgc

SEQ ID NO: 815840 - DNA, 33 bp, Homo sapien
gatctaatgaagttaagagcacctactcggtgc

SEQ ID NO: 815841 - DNA, 33 bp, Homo sapien
gttgaaatcgggataagatacataaagtgctta

SEQ ID NO: 815842 - DNA, 33 bp, Homo sapien
gttgaaatcgggataatatacataaagtgctta

SEQ ID NO: 815843 - DNA, 33 bp, Homo sapien
gggaggatatctctggaagtgaaaaggagtcag

SEQ ID NO: 815844 - DNA, 33 bp, Homo sapien
gggaggatatctctggcagtgaaaaggagtcag

SEQ ID NO: 815845 - DNA, 33 bp, Homo sapien
taaaaatcatcttcaaaaatttcctaacttgtc

SEQ ID NO: 815846 - DNA, 33 bp, Homo sapien
taaaaatcatcttcaacaatttcctaacttgtc

SEQ ID NO: 815847 - DNA, 33 bp, Homo sapien
tacatgggctgctgaacctgaaggtacttcttt

SEQ ID NO: 815848 - DNA, 33 bp, Homo sapien
tacatgggctgctgaatctgaaggtacttcttt

SEQ ID NO: 815849 - DNA, 33 bp, Homo sapien
tatttgcagcaagtaacacagtgccttaaacaa

SEQ ID NO: 815850 - DNA, 33 bp, Homo sapien
tatttgcagcaagtaatacagtgccttaaacaa

SEQ ID NO: 815851 - DNA, 33 bp, Homo sapien
tctcctcccaaatttcaaatcactagctggtat

SEQ ID NO: 815852 - DNA, 33 bp, Homo sapien
tctcctcccaaatttcgaatcactagctggtat

SEQ ID NO: 815853 - DNA, 33 bp, Homo sapien
gagtctgacttcagagaagatgttcaggaaaag

SEQ ID NO: 815854 - DNA, 33 bp, Homo sapien
gagtctgacttcagagcagatgttcaggaaaag

SEQ ID NO: 815855 - DNA, 33 bp, Homo sapien
caagaatgggcaattagctcaaagacaccaact

SEQ ID NO: 815856 - DNA, 33 bp, Homo sapien
caagaatgggcaattatctcaaagacaccaact

SEQ ID NO: 815857 - DNA, 33 bp, Homo sapien
gtatctttacagttggcatagaatttagtgcta

SEQ ID NO: 815858 - DNA, 33 bp, Homo sapien
gtatctttacagttgggatagaatttagtgcta

SEQ ID NO: 815859 - DNA, 33 bp, Homo sapien
ctcactgtactgtgtaggttgagcttacaaagg

SEQ ID NO: 815860 - DNA, 33 bp, Homo sapien
ctcactgtactgtgtatgttgagcttacaaagg

SEQ ID NO: 815861 - DNA, 33 bp, Homo sapien
tgaggccattcatacaacaaatatacatcaggc

SEQ ID NO: 815862 - DNA, 33 bp, Homo sapien
tgaggccattcatacagcaaatatacatcaggc

SEQ ID NO: 815863 - DNA, 33 bp, Homo sapien
atctctaaagttctcaatcatttacactgactt

SEQ ID NO: 815864 - DNA, 33 bp, Homo sapien
atctctaaagttctcagtcatttacactgactt

SEQ ID NO: 815865 - DNA, 33 bp, Homo sapien
gtttggaactttttggccaaaataaatcctact

SEQ ID NO: 815866 - DNA, 33 bp, Homo sapien
gtttggaactttttggtcaaaataaatcctact

SEQ ID NO: 815867 - DNA, 33 bp, Homo sapien
tttttcctagttaagtcaatttagctttaagga

SEQ ID NO: 815868 - DNA, 33 bp, Homo sapien
tttttcctagttaagtgaatttagctttaagga

SEQ ID NO: 815869 - DNA, 33 bp, Homo sapien
attcttccttgtccaccgtaatctattcaggct

SEQ ID NO: 815870 - DNA, 33 bp, Homo sapien
attcttccttgtccactgtaatctattcaggct

SEQ ID NO: 815871 - DNA, 33 bp, Homo sapien
aggaaggggtcagaatgaacagaagagtgcact

SEQ ID NO: 815872 - DNA, 33 bp, Homo sapien
aggaaggggtcagaattaacagaagagtgcact

SEQ ID NO: 815873 - DNA, 33 bp, Homo sapien
gctgtagagcctggaagaatcaacttagaatct

SEQ ID NO: 815874 - DNA, 33 bp, Homo sapien
gctgtagagcctggaataatcaacttagaatct

SEQ ID NO: 815875 - DNA, 33 bp, Homo sapien
tcacaaggaaagtggagatcagaatgcctgata

SEQ ID NO: 815876 - DNA, 33 bp, Homo sapien
tcacaaggaaagtggatatcagaatgcctgata

SEQ ID NO: 815877 - DNA, 33 bp, Homo sapien
ttctctgagtgctccaagctacctttatcaggc

SEQ ID NO: 815878 - DNA, 33 bp, Homo sapien
ttctctgagtgctccaggctacctttatcaggc

SEQ ID NO: 815879 - DNA, 33 bp, Homo sapien
aaagaattctttaaaaatggacaaagcctccaa

SEQ ID NO: 815880 - DNA, 33 bp, Homo sapien
aaagaattctttaaaactggacaaagcctccaa

SEQ ID NO: 815881 - DNA, 33 bp, Homo sapien
cttcagcactatctaacctactattaaaccctc

SEQ ID NO: 815882 - DNA, 33 bp, Homo sapien
cttcagcactatctaatctactattaaaccctc

SEQ ID NO: 815883 - DNA, 33 bp, Homo sapien
aaaaaaaatagttggcaacatgaattcaatacc

SEQ ID NO: 815884 - DNA, 33 bp, Homo sapien
aaaaaaaatagttggcgacatgaattcaatacc

SEQ ID NO: 815885 - DNA, 33 bp, Homo sapien
gagaagacgggagaacaaacctgaaatccacct

SEQ ID NO: 815886 - DNA, 33 bp, Homo sapien
gagaagacgggagaacgaacctgaaatccacct

SEQ ID NO: 815887 - DNA, 33 bp, Homo sapien
tgggcctctgacttcaaaaggtcattctctggg

SEQ ID NO: 815888 - DNA, 33 bp, Homo sapien
tgggcctctgacttcacaaggtcattctctggg

SEQ ID NO: 815889 - DNA, 33 bp, Homo sapien
tgacctagtgctcacacgataggttttaaataa

SEQ ID NO: 815890 - DNA, 33 bp, Homo sapien
tgacctagtgctcacatgataggttttaaataa

SEQ ID NO: 815891 - DNA, 33 bp, Homo sapien
tacatctgtgtcactaacatctgacctagtgct

SEQ ID NO: 815892 - DNA, 33 bp, Homo sapien
tacatctgtgtcactagcatctgacctagtgct

SEQ ID NO: 815893 - DNA, 33 bp, Homo sapien
aaggaaagaagaggcacagatgcagaaaatcag

SEQ ID NO: 815894 - DNA, 33 bp, Homo sapien
aaggaaagaagaggcatagatgcagaaaatcag

SEQ ID NO: 815895 - DNA, 33 bp, Homo sapien
atacaagtacagaagacgtgaaaaagaaaaaag

SEQ ID NO: 815896 - DNA, 33 bp, Homo sapien
atacaagtacagaagatgtgaaaaagaaaaaag

SEQ ID NO: 815897 - DNA, 33 bp, Homo sapien
ttagaacactttaaatcattacttcagtggaaa

SEQ ID NO: 815898 - DNA, 33 bp, Homo sapien
ttagaacactttaaattattacttcagtggaaa

SEQ ID NO: 815899 - DNA, 33 bp, Homo sapien
cgttcactctggataaaccttattagtactact

SEQ ID NO: 815900 - DNA, 33 bp, Homo sapien
cgttcactctggataacccttattagtactact

SEQ ID NO: 815901 - DNA, 33 bp, Homo sapien
caattaaaaaatacaaattacgaagctcatcgg

SEQ ID NO: 815902 - DNA, 33 bp, Homo sapien
caattaaaaaatacaagttacgaagctcatcgg

SEQ ID NO: 815903 - DNA, 33 bp, Homo sapien
tctcttctaagaaaacacttcctagtttgtgct

SEQ ID NO: 815904 - DNA, 33 bp, Homo sapien
tctcttctaagaaaacccttcctagtttgtgct

SEQ ID NO: 815905 - DNA, 33 bp, Homo sapien
acactctgattgtcatcacacagtctttcacca

SEQ ID NO: 815906 - DNA, 33 bp, Homo sapien
acactctgattgtcattacacagtctttcacca

SEQ ID NO: 815907 - DNA, 33 bp, Homo sapien
tgttccactgtggctcaataaacgtgagcttcc

SEQ ID NO: 815908 - DNA, 33 bp, Homo sapien
tgttccactgtggctcgataaacgtgagcttcc

SEQ ID NO: 815909 - DNA, 33 bp, Homo sapien
tcaggttcctgcatcccagtctctgaacagcca

SEQ ID NO: 815910 - DNA, 33 bp, Homo sapien
tcaggttcctgcatcctagtctctgaacagcca

SEQ ID NO: 815911 - DNA, 33 bp, Homo sapien
gtccatgaggaggaagaaatctctaccctgtct

SEQ ID NO: 815912 - DNA, 33 bp, Homo sapien
gtccatgaggaggaaggaatctctaccctgtct

SEQ ID NO: 815913 - DNA, 33 bp, Homo sapien
tagttctccagcgctaaattggagggtttcatt

SEQ ID NO: 815914 - DNA, 33 bp, Homo sapien
tagttctccagcgctacattggagggtttcatt

SEQ ID NO: 815915 - DNA, 33 bp, Homo sapien
tggcatcagccctggaaagaacgtggagagcac

SEQ ID NO: 815916 - DNA, 33 bp, Homo sapien
tggcatcagccctggatagaacgtggagagcac

SEQ ID NO: 815917 - DNA, 33 bp, Homo sapien
ttaaactggctccatcagaagacgttgaagggc

SEQ ID NO: 815918 - DNA, 33 bp, Homo sapien
ttaaactggctccatcggaagacgttgaagggc

SEQ ID NO: 815919 - DNA, 33 bp, Homo sapien
attactaagcccagaacgcacataacccatagt

SEQ ID NO: 815920 - DNA, 33 bp, Homo sapien
attactaagcccagaatgcacataacccatagt

SEQ ID NO: 815921 - DNA, 33 bp, Homo sapien
attgaaaaataaattacgtaagctcagtccaca

SEQ ID NO: 815922 - DNA, 33 bp, Homo sapien
attgaaaaataaattatgtaagctcagtccaca

SEQ ID NO: 815923 - DNA, 33 bp, Homo sapien
cacttcaaaacaagcaataaatacataaataaa

SEQ ID NO: 815924 - DNA, 33 bp, Homo sapien
cacttcaaaacaagcagtaaatacataaataaa

SEQ ID NO: 815925 - DNA, 33 bp, Homo sapien
tcttacacgtcatagacacctactcccatctgc

SEQ ID NO: 815926 - DNA, 33 bp, Homo sapien
tcttacacgtcatagatacctactcccatctgc

SEQ ID NO: 815927 - DNA, 33 bp, Homo sapien
cttccagtatcccacagaattttaaccaaaatg

SEQ ID NO: 815928 - DNA, 33 bp, Homo sapien
cttccagtatcccacataattttaaccaaaatg

SEQ ID NO: 815929 - DNA, 33 bp, Homo sapien
ttccaatgtctgcaaaagaagatgtactacggt

SEQ ID NO: 815930 - DNA, 33 bp, Homo sapien
ttccaatgtctgcaaaggaagatgtactacggt

SEQ ID NO: 815931 - DNA, 33 bp, Homo sapien
cacaggtgccagggataaggacctctgcaaatc

SEQ ID NO: 815932 - DNA, 33 bp, Homo sapien
cacaggtgccagggatgaggacctctgcaaatc

SEQ ID NO: 815933 - DNA, 33 bp, Homo sapien
ggaaatccttctgaaacctgcagagaaagtttc

SEQ ID NO: 815934 - DNA, 33 bp, Homo sapien
ggaaatccttctgaaatctgcagagaaagtttc

SEQ ID NO: 815935 - DNA, 33 bp, Homo sapien
gcctccgggctgttgcacatacattgcctttgc

SEQ ID NO: 815936 - DNA, 33 bp, Homo sapien
gcctccgggctgttgcgcatacattgcctttgc

SEQ ID NO: 815937 - DNA, 33 bp, Homo sapien
aaggaatgacgtgtccaattgcaaacacatctc

SEQ ID NO: 815938 - DNA, 33 bp, Homo sapien
aaggaatgacgtgtccgattgcaaacacatctc

SEQ ID NO: 815939 - DNA, 33 bp, Homo sapien
gattaatgccatgagaccagctgaataagaaaa

SEQ ID NO: 815940 - DNA, 33 bp, Homo sapien
gattaatgccatgagagcagctgaataagaaaa

SEQ ID NO: 815941 - DNA, 33 bp, Homo sapien
gtcccttccaagcagaaactttgtctgtcttgt

SEQ ID NO: 815942 - DNA, 33 bp, Homo sapien
gtcccttccaagcagagactttgtctgtcttgt

SEQ ID NO: 815943 - DNA, 33 bp, Homo sapien
atttcttcacttcctcaacatcggcaagaaagc

SEQ ID NO: 815944 - DNA, 33 bp, Homo sapien
atttcttcacttcctcgacatcggcaagaaagc

SEQ ID NO: 815945 - DNA, 33 bp, Homo sapien
gtgatccacttctagcaaacagaataaagtgga

SEQ ID NO: 815946 - DNA, 33 bp, Homo sapien
gtgatccacttctagcgaacagaataaagtgga

SEQ ID NO: 815947 - DNA, 33 bp, Homo sapien
gtaagatttcttgctaagatttaaagctaagtc

SEQ ID NO: 815948 - DNA, 33 bp, Homo sapien
gtaagatttcttgctaggatttaaagctaagtc

SEQ ID NO: 815949 - DNA, 33 bp, Homo sapien
caccatactgtaagcaaaattccacgctcattc

SEQ ID NO: 815950 - DNA, 33 bp, Homo sapien
caccatactgtaagcagaattccacgctcattc

SEQ ID NO: 815951 - DNA, 33 bp, Homo sapien
ggcttgagagctctacagcgtctattgcaacaa

SEQ ID NO: 815952 - DNA, 33 bp, Homo sapien
ggcttgagagctctacggcgtctattgcaacaa

SEQ ID NO: 815953 - DNA, 33 bp, Homo sapien
tctagaagagtttttacgtttcatgactctata

SEQ ID NO: 815954 - DNA, 33 bp, Homo sapien
tctagaagagtttttatgtttcatgactctata

SEQ ID NO: 815955 - DNA, 33 bp, Homo sapien
tctttagccaatagacggatcttcatgtgggac

SEQ ID NO: 815956 - DNA, 33 bp, Homo sapien
tctttagccaatagactgatcttcatgtgggac

SEQ ID NO: 815957 - DNA, 33 bp, Homo sapien
taaaatgccttttctacggatacaggaccaggc

SEQ ID NO: 815958 - DNA, 33 bp, Homo sapien
taaaatgccttttctatggatacaggaccaggc

SEQ ID NO: 815959 - DNA, 33 bp, Homo sapien
gcagcgtggaaaagccagcaagcttgtgtaggg

SEQ ID NO: 815960 - DNA, 33 bp, Homo sapien
gcagcgtggaaaagccggcaagcttgtgtaggg

SEQ ID NO: 815961 - DNA, 33 bp, Homo sapien
attcctagaggaaaaaaccacaatagatccagc

SEQ ID NO: 815962 - DNA, 33 bp, Homo sapien
attcctagaggaaaaagccacaatagatccagc

SEQ ID NO: 815963 - DNA, 33 bp, Homo sapien
ccttcacagtaaggtacggaggcttcctggcac

SEQ ID NO: 815964 - DNA, 33 bp, Homo sapien
ccttcacagtaaggtatggaggcttcctggcac

SEQ ID NO: 815965 - DNA, 33 bp, Homo sapien
ctgcatctaactcccacgttctgaaacctaagg

SEQ ID NO: 815966 - DNA, 33 bp, Homo sapien
ctgcatctaactcccatgttctgaaacctaagg

SEQ ID NO: 815967 - DNA, 33 bp, Homo sapien
aagaaaacgataacaaccacaacaactaggtat

SEQ ID NO: 815968 - DNA, 33 bp, Homo sapien
aagaaaacgataacaatcacaacaactaggtat

SEQ ID NO: 815969 - DNA, 33 bp, Homo sapien
acctgctcccttcagccgacacatgcctggaag

SEQ ID NO: 815970 - DNA, 33 bp, Homo sapien
acctgctcccttcagcggacacatgcctggaag

SEQ ID NO: 815971 - DNA, 33 bp, Homo sapien
gcacaatccaggatcactattgaagaaagaggc

SEQ ID NO: 815972 - DNA, 33 bp, Homo sapien
gcacaatccaggatcattattgaagaaagaggc

SEQ ID NO: 815973 - DNA, 33 bp, Homo sapien
agctccagctgctcaacgggtagaaagatctga

SEQ ID NO: 815974 - DNA, 33 bp, Homo sapien
agctccagctgctcaatgggtagaaagatctga

SEQ ID NO: 815975 - DNA, 33 bp, Homo sapien
gaccgcgcactgtctgcagagtgagagatgcac

SEQ ID NO: 815976 - DNA, 33 bp, Homo sapien
gaccgcgcactgtctgtagagtgagagatgcac

SEQ ID NO: 815977 - DNA, 33 bp, Homo sapien
ccatcaatggtggaccagataaataaaatgtgg

SEQ ID NO: 815978 - DNA, 33 bp, Homo sapien
ccatcaatggtggaccggataaataaaatgtgg

SEQ ID NO: 815979 - DNA, 33 bp, Homo sapien
cattttgaactttccaccataaagcaagaattc

SEQ ID NO: 815980 - DNA, 33 bp, Homo sapien
cattttgaactttccatcataaagcaagaattc

SEQ ID NO: 815981 - DNA, 33 bp, Homo sapien
agcagttcaggaagacaatatgaagatgcaggt

SEQ ID NO: 815982 - DNA, 33 bp, Homo sapien
agcagttcaggaagacgatatgaagatgcaggt

SEQ ID NO: 815983 - DNA, 33 bp, Homo sapien
tcacaattgatggcaacttagattgtatgagat

SEQ ID NO: 815984 - DNA, 33 bp, Homo sapien
tcacaattgatggcaagttagattgtatgagat

SEQ ID NO: 815985 - DNA, 33 bp, Homo sapien
gggagcataggcttacagggagcaaggccacat

SEQ ID NO: 815986 - DNA, 33 bp, Homo sapien
gggagcataggcttacggggagcaaggccacat

SEQ ID NO: 815987 - DNA, 33 bp, Homo sapien
tggttccttgatatggcaaaccttgctcctatg

SEQ ID NO: 815988 - DNA, 33 bp, Homo sapien
tggttccttgatatggtaaaccttgctcctatg

SEQ ID NO: 815989 - DNA, 33 bp, Homo sapien
ttcttcaacatcatacaggtgagaaaaccaaat

SEQ ID NO: 815990 - DNA, 33 bp, Homo sapien
ttcttcaacatcatacgggtgagaaaaccaaat

SEQ ID NO: 815991 - DNA, 33 bp, Homo sapien
aatgctccttatcctcacccttcatgtagcaca

SEQ ID NO: 815992 - DNA, 33 bp, Homo sapien
aatgctccttatcctcgcccttcatgtagcaca

SEQ ID NO: 815993 - DNA, 33 bp, Homo sapien
acacaatttaactgacagcagaactaagggcat

SEQ ID NO: 815994 - DNA, 33 bp, Homo sapien
acacaatttaactgacggcagaactaagggcat

SEQ ID NO: 815995 - DNA, 33 bp, Homo sapien
agaaacagatttgagacggagaggagaacgtga

SEQ ID NO: 815996 - DNA, 33 bp, Homo sapien
agaaacagatttgagatggagaggagaacgtga

SEQ ID NO: 815997 - DNA, 33 bp, Homo sapien
aaaggcctaaagggacaaaagctcttctgtact

SEQ ID NO: 815998 - DNA, 33 bp, Homo sapien
aaaggcctaaagggacgaaagctcttctgtact

SEQ ID NO: 815999 - DNA, 33 bp, Homo sapien
cataagcttttactcactcatttaaccatgatt

SEQ ID NO: 816000 - DNA, 33 bp, Homo sapien
cataagcttttactcagtcatttaaccatgatt

SEQ ID NO: 816001 - DNA, 33 bp, Homo sapien
gattagcaagactgagaacaaatcttattatag

SEQ ID NO: 816002 - DNA, 33 bp, Homo sapien
gattagcaagactgaggacaaatcttattatag

SEQ ID NO: 816003 - DNA, 33 bp, Homo sapien
atttaatatggttagacggattgatattcttta

SEQ ID NO: 816004 - DNA, 33 bp, Homo sapien
atttaatatggttagatggattgatattcttta

SEQ ID NO: 816005 - DNA, 33 bp, Homo sapien
accaattatgttgaaccggaatcaaaataggtg

SEQ ID NO: 816006 - DNA, 33 bp, Homo sapien
accaattatgttgaactggaatcaaaataggtg

SEQ ID NO: 816007 - DNA, 33 bp, Homo sapien
acagggataatgatgaagaaacagactcaggaa

SEQ ID NO: 816008 - DNA, 33 bp, Homo sapien
acagggataatgatgaggaaacagactcaggaa

SEQ ID NO: 816009 - DNA, 33 bp, Homo sapien
ttccagcttctgacaaccagcattccactttct

SEQ ID NO: 816010 - DNA, 33 bp, Homo sapien
ttccagcttctgacaatcagcattccactttct

SEQ ID NO: 816011 - DNA, 33 bp, Homo sapien
taagccatttcttaaggcattctgaagataagc

SEQ ID NO: 816012 - DNA, 33 bp, Homo sapien
taagccatttcttaagtcattctgaagataagc

SEQ ID NO: 816013 - DNA, 33 bp, Homo sapien
tattaagtgaaatacaacatggaaacagtggag

SEQ ID NO: 816014 - DNA, 33 bp, Homo sapien
tattaagtgaaatacagcatggaaacagtggag

SEQ ID NO: 816015 - DNA, 33 bp, Homo sapien
cctccaaccaaaatggaacaatggagagcagat

SEQ ID NO: 816016 - DNA, 33 bp, Homo sapien
cctccaaccaaaatgggacaatggagagcagat

SEQ ID NO: 816017 - DNA, 33 bp, Homo sapien
ttggaggtggaaatacaaggcatctaaatatga

SEQ ID NO: 816018 - DNA, 33 bp, Homo sapien
ttggaggtggaaatacgaggcatctaaatatga

SEQ ID NO: 816019 - DNA, 33 bp, Homo sapien
tctaggtggccttgaaaagatggttgcagtgcc

SEQ ID NO: 816020 - DNA, 33 bp, Homo sapien
tctaggtggccttgaagagatggttgcagtgcc

SEQ ID NO: 816021 - DNA, 33 bp, Homo sapien
ttgtggttgaaccttgaagaaatgtgttagaaa

SEQ ID NO: 816022 - DNA, 33 bp, Homo sapien
ttgtggttgaaccttgcagaaatgtgttagaaa

SEQ ID NO: 816023 - DNA, 33 bp, Homo sapien
aaagtggctttgagaccatccagccaggtgatg

SEQ ID NO: 816024 - DNA, 33 bp, Homo sapien
aaagtggctttgagactatccagccaggtgatg

SEQ ID NO: 816025 - DNA, 33 bp, Homo sapien
gacacctcccaaacaaccaatataatcagattt

SEQ ID NO: 816026 - DNA, 33 bp, Homo sapien
gacacctcccaaacaagcaatataatcagattt

SEQ ID NO: 816027 - DNA, 33 bp, Homo sapien
acatgttgatttctgactagccccagtcctgtg

SEQ ID NO: 816028 - DNA, 33 bp, Homo sapien
acatgttgatttctgattagccccagtcctgtg

SEQ ID NO: 816029 - DNA, 33 bp, Homo sapien
ctgaacagagaaatcaataatcaaaagcttccc

SEQ ID NO: 816030 - DNA, 33 bp, Homo sapien
ctgaacagagaaatcagtaatcaaaagcttccc

SEQ ID NO: 816031 - DNA, 33 bp, Homo sapien
gaaaagtgtctgttcacgttgttcatgtcattt

SEQ ID NO: 816032 - DNA, 33 bp, Homo sapien
gaaaagtgtctgttcatgttgttcatgtcattt

SEQ ID NO: 816033 - DNA, 33 bp, Homo sapien
cataggacctccaccactaatcataagaatatc

SEQ ID NO: 816034 - DNA, 33 bp, Homo sapien
cataggacctccaccattaatcataagaatatc

SEQ ID NO: 816035 - DNA, 33 bp, Homo sapien
gcattattgggagacaaagtaagatgaaaatat

SEQ ID NO: 816036 - DNA, 33 bp, Homo sapien
gcattattgggagacacagtaagatgaaaatat

SEQ ID NO: 816037 - DNA, 33 bp, Homo sapien
tgctccctagggatgccgattagaggaagaaga

SEQ ID NO: 816038 - DNA, 33 bp, Homo sapien
tgctccctagggatgctgattagaggaagaaga

SEQ ID NO: 816039 - DNA, 33 bp, Homo sapien
ccaggatcagtcatcccgagaagtatttcagag

SEQ ID NO: 816040 - DNA, 33 bp, Homo sapien
ccaggatcagtcatcctgagaagtatttcagag

SEQ ID NO: 816041 - DNA, 33 bp, Homo sapien
ggataaaatggtaaaaagtgtgttaagatatag

SEQ ID NO: 816042 - DNA, 33 bp, Homo sapien
ggataaaatggtaaaacgtgtgttaagatatag

SEQ ID NO: 816043 - DNA, 33 bp, Homo sapien
cgtgcctggaatgctacaggttcatagccagca

SEQ ID NO: 816044 - DNA, 33 bp, Homo sapien
cgtgcctggaatgctagaggttcatagccagca

SEQ ID NO: 816045 - DNA, 33 bp, Homo sapien
tcaaaacactgtagaactggcctgcccaggaag

SEQ ID NO: 816046 - DNA, 33 bp, Homo sapien
tcaaaacactgtagaattggcctgcccaggaag

SEQ ID NO: 816047 - DNA, 33 bp, Homo sapien
aagatggaaaattttaccagactgttgatggat

SEQ ID NO: 816048 - DNA, 33 bp, Homo sapien
aagatggaaaattttatcagactgttgatggat

SEQ ID NO: 816049 - DNA, 33 bp, Homo sapien
aatccagagtgtcccaagaacccaaatgcccag

SEQ ID NO: 816050 - DNA, 33 bp, Homo sapien
aatccagagtgtcccaggaacccaaatgcccag

SEQ ID NO: 816051 - DNA, 33 bp, Homo sapien
acccaccacatttcaaacttgatctcagtgatt

SEQ ID NO: 816052 - DNA, 33 bp, Homo sapien
acccaccacatttcaagcttgatctcagtgatt

SEQ ID NO: 816053 - DNA, 33 bp, Homo sapien
ggagaggcatggaaatcacacaagactagaggg

SEQ ID NO: 816054 - DNA, 33 bp, Homo sapien
ggagaggcatggaaattacacaagactagaggg

SEQ ID NO: 816055 - DNA, 33 bp, Homo sapien
gagagaaaggttaagacggagggagaatgaaat

SEQ ID NO: 816056 - DNA, 33 bp, Homo sapien
gagagaaaggttaagatggagggagaatgaaat

SEQ ID NO: 816057 - DNA, 33 bp, Homo sapien
accatcagcgtctcaccagaaccttctcacttc

SEQ ID NO: 816058 - DNA, 33 bp, Homo sapien
accatcagcgtctcactagaaccttctcacttc

SEQ ID NO: 816059 - DNA, 33 bp, Homo sapien
tcccgcagtgcggacactataggagagaactgg

SEQ ID NO: 816060 - DNA, 33 bp, Homo sapien
tcccgcagtgcggacagtataggagagaactgg

SEQ ID NO: 816061 - DNA, 33 bp, Homo sapien
gttcacacacgacctcaagtgaaaaaagaaatg

SEQ ID NO: 816062 - DNA, 33 bp, Homo sapien
gttcacacacgacctcgagtgaaaaaagaaatg

SEQ ID NO: 816063 - DNA, 33 bp, Homo sapien
ggggctgccctggtagccaaagcctttgctctg

SEQ ID NO: 816064 - DNA, 33 bp, Homo sapien
ggggctgccctggtagtcaaagcctttgctctg

SEQ ID NO: 816065 - DNA, 33 bp, Homo sapien
caaggcaaaaggactactaggcttctggcctcc

SEQ ID NO: 816066 - DNA, 33 bp, Homo sapien
caaggcaaaaggactattaggcttctggcctcc

SEQ ID NO: 816067 - DNA, 33 bp, Homo sapien
cacagatccacccccacacgcttccatgagaca

SEQ ID NO: 816068 - DNA, 33 bp, Homo sapien
cacagatccacccccatacgcttccatgagaca

SEQ ID NO: 816069 - DNA, 33 bp, Homo sapien
ttcattaacttcggaaactcactcttcctcaag

SEQ ID NO: 816070 - DNA, 33 bp, Homo sapien
ttcattaacttcggaacctcactcttcctcaag

SEQ ID NO: 816071 - DNA, 33 bp, Homo sapien
cgggtaagatatttgaggaactggggtacgatg

SEQ ID NO: 816072 - DNA, 33 bp, Homo sapien
cgggtaagatatttgatgaactggggtacgatg

SEQ ID NO: 816073 - DNA, 33 bp, Homo sapien
ttacctcaggttcaaacatgactcaggatgatg

SEQ ID NO: 816074 - DNA, 33 bp, Homo sapien
ttacctcaggttcaaatatgactcaggatgatg

SEQ ID NO: 816075 - DNA, 33 bp, Homo sapien
cattggcaaattcccacgaagctcgctgtggtg

SEQ ID NO: 816076 - DNA, 33 bp, Homo sapien
cattggcaaattcccatgaagctcgctgtggtg

SEQ ID NO: 816077 - DNA, 33 bp, Homo sapien
acactgtggaaaataacagcacatctctcaagg

SEQ ID NO: 816078 - DNA, 33 bp, Homo sapien
acactgtggaaaataatagcacatctctcaagg

SEQ ID NO: 816079 - DNA, 33 bp, Homo sapien
agctgtgtgtgcttggacaagttatttcccctc

SEQ ID NO: 816080 - DNA, 33 bp, Homo sapien
agctgtgtgtgcttgggcaagttatttcccctc

SEQ ID NO: 816081 - DNA, 33 bp, Homo sapien
gcttgctggatccatcaacttatcatttacatt

SEQ ID NO: 816082 - DNA, 33 bp, Homo sapien
gcttgctggatccatcgacttatcatttacatt

SEQ ID NO: 816083 - DNA, 33 bp, Homo sapien
ctttttattttggaaaattatgggccatttaag

SEQ ID NO: 816084 - DNA, 33 bp, Homo sapien
ctttttattttggaaagttatgggccatttaag

SEQ ID NO: 816085 - DNA, 33 bp, Homo sapien
tagagccaaggcatacgaattaacaccgcagtg

SEQ ID NO: 816086 - DNA, 33 bp, Homo sapien
tagagccaaggcatactaattaacaccgcagtg

SEQ ID NO: 816087 - DNA, 33 bp, Homo sapien
aataaggtagagaaaacgccttgatttccatcc

SEQ ID NO: 816088 - DNA, 33 bp, Homo sapien
aataaggtagagaaaatgccttgatttccatcc

SEQ ID NO: 816089 - DNA, 33 bp, Homo sapien
tttcacgtgcttttacactattagtttatcata

SEQ ID NO: 816090 - DNA, 33 bp, Homo sapien
tttcacgtgcttttacgctattagtttatcata

SEQ ID NO: 816091 - DNA, 33 bp, Homo sapien
gattttcttgttatcaaggtagtatctgttcat

SEQ ID NO: 816092 - DNA, 33 bp, Homo sapien
gattttcttgttatcatggtagtatctgttcat

SEQ ID NO: 816093 - DNA, 33 bp, Homo sapien
tgctgattatcatagaccacctcacagctctta

SEQ ID NO: 816094 - DNA, 33 bp, Homo sapien
tgctgattatcatagatcacctcacagctctta

SEQ ID NO: 816095 - DNA, 33 bp, Homo sapien
tatcctattagaaaaacgaacatgcatgcaaag

SEQ ID NO: 816096 - DNA, 33 bp, Homo sapien
tatcctattagaaaaatgaacatgcatgcaaag

SEQ ID NO: 816097 - DNA, 33 bp, Homo sapien
gagtcagcacccagtaaatgctggttaaatcga

SEQ ID NO: 816098 - DNA, 33 bp, Homo sapien
gagtcagcacccagtatatgctggttaaatcga

SEQ ID NO: 816099 - DNA, 33 bp, Homo sapien
ctcctctctcccttcaagatcacatctcaggca

SEQ ID NO: 816100 - DNA, 33 bp, Homo sapien
ctcctctctcccttcaggatcacatctcaggca

SEQ ID NO: 816101 - DNA, 33 bp, Homo sapien
cacttgcagtggtcacacagactaaccatagca

SEQ ID NO: 816102 - DNA, 33 bp, Homo sapien
cacttgcagtggtcacgcagactaaccatagca

SEQ ID NO: 816103 - DNA, 33 bp, Homo sapien
ttagcaggaaggagtacgggaaaacatgtctac

SEQ ID NO: 816104 - DNA, 33 bp, Homo sapien
ttagcaggaaggagtatgggaaaacatgtctac

SEQ ID NO: 816105 - DNA, 33 bp, Homo sapien
ggatgaatcctggaaaaggaacaagagatgact

SEQ ID NO: 816106 - DNA, 33 bp, Homo sapien
ggatgaatcctggaaatggaacaagagatgact

SEQ ID NO: 816107 - DNA, 33 bp, Homo sapien
gagctttcctggcaccagataaacaaagaagat

SEQ ID NO: 816108 - DNA, 33 bp, Homo sapien
gagctttcctggcaccggataaacaaagaagat

SEQ ID NO: 816109 - DNA, 33 bp, Homo sapien
ttcagcaataaattgaactaaactctgtatctc

SEQ ID NO: 816110 - DNA, 33 bp, Homo sapien
ttcagcaataaattgagctaaactctgtatctc

SEQ ID NO: 816111 - DNA, 33 bp, Homo sapien
ttgccaaggccaacaacacactggtaaggatgg

SEQ ID NO: 816112 - DNA, 33 bp, Homo sapien
ttgccaaggccaacaatacactggtaaggatgg

SEQ ID NO: 816113 - DNA, 33 bp, Homo sapien
atctttccccccatggccagtctcagagaagat

SEQ ID NO: 816114 - DNA, 33 bp, Homo sapien
atctttccccccatggtcagtctcagagaagat

SEQ ID NO: 816115 - DNA, 33 bp, Homo sapien
tgtaccatgaatctctgaagcttattccctcct

SEQ ID NO: 816116 - DNA, 33 bp, Homo sapien
tgtaccatgaatctcttaagcttattccctcct

SEQ ID NO: 816117 - DNA, 33 bp, Homo sapien
agtggatgttggctccccttgaaaatccctctt

SEQ ID NO: 816118 - DNA, 33 bp, Homo sapien
agtggatgttggctcctcttgaaaatccctctt

SEQ ID NO: 816119 - DNA, 33 bp, Homo sapien
gctggccaaggatagacaccaggcgataaggcc

SEQ ID NO: 816120 - DNA, 33 bp, Homo sapien
gctggccaaggatagataccaggcgataaggcc

SEQ ID NO: 816121 - DNA, 33 bp, Homo sapien
aaacccacaaagattgaagctctcaggtgaagg

SEQ ID NO: 816122 - DNA, 33 bp, Homo sapien
aaacccacaaagattgcagctctcaggtgaagg

SEQ ID NO: 816123 - DNA, 33 bp, Homo sapien
gtaacctgcattcaaaaggaaaatacatttaat

SEQ ID NO: 816124 - DNA, 33 bp, Homo sapien
gtaacctgcattcaaagggaaaatacatttaat

SEQ ID NO: 816125 - DNA, 33 bp, Homo sapien
tgtcacaggtatgaacagaatatggatgggaag

SEQ ID NO: 816126 - DNA, 33 bp, Homo sapien
tgtcacaggtatgaacggaatatggatgggaag

SEQ ID NO: 816127 - DNA, 33 bp, Homo sapien
ccctaactacaaagtcgccagttttccaaagaa

SEQ ID NO: 816128 - DNA, 33 bp, Homo sapien
ccctaactacaaagtctccagttttccaaagaa

SEQ ID NO: 816129 - DNA, 33 bp, Homo sapien
acatagccactaaatacgtgagtgagtgagtga

SEQ ID NO: 816130 - DNA, 33 bp, Homo sapien
acatagccactaaatatgtgagtgagtgagtga

SEQ ID NO: 816131 - DNA, 33 bp, Homo sapien
tattgtctctattctaaaaacaggaaacccagg

SEQ ID NO: 816132 - DNA, 33 bp, Homo sapien
tattgtctctattctacaaacaggaaacccagg

SEQ ID NO: 816133 - DNA, 33 bp, Homo sapien
cagggccaaccaggtacgatatcgggtgcagca

SEQ ID NO: 816134 - DNA, 33 bp, Homo sapien
cagggccaaccaggtatgatatcgggtgcagca

SEQ ID NO: 816135 - DNA, 33 bp, Homo sapien
ataattagtcaccaaacgaattagagcaaagag

SEQ ID NO: 816136 - DNA, 33 bp, Homo sapien
ataattagtcaccaaatgaattagagcaaagag

SEQ ID NO: 816137 - DNA, 33 bp, Homo sapien
ctatatgattaatacaaagataggtggtcttaa

SEQ ID NO: 816138 - DNA, 33 bp, Homo sapien
ctatatgattaatacagagataggtggtcttaa

SEQ ID NO: 816139 - DNA, 33 bp, Homo sapien
gaggcattcaagaccaaatgcgtacggtcggct

SEQ ID NO: 816140 - DNA, 33 bp, Homo sapien
gaggcattcaagaccagatgcgtacggtcggct

SEQ ID NO: 816141 - DNA, 33 bp, Homo sapien
cacacagcaaggtaaacggtgattacttcaggc

SEQ ID NO: 816142 - DNA, 33 bp, Homo sapien
cacacagcaaggtaaatggtgattacttcaggc

SEQ ID NO: 816143 - DNA, 33 bp, Homo sapien
gtcaggctgtgcttaaaccagaagagaggagag

SEQ ID NO: 816144 - DNA, 33 bp, Homo sapien
gtcaggctgtgcttaacccagaagagaggagag

SEQ ID NO: 816145 - DNA, 33 bp, Homo sapien
agctgacttcttagcaaacctttccacctctct

SEQ ID NO: 816146 - DNA, 33 bp, Homo sapien
agctgacttcttagcagacctttccacctctct

SEQ ID NO: 816147 - DNA, 33 bp, Homo sapien
ctcggtggatccttaacctgtacaaatgagacc

SEQ ID NO: 816148 - DNA, 33 bp, Homo sapien
ctcggtggatccttaatctgtacaaatgagacc

SEQ ID NO: 816149 - DNA, 33 bp, Homo sapien
agatggagtaggagggaaataagttggaagaac

SEQ ID NO: 816150 - DNA, 33 bp, Homo sapien
agatggagtaggaggggaataagttggaagaac

SEQ ID NO: 816151 - DNA, 33 bp, Homo sapien
cttaatgaaattctggaaaaggaaaaaatatgg

SEQ ID NO: 816152 - DNA, 33 bp, Homo sapien
cttaatgaaattctgggaaaggaaaaaatatgg

SEQ ID NO: 816153 - DNA, 33 bp, Homo sapien
ttttggacacaggatacatttggccagaaaggg

SEQ ID NO: 816154 - DNA, 33 bp, Homo sapien
ttttggacacaggatatatttggccagaaaggg

SEQ ID NO: 816155 - DNA, 33 bp, Homo sapien
gatgctccatgtagaaatggccactcaatgcac

SEQ ID NO: 816156 - DNA, 33 bp, Homo sapien
gatgctccatgtagaagtggccactcaatgcac

SEQ ID NO: 816157 - DNA, 33 bp, Homo sapien
ttcaacacttactcccgacttgttcatgtccag

SEQ ID NO: 816158 - DNA, 33 bp, Homo sapien
ttcaacacttactccctacttgttcatgtccag

SEQ ID NO: 816159 - DNA, 33 bp, Homo sapien
tgaaggtgatggaatcagaccgtgggagaatca

SEQ ID NO: 816160 - DNA, 33 bp, Homo sapien
tgaaggtgatggaatcggaccgtgggagaatca

SEQ ID NO: 816161 - DNA, 33 bp, Homo sapien
tctctgtcaaggtggacgggaggatgagtagtg

SEQ ID NO: 816162 - DNA, 33 bp, Homo sapien
tctctgtcaaggtggatgggaggatgagtagtg

SEQ ID NO: 816163 - DNA, 33 bp, Homo sapien
gactgtgtagctcgaaaggtttattatattagt

SEQ ID NO: 816164 - DNA, 33 bp, Homo sapien
gactgtgtagctcgaagggtttattatattagt

SEQ ID NO: 816165 - DNA, 33 bp, Homo sapien
ttgtcttggcacctaactcagtgtttggcacat

SEQ ID NO: 816166 - DNA, 33 bp, Homo sapien
ttgtcttggcacctaattcagtgtttggcacat

SEQ ID NO: 816167 - DNA, 33 bp, Homo sapien
atacacccacaagaacaatccacaggagttctc

SEQ ID NO: 816168 - DNA, 33 bp, Homo sapien
atacacccacaagaacgatccacaggagttctc

SEQ ID NO: 816169 - DNA, 33 bp, Homo sapien
ctggccaacgtcatccacaactttggtatcgtg

SEQ ID NO: 816170 - DNA, 33 bp, Homo sapien
ctggccaacgtcatccgcaactttggtatcgtg

SEQ ID NO: 816171 - DNA, 33 bp, Homo sapien
acagatacacatacagcctgcagtgaggagtga

SEQ ID NO: 816172 - DNA, 33 bp, Homo sapien
acagatacacatacagtctgcagtgaggagtga

SEQ ID NO: 816173 - DNA, 33 bp, Homo sapien
actcactgtgttgcagccaccctggtttcttcc

SEQ ID NO: 816174 - DNA, 33 bp, Homo sapien
actcactgtgttgcagtcaccctggtttcttcc

SEQ ID NO: 816175 - DNA, 33 bp, Homo sapien
actccaagcccagggcgcttttgttcatactac

SEQ ID NO: 816176 - DNA, 33 bp, Homo sapien
actccaagcccagggctcttttgttcatactac

SEQ ID NO: 816177 - DNA, 33 bp, Homo sapien
cattctcacagtttgccgagtgactgttaaggg

SEQ ID NO: 816178 - DNA, 33 bp, Homo sapien
cattctcacagtttgctgagtgactgttaaggg

SEQ ID NO: 816179 - DNA, 33 bp, Homo sapien
tgaaatgtgtttcaggcaaatatcgaagctaaa

SEQ ID NO: 816180 - DNA, 33 bp, Homo sapien
tgaaatgtgtttcaggtaaatatcgaagctaaa

SEQ ID NO: 816181 - DNA, 33 bp, Homo sapien
tagacatagctagataaatgagagttcatggct

SEQ ID NO: 816182 - DNA, 33 bp, Homo sapien
tagacatagctagatagatgagagttcatggct

SEQ ID NO: 816183 - DNA, 33 bp, Homo sapien
tttgcccagtggcttaagtcaagagagctggat

SEQ ID NO: 816184 - DNA, 33 bp, Homo sapien
tttgcccagtggcttatgtcaagagagctggat

SEQ ID NO: 816185 - DNA, 33 bp, Homo sapien
gaccgacatcctacaactagttagtgctagaaa

SEQ ID NO: 816186 - DNA, 33 bp, Homo sapien
gaccgacatcctacaattagttagtgctagaaa

SEQ ID NO: 816187 - DNA, 33 bp, Homo sapien
actgcttagaccttataaaataggctgagggtc

SEQ ID NO: 816188 - DNA, 33 bp, Homo sapien
actgcttagaccttatgaaataggctgagggtc

SEQ ID NO: 816189 - DNA, 33 bp, Homo sapien
tttatctatccaagaactctctgctgaacacct

SEQ ID NO: 816190 - DNA, 33 bp, Homo sapien
tttatctatccaagaagtctctgctgaacacct

SEQ ID NO: 816191 - DNA, 33 bp, Homo sapien
ggcaaaatcatagctcaccacggccttagctta

SEQ ID NO: 816192 - DNA, 33 bp, Homo sapien
ggcaaaatcatagctcgccacggccttagctta

SEQ ID NO: 816193 - DNA, 33 bp, Homo sapien
gcttgtgcacatataccagttactttacataca

SEQ ID NO: 816194 - DNA, 33 bp, Homo sapien
gcttgtgcacatatacgagttactttacataca

SEQ ID NO: 816195 - DNA, 33 bp, Homo sapien; identical to SEQ ID NO: 816193

SEQ ID NO: 816196 - DNA, 33 bp, Homo sapien; identical to SEQ ID NO: 816194

SEQ ID NO: 816197 - DNA, 33 bp, Homo sapien
cttgatgtcaatcaaaacataccattggctgtt

SEQ ID NO: 816198 - DNA, 33 bp, Homo sapien
cttgatgtcaatcaaagcataccattggctgtt

SEQ ID NO: 816199 - DNA, 33 bp, Homo sapien; identical to SEQ ID NO: 816197

SEQ ID NO: 816200 - DNA, 33 bp, Homo sapien; identical to SEQ ID NO: 816198

SEQ ID NO: 816201 - DNA, 33 bp, Homo sapien
gctgcacccgttgctgaatataacttttaaaat

SEQ ID NO: 816202 - DNA, 33 bp, Homo sapien
gctgcacccgttgctgtatataacttttaaaat

SEQ ID NO: 816203 - DNA, 33 bp, Homo sapien
ggattcatctatctaaatcccaattctaatgtc

SEQ ID NO: 816204 - DNA, 33 bp, Homo sapien
ggattcatctatctaagtcccaattctaatgtc

SEQ ID NO: 816205 - DNA, 33 bp, Homo sapien
gtgttattcttctgtaccgttcaataagcatga

SEQ ID NO: 816206 - DNA, 33 bp, Homo sapien
gtgttattcttctgtatcgttcaataagcatga

SEQ ID NO: 816207 - DNA, 33 bp, Homo sapien
caggaaaccagtgaacactccaggattccctgc

SEQ ID NO: 816208 - DNA, 33 bp, Homo sapien
caggaaaccagtgaacgctccaggattccctgc

SEQ ID NO: 816209 - DNA, 33 bp, Homo sapien
gtcctaccagttagaacgagatgaaagtcagta

SEQ ID NO: 816210 - DNA, 33 bp, Homo sapien
gtcctaccagttagaatgagatgaaagtcagta

SEQ ID NO: 816211 - DNA, 33 bp, Homo sapien
atggggcctgacacacaggaggtgctaactcgg

SEQ ID NO: 816212 - DNA, 33 bp, Homo sapien
atggggcctgacacacgggaggtgctaactcgg

SEQ ID NO: 816213 - DNA, 33 bp, Homo sapien
aagtttggagagattacgaaattgtccagctta

SEQ ID NO: 816214 - DNA, 33 bp, Homo sapien
aagtttggagagattaggaaattgtccagctta

SEQ ID NO: 816215 - DNA, 33 bp, Homo sapien
gcaatgtaacctttcacgacgcttctttgtagc

SEQ ID NO: 816216 - DNA, 33 bp, Homo sapien
gcaatgtaacctttcatgacgcttctttgtagc

SEQ ID NO: 816217 - DNA, 33 bp, Homo sapien
tcacaacttgtaaaaaactgatgtgattcaatg

SEQ ID NO: 816218 - DNA, 33 bp, Homo sapien
tcacaacttgtaaaaagctgatgtgattcaatg

SEQ ID NO: 816219 - DNA, 33 bp, Homo sapien
ctgcctgtctaagagcaaacggcctagaggtca

SEQ ID NO: 816220 - DNA, 33 bp, Homo sapien
ctgcctgtctaagagcgaacggcctagaggtca

SEQ ID NO: 816221 - DNA, 33 bp, Homo sapien
agaaaattctgaccaccatagctacactttttg

SEQ ID NO: 816222 - DNA, 33 bp, Homo sapien
agaaaattctgaccactatagctacactttttg

SEQ ID NO: 816223 - DNA, 33 bp, Homo sapien
tccttcaaaatcagacaaagagatgacaaagta

SEQ ID NO: 816224 - DNA, 33 bp, Homo sapien
tccttcaaaatcagacgaagagatgacaaagta

SEQ ID NO: 816225 - DNA, 33 bp, Homo sapien
tcagcaacttccagaacctcaaactcggtgctc

SEQ ID NO: 816226 - DNA, 33 bp, Homo sapien
tcagcaacttccagaatctcaaactcggtgctc

SEQ ID NO: 816227 - DNA, 33 bp, Homo sapien
acaaattagaaaaaaactacagctgcgcaggag

SEQ ID NO: 816228 - DNA, 33 bp, Homo sapien
acaaattagaaaaaaagtacagctgcgcaggag

SEQ ID NO: 816229 - DNA, 33 bp, Homo sapien
actgaagttcaaggcactcctaacgtggagaat

SEQ ID NO: 816230 - DNA, 33 bp, Homo sapien
actgaagttcaaggcagtcctaacgtggagaat

SEQ ID NO: 816231 - DNA, 33 bp, Homo sapien
ttatatttttttgaaacgagtatgtggacactt

SEQ ID NO: 816232 - DNA, 33 bp, Homo sapien
ttatatttttttgaaatgagtatgtggacactt

SEQ ID NO: 816233 - DNA, 33 bp, Homo sapien
ataaatatgaaattaccaccagggaaagatctc

SEQ ID NO: 816234 - DNA, 33 bp, Homo sapien
ataaatatgaaattactaccagggaaagatctc

SEQ ID NO: 816235 - DNA, 33 bp, Homo sapien
ctgtttaaaaatgttacagtatgattgtgccat

SEQ ID NO: 816236 - DNA, 33 bp, Homo sapien
ctgtttaaaaatgttagagtatgattgtgccat

SEQ ID NO: 816237 - DNA, 33 bp, Homo sapien
atttgtacaagttcaacctcccccacgagattg

SEQ ID NO: 816238 - DNA, 33 bp, Homo sapien
atttgtacaagttcaagctcccccacgagattg

SEQ ID NO: 816239 - DNA, 33 bp, Homo sapien
tttacaggaaaatccaatatggtttatctcttc

SEQ ID NO: 816240 - DNA, 33 bp, Homo sapien
tttacaggaaaatccagtatggtttatctcttc

SEQ ID NO: 816241 - DNA, 33 bp, Homo sapien
tcaaagagctggagaaagttgttgcccagggtc

SEQ ID NO: 816242 - DNA, 33 bp, Homo sapien
tcaaagagctggagaaggttgttgcccagggtc

SEQ ID NO: 816243 - DNA, 33 bp, Homo sapien
acaggaggcagggaaacgagaattagccagaaa

SEQ ID NO: 816244 - DNA, 33 bp, Homo sapien
acaggaggcagggaaatgagaattagccagaaa

SEQ ID NO: 816245 - DNA, 33 bp, Homo sapien
ctggagagtcactaaagggttttgaataagtgg

SEQ ID NO: 816246 - DNA, 33 bp, Homo sapien
ctggagagtcactaaatggttttgaataagtgg

SEQ ID NO: 816247 - DNA, 33 bp, Homo sapien
catcaatgctcccaaaagaaagttaatattggt

SEQ ID NO: 816248 - DNA, 33 bp, Homo sapien
catcaatgctcccaaacgaaagttaatattggt

SEQ ID NO: 816249 - DNA, 33 bp, Homo sapien
ctatatccctggtgccccaaactgagcctggtc

SEQ ID NO: 816250 - DNA, 33 bp, Homo sapien
ctatatccctggtgcctcaaactgagcctggtc

SEQ ID NO: 816251 - DNA, 33 bp, Homo sapien
gccaagtgggtgtgaactgttccattgactcag

SEQ ID NO: 816252 - DNA, 33 bp, Homo sapien
gccaagtgggtgtgaagtgttccattgactcag

SEQ ID NO: 816253 - DNA, 33 bp, Homo sapien
acccaggtagaatgaacccatccccatttactt

SEQ ID NO: 816254 - DNA, 33 bp, Homo sapien
acccaggtagaatgaatccatccccatttactt

SEQ ID NO: 816255 - DNA, 33 bp, Homo sapien
cttccctatatttcagccataccaactgactta

SEQ ID NO: 816256 - DNA, 33 bp, Homo sapien
cttccctatatttcagtcataccaactgactta

SEQ ID NO: 816257 - DNA, 33 bp, Homo sapien
tttcacaggtggattgccaaagaagaagctgcc

SEQ ID NO: 816258 - DNA, 33 bp, Homo sapien
tttcacaggtggattgtcaaagaagaagctgcc

SEQ ID NO: 816259 - DNA, 33 bp, Homo sapien
cagctataaagaataactaccgaggtacagcac

SEQ ID NO: 816260 - DNA, 33 bp, Homo sapien
cagctataaagaataattaccgaggtacagcac

SEQ ID NO: 816261 - DNA, 33 bp, Homo sapien
accctcaattactttcccgtctgcatattttct

SEQ ID NO: 816262 - DNA, 33 bp, Homo sapien
accctcaattactttctcgtctgcatattttct

SEQ ID NO: 816263 - DNA, 33 bp, Homo sapien
tccagatcagaactaacaagctagcaaatgtgg

SEQ ID NO: 816264 - DNA, 33 bp, Homo sapien
tccagatcagaactaataagctagcaaatgtgg

SEQ ID NO: 816265 - DNA, 33 bp, Homo sapien
actttgaggggttactcaataggcataattgta

SEQ ID NO: 816266 - DNA, 33 bp, Homo sapien
actttgaggggttacttaataggcataattgta

SEQ ID NO: 816267 - DNA, 33 bp, Homo sapien
ttctatatggaaaacaaacagcattagagataa

SEQ ID NO: 816268 - DNA, 33 bp, Homo sapien
ttctatatggaaaacagacagcattagagataa

SEQ ID NO: 816269 - DNA, 33 bp, Homo sapien
agaggagtacagtcaccaaaggaagcgtcagag

SEQ ID NO: 816270 - DNA, 33 bp, Homo sapien
agaggagtacagtcacgaaaggaagcgtcagag

SEQ ID NO: 816271 - DNA, 33 bp, Homo sapien
acatccagacgcaccaatggctctcttggtggg

SEQ ID NO: 816272 - DNA, 33 bp, Homo sapien
acatccagacgcaccagtggctctcttggtggg

SEQ ID NO: 816273 - DNA, 33 bp, Homo sapien
attatgttcacaaaacccgtaggaggtaggtac

SEQ ID NO: 816274 - DNA, 33 bp, Homo sapien
attatgttcacaaaactcgtaggaggtaggtac

SEQ ID NO: 816275 - DNA, 33 bp, Homo sapien
gttgcctgttctacacaccacacccatccagct

SEQ ID NO: 816276 - DNA, 33 bp, Homo sapien
gttgcctgttctacacgccacacccatccagct

SEQ ID NO: 816277 - DNA, 33 bp, Homo sapien
agcatctgttgtttcccataaatcaaactttat

SEQ ID NO: 816278 - DNA, 33 bp, Homo sapien
agcatctgttgtttcctataaatcaaactttat

SEQ ID NO: 816279 - DNA, 33 bp, Homo sapien
ccgggctgtgaatttccagttgccaggaagctg

SEQ ID NO: 816280 - DNA, 33 bp, Homo sapien
ccgggctgtgaatttctagttgccaggaagctg

SEQ ID NO: 816281 - DNA, 33 bp, Homo sapien
ataaaacagtaaaacactgaaattgttcagagg

SEQ ID NO: 816282 - DNA, 33 bp, Homo sapien
ataaaacagtaaaacattgaaattgttcagagg

SEQ ID NO: 816283 - DNA, 33 bp, Homo sapien
ggaaggggtgtgaaggaatacagggtgtctgag

SEQ ID NO: 816284 - DNA, 33 bp, Homo sapien
ggaaggggtgtgaagggatacagggtgtctgag

SEQ ID NO: 816285 - DNA, 33 bp, Homo sapien
gattgggcagttctacaatcatgggtaacagag

SEQ ID NO: 816286 - DNA, 33 bp, Homo sapien
gattgggcagttctaccatcatgggtaacagag

SEQ ID NO: 816287 - DNA, 33 bp, Homo sapien
aaacatggtgtgaaaaaaataggtcaggttagg

SEQ ID NO: 816288 - DNA, 33 bp, Homo sapien
aaacatggtgtgaaaacaataggtcaggttagg

SEQ ID NO: 816289 - DNA, 33 bp, Homo sapien
ttcctgtcttcttccactactcagaaataaaca

SEQ ID NO: 816290 - DNA, 33 bp, Homo sapien
ttcctgtcttcttccattactcagaaataaaca

SEQ ID NO: 816291 - DNA, 33 bp, Homo sapien
cagtaatgaacaagagacctgatttctccatgt

SEQ ID NO: 816292 - DNA, 33 bp, Homo sapien
cagtaatgaacaagagtcctgatttctccatgt

SEQ ID NO: 816293 - DNA, 33 bp, Homo sapien
actcatgccattctcactcctcctatacacaca

SEQ ID NO: 816294 - DNA, 33 bp, Homo sapien
actcatgccattctcattcctcctatacacaca

SEQ ID NO: 816295 - DNA, 33 bp, Homo sapien
actaacagcatctgaaagttagatgggatatat

SEQ ID NO: 816296 - DNA, 33 bp, Homo sapien
actaacagcatctgaaggttagatgggatatat

SEQ ID NO: 816297 - DNA, 33 bp, Homo sapien
gcaatgatggatatgacggataatttcatgtgt

SEQ ID NO: 816298 - DNA, 33 bp, Homo sapien
gcaatgatggatatgatggataatttcatgtgt

SEQ ID NO: 816299 - DNA, 33 bp, Homo sapien
agctgaaagagtgcctcaccattatacctgcct

SEQ ID NO: 816300 - DNA, 33 bp, Homo sapien
agctgaaagagtgccttaccattatacctgcct

SEQ ID NO: 816301 - DNA, 33 bp, Homo sapien
aaggctacgtctgttaaaccgctggtcctctgg

SEQ ID NO: 816302 - DNA, 33 bp, Homo sapien
aaggctacgtctgttataccgctggtcctctgg

SEQ ID NO: 816303 - DNA, 33 bp, Homo sapien
tgaagtgtgtgtccaacattctgtccatttggg

SEQ ID NO: 816304 - DNA, 33 bp, Homo sapien
tgaagtgtgtgtccaatattctgtccatttggg

SEQ ID NO: 816305 - DNA, 33 bp, Homo sapien
aaagtctagccatttccactccaacaataacct

SEQ ID NO: 816306 - DNA, 33 bp, Homo sapien
aaagtctagccatttctactccaacaataacct

SEQ ID NO: 816307 - DNA, 33 bp, Homo sapien
actttggggtgcacgagacaatcacccaacctc

SEQ ID NO: 816308 - DNA, 33 bp, Homo sapien
actttggggtgcacgatacaatcacccaacctc

SEQ ID NO: 816309 - DNA, 33 bp, Homo sapien
ggggtcaggagaagaaagaagattcgcaagtgg

SEQ ID NO: 816310 - DNA, 33 bp, Homo sapien
ggggtcaggagaagaaggaagattcgcaagtgg

SEQ ID NO: 816311 - DNA, 33 bp, Homo sapien
tccacagtgaggtccactaagcacactgcaaat

SEQ ID NO: 816312 - DNA, 33 bp, Homo sapien
tccacagtgaggtccattaagcacactgcaaat

SEQ ID NO: 816313 - DNA, 33 bp, Homo sapien
tgggctagaaagcatacgcagatgtattttact

SEQ ID NO: 816314 - DNA, 33 bp, Homo sapien
tgggctagaaagcatatgcagatgtattttact

SEQ ID NO: 816315 - DNA, 33 bp, Homo sapien
catgtcagctacagaaactaattagagagattc

SEQ ID NO: 816316 - DNA, 33 bp, Homo sapien
catgtcagctacagaagctaattagagagattc

SEQ ID NO: 816317 - DNA, 33 bp, Homo sapien
cattcatcttttcaggaatacggtgacccaggg

SEQ ID NO: 816318 - DNA, 33 bp, Homo sapien
cattcatcttttcaggcatacggtgacccaggg

SEQ ID NO: 816319 - DNA, 33 bp, Homo sapien
gaacacatgaccccaacatctcttccctgggtc

SEQ ID NO: 816320 - DNA, 33 bp, Homo sapien
gaacacatgaccccaatatctcttccctgggtc

SEQ ID NO: 816321 - DNA, 33 bp, Homo sapien
gttagctacgttgtctcacagtaccatagaatc

SEQ ID NO: 816322 - DNA, 33 bp, Homo sapien
gttagctacgttgtcttacagtaccatagaatc

SEQ ID NO: 816323 - DNA, 33 bp, Homo sapien
tgtagaatttgggcaacgtcttagagttagtaa

SEQ ID NO: 816324 - DNA, 33 bp, Homo sapien
tgtagaatttgggcaatgtcttagagttagtaa

SEQ ID NO: 816325 - DNA, 33 bp, Homo sapien
tggtgtatatgtactacattcgtattatccagt

SEQ ID NO: 816326 - DNA, 33 bp, Homo sapien
tggtgtatatgtactatattcgtattatccagt

SEQ ID NO: 816327 - DNA, 33 bp, Homo sapien
gaggggttacatcagtaaataagaaagatcaag

SEQ ID NO: 816328 - DNA, 33 bp, Homo sapien
gaggggttacatcagtgaataagaaagatcaag

SEQ ID NO: 816329 - DNA, 33 bp, Homo sapien
tgcaccagatatgctacattctaaggctagtct

SEQ ID NO: 816330 - DNA, 33 bp, Homo sapien
tgcaccagatatgctatattctaaggctagtct

SEQ ID NO: 816331 - DNA, 33 bp, Homo sapien
caaatcgccagaaagtaacaggctgaaaaattc

SEQ ID NO: 816332 - DNA, 33 bp, Homo sapien
caaatcgccagaaagtcacaggctgaaaaattc

SEQ ID NO: 816333 - DNA, 33 bp, Homo sapien
tacggagttgaggaagaccaagcctgcaagatt

SEQ ID NO: 816334 - DNA, 33 bp, Homo sapien
tacggagttgaggaaggccaagcctgcaagatt

SEQ ID NO: 816335 - DNA, 33 bp, Homo sapien
agtgattcttgaagaaaggaaaacaaacaagat

SEQ ID NO: 816336 - DNA, 33 bp, Homo sapien
agtgattcttgaagaagggaaaacaaacaagat

SEQ ID NO: 816337 - DNA, 33 bp, Homo sapien
aaatccttctaatgtaccagatgtgtcctgaca

SEQ ID NO: 816338 - DNA, 33 bp, Homo sapien
aaatccttctaatgtatcagatgtgtcctgaca

SEQ ID NO: 816339 - DNA, 33 bp, Homo sapien
catgatggattgtctaataatgagatttagggt

SEQ ID NO: 816340 - DNA, 33 bp, Homo sapien
catgatggattgtctagtaatgagatttagggt

SEQ ID NO: 816341 - DNA, 33 bp, Homo sapien
gaggttgaaattaaagcacccatatcactcata

SEQ ID NO: 816342 - DNA, 33 bp, Homo sapien
gaggttgaaattaaagtacccatatcactcata

SEQ ID NO: 816343 - DNA, 33 bp, Homo sapien
gggaaatgtaattgacacaaatgtggccaggat

SEQ ID NO: 816344 - DNA, 33 bp, Homo sapien
gggaaatgtaattgacccaaatgtggccaggat

SEQ ID NO: 816345 - DNA, 33 bp, Homo sapien
gaattgtgtgtgtttaaaaatggttggttgaag

SEQ ID NO: 816346 - DNA, 33 bp, Homo sapien
gaattgtgtgtgtttataaatggttggttgaag

SEQ ID NO: 816347 - DNA, 33 bp, Homo sapien
aagttactgtaaggacccaggagaatgtttgcc

SEQ ID NO: 816348 - DNA, 33 bp, Homo sapien
aagttactgtaaggactcaggagaatgtttgcc

SEQ ID NO: 816349 - DNA, 33 bp, Homo sapien
aaatacttaatatacacgagacatgcaaatttc

SEQ ID NO: 816350 - DNA, 33 bp, Homo sapien
aaatacttaatatacatgagacatgcaaatttc

SEQ ID NO: 816351 - DNA, 33 bp, Homo sapien
gcattgtaactttcaacagaataaaataggaat

SEQ ID NO: 816352 - DNA, 33 bp, Homo sapien
gcattgtaactttcaagagaataaaataggaat

SEQ ID NO: 816353 - DNA, 33 bp, Homo sapien
aagttcctgctctggactcaattgtgtctacaa

SEQ ID NO: 816354 - DNA, 33 bp, Homo sapien
aagttcctgctctggagtcaattgtgtctacaa

SEQ ID NO: 816355 - DNA, 33 bp, Homo sapien
tactctggctaatatacaaggctttgctatggc

SEQ ID NO: 816356 - DNA, 33 bp, Homo sapien
tactctggctaatatagaaggctttgctatggc

SEQ ID NO: 816357 - DNA, 33 bp, Homo sapien
tcttgtctctcacttaacagaaggaatggaaga

SEQ ID NO: 816358 - DNA, 33 bp, Homo sapien
tcttgtctctcacttatcagaaggaatggaaga

SEQ ID NO: 816359 - DNA, 33 bp, Homo sapien
aaatccttaagtcaacactcaaattattgtcgt

SEQ ID NO: 816360 - DNA, 33 bp, Homo sapien
aaatccttaagtcaacgctcaaattattgtcgt

SEQ ID NO: 816361 - DNA, 33 bp, Homo sapien
ccagagggaccttcctaaaacatggtctgatct

SEQ ID NO: 816362 - DNA, 33 bp, Homo sapien
ccagagggaccttcctgaaacatggtctgatct

SEQ ID NO: 816363 - DNA, 33 bp, Homo sapien
ccactctgcaatagaacagcagaacttatacct

SEQ ID NO: 816364 - DNA, 33 bp, Homo sapien
ccactctgcaatagaagagcagaacttatacct

SEQ ID NO: 816365 - DNA, 33 bp, Homo sapien
aacacacgaaggaagacagatgccagctgtcag

SEQ ID NO: 816366 - DNA, 33 bp, Homo sapien
aacacacgaaggaagagagatgccagctgtcag

SEQ ID NO: 816367 - DNA, 33 bp, Homo sapien
cttcaaaaaaaccaaacgtactgatactttgtg

SEQ ID NO: 816368 - DNA, 33 bp, Homo sapien
cttcaaaaaaaccaaatgtactgatactttgtg

SEQ ID NO: 816369 - DNA, 33 bp, Homo sapien
ccaaagaacctcaacacgtgaaggctggccctt

SEQ ID NO: 816370 - DNA, 33 bp, Homo sapien
ccaaagaacctcaacatgtgaaggctggccctt

SEQ ID NO: 816371 - DNA, 33 bp, Homo sapien
cattgtttacatatagccatttcatcaatgaga

SEQ ID NO: 816372 - DNA, 33 bp, Homo sapien
cattgtttacatatagtcatttcatcaatgaga

SEQ ID NO: 816373 - DNA, 33 bp, Homo sapien
tctactcctgcaccataagggccaaatgctgaa

SEQ ID NO: 816374 - DNA, 33 bp, Homo sapien
tctactcctgcaccatgagggccaaatgctgaa

SEQ ID NO: 816375 - DNA, 33 bp, Homo sapien
accttctcccttcgagaaatgtgtcatccaaac

SEQ ID NO: 816376 - DNA, 33 bp, Homo sapien
accttctcccttcgaggaatgtgtcatccaaac

SEQ ID NO: 816377 - DNA, 33 bp, Homo sapien
gtcagagaggagataaacagaccaagactcgtg

SEQ ID NO: 816378 - DNA, 33 bp, Homo sapien
gtcagagaggagataagcagaccaagactcgtg

SEQ ID NO: 816379 - DNA, 33 bp, Homo sapien
atccctttagaaaacaatatgcattatctcata

SEQ ID NO: 816380 - DNA, 33 bp, Homo sapien
atccctttagaaaacagtatgcattatctcata

SEQ ID NO: 816381 - DNA, 33 bp, Homo sapien
ttaacactagaaaaaccgagttctctgtcttag

SEQ ID NO: 816382 - DNA, 33 bp, Homo sapien
ttaacactagaaaaactgagttctctgtcttag

SEQ ID NO: 816383 - DNA, 33 bp, Homo sapien
tggggtgactccttacactaaccaagtttctca

SEQ ID NO: 816384 - DNA, 33 bp, Homo sapien
tggggtgactccttacgctaaccaagtttctca

SEQ ID NO: 816385 - DNA, 33 bp, Homo sapien
tgaatctgcccaatgaataccctatctccatac

SEQ ID NO: 816386 - DNA, 33 bp, Homo sapien
tgaatctgcccaatgagtaccctatctccatac

SEQ ID NO: 816387 - DNA, 33 bp, Homo sapien
ggacatcgcatttcaacatggggtttgaaaggg

SEQ ID NO: 816388 - DNA, 33 bp, Homo sapien
ggacatcgcatttcaatatggggtttgaaaggg

SEQ ID NO: 816389 - DNA, 33 bp, Homo sapien
gactgtggtgccagttgaactctcaccagtctc

SEQ ID NO: 816390 - DNA, 33 bp, Homo sapien
gactgtggtgccagtttaactctcaccagtctc

SEQ ID NO: 816391 - DNA, 33 bp, Homo sapien
ccactgtgctttgctaggtgctcttcctattgc

SEQ ID NO: 816392 - DNA, 33 bp, Homo sapien
ccactgtgctttgctatgtgctcttcctattgc

SEQ ID NO: 816393 - DNA, 33 bp, Homo sapien
gttgaatgatgggatgaaatgaggaaaactgtg

SEQ ID NO: 816394 - DNA, 33 bp, Homo sapien
gttgaatgatgggatggaatgaggaaaactgtg

SEQ ID NO: 816395 - DNA, 33 bp, Homo sapien
actatccccagatcacacagctaataaaggcag

SEQ ID NO: 816396 - DNA, 33 bp, Homo sapien
actatccccagatcacgcagctaataaaggcag

SEQ ID NO: 816397 - DNA, 33 bp, Homo sapien
aaaaggagaaagtacacgcttctatttggtctt

SEQ ID NO: 816398 - DNA, 33 bp, Homo sapien
aaaaggagaaagtacatgcttctatttggtctt

SEQ ID NO: 816399 - DNA, 33 bp, Homo sapien
acttaagttcagttcccagttgttgggcaagcc

SEQ ID NO: 816400 - DNA, 33 bp, Homo sapien
acttaagttcagttcctagttgttgggcaagcc

SEQ ID NO: 816401 - DNA, 33 bp, Homo sapien
gggcttcaaaaattgcgaagagtacagcagaac

SEQ ID NO: 816402 - DNA, 33 bp, Homo sapien
gggcttcaaaaattgctaagagtacagcagaac

SEQ ID NO: 816403 - DNA, 33 bp, Homo sapien
ctcccctaagctctcaacctttactatcacaca

SEQ ID NO: 816404 - DNA, 33 bp, Homo sapien
ctcccctaagctctcagcctttactatcacaca

SEQ ID NO: 816405 - DNA, 33 bp, Homo sapien
cgtaaactgcaaagtacgcctgttagttgtgtt

SEQ ID NO: 816406 - DNA, 33 bp, Homo sapien
cgtaaactgcaaagtatgcctgttagttgtgtt

SEQ ID NO: 816407 - DNA, 33 bp, Homo sapien
ataactgaggatcaaaattgtgaataaatgcca

SEQ ID NO: 816408 - DNA, 33 bp, Homo sapien
ataactgaggatcaaagttgtgaataaatgcca

SEQ ID NO: 816409 - DNA, 33 bp, Homo sapien
cccttgcttgttattgaaaatcttacaagagca

SEQ ID NO: 816410 - DNA, 33 bp, Homo sapien
cccttgcttgttattgcaaatcttacaagagca

SEQ ID NO: 816411 - DNA, 33 bp, Homo sapien
taggagaatttaggaacgaatccagcctgcagg

SEQ ID NO: 816412 - DNA, 33 bp, Homo sapien
taggagaatttaggaaggaatccagcctgcagg

SEQ ID NO: 816413 - DNA, 33 bp, Homo sapien
agaaatggagttggcacgggcactaggaactgc

SEQ ID NO: 816414 - DNA, 33 bp, Homo sapien
agaaatggagttggcatgggcactaggaactgc

SEQ ID NO: 816415 - DNA, 33 bp, Homo sapien
tttcagcttcaagttacgtattcatcccacaac

SEQ ID NO: 816416 - DNA, 33 bp, Homo sapien
tttcagcttcaagttatgtattcatcccacaac

SEQ ID NO: 816417 - DNA, 33 bp, Homo sapien
aaccacataaatcacagaaacatcagggtgtac

SEQ ID NO: 816418 - DNA, 33 bp, Homo sapien
aaccacataaatcacataaacatcagggtgtac

SEQ ID NO: 816419 - DNA, 33 bp, Homo sapien
tgaagcgagataaaaacgttcaccaaatgtttt

SEQ ID NO: 816420 - DNA, 33 bp, Homo sapien
tgaagcgagataaaaatgttcaccaaatgtttt

SEQ ID NO: 816421 - DNA, 33 bp, Homo sapien
aaataagatgagcttccagtgtacctgatggtt

SEQ ID NO: 816422 - DNA, 33 bp, Homo sapien
aaataagatgagcttctagtgtacctgatggtt

SEQ ID NO: 816423 - DNA, 33 bp, Homo sapien
accatacctgactgtaaaagtggacactgtctg

SEQ ID NO: 816424 - DNA, 33 bp, Homo sapien
accatacctgactgtagaagtggacactgtctg

SEQ ID NO: 816425 - DNA, 33 bp, Homo sapien
ggcttgggggaattgagaagtgcaaagactaaa

SEQ ID NO: 816426 - DNA, 33 bp, Homo sapien
ggcttgggggaattgataagtgcaaagactaaa

SEQ ID NO: 816427 - DNA, 33 bp, Homo sapien
ataaaacctgccataacgtagataagtaacaat

SEQ ID NO: 816428 - DNA, 33 bp, Homo sapien
ataaaacctgccataatgtagataagtaacaat

SEQ ID NO: 816429 - DNA, 33 bp, Homo sapien
attcgtcctaggaaaacgttacctgggaaataa

SEQ ID NO: 816430 - DNA, 33 bp, Homo sapien
attcgtcctaggaaaatgttacctgggaaataa

SEQ ID NO: 816431 - DNA, 33 bp, Homo sapien
aacagtttatgacccaagaggagagtgtatggt

SEQ ID NO: 816432 - DNA, 33 bp, Homo sapien
aacagtttatgacccacgaggagagtgtatggt

SEQ ID NO: 816433 - DNA, 33 bp, Homo sapien
atgaggaaatgacttcacctagagtgatggtaa

SEQ ID NO: 816434 - DNA, 33 bp, Homo sapien
atgaggaaatgacttctcctagagtgatggtaa

SEQ ID NO: 816435 - DNA, 33 bp, Homo sapien
acaggaatgcttctaaagtttcaggactaagga

SEQ ID NO: 816436 - DNA, 33 bp, Homo sapien
acaggaatgcttctaatgtttcaggactaagga

SEQ ID NO: 816437 - DNA, 33 bp, Homo sapien
atttaatcacaaataactgccactcagaaagat

SEQ ID NO: 816438 - DNA, 33 bp, Homo sapien
atttaatcacaaataattgccactcagaaagat

SEQ ID NO: 816439 - DNA, 33 bp, Homo sapien
ggcttccctgagtgtccatcggggtacctgtgc

SEQ ID NO: 816440 - DNA, 33 bp, Homo sapien
ggcttccctgagtgtctatcggggtacctgtgc

SEQ ID NO: 816441 - DNA, 33 bp, Homo sapien
ctggctatcgattcacaatgactagcttggcta

SEQ ID NO: 816442 - DNA, 33 bp, Homo sapien
ctggctatcgattcaccatgactagcttggcta

SEQ ID NO: 816443 - DNA, 33 bp, Homo sapien
gcctgaaaaccacatgaaaccttctcggtaaat

SEQ ID NO: 816444 - DNA, 33 bp, Homo sapien
gcctgaaaaccacatggaaccttctcggtaaat

SEQ ID NO: 816445 - DNA, 33 bp, Homo sapien
ccaggggaagtgattaacagagccttgtcccaa

SEQ ID NO: 816446 - DNA, 33 bp, Homo sapien
ccaggggaagtgattaccagagccttgtcccaa

SEQ ID NO: 816447 - DNA, 33 bp, Homo sapien
accaaatgcactaattcaataacacctgggatg

SEQ ID NO: 816448 - DNA, 33 bp, Homo sapien
accaaatgcactaatttaataacacctgggatg

SEQ ID NO: 816449 - DNA, 33 bp, Homo sapien
ctggtttcttgttggcagagaaaactcagtgca

SEQ ID NO: 816450 - DNA, 33 bp, Homo sapien
ctggtttcttgttggcggagaaaactcagtgca

SEQ ID NO: 816451 - DNA, 33 bp, Homo sapien
actactgtggtctgaacgttggtatctccctca

SEQ ID NO: 816452 - DNA, 33 bp, Homo sapien
actactgtggtctgaatgttggtatctccctca

SEQ ID NO: 816453 - DNA, 33 bp, Homo sapien
gatgcggaaatagacaagtgattctgcgtctcc

SEQ ID NO: 816454 - DNA, 33 bp, Homo sapien
gatgcggaaatagacacgtgattctgcgtctcc

SEQ ID NO: 816455 - DNA, 33 bp, Homo sapien
gagagaaaatagaagaactggcatgtgctagga

SEQ ID NO: 816456 - DNA, 33 bp, Homo sapien
gagagaaaatagaagacctggcatgtgctagga

SEQ ID NO: 816457 - DNA, 33 bp, Homo sapien
gcaggatgtgagaaagaaggagtgagaggagca

SEQ ID NO: 816458 - DNA, 33 bp, Homo sapien
gcaggatgtgagaaaggaggagtgagaggagca

SEQ ID NO: 816459 - DNA, 33 bp, Homo sapien
cctgacggctttcactaacttctacaaatgtgc

SEQ ID NO: 816460 - DNA, 33 bp, Homo sapien
cctgacggctttcactgacttctacaaatgtgc

SEQ ID NO: 816461 - DNA, 33 bp, Homo sapien
gcctgataataacaaacacagtttcctgagtgt

SEQ ID NO: 816462 - DNA, 33 bp, Homo sapien
gcctgataataacaaatacagtttcctgagtgt

SEQ ID NO: 816463 - DNA, 33 bp, Homo sapien
cgaactggaagccaaacagacctcttttatttg

SEQ ID NO: 816464 - DNA, 33 bp, Homo sapien
cgaactggaagccaaatagacctcttttatttg

SEQ ID NO: 816465 - DNA, 33 bp, Homo sapien
tcctttcccaagctgaaattaaagagttctctg

SEQ ID NO: 816466 - DNA, 33 bp, Homo sapien
tcctttcccaagctgagattaaagagttctctg

SEQ ID NO: 816467 - DNA, 33 bp, Homo sapien
cagttgattcttgcagaaacccaaacagggggg

SEQ ID NO: 816468 - DNA, 33 bp, Homo sapien
cagttgattcttgcagcaacccaaacagggggg

SEQ ID NO: 816469 - DNA, 33 bp, Homo sapien
aggggcacagaacagacaggaagcttacctgag

SEQ ID NO: 816470 - DNA, 33 bp, Homo sapien
aggggcacagaacagataggaagcttacctgag

SEQ ID NO: 816471 - DNA, 33 bp, Homo sapien
ctcatattctcacgtaggtttttctcatatatc

SEQ ID NO: 816472 - DNA, 33 bp, Homo sapien
ctcatattctcacgtatgtttttctcatatatc

SEQ ID NO: 816473 - DNA, 33 bp, Homo sapien
tccagaatatacttacaactcaataataaagac

SEQ ID NO: 816474 - DNA, 33 bp, Homo sapien
tccagaatatacttacgactcaataataaagac

SEQ ID NO: 816475 - DNA, 33 bp, Homo sapien
tacggaaagatgctcaatagtgtttgaatacag

SEQ ID NO: 816476 - DNA, 33 bp, Homo sapien
tacggaaagatgctcagtagtgtttgaatacag

SEQ ID NO: 816477 - DNA, 33 bp, Homo sapien
gcccttgagtgctaaaacaggtttttctttttt

SEQ ID NO: 816478 - DNA, 33 bp, Homo sapien
gcccttgagtgctaaatcaggtttttctttttt

SEQ ID NO: 816479 - DNA, 33 bp, Homo sapien
tactgttttgccttcccatcatctattcctcct

SEQ ID NO: 816480 - DNA, 33 bp, Homo sapien
tactgttttgccttcctatcatctattcctcct

SEQ ID NO: 816481 - DNA, 33 bp, Homo sapien
tggtgtctgtaataaacaatagcatcaggaggg

SEQ ID NO: 816482 - DNA, 33 bp, Homo sapien
tggtgtctgtaataaagaatagcatcaggaggg

SEQ ID NO: 816483 - DNA, 33 bp, Homo sapien
ccccataaaacaaaaaaagtagaagaatccagt

SEQ ID NO: 816484 - DNA, 33 bp, Homo sapien
ccccataaaacaaaaagagtagaagaatccagt

SEQ ID NO: 816485 - DNA, 33 bp, Homo sapien
tcatcaaattaacaagaccaggctaatctctta

SEQ ID NO: 816486 - DNA, 33 bp, Homo sapien
tcatcaaattaacaaggccaggctaatctctta

SEQ ID NO: 816487 - DNA, 33 bp, Homo sapien
cagaacatgaagagacaacagttaagcaggcag

SEQ ID NO: 816488 - DNA, 33 bp, Homo sapien
cagaacatgaagagacgacagttaagcaggcag

SEQ ID NO: 816489 - DNA, 33 bp, Homo sapien
tttacaggtaagaagcactaaagcccaaagagg

SEQ ID NO: 816490 - DNA, 33 bp, Homo sapien
tttacaggtaagaagcgctaaagcccaaagagg

SEQ ID NO: 816491 - DNA, 33 bp, Homo sapien
aaacttcaacaaatgcaaagttgcttcttatgg

SEQ ID NO: 816492 - DNA, 33 bp, Homo sapien
aaacttcaacaaatgcgaagttgcttcttatgg

SEQ ID NO: 816493 - DNA, 33 bp, Homo sapien
tgacccaatgcaataaatcctgattctcttaac

SEQ ID NO: 816494 - DNA, 33 bp, Homo sapien
tgacccaatgcaataattcctgattctcttaac

SEQ ID NO: 816495 - DNA, 33 bp, Homo sapien
taacctggatgaacaacggttcctgtgctggaa

SEQ ID NO: 816496 - DNA, 33 bp, Homo sapien
taacctggatgaacaatggttcctgtgctggaa

SEQ ID NO: 816497 - DNA, 33 bp, Homo sapien
tgcttttctctgaaataatcccagggcagaagg

SEQ ID NO: 816498 - DNA, 33 bp, Homo sapien
tgcttttctctgaaatgatcccagggcagaagg

SEQ ID NO: 816499 - DNA, 33 bp, Homo sapien
cgttcagtgccgtgaacgtgattgtctctctct

SEQ ID NO: 816500 - DNA, 33 bp, Homo sapien
cgttcagtgccgtgaaggtgattgtctctctct

SEQ ID NO: 816501 - DNA, 33 bp, Homo sapien
atcaggttaataatacagaaagtttcctggcat

SEQ ID NO: 816502 - DNA, 33 bp, Homo sapien
atcaggttaataataccgaaagtttcctggcat

SEQ ID NO: 816503 - DNA, 33 bp, Homo sapien
atctacctggagaaccacagcttcatagctggc

SEQ ID NO: 816504 - DNA, 33 bp, Homo sapien
atctacctggagaacctcagcttcatagctggc

SEQ ID NO: 816505 - DNA, 33 bp, Homo sapien
caaaagaagcctgccaatcgtcggcgcatcggg

SEQ ID NO: 816506 - DNA, 33 bp, Homo sapien
caaaagaagcctgccagtcgtcggcgcatcggg

SEQ ID NO: 816507 - DNA, 33 bp, Homo sapien
actcctctggccagaaagttggccgcagaccca

SEQ ID NO: 816508 - DNA, 33 bp, Homo sapien
actcctctggccagaatgttggccgcagaccca

SEQ ID NO: 816509 - DNA, 33 bp, Homo sapien
gaagtaaccatcttgacatagacagtcatggaa

SEQ ID NO: 816510 - DNA, 33 bp, Homo sapien
gaagtaaccatcttgatatagacagtcatggaa

SEQ ID NO: 816511 - DNA, 33 bp, Homo sapien
ctctgcagttgcaatacctctaagttcccttta

SEQ ID NO: 816512 - DNA, 33 bp, Homo sapien
ctctgcagttgcaatagctctaagttcccttta

SEQ ID NO: 816513 - DNA, 33 bp, Homo sapien
gtttcacaggcgtatacctttgctgaatttcac

SEQ ID NO: 816514 - DNA, 33 bp, Homo sapien
gtttcacaggcgtatatctttgctgaatttcac

SEQ ID NO: 816515 - DNA, 33 bp, Homo sapien
ataaaagcaaccgaatcagggttcaataaatgc

SEQ ID NO: 816516 - DNA, 33 bp, Homo sapien
ataaaagcaaccgaattagggttcaataaatgc

SEQ ID NO: 816517 - DNA, 33 bp, Homo sapien
catgcattgctgattcacctctttctgacaaaa

SEQ ID NO: 816518 - DNA, 33 bp, Homo sapien
catgcattgctgattcgcctctttctgacaaaa

SEQ ID NO: 816519 - DNA, 33 bp, Homo sapien
gaaaattgagtgaataacaacagtgctttagag

SEQ ID NO: 816520 - DNA, 33 bp, Homo sapien
gaaaattgagtgaatagcaacagtgctttagag

SEQ ID NO: 816521 - DNA, 33 bp, Homo sapien
ctcacaaaaatcactacgatgaggctttctttt

SEQ ID NO: 816522 - DNA, 33 bp, Homo sapien
ctcacaaaaatcactatgatgaggctttctttt

SEQ ID NO: 816523 - DNA, 33 bp, Homo sapien
aaactattttcttgcacgatactttcaatgtag

SEQ ID NO: 816524 - DNA, 33 bp, Homo sapien
aaactattttcttgcatgatactttcaatgtag

SEQ ID NO: 816525 - DNA, 33 bp, Homo sapien
tggcattttatgtctcaaatttccagactcttg

SEQ ID NO: 816526 - DNA, 33 bp, Homo sapien
tggcattttatgtctcgaatttccagactcttg

SEQ ID NO: 816527 - DNA, 33 bp, Homo sapien
agagtaacatgacaaagaaattgcatctgcctt

SEQ ID NO: 816528 - DNA, 33 bp, Homo sapien
agagtaacatgacaaataaattgcatctgcctt

SEQ ID NO: 816529 - DNA, 33 bp, Homo sapien
tgggctgaagcaaagacaccagcagaaaggaca

SEQ ID NO: 816530 - DNA, 33 bp, Homo sapien
tgggctgaagcaaagataccagcagaaaggaca

SEQ ID NO: 816531 - DNA, 33 bp, Homo sapien
ggaaggtaaggtgagaacaacatctagaagcca

SEQ ID NO: 816532 - DNA, 33 bp, Homo sapien
ggaaggtaaggtgagatcaacatctagaagcca

SEQ ID NO: 816533 - DNA, 33 bp, Homo sapien
gcccaaatgttgcaaacgaaaagctaacaggat

SEQ ID NO: 816534 - DNA, 33 bp, Homo sapien
gcccaaatgttgcaaatgaaaagctaacaggat

SEQ ID NO: 816535 - DNA, 33 bp, Homo sapien
gcctctaatttccagaaagttgaagtcaatggt

SEQ ID NO: 816536 - DNA, 33 bp, Homo sapien
gcctctaatttccagagagttgaagtcaatggt

SEQ ID NO: 816537 - DNA, 33 bp, Homo sapien
ccaccagtagtaaacactctcctttacccagtg

SEQ ID NO: 816538 - DNA, 33 bp, Homo sapien
ccaccagtagtaaacattctcctttacccagtg

SEQ ID NO: 816539 - DNA, 33 bp, Homo sapien
ggacaacatgggcataaacataaggacaggaag

SEQ ID NO: 816540 - DNA, 33 bp, Homo sapien
ggacaacatgggcatagacataaggacaggaag

SEQ ID NO: 816541 - DNA, 33 bp, Homo sapien
gctgtccagcgctgatgacaaaacctaaccctg

SEQ ID NO: 816542 - DNA, 33 bp, Homo sapien
gctgtccagcgctgattacaaaacctaaccctg

SEQ ID NO: 816543 - DNA, 33 bp, Homo sapien
cacgtcctctttactgcaccccgaatggaaacc

SEQ ID NO: 816544 - DNA, 33 bp, Homo sapien
cacgtcctctttactgtaccccgaatggaaacc

SEQ ID NO: 816545 - DNA, 33 bp, Homo sapien
taatgatttgcaattgaattttaatcatctcag

SEQ ID NO: 816546 - DNA, 33 bp, Homo sapien
taatgatttgcaattggattttaatcatctcag

SEQ ID NO: 816547 - DNA, 33 bp, Homo sapien
agacaacaatcataccagcagaatctatctgac

SEQ ID NO: 816548 - DNA, 33 bp, Homo sapien
agacaacaatcataccggcagaatctatctgac

SEQ ID NO: 816549 - DNA, 33 bp, Homo sapien
atttatctgtgagacacagtctttccctgttgt

SEQ ID NO: 816550 - DNA, 33 bp, Homo sapien
atttatctgtgagacatagtctttccctgttgt

SEQ ID NO: 816551 - DNA, 33 bp, Homo sapien
cccagggtgtcagctacatccaaggctagaaaa

SEQ ID NO: 816552 - DNA, 33 bp, Homo sapien
cccagggtgtcagctatatccaaggctagaaaa

SEQ ID NO: 816553 - DNA, 33 bp, Homo sapien
cctaacccctatgtcaactactaggaattcagc

SEQ ID NO: 816554 - DNA, 33 bp, Homo sapien
cctaacccctatgtcacctactaggaattcagc

SEQ ID NO: 816555 - DNA, 33 bp, Homo sapien
cagctgtgtgaccctggatataggcttggatat

SEQ ID NO: 816556 - DNA, 33 bp, Homo sapien
cagctgtgtgaccctgtatataggcttggatat

SEQ ID NO: 816557 - DNA, 33 bp, Homo sapien
tacaagacgaggaataagaggcccaaagaaaat

SEQ ID NO: 816558 - DNA, 33 bp, Homo sapien
tacaagacgaggaatatgaggcccaaagaaaat

SEQ ID NO: 816559 - DNA, 33 bp, Homo sapien
ctccaccatatattggacacttctacctgcctg

SEQ ID NO: 816560 - DNA, 33 bp, Homo sapien
ctccaccatatattgggcacttctacctgcctg

SEQ ID NO: 816561 - DNA, 33 bp, Homo sapien
cttcaacctgtcctcaatctgtagcccagcagc

SEQ ID NO: 816562 - DNA, 33 bp, Homo sapien
cttcaacctgtcctcagtctgtagcccagcagc

SEQ ID NO: 816563 - DNA, 33 bp, Homo sapien
ttttattgctgtgaacagtaggaacagctccta

SEQ ID NO: 816564 - DNA, 33 bp, Homo sapien
ttttattgctgtgaacggtaggaacagctccta

SEQ ID NO: 816565 - DNA, 33 bp, Homo sapien
ttggaggtatgtaaacacagcttaaaatgaaac

SEQ ID NO: 816566 - DNA, 33 bp, Homo sapien
ttggaggtatgtaaacgcagcttaaaatgaaac

SEQ ID NO: 816567 - DNA, 33 bp, Homo sapien
gtgattcttggctttaacattagccagctggta

SEQ ID NO: 816568 - DNA, 33 bp, Homo sapien
gtgattcttggctttatcattagccagctggta

SEQ ID NO: 816569 - DNA, 33 bp, Homo sapien
taactcagtttttgtgcaacgatgccaggcaca

SEQ ID NO: 816570 - DNA, 33 bp, Homo sapien
taactcagtttttgtgtaacgatgccaggcaca

SEQ ID NO: 816571 - DNA, 33 bp, Homo sapien
ggcctccttatctacccgaaaccctggcccaaa

SEQ ID NO: 816572 - DNA, 33 bp, Homo sapien
ggcctccttatctacctgaaaccctggcccaaa

SEQ ID NO: 816573 - DNA, 33 bp, Homo sapien
gtctatctttttgacagaccaactttatgctgg

SEQ ID NO: 816574 - DNA, 33 bp, Homo sapien
gtctatctttttgacataccaactttatgctgg

SEQ ID NO: 816575 - DNA, 33 bp, Homo sapien
ggtgagtggtgctgacaaaatcacttcactggg

SEQ ID NO: 816576 - DNA, 33 bp, Homo sapien
ggtgagtggtgctgaccaaatcacttcactggg

SEQ ID NO: 816577 - DNA, 33 bp, Homo sapien
atcatataggacccagaaaaataatgctcatgg

SEQ ID NO: 816578 - DNA, 33 bp, Homo sapien
atcatataggacccaggaaaataatgctcatgg

SEQ ID NO: 816579 - DNA, 33 bp, Homo sapien
gcagaataacttcattaaaaattgtggcaaact

SEQ ID NO: 816580 - DNA, 33 bp, Homo sapien
gcagaataacttcatttaaaattgtggcaaact

SEQ ID NO: 816581 - DNA, 33 bp, Homo sapien
ttttgaagtaaccagacattaagttcttttccc

SEQ ID NO: 816582 - DNA, 33 bp, Homo sapien
ttttgaagtaaccagatattaagttcttttccc

SEQ ID NO: 816583 - DNA, 33 bp, Homo sapien
ccatattctctgaaaacgaggatacggcaaaga

SEQ ID NO: 816584 - DNA, 33 bp, Homo sapien
ccatattctctgaaaatgaggatacggcaaaga

SEQ ID NO: 816585 - DNA, 33 bp, Homo sapien
ctctcaccctcatatcaaatatactaacaagat

SEQ ID NO: 816586 - DNA, 33 bp, Homo sapien
ctctcaccctcatatcgaatatactaacaagat

SEQ ID NO: 816587 - DNA, 33 bp, Homo sapien
ccacccaaaatgataacggtgccgaagttgaga

SEQ ID NO: 816588 - DNA, 33 bp, Homo sapien
ccacccaaaatgataatggtgccgaagttgaga

SEQ ID NO: 816589 - DNA, 33 bp, Homo sapien
tcaaaactttaaacaggctgggcatcgtgtctc

SEQ ID NO: 816590 - DNA, 33 bp, Homo sapien
tcaaaactttaaacagtctgggcatcgtgtctc

SEQ ID NO: 816591 - DNA, 33 bp, Homo sapien
tcttcttcttctgggaatatttatgcaccaaag

SEQ ID NO: 816592 - DNA, 33 bp, Homo sapien
tcttcttcttctgggactatttatgcaccaaag

SEQ ID NO: 816593 - DNA, 33 bp, Homo sapien
gttgtccgttttaccacgtcctgaccagcactg

SEQ ID NO: 816594 - DNA, 33 bp, Homo sapien
gttgtccgttttaccatgtcctgaccagcactg

SEQ ID NO: 816595 - DNA, 33 bp, Homo sapien
tgggaatgaagcaaacaagaaggcaaacaaata

SEQ ID NO: 816596 - DNA, 33 bp, Homo sapien
tgggaatgaagcaaacgagaaggcaaacaaata

SEQ ID NO: 816597 - DNA, 33 bp, Homo sapien
tgtgacctcaaagccaagatggtccaagtcacc

SEQ ID NO: 816598 - DNA, 33 bp, Homo sapien
tgtgacctcaaagccaggatggtccaagtcacc

SEQ ID NO: 816599 - DNA, 33 bp, Homo sapien
tctcacttacacatgaaagctaaacactgatta

SEQ ID NO: 816600 - DNA, 33 bp, Homo sapien
tctcacttacacatgagagctaaacactgatta

SEQ ID NO: 816601 - DNA, 33 bp, Homo sapien
agtaatgaaagtttagaaaggcaatggtgccct

SEQ ID NO: 816602 - DNA, 33 bp, Homo sapien
agtaatgaaagtttaggaaggcaatggtgccct

SEQ ID NO: 816603 - DNA, 33 bp, Homo sapien
ttgctggctatgagaagtaaatgagaagattta

SEQ ID NO: 816604 - DNA, 33 bp, Homo sapien
ttgctggctatgagaattaaatgagaagattta

SEQ ID NO: 816605 - DNA, 33 bp, Homo sapien
aaagctgtatgaagtcacaaacacataaagaag

SEQ ID NO: 816606 - DNA, 33 bp, Homo sapien
aaagctgtatgaagtcgcaaacacataaagaag

SEQ ID NO: 816607 - DNA, 33 bp, Homo sapien
tggagagaaataatgaacatgaattttttaaac

SEQ ID NO: 816608 - DNA, 33 bp, Homo sapien
tggagagaaataatgagcatgaattttttaaac

SEQ ID NO: 816609 - DNA, 33 bp, Homo sapien
aacaccagctgaacaggatgggtctgcctcccc

SEQ ID NO: 816610 - DNA, 33 bp, Homo sapien
aacaccagctgaacagtatgggtctgcctcccc

SEQ ID NO: 816611 - DNA, 33 bp, Homo sapien
acatttcctggtatgcaatggcctcctaagggt

SEQ ID NO: 816612 - DNA, 33 bp, Homo sapien
acatttcctggtatgcgatggcctcctaagggt

SEQ ID NO: 816613 - DNA, 33 bp, Homo sapien
gagtcattaggtataaattaaatgaaacgtaaa

SEQ ID NO: 816614 - DNA, 33 bp, Homo sapien
gagtcattaggtataagttaaatgaaacgtaaa

SEQ ID NO: 816615 - DNA, 33 bp, Homo sapien
acttcgcattcaaaaacgtgttcaatttccctc

SEQ ID NO: 816616 - DNA, 33 bp, Homo sapien
acttcgcattcaaaaatgtgttcaatttccctc

SEQ ID NO: 816617 - DNA, 33 bp, Homo sapien
tagaatctgtgtcattaaagatgaaagaccact

SEQ ID NO: 816618 - DNA, 33 bp, Homo sapien
tagaatctgtgtcattgaagatgaaagaccact

SEQ ID NO: 816619 - DNA, 33 bp, Homo sapien
gtgctctggggacccactccggtgaacagcccc

SEQ ID NO: 816620 - DNA, 33 bp, Homo sapien
gtgctctggggacccagtccggtgaacagcccc

SEQ ID NO: 816621 - DNA, 33 bp, Homo sapien
cccaaaggctgagcaccggtaaaagccaactcc

SEQ ID NO: 816622 - DNA, 33 bp, Homo sapien
cccaaaggctgagcactggtaaaagccaactcc

SEQ ID NO: 816623 - DNA, 33 bp, Homo sapien
gaaagcaggaccatcacggaaggaattcacgag

SEQ ID NO: 816624 - DNA, 33 bp, Homo sapien
gaaagcaggaccatcatggaaggaattcacgag

SEQ ID NO: 816625 - DNA, 33 bp, Homo sapien
acatggtcttcctcaaagttgaagcgattcctc

SEQ ID NO: 816626 - DNA, 33 bp, Homo sapien
acatggtcttcctcaaggttgaagcgattcctc

SEQ ID NO: 816627 - DNA, 33 bp, Homo sapien
aaggtggagtggacaacgcattgcaggagctca

SEQ ID NO: 816628 - DNA, 33 bp, Homo sapien
aaggtggagtggacaaggcattgcaggagctca

SEQ ID NO: 816629 - DNA, 33 bp, Homo sapien
tctgggaagtgcaccccaattcacagagttgtg

SEQ ID NO: 816630 - DNA, 33 bp, Homo sapien
tctgggaagtgcaccctaattcacagagttgtg

SEQ ID NO: 816631 - DNA, 33 bp, Homo sapien
ttgtgctcagggccatcaaagaaggatgatagg

SEQ ID NO: 816632 - DNA, 33 bp, Homo sapien
ttgtgctcagggccattaaagaaggatgatagg

SEQ ID NO: 816633 - DNA, 33 bp, Homo sapien
gaaaagggcattcttacacactgttggtaggag

SEQ ID NO: 816634 - DNA, 33 bp, Homo sapien
gaaaagggcattcttatacactgttggtaggag

SEQ ID NO: 816635 - DNA, 33 bp, Homo sapien
ggaaagagcaaggaacaccgaggaaggtaaaag

SEQ ID NO: 816636 - DNA, 33 bp, Homo sapien
ggaaagagcaaggaacgccgaggaaggtaaaag

SEQ ID NO: 816637 - DNA, 33 bp, Homo sapien
gcacaggaaataagaaagagaggaaaacatctc

SEQ ID NO: 816638 - DNA, 33 bp, Homo sapien
gcacaggaaataagaaggagaggaaaacatctc

SEQ ID NO: 816639 - DNA, 33 bp, Homo sapien
ataatagttaccattaataaaatgcatagtata

SEQ ID NO: 816640 - DNA, 33 bp, Homo sapien
ataatagttaccattagtaaaatgcatagtata

SEQ ID NO: 816641 - DNA, 33 bp, Homo sapien
acatctattgtcttcacggctcaattgaaattg

SEQ ID NO: 816642 - DNA, 33 bp, Homo sapien
acatctattgtcttcatggctcaattgaaattg

SEQ ID NO: 816643 - DNA, 33 bp, Homo sapien
attgtaataccacagaagtgatatatcttttta

SEQ ID NO: 816644 - DNA, 33 bp, Homo sapien
attgtaataccacagacgtgatatatcttttta

SEQ ID NO: 816645 - DNA, 33 bp, Homo sapien
ctggagggcccattaaaccatagactgcagggc

SEQ ID NO: 816646 - DNA, 33 bp, Homo sapien
ctggagggcccattaagccatagactgcagggc

SEQ ID NO: 816647 - DNA, 33 bp, Homo sapien
atgaccaaaggcatgacacttggctaaggagcc

SEQ ID NO: 816648 - DNA, 33 bp, Homo sapien
atgaccaaaggcatgatacttggctaaggagcc

SEQ ID NO: 816649 - DNA, 33 bp, Homo sapien
cattgccagatcagggaaactaatgaaccaaga

SEQ ID NO: 816650 - DNA, 33 bp, Homo sapien
cattgccagatcagggcaactaatgaaccaaga

SEQ ID NO: 816651 - DNA, 33 bp, Homo sapien
gaatcaattttatcaaatgtgtaggtacaatgt

SEQ ID NO: 816652 - DNA, 33 bp, Homo sapien
gaatcaattttatcaagtgtgtaggtacaatgt

SEQ ID NO: 816653 - DNA, 33 bp, Homo sapien
agcaaataaatgtatgcatcttcaagcccatgt

SEQ ID NO: 816654 - DNA, 33 bp, Homo sapien
agcaaataaatgtatgtatcttcaagcccatgt

SEQ ID NO: 816655 - DNA, 33 bp, Homo sapien
tggggcaggaaatatccgaaatgaacctggaac

SEQ ID NO: 816656 - DNA, 33 bp, Homo sapien
tggggcaggaaatatctgaaatgaacctggaac

SEQ ID NO: 816657 - DNA, 33 bp, Homo sapien
gaacgatctgagcaacagaataaagtggtattg

SEQ ID NO: 816658 - DNA, 33 bp, Homo sapien
gaacgatctgagcaaccgaataaagtggtattg

SEQ ID NO: 816659 - DNA, 33 bp, Homo sapien
ttacatgagccataccaacataaataaataatt

SEQ ID NO: 816660 - DNA, 33 bp, Homo sapien
ttacatgagccataccgacataaataaataatt

SEQ ID NO: 816661 - DNA, 33 bp, Homo sapien
gtccatatccatttacactgctatgaatagagc

SEQ ID NO: 816662 - DNA, 33 bp, Homo sapien
gtccatatccatttacgctgctatgaatagagc

SEQ ID NO: 816663 - DNA, 33 bp, Homo sapien
tcaatgccacaacaaaaattaaggtttgtgtat

SEQ ID NO: 816664 - DNA, 33 bp, Homo sapien
tcaatgccacaacaaagattaaggtttgtgtat

SEQ ID NO: 816665 - DNA, 33 bp, Homo sapien
aaatttcaaaaacacgaccttgtggagttcaaa

SEQ ID NO: 816666 - DNA, 33 bp, Homo sapien
aaatttcaaaaacacggccttgtggagttcaaa

SEQ ID NO: 816667 - DNA, 33 bp, Homo sapien
gctgagcttatcaaaacgtcttatgaggcacat

SEQ ID NO: 816668 - DNA, 33 bp, Homo sapien
gctgagcttatcaaaatgtcttatgaggcacat

SEQ ID NO: 816669 - DNA, 33 bp, Homo sapien
tcgccatctgggatcaactttctgctagaagga

SEQ ID NO: 816670 - DNA, 33 bp, Homo sapien
tcgccatctgggatcatctttctgctagaagga

SEQ ID NO: 816671 - DNA, 33 bp, Homo sapien
agaaggactacctttaacatttcctgaagtgca

SEQ ID NO: 816672 - DNA, 33 bp, Homo sapien
agaaggactacctttatcatttcctgaagtgca

SEQ ID NO: 816673 - DNA, 33 bp, Homo sapien
ggataaatgaatacgtaaacttgaaagatcatg

SEQ ID NO: 816674 - DNA, 33 bp, Homo sapien
ggataaatgaatacgttaacttgaaagatcatg

SEQ ID NO: 816675 - DNA, 33 bp, Homo sapien
aggtggttccttaatccacataactggtatcct

SEQ ID NO: 816676 - DNA, 33 bp, Homo sapien
aggtggttccttaatctacataactggtatcct

SEQ ID NO: 816677 - DNA, 33 bp, Homo sapien
gcattggcagaaataggccctagtgttcccacc

SEQ ID NO: 816678 - DNA, 33 bp, Homo sapien
gcattggcagaaatagtccctagtgttcccacc

SEQ ID NO: 816679 - DNA, 33 bp, Homo sapien
cagatttcagctccagaatgatttgcttaatcc

SEQ ID NO: 816680 - DNA, 33 bp, Homo sapien
cagatttcagctccaggatgatttgcttaatcc

SEQ ID NO: 816681 - DNA, 33 bp, Homo sapien
agaaaatgaggaggtaagtaaacttcgaattaa

SEQ ID NO: 816682 - DNA, 33 bp, Homo sapien
agaaaatgaggaggtaggtaaacttcgaattaa

SEQ ID NO: 816683 - DNA, 33 bp, Homo sapien
tattaatgtgctccacagagaaggaatctgcat

SEQ ID NO: 816684 - DNA, 33 bp, Homo sapien
tattaatgtgctccacggagaaggaatctgcat

SEQ ID NO: 816685 - DNA, 33 bp, Homo sapien
tgtatgtgaggcttaccgggctttcactctaaa

SEQ ID NO: 816686 - DNA, 33 bp, Homo sapien
tgtatgtgaggcttactgggctttcactctaaa

SEQ ID NO: 816687 - DNA, 33 bp, Homo sapien
ccacagtaatgctataagacaactgcaaaacct

SEQ ID NO: 816688 - DNA, 33 bp, Homo sapien
ccacagtaatgctatatgacaactgcaaaacct

SEQ ID NO: 816689 - DNA, 33 bp, Homo sapien
atctgcagacctaacacgctcagttttgatcct

SEQ ID NO: 816690 - DNA, 33 bp, Homo sapien
atctgcagacctaacatgctcagttttgatcct

SEQ ID NO: 816691 - DNA, 33 bp, Homo sapien
agtggagatgagtagggaaagacttgagtgatt

SEQ ID NO: 816692 - DNA, 33 bp, Homo sapien
agtggagatgagtaggtaaagacttgagtgatt

SEQ ID NO: 816693 - DNA, 33 bp, Homo sapien
tttttgacaatgaatacgtgcttctttgataaa

SEQ ID NO: 816694 - DNA, 33 bp, Homo sapien
tttttgacaatgaatatgtgcttctttgataaa

SEQ ID NO: 816695 - DNA, 33 bp, Homo sapien
ctttatagtttttggacgataagacttagtatt

SEQ ID NO: 816696 - DNA, 33 bp, Homo sapien
ctttatagtttttggatgataagacttagtatt

SEQ ID NO: 816697 - DNA, 33 bp, Homo sapien
atttttgccagttctaaaacaatacttccaaag

SEQ ID NO: 816698 - DNA, 33 bp, Homo sapien
atttttgccagttctacaacaatacttccaaag

SEQ ID NO: 816699 - DNA, 33 bp, Homo sapien
cagtcaggaactaaccagaaggcgggagacttg

SEQ ID NO: 816700 - DNA, 33 bp, Homo sapien
cagtcaggaactaaccggaaggcgggagacttg

SEQ ID NO: 816701 - DNA, 33 bp, Homo sapien
catttcaagattcagagagaacatggttagtga

SEQ ID NO: 816702 - DNA, 33 bp, Homo sapien
catttcaagattcagatagaacatggttagtga

SEQ ID NO: 816703 - DNA, 33 bp, Homo sapien
aaaagctttcttgtgcacgcctctcatcgcaaa

SEQ ID NO: 816704 - DNA, 33 bp, Homo sapien
aaaagctttcttgtgcgcgcctctcatcgcaaa

SEQ ID NO: 816705 - DNA, 33 bp, Homo sapien
ccattggaagcaaaaccgttttcccatgacatt

SEQ ID NO: 816706 - DNA, 33 bp, Homo sapien
ccattggaagcaaaacggttttcccatgacatt

SEQ ID NO: 816707 - DNA, 33 bp, Homo sapien
gttctttcttataaaccgtgatcaacatacagt

SEQ ID NO: 816708 - DNA, 33 bp, Homo sapien
gttctttcttataaactgtgatcaacatacagt

SEQ ID NO: 816709 - DNA, 33 bp, Homo sapien
ttgcctggcacttagtaaacagtcaatgaatgg

SEQ ID NO: 816710 - DNA, 33 bp, Homo sapien
ttgcctggcacttagtgaacagtcaatgaatgg

SEQ ID NO: 816711 - DNA, 33 bp, Homo sapien
cataacaataagctcacgacggcaaggatttgg

SEQ ID NO: 816712 - DNA, 33 bp, Homo sapien
cataacaataagctcatgacggcaaggatttgg

SEQ ID NO: 816713 - DNA, 33 bp, Homo sapien
agaacagttgacactaacccgggggccatgtgg

SEQ ID NO: 816714 - DNA, 33 bp, Homo sapien
agaacagttgacactagcccgggggccatgtgg

SEQ ID NO: 816715 - DNA, 33 bp, Homo sapien
gggctcattccagaacaatgcttataacgtggt

SEQ ID NO: 816716 - DNA, 33 bp, Homo sapien
gggctcattccagaactatgcttataacgtggt

SEQ ID NO: 816717 - DNA, 33 bp, Homo sapien
ttttgccttagacaacacctcatttaatctcac

SEQ ID NO: 816718 - DNA, 33 bp, Homo sapien
ttttgccttagacaactcctcatttaatctcac

SEQ ID NO: 816719 - DNA, 33 bp, Homo sapien
gagtttatcctggtggaaacgagagaccaaagg

SEQ ID NO: 816720 - DNA, 33 bp, Homo sapien
gagtttatcctggtggcaacgagagaccaaagg

SEQ ID NO: 816721 - DNA, 33 bp, Homo sapien
aaatgaactttccttcctggaatttgtccaatt

SEQ ID NO: 816722 - DNA, 33 bp, Homo sapien
aaatgaactttccttcttggaatttgtccaatt

SEQ ID NO: 816723 - DNA, 33 bp, Homo sapien
caaggagctggtctccaaagtctcatctgtgta

SEQ ID NO: 816724 - DNA, 33 bp, Homo sapien
caaggagctggtctccgaagtctcatctgtgta

SEQ ID NO: 816725 - DNA, 33 bp, Homo sapien
gagatggtaactaagccatattaagagctggct

SEQ ID NO: 816726 - DNA, 33 bp, Homo sapien
gagatggtaactaagctatattaagagctggct

SEQ ID NO: 816727 - DNA, 33 bp, Homo sapien
tgctgggaggagaaacaagataaagcatgggga

SEQ ID NO: 816728 - DNA, 33 bp, Homo sapien
tgctgggaggagaaacgagataaagcatgggga

SEQ ID NO: 816729 - DNA, 33 bp, Homo sapien
ctggatgagggtaccccgatactattctcatct

SEQ ID NO: 816730 - DNA, 33 bp, Homo sapien
ctggatgagggtacccggatactattctcatct

SEQ ID NO: 816731 - DNA, 33 bp, Homo sapien
gattcccattgtgccaagcctaaattcagagcc

SEQ ID NO: 816732 - DNA, 33 bp, Homo sapien
gattcccattgtgccaggcctaaattcagagcc

SEQ ID NO: 816733 - DNA, 33 bp, Homo sapien
accaactagaaaacaaacacttgcatgaatgtg

SEQ ID NO: 816734 - DNA, 33 bp, Homo sapien
accaactagaaaacaagcacttgcatgaatgtg

SEQ ID NO: 816735 - DNA, 33 bp, Homo sapien
aaacaaataagtgaatcaatgaacaatgaatga

SEQ ID NO: 816736 - DNA, 33 bp, Homo sapien
aaacaaataagtgaatgaatgaacaatgaatga

SEQ ID NO: 816737 - DNA, 33 bp, Homo sapien
catcctgttctaggatgaatgtagatgcaggcc

SEQ ID NO: 816738 - DNA, 33 bp, Homo sapien
catcctgttctaggattaatgtagatgcaggcc

SEQ ID NO: 816739 - DNA, 33 bp, Homo sapien
atgacataaaacagctaacatccattacactaa

SEQ ID NO: 816740 - DNA, 33 bp, Homo sapien
atgacataaaacagctgacatccattacactaa

SEQ ID NO: 816741 - DNA, 33 bp, Homo sapien
tttggaatgggccctaagagttgactgtttaaa

SEQ ID NO: 816742 - DNA, 33 bp, Homo sapien
tttggaatgggccctaggagttgactgtttaaa

SEQ ID NO: 816743 - DNA, 33 bp, Homo sapien
tggagaaagagaaaaagcttagagaatgcttgg

SEQ ID NO: 816744 - DNA, 33 bp, Homo sapien
tggagaaagagaaaaatcttagagaatgcttgg

SEQ ID NO: 816745 - DNA, 33 bp, Homo sapien
atactacatgatgggactccacacactgacatt

SEQ ID NO: 816746 - DNA, 33 bp, Homo sapien
atactacatgatgggattccacacactgacatt

SEQ ID NO: 816747 - DNA, 33 bp, Homo sapien
actgtgagggtcaaacaaaacaaatgtgtgggt

SEQ ID NO: 816748 - DNA, 33 bp, Homo sapien
actgtgagggtcaaacgaaacaaatgtgtgggt

SEQ ID NO: 816749 - DNA, 33 bp, Homo sapien
tctcagcgctagttgacggctagcccaagctgc

SEQ ID NO: 816750 - DNA, 33 bp, Homo sapien
tctcagcgctagttgatggctagcccaagctgc

SEQ ID NO: 816751 - DNA, 33 bp, Homo sapien
atttggaatgagtcttaaaaagatgtaagtcca

SEQ ID NO: 816752 - DNA, 33 bp, Homo sapien
atttggaatgagtctttaaaagatgtaagtcca

SEQ ID NO: 816753 - DNA, 33 bp, Homo sapien
ttgggcaggacacagcagaatagagttgacagc

SEQ ID NO: 816754 - DNA, 33 bp, Homo sapien
ttgggcaggacacagcggaatagagttgacagc

SEQ ID NO: 816755 - DNA, 33 bp, Homo sapien
ataccagtggcaaatcactttaatctaatgtta

SEQ ID NO: 816756 - DNA, 33 bp, Homo sapien
ataccagtggcaaatctctttaatctaatgtta

SEQ ID NO: 816757 - DNA, 33 bp, Homo sapien
cgggctgagcaataatcaactctatggagaaca

SEQ ID NO: 816758 - DNA, 33 bp, Homo sapien
cgggctgagcaataatgaactctatggagaaca

SEQ ID NO: 816759 - DNA, 33 bp, Homo sapien
agatactggtcaaagacgtatgagcaacattta

SEQ ID NO: 816760 - DNA, 33 bp, Homo sapien
agatactggtcaaagatgtatgagcaacattta

SEQ ID NO: 816761 - DNA, 33 bp, Homo sapien
gggtcgccatactctcaaggggcagcaaattgg

SEQ ID NO: 816762 - DNA, 33 bp, Homo sapien
gggtcgccatactctcgaggggcagcaaattgg

SEQ ID NO: 816763 - DNA, 33 bp, Homo sapien
ggatgacgagttcagtcaagtctgcaacagaga

SEQ ID NO: 816764 - DNA, 33 bp, Homo sapien
ggatgacgagttcagttaagtctgcaacagaga

SEQ ID NO: 816765 - DNA, 33 bp, Homo sapien
caagcctggttgctccggcactgaactgtggcc

SEQ ID NO: 816766 - DNA, 33 bp, Homo sapien
caagcctggttgctcctgcactgaactgtggcc

SEQ ID NO: 816767 - DNA, 33 bp, Homo sapien
gatagtcaaaaacaggaccaagttcaaatccag

SEQ ID NO: 816768 - DNA, 33 bp, Homo sapien
gatagtcaaaaacagggccaagttcaaatccag

SEQ ID NO: 816769 - DNA, 33 bp, Homo sapien
tcaccgtaggctctgcaagattttgacgatctc

SEQ ID NO: 816770 - DNA, 33 bp, Homo sapien
tcaccgtaggctctgcgagattttgacgatctc

SEQ ID NO: 816771 - DNA, 33 bp, Homo sapien
ccagaaagtgggtaccagctaccggagacagcc

SEQ ID NO: 816772 - DNA, 33 bp, Homo sapien
ccagaaagtgggtaccggctaccggagacagcc

SEQ ID NO: 816773 - DNA, 33 bp, Homo sapien
ttgaagtccagagacactaagtaaattgaccac

SEQ ID NO: 816774 - DNA, 33 bp, Homo sapien
ttgaagtccagagacagtaagtaaattgaccac

SEQ ID NO: 816775 - DNA, 33 bp, Homo sapien
ggtgcatacgtgtaggaacgtgcatgacctctg

SEQ ID NO: 816776 - DNA, 33 bp, Homo sapien
ggtgcatacgtgtagggacgtgcatgacctctg

SEQ ID NO: 816777 - DNA, 33 bp, Homo sapien
agaaacttgaaatgcacatgtgttgctgggctt

SEQ ID NO: 816778 - DNA, 33 bp, Homo sapien
agaaacttgaaatgcatatgtgttgctgggctt

SEQ ID NO: 816779 - DNA, 33 bp, Homo sapien
ataatcaagtcttagcccagggtctacaatctc

SEQ ID NO: 816780 - DNA, 33 bp, Homo sapien
ataatcaagtcttagctcagggtctacaatctc

SEQ ID NO: 816781 - DNA, 33 bp, Homo sapien
ctttcacacactctgacggcagaatcttgcctg

SEQ ID NO: 816782 - DNA, 33 bp, Homo sapien
ctttcacacactctgatggcagaatcttgcctg

SEQ ID NO: 816783 - DNA, 33 bp, Homo sapien
gagcaagcacctagcacgcgctggcactcgatc

SEQ ID NO: 816784 - DNA, 33 bp, Homo sapien
gagcaagcacctagcatgcgctggcactcgatc

SEQ ID NO: 816785 - DNA, 33 bp, Homo sapien
catcaggcttcatctcaccccaagtccaagact

SEQ ID NO: 816786 - DNA, 33 bp, Homo sapien
catcaggcttcatctcgccccaagtccaagact

SEQ ID NO: 816787 - DNA, 33 bp, Homo sapien
catttttgacagggagaatatattcagggctta

SEQ ID NO: 816788 - DNA, 33 bp, Homo sapien
catttttgacagggagtatatattcagggctta

SEQ ID NO: 816789 - DNA, 33 bp, Homo sapien
acaaaacagcaacatgaagctctcgtacgcacg

SEQ ID NO: 816790 - DNA, 33 bp, Homo sapien
acaaaacagcaacatgcagctctcgtacgcacg

SEQ ID NO: 816791 - DNA, 33 bp, Homo sapien
ccggggagggagacaacctttcctgagtacctg

SEQ ID NO: 816792 - DNA, 33 bp, Homo sapien
ccggggagggagacaatctttcctgagtacctg

SEQ ID NO: 816793 - DNA, 33 bp, Homo sapien
atgcaatgtgaaacccaacatgaaagtacaaac

SEQ ID NO: 816794 - DNA, 33 bp, Homo sapien
atgcaatgtgaaacccgacatgaaagtacaaac

SEQ ID NO: 816795 - DNA, 33 bp, Homo sapien
tggttgcccctgtgaacgctaaactgaatgctt

SEQ ID NO: 816796 - DNA, 33 bp, Homo sapien
tggttgcccctgtgaatgctaaactgaatgctt

SEQ ID NO: 816797 - DNA, 33 bp, Homo sapien
gcctaaactgatacagaaagctgaggtgaggat

SEQ ID NO: 816798 - DNA, 33 bp, Homo sapien
gcctaaactgatacaggaagctgaggtgaggat

SEQ ID NO: 816799 - DNA, 33 bp, Homo sapien
cagtcataaatataaagcatccagctagtgtct

SEQ ID NO: 816800 - DNA, 33 bp, Homo sapien
cagtcataaatataaatcatccagctagtgtct

SEQ ID NO: 816801 - DNA, 33 bp, Homo sapien
aagagtgcttctctccaaatagtcttaagactg

SEQ ID NO: 816802 - DNA, 33 bp, Homo sapien
aagagtgcttctctcccaatagtcttaagactg

SEQ ID NO: 816803 - DNA, 33 bp, Homo sapien
catcatcatcacaggcaaataatacattgtaac

SEQ ID NO: 816804 - DNA, 33 bp, Homo sapien
catcatcatcacaggcgaataatacattgtaac

SEQ ID NO: 816805 - DNA, 33 bp, Homo sapien
ctaaccactgagaacactgcagtaagcttgaca

SEQ ID NO: 816806 - DNA, 33 bp, Homo sapien
ctaaccactgagaacattgcagtaagcttgaca

SEQ ID NO: 816807 - DNA, 33 bp, Homo sapien
gcggcaggaaagcataagtggaagagaaacctt

SEQ ID NO: 816808 - DNA, 33 bp, Homo sapien
gcggcaggaaagcatacgtggaagagaaacctt

SEQ ID NO: 816809 - DNA, 33 bp, Homo sapien
ttgtgcataagcaggacctaatcttggcccgaa

SEQ ID NO: 816810 - DNA, 33 bp, Homo sapien
ttgtgcataagcaggatctaatcttggcccgaa

SEQ ID NO: 816811 - DNA, 33 bp, Homo sapien
gactagtgtgtgaaaaagctctgtaaggaatga

SEQ ID NO: 816812 - DNA, 33 bp, Homo sapien
gactagtgtgtgaaaaggctctgtaaggaatga

SEQ ID NO: 816813 - DNA, 33 bp, Homo sapien
tgaggaacattatttcaagctcacattgcacca

SEQ ID NO: 816814 - DNA, 33 bp, Homo sapien
tgaggaacattatttcgagctcacattgcacca

SEQ ID NO: 816815 - DNA, 33 bp, Homo sapien
cctcacgttcaatctcagaagcagtcctgtcaa

SEQ ID NO: 816816 - DNA, 33 bp, Homo sapien
cctcacgttcaatctcggaagcagtcctgtcaa

SEQ ID NO: 816817 - DNA, 33 bp, Homo sapien
ctttcctagtaagtcaacttcctacctagcaag

SEQ ID NO: 816818 - DNA, 33 bp, Homo sapien
ctttcctagtaagtcagcttcctacctagcaag

SEQ ID NO: 816819 - DNA, 33 bp, Homo sapien
atgtcagagactatgcacagttgttcagggagg

SEQ ID NO: 816820 - DNA, 33 bp, Homo sapien
atgtcagagactatgcgcagttgttcagggagg

SEQ ID NO: 816821 - DNA, 33 bp, Homo sapien
gtgcgttaggacattacgcattagacacgtgat

SEQ ID NO: 816822 - DNA, 33 bp, Homo sapien
gtgcgttaggacattatgcattagacacgtgat

SEQ ID NO: 816823 - DNA, 33 bp, Homo sapien
tgggctgatccagcagaaaagggccttgcagac

SEQ ID NO: 816824 - DNA, 33 bp, Homo sapien
tgggctgatccagcagcaaagggccttgcagac

SEQ ID NO: 816825 - DNA, 33 bp, Homo sapien
gaagccatggaagggcaagttgtttttcatttt

SEQ ID NO: 816826 - DNA, 33 bp, Homo sapien
gaagccatggaagggcgagttgtttttcatttt

SEQ ID NO: 816827 - DNA, 33 bp, Homo sapien
tggctgctgttttagcacaagattttgcttcag

SEQ ID NO: 816828 - DNA, 33 bp, Homo sapien
tggctgctgttttagcgcaagattttgcttcag

SEQ ID NO: 816829 - DNA, 33 bp, Homo sapien
gtgcatctcagttacacgccaagatgccgttgg

SEQ ID NO: 816830 - DNA, 33 bp, Homo sapien
gtgcatctcagttacatgccaagatgccgttgg

SEQ ID NO: 816831 - DNA, 33 bp, Homo sapien
actgtaacttgacacaatgacacatttttccat

SEQ ID NO: 816832 - DNA, 33 bp, Homo sapien
actgtaacttgacacagtgacacatttttccat

SEQ ID NO: 816833 - DNA, 33 bp, Homo sapien
ctcttgttttatcacacctgttatctgtaaaac

SEQ ID NO: 816834 - DNA, 33 bp, Homo sapien
ctcttgttttatcacatctgttatctgtaaaac

SEQ ID NO: 816835 - DNA, 33 bp, Homo sapien
gacgtgccttcgctcaaagcatgcgtggcccac

SEQ ID NO: 816836 - DNA, 33 bp, Homo sapien
gacgtgccttcgctcacagcatgcgtggcccac

SEQ ID NO: 816837 - DNA, 33 bp, Homo sapien
gacattgtgatcattacgcagatgaaggaacta

SEQ ID NO: 816838 - DNA, 33 bp, Homo sapien
gacattgtgatcattatgcagatgaaggaacta

SEQ ID NO: 816839 - DNA, 33 bp, Homo sapien
aattatgcagtccaaaaacactctgaaagtcac

SEQ ID NO: 816840 - DNA, 33 bp, Homo sapien
aattatgcagtccaaacacactctgaaagtcac

SEQ ID NO: 816841 - DNA, 33 bp, Homo sapien
gtgtcctcagtttacgaatggggaaacagaggg

SEQ ID NO: 816842 - DNA, 33 bp, Homo sapien
gtgtcctcagtttacggatggggaaacagaggg

SEQ ID NO: 816843 - DNA, 33 bp, Homo sapien
atgtgattttgttccaatgagggagaacttatc

SEQ ID NO: 816844 - DNA, 33 bp, Homo sapien
atgtgattttgttccagtgagggagaacttatc

SEQ ID NO: 816845 - DNA, 33 bp, Homo sapien
ggccgtgctagtgatcaatggctacataacaaa

SEQ ID NO: 816846 - DNA, 33 bp, Homo sapien
ggccgtgctagtgatcgatggctacataacaaa

SEQ ID NO: 816847 - DNA, 33 bp, Homo sapien
ttttagctcaaaagacacttagcaatttgcagt

SEQ ID NO: 816848 - DNA, 33 bp, Homo sapien
ttttagctcaaaagacgcttagcaatttgcagt

SEQ ID NO: 816849 - DNA, 33 bp, Homo sapien
tgcatgaacaagtaaagtcctttcattacttag

SEQ ID NO: 816850 - DNA, 33 bp, Homo sapien
tgcatgaacaagtaaattcctttcattacttag

SEQ ID NO: 816851 - DNA, 33 bp, Homo sapien
agatgttgctaagagaaggaaatcaaaacccac

SEQ ID NO: 816852 - DNA, 33 bp, Homo sapien
agatgttgctaagagacggaaatcaaaacccac

SEQ ID NO: 816853 - DNA, 33 bp, Homo sapien
taggctaatccatggaaagacagaaataagtag

SEQ ID NO: 816854 - DNA, 33 bp, Homo sapien
taggctaatccatggagagacagaaataagtag

SEQ ID NO: 816855 - DNA, 33 bp, Homo sapien
agcctggagatggacacaaatactactgtgggg

SEQ ID NO: 816856 - DNA, 33 bp, Homo sapien
agcctggagatggacataaatactactgtgggg

SEQ ID NO: 816857 - DNA, 33 bp, Homo sapien
ctattcagatcacccaatacgtattatacaatc

SEQ ID NO: 816858 - DNA, 33 bp, Homo sapien
ctattcagatcacccagtacgtattatacaatc

SEQ ID NO: 816859 - DNA, 33 bp, Homo sapien
tctcttgatctgctaaactaggaacagagtagc

SEQ ID NO: 816860 - DNA, 33 bp, Homo sapien
tctcttgatctgctaagctaggaacagagtagc

SEQ ID NO: 816861 - DNA, 33 bp, Homo sapien
ggaacagagtagctccaccggccgatttaggaa

SEQ ID NO: 816862 - DNA, 33 bp, Homo sapien
ggaacagagtagctccgccggccgatttaggaa

SEQ ID NO: 816863 - DNA, 33 bp, Homo sapien
acaacacccacacgtacgagaataaatttagat

SEQ ID NO: 816864 - DNA, 33 bp, Homo sapien
acaacacccacacgtaggagaataaatttagat

SEQ ID NO: 816865 - DNA, 33 bp, Homo sapien
aggtcattccattccggcaatgagaagaatgtg

SEQ ID NO: 816866 - DNA, 33 bp, Homo sapien
aggtcattccattccgtcaatgagaagaatgtg

SEQ ID NO: 816867 - DNA, 33 bp, Homo sapien
tgtcattaagtgtataccactttcccttgccac

SEQ ID NO: 816868 - DNA, 33 bp, Homo sapien
tgtcattaagtgtatatcactttcccttgccac

SEQ ID NO: 816869 - DNA, 33 bp, Homo sapien
gagaaactgtaaagacccattatagaagccatc

SEQ ID NO: 816870 - DNA, 33 bp, Homo sapien
gagaaactgtaaagactcattatagaagccatc

SEQ ID NO: 816871 - DNA, 33 bp, Homo sapien
taagtgtcaaagatggacaaatagtcaatccac

SEQ ID NO: 816872 - DNA, 33 bp, Homo sapien
taagtgtcaaagatgggcaaatagtcaatccac

SEQ ID NO: 816873 - DNA, 33 bp, Homo sapien
cactgagagttttaaacactggctgtttctcta

SEQ ID NO: 816874 - DNA, 33 bp, Homo sapien
cactgagagttttaaatactggctgtttctcta

SEQ ID NO: 816875 - DNA, 33 bp, Homo sapien
gagaggatgggctttcaatcaaaacaaacaaaa

SEQ ID NO: 816876 - DNA, 33 bp, Homo sapien
gagaggatgggctttccatcaaaacaaacaaaa

SEQ ID NO: 816877 - DNA, 33 bp, Homo sapien
accagcttttttatgaagggatgtggatatttt

SEQ ID NO: 816878 - DNA, 33 bp, Homo sapien
accagcttttttatgaggggatgtggatatttt

SEQ ID NO: 816879 - DNA, 33 bp, Homo sapien
gttgtataaggcaaagaaaaatgtgtgtgtgtt

SEQ ID NO: 816880 - DNA, 33 bp, Homo sapien
gttgtataaggcaaagcaaaatgtgtgtgtgtt

SEQ ID NO: 816881 - DNA, 33 bp, Homo sapien
caaaacttacaagaaactaaggccaaccagtaa

SEQ ID NO: 816882 - DNA, 33 bp, Homo sapien
caaaacttacaagaaattaaggccaaccagtaa

SEQ ID NO: 816883 - DNA, 33 bp, Homo sapien
aaattctgtcctgagcaaaagaaatgttctggt

SEQ ID NO: 816884 - DNA, 33 bp, Homo sapien
aaattctgtcctgagcgaaagaaatgttctggt

SEQ ID NO: 816885 - DNA, 33 bp, Homo sapien; identical to SEQ ID NO: 816883

SEQ ID NO: 816886 - DNA, 33 bp, Homo sapien; identical to SEQ ID NO: 816884

SEQ ID NO: 816887 - DNA, 33 bp, Homo sapien
cagtaacagagcaataataagttttatgtttca

SEQ ID NO: 816888 - DNA, 33 bp, Homo sapien
cagtaacagagcaatagtaagttttatgtttca

SEQ ID NO: 816889 - DNA, 33 bp, Homo sapien
cttaattttgggctaacatcttgttctgctata

SEQ ID NO: 816890 - DNA, 33 bp, Homo sapien
cttaattttgggctaagatcttgttctgctata

SEQ ID NO: 816891 - DNA, 33 bp, Homo sapien
tgcaggattctgagggccatgcagcgcgttcct

SEQ ID NO: 816892 - DNA, 33 bp, Homo sapien
tgcaggattctgagggtcatgcagcgcgttcct

SEQ ID NO: 816893 - DNA, 33 bp, Homo sapien
ccaaaataagaacaggacataccgaatcatgct

SEQ ID NO: 816894 - DNA, 33 bp, Homo sapien
ccaaaataagaacagggcataccgaatcatgct

SEQ ID NO: 816895 - DNA, 33 bp, Homo sapien
tgttctagaaacaaaactccatccccgcatcag

SEQ ID NO: 816896 - DNA, 33 bp, Homo sapien
tgttctagaaacaaaattccatccccgcatcag

SEQ ID NO: 816897 - DNA, 33 bp, Homo sapien
tttgttgacgcttcacagggataggaattcacg

SEQ ID NO: 816898 - DNA, 33 bp, Homo sapien
tttgttgacgcttcacggggataggaattcacg

SEQ ID NO: 816899 - DNA, 33 bp, Homo sapien
ctggaggttttcaaacaggaatttgcatgtggc

SEQ ID NO: 816900 - DNA, 33 bp, Homo sapien
ctggaggttttcaaacgggaatttgcatgtggc

SEQ ID NO: 816901 - DNA, 33 bp, Homo sapien
tgccgaaacaatcaagcagcttcatccagaggc

SEQ ID NO: 816902 - DNA, 33 bp, Homo sapien
tgccgaaacaatcaagtagcttcatccagaggc

SEQ ID NO: 816903 - DNA, 33 bp, Homo sapien
ttgggttttccaaatgcagacaacgggcagagg

SEQ ID NO: 816904 - DNA, 33 bp, Homo sapien
ttgggttttccaaatgtagacaacgggcagagg

SEQ ID NO: 816905 - DNA, 33 bp, Homo sapien; identical to SEQ ID NO: 816903

SEQ ID NO: 816906 - DNA, 33 bp, Homo sapien; identical to SEQ ID NO: 816904

SEQ ID NO: 816907 - DNA, 33 bp, Homo sapien
tactctgaggaatcccaaacaggcatttttgca

SEQ ID NO: 816908 - DNA, 33 bp, Homo sapien
tactctgaggaatcccgaacaggcatttttgca

SEQ ID NO: 816909 - DNA, 33 bp, Homo sapien
catttcatttaagttacctaatttgacacagtt

SEQ ID NO: 816910 - DNA, 33 bp, Homo sapien
catttcatttaagttatctaatttgacacagtt

SEQ ID NO: 816911 - DNA, 33 bp, Homo sapien
cttaaattttcaactaccttctgaagtgcagct

SEQ ID NO: 816912 - DNA, 33 bp, Homo sapien
cttaaattttcaactatcttctgaagtgcagct

SEQ ID NO: 816913 - DNA, 33 bp, Homo sapien
cagagaaagccacatacatgtaaagaggctaca

SEQ ID NO: 816914 - DNA, 33 bp, Homo sapien
cagagaaagccacatatatgtaaagaggctaca

SEQ ID NO: 816915 - DNA, 33 bp, Homo sapien
ttcttacagtaaaaagccaactaatgttagaaa

SEQ ID NO: 816916 - DNA, 33 bp, Homo sapien
ttcttacagtaaaaaggcaactaatgttagaaa

SEQ ID NO: 816917 - DNA, 33 bp, Homo sapien
tctgcttacctacacaatcttacaactatgagg

SEQ ID NO: 816918 - DNA, 33 bp, Homo sapien
tctgcttacctacacagtcttacaactatgagg

SEQ ID NO: 816919 - DNA, 33 bp, Homo sapien
gtcataaatggggagacgagagttttccagaaa

SEQ ID NO: 816920 - DNA, 33 bp, Homo sapien
gtcataaatggggagatgagagttttccagaaa

SEQ ID NO: 816921 - DNA, 33 bp, Homo sapien
cttaccatattgtataacgggagctgtttactg

SEQ ID NO: 816922 - DNA, 33 bp, Homo sapien
cttaccatattgtataccgggagctgtttactg

SEQ ID NO: 816923 - DNA, 33 bp, Homo sapien; identical to SEQ ID NO: 816921

SEQ ID NO: 816924 - DNA, 33 bp, Homo sapien; identical to SEQ ID NO: 816922

SEQ ID NO: 816925 - DNA, 33 bp, Homo sapien
tttgaattttctcaaacgctcaacagatccatt

SEQ ID NO: 816926 - DNA, 33 bp, Homo sapien
tttgaattttctcaaatgctcaacagatccatt

SEQ ID NO: 816927 - DNA, 33 bp, Homo sapien
cctatgggcaagacacagaaagtgggtcaacca

SEQ ID NO: 816928 - DNA, 33 bp, Homo sapien
cctatgggcaagacacggaaagtgggtcaacca

SEQ ID NO: 816929 - DNA, 33 bp, Homo sapien
aggcccgccaagttcacgtaaggctgtttaacc

SEQ ID NO: 816930 - DNA, 33 bp, Homo sapien
aggcccgccaagttcatgtaaggctgtttaacc

SEQ ID NO: 816931 - DNA, 33 bp, Homo sapien
taataacactctctaacacatcaacctgcctgg

SEQ ID NO: 816932 - DNA, 33 bp, Homo sapien
taataacactctctaagacatcaacctgcctgg

SEQ ID NO: 816933 - DNA, 33 bp, Homo sapien
agcaggagcagaatggaaacagcctgaggatac

SEQ ID NO: 816934 - DNA, 33 bp, Homo sapien
agcaggagcagaatggcaacagcctgaggatac

SEQ ID NO: 816935 - DNA, 33 bp, Homo sapien
aacagacctacttacacatggtttaaataaccc

SEQ ID NO: 816936 - DNA, 33 bp, Homo sapien
aacagacctacttacagatggtttaaataaccc

SEQ ID NO: 816937 - DNA, 33 bp, Homo sapien
ttccaacaaagctcagccacttcttccacttat

SEQ ID NO: 816938 - DNA, 33 bp, Homo sapien
ttccaacaaagctcagtcacttcttccacttat

SEQ ID NO: 816939 - DNA, 33 bp, Homo sapien
tggaacgttgttgtcaatgaatttggtttgatt

SEQ ID NO: 816940 - DNA, 33 bp, Homo sapien
tggaacgttgttgtcagtgaatttggtttgatt

SEQ ID NO: 816941 - DNA, 33 bp, Homo sapien
tcctaaaccataaagcaaaggtaatatgacccc

SEQ ID NO: 816942 - DNA, 33 bp, Homo sapien
tcctaaaccataaagcgaaggtaatatgacccc

SEQ ID NO: 816943 - DNA, 33 bp, Homo sapien
gaggcggggaaaaagcagagactaaatgatacc

SEQ ID NO: 816944 - DNA, 33 bp, Homo sapien
gaggcggggaaaaagcggagactaaatgatacc

SEQ ID NO: 816945 - DNA, 33 bp, Homo sapien
ggtgaaaaagatcaacccttagactttccacaa

SEQ ID NO: 816946 - DNA, 33 bp, Homo sapien
ggtgaaaaagatcaactcttagactttccacaa

SEQ ID NO: 816947 - DNA, 33 bp, Homo sapien
ttaagatcactgataaacctaccaccacttgaa

SEQ ID NO: 816948 - DNA, 33 bp, Homo sapien
ttaagatcactgataatcctaccaccacttgaa

SEQ ID NO: 816949 - DNA, 33 bp, Homo sapien
gcaccagtctagctacagaacactttggaatac

SEQ ID NO: 816950 - DNA, 33 bp, Homo sapien
gcaccagtctagctacggaacactttggaatac

SEQ ID NO: 816951 - DNA, 33 bp, Homo sapien
ccaaaagtccttaggagtaacacagattgtact

SEQ ID NO: 816952 - DNA, 33 bp, Homo sapien
ccaaaagtccttaggattaacacagattgtact

SEQ ID NO: 816953 - DNA, 33 bp, Homo sapien
aacttgaatttccccaactataaatgaagataa

SEQ ID NO: 816954 - DNA, 33 bp, Homo sapien
aacttgaatttccccagctataaatgaagataa

SEQ ID NO: 816955 - DNA, 33 bp, Homo sapien
gggcactgatcagccacgagtcttcaatatgag

SEQ ID NO: 816956 - DNA, 33 bp, Homo sapien
gggcactgatcagccatgagtcttcaatatgag

SEQ ID NO: 816957 - DNA, 33 bp, Homo sapien
ctgcaggtggctcttccctgtgcatctcacctg

SEQ ID NO: 816958 - DNA, 33 bp, Homo sapien
ctgcaggtggctcttctctgtgcatctcacctg

SEQ ID NO: 816959 - DNA, 33 bp, Homo sapien
gagccagggccactgcaaggagaacgagggtgg

SEQ ID NO: 816960 - DNA, 33 bp, Homo sapien
gagccagggccactgcgaggagaacgagggtgg

SEQ ID NO: 816961 - DNA, 33 bp, Homo sapien
tcggaagttctggctccagcggaccaagtcccc

SEQ ID NO: 816962 - DNA, 33 bp, Homo sapien
tcggaagttctggctctagcggaccaagtcccc

SEQ ID NO: 816963 - DNA, 33 bp, Homo sapien
aacccattcctattcaacttcctctctcgggtt

SEQ ID NO: 816964 - DNA, 33 bp, Homo sapien
aacccattcctattcagcttcctctctcgggtt

SEQ ID NO: 816965 - DNA, 33 bp, Homo sapien
tggggaatttgttaaaaatctaggtgcccttgt

SEQ ID NO: 816966 - DNA, 33 bp, Homo sapien
tggggaatttgttaaacatctaggtgcccttgt

SEQ ID NO: 816967 - DNA, 33 bp, Homo sapien
cccatccaagtcctcaagggatgattcttcaga

SEQ ID NO: 816968 - DNA, 33 bp, Homo sapien
cccatccaagtcctcacgggatgattcttcaga

SEQ ID NO: 816969 - DNA, 33 bp, Homo sapien
acagggtggcacccccactctgccgctgacagc

SEQ ID NO: 816970 - DNA, 33 bp, Homo sapien
acagggtggcacccccgctctgccgctgacagc

SEQ ID NO: 816971 - DNA, 33 bp, Homo sapien
atgtgggtacagctacaccctggagagtgacat

SEQ ID NO: 816972 - DNA, 33 bp, Homo sapien
atgtgggtacagctacgccctggagagtgacat

SEQ ID NO: 816973 - DNA, 33 bp, Homo sapien
tcagctgggattatgtaaaagattagcggttgg

SEQ ID NO: 816974 - DNA, 33 bp, Homo sapien
tcagctgggattatgtgaaagattagcggttgg

SEQ ID NO: 816975 - DNA, 33 bp, Homo sapien
ccagacacgccctcaacgctcccacaggagaaa

SEQ ID NO: 816976 - DNA, 33 bp, Homo sapien
ccagacacgccctcaatgctcccacaggagaaa

SEQ ID NO: 816977 - DNA, 33 bp, Homo sapien
cgtgcctggcacataccgtatagtcgccccttg

SEQ ID NO: 816978 - DNA, 33 bp, Homo sapien
cgtgcctggcacatactgtatagtcgccccttg

SEQ ID NO: 816979 - DNA, 33 bp, Homo sapien
ggctgccattgaggacgatggagccattggcca

SEQ ID NO: 816980 - DNA, 33 bp, Homo sapien
ggctgccattgaggactatggagccattggcca

SEQ ID NO: 816981 - DNA, 33 bp, Homo sapien
gagatgggggtggccacgagtgaatctgagtgt

SEQ ID NO: 816982 - DNA, 33 bp, Homo sapien
gagatgggggtggccatgagtgaatctgagtgt

SEQ ID NO: 816983 - DNA, 33 bp, Homo sapien
gagttcagggcaccaaaggatgagcagacagga

SEQ ID NO: 816984 - DNA, 33 bp, Homo sapien
gagttcagggcaccaagggatgagcagacagga

SEQ ID NO: 816985 - DNA, 33 bp, Homo sapien
cacaggggtgaagaaaactgttcactcaggaaa

SEQ ID NO: 816986 - DNA, 33 bp, Homo sapien
cacaggggtgaagaaacctgttcactcaggaaa

SEQ ID NO: 816987 - DNA, 33 bp, Homo sapien
gctggttctcagtggcagccaacggctctgtgt

SEQ ID NO: 816988 - DNA, 33 bp, Homo sapien
gctggttctcagtggcggccaacggctctgtgt

SEQ ID NO: 816989 - DNA, 33 bp, Homo sapien
ctttattgtccattggaaaaaaaaaggactatg

SEQ ID NO: 816990 - DNA, 33 bp, Homo sapien
ctttattgtccattgggaaaaaaaaggactatg

SEQ ID NO: 816991 - DNA, 33 bp, Homo sapien
agtctctcgtggccatcataacaacgttttgcc

SEQ ID NO: 816992 - DNA, 33 bp, Homo sapien
agtctctcgtggccatgataacaacgttttgcc

SEQ ID NO: 816993 - DNA, 33 bp, Homo sapien
catctggatttttgcacaacccaggcggggctg

SEQ ID NO: 816994 - DNA, 33 bp, Homo sapien
catctggatttttgcagaacccaggcggggctg

SEQ ID NO: 816995 - DNA, 33 bp, Homo sapien
ttgcagccacgcattccagcgtctgggaaagag

SEQ ID NO: 816996 - DNA, 33 bp, Homo sapien
ttgcagccacgcattctagcgtctgggaaagag

SEQ ID NO: 816997 - DNA, 33 bp, Homo sapien
caagttcagcatcttcaccgtggctgcagagct

SEQ ID NO: 816998 - DNA, 33 bp, Homo sapien
caagttcagcatcttcgccgtggctgcagagct

SEQ ID NO: 816999 - DNA, 33 bp, Homo sapien
ctgtttcatccatttacacaacatacgtggccc

SEQ ID NO: 817000 - DNA, 33 bp, Homo sapien
ctgtttcatccatttatacaacatacgtggccc

SEQ ID NO: 817001 - DNA, 33 bp, Homo sapien
cttgggtcctcaggccaagttgagccagacagg

SEQ ID NO: 817002 - DNA, 33 bp, Homo sapien
cttgggtcctcaggccgagttgagccagacagg

SEQ ID NO: 817003 - DNA, 33 bp, Homo sapien
gagatcctctgctcacaagattttggtcacctg

SEQ ID NO: 817004 - DNA, 33 bp, Homo sapien
gagatcctctgctcacgagattttggtcacctg

SEQ ID NO: 817005 - DNA, 33 bp, Homo sapien
ggaacactgaattcaccggtatggaagcattgc

SEQ ID NO: 817006 - DNA, 33 bp, Homo sapien
ggaacactgaattcactggtatggaagcattgc

SEQ ID NO: 817007 - DNA, 33 bp, Homo sapien
gaagggtcaaggcctcaagtggggccaaactcc

SEQ ID NO: 817008 - DNA, 33 bp, Homo sapien
gaagggtcaaggcctcgagtggggccaaactcc

SEQ ID NO: 817009 - DNA, 33 bp, Homo sapien
agtgctcgattataaaatatgatgatgatgatt

SEQ ID NO: 817010 - DNA, 33 bp, Homo sapien
agtgctcgattataaagtatgatgatgatgatt

SEQ ID NO: 817011 - DNA, 33 bp, Homo sapien
gcctgacataagaggcacttactcggtgatggc

SEQ ID NO: 817012 - DNA, 33 bp, Homo sapien
gcctgacataagaggcgcttactcggtgatggc

SEQ ID NO: 817013 - DNA, 33 bp, Homo sapien
ccctggagtcagccagcagttgtgtagttgtga

SEQ ID NO: 817014 - DNA, 33 bp, Homo sapien
ccctggagtcagccagtagttgtgtagttgtga

SEQ ID NO: 817015 - DNA, 33 bp, Homo sapien
ttggtgaatcctaaaccggcatcaatcacaaat

SEQ ID NO: 817016 - DNA, 33 bp, Homo sapien
ttggtgaatcctaaactggcatcaatcacaaat

SEQ ID NO: 817017 - DNA, 33 bp, Homo sapien
aataaagttattcacccaagtggtagagtttgg

SEQ ID NO: 817018 - DNA, 33 bp, Homo sapien
aataaagttattcaccgaagtggtagagtttgg

SEQ ID NO: 817019 - DNA, 33 bp, Homo sapien
gggctaatataggaaacaaagtgcctggcctgc

SEQ ID NO: 817020 - DNA, 33 bp, Homo sapien
gggctaatataggaaataaagtgcctggcctgc

SEQ ID NO: 817021 - DNA, 33 bp, Homo sapien
taaggatgtggagtgacatccaagacagctgga

SEQ ID NO: 817022 - DNA, 33 bp, Homo sapien
taaggatgtggagtgatatccaagacagctgga

SEQ ID NO: 817023 - DNA, 33 bp, Homo sapien
tagagcttgagcttccaagaaggatctgaatca

SEQ ID NO: 817024 - DNA, 33 bp, Homo sapien
tagagcttgagcttccgagaaggatctgaatca

SEQ ID NO: 817025 - DNA, 33 bp, Homo sapien
cagaggatttcgttagcagagttagagcttgag

SEQ ID NO: 817026 - DNA, 33 bp, Homo sapien
cagaggatttcgttaggagagttagagcttgag

SEQ ID NO: 817027 - DNA, 33 bp, Homo sapien
ggggagacttctgatgcatggattctgtttcaa

SEQ ID NO: 817028 - DNA, 33 bp, Homo sapien
ggggagacttctgatggatggattctgtttcaa

SEQ ID NO: 817029 - DNA, 33 bp, Homo sapien
cacaagggctgaccccaagttgttttcattctg

SEQ ID NO: 817030 - DNA, 33 bp, Homo sapien
cacaagggctgaccccgagttgttttcattctg

SEQ ID NO: 817031 - DNA, 33 bp, Homo sapien
taatcagtttctgttccctgaagacagtctggt

SEQ ID NO: 817032 - DNA, 33 bp, Homo sapien
taatcagtttctgttctctgaagacagtctggt

SEQ ID NO: 817033 - DNA, 33 bp, Homo sapien
cagccgcccctggagacgactcagtagtcaggg

SEQ ID NO: 817034 - DNA, 33 bp, Homo sapien
cagccgcccctggagatgactcagtagtcaggg

SEQ ID NO: 817035 - DNA, 33 bp, Homo sapien
cttacaaaggaggtgacgggagtgagagttagg

SEQ ID NO: 817036 - DNA, 33 bp, Homo sapien
cttacaaaggaggtgatgggagtgagagttagg

SEQ ID NO: 817037 - DNA, 33 bp, Homo sapien
agcggatgggaacaagactgccagcaccccgac

SEQ ID NO: 817038 - DNA, 33 bp, Homo sapien
agcggatgggaacaaggctgccagcaccccgac

SEQ ID NO: 817039 - DNA, 33 bp, Homo sapien
ggaggcttgctcctcaacccgtcgtgggtcact

SEQ ID NO: 817040 - DNA, 33 bp, Homo sapien
ggaggcttgctcctcaccccgtcgtgggtcact

SEQ ID NO: 817041 - DNA, 33 bp, Homo sapien
caagtcatttttgttcgcgaatgacagaaaacc

SEQ ID NO: 817042 - DNA, 33 bp, Homo sapien
caagtcatttttgttctcgaatgacagaaaacc

SEQ ID NO: 817043 - DNA, 33 bp, Homo sapien
ctgatacagaggaacacaaaggatcagcgatga

SEQ ID NO: 817044 - DNA, 33 bp, Homo sapien
ctgatacagaggaacagaaaggatcagcgatga

SEQ ID NO: 817045 - DNA, 33 bp, Homo sapien
aacatcctcattgcaccctccctccacattcca

SEQ ID NO: 817046 - DNA, 33 bp, Homo sapien
aacatcctcattgcactctccctccacattcca

SEQ ID NO: 817047 - DNA, 33 bp, Homo sapien
gacccagcaatactcaactagcagcttaacaag

SEQ ID NO: 817048 - DNA, 33 bp, Homo sapien
gacccagcaatactcagctagcagcttaacaag

SEQ ID NO: 817049 - DNA, 33 bp, Homo sapien
ccggtcagttttgtcccagcctgtgttcctcac

SEQ ID NO: 817050 - DNA, 33 bp, Homo sapien
ccggtcagttttgtccgagcctgtgttcctcac

SEQ ID NO: 817051 - DNA, 33 bp, Homo sapien
gaacactcaaatgaacaggctctggaattcact

SEQ ID NO: 817052 - DNA, 33 bp, Homo sapien
gaacactcaaatgaaccggctctggaattcact

SEQ ID NO: 817053 - DNA, 33 bp, Homo sapien
gtttataaacagactcccacacacagggcttga

SEQ ID NO: 817054 - DNA, 33 bp, Homo sapien
gtttataaacagactctcacacacagggcttga

SEQ ID NO: 817055 - DNA, 33 bp, Homo sapien
atctcgatgaaatgtaactgaagaaaacatcag

SEQ ID NO: 817056 - DNA, 33 bp, Homo sapien
atctcgatgaaatgtacctgaagaaaacatcag

SEQ ID NO: 817057 - DNA, 33 bp, Homo sapien
acatcctggatcaaaactaggataggcaggaca

SEQ ID NO: 817058 - DNA, 33 bp, Homo sapien
acatcctggatcaaaattaggataggcaggaca

SEQ ID NO: 817059 - DNA, 33 bp, Homo sapien
agtcatcataaggaagaaagtttggtttggtga

SEQ ID NO: 817060 - DNA, 33 bp, Homo sapien
agtcatcataaggaagcaagtttggtttggtga

SEQ ID NO: 817061 - DNA, 33 bp, Homo sapien
catccgtccagaaagcccagttctcaaagggta

SEQ ID NO: 817062 - DNA, 33 bp, Homo sapien
catccgtccagaaagctcagttctcaaagggta

SEQ ID NO: 817063 - DNA, 33 bp, Homo sapien
ccatttggaatctgcaaagcatggaaggatacc

SEQ ID NO: 817064 - DNA, 33 bp, Homo sapien
ccatttggaatctgcagagcatggaaggatacc

SEQ ID NO: 817065 - DNA, 33 bp, Homo sapien
ctcctcttttcccaaaataacagccccattttc

SEQ ID NO: 817066 - DNA, 33 bp, Homo sapien
ctcctcttttcccaaagtaacagccccattttc

SEQ ID NO: 817067 - DNA, 33 bp, Homo sapien
gggctctggggctcaccgcaaatggggttccca

SEQ ID NO: 817068 - DNA, 33 bp, Homo sapien
gggctctggggctcactgcaaatggggttccca

SEQ ID NO: 817069 - DNA, 33 bp, Homo sapien
attgcctcttgttttacgtgtcttcctattcct

SEQ ID NO: 817070 - DNA, 33 bp, Homo sapien
attgcctcttgttttatgtgtcttcctattcct

SEQ ID NO: 817071 - DNA, 33 bp, Homo sapien
cacacacgtgttcatgccaactaatcatgcgga

SEQ ID NO: 817072 - DNA, 33 bp, Homo sapien
cacacacgtgttcatgtcaactaatcatgcgga

SEQ ID NO: 817073 - DNA, 33 bp, Homo sapien
ccattgtctgaaggaacagaaattactgatgaa

SEQ ID NO: 817074 - DNA, 33 bp, Homo sapien
ccattgtctgaaggaagagaaattactgatgaa

SEQ ID NO: 817075 - DNA, 33 bp, Homo sapien
atgacattgtgctggaacaaagctttatccaca

SEQ ID NO: 817076 - DNA, 33 bp, Homo sapien
atgacattgtgctggatcaaagctttatccaca

SEQ ID NO: 817077 - DNA, 33 bp, Homo sapien
gaattatgtcagaaacagtcaagggagtaacca

SEQ ID NO: 817078 - DNA, 33 bp, Homo sapien
gaattatgtcagaaacggtcaagggagtaacca

SEQ ID NO: 817079 - DNA, 33 bp, Homo sapien
gataaaggtaacatatgaatgatgcacaaaaca

SEQ ID NO: 817080 - DNA, 33 bp, Homo sapien
gataaaggtaacatattaatgatgcacaaaaca

SEQ ID NO: 817081 - DNA, 33 bp, Homo sapien
atgcacaaaacaatagaaggaagcaataatgtc

SEQ ID NO: 817082 - DNA, 33 bp, Homo sapien
atgcacaaaacaataggaggaagcaataatgtc

SEQ ID NO: 817083 - DNA, 33 bp, Homo sapien
gggaatattttttgacagaggaaaccaaagtga

SEQ ID NO: 817084 - DNA, 33 bp, Homo sapien
gggaatattttttgacggaggaaaccaaagtga

SEQ ID NO: 817085 - DNA, 33 bp, Homo sapien
cccgctatgtgaccaacgctttccacccacaaa

SEQ ID NO: 817086 - DNA, 33 bp, Homo sapien
cccgctatgtgaccaatgctttccacccacaaa

SEQ ID NO: 817087 - DNA, 33 bp, Homo sapien
ctagtttagtcagttaagtttttcagtaaacta

SEQ ID NO: 817088 - DNA, 33 bp, Homo sapien
ctagtttagtcagttaggtttttcagtaaacta

SEQ ID NO: 817089 - DNA, 33 bp, Homo sapien
aacaaaaacttaattacgaatggcttccttcat

SEQ ID NO: 817090 - DNA, 33 bp, Homo sapien
aacaaaaacttaattatgaatggcttccttcat

SEQ ID NO: 817091 - DNA, 33 bp, Homo sapien
aggcaccttgatcttacatttaccagacttcag

SEQ ID NO: 817092 - DNA, 33 bp, Homo sapien
aggcaccttgatcttagatttaccagacttcag

SEQ ID NO: 817093 - DNA, 33 bp, Homo sapien
tgggagtggacaaaagaaaccttaatatatctg

SEQ ID NO: 817094 - DNA, 33 bp, Homo sapien
tgggagtggacaaaagtaaccttaatatatctg

SEQ ID NO: 817095 - DNA, 33 bp, Homo sapien
cattcctggaagcactcacacaaagacaaaata

SEQ ID NO: 817096 - DNA, 33 bp, Homo sapien
cattcctggaagcacttacacaaagacaaaata

SEQ ID NO: 817097 - DNA, 33 bp, Homo sapien
acaggggatttttgtcaaagtcgcagaacccac

SEQ ID NO: 817098 - DNA, 33 bp, Homo sapien
acaggggatttttgtcgaagtcgcagaacccac

SEQ ID NO: 817099 - DNA, 33 bp, Homo sapien
gtgttcctacttcatcaaccctgtgaaaagcag

SEQ ID NO: 817100 - DNA, 33 bp, Homo sapien
gtgttcctacttcatcgaccctgtgaaaagcag

SEQ ID NO: 817101 - DNA, 33 bp, Homo sapien
aaactgctgaacttcacgtaagaacagtaggaa

SEQ ID NO: 817102 - DNA, 33 bp, Homo sapien
aaactgctgaacttcaggtaagaacagtaggaa

SEQ ID NO: 817103 - DNA, 33 bp, Homo sapien
agggacttaacaatccaagagcaattttgtgct

SEQ ID NO: 817104 - DNA, 33 bp, Homo sapien
agggacttaacaatccgagagcaattttgtgct

SEQ ID NO: 817105 - DNA, 33 bp, Homo sapien
aacttgctttttttacactcaacaccacaaaca

SEQ ID NO: 817106 - DNA, 33 bp, Homo sapien
aacttgctttttttacgctcaacaccacaaaca

SEQ ID NO: 817107 - DNA, 33 bp, Homo sapien
gctgaaacaaaatcaacaagcagagaaactgaa

SEQ ID NO: 817108 - DNA, 33 bp, Homo sapien
gctgaaacaaaatcaagaagcagagaaactgaa

SEQ ID NO: 817109 - DNA, 33 bp, Homo sapien
gtctaaattctgctgacaggaagcaaccttttc

SEQ ID NO: 817110 - DNA, 33 bp, Homo sapien
gtctaaattctgctgataggaagcaaccttttc

SEQ ID NO: 817111 - DNA, 33 bp, Homo sapien
tgttcactgaaaaaagactgccaggattccatt

SEQ ID NO: 817112 - DNA, 33 bp, Homo sapien
tgttcactgaaaaaaggctgccaggattccatt

SEQ ID NO: 817113 - DNA, 33 bp, Homo sapien
tttatgtttgagagaactgttctggctgttatg

SEQ ID NO: 817114 - DNA, 33 bp, Homo sapien
tttatgtttgagagaattgttctggctgttatg

SEQ ID NO: 817115 - DNA, 33 bp, Homo sapien
agagcttctctgtgaaagacagcaataaaggaa

SEQ ID NO: 817116 - DNA, 33 bp, Homo sapien
agagcttctctgtgaatgacagcaataaaggaa

SEQ ID NO: 817117 - DNA, 33 bp, Homo sapien
ctctgcacaaatgtgacggcagcagctgaagcc

SEQ ID NO: 817118 - DNA, 33 bp, Homo sapien
ctctgcacaaatgtgatggcagcagctgaagcc

SEQ ID NO: 817119 - DNA, 33 bp, Homo sapien
cagcatttagtgcacacgacagtggccaagaca

SEQ ID NO: 817120 - DNA, 33 bp, Homo sapien
cagcatttagtgcacatgacagtggccaagaca

SEQ ID NO: 817121 - DNA, 33 bp, Homo sapien
cttcagcatgcgttgcaaagtgcttgtgccctg

SEQ ID NO: 817122 - DNA, 33 bp, Homo sapien
cttcagcatgcgttgcgaagtgcttgtgccctg

SEQ ID NO: 817123 - DNA, 33 bp, Homo sapien
cagcctcctgtgtacaaagaacacaccgcacat

SEQ ID NO: 817124 - DNA, 33 bp, Homo sapien
cagcctcctgtgtacagagaacacaccgcacat

SEQ ID NO: 817125 - DNA, 33 bp, Homo sapien
cgtttgttttctttgcaatgatcttatttgttc

SEQ ID NO: 817126 - DNA, 33 bp, Homo sapien
cgtttgttttctttgcgatgatcttatttgttc

SEQ ID NO: 817127 - DNA, 33 bp, Homo sapien
ctgtgtttttcagaacaatgctgataagccact

SEQ ID NO: 817128 - DNA, 33 bp, Homo sapien
ctgtgtttttcagaacgatgctgataagccact

SEQ ID NO: 817129 - DNA, 33 bp, Homo sapien
gggactcaacccatcacccaggaccatggtacc

SEQ ID NO: 817130 - DNA, 33 bp, Homo sapien
gggactcaacccatcatccaggaccatggtacc

SEQ ID NO: 817131 - DNA, 33 bp, Homo sapien
ggactaaaattgtaaaactcttggcaaaacaca

SEQ ID NO: 817132 - DNA, 33 bp, Homo sapien
ggactaaaattgtaaacctcttggcaaaacaca

SEQ ID NO: 817133 - DNA, 33 bp, Homo sapien
ataaaacctttgtacactgggaagaattagaaa

SEQ ID NO: 817134 - DNA, 33 bp, Homo sapien
ataaaacctttgtacattgggaagaattagaaa

SEQ ID NO: 817135 - DNA, 33 bp, Homo sapien
tccaaatggatgaataggaagtcacgtacactt

SEQ ID NO: 817136 - DNA, 33 bp, Homo sapien
tccaaatggatgaatatgaagtcacgtacactt

SEQ ID NO: 817137 - DNA, 33 bp, Homo sapien
tgatacatgctaaataaggataaacctgcaaaa

SEQ ID NO: 817138 - DNA, 33 bp, Homo sapien
tgatacatgctaaatagggataaacctgcaaaa

SEQ ID NO: 817139 - DNA, 33 bp, Homo sapien
agcgtgccttagattgaaaagtatgatcaagtg

SEQ ID NO: 817140 - DNA, 33 bp, Homo sapien
agcgtgccttagattgtaaagtatgatcaagtg

SEQ ID NO: 817141 - DNA, 33 bp, Homo sapien
catggaggtgtgatagcataagatttatgtgaa

SEQ ID NO: 817142 - DNA, 33 bp, Homo sapien
catggaggtgtgatagtataagatttatgtgaa

SEQ ID NO: 817143 - DNA, 33 bp, Homo sapien
gttatccaataacaacaaaacctcattattatt

SEQ ID NO: 817144 - DNA, 33 bp, Homo sapien
gttatccaataacaacgaaacctcattattatt

SEQ ID NO: 817145 - DNA, 33 bp, Homo sapien
aactagacaacctagaatagatcatacacaagg

SEQ ID NO: 817146 - DNA, 33 bp, Homo sapien
aactagacaacctagagtagatcatacacaagg

SEQ ID NO: 817147 - DNA, 33 bp, Homo sapien
tggctcgagatttagcacaaggcttttccttct

SEQ ID NO: 817148 - DNA, 33 bp, Homo sapien
tggctcgagatttagcgcaaggcttttccttct

SEQ ID NO: 817149 - DNA, 33 bp, Homo sapien
tcaagcaaaacgaaaacgtcctggagatctgct

SEQ ID NO: 817150 - DNA, 33 bp, Homo sapien
tcaagcaaaacgaaaatgtcctggagatctgct

SEQ ID NO: 817151 - DNA, 33 bp, Homo sapien
aaagggatatgcacagcagctcatgtctggaat

SEQ ID NO: 817152 - DNA, 33 bp, Homo sapien
aaagggatatgcacagtagctcatgtctggaat

SEQ ID NO: 817153 - DNA, 33 bp, Homo sapien
tgaccttcacacttgaggtagaaaaaacatctg

SEQ ID NO: 817154 - DNA, 33 bp, Homo sapien
tgaccttcacacttgatgtagaaaaaacatctg

SEQ ID NO: 817155 - DNA, 33 bp, Homo sapien
tcttggaatgcaacgacggttcaaaaatagaaa

SEQ ID NO: 817156 - DNA, 33 bp, Homo sapien
tcttggaatgcaacgatggttcaaaaatagaaa

SEQ ID NO: 817157 - DNA, 33 bp, Homo sapien
caatcactctgattcagatcgatgtcagctcta

SEQ ID NO: 817158 - DNA, 33 bp, Homo sapien
caatcactctgattcatatcgatgtcagctcta

SEQ ID NO: 817159 - DNA, 33 bp, Homo sapien
aagtcagccctacagaggattaaaaatgagacc

SEQ ID NO: 817160 - DNA, 33 bp, Homo sapien
aagtcagccctacagatgattaaaaatgagacc

SEQ ID NO: 817161 - DNA, 33 bp, Homo sapien
aaaaactttgcatatggaaaagatgcattcaaa

SEQ ID NO: 817162 - DNA, 33 bp, Homo sapien
aaaaactttgcatatgtaaaagatgcattcaaa

SEQ ID NO: 817163 - DNA, 33 bp, Homo sapien
caatgattaaaacataaattttccagcctgggc

SEQ ID NO: 817164 - DNA, 33 bp, Homo sapien
caatgattaaaacatatattttccagcctgggc

SEQ ID NO: 817165 - DNA, 33 bp, Homo sapien
aaagtagacgaatataaaagtgaaactttggcc

SEQ ID NO: 817166 - DNA, 33 bp, Homo sapien
aaagtagacgaatatagaagtgaaactttggcc

SEQ ID NO: 817167 - DNA, 33 bp, Homo sapien
ggaactgctcaaatgaaactcagcaagaaaggg

SEQ ID NO: 817168 - DNA, 33 bp, Homo sapien
ggaactgctcaaatgagactcagcaagaaaggg

SEQ ID NO: 817169 - DNA, 33 bp, Homo sapien
agaaatccacaacctcagaagaagtgtttcgag

SEQ ID NO: 817170 - DNA, 33 bp, Homo sapien
agaaatccacaacctcggaagaagtgtttcgag

SEQ ID NO: 817171 - DNA, 33 bp, Homo sapien
agtcctggtaaacacaagcacatgtcagtcagg

SEQ ID NO: 817172 - DNA, 33 bp, Homo sapien
agtcctggtaaacacaggcacatgtcagtcagg

SEQ ID NO: 817173 - DNA, 33 bp, Homo sapien
gctgttcctttgtctagaattctttcatctctc

SEQ ID NO: 817174 - DNA, 33 bp, Homo sapien
gctgttcctttgtctataattctttcatctctc

SEQ ID NO: 817175 - DNA, 33 bp, Homo sapien
ccacgtctgctgagaacggccagaagccgggaa

SEQ ID NO: 817176 - DNA, 33 bp, Homo sapien
ccacgtctgctgagaatggccagaagccgggaa

SEQ ID NO: 817177 - DNA, 33 bp, Homo sapien
aggccgcgggaagtaccgaaggcagagcagagc

SEQ ID NO: 817178 - DNA, 33 bp, Homo sapien
aggccgcgggaagtactgaaggcagagcagagc

SEQ ID NO: 817179 - DNA, 33 bp, Homo sapien
gaggtaagtgtgtgccaagtaaagtacacgtgt

SEQ ID NO: 817180 - DNA, 33 bp, Homo sapien
gaggtaagtgtgtgccgagtaaagtacacgtgt

SEQ ID NO: 817181 - DNA, 33 bp, Homo sapien
gaaaggacagaaattacgagaaacgtagctgct

SEQ ID NO: 817182 - DNA, 33 bp, Homo sapien
gaaaggacagaaattatgagaaacgtagctgct

SEQ ID NO: 817183 - DNA, 33 bp, Homo sapien
ttagctatcgatcaaaaccatcaagagatataa

SEQ ID NO: 817184 - DNA, 33 bp, Homo sapien
ttagctatcgatcaaatccatcaagagatataa

SEQ ID NO: 817185 - DNA, 33 bp, Homo sapien
tataggcctggaaggagaaaagaattggaaatg

SEQ ID NO: 817186 - DNA, 33 bp, Homo sapien
tataggcctggaaggataaaagaattggaaatg

SEQ ID NO: 817187 - DNA, 33 bp, Homo sapien
ggtacctgcttctgcactataaactactccaaa

SEQ ID NO: 817188 - DNA, 33 bp, Homo sapien
ggtacctgcttctgcattataaactactccaaa

SEQ ID NO: 817189 - DNA, 33 bp, Homo sapien
caagcaaacaactccacgaatgattctttttgg

SEQ ID NO: 817190 - DNA, 33 bp, Homo sapien
caagcaaacaactccatgaatgattctttttgg

SEQ ID NO: 817191 - DNA, 33 bp, Homo sapien
aggacaaacaccgtgcaattccactgataggca

SEQ ID NO: 817192 - DNA, 33 bp, Homo sapien
aggacaaacaccgtgcgattccactgataggca

SEQ ID NO: 817193 - DNA, 33 bp, Homo sapien
ttcatattctcttgtgcagaaagtgatcctcac

SEQ ID NO: 817194 - DNA, 33 bp, Homo sapien
ttcatattctcttgtgtagaaagtgatcctcac

SEQ ID NO: 817195 - DNA, 33 bp, Homo sapien
cagaagtggctccccccgcacaatctcccaagt

SEQ ID NO: 817196 - DNA, 33 bp, Homo sapien
cagaagtggctcccccggcacaatctcccaagt

SEQ ID NO: 817197 - DNA, 33 bp, Homo sapien
aaagttgacaacatgactaaaatgagccttaag

SEQ ID NO: 817198 - DNA, 33 bp, Homo sapien
aaagttgacaacatgattaaaatgagccttaag

SEQ ID NO: 817199 - DNA, 33 bp, Homo sapien
aaaacacaaaaattaactggacctggtggtggg

SEQ ID NO: 817200 - DNA, 33 bp, Homo sapien
aaaacacaaaaattaattggacctggtggtggg

SEQ ID NO: 817201 - DNA, 33 bp, Homo sapien
actctgcctcaaaacaaacaaatgaaatgttta

SEQ ID NO: 817202 - DNA, 33 bp, Homo sapien
actctgcctcaaaacagacaaatgaaatgttta

SEQ ID NO: 817203 - DNA, 33 bp, Homo sapien
attgagatggaaatgaacatattcaccagatta

SEQ ID NO: 817204 - DNA, 33 bp, Homo sapien
attgagatggaaatgagcatattcaccagatta

SEQ ID NO: 817205 - DNA, 33 bp, Homo sapien
tgagggtctccaggaaagaggtaaaacactgag

SEQ ID NO: 817206 - DNA, 33 bp, Homo sapien
tgagggtctccaggaacgaggtaaaacactgag

SEQ ID NO: 817207 - DNA, 33 bp, Homo sapien
tcccgatcatctcccagcttagcaaatgatgat

SEQ ID NO: 817208 - DNA, 33 bp, Homo sapien
tcccgatcatctcccatcttagcaaatgatgat

SEQ ID NO: 817209 - DNA, 33 bp, Homo sapien
cagctcttctactctacgtgcaaccacgtggag

SEQ ID NO: 817210 - DNA, 33 bp, Homo sapien
cagctcttctactctatgtgcaaccacgtggag

SEQ ID NO: 817211 - DNA, 33 bp, Homo sapien
tgcagagatggcatcaagacttttagagtaact

SEQ ID NO: 817212 - DNA, 33 bp, Homo sapien
tgcagagatggcatcaggacttttagagtaact

SEQ ID NO: 817213 - DNA, 33 bp, Homo sapien
attctgaatgttgggagacaaggacaactgtca

SEQ ID NO: 817214 - DNA, 33 bp, Homo sapien
attctgaatgttgggatacaaggacaactgtca

SEQ ID NO: 817215 - DNA, 33 bp, Homo sapien
gaacctgacacaacccagcttatgtgccctcct

SEQ ID NO: 817216 - DNA, 33 bp, Homo sapien
gaacctgacacaacccggcttatgtgccctcct

SEQ ID NO: 817217 - DNA, 33 bp, Homo sapien
attccaaaaaatgtcaaagaaatctgtctcggg

SEQ ID NO: 817218 - DNA, 33 bp, Homo sapien
attccaaaaaatgtcagagaaatctgtctcggg

SEQ ID NO: 817219 - DNA, 33 bp, Homo sapien
agggcctgacaacaaagttctccgcaggtttgg

SEQ ID NO: 817220 - DNA, 33 bp, Homo sapien
agggcctgacaacaaatttctccgcaggtttgg

SEQ ID NO: 817221 - DNA, 33 bp, Homo sapien
tcctgttttctaaataagactccaacaccagaa

SEQ ID NO: 817222 - DNA, 33 bp, Homo sapien
tcctgttttctaaataggactccaacaccagaa

SEQ ID NO: 817223 - DNA, 33 bp, Homo sapien
attttggaaaggaacacaaaacatggtaatagt

SEQ ID NO: 817224 - DNA, 33 bp, Homo sapien
attttggaaaggaacataaaacatggtaatagt

SEQ ID NO: 817225 - DNA, 33 bp, Homo sapien
cactccttttcaacatcagaaatcctggccaca

SEQ ID NO: 817226 - DNA, 33 bp, Homo sapien
cactccttttcaacattagaaatcctggccaca

SEQ ID NO: 817227 - DNA, 33 bp, Homo sapien
gtggagattcggttgactacgctccccaactgt

SEQ ID NO: 817228 - DNA, 33 bp, Homo sapien
gtggagattcggttgattacgctccccaactgt

SEQ ID NO: 817229 - DNA, 33 bp, Homo sapien
aggcgctcttcagggcacttgcctgcttccttg

SEQ ID NO: 817230 - DNA, 33 bp, Homo sapien
aggcgctcttcagggcgcttgcctgcttccttg

SEQ ID NO: 817231 - DNA, 33 bp, Homo sapien
acatgctctgtaatcacgctaaagacggatggc

SEQ ID NO: 817232 - DNA, 33 bp, Homo sapien
acatgctctgtaatcatgctaaagacggatggc

SEQ ID NO: 817233 - DNA, 33 bp, Homo sapien
tctgagtgagtcctaacgcttgccactgcaatc

SEQ ID NO: 817234 - DNA, 33 bp, Homo sapien
tctgagtgagtcctaatgcttgccactgcaatc

SEQ ID NO: 817235 - DNA, 33 bp, Homo sapien
atcctgtctttaattcaccatgttcaaatcaga

SEQ ID NO: 817236 - DNA, 33 bp, Homo sapien
atcctgtctttaattcgccatgttcaaatcaga

SEQ ID NO: 817237 - DNA, 33 bp, Homo sapien
tcgagtggccacccagcatgacaggcagcctcc

SEQ ID NO: 817238 - DNA, 33 bp, Homo sapien
tcgagtggccacccaggatgacaggcagcctcc

SEQ ID NO: 817239 - DNA, 33 bp, Homo sapien
tcagcgcaggaagacacactaacaaagtcactc

SEQ ID NO: 817240 - DNA, 33 bp, Homo sapien
tcagcgcaggaagacagactaacaaagtcactc

SEQ ID NO: 817241 - DNA, 33 bp, Homo sapien
tgtcatctgcagcccacgattgtaacctctgta

SEQ ID NO: 817242 - DNA, 33 bp, Homo sapien
tgtcatctgcagcccatgattgtaacctctgta

SEQ ID NO: 817243 - DNA, 33 bp, Homo sapien
tacttagaaaaaactcaacattcctctctctga

SEQ ID NO: 817244 - DNA, 33 bp, Homo sapien
tacttagaaaaaactccacattcctctctctga

SEQ ID NO: 817245 - DNA, 33 bp, Homo sapien
ctctaaaatggtgcacagtcaaatcggtcctca

SEQ ID NO: 817246 - DNA, 33 bp, Homo sapien
ctctaaaatggtgcacggtcaaatcggtcctca

SEQ ID NO: 817247 - DNA, 33 bp, Homo sapien
gtcactgctctacttaagatttggctgggcggg

SEQ ID NO: 817248 - DNA, 33 bp, Homo sapien
gtcactgctctacttacgatttggctgggcggg

SEQ ID NO: 817249 - DNA, 33 bp, Homo sapien
ggtgcatttcaccactaaccagaagagccactc

SEQ ID NO: 817250 - DNA, 33 bp, Homo sapien
ggtgcatttcaccactcaccagaagagccactc

SEQ ID NO: 817251 - DNA, 33 bp, Homo sapien
gcctattaaacctccacgctgtttctttgtttt

SEQ ID NO: 817252 - DNA, 33 bp, Homo sapien
gcctattaaacctccatgctgtttctttgtttt

SEQ ID NO: 817253 - DNA, 33 bp, Homo sapien
cgcacctataacctcaacactttgcactttgac

SEQ ID NO: 817254 - DNA, 33 bp, Homo sapien
cgcacctataacctcagcactttgcactttgac

SEQ ID NO: 817255 - DNA, 33 bp, Homo sapien
aggtgcgagccactgcgcttgcttgaacgtcta

SEQ ID NO: 817256 - DNA, 33 bp, Homo sapien
aggtgcgagccactgctcttgcttgaacgtcta

SEQ ID NO: 817257 - DNA, 33 bp, Homo sapien
taccgcactcagcctaaaaattttacataaatg

SEQ ID NO: 817258 - DNA, 33 bp, Homo sapien
taccgcactcagcctagaaattttacataaatg

SEQ ID NO: 817259 - DNA, 33 bp, Homo sapien
tctattcaaaacagcaataaacacaaaaggtca

SEQ ID NO: 817260 - DNA, 33 bp, Homo sapien
tctattcaaaacagcagtaaacacaaaaggtca

SEQ ID NO: 817261 - DNA, 33 bp, Homo sapien
agccacagggctggtcactcttcacttgtgtcc

SEQ ID NO: 817262 - DNA, 33 bp, Homo sapien
agccacagggctggtcgctcttcacttgtgtcc

SEQ ID NO: 817263 - DNA, 33 bp, Homo sapien
acctttgaatcacctacgacctgtaactcccct

SEQ ID NO: 817264 - DNA, 33 bp, Homo sapien
acctttgaatcacctatgacctgtaactcccct

SEQ ID NO: 817265 - DNA, 33 bp, Homo sapien
tcaattgaattgttgacgctgcaattgccagca

SEQ ID NO: 817266 - DNA, 33 bp, Homo sapien
tcaattgaattgttgaggctgcaattgccagca

SEQ ID NO: 817267 - DNA, 33 bp, Homo sapien
ccactcgtattcacccaaagtcaaggctaagac

SEQ ID NO: 817268 - DNA, 33 bp, Homo sapien
ccactcgtattcacccgaagtcaaggctaagac

SEQ ID NO: 817269 - DNA, 33 bp, Homo sapien
cccaaaggtggcctcccatactagcatattttg

SEQ ID NO: 817270 - DNA, 33 bp, Homo sapien
cccaaaggtggcctcctatactagcatattttg

SEQ ID NO: 817271 - DNA, 33 bp, Homo sapien
atggccacagggaaacaccagactgcaagagtc

SEQ ID NO: 817272 - DNA, 33 bp, Homo sapien
atggccacagggaaacgccagactgcaagagtc

SEQ ID NO: 817273 - DNA, 33 bp, Homo sapien
acagtgctgctttgaacagttttcataagtctc

SEQ ID NO: 817274 - DNA, 33 bp, Homo sapien
acagtgctgctttgaatagttttcataagtctc

SEQ ID NO: 817275 - DNA, 33 bp, Homo sapien
catgattctctcagcgacgatacagctcgtccg

SEQ ID NO: 817276 - DNA, 33 bp, Homo sapien
catgattctctcagcgtcgatacagctcgtccg

SEQ ID NO: 817277 - DNA, 33 bp, Homo sapien
cacgagcagccgcacaaattgttttcctggggt

SEQ ID NO: 817278 - DNA, 33 bp, Homo sapien
cacgagcagccgcacacattgttttcctggggt

SEQ ID NO: 817279 - DNA, 33 bp, Homo sapien
gaacacaactcagcaaccaacccaaaggaacag

SEQ ID NO: 817280 - DNA, 33 bp, Homo sapien
gaacacaactcagcaatcaacccaaaggaacag

SEQ ID NO: 817281 - DNA, 33 bp, Homo sapien
ggtcaccgtcagcaggaagtggagttagatttg

SEQ ID NO: 817282 - DNA, 33 bp, Homo sapien
ggtcaccgtcagcaggtagtggagttagatttg

SEQ ID NO: 817283 - DNA, 33 bp, Homo sapien
ctgggagactttctagcccaagggttacaaatc

SEQ ID NO: 817284 - DNA, 33 bp, Homo sapien
ctgggagactttctaggccaagggttacaaatc

SEQ ID NO: 817285 - DNA, 33 bp, Homo sapien
gggagcagcagctgaccggaagtgtgaccttca

SEQ ID NO: 817286 - DNA, 33 bp, Homo sapien
gggagcagcagctgacgggaagtgtgaccttca

SEQ ID NO: 817287 - DNA, 33 bp, Homo sapien
gaaattctcaagctgcaacctggaagggtctga

SEQ ID NO: 817288 - DNA, 33 bp, Homo sapien
gaaattctcaagctgcgacctggaagggtctga

SEQ ID NO: 817289 - DNA, 33 bp, Homo sapien
cacagaacgttccggcaaacaggtcaagcctgt

SEQ ID NO: 817290 - DNA, 33 bp, Homo sapien
cacagaacgttccggcgaacaggtcaagcctgt

SEQ ID NO: 817291 - DNA, 33 bp, Homo sapien
ctgccctcaatagaaacaaaccatcccctcagg

SEQ ID NO: 817292 - DNA, 33 bp, Homo sapien
ctgccctcaatagaaataaaccatcccctcagg

SEQ ID NO: 817293 - DNA, 33 bp, Homo sapien
cagtcagcggccagcacgatttatacgtcccaa

SEQ ID NO: 817294 - DNA, 33 bp, Homo sapien
cagtcagcggccagcatgatttatacgtcccaa

SEQ ID NO: 817295 - DNA, 33 bp, Homo sapien
gggacctttcatgctacgtattctaccacagtt

SEQ ID NO: 817296 - DNA, 33 bp, Homo sapien
gggacctttcatgctatgtattctaccacagtt

SEQ ID NO: 817297 - DNA, 33 bp, Homo sapien
aaggtcccatcttaacaattcttgagtggacgg

SEQ ID NO: 817298 - DNA, 33 bp, Homo sapien
aaggtcccatcttaaccattcttgagtggacgg

SEQ ID NO: 817299 - DNA, 33 bp, Homo sapien
cattatggctgagtataaagtaaggctttccct

SEQ ID NO: 817300 - DNA, 33 bp, Homo sapien
cattatggctgagtatgaagtaaggctttccct

SEQ ID NO: 817301 - DNA, 33 bp, Homo sapien
cgctggattcatgccaagggccctaagtgccat

SEQ ID NO: 817302 - DNA, 33 bp, Homo sapien
cgctggattcatgccaggggccctaagtgccat

SEQ ID NO: 817303 - DNA, 33 bp, Homo sapien
ccaaagcacatgcctgaatcgagcccatgcccc

SEQ ID NO: 817304 - DNA, 33 bp, Homo sapien
ccaaagcacatgcctggatcgagcccatgcccc

SEQ ID NO: 817305 - DNA, 33 bp, Homo sapien
cgtgtgagacaacatacgtgaaaatacccagac

SEQ ID NO: 817306 - DNA, 33 bp, Homo sapien
cgtgtgagacaacatatgtgaaaatacccagac

SEQ ID NO: 817307 - DNA, 33 bp, Homo sapien
cctcctaagacttggcagaaacgtgtgagacaa

SEQ ID NO: 817308 - DNA, 33 bp, Homo sapien
cctcctaagacttggcggaaacgtgtgagacaa

SEQ ID NO: 817309 - DNA, 33 bp, Homo sapien
tattccttctcccggcacagggggaccgctctt

SEQ ID NO: 817310 - DNA, 33 bp, Homo sapien
tattccttctcccggcgcagggggaccgctctt

SEQ ID NO: 817311 - DNA, 33 bp, Homo sapien
tgtcagctgcttagatcacatgacttcctgctt

SEQ ID NO: 817312 - DNA, 33 bp, Homo sapien
tgtcagctgcttagatgacatgacttcctgctt

SEQ ID NO: 817313 - DNA, 33 bp, Homo sapien
ccaacctctcctcacaaaacctcctaagagatg

SEQ ID NO: 817314 - DNA, 33 bp, Homo sapien
ccaacctctcctcacataacctcctaagagatg

SEQ ID NO: 817315 - DNA, 33 bp, Homo sapien
agatgctgaaatcacacaagggcccttttcatt

SEQ ID NO: 817316 - DNA, 33 bp, Homo sapien
agatgctgaaatcacataagggcccttttcatt

SEQ ID NO: 817317 - DNA, 33 bp, Homo sapien
gatgaggggctggtaaaaatgtttttctccgca

SEQ ID NO: 817318 - DNA, 33 bp, Homo sapien
gatgaggggctggtaacaatgtttttctccgca

SEQ ID NO: 817319 - DNA, 33 bp, Homo sapien
tgacagcattgaaggcagagtgattcattttgc

SEQ ID NO: 817320 - DNA, 33 bp, Homo sapien
tgacagcattgaaggcggagtgattcattttgc

SEQ ID NO: 817321 - DNA, 33 bp, Homo sapien
ttcacttttaacaaaccgaggtgcagaatggcc

SEQ ID NO: 817322 - DNA, 33 bp, Homo sapien
ttcacttttaacaaactgaggtgcagaatggcc

SEQ ID NO: 817323 - DNA, 33 bp, Homo sapien
ctgtccctgcctgtgaactgttagacagacaca

SEQ ID NO: 817324 - DNA, 33 bp, Homo sapien
ctgtccctgcctgtgagctgttagacagacaca

SEQ ID NO: 817325 - DNA, 33 bp, Homo sapien
gaagaccaggggcaccaatgcagtgcagggggt

SEQ ID NO: 817326 - DNA, 33 bp, Homo sapien
gaagaccaggggcaccgatgcagtgcagggggt

SEQ ID NO: 817327 - DNA, 33 bp, Homo sapien
tctcaaggacaaatgcaatgccccgcagcctgt

SEQ ID NO: 817328 - DNA, 33 bp, Homo sapien
tctcaaggacaaatgcgatgccccgcagcctgt

SEQ ID NO: 817329 - DNA, 33 bp, Homo sapien
gtgacgttgccttcaacaaataattagggggtg

SEQ ID NO: 817330 - DNA, 33 bp, Homo sapien
gtgacgttgccttcaagaaataattagggggtg

SEQ ID NO: 817331 - DNA, 33 bp, Homo sapien
gtgggccattttcccccgcgctgtgcttgcgga

SEQ ID NO: 817332 - DNA, 33 bp, Homo sapien
gtgggccattttcccctgcgctgtgcttgcgga

SEQ ID NO: 817333 - DNA, 33 bp, Homo sapien
agtcacaaacaagagaaactggcttcaacaaaa

SEQ ID NO: 817334 - DNA, 33 bp, Homo sapien
agtcacaaacaagagagactggcttcaacaaaa

SEQ ID NO: 817335 - DNA, 33 bp, Homo sapien
gaacaaatgcttttacacaaacaccttgattga

SEQ ID NO: 817336 - DNA, 33 bp, Homo sapien
gaacaaatgcttttacgcaaacaccttgattga

SEQ ID NO: 817337 - DNA, 33 bp, Homo sapien
tttgaggcttttgttacgagaagctggacaagc

SEQ ID NO: 817338 - DNA, 33 bp, Homo sapien
tttgaggcttttgttatgagaagctggacaagc

SEQ ID NO: 817339 - DNA, 33 bp, Homo sapien
aggttcaccataaggaatcagctgtatttccct

SEQ ID NO: 817340 - DNA, 33 bp, Homo sapien
aggttcaccataaggagtcagctgtatttccct

SEQ ID NO: 817341 - DNA, 33 bp, Homo sapien
gcgaggtacacgtagccaggaaggcaggacttc

SEQ ID NO: 817342 - DNA, 33 bp, Homo sapien
gcgaggtacacgtagcgaggaaggcaggacttc

SEQ ID NO: 817343 - DNA, 33 bp, Homo sapien
gaatgctcaagaacagccccgtctgattagacg

SEQ ID NO: 817344 - DNA, 33 bp, Homo sapien
gaatgctcaagaacagtcccgtctgattagacg

SEQ ID NO: 817345 - DNA, 33 bp, Homo sapien
gaatcaggatctctccaggaaagctggaacgta

SEQ ID NO: 817346 - DNA, 33 bp, Homo sapien
gaatcaggatctctccgggaaagctggaacgta

SEQ ID NO: 817347 - DNA, 33 bp, Homo sapien
cctgacctgcagaaccacgaatgactacaactg

SEQ ID NO: 817348 - DNA, 33 bp, Homo sapien
cctgacctgcagaaccgcgaatgactacaactg

SEQ ID NO: 817349 - DNA, 33 bp, Homo sapien
taactgtgacagctcaagtttaattgggggatt

SEQ ID NO: 817350 - DNA, 33 bp, Homo sapien
taactgtgacagctcaggtttaattgggggatt

SEQ ID NO: 817351 - DNA, 33 bp, Homo sapien
cttgggttttctccaacgagcggggtgccctag

SEQ ID NO: 817352 - DNA, 33 bp, Homo sapien
cttgggttttctccaatgagcggggtgccctag

SEQ ID NO: 817353 - DNA, 33 bp, Homo sapien
gcagttttgagatgtacggaaatcaaacgagat

SEQ ID NO: 817354 - DNA, 33 bp, Homo sapien
gcagttttgagatgtatggaaatcaaacgagat

SEQ ID NO: 817355 - DNA, 33 bp, Homo sapien
agatagctgcagtgtcacatgcttactttagct

SEQ ID NO: 817356 - DNA, 33 bp, Homo sapien
agatagctgcagtgtcgcatgcttactttagct

SEQ ID NO: 817357 - DNA, 33 bp, Homo sapien
cttttcatgcgtaaaacgtagattcattgagtg

SEQ ID NO: 817358 - DNA, 33 bp, Homo sapien
cttttcatgcgtaaaatgtagattcattgagtg

SEQ ID NO: 817359 - DNA, 33 bp, Homo sapien
cactgtcaagaattccagaaacgggttccgatt

SEQ ID NO: 817360 - DNA, 33 bp, Homo sapien
cactgtcaagaattcccgaaacgggttccgatt

SEQ ID NO: 817361 - DNA, 33 bp, Homo sapien
agaagctcgcctctcacgagcacagaactactc

SEQ ID NO: 817362 - DNA, 33 bp, Homo sapien
agaagctcgcctctcatgagcacagaactactc

SEQ ID NO: 817363 - DNA, 33 bp, Homo sapien
tacagacgtaaagacacgagcggcctgctgcag

SEQ ID NO: 817364 - DNA, 33 bp, Homo sapien
tacagacgtaaagacatgagcggcctgctgcag

SEQ ID NO: 817365 - DNA, 33 bp, Homo sapien
ctgagtcagatgacgcacagaatcgtctaacac

SEQ ID NO: 817366 - DNA, 33 bp, Homo sapien
ctgagtcagatgacgcgcagaatcgtctaacac

SEQ ID NO: 817367 - DNA, 33 bp, Homo sapien
gaaacataaaaagtaacgatggctgttaggaca

SEQ ID NO: 817368 - DNA, 33 bp, Homo sapien
gaaacataaaaagtaatgatggctgttaggaca

SEQ ID NO: 817369 - DNA, 33 bp, Homo sapien
aagtgcactgcaaattaaaacttctccaagaca

SEQ ID NO: 817370 - DNA, 33 bp, Homo sapien
aagtgcactgcaaattgaaacttctccaagaca

SEQ ID NO: 817371 - DNA, 33 bp, Homo sapien
aaagaagaaaattcaacacgatgttaataacaa

SEQ ID NO: 817372 - DNA, 33 bp, Homo sapien
aaagaagaaaattcaatacgatgttaataacaa

SEQ ID NO: 817373 - DNA, 33 bp, Homo sapien
aaaggccacgtcagcaaatggttaggtgcaatt

SEQ ID NO: 817374 - DNA, 33 bp, Homo sapien
aaaggccacgtcagcagatggttaggtgcaatt

SEQ ID NO: 817375 - DNA, 33 bp, Homo sapien
gcagcagaatggataccggagttaggagatgtc

SEQ ID NO: 817376 - DNA, 33 bp, Homo sapien
gcagcagaatggatactggagttaggagatgtc

SEQ ID NO: 817377 - DNA, 33 bp, Homo sapien
tgtgcaagtgaggggacataaaagaaggacccc

SEQ ID NO: 817378 - DNA, 33 bp, Homo sapien
tgtgcaagtgaggggatataaaagaaggacccc

SEQ ID NO: 817379 - DNA, 33 bp, Homo sapien
cactgcacagagctgaaagttagcaaagctcag

SEQ ID NO: 817380 - DNA, 33 bp, Homo sapien
cactgcacagagctgagagttagcaaagctcag

SEQ ID NO: 817381 - DNA, 33 bp, Homo sapien
caatggggagccacagcctatcccaatgtgcac

SEQ ID NO: 817382 - DNA, 33 bp, Homo sapien
caatggggagccacagtctatcccaatgtgcac

SEQ ID NO: 817383 - DNA, 33 bp, Homo sapien
aaggttgacatgttctaacactagggacagtaa

SEQ ID NO: 817384 - DNA, 33 bp, Homo sapien
aaggttgacatgttcttacactagggacagtaa

SEQ ID NO: 817385 - DNA, 33 bp, Homo sapien
gcgccatttcctattaagacgcctattatttgt

SEQ ID NO: 817386 - DNA, 33 bp, Homo sapien
gcgccatttcctattatgacgcctattatttgt

SEQ ID NO: 817387 - DNA, 33 bp, Homo sapien
cttctctgagattccaaatataaagtggtagag

SEQ ID NO: 817388 - DNA, 33 bp, Homo sapien
cttctctgagattccacatataaagtggtagag

SEQ ID NO: 817389 - DNA, 33 bp, Homo sapien
cagagctaggaaaatacgcagaatctgggcaat

SEQ ID NO: 817390 - DNA, 33 bp, Homo sapien
cagagctaggaaaatatgcagaatctgggcaat

SEQ ID NO: 817391 - DNA, 33 bp, Homo sapien
ctcccctccaggtgtccacagctctttaataca

SEQ ID NO: 817392 - DNA, 33 bp, Homo sapien
ctcccctccaggtgtctacagctctttaataca

SEQ ID NO: 817393 - DNA, 33 bp, Homo sapien
gttcttcaaatgagtcccttttgaattactggg

SEQ ID NO: 817394 - DNA, 33 bp, Homo sapien
gttcttcaaatgagtctcttttgaattactggg

SEQ ID NO: 817395 - DNA, 33 bp, Homo sapien
tagaggacttcgcttacggctctggcaatcttg

SEQ ID NO: 817396 - DNA, 33 bp, Homo sapien
tagaggacttcgcttatggctctggcaatcttg

SEQ ID NO: 817397 - DNA, 33 bp, Homo sapien
gtactccaaaaattccagcaatatgctattggt

SEQ ID NO: 817398 - DNA, 33 bp, Homo sapien
gtactccaaaaattccggcaatatgctattggt

SEQ ID NO: 817399 - DNA, 33 bp, Homo sapien
aatattgaaaacaaacagtcctgtatacaaaat

SEQ ID NO: 817400 - DNA, 33 bp, Homo sapien
aatattgaaaacaaacggtcctgtatacaaaat

SEQ ID NO: 817401 - DNA, 33 bp, Homo sapien
ccctcaattacagcagcaaaaacgtggggacct

SEQ ID NO: 817402 - DNA, 33 bp, Homo sapien
ccctcaattacagcaggaaaaacgtggggacct

SEQ ID NO: 817403 - DNA, 33 bp, Homo sapien
agaatcactgctgggacgcagccacaacacaac

SEQ ID NO: 817404 - DNA, 33 bp, Homo sapien
agaatcactgctgggatgcagccacaacacaac

SEQ ID NO: 817405 - DNA, 33 bp, Homo sapien
agttctcagatctccaaggtagtcacaatctca

SEQ ID NO: 817406 - DNA, 33 bp, Homo sapien
agttctcagatctccagggtagtcacaatctca

SEQ ID NO: 817407 - DNA, 33 bp, Homo sapien
agccagtcgcaaagacacacactgtagcattcc

SEQ ID NO: 817408 - DNA, 33 bp, Homo sapien
agccagtcgcaaagacgcacactgtagcattcc

SEQ ID NO: 817409 - DNA, 33 bp, Homo sapien
ttccttttcaatagacaaatgatacaaaatatt

SEQ ID NO: 817410 - DNA, 33 bp, Homo sapien
ttccttttcaatagacgaatgatacaaaatatt

SEQ ID NO: 817411 - DNA, 33 bp, Homo sapien
gtactagttctatgacccaggaaatatcgcttg

SEQ ID NO: 817412 - DNA, 33 bp, Homo sapien
gtactagttctatgactcaggaaatatcgcttg

SEQ ID NO: 817413 - DNA, 33 bp, Homo sapien
aaggactgttataaaaaccaactataggtcagg

SEQ ID NO: 817414 - DNA, 33 bp, Homo sapien
aaggactgttataaaagccaactataggtcagg

SEQ ID NO: 817415 - DNA, 33 bp, Homo sapien
cctgaagtgcgcatccgccgacttgccttcccc

SEQ ID NO: 817416 - DNA, 33 bp, Homo sapien
cctgaagtgcgcatcctccgacttgccttcccc

SEQ ID NO: 817417 - DNA, 33 bp, Homo sapien
tttggaattctgtaagaaagttttatctcttct

SEQ ID NO: 817418 - DNA, 33 bp, Homo sapien
tttggaattctgtaaggaagttttatctcttct

SEQ ID NO: 817419 - DNA, 33 bp, Homo sapien
atcccatcttacccacaatagagcagctgtaga

SEQ ID NO: 817420 - DNA, 33 bp, Homo sapien
atcccatcttacccacgatagagcagctgtaga

SEQ ID NO: 817421 - DNA, 33 bp, Homo sapien
tctggtagactgactaccttggtccttcggggc

SEQ ID NO: 817422 - DNA, 33 bp, Homo sapien
tctggtagactgactatcttggtccttcggggc

SEQ ID NO: 817423 - DNA, 33 bp, Homo sapien
aaataaatattgaactcaaaatctcggaagaaa

SEQ ID NO: 817424 - DNA, 33 bp, Homo sapien
aaataaatattgaactgaaaatctcggaagaaa

SEQ ID NO: 817425 - DNA, 33 bp, Homo sapien
cagccacacttatagcactaacaggtagaaact

SEQ ID NO: 817426 - DNA, 33 bp, Homo sapien
cagccacacttatagcgctaacaggtagaaact

SEQ ID NO: 817427 - DNA, 33 bp, Homo sapien
atatagctttaaaccactgattatctttaaaag

SEQ ID NO: 817428 - DNA, 33 bp, Homo sapien
atatagctttaaaccattgattatctttaaaag

SEQ ID NO: 817429 - DNA, 33 bp, Homo sapien
gtgaatgctttcatcaatctgactaatatgaaa

SEQ ID NO: 817430 - DNA, 33 bp, Homo sapien
gtgaatgctttcatcagtctgactaatatgaaa

SEQ ID NO: 817431 - DNA, 33 bp, Homo sapien
ggtctgattttcaacacaatgttccctatggcc

SEQ ID NO: 817432 - DNA, 33 bp, Homo sapien
ggtctgattttcaacataatgttccctatggcc

SEQ ID NO: 817433 - DNA, 33 bp, Homo sapien
gctactcgggattgagacccagagcgggaaatg

SEQ ID NO: 817434 - DNA, 33 bp, Homo sapien
gctactcgggattgaggcccagagcgggaaatg

SEQ ID NO: 817435 - DNA, 33 bp, Homo sapien
ctgggcttccgttgtcccttgcttcctatgagt

SEQ ID NO: 817436 - DNA, 33 bp, Homo sapien
ctgggcttccgttgtcgcttgcttcctatgagt

SEQ ID NO: 817437 - DNA, 33 bp, Homo sapien
agctattggctgtcagaacacaaaggcagctgc

SEQ ID NO: 817438 - DNA, 33 bp, Homo sapien
agctattggctgtcaggacacaaaggcagctgc

SEQ ID NO: 817439 - DNA, 33 bp, Homo sapien
tgtccatctgtcagaacgcacttgtctgttttc

SEQ ID NO: 817440 - DNA, 33 bp, Homo sapien
tgtccatctgtcagaatgcacttgtctgttttc

SEQ ID NO: 817441 - DNA, 33 bp, Homo sapien
gacagatgttcctaccaatgggtgttttcacac

SEQ ID NO: 817442 - DNA, 33 bp, Homo sapien
gacagatgttcctaccgatgggtgttttcacac

SEQ ID NO: 817443 - DNA, 33 bp, Homo sapien
tctgtccctatgtccacaagtccatcagtctga

SEQ ID NO: 817444 - DNA, 33 bp, Homo sapien
tctgtccctatgtccataagtccatcagtctga

SEQ ID NO: 817445 - DNA, 33 bp, Homo sapien
gaacatccatctgtcacaactgctgtacattgg

SEQ ID NO: 817446 - DNA, 33 bp, Homo sapien
gaacatccatctgtcagaactgctgtacattgg

SEQ ID NO: 817447 - DNA, 33 bp, Homo sapien
tgtctgtctgacaagccgactttctgtatgttc

SEQ ID NO: 817448 - DNA, 33 bp, Homo sapien
tgtctgtctgacaagctgactttctgtatgttc

SEQ ID NO: 817449 - DNA, 33 bp, Homo sapien
ttccttcggcgcttcaatacttttcttttcttt

SEQ ID NO: 817450 - DNA, 33 bp, Homo sapien
ttccttcggcgcttcagtacttttcttttcttt

SEQ ID NO: 817451 - DNA, 33 bp, Homo sapien
aggctgtttttagtgaataagtctaccagcttc

SEQ ID NO: 817452 - DNA, 33 bp, Homo sapien
aggctgtttttagtgagtaagtctaccagcttc

SEQ ID NO: 817453 - DNA, 33 bp, Homo sapien
aaacaaacacacatggcaagaagttttagattt

SEQ ID NO: 817454 - DNA, 33 bp, Homo sapien
aaacaaacacacatggtaagaagttttagattt

SEQ ID NO: 817455 - DNA, 33 bp, Homo sapien
ggattttgggaagatacaattcaacccataaca

SEQ ID NO: 817456 - DNA, 33 bp, Homo sapien
ggattttgggaagatagaattcaacccataaca

SEQ ID NO: 817457 - DNA, 33 bp, Homo sapien
gggacaaaggtagacacaggaaagcccactagg

SEQ ID NO: 817458 - DNA, 33 bp, Homo sapien
gggacaaaggtagacagaggaaagcccactagg

SEQ ID NO: 817459 - DNA, 33 bp, Homo sapien
catctggttcaacccaagtcatttctccctggc

SEQ ID NO: 817460 - DNA, 33 bp, Homo sapien
catctggttcaacccacgtcatttctccctggc

SEQ ID NO: 817461 - DNA, 33 bp, Homo sapien
gtctgtgaaggaatgacggctggaccttccaga

SEQ ID NO: 817462 - DNA, 33 bp, Homo sapien
gtctgtgaaggaatgatggctggaccttccaga

SEQ ID NO: 817463 - DNA, 33 bp, Homo sapien
agctcagtccagagcaaaactgagggtcttccc

SEQ ID NO: 817464 - DNA, 33 bp, Homo sapien
agctcagtccagagcagaactgagggtcttccc

SEQ ID NO: 817465 - DNA, 33 bp, Homo sapien
gagcaagggagcgaccagagcagtcagaggaga

SEQ ID NO: 817466 - DNA, 33 bp, Homo sapien
gagcaagggagcgaccggagcagtcagaggaga

SEQ ID NO: 817467 - DNA, 33 bp, Homo sapien
aaggttacaaagtgtacgagtctatttatataa

SEQ ID NO: 817468 - DNA, 33 bp, Homo sapien
aaggttacaaagtgtatgagtctatttatataa

SEQ ID NO: 817469 - DNA, 33 bp, Homo sapien
ccctctatgagaagctcagattaaaaaggagtt

SEQ ID NO: 817470 - DNA, 33 bp, Homo sapien
ccctctatgagaagcttagattaaaaaggagtt

SEQ ID NO: 817471 - DNA, 33 bp, Homo sapien
tggagcaggtactatacaagtttacaagtttta

SEQ ID NO: 817472 - DNA, 33 bp, Homo sapien
tggagcaggtactatagaagtttacaagtttta

SEQ ID NO: 817473 - DNA, 33 bp, Homo sapien
agacactgaaatattaagaggttaagaagaata

SEQ ID NO: 817474 - DNA, 33 bp, Homo sapien
agacactgaaatattacgaggttaagaagaata

SEQ ID NO: 817475 - DNA, 33 bp, Homo sapien
ggacctctgtaacttccactatggagtgatctc

SEQ ID NO: 817476 - DNA, 33 bp, Homo sapien
ggacctctgtaacttctactatggagtgatctc

SEQ ID NO: 817477 - DNA, 33 bp, Homo sapien
ataagttctgataatgcagctcccacttataag

SEQ ID NO: 817478 - DNA, 33 bp, Homo sapien
ataagttctgataatgtagctcccacttataag

SEQ ID NO: 817479 - DNA, 33 bp, Homo sapien
cactaaaggcaatcataacaagagcaaaaattg

SEQ ID NO: 817480 - DNA, 33 bp, Homo sapien
cactaaaggcaatcatgacaagagcaaaaattg

SEQ ID NO: 817481 - DNA, 33 bp, Homo sapien
atcctctctggaatccaaaacgtcaagttcaca

SEQ ID NO: 817482 - DNA, 33 bp, Homo sapien
atcctctctggaatccgaaacgtcaagttcaca

SEQ ID NO: 817483 - DNA, 33 bp, Homo sapien
gagtgggtacaaagaaatgtgatattgtaacat

SEQ ID NO: 817484 - DNA, 33 bp, Homo sapien
gagtgggtacaaagaactgtgatattgtaacat

SEQ ID NO: 817485 - DNA, 33 bp, Homo sapien
tgtccgcctgtttcacaagttcttggtccagtc

SEQ ID NO: 817486 - DNA, 33 bp, Homo sapien
tgtccgcctgtttcaccagttcttggtccagtc

SEQ ID NO: 817487 - DNA, 33 bp, Homo sapien
ccttggaccttctctaccgtgttttgacacagc

SEQ ID NO: 817488 - DNA, 33 bp, Homo sapien
ccttggaccttctctatcgtgttttgacacagc

SEQ ID NO: 817489 - DNA, 33 bp, Homo sapien
accaccatttttgttccagctggtgctaaaagc

SEQ ID NO: 817490 - DNA, 33 bp, Homo sapien
accaccatttttgttctagctggtgctaaaagc

SEQ ID NO: 817491 - DNA, 33 bp, Homo sapien
aaaataactactaagcagccgggtgccatggct

SEQ ID NO: 817492 - DNA, 33 bp, Homo sapien
aaaataactactaagcggccgggtgccatggct

SEQ ID NO: 817493 - DNA, 33 bp, Homo sapien
ggggaactcaacacaacgtttggaagctggata

SEQ ID NO: 817494 - DNA, 33 bp, Homo sapien
ggggaactcaacacaatgtttggaagctggata

SEQ ID NO: 817495 - DNA, 33 bp, Homo sapien
atcagacaatcacttacggctttgtttgaatct

SEQ ID NO: 817496 - DNA, 33 bp, Homo sapien
atcagacaatcacttatggctttgtttgaatct

SEQ ID NO: 817497 - DNA, 33 bp, Homo sapien
tttaatccaaaatacaataaccacaatagattg

SEQ ID NO: 817498 - DNA, 33 bp, Homo sapien
tttaatccaaaatacagtaaccacaatagattg

SEQ ID NO: 817499 - DNA, 33 bp, Homo sapien
atctgtttcagtcgcacagaccttgggacagtt

SEQ ID NO: 817500 - DNA, 33 bp, Homo sapien
atctgtttcagtcgcagagaccttgggacagtt

SEQ ID NO: 817501 - DNA, 33 bp, Homo sapien
cgctggggtgttattaaccactctgtcaaggtg

SEQ ID NO: 817502 - DNA, 33 bp, Homo sapien
cgctggggtgttattagccactctgtcaaggtg

SEQ ID NO: 817503 - DNA, 33 bp, Homo sapien
caagagtgggttgtaaatgactgcgacgccgat

SEQ ID NO: 817504 - DNA, 33 bp, Homo sapien
caagagtgggttgtaagtgactgcgacgccgat

SEQ ID NO: 817505 - DNA, 33 bp, Homo sapien; identical to SEQ ID NO: 817503

SEQ ID NO: 817506 - DNA, 33 bp, Homo sapien; identical to SEQ ID NO: 817504

SEQ ID NO: 817507 - DNA, 33 bp, Homo sapien
agatgaggggtcctgccgaaggaagtggtgtcc

SEQ ID NO: 817508 - DNA, 33 bp, Homo sapien
agatgaggggtcctgctgaaggaagtggtgtcc

SEQ ID NO: 817509 - DNA, 33 bp, Homo sapien
cactgcacggcgtgcacacctactctgaatgaa

SEQ ID NO: 817510 - DNA, 33 bp, Homo sapien
cactgcacggcgtgcatacctactctgaatgaa

SEQ ID NO: 817511 - DNA, 33 bp, Homo sapien
gaaatgagccctaagcaacttaatctgatgcga

SEQ ID NO: 817512 - DNA, 33 bp, Homo sapien
gaaatgagccctaagcgacttaatctgatgcga

SEQ ID NO: 817513 - DNA, 33 bp, Homo sapien
aaagccatcatgcttgaaatagcgccttcctgc

SEQ ID NO: 817514 - DNA, 33 bp, Homo sapien
aaagccatcatgcttggaatagcgccttcctgc

SEQ ID NO: 817515 - DNA, 33 bp, Homo sapien
tgtaaatccttccaccacaaaagcactcttcct

SEQ ID NO: 817516 - DNA, 33 bp, Homo sapien
tgtaaatccttccaccgcaaaagcactcttcct

SEQ ID NO: 817517 - DNA, 33 bp, Homo sapien
gatggtgagacacacaaaggaagagacccgagc

SEQ ID NO: 817518 - DNA, 33 bp, Homo sapien
gatggtgagacacacagaggaagagacccgagc

SEQ ID NO: 817519 - DNA, 33 bp, Homo sapien
cagagcaatgcgggagcagtcagtgaagctgaa

SEQ ID NO: 817520 - DNA, 33 bp, Homo sapien
cagagcaatgcgggagtagtcagtgaagctgaa

SEQ ID NO: 817521 - DNA, 33 bp, Homo sapien
tgattatttcactcatcatgaccatgtttcaac

SEQ ID NO: 817522 - DNA, 33 bp, Homo sapien
tgattatttcactcatgatgaccatgtttcaac

SEQ ID NO: 817523 - DNA, 33 bp, Homo sapien
gcgtatatcgtaaggcacacaacgtcgtatttt

SEQ ID NO: 817524 - DNA, 33 bp, Homo sapien
gcgtatatcgtaaggcgcacaacgtcgtatttt

SEQ ID NO: 817525 - DNA, 33 bp, Homo sapien
gagtacaatggtgccaactcagttcactgtaac

SEQ ID NO: 817526 - DNA, 33 bp, Homo sapien
gagtacaatggtgccacctcagttcactgtaac

SEQ ID NO: 817527 - DNA, 33 bp, Homo sapien
agagtgacatggtatccgagtgtttttcggatt

SEQ ID NO: 817528 - DNA, 33 bp, Homo sapien
agagtgacatggtatctgagtgtttttcggatt

SEQ ID NO: 817529 - DNA, 33 bp, Homo sapien
aacccagaagtaaccccgcacaacgacaatcat

SEQ ID NO: 817530 - DNA, 33 bp, Homo sapien
aacccagaagtaaccctgcacaacgacaatcat

SEQ ID NO: 817531 - DNA, 33 bp, Homo sapien
caaaagatgaataaaaccaagagtagcttctgt

SEQ ID NO: 817532 - DNA, 33 bp, Homo sapien
caaaagatgaataaaatcaagagtagcttctgt

SEQ ID NO: 817533 - DNA, 33 bp, Homo sapien
gacttactctggtagaactgggatgttttgcat

SEQ ID NO: 817534 - DNA, 33 bp, Homo sapien
gacttactctggtagatctgggatgttttgcat

SEQ ID NO: 817535 - DNA, 33 bp, Homo sapien
agctcatgccaagaaacccaaactagcataaac

SEQ ID NO: 817536 - DNA, 33 bp, Homo sapien
agctcatgccaagaaatccaaactagcataaac

SEQ ID NO: 817537 - DNA, 33 bp, Homo sapien
ggtgccaggttttgaaaaggtttatgctagttt

SEQ ID NO: 817538 - DNA, 33 bp, Homo sapien
ggtgccaggttttgaagaggtttatgctagttt

SEQ ID NO: 817539 - DNA, 33 bp, Homo sapien
agaacctattttcttcacagtaaaaacaaatcc

SEQ ID NO: 817540 - DNA, 33 bp, Homo sapien
agaacctattttcttctcagtaaaaacaaatcc

SEQ ID NO: 817541 - DNA, 33 bp, Homo sapien
ggacgttctttgtcaagagagcgagttaaccgg

SEQ ID NO: 817542 - DNA, 33 bp, Homo sapien
ggacgttctttgtcaatagagcgagttaaccgg

SEQ ID NO: 817543 - DNA, 33 bp, Homo sapien
acctatagaacgagtgaaaggcagagattgtcc

SEQ ID NO: 817544 - DNA, 33 bp, Homo sapien
acctatagaacgagtggaaggcagagattgtcc

SEQ ID NO: 817545 - DNA, 33 bp, Homo sapien
gttgcggggtagtcaccgagtgtgcaaaaaacg

SEQ ID NO: 817546 - DNA, 33 bp, Homo sapien
gttgcggggtagtcactgagtgtgcaaaaaacg

SEQ ID NO: 817547 - DNA, 33 bp, Homo sapien
tagggcagctccaagaagttacctaagaaactt

SEQ ID NO: 817548 - DNA, 33 bp, Homo sapien
tagggcagctccaagaggttacctaagaaactt

SEQ ID NO: 817549 - DNA, 33 bp, Homo sapien
aacagaatctcatggccagaaggatgagttagg

SEQ ID NO: 817550 - DNA, 33 bp, Homo sapien
aacagaatctcatggctagaaggatgagttagg

SEQ ID NO: 817551 - DNA, 33 bp, Homo sapien
gagactgtggactaaccgtctttgtgcactaca

SEQ ID NO: 817552 - DNA, 33 bp, Homo sapien
gagactgtggactaactgtctttgtgcactaca

SEQ ID NO: 817553 - DNA, 33 bp, Homo sapien
aaatatgccagttcctcagaaacaaacaaaaaa

SEQ ID NO: 817554 - DNA, 33 bp, Homo sapien
aaatatgccagttcctgagaaacaaacaaaaaa

SEQ ID NO: 817555 - DNA, 33 bp, Homo sapien
atcctgcagacatcaaaaagataagagaatact

SEQ ID NO: 817556 - DNA, 33 bp, Homo sapien
atcctgcagacatcaataagataagagaatact

SEQ ID NO: 817557 - DNA, 33 bp, Homo sapien
ccggcaactactatccagcatatataaagatct

SEQ ID NO: 817558 - DNA, 33 bp, Homo sapien
ccggcaactactatccggcatatataaagatct

SEQ ID NO: 817559 - DNA, 33 bp, Homo sapien
acctatgctatgactccaatttatttcacaaaa

SEQ ID NO: 817560 - DNA, 33 bp, Homo sapien
acctatgctatgactcgaatttatttcacaaaa

SEQ ID NO: 817561 - DNA, 33 bp, Homo sapien
catttctgatttgataccttctttcaccaaaaa

SEQ ID NO: 817562 - DNA, 33 bp, Homo sapien
catttctgatttgatatcttctttcaccaaaaa

SEQ ID NO: 817563 - DNA, 33 bp, Homo sapien
tctgtgcacggttctccagcctcttaacagaag

SEQ ID NO: 817564 - DNA, 33 bp, Homo sapien
tctgtgcacggttctctagcctcttaacagaag

SEQ ID NO: 817565 - DNA, 33 bp, Homo sapien; identical to SEQ ID NO: 817563

SEQ ID NO: 817566 - DNA, 33 bp, Homo sapien; identical to SEQ ID NO: 817564

SEQ ID NO: 817567 - DNA, 33 bp, Homo sapien
ttacattccctgactacgacattgcttgctgga

SEQ ID NO: 817568 - DNA, 33 bp, Homo sapien
ttacattccctgactatgacattgcttgctgga

SEQ ID NO: 817569 - DNA, 33 bp, Homo sapien
gttgaatacttctgaaccatctatcaggttgat

SEQ ID NO: 817570 - DNA, 33 bp, Homo sapien
gttgaatacttctgaagcatctatcaggttgat

SEQ ID NO: 817571 - DNA, 33 bp, Homo sapien
ggagtaactgacaacactgagcattaataaact

SEQ ID NO: 817572 - DNA, 33 bp, Homo sapien
ggagtaactgacaacagtgagcattaataaact

SEQ ID NO: 817573 - DNA, 33 bp, Homo sapien
caaatatcttctcccactaggtagtttctattt

SEQ ID NO: 817574 - DNA, 33 bp, Homo sapien
caaatatcttctcccagtaggtagtttctattt

SEQ ID NO: 817575 - DNA, 33 bp, Homo sapien
aatccatttacactataagacaaatacaaagtc

SEQ ID NO: 817576 - DNA, 33 bp, Homo sapien
aatccatttacactattagacaaatacaaagtc

SEQ ID NO: 817577 - DNA, 33 bp, Homo sapien
gaccactggagtaggccacataatgaagatgga

SEQ ID NO: 817578 - DNA, 33 bp, Homo sapien
gaccactggagtaggctacataatgaagatgga

SEQ ID NO: 817579 - DNA, 33 bp, Homo sapien
cctgctattaggagagaactgggtcaaaagctc

SEQ ID NO: 817580 - DNA, 33 bp, Homo sapien
cctgctattaggagaggactgggtcaaaagctc

SEQ ID NO: 817581 - DNA, 33 bp, Homo sapien
atggttgctttgaaaacagtttcacagtttatt

SEQ ID NO: 817582 - DNA, 33 bp, Homo sapien
atggttgctttgaaaatagtttcacagtttatt

SEQ ID NO: 817583 - DNA, 33 bp, Homo sapien
agaaaggtaaacaggcacatttcaagactaaaa

SEQ ID NO: 817584 - DNA, 33 bp, Homo sapien
agaaaggtaaacaggcgcatttcaagactaaaa

SEQ ID NO: 817585 - DNA, 33 bp, Homo sapien
tttgaaaacacgtgcacagaagatgtttcaaga

SEQ ID NO: 817586 - DNA, 33 bp, Homo sapien
tttgaaaacacgtgcatagaagatgtttcaaga

SEQ ID NO: 817587 - DNA, 33 bp, Homo sapien
gtgaaggtactaaatacgacaacatcttcagta

SEQ ID NO: 817588 - DNA, 33 bp, Homo sapien
gtgaaggtactaaatatgacaacatcttcagta

SEQ ID NO: 817589 - DNA, 33 bp, Homo sapien
gtggcagggagtttgccaagaccatgctccgcg

SEQ ID NO: 817590 - DNA, 33 bp, Homo sapien
gtggcagggagtttgcgaagaccatgctccgcg

SEQ ID NO: 817591 - DNA, 33 bp, Homo sapien
acatccagacaaccacactaaccgtgtccttga

SEQ ID NO: 817592 - DNA, 33 bp, Homo sapien
acatccagacaaccacgctaaccgtgtccttga

SEQ ID NO: 817593 - DNA, 33 bp, Homo sapien
acaagcagccagatacaggataaacaaaagcac

SEQ ID NO: 817594 - DNA, 33 bp, Homo sapien
acaagcagccagatacgggataaacaaaagcac

SEQ ID NO: 817595 - DNA, 33 bp, Homo sapien
gcctgcacagactccaatactcctcggcatcag

SEQ ID NO: 817596 - DNA, 33 bp, Homo sapien
gcctgcacagactccagtactcctcggcatcag

SEQ ID NO: 817597 - DNA, 33 bp, Homo sapien
ttgctgttattttgcaagagtccgttccgagtg

SEQ ID NO: 817598 - DNA, 33 bp, Homo sapien
ttgctgttattttgcaggagtccgttccgagtg

SEQ ID NO: 817599 - DNA, 33 bp, Homo sapien
aagctgtccgcttcaacggtgagtgggtgcctg

SEQ ID NO: 817600 - DNA, 33 bp, Homo sapien
aagctgtccgcttcaatggtgagtgggtgcctg

SEQ ID NO: 817601 - DNA, 33 bp, Homo sapien
tgattgatgcggtgtacgccattgcccacgccc

SEQ ID NO: 817602 - DNA, 33 bp, Homo sapien
tgattgatgcggtgtatgccattgcccacgccc

SEQ ID NO: 817603 - DNA, 33 bp, Homo sapien
tcctatgtttcatcacccttaacacagggaatt

SEQ ID NO: 817604 - DNA, 33 bp, Homo sapien
tcctatgtttcatcactcttaacacagggaatt

SEQ ID NO: 817605 - DNA, 33 bp, Homo sapien
gtttctgctagaccacagtataggtatttctga

SEQ ID NO: 817606 - DNA, 33 bp, Homo sapien
gtttctgctagaccacggtataggtatttctga

SEQ ID NO: 817607 - DNA, 33 bp, Homo sapien
attcattatgccaaacaccctacattttattta

SEQ ID NO: 817608 - DNA, 33 bp, Homo sapien
attcattatgccaaactccctacattttattta

SEQ ID NO: 817609 - DNA, 33 bp, Homo sapien
agatgaaactatgaggaatgtattgtagtgatt

SEQ ID NO: 817610 - DNA, 33 bp, Homo sapien
agatgaaactatgagggatgtattgtagtgatt

SEQ ID NO: 817611 - DNA, 33 bp, Homo sapien
gatggttatgggaatacaaagccataatataaa

SEQ ID NO: 817612 - DNA, 33 bp, Homo sapien
gatggttatgggaatagaaagccataatataaa

SEQ ID NO: 817613 - DNA, 33 bp, Homo sapien
aagggacatgaaatgacgtggtttttgtttaaa

SEQ ID NO: 817614 - DNA, 33 bp, Homo sapien
aagggacatgaaatgatgtggtttttgtttaaa

SEQ ID NO: 817615 - DNA, 33 bp, Homo sapien
gaaagagaagagctccaccaaacacaggatgtc

SEQ ID NO: 817616 - DNA, 33 bp, Homo sapien
gaaagagaagagctccgccaaacacaggatgtc

SEQ ID NO: 817617 - DNA, 33 bp, Homo sapien
taatgacaagaaataccgagaaagaataaactg

SEQ ID NO: 817618 - DNA, 33 bp, Homo sapien
taatgacaagaaatacggagaaagaataaactg

SEQ ID NO: 817619 - DNA, 33 bp, Homo sapien
atcttcatttggaagcaattataataagtgatt

SEQ ID NO: 817620 - DNA, 33 bp, Homo sapien
atcttcatttggaagcgattataataagtgatt

SEQ ID NO: 817621 - DNA, 33 bp, Homo sapien
caagagttgggtgaaactgaactgcagcgatag

SEQ ID NO: 817622 - DNA, 33 bp, Homo sapien
caagagttgggtgaaattgaactgcagcgatag

SEQ ID NO: 817623 - DNA, 33 bp, Homo sapien
ggtatttctacatctcacacttgccagctcttg

SEQ ID NO: 817624 - DNA, 33 bp, Homo sapien
ggtatttctacatctcgcacttgccagctcttg

SEQ ID NO: 817625 - DNA, 33 bp, Homo sapien
atcttgtttccaaatactattacattctgaggc

SEQ ID NO: 817626 - DNA, 33 bp, Homo sapien
atcttgtttccaaatattattacattctgaggc

SEQ ID NO: 817627 - DNA, 33 bp, Homo sapien
agtgggagtaggggaaaacaggcaaagttcctg

SEQ ID NO: 817628 - DNA, 33 bp, Homo sapien
agtgggagtaggggaagacaggcaaagttcctg

SEQ ID NO: 817629 - DNA, 33 bp, Homo sapien
gtaaacagttgacgtgaattattagaatcctga

SEQ ID NO: 817630 - DNA, 33 bp, Homo sapien
gtaaacagttgacgtgcattattagaatcctga

SEQ ID NO: 817631 - DNA, 33 bp, Homo sapien
atcacagtcacatgaaataaagaaatttaagaa

SEQ ID NO: 817632 - DNA, 33 bp, Homo sapien
atcacagtcacatgaagtaaagaaatttaagaa

SEQ ID NO: 817633 - DNA, 33 bp, Homo sapien
gctttatctcctttaaaaaatctctgatactgg

SEQ ID NO: 817634 - DNA, 33 bp, Homo sapien
gctttatctcctttaagaaatctctgatactgg

SEQ ID NO: 817635 - DNA, 33 bp, Homo sapien
taatagctcaaaagaactaagtattccagattt

SEQ ID NO: 817636 - DNA, 33 bp, Homo sapien
taatagctcaaaagaattaagtattccagattt

SEQ ID NO: 817637 - DNA, 33 bp, Homo sapien; identical to SEQ ID NO: 817635

SEQ ID NO: 817638 - DNA, 33 bp, Homo sapien; identical to SEQ ID NO: 817636

SEQ ID NO: 817639 - DNA, 33 bp, Homo sapien
caagatgcaatgcagaatcacgtgaaatacatg

SEQ ID NO: 817640 - DNA, 33 bp, Homo sapien
caagatgcaatgcagagtcacgtgaaatacatg

SEQ ID NO: 817641 - DNA, 33 bp, Homo sapien
gaaggctcaggcaagaaaggatccacttctaag

SEQ ID NO: 817642 - DNA, 33 bp, Homo sapien
gaaggctcaggcaagagaggatccacttctaag

SEQ ID NO: 817643 - DNA, 33 bp, Homo sapien
tgaggtttttaccagcacatgcctacttaacac

SEQ ID NO: 817644 - DNA, 33 bp, Homo sapien
tgaggtttttaccagcgcatgcctacttaacac

SEQ ID NO: 817645 - DNA, 33 bp, Homo sapien
tgactattgacactgcccgcaatgttctcaact

SEQ ID NO: 817646 - DNA, 33 bp, Homo sapien
tgactattgacactgctcgcaatgttctcaact

SEQ ID NO: 817647 - DNA, 33 bp, Homo sapien
aagagcattcaatagagatgtgtctactccaga

SEQ ID NO: 817648 - DNA, 33 bp, Homo sapien
aagagcattcaatagatatgtgtctactccaga

SEQ ID NO: 817649 - DNA, 33 bp, Homo sapien
caaaaaagcacactctaacctcataccatgctc

SEQ ID NO: 817650 - DNA, 33 bp, Homo sapien
caaaaaagcacactctgacctcataccatgctc

SEQ ID NO: 817651 - DNA, 33 bp, Homo sapien
agaatgggaaaaaaacaaacagcgccttcttat

SEQ ID NO: 817652 - DNA, 33 bp, Homo sapien
agaatgggaaaaaaacgaacagcgccttcttat

SEQ ID NO: 817653 - DNA, 33 bp, Homo sapien
gttcacaaaatgtcaaggcagtgagaggtaaaa

SEQ ID NO: 817654 - DNA, 33 bp, Homo sapien
gttcacaaaatgtcaatgcagtgagaggtaaaa

SEQ ID NO: 817655 - DNA, 33 bp, Homo sapien
cagtgagaggtaaaaacgagccactcttctccc

SEQ ID NO: 817656 - DNA, 33 bp, Homo sapien
cagtgagaggtaaaaatgagccactcttctccc

SEQ ID NO: 817657 - DNA, 33 bp, Homo sapien
gcagagcgtgcaacccacaggaatgctcccagc

SEQ ID NO: 817658 - DNA, 33 bp, Homo sapien
gcagagcgtgcaacccgcaggaatgctcccagc

SEQ ID NO: 817659 - DNA, 33 bp, Homo sapien
attttatttgtcaaaaaaggtacatatcacaaa

SEQ ID NO: 817660 - DNA, 33 bp, Homo sapien
attttatttgtcaaaagaggtacatatcacaaa

SEQ ID NO: 817661 - DNA, 33 bp, Homo sapien
agcgcatggtgcatgacgggacgcgctgctcct

SEQ ID NO: 817662 - DNA, 33 bp, Homo sapien
agcgcatggtgcatgatgggacgcgctgctcct

SEQ ID NO: 817663 - DNA, 33 bp, Homo sapien
gagaagcaggaatgaaaagagaagtgctgttaa

SEQ ID NO: 817664 - DNA, 33 bp, Homo sapien
gagaagcaggaatgaagagagaagtgctgttaa

SEQ ID NO: 817665 - DNA, 33 bp, Homo sapien
gtcttcttctcgctcaagggaagcacagttccc

SEQ ID NO: 817666 - DNA, 33 bp, Homo sapien
gtcttcttctcgctcaggggaagcacagttccc

SEQ ID NO: 817667 - DNA, 33 bp, Homo sapien
atcagagacttggggaccatcagagaaggacat

SEQ ID NO: 817668 - DNA, 33 bp, Homo sapien
atcagagacttggggagcatcagagaaggacat

SEQ ID NO: 817669 - DNA, 33 bp, Homo sapien
gccccagccacaggaaacgtgagctagcgccca

SEQ ID NO: 817670 - DNA, 33 bp, Homo sapien
gccccagccacaggaagcgtgagctagcgccca

SEQ ID NO: 817671 - DNA, 33 bp, Homo sapien
aaaagaatccacggtacaacttgtagagttagg

SEQ ID NO: 817672 - DNA, 33 bp, Homo sapien
aaaagaatccacggtataacttgtagagttagg

SEQ ID NO: 817673 - DNA, 33 bp, Homo sapien
attaacagcaaacaataagaatttgtctctgct

SEQ ID NO: 817674 - DNA, 33 bp, Homo sapien
attaacagcaaacaatgagaatttgtctctgct

SEQ ID NO: 817675 - DNA, 33 bp, Homo sapien
tttcatgtcacatacaagtatctaggattttca

SEQ ID NO: 817676 - DNA, 33 bp, Homo sapien
tttcatgtcacatacaggtatctaggattttca

SEQ ID NO: 817677 - DNA, 33 bp, Homo sapien
ctgtactttgtcctgacgggctacctttggcat

SEQ ID NO: 817678 - DNA, 33 bp, Homo sapien
ctgtactttgtcctgatgggctacctttggcat

SEQ ID NO: 817679 - DNA, 33 bp, Homo sapien
tgatcttctccgcctacgccgagtacttccccg

SEQ ID NO: 817680 - DNA, 33 bp, Homo sapien
tgatcttctccgcctatgccgagtacttccccg

SEQ ID NO: 817681 - DNA, 33 bp, Homo sapien
gcctgagatgagaacccgcggagcatgctaggg

SEQ ID NO: 817682 - DNA, 33 bp, Homo sapien
gcctgagatgagaacctgcggagcatgctaggg

SEQ ID NO: 817683 - DNA, 33 bp, Homo sapien
tctacagcggttaagaccagttcattctatcct

SEQ ID NO: 817684 - DNA, 33 bp, Homo sapien
tctacagcggttaagagcagttcattctatcct

SEQ ID NO: 817685 - DNA, 33 bp, Homo sapien
tcacatcgtggccaaagaatgacactgtgggaa

SEQ ID NO: 817686 - DNA, 33 bp, Homo sapien
tcacatcgtggccaaataatgacactgtgggaa

SEQ ID NO: 817687 - DNA, 33 bp, Homo sapien
gtgtatccataatttacgtaagtcgctctgaat

SEQ ID NO: 817688 - DNA, 33 bp, Homo sapien
gtgtatccataatttatgtaagtcgctctgaat

SEQ ID NO: 817689 - DNA, 33 bp, Homo sapien
tagaagaaaatgtagcgaggcacctttttatca

SEQ ID NO: 817690 - DNA, 33 bp, Homo sapien
tagaagaaaatgtagctaggcacctttttatca

SEQ ID NO: 817691 - DNA, 33 bp, Homo sapien
agaccacggtgttgacaaggcttaatttgatca

SEQ ID NO: 817692 - DNA, 33 bp, Homo sapien
agaccacggtgttgacgaggcttaatttgatca

SEQ ID NO: 817693 - DNA, 33 bp, Homo sapien
ccaggaaggaaaccgaagtagactccacggcca

SEQ ID NO: 817694 - DNA, 33 bp, Homo sapien
ccaggaaggaaaccgatgtagactccacggcca

SEQ ID NO: 817695 - DNA, 33 bp, Homo sapien
ttctttctggaaatgcagaccgtttctctctgt

SEQ ID NO: 817696 - DNA, 33 bp, Homo sapien
ttctttctggaaatgcggaccgtttctctctgt

SEQ ID NO: 817697 - DNA, 33 bp, Homo sapien
cacccacatcatgtgcacttcagacaaaggact

SEQ ID NO: 817698 - DNA, 33 bp, Homo sapien
cacccacatcatgtgcgcttcagacaaaggact

SEQ ID NO: 817699 - DNA, 33 bp, Homo sapien
ctcttacaaatcaacaagaaacaatccagcaat

SEQ ID NO: 817700 - DNA, 33 bp, Homo sapien
ctcttacaaatcaacaggaaacaatccagcaat

SEQ ID NO: 817701 - DNA, 33 bp, Homo sapien
agtgtaaggatatccacggctgcattataagaa

SEQ ID NO: 817702 - DNA, 33 bp, Homo sapien
agtgtaaggatatccagggctgcattataagaa

SEQ ID NO: 817703 - DNA, 33 bp, Homo sapien
cagctccctggagagacgtctgcggttccacct

SEQ ID NO: 817704 - DNA, 33 bp, Homo sapien
cagctccctggagagatgtctgcggttccacct

SEQ ID NO: 817705 - DNA, 33 bp, Homo sapien
aacctgcagtttaagacaaggaggctgggtaag

SEQ ID NO: 817706 - DNA, 33 bp, Homo sapien
aacctgcagtttaagagaaggaggctgggtaag

SEQ ID NO: 817707 - DNA, 33 bp, Homo sapien
tcctcctctttcacaaaaccggaaatcccttgt

SEQ ID NO: 817708 - DNA, 33 bp, Homo sapien
tcctcctctttcacaagaccggaaatcccttgt

SEQ ID NO: 817709 - DNA, 33 bp, Homo sapien
taagccaagaaaaggaaatttgctggcacacgc

SEQ ID NO: 817710 - DNA, 33 bp, Homo sapien
taagccaagaaaaggagatttgctggcacacgc

SEQ ID NO: 817711 - DNA, 33 bp, Homo sapien
cctcatgtgccagacaaagattttaaataaatt

SEQ ID NO: 817712 - DNA, 33 bp, Homo sapien
cctcatgtgccagacagagattttaaataaatt

SEQ ID NO: 817713 - DNA, 33 bp, Homo sapien
tataattattgctttacgcatctatagactaaa

SEQ ID NO: 817714 - DNA, 33 bp, Homo sapien
tataattattgctttatgcatctatagactaaa

SEQ ID NO: 817715 - DNA, 33 bp, Homo sapien
gtgtcatttaataggcacggtagtcctggaagc

SEQ ID NO: 817716 - DNA, 33 bp, Homo sapien
gtgtcatttaataggcgcggtagtcctggaagc

SEQ ID NO: 817717 - DNA, 33 bp, Homo sapien
gttgagtgtttcagcaagctcgtactggttgca

SEQ ID NO: 817718 - DNA, 33 bp, Homo sapien
gttgagtgtttcagcaggctcgtactggttgca

SEQ ID NO: 817719 - DNA, 33 bp, Homo sapien
attttaacatcaggaaagttcacataaaaagtc

SEQ ID NO: 817720 - DNA, 33 bp, Homo sapien
attttaacatcaggaaggttcacataaaaagtc

SEQ ID NO: 817721 - DNA, 33 bp, Homo sapien
ggggccaccggttgcactgattggctccagagt

SEQ ID NO: 817722 - DNA, 33 bp, Homo sapien
ggggccaccggttgcattgattggctccagagt

SEQ ID NO: 817723 - DNA, 33 bp, Homo sapien
tggctgagatgtatggaatggtaatcacagcac

SEQ ID NO: 817724 - DNA, 33 bp, Homo sapien
tggctgagatgtatggtatggtaatcacagcac

SEQ ID NO: 817725 - DNA, 33 bp, Homo sapien
gggctaagcgagataccgcgtctctagcactgg

SEQ ID NO: 817726 - DNA, 33 bp, Homo sapien
gggctaagcgagatactgcgtctctagcactgg

SEQ ID NO: 817727 - DNA, 33 bp, Homo sapien
ggaataaacaagatgccgacaagaatgcctcac

SEQ ID NO: 817728 - DNA, 33 bp, Homo sapien
ggaataaacaagatgcggacaagaatgcctcac

SEQ ID NO: 817729 - DNA, 33 bp, Homo sapien
cgcctggaggctgttacgggctgagtgacgccc

SEQ ID NO: 817730 - DNA, 33 bp, Homo sapien
cgcctggaggctgttatgggctgagtgacgccc

SEQ ID NO: 817731 - DNA, 33 bp, Homo sapien
agtggaatgtttgagacgcacaaataccttaaa

SEQ ID NO: 817732 - DNA, 33 bp, Homo sapien
agtggaatgtttgagatgcacaaataccttaaa

SEQ ID NO: 817733 - DNA, 33 bp, Homo sapien
gaactctgctaagtcacgaatgccccatctctc

SEQ ID NO: 817734 - DNA, 33 bp, Homo sapien
gaactctgctaagtcatgaatgccccatctctc

SEQ ID NO: 817735 - DNA, 33 bp, Homo sapien
tgctccactctccccaactggcgatgagtctgg

SEQ ID NO: 817736 - DNA, 33 bp, Homo sapien
tgctccactctccccagctggcgatgagtctgg

SEQ ID NO: 817737 - DNA, 33 bp, Homo sapien
ctctgcccatgccacacataatggaaatatttc

SEQ ID NO: 817738 - DNA, 33 bp, Homo sapien
ctctgcccatgccacatataatggaaatatttc

SEQ ID NO: 817739 - DNA, 33 bp, Homo sapien
caggccatttcccttcacagctatttagaaggg

SEQ ID NO: 817740 - DNA, 33 bp, Homo sapien
caggccatttcccttcgcagctatttagaaggg

SEQ ID NO: 817741 - DNA, 33 bp, Homo sapien
taacaaggaagttcataaaaagtctagatgcaa

SEQ ID NO: 817742 - DNA, 33 bp, Homo sapien
taacaaggaagttcatgaaaagtctagatgcaa

SEQ ID NO: 817743 - DNA, 33 bp, Homo sapien
ttgagtgcaatgctcacgccaactacctggggt

SEQ ID NO: 817744 - DNA, 33 bp, Homo sapien
ttgagtgcaatgctcatgccaactacctggggt

SEQ ID NO: 817745 - DNA, 33 bp, Homo sapien
agaacacaaacaccccagaatcgcaacacctct

SEQ ID NO: 817746 - DNA, 33 bp, Homo sapien
agaacacaaacaccccggaatcgcaacacctct

SEQ ID NO: 817747 - DNA, 33 bp, Homo sapien
tttctgtgtctccataaaaagaatgacagtggt

SEQ ID NO: 817748 - DNA, 33 bp, Homo sapien
tttctgtgtctccatagaaagaatgacagtggt

SEQ ID NO: 817749 - DNA, 33 bp, Homo sapien
ccagctggagttcaacaggaaaccacagcagaa

SEQ ID NO: 817750 - DNA, 33 bp, Homo sapien
ccagctggagttcaacgggaaaccacagcagaa

SEQ ID NO: 817751 - DNA, 33 bp, Homo sapien
ggatgcaagccagagaactgttcaggcaggcaa

SEQ ID NO: 817752 - DNA, 33 bp, Homo sapien
ggatgcaagccagagacctgttcaggcaggcaa

SEQ ID NO: 817753 - DNA, 33 bp, Homo sapien
aagtctgtattgggcacgataatacctcatcac

SEQ ID NO: 817754 - DNA, 33 bp, Homo sapien
aagtctgtattgggcatgataatacctcatcac

SEQ ID NO: 817755 - DNA, 33 bp, Homo sapien
ttttaaatcttagcaaataatttgagtttaaaa

SEQ ID NO: 817756 - DNA, 33 bp, Homo sapien
ttttaaatcttagcaactaatttgagtttaaaa

SEQ ID NO: 817757 - DNA, 33 bp, Homo sapien
tggaaacctccactccagcttgtggatgcccca

SEQ ID NO: 817758 - DNA, 33 bp, Homo sapien
tggaaacctccactccggcttgtggatgcccca

SEQ ID NO: 817759 - DNA, 33 bp, Homo sapien
tatcagttttattttcgcagccaagaatctaga

SEQ ID NO: 817760 - DNA, 33 bp, Homo sapien
tatcagttttattttctcagccaagaatctaga

SEQ ID NO: 817761 - DNA, 33 bp, Homo sapien
ggagaagttggagaagaagagcaataattgaac

SEQ ID NO: 817762 - DNA, 33 bp, Homo sapien
ggagaagttggagaaggagagcaataattgaac

SEQ ID NO: 817763 - DNA, 33 bp, Homo sapien
gacagaccctagcttaacagtttctcttttccc

SEQ ID NO: 817764 - DNA, 33 bp, Homo sapien
gacagaccctagcttagcagtttctcttttccc

SEQ ID NO: 817765 - DNA, 33 bp, Homo sapien
ctgcagagagagcgaacgtcctccggagcagag

SEQ ID NO: 817766 - DNA, 33 bp, Homo sapien
ctgcagagagagcgaatgtcctccggagcagag

SEQ ID NO: 817767 - DNA, 33 bp, Homo sapien
ggcctgggtgagtaggacatctaggtggctcac

SEQ ID NO: 817768 - DNA, 33 bp, Homo sapien
ggcctgggtgagtagggcatctaggtggctcac

SEQ ID NO: 817769 - DNA, 33 bp, Homo sapien
tgaattcctgacaaaaatcctcccagggtgaca

SEQ ID NO: 817770 - DNA, 33 bp, Homo sapien
tgaattcctgacaaaagtcctcccagggtgaca

SEQ ID NO: 817771 - DNA, 33 bp, Homo sapien
aagcacagaagcttcacgccctggtcttcccaa

SEQ ID NO: 817772 - DNA, 33 bp, Homo sapien
aagcacagaagcttcatgccctggtcttcccaa

SEQ ID NO: 817773 - DNA, 33 bp, Homo sapien
gctagcaagtgttcgaagagactcaaacacatc

SEQ ID NO: 817774 - DNA, 33 bp, Homo sapien
gctagcaagtgttcgaggagactcaaacacatc

SEQ ID NO: 817775 - DNA, 33 bp, Homo sapien
ctggcttcgagagagaaagctaaaattctgaaa

SEQ ID NO: 817776 - DNA, 33 bp, Homo sapien
ctggcttcgagagagagagctaaaattctgaaa

SEQ ID NO: 817777 - DNA, 33 bp, Homo sapien
gtctatttctggactccattttttcctgttgat

SEQ ID NO: 817778 - DNA, 33 bp, Homo sapien
gtctatttctggactctattttttcctgttgat

SEQ ID NO: 817779 - DNA, 33 bp, Homo sapien
aaggcaatttaacgggaaaaatgcattctttct

SEQ ID NO: 817780 - DNA, 33 bp, Homo sapien
aaggcaatttaacggggaaaatgcattctttct

SEQ ID NO: 817781 - DNA, 33 bp, Homo sapien
tggaagaggaatccaacttccatatgagagcac

SEQ ID NO: 817782 - DNA, 33 bp, Homo sapien
tggaagaggaatccaagttccatatgagagcac

SEQ ID NO: 817783 - DNA, 33 bp, Homo sapien
ggcaaaatatttgaaccgacattccatgaaaaa

SEQ ID NO: 817784 - DNA, 33 bp, Homo sapien
ggcaaaatatttgaactgacattccatgaaaaa

SEQ ID NO: 817785 - DNA, 33 bp, Homo sapien
gctgggaagtgcatggaagtttgtttttatggc

SEQ ID NO: 817786 - DNA, 33 bp, Homo sapien
gctgggaagtgcatgggagtttgtttttatggc

SEQ ID NO: 817787 - DNA, 33 bp, Homo sapien
tagggtaacaacctccaattctcagagtttaga

SEQ ID NO: 817788 - DNA, 33 bp, Homo sapien
tagggtaacaacctccgattctcagagtttaga

SEQ ID NO: 817789 - DNA, 33 bp, Homo sapien
ttcaccaaggagaagacggagatagccaaaaag

SEQ ID NO: 817790 - DNA, 33 bp, Homo sapien
ttcaccaaggagaagatggagatagccaaaaag

SEQ ID NO: 817791 - DNA, 33 bp, Homo sapien
gatgattcccaacttaagaactccatccttgag

SEQ ID NO: 817792 - DNA, 33 bp, Homo sapien
gatgattcccaacttaggaactccatccttgag

SEQ ID NO: 817793 - DNA, 33 bp, Homo sapien
gaaggggctaacaaaccggatcttatgttttga

SEQ ID NO: 817794 - DNA, 33 bp, Homo sapien
gaaggggctaacaaactggatcttatgttttga

SEQ ID NO: 817795 - DNA, 33 bp, Homo sapien
ttgctgagttaaggacaagtgtgtgatttccag

SEQ ID NO: 817796 - DNA, 33 bp, Homo sapien
ttgctgagttaaggacgagtgtgtgatttccag

SEQ ID NO: 817797 - DNA, 33 bp, Homo sapien
ccagagggtcttccccaaggacaccatgcagat

SEQ ID NO: 817798 - DNA, 33 bp, Homo sapien
ccagagggtcttccccgaggacaccatgcagat

SEQ ID NO: 817799 - DNA, 33 bp, Homo sapien
gttcactatgtatggcagaacttggtatttttt

SEQ ID NO: 817800 - DNA, 33 bp, Homo sapien
gttcactatgtatggcggaacttggtatttttt

SEQ ID NO: 817801 - DNA, 33 bp, Homo sapien
gtagaacaatgggatagcatggccaccaccctt

SEQ ID NO: 817802 - DNA, 33 bp, Homo sapien
gtagaacaatgggatatcatggccaccaccctt

SEQ ID NO: 817803 - DNA, 33 bp, Homo sapien
gcattgctgagttttaccgagtcctgctggtgc

SEQ ID NO: 817804 - DNA, 33 bp, Homo sapien
gcattgctgagttttagcgagtcctgctggtgc

SEQ ID NO: 817805 - DNA, 33 bp, Homo sapien
acactgtggattaccaatggggaaggagcctgg

SEQ ID NO: 817806 - DNA, 33 bp, Homo sapien
acactgtggattaccagtggggaaggagcctgg

SEQ ID NO: 817807 - DNA, 33 bp, Homo sapien
gtccttgtttagtcagaactcctgggttccaaa

SEQ ID NO: 817808 - DNA, 33 bp, Homo sapien
gtccttgtttagtcaggactcctgggttccaaa

SEQ ID NO: 817809 - DNA, 33 bp, Homo sapien
aaaaacaaaccacacaggattcccagttaaggg

SEQ ID NO: 817810 - DNA, 33 bp, Homo sapien
aaaaacaaaccacacatgattcccagttaaggg

SEQ ID NO: 817811 - DNA, 33 bp, Homo sapien
tatagccggaagcaccagacgggatccttcagg

SEQ ID NO: 817812 - DNA, 33 bp, Homo sapien
tatagccggaagcaccggacgggatccttcagg

SEQ ID NO: 817813 - DNA, 33 bp, Homo sapien
tatttttcaagtgcataagacaccaaagatcac

SEQ ID NO: 817814 - DNA, 33 bp, Homo sapien
tatttttcaagtgcatgagacaccaaagatcac

SEQ ID NO: 817815 - DNA, 33 bp, Homo sapien
aaatcaagccccaacacggaatttagcattttt

SEQ ID NO: 817816 - DNA, 33 bp, Homo sapien
aaatcaagccccaacatggaatttagcattttt

SEQ ID NO: 817817 - DNA, 33 bp, Homo sapien
tttgttttgttaacaacgtagatgctttgcctc

SEQ ID NO: 817818 - DNA, 33 bp, Homo sapien
tttgttttgttaacaatgtagatgctttgcctc

SEQ ID NO: 817819 - DNA, 33 bp, Homo sapien
gcttcatatactgaagcctagtcaccaacgtga

SEQ ID NO: 817820 - DNA, 33 bp, Homo sapien
gcttcatatactgaagtctagtcaccaacgtga

SEQ ID NO: 817821 - DNA, 33 bp, Homo sapien
taaaatgacccatgaacgaggttatacactaca

SEQ ID NO: 817822 - DNA, 33 bp, Homo sapien
taaaatgacccatgaatgaggttatacactaca

SEQ ID NO: 817823 - DNA, 33 bp, Homo sapien
tgaaagccagctgctacgtaagaaggctgactt

SEQ ID NO: 817824 - DNA, 33 bp, Homo sapien
tgaaagccagctgctatgtaagaaggctgactt

SEQ ID NO: 817825 - DNA, 33 bp, Homo sapien
ttaggcatactaatcacaaagtccctctgtttt

SEQ ID NO: 817826 - DNA, 33 bp, Homo sapien
ttaggcatactaatcagaaagtccctctgtttt

SEQ ID NO: 817827 - DNA, 33 bp, Homo sapien
ccattcgaatccccctgagagattgatgggcta

SEQ ID NO: 817828 - DNA, 33 bp, Homo sapien
ccattcgaatcccccttagagattgatgggcta

SEQ ID NO: 817829 - DNA, 33 bp, Homo sapien
tccacatcacccctgcaacacttagttccctca

SEQ ID NO: 817830 - DNA, 33 bp, Homo sapien
tccacatcacccctgcgacacttagttccctca

SEQ ID NO: 817831 - DNA, 33 bp, Homo sapien
tgtagccaacaccccaatcaaggcagaaaacat

SEQ ID NO: 817832 - DNA, 33 bp, Homo sapien
tgtagccaacaccccagtcaaggcagaaaacat

SEQ ID NO: 817833 - DNA, 33 bp, Homo sapien
aggaagcatgggtaaacaaggaggcgtgtgata

SEQ ID NO: 817834 - DNA, 33 bp, Homo sapien
aggaagcatgggtaaataaggaggcgtgtgata

SEQ ID NO: 817835 - DNA, 33 bp, Homo sapien
ttgtcatataagtctacgtctgtaagtaaatgt

SEQ ID NO: 817836 - DNA, 33 bp, Homo sapien
ttgtcatataagtctatgtctgtaagtaaatgt

SEQ ID NO: 817837 - DNA, 33 bp, Homo sapien
gatcttttagcggttccatctctcaattttact

SEQ ID NO: 817838 - DNA, 33 bp, Homo sapien
gatcttttagcggttctatctctcaattttact

SEQ ID NO: 817839 - DNA, 33 bp, Homo sapien
gttagaggcatggaaaattaaacctggaacgat

SEQ ID NO: 817840 - DNA, 33 bp, Homo sapien
gttagaggcatggaaagttaaacctggaacgat

SEQ ID NO: 817841 - DNA, 33 bp, Homo sapien
tacataggcttctctcaaaatataaaaataatt

SEQ ID NO: 817842 - DNA, 33 bp, Homo sapien
tacataggcttctctcgaaatataaaaataatt

SEQ ID NO: 817843 - DNA, 33 bp, Homo sapien
aataataataatagccactgccctcaggacctg

SEQ ID NO: 817844 - DNA, 33 bp, Homo sapien
aataataataatagccgctgccctcaggacctg

SEQ ID NO: 817845 - DNA, 33 bp, Homo sapien
ttttttaagagatgaacgttgaatgttgtcaga

SEQ ID NO: 817846 - DNA, 33 bp, Homo sapien
ttttttaagagatgaatgttgaatgttgtcaga

SEQ ID NO: 817847 - DNA, 33 bp, Homo sapien
tattttgttcctctgaagtatttggcctgatat

SEQ ID NO: 817848 - DNA, 33 bp, Homo sapien
tattttgttcctctgacgtatttggcctgatat

SEQ ID NO: 817849 - DNA, 33 bp, Homo sapien
gtggatgctgaagaacaagtaggaactttggca

SEQ ID NO: 817850 - DNA, 33 bp, Homo sapien
gtggatgctgaagaacgagtaggaactttggca

SEQ ID NO: 817851 - DNA, 33 bp, Homo sapien
gacacattccaccgaaaagcaggagtttgcagg

SEQ ID NO: 817852 - DNA, 33 bp, Homo sapien
gacacattccaccgaagagcaggagtttgcagg

SEQ ID NO: 817853 - DNA, 33 bp, Homo sapien
aagtgctgccttaaaacatctatctttcatttc

SEQ ID NO: 817854 - DNA, 33 bp, Homo sapien
aagtgctgccttaaaatatctatctttcatttc

SEQ ID NO: 817855 - DNA, 33 bp, Homo sapien
gcttatggtggaggtacgtgaggattcgtaagg

SEQ ID NO: 817856 - DNA, 33 bp, Homo sapien
gcttatggtggaggtatgtgaggattcgtaagg

SEQ ID NO: 817857 - DNA, 33 bp, Homo sapien
aaaaattctgacattaagactcgatacatatat

SEQ ID NO: 817858 - DNA, 33 bp, Homo sapien
aaaaattctgacattaggactcgatacatatat

SEQ ID NO: 817859 - DNA, 33 bp, Homo sapien
tctgctctgggagatgcagcggtaacctaccga

SEQ ID NO: 817860 - DNA, 33 bp, Homo sapien
tctgctctgggagatgtagcggtaacctaccga

SEQ ID NO: 817861 - DNA, 33 bp, Homo sapien
gattacctcagccaaactgccttctgaaatggt

SEQ ID NO: 817862 - DNA, 33 bp, Homo sapien
gattacctcagccaaagtgccttctgaaatggt

SEQ ID NO: 817863 - DNA, 33 bp, Homo sapien
cttgaggagaagcaaaatgactgagccagcaga

SEQ ID NO: 817864 - DNA, 33 bp, Homo sapien
cttgaggagaagcaaagtgactgagccagcaga

SEQ ID NO: 817865 - DNA, 33 bp, Homo sapien
gagccgattctacttgaagagcaaacactgaag

SEQ ID NO: 817866 - DNA, 33 bp, Homo sapien
gagccgattctacttggagagcaaacactgaag

SEQ ID NO: 817867 - DNA, 33 bp, Homo sapien
ctggagcttgtcttcacgccagacggctcccgg

SEQ ID NO: 817868 - DNA, 33 bp, Homo sapien
ctggagcttgtcttcatgccagacggctcccgg

SEQ ID NO: 817869 - DNA, 33 bp, Homo sapien
gagaaagaggaggtcaatatttttgttaacttt

SEQ ID NO: 817870 - DNA, 33 bp, Homo sapien
gagaaagaggaggtcagtatttttgttaacttt

SEQ ID NO: 817871 - DNA, 33 bp, Homo sapien
aaggcatcttaagctacgactgtcatttagtat

SEQ ID NO: 817872 - DNA, 33 bp, Homo sapien
aaggcatcttaagctatgactgtcatttagtat

SEQ ID NO: 817873 - DNA, 33 bp, Homo sapien
gtaaataaaattaccaaatgatcttctgtggat

SEQ ID NO: 817874 - DNA, 33 bp, Homo sapien
gtaaataaaattaccagatgatcttctgtggat

SEQ ID NO: 817875 - DNA, 33 bp, Homo sapien
ggaaagggctcacagaataagcatgtgaagtct

SEQ ID NO: 817876 - DNA, 33 bp, Homo sapien
ggaaagggctcacagagtaagcatgtgaagtct

SEQ ID NO: 817877 - DNA, 33 bp, Homo sapien
tttcggcatcactctcagaagtgggatcaattc

SEQ ID NO: 817878 - DNA, 33 bp, Homo sapien
tttcggcatcactctcggaagtgggatcaattc

SEQ ID NO: 817879 - DNA, 33 bp, Homo sapien
tattgccactgaaactaagaaaattacacaagg

SEQ ID NO: 817880 - DNA, 33 bp, Homo sapien
tattgccactgaaactgagaaaattacacaagg

SEQ ID NO: 817881 - DNA, 33 bp, Homo sapien
acctattattcccagtgaattcaggatctcact

SEQ ID NO: 817882 - DNA, 33 bp, Homo sapien
acctattattcccagttaattcaggatctcact

SEQ ID NO: 817883 - DNA, 33 bp, Homo sapien
caggtcgtccaaatcactcatccactcctctga

SEQ ID NO: 817884 - DNA, 33 bp, Homo sapien
caggtcgtccaaatcattcatccactcctctga

SEQ ID NO: 817885 - DNA, 33 bp, Homo sapien
gaaatggccgacataccacttggggtggcaaat

SEQ ID NO: 817886 - DNA, 33 bp, Homo sapien
gaaatggccgacatactacttggggtggcaaat

SEQ ID NO: 817887 - DNA, 33 bp, Homo sapien
cagaggctgtgatacaatccagatacctgtcag

SEQ ID NO: 817888 - DNA, 33 bp, Homo sapien
cagaggctgtgatacactccagatacctgtcag

SEQ ID NO: 817889 - DNA, 33 bp, Homo sapien
ataagagggtgataaaaggtatgtatggcgttt

SEQ ID NO: 817890 - DNA, 33 bp, Homo sapien
ataagagggtgataaatggtatgtatggcgttt

SEQ ID NO: 817891 - DNA, 33 bp, Homo sapien
aatgtctgtcaactaaggaacaggtaaacaaaa

SEQ ID NO: 817892 - DNA, 33 bp, Homo sapien
aatgtctgtcaactaatgaacaggtaaacaaaa

SEQ ID NO: 817893 - DNA, 33 bp, Homo sapien
tcattggtggaacatcaagccctgttttttact

SEQ ID NO: 817894 - DNA, 33 bp, Homo sapien
tcattggtggaacatcgagccctgttttttact

SEQ ID NO: 817895 - DNA, 33 bp, Homo sapien
tgcagactattgttcacccaaaggagggcagtc

SEQ ID NO: 817896 - DNA, 33 bp, Homo sapien
tgcagactattgttcatccaaaggagggcagtc

SEQ ID NO: 817897 - DNA, 33 bp, Homo sapien
acccagctcgaccccgcaatcacacagccagta

SEQ ID NO: 817898 - DNA, 33 bp, Homo sapien
acccagctcgaccccggaatcacacagccagta

SEQ ID NO: 817899 - DNA, 33 bp, Homo sapien
ggagttcacctgtagacgggtccacttcttttg

SEQ ID NO: 817900 - DNA, 33 bp, Homo sapien
ggagttcacctgtagatgggtccacttcttttg

SEQ ID NO: 817901 - DNA, 33 bp, Homo sapien
cccacacctacagacagccctgcagtggagaac

SEQ ID NO: 817902 - DNA, 33 bp, Homo sapien
cccacacctacagacatccctgcagtggagaac

SEQ ID NO: 817903 - DNA, 33 bp, Homo sapien
aaaatgtttttctttaagcaaactccagagcca

SEQ ID NO: 817904 - DNA, 33 bp, Homo sapien
aaaatgtttttctttaggcaaactccagagcca

SEQ ID NO: 817905 - DNA, 33 bp, Homo sapien
tcctctaaatgggcgcaatttgtcctgccacct

SEQ ID NO: 817906 - DNA, 33 bp, Homo sapien
tcctctaaatgggcgcgatttgtcctgccacct

SEQ ID NO: 817907 - DNA, 33 bp, Homo sapien
tggcattgttcttacaaatggagggcatggcca

SEQ ID NO: 817908 - DNA, 33 bp, Homo sapien
tggcattgttcttacacatggagggcatggcca

SEQ ID NO: 817909 - DNA, 33 bp, Homo sapien
agcaacaggcttgaggaagcatgaaacacaatg

SEQ ID NO: 817910 - DNA, 33 bp, Homo sapien
agcaacaggcttgagggagcatgaaacacaatg

SEQ ID NO: 817911 - DNA, 33 bp, Homo sapien
gaatcaacttttttctaaatctggcaggaaaaa

SEQ ID NO: 817912 - DNA, 33 bp, Homo sapien
gaatcaacttttttctcaatctggcaggaaaaa

SEQ ID NO: 817913 - DNA, 33 bp, Homo sapien
tgcctgttgcagagtgaatctagttcatttgta

SEQ ID NO: 817914 - DNA, 33 bp, Homo sapien
tgcctgttgcagagtggatctagttcatttgta

SEQ ID NO: 817915 - DNA, 33 bp, Homo sapien
cagaagacaaaacctacggcagtgtgggcggac

SEQ ID NO: 817916 - DNA, 33 bp, Homo sapien
cagaagacaaaacctatggcagtgtgggcggac

SEQ ID NO: 817917 - DNA, 33 bp, Homo sapien
cagtcaaacaccctgaacaattctcccactgaa

SEQ ID NO: 817918 - DNA, 33 bp, Homo sapien
cagtcaaacaccctgagcaattctcccactgaa

SEQ ID NO: 817919 - DNA, 33 bp, Homo sapien
tgcttggaggagctaccgagaggctttgagggc

SEQ ID NO: 817920 - DNA, 33 bp, Homo sapien
tgcttggaggagctactgagaggctttgagggc

SEQ ID NO: 817921 - DNA, 33 bp, Homo sapien
tgtagaaatatatacacctcaaacaagccatgc

SEQ ID NO: 817922 - DNA, 33 bp, Homo sapien
tgtagaaatatatacatctcaaacaagccatgc

SEQ ID NO: 817923 - DNA, 33 bp, Homo sapien
cacctgcctagcattacaggctctcagatctgc

SEQ ID NO: 817924 - DNA, 33 bp, Homo sapien
cacctgcctagcattagaggctctcagatctgc

SEQ ID NO: 817925 - DNA, 33 bp, Homo sapien
acttgacagataaatgcagcagtttcggttcca

SEQ ID NO: 817926 - DNA, 33 bp, Homo sapien
acttgacagataaatgtagcagtttcggttcca

SEQ ID NO: 817927 - DNA, 33 bp, Homo sapien
tcaaggagttcgtgacagggatgagtgagtgcc

SEQ ID NO: 817928 - DNA, 33 bp, Homo sapien
tcaaggagttcgtgacggggatgagtgagtgcc

SEQ ID NO: 817929 - DNA, 33 bp, Homo sapien
tctttgagctcctgaaagtgtcctatgaggtca

SEQ ID NO: 817930 - DNA, 33 bp, Homo sapien
tctttgagctcctgaaggtgtcctatgaggtca

SEQ ID NO: 817931 - DNA, 33 bp, Homo sapien
ctgccgcttcctacaacaggcggatagggcctc

SEQ ID NO: 817932 - DNA, 33 bp, Homo sapien
ctgccgcttcctacaataggcggatagggcctc

SEQ ID NO: 817933 - DNA, 33 bp, Homo sapien
ggtctttatacctgaacgtcagtttggctgggt

SEQ ID NO: 817934 - DNA, 33 bp, Homo sapien
ggtctttatacctgaaggtcagtttggctgggt

SEQ ID NO: 817935 - DNA, 33 bp, Homo sapien
ggcacacgtctgtcccaaattcctggtgattcc

SEQ ID NO: 817936 - DNA, 33 bp, Homo sapien
ggcacacgtctgtcccgaattcctggtgattcc

SEQ ID NO: 817937 - DNA, 33 bp, Homo sapien
ctgaccacctgaataacgagaatctgccatgtc

SEQ ID NO: 817938 - DNA, 33 bp, Homo sapien
ctgaccacctgaataatgagaatctgccatgtc

SEQ ID NO: 817939 - DNA, 33 bp, Homo sapien
ttattcagtcctgcaaaggagaagggcactgct

SEQ ID NO: 817940 - DNA, 33 bp, Homo sapien
ttattcagtcctgcaagggagaagggcactgct

SEQ ID NO: 817941 - DNA, 33 bp, Homo sapien
gatgccttatttaatacgtattcctgatcgatt

SEQ ID NO: 817942 - DNA, 33 bp, Homo sapien
gatgccttatttaatatgtattcctgatcgatt

SEQ ID NO: 817943 - DNA, 33 bp, Homo sapien
atcactcacgcctgaacgaagctgctctcatgc

SEQ ID NO: 817944 - DNA, 33 bp, Homo sapien
atcactcacgcctgaatgaagctgctctcatgc

SEQ ID NO: 817945 - DNA, 33 bp, Homo sapien
ctcccaagcatagcgcccttgttcctaagagca

SEQ ID NO: 817946 - DNA, 33 bp, Homo sapien
ctcccaagcatagcgctcttgttcctaagagca

SEQ ID NO: 817947 - DNA, 33 bp, Homo sapien
tttctaactatagcacaggtaatgtgggggtgg

SEQ ID NO: 817948 - DNA, 33 bp, Homo sapien
tttctaactatagcacgggtaatgtgggggtgg

SEQ ID NO: 817949 - DNA, 33 bp, Homo sapien
acatcttaatggtcacagattcaccccaacttc

SEQ ID NO: 817950 - DNA, 33 bp, Homo sapien
acatcttaatggtcacggattcaccccaacttc

SEQ ID NO: 817951 - DNA, 33 bp, Homo sapien
aacacttgtcactttacgtcatgctcaacacgg

SEQ ID NO: 817952 - DNA, 33 bp, Homo sapien
aacacttgtcactttatgtcatgctcaacacgg

SEQ ID NO: 817953 - DNA, 33 bp, Homo sapien
gagaagcttcctacccgcgtggagtacaggtgc

SEQ ID NO: 817954 - DNA, 33 bp, Homo sapien
gagaagcttcctaccctcgtggagtacaggtgc

SEQ ID NO: 817955 - DNA, 33 bp, Homo sapien
tctagatgaacatgtacgagaaaatcttagtga

SEQ ID NO: 817956 - DNA, 33 bp, Homo sapien
tctagatgaacatgtatgagaaaatcttagtga

SEQ ID NO: 817957 - DNA, 33 bp, Homo sapien
gggcactattctgttccagcaatccatttgtct

SEQ ID NO: 817958 - DNA, 33 bp, Homo sapien
gggcactattctgttctagcaatccatttgtct

SEQ ID NO: 817959 - DNA, 33 bp, Homo sapien
agaagttgaatgaaaacgggtccctcccaccaa

SEQ ID NO: 817960 - DNA, 33 bp, Homo sapien
agaagttgaatgaaaatgggtccctcccaccaa

SEQ ID NO: 817961 - DNA, 33 bp, Homo sapien
tcctgagactaaagaagaagcagagagaaaatt

SEQ ID NO: 817962 - DNA, 33 bp, Homo sapien
tcctgagactaaagaataagcagagagaaaatt

SEQ ID NO: 817963 - DNA, 33 bp, Homo sapien
ggtgactattaaactacccaataattctcgaaa

SEQ ID NO: 817964 - DNA, 33 bp, Homo sapien
ggtgactattaaactatccaataattctcgaaa

SEQ ID NO: 817965 - DNA, 33 bp, Homo sapien
acagcgggtctttcaaactgcttctttcctgca

SEQ ID NO: 817966 - DNA, 33 bp, Homo sapien
acagcgggtctttcaacctgcttctttcctgca

SEQ ID NO: 817967 - DNA, 33 bp, Homo sapien
aaactacactcaaagcacagttttctctattgc

SEQ ID NO: 817968 - DNA, 33 bp, Homo sapien
aaactacactcaaagcgcagttttctctattgc

SEQ ID NO: 817969 - DNA, 33 bp, Homo sapien
aggtggtttgccgagcaccagactgttgtagca

SEQ ID NO: 817970 - DNA, 33 bp, Homo sapien
aggtggtttgccgagcgccagactgttgtagca

SEQ ID NO: 817971 - DNA, 33 bp, Homo sapien
atgcttgtgcttttcaggtttcactgtccacgt

SEQ ID NO: 817972 - DNA, 33 bp, Homo sapien
atgcttgtgcttttcatgtttcactgtccacgt

SEQ ID NO: 817973 - DNA, 33 bp, Homo sapien
aaaggactttgttggcactcagtatgcttgtgc

SEQ ID NO: 817974 - DNA, 33 bp, Homo sapien
aaaggactttgttggcgctcagtatgcttgtgc

SEQ ID NO: 817975 - DNA, 33 bp, Homo sapien
cggttcacggaatttcactgcaccctctatggt

SEQ ID NO: 817976 - DNA, 33 bp, Homo sapien
cggttcacggaatttcgctgcaccctctatggt

SEQ ID NO: 817977 - DNA, 33 bp, Homo sapien
taagttcccagaataaactactttaggccgagc

SEQ ID NO: 817978 - DNA, 33 bp, Homo sapien
taagttcccagaataacctactttaggccgagc

SEQ ID NO: 817979 - DNA, 33 bp, Homo sapien
aagcaagtgttataaactgaaaaatgattaaaa

SEQ ID NO: 817980 - DNA, 33 bp, Homo sapien
aagcaagtgttataaagtgaaaaatgattaaaa

SEQ ID NO: 817981 - DNA, 33 bp, Homo sapien
cccacagatgaagagacggtgatccctaccctg

SEQ ID NO: 817982 - DNA, 33 bp, Homo sapien
cccacagatgaagagatggtgatccctaccctg

SEQ ID NO: 817983 - DNA, 33 bp, Homo sapien
aactcatgatgttgcaaactgttacagcaaaaa

SEQ ID NO: 817984 - DNA, 33 bp, Homo sapien
aactcatgatgttgcagactgttacagcaaaaa

SEQ ID NO: 817985 - DNA, 33 bp, Homo sapien
atggatcaaatgctccacttaaaagatacagcc

SEQ ID NO: 817986 - DNA, 33 bp, Homo sapien
atggatcaaatgctccgcttaaaagatacagcc

SEQ ID NO: 817987 - DNA, 33 bp, Homo sapien
gtagcccagtggttcccaaataagagtaaatct

SEQ ID NO: 817988 - DNA, 33 bp, Homo sapien
gtagcccagtggttcctaaataagagtaaatct

SEQ ID NO: 817989 - DNA, 33 bp, Homo sapien
atgacagcaagtatcccagcttaggggagcaga

SEQ ID NO: 817990 - DNA, 33 bp, Homo sapien
atgacagcaagtatcctagcttaggggagcaga

SEQ ID NO: 817991 - DNA, 33 bp, Homo sapien
atgctaggaaacaagcccgcagtttgtggcctg

SEQ ID NO: 817992 - DNA, 33 bp, Homo sapien
atgctaggaaacaagctcgcagtttgtggcctg

SEQ ID NO: 817993 - DNA, 33 bp, Homo sapien
tgacatttaaaacttacggaaacatcaaatgta

SEQ ID NO: 817994 - DNA, 33 bp, Homo sapien
tgacatttaaaacttatggaaacatcaaatgta

SEQ ID NO: 817995 - DNA, 33 bp, Homo sapien
cagctggtaacagagccacaaagtgccaaatgg

SEQ ID NO: 817996 - DNA, 33 bp, Homo sapien
cagctggtaacagagctacaaagtgccaaatgg

SEQ ID NO: 817997 - DNA, 33 bp, Homo sapien
caggaggacagcagaacgaaagcccgccaccaa

SEQ ID NO: 817998 - DNA, 33 bp, Homo sapien
caggaggacagcagaatgaaagcccgccaccaa

SEQ ID NO: 817999 - DNA, 33 bp, Homo sapien
tcttaaatcttttacagaatctggcgaaagtta

SEQ ID NO: 818000 - DNA, 33 bp, Homo sapien
tcttaaatcttttacataatctggcgaaagtta

SEQ ID NO: 818001 - DNA, 33 bp, Homo sapien
agagaatatgatggaaaaaaggtgaagagccat

SEQ ID NO: 818002 - DNA, 33 bp, Homo sapien
agagaatatgatggaacaaaggtgaagagccat

SEQ ID NO: 818003 - DNA, 33 bp, Homo sapien
cagttgaaatcttggaaaactcctattaactca

SEQ ID NO: 818004 - DNA, 33 bp, Homo sapien
cagttgaaatcttggagaactcctattaactca

SEQ ID NO: 818005 - DNA, 33 bp, Homo sapien
acccaagtatactgaaacaatgtatcaaagtat

SEQ ID NO: 818006 - DNA, 33 bp, Homo sapien
acccaagtatactgaagcaatgtatcaaagtat

SEQ ID NO: 818007 - DNA, 33 bp, Homo sapien
attttaaattatggtcaagatagcccagtcttt

SEQ ID NO: 818008 - DNA, 33 bp, Homo sapien
attttaaattatggtccagatagcccagtcttt

SEQ ID NO: 818009 - DNA, 33 bp, Homo sapien
caattgatgttgaaaacccacacatttggtatc

SEQ ID NO: 818010 - DNA, 33 bp, Homo sapien
caattgatgttgaaaatccacacatttggtatc

SEQ ID NO: 818011 - DNA, 33 bp, Homo sapien
tagcacacatttttaccagctgtaacatacact

SEQ ID NO: 818012 - DNA, 33 bp, Homo sapien
tagcacacatttttactagctgtaacatacact

SEQ ID NO: 818013 - DNA, 33 bp, Homo sapien
tatactacgtaaagtacagcacttgccaaaata

SEQ ID NO: 818014 - DNA, 33 bp, Homo sapien
tatactacgtaaagtatagcacttgccaaaata

SEQ ID NO: 818015 - DNA, 33 bp, Homo sapien
aagttgtttctacggccaagctgggaccctaac

SEQ ID NO: 818016 - DNA, 33 bp, Homo sapien
aagttgtttctacggctaagctgggaccctaac

SEQ ID NO: 818017 - DNA, 33 bp, Homo sapien
aatcaactaaacaaagcccttgttcataggaaa

SEQ ID NO: 818018 - DNA, 33 bp, Homo sapien
aatcaactaaacaaagtccttgttcataggaaa

SEQ ID NO: 818019 - DNA, 33 bp, Homo sapien
cctcacagatgctgtaagtgaagggctctatgg

SEQ ID NO: 818020 - DNA, 33 bp, Homo sapien
cctcacagatgctgtaggtgaagggctctatgg

SEQ ID NO: 818021 - DNA, 33 bp, Homo sapien
caggaggagaatataacgggtctgatctaaggc

SEQ ID NO: 818022 - DNA, 33 bp, Homo sapien
caggaggagaatataatgggtctgatctaaggc

SEQ ID NO: 818023 - DNA, 33 bp, Homo sapien
agcatatgaaagacaccactgtggagattctga

SEQ ID NO: 818024 - DNA, 33 bp, Homo sapien
agcatatgaaagacactactgtggagattctga

SEQ ID NO: 818025 - DNA, 33 bp, Homo sapien
cctcgaaaggcctgacaagaggctcctcaacca

SEQ ID NO: 818026 - DNA, 33 bp, Homo sapien
cctcgaaaggcctgacgagaggctcctcaacca

SEQ ID NO: 818027 - DNA, 33 bp, Homo sapien
tgtaacagacacaggcacgaggtgaggcctctg

SEQ ID NO: 818028 - DNA, 33 bp, Homo sapien
tgtaacagacacaggcgcgaggtgaggcctctg

SEQ ID NO: 818029 - DNA, 33 bp, Homo sapien
acaggatacttccttaagctgataatagacatc

SEQ ID NO: 818030 - DNA, 33 bp, Homo sapien
acaggatacttccttaggctgataatagacatc

SEQ ID NO: 818031 - DNA, 33 bp, Homo sapien
tgggaggaaatgacccaattgtctcgacggtgg

SEQ ID NO: 818032 - DNA, 33 bp, Homo sapien
tgggaggaaatgaccccattgtctcgacggtgg

SEQ ID NO: 818033 - DNA, 33 bp, Homo sapien
cagcctgagaaacggcaactggctttggtgaca

SEQ ID NO: 818034 - DNA, 33 bp, Homo sapien
cagcctgagaaacggccactggctttggtgaca

SEQ ID NO: 818035 - DNA, 33 bp, Homo sapien
cactatcgtgggtccacgtttatgaagcaccag

SEQ ID NO: 818036 - DNA, 33 bp, Homo sapien
cactatcgtgggtccatgtttatgaagcaccag

SEQ ID NO: 818037 - DNA, 33 bp, Homo sapien
caagggacttccaggaagagtcgactatcgggc

SEQ ID NO: 818038 - DNA, 33 bp, Homo sapien
caagggacttccaggaggagtcgactatcgggc

SEQ ID NO: 818039 - DNA, 33 bp, Homo sapien
ctgcctgcaatggcaacgagcagtgaggacctg

SEQ ID NO: 818040 - DNA, 33 bp, Homo sapien
ctgcctgcaatggcaaggagcagtgaggacctg

SEQ ID NO: 818041 - DNA, 33 bp, Homo sapien
gaggccatgagaagacagagaatgaaggctgtg

SEQ ID NO: 818042 - DNA, 33 bp, Homo sapien
gaggccatgagaagacggagaatgaaggctgtg

SEQ ID NO: 818043 - DNA, 33 bp, Homo sapien
aaatcacaaagagcccagaatgccaggttaagg

SEQ ID NO: 818044 - DNA, 33 bp, Homo sapien
aaatcacaaagagcccggaatgccaggttaagg

SEQ ID NO: 818045 - DNA, 33 bp, Homo sapien
acaccacgttgcccccagctccgccgagcctct

SEQ ID NO: 818046 - DNA, 33 bp, Homo sapien
acaccacgttgccccccgctccgccgagcctct

SEQ ID NO: 818047 - DNA, 33 bp, Homo sapien
taaagcacagttagaaatgacatctgtagtgcc

SEQ ID NO: 818048 - DNA, 33 bp, Homo sapien
taaagcacagttagaagtgacatctgtagtgcc

SEQ ID NO: 818049 - DNA, 33 bp, Homo sapien
ggctctttaaatcccacggaagccttttcacca

SEQ ID NO: 818050 - DNA, 33 bp, Homo sapien
ggctctttaaatcccatggaagccttttcacca

SEQ ID NO: 818051 - DNA, 33 bp, Homo sapien
tggctttcctgctgaaacttcaggccaagtctg

SEQ ID NO: 818052 - DNA, 33 bp, Homo sapien
tggctttcctgctgaaccttcaggccaagtctg

SEQ ID NO: 818053 - DNA, 33 bp, Homo sapien
ccgagtagaggatgcactcaaaccatgtgcaca

SEQ ID NO: 818054 - DNA, 33 bp, Homo sapien
ccgagtagaggatgcattcaaaccatgtgcaca

SEQ ID NO: 818055 - DNA, 33 bp, Homo sapien
cagtctgtggaggtaacaacaagtagaagcatt

SEQ ID NO: 818056 - DNA, 33 bp, Homo sapien
cagtctgtggaggtaataacaagtagaagcatt

SEQ ID NO: 818057 - DNA, 33 bp, Homo sapien
ctgctgtttgagacgaactccacgacccaaagc

SEQ ID NO: 818058 - DNA, 33 bp, Homo sapien
ctgctgtttgagacgagctccacgacccaaagc

SEQ ID NO: 818059 - DNA, 33 bp, Homo sapien
ccttgtcaacacttatcactttctgttttgttg

SEQ ID NO: 818060 - DNA, 33 bp, Homo sapien
ccttgtcaacacttattactttctgttttgttg

SEQ ID NO: 818061 - DNA, 33 bp, Homo sapien
aggtcctgagactcacagccagaagaaaacgaa

SEQ ID NO: 818062 - DNA, 33 bp, Homo sapien
aggtcctgagactcacggccagaagaaaacgaa

SEQ ID NO: 818063 - DNA, 33 bp, Homo sapien
gattcccgccctgttaggttgttagccatctta

SEQ ID NO: 818064 - DNA, 33 bp, Homo sapien
gattcccgccctgttatgttgttagccatctta

SEQ ID NO: 818065 - DNA, 33 bp, Homo sapien
cgtccctccgctttcacccggcatgattagttt

SEQ ID NO: 818066 - DNA, 33 bp, Homo sapien
cgtccctccgctttcatccggcatgattagttt

SEQ ID NO: 818067 - DNA, 33 bp, Homo sapien
tggggtgaggctctcaagagtgttcacataggc

SEQ ID NO: 818068 - DNA, 33 bp, Homo sapien
tggggtgaggctctcacgagtgttcacataggc

SEQ ID NO: 818069 - DNA, 33 bp, Homo sapien
aggtcacccctggataagccacctactgcctat

SEQ ID NO: 818070 - DNA, 33 bp, Homo sapien
aggtcacccctggatatgccacctactgcctat

SEQ ID NO: 818071 - DNA, 33 bp, Homo sapien
ctgttatttttggtaacagccattcctgacttg

SEQ ID NO: 818072 - DNA, 33 bp, Homo sapien
ctgttatttttggtaatagccattcctgacttg

SEQ ID NO: 818073 - DNA, 33 bp, Homo sapien
ctttgcatttctctaacagttagtgatgttgag

SEQ ID NO: 818074 - DNA, 33 bp, Homo sapien
ctttgcatttctctaatagttagtgatgttgag

SEQ ID NO: 818075 - DNA, 33 bp, Homo sapien
ttgttctcgaatggaacgcagttggggtgctca

SEQ ID NO: 818076 - DNA, 33 bp, Homo sapien
ttgttctcgaatggaatgcagttggggtgctca

SEQ ID NO: 818077 - DNA, 33 bp, Homo sapien
gaccccaccaagctcaaagcagggagaaggagg

SEQ ID NO: 818078 - DNA, 33 bp, Homo sapien
gaccccaccaagctcagagcagggagaaggagg

SEQ ID NO: 818079 - DNA, 33 bp, Homo sapien
aaactgcaaaaggacaaagccgagaaatggcct

SEQ ID NO: 818080 - DNA, 33 bp, Homo sapien
aaactgcaaaaggacagagccgagaaatggcct

SEQ ID NO: 818081 - DNA, 33 bp, Homo sapien
gtcagttccaagtaaaatagagcatcatttgaa

SEQ ID NO: 818082 - DNA, 33 bp, Homo sapien
gtcagttccaagtaaagtagagcatcatttgaa

SEQ ID NO: 818083 - DNA, 33 bp, Homo sapien
attatacacatcgttcacattatatgacattgt

SEQ ID NO: 818084 - DNA, 33 bp, Homo sapien
attatacacatcgttcgcattatatgacattgt

SEQ ID NO: 818085 - DNA, 33 bp, Homo sapien
tccaaggagagaaagaaccatgggaagattcca

SEQ ID NO: 818086 - DNA, 33 bp, Homo sapien
tccaaggagagaaagagccatgggaagattcca

SEQ ID NO: 818087 - DNA, 33 bp, Homo sapien
ttctgccctctcacataatgagtagtgtggttg

SEQ ID NO: 818088 - DNA, 33 bp, Homo sapien
ttctgccctctcacatgatgagtagtgtggttg

SEQ ID NO: 818089 - DNA, 33 bp, Homo sapien
aaaactcctgaataccaccacccacagattact

SEQ ID NO: 818090 - DNA, 33 bp, Homo sapien
aaaactcctgaataccgccacccacagattact

SEQ ID NO: 818091 - DNA, 33 bp, Homo sapien
ttagctaacactgacaagaggaattggattttc

SEQ ID NO: 818092 - DNA, 33 bp, Homo sapien
ttagctaacactgacaggaggaattggattttc

SEQ ID NO: 818093 - DNA, 33 bp, Homo sapien
gacaaggacggcttcaaggaggaggcggcatcc

SEQ ID NO: 818094 - DNA, 33 bp, Homo sapien
gacaaggacggcttcacggaggaggcggcatcc

SEQ ID NO: 818095 - DNA, 33 bp, Homo sapien
agcagcagaggcggagacacattcggaatgtga

SEQ ID NO: 818096 - DNA, 33 bp, Homo sapien
agcagcagaggcggaggcacattcggaatgtga

SEQ ID NO: 818097 - DNA, 33 bp, Homo sapien
gcagtgtctctgcaataaaaagaactcttacag

SEQ ID NO: 818098 - DNA, 33 bp, Homo sapien
gcagtgtctctgcaattaaaagaactcttacag

SEQ ID NO: 818099 - DNA, 33 bp, Homo sapien
ttgggattaacctgtcaatggattcatggatta

SEQ ID NO: 818100 - DNA, 33 bp, Homo sapien
ttgggattaacctgtcgatggattcatggatta

SEQ ID NO: 818101 - DNA, 33 bp, Homo sapien
tccttctgcgtcccacgctcattgcgcccgcgc

SEQ ID NO: 818102 - DNA, 33 bp, Homo sapien
tccttctgcgtcccactctcattgcgcccgcgc

SEQ ID NO: 818103 - DNA, 33 bp, Homo sapien
cattggccatgtgatcaaactcagtcgccagcc

SEQ ID NO: 818104 - DNA, 33 bp, Homo sapien
cattggccatgtgatcgaactcagtcgccagcc

SEQ ID NO: 818105 - DNA, 33 bp, Homo sapien
cagccaccccttaggaaaaacaagtcggagtca

SEQ ID NO: 818106 - DNA, 33 bp, Homo sapien
cagccaccccttaggacaaacaagtcggagtca

SEQ ID NO: 818107 - DNA, 33 bp, Homo sapien
ttaatgggcaaatgctcaatcagataattaact

SEQ ID NO: 818108 - DNA, 33 bp, Homo sapien
ttaatgggcaaatgcttaatcagataattaact

SEQ ID NO: 818109 - DNA, 33 bp, Homo sapien
agaagcagccatcccactgagtagcaagctgat

SEQ ID NO: 818110 - DNA, 33 bp, Homo sapien
agaagcagccatcccattgagtagcaagctgat

SEQ ID NO: 818111 - DNA, 33 bp, Homo sapien
gggacagtttgtgacacggaacctcactgtcca

SEQ ID NO: 818112 - DNA, 33 bp, Homo sapien
gggacagtttgtgacatggaacctcactgtcca

SEQ ID NO: 818113 - DNA, 33 bp, Homo sapien
gcgtggggaagtcgacagcagtctaggaccaga

SEQ ID NO: 818114 - DNA, 33 bp, Homo sapien
gcgtggggaagtcgacggcagtctaggaccaga

SEQ ID NO: 818115 - DNA, 33 bp, Homo sapien
tcatagtattgaaaacggattctggctgttcga

SEQ ID NO: 818116 - DNA, 33 bp, Homo sapien
tcatagtattgaaaactgattctggctgttcga

SEQ ID NO: 818117 - DNA, 33 bp, Homo sapien
tcacatggaaggatgaataagaaccggcagtgt

SEQ ID NO: 818118 - DNA, 33 bp, Homo sapien
tcacatggaaggatgagtaagaaccggcagtgt

SEQ ID NO: 818119 - DNA, 33 bp, Homo sapien
gggggatcttttacacaatttggctgacacagc

SEQ ID NO: 818120 - DNA, 33 bp, Homo sapien
gggggatcttttacacgatttggctgacacagc

SEQ ID NO: 818121 - DNA, 33 bp, Homo sapien
ccctggagggaggcaacagtatgggtcatagaa

SEQ ID NO: 818122 - DNA, 33 bp, Homo sapien
ccctggagggaggcaatagtatgggtcatagaa

SEQ ID NO: 818123 - DNA, 33 bp, Homo sapien
ttattcagatgtagcacattgacatgaatctga

SEQ ID NO: 818124 - DNA, 33 bp, Homo sapien
ttattcagatgtagcatattgacatgaatctga

SEQ ID NO: 818125 - DNA, 33 bp, Homo sapien
gtcccatcctccagaacgttacaatccagcggg

SEQ ID NO: 818126 - DNA, 33 bp, Homo sapien
gtcccatcctccagaaggttacaatccagcggg

SEQ ID NO: 818127 - DNA, 33 bp, Homo sapien
atattgctaagcagaaaaagagggctacagcaa

SEQ ID NO: 818128 - DNA, 33 bp, Homo sapien
atattgctaagcagaagaagagggctacagcaa

SEQ ID NO: 818129 - DNA, 33 bp, Homo sapien
ctgttgctatcaggaaatactgtacccctcttt

SEQ ID NO: 818130 - DNA, 33 bp, Homo sapien
ctgttgctatcaggaattactgtacccctcttt

SEQ ID NO: 818131 - DNA, 33 bp, Homo sapien
ttgagtgggtattcacagaagctgccaatatca

SEQ ID NO: 818132 - DNA, 33 bp, Homo sapien
ttgagtgggtattcacggaagctgccaatatca

SEQ ID NO: 818133 - DNA, 33 bp, Homo sapien
tccaacatttcagccacgttccttcaaagcttc

SEQ ID NO: 818134 - DNA, 33 bp, Homo sapien
tccaacatttcagccatgttccttcaaagcttc

SEQ ID NO: 818135 - DNA, 33 bp, Homo sapien
agggaatagtatctaccctagagcatcattttt

SEQ ID NO: 818136 - DNA, 33 bp, Homo sapien
agggaatagtatctactctagagcatcattttt

SEQ ID NO: 818137 - DNA, 33 bp, Homo sapien
ctgtaaatccagcaaaattcagactgaggcgtg

SEQ ID NO: 818138 - DNA, 33 bp, Homo sapien
ctgtaaatccagcaaagttcagactgaggcgtg

SEQ ID NO: 818139 - DNA, 33 bp, Homo sapien
caggaacgtcagggaaccactttggcctgaggc

SEQ ID NO: 818140 - DNA, 33 bp, Homo sapien
caggaacgtcagggaagcactttggcctgaggc

SEQ ID NO: 818141 - DNA, 33 bp, Homo sapien
acccggaaggctgccacgtccgactgggaactc

SEQ ID NO: 818142 - DNA, 33 bp, Homo sapien
acccggaaggctgccaggtccgactgggaactc

SEQ ID NO: 818143 - DNA, 33 bp, Homo sapien
aatgttaagtcactgaactctcaggatttatgt

SEQ ID NO: 818144 - DNA, 33 bp, Homo sapien
aatgttaagtcactgagctctcaggatttatgt

SEQ ID NO: 818145 - DNA, 33 bp, Homo sapien
catgcaacaagtcaaaactaattcaaggataaa

SEQ ID NO: 818146 - DNA, 33 bp, Homo sapien
catgcaacaagtcaaatctaattcaaggataaa

SEQ ID NO: 818147 - DNA, 33 bp, Homo sapien
ctactgttgctgcaacgctgtgagactgcctgg

SEQ ID NO: 818148 - DNA, 33 bp, Homo sapien
ctactgttgctgcaactctgtgagactgcctgg

SEQ ID NO: 818149 - DNA, 33 bp, Homo sapien
tgtgggcatgtctgaacatctaaagtaacaaac

SEQ ID NO: 818150 - DNA, 33 bp, Homo sapien
tgtgggcatgtctgaatatctaaagtaacaaac

SEQ ID NO: 818151 - DNA, 33 bp, Homo sapien
cccaaaacaaaaccgacaagaactgcatgcgtg

SEQ ID NO: 818152 - DNA, 33 bp, Homo sapien
cccaaaacaaaaccgagaagaactgcatgcgtg

SEQ ID NO: 818153 - DNA, 33 bp, Homo sapien
ttaaatgcgaacaaacacacttggaggaattcc

SEQ ID NO: 818154 - DNA, 33 bp, Homo sapien
ttaaatgcgaacaaacgcacttggaggaattcc

SEQ ID NO: 818155 - DNA, 33 bp, Homo sapien
ctgtcgtgatcctacccattttcttcttcgccc

SEQ ID NO: 818156 - DNA, 33 bp, Homo sapien
ctgtcgtgatcctacctattttcttcttcgccc

SEQ ID NO: 818157 - DNA, 33 bp, Homo sapien
agtgcagttacttgtgcaagcctgtaagtgttc

SEQ ID NO: 818158 - DNA, 33 bp, Homo sapien
agtgcagttacttgtgtaagcctgtaagtgttc

SEQ ID NO: 818159 - DNA, 33 bp, Homo sapien
gtgggtttcagtaagcagctcaagagtccctgg

SEQ ID NO: 818160 - DNA, 33 bp, Homo sapien
gtgggtttcagtaagcggctcaagagtccctgg

SEQ ID NO: 818161 - DNA, 33 bp, Homo sapien
taaaggagaatatgttaaaatgtggcaaaaact

SEQ ID NO: 818162 - DNA, 33 bp, Homo sapien
taaaggagaatatgttgaaatgtggcaaaaact

SEQ ID NO: 818163 - DNA, 33 bp, Homo sapien
tggaccagcaggcatcaagggcctaatttggtg

SEQ ID NO: 818164 - DNA, 33 bp, Homo sapien
tggaccagcaggcatcgagggcctaatttggtg

SEQ ID NO: 818165 - DNA, 33 bp, Homo sapien
acacaaaatcttacaactgtgggaatagaagag

SEQ ID NO: 818166 - DNA, 33 bp, Homo sapien
acacaaaatcttacaagtgtgggaatagaagag

SEQ ID NO: 818167 - DNA, 33 bp, Homo sapien
ttccaaaccaagcggagtatttcaaaaatggcc

SEQ ID NO: 818168 - DNA, 33 bp, Homo sapien
ttccaaaccaagcggattatttcaaaaatggcc

SEQ ID NO: 818169 - DNA, 33 bp, Homo sapien
catttctgcttaaatcactttaaatcagtttct

SEQ ID NO: 818170 - DNA, 33 bp, Homo sapien
catttctgcttaaatcgctttaaatcagtttct

SEQ ID NO: 818171 - DNA, 33 bp, Homo sapien
gggatttctgatgttacggtcctaaggcttttg

SEQ ID NO: 818172 - DNA, 33 bp, Homo sapien
gggatttctgatgttagggtcctaaggcttttg

SEQ ID NO: 818173 - DNA, 33 bp, Homo sapien
ggggccacacacaaaggctgaaggatgagacac

SEQ ID NO: 818174 - DNA, 33 bp, Homo sapien
ggggccacacacaaagtctgaaggatgagacac

SEQ ID NO: 818175 - DNA, 33 bp, Homo sapien
gaatataagaaggcaaatataggtactggaatg

SEQ ID NO: 818176 - DNA, 33 bp, Homo sapien
gaatataagaaggcaattataggtactggaatg

SEQ ID NO: 818177 - DNA, 33 bp, Homo sapien
caatgtcctaattagaagaaacctagttctaag

SEQ ID NO: 818178 - DNA, 33 bp, Homo sapien
caatgtcctaattagaggaaacctagttctaag

SEQ ID NO: 818179 - DNA, 33 bp, Homo sapien
gtatttagtggtgtcaatatgttaaaatttggt

SEQ ID NO: 818180 - DNA, 33 bp, Homo sapien
gtatttagtggtgtcagtatgttaaaatttggt

SEQ ID NO: 818181 - DNA, 33 bp, Homo sapien
agccagtctcacaatacgaaaaaccaagaaagg

SEQ ID NO: 818182 - DNA, 33 bp, Homo sapien
agccagtctcacaatatgaaaaaccaagaaagg

SEQ ID NO: 818183 - DNA, 33 bp, Homo sapien
atgtattttgtaagaggacactgatactgagaa

SEQ ID NO: 818184 - DNA, 33 bp, Homo sapien
atgtattttgtaagagtacactgatactgagaa

SEQ ID NO: 818185 - DNA, 33 bp, Homo sapien
gcggtcaggtgaaagaagacaaaatttgttctg

SEQ ID NO: 818186 - DNA, 33 bp, Homo sapien
gcggtcaggtgaaagacgacaaaatttgttctg

SEQ ID NO: 818187 - DNA, 33 bp, Homo sapien
agaataactacaaaatgagtgcatatttctctt

SEQ ID NO: 818188 - DNA, 33 bp, Homo sapien
agaataactacaaaattagtgcatatttctctt

SEQ ID NO: 818189 - DNA, 33 bp, Homo sapien
tctcaaggtattacacaagaaaaaacagcagaa

SEQ ID NO: 818190 - DNA, 33 bp, Homo sapien
tctcaaggtattacacgagaaaaaacagcagaa

SEQ ID NO: 818191 - DNA, 33 bp, Homo sapien
tggctgaagaaaacgcaaccttgagacttccaa

SEQ ID NO: 818192 - DNA, 33 bp, Homo sapien
tggctgaagaaaacgcgaccttgagacttccaa

SEQ ID NO: 818193 - DNA, 33 bp, Homo sapien
aggtagcattaagacaaaatgtttaaggttggt

SEQ ID NO: 818194 - DNA, 33 bp, Homo sapien
aggtagcattaagacagaatgtttaaggttggt

SEQ ID NO: 818195 - DNA, 33 bp, Homo sapien
agcagtgcttctcaaacgggcagtttatccccc

SEQ ID NO: 818196 - DNA, 33 bp, Homo sapien
agcagtgcttctcaaatgggcagtttatccccc

SEQ ID NO: 818197 - DNA, 33 bp, Homo sapien
cgttcttgacatcacaatagatagagcccttag

SEQ ID NO: 818198 - DNA, 33 bp, Homo sapien
cgttcttgacatcacactagatagagcccttag

SEQ ID NO: 818199 - DNA, 33 bp, Homo sapien
catgtagaggggaggaccagaaccatcagatgg

SEQ ID NO: 818200 - DNA, 33 bp, Homo sapien
catgtagaggggaggagcagaaccatcagatgg

SEQ ID NO: 818201 - DNA, 33 bp, Homo sapien
gactaaggaaaagacactgacgacaaaaagaat

SEQ ID NO: 818202 - DNA, 33 bp, Homo sapien
gactaaggaaaagacattgacgacaaaaagaat

SEQ ID NO: 818203 - DNA, 33 bp, Homo sapien
ccctaatgtgcatcacagtattaaggattaagt

SEQ ID NO: 818204 - DNA, 33 bp, Homo sapien
ccctaatgtgcatcactgtattaaggattaagt

SEQ ID NO: 818205 - DNA, 33 bp, Homo sapien
catttaatggggacttaaaaacagaagctatgt

SEQ ID NO: 818206 - DNA, 33 bp, Homo sapien
catttaatggggacttgaaaacagaagctatgt

SEQ ID NO: 818207 - DNA, 33 bp, Homo sapien
acagactcgactcaaacagcaaagcggatcgat

SEQ ID NO: 818208 - DNA, 33 bp, Homo sapien
acagactcgactcaaatagcaaagcggatcgat

SEQ ID NO: 818209 - DNA, 33 bp, Homo sapien
tgtcctggagttagaacggacaggacttctgga

SEQ ID NO: 818210 - DNA, 33 bp, Homo sapien
tgtcctggagttagaatggacaggacttctgga

SEQ ID NO: 818211 - DNA, 33 bp, Homo sapien
gtgtctttctttcttacgatctcttatctccac

SEQ ID NO: 818212 - DNA, 33 bp, Homo sapien
gtgtctttctttcttatgatctcttatctccac

SEQ ID NO: 818213 - DNA, 33 bp, Homo sapien
cacagcgacctccttgcagaaagacagggccca

SEQ ID NO: 818214 - DNA, 33 bp, Homo sapien
cacagcgacctccttgtagaaagacagggccca

SEQ ID NO: 818215 - DNA, 33 bp, Homo sapien
gcttcctcgtctatgcaatggggactcaaagtg

SEQ ID NO: 818216 - DNA, 33 bp, Homo sapien
gcttcctcgtctatgcgatggggactcaaagtg

SEQ ID NO: 818217 - DNA, 33 bp, Homo sapien
ccataggcctggtggacgagggaacagcacctg

SEQ ID NO: 818218 - DNA, 33 bp, Homo sapien
ccataggcctggtggatgagggaacagcacctg

SEQ ID NO: 818219 - DNA, 33 bp, Homo sapien
aagacaccgaatgggcacactggttggcagccc

SEQ ID NO: 818220 - DNA, 33 bp, Homo sapien
aagacaccgaatgggcgcactggttggcagccc

SEQ ID NO: 818221 - DNA, 33 bp, Homo sapien
gactgcactgccacgacggtgactgctgtcctc

SEQ ID NO: 818222 - DNA, 33 bp, Homo sapien
gactgcactgccacgatggtgactgctgtcctc

SEQ ID NO: 818223 - DNA, 33 bp, Homo sapien
ggaaatgtaagaaaataaagacagctgttgaca

SEQ ID NO: 818224 - DNA, 33 bp, Homo sapien
ggaaatgtaagaaaatgaagacagctgttgaca

SEQ ID NO: 818225 - DNA, 33 bp, Homo sapien
taggctttgtgagccacgtagttcttcggcccc

SEQ ID NO: 818226 - DNA, 33 bp, Homo sapien
taggctttgtgagccatgtagttcttcggcccc

SEQ ID NO: 818227 - DNA, 33 bp, Homo sapien
gacctggaaagggaacagaattatctacagaat

SEQ ID NO: 818228 - DNA, 33 bp, Homo sapien
gacctggaaagggaacggaattatctacagaat

SEQ ID NO: 818229 - DNA, 33 bp, Homo sapien; identical to SEQ ID NO: 818227

SEQ ID NO: 818230 - DNA, 33 bp, Homo sapien; identical to SEQ ID NO: 818228

SEQ ID NO: 818231 - DNA, 33 bp, Homo sapien
accaaaagaaacataaagtatgcctccagaaaa

SEQ ID NO: 818232 - DNA, 33 bp, Homo sapien
accaaaagaaacataatgtatgcctccagaaaa

SEQ ID NO: 818233 - DNA, 33 bp, Homo sapien
cagtcattctcagaaccgaactgaatcagcatt

SEQ ID NO: 818234 - DNA, 33 bp, Homo sapien
cagtcattctcagaactgaactgaatcagcatt

SEQ ID NO: 818235 - DNA, 33 bp, Homo sapien
gtacagacagattatacgagacaggttgttgga

SEQ ID NO: 818236 - DNA, 33 bp, Homo sapien
gtacagacagattatatgagacaggttgttgga

SEQ ID NO: 818237 - DNA, 33 bp, Homo sapien
aggttaaacattcctcaagtacttttttgatac

SEQ ID NO: 818238 - DNA, 33 bp, Homo sapien
aggttaaacattcctcgagtacttttttgatac

SEQ ID NO: 818239 - DNA, 33 bp, Homo sapien
gattctaagtaactgcaaccctgccgtagacgc

SEQ ID NO: 818240 - DNA, 33 bp, Homo sapien
gattctaagtaactgcgaccctgccgtagacgc

SEQ ID NO: 818241 - DNA, 33 bp, Homo sapien
catctgcatggcaccacgttgggagtcattgac

SEQ ID NO: 818242 - DNA, 33 bp, Homo sapien
catctgcatggcaccatgttgggagtcattgac

SEQ ID NO: 818243 - DNA, 33 bp, Homo sapien
cagagcttgaatcacacggtcactgtgttgcta

SEQ ID NO: 818244 - DNA, 33 bp, Homo sapien
cagagcttgaatcacatggtcactgtgttgcta

SEQ ID NO: 818245 - DNA, 33 bp, Homo sapien
acagattagaggtaaaaagacacattcgggtgt

SEQ ID NO: 818246 - DNA, 33 bp, Homo sapien
acagattagaggtaaagagacacattcgggtgt

SEQ ID NO: 818247 - DNA, 33 bp, Homo sapien
aaagcctcaaaacatcagagcatcagaaataca

SEQ ID NO: 818248 - DNA, 33 bp, Homo sapien
aaagcctcaaaacatcggagcatcagaaataca

SEQ ID NO: 818249 - DNA, 33 bp, Homo sapien
gaagcttgtccagttccagggaagcagggtact

SEQ ID NO: 818250 - DNA, 33 bp, Homo sapien
gaagcttgtccagttcgagggaagcagggtact

SEQ ID NO: 818251 - DNA, 33 bp, Homo sapien
acctaggaatgagacccggctaaagactgtgct

SEQ ID NO: 818252 - DNA, 33 bp, Homo sapien
acctaggaatgagacctggctaaagactgtgct

SEQ ID NO: 818253 - DNA, 33 bp, Homo sapien
gttttattcactttcaacaaggagggagagttt

SEQ ID NO: 818254 - DNA, 33 bp, Homo sapien
gttttattcactttcagcaaggagggagagttt

SEQ ID NO: 818255 - DNA, 33 bp, Homo sapien
aaaagagtttcacagcagaataatccttaaacc

SEQ ID NO: 818256 - DNA, 33 bp, Homo sapien
aaaagagtttcacagccgaataatccttaaacc

SEQ ID NO: 818257 - DNA, 33 bp, Homo sapien
ctaacttgaagtctgaccctttataccagaact

SEQ ID NO: 818258 - DNA, 33 bp, Homo sapien
ctaacttgaagtctgatcctttataccagaact

SEQ ID NO: 818259 - DNA, 33 bp, Homo sapien
aaatgtcacacttcacgctcttgctgctgcgtt

SEQ ID NO: 818260 - DNA, 33 bp, Homo sapien
aaatgtcacacttcactctcttgctgctgcgtt

SEQ ID NO: 818261 - DNA, 33 bp, Homo sapien
ggaacaagtctatacccggacagagtaatggag

SEQ ID NO: 818262 - DNA, 33 bp, Homo sapien
ggaacaagtctatacctggacagagtaatggag

SEQ ID NO: 818263 - DNA, 33 bp, Homo sapien
ggtgaaaaacaattggaatttcagtgaggaact

SEQ ID NO: 818264 - DNA, 33 bp, Homo sapien
ggtgaaaaacaattggcatttcagtgaggaact

SEQ ID NO: 818265 - DNA, 33 bp, Homo sapien
ggaactggatgtaatacatgaaatggctcagat

SEQ ID NO: 818266 - DNA, 33 bp, Homo sapien
ggaactggatgtaatatatgaaatggctcagat

SEQ ID NO: 818267 - DNA, 33 bp, Homo sapien
tcagttcaaacttgtacaatttgcaaccaagtt

SEQ ID NO: 818268 - DNA, 33 bp, Homo sapien
tcagttcaaacttgtataatttgcaaccaagtt

SEQ ID NO: 818269 - DNA, 33 bp, Homo sapien
aaggccattgcatcatcagggcgtgttccatga

SEQ ID NO: 818270 - DNA, 33 bp, Homo sapien
aaggccattgcatcatgagggcgtgttccatga

SEQ ID NO: 818271 - DNA, 33 bp, Homo sapien
ggtagagatgagaatcaaactgggaaacgtaac

SEQ ID NO: 818272 - DNA, 33 bp, Homo sapien
ggtagagatgagaatcgaactgggaaacgtaac

SEQ ID NO: 818273 - DNA, 33 bp, Homo sapien
ggctgcccaggccagaaaggcaagcgtgaggca

SEQ ID NO: 818274 - DNA, 33 bp, Homo sapien
ggctgcccaggccagagaggcaagcgtgaggca

SEQ ID NO: 818275 - DNA, 33 bp, Homo sapien
ccacagctgtacccaaagagttcctgggctggg

SEQ ID NO: 818276 - DNA, 33 bp, Homo sapien
ccacagctgtacccaaggagttcctgggctggg

SEQ ID NO: 818277 - DNA, 33 bp, Homo sapien
gggagatgcaggctaaataacaaaggagaggat

SEQ ID NO: 818278 - DNA, 33 bp, Homo sapien
gggagatgcaggctaagtaacaaaggagaggat

SEQ ID NO: 818279 - DNA, 33 bp, Homo sapien
ctcatcttcagcaaaaagaagcccaatccatgt

SEQ ID NO: 818280 - DNA, 33 bp, Homo sapien
ctcatcttcagcaaaaggaagcccaatccatgt

SEQ ID NO: 818281 - DNA, 33 bp, Homo sapien
gaataaagggagaaaggctgtgagcacaaccac

SEQ ID NO: 818282 - DNA, 33 bp, Homo sapien
gaataaagggagaaagtctgtgagcacaaccac

SEQ ID NO: 818283 - DNA, 33 bp, Homo sapien
gacagtgcctagtagaacctcaagtatttgctg

SEQ ID NO: 818284 - DNA, 33 bp, Homo sapien
gacagtgcctagtagatcctcaagtatttgctg

SEQ ID NO: 818285 - DNA, 33 bp, Homo sapien
aattctcagaagagtcaatttttaccctttgag

SEQ ID NO: 818286 - DNA, 33 bp, Homo sapien
aattctcagaagagtctatttttaccctttgag

SEQ ID NO: 818287 - DNA, 33 bp, Homo sapien
tctggcccagtaacgacgatcacatggctccac

SEQ ID NO: 818288 - DNA, 33 bp, Homo sapien
tctggcccagtaacgaggatcacatggctccac

SEQ ID NO: 818289 - DNA, 33 bp, Homo sapien
aattccactttacctcaccacaaggagctggct

SEQ ID NO: 818290 - DNA, 33 bp, Homo sapien
aattccactttacctcgccacaaggagctggct

SEQ ID NO: 818291 - DNA, 33 bp, Homo sapien
agtctcagaagggaagaactacttacgtcttat

SEQ ID NO: 818292 - DNA, 33 bp, Homo sapien
agtctcagaagggaaggactacttacgtcttat

SEQ ID NO: 818293 - DNA, 33 bp, Homo sapien
actatcatcaacattacgtaattctcctaatgc

SEQ ID NO: 818294 - DNA, 33 bp, Homo sapien
actatcatcaacattatgtaattctcctaatgc

SEQ ID NO: 818295 - DNA, 33 bp, Homo sapien
accctactcagcacccaaggacctatcaacaag

SEQ ID NO: 818296 - DNA, 33 bp, Homo sapien
accctactcagcacccgaggacctatcaacaag

SEQ ID NO: 818297 - DNA, 33 bp, Homo sapien
taggtgtgtccccgtcaacgatcacggtgcgtc

SEQ ID NO: 818298 - DNA, 33 bp, Homo sapien
taggtgtgtccccgtctacgatcacggtgcgtc

SEQ ID NO: 818299 - DNA, 33 bp, Homo sapien
ctcagcccatctgggacaaacactgaatttatt

SEQ ID NO: 818300 - DNA, 33 bp, Homo sapien
ctcagcccatctgggagaaacactgaatttatt

SEQ ID NO: 818301 - DNA, 33 bp, Homo sapien
caggtgctcctcaagaccgaatgaagtaactga

SEQ ID NO: 818302 - DNA, 33 bp, Homo sapien
caggtgctcctcaagatcgaatgaagtaactga

SEQ ID NO: 818303 - DNA, 33 bp, Homo sapien
ttcaaacatgtgtgtcaacctagtgaataagat

SEQ ID NO: 818304 - DNA, 33 bp, Homo sapien
ttcaaacatgtgtgtcgacctagtgaataagat

SEQ ID NO: 818305 - DNA, 33 bp, Homo sapien
atgcaactgtgagaaaacatcaaatttcaaagg

SEQ ID NO: 818306 - DNA, 33 bp, Homo sapien
atgcaactgtgagaaatcatcaaatttcaaagg

SEQ ID NO: 818307 - DNA, 33 bp, Homo sapien
ccctgtatacctaataagttcagagatttttaa

SEQ ID NO: 818308 - DNA, 33 bp, Homo sapien
ccctgtatacctaatatgttcagagatttttaa

SEQ ID NO: 818309 - DNA, 33 bp, Homo sapien
tgcaatgttgcagacaatgagaaggagagaaga

SEQ ID NO: 818310 - DNA, 33 bp, Homo sapien
tgcaatgttgcagacagtgagaaggagagaaga

SEQ ID NO: 818311 - DNA, 33 bp, Homo sapien
cagggctgatacacaccgccctgtttgcaatgt

SEQ ID NO: 818312 - DNA, 33 bp, Homo sapien
cagggctgatacacactgccctgtttgcaatgt

SEQ ID NO: 818313 - DNA, 33 bp, Homo sapien
ttttgttcaccaataaataaaatgtctgtggga

SEQ ID NO: 818314 - DNA, 33 bp, Homo sapien
ttttgttcaccaataactaaaatgtctgtggga

SEQ ID NO: 818315 - DNA, 33 bp, Homo sapien
catgacagtcaaaaatcaactcttcgggcaggc

SEQ ID NO: 818316 - DNA, 33 bp, Homo sapien
catgacagtcaaaaattaactcttcgggcaggc

SEQ ID NO: 818317 - DNA, 33 bp, Homo sapien
aacgacaacaagagacaataagaaaatttcagg

SEQ ID NO: 818318 - DNA, 33 bp, Homo sapien
aacgacaacaagagacgataagaaaatttcagg

SEQ ID NO: 818319 - DNA, 33 bp, Homo sapien
tgtgtccctgcattaacacctgtggatctggtg

SEQ ID NO: 818320 - DNA, 33 bp, Homo sapien
tgtgtccctgcattaatacctgtggatctggtg

SEQ ID NO: 818321 - DNA, 33 bp, Homo sapien
aagtaaaacatgataacatagagtgtggaataa

SEQ ID NO: 818322 - DNA, 33 bp, Homo sapien
aagtaaaacatgataatatagagtgtggaataa

SEQ ID NO: 818323 - DNA, 33 bp, Homo sapien
tccatctttcagaaacagcaatcagaaaatgaa

SEQ ID NO: 818324 - DNA, 33 bp, Homo sapien
tccatctttcagaaacggcaatcagaaaatgaa

SEQ ID NO: 818325 - DNA, 33 bp, Homo sapien
aggcagtctataaagacacaatggtactgcgcc

SEQ ID NO: 818326 - DNA, 33 bp, Homo sapien
aggcagtctataaagagacaatggtactgcgcc

SEQ ID NO: 818327 - DNA, 33 bp, Homo sapien
gccaacacaccctatacgcagacaggcgcagta

SEQ ID NO: 818328 - DNA, 33 bp, Homo sapien
gccaacacaccctatatgcagacaggcgcagta

SEQ ID NO: 818329 - DNA, 33 bp, Homo sapien
aaacccgactctcagcacacttagtgaattccc

SEQ ID NO: 818330 - DNA, 33 bp, Homo sapien
aaacccgactctcagcgcacttagtgaattccc

SEQ ID NO: 818331 - DNA, 33 bp, Homo sapien
cgttatgcccatcaggaatgtctacaggaagga

SEQ ID NO: 818332 - DNA, 33 bp, Homo sapien
cgttatgcccatcaggtatgtctacaggaagga

SEQ ID NO: 818333 - DNA, 33 bp, Homo sapien
ttttcctgtatcatacacagacaagtgaggggt

SEQ ID NO: 818334 - DNA, 33 bp, Homo sapien
ttttcctgtatcatacgcagacaagtgaggggt

SEQ ID NO: 818335 - DNA, 33 bp, Homo sapien
gtctctgaagctctcacagcagagaaaatacgt

SEQ ID NO: 818336 - DNA, 33 bp, Homo sapien
gtctctgaagctctcatagcagagaaaatacgt

SEQ ID NO: 818337 - DNA, 33 bp, Homo sapien
tagacttgcaggctacaaaaatcaacataaaaa

SEQ ID NO: 818338 - DNA, 33 bp, Homo sapien
tagacttgcaggctacgaaaatcaacataaaaa

SEQ ID NO: 818339 - DNA, 33 bp, Homo sapien
tgcattttccttgaaccggggcaaccgcggatc

SEQ ID NO: 818340 - DNA, 33 bp, Homo sapien
tgcattttccttgaactggggcaaccgcggatc

SEQ ID NO: 818341 - DNA, 33 bp, Homo sapien
tacagaagttagaacacggacgggctggatgta

SEQ ID NO: 818342 - DNA, 33 bp, Homo sapien
tacagaagttagaacatggacgggctggatgta

SEQ ID NO: 818343 - DNA, 33 bp, Homo sapien
gtttatcaaaataccaatgcatcaaacggagag

SEQ ID NO: 818344 - DNA, 33 bp, Homo sapien
gtttatcaaaataccagtgcatcaaacggagag

SEQ ID NO: 818345 - DNA, 33 bp, Homo sapien
gtgtagggacagaagacgacgaagtgaattcct

SEQ ID NO: 818346 - DNA, 33 bp, Homo sapien
gtgtagggacagaagatgacgaagtgaattcct

SEQ ID NO: 818347 - DNA, 33 bp, Homo sapien
ggtcccatgactatgacggagctgaagaattcc

SEQ ID NO: 818348 - DNA, 33 bp, Homo sapien
ggtcccatgactatgatggagctgaagaattcc

SEQ ID NO: 818349 - DNA, 33 bp, Homo sapien
atggagtggaactgaagcaataaagagactcaa

SEQ ID NO: 818350 - DNA, 33 bp, Homo sapien
atggagtggaactgaatcaataaagagactcaa

SEQ ID NO: 818351 - DNA, 33 bp, Homo sapien
cttccgtggctactgtaaagcatttagggacag

SEQ ID NO: 818352 - DNA, 33 bp, Homo sapien
cttccgtggctactgtgaagcatttagggacag

SEQ ID NO: 818353 - DNA, 33 bp, Homo sapien
caagatgtcaaacaccacgttccaacccagcac

SEQ ID NO: 818354 - DNA, 33 bp, Homo sapien
caagatgtcaaacaccgcgttccaacccagcac

SEQ ID NO: 818355 - DNA, 33 bp, Homo sapien
ggatgctctgacttgcacaatttcaatacatag

SEQ ID NO: 818356 - DNA, 33 bp, Homo sapien
ggatgctctgacttgcgcaatttcaatacatag

SEQ ID NO: 818357 - DNA, 33 bp, Homo sapien
agcgtatgctctgagacatgcaggaggacactc

SEQ ID NO: 818358 - DNA, 33 bp, Homo sapien
agcgtatgctctgagagatgcaggaggacactc

SEQ ID NO: 818359 - DNA, 33 bp, Homo sapien
agaggctacaataacccatcagaaaaaggaggg

SEQ ID NO: 818360 - DNA, 33 bp, Homo sapien
agaggctacaataacctatcagaaaaaggaggg

SEQ ID NO: 818361 - DNA, 33 bp, Homo sapien
cctcttccctggtctcccagcttctatccttga

SEQ ID NO: 818362 - DNA, 33 bp, Homo sapien
cctcttccctggtctcgcagcttctatccttga

SEQ ID NO: 818363 - DNA, 33 bp, Homo sapien
ctgggggatctgggggaacctggtttgtttcgc

SEQ ID NO: 818364 - DNA, 33 bp, Homo sapien
ctgggggatctggggggacctggtttgtttcgc

SEQ ID NO: 818365 - DNA, 33 bp, Homo sapien
gtgggctccacaacccaatgagtagtcggtgcg

SEQ ID NO: 818366 - DNA, 33 bp, Homo sapien
gtgggctccacaacccgatgagtagtcggtgcg

SEQ ID NO: 818367 - DNA, 33 bp, Homo sapien
ttatgcagttagattccacacatatctcaaacc

SEQ ID NO: 818368 - DNA, 33 bp, Homo sapien
ttatgcagttagattctacacatatctcaaacc

SEQ ID NO: 818369 - DNA, 33 bp, Homo sapien
ttccaggtcgccacttaaagaataaagaaaata

SEQ ID NO: 818370 - DNA, 33 bp, Homo sapien
ttccaggtcgccacttgaagaataaagaaaata

SEQ ID NO: 818371 - DNA, 33 bp, Homo sapien
ttaagctaaactggaaaaaaaggtatttcacaa

SEQ ID NO: 818372 - DNA, 33 bp, Homo sapien
ttaagctaaactggaagaaaaggtatttcacaa

SEQ ID NO: 818373 - DNA, 33 bp, Homo sapien
gctctctaacttcagaactttctgctgggtgtt

SEQ ID NO: 818374 - DNA, 33 bp, Homo sapien
gctctctaacttcagacctttctgctgggtgtt

SEQ ID NO: 818375 - DNA, 33 bp, Homo sapien
ttttatgaaatacaaccgaatttattcttgcat

SEQ ID NO: 818376 - DNA, 33 bp, Homo sapien
ttttatgaaatacaactgaatttattcttgcat

SEQ ID NO: 818377 - DNA, 33 bp, Homo sapien
ggactccagaataacccgagtgctgtgacctgg

SEQ ID NO: 818378 - DNA, 33 bp, Homo sapien
ggactccagaataacctgagtgctgtgacctgg

SEQ ID NO: 818379 - DNA, 33 bp, Homo sapien
gtggcctcctatgctcacattctagggactgtg

SEQ ID NO: 818380 - DNA, 33 bp, Homo sapien
gtggcctcctatgctcgcattctagggactgtg

SEQ ID NO: 818381 - DNA, 33 bp, Homo sapien
caatcatcataattcacgaggaaaccaagactg

SEQ ID NO: 818382 - DNA, 33 bp, Homo sapien
caatcatcataattcatgaggaaaccaagactg

SEQ ID NO: 818383 - DNA, 33 bp, Homo sapien
catggggaggtgaagaagaaaactggacgatga

SEQ ID NO: 818384 - DNA, 33 bp, Homo sapien
catggggaggtgaagaggaaaactggacgatga

SEQ ID NO: 818385 - DNA, 33 bp, Homo sapien
accctggaggaatgaggatctgctgttgtgaat

SEQ ID NO: 818386 - DNA, 33 bp, Homo sapien
accctggaggaatgagtatctgctgttgtgaat

SEQ ID NO: 818387 - DNA, 33 bp, Homo sapien
cagggggctggcaacaataaagagagtgaggtg

SEQ ID NO: 818388 - DNA, 33 bp, Homo sapien
cagggggctggcaacagtaaagagagtgaggtg

SEQ ID NO: 818389 - DNA, 33 bp, Homo sapien
attctaagttacaggacaagataggtcagccca

SEQ ID NO: 818390 - DNA, 33 bp, Homo sapien
attctaagttacaggataagataggtcagccca

SEQ ID NO: 818391 - DNA, 33 bp, Homo sapien
ggctggagagcagtgggaagaacctagctcact

SEQ ID NO: 818392 - DNA, 33 bp, Homo sapien
ggctggagagcagtggtaagaacctagctcact

SEQ ID NO: 818393 - DNA, 33 bp, Homo sapien
agcctcccagcagaaaagcctttccaagttcct

SEQ ID NO: 818394 - DNA, 33 bp, Homo sapien
agcctcccagcagaaacgcctttccaagttcct

SEQ ID NO: 818395 - DNA, 33 bp, Homo sapien
acaggtttcttctctcactacctggctaccagg

SEQ ID NO: 818396 - DNA, 33 bp, Homo sapien
acaggtttcttctctcgctacctggctaccagg

SEQ ID NO: 818397 - DNA, 33 bp, Homo sapien
ggttatgttttacaaaatctgtttctttagaga

SEQ ID NO: 818398 - DNA, 33 bp, Homo sapien
ggttatgttttacaaagtctgtttctttagaga

SEQ ID NO: 818399 - DNA, 33 bp, Homo sapien
agatagaaagaaagcacgtgaagagttgtggca

SEQ ID NO: 818400 - DNA, 33 bp, Homo sapien
agatagaaagaaagcatgtgaagagttgtggca

SEQ ID NO: 818401 - DNA, 33 bp, Homo sapien
aacagccatgaatatactaaacctgaagataat

SEQ ID NO: 818402 - DNA, 33 bp, Homo sapien
aacagccatgaatatattaaacctgaagataat

SEQ ID NO: 818403 - DNA, 33 bp, Homo sapien
aaatcatgtgaaaattaaaacctctggctgtct

SEQ ID NO: 818404 - DNA, 33 bp, Homo sapien
aaatcatgtgaaaattgaaacctctggctgtct

SEQ ID NO: 818405 - DNA, 33 bp, Homo sapien
cgcttcttagtatttgcacagtggaaacgtgct

SEQ ID NO: 818406 - DNA, 33 bp, Homo sapien
cgcttcttagtatttggacagtggaaacgtgct

SEQ ID NO: 818407 - DNA, 33 bp, Homo sapien
gcttcagtttcaactacgtgtggcaaacatctc

SEQ ID NO: 818408 - DNA, 33 bp, Homo sapien
gcttcagtttcaactaggtgtggcaaacatctc

SEQ ID NO: 818409 - DNA, 33 bp, Homo sapien
tcagcgtcctacataccacgtgcagatcatcag

SEQ ID NO: 818410 - DNA, 33 bp, Homo sapien
tcagcgtcctacatactacgtgcagatcatcag

SEQ ID NO: 818411 - DNA, 33 bp, Homo sapien
gttactgaatgagaaacggctaccgtatccaga

SEQ ID NO: 818412 - DNA, 33 bp, Homo sapien
gttactgaatgagaaatggctaccgtatccaga

SEQ ID NO: 818413 - DNA, 33 bp, Homo sapien
actctggtttatatgacgtcctctctccagtag

SEQ ID NO: 818414 - DNA, 33 bp, Homo sapien
actctggtttatatgaggtcctctctccagtag

SEQ ID NO: 818415 - DNA, 33 bp, Homo sapien
ttatagcaaatattgggaagtgcacagttaagg

SEQ ID NO: 818416 - DNA, 33 bp, Homo sapien
ttatagcaaatattggtaagtgcacagttaagg

SEQ ID NO: 818417 - DNA, 33 bp, Homo sapien
ctgatgtttctcctccaatctagctcctccttt

SEQ ID NO: 818418 - DNA, 33 bp, Homo sapien
ctgatgtttctcctccgatctagctcctccttt

SEQ ID NO: 818419 - DNA, 33 bp, Homo sapien
ggcctcctccccgttaaagactgtggagaggag

SEQ ID NO: 818420 - DNA, 33 bp, Homo sapien
ggcctcctccccgttatagactgtggagaggag

SEQ ID NO: 818421 - DNA, 33 bp, Homo sapien
caggcaggtggtgggacaaggagactgagctca

SEQ ID NO: 818422 - DNA, 33 bp, Homo sapien
caggcaggtggtgggagaaggagactgagctca

SEQ ID NO: 818423 - DNA, 33 bp, Homo sapien
tagtaacagaattagacgttatgaagagcctta

SEQ ID NO: 818424 - DNA, 33 bp, Homo sapien
tagtaacagaattagatgttatgaagagcctta

SEQ ID NO: 818425 - DNA, 33 bp, Homo sapien; identical to SEQ ID NO: 818423

SEQ ID NO: 818426 - DNA, 33 bp, Homo sapien; identical to SEQ ID NO: 818424

SEQ ID NO: 818427 - DNA, 33 bp, Homo sapien
ttcataatctccttaacgcagagaaaggtagca

SEQ ID NO: 818428 - DNA, 33 bp, Homo sapien
ttcataatctccttaatgcagagaaaggtagca

SEQ ID NO: 818429 - DNA, 33 bp, Homo sapien
aatcagggccttccaacgtgattacaagattgg

SEQ ID NO: 818430 - DNA, 33 bp, Homo sapien
aatcagggccttccaatgtgattacaagattgg

SEQ ID NO: 818431 - DNA, 33 bp, Homo sapien
acattacaggcaggcaataccagaccactgtgc

SEQ ID NO: 818432 - DNA, 33 bp, Homo sapien
acattacaggcaggcagtaccagaccactgtgc

SEQ ID NO: 818433 - DNA, 33 bp, Homo sapien
ctgaataacagggagggatgattgcaaaggtca

SEQ ID NO: 818434 - DNA, 33 bp, Homo sapien
ctgaataacagggaggtatgattgcaaaggtca

SEQ ID NO: 818435 - DNA, 33 bp, Homo sapien
gttttggggccactacaacctttggatgtggac

SEQ ID NO: 818436 - DNA, 33 bp, Homo sapien
gttttggggccactacgacctttggatgtggac

SEQ ID NO: 818437 - DNA, 33 bp, Homo sapien
ttagttgccttcaccaaaaccgaagaagtttag

SEQ ID NO: 818438 - DNA, 33 bp, Homo sapien
ttagttgccttcaccagaaccgaagaagtttag

SEQ ID NO: 818439 - DNA, 33 bp, Homo sapien
tgagaagcagagggagaacctcaagagactgcc

SEQ ID NO: 818440 - DNA, 33 bp, Homo sapien
tgagaagcagagggaggacctcaagagactgcc

SEQ ID NO: 818441 - DNA, 33 bp, Homo sapien
tgtgtgatgaggagagaaagagatacaacagat

SEQ ID NO: 818442 - DNA, 33 bp, Homo sapien
tgtgtgatgaggagaggaagagatacaacagat

SEQ ID NO: 818443 - DNA, 33 bp, Homo sapien
cagcatcggccagctcaaagaccagcatgggtg

SEQ ID NO: 818444 - DNA, 33 bp, Homo sapien
cagcatcggccagctcgaagaccagcatgggtg

SEQ ID NO: 818445 - DNA, 33 bp, Homo sapien
cgtgtgcgattagtcactaagtcttagtagtga

SEQ ID NO: 818446 - DNA, 33 bp, Homo sapien
cgtgtgcgattagtcagtaagtcttagtagtga

SEQ ID NO: 818447 - DNA, 33 bp, Homo sapien
atttcaaaggccagggcgatccaagctgatatt

SEQ ID NO: 818448 - DNA, 33 bp, Homo sapien
atttcaaaggccagggtgatccaagctgatatt

SEQ ID NO: 818449 - DNA, 33 bp, Homo sapien
ctagctgactctgtgtctctaaccgtctgtaga

SEQ ID NO: 818450 - DNA, 33 bp, Homo sapien
ctagctgactctgtgtttctaaccgtctgtaga

SEQ ID NO: 818451 - DNA, 33 bp, Homo sapien
cattctcaaaattctcaaaattcaaaggaaaac

SEQ ID NO: 818452 - DNA, 33 bp, Homo sapien
cattctcaaaattctccaaattcaaaggaaaac

SEQ ID NO: 818453 - DNA, 33 bp, Homo sapien
tgctcattctcgtgtaaggctgcaggtttccag

SEQ ID NO: 818454 - DNA, 33 bp, Homo sapien
tgctcattctcgtgtagggctgcaggtttccag

SEQ ID NO: 818455 - DNA, 33 bp, Homo sapien
ttcaccgctctggtcacgcccttcccctgaaca

SEQ ID NO: 818456 - DNA, 33 bp, Homo sapien
ttcaccgctctggtcatgcccttcccctgaaca

SEQ ID NO: 818457 - DNA, 33 bp, Homo sapien
gcttattatatttcacagaagccttttgttttg

SEQ ID NO: 818458 - DNA, 33 bp, Homo sapien
gcttattatatttcacggaagccttttgttttg

SEQ ID NO: 818459 - DNA, 33 bp, Homo sapien
ttaaatggacattggccgcaggaagagtgtgtt

SEQ ID NO: 818460 - DNA, 33 bp, Homo sapien
ttaaatggacattggctgcaggaagagtgtgtt

SEQ ID NO: 818461 - DNA, 33 bp, Homo sapien
ataagtgaggaattaaactacaagtatgaatag

SEQ ID NO: 818462 - DNA, 33 bp, Homo sapien
ataagtgaggaattaagctacaagtatgaatag

SEQ ID NO: 818463 - DNA, 33 bp, Homo sapien
agagaccgcagggagccgaggactgaaggagag

SEQ ID NO: 818464 - DNA, 33 bp, Homo sapien
agagaccgcagggagctgaggactgaaggagag

SEQ ID NO: 818465 - DNA, 33 bp, Homo sapien
aattctgaaaaaagccactgaacccatgaggcc

SEQ ID NO: 818466 - DNA, 33 bp, Homo sapien
aattctgaaaaaagcctctgaacccatgaggcc

SEQ ID NO: 818467 - DNA, 33 bp, Homo sapien
aaagaaacactcttagacactttaatactcctc

SEQ ID NO: 818468 - DNA, 33 bp, Homo sapien
aaagaaacactcttagccactttaatactcctc

SEQ ID NO: 818469 - DNA, 33 bp, Homo sapien
tctgggctttctagaacgatgctgagactccct

SEQ ID NO: 818470 - DNA, 33 bp, Homo sapien
tctgggctttctagaatgatgctgagactccct

SEQ ID NO: 818471 - DNA, 33 bp, Homo sapien
atagccaagaaatctccatcttaggaatacaaa

SEQ ID NO: 818472 - DNA, 33 bp, Homo sapien
atagccaagaaatctctatcttaggaatacaaa

SEQ ID NO: 818473 - DNA, 33 bp, Homo sapien
gttacccaccacaagacctgattatcatttaca

SEQ ID NO: 818474 - DNA, 33 bp, Homo sapien
gttacccaccacaagatctgattatcatttaca

SEQ ID NO: 818475 - DNA, 33 bp, Homo sapien
tagagtttcatgttctaaattctgctgaagata

SEQ ID NO: 818476 - DNA, 33 bp, Homo sapien
tagagtttcatgttctcaattctgctgaagata

SEQ ID NO: 818477 - DNA, 33 bp, Homo sapien
tctaatagttgcccaccgaaggatttcactgca

SEQ ID NO: 818478 - DNA, 33 bp, Homo sapien
tctaatagttgcccactgaaggatttcactgca

SEQ ID NO: 818479 - DNA, 33 bp, Homo sapien
atcagcccaatgagtacggatgaaggtatactg

SEQ ID NO: 818480 - DNA, 33 bp, Homo sapien
atcagcccaatgagtatggatgaaggtatactg

SEQ ID NO: 818481 - DNA, 33 bp, Homo sapien
cagtcccatagtcagccatttctccaaggaacc

SEQ ID NO: 818482 - DNA, 33 bp, Homo sapien
cagtcccatagtcagcgatttctccaaggaacc

SEQ ID NO: 818483 - DNA, 33 bp, Homo sapien
cataaaacaatgttagaattttgatagagatat

SEQ ID NO: 818484 - DNA, 33 bp, Homo sapien
cataaaacaatgttaggattttgatagagatat

SEQ ID NO: 818485 - DNA, 33 bp, Homo sapien
ctcttaaatttgactgcaagagtgaattataca

SEQ ID NO: 818486 - DNA, 33 bp, Homo sapien
ctcttaaatttgactggaagagtgaattataca

SEQ ID NO: 818487 - DNA, 33 bp, Homo sapien
cccggggtctgatgtacgtagagcgggcgccag

SEQ ID NO: 818488 - DNA, 33 bp, Homo sapien
cccggggtctgatgtatgtagagcgggcgccag

SEQ ID NO: 818489 - DNA, 33 bp, Homo sapien
agcagtacctatcttacctctgatgtaattaaa

SEQ ID NO: 818490 - DNA, 33 bp, Homo sapien
agcagtacctatcttatctctgatgtaattaaa

SEQ ID NO: 818491 - DNA, 33 bp, Homo sapien
tcatctagcctgaggaacccttgatacatgatg

SEQ ID NO: 818492 - DNA, 33 bp, Homo sapien
tcatctagcctgaggagcccttgatacatgatg

SEQ ID NO: 818493 - DNA, 33 bp, Homo sapien
ggccttgttgagaaaaagactcagaggaacctg

SEQ ID NO: 818494 - DNA, 33 bp, Homo sapien
ggccttgttgagaaaaggactcagaggaacctg

SEQ ID NO: 818495 - DNA, 33 bp, Homo sapien
tctcctgccttttttaagatgtggcagtagaca

SEQ ID NO: 818496 - DNA, 33 bp, Homo sapien
tctcctgccttttttaggatgtggcagtagaca

SEQ ID NO: 818497 - DNA, 33 bp, Homo sapien
gaatgaagatcttagaaacgtaatagaaacctg

SEQ ID NO: 818498 - DNA, 33 bp, Homo sapien
gaatgaagatcttagagacgtaatagaaacctg

SEQ ID NO: 818499 - DNA, 33 bp, Homo sapien
ccggaacaagaaacacgctttccctccgtggat

SEQ ID NO: 818500 - DNA, 33 bp, Homo sapien
ccggaacaagaaacactctttccctccgtggat

SEQ ID NO: 818501 - DNA, 33 bp, Homo sapien
tttttccctggtgatacgtacagagaacactcc

SEQ ID NO: 818502 - DNA, 33 bp, Homo sapien
tttttccctggtgataggtacagagaacactcc

SEQ ID NO: 818503 - DNA, 33 bp, Homo sapien
ttgaaagtagttgaaacttactgaaaagtactc

SEQ ID NO: 818504 - DNA, 33 bp, Homo sapien
ttgaaagtagttgaaatttactgaaaagtactc

SEQ ID NO: 818505 - DNA, 33 bp, Homo sapien
tttccgtgaccatgcgcacaaataatcctgctt

SEQ ID NO: 818506 - DNA, 33 bp, Homo sapien
tttccgtgaccatgcgtacaaataatcctgctt

SEQ ID NO: 818507 - DNA, 33 bp, Homo sapien
cgcctaccctttgtcactctccttgtgcctggt

SEQ ID NO: 818508 - DNA, 33 bp, Homo sapien
cgcctaccctttgtcattctccttgtgcctggt

SEQ ID NO: 818509 - DNA, 33 bp, Homo sapien
caccaacccgggcagcaatatgaattctgtgac

SEQ ID NO: 818510 - DNA, 33 bp, Homo sapien
caccaacccgggcagccatatgaattctgtgac

SEQ ID NO: 818511 - DNA, 33 bp, Homo sapien
tcactcccagcctctcgctgtcctcactttgca

SEQ ID NO: 818512 - DNA, 33 bp, Homo sapien
tcactcccagcctctctctgtcctcactttgca

SEQ ID NO: 818513 - DNA, 33 bp, Homo sapien
acaccctctatatgcacaggaaaactgctcttc

SEQ ID NO: 818514 - DNA, 33 bp, Homo sapien
acaccctctatatgcataggaaaactgctcttc

SEQ ID NO: 818515 - DNA, 33 bp, Homo sapien
ggagaggagattgcctcagcagctgaaatgccg

SEQ ID NO: 818516 - DNA, 33 bp, Homo sapien
ggagaggagattgcctgagcagctgaaatgccg

SEQ ID NO: 818517 - DNA, 33 bp, Homo sapien
tgaaaggacttgggataaaaacacacttttagc

SEQ ID NO: 818518 - DNA, 33 bp, Homo sapien
tgaaaggacttgggatgaaaacacacttttagc

SEQ ID NO: 818519 - DNA, 33 bp, Homo sapien
gagactgccggtgctacaactgtgttcccacgt

SEQ ID NO: 818520 - DNA, 33 bp, Homo sapien
gagactgccggtgctagaactgtgttcccacgt

SEQ ID NO: 818521 - DNA, 33 bp, Homo sapien
tctgacacacgtctcactaaggaacgagcccag

SEQ ID NO: 818522 - DNA, 33 bp, Homo sapien
tctgacacacgtctcattaaggaacgagcccag

SEQ ID NO: 818523 - DNA, 33 bp, Homo sapien
gaatctatgctccccacacctccttggcccagc

SEQ ID NO: 818524 - DNA, 33 bp, Homo sapien
gaatctatgctccccatacctccttggcccagc

SEQ ID NO: 818525 - DNA, 33 bp, Homo sapien
atagattcatataagacagagtggttcagtctg

SEQ ID NO: 818526 - DNA, 33 bp, Homo sapien
atagattcatataagagagagtggttcagtctg

SEQ ID NO: 818527 - DNA, 33 bp, Homo sapien
ataccattttccatcaatacacacagggagagc

SEQ ID NO: 818528 - DNA, 33 bp, Homo sapien
ataccattttccatcagtacacacagggagagc

SEQ ID NO: 818529 - DNA, 33 bp, Homo sapien
gctttcaggcttgtagaaaatgagacttgtgat

SEQ ID NO: 818530 - DNA, 33 bp, Homo sapien
gctttcaggcttgtaggaaatgagacttgtgat

SEQ ID NO: 818531 - DNA, 33 bp, Homo sapien
cggataattcactaaacaagtaacttcctcgtg

SEQ ID NO: 818532 - DNA, 33 bp, Homo sapien
cggataattcactaaataagtaacttcctcgtg

SEQ ID NO: 818533 - DNA, 33 bp, Homo sapien
ggtaatgaggccatccagagttttagtgattaa

SEQ ID NO: 818534 - DNA, 33 bp, Homo sapien
ggtaatgaggccatccggagttttagtgattaa

SEQ ID NO: 818535 - DNA, 33 bp, Homo sapien
ctgagttgtacaggacaggtaaagaaatacatg

SEQ ID NO: 818536 - DNA, 33 bp, Homo sapien
ctgagttgtacaggacgggtaaagaaatacatg

SEQ ID NO: 818537 - DNA, 33 bp, Homo sapien
cactgaaccctttggaggttttaggaatatttg

SEQ ID NO: 818538 - DNA, 33 bp, Homo sapien
cactgaaccctttggatgttttaggaatatttg

SEQ ID NO: 818539 - DNA, 33 bp, Homo sapien
gaggcaatgcttagaactgtgtaaagtgatgga

SEQ ID NO: 818540 - DNA, 33 bp, Homo sapien
gaggcaatgcttagaattgtgtaaagtgatgga

SEQ ID NO: 818541 - DNA, 33 bp, Homo sapien
cctgaaaagagccgccacatcagcagacgtatt

SEQ ID NO: 818542 - DNA, 33 bp, Homo sapien
cctgaaaagagccgccgcatcagcagacgtatt

SEQ ID NO: 818543 - DNA, 33 bp, Homo sapien
attaaggattcccaccaaacactctcatgttat

SEQ ID NO: 818544 - DNA, 33 bp, Homo sapien
attaaggattcccaccgaacactctcatgttat

SEQ ID NO: 818545 - DNA, 33 bp, Homo sapien
tggacaagttttcattgaaaaaatcagaatgtt

SEQ ID NO: 818546 - DNA, 33 bp, Homo sapien
tggacaagttttcatttaaaaaatcagaatgtt

SEQ ID NO: 818547 - DNA, 33 bp, Homo sapien
tggcccttctctcacgccccctctacttcagct

SEQ ID NO: 818548 - DNA, 33 bp, Homo sapien
tggcccttctctcacgtcccctctacttcagct

SEQ ID NO: 818549 - DNA, 33 bp, Homo sapien
aaggtgaacacttggagatctgatttcagagac

SEQ ID NO: 818550 - DNA, 33 bp, Homo sapien
aaggtgaacacttggatatctgatttcagagac

SEQ ID NO: 818551 - DNA, 33 bp, Homo sapien
tgtaatcagtagaagcaatgaagctgagaaagg

SEQ ID NO: 818552 - DNA, 33 bp, Homo sapien
tgtaatcagtagaagcgatgaagctgagaaagg

SEQ ID NO: 818553 - DNA, 33 bp, Homo sapien
ttcataatgctacactaaaacagagaatatatg

SEQ ID NO: 818554 - DNA, 33 bp, Homo sapien
ttcataatgctacactgaaacagagaatatatg

SEQ ID NO: 818555 - DNA, 33 bp, Homo sapien
ctgttgctataatggaataccatagagtgggta

SEQ ID NO: 818556 - DNA, 33 bp, Homo sapien
ctgttgctataatggactaccatagagtgggta

SEQ ID NO: 818557 - DNA, 33 bp, Homo sapien
gctaggcaccatgggaaacagatgggaatttgg

SEQ ID NO: 818558 - DNA, 33 bp, Homo sapien
gctaggcaccatgggagacagatgggaatttgg

SEQ ID NO: 818559 - DNA, 33 bp, Homo sapien
aggcaatacacacaaaacgcctctaaagaagag

SEQ ID NO: 818560 - DNA, 33 bp, Homo sapien
aggcaatacacacaaaccgcctctaaagaagag

SEQ ID NO: 818561 - DNA, 33 bp, Homo sapien
gattccacgggtgccacgtctggacaactgagg

SEQ ID NO: 818562 - DNA, 33 bp, Homo sapien
gattccacgggtgccatgtctggacaactgagg

SEQ ID NO: 818563 - DNA, 33 bp, Homo sapien
ggatacggggacgcagactaccgcttgggctac

SEQ ID NO: 818564 - DNA, 33 bp, Homo sapien
ggatacggggacgcagcctaccgcttgggctac

SEQ ID NO: 818565 - DNA, 33 bp, Homo sapien
ttgcaacatttcccttcgggttccagcctcaca

SEQ ID NO: 818566 - DNA, 33 bp, Homo sapien
ttgcaacatttccctttgggttccagcctcaca

SEQ ID NO: 818567 - DNA, 33 bp, Homo sapien
tcccagtggtaggagacccttagttcattcatg

SEQ ID NO: 818568 - DNA, 33 bp, Homo sapien
tcccagtggtaggagatccttagttcattcatg

SEQ ID NO: 818569 - DNA, 33 bp, Homo sapien
aaaacgggaatgaaaaaatctggcaatacccag

SEQ ID NO: 818570 - DNA, 33 bp, Homo sapien
aaaacgggaatgaaaacatctggcaatacccag

SEQ ID NO: 818571 - DNA, 33 bp, Homo sapien
tcccactgaggaatgccatagtattctgttttt

SEQ ID NO: 818572 - DNA, 33 bp, Homo sapien
tcccactgaggaatgctatagtattctgttttt

SEQ ID NO: 818573 - DNA, 33 bp, Homo sapien
tataaggcatcagagcaattcttggtctgctgc

SEQ ID NO: 818574 - DNA, 33 bp, Homo sapien
tataaggcatcagagctattcttggtctgctgc

SEQ ID NO: 818575 - DNA, 33 bp, Homo sapien
ccctctgcactgtcaacgtccaagctcagggac

SEQ ID NO: 818576 - DNA, 33 bp, Homo sapien
ccctctgcactgtcaatgtccaagctcagggac

SEQ ID NO: 818577 - DNA, 33 bp, Homo sapien
gcacttaaatatttggaaacctgtttgtacatt

SEQ ID NO: 818578 - DNA, 33 bp, Homo sapien
gcacttaaatatttgggaacctgtttgtacatt

SEQ ID NO: 818579 - DNA, 33 bp, Homo sapien
ttaactctaccttaaactccatccagaatgtgc

SEQ ID NO: 818580 - DNA, 33 bp, Homo sapien
ttaactctaccttaaagtccatccagaatgtgc

SEQ ID NO: 818581 - DNA, 33 bp, Homo sapien
tgcctgtttgccaaaaacaaatcaaaacctcag

SEQ ID NO: 818582 - DNA, 33 bp, Homo sapien
tgcctgtttgccaaaagcaaatcaaaacctcag

SEQ ID NO: 818583 - DNA, 33 bp, Homo sapien
ggaagcaccccatcaccgcgagttcaaaaacag

SEQ ID NO: 818584 - DNA, 33 bp, Homo sapien
ggaagcaccccatcactgcgagttcaaaaacag

SEQ ID NO: 818585 - DNA, 33 bp, Homo sapien
caaccatctgctggagaaatttgcataattaaa

SEQ ID NO: 818586 - DNA, 33 bp, Homo sapien
caaccatctgctggaggaatttgcataattaaa

SEQ ID NO: 818587 - DNA, 33 bp, Homo sapien
aaactatgacactatgacacttccacagggggt

SEQ ID NO: 818588 - DNA, 33 bp, Homo sapien
aaactatgacactatgccacttccacagggggt

SEQ ID NO: 818589 - DNA, 33 bp, Homo sapien
tgtttctttttctacaactgccttttaagattt

SEQ ID NO: 818590 - DNA, 33 bp, Homo sapien
tgtttctttttctacagctgccttttaagattt

SEQ ID NO: 818591 - DNA, 33 bp, Homo sapien
taaaaaagttgaatggaaatgttagaaatgaaa

SEQ ID NO: 818592 - DNA, 33 bp, Homo sapien
taaaaaagttgaatggcaatgttagaaatgaaa

SEQ ID NO: 818593 - DNA, 33 bp, Homo sapien
aaaaaacattttcaagaaatcaagcaatcaaca

SEQ ID NO: 818594 - DNA, 33 bp, Homo sapien
aaaaaacattttcaaggaatcaagcaatcaaca

SEQ ID NO: 818595 - DNA, 33 bp, Homo sapien
tcaaggctaactggtccaaccatttacccaaat

SEQ ID NO: 818596 - DNA, 33 bp, Homo sapien
tcaaggctaactggtctaaccatttacccaaat

SEQ ID NO: 818597 - DNA, 33 bp, Homo sapien
tatctctgggagatacaaatacacaggccagac

SEQ ID NO: 818598 - DNA, 33 bp, Homo sapien
tatctctgggagatacgaatacacaggccagac

SEQ ID NO: 818599 - DNA, 33 bp, Homo sapien
tgatagactgagctcaaccaactcgtgcagttc

SEQ ID NO: 818600 - DNA, 33 bp, Homo sapien
tgatagactgagctcagccaactcgtgcagttc

SEQ ID NO: 818601 - DNA, 33 bp, Homo sapien
tgggagcaggttataaacttgtattgtgtcaaa

SEQ ID NO: 818602 - DNA, 33 bp, Homo sapien
tgggagcaggttataagcttgtattgtgtcaaa

SEQ ID NO: 818603 - DNA, 33 bp, Homo sapien
ctaacaggtctggaaaatggccctcaggtttct

SEQ ID NO: 818604 - DNA, 33 bp, Homo sapien
ctaacaggtctggaaagtggccctcaggtttct

SEQ ID NO: 818605 - DNA, 33 bp, Homo sapien
atgacatcagtaccaccaaaatagatttttatt

SEQ ID NO: 818606 - DNA, 33 bp, Homo sapien
atgacatcagtaccactaaaatagatttttatt

SEQ ID NO: 818607 - DNA, 33 bp, Homo sapien
aattctcctctttggacgggtctgttccagctg

SEQ ID NO: 818608 - DNA, 33 bp, Homo sapien
aattctcctctttggatgggtctgttccagctg

SEQ ID NO: 818609 - DNA, 33 bp, Homo sapien
aggtgtgcctggaaacaatctggacaatgaggt

SEQ ID NO: 818610 - DNA, 33 bp, Homo sapien
aggtgtgcctggaaaccatctggacaatgaggt

SEQ ID NO: 818611 - DNA, 33 bp, Homo sapien
tgccactcttctcaagaaaggtatcctgggatc

SEQ ID NO: 818612 - DNA, 33 bp, Homo sapien
tgccactcttctcaagcaaggtatcctgggatc

SEQ ID NO: 818613 - DNA, 33 bp, Homo sapien
actgcattcacggagacaccaggtgtgtgatgt

SEQ ID NO: 818614 - DNA, 33 bp, Homo sapien
actgcattcacggagataccaggtgtgtgatgt

SEQ ID NO: 818615 - DNA, 33 bp, Homo sapien
aaatcaataaggccaacagctggttctttgaga

SEQ ID NO: 818616 - DNA, 33 bp, Homo sapien
aaatcaataaggccaatagctggttctttgaga

SEQ ID NO: 818617 - DNA, 33 bp, Homo sapien
tctaactaaagtcagaaggttatacaaatttct

SEQ ID NO: 818618 - DNA, 33 bp, Homo sapien
tctaactaaagtcagagggttatacaaatttct

SEQ ID NO: 818619 - DNA, 33 bp, Homo sapien
gtaatacacgtaataaacctcaatgtaataaat

SEQ ID NO: 818620 - DNA, 33 bp, Homo sapien
gtaatacacgtaataagcctcaatgtaataaat

SEQ ID NO: 818621 - DNA, 33 bp, Homo sapien
aaatatatctttcagaacagttcacagatctat

SEQ ID NO: 818622 - DNA, 33 bp, Homo sapien
aaatatatctttcagagcagttcacagatctat

SEQ ID NO: 818623 - DNA, 33 bp, Homo sapien
tggcttcactggaataagttcaggtcaccggga

SEQ ID NO: 818624 - DNA, 33 bp, Homo sapien
tggcttcactggaataggttcaggtcaccggga

SEQ ID NO: 818625 - DNA, 33 bp, Homo sapien
agagactgactgataccagatttggaaagctat

SEQ ID NO: 818626 - DNA, 33 bp, Homo sapien
agagactgactgatacgagatttggaaagctat

SEQ ID NO: 818627 - DNA, 33 bp, Homo sapien
tattttcaacaatggacgcttaaaccccacaaa

SEQ ID NO: 818628 - DNA, 33 bp, Homo sapien
tattttcaacaatggatgcttaaaccccacaaa

SEQ ID NO: 818629 - DNA, 33 bp, Homo sapien
gtggcttcgctctaaacgaacagttcttaaaac

SEQ ID NO: 818630 - DNA, 33 bp, Homo sapien
gtggcttcgctctaaatgaacagttcttaaaac

SEQ ID NO: 818631 - DNA, 33 bp, Homo sapien
acatgaagatgatccaaactgcagcgctcgttg

SEQ ID NO: 818632 - DNA, 33 bp, Homo sapien
acatgaagatgatccacactgcagcgctcgttg

SEQ ID NO: 818633 - DNA, 33 bp, Homo sapien
tctgtgcccgcgggaaatgttttgtcgttatct

SEQ ID NO: 818634 - DNA, 33 bp, Homo sapien
tctgtgcccgcgggaagtgttttgtcgttatct

SEQ ID NO: 818635 - DNA, 33 bp, Homo sapien
tcaaaaactggcacaactagtcctatatttatt

SEQ ID NO: 818636 - DNA, 33 bp, Homo sapien
tcaaaaactggcacaagtagtcctatatttatt

SEQ ID NO: 818637 - DNA, 33 bp, Homo sapien
acaaagcaagaaagaacataagatttcacattc

SEQ ID NO: 818638 - DNA, 33 bp, Homo sapien
acaaagcaagaaagaagataagatttcacattc

SEQ ID NO: 818639 - DNA, 33 bp, Homo sapien
ttataagttgatcagacgtgtttctgctttcaa

SEQ ID NO: 818640 - DNA, 33 bp, Homo sapien
ttataagttgatcagatgtgtttctgctttcaa

SEQ ID NO: 818641 - DNA, 33 bp, Homo sapien
ttaaaaatttaatgccagccatgtttaatgtct

SEQ ID NO: 818642 - DNA, 33 bp, Homo sapien
ttaaaaatttaatgcccgccatgtttaatgtct

SEQ ID NO: 818643 - DNA, 33 bp, Homo sapien
cgtttcgtgaataaacagccagaaggaaaacag

SEQ ID NO: 818644 - DNA, 33 bp, Homo sapien
cgtttcgtgaataaacggccagaaggaaaacag

SEQ ID NO: 818645 - DNA, 33 bp, Homo sapien
tcatcagatttggtgcaatcttcttagggtctt

SEQ ID NO: 818646 - DNA, 33 bp, Homo sapien
tcatcagatttggtgcgatcttcttagggtctt

SEQ ID NO: 818647 - DNA, 33 bp, Homo sapien
gactgtcaaaagttatcacaaatcattccagtt

SEQ ID NO: 818648 - DNA, 33 bp, Homo sapien
gactgtcaaaagttattacaaatcattccagtt

SEQ ID NO: 818649 - DNA, 33 bp, Homo sapien
gttcccgtggcttcaaatatcatttctatctaa

SEQ ID NO: 818650 - DNA, 33 bp, Homo sapien
gttcccgtggcttcaagtatcatttctatctaa

SEQ ID NO: 818651 - DNA, 33 bp, Homo sapien
agaaggacacaaccacacagaggatggggggaa

SEQ ID NO: 818652 - DNA, 33 bp, Homo sapien
agaaggacacaaccactcagaggatggggggaa

SEQ ID NO: 818653 - DNA, 33 bp, Homo sapien
aagcaagcgtccacgaatcagggtgctccaggg

SEQ ID NO: 818654 - DNA, 33 bp, Homo sapien
aagcaagcgtccacgagtcagggtgctccaggg

SEQ ID NO: 818655 - DNA, 33 bp, Homo sapien
aagttcttccatgaaacgaacgtcaggtttcgc

SEQ ID NO: 818656 - DNA, 33 bp, Homo sapien
aagttcttccatgaaatgaacgtcaggtttcgc

SEQ ID NO: 818657 - DNA, 33 bp, Homo sapien
gcacttggagttcaaacatacaaagaaaaaagt

SEQ ID NO: 818658 - DNA, 33 bp, Homo sapien
gcacttggagttcaaatatacaaagaaaaaagt

SEQ ID NO: 818659 - DNA, 33 bp, Homo sapien
gatgaagaagaaaaaccgagtgaggcctttcca

SEQ ID NO: 818660 - DNA, 33 bp, Homo sapien
gatgaagaagaaaaactgagtgaggcctttcca

SEQ ID NO: 818661 - DNA, 33 bp, Homo sapien
atgtctcaggaacagacacagtggcccagacct

SEQ ID NO: 818662 - DNA, 33 bp, Homo sapien
atgtctcaggaacagagacagtggcccagacct

SEQ ID NO: 818663 - DNA, 33 bp, Homo sapien
aattttgatgtcctacaccagataaccctaaat

SEQ ID NO: 818664 - DNA, 33 bp, Homo sapien
aattttgatgtcctacgccagataaccctaaat

SEQ ID NO: 818665 - DNA, 33 bp, Homo sapien
tcctggcacatacaaaaatgtttgttccgttgt

SEQ ID NO: 818666 - DNA, 33 bp, Homo sapien
tcctggcacatacaaagatgtttgttccgttgt

SEQ ID NO: 818667 - DNA, 33 bp, Homo sapien
taagacaccatcagaagtacaggactaggtttt

SEQ ID NO: 818668 - DNA, 33 bp, Homo sapien
taagacaccatcagaattacaggactaggtttt

SEQ ID NO: 818669 - DNA, 33 bp, Homo sapien
cataacgatgctatacagacaggatcattaaca

SEQ ID NO: 818670 - DNA, 33 bp, Homo sapien
cataacgatgctatacggacaggatcattaaca

SEQ ID NO: 818671 - DNA, 33 bp, Homo sapien
cagttccatctactccacacagagtgtcaggca

SEQ ID NO: 818672 - DNA, 33 bp, Homo sapien
cagttccatctactccgcacagagtgtcaggca

SEQ ID NO: 818673 - DNA, 33 bp, Homo sapien
gatttaacccaagtaccacgtgcaaaatgaaag

SEQ ID NO: 818674 - DNA, 33 bp, Homo sapien
gatttaacccaagtactacgtgcaaaatgaaag

SEQ ID NO: 818675 - DNA, 33 bp, Homo sapien
atcagcacgaccctcaggaatctcaaattcaac

SEQ ID NO: 818676 - DNA, 33 bp, Homo sapien
atcagcacgaccctcatgaatctcaaattcaac

SEQ ID NO: 818677 - DNA, 33 bp, Homo sapien
tagtgagccatcgcagaagtttaacagaacgat

SEQ ID NO: 818678 - DNA, 33 bp, Homo sapien
tagtgagccatcgcaggagtttaacagaacgat

SEQ ID NO: 818679 - DNA, 33 bp, Homo sapien
gctttggtatgtagaaacatcttatgtcactgt

SEQ ID NO: 818680 - DNA, 33 bp, Homo sapien
gctttggtatgtagaagcatcttatgtcactgt

SEQ ID NO: 818681 - DNA, 33 bp, Homo sapien
catgttattatgcaccaaagaatttaatcttgc

SEQ ID NO: 818682 - DNA, 33 bp, Homo sapien
catgttattatgcaccgaagaatttaatcttgc

SEQ ID NO: 818683 - DNA, 33 bp, Homo sapien
acatggagtacttgcagccaaggaagctcccca

SEQ ID NO: 818684 - DNA, 33 bp, Homo sapien
acatggagtacttgcatccaaggaagctcccca

SEQ ID NO: 818685 - DNA, 33 bp, Homo sapien
ggcagtgccgggtttccatggcggaagctgcca

SEQ ID NO: 818686 - DNA, 33 bp, Homo sapien
ggcagtgccgggtttctatggcggaagctgcca

SEQ ID NO: 818687 - DNA, 33 bp, Homo sapien
gatgttcacgggtaaacgcaaagtcaaagagct

SEQ ID NO: 818688 - DNA, 33 bp, Homo sapien
gatgttcacgggtaaatgcaaagtcaaagagct

SEQ ID NO: 818689 - DNA, 33 bp, Homo sapien
aacctaaggacacagcagagaaaaaagaaacga

SEQ ID NO: 818690 - DNA, 33 bp, Homo sapien
aacctaaggacacagctgagaaaaaagaaacga

SEQ ID NO: 818691 - DNA, 33 bp, Homo sapien
actgactcttctagacagccattcccaggtaat

SEQ ID NO: 818692 - DNA, 33 bp, Homo sapien
actgactcttctagaccgccattcccaggtaat

SEQ ID NO: 818693 - DNA, 33 bp, Homo sapien
agagccacaaggcaaccgtactgtgttactctc

SEQ ID NO: 818694 - DNA, 33 bp, Homo sapien
agagccacaaggcaactgtactgtgttactctc

SEQ ID NO: 818695 - DNA, 33 bp, Homo sapien
tatcaaatgctgaccacgtgcaagacattacag

SEQ ID NO: 818696 - DNA, 33 bp, Homo sapien
tatcaaatgctgaccaggtgcaagacattacag

SEQ ID NO: 818697 - DNA, 33 bp, Homo sapien
cttttttaatatgctcaaatcaatgcaatatac

SEQ ID NO: 818698 - DNA, 33 bp, Homo sapien
cttttttaatatgctctaatcaatgcaatatac

SEQ ID NO: 818699 - DNA, 33 bp, Homo sapien
ctcccattatgtgagagaaaagatggtcactcc

SEQ ID NO: 818700 - DNA, 33 bp, Homo sapien
ctcccattatgtgagataaaagatggtcactcc

SEQ ID NO: 818701 - DNA, 33 bp, Homo sapien
ccagtagatattcgaacatctagcaagagccaa

SEQ ID NO: 818702 - DNA, 33 bp, Homo sapien
ccagtagatattcgaagatctagcaagagccaa

SEQ ID NO: 818703 - DNA, 33 bp, Homo sapien
acttcaagacttattacaaatctacagtaatca

SEQ ID NO: 818704 - DNA, 33 bp, Homo sapien
acttcaagacttattagaaatctacagtaatca

SEQ ID NO: 818705 - DNA, 33 bp, Homo sapien
gtaaaacagattgctaatacccagtgttgctgg

SEQ ID NO: 818706 - DNA, 33 bp, Homo sapien
gtaaaacagattgctactacccagtgttgctgg

SEQ ID NO: 818707 - DNA, 33 bp, Homo sapien
tagagataagtatacagggggtacgattaatcc

SEQ ID NO: 818708 - DNA, 33 bp, Homo sapien
tagagataagtatacatggggtacgattaatcc

SEQ ID NO: 818709 - DNA, 33 bp, Homo sapien
cagaatgccttaggaccaattactggtagatcc

SEQ ID NO: 818710 - DNA, 33 bp, Homo sapien
cagaatgccttaggacgaattactggtagatcc

SEQ ID NO: 818711 - DNA, 33 bp, Homo sapien
ggccagtcttcatctcaaggtgaggcagaagac

SEQ ID NO: 818712 - DNA, 33 bp, Homo sapien
ggccagtcttcatctccaggtgaggcagaagac

SEQ ID NO: 818713 - DNA, 33 bp, Homo sapien
agtatgaacacctaaagaaattcctgctcccaa

SEQ ID NO: 818714 - DNA, 33 bp, Homo sapien
agtatgaacacctaaataaattcctgctcccaa

SEQ ID NO: 818715 - DNA, 33 bp, Homo sapien
gcgaaaacgtttctaacagtacagattttgaga

SEQ ID NO: 818716 - DNA, 33 bp, Homo sapien
gcgaaaacgtttctaatagtacagattttgaga

SEQ ID NO: 818717 - DNA, 33 bp, Homo sapien
tcacagtggctcagaaaggttgaaaagggaaga

SEQ ID NO: 818718 - DNA, 33 bp, Homo sapien
tcacagtggctcagaagggttgaaaagggaaga

SEQ ID NO: 818719 - DNA, 33 bp, Homo sapien
acaagtatatagggaacgcctgacaacttagct

SEQ ID NO: 818720 - DNA, 33 bp, Homo sapien
acaagtatatagggaatgcctgacaacttagct

SEQ ID NO: 818721 - DNA, 33 bp, Homo sapien
gcttagagacagacaacaataaagtaaaacaga

SEQ ID NO: 818722 - DNA, 33 bp, Homo sapien
gcttagagacagacaagaataaagtaaaacaga

SEQ ID NO: 818723 - DNA, 33 bp, Homo sapien
tgtatagttgctttgacgcctaagccaaaaata

SEQ ID NO: 818724 - DNA, 33 bp, Homo sapien
tgtatagttgctttgatgcctaagccaaaaata

SEQ ID NO: 818725 - DNA, 33 bp, Homo sapien
ggtaagacacctcttgaagcttatgaggaattc

SEQ ID NO: 818726 - DNA, 33 bp, Homo sapien
ggtaagacacctcttggagcttatgaggaattc

SEQ ID NO: 818727 - DNA, 33 bp, Homo sapien
tctatgtgtcttacacaaatgcctgcccggcag

SEQ ID NO: 818728 - DNA, 33 bp, Homo sapien
tctatgtgtcttacacgaatgcctgcccggcag

SEQ ID NO: 818729 - DNA, 33 bp, Homo sapien
aaggcagatctagacaatgcctctgccctctcc

SEQ ID NO: 818730 - DNA, 33 bp, Homo sapien
aaggcagatctagacagtgcctctgccctctcc

SEQ ID NO: 818731 - DNA, 33 bp, Homo sapien
tgcaggtgaagagaaccgagccgggtgattaag

SEQ ID NO: 818732 - DNA, 33 bp, Homo sapien
tgcaggtgaagagaacggagccgggtgattaag

SEQ ID NO: 818733 - DNA, 33 bp, Homo sapien
ctacaatgtaaagtagaatattgcccccattcc

SEQ ID NO: 818734 - DNA, 33 bp, Homo sapien
ctacaatgtaaagtaggatattgcccccattcc

SEQ ID NO: 818735 - DNA, 33 bp, Homo sapien
aataaacaatggtttgcaaatcaatttcaaagg

SEQ ID NO: 818736 - DNA, 33 bp, Homo sapien
aataaacaatggtttgtaaatcaatttcaaagg

SEQ ID NO: 818737 - DNA, 33 bp, Homo sapien
ttgtggactgagaagcactagatatagcatctt

SEQ ID NO: 818738 - DNA, 33 bp, Homo sapien
ttgtggactgagaagcgctagatatagcatctt

SEQ ID NO: 818739 - DNA, 33 bp, Homo sapien
atggtaaattattagcacgatatttgaatagtc

SEQ ID NO: 818740 - DNA, 33 bp, Homo sapien
atggtaaattattagcgcgatatttgaatagtc

SEQ ID NO: 818741 - DNA, 33 bp, Homo sapien
tttctgtggttccttaagatggtttgtagaata

SEQ ID NO: 818742 - DNA, 33 bp, Homo sapien
tttctgtggttccttaggatggtttgtagaata

SEQ ID NO: 818743 - DNA, 33 bp, Homo sapien
gcataaacttagaagcagcatatgttggattct

SEQ ID NO: 818744 - DNA, 33 bp, Homo sapien
gcataaacttagaagctgcatatgttggattct

SEQ ID NO: 818745 - DNA, 33 bp, Homo sapien
tggggactgtccactacgctgcaacagaggtgg

SEQ ID NO: 818746 - DNA, 33 bp, Homo sapien
tggggactgtccactatgctgcaacagaggtgg

SEQ ID NO: 818747 - DNA, 33 bp, Homo sapien
attcaaagaaaattcaagatgcatagtagtgtt

SEQ ID NO: 818748 - DNA, 33 bp, Homo sapien
attcaaagaaaattcaggatgcatagtagtgtt

SEQ ID NO: 818749 - DNA, 33 bp, Homo sapien
aataactcaaagagacaaaggcaaaaattccaa

SEQ ID NO: 818750 - DNA, 33 bp, Homo sapien
aataactcaaagagacgaaggcaaaaattccaa

SEQ ID NO: 818751 - DNA, 33 bp, Homo sapien
cactgctaaaagagtcaaaaagctaaggtgcca

SEQ ID NO: 818752 - DNA, 33 bp, Homo sapien
cactgctaaaagagtcgaaaagctaaggtgcca

SEQ ID NO: 818753 - DNA, 33 bp, Homo sapien
agtacagacaaagggggataatctaatctaaca

SEQ ID NO: 818754 - DNA, 33 bp, Homo sapien
agtacagacaaaggggtataatctaatctaaca

SEQ ID NO: 818755 - DNA, 33 bp, Homo sapien
caattgagatgggaaaacagttaatatttcaat

SEQ ID NO: 818756 - DNA, 33 bp, Homo sapien
caattgagatgggaaagcagttaatatttcaat

SEQ ID NO: 818757 - DNA, 33 bp, Homo sapien
cctccacattctatcgcaaggatcgcacgcagt

SEQ ID NO: 818758 - DNA, 33 bp, Homo sapien
cctccacattctatcgtaaggatcgcacgcagt

SEQ ID NO: 818759 - DNA, 33 bp, Homo sapien
gaactattaaaaagtgaaagtacagatgatgtg

SEQ ID NO: 818760 - DNA, 33 bp, Homo sapien
gaactattaaaaagtggaagtacagatgatgtg

SEQ ID NO: 818761 - DNA, 33 bp, Homo sapien
gatgtgatgtagatgacgagaactacgagggga

SEQ ID NO: 818762 - DNA, 33 bp, Homo sapien
gatgtgatgtagatgatgagaactacgagggga

SEQ ID NO: 818763 - DNA, 33 bp, Homo sapien
gttgttgttactattgcaatggtgccacagact

SEQ ID NO: 818764 - DNA, 33 bp, Homo sapien
gttgttgttactattgtaatggtgccacagact

SEQ ID NO: 818765 - DNA, 33 bp, Homo sapien
cttagttcatgatagtaaaactacgtcatcaat

SEQ ID NO: 818766 - DNA, 33 bp, Homo sapien
cttagttcatgatagtcaaactacgtcatcaat

SEQ ID NO: 818767 - DNA, 33 bp, Homo sapien
gtactgtgcttccaaaattaatgagatcaaaca

SEQ ID NO: 818768 - DNA, 33 bp, Homo sapien
gtactgtgcttccaaagttaatgagatcaaaca

SEQ ID NO: 818769 - DNA, 33 bp, Homo sapien
tcccatcgtgacccacacagtcctctgatgctc

SEQ ID NO: 818770 - DNA, 33 bp, Homo sapien
tcccatcgtgacccacgcagtcctctgatgctc

SEQ ID NO: 818771 - DNA, 33 bp, Homo sapien
gtcactgaagcttcccgctgactccagctcact

SEQ ID NO: 818772 - DNA, 33 bp, Homo sapien
gtcactgaagcttccctctgactccagctcact

SEQ ID NO: 818773 - DNA, 33 bp, Homo sapien
gtctaacacccttagaaggcatcccataatact

SEQ ID NO: 818774 - DNA, 33 bp, Homo sapien
gtctaacacccttagatggcatcccataatact

SEQ ID NO: 818775 - DNA, 33 bp, Homo sapien
aattcatttttcattcaaagttgcaagatttaa

SEQ ID NO: 818776 - DNA, 33 bp, Homo sapien
aattcatttttcattccaagttgcaagatttaa

SEQ ID NO: 818777 - DNA, 33 bp, Homo sapien
gcctcaggacatttaccatcatggcagaagggg

SEQ ID NO: 818778 - DNA, 33 bp, Homo sapien
gcctcaggacatttacgatcatggcagaagggg

SEQ ID NO: 818779 - DNA, 33 bp, Homo sapien
agaggtgctggctgcacgactaaaactggtaag

SEQ ID NO: 818780 - DNA, 33 bp, Homo sapien
agaggtgctggctgcatgactaaaactggtaag

SEQ ID NO: 818781 - DNA, 33 bp, Homo sapien
aggtgtctatgataacacaaacaaagagaagca

SEQ ID NO: 818782 - DNA, 33 bp, Homo sapien
aggtgtctatgataacgcaaacaaagagaagca

SEQ ID NO: 818783 - DNA, 33 bp, Homo sapien
tatgacactggtttgtaaattataaagctctat

SEQ ID NO: 818784 - DNA, 33 bp, Homo sapien
tatgacactggtttgtgaattataaagctctat

SEQ ID NO: 818785 - DNA, 33 bp, Homo sapien
attagcctcaaatgaacggcctttatttgcttc

SEQ ID NO: 818786 - DNA, 33 bp, Homo sapien
attagcctcaaatgaatggcctttatttgcttc

SEQ ID NO: 818787 - DNA, 33 bp, Homo sapien
tgtcccatgtgcagccaagtccatcatgaggtg

SEQ ID NO: 818788 - DNA, 33 bp, Homo sapien
tgtcccatgtgcagccgagtccatcatgaggtg

SEQ ID NO: 818789 - DNA, 33 bp, Homo sapien
acccatttagtgtatacaattcgatgataaagt

SEQ ID NO: 818790 - DNA, 33 bp, Homo sapien
acccatttagtgtatataattcgatgataaagt

SEQ ID NO: 818791 - DNA, 33 bp, Homo sapien
acttttaaccagaagacagtgggcactagagga

SEQ ID NO: 818792 - DNA, 33 bp, Homo sapien
acttttaaccagaagatagtgggcactagagga

SEQ ID NO: 818793 - DNA, 33 bp, Homo sapien
catagtaagctaaaatgatcaactttaacaaca

SEQ ID NO: 818794 - DNA, 33 bp, Homo sapien
catagtaagctaaaattatcaactttaacaaca

SEQ ID NO: 818795 - DNA, 33 bp, Homo sapien
aaatcgcatttagagaatcacatctgatgccta

SEQ ID NO: 818796 - DNA, 33 bp, Homo sapien
aaatcgcatttagagagtcacatctgatgccta

SEQ ID NO: 818797 - DNA, 33 bp, Homo sapien
ttcatgtttcacactcaaagagtcaaagttatt

SEQ ID NO: 818798 - DNA, 33 bp, Homo sapien
ttcatgtttcacactcgaagagtcaaagttatt

SEQ ID NO: 818799 - DNA, 33 bp, Homo sapien
acgggagatttaatcacgaccacgttaggaatc

SEQ ID NO: 818800 - DNA, 33 bp, Homo sapien
acgggagatttaatcatgaccacgttaggaatc

SEQ ID NO: 818801 - DNA, 33 bp, Homo sapien
acagccaaattaagagcagtttccaagtgcatt

SEQ ID NO: 818802 - DNA, 33 bp, Homo sapien
acagccaaattaagagtagtttccaagtgcatt

SEQ ID NO: 818803 - DNA, 33 bp, Homo sapien
atgagcagaaggatccgatttcagccaaacatg

SEQ ID NO: 818804 - DNA, 33 bp, Homo sapien
atgagcagaaggatcctatttcagccaaacatg

SEQ ID NO: 818805 - DNA, 33 bp, Homo sapien
tgagctttatacaaacacctatccaacgaatca

SEQ ID NO: 818806 - DNA, 33 bp, Homo sapien
tgagctttatacaaacgcctatccaacgaatca

SEQ ID NO: 818807 - DNA, 33 bp, Homo sapien
aactttttcagcctaaagttccaaaagttacgt

SEQ ID NO: 818808 - DNA, 33 bp, Homo sapien
aactttttcagcctaacgttccaaaagttacgt

SEQ ID NO: 818809 - DNA, 33 bp, Homo sapien
aggaggttgtaggatacgcaaataatggaggtt

SEQ ID NO: 818810 - DNA, 33 bp, Homo sapien
aggaggttgtaggataggcaaataatggaggtt

SEQ ID NO: 818811 - DNA, 33 bp, Homo sapien
agattaggcttaaaaaaggaagcccttgccaca

SEQ ID NO: 818812 - DNA, 33 bp, Homo sapien
agattaggcttaaaaagggaagcccttgccaca

SEQ ID NO: 818813 - DNA, 33 bp, Homo sapien
ttactaaaatgaaaaacgtatgagggggttcaa

SEQ ID NO: 818814 - DNA, 33 bp, Homo sapien
ttactaaaatgaaaaatgtatgagggggttcaa

SEQ ID NO: 818815 - DNA, 33 bp, Homo sapien
ctcatcaaatattctccctgccccgttctctct

SEQ ID NO: 818816 - DNA, 33 bp, Homo sapien
ctcatcaaatattctctctgccccgttctctct

SEQ ID NO: 818817 - DNA, 33 bp, Homo sapien
tgagtttattctaaccaaaaagaagttcattga

SEQ ID NO: 818818 - DNA, 33 bp, Homo sapien
tgagtttattctaaccgaaaagaagttcattga

SEQ ID NO: 818819 - DNA, 33 bp, Homo sapien
tgggagtttcctgtataaaatgaacagaatagg

SEQ ID NO: 818820 - DNA, 33 bp, Homo sapien
tgggagtttcctgtatgaaatgaacagaatagg

SEQ ID NO: 818821 - DNA, 33 bp, Homo sapien
aagcttttaacatggcaacatatcccactgaaa

SEQ ID NO: 818822 - DNA, 33 bp, Homo sapien
aagcttttaacatggcgacatatcccactgaaa

SEQ ID NO: 818823 - DNA, 33 bp, Homo sapien
agaaaggagggctgaacaggattacgggagatt

SEQ ID NO: 818824 - DNA, 33 bp, Homo sapien
agaaaggagggctgaataggattacgggagatt

SEQ ID NO: 818825 - DNA, 33 bp, Homo sapien
gggttggaaaaaggcaaagataatgaggaaaaa

SEQ ID NO: 818826 - DNA, 33 bp, Homo sapien
gggttggaaaaaggcagagataatgaggaaaaa

SEQ ID NO: 818827 - DNA, 33 bp, Homo sapien
gcacgaactctttgtacccatagactcttccct

SEQ ID NO: 818828 - DNA, 33 bp, Homo sapien
gcacgaactctttgtatccatagactcttccct

SEQ ID NO: 818829 - DNA, 33 bp, Homo sapien
tcctgtttctgttccacagagtagactttaact

SEQ ID NO: 818830 - DNA, 33 bp, Homo sapien
tcctgtttctgttccatagagtagactttaact

SEQ ID NO: 818831 - DNA, 33 bp, Homo sapien
tttcttgaaatcaagaatatgaaggcaattaaa

SEQ ID NO: 818832 - DNA, 33 bp, Homo sapien
tttcttgaaatcaagactatgaaggcaattaaa

SEQ ID NO: 818833 - DNA, 33 bp, Homo sapien
aacatgatgcagtgccacgtaaggcaaattaac

SEQ ID NO: 818834 - DNA, 33 bp, Homo sapien
aacatgatgcagtgccgcgtaaggcaaattaac

SEQ ID NO: 818835 - DNA, 33 bp, Homo sapien
agttgaacttacccaaacattcacaatcatggg

SEQ ID NO: 818836 - DNA, 33 bp, Homo sapien
agttgaacttacccaagcattcacaatcatggg

SEQ ID NO: 818837 - DNA, 33 bp, Homo sapien
cttcccttcaggaaaaagtcaggaaggtctctg

SEQ ID NO: 818838 - DNA, 33 bp, Homo sapien
cttcccttcaggaaaatgtcaggaaggtctctg

SEQ ID NO: 818839 - DNA, 33 bp, Homo sapien
gtgaggttcaataccaaaagactgccccctcct

SEQ ID NO: 818840 - DNA, 33 bp, Homo sapien
gtgaggttcaataccacaagactgccccctcct

SEQ ID NO: 818841 - DNA, 33 bp, Homo sapien
tccataccctagaggaataatgctgttgaaaca

SEQ ID NO: 818842 - DNA, 33 bp, Homo sapien
tccataccctagaggattaatgctgttgaaaca

SEQ ID NO: 818843 - DNA, 33 bp, Homo sapien
cacatgccgaatgtcaagcaggttgcagagatg

SEQ ID NO: 818844 - DNA, 33 bp, Homo sapien
cacatgccgaatgtcaggcaggttgcagagatg

SEQ ID NO: 818845 - DNA, 33 bp, Homo sapien
aactttgctagttaaactgtcaggccaattttg

SEQ ID NO: 818846 - DNA, 33 bp, Homo sapien
aactttgctagttaaagtgtcaggccaattttg

SEQ ID NO: 818847 - DNA, 33 bp, Homo sapien
ctgagcaacacacgtaagggtgagggcttcaca

SEQ ID NO: 818848 - DNA, 33 bp, Homo sapien
ctgagcaacacacgtaggggtgagggcttcaca

SEQ ID NO: 818849 - DNA, 33 bp, Homo sapien
ggcagggagaaatatccaaactgtaccaggcac

SEQ ID NO: 818850 - DNA, 33 bp, Homo sapien
ggcagggagaaatatcgaaactgtaccaggcac

SEQ ID NO: 818851 - DNA, 33 bp, Homo sapien
caaatatatttatccactctctaaacacatttg

SEQ ID NO: 818852 - DNA, 33 bp, Homo sapien
caaatatatttatccattctctaaacacatttg

SEQ ID NO: 818853 - DNA, 33 bp, Homo sapien
ctcacagctcctctgcacattcatttgagtaac

SEQ ID NO: 818854 - DNA, 33 bp, Homo sapien
ctcacagctcctctgcgcattcatttgagtaac

SEQ ID NO: 818855 - DNA, 33 bp, Homo sapien
gggagactttggacaactggatactctttcctg

SEQ ID NO: 818856 - DNA, 33 bp, Homo sapien
gggagactttggacaagtggatactctttcctg

SEQ ID NO: 818857 - DNA, 33 bp, Homo sapien
cacttgtactcatagacgctaatggatactttc

SEQ ID NO: 818858 - DNA, 33 bp, Homo sapien
cacttgtactcatagaggctaatggatactttc

SEQ ID NO: 818859 - DNA, 33 bp, Homo sapien
aacattgagaacttcaacatcatcgaaacctcc

SEQ ID NO: 818860 - DNA, 33 bp, Homo sapien
aacattgagaacttcagcatcatcgaaacctcc

SEQ ID NO: 818861 - DNA, 33 bp, Homo sapien
caataccatctagaaacgatgtgatatacagcc

SEQ ID NO: 818862 - DNA, 33 bp, Homo sapien
caataccatctagaaatgatgtgatatacagcc

SEQ ID NO: 818863 - DNA, 33 bp, Homo sapien
tttgttctttatcaccaaaaccattttctagta

SEQ ID NO: 818864 - DNA, 33 bp, Homo sapien
tttgttctttatcaccgaaaccattttctagta

SEQ ID NO: 818865 - DNA, 33 bp, Homo sapien
ctggtttttctttttaagtcctcagcctgaagc

SEQ ID NO: 818866 - DNA, 33 bp, Homo sapien
ctggtttttctttttatgtcctcagcctgaagc

SEQ ID NO: 818867 - DNA, 33 bp, Homo sapien
catccttgcttacagaaacctttctctggctcc

SEQ ID NO: 818868 - DNA, 33 bp, Homo sapien
catccttgcttacagagacctttctctggctcc

SEQ ID NO: 818869 - DNA, 33 bp, Homo sapien
taggacaactccagaaaaatatttacattacat

SEQ ID NO: 818870 - DNA, 33 bp, Homo sapien
taggacaactccagaagaatatttacattacat

SEQ ID NO: 818871 - DNA, 33 bp, Homo sapien
aagatggtctagactgaagagcagggactttgg

SEQ ID NO: 818872 - DNA, 33 bp, Homo sapien
aagatggtctagactggagagcagggactttgg

SEQ ID NO: 818873 - DNA, 33 bp, Homo sapien
ttacatttattgcaagaatttatagactagtta

SEQ ID NO: 818874 - DNA, 33 bp, Homo sapien
ttacatttattgcaagcatttatagactagtta

SEQ ID NO: 818875 - DNA, 33 bp, Homo sapien
ctgtttgtaatcctggaagtagtaactgggaaa

SEQ ID NO: 818876 - DNA, 33 bp, Homo sapien
ctgtttgtaatcctgggagtagtaactgggaaa

SEQ ID NO: 818877 - DNA, 33 bp, Homo sapien
gttcccttctatgtgcaaaatcccatatcaccc

SEQ ID NO: 818878 - DNA, 33 bp, Homo sapien
gttcccttctatgtgcgaaatcccatatcaccc

SEQ ID NO: 818879 - DNA, 33 bp, Homo sapien
caccaggagatgtgacgctaatatcatctgccc

SEQ ID NO: 818880 - DNA, 33 bp, Homo sapien
caccaggagatgtgactctaatatcatctgccc

SEQ ID NO: 818881 - DNA, 33 bp, Homo sapien
ctctttgtggatcttaaaagaaccatatttgct

SEQ ID NO: 818882 - DNA, 33 bp, Homo sapien
ctctttgtggatcttagaagaaccatatttgct

SEQ ID NO: 818883 - DNA, 33 bp, Homo sapien
gctcacactgaagagcaaacactatagtagaga

SEQ ID NO: 818884 - DNA, 33 bp, Homo sapien
gctcacactgaagagccaacactatagtagaga

SEQ ID NO: 818885 - DNA, 33 bp, Homo sapien
aggcaagatggcaggcaatgacagagtcttgag

SEQ ID NO: 818886 - DNA, 33 bp, Homo sapien
aggcaagatggcaggcgatgacagagtcttgag

SEQ ID NO: 818887 - DNA, 33 bp, Homo sapien
catttcctctttctgaggcgtctagagaacagc

SEQ ID NO: 818888 - DNA, 33 bp, Homo sapien
catttcctctttctgatgcgtctagagaacagc

SEQ ID NO: 818889 - DNA, 33 bp, Homo sapien
tccacaggtggaaaggaacctgagtgttgccac

SEQ ID NO: 818890 - DNA, 33 bp, Homo sapien
tccacaggtggaaaggcacctgagtgttgccac

SEQ ID NO: 818891 - DNA, 33 bp, Homo sapien
gctcacataggactgacgatatgcactgctaat

SEQ ID NO: 818892 - DNA, 33 bp, Homo sapien
gctcacataggactgatgatatgcactgctaat

SEQ ID NO: 818893 - DNA, 33 bp, Homo sapien
aagtaactcagcaggacgtcacagcacagttag

SEQ ID NO: 818894 - DNA, 33 bp, Homo sapien
aagtaactcagcaggatgtcacagcacagttag

SEQ ID NO: 818895 - DNA, 33 bp, Homo sapien
atctcctgcccaactcaatgtctcatttacttc

SEQ ID NO: 818896 - DNA, 33 bp, Homo sapien
atctcctgcccaactccatgtctcatttacttc

SEQ ID NO: 818897 - DNA, 33 bp, Homo sapien
aagcaagcgagtacatcagtggatccagatggt

SEQ ID NO: 818898 - DNA, 33 bp, Homo sapien
aagcaagcgagtacatgagtggatccagatggt

SEQ ID NO: 818899 - DNA, 33 bp, Homo sapien
caaacaagttgtctccaatgggcactcgctatt

SEQ ID NO: 818900 - DNA, 33 bp, Homo sapien
caaacaagttgtctccgatgggcactcgctatt

SEQ ID NO: 818901 - DNA, 33 bp, Homo sapien
tgtggactgagcattaaggtttcctaatttatt

SEQ ID NO: 818902 - DNA, 33 bp, Homo sapien
tgtggactgagcattatggtttcctaatttatt

SEQ ID NO: 818903 - DNA, 33 bp, Homo sapien
gttgaagatgtcatgcaatgtcaacctggagtt

SEQ ID NO: 818904 - DNA, 33 bp, Homo sapien
gttgaagatgtcatgcgatgtcaacctggagtt

SEQ ID NO: 818905 - DNA, 33 bp, Homo sapien
cagagactggaggctaccctaaaagagctaagg

SEQ ID NO: 818906 - DNA, 33 bp, Homo sapien
cagagactggaggctatcctaaaagagctaagg

SEQ ID NO: 818907 - DNA, 33 bp, Homo sapien
tcataacaatcccccactaaacagcttggcttt

SEQ ID NO: 818908 - DNA, 33 bp, Homo sapien
tcataacaatcccccattaaacagcttggcttt

SEQ ID NO: 818909 - DNA, 33 bp, Homo sapien
tttcactagagtccacacttccccttctgccaa

SEQ ID NO: 818910 - DNA, 33 bp, Homo sapien
tttcactagagtccacgcttccccttctgccaa

SEQ ID NO: 818911 - DNA, 33 bp, Homo sapien
aatgattttgaagttcaactttgaatagttacc

SEQ ID NO: 818912 - DNA, 33 bp, Homo sapien
aatgattttgaagttcgactttgaatagttacc

SEQ ID NO: 818913 - DNA, 33 bp, Homo sapien
cacaccctctgcaatccaaaatggatcccacat

SEQ ID NO: 818914 - DNA, 33 bp, Homo sapien
cacaccctctgcaatctaaaatggatcccacat

SEQ ID NO: 818915 - DNA, 33 bp, Homo sapien
caatcccccacttctgaagcagattttccaggg

SEQ ID NO: 818916 - DNA, 33 bp, Homo sapien
caatcccccacttctggagcagattttccaggg

SEQ ID NO: 818917 - DNA, 33 bp, Homo sapien
ggacattacagagtccagatgcctcttccatga

SEQ ID NO: 818918 - DNA, 33 bp, Homo sapien
ggacattacagagtccggatgcctcttccatga

SEQ ID NO: 818919 - DNA, 33 bp, Homo sapien
tcagaatttcgagaaccgtgtgctgaagtgcca

SEQ ID NO: 818920 - DNA, 33 bp, Homo sapien
tcagaatttcgagaactgtgtgctgaagtgcca

SEQ ID NO: 818921 - DNA, 33 bp, Homo sapien
tcctcagcttcatcccagatgcctggtactgtc

SEQ ID NO: 818922 - DNA, 33 bp, Homo sapien
tcctcagcttcatcccggatgcctggtactgtc

SEQ ID NO: 818923 - DNA, 33 bp, Homo sapien
agtgatagtgacctagcagtgagtaagccaggc

SEQ ID NO: 818924 - DNA, 33 bp, Homo sapien
agtgatagtgacctagtagtgagtaagccaggc

SEQ ID NO: 818925 - DNA, 33 bp, Homo sapien
aatgtctcctactcaaacagggcctggaagtca

SEQ ID NO: 818926 - DNA, 33 bp, Homo sapien
aatgtctcctactcaagcagggcctggaagtca

SEQ ID NO: 818927 - DNA, 33 bp, Homo sapien
ttcacactgcatcaaaacctccagaacgtcctt

SEQ ID NO: 818928 - DNA, 33 bp, Homo sapien
ttcacactgcatcaaagcctccagaacgtcctt

SEQ ID NO: 818929 - DNA, 33 bp, Homo sapien
cctgaggcaaagatgcagaccaaagcgccgtgt

SEQ ID NO: 818930 - DNA, 33 bp, Homo sapien
cctgaggcaaagatgccgaccaaagcgccgtgt

SEQ ID NO: 818931 - DNA, 33 bp, Homo sapien
ataggatagctaggttaaaagtccagggatccc

SEQ ID NO: 818932 - DNA, 33 bp, Homo sapien
ataggatagctaggttgaaagtccagggatccc

SEQ ID NO: 818933 - DNA, 33 bp, Homo sapien
cactgtgcttgaacagcatagcgtgaaacagga

SEQ ID NO: 818934 - DNA, 33 bp, Homo sapien
cactgtgcttgaacagtatagcgtgaaacagga

SEQ ID NO: 818935 - DNA, 33 bp, Homo sapien
agggggttttattaccaagaggaagacaaaagt

SEQ ID NO: 818936 - DNA, 33 bp, Homo sapien
agggggttttattaccgagaggaagacaaaagt

SEQ ID NO: 818937 - DNA, 33 bp, Homo sapien
attgcccttcatttaacgcatctggccatatct

SEQ ID NO: 818938 - DNA, 33 bp, Homo sapien
attgcccttcatttaatgcatctggccatatct

SEQ ID NO: 818939 - DNA, 33 bp, Homo sapien
gaatccacaggaaggaactttctcttatgggag

SEQ ID NO: 818940 - DNA, 33 bp, Homo sapien
gaatccacaggaaggatctttctcttatgggag

SEQ ID NO: 818941 - DNA, 33 bp, Homo sapien
tgtgaatggacagcgccctggatcataaggagt

SEQ ID NO: 818942 - DNA, 33 bp, Homo sapien
tgtgaatggacagcgctctggatcataaggagt

SEQ ID NO: 818943 - DNA, 33 bp, Homo sapien
ttcactgaaacatgggaacctaggagtgacctg

SEQ ID NO: 818944 - DNA, 33 bp, Homo sapien
ttcactgaaacatggggacctaggagtgacctg

SEQ ID NO: 818945 - DNA, 33 bp, Homo sapien
gcgtttgatgaaatagcagtttttacatcttgg

SEQ ID NO: 818946 - DNA, 33 bp, Homo sapien
gcgtttgatgaaataggagtttttacatcttgg

SEQ ID NO: 818947 - DNA, 33 bp, Homo sapien
ggagactgaaagccccacagatgtgtgcaaaat

SEQ ID NO: 818948 - DNA, 33 bp, Homo sapien
ggagactgaaagccccgcagatgtgtgcaaaat

SEQ ID NO: 818949 - DNA, 33 bp, Homo sapien
acctaagctgtggtgaaaagttggtaaatactt

SEQ ID NO: 818950 - DNA, 33 bp, Homo sapien
acctaagctgtggtgacaagttggtaaatactt

SEQ ID NO: 818951 - DNA, 33 bp, Homo sapien
ttcttatctggcttagaatgggattttcatatc

SEQ ID NO: 818952 - DNA, 33 bp, Homo sapien
ttcttatctggcttagtatgggattttcatatc

SEQ ID NO: 818953 - DNA, 33 bp, Homo sapien
tgagtaaaaagctaacaaagtggacatatgtag

SEQ ID NO: 818954 - DNA, 33 bp, Homo sapien
tgagtaaaaagctaacgaagtggacatatgtag

SEQ ID NO: 818955 - DNA, 33 bp, Homo sapien
ttgttgcccagacctgaaacacttttgaaaggg

SEQ ID NO: 818956 - DNA, 33 bp, Homo sapien
ttgttgcccagacctggaacacttttgaaaggg

SEQ ID NO: 818957 - DNA, 33 bp, Homo sapien
ttgtagaatggctaaaccaacttaattaacgta

SEQ ID NO: 818958 - DNA, 33 bp, Homo sapien
ttgtagaatggctaaagcaacttaattaacgta

SEQ ID NO: 818959 - DNA, 33 bp, Homo sapien
gtgggttaaaacaagacgaatttgctctcttac

SEQ ID NO: 818960 - DNA, 33 bp, Homo sapien
gtgggttaaaacaagatgaatttgctctcttac

SEQ ID NO: 818961 - DNA, 33 bp, Homo sapien
gtaagtgggtttgttacaggaagacatctagcc

SEQ ID NO: 818962 - DNA, 33 bp, Homo sapien
gtaagtgggtttgttataggaagacatctagcc

SEQ ID NO: 818963 - DNA, 33 bp, Homo sapien
ttctcttgcaagtttcaatccaggaaaggaacc

SEQ ID NO: 818964 - DNA, 33 bp, Homo sapien
ttctcttgcaagtttcgatccaggaaaggaacc

SEQ ID NO: 818965 - DNA, 33 bp, Homo sapien
ggttgatgtaacaggaccattctgaaactttct

SEQ ID NO: 818966 - DNA, 33 bp, Homo sapien
ggttgatgtaacaggatcattctgaaactttct

SEQ ID NO: 818967 - DNA, 33 bp, Homo sapien
gttaatgtcaacaaaacggttcaaatgaaggtc

SEQ ID NO: 818968 - DNA, 33 bp, Homo sapien
gttaatgtcaacaaaatggttcaaatgaaggtc

SEQ ID NO: 818969 - DNA, 33 bp, Homo sapien
tatctgaactgagcaaacaaatttaaaaagtta

SEQ ID NO: 818970 - DNA, 33 bp, Homo sapien
tatctgaactgagcaagcaaatttaaaaagtta

SEQ ID NO: 818971 - DNA, 33 bp, Homo sapien
caacacaactagcagacgaagttgaataatgac

SEQ ID NO: 818972 - DNA, 33 bp, Homo sapien
caacacaactagcagatgaagttgaataatgac

SEQ ID NO: 818973 - DNA, 33 bp, Homo sapien
caacttgacataaaagcaatagcttggaaagta

SEQ ID NO: 818974 - DNA, 33 bp, Homo sapien
caacttgacataaaagtaatagcttggaaagta

SEQ ID NO: 818975 - DNA, 33 bp, Homo sapien
tttaagcttggagacaccctgttaatttattta

SEQ ID NO: 818976 - DNA, 33 bp, Homo sapien
tttaagcttggagacatcctgttaatttattta

SEQ ID NO: 818977 - DNA, 33 bp, Homo sapien
acaacttggccagtaaacgtcagaactcgcctt

SEQ ID NO: 818978 - DNA, 33 bp, Homo sapien
acaacttggccagtaagcgtcagaactcgcctt

SEQ ID NO: 818979 - DNA, 33 bp, Homo sapien
tctcctttctccttaacgctacatcaaaggagg

SEQ ID NO: 818980 - DNA, 33 bp, Homo sapien
tctcctttctccttaatgctacatcaaaggagg

SEQ ID NO: 818981 - DNA, 33 bp, Homo sapien
tttggtgagttttatgacaaagagggctctgga

SEQ ID NO: 818982 - DNA, 33 bp, Homo sapien
tttggtgagttttatggcaaagagggctctgga

SEQ ID NO: 818983 - DNA, 33 bp, Homo sapien
taactactccgatgacacagagattttgagctt

SEQ ID NO: 818984 - DNA, 33 bp, Homo sapien
taactactccgatgactcagagattttgagctt

SEQ ID NO: 818985 - DNA, 33 bp, Homo sapien
ggcctttattttcaagcctctctggagctgtgg

SEQ ID NO: 818986 - DNA, 33 bp, Homo sapien
ggcctttattttcaagtctctctggagctgtgg

SEQ ID NO: 818987 - DNA, 33 bp, Homo sapien
ctccagagacatccaaaaccctgcggttggcca

SEQ ID NO: 818988 - DNA, 33 bp, Homo sapien
ctccagagacatccaagaccctgcggttggcca

SEQ ID NO: 818989 - DNA, 33 bp, Homo sapien
aactgagattcaaatacatatgttctaggtctc

SEQ ID NO: 818990 - DNA, 33 bp, Homo sapien
aactgagattcaaatagatatgttctaggtctc

SEQ ID NO: 818991 - DNA, 33 bp, Homo sapien
atggaggtggagaagcacgaggtgaaaggtgag

SEQ ID NO: 818992 - DNA, 33 bp, Homo sapien
atggaggtggagaagcgcgaggtgaaaggtgag

SEQ ID NO: 818993 - DNA, 33 bp, Homo sapien
attcaattgaataaacacatcagttgacagtaa

SEQ ID NO: 818994 - DNA, 33 bp, Homo sapien
attcaattgaataaacgcatcagttgacagtaa

SEQ ID NO: 818995 - DNA, 33 bp, Homo sapien
agatcctagaagcctgaagcactggaagccttc

SEQ ID NO: 818996 - DNA, 33 bp, Homo sapien
agatcctagaagcctgcagcactggaagccttc

SEQ ID NO: 818997 - DNA, 33 bp, Homo sapien
ccaagagacacacaggaaagtcaaagtaatcca

SEQ ID NO: 818998 - DNA, 33 bp, Homo sapien
ccaagagacacacagggaagtcaaagtaatcca

SEQ ID NO: 818999 - DNA, 33 bp, Homo sapien
aaagtaatccacagaaacacgcatggatcttga

SEQ ID NO: 819000 - DNA, 33 bp, Homo sapien
aaagtaatccacagaagcacgcatggatcttga

SEQ ID NO: 819001 - DNA, 33 bp, Homo sapien
agaattcgtcgtcctcagactttgctgttggcc

SEQ ID NO: 819002 - DNA, 33 bp, Homo sapien
agaattcgtcgtcctcggactttgctgttggcc

SEQ ID NO: 819003 - DNA, 33 bp, Homo sapien
aagacataaatacaccaacacactatttgggta

SEQ ID NO: 819004 - DNA, 33 bp, Homo sapien
aagacataaatacaccgacacactatttgggta

SEQ ID NO: 819005 - DNA, 33 bp, Homo sapien
gtgctgaaaaaaaaacaccacttcattgtcagc

SEQ ID NO: 819006 - DNA, 33 bp, Homo sapien
gtgctgaaaaaaaaacgccacttcattgtcagc

SEQ ID NO: 819007 - DNA, 33 bp, Homo sapien
acaatagcaggaagaacagcttcaattctccag

SEQ ID NO: 819008 - DNA, 33 bp, Homo sapien
acaatagcaggaagaagagcttcaattctccag

SEQ ID NO: 819009 - DNA, 33 bp, Homo sapien
cccatccaataagccaaagttagtttaaacagg

SEQ ID NO: 819010 - DNA, 33 bp, Homo sapien
cccatccaataagccagagttagtttaaacagg

SEQ ID NO: 819011 - DNA, 33 bp, Homo sapien
cttaaaaacttcctaaacctgagtctcatagcc

SEQ ID NO: 819012 - DNA, 33 bp, Homo sapien
cttaaaaacttcctaagcctgagtctcatagcc

SEQ ID NO: 819013 - DNA, 33 bp, Homo sapien
tgattttcattgaaatcatttacgacattcgag

SEQ ID NO: 819014 - DNA, 33 bp, Homo sapien
tgattttcattgaaatgatttacgacattcgag

SEQ ID NO: 819015 - DNA, 33 bp, Homo sapien
atgttggagtcattgacgagctgagtttgagtt

SEQ ID NO: 819016 - DNA, 33 bp, Homo sapien
atgttggagtcattgatgagctgagtttgagtt

SEQ ID NO: 819017 - DNA, 33 bp, Homo sapien
tcagtgctgaatcctacacccttagacgggagc

SEQ ID NO: 819018 - DNA, 33 bp, Homo sapien
tcagtgctgaatcctatacccttagacgggagc

SEQ ID NO: 819019 - DNA, 33 bp, Homo sapien
ggcctatgctgacccccgcggttggtgtcactc

SEQ ID NO: 819020 - DNA, 33 bp, Homo sapien
ggcctatgctgacccctgcggttggtgtcactc

SEQ ID NO: 819021 - DNA, 33 bp, Homo sapien
gtgggtggcctccttcaacaaagaaactgcact

SEQ ID NO: 819022 - DNA, 33 bp, Homo sapien
gtgggtggcctccttcgacaaagaaactgcact

SEQ ID NO: 819023 - DNA, 33 bp, Homo sapien
agattgtctgaacctccgaggcacttaaagctt

SEQ ID NO: 819024 - DNA, 33 bp, Homo sapien
agattgtctgaacctctgaggcacttaaagctt

SEQ ID NO: 819025 - DNA, 33 bp, Homo sapien
gcaaccacctttctacaagacagtatttttttt

SEQ ID NO: 819026 - DNA, 33 bp, Homo sapien
gcaaccacctttctacgagacagtatttttttt

SEQ ID NO: 819027 - DNA, 33 bp, Homo sapien
gtaatagaaaagaaacgaactcctgcacaccaa

SEQ ID NO: 819028 - DNA, 33 bp, Homo sapien
gtaatagaaaagaaactaactcctgcacaccaa

SEQ ID NO: 819029 - DNA, 33 bp, Homo sapien
cagctgaatcgaacacagccaaccctttgaact

SEQ ID NO: 819030 - DNA, 33 bp, Homo sapien
cagctgaatcgaacacggccaaccctttgaact

SEQ ID NO: 819031 - DNA, 33 bp, Homo sapien
ccctcattcctgaccacgtttaatgcgttccta

SEQ ID NO: 819032 - DNA, 33 bp, Homo sapien
ccctcattcctgaccaggtttaatgcgttccta

SEQ ID NO: 819033 - DNA, 33 bp, Homo sapien
gcaaagaggctgttcacatcgtgtcttcattgt

SEQ ID NO: 819034 - DNA, 33 bp, Homo sapien
gcaaagaggctgttcatatcgtgtcttcattgt

SEQ ID NO: 819035 - DNA, 33 bp, Homo sapien
tgccttgctgtacctgaattgtagtgacccact

SEQ ID NO: 819036 - DNA, 33 bp, Homo sapien
tgccttgctgtacctgtattgtagtgacccact

SEQ ID NO: 819037 - DNA, 33 bp, Homo sapien
ttatggcctttgaatgccagatcttggttttgg

SEQ ID NO: 819038 - DNA, 33 bp, Homo sapien
ttatggcctttgaatggcagatcttggttttgg

SEQ ID NO: 819039 - DNA, 33 bp, Homo sapien
gtctccagaacttttgcatcttcccaagtggca

SEQ ID NO: 819040 - DNA, 33 bp, Homo sapien
gtctccagaacttttgtatcttcccaagtggca

SEQ ID NO: 819041 - DNA, 33 bp, Homo sapien
cagtccctccaggttcccacttcattccagagt

SEQ ID NO: 819042 - DNA, 33 bp, Homo sapien
cagtccctccaggttctcacttcattccagagt

SEQ ID NO: 819043 - DNA, 33 bp, Homo sapien
gtttgaagctctgtgaataacgtagagaaactt

SEQ ID NO: 819044 - DNA, 33 bp, Homo sapien
gtttgaagctctgtgagtaacgtagagaaactt

SEQ ID NO: 819045 - DNA, 33 bp, Homo sapien
tgctcccaagtcactaagtgtaaaaatggacat

SEQ ID NO: 819046 - DNA, 33 bp, Homo sapien
tgctcccaagtcactaggtgtaaaaatggacat

SEQ ID NO: 819047 - DNA, 33 bp, Homo sapien
ccagagcttggcaagacgtagttgttcaagaaa

SEQ ID NO: 819048 - DNA, 33 bp, Homo sapien
ccagagcttggcaagatgtagttgttcaagaaa

SEQ ID NO: 819049 - DNA, 33 bp, Homo sapien
cattccagtctctttcaaaacgaaaataaaagg

SEQ ID NO: 819050 - DNA, 33 bp, Homo sapien
cattccagtctctttccaaacgaaaataaaagg

SEQ ID NO: 819051 - DNA, 33 bp, Homo sapien
taaaactgtactgtgtaacaaaactcctgttct

SEQ ID NO: 819052 - DNA, 33 bp, Homo sapien
taaaactgtactgtgtgacaaaactcctgttct

SEQ ID NO: 819053 - DNA, 33 bp, Homo sapien
gggacaatcttggagaaacgtcaactgaagtgc

SEQ ID NO: 819054 - DNA, 33 bp, Homo sapien
gggacaatcttggagacacgtcaactgaagtgc

SEQ ID NO: 819055 - DNA, 33 bp, Homo sapien
gactattgttgaaataactgtcgtccccaaacc

SEQ ID NO: 819056 - DNA, 33 bp, Homo sapien
gactattgttgaaatatctgtcgtccccaaacc

SEQ ID NO: 819057 - DNA, 33 bp, Homo sapien
agaggcacactgcaccaggagggaccttgctta

SEQ ID NO: 819058 - DNA, 33 bp, Homo sapien
agaggcacactgcaccgggagggaccttgctta

SEQ ID NO: 819059 - DNA, 33 bp, Homo sapien
acaggagaaagagccacgtcaactgaggtggga

SEQ ID NO: 819060 - DNA, 33 bp, Homo sapien
acaggagaaagagccatgtcaactgaggtggga

SEQ ID NO: 819061 - DNA, 33 bp, Homo sapien
acaattcagcagtaaccggtttgagggctgcag

SEQ ID NO: 819062 - DNA, 33 bp, Homo sapien
acaattcagcagtaactggtttgagggctgcag

SEQ ID NO: 819063 - DNA, 33 bp, Homo sapien
agattaatattcagccaatgactcaaggggcca

SEQ ID NO: 819064 - DNA, 33 bp, Homo sapien
agattaatattcagccgatgactcaaggggcca

SEQ ID NO: 819065 - DNA, 33 bp, Homo sapien
gttgacagaattatataaggctacatcactaaa

SEQ ID NO: 819066 - DNA, 33 bp, Homo sapien
gttgacagaattatatgaggctacatcactaaa

SEQ ID NO: 819067 - DNA, 33 bp, Homo sapien
ttcctctgtgccattactaagatggtccccttc

SEQ ID NO: 819068 - DNA, 33 bp, Homo sapien
ttcctctgtgccattattaagatggtccccttc

SEQ ID NO: 819069 - DNA, 33 bp, Homo sapien
actcataaagctgaatgaaaaaatcaatacatt

SEQ ID NO: 819070 - DNA, 33 bp, Homo sapien
actcataaagctgaattaaaaaatcaatacatt

SEQ ID NO: 819071 - DNA, 33 bp, Homo sapien
ttgttctgcttgtaaaactcaaaatttaaagaa

SEQ ID NO: 819072 - DNA, 33 bp, Homo sapien
ttgttctgcttgtaaatctcaaaatttaaagaa

SEQ ID NO: 819073 - DNA, 33 bp, Homo sapien
aagttttcttttgagacctcaggaattataagc

SEQ ID NO: 819074 - DNA, 33 bp, Homo sapien
aagttttcttttgagagctcaggaattataagc

SEQ ID NO: 819075 - DNA, 33 bp, Homo sapien
gctaaaattgataccgacatcaaccacaaatgg

SEQ ID NO: 819076 - DNA, 33 bp, Homo sapien
gctaaaattgataccggcatcaaccacaaatgg

SEQ ID NO: 819077 - DNA, 33 bp, Homo sapien
tgaagggtctagatacacacatgcacgtctccc

SEQ ID NO: 819078 - DNA, 33 bp, Homo sapien
tgaagggtctagatacgcacatgcacgtctccc

SEQ ID NO: 819079 - DNA, 33 bp, Homo sapien
gcagaccccttcctaaacatcattctgcctgtg

SEQ ID NO: 819080 - DNA, 33 bp, Homo sapien
gcagaccccttcctaagcatcattctgcctgtg

SEQ ID NO: 819081 - DNA, 33 bp, Homo sapien
gcatttttaggttataacaactctgctaccctg

SEQ ID NO: 819082 - DNA, 33 bp, Homo sapien
gcatttttaggttatatcaactctgctaccctg

SEQ ID NO: 819083 - DNA, 33 bp, Homo sapien
cagaatcacgtgcttccgaaagcctggatttgt

SEQ ID NO: 819084 - DNA, 33 bp, Homo sapien
cagaatcacgtgcttctgaaagcctggatttgt

SEQ ID NO: 819085 - DNA, 33 bp, Homo sapien
aatttcctgtgactcacgaaagagccttattgg

SEQ ID NO: 819086 - DNA, 33 bp, Homo sapien
aatttcctgtgactcatgaaagagccttattgg

SEQ ID NO: 819087 - DNA, 33 bp, Homo sapien
agttgataaacctgaactctaagagcataataa

SEQ ID NO: 819088 - DNA, 33 bp, Homo sapien
agttgataaacctgaattctaagagcataataa

SEQ ID NO: 819089 - DNA, 33 bp, Homo sapien
tgtacaaaccctcaaacatgggagacctgccct

SEQ ID NO: 819090 - DNA, 33 bp, Homo sapien
tgtacaaaccctcaaatatgggagacctgccct

SEQ ID NO: 819091 - DNA, 33 bp, Homo sapien
gcatgcaggagttttcacagataaaaatctttc

SEQ ID NO: 819092 - DNA, 33 bp, Homo sapien
gcatgcaggagttttctcagataaaaatctttc

SEQ ID NO: 819093 - DNA, 33 bp, Homo sapien
ggtctggtggagtttacgcagcaacacaaacaa

SEQ ID NO: 819094 - DNA, 33 bp, Homo sapien
ggtctggtggagtttatgcagcaacacaaacaa

SEQ ID NO: 819095 - DNA, 33 bp, Homo sapien
caatggatggcaataacgtgcttgctgaatgtg

SEQ ID NO: 819096 - DNA, 33 bp, Homo sapien
caatggatggcaataatgtgcttgctgaatgtg

SEQ ID NO: 819097 - DNA, 33 bp, Homo sapien
gccacattatctttcccatcttgttcttgtgca

SEQ ID NO: 819098 - DNA, 33 bp, Homo sapien
gccacattatctttcctatcttgttcttgtgca

SEQ ID NO: 819099 - DNA, 33 bp, Homo sapien
caaaatttgtgactaacgtatgcttttactatc

SEQ ID NO: 819100 - DNA, 33 bp, Homo sapien
caaaatttgtgactaatgtatgcttttactatc

SEQ ID NO: 819101 - DNA, 33 bp, Homo sapien
ccaggcttgtgtccaacaataacaactgatgtt

SEQ ID NO: 819102 - DNA, 33 bp, Homo sapien
ccaggcttgtgtccaataataacaactgatgtt

SEQ ID NO: 819103 - DNA, 33 bp, Homo sapien
cttatgaaagaccagcgctactatacttccact

SEQ ID NO: 819104 - DNA, 33 bp, Homo sapien
cttatgaaagaccagctctactatacttccact

SEQ ID NO: 819105 - DNA, 33 bp, Homo sapien
tacagttaggtatcaccgcctcaatgtgcggtg

SEQ ID NO: 819106 - DNA, 33 bp, Homo sapien
tacagttaggtatcactgcctcaatgtgcggtg

SEQ ID NO: 819107 - DNA, 33 bp, Homo sapien
tgagaacactactctacatgacttcctttgatc

SEQ ID NO: 819108 - DNA, 33 bp, Homo sapien
tgagaacactactctagatgacttcctttgatc

SEQ ID NO: 819109 - DNA, 33 bp, Homo sapien
gaattttaaaaaagtaggtgtagagtaaatgct

SEQ ID NO: 819110 - DNA, 33 bp, Homo sapien
gaattttaaaaaagtatgtgtagagtaaatgct

SEQ ID NO: 819111 - DNA, 33 bp, Homo sapien
acgactcgatgacccactggccaggtctgaggg

SEQ ID NO: 819112 - DNA, 33 bp, Homo sapien
acgactcgatgacccattggccaggtctgaggg

SEQ ID NO: 819113 - DNA, 33 bp, Homo sapien
agtcgtgcccaccgcccaggccaggagatctgg

SEQ ID NO: 819114 - DNA, 33 bp, Homo sapien
agtcgtgcccaccgccgaggccaggagatctgg

SEQ ID NO: 819115 - DNA, 33 bp, Homo sapien
cggctctctctcttagaaaaaggcctgagtaac

SEQ ID NO: 819116 - DNA, 33 bp, Homo sapien
cggctctctctcttaggaaaaggcctgagtaac

SEQ ID NO: 819117 - DNA, 33 bp, Homo sapien
ggattgcccttgctgaccaaaccctgttcttac

SEQ ID NO: 819118 - DNA, 33 bp, Homo sapien
ggattgcccttgctgatcaaaccctgttcttac

SEQ ID NO: 819119 - DNA, 33 bp, Homo sapien
gaagcatgccgacttcaaaacactgaaaactcc

SEQ ID NO: 819120 - DNA, 33 bp, Homo sapien
gaagcatgccgacttcgaaacactgaaaactcc

SEQ ID NO: 819121 - DNA, 33 bp, Homo sapien
tttcctggtaaaaatacgtagtaaggagttttg

SEQ ID NO: 819122 - DNA, 33 bp, Homo sapien
tttcctggtaaaaatatgtagtaaggagttttg

SEQ ID NO: 819123 - DNA, 33 bp, Homo sapien
gtcattgattttaatgacagcatgtaaataatt

SEQ ID NO: 819124 - DNA, 33 bp, Homo sapien
gtcattgattttaatggcagcatgtaaataatt

SEQ ID NO: 819125 - DNA, 33 bp, Homo sapien
tgcaatgtcattgctacgggaagggatggtcgc

SEQ ID NO: 819126 - DNA, 33 bp, Homo sapien
tgcaatgtcattgctatgggaagggatggtcgc

SEQ ID NO: 819127 - DNA, 33 bp, Homo sapien
gcttcttctgcccagcaaattatttgaagatgt

SEQ ID NO: 819128 - DNA, 33 bp, Homo sapien
gcttcttctgcccagcgaattatttgaagatgt

SEQ ID NO: 819129 - DNA, 33 bp, Homo sapien
ctctggcaagaatgtgaagttgtaaaaaatata

SEQ ID NO: 819130 - DNA, 33 bp, Homo sapien
ctctggcaagaatgtggagttgtaaaaaatata

SEQ ID NO: 819131 - DNA, 33 bp, Homo sapien
gacactcaaaatcttcaagtgaaacaaagatca

SEQ ID NO: 819132 - DNA, 33 bp, Homo sapien
gacactcaaaatcttcgagtgaaacaaagatca

SEQ ID NO: 819133 - DNA, 33 bp, Homo sapien
agtcagaatgatgtaaagacaagagcctggtgt

SEQ ID NO: 819134 - DNA, 33 bp, Homo sapien
agtcagaatgatgtaaggacaagagcctggtgt

SEQ ID NO: 819135 - DNA, 33 bp, Homo sapien
tgcaactttatactgccactaattgctcatgag

SEQ ID NO: 819136 - DNA, 33 bp, Homo sapien
tgcaactttatactgctactaattgctcatgag

SEQ ID NO: 819137 - DNA, 33 bp, Homo sapien
gtggggctgttgattacatcagattgtttcctt

SEQ ID NO: 819138 - DNA, 33 bp, Homo sapien
gtggggctgttgattatatcagattgtttcctt

SEQ ID NO: 819139 - DNA, 33 bp, Homo sapien
tgaattctcttgaatgaaaaggctccaggaagc

SEQ ID NO: 819140 - DNA, 33 bp, Homo sapien
tgaattctcttgaatgcaaaggctccaggaagc

SEQ ID NO: 819141 - DNA, 33 bp, Homo sapien
aacagcgggaactgaaaggaccacagatgaatt

SEQ ID NO: 819142 - DNA, 33 bp, Homo sapien
aacagcgggaactgaagggaccacagatgaatt

SEQ ID NO: 819143 - DNA, 33 bp, Homo sapien
gagtggagaggaagtaaatgctaaaaccacatg

SEQ ID NO: 819144 - DNA, 33 bp, Homo sapien
gagtggagaggaagtagatgctaaaaccacatg

SEQ ID NO: 819145 - DNA, 33 bp, Homo sapien
gggtgtccagaacaaaattggaaacattgctga

SEQ ID NO: 819146 - DNA, 33 bp, Homo sapien
gggtgtccagaacaaacttggaaacattgctga

SEQ ID NO: 819147 - DNA, 33 bp, Homo sapien
ctgacttggaattgaacccaggctgtgaccgag

SEQ ID NO: 819148 - DNA, 33 bp, Homo sapien
ctgacttggaattgaatccaggctgtgaccgag

SEQ ID NO: 819149 - DNA, 33 bp, Homo sapien
gtcctactctcagtggacatgaattctattgct

SEQ ID NO: 819150 - DNA, 33 bp, Homo sapien
gtcctactctcagtgggcatgaattctattgct

SEQ ID NO: 819151 - DNA, 33 bp, Homo sapien
aaaacataaaacacaacataacaagtgtggtga

SEQ ID NO: 819152 - DNA, 33 bp, Homo sapien
aaaacataaaacacaatataacaagtgtggtga

SEQ ID NO: 819153 - DNA, 33 bp, Homo sapien
atacacaaagacaggagcggcttcatccagaac

SEQ ID NO: 819154 - DNA, 33 bp, Homo sapien
atacacaaagacaggatcggcttcatccagaac

SEQ ID NO: 819155 - DNA, 33 bp, Homo sapien
cccaatgagatttttacggtcgggtgtaaggct

SEQ ID NO: 819156 - DNA, 33 bp, Homo sapien
cccaatgagatttttatggtcgggtgtaaggct

SEQ ID NO: 819157 - DNA, 33 bp, Homo sapien
ctgcccaggaatttccaaactttgatgccatta

SEQ ID NO: 819158 - DNA, 33 bp, Homo sapien
ctgcccaggaatttccgaactttgatgccatta

SEQ ID NO: 819159 - DNA, 33 bp, Homo sapien
tctccacacccgtgtcactgctccatcagagcc

SEQ ID NO: 819160 - DNA, 33 bp, Homo sapien
tctccacacccgtgtcgctgctccatcagagcc

SEQ ID NO: 819161 - DNA, 33 bp, Homo sapien
aacacattttatccgcagatgctctgggcactc

SEQ ID NO: 819162 - DNA, 33 bp, Homo sapien
aacacattttatccgcggatgctctgggcactc

SEQ ID NO: 819163 - DNA, 33 bp, Homo sapien
ctccaatgataaagcaaacattatgacccagac

SEQ ID NO: 819164 - DNA, 33 bp, Homo sapien
ctccaatgataaagcacacattatgacccagac

SEQ ID NO: 819165 - DNA, 33 bp, Homo sapien
ttatgatgtactaaaggaattgtaaggctattt

SEQ ID NO: 819166 - DNA, 33 bp, Homo sapien
ttatgatgtactaaagtaattgtaaggctattt

SEQ ID NO: 819167 - DNA, 33 bp, Homo sapien
cccaagtctgaggcaaagaggccagatagcctt

SEQ ID NO: 819168 - DNA, 33 bp, Homo sapien
cccaagtctgaggcaaggaggccagatagcctt

SEQ ID NO: 819169 - DNA, 33 bp, Homo sapien
gagtggtcaggagcataagatttggggacagag

SEQ ID NO: 819170 - DNA, 33 bp, Homo sapien
gagtggtcaggagcatgagatttggggacagag

SEQ ID NO: 819171 - DNA, 33 bp, Homo sapien
gctttcactgctcagagagttcatgattttgcc

SEQ ID NO: 819172 - DNA, 33 bp, Homo sapien
gctttcactgctcagatagttcatgattttgcc

SEQ ID NO: 819173 - DNA, 33 bp, Homo sapien
cagcttctaccgaaaacggaaacaaaatcacca

SEQ ID NO: 819174 - DNA, 33 bp, Homo sapien
cagcttctaccgaaaatggaaacaaaatcacca

SEQ ID NO: 819175 - DNA, 33 bp, Homo sapien
gctccagagcagagaaaggtgtggctagatttg

SEQ ID NO: 819176 - DNA, 33 bp, Homo sapien
gctccagagcagagaagggtgtggctagatttg

SEQ ID NO: 819177 - DNA, 33 bp, Homo sapien; identical to SEQ ID NO: 819175

SEQ ID NO: 819178 - DNA, 33 bp, Homo sapien; identical to SEQ ID NO: 819176

SEQ ID NO: 819179 - DNA, 33 bp, Homo sapien
catagacgataaaaaaatgaaacctgtaatgaa

SEQ ID NO: 819180 - DNA, 33 bp, Homo sapien
catagacgataaaaaagtgaaacctgtaatgaa

SEQ ID NO: 819181 - DNA, 33 bp, Homo sapien; identical to SEQ ID NO: 819179

SEQ ID NO: 819182 - DNA, 33 bp, Homo sapien; identical to SEQ ID NO: 819180

SEQ ID NO: 819183 - DNA, 33 bp, Homo sapien
gaagtttcaaccgagcacaagtctgttggagag

SEQ ID NO: 819184 - DNA, 33 bp, Homo sapien
gaagtttcaaccgagcgcaagtctgttggagag

SEQ ID NO: 819185 - DNA, 33 bp, Homo sapien
gtctcaactggtttaaactggacaggacctgcc

SEQ ID NO: 819186 - DNA, 33 bp, Homo sapien
gtctcaactggtttaatctggacaggacctgcc

SEQ ID NO: 819187 - DNA, 33 bp, Homo sapien
gcgacactctgataataaaattactgggccctg

SEQ ID NO: 819188 - DNA, 33 bp, Homo sapien
gcgacactctgataatgaaattactgggccctg

SEQ ID NO: 819189 - DNA, 33 bp, Homo sapien
ccgaaaccagatgaaactgattatctctcataa

SEQ ID NO: 819190 - DNA, 33 bp, Homo sapien
ccgaaaccagatgaaattgattatctctcataa

SEQ ID NO: 819191 - DNA, 33 bp, Homo sapien
aaagctgaagcaaggcactggttacagataatg

SEQ ID NO: 819192 - DNA, 33 bp, Homo sapien
aaagctgaagcaaggcgctggttacagataatg

SEQ ID NO: 819193 - DNA, 33 bp, Homo sapien
gtttggtgaacacataacagtctctaacacaaa

SEQ ID NO: 819194 - DNA, 33 bp, Homo sapien
gtttggtgaacacatagcagtctctaacacaaa

SEQ ID NO: 819195 - DNA, 33 bp, Homo sapien
taaagtttcatgtcccagcacagcggttgtctc

SEQ ID NO: 819196 - DNA, 33 bp, Homo sapien
taaagtttcatgtcccggcacagcggttgtctc

SEQ ID NO: 819197 - DNA, 33 bp, Homo sapien
gggaagttaacgggaaatctctggctgctcttg

SEQ ID NO: 819198 - DNA, 33 bp, Homo sapien
gggaagttaacgggaagtctctggctgctcttg

SEQ ID NO: 819199 - DNA, 33 bp, Homo sapien
tttgaaaactgcacatcaggtaggcacgaggac

SEQ ID NO: 819200 - DNA, 33 bp, Homo sapien
tttgaaaactgcacattaggtaggcacgaggac

SEQ ID NO: 819201 - DNA, 33 bp, Homo sapien
cacccttaacaaacccacaagtgcaaaccataa

SEQ ID NO: 819202 - DNA, 33 bp, Homo sapien
cacccttaacaaaccctcaagtgcaaaccataa

SEQ ID NO: 819203 - DNA, 33 bp, Homo sapien
acccttgtaatgcaaaatatgggaggtatagac

SEQ ID NO: 819204 - DNA, 33 bp, Homo sapien
acccttgtaatgcaaagtatgggaggtatagac

SEQ ID NO: 819205 - DNA, 33 bp, Homo sapien
tcaaatctgcgaatacagagggtcagatcttaa

SEQ ID NO: 819206 - DNA, 33 bp, Homo sapien
tcaaatctgcgaatacggagggtcagatcttaa

SEQ ID NO: 819207 - DNA, 33 bp, Homo sapien
gcacataatacaatggccatgaagaaaactcta

SEQ ID NO: 819208 - DNA, 33 bp, Homo sapien
gcacataatacaatggtcatgaagaaaactcta

SEQ ID NO: 819209 - DNA, 33 bp, Homo sapien
ccgacactgttcatgacgtcaaaggccacggtg

SEQ ID NO: 819210 - DNA, 33 bp, Homo sapien
ccgacactgttcatgatgtcaaaggccacggtg

SEQ ID NO: 819211 - DNA, 33 bp, Homo sapien
aagaggcagatgtttcgatcacctagccgacac

SEQ ID NO: 819212 - DNA, 33 bp, Homo sapien
aagaggcagatgtttctatcacctagccgacac

SEQ ID NO: 819213 - DNA, 33 bp, Homo sapien
tttgtgtctgcgtgacaaattgtcagtcccagg

SEQ ID NO: 819214 - DNA, 33 bp, Homo sapien
tttgtgtctgcgtgacgaattgtcagtcccagg

SEQ ID NO: 819215 - DNA, 33 bp, Homo sapien
actgcaccagtaaatacatcctctgaaacccca

SEQ ID NO: 819216 - DNA, 33 bp, Homo sapien
actgcaccagtaaatatatcctctgaaacccca

SEQ ID NO: 819217 - DNA, 33 bp, Homo sapien
catagaacctccgtgacagcaggatgcagtggc

SEQ ID NO: 819218 - DNA, 33 bp, Homo sapien
catagaacctccgtgagagcaggatgcagtggc

SEQ ID NO: 819219 - DNA, 33 bp, Homo sapien
cttcctactcctcctgaagttaagaaagacaaa

SEQ ID NO: 819220 - DNA, 33 bp, Homo sapien
cttcctactcctcctgcagttaagaaagacaaa

SEQ ID NO: 819221 - DNA, 33 bp, Homo sapien
ggtgagttctcgcttacatcagatttattgatc

SEQ ID NO: 819222 - DNA, 33 bp, Homo sapien
ggtgagttctcgcttatatcagatttattgatc

SEQ ID NO: 819223 - DNA, 33 bp, Homo sapien
aagtccactggcttcactatctgcacaggtgct

SEQ ID NO: 819224 - DNA, 33 bp, Homo sapien
aagtccactggcttcagtatctgcacaggtgct

SEQ ID NO: 819225 - DNA, 33 bp, Homo sapien
ccctgaaacacacaaccgcttgctctaaatttt

SEQ ID NO: 819226 - DNA, 33 bp, Homo sapien
ccctgaaacacacaactgcttgctctaaatttt

SEQ ID NO: 819227 - DNA, 33 bp, Homo sapien
ttaaaaaaaatattaccactgcattggctaaaa

SEQ ID NO: 819228 - DNA, 33 bp, Homo sapien
ttaaaaaaaatattactactgcattggctaaaa

SEQ ID NO: 819229 - DNA, 33 bp, Homo sapien
tctttctaaggcagaaaagtagacacaggttct

SEQ ID NO: 819230 - DNA, 33 bp, Homo sapien
tctttctaaggcagaagagtagacacaggttct

SEQ ID NO: 819231 - DNA, 33 bp, Homo sapien
tagatgtaacccctaaaccatacagggtagtgg

SEQ ID NO: 819232 - DNA, 33 bp, Homo sapien
tagatgtaacccctaagccatacagggtagtgg

SEQ ID NO: 819233 - DNA, 33 bp, Homo sapien
ctccaaatgtatcacaaatctaaacattagaaa

SEQ ID NO: 819234 - DNA, 33 bp, Homo sapien
ctccaaatgtatcacagatctaaacattagaaa

SEQ ID NO: 819235 - DNA, 33 bp, Homo sapien
atctaaacattagaaaatagaagcacaaaaagt

SEQ ID NO: 819236 - DNA, 33 bp, Homo sapien
atctaaacattagaaagtagaagcacaaaaagt

SEQ ID NO: 819237 - DNA, 33 bp, Homo sapien
aggataatttcacttaaggatggcgtttttgcc

SEQ ID NO: 819238 - DNA, 33 bp, Homo sapien
aggataatttcacttagggatggcgtttttgcc

SEQ ID NO: 819239 - DNA, 33 bp, Homo sapien
ttcatcatcgttgaaccaggaatatgagcatgt

SEQ ID NO: 819240 - DNA, 33 bp, Homo sapien
ttcatcatcgttgaactaggaatatgagcatgt

SEQ ID NO: 819241 - DNA, 33 bp, Homo sapien
gtcgggtttctgcatagctctttgcccaaccaa

SEQ ID NO: 819242 - DNA, 33 bp, Homo sapien
gtcgggtttctgcatatctctttgcccaaccaa

SEQ ID NO: 819243 - DNA, 33 bp, Homo sapien
gggatcacaccaaaaaagaagaatgaggacttt

SEQ ID NO: 819244 - DNA, 33 bp, Homo sapien
gggatcacaccaaaaaggaagaatgaggacttt

SEQ ID NO: 819245 - DNA, 33 bp, Homo sapien
tcctgccaacgtgaggaagccgggattcgaacc

SEQ ID NO: 819246 - DNA, 33 bp, Homo sapien
tcctgccaacgtgaggcagccgggattcgaacc

SEQ ID NO: 819247 - DNA, 33 bp, Homo sapien
agggccttctccactacaggcatttcatggaca

SEQ ID NO: 819248 - DNA, 33 bp, Homo sapien
agggccttctccactataggcatttcatggaca

SEQ ID NO: 819249 - DNA, 33 bp, Homo sapien
ttgtttgagctctgccgacggacagtcccaccg

SEQ ID NO: 819250 - DNA, 33 bp, Homo sapien
ttgtttgagctctgcctacggacagtcccaccg

SEQ ID NO: 819251 - DNA, 33 bp, Homo sapien
ctcacaggccagtgaaatgagggctcttgggaa

SEQ ID NO: 819252 - DNA, 33 bp, Homo sapien
ctcacaggccagtgaagtgagggctcttgggaa

SEQ ID NO: 819253 - DNA, 33 bp, Homo sapien
ctgggcctaggttccacgatgtataagcctgtt

SEQ ID NO: 819254 - DNA, 33 bp, Homo sapien
ctgggcctaggttccatgatgtataagcctgtt

SEQ ID NO: 819255 - DNA, 33 bp, Homo sapien
gcaatcaaggaaacaaccaggtggttacaaggc

SEQ ID NO: 819256 - DNA, 33 bp, Homo sapien
gcaatcaaggaaacaatcaggtggttacaaggc

SEQ ID NO: 819257 - DNA, 33 bp, Homo sapien
acttcatgcttgtcaggagtctagtggcatcaa

SEQ ID NO: 819258 - DNA, 33 bp, Homo sapien
acttcatgcttgtcagtagtctagtggcatcaa

SEQ ID NO: 819259 - DNA, 33 bp, Homo sapien
tgtgatttgagacaaagaattccaaatgtatat

SEQ ID NO: 819260 - DNA, 33 bp, Homo sapien
tgtgatttgagacaaataattccaaatgtatat

SEQ ID NO: 819261 - DNA, 33 bp, Homo sapien
ctcagcaacactgaatgacttgagaaagacttt

SEQ ID NO: 819262 - DNA, 33 bp, Homo sapien
ctcagcaacactgaattacttgagaaagacttt

SEQ ID NO: 819263 - DNA, 33 bp, Homo sapien
gttctcacctacttaaatgaaacgtcccaaagt

SEQ ID NO: 819264 - DNA, 33 bp, Homo sapien
gttctcacctacttaactgaaacgtcccaaagt

SEQ ID NO: 819265 - DNA, 33 bp, Homo sapien
tctgaagagaatactcacggtctcccatgtgag

SEQ ID NO: 819266 - DNA, 33 bp, Homo sapien
tctgaagagaatactcgcggtctcccatgtgag

SEQ ID NO: 819267 - DNA, 33 bp, Homo sapien
gaatgaaaactaaaagcatggctgaagacaaaa

SEQ ID NO: 819268 - DNA, 33 bp, Homo sapien
gaatgaaaactaaaagtatggctgaagacaaaa

SEQ ID NO: 819269 - DNA, 33 bp, Homo sapien
tatgctcagcgtcatacgtcactagggaattta

SEQ ID NO: 819270 - DNA, 33 bp, Homo sapien
tatgctcagcgtcatatgtcactagggaattta

SEQ ID NO: 819271 - DNA, 33 bp, Homo sapien
tggctttcaaggatgaagatcggttattacata

SEQ ID NO: 819272 - DNA, 33 bp, Homo sapien
tggctttcaaggatgaggatcggttattacata

SEQ ID NO: 819273 - DNA, 33 bp, Homo sapien
gtggtgatggttacacaactgtatatggccaaa

SEQ ID NO: 819274 - DNA, 33 bp, Homo sapien
gtggtgatggttacacgactgtatatggccaaa

SEQ ID NO: 819275 - DNA, 33 bp, Homo sapien
ttttaattagtgaagcagagaaatgctgagtga

SEQ ID NO: 819276 - DNA, 33 bp, Homo sapien
ttttaattagtgaagccgagaaatgctgagtga

SEQ ID NO: 819277 - DNA, 33 bp, Homo sapien
taagagctaacaattgcaaaaatcttcttaagc

SEQ ID NO: 819278 - DNA, 33 bp, Homo sapien
taagagctaacaattggaaaaatcttcttaagc

SEQ ID NO: 819279 - DNA, 33 bp, Homo sapien
catgtctaaggtcacactgcagtaaatggcagt

SEQ ID NO: 819280 - DNA, 33 bp, Homo sapien
catgtctaaggtcacattgcagtaaatggcagt

SEQ ID NO: 819281 - DNA, 33 bp, Homo sapien
tttctcattttcagcaagaataatcctgtgccc

SEQ ID NO: 819282 - DNA, 33 bp, Homo sapien
tttctcattttcagcacgaataatcctgtgccc

SEQ ID NO: 819283 - DNA, 33 bp, Homo sapien
gttaaagtatctccgtaaagtaacacactgaca

SEQ ID NO: 819284 - DNA, 33 bp, Homo sapien
gttaaagtatctccgtgaagtaacacactgaca

SEQ ID NO: 819285 - DNA, 33 bp, Homo sapien
agaacgtaagaggatcaacacgtattgttttaa

SEQ ID NO: 819286 - DNA, 33 bp, Homo sapien
agaacgtaagaggatcgacacgtattgttttaa

SEQ ID NO: 819287 - DNA, 33 bp, Homo sapien
ttataatttcactgtacgtgggaggagtagtta

SEQ ID NO: 819288 - DNA, 33 bp, Homo sapien
ttataatttcactgtatgtgggaggagtagtta

SEQ ID NO: 819289 - DNA, 33 bp, Homo sapien
ccgaagttatctttcacagagaagcgatttccc

SEQ ID NO: 819290 - DNA, 33 bp, Homo sapien
ccgaagttatctttcatagagaagcgatttccc

SEQ ID NO: 819291 - DNA, 33 bp, Homo sapien
cttccttcccccaaaaagtgctactgcagctgt

SEQ ID NO: 819292 - DNA, 33 bp, Homo sapien
cttccttcccccaaaaggtgctactgcagctgt

SEQ ID NO: 819293 - DNA, 33 bp, Homo sapien
acaagaagctaatgccaaaggtgaaagaaaagg

SEQ ID NO: 819294 - DNA, 33 bp, Homo sapien
acaagaagctaatgccgaaggtgaaagaaaagg

SEQ ID NO: 819295 - DNA, 33 bp, Homo sapien
cactaaacgacaaagcaatgactactgaacatt

SEQ ID NO: 819296 - DNA, 33 bp, Homo sapien
cactaaacgacaaagcgatgactactgaacatt

SEQ ID NO: 819297 - DNA, 33 bp, Homo sapien
catcagataactggtgcatcaaatggtttagat

SEQ ID NO: 819298 - DNA, 33 bp, Homo sapien
catcagataactggtggatcaaatggtttagat

SEQ ID NO: 819299 - DNA, 33 bp, Homo sapien
gaaggggttgactacacatcgtcagaaattata

SEQ ID NO: 819300 - DNA, 33 bp, Homo sapien
gaaggggttgactacatatcgtcagaaattata

SEQ ID NO: 819301 - DNA, 33 bp, Homo sapien
gccttcattaacacccaacacttctcctctgtt

SEQ ID NO: 819302 - DNA, 33 bp, Homo sapien
gccttcattaacacccgacacttctcctctgtt

SEQ ID NO: 819303 - DNA, 33 bp, Homo sapien
tagagtccgtttctaaacattgaagagggttag

SEQ ID NO: 819304 - DNA, 33 bp, Homo sapien
tagagtccgtttctaagcattgaagagggttag

SEQ ID NO: 819305 - DNA, 33 bp, Homo sapien
acggactctaagatcaagagaaaactgcaagag

SEQ ID NO: 819306 - DNA, 33 bp, Homo sapien
acggactctaagatcacgagaaaactgcaagag

SEQ ID NO: 819307 - DNA, 33 bp, Homo sapien
agtgaaaagacatgtacagaggtaaagcaatag

SEQ ID NO: 819308 - DNA, 33 bp, Homo sapien
agtgaaaagacatgtatagaggtaaagcaatag

SEQ ID NO: 819309 - DNA, 33 bp, Homo sapien
caaaattgaatgttaaaaactcaaccatgtatt

SEQ ID NO: 819310 - DNA, 33 bp, Homo sapien
caaaattgaatgttaagaactcaaccatgtatt

SEQ ID NO: 819311 - DNA, 33 bp, Homo sapien
tttaaagagtggtaaacgatgaccgattcactt

SEQ ID NO: 819312 - DNA, 33 bp, Homo sapien
tttaaagagtggtaaatgatgaccgattcactt

SEQ ID NO: 819313 - DNA, 33 bp, Homo sapien
gcttccatagtgaggacggacctcattaaagca

SEQ ID NO: 819314 - DNA, 33 bp, Homo sapien
gcttccatagtgaggatggacctcattaaagca

SEQ ID NO: 819315 - DNA, 33 bp, Homo sapien
caagagaaggtctgaaacactttctagagggga

SEQ ID NO: 819316 - DNA, 33 bp, Homo sapien
caagagaaggtctgaagcactttctagagggga

SEQ ID NO: 819317 - DNA, 33 bp, Homo sapien
gaggaggccgacagataagtcccagaagggcaa

SEQ ID NO: 819318 - DNA, 33 bp, Homo sapien
gaggaggccgacagatcagtcccagaagggcaa

SEQ ID NO: 819319 - DNA, 33 bp, Homo sapien
caataggtattgttaaccttagacaccctattg

SEQ ID NO: 819320 - DNA, 33 bp, Homo sapien
caataggtattgttaatcttagacaccctattg

SEQ ID NO: 819321 - DNA, 33 bp, Homo sapien
tttaaggtgcaattgcaagatacaggaactcca

SEQ ID NO: 819322 - DNA, 33 bp, Homo sapien
tttaaggtgcaattgcgagatacaggaactcca

SEQ ID NO: 819323 - DNA, 33 bp, Homo sapien
cacttatgtatgtatacgcatttcaggggagaa

SEQ ID NO: 819324 - DNA, 33 bp, Homo sapien
cacttatgtatgtatatgcatttcaggggagaa

SEQ ID NO: 819325 - DNA, 33 bp, Homo sapien
cctattagagagaagcagaaactatcctcatag

SEQ ID NO: 819326 - DNA, 33 bp, Homo sapien
cctattagagagaagcggaaactatcctcatag

SEQ ID NO: 819327 - DNA, 33 bp, Homo sapien
gaatacagagctgatacacaactggtcccatat

SEQ ID NO: 819328 - DNA, 33 bp, Homo sapien
gaatacagagctgatatacaactggtcccatat

SEQ ID NO: 819329 - DNA, 33 bp, Homo sapien
ctcacatcccacacacaggcctccgttttgagt

SEQ ID NO: 819330 - DNA, 33 bp, Homo sapien
ctcacatcccacacacgggcctccgttttgagt

SEQ ID NO: 819331 - DNA, 33 bp, Homo sapien
ccagatctgcttacacagaggagctgcacatcg

SEQ ID NO: 819332 - DNA, 33 bp, Homo sapien
ccagatctgcttacacggaggagctgcacatcg

SEQ ID NO: 819333 - DNA, 33 bp, Homo sapien
ccacagacaccatcaacgcggctgctgcagagc

SEQ ID NO: 819334 - DNA, 33 bp, Homo sapien
ccacagacaccatcaatgcggctgctgcagagc

SEQ ID NO: 819335 - DNA, 33 bp, Homo sapien
ttcttactgttggtcaacaaagagctttttcta

SEQ ID NO: 819336 - DNA, 33 bp, Homo sapien
ttcttactgttggtcagcaaagagctttttcta

SEQ ID NO: 819337 - DNA, 33 bp, Homo sapien
acaccaaacctcaaacaggacttaatcactcaa

SEQ ID NO: 819338 - DNA, 33 bp, Homo sapien
acaccaaacctcaaacgggacttaatcactcaa

SEQ ID NO: 819339 - DNA, 33 bp, Homo sapien
tgctcctgaggttccaaggggtgcaggtgcaag

SEQ ID NO: 819340 - DNA, 33 bp, Homo sapien
tgctcctgaggttccacggggtgcaggtgcaag

SEQ ID NO: 819341 - DNA, 33 bp, Homo sapien
acttagtgacagaaacaacattgcgatgtgaag

SEQ ID NO: 819342 - DNA, 33 bp, Homo sapien
acttagtgacagaaacgacattgcgatgtgaag

SEQ ID NO: 819343 - DNA, 33 bp, Homo sapien
aaatgtatctttatgaatacgagatggggaaag

SEQ ID NO: 819344 - DNA, 33 bp, Homo sapien
aaatgtatctttatgattacgagatggggaaag

SEQ ID NO: 819345 - DNA, 33 bp, Homo sapien
aggaatgtttattcaaatggctcaaaaatgtag

SEQ ID NO: 819346 - DNA, 33 bp, Homo sapien
aggaatgtttattcaagtggctcaaaaatgtag

SEQ ID NO: 819347 - DNA, 33 bp, Homo sapien
cacacacacaggcacgcacatgcatacacacaa

SEQ ID NO: 819348 - DNA, 33 bp, Homo sapien
cacacacacaggcacgtacatgcatacacacaa

SEQ ID NO: 819349 - DNA, 33 bp, Homo sapien
gactgatttatgactgaattccaattttgtctc

SEQ ID NO: 819350 - DNA, 33 bp, Homo sapien
gactgatttatgactggattccaattttgtctc

SEQ ID NO: 819351 - DNA, 33 bp, Homo sapien
accctggatgaggagaaggttataaggcaactc

SEQ ID NO: 819352 - DNA, 33 bp, Homo sapien
accctggatgaggagacggttataaggcaactc

SEQ ID NO: 819353 - DNA, 33 bp, Homo sapien
gtagggcagagtgtaaccatgtgggtatcagat

SEQ ID NO: 819354 - DNA, 33 bp, Homo sapien
gtagggcagagtgtaagcatgtgggtatcagat

SEQ ID NO: 819355 - DNA, 33 bp, Homo sapien
tgacgtttaacttgtagagcatccttcaaaaca

SEQ ID NO: 819356 - DNA, 33 bp, Homo sapien
tgacgtttaacttgtatagcatccttcaaaaca

SEQ ID NO: 819357 - DNA, 33 bp, Homo sapien
gcattgttagcttgaccgcaaagctcttttcag

SEQ ID NO: 819358 - DNA, 33 bp, Homo sapien
gcattgttagcttgactgcaaagctcttttcag

SEQ ID NO: 819359 - DNA, 33 bp, Homo sapien
cagaacttacgagacacaaaatgaaaagttcgc

SEQ ID NO: 819360 - DNA, 33 bp, Homo sapien
cagaacttacgagacagaaaatgaaaagttcgc

SEQ ID NO: 819361 - DNA, 33 bp, Homo sapien
ttacaaacacttagaacatttatgtacagctca

SEQ ID NO: 819362 - DNA, 33 bp, Homo sapien
ttacaaacacttagaatatttatgtacagctca

SEQ ID NO: 819363 - DNA, 33 bp, Homo sapien
atcagcactttaggagaaggaaagagtgagacg

SEQ ID NO: 819364 - DNA, 33 bp, Homo sapien
atcagcactttaggaggaggaaagagtgagacg

SEQ ID NO: 819365 - DNA, 33 bp, Homo sapien
aaaggtgagaagtccacgcttcactctgtagcc

SEQ ID NO: 819366 - DNA, 33 bp, Homo sapien
aaaggtgagaagtccatgcttcactctgtagcc

SEQ ID NO: 819367 - DNA, 33 bp, Homo sapien
cggagcactgtgactcgacaagcggtagatgat

SEQ ID NO: 819368 - DNA, 33 bp, Homo sapien
cggagcactgtgactctacaagcggtagatgat

SEQ ID NO: 819369 - DNA, 33 bp, Homo sapien
gaatgtatttacatccaatagcagcttggcaca

SEQ ID NO: 819370 - DNA, 33 bp, Homo sapien
gaatgtatttacatccgatagcagcttggcaca

SEQ ID NO: 819371 - DNA, 33 bp, Homo sapien
aaggcctgagcttcaccaagtttacattacaga

SEQ ID NO: 819372 - DNA, 33 bp, Homo sapien
aaggcctgagcttcacgaagtttacattacaga

SEQ ID NO: 819373 - DNA, 33 bp, Homo sapien
ttctccttcctgagcaggacttgagcaagcata

SEQ ID NO: 819374 - DNA, 33 bp, Homo sapien
ttctccttcctgagcatgacttgagcaagcata

SEQ ID NO: 819375 - DNA, 33 bp, Homo sapien
aaggtaacgatcggtaagatgatgtcagtctga

SEQ ID NO: 819376 - DNA, 33 bp, Homo sapien
aaggtaacgatcggtaggatgatgtcagtctga

SEQ ID NO: 819377 - DNA, 33 bp, Homo sapien
cttgatacttgttccacgctaaatacgacaaaa

SEQ ID NO: 819378 - DNA, 33 bp, Homo sapien
cttgatacttgttccatgctaaatacgacaaaa

SEQ ID NO: 819379 - DNA, 33 bp, Homo sapien
catttaaagaatgaaaaggttggcagctgcgtt

SEQ ID NO: 819380 - DNA, 33 bp, Homo sapien
catttaaagaatgaaagggttggcagctgcgtt

SEQ ID NO: 819381 - DNA, 33 bp, Homo sapien
aggccgaggatgctgcggaacatcctccgatac

SEQ ID NO: 819382 - DNA, 33 bp, Homo sapien
aggccgaggatgctgctgaacatcctccgatac

SEQ ID NO: 819383 - DNA, 33 bp, Homo sapien
tgcagtaagttcctcaagaatgttatggagtaa

SEQ ID NO: 819384 - DNA, 33 bp, Homo sapien
tgcagtaagttcctcacgaatgttatggagtaa

SEQ ID NO: 819385 - DNA, 33 bp, Homo sapien
ttcctaatacatttaccagcaagaaaggcatgt

SEQ ID NO: 819386 - DNA, 33 bp, Homo sapien
ttcctaatacatttactagcaagaaaggcatgt

SEQ ID NO: 819387 - DNA, 33 bp, Homo sapien
agcattttgggcttcacaccccactaacctctt

SEQ ID NO: 819388 - DNA, 33 bp, Homo sapien
agcattttgggcttcataccccactaacctctt

SEQ ID NO: 819389 - DNA, 33 bp, Homo sapien
tcagtaggcacaaggcaagggtcacatgatcac

SEQ ID NO: 819390 - DNA, 33 bp, Homo sapien
tcagtaggcacaaggcgagggtcacatgatcac

SEQ ID NO: 819391 - DNA, 33 bp, Homo sapien
cttaactacggttatgaaatcctgaagaggggc

SEQ ID NO: 819392 - DNA, 33 bp, Homo sapien
cttaactacggttatggaatcctgaagaggggc

SEQ ID NO: 819393 - DNA, 33 bp, Homo sapien
ataagaaagcaaactcccgatcaagatccagag

SEQ ID NO: 819394 - DNA, 33 bp, Homo sapien
ataagaaagcaaactctcgatcaagatccagag

SEQ ID NO: 819395 - DNA, 33 bp, Homo sapien
ggtaaatactgctgtacggaaaaagtgttcaaa

SEQ ID NO: 819396 - DNA, 33 bp, Homo sapien
ggtaaatactgctgtatggaaaaagtgttcaaa

SEQ ID NO: 819397 - DNA, 33 bp, Homo sapien
agttgaaatatgacagcatctgtatctcagaaa

SEQ ID NO: 819398 - DNA, 33 bp, Homo sapien
agttgaaatatgacagtatctgtatctcagaaa

SEQ ID NO: 819399 - DNA, 33 bp, Homo sapien
gtcaaatatgtgttggaagaatcaaatacaaag

SEQ ID NO: 819400 - DNA, 33 bp, Homo sapien
gtcaaatatgtgttgggagaatcaaatacaaag

SEQ ID NO: 819401 - DNA, 33 bp, Homo sapien
agccactgtcaaataaatacataagaatcttta

SEQ ID NO: 819402 - DNA, 33 bp, Homo sapien
agccactgtcaaataactacataagaatcttta

SEQ ID NO: 819403 - DNA, 33 bp, Homo sapien
atcatatttcttaaaacggagggtaccaagcta

SEQ ID NO: 819404 - DNA, 33 bp, Homo sapien
atcatatttcttaaaatggagggtaccaagcta

SEQ ID NO: 819405 - DNA, 33 bp, Homo sapien
gactttagattttgaacagtgcaacatttagat

SEQ ID NO: 819406 - DNA, 33 bp, Homo sapien
gactttagattttgaatagtgcaacatttagat

SEQ ID NO: 819407 - DNA, 33 bp, Homo sapien
gcttgctcatgtctgaacacagaaccaacatgg

SEQ ID NO: 819408 - DNA, 33 bp, Homo sapien
gcttgctcatgtctgaccacagaaccaacatgg

SEQ ID NO: 819409 - DNA, 33 bp, Homo sapien
agattgtgacctaatacgcaatcaaattcttta

SEQ ID NO: 819410 - DNA, 33 bp, Homo sapien
agattgtgacctaatatgcaatcaaattcttta

SEQ ID NO: 819411 - DNA, 33 bp, Homo sapien
gcacccagtagcccggaagtcctctttgattcc

SEQ ID NO: 819412 - DNA, 33 bp, Homo sapien
gcacccagtagcccgggagtcctctttgattcc

SEQ ID NO: 819413 - DNA, 33 bp, Homo sapien
cagcagtcctaaataactccccatcccagcctc

SEQ ID NO: 819414 - DNA, 33 bp, Homo sapien
cagcagtcctaaataattccccatcccagcctc

SEQ ID NO: 819415 - DNA, 33 bp, Homo sapien
gacagcaatccagtaaagaaaatgataagggcc

SEQ ID NO: 819416 - DNA, 33 bp, Homo sapien
gacagcaatccagtaacgaaaatgataagggcc

SEQ ID NO: 819417 - DNA, 33 bp, Homo sapien
taatactaaggaatgaaaaatgcaaggaagaga

SEQ ID NO: 819418 - DNA, 33 bp, Homo sapien
taatactaaggaatgacaaatgcaaggaagaga

SEQ ID NO: 819419 - DNA, 33 bp, Homo sapien
ggccaccaaaggagccacacaaggtaatggaca

SEQ ID NO: 819420 - DNA, 33 bp, Homo sapien
ggccaccaaaggagccgcacaaggtaatggaca

SEQ ID NO: 819421 - DNA, 33 bp, Homo sapien
accaagtattgcttcaaaagtcttttatgttta

SEQ ID NO: 819422 - DNA, 33 bp, Homo sapien
accaagtattgcttcagaagtcttttatgttta

SEQ ID NO: 819423 - DNA, 33 bp, Homo sapien
ccacagggattaagaaaggcatcctgagatggt

SEQ ID NO: 819424 - DNA, 33 bp, Homo sapien
ccacagggattaagaagggcatcctgagatggt

SEQ ID NO: 819425 - DNA, 33 bp, Homo sapien
tagatatatgatcaaaataactcagattaaagt

SEQ ID NO: 819426 - DNA, 33 bp, Homo sapien
tagatatatgatcaaagtaactcagattaaagt

SEQ ID NO: 819427 - DNA, 33 bp, Homo sapien
agtcacttcagctgcaaataaagagactgaaac

SEQ ID NO: 819428 - DNA, 33 bp, Homo sapien
agtcacttcagctgcatataaagagactgaaac

SEQ ID NO: 819429 - DNA, 33 bp, Homo sapien
ctaaaatgtcgacaaaatgctaagaatgactgg

SEQ ID NO: 819430 - DNA, 33 bp, Homo sapien
ctaaaatgtcgacaaattgctaagaatgactgg

SEQ ID NO: 819431 - DNA, 33 bp, Homo sapien
ctctgcagaagcctgacgttcctgcacccctag

SEQ ID NO: 819432 - DNA, 33 bp, Homo sapien
ctctgcagaagcctgaggttcctgcacccctag

SEQ ID NO: 819433 - DNA, 33 bp, Homo sapien
atggagcagaataagcacattgttcttcaaata

SEQ ID NO: 819434 - DNA, 33 bp, Homo sapien
atggagcagaataagcgcattgttcttcaaata

SEQ ID NO: 819435 - DNA, 33 bp, Homo sapien
atcatccaatatggcaaagatcctcagagaaga

SEQ ID NO: 819436 - DNA, 33 bp, Homo sapien
atcatccaatatggcagagatcctcagagaaga

SEQ ID NO: 819437 - DNA, 33 bp, Homo sapien
aaaagatgcttgtgtacgtatgaatgatgaatg

SEQ ID NO: 819438 - DNA, 33 bp, Homo sapien
aaaagatgcttgtgtatgtatgaatgatgaatg

SEQ ID NO: 819439 - DNA, 33 bp, Homo sapien
cttggtgttaaattgcacagaaaattaggctac

SEQ ID NO: 819440 - DNA, 33 bp, Homo sapien
cttggtgttaaattgcgcagaaaattaggctac

SEQ ID NO: 819441 - DNA, 33 bp, Homo sapien
tttttaaacattgacaatacttaagcctatcag

SEQ ID NO: 819442 - DNA, 33 bp, Homo sapien
tttttaaacattgacagtacttaagcctatcag

SEQ ID NO: 819443 - DNA, 33 bp, Homo sapien
atcccctgcacttcccacaaaaagcacagtgac

SEQ ID NO: 819444 - DNA, 33 bp, Homo sapien
atcccctgcacttcccgcaaaaagcacagtgac

SEQ ID NO: 819445 - DNA, 33 bp, Homo sapien
tatgggcatatggtacacagagaaaaaggactt

SEQ ID NO: 819446 - DNA, 33 bp, Homo sapien
tatgggcatatggtacgcagagaaaaaggactt

SEQ ID NO: 819447 - DNA, 33 bp, Homo sapien
gacagagagggaatggaaagaccagtcttgcac

SEQ ID NO: 819448 - DNA, 33 bp, Homo sapien
gacagagagggaatgggaagaccagtcttgcac

SEQ ID NO: 819449 - DNA, 33 bp, Homo sapien
ctgctttagtagactacctctattagaactaag

SEQ ID NO: 819450 - DNA, 33 bp, Homo sapien
ctgctttagtagactatctctattagaactaag

SEQ ID NO: 819451 - DNA, 33 bp, Homo sapien
accatcgaattttccaagtaagtcttctgatgc

SEQ ID NO: 819452 - DNA, 33 bp, Homo sapien
accatcgaattttccaggtaagtcttctgatgc

SEQ ID NO: 819453 - DNA, 33 bp, Homo sapien
agtaaagccacagtaaaaggaattggtggcaaa

SEQ ID NO: 819454 - DNA, 33 bp, Homo sapien
agtaaagccacagtaacaggaattggtggcaaa

SEQ ID NO: 819455 - DNA, 33 bp, Homo sapien
cacctcagatatccaacttccagactcagctag

SEQ ID NO: 819456 - DNA, 33 bp, Homo sapien
cacctcagatatccaatttccagactcagctag

SEQ ID NO: 819457 - DNA, 33 bp, Homo sapien
tctctggaagtgtagacgcttagaattgtgaaa

SEQ ID NO: 819458 - DNA, 33 bp, Homo sapien
tctctggaagtgtagatgcttagaattgtgaaa

SEQ ID NO: 819459 - DNA, 33 bp, Homo sapien
gtagtttactaaaccactggttcctgaatctgg

SEQ ID NO: 819460 - DNA, 33 bp, Homo sapien
gtagtttactaaaccattggttcctgaatctgg

SEQ ID NO: 819461 - DNA, 33 bp, Homo sapien
aataatagagctacaaaatatatgactcaaaag

SEQ ID NO: 819462 - DNA, 33 bp, Homo sapien
aataatagagctacaagatatatgactcaaaag

SEQ ID NO: 819463 - DNA, 33 bp, Homo sapien
aataaagagacataaaatgagtgtttaaaggct

SEQ ID NO: 819464 - DNA, 33 bp, Homo sapien
aataaagagacataaagtgagtgtttaaaggct

SEQ ID NO: 819465 - DNA, 33 bp, Homo sapien
atgtattgtttagtccactcagaattacatggg

SEQ ID NO: 819466 - DNA, 33 bp, Homo sapien
atgtattgtttagtccgctcagaattacatggg

SEQ ID NO: 819467 - DNA, 33 bp, Homo sapien
ggacgaggttaagagggagcacacaacttccaa

SEQ ID NO: 819468 - DNA, 33 bp, Homo sapien
ggacgaggttaagaggtagcacacaacttccaa

SEQ ID NO: 819469 - DNA, 33 bp, Homo sapien
aaaagaatgctttcagaatataagaaggcttct

SEQ ID NO: 819470 - DNA, 33 bp, Homo sapien
aaaagaatgctttcaggatataagaaggcttct

SEQ ID NO: 819471 - DNA, 33 bp, Homo sapien
gctgactagtgagggaactgcagtgtgaaccag

SEQ ID NO: 819472 - DNA, 33 bp, Homo sapien
gctgactagtgagggacctgcagtgtgaaccag

SEQ ID NO: 819473 - DNA, 33 bp, Homo sapien
gggggcgatcttcaataaaaagggaccgagccc

SEQ ID NO: 819474 - DNA, 33 bp, Homo sapien
gggggcgatcttcaatgaaaagggaccgagccc

SEQ ID NO: 819475 - DNA, 33 bp, Homo sapien
ctgtgcactctggacacatagttgctcattaat

SEQ ID NO: 819476 - DNA, 33 bp, Homo sapien
ctgtgcactctggacatatagttgctcattaat

SEQ ID NO: 819477 - DNA, 33 bp, Homo sapien
tttataaagtggtacaacttagtgagaatagtt

SEQ ID NO: 819478 - DNA, 33 bp, Homo sapien
tttataaagtggtacagcttagtgagaatagtt

SEQ ID NO: 819479 - DNA, 33 bp, Homo sapien
tatagtaaatagtggaccagccaacgattaggt

SEQ ID NO: 819480 - DNA, 33 bp, Homo sapien
tatagtaaatagtggagcagccaacgattaggt

SEQ ID NO: 819481 - DNA, 33 bp, Homo sapien
cagctaaaattgctggcagtgacgtccattaaa

SEQ ID NO: 819482 - DNA, 33 bp, Homo sapien
cagctaaaattgctggtagtgacgtccattaaa

SEQ ID NO: 819483 - DNA, 33 bp, Homo sapien
taaataggtgatctacaaataaagataggaaga

SEQ ID NO: 819484 - DNA, 33 bp, Homo sapien
taaataggtgatctaccaataaagataggaaga

SEQ ID NO: 819485 - DNA, 33 bp, Homo sapien
agagggagagaaaaagcatattctgaccaatca

SEQ ID NO: 819486 - DNA, 33 bp, Homo sapien
agagggagagaaaaagtatattctgaccaatca

SEQ ID NO: 819487 - DNA, 33 bp, Homo sapien
atcttacttttcttcaaatattcacgaggagta

SEQ ID NO: 819488 - DNA, 33 bp, Homo sapien
atcttacttttcttcagatattcacgaggagta

SEQ ID NO: 819489 - DNA, 33 bp, Homo sapien
ctcactaagaatcaaacgaatggttattttctc

SEQ ID NO: 819490 - DNA, 33 bp, Homo sapien
ctcactaagaatcaaatgaatggttattttctc

SEQ ID NO: 819491 - DNA, 33 bp, Homo sapien
tggacagctaaaacgacgaggggtgaaactgaa

SEQ ID NO: 819492 - DNA, 33 bp, Homo sapien
tggacagctaaaacgatgaggggtgaaactgaa

SEQ ID NO: 819493 - DNA, 33 bp, Homo sapien
gccagagaaatcccaacgaaaatgcttactttg

SEQ ID NO: 819494 - DNA, 33 bp, Homo sapien
gccagagaaatcccaatgaaaatgcttactttg

SEQ ID NO: 819495 - DNA, 33 bp, Homo sapien
gaaatgcatattctacagagcagagagttttag

SEQ ID NO: 819496 - DNA, 33 bp, Homo sapien
gaaatgcatattctacggagcagagagttttag

SEQ ID NO: 819497 - DNA, 33 bp, Homo sapien
ttctataccactatgacactgacgttttgcaat

SEQ ID NO: 819498 - DNA, 33 bp, Homo sapien
ttctataccactatgagactgacgttttgcaat

SEQ ID NO: 819499 - DNA, 33 bp, Homo sapien
acaccactaataaaaccaatctctttgtttaga

SEQ ID NO: 819500 - DNA, 33 bp, Homo sapien
acaccactaataaaacgaatctctttgtttaga

SEQ ID NO: 819501 - DNA, 33 bp, Homo sapien
atcaggaaatagaataaccccttctgcaagaag

SEQ ID NO: 819502 - DNA, 33 bp, Homo sapien
atcaggaaatagaatacccccttctgcaagaag

SEQ ID NO: 819503 - DNA, 33 bp, Homo sapien
acatacacctcaaacccatcaagaaaagagagc

SEQ ID NO: 819504 - DNA, 33 bp, Homo sapien
acatacacctcaaacctatcaagaaaagagagc

SEQ ID NO: 819505 - DNA, 33 bp, Homo sapien
gacagttaccgccaaagggataagccggcaacc

SEQ ID NO: 819506 - DNA, 33 bp, Homo sapien
gacagttaccgccaaatggataagccggcaacc

SEQ ID NO: 819507 - DNA, 33 bp, Homo sapien
ttggctccaattcttccctcccatattcattca

SEQ ID NO: 819508 - DNA, 33 bp, Homo sapien
ttggctccaattcttctctcccatattcattca

SEQ ID NO: 819509 - DNA, 33 bp, Homo sapien
aactgccacagaactcccatgaacaggcacaca

SEQ ID NO: 819510 - DNA, 33 bp, Homo sapien
aactgccacagaactctcatgaacaggcacaca

SEQ ID NO: 819511 - DNA, 33 bp, Homo sapien
attttataggtggaacacttttcagctagaaag

SEQ ID NO: 819512 - DNA, 33 bp, Homo sapien
attttataggtggaacccttttcagctagaaag

SEQ ID NO: 819513 - DNA, 33 bp, Homo sapien
aactactccttagagaagtagtgagctctgaga

SEQ ID NO: 819514 - DNA, 33 bp, Homo sapien
aactactccttagagaggtagtgagctctgaga

SEQ ID NO: 819515 - DNA, 33 bp, Homo sapien
caacacacatcatgtaagagaagtctgatggta

SEQ ID NO: 819516 - DNA, 33 bp, Homo sapien
caacacacatcatgtaggagaagtctgatggta

SEQ ID NO: 819517 - DNA, 33 bp, Homo sapien
gccactgaacacaatggactctgcagatctgat

SEQ ID NO: 819518 - DNA, 33 bp, Homo sapien
gccactgaacacaatgtactctgcagatctgat

SEQ ID NO: 819519 - DNA, 33 bp, Homo sapien
gcaaattagagaattgaaggagaaagtaattga

SEQ ID NO: 819520 - DNA, 33 bp, Homo sapien
gcaaattagagaattgtaggagaaagtaattga

SEQ ID NO: 819521 - DNA, 33 bp, Homo sapien
tgaggccttgtgttgactaaaaggttaccgtac

SEQ ID NO: 819522 - DNA, 33 bp, Homo sapien
tgaggccttgtgttgattaaaaggttaccgtac

SEQ ID NO: 819523 - DNA, 33 bp, Homo sapien
gggattgagttttggaacttctcagaggtttac

SEQ ID NO: 819524 - DNA, 33 bp, Homo sapien
gggattgagttttggagcttctcagaggtttac

SEQ ID NO: 819525 - DNA, 33 bp, Homo sapien
ctgcaacaaagctgaactaaagatgaagtgcaa

SEQ ID NO: 819526 - DNA, 33 bp, Homo sapien
ctgcaacaaagctgaattaaagatgaagtgcaa

SEQ ID NO: 819527 - DNA, 33 bp, Homo sapien
tcttcaggtagagcaaacaaataatgctttgaa

SEQ ID NO: 819528 - DNA, 33 bp, Homo sapien
tcttcaggtagagcaaccaaataatgctttgaa

SEQ ID NO: 819529 - DNA, 33 bp, Homo sapien
cttcctacctgaacgaagatagaaaatgatgat

SEQ ID NO: 819530 - DNA, 33 bp, Homo sapien
cttcctacctgaacgacgatagaaaatgatgat

SEQ ID NO: 819531 - DNA, 33 bp, Homo sapien
gtgttatattggccaccacccagagatacccag

SEQ ID NO: 819532 - DNA, 33 bp, Homo sapien
gtgttatattggccacgacccagagatacccag

SEQ ID NO: 819533 - DNA, 33 bp, Homo sapien
gattcagtggtcatgaagtaatcgtgcccacat

SEQ ID NO: 819534 - DNA, 33 bp, Homo sapien
gattcagtggtcatgacgtaatcgtgcccacat

SEQ ID NO: 819535 - DNA, 33 bp, Homo sapien
ctgcatgactgctgagcccagaccatccaaagc

SEQ ID NO: 819536 - DNA, 33 bp, Homo sapien
ctgcatgactgctgagtccagaccatccaaagc

SEQ ID NO: 819537 - DNA, 33 bp, Homo sapien
ttaggaaacagtccccaatttctgactcatcct

SEQ ID NO: 819538 - DNA, 33 bp, Homo sapien
ttaggaaacagtccccgatttctgactcatcct

SEQ ID NO: 819539 - DNA, 33 bp, Homo sapien
tgctggaggatgaaaccgtctaaactctcctga

SEQ ID NO: 819540 - DNA, 33 bp, Homo sapien
tgctggaggatgaaactgtctaaactctcctga

SEQ ID NO: 819541 - DNA, 33 bp, Homo sapien
aaccaatccaagttaacgccagggcagtgtcag

SEQ ID NO: 819542 - DNA, 33 bp, Homo sapien
aaccaatccaagttaatgccagggcagtgtcag

SEQ ID NO: 819543 - DNA, 33 bp, Homo sapien
tgcctgcactgaaccccggacaaatggaatcag

SEQ ID NO: 819544 - DNA, 33 bp, Homo sapien
tgcctgcactgaaccctggacaaatggaatcag

SEQ ID NO: 819545 - DNA, 33 bp, Homo sapien
tgccctaccaaactaagcgaacctaaagaggaa

SEQ ID NO: 819546 - DNA, 33 bp, Homo sapien
tgccctaccaaactaatcgaacctaaagaggaa

SEQ ID NO: 819547 - DNA, 33 bp, Homo sapien
aagtcaaattggtcacaagagacaaagaaggtc

SEQ ID NO: 819548 - DNA, 33 bp, Homo sapien
aagtcaaattggtcacgagagacaaagaaggtc

SEQ ID NO: 819549 - DNA, 33 bp, Homo sapien
tgcatttgaaaaaacagctgcttctcccactct

SEQ ID NO: 819550 - DNA, 33 bp, Homo sapien
tgcatttgaaaaaacatctgcttctcccactct

SEQ ID NO: 819551 - DNA, 33 bp, Homo sapien
ttaacaaaagattaaactctaccacagataaaa

SEQ ID NO: 819552 - DNA, 33 bp, Homo sapien
ttaacaaaagattaaattctaccacagataaaa

SEQ ID NO: 819553 - DNA, 33 bp, Homo sapien
taaaaattatgctagccaaaggcaagagaaaat

SEQ ID NO: 819554 - DNA, 33 bp, Homo sapien
taaaaattatgctagctaaaggcaagagaaaat

SEQ ID NO: 819555 - DNA, 33 bp, Homo sapien
cattatttttcatgaccgaatagtattccagtg

SEQ ID NO: 819556 - DNA, 33 bp, Homo sapien
cattatttttcatgactgaatagtattccagtg

SEQ ID NO: 819557 - DNA, 33 bp, Homo sapien
taaaagattcattgaccagagctaatgagcaat

SEQ ID NO: 819558 - DNA, 33 bp, Homo sapien
taaaagattcattgactagagctaatgagcaat

SEQ ID NO: 819559 - DNA, 33 bp, Homo sapien
tctcccagttcaaaaaaccaacagcatcatttc

SEQ ID NO: 819560 - DNA, 33 bp, Homo sapien
tctcccagttcaaaaagccaacagcatcatttc

SEQ ID NO: 819561 - DNA, 33 bp, Homo sapien
ccactgcttactctaacgtacgtcctcgtccta

SEQ ID NO: 819562 - DNA, 33 bp, Homo sapien
ccactgcttactctaatgtacgtcctcgtccta

SEQ ID NO: 819563 - DNA, 33 bp, Homo sapien
ggcctgtgtgtcggtcagaatatctctgtctgt

SEQ ID NO: 819564 - DNA, 33 bp, Homo sapien
ggcctgtgtgtcggtcggaatatctctgtctgt

SEQ ID NO: 819565 - DNA, 33 bp, Homo sapien
ctgatacctgcttccacgatagccatgacagat

SEQ ID NO: 819566 - DNA, 33 bp, Homo sapien
ctgatacctgcttccatgatagccatgacagat

SEQ ID NO: 819567 - DNA, 33 bp, Homo sapien
aataaatgcttaaaaaaccagcatacacaaggt

SEQ ID NO: 819568 - DNA, 33 bp, Homo sapien
aataaatgcttaaaaacccagcatacacaaggt

SEQ ID NO: 819569 - DNA, 33 bp, Homo sapien
aatggcccagtccaaacgtcagtagagctgagg

SEQ ID NO: 819570 - DNA, 33 bp, Homo sapien
aatggcccagtccaaatgtcagtagagctgagg

SEQ ID NO: 819571 - DNA, 33 bp, Homo sapien
gatgcaggagtgccacacttcccaaagaatccc

SEQ ID NO: 819572 - DNA, 33 bp, Homo sapien
gatgcaggagtgccacgcttcccaaagaatccc

SEQ ID NO: 819573 - DNA, 33 bp, Homo sapien
ctgtggctcacaaacacggtcctgctctaatga

SEQ ID NO: 819574 - DNA, 33 bp, Homo sapien
ctgtggctcacaaacatggtcctgctctaatga

SEQ ID NO: 819575 - DNA, 33 bp, Homo sapien
ctagtctttaaggtgccctgaaaatagaaagaa

SEQ ID NO: 819576 - DNA, 33 bp, Homo sapien
ctagtctttaaggtgctctgaaaatagaaagaa

SEQ ID NO: 819577 - DNA, 33 bp, Homo sapien
caaggataggcaactcactcaaatctatacagc

SEQ ID NO: 819578 - DNA, 33 bp, Homo sapien
caaggataggcaactcgctcaaatctatacagc

SEQ ID NO: 819579 - DNA, 33 bp, Homo sapien
actgaggctgggtccaagtctgttttgctcact

SEQ ID NO: 819580 - DNA, 33 bp, Homo sapien
actgaggctgggtccaggtctgttttgctcact

SEQ ID NO: 819581 - DNA, 33 bp, Homo sapien
acagccctgtcatccacgtgcttccggtgaatc

SEQ ID NO: 819582 - DNA, 33 bp, Homo sapien
acagccctgtcatccatgtgcttccggtgaatc

SEQ ID NO: 819583 - DNA, 33 bp, Homo sapien
ttccttctcctgcagcaaaactccttgtccaga

SEQ ID NO: 819584 - DNA, 33 bp, Homo sapien
ttccttctcctgcagcgaaactccttgtccaga

SEQ ID NO: 819585 - DNA, 33 bp, Homo sapien
gaccagaagtaactcgcagcacagccatatgcc

SEQ ID NO: 819586 - DNA, 33 bp, Homo sapien
gaccagaagtaactcggagcacagccatatgcc

SEQ ID NO: 819587 - DNA, 33 bp, Homo sapien
tagacactttccacacaagggctgagtaacttt

SEQ ID NO: 819588 - DNA, 33 bp, Homo sapien
tagacactttccacacgagggctgagtaacttt

SEQ ID NO: 819589 - DNA, 33 bp, Homo sapien
tagtattcattgaaaactggatgaaggtgaaag

SEQ ID NO: 819590 - DNA, 33 bp, Homo sapien
tagtattcattgaaaattggatgaaggtgaaag

SEQ ID NO: 819591 - DNA, 33 bp, Homo sapien
gaagtaaaatcaatagaccttagtgatggtttg

SEQ ID NO: 819592 - DNA, 33 bp, Homo sapien
gaagtaaaatcaataggccttagtgatggtttg

SEQ ID NO: 819593 - DNA, 33 bp, Homo sapien
atactaaggctatagacgttctaggcttcactt

SEQ ID NO: 819594 - DNA, 33 bp, Homo sapien
atactaaggctatagatgttctaggcttcactt

SEQ ID NO: 819595 - DNA, 33 bp, Homo sapien
ttgagactgaagataaaattttggcagcttccc

SEQ ID NO: 819596 - DNA, 33 bp, Homo sapien
ttgagactgaagataagattttggcagcttccc

SEQ ID NO: 819597 - DNA, 33 bp, Homo sapien
cactgcacccaggaaccctttctaatgccatcc

SEQ ID NO: 819598 - DNA, 33 bp, Homo sapien
cactgcacccaggaacgctttctaatgccatcc

SEQ ID NO: 819599 - DNA, 33 bp, Homo sapien
cctttctggctaaaagacattccctatagcttg

SEQ ID NO: 819600 - DNA, 33 bp, Homo sapien
cctttctggctaaaaggcattccctatagcttg

SEQ ID NO: 819601 - DNA, 33 bp, Homo sapien
aaacagaggatggaaaataagggttatcacaga

SEQ ID NO: 819602 - DNA, 33 bp, Homo sapien
aaacagaggatggaaagtaagggttatcacaga

SEQ ID NO: 819603 - DNA, 33 bp, Homo sapien
cctcaggtctactcaaaggcattgctccctgtc

SEQ ID NO: 819604 - DNA, 33 bp, Homo sapien
cctcaggtctactcaagggcattgctccctgtc

SEQ ID NO: 819605 - DNA, 33 bp, Homo sapien
ttccttggctttcccgaagtgcttacttcttct

SEQ ID NO: 819606 - DNA, 33 bp, Homo sapien
ttccttggctttcccggagtgcttacttcttct

SEQ ID NO: 819607 - DNA, 33 bp, Homo sapien
aaaacgcaattcttaaagtaatggtggacagac

SEQ ID NO: 819608 - DNA, 33 bp, Homo sapien
aaaacgcaattcttaacgtaatggtggacagac

SEQ ID NO: 819609 - DNA, 33 bp, Homo sapien
attcctttcacagtaagcttcaagcaagggacc

SEQ ID NO: 819610 - DNA, 33 bp, Homo sapien
attcctttcacagtaatcttcaagcaagggacc

SEQ ID NO: 819611 - DNA, 33 bp, Homo sapien
tgggcatccttgtaatcatcggcactcagaggg

SEQ ID NO: 819612 - DNA, 33 bp, Homo sapien
tgggcatccttgtaattatcggcactcagaggg

SEQ ID NO: 819613 - DNA, 33 bp, Homo sapien
ccagccgcatagaacagaaagagatttacagtc

SEQ ID NO: 819614 - DNA, 33 bp, Homo sapien
ccagccgcatagaacataaagagatttacagtc

SEQ ID NO: 819615 - DNA, 33 bp, Homo sapien
cccactcggaaactacagacgaaggttcagaat

SEQ ID NO: 819616 - DNA, 33 bp, Homo sapien
cccactcggaaactacggacgaaggttcagaat

SEQ ID NO: 819617 - DNA, 33 bp, Homo sapien
aaatgaacaattcaacactaggtgctctgattc

SEQ ID NO: 819618 - DNA, 33 bp, Homo sapien
aaatgaacaattcaaccctaggtgctctgattc

SEQ ID NO: 819619 - DNA, 33 bp, Homo sapien
tttatgagtaaatggaatcagggactttgaaac

SEQ ID NO: 819620 - DNA, 33 bp, Homo sapien
tttatgagtaaatggagtcagggactttgaaac

SEQ ID NO: 819621 - DNA, 33 bp, Homo sapien
aatagtggtgcctacaaaagaaagagagaataa

SEQ ID NO: 819622 - DNA, 33 bp, Homo sapien
aatagtggtgcctacacaagaaagagagaataa

SEQ ID NO: 819623 - DNA, 33 bp, Homo sapien
tccatcttggtcacctaagcagaatacccagct

SEQ ID NO: 819624 - DNA, 33 bp, Homo sapien
tccatcttggtcacctgagcagaatacccagct

SEQ ID NO: 819625 - DNA, 33 bp, Homo sapien
acaactcggtctgaaaatgtgtctttctatcat

SEQ ID NO: 819626 - DNA, 33 bp, Homo sapien
acaactcggtctgaaagtgtgtctttctatcat

SEQ ID NO: 819627 - DNA, 33 bp, Homo sapien
gctcccaactttgacacagaacttgtattgtcc

SEQ ID NO: 819628 - DNA, 33 bp, Homo sapien
gctcccaactttgacatagaacttgtattgtcc

SEQ ID NO: 819629 - DNA, 33 bp, Homo sapien
atccacgcatggccaaccttgtttcaattttac

SEQ ID NO: 819630 - DNA, 33 bp, Homo sapien
atccacgcatggccaatcttgtttcaattttac

SEQ ID NO: 819631 - DNA, 33 bp, Homo sapien
acaggtctgtagccgaagtcactattttgtaca

SEQ ID NO: 819632 - DNA, 33 bp, Homo sapien
acaggtctgtagccgaggtcactattttgtaca

SEQ ID NO: 819633 - DNA, 33 bp, Homo sapien
ggcgactggcggcggacgcagagaagaggagga

SEQ ID NO: 819634 - DNA, 33 bp, Homo sapien
ggcgactggcggcggatgcagagaagaggagga

SEQ ID NO: 819635 - DNA, 33 bp, Homo sapien
agactggttaaggaaacgtctactccagagttt

SEQ ID NO: 819636 - DNA, 33 bp, Homo sapien
agactggttaaggaaatgtctactccagagttt

SEQ ID NO: 819637 - DNA, 33 bp, Homo sapien
tccagctcacacaaagactaactactaccatca

SEQ ID NO: 819638 - DNA, 33 bp, Homo sapien
tccagctcacacaaagcctaactactaccatca

SEQ ID NO: 819639 - DNA, 33 bp, Homo sapien
ctgtttttgaatgttacgtaagtggaaccgtgt

SEQ ID NO: 819640 - DNA, 33 bp, Homo sapien
ctgtttttgaatgttatgtaagtggaaccgtgt

SEQ ID NO: 819641 - DNA, 33 bp, Homo sapien
ggatccatcattttcccagtgcaccaggaacaa

SEQ ID NO: 819642 - DNA, 33 bp, Homo sapien
ggatccatcattttccgagtgcaccaggaacaa

SEQ ID NO: 819643 - DNA, 33 bp, Homo sapien
ggccatagtttatagaaatagtagcatatggcc

SEQ ID NO: 819644 - DNA, 33 bp, Homo sapien
ggccatagtttatagacatagtagcatatggcc

SEQ ID NO: 819645 - DNA, 33 bp, Homo sapien
tgagcgctagctgtaactctcatatctcagcta

SEQ ID NO: 819646 - DNA, 33 bp, Homo sapien
tgagcgctagctgtaattctcatatctcagcta

SEQ ID NO: 819647 - DNA, 33 bp, Homo sapien
caggttgcagagtttacagagtaatgaaagagg

SEQ ID NO: 819648 - DNA, 33 bp, Homo sapien
caggttgcagagtttatagagtaatgaaagagg

SEQ ID NO: 819649 - DNA, 33 bp, Homo sapien
caagaaatgttagctcaattggtcccagtttgg

SEQ ID NO: 819650 - DNA, 33 bp, Homo sapien
caagaaatgttagctccattggtcccagtttgg

SEQ ID NO: 819651 - DNA, 33 bp, Homo sapien
gaaatgacaaaatagaccatgtgtaggcacttt

SEQ ID NO: 819652 - DNA, 33 bp, Homo sapien
gaaatgacaaaatagatcatgtgtaggcacttt

SEQ ID NO: 819653 - DNA, 33 bp, Homo sapien
cacgctctccaggcaaaaataaaatccctattt

SEQ ID NO: 819654 - DNA, 33 bp, Homo sapien
cacgctctccaggcaacaataaaatccctattt

SEQ ID NO: 819655 - DNA, 33 bp, Homo sapien
tctcaaggatataaaacggttaacggcaaagaa

SEQ ID NO: 819656 - DNA, 33 bp, Homo sapien
tctcaaggatataaaatggttaacggcaaagaa

SEQ ID NO: 819657 - DNA, 33 bp, Homo sapien
ccatcacccgtgaagcacttgatggtgttttac

SEQ ID NO: 819658 - DNA, 33 bp, Homo sapien
ccatcacccgtgaagcgcttgatggtgttttac

SEQ ID NO: 819659 - DNA, 33 bp, Homo sapien
taagagttctggagcacagggaaaatgaaagtc

SEQ ID NO: 819660 - DNA, 33 bp, Homo sapien
taagagttctggagcagagggaaaatgaaagtc

SEQ ID NO: 819661 - DNA, 33 bp, Homo sapien
tgagaaggttgaatgacgtaccagctctaaagc

SEQ ID NO: 819662 - DNA, 33 bp, Homo sapien
tgagaaggttgaatgatgtaccagctctaaagc

SEQ ID NO: 819663 - DNA, 33 bp, Homo sapien
catcgccgcgactctccagccccaggttcttag

SEQ ID NO: 819664 - DNA, 33 bp, Homo sapien
catcgccgcgactctctagccccaggttcttag

SEQ ID NO: 819665 - DNA, 33 bp, Homo sapien
agaaagaatgaaaaaaaaagtttctgcaatgaa

SEQ ID NO: 819666 - DNA, 33 bp, Homo sapien
agaaagaatgaaaaaacaagtttctgcaatgaa

SEQ ID NO: 819667 - DNA, 33 bp, Homo sapien
tgggtagttttggtgacctaataatgaatccgt

SEQ ID NO: 819668 - DNA, 33 bp, Homo sapien
tgggtagttttggtgagctaataatgaatccgt

SEQ ID NO: 819669 - DNA, 33 bp, Homo sapien
acccaggaaaggaaggacagtgcttccatggag

SEQ ID NO: 819670 - DNA, 33 bp, Homo sapien
acccaggaaaggaagggcagtgcttccatggag

SEQ ID NO: 819671 - DNA, 33 bp, Homo sapien
cagggtcactttgctacgttaactcatggagca

SEQ ID NO: 819672 - DNA, 33 bp, Homo sapien
cagggtcactttgctatgttaactcatggagca

SEQ ID NO: 819673 - DNA, 33 bp, Homo sapien
ctataggacctcatacaccactgtaaggacttt

SEQ ID NO: 819674 - DNA, 33 bp, Homo sapien
ctataggacctcatactccactgtaaggacttt

SEQ ID NO: 819675 - DNA, 33 bp, Homo sapien
aacttgatgacatcacactgattggccaggaca

SEQ ID NO: 819676 - DNA, 33 bp, Homo sapien
aacttgatgacatcacgctgattggccaggaca

SEQ ID NO: 819677 - DNA, 33 bp, Homo sapien
ctccaagaggttaaacgggcaatgtacttcctt

SEQ ID NO: 819678 - DNA, 33 bp, Homo sapien
ctccaagaggttaaactggcaatgtacttcctt

SEQ ID NO: 819679 - DNA, 33 bp, Homo sapien
atggaacgcacttgaccataaggcagctgccca

SEQ ID NO: 819680 - DNA, 33 bp, Homo sapien
atggaacgcacttgacgataaggcagctgccca

SEQ ID NO: 819681 - DNA, 33 bp, Homo sapien
cctctatgaccagctggaggagaaatttagtta

SEQ ID NO: 819682 - DNA, 33 bp, Homo sapien
cctctatgaccagctgtaggagaaatttagtta

SEQ ID NO: 819683 - DNA, 33 bp, Homo sapien
acaccaacaagcaatacaaaagctgaattcctc

SEQ ID NO: 819684 - DNA, 33 bp, Homo sapien
acaccaacaagcaatagaaaagctgaattcctc

SEQ ID NO: 819685 - DNA, 33 bp, Homo sapien
taaggaagaaaacaaacggctcaaccagttcag

SEQ ID NO: 819686 - DNA, 33 bp, Homo sapien
taaggaagaaaacaaatggctcaaccagttcag

SEQ ID NO: 819687 - DNA, 33 bp, Homo sapien
aactctaacctgaaaaagacacgataaccaatg

SEQ ID NO: 819688 - DNA, 33 bp, Homo sapien
aactctaacctgaaaaggacacgataaccaatg

SEQ ID NO: 819689 - DNA, 33 bp, Homo sapien
atgaagttattataacaccagctatgaagaaag

SEQ ID NO: 819690 - DNA, 33 bp, Homo sapien
atgaagttattataacgccagctatgaagaaag

SEQ ID NO: 819691 - DNA, 33 bp, Homo sapien
cttctctgatcttttacctgtagcgcagctttt

SEQ ID NO: 819692 - DNA, 33 bp, Homo sapien
cttctctgatcttttatctgtagcgcagctttt

SEQ ID NO: 819693 - DNA, 33 bp, Homo sapien
tgactagagcttctaaagtggagaccgtttttc

SEQ ID NO: 819694 - DNA, 33 bp, Homo sapien
tgactagagcttctaaggtggagaccgtttttc

SEQ ID NO: 819695 - DNA, 33 bp, Homo sapien
aacatctaccctaataagaaggaatctcatggt

SEQ ID NO: 819696 - DNA, 33 bp, Homo sapien
aacatctaccctaataggaaggaatctcatggt

SEQ ID NO: 819697 - DNA, 33 bp, Homo sapien
tttgaggtgtttagcaaatctgaatttccacaa

SEQ ID NO: 819698 - DNA, 33 bp, Homo sapien
tttgaggtgtttagcagatctgaatttccacaa

SEQ ID NO: 819699 - DNA, 33 bp, Homo sapien
taagtgaagcagacaacgtagaaatgaataaag

SEQ ID NO: 819700 - DNA, 33 bp, Homo sapien
taagtgaagcagacaaggtagaaatgaataaag

SEQ ID NO: 819701 - DNA, 33 bp, Homo sapien
acaaacagacttcttcaaaattgcctgtcaaag

SEQ ID NO: 819702 - DNA, 33 bp, Homo sapien
acaaacagacttcttccaaattgcctgtcaaag

SEQ ID NO: 819703 - DNA, 33 bp, Homo sapien
taattactgtctattacgtagagaggagaaggc

SEQ ID NO: 819704 - DNA, 33 bp, Homo sapien
taattactgtctattatgtagagaggagaaggc

SEQ ID NO: 819705 - DNA, 33 bp, Homo sapien
tctgaaaataccataccgatgactacacgtatg

SEQ ID NO: 819706 - DNA, 33 bp, Homo sapien
tctgaaaataccatactgatgactacacgtatg

SEQ ID NO: 819707 - DNA, 33 bp, Homo sapien
gtctcatacaagccaaccacattctgaataaca

SEQ ID NO: 819708 - DNA, 33 bp, Homo sapien
gtctcatacaagccaatcacattctgaataaca

SEQ ID NO: 819709 - DNA, 33 bp, Homo sapien
gctatcaagtctgaaacgaacaagtccctcctc

SEQ ID NO: 819710 - DNA, 33 bp, Homo sapien
gctatcaagtctgaaatgaacaagtccctcctc

SEQ ID NO: 819711 - DNA, 33 bp, Homo sapien
tgtttcttgggatggaatatctaaatgcagtag

SEQ ID NO: 819712 - DNA, 33 bp, Homo sapien
tgtttcttgggatggagtatctaaatgcagtag

SEQ ID NO: 819713 - DNA, 33 bp, Homo sapien
gattccagcagacagcaatgggaatgtatgaag

SEQ ID NO: 819714 - DNA, 33 bp, Homo sapien
gattccagcagacagcgatgggaatgtatgaag

SEQ ID NO: 819715 - DNA, 33 bp, Homo sapien
gaggtggcctttcagcaatggagagccaaaaac

SEQ ID NO: 819716 - DNA, 33 bp, Homo sapien
gaggtggcctttcagcgatggagagccaaaaac

SEQ ID NO: 819717 - DNA, 33 bp, Homo sapien
cttttcctctataggcaagatgtcactcctctc

SEQ ID NO: 819718 - DNA, 33 bp, Homo sapien
cttttcctctataggccagatgtcactcctctc

SEQ ID NO: 819719 - DNA, 33 bp, Homo sapien
aacagaagttccccaacctgaacaactaaaaga

SEQ ID NO: 819720 - DNA, 33 bp, Homo sapien
aacagaagttccccaatctgaacaactaaaaga

SEQ ID NO: 819721 - DNA, 33 bp, Homo sapien
aaaggctgtgattccacctctgaaaatgggtta

SEQ ID NO: 819722 - DNA, 33 bp, Homo sapien
aaaggctgtgattccatctctgaaaatgggtta

SEQ ID NO: 819723 - DNA, 33 bp, Homo sapien
gctccatgaaagtcaccgggccctgagacacca

SEQ ID NO: 819724 - DNA, 33 bp, Homo sapien
gctccatgaaagtcactgggccctgagacacca

SEQ ID NO: 819725 - DNA, 33 bp, Homo sapien
catgagtaatgagccacgttctcaaagctcccg

SEQ ID NO: 819726 - DNA, 33 bp, Homo sapien
catgagtaatgagccatgttctcaaagctcccg

SEQ ID NO: 819727 - DNA, 33 bp, Homo sapien
atatcgtgatgtgttacgtcctgttgactttta

SEQ ID NO: 819728 - DNA, 33 bp, Homo sapien
atatcgtgatgtgttatgtcctgttgactttta

SEQ ID NO: 819729 - DNA, 33 bp, Homo sapien
ggctgtgacttaaccccagtgagtggtccaggt

SEQ ID NO: 819730 - DNA, 33 bp, Homo sapien
ggctgtgacttaaccctagtgagtggtccaggt

SEQ ID NO: 819731 - DNA, 33 bp, Homo sapien
gcctgctagactagccacattaggcaaggccag

SEQ ID NO: 819732 - DNA, 33 bp, Homo sapien
gcctgctagactagccgcattaggcaaggccag

SEQ ID NO: 819733 - DNA, 33 bp, Homo sapien
ggctctgtggcagaaccgtacgtgtgcaatctt

SEQ ID NO: 819734 - DNA, 33 bp, Homo sapien
ggctctgtggcagaactgtacgtgtgcaatctt

SEQ ID NO: 819735 - DNA, 33 bp, Homo sapien
atcatagaggatagaaaagacatcatggctctg

SEQ ID NO: 819736 - DNA, 33 bp, Homo sapien
atcatagaggatagaagagacatcatggctctg

SEQ ID NO: 819737 - DNA, 33 bp, Homo sapien
gataggcaagatatggcaagtatgttggatgct

SEQ ID NO: 819738 - DNA, 33 bp, Homo sapien
gataggcaagatatggtaagtatgttggatgct

SEQ ID NO: 819739 - DNA, 33 bp, Homo sapien
aaccacgaactcatacggatatcaacaaatgat

SEQ ID NO: 819740 - DNA, 33 bp, Homo sapien
aaccacgaactcatactgatatcaacaaatgat

SEQ ID NO: 819741 - DNA, 33 bp, Homo sapien
ttgacaaaccaataaacgactagagacatgggt

SEQ ID NO: 819742 - DNA, 33 bp, Homo sapien
ttgacaaaccaataaatgactagagacatgggt

SEQ ID NO: 819743 - DNA, 33 bp, Homo sapien
tctattttgccatggccctaaaactgctttaaa

SEQ ID NO: 819744 - DNA, 33 bp, Homo sapien
tctattttgccatggctctaaaactgctttaaa

SEQ ID NO: 819745 - DNA, 33 bp, Homo sapien
ggaacgcaaaacagtacgaccacattaggagac

SEQ ID NO: 819746 - DNA, 33 bp, Homo sapien
ggaacgcaaaacagtatgaccacattaggagac

SEQ ID NO: 819747 - DNA, 33 bp, Homo sapien
ctatttcctaccaatacgttggacacagaatga

SEQ ID NO: 819748 - DNA, 33 bp, Homo sapien
ctatttcctaccaatatgttggacacagaatga

SEQ ID NO: 819749 - DNA, 33 bp, Homo sapien
aagcagtgtggtgacacctcaaaaagctaaaaa

SEQ ID NO: 819750 - DNA, 33 bp, Homo sapien
aagcagtgtggtgacagctcaaaaagctaaaaa

SEQ ID NO: 819751 - DNA, 33 bp, Homo sapien
ttccctgatgctgggacagaattaatcaatccc

SEQ ID NO: 819752 - DNA, 33 bp, Homo sapien
ttccctgatgctgggagagaattaatcaatccc

SEQ ID NO: 819753 - DNA, 33 bp, Homo sapien
ataaccataatacaagcccatgagtgctagagt

SEQ ID NO: 819754 - DNA, 33 bp, Homo sapien
ataaccataatacaaggccatgagtgctagagt

SEQ ID NO: 819755 - DNA, 33 bp, Homo sapien
gctttacaacaagggactcagtacagaagaaag

SEQ ID NO: 819756 - DNA, 33 bp, Homo sapien
gctttacaacaagggattcagtacagaagaaag

SEQ ID NO: 819757 - DNA, 33 bp, Homo sapien
gccctcaagatgaacacgtggcccgttctcagt

SEQ ID NO: 819758 - DNA, 33 bp, Homo sapien
gccctcaagatgaacaggtggcccgttctcagt

SEQ ID NO: 819759 - DNA, 33 bp, Homo sapien
acattgaatacctccaacaaggtgaacacgatg

SEQ ID NO: 819760 - DNA, 33 bp, Homo sapien
acattgaatacctccagcaaggtgaacacgatg

SEQ ID NO: 819761 - DNA, 33 bp, Homo sapien
tgttccagctctgtcccgatttgcattcctgtt

SEQ ID NO: 819762 - DNA, 33 bp, Homo sapien
tgttccagctctgtcctgatttgcattcctgtt

SEQ ID NO: 819763 - DNA, 33 bp, Homo sapien
agtcatcacacctttaagttgtgtcttcatttt

SEQ ID NO: 819764 - DNA, 33 bp, Homo sapien
agtcatcacacctttatgttgtgtcttcatttt

SEQ ID NO: 819765 - DNA, 33 bp, Homo sapien
gagggtaagcttactcacccattttccacctgc

SEQ ID NO: 819766 - DNA, 33 bp, Homo sapien
gagggtaagcttactcgcccattttccacctgc

SEQ ID NO: 819767 - DNA, 33 bp, Homo sapien
tgaagtcctgctgaccagaaggaacgtcacaaa

SEQ ID NO: 819768 - DNA, 33 bp, Homo sapien
tgaagtcctgctgaccggaaggaacgtcacaaa

SEQ ID NO: 819769 - DNA, 33 bp, Homo sapien
caggaaaagccaccaacttcaattcaattaaat

SEQ ID NO: 819770 - DNA, 33 bp, Homo sapien
caggaaaagccaccaatttcaattcaattaaat

SEQ ID NO: 819771 - DNA, 33 bp, Homo sapien
tccttcaagacctctccctcttgcattaacttg

SEQ ID NO: 819772 - DNA, 33 bp, Homo sapien
tccttcaagacctctctctcttgcattaacttg

SEQ ID NO: 819773 - DNA, 33 bp, Homo sapien
gtgaacatcaccccaaatgccgccgtccaggga

SEQ ID NO: 819774 - DNA, 33 bp, Homo sapien
gtgaacatcaccccaactgccgccgtccaggga

SEQ ID NO: 819775 - DNA, 33 bp, Homo sapien
gcaagtcacaagataacacaaagaccctctagg

SEQ ID NO: 819776 - DNA, 33 bp, Homo sapien
gcaagtcacaagataagacaaagaccctctagg

SEQ ID NO: 819777 - DNA, 33 bp, Homo sapien
ttgcattccttttggcagaactggggctgaagc

SEQ ID NO: 819778 - DNA, 33 bp, Homo sapien
ttgcattccttttggcggaactggggctgaagc

SEQ ID NO: 819779 - DNA, 33 bp, Homo sapien
cactgcttcctgcgatcactttccatggaagct

SEQ ID NO: 819780 - DNA, 33 bp, Homo sapien
cactgcttcctgcgattactttccatggaagct

SEQ ID NO: 819781 - DNA, 33 bp, Homo sapien
aagaccaaaagggaagaaagtcaacatggacta

SEQ ID NO: 819782 - DNA, 33 bp, Homo sapien
aagaccaaaagggaaggaagtcaacatggacta

SEQ ID NO: 819783 - DNA, 33 bp, Homo sapien
actgagaatctgttcccgagaaagggtgtggtc

SEQ ID NO: 819784 - DNA, 33 bp, Homo sapien
actgagaatctgttcctgagaaagggtgtggtc

SEQ ID NO: 819785 - DNA, 33 bp, Homo sapien
aagactagattcaagacgagattgcttcatgtg

SEQ ID NO: 819786 - DNA, 33 bp, Homo sapien
aagactagattcaagatgagattgcttcatgtg

SEQ ID NO: 819787 - DNA, 33 bp, Homo sapien
gtgagttcttgctgctcactgttgtttgtttgt

SEQ ID NO: 819788 - DNA, 33 bp, Homo sapien
gtgagttcttgctgcttactgttgtttgtttgt

SEQ ID NO: 819789 - DNA, 33 bp, Homo sapien
tgcccatcatcataccaccagtaattggcagaa

SEQ ID NO: 819790 - DNA, 33 bp, Homo sapien
tgcccatcatcataccgccagtaattggcagaa

SEQ ID NO: 819791 - DNA, 33 bp, Homo sapien
tgtgtagcttcatgacaaaagcagtcccagatc

SEQ ID NO: 819792 - DNA, 33 bp, Homo sapien
tgtgtagcttcatgaccaaagcagtcccagatc

SEQ ID NO: 819793 - DNA, 33 bp, Homo sapien
caacatccattttatacgtgtcgttaatgtgct

SEQ ID NO: 819794 - DNA, 33 bp, Homo sapien
caacatccattttatatgtgtcgttaatgtgct

SEQ ID NO: 819795 - DNA, 33 bp, Homo sapien
agggttctggcacataaaagattcttcagggaa

SEQ ID NO: 819796 - DNA, 33 bp, Homo sapien
agggttctggcacatacaagattcttcagggaa

SEQ ID NO: 819797 - DNA, 33 bp, Homo sapien
agccgtgcagaggacaagctggataatgcaggg

SEQ ID NO: 819798 - DNA, 33 bp, Homo sapien
agccgtgcagaggacaggctggataatgcaggg

SEQ ID NO: 819799 - DNA, 33 bp, Homo sapien
gaggggagcaagaaaaagaggttgcttcagtcc

SEQ ID NO: 819800 - DNA, 33 bp, Homo sapien
gaggggagcaagaaaaggaggttgcttcagtcc

SEQ ID NO: 819801 - DNA, 33 bp, Homo sapien
gtcaaatgactccatacgaggcttcataacatt

SEQ ID NO: 819802 - DNA, 33 bp, Homo sapien
gtcaaatgactccatatgaggcttcataacatt

SEQ ID NO: 819803 - DNA, 33 bp, Homo sapien
tcagtcccgatttcctaaccaccatgtgctttt

SEQ ID NO: 819804 - DNA, 33 bp, Homo sapien
tcagtcccgatttccttaccaccatgtgctttt

SEQ ID NO: 819805 - DNA, 33 bp, Homo sapien
taaaatagaacaattacaacaacacgccagctg

SEQ ID NO: 819806 - DNA, 33 bp, Homo sapien
taaaatagaacaattataacaacacgccagctg

SEQ ID NO: 819807 - DNA, 33 bp, Homo sapien
agctttgaaagaattcccagggtttgtgctgtt

SEQ ID NO: 819808 - DNA, 33 bp, Homo sapien
agctttgaaagaattctcagggtttgtgctgtt

SEQ ID NO: 819809 - DNA, 33 bp, Homo sapien
gaattcagcagaggaacatagtcactgacatgg

SEQ ID NO: 819810 - DNA, 33 bp, Homo sapien
gaattcagcagaggaatatagtcactgacatgg

SEQ ID NO: 819811 - DNA, 33 bp, Homo sapien
atgcactcacgctctcaatttcttagtagcctc

SEQ ID NO: 819812 - DNA, 33 bp, Homo sapien
atgcactcacgctctcgatttcttagtagcctc

SEQ ID NO: 819813 - DNA, 33 bp, Homo sapien
gaattggtgcgaagaagcattttacaaaatatg

SEQ ID NO: 819814 - DNA, 33 bp, Homo sapien
gaattggtgcgaagaatcattttacaaaatatg

SEQ ID NO: 819815 - DNA, 33 bp, Homo sapien
atgaagatttttgtcaagggctgccattacatg

SEQ ID NO: 819816 - DNA, 33 bp, Homo sapien
atgaagatttttgtcacgggctgccattacatg

SEQ ID NO: 819817 - DNA, 33 bp, Homo sapien
ctacaagtcccacgtccatgcagcgcaatctgt

SEQ ID NO: 819818 - DNA, 33 bp, Homo sapien
ctacaagtcccacgtcgatgcagcgcaatctgt

SEQ ID NO: 819819 - DNA, 33 bp, Homo sapien
atctaaactgtgaaataaaaaaaactgctttaa

SEQ ID NO: 819820 - DNA, 33 bp, Homo sapien
atctaaactgtgaaattaaaaaaactgctttaa

SEQ ID NO: 819821 - DNA, 33 bp, Homo sapien
atgtattaaaatttaggccacagtataaatata

SEQ ID NO: 819822 - DNA, 33 bp, Homo sapien
atgtattaaaatttagtccacagtataaatata

SEQ ID NO: 819823 - DNA, 33 bp, Homo sapien
taatgagatcggtttgaaaatatattgctgtat

SEQ ID NO: 819824 - DNA, 33 bp, Homo sapien
taatgagatcggtttggaaatatattgctgtat

SEQ ID NO: 819825 - DNA, 33 bp, Homo sapien
aaacccctggtgttccagcaataaaattagaca

SEQ ID NO: 819826 - DNA, 33 bp, Homo sapien
aaacccctggtgttccggcaataaaattagaca

SEQ ID NO: 819827 - DNA, 33 bp, Homo sapien
cttatactatcaccaacaatttgttatcagcaa

SEQ ID NO: 819828 - DNA, 33 bp, Homo sapien
cttatactatcaccaataatttgttatcagcaa

SEQ ID NO: 819829 - DNA, 33 bp, Homo sapien
ctgtttctcaaaacataaatgtcatagactagt

SEQ ID NO: 819830 - DNA, 33 bp, Homo sapien
ctgtttctcaaaacatgaatgtcatagactagt

SEQ ID NO: 819831 - DNA, 33 bp, Homo sapien
acatggtaactgataacgtgtggatcagtttcc

SEQ ID NO: 819832 - DNA, 33 bp, Homo sapien
acatggtaactgataatgtgtggatcagtttcc

SEQ ID NO: 819833 - DNA, 33 bp, Homo sapien
atatgtaaagcagttaagatgtgcttggaacat

SEQ ID NO: 819834 - DNA, 33 bp, Homo sapien
atatgtaaagcagttaggatgtgcttggaacat

SEQ ID NO: 819835 - DNA, 33 bp, Homo sapien
acagtctaatcccaaacctcgggagagccaggg

SEQ ID NO: 819836 - DNA, 33 bp, Homo sapien
acagtctaatcccaaatctcgggagagccaggg

SEQ ID NO: 819837 - DNA, 33 bp, Homo sapien
actacctaccaacctaaagtggttttgcctctt

SEQ ID NO: 819838 - DNA, 33 bp, Homo sapien
actacctaccaacctagagtggttttgcctctt

SEQ ID NO: 819839 - DNA, 33 bp, Homo sapien
aacttccctccacttacggacagtggttcttgg

SEQ ID NO: 819840 - DNA, 33 bp, Homo sapien
aacttccctccacttatggacagtggttcttgg

SEQ ID NO: 819841 - DNA, 33 bp, Homo sapien
taaaataagaaaggaacgcaaaagatatctaac

SEQ ID NO: 819842 - DNA, 33 bp, Homo sapien
taaaataagaaaggaaggcaaaagatatctaac

SEQ ID NO: 819843 - DNA, 33 bp, Homo sapien
gtgcttcagacttagacggcaactactgtggaa

SEQ ID NO: 819844 - DNA, 33 bp, Homo sapien
gtgcttcagacttagagggcaactactgtggaa

SEQ ID NO: 819845 - DNA, 33 bp, Homo sapien
tttgacaattagtatacagtgtggtttagagta

SEQ ID NO: 819846 - DNA, 33 bp, Homo sapien
tttgacaattagtatatagtgtggtttagagta

SEQ ID NO: 819847 - DNA, 33 bp, Homo sapien
tggtcactgtgataaccaggacagaaggacaga

SEQ ID NO: 819848 - DNA, 33 bp, Homo sapien
tggtcactgtgataactaggacagaaggacaga

SEQ ID NO: 819849 - DNA, 33 bp, Homo sapien
aggcagaagagaaacactccttgagggagcctg

SEQ ID NO: 819850 - DNA, 33 bp, Homo sapien
aggcagaagagaaacattccttgagggagcctg

SEQ ID NO: 819851 - DNA, 33 bp, Homo sapien
ttttagtgactttgaacctcactggggaggggg

SEQ ID NO: 819852 - DNA, 33 bp, Homo sapien
ttttagtgactttgaatctcactggggaggggg

SEQ ID NO: 819853 - DNA, 33 bp, Homo sapien
aaatacgaagtgaaaaattatccattagcacag

SEQ ID NO: 819854 - DNA, 33 bp, Homo sapien
aaatacgaagtgaaaatttatccattagcacag

SEQ ID NO: 819855 - DNA, 33 bp, Homo sapien
gggacttcttagaaacaaaattatgcttggtac

SEQ ID NO: 819856 - DNA, 33 bp, Homo sapien
gggacttcttagaaacgaaattatgcttggtac

SEQ ID NO: 819857 - DNA, 33 bp, Homo sapien
ctcacagagaaggaagcctacgtggtcacaaga

SEQ ID NO: 819858 - DNA, 33 bp, Homo sapien
ctcacagagaaggaagtctacgtggtcacaaga

SEQ ID NO: 819859 - DNA, 33 bp, Homo sapien
aattcttcccgtattacagccatttcagtaata

SEQ ID NO: 819860 - DNA, 33 bp, Homo sapien
aattcttcccgtattagagccatttcagtaata

SEQ ID NO: 819861 - DNA, 33 bp, Homo sapien
ctaggaaagactacaccggaactaatgattccc

SEQ ID NO: 819862 - DNA, 33 bp, Homo sapien
ctaggaaagactacactggaactaatgattccc

SEQ ID NO: 819863 - DNA, 33 bp, Homo sapien
actgaaagtccgggaaaagtcagatggactcac

SEQ ID NO: 819864 - DNA, 33 bp, Homo sapien
actgaaagtccgggaagagtcagatggactcac

SEQ ID NO: 819865 - DNA, 33 bp, Homo sapien
caaataaagtaccatgaatgtgtgaaagttctt

SEQ ID NO: 819866 - DNA, 33 bp, Homo sapien
caaataaagtaccatgcatgtgtgaaagttctt

SEQ ID NO: 819867 - DNA, 33 bp, Homo sapien
actccacaagacccccaatggtggagatggcgc

SEQ ID NO: 819868 - DNA, 33 bp, Homo sapien
actccacaagacccccgatggtggagatggcgc

SEQ ID NO: 819869 - DNA, 33 bp, Homo sapien
tgggccacttcattgcaagagactttaggtggt

SEQ ID NO: 819870 - DNA, 33 bp, Homo sapien
tgggccacttcattgcgagagactttaggtggt

SEQ ID NO: 819871 - DNA, 33 bp, Homo sapien
attcctggaatagctacggtgttacatgaaatg

SEQ ID NO: 819872 - DNA, 33 bp, Homo sapien
attcctggaatagctatggtgttacatgaaatg

SEQ ID NO: 819873 - DNA, 33 bp, Homo sapien
atgtagttggctgcacaaaagtaacatccctac

SEQ ID NO: 819874 - DNA, 33 bp, Homo sapien
atgtagttggctgcacgaaagtaacatccctac

SEQ ID NO: 819875 - DNA, 33 bp, Homo sapien
tcttctctgtcctaccaaaattaataaacagaa

SEQ ID NO: 819876 - DNA, 33 bp, Homo sapien
tcttctctgtcctaccgaaattaataaacagaa

SEQ ID NO: 819877 - DNA, 33 bp, Homo sapien
ttatcttttcccagtccccaaatcatccgatgg

SEQ ID NO: 819878 - DNA, 33 bp, Homo sapien
ttatcttttcccagtctccaaatcatccgatgg

SEQ ID NO: 819879 - DNA, 33 bp, Homo sapien
gtgcagatttgtcacactcattaaacagtcttc

SEQ ID NO: 819880 - DNA, 33 bp, Homo sapien
gtgcagatttgtcacagtcattaaacagtcttc

SEQ ID NO: 819881 - DNA, 33 bp, Homo sapien
accaaaagcaacttgaactcggaagaatgctga

SEQ ID NO: 819882 - DNA, 33 bp, Homo sapien
accaaaagcaacttgacctcggaagaatgctga

SEQ ID NO: 819883 - DNA, 33 bp, Homo sapien
catttcactctcttgagctccaaagacttgtat

SEQ ID NO: 819884 - DNA, 33 bp, Homo sapien
catttcactctcttgatctccaaagacttgtat

SEQ ID NO: 819885 - DNA, 33 bp, Homo sapien
ttaagacattaaaaaaatctcaccatgccggga

SEQ ID NO: 819886 - DNA, 33 bp, Homo sapien
ttaagacattaaaaaattctcaccatgccggga

SEQ ID NO: 819887 - DNA, 33 bp, Homo sapien
aactaggtggcatataaaaaaataatcacaact

SEQ ID NO: 819888 - DNA, 33 bp, Homo sapien
aactaggtggcatatacaaaaataatcacaact

SEQ ID NO: 819889 - DNA, 33 bp, Homo sapien
tctatagaagtcgtcaaatttcaggttataaag

SEQ ID NO: 819890 - DNA, 33 bp, Homo sapien
tctatagaagtcgtcagatttcaggttataaag

SEQ ID NO: 819891 - DNA, 33 bp, Homo sapien
tactgtgtggtgttaacaactgtttccttgtgg

SEQ ID NO: 819892 - DNA, 33 bp, Homo sapien
tactgtgtggtgttaagaactgtttccttgtgg

SEQ ID NO: 819893 - DNA, 33 bp, Homo sapien
ttctcatgaggtgaaacgagaggcaaaccaggt

SEQ ID NO: 819894 - DNA, 33 bp, Homo sapien
ttctcatgaggtgaaatgagaggcaaaccaggt

SEQ ID NO: 819895 - DNA, 33 bp, Homo sapien
gttgcactgaaatagcagaataaaccagtaagg

SEQ ID NO: 819896 - DNA, 33 bp, Homo sapien
gttgcactgaaatagcggaataaaccagtaagg

SEQ ID NO: 819897 - DNA, 33 bp, Homo sapien
ctttggcttttactcaaggtttccctcaaagag

SEQ ID NO: 819898 - DNA, 33 bp, Homo sapien
ctttggcttttactcagggtttccctcaaagag

SEQ ID NO: 819899 - DNA, 33 bp, Homo sapien
ggtagggtcaggctcaccttttcagtcaagtag

SEQ ID NO: 819900 - DNA, 33 bp, Homo sapien
ggtagggtcaggctcatcttttcagtcaagtag

SEQ ID NO: 819901 - DNA, 33 bp, Homo sapien
tcagtcttggcctgaacctggtgacctggagct

SEQ ID NO: 819902 - DNA, 33 bp, Homo sapien
tcagtcttggcctgaatctggtgacctggagct

SEQ ID NO: 819903 - DNA, 33 bp, Homo sapien
cagggccacttttacactggaagtttcttatga

SEQ ID NO: 819904 - DNA, 33 bp, Homo sapien
cagggccacttttacattggaagtttcttatga

SEQ ID NO: 819905 - DNA, 33 bp, Homo sapien
tcttaatgctttcccaggtaaacagtcaaaata

SEQ ID NO: 819906 - DNA, 33 bp, Homo sapien
tcttaatgctttcccatgtaaacagtcaaaata

SEQ ID NO: 819907 - DNA, 33 bp, Homo sapien
gtagcttgaaacttccaaaaatcccttcttttg

SEQ ID NO: 819908 - DNA, 33 bp, Homo sapien
gtagcttgaaacttcccaaaatcccttcttttg

SEQ ID NO: 819909 - DNA, 33 bp, Homo sapien
gcagagctgtcagtaaaccatgccatatcatag

SEQ ID NO: 819910 - DNA, 33 bp, Homo sapien
gcagagctgtcagtaagccatgccatatcatag

SEQ ID NO: 819911 - DNA, 33 bp, Homo sapien
tgttgttgagaacttaaatgtctgcacctgttt

SEQ ID NO: 819912 - DNA, 33 bp, Homo sapien
tgttgttgagaacttacatgtctgcacctgttt

SEQ ID NO: 819913 - DNA, 33 bp, Homo sapien
gattctggggtttggccagaggagaattagtaa

SEQ ID NO: 819914 - DNA, 33 bp, Homo sapien
gattctggggtttggcgagaggagaattagtaa

SEQ ID NO: 819915 - DNA, 33 bp, Homo sapien
gaaaaggagtgcctctcaaatatgtagagactg

SEQ ID NO: 819916 - DNA, 33 bp, Homo sapien
gaaaaggagtgcctcttaaatatgtagagactg

SEQ ID NO: 819917 - DNA, 33 bp, Homo sapien
gcacagtgcaatgtccaaatgatgaccgaagcc

SEQ ID NO: 819918 - DNA, 33 bp, Homo sapien
gcacagtgcaatgtccgaatgatgaccgaagcc

SEQ ID NO: 819919 - DNA, 33 bp, Homo sapien
cactttgacttcaagaaaactgataatgtgcag

SEQ ID NO: 819920 - DNA, 33 bp, Homo sapien
cactttgacttcaagagaactgataatgtgcag

SEQ ID NO: 819921 - DNA, 33 bp, Homo sapien
ataaatctgtatcacacaactgcatttgtaccc

SEQ ID NO: 819922 - DNA, 33 bp, Homo sapien
ataaatctgtatcacataactgcatttgtaccc

SEQ ID NO: 819923 - DNA, 33 bp, Homo sapien
ttttgtgtgggagagaacagaatatggatagat

SEQ ID NO: 819924 - DNA, 33 bp, Homo sapien
ttttgtgtgggagagagcagaatatggatagat

SEQ ID NO: 819925 - DNA, 33 bp, Homo sapien
acagaccccttctaaaaagcgtagaggaatttt

SEQ ID NO: 819926 - DNA, 33 bp, Homo sapien
acagaccccttctaaagagcgtagaggaatttt

SEQ ID NO: 819927 - DNA, 33 bp, Homo sapien
atctgaatggtggatacctctggttctctttta

SEQ ID NO: 819928 - DNA, 33 bp, Homo sapien
atctgaatggtggatatctctggttctctttta

SEQ ID NO: 819929 - DNA, 33 bp, Homo sapien
taactgcaaaataaatcaccatcttatcatgtt

SEQ ID NO: 819930 - DNA, 33 bp, Homo sapien
taactgcaaaataaatgaccatcttatcatgtt

SEQ ID NO: 819931 - DNA, 33 bp, Homo sapien
tcctcctgagctagcagcttccagtttttgctt

SEQ ID NO: 819932 - DNA, 33 bp, Homo sapien
tcctcctgagctagcatcttccagtttttgctt

SEQ ID NO: 819933 - DNA, 33 bp, Homo sapien
ctccaaagttccagtaccaactttaaaatgtaa

SEQ ID NO: 819934 - DNA, 33 bp, Homo sapien
ctccaaagttccagtatcaactttaaaatgtaa

SEQ ID NO: 819935 - DNA, 33 bp, Homo sapien
ctcacctcagtgacaagtctcagactgggcccc

SEQ ID NO: 819936 - DNA, 33 bp, Homo sapien
ctcacctcagtgacaattctcagactgggcccc

SEQ ID NO: 819937 - DNA, 33 bp, Homo sapien
acattctggtgcagcactctttggccaccatcc

SEQ ID NO: 819938 - DNA, 33 bp, Homo sapien
acattctggtgcagcattctttggccaccatcc

SEQ ID NO: 819939 - DNA, 33 bp, Homo sapien
ttaacttcggaatagcacaattagattgcattg

SEQ ID NO: 819940 - DNA, 33 bp, Homo sapien
ttaacttcggaatagcgcaattagattgcattg

SEQ ID NO: 819941 - DNA, 33 bp, Homo sapien
taattctgccctgtaaactctttgggcaactgg

SEQ ID NO: 819942 - DNA, 33 bp, Homo sapien
taattctgccctgtaagctctttgggcaactgg

SEQ ID NO: 819943 - DNA, 33 bp, Homo sapien
gaattagaagtaacaaattaggctctcagcttt

SEQ ID NO: 819944 - DNA, 33 bp, Homo sapien
gaattagaagtaacaagttaggctctcagcttt

SEQ ID NO: 819945 - DNA, 33 bp, Homo sapien
tattaattctttttagaccttgatattttctct

SEQ ID NO: 819946 - DNA, 33 bp, Homo sapien
tattaattctttttaggccttgatattttctct

SEQ ID NO: 819947 - DNA, 33 bp, Homo sapien
tctctcacccaggcacaccacggacaccagcac

SEQ ID NO: 819948 - DNA, 33 bp, Homo sapien
tctctcacccaggcacgccacggacaccagcac

SEQ ID NO: 819949 - DNA, 33 bp, Homo sapien
tgcttggtgattggtaaatgtcaaagaaaaaga

SEQ ID NO: 819950 - DNA, 33 bp, Homo sapien
tgcttggtgattggtagatgtcaaagaaaaaga

SEQ ID NO: 819951 - DNA, 33 bp, Homo sapien
gagggcagacaggtaaagaatctgccctcatct

SEQ ID NO: 819952 - DNA, 33 bp, Homo sapien
gagggcagacaggtaaggaatctgccctcatct

SEQ ID NO: 819953 - DNA, 33 bp, Homo sapien
agaaagtgacgtgttccagtctaggcctccaag

SEQ ID NO: 819954 - DNA, 33 bp, Homo sapien
agaaagtgacgtgttctagtctaggcctccaag

SEQ ID NO: 819955 - DNA, 33 bp, Homo sapien
acagcctcaggtgaaactggtcttagcttttgg

SEQ ID NO: 819956 - DNA, 33 bp, Homo sapien
acagcctcaggtgaaattggtcttagcttttgg

SEQ ID NO: 819957 - DNA, 33 bp, Homo sapien
gctgtgacaccactatcactattcatagccaac

SEQ ID NO: 819958 - DNA, 33 bp, Homo sapien
gctgtgacaccactattactattcatagccaac

SEQ ID NO: 819959 - DNA, 33 bp, Homo sapien
aggaggaaatggagaacaattgctaatgggtat

SEQ ID NO: 819960 - DNA, 33 bp, Homo sapien
aggaggaaatggagaataattgctaatgggtat

SEQ ID NO: 819961 - DNA, 33 bp, Homo sapien
aatgaatctctacacaaaaaattaggtagggtc

SEQ ID NO: 819962 - DNA, 33 bp, Homo sapien
aatgaatctctacacagaaaattaggtagggtc

SEQ ID NO: 819963 - DNA, 33 bp, Homo sapien
gaggagatgctcagggacaagaaaaacatattt

SEQ ID NO: 819964 - DNA, 33 bp, Homo sapien
gaggagatgctcaggggcaagaaaaacatattt

SEQ ID NO: 819965 - DNA, 33 bp, Homo sapien
tgctctgagaggctccagcaacatttataccca

SEQ ID NO: 819966 - DNA, 33 bp, Homo sapien
tgctctgagaggctccggcaacatttataccca

SEQ ID NO: 819967 - DNA, 33 bp, Homo sapien
tactttaggaaaaaaaatcaccatacaatatcc

SEQ ID NO: 819968 - DNA, 33 bp, Homo sapien
tactttaggaaaaaaattcaccatacaatatcc

SEQ ID NO: 819969 - DNA, 33 bp, Homo sapien
cactgagatgtttatgaaaagtgaaagataaat

SEQ ID NO: 819970 - DNA, 33 bp, Homo sapien
cactgagatgtttatgtaaagtgaaagataaat

SEQ ID NO: 819971 - DNA, 33 bp, Homo sapien
tggttctattcactcccgcactgaaaccgtttg

SEQ ID NO: 819972 - DNA, 33 bp, Homo sapien
tggttctattcactcctgcactgaaaccgtttg

SEQ ID NO: 819973 - DNA, 33 bp, Homo sapien
gctgcgtttctccctgcagagagtggccagctc

SEQ ID NO: 819974 - DNA, 33 bp, Homo sapien
gctgcgtttctccctgtagagagtggccagctc

SEQ ID NO: 819975 - DNA, 33 bp, Homo sapien
ctcctcaaaattaaaacgtggattgatccagaa

SEQ ID NO: 819976 - DNA, 33 bp, Homo sapien
ctcctcaaaattaaaatgtggattgatccagaa

SEQ ID NO: 819977 - DNA, 33 bp, Homo sapien
tagtggctggaaataacaatgattgattatttc

SEQ ID NO: 819978 - DNA, 33 bp, Homo sapien
tagtggctggaaataataatgattgattatttc

SEQ ID NO: 819979 - DNA, 33 bp, Homo sapien
gcagtcacgggtggccccgaccagctacatctg

SEQ ID NO: 819980 - DNA, 33 bp, Homo sapien
gcagtcacgggtggcctcgaccagctacatctg

SEQ ID NO: 819981 - DNA, 33 bp, Homo sapien
gataatctcccatctcaagagcctgaatctaat

SEQ ID NO: 819982 - DNA, 33 bp, Homo sapien
gataatctcccatctcgagagcctgaatctaat

SEQ ID NO: 819983 - DNA, 33 bp, Homo sapien
ctggaacaacactttacgggctactgacaggct

SEQ ID NO: 819984 - DNA, 33 bp, Homo sapien
ctggaacaacactttaggggctactgacaggct

SEQ ID NO: 819985 - DNA, 33 bp, Homo sapien
ggccacactctcctacacctggaatttgtaaac

SEQ ID NO: 819986 - DNA, 33 bp, Homo sapien
ggccacactctcctacgcctggaatttgtaaac

SEQ ID NO: 819987 - DNA, 33 bp, Homo sapien
tttgcagaattaaaaaaagcatcgaaacattct

SEQ ID NO: 819988 - DNA, 33 bp, Homo sapien
tttgcagaattaaaaacagcatcgaaacattct

SEQ ID NO: 819989 - DNA, 33 bp, Homo sapien
taatagtaatgtacaacgttgggaccttagttt

SEQ ID NO: 819990 - DNA, 33 bp, Homo sapien
taatagtaatgtacaatgttgggaccttagttt

SEQ ID NO: 819991 - DNA, 33 bp, Homo sapien
tttctcaagaatattacgtttgtgcagaaatta

SEQ ID NO: 819992 - DNA, 33 bp, Homo sapien
tttctcaagaatattatgtttgtgcagaaatta

SEQ ID NO: 819993 - DNA, 33 bp, Homo sapien
gcgctttgaagggatgaatgtgacctctcccac

SEQ ID NO: 819994 - DNA, 33 bp, Homo sapien
gcgctttgaagggatggatgtgacctctcccac

SEQ ID NO: 819995 - DNA, 33 bp, Homo sapien
aagtcttactccacaacagtgaatcattacctg

SEQ ID NO: 819996 - DNA, 33 bp, Homo sapien
aagtcttactccacaatagtgaatcattacctg

SEQ ID NO: 819997 - DNA, 33 bp, Homo sapien
cgtggaagtgtataaactatctggaattatctt

SEQ ID NO: 819998 - DNA, 33 bp, Homo sapien
cgtggaagtgtataaattatctggaattatctt

SEQ ID NO: 819999 - DNA, 33 bp, Homo sapien
atacctggagcaaaccagaatcgtagaatcctg

SEQ ID NO: 820000 - DNA, 33 bp, Homo sapien
atacctggagcaaaccggaatcgtagaatcctg

SEQ ID NO: 820001 - DNA, 33 bp, Homo sapien
caactatccatagtgaaccttatccaagagcac

SEQ ID NO: 820002 - DNA, 33 bp, Homo sapien
caactatccatagtgatccttatccaagagcac

SEQ ID NO: 820003 - DNA, 33 bp, Homo sapien
cagacaaaaagctccacgatttcagaaacgatg

SEQ ID NO: 820004 - DNA, 33 bp, Homo sapien
cagacaaaaagctccatgatttcagaaacgatg

SEQ ID NO: 820005 - DNA, 33 bp, Homo sapien
tctattctgaccatcactcactgagattttctt

SEQ ID NO: 820006 - DNA, 33 bp, Homo sapien
tctattctgaccatcattcactgagattttctt

SEQ ID NO: 820007 - DNA, 33 bp, Homo sapien
gatgtttgcgtgacaacgaaatcaactaattat

SEQ ID NO: 820008 - DNA, 33 bp, Homo sapien
gatgtttgcgtgacaatgaaatcaactaattat

SEQ ID NO: 820009 - DNA, 33 bp, Homo sapien
gggtgtctgtcaaagacaatgagcctccgagtt

SEQ ID NO: 820010 - DNA, 33 bp, Homo sapien
gggtgtctgtcaaagagaatgagcctccgagtt

SEQ ID NO: 820011 - DNA, 33 bp, Homo sapien
aacggaatgggaaatacgaggcttcaggaagga

SEQ ID NO: 820012 - DNA, 33 bp, Homo sapien
aacggaatgggaaatatgaggcttcaggaagga

SEQ ID NO: 820013 - DNA, 33 bp, Homo sapien
ttaccaggctccacccacgagaggctctgagac

SEQ ID NO: 820014 - DNA, 33 bp, Homo sapien
ttaccaggctccacccgcgagaggctctgagac

SEQ ID NO: 820015 - DNA, 33 bp, Homo sapien
taatccagtaactcacaagcgatgtctttcctt

SEQ ID NO: 820016 - DNA, 33 bp, Homo sapien
taatccagtaactcaccagcgatgtctttcctt

SEQ ID NO: 820017 - DNA, 33 bp, Homo sapien
cacatattgaacggcagaacaagggccaggaat

SEQ ID NO: 820018 - DNA, 33 bp, Homo sapien
cacatattgaacggcataacaagggccaggaat

SEQ ID NO: 820019 - DNA, 33 bp, Homo sapien
atcattactagaatataacaaccttggccaggt

SEQ ID NO: 820020 - DNA, 33 bp, Homo sapien
atcattactagaatatgacaaccttggccaggt

SEQ ID NO: 820021 - DNA, 33 bp, Homo sapien
gggaacaacaattcaaatggctgcagatttctc

SEQ ID NO: 820022 - DNA, 33 bp, Homo sapien
gggaacaacaattcaagtggctgcagatttctc

SEQ ID NO: 820023 - DNA, 33 bp, Homo sapien
gatgacattccatcaccggtatggttgggatgt

SEQ ID NO: 820024 - DNA, 33 bp, Homo sapien
gatgacattccatcactggtatggttgggatgt

SEQ ID NO: 820025 - DNA, 33 bp, Homo sapien
tctaattaggactccacagtattcttttgttag

SEQ ID NO: 820026 - DNA, 33 bp, Homo sapien
tctaattaggactccatagtattcttttgttag

SEQ ID NO: 820027 - DNA, 33 bp, Homo sapien
tataatcgaaagcaaaataaggaaaacagggct

SEQ ID NO: 820028 - DNA, 33 bp, Homo sapien
tataatcgaaagcaaattaaggaaaacagggct

SEQ ID NO: 820029 - DNA, 33 bp, Homo sapien
ggggaaacaataaagtcaatgccagcaaaatgt

SEQ ID NO: 820030 - DNA, 33 bp, Homo sapien
ggggaaacaataaagttaatgccagcaaaatgt

SEQ ID NO: 820031 - DNA, 33 bp, Homo sapien
attttgtgaacacaacaatttcaaactaaaatg

SEQ ID NO: 820032 - DNA, 33 bp, Homo sapien
attttgtgaacacaaccatttcaaactaaaatg

SEQ ID NO: 820033 - DNA, 33 bp, Homo sapien
ggtttaagggaagaagccatctctgtaacataa

SEQ ID NO: 820034 - DNA, 33 bp, Homo sapien
ggtttaagggaagaaggcatctctgtaacataa

SEQ ID NO: 820035 - DNA, 33 bp, Homo sapien
gtacaacttgattaaaagcgggcaaaagctctg

SEQ ID NO: 820036 - DNA, 33 bp, Homo sapien
gtacaacttgattaaaggcgggcaaaagctctg

SEQ ID NO: 820037 - DNA, 33 bp, Homo sapien
ttaatttcaatagaaaaaaattcactgtcctga

SEQ ID NO: 820038 - DNA, 33 bp, Homo sapien
ttaatttcaatagaaacaaattcactgtcctga

SEQ ID NO: 820039 - DNA, 33 bp, Homo sapien
aaaagaaatcactgaaaaccatgcagaagatgc

SEQ ID NO: 820040 - DNA, 33 bp, Homo sapien
aaaagaaatcactgaacaccatgcagaagatgc

SEQ ID NO: 820041 - DNA, 33 bp, Homo sapien
tgaagaatataaaaagaacaatgcaaactctaa

SEQ ID NO: 820042 - DNA, 33 bp, Homo sapien
tgaagaatataaaaaggacaatgcaaactctaa

SEQ ID NO: 820043 - DNA, 33 bp, Homo sapien
tctgtttctgtccctaaagttcttttcctttcc

SEQ ID NO: 820044 - DNA, 33 bp, Homo sapien
tctgtttctgtccctagagttcttttcctttcc

SEQ ID NO: 820045 - DNA, 33 bp, Homo sapien
tgcagctcgttagcataaaatttgcaaattgct

SEQ ID NO: 820046 - DNA, 33 bp, Homo sapien
tgcagctcgttagcatcaaatttgcaaattgct

SEQ ID NO: 820047 - DNA, 33 bp, Homo sapien
catcatgccaagtggaataagccagacacaaaa

SEQ ID NO: 820048 - DNA, 33 bp, Homo sapien
catcatgccaagtggagtaagccagacacaaaa

SEQ ID NO: 820049 - DNA, 33 bp, Homo sapien
ataaggtatcttgaaacgaacagaagttttgta

SEQ ID NO: 820050 - DNA, 33 bp, Homo sapien
ataaggtatcttgaaatgaacagaagttttgta

SEQ ID NO: 820051 - DNA, 33 bp, Homo sapien
ctaaggctttaatcaccggtcccgagagcccta

SEQ ID NO: 820052 - DNA, 33 bp, Homo sapien
ctaaggctttaatcacgggtcccgagagcccta

SEQ ID NO: 820053 - DNA, 33 bp, Homo sapien
aacagtgccacgatccactgaggctcagtcaag

SEQ ID NO: 820054 - DNA, 33 bp, Homo sapien
aacagtgccacgatccgctgaggctcagtcaag

SEQ ID NO: 820055 - DNA, 33 bp, Homo sapien
aacggctaaaaagaaacgattcacagcgaggtt

SEQ ID NO: 820056 - DNA, 33 bp, Homo sapien
aacggctaaaaagaaaggattcacagcgaggtt

SEQ ID NO: 820057 - DNA, 33 bp, Homo sapien
tggactgtctacagagaaagacttcacatgtgg

SEQ ID NO: 820058 - DNA, 33 bp, Homo sapien
tggactgtctacagaggaagacttcacatgtgg

SEQ ID NO: 820059 - DNA, 33 bp, Homo sapien
ttcctctgttctcacaacacaaaagccaacaca

SEQ ID NO: 820060 - DNA, 33 bp, Homo sapien
ttcctctgttctcacagcacaaaagccaacaca

SEQ ID NO: 820061 - DNA, 33 bp, Homo sapien
tatagttagattgagaagatatgggaatgaaat

SEQ ID NO: 820062 - DNA, 33 bp, Homo sapien
tatagttagattgagaggatatgggaatgaaat

SEQ ID NO: 820063 - DNA, 33 bp, Homo sapien
cagatgttcaaaataccgcaaaaggactagaat

SEQ ID NO: 820064 - DNA, 33 bp, Homo sapien
cagatgttcaaaatactgcaaaaggactagaat

SEQ ID NO: 820065 - DNA, 33 bp, Homo sapien
tgtaggcataatgaaaaaataaccagccattgt

SEQ ID NO: 820066 - DNA, 33 bp, Homo sapien
tgtaggcataatgaaacaataaccagccattgt

SEQ ID NO: 820067 - DNA, 33 bp, Homo sapien
aatgaggccagtattaaatcacatcacagtatg

SEQ ID NO: 820068 - DNA, 33 bp, Homo sapien
aatgaggccagtattagatcacatcacagtatg

SEQ ID NO: 820069 - DNA, 33 bp, Homo sapien
cttaaatcagcaagaaaagaatcaataacccca

SEQ ID NO: 820070 - DNA, 33 bp, Homo sapien
cttaaatcagcaagaatagaatcaataacccca

SEQ ID NO: 820071 - DNA, 33 bp, Homo sapien
tggtgggttcttagcaacagcttcaagagagga

SEQ ID NO: 820072 - DNA, 33 bp, Homo sapien
tggtgggttcttagcagcagcttcaagagagga

SEQ ID NO: 820073 - DNA, 33 bp, Homo sapien
atctgcaattgcagaacctggagaaataaactg

SEQ ID NO: 820074 - DNA, 33 bp, Homo sapien
atctgcaattgcagaatctggagaaataaactg

SEQ ID NO: 820075 - DNA, 33 bp, Homo sapien
atgtaaggcagatagcgaaagttgattgaatgg

SEQ ID NO: 820076 - DNA, 33 bp, Homo sapien
atgtaaggcagatagctaaagttgattgaatgg

SEQ ID NO: 820077 - DNA, 33 bp, Homo sapien
atgtaaacagaacagcagcccaaggttggagtc

SEQ ID NO: 820078 - DNA, 33 bp, Homo sapien
atgtaaacagaacagcggcccaaggttggagtc

SEQ ID NO: 820079 - DNA, 33 bp, Homo sapien
gagggatctcatacaaatcacttaaggctctcg

SEQ ID NO: 820080 - DNA, 33 bp, Homo sapien
gagggatctcatacaagtcacttaaggctctcg

SEQ ID NO: 820081 - DNA, 33 bp, Homo sapien
ccataggtacatggtacgtgaccaaggatgcag

SEQ ID NO: 820082 - DNA, 33 bp, Homo sapien
ccataggtacatggtatgtgaccaaggatgcag

SEQ ID NO: 820083 - DNA, 33 bp, Homo sapien
gctggggcgattgttacggcacatggtggtgcc

SEQ ID NO: 820084 - DNA, 33 bp, Homo sapien
gctggggcgattgttatggcacatggtggtgcc

SEQ ID NO: 820085 - DNA, 33 bp, Homo sapien
tattcaccttacactaccaaaagaaatcaagaa

SEQ ID NO: 820086 - DNA, 33 bp, Homo sapien
tattcaccttacactatcaaaagaaatcaagaa

SEQ ID NO: 820087 - DNA, 33 bp, Homo sapien
agcagcaatgaggtgacggttcttagcataaag

SEQ ID NO: 820088 - DNA, 33 bp, Homo sapien
agcagcaatgaggtgatggttcttagcataaag

SEQ ID NO: 820089 - DNA, 33 bp, Homo sapien
agatgagatcccatgacgtgtgttctaaatcgg

SEQ ID NO: 820090 - DNA, 33 bp, Homo sapien
agatgagatcccatgatgtgtgttctaaatcgg

SEQ ID NO: 820091 - DNA, 33 bp, Homo sapien
ctcacaggcccacttacggcacttgcagtttgg

SEQ ID NO: 820092 - DNA, 33 bp, Homo sapien
ctcacaggcccacttatggcacttgcagtttgg

SEQ ID NO: 820093 - DNA, 33 bp, Homo sapien
ggactgcattttagacagagtgaaatgtacatg

SEQ ID NO: 820094 - DNA, 33 bp, Homo sapien
ggactgcattttagacggagtgaaatgtacatg

SEQ ID NO: 820095 - DNA, 33 bp, Homo sapien
tcaccattgccaaaccaattttcctagaacaca

SEQ ID NO: 820096 - DNA, 33 bp, Homo sapien
tcaccattgccaaaccgattttcctagaacaca

SEQ ID NO: 820097 - DNA, 33 bp, Homo sapien
gaaccaatcaagccacagatcttcctgtcccca

SEQ ID NO: 820098 - DNA, 33 bp, Homo sapien
gaaccaatcaagccacggatcttcctgtcccca

SEQ ID NO: 820099 - DNA, 33 bp, Homo sapien
tgaggagcttgagttacaccacactgaacttct

SEQ ID NO: 820100 - DNA, 33 bp, Homo sapien
tgaggagcttgagttataccacactgaacttct

SEQ ID NO: 820101 - DNA, 33 bp, Homo sapien
gagcagattacagagcaaatgcaaaagaggaga

SEQ ID NO: 820102 - DNA, 33 bp, Homo sapien
gagcagattacagagccaatgcaaaagaggaga

SEQ ID NO: 820103 - DNA, 33 bp, Homo sapien
tagttccaccccacaaagctaagaagcatatct

SEQ ID NO: 820104 - DNA, 33 bp, Homo sapien
tagttccaccccacaaggctaagaagcatatct

SEQ ID NO: 820105 - DNA, 33 bp, Homo sapien
tcgtggtactgttgtcaaaactaaaagagtgac

SEQ ID NO: 820106 - DNA, 33 bp, Homo sapien
tcgtggtactgttgtcgaaactaaaagagtgac

SEQ ID NO: 820107 - DNA, 33 bp, Homo sapien
gtcattcaccttcagacgagacctccactagat

SEQ ID NO: 820108 - DNA, 33 bp, Homo sapien
gtcattcaccttcagatgagacctccactagat

SEQ ID NO: 820109 - DNA, 33 bp, Homo sapien
agattgtggaccttctaaccatcctgaaggggt

SEQ ID NO: 820110 - DNA, 33 bp, Homo sapien
agattgtggaccttctgaccatcctgaaggggt

SEQ ID NO: 820111 - DNA, 33 bp, Homo sapien
tgcatctccaggtgccgcctctgctatgacaca

SEQ ID NO: 820112 - DNA, 33 bp, Homo sapien
tgcatctccaggtgcctcctctgctatgacaca

SEQ ID NO: 820113 - DNA, 33 bp, Homo sapien
acactgcccccacatcacagtgaaaaatgccag

SEQ ID NO: 820114 - DNA, 33 bp, Homo sapien
acactgcccccacatcgcagtgaaaaatgccag

SEQ ID NO: 820115 - DNA, 33 bp, Homo sapien
aagattatgtacagaacccaagcttatattttg

SEQ ID NO: 820116 - DNA, 33 bp, Homo sapien
aagattatgtacagaatccaagcttatattttg

SEQ ID NO: 820117 - DNA, 33 bp, Homo sapien
ggggaaactgaggcccaaaggaataaggtgact

SEQ ID NO: 820118 - DNA, 33 bp, Homo sapien
ggggaaactgaggcccgaaggaataaggtgact

SEQ ID NO: 820119 - DNA, 33 bp, Homo sapien
actctccatctagactcagggctaacgctcact

SEQ ID NO: 820120 - DNA, 33 bp, Homo sapien
actctccatctagacttagggctaacgctcact

SEQ ID NO: 820121 - DNA, 33 bp, Homo sapien
agcttatgctgctttaagtttttgccagaccaa

SEQ ID NO: 820122 - DNA, 33 bp, Homo sapien
agcttatgctgctttaggtttttgccagaccaa

SEQ ID NO: 820123 - DNA, 33 bp, Homo sapien
ggcacacagagccttcaaaatacaacgtggtag

SEQ ID NO: 820124 - DNA, 33 bp, Homo sapien
ggcacacagagccttcgaaatacaacgtggtag

SEQ ID NO: 820125 - DNA, 33 bp, Homo sapien
tagctgggatacagacacgtgctcccatgtgtg

SEQ ID NO: 820126 - DNA, 33 bp, Homo sapien
tagctgggatacagacgcgtgctcccatgtgtg

SEQ ID NO: 820127 - DNA, 33 bp, Homo sapien
aattgccattgaaagaccatttattactctcag

SEQ ID NO: 820128 - DNA, 33 bp, Homo sapien
aattgccattgaaagatcatttattactctcag

SEQ ID NO: 820129 - DNA, 33 bp, Homo sapien
gaagaagattcacccaaagaaattggagccttg

SEQ ID NO: 820130 - DNA, 33 bp, Homo sapien
gaagaagattcacccagagaaattggagccttg

SEQ ID NO: 820131 - DNA, 33 bp, Homo sapien
atgagacatttagaacagtgcctgtcacctagt

SEQ ID NO: 820132 - DNA, 33 bp, Homo sapien
atgagacatttagaacggtgcctgtcacctagt

SEQ ID NO: 820133 - DNA, 33 bp, Homo sapien
gtgcacgtgtgtgcataaggatggcggtcccaa

SEQ ID NO: 820134 - DNA, 33 bp, Homo sapien
gtgcacgtgtgtgcatgaggatggcggtcccaa

SEQ ID NO: 820135 - DNA, 33 bp, Homo sapien
aggtctttccagagcaactccagttatgcaggg

SEQ ID NO: 820136 - DNA, 33 bp, Homo sapien
aggtctttccagagcagctccagttatgcaggg

SEQ ID NO: 820137 - DNA, 33 bp, Homo sapien
gattcacgtagtagtaagtctgtattggttgtc

SEQ ID NO: 820138 - DNA, 33 bp, Homo sapien
gattcacgtagtagtaggtctgtattggttgtc

SEQ ID NO: 820139 - DNA, 33 bp, Homo sapien
cctgctgaaataaagtcaaggctctgctaggat

SEQ ID NO: 820140 - DNA, 33 bp, Homo sapien
cctgctgaaataaagttaaggctctgctaggat

SEQ ID NO: 820141 - DNA, 33 bp, Homo sapien
tcacatttattcatgcaacaagtatctgagctt

SEQ ID NO: 820142 - DNA, 33 bp, Homo sapien
tcacatttattcatgcgacaagtatctgagctt

SEQ ID NO: 820143 - DNA, 33 bp, Homo sapien
ctttgatgagttcccacgtagggtgccgggcca

SEQ ID NO: 820144 - DNA, 33 bp, Homo sapien
ctttgatgagttcccatgtagggtgccgggcca

SEQ ID NO: 820145 - DNA, 33 bp, Homo sapien
gagcaaatggagcctcacaggccttcagatttg

SEQ ID NO: 820146 - DNA, 33 bp, Homo sapien
gagcaaatggagcctcgcaggccttcagatttg

SEQ ID NO: 820147 - DNA, 33 bp, Homo sapien
agtgttctgaacactgaagagttttatacatct

SEQ ID NO: 820148 - DNA, 33 bp, Homo sapien
agtgttctgaacactgcagagttttatacatct

SEQ ID NO: 820149 - DNA, 33 bp, Homo sapien
tcaatactgctaaaaacgctacgtcagtccaaa

SEQ ID NO: 820150 - DNA, 33 bp, Homo sapien
tcaatactgctaaaaatgctacgtcagtccaaa

SEQ ID NO: 820151 - DNA, 33 bp, Homo sapien
taccagaggctcaacacgccctgaatcagacca

SEQ ID NO: 820152 - DNA, 33 bp, Homo sapien
taccagaggctcaacatgccctgaatcagacca

SEQ ID NO: 820153 - DNA, 33 bp, Homo sapien
ccataaacgcagttagcaaaaggaagagctaga

SEQ ID NO: 820154 - DNA, 33 bp, Homo sapien
ccataaacgcagttagtaaaaggaagagctaga

SEQ ID NO: 820155 - DNA, 33 bp, Homo sapien
cccagaaactatggaaatgaggccactagggtt

SEQ ID NO: 820156 - DNA, 33 bp, Homo sapien
cccagaaactatggaagtgaggccactagggtt

SEQ ID NO: 820157 - DNA, 33 bp, Homo sapien
aaagtttaatcacatacgtataccggcaggaga

SEQ ID NO: 820158 - DNA, 33 bp, Homo sapien
aaagtttaatcacatatgtataccggcaggaga

SEQ ID NO: 820159 - DNA, 33 bp, Homo sapien
cattcggcacttactaacctggcaatcacacga

SEQ ID NO: 820160 - DNA, 33 bp, Homo sapien
cattcggcacttactagcctggcaatcacacga

SEQ ID NO: 820161 - DNA, 33 bp, Homo sapien
gcattccacaaaagccacatttgtcgacactaa

SEQ ID NO: 820162 - DNA, 33 bp, Homo sapien
gcattccacaaaagccgcatttgtcgacactaa

SEQ ID NO: 820163 - DNA, 33 bp, Homo sapien
gaacaaaaaaagggaaactccgtctgtgttaga

SEQ ID NO: 820164 - DNA, 33 bp, Homo sapien
gaacaaaaaaagggaagctccgtctgtgttaga

SEQ ID NO: 820165 - DNA, 33 bp, Homo sapien
ccagcatgagggtcacagcatttcccattgagt

SEQ ID NO: 820166 - DNA, 33 bp, Homo sapien
ccagcatgagggtcacggcatttcccattgagt

SEQ ID NO: 820167 - DNA, 33 bp, Homo sapien
ggcttagctacctgtcacatcaaaggattcagt

SEQ ID NO: 820168 - DNA, 33 bp, Homo sapien
ggcttagctacctgtcgcatcaaaggattcagt

SEQ ID NO: 820169 - DNA, 33 bp, Homo sapien
tattaatttagtgcaacacagagacgtcccaga

SEQ ID NO: 820170 - DNA, 33 bp, Homo sapien
tattaatttagtgcaatacagagacgtcccaga

SEQ ID NO: 820171 - DNA, 33 bp, Homo sapien
agttgaattcagactcaaaagcccagtctcaac

SEQ ID NO: 820172 - DNA, 33 bp, Homo sapien
agttgaattcagactcgaaagcccagtctcaac

SEQ ID NO: 820173 - DNA, 33 bp, Homo sapien
agcttttgccatgaccacctctttgtttccatg

SEQ ID NO: 820174 - DNA, 33 bp, Homo sapien
agcttttgccatgaccgcctctttgtttccatg

SEQ ID NO: 820175 - DNA, 33 bp, Homo sapien
ttaatatttcattcacacgcacatggaaacaaa

SEQ ID NO: 820176 - DNA, 33 bp, Homo sapien
ttaatatttcattcacgcgcacatggaaacaaa

SEQ ID NO: 820177 - DNA, 33 bp, Homo sapien
cacgcccaaactaggacgtggcaccttcagcac

SEQ ID NO: 820178 - DNA, 33 bp, Homo sapien
cacgcccaaactaggatgtggcaccttcagcac

SEQ ID NO: 820179 - DNA, 33 bp, Homo sapien
actttgctaaccaaagacttgttagtttcttgt

SEQ ID NO: 820180 - DNA, 33 bp, Homo sapien
actttgctaaccaaaggcttgttagtttcttgt

SEQ ID NO: 820181 - DNA, 33 bp, Homo sapien
catctccccacaacacagcgagttaaataatta

SEQ ID NO: 820182 - DNA, 33 bp, Homo sapien
catctccccacaacacggcgagttaaataatta

SEQ ID NO: 820183 - DNA, 33 bp, Homo sapien
tactaccagtagtatacgcaaactaacttttcc

SEQ ID NO: 820184 - DNA, 33 bp, Homo sapien
tactaccagtagtatatgcaaactaacttttcc

SEQ ID NO: 820185 - DNA, 33 bp, Homo sapien
ggctttgaatacccaaataactgaaccagactg

SEQ ID NO: 820186 - DNA, 33 bp, Homo sapien
ggctttgaatacccaactaactgaaccagactg

SEQ ID NO: 820187 - DNA, 33 bp, Homo sapien
tgaggagcctgagggacgtaagttaggttgccc

SEQ ID NO: 820188 - DNA, 33 bp, Homo sapien
tgaggagcctgagggatgtaagttaggttgccc

SEQ ID NO: 820189 - DNA, 33 bp, Homo sapien
tgtggagatatacctaaatgtaagggaaatttt

SEQ ID NO: 820190 - DNA, 33 bp, Homo sapien
tgtggagatatacctacatgtaagggaaatttt

SEQ ID NO: 820191 - DNA, 33 bp, Homo sapien
cttccctggaacttcacggttttacagatgaca

SEQ ID NO: 820192 - DNA, 33 bp, Homo sapien
cttccctggaacttcatggttttacagatgaca

SEQ ID NO: 820193 - DNA, 33 bp, Homo sapien
acatttctccaaaacacgcatctaaggcttatc

SEQ ID NO: 820194 - DNA, 33 bp, Homo sapien
acatttctccaaaacatgcatctaaggcttatc

SEQ ID NO: 820195 - DNA, 33 bp, Homo sapien
aggacggctgcccagaacaagggtcccggcgca

SEQ ID NO: 820196 - DNA, 33 bp, Homo sapien
aggacggctgcccagagcaagggtcccggcgca

SEQ ID NO: 820197 - DNA, 33 bp, Homo sapien
cgacacatttttgtcaataccagaagcagaagt

SEQ ID NO: 820198 - DNA, 33 bp, Homo sapien
cgacacatttttgtcagtaccagaagcagaagt

SEQ ID NO: 820199 - DNA, 33 bp, Homo sapien
gttgtcttacaggttacattcgcgagaaaatct

SEQ ID NO: 820200 - DNA, 33 bp, Homo sapien
gttgtcttacaggttatattcgcgagaaaatct

SEQ ID NO: 820201 - DNA, 33 bp, Homo sapien
tggggtgtggcactcaatacgtgaccaataaat

SEQ ID NO: 820202 - DNA, 33 bp, Homo sapien
tggggtgtggcactcagtacgtgaccaataaat

SEQ ID NO: 820203 - DNA, 33 bp, Homo sapien
tgtgttttctaacacaaacaactcctttccact

SEQ ID NO: 820204 - DNA, 33 bp, Homo sapien
tgtgttttctaacacagacaactcctttccact

SEQ ID NO: 820205 - DNA, 33 bp, Homo sapien
cctccctttttgtaagaatgacctgggcaagcc

SEQ ID NO: 820206 - DNA, 33 bp, Homo sapien
cctccctttttgtaagcatgacctgggcaagcc

SEQ ID NO: 820207 - DNA, 33 bp, Homo sapien
ttttttaaagtggaggcataatgaccacatagt

SEQ ID NO: 820208 - DNA, 33 bp, Homo sapien
ttttttaaagtggaggtataatgaccacatagt

SEQ ID NO: 820209 - DNA, 33 bp, Homo sapien
ccaaaaggaagacaacactaccaagtccagggc

SEQ ID NO: 820210 - DNA, 33 bp, Homo sapien
ccaaaaggaagacaacgctaccaagtccagggc

SEQ ID NO: 820211 - DNA, 33 bp, Homo sapien
gaggttctggaggaaactgggcctgtttgggaa

SEQ ID NO: 820212 - DNA, 33 bp, Homo sapien
gaggttctggaggaaattgggcctgtttgggaa

SEQ ID NO: 820213 - DNA, 33 bp, Homo sapien
cagaaacactagcgtacccgaaacactgttttt

SEQ ID NO: 820214 - DNA, 33 bp, Homo sapien
cagaaacactagcgtatccgaaacactgttttt

SEQ ID NO: 820215 - DNA, 33 bp, Homo sapien
atgatatctctaacataaagttatccatcctag

SEQ ID NO: 820216 - DNA, 33 bp, Homo sapien
atgatatctctaacatgaagttatccatcctag

SEQ ID NO: 820217 - DNA, 33 bp, Homo sapien
tgttccatgatctttcccttgcaaataagcctc

SEQ ID NO: 820218 - DNA, 33 bp, Homo sapien
tgttccatgatctttctcttgcaaataagcctc

SEQ ID NO: 820219 - DNA, 33 bp, Homo sapien
tatcttacacatccatgagctacaactgttaac

SEQ ID NO: 820220 - DNA, 33 bp, Homo sapien
tatcttacacatccattagctacaactgttaac

SEQ ID NO: 820221 - DNA, 33 bp, Homo sapien
ccaagcattttctggccgataaaaagactctgt

SEQ ID NO: 820222 - DNA, 33 bp, Homo sapien
ccaagcattttctggctgataaaaagactctgt

SEQ ID NO: 820223 - DNA, 33 bp, Homo sapien
acatgcaatccttaaactccatccaggtagagg

SEQ ID NO: 820224 - DNA, 33 bp, Homo sapien
acatgcaatccttaaattccatccaggtagagg

SEQ ID NO: 820225 - DNA, 33 bp, Homo sapien
agcctttgatatttccagagtcaatacctgctt

SEQ ID NO: 820226 - DNA, 33 bp, Homo sapien
agcctttgatatttccggagtcaatacctgctt

SEQ ID NO: 820227 - DNA, 33 bp, Homo sapien
agggcagccaacaacacgattaaagggctggaa

SEQ ID NO: 820228 - DNA, 33 bp, Homo sapien
agggcagccaacaacaggattaaagggctggaa

SEQ ID NO: 820229 - DNA, 33 bp, Homo sapien
ttcctcactaaatcacagactccttgaggcaga

SEQ ID NO: 820230 - DNA, 33 bp, Homo sapien
ttcctcactaaatcacggactccttgaggcaga

SEQ ID NO: 820231 - DNA, 33 bp, Homo sapien
gatccattttaaaaaccattgccgaccactgtg

SEQ ID NO: 820232 - DNA, 33 bp, Homo sapien
gatccattttaaaaacgattgccgaccactgtg

SEQ ID NO: 820233 - DNA, 33 bp, Homo sapien
cagcacagtcatgtaactataatacaacacagg

SEQ ID NO: 820234 - DNA, 33 bp, Homo sapien
cagcacagtcatgtaattataatacaacacagg

SEQ ID NO: 820235 - DNA, 33 bp, Homo sapien
tacctatttaatgactaaacccaaaactaccat

SEQ ID NO: 820236 - DNA, 33 bp, Homo sapien
tacctatttaatgactgaacccaaaactaccat

SEQ ID NO: 820237 - DNA, 33 bp, Homo sapien
aggcaagcgaccagtacgaaagacgtttgccaa

SEQ ID NO: 820238 - DNA, 33 bp, Homo sapien
aggcaagcgaccagtatgaaagacgtttgccaa

SEQ ID NO: 820239 - DNA, 33 bp, Homo sapien
cttgttgtgagagaaaacgtgacctgttctcag

SEQ ID NO: 820240 - DNA, 33 bp, Homo sapien
cttgttgtgagagaaagcgtgacctgttctcag

SEQ ID NO: 820241 - DNA, 33 bp, Homo sapien
caaaagaaacacaaaacggtctgtacagggaag

SEQ ID NO: 820242 - DNA, 33 bp, Homo sapien
caaaagaaacacaaaatggtctgtacagggaag

SEQ ID NO: 820243 - DNA, 33 bp, Homo sapien
ttatcaaatactcaccaagcccctgtgtgtgca

SEQ ID NO: 820244 - DNA, 33 bp, Homo sapien
ttatcaaatactcaccgagcccctgtgtgtgca

SEQ ID NO: 820245 - DNA, 33 bp, Homo sapien
cccagccttcagcaaaagatggatggttcatta

SEQ ID NO: 820246 - DNA, 33 bp, Homo sapien
cccagccttcagcaaaggatggatggttcatta

SEQ ID NO: 820247 - DNA, 33 bp, Homo sapien
cagtcagttctctttaaaatctatgaagtaggc

SEQ ID NO: 820248 - DNA, 33 bp, Homo sapien
cagtcagttctctttacaatctatgaagtaggc

SEQ ID NO: 820249 - DNA, 33 bp, Homo sapien
ctgaagttctgatgaaaggagatgaaggagaca

SEQ ID NO: 820250 - DNA, 33 bp, Homo sapien
ctgaagttctgatgaagggagatgaaggagaca

SEQ ID NO: 820251 - DNA, 33 bp, Homo sapien
atttcattctttaaaaaatttgtcacatagcta

SEQ ID NO: 820252 - DNA, 33 bp, Homo sapien
atttcattctttaaaagatttgtcacatagcta

SEQ ID NO: 820253 - DNA, 33 bp, Homo sapien
tgaaacaaaactttccaagggcaggattccccg

SEQ ID NO: 820254 - DNA, 33 bp, Homo sapien
tgaaacaaaactttccgagggcaggattccccg

SEQ ID NO: 820255 - DNA, 33 bp, Homo sapien
ggtggcgcagaaaaacaggcaaatggccagtct

SEQ ID NO: 820256 - DNA, 33 bp, Homo sapien
ggtggcgcagaaaaacgggcaaatggccagtct

SEQ ID NO: 820257 - DNA, 33 bp, Homo sapien
gttggattggtgcatccctgcaaggaaagaatt

SEQ ID NO: 820258 - DNA, 33 bp, Homo sapien
gttggattggtgcatctctgcaaggaaagaatt

SEQ ID NO: 820259 - DNA, 33 bp, Homo sapien
acatgcccactctaccagcaccaagacacacac

SEQ ID NO: 820260 - DNA, 33 bp, Homo sapien
acatgcccactctaccggcaccaagacacacac

SEQ ID NO: 820261 - DNA, 33 bp, Homo sapien
tagggctcagtaggacaacaaaattagatgtcg

SEQ ID NO: 820262 - DNA, 33 bp, Homo sapien
tagggctcagtaggacgacaaaattagatgtcg

SEQ ID NO: 820263 - DNA, 33 bp, Homo sapien
catggtagagagatacaacatagacagatatac

SEQ ID NO: 820264 - DNA, 33 bp, Homo sapien
catggtagagagatacgacatagacagatatac

SEQ ID NO: 820265 - DNA, 33 bp, Homo sapien
tattgagtcacctcgaaaaaagaattcctaatc

SEQ ID NO: 820266 - DNA, 33 bp, Homo sapien
tattgagtcacctcgataaaagaattcctaatc

SEQ ID NO: 820267 - DNA, 33 bp, Homo sapien
gtgttagtaatggaagaagcatttgatgagggc

SEQ ID NO: 820268 - DNA, 33 bp, Homo sapien
gtgttagtaatggaaggagcatttgatgagggc

SEQ ID NO: 820269 - DNA, 33 bp, Homo sapien
cacaggaggttgaacagtcaaggtggagtcatg

SEQ ID NO: 820270 - DNA, 33 bp, Homo sapien
cacaggaggttgaacattcaaggtggagtcatg

SEQ ID NO: 820271 - DNA, 33 bp, Homo sapien
ggtgctttatgtgcaacaaccaaaaatgaggga

SEQ ID NO: 820272 - DNA, 33 bp, Homo sapien
ggtgctttatgtgcaataaccaaaaatgaggga

SEQ ID NO: 820273 - DNA, 33 bp, Homo sapien
gccactcccgtgtgataaatttggacagccttt

SEQ ID NO: 820274 - DNA, 33 bp, Homo sapien
gccactcccgtgtgatcaatttggacagccttt

SEQ ID NO: 820275 - DNA, 33 bp, Homo sapien
catatttcattgaatactacacaccatcaatga

SEQ ID NO: 820276 - DNA, 33 bp, Homo sapien
catatttcattgaatagtacacaccatcaatga

SEQ ID NO: 820277 - DNA, 33 bp, Homo sapien
tagcaatggaaagctcagaaagtctgaagagat

SEQ ID NO: 820278 - DNA, 33 bp, Homo sapien
tagcaatggaaagctctgaaagtctgaagagat

SEQ ID NO: 820279 - DNA, 33 bp, Homo sapien
aggtctgaggccttcaccagtcctgttttttca

SEQ ID NO: 820280 - DNA, 33 bp, Homo sapien
aggtctgaggccttcagcagtcctgttttttca

SEQ ID NO: 820281 - DNA, 33 bp, Homo sapien
tggagatgctagaagacgtgtccccagcactct

SEQ ID NO: 820282 - DNA, 33 bp, Homo sapien
tggagatgctagaagatgtgtccccagcactct

SEQ ID NO: 820283 - DNA, 33 bp, Homo sapien
cccctctagcctggaaagacaatgcatatacca

SEQ ID NO: 820284 - DNA, 33 bp, Homo sapien
cccctctagcctggaaggacaatgcatatacca

SEQ ID NO: 820285 - DNA, 33 bp, Homo sapien
ccaagagttctagtgcgctacatgggcatgaga

SEQ ID NO: 820286 - DNA, 33 bp, Homo sapien
ccaagagttctagtgctctacatgggcatgaga

SEQ ID NO: 820287 - DNA, 33 bp, Homo sapien
acgccaagtctgaaacacgggctcgggcttctg

SEQ ID NO: 820288 - DNA, 33 bp, Homo sapien
acgccaagtctgaaacgcgggctcgggcttctg

SEQ ID NO: 820289 - DNA, 33 bp, Homo sapien
aatccaaacagaaaacacttggccagagaagca

SEQ ID NO: 820290 - DNA, 33 bp, Homo sapien
aatccaaacagaaaacgcttggccagagaagca

SEQ ID NO: 820291 - DNA, 33 bp, Homo sapien
ggacataaaccaaacactaatgcagagggtgag

SEQ ID NO: 820292 - DNA, 33 bp, Homo sapien
ggacataaaccaaacattaatgcagagggtgag

SEQ ID NO: 820293 - DNA, 33 bp, Homo sapien
agctcttcctttagagcacaaatgcagtcaggg

SEQ ID NO: 820294 - DNA, 33 bp, Homo sapien
agctcttcctttagagtacaaatgcagtcaggg

SEQ ID NO: 820295 - DNA, 33 bp, Homo sapien
ggataatggtttacaacgcacattcggcatctc

SEQ ID NO: 820296 - DNA, 33 bp, Homo sapien
ggataatggtttacaatgcacattcggcatctc

SEQ ID NO: 820297 - DNA, 33 bp, Homo sapien
aaaggatggtttctcacggaagactcgccatct

SEQ ID NO: 820298 - DNA, 33 bp, Homo sapien
aaaggatggtttctcatggaagactcgccatct

SEQ ID NO: 820299 - DNA, 33 bp, Homo sapien
accaccttgttcatacaatgcctagagccctta

SEQ ID NO: 820300 - DNA, 33 bp, Homo sapien
accaccttgttcatacgatgcctagagccctta

SEQ ID NO: 820301 - DNA, 33 bp, Homo sapien
atctcttcagaagccaccgtggaactttccaag

SEQ ID NO: 820302 - DNA, 33 bp, Homo sapien
atctcttcagaagccatcgtggaactttccaag

SEQ ID NO: 820303 - DNA, 33 bp, Homo sapien
catggtcagaaggtcaatagtagcttacttctc

SEQ ID NO: 820304 - DNA, 33 bp, Homo sapien
catggtcagaaggtcagtagtagcttacttctc

SEQ ID NO: 820305 - DNA, 33 bp, Homo sapien
aatgataacttagtatcaatgatgacaaatggc

SEQ ID NO: 820306 - DNA, 33 bp, Homo sapien
aatgataacttagtattaatgatgacaaatggc

SEQ ID NO: 820307 - DNA, 33 bp, Homo sapien
tattctggaaccatgaggctaacaaagtggagg

SEQ ID NO: 820308 - DNA, 33 bp, Homo sapien
tattctggaaccatgatgctaacaaagtggagg

SEQ ID NO: 820309 - DNA, 33 bp, Homo sapien
tcagggaatgtggtaagagagtctatggcccgc

SEQ ID NO: 820310 - DNA, 33 bp, Homo sapien
tcagggaatgtggtaatagagtctatggcccgc

SEQ ID NO: 820311 - DNA, 33 bp, Homo sapien
gacctccagatgtgcacgcttcaaaagaattac

SEQ ID NO: 820312 - DNA, 33 bp, Homo sapien
gacctccagatgtgcatgcttcaaaagaattac

SEQ ID NO: 820313 - DNA, 33 bp, Homo sapien
tactgagtcaactaacactgggactcccatgtc

SEQ ID NO: 820314 - DNA, 33 bp, Homo sapien
tactgagtcaactaactctgggactcccatgtc

SEQ ID NO: 820315 - DNA, 33 bp, Homo sapien
actgttgcatcggggagtaagttttcagtacat

SEQ ID NO: 820316 - DNA, 33 bp, Homo sapien
actgttgcatcggggattaagttttcagtacat

SEQ ID NO: 820317 - DNA, 33 bp, Homo sapien
attactactgatcacaaccactctggctggctt

SEQ ID NO: 820318 - DNA, 33 bp, Homo sapien
attactactgatcacacccactctggctggctt

SEQ ID NO: 820319 - DNA, 33 bp, Homo sapien
gaatccaggcctaaggcagttcataaataggat

SEQ ID NO: 820320 - DNA, 33 bp, Homo sapien
gaatccaggcctaagggagttcataaataggat

SEQ ID NO: 820321 - DNA, 33 bp, Homo sapien
gttacaactccttgaaacacattccacatgaga

SEQ ID NO: 820322 - DNA, 33 bp, Homo sapien
gttacaactccttgaaccacattccacatgaga

SEQ ID NO: 820323 - DNA, 33 bp, Homo sapien
acatgggcagtgcctaaggcgcaggcagtggag

SEQ ID NO: 820324 - DNA, 33 bp, Homo sapien
acatgggcagtgcctacggcgcaggcagtggag

SEQ ID NO: 820325 - DNA, 33 bp, Homo sapien
ttggttccccagagacgaatccttgtaccaggt

SEQ ID NO: 820326 - DNA, 33 bp, Homo sapien
ttggttccccagagactaatccttgtaccaggt

SEQ ID NO: 820327 - DNA, 33 bp, Homo sapien
agattacaaatccagtaacaatcccttcaggac

SEQ ID NO: 820328 - DNA, 33 bp, Homo sapien
agattacaaatccagtgacaatcccttcaggac

SEQ ID NO: 820329 - DNA, 33 bp, Homo sapien
ctttgtgcaaatcaggaaaaggcacccccgagt

SEQ ID NO: 820330 - DNA, 33 bp, Homo sapien
ctttgtgcaaatcagggaaaggcacccccgagt

SEQ ID NO: 820331 - DNA, 33 bp, Homo sapien
ccaggaagggacctgcaatcttgccttccaagg

SEQ ID NO: 820332 - DNA, 33 bp, Homo sapien
ccaggaagggacctgctatcttgccttccaagg

SEQ ID NO: 820333 - DNA, 33 bp, Homo sapien
accaattttctccatccagaaccttgggaaccc

SEQ ID NO: 820334 - DNA, 33 bp, Homo sapien
accaattttctccatctagaaccttgggaaccc

SEQ ID NO: 820335 - DNA, 33 bp, Homo sapien
tagagggattatggcacagaaatcctagcccag

SEQ ID NO: 820336 - DNA, 33 bp, Homo sapien
tagagggattatggcagagaaatcctagcccag

SEQ ID NO: 820337 - DNA, 33 bp, Homo sapien
aggactggcctgtgaaagataaagaggtggaat

SEQ ID NO: 820338 - DNA, 33 bp, Homo sapien
aggactggcctgtgaatgataaagaggtggaat

SEQ ID NO: 820339 - DNA, 33 bp, Homo sapien
gtttgagtttcaaatccactcctagttgcaagg

SEQ ID NO: 820340 - DNA, 33 bp, Homo sapien
gtttgagtttcaaatctactcctagttgcaagg

SEQ ID NO: 820341 - DNA, 33 bp, Homo sapien
aaactgtggaaatttgcaacatctaccaaatta

SEQ ID NO: 820342 - DNA, 33 bp, Homo sapien
aaactgtggaaatttggaacatctaccaaatta

SEQ ID NO: 820343 - DNA, 33 bp, Homo sapien
tggcattcttttcccaccctcatcgtaggtata

SEQ ID NO: 820344 - DNA, 33 bp, Homo sapien
tggcattcttttcccatcctcatcgtaggtata

SEQ ID NO: 820345 - DNA, 33 bp, Homo sapien
ggagagtgagaagtgccagggaatatgagaaaa

SEQ ID NO: 820346 - DNA, 33 bp, Homo sapien
ggagagtgagaagtgctagggaatatgagaaaa

SEQ ID NO: 820347 - DNA, 33 bp, Homo sapien
tgtcaattttggaataaaacatacaaatagcaa

SEQ ID NO: 820348 - DNA, 33 bp, Homo sapien
tgtcaattttggaatataacatacaaatagcaa

SEQ ID NO: 820349 - DNA, 33 bp, Homo sapien
tgctggattagacactcaaaagttggttggctt

SEQ ID NO: 820350 - DNA, 33 bp, Homo sapien
tgctggattagacacttaaaagttggttggctt

SEQ ID NO: 820351 - DNA, 33 bp, Homo sapien
atcatgtcctgccagaatatttactccctacaa

SEQ ID NO: 820352 - DNA, 33 bp, Homo sapien
atcatgtcctgccagagtatttactccctacaa

SEQ ID NO: 820353 - DNA, 33 bp, Homo sapien
ttcatgtaaatgccaaatgaatgtaagcataca

SEQ ID NO: 820354 - DNA, 33 bp, Homo sapien
ttcatgtaaatgccaactgaatgtaagcataca

SEQ ID NO: 820355 - DNA, 33 bp, Homo sapien
ctccctatctcctccgcacagaaaccacaataa

SEQ ID NO: 820356 - DNA, 33 bp, Homo sapien
ctccctatctcctccgtacagaaaccacaataa

SEQ ID NO: 820357 - DNA, 33 bp, Homo sapien
tgtggaaaacaatccccgcgagttgtcaatgct

SEQ ID NO: 820358 - DNA, 33 bp, Homo sapien
tgtggaaaacaatccctgcgagttgtcaatgct

SEQ ID NO: 820359 - DNA, 33 bp, Homo sapien
ccatcagattagttagacacagagtttcaccac

SEQ ID NO: 820360 - DNA, 33 bp, Homo sapien
ccatcagattagttagtcacagagtttcaccac

SEQ ID NO: 820361 - DNA, 33 bp, Homo sapien
agctctggcagtctcagagcaggagccagctca

SEQ ID NO: 820362 - DNA, 33 bp, Homo sapien
agctctggcagtctcatagcaggagccagctca

SEQ ID NO: 820363 - DNA, 33 bp, Homo sapien
ggcaaagctttccagaaatggctgagttcccac

SEQ ID NO: 820364 - DNA, 33 bp, Homo sapien
ggcaaagctttccagagatggctgagttcccac

SEQ ID NO: 820365 - DNA, 33 bp, Homo sapien
tctcttccacaccgtaagagaatgccgtgcacc

SEQ ID NO: 820366 - DNA, 33 bp, Homo sapien
tctcttccacaccgtatgagaatgccgtgcacc

SEQ ID NO: 820367 - DNA, 33 bp, Homo sapien
cttcgcttagactctcacatttcactaaagatg

SEQ ID NO: 820368 - DNA, 33 bp, Homo sapien
cttcgcttagactctcgcatttcactaaagatg

SEQ ID NO: 820369 - DNA, 33 bp, Homo sapien
ttttcaataaaccatccctttctgaacccgtgt

SEQ ID NO: 820370 - DNA, 33 bp, Homo sapien
ttttcaataaaccatctctttctgaacccgtgt

SEQ ID NO: 820371 - DNA, 33 bp, Homo sapien
gatcaaatgaatgacacactagttgtactcagt

SEQ ID NO: 820372 - DNA, 33 bp, Homo sapien
gatcaaatgaatgacatactagttgtactcagt

SEQ ID NO: 820373 - DNA, 33 bp, Homo sapien
aagtgttacaggccctcaaaggcggcatggccg

SEQ ID NO: 820374 - DNA, 33 bp, Homo sapien
aagtgttacaggcccttaaaggcggcatggccg

SEQ ID NO: 820375 - DNA, 33 bp, Homo sapien
aaatccagcatgagaaatgtgtaagcgaatttc

SEQ ID NO: 820376 - DNA, 33 bp, Homo sapien
aaatccagcatgagaattgtgtaagcgaatttc

SEQ ID NO: 820377 - DNA, 33 bp, Homo sapien
caaatagctcctaaaactaacttgtggtaagct

SEQ ID NO: 820378 - DNA, 33 bp, Homo sapien
caaatagctcctaaaagtaacttgtggtaagct

SEQ ID NO: 820379 - DNA, 33 bp, Homo sapien
cccagctgtggaaagtaaaagagatcaagtagg

SEQ ID NO: 820380 - DNA, 33 bp, Homo sapien
cccagctgtggaaagttaaagagatcaagtagg

SEQ ID NO: 820381 - DNA, 33 bp, Homo sapien
tgactcttaccagggccgaaaaaagaggtttgc

SEQ ID NO: 820382 - DNA, 33 bp, Homo sapien
tgactcttaccagggctgaaaaaagaggtttgc

SEQ ID NO: 820383 - DNA, 33 bp, Homo sapien
aggtaagagcatgctcaatttactttacatctt

SEQ ID NO: 820384 - DNA, 33 bp, Homo sapien
aggtaagagcatgctccatttactttacatctt

SEQ ID NO: 820385 - DNA, 33 bp, Homo sapien
ttacggcaaagacccacgttggaggcctctcag

SEQ ID NO: 820386 - DNA, 33 bp, Homo sapien
ttacggcaaagacccatgttggaggcctctcag

SEQ ID NO: 820387 - DNA, 33 bp, Homo sapien
tgtgttctttataaatcagggacagcaacctta

SEQ ID NO: 820388 - DNA, 33 bp, Homo sapien
tgtgttctttataaatgagggacagcaacctta

SEQ ID NO: 820389 - DNA, 33 bp, Homo sapien
aggatgacaggagtgacgacatctgctttgaca

SEQ ID NO: 820390 - DNA, 33 bp, Homo sapien
aggatgacaggagtgatgacatctgctttgaca

SEQ ID NO: 820391 - DNA, 33 bp, Homo sapien
gttcatcagtgccaaacgaccttattaatgact

SEQ ID NO: 820392 - DNA, 33 bp, Homo sapien
gttcatcagtgccaaatgaccttattaatgact

SEQ ID NO: 820393 - DNA, 33 bp, Homo sapien
gacgatgacctctttgacaaacagttctcatgt

SEQ ID NO: 820394 - DNA, 33 bp, Homo sapien
gacgatgacctctttggcaaacagttctcatgt

SEQ ID NO: 820395 - DNA, 33 bp, Homo sapien
acccgtgccttctccactgatgacagtctcttg

SEQ ID NO: 820396 - DNA, 33 bp, Homo sapien
acccgtgccttctccattgatgacagtctcttg

SEQ ID NO: 820397 - DNA, 33 bp, Homo sapien
agtgcttgtttttgccaagttctcagctcccga

SEQ ID NO: 820398 - DNA, 33 bp, Homo sapien
agtgcttgtttttgccgagttctcagctcccga

SEQ ID NO: 820399 - DNA, 33 bp, Homo sapien
ataatctcccctgtgacgctacagaacattccc

SEQ ID NO: 820400 - DNA, 33 bp, Homo sapien
ataatctcccctgtgatgctacagaacattccc

SEQ ID NO: 820401 - DNA, 33 bp, Homo sapien
tggattaatgtagctccaaaaagggcttgtggg

SEQ ID NO: 820402 - DNA, 33 bp, Homo sapien
tggattaatgtagctctaaaaagggcttgtggg

SEQ ID NO: 820403 - DNA, 33 bp, Homo sapien
ctggtggtcggaaatccgagatcagggctgcca

SEQ ID NO: 820404 - DNA, 33 bp, Homo sapien
ctggtggtcggaaatctgagatcagggctgcca

SEQ ID NO: 820405 - DNA, 33 bp, Homo sapien
tttagtgctcttataacaatggatactggagag

SEQ ID NO: 820406 - DNA, 33 bp, Homo sapien
tttagtgctcttataagaatggatactggagag

SEQ ID NO: 820407 - DNA, 33 bp, Homo sapien
ccatcttcaatatacagctgtaagctagcaaga

SEQ ID NO: 820408 - DNA, 33 bp, Homo sapien
ccatcttcaatatacatctgtaagctagcaaga

SEQ ID NO: 820409 - DNA, 33 bp, Homo sapien
taagctagcaagaaaacatacagaatgctgcac

SEQ ID NO: 820410 - DNA, 33 bp, Homo sapien
taagctagcaagaaaagatacagaatgctgcac

SEQ ID NO: 820411 - DNA, 33 bp, Homo sapien
gtgatatgttttttagaattcaaatgactgctt

SEQ ID NO: 820412 - DNA, 33 bp, Homo sapien
gtgatatgttttttagcattcaaatgactgctt

SEQ ID NO: 820413 - DNA, 33 bp, Homo sapien
gactaatgtaaaaatacgtatattggcttgaag

SEQ ID NO: 820414 - DNA, 33 bp, Homo sapien
gactaatgtaaaaatatgtatattggcttgaag

SEQ ID NO: 820415 - DNA, 33 bp, Homo sapien
agtgttcttgtatcaaccaggaccgtgtgtgtg

SEQ ID NO: 820416 - DNA, 33 bp, Homo sapien
agtgttcttgtatcaagcaggaccgtgtgtgtg

SEQ ID NO: 820417 - DNA, 33 bp, Homo sapien
cttgattgctctctcagaagggtgatcagatct

SEQ ID NO: 820418 - DNA, 33 bp, Homo sapien
cttgattgctctctcataagggtgatcagatct

SEQ ID NO: 820419 - DNA, 33 bp, Homo sapien
tcagaactagatctcaacaagaataactacata

SEQ ID NO: 820420 - DNA, 33 bp, Homo sapien
tcagaactagatctcagcaagaataactacata

SEQ ID NO: 820421 - DNA, 33 bp, Homo sapien
caaaattaacttgctacatcttgactgagccag

SEQ ID NO: 820422 - DNA, 33 bp, Homo sapien
caaaattaacttgctagatcttgactgagccag

SEQ ID NO: 820423 - DNA, 33 bp, Homo sapien
tttccaaaagcctgcacgaagcctgtatcttct

SEQ ID NO: 820424 - DNA, 33 bp, Homo sapien
tttccaaaagcctgcatgaagcctgtatcttct

SEQ ID NO: 820425 - DNA, 33 bp, Homo sapien
ctctgaggatattgtacagaagttagacaagaa

SEQ ID NO: 820426 - DNA, 33 bp, Homo sapien
ctctgaggatattgtatagaagttagacaagaa

SEQ ID NO: 820427 - DNA, 33 bp, Homo sapien
gattacctgtggaggaacgtcattccaggaaaa

SEQ ID NO: 820428 - DNA, 33 bp, Homo sapien
gattacctgtggaggagcgtcattccaggaaaa

SEQ ID NO: 820429 - DNA, 33 bp, Homo sapien
ccagaggagaacagcacggtgtgagccctcatc

SEQ ID NO: 820430 - DNA, 33 bp, Homo sapien
ccagaggagaacagcagggtgtgagccctcatc

SEQ ID NO: 820431 - DNA, 33 bp, Homo sapien
agctggttgtgaaatacatactgcggttcagcc

SEQ ID NO: 820432 - DNA, 33 bp, Homo sapien
agctggttgtgaaatatatactgcggttcagcc

SEQ ID NO: 820433 - DNA, 33 bp, Homo sapien
gtagtctatccctttcactacaaaaatatccaa

SEQ ID NO: 820434 - DNA, 33 bp, Homo sapien
gtagtctatccctttcgctacaaaaatatccaa

SEQ ID NO: 820435 - DNA, 33 bp, Homo sapien
agctagatgacaaagagccacattcagacttga

SEQ ID NO: 820436 - DNA, 33 bp, Homo sapien
agctagatgacaaagatccacattcagacttga

SEQ ID NO: 820437 - DNA, 33 bp, Homo sapien
ttgatagtggccagagaagtggctcttgttggt

SEQ ID NO: 820438 - DNA, 33 bp, Homo sapien
ttgatagtggccagagcagtggctcttgttggt

SEQ ID NO: 820439 - DNA, 33 bp, Homo sapien
tatttttatacaacaaattcccactcctaacat

SEQ ID NO: 820440 - DNA, 33 bp, Homo sapien
tatttttatacaacaagttcccactcctaacat

SEQ ID NO: 820441 - DNA, 33 bp, Homo sapien
acacacacacatttcaatctccaggagaaactt

SEQ ID NO: 820442 - DNA, 33 bp, Homo sapien
acacacacacatttcagtctccaggagaaactt

SEQ ID NO: 820443 - DNA, 33 bp, Homo sapien
gtgcagacattaccacaatctaattttggaaca

SEQ ID NO: 820444 - DNA, 33 bp, Homo sapien
gtgcagacattaccacgatctaattttggaaca

SEQ ID NO: 820445 - DNA, 33 bp, Homo sapien
gacagaaaccagaaataaaaggccacatagtaa

SEQ ID NO: 820446 - DNA, 33 bp, Homo sapien
gacagaaaccagaaattaaaggccacatagtaa

SEQ ID NO: 820447 - DNA, 33 bp, Homo sapien
tgttctactgttttcaataatgacctggggcct

SEQ ID NO: 820448 - DNA, 33 bp, Homo sapien
tgttctactgttttcagtaatgacctggggcct

SEQ ID NO: 820449 - DNA, 33 bp, Homo sapien
tgagacgatgccattgcaatttaacccagggaa

SEQ ID NO: 820450 - DNA, 33 bp, Homo sapien
tgagacgatgccattgtaatttaacccagggaa

SEQ ID NO: 820451 - DNA, 33 bp, Homo sapien
cagcaaagagagggaccataaaccaagaaacat

SEQ ID NO: 820452 - DNA, 33 bp, Homo sapien
cagcaaagagagggacgataaaccaagaaacat

SEQ ID NO: 820453 - DNA, 33 bp, Homo sapien
gactaaattaatatcaaactgaggtgagccagt

SEQ ID NO: 820454 - DNA, 33 bp, Homo sapien
gactaaattaatatcatactgaggtgagccagt

SEQ ID NO: 820455 - DNA, 33 bp, Homo sapien
aaacgagattctacatcaagtgtgacaaacatc

SEQ ID NO: 820456 - DNA, 33 bp, Homo sapien
aaacgagattctacatgaagtgtgacaaacatc

SEQ ID NO: 820457 - DNA, 33 bp, Homo sapien
tgccaatacaggaaacagaagtcatcctcattg

SEQ ID NO: 820458 - DNA, 33 bp, Homo sapien
tgccaatacaggaaacggaagtcatcctcattg

SEQ ID NO: 820459 - DNA, 33 bp, Homo sapien
gttctaggagagtaaggctctttgttttattca

SEQ ID NO: 820460 - DNA, 33 bp, Homo sapien
gttctaggagagtaagtctctttgttttattca

SEQ ID NO: 820461 - DNA, 33 bp, Homo sapien
atcactttcatcactaagtaaatcaaagccatc

SEQ ID NO: 820462 - DNA, 33 bp, Homo sapien
atcactttcatcactacgtaaatcaaagccatc

SEQ ID NO: 820463 - DNA, 33 bp, Homo sapien
cttgacaaagacattgaacccgagatctaacta

SEQ ID NO: 820464 - DNA, 33 bp, Homo sapien
cttgacaaagacattggacccgagatctaacta

SEQ ID NO: 820465 - DNA, 33 bp, Homo sapien
tcagtaatctggggcaaggattccgaaacaaga

SEQ ID NO: 820466 - DNA, 33 bp, Homo sapien
tcagtaatctggggcagggattccgaaacaaga

SEQ ID NO: 820467 - DNA, 33 bp, Homo sapien
agacacgctccagggacgtttctataaagtggc

SEQ ID NO: 820468 - DNA, 33 bp, Homo sapien
agacacgctccagggaggtttctataaagtggc

SEQ ID NO: 820469 - DNA, 33 bp, Homo sapien
ctggtgacacatcacaaggaatgtttaaagtgc

SEQ ID NO: 820470 - DNA, 33 bp, Homo sapien
ctggtgacacatcacagggaatgtttaaagtgc

SEQ ID NO: 820471 - DNA, 33 bp, Homo sapien
ctggccagggaacctcaaatctttagtctctta

SEQ ID NO: 820472 - DNA, 33 bp, Homo sapien
ctggccagggaacctcgaatctttagtctctta

SEQ ID NO: 820473 - DNA, 33 bp, Homo sapien
caatagagtgtgcagtcaattcctttcatttga

SEQ ID NO: 820474 - DNA, 33 bp, Homo sapien
caatagagtgtgcagtgaattcctttcatttga

SEQ ID NO: 820475 - DNA, 33 bp, Homo sapien
tttctttgctactctaaagcttcttaataaact

SEQ ID NO: 820476 - DNA, 33 bp, Homo sapien
tttctttgctactctacagcttcttaataaact

SEQ ID NO: 820477 - DNA, 33 bp, Homo sapien
agactaacagtaatggaaccaacaggccatagt

SEQ ID NO: 820478 - DNA, 33 bp, Homo sapien
agactaacagtaatgggaccaacaggccatagt

SEQ ID NO: 820479 - DNA, 33 bp, Homo sapien
accctcaggcaaagaacggaaactcctcagatg

SEQ ID NO: 820480 - DNA, 33 bp, Homo sapien
accctcaggcaaagaatggaaactcctcagatg

SEQ ID NO: 820481 - DNA, 33 bp, Homo sapien
tcaaccctgtgatctacgtctctgaagcatgtc

SEQ ID NO: 820482 - DNA, 33 bp, Homo sapien
tcaaccctgtgatctaggtctctgaagcatgtc

SEQ ID NO: 820483 - DNA, 33 bp, Homo sapien
tactgctcctagaagcccaagcactttcattta

SEQ ID NO: 820484 - DNA, 33 bp, Homo sapien
tactgctcctagaagcgcaagcactttcattta

SEQ ID NO: 820485 - DNA, 33 bp, Homo sapien
cagtctgggtcagtcaccaggtatttctttcac

SEQ ID NO: 820486 - DNA, 33 bp, Homo sapien
cagtctgggtcagtcatcaggtatttctttcac

SEQ ID NO: 820487 - DNA, 33 bp, Homo sapien
tgggaatagtgtgtagaatggaattggacagga

SEQ ID NO: 820488 - DNA, 33 bp, Homo sapien
tgggaatagtgtgtaggatggaattggacagga

SEQ ID NO: 820489 - DNA, 33 bp, Homo sapien
tgggggtaagcataaaaatggacaggactggaa

SEQ ID NO: 820490 - DNA, 33 bp, Homo sapien
tgggggtaagcataaacatggacaggactggaa

SEQ ID NO: 820491 - DNA, 33 bp, Homo sapien
cctttttcacagtttgcagtaaattttcgtggt

SEQ ID NO: 820492 - DNA, 33 bp, Homo sapien
cctttttcacagtttggagtaaattttcgtggt

SEQ ID NO: 820493 - DNA, 33 bp, Homo sapien
aacattttgcacagggccaagtcagaaaacatg

SEQ ID NO: 820494 - DNA, 33 bp, Homo sapien
aacattttgcacagggtcaagtcagaaaacatg

SEQ ID NO: 820495 - DNA, 33 bp, Homo sapien
tagcataatatcgaaaatgaaaaattgaaattg

SEQ ID NO: 820496 - DNA, 33 bp, Homo sapien
tagcataatatcgaaactgaaaaattgaaattg

SEQ ID NO: 820497 - DNA, 33 bp, Homo sapien
tgcacagcctgttgcactatttgtctttaggaa

SEQ ID NO: 820498 - DNA, 33 bp, Homo sapien
tgcacagcctgttgcattatttgtctttaggaa

SEQ ID NO: 820499 - DNA, 33 bp, Homo sapien
attagtccaaccacttcaagagagtctgaacta

SEQ ID NO: 820500 - DNA, 33 bp, Homo sapien
attagtccaaccactttaagagagtctgaacta

SEQ ID NO: 820501 - DNA, 33 bp, Homo sapien
tgttgaaactaggaaacgaaaataatctcatac

SEQ ID NO: 820502 - DNA, 33 bp, Homo sapien
tgttgaaactaggaaatgaaaataatctcatac

SEQ ID NO: 820503 - DNA, 33 bp, Homo sapien
tactcagaatagataaatgctgccaacttgcag

SEQ ID NO: 820504 - DNA, 33 bp, Homo sapien
tactcagaatagataagtgctgccaacttgcag

SEQ ID NO: 820505 - DNA, 33 bp, Homo sapien
aagaggaaggaaattccatccaataaatgctat

SEQ ID NO: 820506 - DNA, 33 bp, Homo sapien
aagaggaaggaaattctatccaataaatgctat

SEQ ID NO: 820507 - DNA, 33 bp, Homo sapien
tgcctggtacataccacgtgtttaatacctagt

SEQ ID NO: 820508 - DNA, 33 bp, Homo sapien
tgcctggtacataccatgtgtttaatacctagt

SEQ ID NO: 820509 - DNA, 33 bp, Homo sapien
ttaagtatggattccaacattgaaagtaatcta

SEQ ID NO: 820510 - DNA, 33 bp, Homo sapien
ttaagtatggattccagcattgaaagtaatcta

SEQ ID NO: 820511 - DNA, 33 bp, Homo sapien
ttacatgatgttgcctaaattcaagtaaacagg

SEQ ID NO: 820512 - DNA, 33 bp, Homo sapien
ttacatgatgttgcctgaattcaagtaaacagg

SEQ ID NO: 820513 - DNA, 33 bp, Homo sapien
tccctattttcgatatcacactagttcaggctc

SEQ ID NO: 820514 - DNA, 33 bp, Homo sapien
tccctattttcgatattacactagttcaggctc

SEQ ID NO: 820515 - DNA, 33 bp, Homo sapien
ggctcttacaattttacgttcatccatcaaaca

SEQ ID NO: 820516 - DNA, 33 bp, Homo sapien
ggctcttacaattttatgttcatccatcaaaca

SEQ ID NO: 820517 - DNA, 33 bp, Homo sapien
tctaacattgatcaataacgaattcctaagcat

SEQ ID NO: 820518 - DNA, 33 bp, Homo sapien
tctaacattgatcaatgacgaattcctaagcat

SEQ ID NO: 820519 - DNA, 33 bp, Homo sapien
ccttcaaagaaattaacgtctggtggaaaacta

SEQ ID NO: 820520 - DNA, 33 bp, Homo sapien
ccttcaaagaaattaatgtctggtggaaaacta

SEQ ID NO: 820521 - DNA, 33 bp, Homo sapien
aaaccatcatcctagaatatcagaccaaaagtg

SEQ ID NO: 820522 - DNA, 33 bp, Homo sapien
aaaccatcatcctagagtatcagaccaaaagtg

SEQ ID NO: 820523 - DNA, 33 bp, Homo sapien
tattgtgacagtgtagaacttgtcagctagtgg

SEQ ID NO: 820524 - DNA, 33 bp, Homo sapien
tattgtgacagtgtaggacttgtcagctagtgg

SEQ ID NO: 820525 - DNA, 33 bp, Homo sapien
gggcacaggggatatacagaaattctactttct

SEQ ID NO: 820526 - DNA, 33 bp, Homo sapien
gggcacaggggatatatagaaattctactttct

SEQ ID NO: 820527 - DNA, 33 bp, Homo sapien
actattacctgatttacggtttgctatgtgtgt

SEQ ID NO: 820528 - DNA, 33 bp, Homo sapien
actattacctgatttatggtttgctatgtgtgt

SEQ ID NO: 820529 - DNA, 33 bp, Homo sapien
ttacataagggattgcagatttgattgaaccaa

SEQ ID NO: 820530 - DNA, 33 bp, Homo sapien
ttacataagggattgcggatttgattgaaccaa

SEQ ID NO: 820531 - DNA, 33 bp, Homo sapien
aaagttacagagctaaaaattcagagaaaagcg

SEQ ID NO: 820532 - DNA, 33 bp, Homo sapien
aaagttacagagctaacaattcagagaaaagcg

SEQ ID NO: 820533 - DNA, 33 bp, Homo sapien
ccatgtccgttcaacaatgtactgtcagctggg

SEQ ID NO: 820534 - DNA, 33 bp, Homo sapien
ccatgtccgttcaacagtgtactgtcagctggg

SEQ ID NO: 820535 - DNA, 33 bp, Homo sapien
ctaatagctaagcaatcacttcacattaaaata

SEQ ID NO: 820536 - DNA, 33 bp, Homo sapien
ctaatagctaagcaatgacttcacattaaaata

SEQ ID NO: 820537 - DNA, 33 bp, Homo sapien
cttttagaatacacacaagttcatgcagctgtt

SEQ ID NO: 820538 - DNA, 33 bp, Homo sapien
cttttagaatacacacgagttcatgcagctgtt

SEQ ID NO: 820539 - DNA, 33 bp, Homo sapien
atgtagcttattgacaaattgtaacaagaattt

SEQ ID NO: 820540 - DNA, 33 bp, Homo sapien
atgtagcttattgacagattgtaacaagaattt

SEQ ID NO: 820541 - DNA, 33 bp, Homo sapien
ttccaggattggtgcacactttaaatctatcag

SEQ ID NO: 820542 - DNA, 33 bp, Homo sapien
ttccaggattggtgcatactttaaatctatcag

SEQ ID NO: 820543 - DNA, 33 bp, Homo sapien
aactgcttgggcttagaagttggaggttacagt

SEQ ID NO: 820544 - DNA, 33 bp, Homo sapien
aactgcttgggcttaggagttggaggttacagt

SEQ ID NO: 820545 - DNA, 33 bp, Homo sapien
agactgcctaaggctaaagtgttatgctgcttt

SEQ ID NO: 820546 - DNA, 33 bp, Homo sapien
agactgcctaaggctatagtgttatgctgcttt

SEQ ID NO: 820547 - DNA, 33 bp, Homo sapien
taagtagttttaggtacagcattggtatttgct

SEQ ID NO: 820548 - DNA, 33 bp, Homo sapien
taagtagttttaggtatagcattggtatttgct

SEQ ID NO: 820549 - DNA, 33 bp, Homo sapien
ggcgtgctggttcagacctttgtgcctttgcta

SEQ ID NO: 820550 - DNA, 33 bp, Homo sapien
ggcgtgctggttcagagctttgtgcctttgcta

SEQ ID NO: 820551 - DNA, 33 bp, Homo sapien
tttaaaggctagacaaagtaatgaaatttttaa

SEQ ID NO: 820552 - DNA, 33 bp, Homo sapien
tttaaaggctagacaacgtaatgaaatttttaa

SEQ ID NO: 820553 - DNA, 33 bp, Homo sapien; identical to SEQ ID NO: 820551

SEQ ID NO: 820554 - DNA, 33 bp, Homo sapien; identical to SEQ ID NO: 820552

SEQ ID NO: 820555 - DNA, 33 bp, Homo sapien
gaagaaaaattaaggacgccataatgacatcta

SEQ ID NO: 820556 - DNA, 33 bp, Homo sapien
gaagaaaaattaaggatgccataatgacatcta

SEQ ID NO: 820557 - DNA, 33 bp, Homo sapien
ccactttagatagttaggcagtctaacaaaatt

SEQ ID NO: 820558 - DNA, 33 bp, Homo sapien
ccactttagatagttatgcagtctaacaaaatt

SEQ ID NO: 820559 - DNA, 33 bp, Homo sapien
aaaactggagacatgaatacaaaatatttggct

SEQ ID NO: 820560 - DNA, 33 bp, Homo sapien
aaaactggagacatgattacaaaatatttggct

SEQ ID NO: 820561 - DNA, 33 bp, Homo sapien
gctggtcatttaacccacacatgattatatgag

SEQ ID NO: 820562 - DNA, 33 bp, Homo sapien
gctggtcatttaacccgcacatgattatatgag

SEQ ID NO: 820563 - DNA, 33 bp, Homo sapien
taaattccaacttgcaatgacctgtttcccaca

SEQ ID NO: 820564 - DNA, 33 bp, Homo sapien
taaattccaacttgcagtgacctgtttcccaca

SEQ ID NO: 820565 - DNA, 33 bp, Homo sapien
taccactttggattaacgggactgattgtatgg

SEQ ID NO: 820566 - DNA, 33 bp, Homo sapien
taccactttggattaatgggactgattgtatgg

SEQ ID NO: 820567 - DNA, 33 bp, Homo sapien
gaaacacaacatgcaaaagattgtgaaatatgt

SEQ ID NO: 820568 - DNA, 33 bp, Homo sapien
gaaacacaacatgcaacagattgtgaaatatgt

SEQ ID NO: 820569 - DNA, 33 bp, Homo sapien
aatcgatgtaagtgaacgaacaagatttgtgca

SEQ ID NO: 820570 - DNA, 33 bp, Homo sapien
aatcgatgtaagtgaatgaacaagatttgtgca

SEQ ID NO: 820571 - DNA, 33 bp, Homo sapien
actgcctcctaatgccggaaggaggaaacccta

SEQ ID NO: 820572 - DNA, 33 bp, Homo sapien
actgcctcctaatgcctgaaggaggaaacccta

SEQ ID NO: 820573 - DNA, 33 bp, Homo sapien
aagaaagtgattgagacgttgtaaatgaataat

SEQ ID NO: 820574 - DNA, 33 bp, Homo sapien
aagaaagtgattgagatgttgtaaatgaataat

SEQ ID NO: 820575 - DNA, 33 bp, Homo sapien
tggatgacaaatctcacaaggactctaagggat

SEQ ID NO: 820576 - DNA, 33 bp, Homo sapien
tggatgacaaatctcagaaggactctaagggat

SEQ ID NO: 820577 - DNA, 33 bp, Homo sapien
atttagcaagctcttacgttaattacaagggag

SEQ ID NO: 820578 - DNA, 33 bp, Homo sapien
atttagcaagctcttaggttaattacaagggag

SEQ ID NO: 820579 - DNA, 33 bp, Homo sapien
tactcttcatgaaccacctagagagccacactg

SEQ ID NO: 820580 - DNA, 33 bp, Homo sapien
tactcttcatgaaccagctagagagccacactg

SEQ ID NO: 820581 - DNA, 33 bp, Homo sapien
ctaccatgcaattgtaactgtaccgctggccat

SEQ ID NO: 820582 - DNA, 33 bp, Homo sapien
ctaccatgcaattgtagctgtaccgctggccat

SEQ ID NO: 820583 - DNA, 33 bp, Homo sapien
atttatcctgacagcccggcaaaattgcttgaa

SEQ ID NO: 820584 - DNA, 33 bp, Homo sapien
atttatcctgacagcctggcaaaattgcttgaa

SEQ ID NO: 820585 - DNA, 33 bp, Homo sapien
tgcttacacagcacacaagtggagtagcaaatc

SEQ ID NO: 820586 - DNA, 33 bp, Homo sapien
tgcttacacagcacacgagtggagtagcaaatc

SEQ ID NO: 820587 - DNA, 33 bp, Homo sapien
agatgtgaaccagtcacgtcacagaaagtgttt

SEQ ID NO: 820588 - DNA, 33 bp, Homo sapien
agatgtgaaccagtcatgtcacagaaagtgttt

SEQ ID NO: 820589 - DNA, 33 bp, Homo sapien
ccggtctagctcttaaatgaataaaacagattt

SEQ ID NO: 820590 - DNA, 33 bp, Homo sapien
ccggtctagctcttaagtgaataaaacagattt

SEQ ID NO: 820591 - DNA, 33 bp, Homo sapien
actaccagttttactaaagccgaatgacaattg

SEQ ID NO: 820592 - DNA, 33 bp, Homo sapien
actaccagttttactacagccgaatgacaattg

SEQ ID NO: 820593 - DNA, 33 bp, Homo sapien
aggaacttgcctgctacggaagcaaatcctgct

SEQ ID NO: 820594 - DNA, 33 bp, Homo sapien
aggaacttgcctgctatggaagcaaatcctgct

SEQ ID NO: 820595 - DNA, 33 bp, Homo sapien; identical to SEQ ID NO: 820593

SEQ ID NO: 820596 - DNA, 33 bp, Homo sapien; identical to SEQ ID NO: 820594

SEQ ID NO: 820597 - DNA, 33 bp, Homo sapien
ttaaatctgcaaatcaccttgggtagtattaat

SEQ ID NO: 820598 - DNA, 33 bp, Homo sapien
ttaaatctgcaaatcatcttgggtagtattaat

SEQ ID NO: 820599 - DNA, 33 bp, Homo sapien
ttgagtttgctgttgaactcctctaataaaatt

SEQ ID NO: 820600 - DNA, 33 bp, Homo sapien
ttgagtttgctgttgatctcctctaataaaatt

SEQ ID NO: 820601 - DNA, 33 bp, Homo sapien
taagtttcccagattacgagaaataaacacaat

SEQ ID NO: 820602 - DNA, 33 bp, Homo sapien
taagtttcccagattatgagaaataaacacaat

SEQ ID NO: 820603 - DNA, 33 bp, Homo sapien
tcagagctgtagtgaaatatcatcattgtaatt

SEQ ID NO: 820604 - DNA, 33 bp, Homo sapien
tcagagctgtagtgaagtatcatcattgtaatt

SEQ ID NO: 820605 - DNA, 33 bp, Homo sapien
gggattgtgacaagaccagaagctgagctatag

SEQ ID NO: 820606 - DNA, 33 bp, Homo sapien
gggattgtgacaagactagaagctgagctatag

SEQ ID NO: 820607 - DNA, 33 bp, Homo sapien
tcatccataaaggaaccgagtggcctccaaact

SEQ ID NO: 820608 - DNA, 33 bp, Homo sapien
tcatccataaaggaactgagtggcctccaaact

SEQ ID NO: 820609 - DNA, 33 bp, Homo sapien
gatgagtttgaacaaacagagagttacatagcc

SEQ ID NO: 820610 - DNA, 33 bp, Homo sapien
gatgagtttgaacaaatagagagttacatagcc

SEQ ID NO: 820611 - DNA, 33 bp, Homo sapien
agttccaattgctccacatcctcactaaaccta

SEQ ID NO: 820612 - DNA, 33 bp, Homo sapien
agttccaattgctccatatcctcactaaaccta

SEQ ID NO: 820613 - DNA, 33 bp, Homo sapien
aatcaagacaaatgacagattgaggaaacaatt

SEQ ID NO: 820614 - DNA, 33 bp, Homo sapien
aatcaagacaaatgacggattgaggaaacaatt

SEQ ID NO: 820615 - DNA, 33 bp, Homo sapien
ccaaagcagcatgactaaagcatgggcaagaca

SEQ ID NO: 820616 - DNA, 33 bp, Homo sapien
ccaaagcagcatgactgaagcatgggcaagaca

SEQ ID NO: 820617 - DNA, 33 bp, Homo sapien
acaaaattatcttgcactgaggcagaggaattt

SEQ ID NO: 820618 - DNA, 33 bp, Homo sapien
acaaaattatcttgcattgaggcagaggaattt

SEQ ID NO: 820619 - DNA, 33 bp, Homo sapien
cagatgggcttttggaatatgctgtgggttttc

SEQ ID NO: 820620 - DNA, 33 bp, Homo sapien
cagatgggcttttggactatgctgtgggttttc

SEQ ID NO: 820621 - DNA, 33 bp, Homo sapien
gagtctgagattctctcaacccaaagaacatca

SEQ ID NO: 820622 - DNA, 33 bp, Homo sapien
gagtctgagattctctgaacccaaagaacatca

SEQ ID NO: 820623 - DNA, 33 bp, Homo sapien
gagcatgaattaagaccatgcagagggatgtga

SEQ ID NO: 820624 - DNA, 33 bp, Homo sapien
gagcatgaattaagacgatgcagagggatgtga

SEQ ID NO: 820625 - DNA, 33 bp, Homo sapien
gcatccgtggttcgtaagcaggtggtatcctta

SEQ ID NO: 820626 - DNA, 33 bp, Homo sapien
gcatccgtggttcgtaggcaggtggtatcctta

SEQ ID NO: 820627 - DNA, 33 bp, Homo sapien
caaatacacaaactacaaaaaataaggattgac

SEQ ID NO: 820628 - DNA, 33 bp, Homo sapien
caaatacacaaactacgaaaaataaggattgac

SEQ ID NO: 820629 - DNA, 33 bp, Homo sapien
tgaaaactaggagtcaaagttgtacacctacat

SEQ ID NO: 820630 - DNA, 33 bp, Homo sapien
tgaaaactaggagtcagagttgtacacctacat

SEQ ID NO: 820631 - DNA, 33 bp, Homo sapien
gcgtctcccaggcataccagacagcacaggggg

SEQ ID NO: 820632 - DNA, 33 bp, Homo sapien
gcgtctcccaggcatatcagacagcacaggggg

SEQ ID NO: 820633 - DNA, 33 bp, Homo sapien
atggtacatatggaaacagcagaatgtgactct

SEQ ID NO: 820634 - DNA, 33 bp, Homo sapien
atggtacatatggaaatagcagaatgtgactct

SEQ ID NO: 820635 - DNA, 33 bp, Homo sapien
tgtggcagtgtgccaacctgaacgctcactttt

SEQ ID NO: 820636 - DNA, 33 bp, Homo sapien
tgtggcagtgtgccaatctgaacgctcactttt

SEQ ID NO: 820637 - DNA, 33 bp, Homo sapien
cttggagcgggacggcaaagttcaaggacaact

SEQ ID NO: 820638 - DNA, 33 bp, Homo sapien
cttggagcgggacggcgaagttcaaggacaact

SEQ ID NO: 820639 - DNA, 33 bp, Homo sapien
ctgcagattttgcccactgacttgtgcagcagc

SEQ ID NO: 820640 - DNA, 33 bp, Homo sapien
ctgcagattttgcccattgacttgtgcagcagc

SEQ ID NO: 820641 - DNA, 33 bp, Homo sapien
cagcatttttgaaggccgagactggagggtcac

SEQ ID NO: 820642 - DNA, 33 bp, Homo sapien
cagcatttttgaaggcggagactggagggtcac

SEQ ID NO: 820643 - DNA, 33 bp, Homo sapien
gtcttttcttcaaggactacaaaatactttaca

SEQ ID NO: 820644 - DNA, 33 bp, Homo sapien
gtcttttcttcaaggattacaaaatactttaca

SEQ ID NO: 820645 - DNA, 33 bp, Homo sapien
gcaaaatggaaatttgaaatcatcttcttattt

SEQ ID NO: 820646 - DNA, 33 bp, Homo sapien
gcaaaatggaaatttgcaatcatcttcttattt

SEQ ID NO: 820647 - DNA, 33 bp, Homo sapien
atggaacacacgaaaaacaatgattgtcagtca

SEQ ID NO: 820648 - DNA, 33 bp, Homo sapien
atggaacacacgaaaatcaatgattgtcagtca

SEQ ID NO: 820649 - DNA, 33 bp, Homo sapien
agagaaacgggagaaacggtagtcacccagcct

SEQ ID NO: 820650 - DNA, 33 bp, Homo sapien
agagaaacgggagaaatggtagtcacccagcct

SEQ ID NO: 820651 - DNA, 33 bp, Homo sapien
caggcacaatcatagcacctaccaattcttcag

SEQ ID NO: 820652 - DNA, 33 bp, Homo sapien
caggcacaatcatagcgcctaccaattcttcag

SEQ ID NO: 820653 - DNA, 33 bp, Homo sapien
gctggctgtcttcatcaccactcgtcattgcca

SEQ ID NO: 820654 - DNA, 33 bp, Homo sapien
gctggctgtcttcatcgccactcgtcattgcca

SEQ ID NO: 820655 - DNA, 33 bp, Homo sapien
cactcctgagccagaaagaccacaaacccaccg

SEQ ID NO: 820656 - DNA, 33 bp, Homo sapien
cactcctgagccagaacgaccacaaacccaccg

SEQ ID NO: 820657 - DNA, 33 bp, Homo sapien; identical to SEQ ID NO: 820655

SEQ ID NO: 820658 - DNA, 33 bp, Homo sapien; identical to SEQ ID NO: 820656

SEQ ID NO: 820659 - DNA, 33 bp, Homo sapien
gatgactgcttgtgtacgcttttggatgttgct

SEQ ID NO: 820660 - DNA, 33 bp, Homo sapien
gatgactgcttgtgtatgcttttggatgttgct

SEQ ID NO: 820661 - DNA, 33 bp, Homo sapien
tttcaagctttaacagaagaagggtgtttctat

SEQ ID NO: 820662 - DNA, 33 bp, Homo sapien
tttcaagctttaacagcagaagggtgtttctat

SEQ ID NO: 820663 - DNA, 33 bp, Homo sapien
agggagagtaacttcacgtaactggagtggctt

SEQ ID NO: 820664 - DNA, 33 bp, Homo sapien
agggagagtaacttcatgtaactggagtggctt

SEQ ID NO: 820665 - DNA, 33 bp, Homo sapien
ctcctactgaatagtacgcacatctcaagtaga

SEQ ID NO: 820666 - DNA, 33 bp, Homo sapien
ctcctactgaatagtatgcacatctcaagtaga

SEQ ID NO: 820667 - DNA, 33 bp, Homo sapien
cttgtggttttcaccacaccttacaccacaaac

SEQ ID NO: 820668 - DNA, 33 bp, Homo sapien
cttgtggttttcaccataccttacaccacaaac

SEQ ID NO: 820669 - DNA, 33 bp, Homo sapien
caatttgtatgtgtaaactccaagttttttaac

SEQ ID NO: 820670 - DNA, 33 bp, Homo sapien
caatttgtatgtgtaacctccaagttttttaac

SEQ ID NO: 820671 - DNA, 33 bp, Homo sapien
aggccatctgcctttccagattccacgtctgtg

SEQ ID NO: 820672 - DNA, 33 bp, Homo sapien
aggccatctgcctttctagattccacgtctgtg

SEQ ID NO: 820673 - DNA, 33 bp, Homo sapien
ctctgataggggaaaaagttcactgtttcaact

SEQ ID NO: 820674 - DNA, 33 bp, Homo sapien
ctctgataggggaaaatgttcactgtttcaact

SEQ ID NO: 820675 - DNA, 33 bp, Homo sapien
aaaaaccctcagcaaaatagaattaaaaggaaa

SEQ ID NO: 820676 - DNA, 33 bp, Homo sapien
aaaaaccctcagcaaagtagaattaaaaggaaa

SEQ ID NO: 820677 - DNA, 33 bp, Homo sapien
ttcccatggaatatagacctctagtgagctgat

SEQ ID NO: 820678 - DNA, 33 bp, Homo sapien
ttcccatggaatatagtcctctagtgagctgat

SEQ ID NO: 820679 - DNA, 33 bp, Homo sapien
tagtatgtgagacgacaaatatattaattaact

SEQ ID NO: 820680 - DNA, 33 bp, Homo sapien
tagtatgtgagacgacgaatatattaattaact

SEQ ID NO: 820681 - DNA, 33 bp, Homo sapien
ttcagagcattagatacaaagaggccttaaaag

SEQ ID NO: 820682 - DNA, 33 bp, Homo sapien
ttcagagcattagatagaaagaggccttaaaag

SEQ ID NO: 820683 - DNA, 33 bp, Homo sapien
aacattgtaagccaaaatatgggtaaatacaat

SEQ ID NO: 820684 - DNA, 33 bp, Homo sapien
aacattgtaagccaaattatgggtaaatacaat

SEQ ID NO: 820685 - DNA, 33 bp, Homo sapien
tttatgcaggattttgcaggtttaagcaggaag

SEQ ID NO: 820686 - DNA, 33 bp, Homo sapien
tttatgcaggattttggaggtttaagcaggaag

SEQ ID NO: 820687 - DNA, 33 bp, Homo sapien
aggaacctgagataacagagccagtttgtttag

SEQ ID NO: 820688 - DNA, 33 bp, Homo sapien
aggaacctgagataactgagccagtttgtttag

SEQ ID NO: 820689 - DNA, 33 bp, Homo sapien
agtgagttagggcaacaagtagcctcagctgcc

SEQ ID NO: 820690 - DNA, 33 bp, Homo sapien
agtgagttagggcaacgagtagcctcagctgcc

SEQ ID NO: 820691 - DNA, 33 bp, Homo sapien
gaaagtcaagaagtaacaaatgtgggccaggca

SEQ ID NO: 820692 - DNA, 33 bp, Homo sapien
gaaagtcaagaagtaagaaatgtgggccaggca

SEQ ID NO: 820693 - DNA, 33 bp, Homo sapien
accatccactctcagaacccatgccaaattcca

SEQ ID NO: 820694 - DNA, 33 bp, Homo sapien
accatccactctcagagcccatgccaaattcca

SEQ ID NO: 820695 - DNA, 33 bp, Homo sapien
tccatcctgccaaataaggactgactattctat

SEQ ID NO: 820696 - DNA, 33 bp, Homo sapien
tccatcctgccaaatagggactgactattctat

SEQ ID NO: 820697 - DNA, 33 bp, Homo sapien
ggccttgggaatggcccatgatctgaattatta

SEQ ID NO: 820698 - DNA, 33 bp, Homo sapien
ggccttgggaatggcctatgatctgaattatta

SEQ ID NO: 820699 - DNA, 33 bp, Homo sapien
tctttttttaacaagcacctatacagttcttac

SEQ ID NO: 820700 - DNA, 33 bp, Homo sapien
tctttttttaacaagcgcctatacagttcttac

SEQ ID NO: 820701 - DNA, 33 bp, Homo sapien
aatagatgtatatctacggaaagatttattata

SEQ ID NO: 820702 - DNA, 33 bp, Homo sapien
aatagatgtatatctagggaaagatttattata

SEQ ID NO: 820703 - DNA, 33 bp, Homo sapien
cctccaggccccataaacagtgaggctggcttg

SEQ ID NO: 820704 - DNA, 33 bp, Homo sapien
cctccaggccccataagcagtgaggctggcttg

SEQ ID NO: 820705 - DNA, 33 bp, Homo sapien
gtgtgaccttcaaccaatgccttacacactggg

SEQ ID NO: 820706 - DNA, 33 bp, Homo sapien
gtgtgaccttcaaccagtgccttacacactggg

SEQ ID NO: 820707 - DNA, 33 bp, Homo sapien
aaatctacactaaccaagacagtgcagtactgc

SEQ ID NO: 820708 - DNA, 33 bp, Homo sapien
aaatctacactaaccaggacagtgcagtactgc

SEQ ID NO: 820709 - DNA, 33 bp, Homo sapien
agtattgccatgttaacgttattgtcttctaga

SEQ ID NO: 820710 - DNA, 33 bp, Homo sapien
agtattgccatgttaatgttattgtcttctaga

SEQ ID NO: 820711 - DNA, 33 bp, Homo sapien
acaaatcactgatttcaacagttactcaacttc

SEQ ID NO: 820712 - DNA, 33 bp, Homo sapien
acaaatcactgatttcgacagttactcaacttc

SEQ ID NO: 820713 - DNA, 33 bp, Homo sapien
atttgtacttccctcccattctcaaaagaaagt

SEQ ID NO: 820714 - DNA, 33 bp, Homo sapien
atttgtacttccctcctattctcaaaagaaagt

SEQ ID NO: 820715 - DNA, 33 bp, Homo sapien
cccctgctaaggaaaaatggagaattgtaggat

SEQ ID NO: 820716 - DNA, 33 bp, Homo sapien
cccctgctaaggaaaagtggagaattgtaggat

SEQ ID NO: 820717 - DNA, 33 bp, Homo sapien
gaaaggagggtggccaataaagggtgcattgtt

SEQ ID NO: 820718 - DNA, 33 bp, Homo sapien
gaaaggagggtggccagtaaagggtgcattgtt

SEQ ID NO: 820719 - DNA, 33 bp, Homo sapien
aaagaaactacaaaaaattgatatgcctggatt

SEQ ID NO: 820720 - DNA, 33 bp, Homo sapien
aaagaaactacaaaaacttgatatgcctggatt

SEQ ID NO: 820721 - DNA, 33 bp, Homo sapien
actgtctggctcccccaccagattctttaacca

SEQ ID NO: 820722 - DNA, 33 bp, Homo sapien
actgtctggctccccctccagattctttaacca

SEQ ID NO: 820723 - DNA, 33 bp, Homo sapien
cctgctagccaaggaacgtcaaagcttgccagc

SEQ ID NO: 820724 - DNA, 33 bp, Homo sapien
cctgctagccaaggaatgtcaaagcttgccagc

SEQ ID NO: 820725 - DNA, 33 bp, Homo sapien
acatcactaggtgatacgaggttttcagctcca

SEQ ID NO: 820726 - DNA, 33 bp, Homo sapien
acatcactaggtgataggaggttttcagctcca

SEQ ID NO: 820727 - DNA, 33 bp, Homo sapien
tcttggaggcttcctacgaaacagagcaaaggg

SEQ ID NO: 820728 - DNA, 33 bp, Homo sapien
tcttggaggcttcctatgaaacagagcaaaggg

SEQ ID NO: 820729 - DNA, 33 bp, Homo sapien
caaattattacacacaatcacagctggaagagt

SEQ ID NO: 820730 - DNA, 33 bp, Homo sapien
caaattattacacacagtcacagctggaagagt

SEQ ID NO: 820731 - DNA, 33 bp, Homo sapien
gattggaagaccagtaagagagaactagatgaa

SEQ ID NO: 820732 - DNA, 33 bp, Homo sapien
gattggaagaccagtaggagagaactagatgaa

SEQ ID NO: 820733 - DNA, 33 bp, Homo sapien
gagaactagatgaactaaatgaaaagatgctcc

SEQ ID NO: 820734 - DNA, 33 bp, Homo sapien
gagaactagatgaactgaatgaaaagatgctcc

SEQ ID NO: 820735 - DNA, 33 bp, Homo sapien
cagagtcctaaagaaacgaaaatgtacaaaatg

SEQ ID NO: 820736 - DNA, 33 bp, Homo sapien
cagagtcctaaagaaatgaaaatgtacaaaatg

SEQ ID NO: 820737 - DNA, 33 bp, Homo sapien
gaacaggaaatagcagcaaacgtcacctacaag

SEQ ID NO: 820738 - DNA, 33 bp, Homo sapien
gaacaggaaatagcaggaaacgtcacctacaag

SEQ ID NO: 820739 - DNA, 33 bp, Homo sapien
ttttaattcttccaataagtcgaaacatttgaa

SEQ ID NO: 820740 - DNA, 33 bp, Homo sapien
ttttaattcttccaatcagtcgaaacatttgaa

SEQ ID NO: 820741 - DNA, 33 bp, Homo sapien
attccaggaacactgaatactgaaatcaaagaa

SEQ ID NO: 820742 - DNA, 33 bp, Homo sapien
attccaggaacactgagtactgaaatcaaagaa

SEQ ID NO: 820743 - DNA, 33 bp, Homo sapien
agttcaaggacatagacacagttgcaggtaggc

SEQ ID NO: 820744 - DNA, 33 bp, Homo sapien
agttcaaggacatagatacagttgcaggtaggc

SEQ ID NO: 820745 - DNA, 33 bp, Homo sapien
gaatgtgctctttgtcactctctggccattggc

SEQ ID NO: 820746 - DNA, 33 bp, Homo sapien
gaatgtgctctttgtcgctctctggccattggc

SEQ ID NO: 820747 - DNA, 33 bp, Homo sapien
acaatagtaggtgccacaagtaaggctcagagg

SEQ ID NO: 820748 - DNA, 33 bp, Homo sapien
acaatagtaggtgccataagtaaggctcagagg

SEQ ID NO: 820749 - DNA, 33 bp, Homo sapien
ggcttcctgacctctacgtcagtgttctttcct

SEQ ID NO: 820750 - DNA, 33 bp, Homo sapien
ggcttcctgacctctatgtcagtgttctttcct

SEQ ID NO: 820751 - DNA, 33 bp, Homo sapien
gaggatgtgacaaaaaagttcatcaaactttgc

SEQ ID NO: 820752 - DNA, 33 bp, Homo sapien
gaggatgtgacaaaaacgttcatcaaactttgc

SEQ ID NO: 820753 - DNA, 33 bp, Homo sapien
ctctgatggtttcctcactacagtcccagaacg

SEQ ID NO: 820754 - DNA, 33 bp, Homo sapien
ctctgatggtttcctccctacagtcccagaacg

SEQ ID NO: 820755 - DNA, 33 bp, Homo sapien
tgcaagaccaagctgcactgaccgatggagata

SEQ ID NO: 820756 - DNA, 33 bp, Homo sapien
tgcaagaccaagctgcgctgaccgatggagata

SEQ ID NO: 820757 - DNA, 33 bp, Homo sapien
ttttggaggcaaatgtcaatgtaatgcttcagt

SEQ ID NO: 820758 - DNA, 33 bp, Homo sapien
ttttggaggcaaatgttaatgtaatgcttcagt

SEQ ID NO: 820759 - DNA, 33 bp, Homo sapien
acaataatcataaaccacatcgagatatttaca

SEQ ID NO: 820760 - DNA, 33 bp, Homo sapien
acaataatcataaaccgcatcgagatatttaca

SEQ ID NO: 820761 - DNA, 33 bp, Homo sapien
aatgtttttacatcttaaacacgtaaatcttca

SEQ ID NO: 820762 - DNA, 33 bp, Homo sapien
aatgtttttacatcttcaacacgtaaatcttca

SEQ ID NO: 820763 - DNA, 33 bp, Homo sapien
tcaactatcagagtccaactcggtgggtttacc

SEQ ID NO: 820764 - DNA, 33 bp, Homo sapien
tcaactatcagagtccgactcggtgggtttacc

SEQ ID NO: 820765 - DNA, 33 bp, Homo sapien
cctgaggagacatcacagaactatcatagctct

SEQ ID NO: 820766 - DNA, 33 bp, Homo sapien
cctgaggagacatcacggaactatcatagctct

SEQ ID NO: 820767 - DNA, 33 bp, Homo sapien
aagggacagtaacgaacaggaacaggtactggg

SEQ ID NO: 820768 - DNA, 33 bp, Homo sapien
aagggacagtaacgaagaggaacaggtactggg

SEQ ID NO: 820769 - DNA, 33 bp, Homo sapien
ctcttaaaaggctaaaggcaccccgttggagag

SEQ ID NO: 820770 - DNA, 33 bp, Homo sapien
ctcttaaaaggctaaatgcaccccgttggagag

SEQ ID NO: 820771 - DNA, 33 bp, Homo sapien
atgtcaccatataactaaaactggacttcagac

SEQ ID NO: 820772 - DNA, 33 bp, Homo sapien
atgtcaccatataactgaaactggacttcagac

SEQ ID NO: 820773 - DNA, 33 bp, Homo sapien
ttggggatagaagaatcaagtgtattctcctca

SEQ ID NO: 820774 - DNA, 33 bp, Homo sapien
ttggggatagaagaattaagtgtattctcctca

SEQ ID NO: 820775 - DNA, 33 bp, Homo sapien
atgaaataggagaaacaatgtgtgagacacaca

SEQ ID NO: 820776 - DNA, 33 bp, Homo sapien
atgaaataggagaaacgatgtgtgagacacaca

SEQ ID NO: 820777 - DNA, 33 bp, Homo sapien
agagcccactcactaccagcctaagtacccttc

SEQ ID NO: 820778 - DNA, 33 bp, Homo sapien
agagcccactcactacgagcctaagtacccttc

SEQ ID NO: 820779 - DNA, 33 bp, Homo sapien
ccaagagtgcctattaccctaagaggacaggtt

SEQ ID NO: 820780 - DNA, 33 bp, Homo sapien
ccaagagtgcctattatcctaagaggacaggtt

SEQ ID NO: 820781 - DNA, 33 bp, Homo sapien
gcatctcagtttcttcacatggaaaacaggact

SEQ ID NO: 820782 - DNA, 33 bp, Homo sapien
gcatctcagtttcttcgcatggaaaacaggact

SEQ ID NO: 820783 - DNA, 33 bp, Homo sapien
tttctgaacattgctccctggaagccaaagttt

SEQ ID NO: 820784 - DNA, 33 bp, Homo sapien
tttctgaacattgctcgctggaagccaaagttt

SEQ ID NO: 820785 - DNA, 33 bp, Homo sapien
tgttccttcagtcctacgcttcagccctgggtg

SEQ ID NO: 820786 - DNA, 33 bp, Homo sapien
tgttccttcagtcctatgcttcagccctgggtg

SEQ ID NO: 820787 - DNA, 33 bp, Homo sapien
ctagagtaagcagacacagaaaaatagaacgat

SEQ ID NO: 820788 - DNA, 33 bp, Homo sapien
ctagagtaagcagacatagaaaaatagaacgat

SEQ ID NO: 820789 - DNA, 33 bp, Homo sapien
aatgaccaaaggcaagaatgtcgatgttgttca

SEQ ID NO: 820790 - DNA, 33 bp, Homo sapien
aatgaccaaaggcaaggatgtcgatgttgttca

SEQ ID NO: 820791 - DNA, 33 bp, Homo sapien
atgcagacaagattacagagaaaagaatgcaaa

SEQ ID NO: 820792 - DNA, 33 bp, Homo sapien
atgcagacaagattacggagaaaagaatgcaaa

SEQ ID NO: 820793 - DNA, 33 bp, Homo sapien
atatgcagctatgtagaagttcccaatagatgg

SEQ ID NO: 820794 - DNA, 33 bp, Homo sapien
atatgcagctatgtaggagttcccaatagatgg

SEQ ID NO: 820795 - DNA, 33 bp, Homo sapien
aatttctataaatgccaatgactcttgattcca

SEQ ID NO: 820796 - DNA, 33 bp, Homo sapien
aatttctataaatgccgatgactcttgattcca

SEQ ID NO: 820797 - DNA, 33 bp, Homo sapien
gggcccttgtgaaccccctctgaaaggtctgtc

SEQ ID NO: 820798 - DNA, 33 bp, Homo sapien
gggcccttgtgaaccctctctgaaaggtctgtc

SEQ ID NO: 820799 - DNA, 33 bp, Homo sapien
cgacagtctttcccaacaacaggagattgaaat

SEQ ID NO: 820800 - DNA, 33 bp, Homo sapien
cgacagtctttcccaataacaggagattgaaat

SEQ ID NO: 820801 - DNA, 33 bp, Homo sapien
atgcacatcctgtcaaagtcctgtagtggttgt

SEQ ID NO: 820802 - DNA, 33 bp, Homo sapien
atgcacatcctgtcaaggtcctgtagtggttgt

SEQ ID NO: 820803 - DNA, 33 bp, Homo sapien
tgcccattgttctaccaaatatgttcagattgt

SEQ ID NO: 820804 - DNA, 33 bp, Homo sapien
tgcccattgttctaccgaatatgttcagattgt

SEQ ID NO: 820805 - DNA, 33 bp, Homo sapien
tatgtcagccagagacaaatacaaacatcatga

SEQ ID NO: 820806 - DNA, 33 bp, Homo sapien
tatgtcagccagagacgaatacaaacatcatga

SEQ ID NO: 820807 - DNA, 33 bp, Homo sapien
gactccatttattccacaaagcctcaccccgca

SEQ ID NO: 820808 - DNA, 33 bp, Homo sapien
gactccatttattccagaaagcctcaccccgca

SEQ ID NO: 820809 - DNA, 33 bp, Homo sapien
caggctgacagagataccgcctactgtcattct

SEQ ID NO: 820810 - DNA, 33 bp, Homo sapien
caggctgacagagatatcgcctactgtcattct

SEQ ID NO: 820811 - DNA, 33 bp, Homo sapien
caaatgctaaatggaaaatccactttccagtag

SEQ ID NO: 820812 - DNA, 33 bp, Homo sapien
caaatgctaaatggaatatccactttccagtag

SEQ ID NO: 820813 - DNA, 33 bp, Homo sapien
aaaaaagtcagtctccaaagattacatactgac

SEQ ID NO: 820814 - DNA, 33 bp, Homo sapien
aaaaaagtcagtctccgaagattacatactgac

SEQ ID NO: 820815 - DNA, 33 bp, Homo sapien
tgtatatttaagttcaggatccatgttgagtta

SEQ ID NO: 820816 - DNA, 33 bp, Homo sapien
tgtatatttaagttcatgatccatgttgagtta

SEQ ID NO: 820817 - DNA, 33 bp, Homo sapien
tagcattgccatttagcaacagattatgtggtt

SEQ ID NO: 820818 - DNA, 33 bp, Homo sapien
tagcattgccatttagtaacagattatgtggtt

SEQ ID NO: 820819 - DNA, 33 bp, Homo sapien
gcagcagaggctaataaagactgaagtcagcat

SEQ ID NO: 820820 - DNA, 33 bp, Homo sapien
gcagcagaggctaatacagactgaagtcagcat

SEQ ID NO: 820821 - DNA, 33 bp, Homo sapien
cccaattctcatttaaactcttgtccgcttctg

SEQ ID NO: 820822 - DNA, 33 bp, Homo sapien
cccaattctcatttaacctcttgtccgcttctg

SEQ ID NO: 820823 - DNA, 33 bp, Homo sapien
gcgtctgctgcccggcacaggcttctcagcgag

SEQ ID NO: 820824 - DNA, 33 bp, Homo sapien
gcgtctgctgcccggcgcaggcttctcagcgag

SEQ ID NO: 820825 - DNA, 33 bp, Homo sapien
tcttgtggtaagaggacgagaaatgctacttca

SEQ ID NO: 820826 - DNA, 33 bp, Homo sapien
tcttgtggtaagaggatgagaaatgctacttca

SEQ ID NO: 820827 - DNA, 33 bp, Homo sapien
gctgtagcaactaagaagatctttaaggggtga

SEQ ID NO: 820828 - DNA, 33 bp, Homo sapien
gctgtagcaactaagaggatctttaaggggtga

SEQ ID NO: 820829 - DNA, 33 bp, Homo sapien
agctaaagctatgccccaaatgctgtcaggcta

SEQ ID NO: 820830 - DNA, 33 bp, Homo sapien
agctaaagctatgcccgaaatgctgtcaggcta

SEQ ID NO: 820831 - DNA, 33 bp, Homo sapien
acctgtaattcttccaatgatatttcctattct

SEQ ID NO: 820832 - DNA, 33 bp, Homo sapien
acctgtaattcttccagtgatatttcctattct

SEQ ID NO: 820833 - DNA, 33 bp, Homo sapien
tcaaaacatcaacaaaaatatctatagccaatg

SEQ ID NO: 820834 - DNA, 33 bp, Homo sapien
tcaaaacatcaacaaagatatctatagccaatg

SEQ ID NO: 820835 - DNA, 33 bp, Homo sapien
aggtgtgtcacagaacagcagagaaccaggtat

SEQ ID NO: 820836 - DNA, 33 bp, Homo sapien
aggtgtgtcacagaacggcagagaaccaggtat

SEQ ID NO: 820837 - DNA, 33 bp, Homo sapien
tatttgtttgctagagccgccataacaaagtac

SEQ ID NO: 820838 - DNA, 33 bp, Homo sapien
tatttgtttgctagaggcgccataacaaagtac

SEQ ID NO: 820839 - DNA, 33 bp, Homo sapien
tcattcttactgacatcacactaatgtttgttc

SEQ ID NO: 820840 - DNA, 33 bp, Homo sapien
tcattcttactgacatgacactaatgtttgttc

SEQ ID NO: 820841 - DNA, 33 bp, Homo sapien
cagatagcaccttgctcaaagatttctccagtg

SEQ ID NO: 820842 - DNA, 33 bp, Homo sapien
cagatagcaccttgctgaaagatttctccagtg

SEQ ID NO: 820843 - DNA, 33 bp, Homo sapien
aattgtttttccagataaggtggtagtttctgt

SEQ ID NO: 820844 - DNA, 33 bp, Homo sapien
aattgtttttccagatgaggtggtagtttctgt

SEQ ID NO: 820845 - DNA, 33 bp, Homo sapien
cacaacaaaactaggaaagaatctgaagaggga

SEQ ID NO: 820846 - DNA, 33 bp, Homo sapien
cacaacaaaactaggagagaatctgaagaggga

SEQ ID NO: 820847 - DNA, 33 bp, Homo sapien
gcattcataactggggaagtgaaataaagtact

SEQ ID NO: 820848 - DNA, 33 bp, Homo sapien
gcattcataactgggggagtgaaataaagtact

SEQ ID NO: 820849 - DNA, 33 bp, Homo sapien
aagaccacccaaaactcaagaggaatgacacag

SEQ ID NO: 820850 - DNA, 33 bp, Homo sapien
aagaccacccaaaactgaagaggaatgacacag

SEQ ID NO: 820851 - DNA, 33 bp, Homo sapien
gaatgcacaagaactacggaaagctatgggggc

SEQ ID NO: 820852 - DNA, 33 bp, Homo sapien
gaatgcacaagaactatggaaagctatgggggc

SEQ ID NO: 820853 - DNA, 33 bp, Homo sapien
atgttagtgagaatcacgggcttcctgtcacaa

SEQ ID NO: 820854 - DNA, 33 bp, Homo sapien
atgttagtgagaatcatgggcttcctgtcacaa

SEQ ID NO: 820855 - DNA, 33 bp, Homo sapien
gaagctaccgaaaaaacggacctcctcttgact

SEQ ID NO: 820856 - DNA, 33 bp, Homo sapien
gaagctaccgaaaaaatggacctcctcttgact

SEQ ID NO: 820857 - DNA, 33 bp, Homo sapien
ttcttagatttcgttcccaggcctttgctttga

SEQ ID NO: 820858 - DNA, 33 bp, Homo sapien
ttcttagatttcgttcgcaggcctttgctttga

SEQ ID NO: 820859 - DNA, 33 bp, Homo sapien
ctggcttggttgaggaccttgacagtcaagaga

SEQ ID NO: 820860 - DNA, 33 bp, Homo sapien
ctggcttggttgaggatcttgacagtcaagaga

SEQ ID NO: 820861 - DNA, 33 bp, Homo sapien
ataagagcctcattcactaatcatttctactca

SEQ ID NO: 820862 - DNA, 33 bp, Homo sapien
ataagagcctcattcattaatcatttctactca

SEQ ID NO: 820863 - DNA, 33 bp, Homo sapien
ccgggagcagcagtgacgtattatttggtctct

SEQ ID NO: 820864 - DNA, 33 bp, Homo sapien
ccgggagcagcagtgaggtattatttggtctct

SEQ ID NO: 820865 - DNA, 33 bp, Homo sapien
agagaggttgaaaggacgggaaagcttcaagac

SEQ ID NO: 820866 - DNA, 33 bp, Homo sapien
agagaggttgaaaggatgggaaagcttcaagac

SEQ ID NO: 820867 - DNA, 33 bp, Homo sapien
tagaactagatgccagaatcccagagcagacac

SEQ ID NO: 820868 - DNA, 33 bp, Homo sapien
tagaactagatgccaggatcccagagcagacac

SEQ ID NO: 820869 - DNA, 33 bp, Homo sapien
ggactcatttgaaattaaagaccattctctggg

SEQ ID NO: 820870 - DNA, 33 bp, Homo sapien
ggactcatttgaaattgaagaccattctctggg

SEQ ID NO: 820871 - DNA, 33 bp, Homo sapien
atgacagagggacagacggaaagtcctccgtga

SEQ ID NO: 820872 - DNA, 33 bp, Homo sapien
atgacagagggacagatggaaagtcctccgtga

SEQ ID NO: 820873 - DNA, 33 bp, Homo sapien
agattgaacaaaattacgtgtacagagtttggc

SEQ ID NO: 820874 - DNA, 33 bp, Homo sapien
agattgaacaaaattatgtgtacagagtttggc

SEQ ID NO: 820875 - DNA, 33 bp, Homo sapien
aaaatctgcttagttgaatgttggattgttgct

SEQ ID NO: 820876 - DNA, 33 bp, Homo sapien
aaaatctgcttagttgtatgttggattgttgct

SEQ ID NO: 820877 - DNA, 33 bp, Homo sapien
agtatactggatgacacgtctacgcagatgcag

SEQ ID NO: 820878 - DNA, 33 bp, Homo sapien
agtatactggatgacatgtctacgcagatgcag

SEQ ID NO: 820879 - DNA, 33 bp, Homo sapien
aattggtgtgtttgccaaaatattttatccaat

SEQ ID NO: 820880 - DNA, 33 bp, Homo sapien
aattggtgtgtttgccgaaatattttatccaat

SEQ ID NO: 820881 - DNA, 33 bp, Homo sapien
gccataaacttttccactatctccaaaagtgtc

SEQ ID NO: 820882 - DNA, 33 bp, Homo sapien
gccataaacttttccattatctccaaaagtgtc

SEQ ID NO: 820883 - DNA, 33 bp, Homo sapien
gtttcagtgtgcaaaagaagtaaattctggaaa

SEQ ID NO: 820884 - DNA, 33 bp, Homo sapien
gtttcagtgtgcaaaataagtaaattctggaaa

SEQ ID NO: 820885 - DNA, 33 bp, Homo sapien
acgttcctgttccaaacgggtgaaatggggcga

SEQ ID NO: 820886 - DNA, 33 bp, Homo sapien
acgttcctgttccaaatgggtgaaatggggcga

SEQ ID NO: 820887 - DNA, 33 bp, Homo sapien
tggggagagagatgccaagaagaagcctggagc

SEQ ID NO: 820888 - DNA, 33 bp, Homo sapien
tggggagagagatgccgagaagaagcctggagc

SEQ ID NO: 820889 - DNA, 33 bp, Homo sapien
gctgctgctgagctccaaacgtcaatgaatgac

SEQ ID NO: 820890 - DNA, 33 bp, Homo sapien
gctgctgctgagctccgaacgtcaatgaatgac

SEQ ID NO: 820891 - DNA, 33 bp, Homo sapien
ggtattatggatgtcaatagttatttcaaagct

SEQ ID NO: 820892 - DNA, 33 bp, Homo sapien
ggtattatggatgtcagtagttatttcaaagct

SEQ ID NO: 820893 - DNA, 33 bp, Homo sapien
aagagagagaagacaacggcacaaacagaaaat

SEQ ID NO: 820894 - DNA, 33 bp, Homo sapien
aagagagagaagacaatggcacaaacagaaaat

SEQ ID NO: 820895 - DNA, 33 bp, Homo sapien
agactactcttccccacgatcatagtgccaaaa

SEQ ID NO: 820896 - DNA, 33 bp, Homo sapien
agactactcttccccatgatcatagtgccaaaa

SEQ ID NO: 820897 - DNA, 33 bp, Homo sapien
ttacaaatagtggaaactaaataatacagtcct

SEQ ID NO: 820898 - DNA, 33 bp, Homo sapien
ttacaaatagtggaaattaaataatacagtcct

SEQ ID NO: 820899 - DNA, 33 bp, Homo sapien
ataatttgtccatgaaatgattttatatgtaac

SEQ ID NO: 820900 - DNA, 33 bp, Homo sapien
ataatttgtccatgaattgattttatatgtaac

SEQ ID NO: 820901 - DNA, 33 bp, Homo sapien
caaaacccagtctaagcccagccgtgccgactt

SEQ ID NO: 820902 - DNA, 33 bp, Homo sapien
caaaacccagtctaagtccagccgtgccgactt

SEQ ID NO: 820903 - DNA, 33 bp, Homo sapien
aagaatagctgtgcaccgtcaaacatactaaga

SEQ ID NO: 820904 - DNA, 33 bp, Homo sapien
aagaatagctgtgcactgtcaaacatactaaga

SEQ ID NO: 820905 - DNA, 33 bp, Homo sapien
gctggcaggagtcgacactggtatgatctttct

SEQ ID NO: 820906 - DNA, 33 bp, Homo sapien
gctggcaggagtcgaccctggtatgatctttct

SEQ ID NO: 820907 - DNA, 33 bp, Homo sapien
catgggccttggaaaccgagtgatcatggtgac

SEQ ID NO: 820908 - DNA, 33 bp, Homo sapien
catgggccttggaaactgagtgatcatggtgac

SEQ ID NO: 820909 - DNA, 33 bp, Homo sapien
aaaacagggattcacaaagccactaggtgacct

SEQ ID NO: 820910 - DNA, 33 bp, Homo sapien
aaaacagggattcacagagccactaggtgacct

SEQ ID NO: 820911 - DNA, 33 bp, Homo sapien
tctggctcatcatttacgggggaaatcagttca

SEQ ID NO: 820912 - DNA, 33 bp, Homo sapien
tctggctcatcatttatgggggaaatcagttca

SEQ ID NO: 820913 - DNA, 33 bp, Homo sapien
aatacgcagctggttaagagcagagctgggaat

SEQ ID NO: 820914 - DNA, 33 bp, Homo sapien
aatacgcagctggttaggagcagagctgggaat

SEQ ID NO: 820915 - DNA, 33 bp, Homo sapien
ggaccaggtgaggagcaaggctacaggtaacgg

SEQ ID NO: 820916 - DNA, 33 bp, Homo sapien
ggaccaggtgaggagcgaggctacaggtaacgg

SEQ ID NO: 820917 - DNA, 33 bp, Homo sapien
ttgctgcaactctgccaggcagaacggctttct

SEQ ID NO: 820918 - DNA, 33 bp, Homo sapien
ttgctgcaactctgccgggcagaacggctttct

SEQ ID NO: 820919 - DNA, 33 bp, Homo sapien
aatacaaaggttagcactgaaagccaaaaaccg

SEQ ID NO: 820920 - DNA, 33 bp, Homo sapien
aatacaaaggttagcattgaaagccaaaaaccg

SEQ ID NO: 820921 - DNA, 33 bp, Homo sapien
attgatggcttagaaactccatgttgtggtgag

SEQ ID NO: 820922 - DNA, 33 bp, Homo sapien
attgatggcttagaaattccatgttgtggtgag

SEQ ID NO: 820923 - DNA, 33 bp, Homo sapien
gctactttatacagcacgttgattgtcaaggaa

SEQ ID NO: 820924 - DNA, 33 bp, Homo sapien
gctactttatacagcatgttgattgtcaaggaa

SEQ ID NO: 820925 - DNA, 33 bp, Homo sapien
taaggagtcagtgcgacatcccagtagagatga

SEQ ID NO: 820926 - DNA, 33 bp, Homo sapien
taaggagtcagtgcgatatcccagtagagatga

SEQ ID NO: 820927 - DNA, 33 bp, Homo sapien
aaacatcatttttgaccaggtgcagtgacttat

SEQ ID NO: 820928 - DNA, 33 bp, Homo sapien
aaacatcatttttgactaggtgcagtgacttat

SEQ ID NO: 820929 - DNA, 33 bp, Homo sapien
aaggaatgtgattcaaccttaaaaaggaaggac

SEQ ID NO: 820930 - DNA, 33 bp, Homo sapien
aaggaatgtgattcaatcttaaaaaggaaggac

SEQ ID NO: 820931 - DNA, 33 bp, Homo sapien
tggaatatggcattccccaaaaaaattaaacgt

SEQ ID NO: 820932 - DNA, 33 bp, Homo sapien
tggaatatggcattcctcaaaaaaattaaacgt

SEQ ID NO: 820933 - DNA, 33 bp, Homo sapien
ttccgacttgctgtcaaattgctctaggatcca

SEQ ID NO: 820934 - DNA, 33 bp, Homo sapien
ttccgacttgctgtcagattgctctaggatcca

SEQ ID NO: 820935 - DNA, 33 bp, Homo sapien
aaagaagtgtttcttgaaggtctccagtgcacc

SEQ ID NO: 820936 - DNA, 33 bp, Homo sapien
aaagaagtgtttcttgcaggtctccagtgcacc

SEQ ID NO: 820937 - DNA, 33 bp, Homo sapien
tgtgtatgtgttcaaacatatcaaatagttgaa

SEQ ID NO: 820938 - DNA, 33 bp, Homo sapien
tgtgtatgtgttcaaagatatcaaatagttgaa

SEQ ID NO: 820939 - DNA, 33 bp, Homo sapien
agtggttcccacagaaagattacagatgcatgg

SEQ ID NO: 820940 - DNA, 33 bp, Homo sapien
agtggttcccacagaaggattacagatgcatgg

SEQ ID NO: 820941 - DNA, 33 bp, Homo sapien
tcacaatagcaccttgcaaccagaaaaggcaca

SEQ ID NO: 820942 - DNA, 33 bp, Homo sapien
tcacaatagcaccttgtaaccagaaaaggcaca

SEQ ID NO: 820943 - DNA, 33 bp, Homo sapien
accttcttctcaagtacagtttagtggaaagag

SEQ ID NO: 820944 - DNA, 33 bp, Homo sapien
accttcttctcaagtatagtttagtggaaagag

SEQ ID NO: 820945 - DNA, 33 bp, Homo sapien
gcagaaatgaaatctacgggcggacagcccggt

SEQ ID NO: 820946 - DNA, 33 bp, Homo sapien
gcagaaatgaaatctatgggcggacagcccggt

SEQ ID NO: 820947 - DNA, 33 bp, Homo sapien
aagaaacttaaccagaggaataagtgtttggaa

SEQ ID NO: 820948 - DNA, 33 bp, Homo sapien
aagaaacttaaccagatgaataagtgtttggaa

SEQ ID NO: 820949 - DNA, 33 bp, Homo sapien
caacttccaggccagacggggttcaggggtgtc

SEQ ID NO: 820950 - DNA, 33 bp, Homo sapien
caacttccaggccagatggggttcaggggtgtc

SEQ ID NO: 820951 - DNA, 33 bp, Homo sapien
tgcattgcagaagggcacatccaatgagaggcg

SEQ ID NO: 820952 - DNA, 33 bp, Homo sapien
tgcattgcagaagggcgcatccaatgagaggcg

SEQ ID NO: 820953 - DNA, 33 bp, Homo sapien
tttcccagattaccaacaaggcagtgaatcttt

SEQ ID NO: 820954 - DNA, 33 bp, Homo sapien
tttcccagattaccaataaggcagtgaatcttt

SEQ ID NO: 820955 - DNA, 33 bp, Homo sapien
tttaggtggaaaaaatcatactggcaaaggtgt

SEQ ID NO: 820956 - DNA, 33 bp, Homo sapien
tttaggtggaaaaaatgatactggcaaaggtgt

SEQ ID NO: 820957 - DNA, 33 bp, Homo sapien
ctgggatgatacaccacgtaggaaaaaatcatt

SEQ ID NO: 820958 - DNA, 33 bp, Homo sapien
ctgggatgatacaccatgtaggaaaaaatcatt

SEQ ID NO: 820959 - DNA, 33 bp, Homo sapien
gttgggtatctggccccattcgaggttgctttg

SEQ ID NO: 820960 - DNA, 33 bp, Homo sapien
gttgggtatctggccctattcgaggttgctttg

SEQ ID NO: 820961 - DNA, 33 bp, Homo sapien
caaaatcctgatttaaaagccttcagagtcagg

SEQ ID NO: 820962 - DNA, 33 bp, Homo sapien
caaaatcctgatttaagagccttcagagtcagg

SEQ ID NO: 820963 - DNA, 33 bp, Homo sapien
gctcagagcccaggtacgttgggaaggggccac

SEQ ID NO: 820964 - DNA, 33 bp, Homo sapien
gctcagagcccaggtatgttgggaaggggccac

SEQ ID NO: 820965 - DNA, 33 bp, Homo sapien
gatttctcatagctcaccagtgacctcctcatc

SEQ ID NO: 820966 - DNA, 33 bp, Homo sapien
gatttctcatagctcatcagtgacctcctcatc

SEQ ID NO: 820967 - DNA, 33 bp, Homo sapien
gtcacccccttgtcacaattcctccaaaagtag

SEQ ID NO: 820968 - DNA, 33 bp, Homo sapien
gtcacccccttgtcacgattcctccaaaagtag

SEQ ID NO: 820969 - DNA, 33 bp, Homo sapien
atctccattcactacacaccacctggcaactgg

SEQ ID NO: 820970 - DNA, 33 bp, Homo sapien
atctccattcactacataccacctggcaactgg

SEQ ID NO: 820971 - DNA, 33 bp, Homo sapien
tagtcctgacttaggaactgtggcaagaggtgg

SEQ ID NO: 820972 - DNA, 33 bp, Homo sapien
tagtcctgacttaggagctgtggcaagaggtgg

SEQ ID NO: 820973 - DNA, 33 bp, Homo sapien
acgtttgtgcagaaaacgacctcaactgagtgg

SEQ ID NO: 820974 - DNA, 33 bp, Homo sapien
acgtttgtgcagaaaatgacctcaactgagtgg

SEQ ID NO: 820975 - DNA, 33 bp, Homo sapien
tgaggattccaaacaacttgtttccttgggttc

SEQ ID NO: 820976 - DNA, 33 bp, Homo sapien
tgaggattccaaacaatttgtttccttgggttc

SEQ ID NO: 820977 - DNA, 33 bp, Homo sapien
gtagatgctgggaaacaccagtgaactagtgat

SEQ ID NO: 820978 - DNA, 33 bp, Homo sapien
gtagatgctgggaaacgccagtgaactagtgat

SEQ ID NO: 820979 - DNA, 33 bp, Homo sapien
gacccagaaagaaagaagcactcacctagcatt

SEQ ID NO: 820980 - DNA, 33 bp, Homo sapien
gacccagaaagaaagatgcactcacctagcatt

SEQ ID NO: 820981 - DNA, 33 bp, Homo sapien
attgatttgaaatgcaactttatttggatctgt

SEQ ID NO: 820982 - DNA, 33 bp, Homo sapien
attgatttgaaatgcagctttatttggatctgt

SEQ ID NO: 820983 - DNA, 33 bp, Homo sapien
gtctccagtttttcatcacaaacagtgctgcaa

SEQ ID NO: 820984 - DNA, 33 bp, Homo sapien
gtctccagtttttcattacaaacagtgctgcaa

SEQ ID NO: 820985 - DNA, 33 bp, Homo sapien
tgatataatcaagagaatactacacagatatga

SEQ ID NO: 820986 - DNA, 33 bp, Homo sapien
tgatataatcaagagactactacacagatatga

SEQ ID NO: 820987 - DNA, 33 bp, Homo sapien
aaagaaaatacaggaaacagttgacacagagtt

SEQ ID NO: 820988 - DNA, 33 bp, Homo sapien
aaagaaaatacaggaagcagttgacacagagtt

SEQ ID NO: 820989 - DNA, 33 bp, Homo sapien
ttcacagctttggaataacacactaccagtatc

SEQ ID NO: 820990 - DNA, 33 bp, Homo sapien
ttcacagctttggaatcacacactaccagtatc

SEQ ID NO: 820991 - DNA, 33 bp, Homo sapien
tgcttatttcaaccacagggatttagaaaggga

SEQ ID NO: 820992 - DNA, 33 bp, Homo sapien
tgcttatttcaaccacggggatttagaaaggga

SEQ ID NO: 820993 - DNA, 33 bp, Homo sapien
attcccactagccagaagtaatatcatttatag

SEQ ID NO: 820994 - DNA, 33 bp, Homo sapien
attcccactagccagaggtaatatcatttatag

SEQ ID NO: 820995 - DNA, 33 bp, Homo sapien
gagtcattttgaattaaaatcagatactctgcc

SEQ ID NO: 820996 - DNA, 33 bp, Homo sapien
gagtcattttgaattagaatcagatactctgcc

SEQ ID NO: 820997 - DNA, 33 bp, Homo sapien
cattattaatcgcaaacctcaccaactaacctt

SEQ ID NO: 820998 - DNA, 33 bp, Homo sapien
cattattaatcgcaaatctcaccaactaacctt

SEQ ID NO: 820999 - DNA, 33 bp, Homo sapien
aaatcgaccatgatccaaatgcttttcaattca

SEQ ID NO: 821000 - DNA, 33 bp, Homo sapien
aaatcgaccatgatccgaatgcttttcaattca

SEQ ID NO: 821001 - DNA, 33 bp, Homo sapien
agttattcattccttacggctcctgatctgctt

SEQ ID NO: 821002 - DNA, 33 bp, Homo sapien
agttattcattccttatggctcctgatctgctt

SEQ ID NO: 821003 - DNA, 33 bp, Homo sapien
gaggggacagatgcagaactcaaactagcacag

SEQ ID NO: 821004 - DNA, 33 bp, Homo sapien
gaggggacagatgcaggactcaaactagcacag

SEQ ID NO: 821005 - DNA, 33 bp, Homo sapien
ggagttgtagacaacaaataaatgcagtgaaac

SEQ ID NO: 821006 - DNA, 33 bp, Homo sapien
ggagttgtagacaacagataaatgcagtgaaac

SEQ ID NO: 821007 - DNA, 33 bp, Homo sapien
tgctgagcatcgttacagaatgagcaaaggaat

SEQ ID NO: 821008 - DNA, 33 bp, Homo sapien
tgctgagcatcgttacggaatgagcaaaggaat

SEQ ID NO: 821009 - DNA, 33 bp, Homo sapien
aagcaatggagtattcacactagtcaggatagc

SEQ ID NO: 821010 - DNA, 33 bp, Homo sapien
aagcaatggagtattcgcactagtcaggatagc

SEQ ID NO: 821011 - DNA, 33 bp, Homo sapien
ttcttacagtattaaaaggtgctagtgtattaa

SEQ ID NO: 821012 - DNA, 33 bp, Homo sapien
ttcttacagtattaaagggtgctagtgtattaa

SEQ ID NO: 821013 - DNA, 33 bp, Homo sapien
acacgtgttttcatataacatacagctattgca

SEQ ID NO: 821014 - DNA, 33 bp, Homo sapien
acacgtgttttcatattacatacagctattgca

SEQ ID NO: 821015 - DNA, 33 bp, Homo sapien
ggcattttagtcgtcacagctggggcagagggc

SEQ ID NO: 821016 - DNA, 33 bp, Homo sapien
ggcattttagtcgtcatagctggggcagagggc

SEQ ID NO: 821017 - DNA, 33 bp, Homo sapien
attgctggcataggagaaaaataagcagacaca

SEQ ID NO: 821018 - DNA, 33 bp, Homo sapien
attgctggcataggagcaaaataagcagacaca

SEQ ID NO: 821019 - DNA, 33 bp, Homo sapien
ttggaacaggatttaaaatgtagtttctcataa

SEQ ID NO: 821020 - DNA, 33 bp, Homo sapien
ttggaacaggatttaagatgtagtttctcataa

SEQ ID NO: 821021 - DNA, 33 bp, Homo sapien
gaaatgataatacaacacataggactgtagtga

SEQ ID NO: 821022 - DNA, 33 bp, Homo sapien
gaaatgataatacaacgcataggactgtagtga

SEQ ID NO: 821023 - DNA, 33 bp, Homo sapien
aaatatcccaacatgactatgaatttgtctaag

SEQ ID NO: 821024 - DNA, 33 bp, Homo sapien
aaatatcccaacatgattatgaatttgtctaag

SEQ ID NO: 821025 - DNA, 33 bp, Homo sapien
aaagtgtggttccccaaactagcagcaacggca

SEQ ID NO: 821026 - DNA, 33 bp, Homo sapien
aaagtgtggttccccagactagcagcaacggca

SEQ ID NO: 821027 - DNA, 33 bp, Homo sapien
gctggctactggcttccatatgaaagagagaaa

SEQ ID NO: 821028 - DNA, 33 bp, Homo sapien
gctggctactggcttctatatgaaagagagaaa

SEQ ID NO: 821029 - DNA, 33 bp, Homo sapien
gctactactattctcaaagccaaaggcgtttta

SEQ ID NO: 821030 - DNA, 33 bp, Homo sapien
gctactactattctcagagccaaaggcgtttta

SEQ ID NO: 821031 - DNA, 33 bp, Homo sapien
gaattgcagattaggtaaaaactccccagaata

SEQ ID NO: 821032 - DNA, 33 bp, Homo sapien
gaattgcagattaggttaaaactccccagaata

SEQ ID NO: 821033 - DNA, 33 bp, Homo sapien
ctttacattctgtcccaggaatagccaagccat

SEQ ID NO: 821034 - DNA, 33 bp, Homo sapien
ctttacattctgtcccgggaatagccaagccat

SEQ ID NO: 821035 - DNA, 33 bp, Homo sapien
ctgtactgggtagcagccatttaagtttgaatc

SEQ ID NO: 821036 - DNA, 33 bp, Homo sapien
ctgtactgggtagcaggcatttaagtttgaatc

SEQ ID NO: 821037 - DNA, 33 bp, Homo sapien
ggagaatttctgaagcccttttggaaagtaggc

SEQ ID NO: 821038 - DNA, 33 bp, Homo sapien
ggagaatttctgaagcgcttttggaaagtaggc

SEQ ID NO: 821039 - DNA, 33 bp, Homo sapien
gtttcattttattggcaaacggcatttagaaat

SEQ ID NO: 821040 - DNA, 33 bp, Homo sapien
gtttcattttattggcgaacggcatttagaaat

SEQ ID NO: 821041 - DNA, 33 bp, Homo sapien
atcaaacaccttcaaaaggcttagaaaatctcc

SEQ ID NO: 821042 - DNA, 33 bp, Homo sapien
atcaaacaccttcaaagggcttagaaaatctcc

SEQ ID NO: 821043 - DNA, 33 bp, Homo sapien
tccttctgtgctctgacgtagacatggctgtgc

SEQ ID NO: 821044 - DNA, 33 bp, Homo sapien
tccttctgtgctctgatgtagacatggctgtgc

SEQ ID NO: 821045 - DNA, 33 bp, Homo sapien
atctaggaaaggacataataggtaattctgaca

SEQ ID NO: 821046 - DNA, 33 bp, Homo sapien
atctaggaaaggacatcataggtaattctgaca

SEQ ID NO: 821047 - DNA, 33 bp, Homo sapien
ctatttatagctgcccaatggcttgcgtctgag

SEQ ID NO: 821048 - DNA, 33 bp, Homo sapien
ctatttatagctgcccgatggcttgcgtctgag

SEQ ID NO: 821049 - DNA, 33 bp, Homo sapien
gcagaagctgatttcaaattggcttaattttta

SEQ ID NO: 821050 - DNA, 33 bp, Homo sapien
gcagaagctgatttcagattggcttaattttta

SEQ ID NO: 821051 - DNA, 33 bp, Homo sapien
aaccacattagttgtacgaaacagtaatactga

SEQ ID NO: 821052 - DNA, 33 bp, Homo sapien
aaccacattagttgtatgaaacagtaatactga

SEQ ID NO: 821053 - DNA, 33 bp, Homo sapien
ccttacagacagaaaacggttcactttggtgag

SEQ ID NO: 821054 - DNA, 33 bp, Homo sapien
ccttacagacagaaaatggttcactttggtgag

SEQ ID NO: 821055 - DNA, 33 bp, Homo sapien
tgattactcagaagcactactctacaacgatca

SEQ ID NO: 821056 - DNA, 33 bp, Homo sapien
tgattactcagaagcattactctacaacgatca

SEQ ID NO: 821057 - DNA, 33 bp, Homo sapien
tgaagcaaaatggtaccgatggaacctcagata

SEQ ID NO: 821058 - DNA, 33 bp, Homo sapien
tgaagcaaaatggtactgatggaacctcagata

SEQ ID NO: 821059 - DNA, 33 bp, Homo sapien
cgctacttccttgctacaagaacagggttaagt

SEQ ID NO: 821060 - DNA, 33 bp, Homo sapien
cgctacttccttgctataagaacagggttaagt

SEQ ID NO: 821061 - DNA, 33 bp, Homo sapien
tggaaaagtccacataaatgacgtttttgcaga

SEQ ID NO: 821062 - DNA, 33 bp, Homo sapien
tggaaaagtccacatagatgacgtttttgcaga

SEQ ID NO: 821063 - DNA, 33 bp, Homo sapien
ttcctgggtattcacaaagatgagcaaaataag

SEQ ID NO: 821064 - DNA, 33 bp, Homo sapien
ttcctgggtattcacacagatgagcaaaataag

SEQ ID NO: 821065 - DNA, 33 bp, Homo sapien
ttcaaaacttcgagccaacaaggttaagagctc

SEQ ID NO: 821066 - DNA, 33 bp, Homo sapien
ttcaaaacttcgagccgacaaggttaagagctc

SEQ ID NO: 821067 - DNA, 33 bp, Homo sapien
caccatcatttttctccaaagctatgatctcta

SEQ ID NO: 821068 - DNA, 33 bp, Homo sapien
caccatcatttttctctaaagctatgatctcta

SEQ ID NO: 821069 - DNA, 33 bp, Homo sapien
aggaaaagagcagaaaatatgaagggagttaaa

SEQ ID NO: 821070 - DNA, 33 bp, Homo sapien
aggaaaagagcagaaagtatgaagggagttaaa

SEQ ID NO: 821071 - DNA, 33 bp, Homo sapien
ggaaacaggtgaaaggaccacgtatcttttcaa

SEQ ID NO: 821072 - DNA, 33 bp, Homo sapien
ggaaacaggtgaaagggccacgtatcttttcaa

SEQ ID NO: 821073 - DNA, 33 bp, Homo sapien
tggaaatccatgatgaagaataaattcctagat

SEQ ID NO: 821074 - DNA, 33 bp, Homo sapien
tggaaatccatgatgatgaataaattcctagat

SEQ ID NO: 821075 - DNA, 33 bp, Homo sapien
ttaacattaaaagagaaatcctaatactgacag

SEQ ID NO: 821076 - DNA, 33 bp, Homo sapien
ttaacattaaaagagagatcctaatactgacag

SEQ ID NO: 821077 - DNA, 33 bp, Homo sapien
agactctgtagcaaccagataccaacttccaac

SEQ ID NO: 821078 - DNA, 33 bp, Homo sapien
agactctgtagcaaccggataccaacttccaac

SEQ ID NO: 821079 - DNA, 33 bp, Homo sapien
ggtatatacctagaaaaagaaccgctgcatcat

SEQ ID NO: 821080 - DNA, 33 bp, Homo sapien
ggtatatacctagaaatagaaccgctgcatcat

SEQ ID NO: 821081 - DNA, 33 bp, Homo sapien
atcagctgaataaataaacaaaatgtggcctat

SEQ ID NO: 821082 - DNA, 33 bp, Homo sapien
atcagctgaataaatagacaaaatgtggcctat

SEQ ID NO: 821083 - DNA, 33 bp, Homo sapien
tgaaatgtccattcataagttttctggtggctt

SEQ ID NO: 821084 - DNA, 33 bp, Homo sapien
tgaaatgtccattcatgagttttctggtggctt

SEQ ID NO: 821085 - DNA, 33 bp, Homo sapien
tccaaatatgatccaacgtggtgatgaatgtag

SEQ ID NO: 821086 - DNA, 33 bp, Homo sapien
tccaaatatgatccaatgtggtgatgaatgtag

SEQ ID NO: 821087 - DNA, 33 bp, Homo sapien
cttatgtgattttccaactgtttgatatttcca

SEQ ID NO: 821088 - DNA, 33 bp, Homo sapien
cttatgtgattttccagctgtttgatatttcca

SEQ ID NO: 821089 - DNA, 33 bp, Homo sapien
ggatctgtggcctgctcactgtgcccagctcag

SEQ ID NO: 821090 - DNA, 33 bp, Homo sapien
ggatctgtggcctgcttactgtgcccagctcag

SEQ ID NO: 821091 - DNA, 33 bp, Homo sapien
aggaagctggacttcaaagttgggggcattcac

SEQ ID NO: 821092 - DNA, 33 bp, Homo sapien
aggaagctggacttcagagttgggggcattcac

SEQ ID NO: 821093 - DNA, 33 bp, Homo sapien
cacgggatgttccagacgatgaggattctttcc

SEQ ID NO: 821094 - DNA, 33 bp, Homo sapien
cacgggatgttccagaggatgaggattctttcc

SEQ ID NO: 821095 - DNA, 33 bp, Homo sapien
atgacttcaagcctcacggccctttctgggaat

SEQ ID NO: 821096 - DNA, 33 bp, Homo sapien
atgacttcaagcctcatggccctttctgggaat

SEQ ID NO: 821097 - DNA, 33 bp, Homo sapien
acatgtaaagttaaacgggtgcacgaaacatcg

SEQ ID NO: 821098 - DNA, 33 bp, Homo sapien
acatgtaaagttaaactggtgcacgaaacatcg

SEQ ID NO: 821099 - DNA, 33 bp, Homo sapien
caacgctaaacttaccagggaattctgatggtc

SEQ ID NO: 821100 - DNA, 33 bp, Homo sapien
caacgctaaacttaccggggaattctgatggtc

SEQ ID NO: 821101 - DNA, 33 bp, Homo sapien
acctcccaccaacatcaagtgaggagctgagtc

SEQ ID NO: 821102 - DNA, 33 bp, Homo sapien
acctcccaccaacatccagtgaggagctgagtc

SEQ ID NO: 821103 - DNA, 33 bp, Homo sapien
tgctactcactgtcttaaactcaggaatgcaat

SEQ ID NO: 821104 - DNA, 33 bp, Homo sapien
tgctactcactgtcttcaactcaggaatgcaat

SEQ ID NO: 821105 - DNA, 33 bp, Homo sapien
ggtcctggtgcgttcaatctgcctctcatgggc

SEQ ID NO: 821106 - DNA, 33 bp, Homo sapien
ggtcctggtgcgttcattctgcctctcatgggc

SEQ ID NO: 821107 - DNA, 33 bp, Homo sapien
caggaatagtgaccaaaggaagaactgttcacc

SEQ ID NO: 821108 - DNA, 33 bp, Homo sapien
caggaatagtgaccaagggaagaactgttcacc

SEQ ID NO: 821109 - DNA, 33 bp, Homo sapien
ctttaaactgcggacacagaagaggctggtctc

SEQ ID NO: 821110 - DNA, 33 bp, Homo sapien
ctttaaactgcggacatagaagaggctggtctc

SEQ ID NO: 821111 - DNA, 33 bp, Homo sapien
cactactgtgaacctaagatcggccttttgagg

SEQ ID NO: 821112 - DNA, 33 bp, Homo sapien
cactactgtgaacctaggatcggccttttgagg

SEQ ID NO: 821113 - DNA, 33 bp, Homo sapien
cataatgctgaggccccaaccccagtgtgatgg

SEQ ID NO: 821114 - DNA, 33 bp, Homo sapien
cataatgctgaggccctaaccccagtgtgatgg

SEQ ID NO: 821115 - DNA, 33 bp, Homo sapien
cttgttgagcatcacactacctgccaagtggat

SEQ ID NO: 821116 - DNA, 33 bp, Homo sapien
cttgttgagcatcacattacctgccaagtggat

SEQ ID NO: 821117 - DNA, 33 bp, Homo sapien
cctaggataattttggcactaggataattctgg

SEQ ID NO: 821118 - DNA, 33 bp, Homo sapien
cctaggataattttggtactaggataattctgg

SEQ ID NO: 821119 - DNA, 33 bp, Homo sapien
tgacaaatccttaaaacagttaggagctttagg

SEQ ID NO: 821120 - DNA, 33 bp, Homo sapien
tgacaaatccttaaaatagttaggagctttagg

SEQ ID NO: 821121 - DNA, 33 bp, Homo sapien
tacctgttttatgccaagccaaaagaaaatcaa

SEQ ID NO: 821122 - DNA, 33 bp, Homo sapien
tacctgttttatgccaggccaaaagaaaatcaa

SEQ ID NO: 821123 - DNA, 33 bp, Homo sapien
gtcaaacttctgactcaagcttcacagaggata

SEQ ID NO: 821124 - DNA, 33 bp, Homo sapien
gtcaaacttctgactcgagcttcacagaggata

SEQ ID NO: 821125 - DNA, 33 bp, Homo sapien
ttagaaacagatggaacacacatgatacttact

SEQ ID NO: 821126 - DNA, 33 bp, Homo sapien
ttagaaacagatggaatacacatgatacttact

SEQ ID NO: 821127 - DNA, 33 bp, Homo sapien
gtaaagagatgatgttaaacaactccagggcag

SEQ ID NO: 821128 - DNA, 33 bp, Homo sapien
gtaaagagatgatgttgaacaactccagggcag

SEQ ID NO: 821129 - DNA, 33 bp, Homo sapien
ttgcatttgattaacacatacatagacttttgg

SEQ ID NO: 821130 - DNA, 33 bp, Homo sapien
ttgcatttgattaacatatacatagacttttgg

SEQ ID NO: 821131 - DNA, 33 bp, Homo sapien
tactactgagtcacagcctagtcacttagtaac

SEQ ID NO: 821132 - DNA, 33 bp, Homo sapien
tactactgagtcacagtctagtcacttagtaac

SEQ ID NO: 821133 - DNA, 33 bp, Homo sapien
catgtgaaagcatcaaattcacagactgccaat

SEQ ID NO: 821134 - DNA, 33 bp, Homo sapien
catgtgaaagcatcaagttcacagactgccaat

SEQ ID NO: 821135 - DNA, 33 bp, Homo sapien
cgtggtttcaacagcaactctgagatgcaacac

SEQ ID NO: 821136 - DNA, 33 bp, Homo sapien
cgtggtttcaacagcagctctgagatgcaacac

SEQ ID NO: 821137 - DNA, 33 bp, Homo sapien
aaacttaaaagctcaagaacttcagtgtggtgt

SEQ ID NO: 821138 - DNA, 33 bp, Homo sapien
aaacttaaaagctcaataacttcagtgtggtgt

SEQ ID NO: 821139 - DNA, 33 bp, Homo sapien
acttaattttgggaaacagaaggattttgaggt

SEQ ID NO: 821140 - DNA, 33 bp, Homo sapien
acttaattttgggaaagagaaggattttgaggt

SEQ ID NO: 821141 - DNA, 33 bp, Homo sapien
atgacaaaaaaattcacagcagtttaaaggatg

SEQ ID NO: 821142 - DNA, 33 bp, Homo sapien
atgacaaaaaaattcatagcagtttaaaggatg

SEQ ID NO: 821143 - DNA, 33 bp, Homo sapien
tttacctatatttgataacacacaaaaataaaa

SEQ ID NO: 821144 - DNA, 33 bp, Homo sapien
tttacctatatttgatgacacacaaaaataaaa

SEQ ID NO: 821145 - DNA, 33 bp, Homo sapien; identical to SEQ ID NO: 821143

SEQ ID NO: 821146 - DNA, 33 bp, Homo sapien; identical to SEQ ID NO: 821144

SEQ ID NO: 821147 - DNA, 33 bp, Homo sapien
ggaaagctggagcatacagtagaagtcactagg

SEQ ID NO: 821148 - DNA, 33 bp, Homo sapien
ggaaagctggagcatagagtagaagtcactagg

SEQ ID NO: 821149 - DNA, 33 bp, Homo sapien
ccaagatattggtagaaaccctggaaatttcaa

SEQ ID NO: 821150 - DNA, 33 bp, Homo sapien
ccaagatattggtagagaccctggaaatttcaa

SEQ ID NO: 821151 - DNA, 33 bp, Homo sapien
actatgttagtagacactgaggctaagagagat

SEQ ID NO: 821152 - DNA, 33 bp, Homo sapien
actatgttagtagacattgaggctaagagagat

SEQ ID NO: 821153 - DNA, 33 bp, Homo sapien
acaaaagtcaagaaaacgtatgaacaaaatgga

SEQ ID NO: 821154 - DNA, 33 bp, Homo sapien
acaaaagtcaagaaaatgtatgaacaaaatgga

SEQ ID NO: 821155 - DNA, 33 bp, Homo sapien
tgaagtgggacagatactaggtagcatttgagc

SEQ ID NO: 821156 - DNA, 33 bp, Homo sapien
tgaagtgggacagatattaggtagcatttgagc

SEQ ID NO: 821157 - DNA, 33 bp, Homo sapien
gatccaaagaccaaaaacttgaataaccactgg

SEQ ID NO: 821158 - DNA, 33 bp, Homo sapien
gatccaaagaccaaaaccttgaataaccactgg

SEQ ID NO: 821159 - DNA, 33 bp, Homo sapien
taacaatacacgcttgaaagggacccaggtttt

SEQ ID NO: 821160 - DNA, 33 bp, Homo sapien
taacaatacacgcttgtaagggacccaggtttt

SEQ ID NO: 821161 - DNA, 33 bp, Homo sapien
agagcaaaggtaaacacggtgaaaggtcctgca

SEQ ID NO: 821162 - DNA, 33 bp, Homo sapien
agagcaaaggtaaacatggtgaaaggtcctgca

SEQ ID NO: 821163 - DNA, 33 bp, Homo sapien
attgctagatagtgaaagtataaatgtttaatg

SEQ ID NO: 821164 - DNA, 33 bp, Homo sapien
attgctagatagtgaacgtataaatgtttaatg

SEQ ID NO: 821165 - DNA, 33 bp, Homo sapien
gggcatagaaataagaccaagtggccaaaggtg

SEQ ID NO: 821166 - DNA, 33 bp, Homo sapien
gggcatagaaataagatcaagtggccaaaggtg

SEQ ID NO: 821167 - DNA, 33 bp, Homo sapien
ggaatatttaggatcaccttttccaagccatga

SEQ ID NO: 821168 - DNA, 33 bp, Homo sapien
ggaatatttaggatcatcttttccaagccatga

SEQ ID NO: 821169 - DNA, 33 bp, Homo sapien
gcctgcaacagggataaagaatgaacagccaga

SEQ ID NO: 821170 - DNA, 33 bp, Homo sapien
gcctgcaacagggatagagaatgaacagccaga

SEQ ID NO: 821171 - DNA, 33 bp, Homo sapien
ataggtttaaatacggcccccagagcccagcat

SEQ ID NO: 821172 - DNA, 33 bp, Homo sapien
ataggtttaaatacggtccccagagcccagcat

SEQ ID NO: 821173 - DNA, 33 bp, Homo sapien
cagtgtatgtaagtgagattagtgtatgtacag

SEQ ID NO: 821174 - DNA, 33 bp, Homo sapien
cagtgtatgtaagtgatattagtgtatgtacag

SEQ ID NO: 821175 - DNA, 33 bp, Homo sapien
ggagcaggatgtgtaaacgcagagactatctgt

SEQ ID NO: 821176 - DNA, 33 bp, Homo sapien
ggagcaggatgtgtaagcgcagagactatctgt

SEQ ID NO: 821177 - DNA, 33 bp, Homo sapien
aactcccctccttgctcacgctggcttgtatca

SEQ ID NO: 821178 - DNA, 33 bp, Homo sapien
aactcccctccttgctgacgctggcttgtatca

SEQ ID NO: 821179 - DNA, 33 bp, Homo sapien
agaaagggtagctcaacagctcaaactactgaa

SEQ ID NO: 821180 - DNA, 33 bp, Homo sapien
agaaagggtagctcaatagctcaaactactgaa

SEQ ID NO: 821181 - DNA, 33 bp, Homo sapien
atgtgtacattccagacatccaggaaagatggc

SEQ ID NO: 821182 - DNA, 33 bp, Homo sapien
atgtgtacattccagagatccaggaaagatggc

SEQ ID NO: 821183 - DNA, 33 bp, Homo sapien
ttatgaatgttacaaacagggaaatatgagtgc

SEQ ID NO: 821184 - DNA, 33 bp, Homo sapien
ttatgaatgttacaaagagggaaatatgagtgc

SEQ ID NO: 821185 - DNA, 33 bp, Homo sapien
ggtccctatgaggtcacgtgctccagttcatgt

SEQ ID NO: 821186 - DNA, 33 bp, Homo sapien
ggtccctatgaggtcatgtgctccagttcatgt

SEQ ID NO: 821187 - DNA, 33 bp, Homo sapien
cgcacagtcctggtagacaacactgctcagcag

SEQ ID NO: 821188 - DNA, 33 bp, Homo sapien
cgcacagtcctggtaggcaacactgctcagcag

SEQ ID NO: 821189 - DNA, 33 bp, Homo sapien
tgatgagcgagcgagcaaaggaatctgagccca

SEQ ID NO: 821190 - DNA, 33 bp, Homo sapien
tgatgagcgagcgagcgaaggaatctgagccca

SEQ ID NO: 821191 - DNA, 33 bp, Homo sapien
aaagacccagaaaacccgaaggagccctggagg

SEQ ID NO: 821192 - DNA, 33 bp, Homo sapien
aaagacccagaaaacctgaaggagccctggagg

SEQ ID NO: 821193 - DNA, 33 bp, Homo sapien
gactttcagatgtgatcaatggctgcagaaatc

SEQ ID NO: 821194 - DNA, 33 bp, Homo sapien
gactttcagatgtgattaatggctgcagaaatc

SEQ ID NO: 821195 - DNA, 33 bp, Homo sapien
ctctgttggtattcacaaccatttcttgcatga

SEQ ID NO: 821196 - DNA, 33 bp, Homo sapien
ctctgttggtattcaccaccatttcttgcatga

SEQ ID NO: 821197 - DNA, 33 bp, Homo sapien
ggatgggagcctcagacgacactggggtctggg

SEQ ID NO: 821198 - DNA, 33 bp, Homo sapien
ggatgggagcctcagatgacactggggtctggg

SEQ ID NO: 821199 - DNA, 33 bp, Homo sapien
gaggcccagtttactgaacataccttccagtta

SEQ ID NO: 821200 - DNA, 33 bp, Homo sapien
gaggcccagtttactggacataccttccagtta

SEQ ID NO: 821201 - DNA, 33 bp, Homo sapien
agattaaaatatctaccggtttgagccttttca

SEQ ID NO: 821202 - DNA, 33 bp, Homo sapien
agattaaaatatctactggtttgagccttttca

SEQ ID NO: 821203 - DNA, 33 bp, Homo sapien
aatgagtatatggaaccagagaaactgagtaac

SEQ ID NO: 821204 - DNA, 33 bp, Homo sapien
aatgagtatatggaactagagaaactgagtaac

SEQ ID NO: 821205 - DNA, 33 bp, Homo sapien
atatggtagctagaaacagagggctctttcctc

SEQ ID NO: 821206 - DNA, 33 bp, Homo sapien
atatggtagctagaaatagagggctctttcctc

SEQ ID NO: 821207 - DNA, 33 bp, Homo sapien
tgacttcttcagcaaagaaattataaggaaaaa

SEQ ID NO: 821208 - DNA, 33 bp, Homo sapien
tgacttcttcagcaaataaattataaggaaaaa

SEQ ID NO: 821209 - DNA, 33 bp, Homo sapien
aatgaaaatcaagaaacctagcaatggctggtg

SEQ ID NO: 821210 - DNA, 33 bp, Homo sapien
aatgaaaatcaagaaatctagcaatggctggtg

SEQ ID NO: 821211 - DNA, 33 bp, Homo sapien
agaaatacgtcaggtgaattttccaaaccgggt

SEQ ID NO: 821212 - DNA, 33 bp, Homo sapien
agaaatacgtcaggtgtattttccaaaccgggt

SEQ ID NO: 821213 - DNA, 33 bp, Homo sapien
ctagcaatgagcccaaagtgagagtcagtgtga

SEQ ID NO: 821214 - DNA, 33 bp, Homo sapien
ctagcaatgagcccaacgtgagagtcagtgtga

SEQ ID NO: 821215 - DNA, 33 bp, Homo sapien
ctcttcatcactatgacggcgagggcgaggctg

SEQ ID NO: 821216 - DNA, 33 bp, Homo sapien
ctcttcatcactatgatggcgagggcgaggctg

SEQ ID NO: 821217 - DNA, 33 bp, Homo sapien
cttagcagtgtccaacagtaaaaatagaaaagc

SEQ ID NO: 821218 - DNA, 33 bp, Homo sapien
cttagcagtgtccaacggtaaaaatagaaaagc

SEQ ID NO: 821219 - DNA, 33 bp, Homo sapien
aggtgtaacaaacgtaataccatgatgaactag

SEQ ID NO: 821220 - DNA, 33 bp, Homo sapien
aggtgtaacaaacgtagtaccatgatgaactag

SEQ ID NO: 821221 - DNA, 33 bp, Homo sapien
tcatggcatggctagaagtgacctttacttatt

SEQ ID NO: 821222 - DNA, 33 bp, Homo sapien
tcatggcatggctagaggtgacctttacttatt

SEQ ID NO: 821223 - DNA, 33 bp, Homo sapien
ccatgccttctgactgaacattttcaccaaaga

SEQ ID NO: 821224 - DNA, 33 bp, Homo sapien
ccatgccttctgactggacattttcaccaaaga

SEQ ID NO: 821225 - DNA, 33 bp, Homo sapien
ttactaagcgaaagcactcaacgcaaaaaagta

SEQ ID NO: 821226 - DNA, 33 bp, Homo sapien
ttactaagcgaaagcagtcaacgcaaaaaagta

SEQ ID NO: 821227 - DNA, 33 bp, Homo sapien
ttaaatggtaactttcaccacactaggttattc

SEQ ID NO: 821228 - DNA, 33 bp, Homo sapien
ttaaatggtaactttcgccacactaggttattc

SEQ ID NO: 821229 - DNA, 33 bp, Homo sapien
tccagcctggcaaaggaaatggctgccactcta

SEQ ID NO: 821230 - DNA, 33 bp, Homo sapien
tccagcctggcaaaggcaatggctgccactcta

SEQ ID NO: 821231 - DNA, 33 bp, Homo sapien
cacacttttagaaatccgagatacacattcacc

SEQ ID NO: 821232 - DNA, 33 bp, Homo sapien
cacacttttagaaatctgagatacacattcacc

SEQ ID NO: 821233 - DNA, 33 bp, Homo sapien
caagcttcccatcacacaattacaaatgagtag

SEQ ID NO: 821234 - DNA, 33 bp, Homo sapien
caagcttcccatcacataattacaaatgagtag

SEQ ID NO: 821235 - DNA, 33 bp, Homo sapien
tgacttcaagagtttacgctgctctagcaccgc

SEQ ID NO: 821236 - DNA, 33 bp, Homo sapien
tgacttcaagagtttatgctgctctagcaccgc

SEQ ID NO: 821237 - DNA, 33 bp, Homo sapien
aattgtagcttgctagccatccagttgaagaaa

SEQ ID NO: 821238 - DNA, 33 bp, Homo sapien
aattgtagcttgctagtcatccagttgaagaaa

SEQ ID NO: 821239 - DNA, 33 bp, Homo sapien
ggccggggaagtcagacgtgtattataacaaga

SEQ ID NO: 821240 - DNA, 33 bp, Homo sapien
ggccggggaagtcagatgtgtattataacaaga

SEQ ID NO: 821241 - DNA, 33 bp, Homo sapien
taactcagcattacataatccagttactccccc

SEQ ID NO: 821242 - DNA, 33 bp, Homo sapien
taactcagcattacatcatccagttactccccc

SEQ ID NO: 821243 - DNA, 33 bp, Homo sapien
gagcatattggtttccaagatcccttatagcac

SEQ ID NO: 821244 - DNA, 33 bp, Homo sapien
gagcatattggtttccgagatcccttatagcac

SEQ ID NO: 821245 - DNA, 33 bp, Homo sapien
tttgactcttcagggacctagcactcttcccac

SEQ ID NO: 821246 - DNA, 33 bp, Homo sapien
tttgactcttcagggatctagcactcttcccac

SEQ ID NO: 821247 - DNA, 33 bp, Homo sapien
tctgagtttatgcaaaataagaactcagctgct

SEQ ID NO: 821248 - DNA, 33 bp, Homo sapien
tctgagtttatgcaaagtaagaactcagctgct

SEQ ID NO: 821249 - DNA, 33 bp, Homo sapien
tttactttaatagtcaacttactgaggaataat

SEQ ID NO: 821250 - DNA, 33 bp, Homo sapien
tttactttaatagtcatcttactgaggaataat

SEQ ID NO: 821251 - DNA, 33 bp, Homo sapien
tggttgtccatttgaacaggcattaaaaaaaat

SEQ ID NO: 821252 - DNA, 33 bp, Homo sapien
tggttgtccatttgaagaggcattaaaaaaaat

SEQ ID NO: 821253 - DNA, 33 bp, Homo sapien
catcctaacaatcttacctactctctgtacaat

SEQ ID NO: 821254 - DNA, 33 bp, Homo sapien
catcctaacaatcttatctactctctgtacaat

SEQ ID NO: 821255 - DNA, 33 bp, Homo sapien
agcatccatgtgaatgcagggtagaccaactta

SEQ ID NO: 821256 - DNA, 33 bp, Homo sapien
agcatccatgtgaatgtagggtagaccaactta

SEQ ID NO: 821257 - DNA, 33 bp, Homo sapien
actgccactggaaaaaatgtgaaaatataaaat

SEQ ID NO: 821258 - DNA, 33 bp, Homo sapien
actgccactggaaaaagtgtgaaaatataaaat

SEQ ID NO: 821259 - DNA, 33 bp, Homo sapien
cattgtcttatttaaccgtcataaaaactctat

SEQ ID NO: 821260 - DNA, 33 bp, Homo sapien
cattgtcttatttaactgtcataaaaactctat

SEQ ID NO: 821261 - DNA, 33 bp, Homo sapien
taaagtctataacatacagtgcgtgacagacag

SEQ ID NO: 821262 - DNA, 33 bp, Homo sapien
taaagtctataacatatagtgcgtgacagacag

SEQ ID NO: 821263 - DNA, 33 bp, Homo sapien
taagaagctgagaaaacgccagagtgacaatac

SEQ ID NO: 821264 - DNA, 33 bp, Homo sapien
taagaagctgagaaaatgccagagtgacaatac

SEQ ID NO: 821265 - DNA, 33 bp, Homo sapien
gcttacccagagttgaactataagttgaatttt

SEQ ID NO: 821266 - DNA, 33 bp, Homo sapien
gcttacccagagttgacctataagttgaatttt

SEQ ID NO: 821267 - DNA, 33 bp, Homo sapien
tttagctcagtccaacacttcagccacaattac

SEQ ID NO: 821268 - DNA, 33 bp, Homo sapien
tttagctcagtccaacgcttcagccacaattac

SEQ ID NO: 821269 - DNA, 33 bp, Homo sapien
acttctcgctaaccaacttccacttcttgaagc

SEQ ID NO: 821270 - DNA, 33 bp, Homo sapien
acttctcgctaaccaatttccacttcttgaagc

SEQ ID NO: 821271 - DNA, 33 bp, Homo sapien
cttttggttgcaagaaaccattctatttagggt

SEQ ID NO: 821272 - DNA, 33 bp, Homo sapien
cttttggttgcaagaatccattctatttagggt

SEQ ID NO: 821273 - DNA, 33 bp, Homo sapien
acagttgcattatcaaatcaaggaggaaatgca

SEQ ID NO: 821274 - DNA, 33 bp, Homo sapien
acagttgcattatcaagtcaaggaggaaatgca

SEQ ID NO: 821275 - DNA, 33 bp, Homo sapien
gcaaggctgaagcgggaaagttctattttattt

SEQ ID NO: 821276 - DNA, 33 bp, Homo sapien
gcaaggctgaagcggggaagttctattttattt

SEQ ID NO: 821277 - DNA, 33 bp, Homo sapien
actctatttgataacaataatctgtgatgacta

SEQ ID NO: 821278 - DNA, 33 bp, Homo sapien
actctatttgataacagtaatctgtgatgacta

SEQ ID NO: 821279 - DNA, 33 bp, Homo sapien
aggcataaatacatacaggatgaaaaatcagct

SEQ ID NO: 821280 - DNA, 33 bp, Homo sapien
aggcataaatacatacgggatgaaaaatcagct

SEQ ID NO: 821281 - DNA, 33 bp, Homo sapien
agaaggcgactggtgacctctgaaaagtagttc

SEQ ID NO: 821282 - DNA, 33 bp, Homo sapien
agaaggcgactggtgatctctgaaaagtagttc

SEQ ID NO: 821283 - DNA, 33 bp, Homo sapien
gagtttgtttcagacacattgagttccaggtga

SEQ ID NO: 821284 - DNA, 33 bp, Homo sapien
gagtttgtttcagacatattgagttccaggtga

SEQ ID NO: 821285 - DNA, 33 bp, Homo sapien
tatttagaagatgagcaaaaaaggttaccttta

SEQ ID NO: 821286 - DNA, 33 bp, Homo sapien
tatttagaagatgagcgaaaaaggttaccttta

SEQ ID NO: 821287 - DNA, 33 bp, Homo sapien
aatttgtggcattctacgaggtcctccaaggga

SEQ ID NO: 821288 - DNA, 33 bp, Homo sapien
aatttgtggcattctatgaggtcctccaaggga

SEQ ID NO: 821289 - DNA, 33 bp, Homo sapien
ttgtcgttgttcatcaatgagaaggtttgttta

SEQ ID NO: 821290 - DNA, 33 bp, Homo sapien
ttgtcgttgttcatcagtgagaaggtttgttta

SEQ ID NO: 821291 - DNA, 33 bp, Homo sapien
gttgatgcaatactgacgtttagatttcagtca

SEQ ID NO: 821292 - DNA, 33 bp, Homo sapien
gttgatgcaatactgaggtttagatttcagtca

SEQ ID NO: 821293 - DNA, 33 bp, Homo sapien
tgaaagaaaaattaaacgtcctaagtggtttgc

SEQ ID NO: 821294 - DNA, 33 bp, Homo sapien
tgaaagaaaaattaaatgtcctaagtggtttgc

SEQ ID NO: 821295 - DNA, 33 bp, Homo sapien
cagtaattatgactgacgagttggctgtctctt

SEQ ID NO: 821296 - DNA, 33 bp, Homo sapien
cagtaattatgactgatgagttggctgtctctt

SEQ ID NO: 821297 - DNA, 33 bp, Homo sapien
tacattacagttgtggaacaaaggaatctgtga

SEQ ID NO: 821298 - DNA, 33 bp, Homo sapien
tacattacagttgtgggacaaaggaatctgtga

SEQ ID NO: 821299 - DNA, 33 bp, Homo sapien
ctaagtgaatctttccaagtacatttgacattt

SEQ ID NO: 821300 - DNA, 33 bp, Homo sapien
ctaagtgaatctttcccagtacatttgacattt

SEQ ID NO: 821301 - DNA, 33 bp, Homo sapien
gactcaaaaaaatatggagaataagaccatcaa

SEQ ID NO: 821302 - DNA, 33 bp, Homo sapien
gactcaaaaaaatatgtagaataagaccatcaa

SEQ ID NO: 821303 - DNA, 33 bp, Homo sapien
ataatgagagattaaccggagccgtggatcaca

SEQ ID NO: 821304 - DNA, 33 bp, Homo sapien
ataatgagagattaactggagccgtggatcaca

SEQ ID NO: 821305 - DNA, 33 bp, Homo sapien
cctaccttgccggacactgaggatttattcacc

SEQ ID NO: 821306 - DNA, 33 bp, Homo sapien
cctaccttgccggacattgaggatttattcacc

SEQ ID NO: 821307 - DNA, 33 bp, Homo sapien
ctgaaagctgaattgccagtcaaatggtttgtg

SEQ ID NO: 821308 - DNA, 33 bp, Homo sapien
ctgaaagctgaattgctagtcaaatggtttgtg

SEQ ID NO: 821309 - DNA, 33 bp, Homo sapien
accttcagccatcctgaattaaaggtgaatttg

SEQ ID NO: 821310 - DNA, 33 bp, Homo sapien
accttcagccatcctggattaaaggtgaatttg

SEQ ID NO: 821311 - DNA, 33 bp, Homo sapien
aaatcaaggctgccacagaagatgggaaatagg

SEQ ID NO: 821312 - DNA, 33 bp, Homo sapien
aaatcaaggctgccacggaagatgggaaatagg

SEQ ID NO: 821313 - DNA, 33 bp, Homo sapien
tttgcaaagaatggtgaatttcaagtatttggc

SEQ ID NO: 821314 - DNA, 33 bp, Homo sapien
tttgcaaagaatggtggatttcaagtatttggc

SEQ ID NO: 821315 - DNA, 33 bp, Homo sapien
tcaagacagaggactacgtaaacatgtgaacag

SEQ ID NO: 821316 - DNA, 33 bp, Homo sapien
tcaagacagaggactatgtaaacatgtgaacag

SEQ ID NO: 821317 - DNA, 33 bp, Homo sapien
aattagtctttggctacgacaagatggaaacta

SEQ ID NO: 821318 - DNA, 33 bp, Homo sapien
aattagtctttggctatgacaagatggaaacta

SEQ ID NO: 821319 - DNA, 33 bp, Homo sapien
tgtcctaaggtctctacgggaagtccctccctg

SEQ ID NO: 821320 - DNA, 33 bp, Homo sapien
tgtcctaaggtctctatgggaagtccctccctg

SEQ ID NO: 821321 - DNA, 33 bp, Homo sapien
tgctgcatttgggggaaatgaaggcttgggagt

SEQ ID NO: 821322 - DNA, 33 bp, Homo sapien
tgctgcatttgggggagatgaaggcttgggagt

SEQ ID NO: 821323 - DNA, 33 bp, Homo sapien
ttgactgtatcttccactatgctgactgtgggg

SEQ ID NO: 821324 - DNA, 33 bp, Homo sapien
ttgactgtatcttccattatgctgactgtgggg

SEQ ID NO: 821325 - DNA, 33 bp, Homo sapien
actaatccatctcctcacgtcttggatataccc

SEQ ID NO: 821326 - DNA, 33 bp, Homo sapien
actaatccatctcctcgcgtcttggatataccc

SEQ ID NO: 821327 - DNA, 33 bp, Homo sapien
gaaggctttcttgtgaacagctcctgggtttga

SEQ ID NO: 821328 - DNA, 33 bp, Homo sapien
gaaggctttcttgtgagcagctcctgggtttga

SEQ ID NO: 821329 - DNA, 33 bp, Homo sapien
ctgaataaaataatgacggtttaccctagttat

SEQ ID NO: 821330 - DNA, 33 bp, Homo sapien
ctgaataaaataatgatggtttaccctagttat

SEQ ID NO: 821331 - DNA, 33 bp, Homo sapien
tctactgctttaggcaacctgaataaaataatg

SEQ ID NO: 821332 - DNA, 33 bp, Homo sapien
tctactgctttaggcaccctgaataaaataatg

SEQ ID NO: 821333 - DNA, 33 bp, Homo sapien
gttgaagcaataaatcaaaaacccactgataat

SEQ ID NO: 821334 - DNA, 33 bp, Homo sapien
gttgaagcaataaatccaaaacccactgataat

SEQ ID NO: 821335 - DNA, 33 bp, Homo sapien
cccacggtcaaagaggaaaagggtgcctttctc

SEQ ID NO: 821336 - DNA, 33 bp, Homo sapien
cccacggtcaaagaggtaaagggtgcctttctc

SEQ ID NO: 821337 - DNA, 33 bp, Homo sapien
tgaatgaccgtcaacactgtgctgattggtttt

SEQ ID NO: 821338 - DNA, 33 bp, Homo sapien
tgaatgaccgtcaacattgtgctgattggtttt

SEQ ID NO: 821339 - DNA, 33 bp, Homo sapien
aggagaactaataagacgaaatggaggggaata

SEQ ID NO: 821340 - DNA, 33 bp, Homo sapien
aggagaactaataagatgaaatggaggggaata

SEQ ID NO: 821341 - DNA, 33 bp, Homo sapien
attctccactaattaacgtgttctgggagtagt

SEQ ID NO: 821342 - DNA, 33 bp, Homo sapien
attctccactaattaatgtgttctgggagtagt

SEQ ID NO: 821343 - DNA, 33 bp, Homo sapien
cctggaaccaatttaccgctcttgaagaggtga

SEQ ID NO: 821344 - DNA, 33 bp, Homo sapien
cctggaaccaatttactgctcttgaagaggtga

SEQ ID NO: 821345 - DNA, 33 bp, Homo sapien
ttatactttgcgccaaggaattcaaatagctga

SEQ ID NO: 821346 - DNA, 33 bp, Homo sapien
ttatactttgcgccaatgaattcaaatagctga

SEQ ID NO: 821347 - DNA, 33 bp, Homo sapien
ttcttcatgatagaacgcactaagggcacaaca

SEQ ID NO: 821348 - DNA, 33 bp, Homo sapien
ttcttcatgatagaactcactaagggcacaaca

SEQ ID NO: 821349 - DNA, 33 bp, Homo sapien
tccattaggattctccaccattattattttccc

SEQ ID NO: 821350 - DNA, 33 bp, Homo sapien
tccattaggattctccgccattattattttccc

SEQ ID NO: 821351 - DNA, 33 bp, Homo sapien
aagacaaccttttcaactgagtaggaagagaaa

SEQ ID NO: 821352 - DNA, 33 bp, Homo sapien
aagacaaccttttcaattgagtaggaagagaaa

SEQ ID NO: 821353 - DNA, 33 bp, Homo sapien
ttcttcaatgctgttaagaatttctgtattttt

SEQ ID NO: 821354 - DNA, 33 bp, Homo sapien
ttcttcaatgctgttaggaatttctgtattttt

SEQ ID NO: 821355 - DNA, 33 bp, Homo sapien
tttggttctaattatcaaaaccaacattactag

SEQ ID NO: 821356 - DNA, 33 bp, Homo sapien
tttggttctaattatccaaaccaacattactag

SEQ ID NO: 821357 - DNA, 33 bp, Homo sapien
tttaataaaagaatgaatcagctgccatttcta

SEQ ID NO: 821358 - DNA, 33 bp, Homo sapien
tttaataaaagaatgagtcagctgccatttcta

SEQ ID NO: 821359 - DNA, 33 bp, Homo sapien
ctttcaaatgcagatggcaggtttccttacaaa

SEQ ID NO: 821360 - DNA, 33 bp, Homo sapien
ctttcaaatgcagatgtcaggtttccttacaaa

SEQ ID NO: 821361 - DNA, 33 bp, Homo sapien
atgaaagaagctacaacttcactgctattctaa

SEQ ID NO: 821362 - DNA, 33 bp, Homo sapien
atgaaagaagctacaagttcactgctattctaa

SEQ ID NO: 821363 - DNA, 33 bp, Homo sapien
ctagcttgtggtaaagcctccatttactacatc

SEQ ID NO: 821364 - DNA, 33 bp, Homo sapien
ctagcttgtggtaaagtctccatttactacatc

SEQ ID NO: 821365 - DNA, 33 bp, Homo sapien
tggctgttgagaactgacactattcctggtcct

SEQ ID NO: 821366 - DNA, 33 bp, Homo sapien
tggctgttgagaactggcactattcctggtcct

SEQ ID NO: 821367 - DNA, 33 bp, Homo sapien
tttcaacacacatgatcagtgttcagttgaatg

SEQ ID NO: 821368 - DNA, 33 bp, Homo sapien
tttcaacacacatgatgagtgttcagttgaatg

SEQ ID NO: 821369 - DNA, 33 bp, Homo sapien
ttgccaaaacgccctcaataggtgttgtataat

SEQ ID NO: 821370 - DNA, 33 bp, Homo sapien
ttgccaaaacgccctcgataggtgttgtataat

SEQ ID NO: 821371 - DNA, 33 bp, Homo sapien
ggggagtcatcaattacattgtttcttggaagt

SEQ ID NO: 821372 - DNA, 33 bp, Homo sapien
ggggagtcatcaattatattgtttcttggaagt

SEQ ID NO: 821373 - DNA, 33 bp, Homo sapien
tccctgactttgaagcactgtctgctatgagaa

SEQ ID NO: 821374 - DNA, 33 bp, Homo sapien
tccctgactttgaagcgctgtctgctatgagaa

SEQ ID NO: 821375 - DNA, 33 bp, Homo sapien
gctgataaaacatacactgtagttgtcatattc

SEQ ID NO: 821376 - DNA, 33 bp, Homo sapien
gctgataaaacatacattgtagttgtcatattc

SEQ ID NO: 821377 - DNA, 33 bp, Homo sapien
ccaagtcctgctgctaggcaattttctatgtgg

SEQ ID NO: 821378 - DNA, 33 bp, Homo sapien
ccaagtcctgctgctatgcaattttctatgtgg

SEQ ID NO: 821379 - DNA, 33 bp, Homo sapien
tccagggctccacagaaaaataatctaaaatga

SEQ ID NO: 821380 - DNA, 33 bp, Homo sapien
tccagggctccacagacaaataatctaaaatga

SEQ ID NO: 821381 - DNA, 33 bp, Homo sapien
tttattgaggataaggaagggatgatgagtagc

SEQ ID NO: 821382 - DNA, 33 bp, Homo sapien
tttattgaggataaggtagggatgatgagtagc

SEQ ID NO: 821383 - DNA, 33 bp, Homo sapien
gcacaatattcttgacagagaaaactgagaaaa

SEQ ID NO: 821384 - DNA, 33 bp, Homo sapien
gcacaatattcttgaccgagaaaactgagaaaa

SEQ ID NO: 821385 - DNA, 33 bp, Homo sapien
cactggcactgtgagcgccttcaaaaattccta

SEQ ID NO: 821386 - DNA, 33 bp, Homo sapien
cactggcactgtgagctccttcaaaaattccta

SEQ ID NO: 821387 - DNA, 33 bp, Homo sapien
aaaggaagggagaaccaaaaggcttgctcagct

SEQ ID NO: 821388 - DNA, 33 bp, Homo sapien
aaaggaagggagaaccgaaaggcttgctcagct

SEQ ID NO: 821389 - DNA, 33 bp, Homo sapien
gatgcctgctgtgaacaagacatgcaggtgcta

SEQ ID NO: 821390 - DNA, 33 bp, Homo sapien
gatgcctgctgtgaacgagacatgcaggtgcta

SEQ ID NO: 821391 - DNA, 33 bp, Homo sapien
ggtcagcagtctatgaccaacaaggtccttgtc

SEQ ID NO: 821392 - DNA, 33 bp, Homo sapien
ggtcagcagtctatgatcaacaaggtccttgtc

SEQ ID NO: 821393 - DNA, 33 bp, Homo sapien
caaagcataatttgtacgacggatctgtgtgtt

SEQ ID NO: 821394 - DNA, 33 bp, Homo sapien
caaagcataatttgtatgacggatctgtgtgtt

SEQ ID NO: 821395 - DNA, 33 bp, Homo sapien
gacatctgagtctttgcaatcattctctgtatc

SEQ ID NO: 821396 - DNA, 33 bp, Homo sapien
gacatctgagtctttggaatcattctctgtatc

SEQ ID NO: 821397 - DNA, 33 bp, Homo sapien
ggccctccaactgaacccctgaaaaacataata

SEQ ID NO: 821398 - DNA, 33 bp, Homo sapien
ggccctccaactgaacgcctgaaaaacataata

SEQ ID NO: 821399 - DNA, 33 bp, Homo sapien
taaattcatacagtcaaaaaatgtaaaccacag

SEQ ID NO: 821400 - DNA, 33 bp, Homo sapien
taaattcatacagtcagaaaatgtaaaccacag

SEQ ID NO: 821401 - DNA, 33 bp, Homo sapien
tttagaagcaatgaccacatatttttccatcgc

SEQ ID NO: 821402 - DNA, 33 bp, Homo sapien
tttagaagcaatgaccgcatatttttccatcgc

SEQ ID NO: 821403 - DNA, 33 bp, Homo sapien
tttgcaggctaaattgaattatctttgttactt

SEQ ID NO: 821404 - DNA, 33 bp, Homo sapien
tttgcaggctaaattggattatctttgttactt

SEQ ID NO: 821405 - DNA, 33 bp, Homo sapien
ttcttggacagttctcaaaaagagttggatatg

SEQ ID NO: 821406 - DNA, 33 bp, Homo sapien
ttcttggacagttctcgaaaagagttggatatg

SEQ ID NO: 821407 - DNA, 33 bp, Homo sapien
atgctgttacagctcaaatctctgcataataaa

SEQ ID NO: 821408 - DNA, 33 bp, Homo sapien
atgctgttacagctcagatctctgcataataaa

SEQ ID NO: 821409 - DNA, 33 bp, Homo sapien
tattctggcacaagcaacttctcgtctcggttc

SEQ ID NO: 821410 - DNA, 33 bp, Homo sapien
tattctggcacaagcatcttctcgtctcggttc

SEQ ID NO: 821411 - DNA, 33 bp, Homo sapien
tcgggatagaaaatggcatcaaattgttgtttt

SEQ ID NO: 821412 - DNA, 33 bp, Homo sapien
tcgggatagaaaatggtatcaaattgttgtttt

SEQ ID NO: 821413 - DNA, 33 bp, Homo sapien
ttagagcataaggaaaagatacaaaatactgaa

SEQ ID NO: 821414 - DNA, 33 bp, Homo sapien
ttagagcataaggaaaggatacaaaatactgaa

SEQ ID NO: 821415 - DNA, 33 bp, Homo sapien
ccctgtgaaaaagccacattagacactgtgggt

SEQ ID NO: 821416 - DNA, 33 bp, Homo sapien
ccctgtgaaaaagccagattagacactgtgggt

SEQ ID NO: 821417 - DNA, 33 bp, Homo sapien
cacctggatgtggaaactgaaagacaaacaaat

SEQ ID NO: 821418 - DNA, 33 bp, Homo sapien
cacctggatgtggaaattgaaagacaaacaaat

SEQ ID NO: 821419 - DNA, 33 bp, Homo sapien
tttgcctgaagtcgcacgtttcagtcagtggca

SEQ ID NO: 821420 - DNA, 33 bp, Homo sapien
tttgcctgaagtcgcatgtttcagtcagtggca

SEQ ID NO: 821421 - DNA, 33 bp, Homo sapien
gatgactgcaggatctaaaaaaaccacggtatg

SEQ ID NO: 821422 - DNA, 33 bp, Homo sapien
gatgactgcaggatctgaaaaaaccacggtatg

SEQ ID NO: 821423 - DNA, 33 bp, Homo sapien
taaggcttcattttaaataatcttatactgatt

SEQ ID NO: 821424 - DNA, 33 bp, Homo sapien
taaggcttcattttaagtaatcttatactgatt

SEQ ID NO: 821425 - DNA, 33 bp, Homo sapien
tgcatctataggttctaacacataatggctaag

SEQ ID NO: 821426 - DNA, 33 bp, Homo sapien
tgcatctataggttctgacacataatggctaag

SEQ ID NO: 821427 - DNA, 33 bp, Homo sapien
gcctaagattccagacaggtatcactctgtgga

SEQ ID NO: 821428 - DNA, 33 bp, Homo sapien
gcctaagattccagacgggtatcactctgtgga

SEQ ID NO: 821429 - DNA, 33 bp, Homo sapien
ccttctcagccattacaaatcaacaggagctaa

SEQ ID NO: 821430 - DNA, 33 bp, Homo sapien
ccttctcagccattacgaatcaacaggagctaa

SEQ ID NO: 821431 - DNA, 33 bp, Homo sapien
tccagtctcaggtaataacctcgctgttcacaa

SEQ ID NO: 821432 - DNA, 33 bp, Homo sapien
tccagtctcaggtaatgacctcgctgttcacaa

SEQ ID NO: 821433 - DNA, 33 bp, Homo sapien
gcactgctcaagttaacgtggatacaacacaaa

SEQ ID NO: 821434 - DNA, 33 bp, Homo sapien
gcactgctcaagttaatgtggatacaacacaaa

SEQ ID NO: 821435 - DNA, 33 bp, Homo sapien
ggcacctttctgattacggtgctattctgtgtt

SEQ ID NO: 821436 - DNA, 33 bp, Homo sapien
ggcacctttctgattatggtgctattctgtgtt

SEQ ID NO: 821437 - DNA, 33 bp, Homo sapien
cactcagcagtctgtccaaaatcatgacctctt

SEQ ID NO: 821438 - DNA, 33 bp, Homo sapien
cactcagcagtctgtctaaaatcatgacctctt

SEQ ID NO: 821439 - DNA, 33 bp, Homo sapien
ctgtcctgttacaggacatactctaaaaattct

SEQ ID NO: 821440 - DNA, 33 bp, Homo sapien
ctgtcctgttacaggagatactctaaaaattct

SEQ ID NO: 821441 - DNA, 33 bp, Homo sapien
tcctctgtcatcagcgcatggaagtcttgtttg

SEQ ID NO: 821442 - DNA, 33 bp, Homo sapien
tcctctgtcatcagcgtatggaagtcttgtttg

SEQ ID NO: 821443 - DNA, 33 bp, Homo sapien
ttacatacatccactcaagagtttggaaaagcc

SEQ ID NO: 821444 - DNA, 33 bp, Homo sapien
ttacatacatccactccagagtttggaaaagcc

SEQ ID NO: 821445 - DNA, 33 bp, Homo sapien
cctgctttccagtcacaatacttgaactgcttc

SEQ ID NO: 821446 - DNA, 33 bp, Homo sapien
cctgctttccagtcacgatacttgaactgcttc

SEQ ID NO: 821447 - DNA, 33 bp, Homo sapien
ccagctctagaacatcggacttttagcagtgta

SEQ ID NO: 821448 - DNA, 33 bp, Homo sapien
ccagctctagaacatctgacttttagcagtgta

SEQ ID NO: 821449 - DNA, 33 bp, Homo sapien
gggctgtcctgtgtgacgaggtaagctgcacac

SEQ ID NO: 821450 - DNA, 33 bp, Homo sapien
gggctgtcctgtgtgaggaggtaagctgcacac

SEQ ID NO: 821451 - DNA, 33 bp, Homo sapien
tcttcctaacacttgcccctctcctaaagtaac

SEQ ID NO: 821452 - DNA, 33 bp, Homo sapien
tcttcctaacacttgctcctctcctaaagtaac

SEQ ID NO: 821453 - DNA, 33 bp, Homo sapien
tgatatagaacatgccaatatagcttacatata

SEQ ID NO: 821454 - DNA, 33 bp, Homo sapien
tgatatagaacatgcctatatagcttacatata

SEQ ID NO: 821455 - DNA, 33 bp, Homo sapien
acagagtggaaagaaaagacggtctctgtcctt

SEQ ID NO: 821456 - DNA, 33 bp, Homo sapien
acagagtggaaagaaacgacggtctctgtcctt

SEQ ID NO: 821457 - DNA, 33 bp, Homo sapien
atgtacttgaaagccactgaattttattttatt

SEQ ID NO: 821458 - DNA, 33 bp, Homo sapien
atgtacttgaaagccattgaattttattttatt

SEQ ID NO: 821459 - DNA, 33 bp, Homo sapien
tattttgttattgttacagtgaagcacactgat

SEQ ID NO: 821460 - DNA, 33 bp, Homo sapien
tattttgttattgttatagtgaagcacactgat

SEQ ID NO: 821461 - DNA, 33 bp, Homo sapien
ctggaacctgagaatacgttatcctacattaag

SEQ ID NO: 821462 - DNA, 33 bp, Homo sapien
ctggaacctgagaatatgttatcctacattaag

SEQ ID NO: 821463 - DNA, 33 bp, Homo sapien
atctatcttctgctgactaatgcttgaaatctc

SEQ ID NO: 821464 - DNA, 33 bp, Homo sapien
atctatcttctgctgagtaatgcttgaaatctc

SEQ ID NO: 821465 - DNA, 33 bp, Homo sapien
atttagacagagaaacaagttactttgtaggta

SEQ ID NO: 821466 - DNA, 33 bp, Homo sapien
atttagacagagaaacgagttactttgtaggta

SEQ ID NO: 821467 - DNA, 33 bp, Homo sapien
agaagtggtcttttaacggcgttatagagtgct

SEQ ID NO: 821468 - DNA, 33 bp, Homo sapien
agaagtggtcttttaatggcgttatagagtgct

SEQ ID NO: 821469 - DNA, 33 bp, Homo sapien
tggaccctgtatactcaatactataactcaaat

SEQ ID NO: 821470 - DNA, 33 bp, Homo sapien
tggaccctgtatactccatactataactcaaat

SEQ ID NO: 821471 - DNA, 33 bp, Homo sapien
tttttccccagaagtcccatactaccagaagtt

SEQ ID NO: 821472 - DNA, 33 bp, Homo sapien
tttttccccagaagtctcatactaccagaagtt

SEQ ID NO: 821473 - DNA, 33 bp, Homo sapien
ggaatggcggcgtccacagcatgacgatcaatc

SEQ ID NO: 821474 - DNA, 33 bp, Homo sapien
ggaatggcggcgtccagagcatgacgatcaatc

SEQ ID NO: 821475 - DNA, 33 bp, Homo sapien
ctgtctaagatgggtcaattgatgccaaagtgt

SEQ ID NO: 821476 - DNA, 33 bp, Homo sapien
ctgtctaagatgggtcgattgatgccaaagtgt

SEQ ID NO: 821477 - DNA, 33 bp, Homo sapien
ctgaataaaatcgaatcaaacattttcctatgg

SEQ ID NO: 821478 - DNA, 33 bp, Homo sapien
ctgaataaaatcgaatgaaacattttcctatgg

SEQ ID NO: 821479 - DNA, 33 bp, Homo sapien
gcaatgagccagaaaacacagccctacattctg

SEQ ID NO: 821480 - DNA, 33 bp, Homo sapien
gcaatgagccagaaaatacagccctacattctg

SEQ ID NO: 821481 - DNA, 33 bp, Homo sapien
gtccccatgcctgccaagtggaaacactccttc

SEQ ID NO: 821482 - DNA, 33 bp, Homo sapien
gtccccatgcctgccacgtggaaacactccttc

SEQ ID NO: 821483 - DNA, 33 bp, Homo sapien
tccctcacctagttggcagttctcttctgacat

SEQ ID NO: 821484 - DNA, 33 bp, Homo sapien
tccctcacctagttgggagttctcttctgacat

SEQ ID NO: 821485 - DNA, 33 bp, Homo sapien
gtttggagctgagaggccacagcttaattactg

SEQ ID NO: 821486 - DNA, 33 bp, Homo sapien
gtttggagctgagagggcacagcttaattactg

SEQ ID NO: 821487 - DNA, 33 bp, Homo sapien
ttggccatgaatggaacagcagtaaaatagtaa

SEQ ID NO: 821488 - DNA, 33 bp, Homo sapien
ttggccatgaatggaagagcagtaaaatagtaa

SEQ ID NO: 821489 - DNA, 33 bp, Homo sapien
ttacgatacgcttaccaacgctgacacctttaa

SEQ ID NO: 821490 - DNA, 33 bp, Homo sapien
ttacgatacgcttaccgacgctgacacctttaa

SEQ ID NO: 821491 - DNA, 33 bp, Homo sapien
tccttgaggacagaaacggattttcaagtcttt

SEQ ID NO: 821492 - DNA, 33 bp, Homo sapien
tccttgaggacagaaatggattttcaagtcttt

SEQ ID NO: 821493 - DNA, 33 bp, Homo sapien
gaatacaaggttaccaaaatgattgttccatat

SEQ ID NO: 821494 - DNA, 33 bp, Homo sapien
gaatacaaggttaccagaatgattgttccatat

SEQ ID NO: 821495 - DNA, 33 bp, Homo sapien
cttgcaaatttttccaggctagtcaatcattat

SEQ ID NO: 821496 - DNA, 33 bp, Homo sapien
cttgcaaatttttccatgctagtcaatcattat

SEQ ID NO: 821497 - DNA, 33 bp, Homo sapien
ctggcattgtaatcaccggctctgttatggatt

SEQ ID NO: 821498 - DNA, 33 bp, Homo sapien
ctggcattgtaatcactggctctgttatggatt

SEQ ID NO: 821499 - DNA, 33 bp, Homo sapien
ttatattctatggtaccattccaaggagggaag

SEQ ID NO: 821500 - DNA, 33 bp, Homo sapien
ttatattctatggtactattccaaggagggaag

SEQ ID NO: 821501 - DNA, 33 bp, Homo sapien
gccccatcctacgagcaatgacagaggaacggc

SEQ ID NO: 821502 - DNA, 33 bp, Homo sapien
gccccatcctacgagcgatgacagaggaacggc

SEQ ID NO: 821503 - DNA, 33 bp, Homo sapien
taaatttgaagttcacaataaaaagatatttgt

SEQ ID NO: 821504 - DNA, 33 bp, Homo sapien
taaatttgaagttcacgataaaaagatatttgt

SEQ ID NO: 821505 - DNA, 33 bp, Homo sapien
ctaaaataacctgttgcacagttagtcacaaat

SEQ ID NO: 821506 - DNA, 33 bp, Homo sapien
ctaaaataacctgttgtacagttagtcacaaat

SEQ ID NO: 821507 - DNA, 33 bp, Homo sapien; identical to SEQ ID NO: 821505

SEQ ID NO: 821508 - DNA, 33 bp, Homo sapien; identical to SEQ ID NO: 821506

SEQ ID NO: 821509 - DNA, 33 bp, Homo sapien
aaattatgcctttaagaatgtgataaacataaa

SEQ ID NO: 821510 - DNA, 33 bp, Homo sapien
aaattatgcctttaaggatgtgataaacataaa

SEQ ID NO: 821511 - DNA, 33 bp, Homo sapien
gtctcaacaaagggaccggattagcccaactca

SEQ ID NO: 821512 - DNA, 33 bp, Homo sapien
gtctcaacaaagggactggattagcccaactca

SEQ ID NO: 821513 - DNA, 33 bp, Homo sapien
tagccagtctgcttcactatccagtgcaaattc

SEQ ID NO: 821514 - DNA, 33 bp, Homo sapien
tagccagtctgcttcattatccagtgcaaattc

SEQ ID NO: 821515 - DNA, 33 bp, Homo sapien
tctccctccactgatacaaacattgcaggaaga

SEQ ID NO: 821516 - DNA, 33 bp, Homo sapien
tctccctccactgatataaacattgcaggaaga

SEQ ID NO: 821517 - DNA, 33 bp, Homo sapien
caaagcatttcacatagatagtgtcatctagtt

SEQ ID NO: 821518 - DNA, 33 bp, Homo sapien
caaagcatttcacatatatagtgtcatctagtt

SEQ ID NO: 821519 - DNA, 33 bp, Homo sapien
acaagctccctgtacccatggctctctcaagat

SEQ ID NO: 821520 - DNA, 33 bp, Homo sapien
acaagctccctgtaccgatggctctctcaagat

SEQ ID NO: 821521 - DNA, 33 bp, Homo sapien
atatccaggctaaaaacagtttgtgagaattgc

SEQ ID NO: 821522 - DNA, 33 bp, Homo sapien
atatccaggctaaaaatagtttgtgagaattgc

SEQ ID NO: 821523 - DNA, 33 bp, Homo sapien
cactgaagggaatcccaaagaatctttaggcaa

SEQ ID NO: 821524 - DNA, 33 bp, Homo sapien
cactgaagggaatcccgaagaatctttaggcaa

SEQ ID NO: 821525 - DNA, 33 bp, Homo sapien
caaaactgagatctaaccaggtctgaggtgaaa

SEQ ID NO: 821526 - DNA, 33 bp, Homo sapien
caaaactgagatctaatcaggtctgaggtgaaa

SEQ ID NO: 821527 - DNA, 33 bp, Homo sapien
ctgctttccagtattcaataagagaatgatgta

SEQ ID NO: 821528 - DNA, 33 bp, Homo sapien
ctgctttccagtattcgataagagaatgatgta

SEQ ID NO: 821529 - DNA, 33 bp, Homo sapien
agtaagtctgtcaaaacagaataatgaggagct

SEQ ID NO: 821530 - DNA, 33 bp, Homo sapien
agtaagtctgtcaaaatagaataatgaggagct

SEQ ID NO: 821531 - DNA, 33 bp, Homo sapien
atagcttggactgcatcaagtgcctctggggtt

SEQ ID NO: 821532 - DNA, 33 bp, Homo sapien
atagcttggactgcattaagtgcctctggggtt

SEQ ID NO: 821533 - DNA, 33 bp, Homo sapien
cctcctgagttgttcacaggtatttcatgtgtt

SEQ ID NO: 821534 - DNA, 33 bp, Homo sapien
cctcctgagttgttcataggtatttcatgtgtt

SEQ ID NO: 821535 - DNA, 33 bp, Homo sapien
gctacttagttgaacacgagggaagagggatga

SEQ ID NO: 821536 - DNA, 33 bp, Homo sapien
gctacttagttgaacatgagggaagagggatga

SEQ ID NO: 821537 - DNA, 33 bp, Homo sapien
gtaatttatgaaatccaaccatcattctcaagg

SEQ ID NO: 821538 - DNA, 33 bp, Homo sapien
gtaatttatgaaatccgaccatcattctcaagg

SEQ ID NO: 821539 - DNA, 33 bp, Homo sapien
gactgcaggtgcttaaatggccccacagtagat

SEQ ID NO: 821540 - DNA, 33 bp, Homo sapien
gactgcaggtgcttaagtggccccacagtagat

SEQ ID NO: 821541 - DNA, 33 bp, Homo sapien
gaaacagaaagcttaacgtctcctgtgtcagtt

SEQ ID NO: 821542 - DNA, 33 bp, Homo sapien
gaaacagaaagcttaatgtctcctgtgtcagtt

SEQ ID NO: 821543 - DNA, 33 bp, Homo sapien
cagtagttggtagtaaatggcttctcacttacc

SEQ ID NO: 821544 - DNA, 33 bp, Homo sapien
cagtagttggtagtaactggcttctcacttacc

SEQ ID NO: 821545 - DNA, 33 bp, Homo sapien
cagtcttgtcttgatccagaagtggtgcccctt

SEQ ID NO: 821546 - DNA, 33 bp, Homo sapien
cagtcttgtcttgatcgagaagtggtgcccctt

SEQ ID NO: 821547 - DNA, 33 bp, Homo sapien
tcaaaatgagtgataccagcctctggaacataa

SEQ ID NO: 821548 - DNA, 33 bp, Homo sapien
tcaaaatgagtgatactagcctctggaacataa

SEQ ID NO: 821549 - DNA, 33 bp, Homo sapien
caataactaggttgcaccatcaaaaagtattac

SEQ ID NO: 821550 - DNA, 33 bp, Homo sapien
caataactaggttgcagcatcaaaaagtattac

SEQ ID NO: 821551 - DNA, 33 bp, Homo sapien
ggcactgaggcagaaccgagtttgacatggctg

SEQ ID NO: 821552 - DNA, 33 bp, Homo sapien
ggcactgaggcagaactgagtttgacatggctg

SEQ ID NO: 821553 - DNA, 33 bp, Homo sapien
tcttgtatacctgcccagcttgcctttcagagc

SEQ ID NO: 821554 - DNA, 33 bp, Homo sapien
tcttgtatacctgcccggcttgcctttcagagc

SEQ ID NO: 821555 - DNA, 33 bp, Homo sapien
gatggtatttaagagacagaaagaagcttcctg

SEQ ID NO: 821556 - DNA, 33 bp, Homo sapien
gatggtatttaagagagagaaagaagcttcctg

SEQ ID NO: 821557 - DNA, 33 bp, Homo sapien
gccttgagatttgccaaatattgctgaatgaaa

SEQ ID NO: 821558 - DNA, 33 bp, Homo sapien
gccttgagatttgccatatattgctgaatgaaa

SEQ ID NO: 821559 - DNA, 33 bp, Homo sapien
tttccatgactgagcccccttttcacctgattc

SEQ ID NO: 821560 - DNA, 33 bp, Homo sapien
tttccatgactgagcctccttttcacctgattc

SEQ ID NO: 821561 - DNA, 33 bp, Homo sapien
tctgtaagtggcaaccaagtgtaaagcctctgg

SEQ ID NO: 821562 - DNA, 33 bp, Homo sapien
tctgtaagtggcaaccgagtgtaaagcctctgg

SEQ ID NO: 821563 - DNA, 33 bp, Homo sapien
catttatggttgcttcactaattagaagtcttt

SEQ ID NO: 821564 - DNA, 33 bp, Homo sapien
catttatggttgcttcgctaattagaagtcttt

SEQ ID NO: 821565 - DNA, 33 bp, Homo sapien; identical to SEQ ID NO: 821563

SEQ ID NO: 821566 - DNA, 33 bp, Homo sapien; identical to SEQ ID NO: 821564

SEQ ID NO: 821567 - DNA, 33 bp, Homo sapien
aaaatggcccatagaaatgatatgcgtggcagc

SEQ ID NO: 821568 - DNA, 33 bp, Homo sapien
aaaatggcccatagaagtgatatgcgtggcagc

SEQ ID NO: 821569 - DNA, 33 bp, Homo sapien; identical to SEQ ID NO: 821567

SEQ ID NO: 821570 - DNA, 33 bp, Homo sapien; identical to SEQ ID NO: 821568

SEQ ID NO: 821571 - DNA, 33 bp, Homo sapien
gcaggactctaatctacccccacatttctctta

SEQ ID NO: 821572 - DNA, 33 bp, Homo sapien
gcaggactctaatctatccccacatttctctta

SEQ ID NO: 821573 - DNA, 33 bp, Homo sapien
ttatgaatgtaaaggcaatctagaaaactagtg

SEQ ID NO: 821574 - DNA, 33 bp, Homo sapien
ttatgaatgtaaaggcgatctagaaaactagtg

SEQ ID NO: 821575 - DNA, 33 bp, Homo sapien
taaaataaacaacttactaaaacctcagagcta

SEQ ID NO: 821576 - DNA, 33 bp, Homo sapien
taaaataaacaacttattaaaacctcagagcta

SEQ ID NO: 821577 - DNA, 33 bp, Homo sapien
catcatcattgttggaataggcattggaaggag

SEQ ID NO: 821578 - DNA, 33 bp, Homo sapien
catcatcattgttggactaggcattggaaggag

SEQ ID NO: 821579 - DNA, 33 bp, Homo sapien
tgtgttcactcacataagtagaaacctggctct

SEQ ID NO: 821580 - DNA, 33 bp, Homo sapien
tgtgttcactcacataggtagaaacctggctct

SEQ ID NO: 821581 - DNA, 33 bp, Homo sapien
aaatgttttggtcacaaggaagatcacttaccg

SEQ ID NO: 821582 - DNA, 33 bp, Homo sapien
aaatgttttggtcacagggaagatcacttaccg

SEQ ID NO: 821583 - DNA, 33 bp, Homo sapien
gaatgttgggcccatcaagagagaattagagaa

SEQ ID NO: 821584 - DNA, 33 bp, Homo sapien
gaatgttgggcccatcgagagagaattagagaa

SEQ ID NO: 821585 - DNA, 33 bp, Homo sapien
aattagagaacttggaaagaagagtggacattc

SEQ ID NO: 821586 - DNA, 33 bp, Homo sapien
aattagagaacttggagagaagagtggacattc

SEQ ID NO: 821587 - DNA, 33 bp, Homo sapien
gtgagatgggatgcaaattattccacattacag

SEQ ID NO: 821588 - DNA, 33 bp, Homo sapien
gtgagatgggatgcaagttattccacattacag

SEQ ID NO: 821589 - DNA, 33 bp, Homo sapien
cgccctccacactaagccagattattttggatg

SEQ ID NO: 821590 - DNA, 33 bp, Homo sapien
cgccctccacactaaggcagattattttggatg

SEQ ID NO: 821591 - DNA, 33 bp, Homo sapien
ttccttggctatgcgccaatcacgggactgccc

SEQ ID NO: 821592 - DNA, 33 bp, Homo sapien
ttccttggctatgcgctaatcacgggactgccc

SEQ ID NO: 821593 - DNA, 33 bp, Homo sapien
ctgactggggcgacaaagatgaataagacctga

SEQ ID NO: 821594 - DNA, 33 bp, Homo sapien
ctgactggggcgacaaggatgaataagacctga

SEQ ID NO: 821595 - DNA, 33 bp, Homo sapien
tggtcataggaaaaatcaaaacagagcagagag

SEQ ID NO: 821596 - DNA, 33 bp, Homo sapien
tggtcataggaaaaatgaaaacagagcagagag

SEQ ID NO: 821597 - DNA, 33 bp, Homo sapien
tacttggataaatctagggactctccaggtctc

SEQ ID NO: 821598 - DNA, 33 bp, Homo sapien
tacttggataaatctatggactctccaggtctc

SEQ ID NO: 821599 - DNA, 33 bp, Homo sapien
ggcagcaagacaagcacaaaacaggttggttga

SEQ ID NO: 821600 - DNA, 33 bp, Homo sapien
ggcagcaagacaagcagaaaacaggttggttga

SEQ ID NO: 821601 - DNA, 33 bp, Homo sapien
cctcactttgtgctccaaacaacagtactccag

SEQ ID NO: 821602 - DNA, 33 bp, Homo sapien
cctcactttgtgctccgaacaacagtactccag

SEQ ID NO: 821603 - DNA, 33 bp, Homo sapien
taatccataagtatcccggaattagacagtggt

SEQ ID NO: 821604 - DNA, 33 bp, Homo sapien
taatccataagtatcctggaattagacagtggt

SEQ ID NO: 821605 - DNA, 33 bp, Homo sapien
acaataaatccaaatcagagttccctttattgc

SEQ ID NO: 821606 - DNA, 33 bp, Homo sapien
acaataaatccaaatcggagttccctttattgc

SEQ ID NO: 821607 - DNA, 33 bp, Homo sapien; identical to SEQ ID NO: 821605

SEQ ID NO: 821608 - DNA, 33 bp, Homo sapien; identical to SEQ ID NO: 821606

SEQ ID NO: 821609 - DNA, 33 bp, Homo sapien
tctcgcttcattaccaacgtcataaagattgag

SEQ ID NO: 821610 - DNA, 33 bp, Homo sapien
tctcgcttcattaccaccgtcataaagattgag

SEQ ID NO: 821611 - DNA, 33 bp, Homo sapien
agagagctcagtgccaaacatttcataattacc

SEQ ID NO: 821612 - DNA, 33 bp, Homo sapien
agagagctcagtgccagacatttcataattacc

SEQ ID NO: 821613 - DNA, 33 bp, Homo sapien
ttactcctgctgcaaacgaagaggagagacctg

SEQ ID NO: 821614 - DNA, 33 bp, Homo sapien
ttactcctgctgcaaaggaagaggagagacctg

SEQ ID NO: 821615 - DNA, 33 bp, Homo sapien
tacgacttaccactcaagagaaaggctgtgccc

SEQ ID NO: 821616 - DNA, 33 bp, Homo sapien
tacgacttaccactcatgagaaaggctgtgccc

SEQ ID NO: 821617 - DNA, 33 bp, Homo sapien
tcacaacacagacataaaagttggtattttact

SEQ ID NO: 821618 - DNA, 33 bp, Homo sapien
tcacaacacagacatagaagttggtattttact

SEQ ID NO: 821619 - DNA, 33 bp, Homo sapien
ttaatccctatcctgcactccttggtcatgtaa

SEQ ID NO: 821620 - DNA, 33 bp, Homo sapien
ttaatccctatcctgccctccttggtcatgtaa

SEQ ID NO: 821621 - DNA, 33 bp, Homo sapien
aagcatgggttctggacaccgggagtaaaagca

SEQ ID NO: 821622 - DNA, 33 bp, Homo sapien
aagcatgggttctggataccgggagtaaaagca

SEQ ID NO: 821623 - DNA, 33 bp, Homo sapien
tcttttctggaaggtcccttaccaactgcagca

SEQ ID NO: 821624 - DNA, 33 bp, Homo sapien
tcttttctggaaggtctcttaccaactgcagca

SEQ ID NO: 821625 - DNA, 33 bp, Homo sapien
gtcctatctccatcccaatctaggcaaaccagc

SEQ ID NO: 821626 - DNA, 33 bp, Homo sapien
gtcctatctccatcccgatctaggcaaaccagc

SEQ ID NO: 821627 - DNA, 33 bp, Homo sapien
ttttttttgacgataccattttccacagcagct

SEQ ID NO: 821628 - DNA, 33 bp, Homo sapien
ttttttttgacgatactattttccacagcagct

SEQ ID NO: 821629 - DNA, 33 bp, Homo sapien
ccacacataagctgaaatattgccttatgacat

SEQ ID NO: 821630 - DNA, 33 bp, Homo sapien
ccacacataagctgaagtattgccttatgacat

SEQ ID NO: 821631 - DNA, 33 bp, Homo sapien
ttgggactacaacttacataatgtttcagtagt

SEQ ID NO: 821632 - DNA, 33 bp, Homo sapien
ttgggactacaacttagataatgtttcagtagt

SEQ ID NO: 821633 - DNA, 33 bp, Homo sapien
aaaaataacaaactcactcatgagggaccacca

SEQ ID NO: 821634 - DNA, 33 bp, Homo sapien
aaaaataacaaactcattcatgagggaccacca

SEQ ID NO: 821635 - DNA, 33 bp, Homo sapien
aagctgtgaccagtaacccagcaggcgtgacat

SEQ ID NO: 821636 - DNA, 33 bp, Homo sapien
aagctgtgaccagtaatccagcaggcgtgacat

SEQ ID NO: 821637 - DNA, 33 bp, Homo sapien
ccctttctattgagaaccagtttcttgctttgt

SEQ ID NO: 821638 - DNA, 33 bp, Homo sapien
ccctttctattgagaatcagtttcttgctttgt

SEQ ID NO: 821639 - DNA, 33 bp, Homo sapien
ctaatcggcgtccacactcattcttgatactgg

SEQ ID NO: 821640 - DNA, 33 bp, Homo sapien
ctaatcggcgtccacagtcattcttgatactgg

SEQ ID NO: 821641 - DNA, 33 bp, Homo sapien
gtctgtcagtcatgcactcgaggtaaacagatg

SEQ ID NO: 821642 - DNA, 33 bp, Homo sapien
gtctgtcagtcatgcattcgaggtaaacagatg

SEQ ID NO: 821643 - DNA, 33 bp, Homo sapien
ttattaaattgacaataaaaaggtagaagccca

SEQ ID NO: 821644 - DNA, 33 bp, Homo sapien
ttattaaattgacaatgaaaaggtagaagccca

SEQ ID NO: 821645 - DNA, 33 bp, Homo sapien
ctgttgtcatttactacgtatggtgttagctga

SEQ ID NO: 821646 - DNA, 33 bp, Homo sapien
ctgttgtcatttactatgtatggtgttagctga

SEQ ID NO: 821647 - DNA, 33 bp, Homo sapien
ggataggataaaaagaaccagagaaagctgtgc

SEQ ID NO: 821648 - DNA, 33 bp, Homo sapien
ggataggataaaaagagccagagaaagctgtgc

SEQ ID NO: 821649 - DNA, 33 bp, Homo sapien
gaataaacttcgatcaaatgtttttagcctggg

SEQ ID NO: 821650 - DNA, 33 bp, Homo sapien
gaataaacttcgatcagatgtttttagcctggg

SEQ ID NO: 821651 - DNA, 33 bp, Homo sapien
agtggatccactgggcccatagacccctcctgg

SEQ ID NO: 821652 - DNA, 33 bp, Homo sapien
agtggatccactgggctcatagacccctcctgg

SEQ ID NO: 821653 - DNA, 33 bp, Homo sapien
gcccaggtcctgctcacagtggatccactgggc

SEQ ID NO: 821654 - DNA, 33 bp, Homo sapien
gcccaggtcctgctcatagtggatccactgggc

SEQ ID NO: 821655 - DNA, 33 bp, Homo sapien
ggaagtcagttttactcaggaagttgggattga

SEQ ID NO: 821656 - DNA, 33 bp, Homo sapien
ggaagtcagttttactgaggaagttgggattga

SEQ ID NO: 821657 - DNA, 33 bp, Homo sapien
ttgatgatcatgcatcaaggtctgctctaaatt

SEQ ID NO: 821658 - DNA, 33 bp, Homo sapien
ttgatgatcatgcatcgaggtctgctctaaatt

SEQ ID NO: 821659 - DNA, 33 bp, Homo sapien
aattcgattaagcacaagaagtgtctgatgaaa

SEQ ID NO: 821660 - DNA, 33 bp, Homo sapien
aattcgattaagcacaggaagtgtctgatgaaa

SEQ ID NO: 821661 - DNA, 33 bp, Homo sapien
aactatatggtttgggaaaagtaaagataagta

SEQ ID NO: 821662 - DNA, 33 bp, Homo sapien
aactatatggtttggggaaagtaaagataagta

SEQ ID NO: 821663 - DNA, 33 bp, Homo sapien
accgtatgcgctcccaataaggcagttcatgaa

SEQ ID NO: 821664 - DNA, 33 bp, Homo sapien
accgtatgcgctcccagtaaggcagttcatgaa

SEQ ID NO: 821665 - DNA, 33 bp, Homo sapien
atcacaggttcctgctaaaaactccaatggctt

SEQ ID NO: 821666 - DNA, 33 bp, Homo sapien
atcacaggttcctgctgaaaactccaatggctt

SEQ ID NO: 821667 - DNA, 33 bp, Homo sapien
tcttctttaaacataaatcacaacatcacaggt

SEQ ID NO: 821668 - DNA, 33 bp, Homo sapien
tcttctttaaacataagtcacaacatcacaggt

SEQ ID NO: 821669 - DNA, 33 bp, Homo sapien
acaaacatctgaaaaacgaacggctgaaattta

SEQ ID NO: 821670 - DNA, 33 bp, Homo sapien
acaaacatctgaaaaatgaacggctgaaattta

SEQ ID NO: 821671 - DNA, 33 bp, Homo sapien
acactagtgaaaaagacaactgggtaaaacaca

SEQ ID NO: 821672 - DNA, 33 bp, Homo sapien
acactagtgaaaaagagaactgggtaaaacaca

SEQ ID NO: 821673 - DNA, 33 bp, Homo sapien
aggatcagaagacttcaactcgactattgggat

SEQ ID NO: 821674 - DNA, 33 bp, Homo sapien
aggatcagaagacttcgactcgactattgggat

SEQ ID NO: 821675 - DNA, 33 bp, Homo sapien
ggcaattacaagtgagaagtctcctccaatggg

SEQ ID NO: 821676 - DNA, 33 bp, Homo sapien
ggcaattacaagtgagtagtctcctccaatggg

SEQ ID NO: 821677 - DNA, 33 bp, Homo sapien
accactatgttcctcaacttcaaggctcttgtg

SEQ ID NO: 821678 - DNA, 33 bp, Homo sapien
accactatgttcctcatcttcaaggctcttgtg

SEQ ID NO: 821679 - DNA, 33 bp, Homo sapien
ggagtatttgcccaacaaatccttttctttact

SEQ ID NO: 821680 - DNA, 33 bp, Homo sapien
ggagtatttgcccaactaatccttttctttact

SEQ ID NO: 821681 - DNA, 33 bp, Homo sapien
tgggctataaatgtgccaggaaaaaaatccttg

SEQ ID NO: 821682 - DNA, 33 bp, Homo sapien
tgggctataaatgtgctaggaaaaaaatccttg

SEQ ID NO: 821683 - DNA, 33 bp, Homo sapien
cttgtccactgctgcaacatcaagagagctcat

SEQ ID NO: 821684 - DNA, 33 bp, Homo sapien
cttgtccactgctgcatcatcaagagagctcat

SEQ ID NO: 821685 - DNA, 33 bp, Homo sapien
tgctacatacatataacggaattgaattgcagg

SEQ ID NO: 821686 - DNA, 33 bp, Homo sapien
tgctacatacatataatggaattgaattgcagg

SEQ ID NO: 821687 - DNA, 33 bp, Homo sapien
caccgtgccctgccgaataggtgctattattgc

SEQ ID NO: 821688 - DNA, 33 bp, Homo sapien
caccgtgccctgccgagtaggtgctattattgc

SEQ ID NO: 821689 - DNA, 33 bp, Homo sapien
aaatggagccaagcgacgcaagggtacctgtgg

SEQ ID NO: 821690 - DNA, 33 bp, Homo sapien
aaatggagccaagcgatgcaagggtacctgtgg

SEQ ID NO: 821691 - DNA, 33 bp, Homo sapien
aatgagagataatctaagtaaggtactatcaca

SEQ ID NO: 821692 - DNA, 33 bp, Homo sapien
aatgagagataatctatgtaaggtactatcaca

SEQ ID NO: 821693 - DNA, 33 bp, Homo sapien
taagaacctgaaaaaaggcaagtaccatagcag

SEQ ID NO: 821694 - DNA, 33 bp, Homo sapien
taagaacctgaaaaaatgcaagtaccatagcag

SEQ ID NO: 821695 - DNA, 33 bp, Homo sapien
gaaaacttttcttcatcagctacttggtttctc

SEQ ID NO: 821696 - DNA, 33 bp, Homo sapien
gaaaacttttcttcatgagctacttggtttctc

SEQ ID NO: 821697 - DNA, 33 bp, Homo sapien
gatcatcaatggctatcaaaaccatgaagtgaa

SEQ ID NO: 821698 - DNA, 33 bp, Homo sapien
gatcatcaatggctattaaaaccatgaagtgaa

SEQ ID NO: 821699 - DNA, 33 bp, Homo sapien
aattagcccatcatccacgtagatcttgcagcc

SEQ ID NO: 821700 - DNA, 33 bp, Homo sapien
aattagcccatcatcctcgtagatcttgcagcc

SEQ ID NO: 821701 - DNA, 33 bp, Homo sapien
ttttagatgtaactcaaggtgaaaaatccattt

SEQ ID NO: 821702 - DNA, 33 bp, Homo sapien
ttttagatgtaactcagggtgaaaaatccattt

SEQ ID NO: 821703 - DNA, 33 bp, Homo sapien
tccctagttggcattcagaacatttttccccat

SEQ ID NO: 821704 - DNA, 33 bp, Homo sapien
tccctagttggcattcggaacatttttccccat

SEQ ID NO: 821705 - DNA, 33 bp, Homo sapien
tccagaagagcagaaaataagctgatacaaacc

SEQ ID NO: 821706 - DNA, 33 bp, Homo sapien
tccagaagagcagaaagtaagctgatacaaacc

SEQ ID NO: 821707 - DNA, 33 bp, Homo sapien
acttagagtatgaagcaatgttataaagcaatt

SEQ ID NO: 821708 - DNA, 33 bp, Homo sapien
acttagagtatgaagctatgttataaagcaatt

SEQ ID NO: 821709 - DNA, 33 bp, Homo sapien
agaaggtatctccgaaaaggtggcattgaggtt

SEQ ID NO: 821710 - DNA, 33 bp, Homo sapien
agaaggtatctccgaagaggtggcattgaggtt

SEQ ID NO: 821711 - DNA, 33 bp, Homo sapien
gtgagaggcaggataacggaatggtaaacacac

SEQ ID NO: 821712 - DNA, 33 bp, Homo sapien
gtgagaggcaggataatggaatggtaaacacac

SEQ ID NO: 821713 - DNA, 33 bp, Homo sapien
ttgtctttaaaccatacgttccttgaggtcagg

SEQ ID NO: 821714 - DNA, 33 bp, Homo sapien
ttgtctttaaaccatatgttccttgaggtcagg

SEQ ID NO: 821715 - DNA, 33 bp, Homo sapien
agcaatgggaaggaaacgaaggttcttaaagga

SEQ ID NO: 821716 - DNA, 33 bp, Homo sapien
agcaatgggaaggaaatgaaggttcttaaagga

SEQ ID NO: 821717 - DNA, 33 bp, Homo sapien
cacaaatacatgattgcaagttcctagaacagt

SEQ ID NO: 821718 - DNA, 33 bp, Homo sapien
cacaaatacatgattgtaagttcctagaacagt

SEQ ID NO: 821719 - DNA, 33 bp, Homo sapien
taaaaaatggctttcacagtcctcaaagtcctc

SEQ ID NO: 821720 - DNA, 33 bp, Homo sapien
taaaaaatggctttcatagtcctcaaagtcctc

SEQ ID NO: 821721 - DNA, 33 bp, Homo sapien
atcacatcctctgtccgagtaagttcaagacaa

SEQ ID NO: 821722 - DNA, 33 bp, Homo sapien
atcacatcctctgtcctagtaagttcaagacaa

SEQ ID NO: 821723 - DNA, 33 bp, Homo sapien
ctgattatagaaaaaagtgtccttgtttggagc

SEQ ID NO: 821724 - DNA, 33 bp, Homo sapien
ctgattatagaaaaaattgtccttgtttggagc

SEQ ID NO: 821725 - DNA, 33 bp, Homo sapien
tctcaatgaagaatcaagatacaccaaaagaac

SEQ ID NO: 821726 - DNA, 33 bp, Homo sapien
tctcaatgaagaatcaggatacaccaaaagaac

SEQ ID NO: 821727 - DNA, 33 bp, Homo sapien
tacattttctagtagccataaagtgaaaagtaa

SEQ ID NO: 821728 - DNA, 33 bp, Homo sapien
tacattttctagtagcgataaagtgaaaagtaa

SEQ ID NO: 821729 - DNA, 33 bp, Homo sapien
taaaggttgagaataaacatcatcgtgtagtac

SEQ ID NO: 821730 - DNA, 33 bp, Homo sapien
taaaggttgagaataagcatcatcgtgtagtac

SEQ ID NO: 821731 - DNA, 33 bp, Homo sapien
accctgggtgaacccgaacttcaaagtgttttg

SEQ ID NO: 821732 - DNA, 33 bp, Homo sapien
accctgggtgaacccggacttcaaagtgttttg

SEQ ID NO: 821733 - DNA, 33 bp, Homo sapien
ctgagtgaagccacgcacaagccccaaaacttc

SEQ ID NO: 821734 - DNA, 33 bp, Homo sapien
ctgagtgaagccacgcgcaagccccaaaacttc

SEQ ID NO: 821735 - DNA, 33 bp, Homo sapien
tttcactaggtgttgacaaaagacagcccgcag

SEQ ID NO: 821736 - DNA, 33 bp, Homo sapien
tttcactaggtgttgataaaagacagcccgcag

SEQ ID NO: 821737 - DNA, 33 bp, Homo sapien
gtacacatctttatgtaacaagtccctgttatt

SEQ ID NO: 821738 - DNA, 33 bp, Homo sapien
gtacacatctttatgtgacaagtccctgttatt

SEQ ID NO: 821739 - DNA, 33 bp, Homo sapien
atgctcattaggctcaccatcactttcctccct

SEQ ID NO: 821740 - DNA, 33 bp, Homo sapien
atgctcattaggctcatcatcactttcctccct

SEQ ID NO: 821741 - DNA, 33 bp, Homo sapien
tactgagcatttgctcaaaggccattacaaaat

SEQ ID NO: 821742 - DNA, 33 bp, Homo sapien
tactgagcatttgctcgaaggccattacaaaat

SEQ ID NO: 821743 - DNA, 33 bp, Homo sapien
catatttcacaaatacaatgtgtagagtctcat

SEQ ID NO: 821744 - DNA, 33 bp, Homo sapien
catatttcacaaatacgatgtgtagagtctcat

SEQ ID NO: 821745 - DNA, 33 bp, Homo sapien
ttaagttgctactatgcagtgatgaggacaggc

SEQ ID NO: 821746 - DNA, 33 bp, Homo sapien
ttaagttgctactatgtagtgatgaggacaggc

SEQ ID NO: 821747 - DNA, 33 bp, Homo sapien
cagctgtagcctaagacgatctctggtgctagg

SEQ ID NO: 821748 - DNA, 33 bp, Homo sapien
cagctgtagcctaagatgatctctggtgctagg

SEQ ID NO: 821749 - DNA, 33 bp, Homo sapien
aactaaagccaggtcagcttgataggattgtga

SEQ ID NO: 821750 - DNA, 33 bp, Homo sapien
aactaaagccaggtcatcttgataggattgtga

SEQ ID NO: 821751 - DNA, 33 bp, Homo sapien
ttcgatctgcaccagaaccattctagattccac

SEQ ID NO: 821752 - DNA, 33 bp, Homo sapien
ttcgatctgcaccagagccattctagattccac

SEQ ID NO: 821753 - DNA, 33 bp, Homo sapien
aggagctaagagaaagactaaaataggaaccaa

SEQ ID NO: 821754 - DNA, 33 bp, Homo sapien
aggagctaagagaaaggctaaaataggaaccaa

SEQ ID NO: 821755 - DNA, 33 bp, Homo sapien
atacagaactgtactaggagaaaacattttcat

SEQ ID NO: 821756 - DNA, 33 bp, Homo sapien
atacagaactgtactatgagaaaacattttcat

SEQ ID NO: 821757 - DNA, 33 bp, Homo sapien
ttgctataggttgctcaatctgtccaccatgtc

SEQ ID NO: 821758 - DNA, 33 bp, Homo sapien
ttgctataggttgctccatctgtccaccatgtc

SEQ ID NO: 821759 - DNA, 33 bp, Homo sapien
tctcctcacttgccgacatttgacagaagtaat

SEQ ID NO: 821760 - DNA, 33 bp, Homo sapien
tctcctcacttgccgatatttgacagaagtaat

SEQ ID NO: 821761 - DNA, 33 bp, Homo sapien
gtcccactcagggccaagtcaaggaggagttca

SEQ ID NO: 821762 - DNA, 33 bp, Homo sapien
gtcccactcagggccaggtcaaggaggagttca

SEQ ID NO: 821763 - DNA, 33 bp, Homo sapien
tgcctcactgggaaaaaaggattaagagctttg

SEQ ID NO: 821764 - DNA, 33 bp, Homo sapien
tgcctcactgggaaaagaggattaagagctttg

SEQ ID NO: 821765 - DNA, 33 bp, Homo sapien
tctgaaaaacaatcaaggtacctcatgaattac

SEQ ID NO: 821766 - DNA, 33 bp, Homo sapien
tctgaaaaacaatcaatgtacctcatgaattac

SEQ ID NO: 821767 - DNA, 33 bp, Homo sapien
tggcaccagtgcttcacggaatcaatgatctta

SEQ ID NO: 821768 - DNA, 33 bp, Homo sapien
tggcaccagtgcttcatggaatcaatgatctta

SEQ ID NO: 821769 - DNA, 33 bp, Homo sapien
caacttggcaataagtaaaaaaatgcaatattt

SEQ ID NO: 821770 - DNA, 33 bp, Homo sapien
caacttggcaataagttaaaaaatgcaatattt

SEQ ID NO: 821771 - DNA, 33 bp, Homo sapien
gaaatcgaggagtaataataaaacgtctacata

SEQ ID NO: 821772 - DNA, 33 bp, Homo sapien
gaaatcgaggagtaatcataaaacgtctacata

SEQ ID NO: 821773 - DNA, 33 bp, Homo sapien
tcaaatagtttgagccactgtttcgggggaacc

SEQ ID NO: 821774 - DNA, 33 bp, Homo sapien
tcaaatagtttgagccgctgtttcgggggaacc

SEQ ID NO: 821775 - DNA, 33 bp, Homo sapien
gggaaaactggacatccagaagcaaaagaatga

SEQ ID NO: 821776 - DNA, 33 bp, Homo sapien
gggaaaactggacatctagaagcaaaagaatga

SEQ ID NO: 821777 - DNA, 33 bp, Homo sapien
gagatatactgcacacccatgtttgttgtagca

SEQ ID NO: 821778 - DNA, 33 bp, Homo sapien
gagatatactgcacactcatgtttgttgtagca

SEQ ID NO: 821779 - DNA, 33 bp, Homo sapien
tttcccaggagatatgaaatagtagttcacacc

SEQ ID NO: 821780 - DNA, 33 bp, Homo sapien
tttcccaggagatatggaatagtagttcacacc

SEQ ID NO: 821781 - DNA, 33 bp, Homo sapien
ccctaaacccacagagcaaattccattttggca

SEQ ID NO: 821782 - DNA, 33 bp, Homo sapien
ccctaaacccacagagtaaattccattttggca

SEQ ID NO: 821783 - DNA, 33 bp, Homo sapien
acagaggctatgccacactataaataagctgaa

SEQ ID NO: 821784 - DNA, 33 bp, Homo sapien
acagaggctatgccacgctataaataagctgaa

SEQ ID NO: 821785 - DNA, 33 bp, Homo sapien
agaagacagcagagaacgaaaatttatacgaaa

SEQ ID NO: 821786 - DNA, 33 bp, Homo sapien
agaagacagcagagaaggaaaatttatacgaaa

SEQ ID NO: 821787 - DNA, 33 bp, Homo sapien
caggccatataactgaaagctaagaagtcaggg

SEQ ID NO: 821788 - DNA, 33 bp, Homo sapien
caggccatataactgagagctaagaagtcaggg

SEQ ID NO: 821789 - DNA, 33 bp, Homo sapien
gcagtgtattacttacaagtcccagagagaaca

SEQ ID NO: 821790 - DNA, 33 bp, Homo sapien
gcagtgtattacttacgagtcccagagagaaca

SEQ ID NO: 821791 - DNA, 33 bp, Homo sapien
gtgagctacacagacaaaagtttctccagtatg

SEQ ID NO: 821792 - DNA, 33 bp, Homo sapien
gtgagctacacagacagaagtttctccagtatg

SEQ ID NO: 821793 - DNA, 33 bp, Homo sapien
gcacttgttagaggtgcaagacctcttttccag

SEQ ID NO: 821794 - DNA, 33 bp, Homo sapien
gcacttgttagaggtgtaagacctcttttccag

SEQ ID NO: 821795 - DNA, 33 bp, Homo sapien
attgttgaaatgcgaacagggccttaggattcg

SEQ ID NO: 821796 - DNA, 33 bp, Homo sapien
attgttgaaatgcgaatagggccttaggattcg

SEQ ID NO: 821797 - DNA, 33 bp, Homo sapien
cagcactgcttacaataaccaagattcagaagc

SEQ ID NO: 821798 - DNA, 33 bp, Homo sapien
cagcactgcttacaatcaccaagattcagaagc

SEQ ID NO: 821799 - DNA, 33 bp, Homo sapien
agtctgtgaaaagagacagcattgagtgtgcca

SEQ ID NO: 821800 - DNA, 33 bp, Homo sapien
agtctgtgaaaagagatagcattgagtgtgcca

SEQ ID NO: 821801 - DNA, 33 bp, Homo sapien
attaaatgcattggcactaagtcctaagaaaga

SEQ ID NO: 821802 - DNA, 33 bp, Homo sapien
attaaatgcattggcagtaagtcctaagaaaga

SEQ ID NO: 821803 - DNA, 33 bp, Homo sapien
atgcttccaatacatacgcagtgtttcttgaaa

SEQ ID NO: 821804 - DNA, 33 bp, Homo sapien
atgcttccaatacatatgcagtgtttcttgaaa

SEQ ID NO: 821805 - DNA, 33 bp, Homo sapien
attattggtactccaaaagcatattgtctttat

SEQ ID NO: 821806 - DNA, 33 bp, Homo sapien
attattggtactccaagagcatattgtctttat

SEQ ID NO: 821807 - DNA, 33 bp, Homo sapien
tatgcccttgtagccaactgtttttatcagata

SEQ ID NO: 821808 - DNA, 33 bp, Homo sapien
tatgcccttgtagccagctgtttttatcagata

SEQ ID NO: 821809 - DNA, 33 bp, Homo sapien
tcccctctggaaataaatcatcctaacctgaat

SEQ ID NO: 821810 - DNA, 33 bp, Homo sapien
tcccctctggaaataagtcatcctaacctgaat

SEQ ID NO: 821811 - DNA, 33 bp, Homo sapien
ctggattcctgacctacaaaattatgagctata

SEQ ID NO: 821812 - DNA, 33 bp, Homo sapien
ctggattcctgacctataaaattatgagctata

SEQ ID NO: 821813 - DNA, 33 bp, Homo sapien
gaaaccagacactaaaaagtacatgtcataaca

SEQ ID NO: 821814 - DNA, 33 bp, Homo sapien
gaaaccagacactaaatagtacatgtcataaca

SEQ ID NO: 821815 - DNA, 33 bp, Homo sapien
gccttcctgtggagaaccttgaagagataccag

SEQ ID NO: 821816 - DNA, 33 bp, Homo sapien
gccttcctgtggagaatcttgaagagataccag

SEQ ID NO: 821817 - DNA, 33 bp, Homo sapien
tatatttatggggttacatgcatagaatgtata

SEQ ID NO: 821818 - DNA, 33 bp, Homo sapien
tatatttatggggttatatgcatagaatgtata

SEQ ID NO: 821819 - DNA, 33 bp, Homo sapien
acaatccacccgtgcacacatcaggtatcactt

SEQ ID NO: 821820 - DNA, 33 bp, Homo sapien
acaatccacccgtgcatacatcaggtatcactt

SEQ ID NO: 821821 - DNA, 33 bp, Homo sapien
agatgctgagcctgggaacaaggtctatcccaa

SEQ ID NO: 821822 - DNA, 33 bp, Homo sapien
agatgctgagcctgggcacaaggtctatcccaa

SEQ ID NO: 821823 - DNA, 33 bp, Homo sapien
ggctatgtcattagccacatacattagggcatt

SEQ ID NO: 821824 - DNA, 33 bp, Homo sapien
ggctatgtcattagccgcatacattagggcatt

SEQ ID NO: 821825 - DNA, 33 bp, Homo sapien
ctttatctgagtgtaccggaaacttctctatct

SEQ ID NO: 821826 - DNA, 33 bp, Homo sapien
ctttatctgagtgtactggaaacttctctatct

SEQ ID NO: 821827 - DNA, 33 bp, Homo sapien
gacagtaaacccacaaactttatctgagtgtac

SEQ ID NO: 821828 - DNA, 33 bp, Homo sapien
gacagtaaacccacaagctttatctgagtgtac

SEQ ID NO: 821829 - DNA, 33 bp, Homo sapien
tgagatgcagaagctacgagcattgtaatttga

SEQ ID NO: 821830 - DNA, 33 bp, Homo sapien
tgagatgcagaagctatgagcattgtaatttga

SEQ ID NO: 821831 - DNA, 33 bp, Homo sapien
tttcatttctaccacaaataagtccttgtcagc

SEQ ID NO: 821832 - DNA, 33 bp, Homo sapien
tttcatttctaccacagataagtccttgtcagc

SEQ ID NO: 821833 - DNA, 33 bp, Homo sapien
atgcaggtcattagcaccaaataaaacctcgtt

SEQ ID NO: 821834 - DNA, 33 bp, Homo sapien
atgcaggtcattagcagcaaataaaacctcgtt

SEQ ID NO: 821835 - DNA, 33 bp, Homo sapien
ctcattataaaaccagactaattagagctcagg

SEQ ID NO: 821836 - DNA, 33 bp, Homo sapien
ctcattataaaaccagcctaattagagctcagg

SEQ ID NO: 821837 - DNA, 33 bp, Homo sapien
ctatgtataccaaatgaatggatctgtataagc

SEQ ID NO: 821838 - DNA, 33 bp, Homo sapien
ctatgtataccaaatggatggatctgtataagc

SEQ ID NO: 821839 - DNA, 33 bp, Homo sapien
ttaagtcaatggctcaaaaatggaatttactgg

SEQ ID NO: 821840 - DNA, 33 bp, Homo sapien
ttaagtcaatggctcagaaatggaatttactgg

SEQ ID NO: 821841 - DNA, 33 bp, Homo sapien
tatatagtggctaaagaaacatggaatagtaat

SEQ ID NO: 821842 - DNA, 33 bp, Homo sapien
tatatagtggctaaaggaacatggaatagtaat

SEQ ID NO: 821843 - DNA, 33 bp, Homo sapien
aatatatggaaatgagccgtttttaagaatgga

SEQ ID NO: 821844 - DNA, 33 bp, Homo sapien
aatatatggaaatgaggcgtttttaagaatgga

SEQ ID NO: 821845 - DNA, 33 bp, Homo sapien
ggctgtggcaaaaacactaatcatgatctagat

SEQ ID NO: 821846 - DNA, 33 bp, Homo sapien
ggctgtggcaaaaacagtaatcatgatctagat

SEQ ID NO: 821847 - DNA, 33 bp, Homo sapien
gagctgtcctgtgccaggtacgatgttaagcaa

SEQ ID NO: 821848 - DNA, 33 bp, Homo sapien
gagctgtcctgtgccatgtacgatgttaagcaa

SEQ ID NO: 821849 - DNA, 33 bp, Homo sapien
atgtaaagtattctgaagtattgctacaccttc

SEQ ID NO: 821850 - DNA, 33 bp, Homo sapien
atgtaaagtattctgatgtattgctacaccttc

SEQ ID NO: 821851 - DNA, 33 bp, Homo sapien
ttttccagaaagaataaagtgatcatagcaaac

SEQ ID NO: 821852 - DNA, 33 bp, Homo sapien
ttttccagaaagaatatagtgatcatagcaaac

SEQ ID NO: 821853 - DNA, 33 bp, Homo sapien
tagttttgaagatgaaagttttagagtcagaaa

SEQ ID NO: 821854 - DNA, 33 bp, Homo sapien
tagttttgaagatgaatgttttagagtcagaaa

SEQ ID NO: 821855 - DNA, 33 bp, Homo sapien
tctcttttaaaaatgaaagatgccacttttaaa

SEQ ID NO: 821856 - DNA, 33 bp, Homo sapien
tctcttttaaaaatgagagatgccacttttaaa

SEQ ID NO: 821857 - DNA, 33 bp, Homo sapien
ttcattctaaaatgtgcactgttctgtagctgt

SEQ ID NO: 821858 - DNA, 33 bp, Homo sapien
ttcattctaaaatgtgtactgttctgtagctgt

SEQ ID NO: 821859 - DNA, 33 bp, Homo sapien
tggggcctgtgaaagaggcttaacccacagaaa

SEQ ID NO: 821860 - DNA, 33 bp, Homo sapien
tggggcctgtgaaagatgcttaacccacagaaa

SEQ ID NO: 821861 - DNA, 33 bp, Homo sapien
ctgctttagaatggcacgtactgagtagagatc

SEQ ID NO: 821862 - DNA, 33 bp, Homo sapien
ctgctttagaatggcaggtactgagtagagatc

SEQ ID NO: 821863 - DNA, 33 bp, Homo sapien
gatgtcaatccccccaatgcagtgttttatatg

SEQ ID NO: 821864 - DNA, 33 bp, Homo sapien
gatgtcaatccccccagtgcagtgttttatatg

SEQ ID NO: 821865 - DNA, 33 bp, Homo sapien
caccacagggaccagtaaaatccacgactgggt

SEQ ID NO: 821866 - DNA, 33 bp, Homo sapien
caccacagggaccagtgaaatccacgactgggt

SEQ ID NO: 821867 - DNA, 33 bp, Homo sapien
ttcagagagtcgatgacaaagctctcatccaaa

SEQ ID NO: 821868 - DNA, 33 bp, Homo sapien
ttcagagagtcgatgataaagctctcatccaaa

SEQ ID NO: 821869 - DNA, 33 bp, Homo sapien
gataataaaccggatggatgaaggaaactgata

SEQ ID NO: 821870 - DNA, 33 bp, Homo sapien
gataataaaccggatgtatgaaggaaactgata

SEQ ID NO: 821871 - DNA, 33 bp, Homo sapien
agtatctcacacttcaataggcattgtctgggg

SEQ ID NO: 821872 - DNA, 33 bp, Homo sapien
agtatctcacacttcagtaggcattgtctgggg

SEQ ID NO: 821873 - DNA, 33 bp, Homo sapien
tctagaaatagtcagaagaagtcattttattat

SEQ ID NO: 821874 - DNA, 33 bp, Homo sapien
tctagaaatagtcagaggaagtcattttattat

SEQ ID NO: 821875 - DNA, 33 bp, Homo sapien
tgcttgatcaaggcctaaagttatgtggctttt

SEQ ID NO: 821876 - DNA, 33 bp, Homo sapien
tgcttgatcaaggcctgaagttatgtggctttt

SEQ ID NO: 821877 - DNA, 33 bp, Homo sapien
cacgatgggcaacacaagtccattggaagaaac

SEQ ID NO: 821878 - DNA, 33 bp, Homo sapien
cacgatgggcaacacaggtccattggaagaaac

SEQ ID NO: 821879 - DNA, 33 bp, Homo sapien
aagtgggacaggcccaagtggaaggagagatga

SEQ ID NO: 821880 - DNA, 33 bp, Homo sapien
aagtgggacaggcccaggtggaaggagagatga

SEQ ID NO: 821881 - DNA, 33 bp, Homo sapien
ggcatgggtgttggggacaatggcaattgagtg

SEQ ID NO: 821882 - DNA, 33 bp, Homo sapien
ggcatgggtgttgggggcaatggcaattgagtg

SEQ ID NO: 821883 - DNA, 33 bp, Homo sapien
aacttaggtgcaccaccgcctgtcaacagatgt

SEQ ID NO: 821884 - DNA, 33 bp, Homo sapien
aacttaggtgcaccactgcctgtcaacagatgt

SEQ ID NO: 821885 - DNA, 33 bp, Homo sapien
gaggattaaatgacacaatgcatcataagcact

SEQ ID NO: 821886 - DNA, 33 bp, Homo sapien
gaggattaaatgacacgatgcatcataagcact

SEQ ID NO: 821887 - DNA, 33 bp, Homo sapien
aggaaagtgatggtaacaatagtgtctgtctta

SEQ ID NO: 821888 - DNA, 33 bp, Homo sapien
aggaaagtgatggtaataatagtgtctgtctta

SEQ ID NO: 821889 - DNA, 33 bp, Homo sapien
atgcttgtcctagaccaactgttcctggcacat

SEQ ID NO: 821890 - DNA, 33 bp, Homo sapien
atgcttgtcctagacctactgttcctggcacat

SEQ ID NO: 821891 - DNA, 33 bp, Homo sapien
tggcatacacatttcaaactggaactttggaag

SEQ ID NO: 821892 - DNA, 33 bp, Homo sapien
tggcatacacatttcagactggaactttggaag

SEQ ID NO: 821893 - DNA, 33 bp, Homo sapien
gcactacaaagaagaaacttgctgaattgagaa

SEQ ID NO: 821894 - DNA, 33 bp, Homo sapien
gcactacaaagaagaagcttgctgaattgagaa

SEQ ID NO: 821895 - DNA, 33 bp, Homo sapien
aatggcagcaaccaaaactattttgttcatcat

SEQ ID NO: 821896 - DNA, 33 bp, Homo sapien
aatggcagcaaccaaatctattttgttcatcat

SEQ ID NO: 821897 - DNA, 33 bp, Homo sapien
gaaattcctgtaggctaaaatctcaggacagac

SEQ ID NO: 821898 - DNA, 33 bp, Homo sapien
gaaattcctgtaggctgaaatctcaggacagac

SEQ ID NO: 821899 - DNA, 33 bp, Homo sapien
agctaaaataattccaaagttttgtatgctatt

SEQ ID NO: 821900 - DNA, 33 bp, Homo sapien
agctaaaataattccagagttttgtatgctatt

SEQ ID NO: 821901 - DNA, 33 bp, Homo sapien
tacgagagcccctaatcaggagatcactctgaa

SEQ ID NO: 821902 - DNA, 33 bp, Homo sapien
tacgagagcccctaatgaggagatcactctgaa

SEQ ID NO: 821903 - DNA, 33 bp, Homo sapien
catttaggaagtcagaaggcctatgttactctt

SEQ ID NO: 821904 - DNA, 33 bp, Homo sapien
catttaggaagtcagagggcctatgttactctt

SEQ ID NO: 821905 - DNA, 33 bp, Homo sapien
gaggtgaggcctaagaagcatttttgtctacac

SEQ ID NO: 821906 - DNA, 33 bp, Homo sapien
gaggtgaggcctaagaggcatttttgtctacac

SEQ ID NO: 821907 - DNA, 33 bp, Homo sapien
tatcaagagaattgtaaagcagctttgttaata

SEQ ID NO: 821908 - DNA, 33 bp, Homo sapien
tatcaagagaattgtacagcagctttgttaata

SEQ ID NO: 821909 - DNA, 33 bp, Homo sapien
aatgggactatgttcccgaaaatacaattttaa

SEQ ID NO: 821910 - DNA, 33 bp, Homo sapien
aatgggactatgttcctgaaaatacaattttaa

SEQ ID NO: 821911 - DNA, 33 bp, Homo sapien
ttattgaacaactacagagcatccagtctttgc

SEQ ID NO: 821912 - DNA, 33 bp, Homo sapien
ttattgaacaactacatagcatccagtctttgc

SEQ ID NO: 821913 - DNA, 33 bp, Homo sapien
tttttccttactcttccccttagctgattgagt

SEQ ID NO: 821914 - DNA, 33 bp, Homo sapien
tttttccttactcttctccttagctgattgagt

SEQ ID NO: 821915 - DNA, 33 bp, Homo sapien
aaatgaaattcttctcaatctaaggttagtttg

SEQ ID NO: 821916 - DNA, 33 bp, Homo sapien
aaatgaaattcttctccatctaaggttagtttg

SEQ ID NO: 821917 - DNA, 33 bp, Homo sapien
cacaaaacctggaaacaattttctacaggaaat

SEQ ID NO: 821918 - DNA, 33 bp, Homo sapien
cacaaaacctggaaacgattttctacaggaaat

SEQ ID NO: 821919 - DNA, 33 bp, Homo sapien
tcctcagatgtatctacgaccgttcactccaaa

SEQ ID NO: 821920 - DNA, 33 bp, Homo sapien
tcctcagatgtatctatgaccgttcactccaaa

SEQ ID NO: 821921 - DNA, 33 bp, Homo sapien
agttagttcccaaaaggcatagtcagagcaaag

SEQ ID NO: 821922 - DNA, 33 bp, Homo sapien
agttagttcccaaaagtcatagtcagagcaaag

SEQ ID NO: 821923 - DNA, 33 bp, Homo sapien
cagcagggagttttcacggaatctggtggtcac

SEQ ID NO: 821924 - DNA, 33 bp, Homo sapien
cagcagggagttttcatggaatctggtggtcac

SEQ ID NO: 821925 - DNA, 33 bp, Homo sapien
ctgaaaatactttaaacggatgacattacaaca

SEQ ID NO: 821926 - DNA, 33 bp, Homo sapien
ctgaaaatactttaaatggatgacattacaaca

SEQ ID NO: 821927 - DNA, 33 bp, Homo sapien
agtgttactagataggaaagcaacgtctctgga

SEQ ID NO: 821928 - DNA, 33 bp, Homo sapien
agtgttactagataggcaagcaacgtctctgga

SEQ ID NO: 821929 - DNA, 33 bp, Homo sapien
caattccaggcaccacaaaaggctgaatgagat

SEQ ID NO: 821930 - DNA, 33 bp, Homo sapien
caattccaggcaccacgaaaggctgaatgagat

SEQ ID NO: 821931 - DNA, 33 bp, Homo sapien
gtaattagggaggttaaaatggagcactgtttg

SEQ ID NO: 821932 - DNA, 33 bp, Homo sapien
gtaattagggaggttacaatggagcactgtttg

SEQ ID NO: 821933 - DNA, 33 bp, Homo sapien
gtgggaataagtcaccaaataactcttagaaat

SEQ ID NO: 821934 - DNA, 33 bp, Homo sapien
gtgggaataagtcaccgaataactcttagaaat

SEQ ID NO: 821935 - DNA, 33 bp, Homo sapien
aaacaatcaaaaaggcacagaaatcatggatga

SEQ ID NO: 821936 - DNA, 33 bp, Homo sapien
aaacaatcaaaaaggcgcagaaatcatggatga

SEQ ID NO: 821937 - DNA, 33 bp, Homo sapien
agaaatccgccctttccattgctaagttgccat

SEQ ID NO: 821938 - DNA, 33 bp, Homo sapien
agaaatccgccctttctattgctaagttgccat

SEQ ID NO: 821939 - DNA, 33 bp, Homo sapien
cctcttttggagtaaacgtaaggcgtaattttg

SEQ ID NO: 821940 - DNA, 33 bp, Homo sapien
cctcttttggagtaaatgtaaggcgtaattttg

SEQ ID NO: 821941 - DNA, 33 bp, Homo sapien
actgtgttcctcgtgaccagtagtcccaggaag

SEQ ID NO: 821942 - DNA, 33 bp, Homo sapien
actgtgttcctcgtgatcagtagtcccaggaag

SEQ ID NO: 821943 - DNA, 33 bp, Homo sapien
aagtgagatacagccacgaaccaaacagtcatt

SEQ ID NO: 821944 - DNA, 33 bp, Homo sapien
aagtgagatacagccatgaaccaaacagtcatt

SEQ ID NO: 821945 - DNA, 33 bp, Homo sapien
cttcctgtgaaagatacgtgacttgattttaac

SEQ ID NO: 821946 - DNA, 33 bp, Homo sapien
cttcctgtgaaagatatgtgacttgattttaac

SEQ ID NO: 821947 - DNA, 33 bp, Homo sapien
tcttctgtgcaaccataaaaataaggaaattaa

SEQ ID NO: 821948 - DNA, 33 bp, Homo sapien
tcttctgtgcaaccatcaaaataaggaaattaa

SEQ ID NO: 821949 - DNA, 33 bp, Homo sapien
gctgttctgctcctcaacagttagttctatctt

SEQ ID NO: 821950 - DNA, 33 bp, Homo sapien
gctgttctgctcctcagcagttagttctatctt

SEQ ID NO: 821951 - DNA, 33 bp, Homo sapien
aatagttgaaagagtacaggctaagaaatagtt

SEQ ID NO: 821952 - DNA, 33 bp, Homo sapien
aatagttgaaagagtataggctaagaaatagtt

SEQ ID NO: 821953 - DNA, 33 bp, Homo sapien
cctgaaagtccctcaactaattcacactcatca

SEQ ID NO: 821954 - DNA, 33 bp, Homo sapien
cctgaaagtccctcaagtaattcacactcatca

SEQ ID NO: 821955 - DNA, 33 bp, Homo sapien
aagatcacctatgcataatctgtcattgactga

SEQ ID NO: 821956 - DNA, 33 bp, Homo sapien
aagatcacctatgcatgatctgtcattgactga

SEQ ID NO: 821957 - DNA, 33 bp, Homo sapien
actactgtatatgggacaagatgagggtcaatt

SEQ ID NO: 821958 - DNA, 33 bp, Homo sapien
actactgtatatgggataagatgagggtcaatt

SEQ ID NO: 821959 - DNA, 33 bp, Homo sapien
aaataactgactctccaactggaagaaagttta

SEQ ID NO: 821960 - DNA, 33 bp, Homo sapien
aaataactgactctccgactggaagaaagttta

SEQ ID NO: 821961 - DNA, 33 bp, Homo sapien
cttgtttgtttttacacaaatgatgcagaaata

SEQ ID NO: 821962 - DNA, 33 bp, Homo sapien
cttgtttgtttttacataaatgatgcagaaata

SEQ ID NO: 821963 - DNA, 33 bp, Homo sapien
accatatgagattttaactgtttgcttgtttgt

SEQ ID NO: 821964 - DNA, 33 bp, Homo sapien
accatatgagattttatctgtttgcttgtttgt

SEQ ID NO: 821965 - DNA, 33 bp, Homo sapien
agctcacagcataatgcaaagaaagtgcccttc

SEQ ID NO: 821966 - DNA, 33 bp, Homo sapien
agctcacagcataatggaaagaaagtgcccttc

SEQ ID NO: 821967 - DNA, 33 bp, Homo sapien
ggcaatggtttccaaacgtaaatgactatggaa

SEQ ID NO: 821968 - DNA, 33 bp, Homo sapien
ggcaatggtttccaaatgtaaatgactatggaa

SEQ ID NO: 821969 - DNA, 33 bp, Homo sapien
tctgaggctgcacaataagtaagtagtgaagca

SEQ ID NO: 821970 - DNA, 33 bp, Homo sapien
tctgaggctgcacaattagtaagtagtgaagca

SEQ ID NO: 821971 - DNA, 33 bp, Homo sapien
ctgtctgctcagaagacaaggagtataaaatgg

SEQ ID NO: 821972 - DNA, 33 bp, Homo sapien
ctgtctgctcagaagataaggagtataaaatgg

SEQ ID NO: 821973 - DNA, 33 bp, Homo sapien
ggcggcttagcaatgaactgttccattttgcca

SEQ ID NO: 821974 - DNA, 33 bp, Homo sapien
ggcggcttagcaatgagctgttccattttgcca

SEQ ID NO: 821975 - DNA, 33 bp, Homo sapien
atccttctcaagtcccccattatctgcaggagg

SEQ ID NO: 821976 - DNA, 33 bp, Homo sapien
atccttctcaagtcccgcattatctgcaggagg

SEQ ID NO: 821977 - DNA, 33 bp, Homo sapien
atataagcctgggaaaagatggcaggcatcaca

SEQ ID NO: 821978 - DNA, 33 bp, Homo sapien
atataagcctgggaaaggatggcaggcatcaca

SEQ ID NO: 821979 - DNA, 33 bp, Homo sapien
cagtcacagtctttatcacactgaattgcaatg

SEQ ID NO: 821980 - DNA, 33 bp, Homo sapien
cagtcacagtctttattacactgaattgcaatg

SEQ ID NO: 821981 - DNA, 33 bp, Homo sapien
aaattgcaaatgtaaacgctttagaagacaaca

SEQ ID NO: 821982 - DNA, 33 bp, Homo sapien
aaattgcaaatgtaaatgctttagaagacaaca

SEQ ID NO: 821983 - DNA, 33 bp, Homo sapien
taagtggatttacttacggctcttcttgggctc

SEQ ID NO: 821984 - DNA, 33 bp, Homo sapien
taagtggatttacttatggctcttcttgggctc

SEQ ID NO: 821985 - DNA, 33 bp, Homo sapien
aattgagccacatggaagaggataaggaggtgg

SEQ ID NO: 821986 - DNA, 33 bp, Homo sapien
aattgagccacatggaggaggataaggaggtgg

SEQ ID NO: 821987 - DNA, 33 bp, Homo sapien
tttcagggctaaaatccgaaatcaaattatttg

SEQ ID NO: 821988 - DNA, 33 bp, Homo sapien
tttcagggctaaaatctgaaatcaaattatttg

SEQ ID NO: 821989 - DNA, 33 bp, Homo sapien
gtgtatgcattgtctacgtgagtgtatgtgtct

SEQ ID NO: 821990 - DNA, 33 bp, Homo sapien
gtgtatgcattgtctatgtgagtgtatgtgtct

SEQ ID NO: 821991 - DNA, 33 bp, Homo sapien
tatagaatgaagaactaaaagccgcttatgggc

SEQ ID NO: 821992 - DNA, 33 bp, Homo sapien
tatagaatgaagaactgaaagccgcttatgggc

SEQ ID NO: 821993 - DNA, 33 bp, Homo sapien
atcctcaggttccatcactattcacagggtgac

SEQ ID NO: 821994 - DNA, 33 bp, Homo sapien
atcctcaggttccatcgctattcacagggtgac

SEQ ID NO: 821995 - DNA, 33 bp, Homo sapien
ctgagggcatcctcataaaagcagtacactgca

SEQ ID NO: 821996 - DNA, 33 bp, Homo sapien
ctgagggcatcctcatgaaagcagtacactgca

SEQ ID NO: 821997 - DNA, 33 bp, Homo sapien
ctgtcttctataagaactctgtgagagagctag

SEQ ID NO: 821998 - DNA, 33 bp, Homo sapien
ctgtcttctataagaattctgtgagagagctag

SEQ ID NO: 821999 - DNA, 33 bp, Homo sapien
tattgttgattggaaacactggctcatatttaa

SEQ ID NO: 822000 - DNA, 33 bp, Homo sapien
tattgttgattggaaagactggctcatatttaa

SEQ ID NO: 822001 - DNA, 33 bp, Homo sapien; identical to SEQ ID NO: 821999

SEQ ID NO: 822002 - DNA, 33 bp, Homo sapien; identical to SEQ ID NO: 822000

SEQ ID NO: 822003 - DNA, 33 bp, Homo sapien
taatgttttcgtgcaaccaagataggagtatat

SEQ ID NO: 822004 - DNA, 33 bp, Homo sapien
taatgttttcgtgcaatcaagataggagtatat

SEQ ID NO: 822005 - DNA, 33 bp, Homo sapien
gtattatttaagtctcccaaaagccatcgtcag

SEQ ID NO: 822006 - DNA, 33 bp, Homo sapien
gtattatttaagtctctcaaaagccatcgtcag

SEQ ID NO: 822007 - DNA, 33 bp, Homo sapien
gctaaatgaatgacagcagatttcgatatcctg

SEQ ID NO: 822008 - DNA, 33 bp, Homo sapien
gctaaatgaatgacagtagatttcgatatcctg

SEQ ID NO: 822009 - DNA, 33 bp, Homo sapien
taataaataatattcacgctcctagttgctcag

SEQ ID NO: 822010 - DNA, 33 bp, Homo sapien
taataaataatattcaggctcctagttgctcag

SEQ ID NO: 822011 - DNA, 33 bp, Homo sapien
gttggttactaataaacttcagccagaggaagg

SEQ ID NO: 822012 - DNA, 33 bp, Homo sapien
gttggttactaataaatttcagccagaggaagg

SEQ ID NO: 822013 - DNA, 33 bp, Homo sapien
acgtgctctgcaaataatacggcactctggagc

SEQ ID NO: 822014 - DNA, 33 bp, Homo sapien
acgtgctctgcaaatagtacggcactctggagc

SEQ ID NO: 822015 - DNA, 33 bp, Homo sapien
ttatcagactgagtaactgactaatgcaaattt

SEQ ID NO: 822016 - DNA, 33 bp, Homo sapien
ttatcagactgagtaattgactaatgcaaattt

SEQ ID NO: 822017 - DNA, 33 bp, Homo sapien
tttgtttgttttttaaatgttgcttcagtgatt

SEQ ID NO: 822018 - DNA, 33 bp, Homo sapien
tttgtttgttttttaagtgttgcttcagtgatt

SEQ ID NO: 822019 - DNA, 33 bp, Homo sapien
tttgagaaaggccagaaatttatcagagaatgg

SEQ ID NO: 822020 - DNA, 33 bp, Homo sapien
tttgagaaaggccagagatttatcagagaatgg

SEQ ID NO: 822021 - DNA, 33 bp, Homo sapien
tctctgggagagcccagaacccttcatcacatt

SEQ ID NO: 822022 - DNA, 33 bp, Homo sapien
tctctgggagagcccataacccttcatcacatt

SEQ ID NO: 822023 - DNA, 33 bp, Homo sapien
agatatacactgggaccatcgcaggcaaactga

SEQ ID NO: 822024 - DNA, 33 bp, Homo sapien
agatatacactgggactatcgcaggcaaactga

SEQ ID NO: 822025 - DNA, 33 bp, Homo sapien
ccaaagattagggtgaccatgcatctcagtttg

SEQ ID NO: 822026 - DNA, 33 bp, Homo sapien
ccaaagattagggtgatcatgcatctcagtttg

SEQ ID NO: 822027 - DNA, 33 bp, Homo sapien
tgtctcccttgtttaaatagatccttgttgaac

SEQ ID NO: 822028 - DNA, 33 bp, Homo sapien
tgtctcccttgtttaagtagatccttgttgaac

SEQ ID NO: 822029 - DNA, 33 bp, Homo sapien
actttcaatcaccacccgcttcaaattaagaag

SEQ ID NO: 822030 - DNA, 33 bp, Homo sapien
actttcaatcaccacctgcttcaaattaagaag

SEQ ID NO: 822031 - DNA, 33 bp, Homo sapien
agatcacataagaaccaccgaggctagggctta

SEQ ID NO: 822032 - DNA, 33 bp, Homo sapien
agatcacataagaacctccgaggctagggctta

SEQ ID NO: 822033 - DNA, 33 bp, Homo sapien
gcatacagaacaaaacacaaactccttggccta

SEQ ID NO: 822034 - DNA, 33 bp, Homo sapien
gcatacagaacaaaacgcaaactccttggccta

SEQ ID NO: 822035 - DNA, 33 bp, Homo sapien
ttattctacccccacagtgtctcttggatttat

SEQ ID NO: 822036 - DNA, 33 bp, Homo sapien
ttattctacccccacattgtctcttggatttat

SEQ ID NO: 822037 - DNA, 33 bp, Homo sapien
cctcctctacttcacaccatgtcagtgaatacc

SEQ ID NO: 822038 - DNA, 33 bp, Homo sapien
cctcctctacttcacagcatgtcagtgaatacc

SEQ ID NO: 822039 - DNA, 33 bp, Homo sapien
ggagcgatcaaaaaagcagctgaaaatgtgggt

SEQ ID NO: 822040 - DNA, 33 bp, Homo sapien
ggagcgatcaaaaaaggagctgaaaatgtgggt

SEQ ID NO: 822041 - DNA, 33 bp, Homo sapien
aaagtcaagtttataaatatgaaccaaacccat

SEQ ID NO: 822042 - DNA, 33 bp, Homo sapien
aaagtcaagtttataagtatgaaccaaacccat

SEQ ID NO: 822043 - DNA, 33 bp, Homo sapien
aagaaaatgaaggacacagatagaaagtggcaa

SEQ ID NO: 822044 - DNA, 33 bp, Homo sapien
aagaaaatgaaggacagagatagaaagtggcaa

SEQ ID NO: 822045 - DNA, 33 bp, Homo sapien
ttcgatatgggaattaagggtgcaaaagacagt

SEQ ID NO: 822046 - DNA, 33 bp, Homo sapien
ttcgatatgggaattaggggtgcaaaagacagt

SEQ ID NO: 822047 - DNA, 33 bp, Homo sapien
actcctcatggtactcaccagaaaagccttctc

SEQ ID NO: 822048 - DNA, 33 bp, Homo sapien
actcctcatggtactcgccagaaaagccttctc

SEQ ID NO: 822049 - DNA, 33 bp, Homo sapien
tcataaaatatctcaccggagccagtttgaggg

SEQ ID NO: 822050 - DNA, 33 bp, Homo sapien
tcataaaatatctcactggagccagtttgaggg

SEQ ID NO: 822051 - DNA, 33 bp, Homo sapien
caactgtctcaggtcccgatgcctggcagccac

SEQ ID NO: 822052 - DNA, 33 bp, Homo sapien
caactgtctcaggtcctgatgcctggcagccac

SEQ ID NO: 822053 - DNA, 33 bp, Homo sapien
caccacaagtcttacccaaatgtgagggtctca

SEQ ID NO: 822054 - DNA, 33 bp, Homo sapien
caccacaagtcttacctaaatgtgagggtctca

SEQ ID NO: 822055 - DNA, 33 bp, Homo sapien
aattctcactcatctcaaaagtgtacattctct

SEQ ID NO: 822056 - DNA, 33 bp, Homo sapien
aattctcactcatctcgaaagtgtacattctct

SEQ ID NO: 822057 - DNA, 33 bp, Homo sapien
gcccttgagatccttaaaactgggagagaggtg

SEQ ID NO: 822058 - DNA, 33 bp, Homo sapien
gcccttgagatccttagaactgggagagaggtg

SEQ ID NO: 822059 - DNA, 33 bp, Homo sapien
attcaaatgcttagtcacatcgctatcgcttag

SEQ ID NO: 822060 - DNA, 33 bp, Homo sapien
attcaaatgcttagtcgcatcgctatcgcttag

SEQ ID NO: 822061 - DNA, 33 bp, Homo sapien
gctcttatggggctcacattacagtaagccaat

SEQ ID NO: 822062 - DNA, 33 bp, Homo sapien
gctcttatggggctcatattacagtaagccaat

SEQ ID NO: 822063 - DNA, 33 bp, Homo sapien
acgaggcgtgttcataagaaggttatcactgta

SEQ ID NO: 822064 - DNA, 33 bp, Homo sapien
acgaggcgtgttcatacgaaggttatcactgta

SEQ ID NO: 822065 - DNA, 33 bp, Homo sapien
gggaccatctgatttaagtaaatgtaacaatta

SEQ ID NO: 822066 - DNA, 33 bp, Homo sapien
gggaccatctgatttaggtaaatgtaacaatta

SEQ ID NO: 822067 - DNA, 33 bp, Homo sapien
tcagatggtcccagaaatggtcctaagaagatc

SEQ ID NO: 822068 - DNA, 33 bp, Homo sapien
tcagatggtcccagaagtggtcctaagaagatc

SEQ ID NO: 822069 - DNA, 33 bp, Homo sapien
tgatagctgtttttcaaagtaaatataaactgt

SEQ ID NO: 822070 - DNA, 33 bp, Homo sapien
tgatagctgtttttcagagtaaatataaactgt

SEQ ID NO: 822071 - DNA, 33 bp, Homo sapien
gatcaaaggcagttcacaataacctaggacaga

SEQ ID NO: 822072 - DNA, 33 bp, Homo sapien
gatcaaaggcagttcataataacctaggacaga

SEQ ID NO: 822073 - DNA, 33 bp, Homo sapien
cttttgtccttctcacaatttcaatcttgctcc

SEQ ID NO: 822074 - DNA, 33 bp, Homo sapien
cttttgtccttctcactatttcaatcttgctcc

SEQ ID NO: 822075 - DNA, 33 bp, Homo sapien
gcctgtccgtgttatagtacccaaatcgtcttg

SEQ ID NO: 822076 - DNA, 33 bp, Homo sapien
gcctgtccgtgttatattacccaaatcgtcttg

SEQ ID NO: 822077 - DNA, 33 bp, Homo sapien
ccactgccaagctcagactgaccgagagcagcc

SEQ ID NO: 822078 - DNA, 33 bp, Homo sapien
ccactgccaagctcagtctgaccgagagcagcc

SEQ ID NO: 822079 - DNA, 33 bp, Homo sapien
gttgttttgttttccaaagcccagtgaacaaga

SEQ ID NO: 822080 - DNA, 33 bp, Homo sapien
gttgttttgttttccagagcccagtgaacaaga

SEQ ID NO: 822081 - DNA, 33 bp, Homo sapien
aaattctgtttgcttacggattccgtacagtgt

SEQ ID NO: 822082 - DNA, 33 bp, Homo sapien
aaattctgtttgcttatggattccgtacagtgt

SEQ ID NO: 822083 - DNA, 33 bp, Homo sapien
tgtggatttaagagagaaagaccatggaggcaa

SEQ ID NO: 822084 - DNA, 33 bp, Homo sapien
tgtggatttaagagaggaagaccatggaggcaa

SEQ ID NO: 822085 - DNA, 33 bp, Homo sapien
tcagaggctgctattccaaggtaagagagtggc

SEQ ID NO: 822086 - DNA, 33 bp, Homo sapien
tcagaggctgctattctaaggtaagagagtggc

SEQ ID NO: 822087 - DNA, 33 bp, Homo sapien
ccagccagctgctccaaaaacagaagcatctat

SEQ ID NO: 822088 - DNA, 33 bp, Homo sapien
ccagccagctgctccagaaacagaagcatctat

SEQ ID NO: 822089 - DNA, 33 bp, Homo sapien
ttggaggagaaggtccccactgctcatgctgac

SEQ ID NO: 822090 - DNA, 33 bp, Homo sapien
ttggaggagaaggtcctcactgctcatgctgac

SEQ ID NO: 822091 - DNA, 33 bp, Homo sapien
gctgctgagagagctgaaaccaaggcaggtgtc

SEQ ID NO: 822092 - DNA, 33 bp, Homo sapien
gctgctgagagagctggaaccaaggcaggtgtc

SEQ ID NO: 822093 - DNA, 33 bp, Homo sapien
tcagcaaggtttcaagactactcaaaggggaaa

SEQ ID NO: 822094 - DNA, 33 bp, Homo sapien
tcagcaaggtttcaagtctactcaaaggggaaa

SEQ ID NO: 822095 - DNA, 33 bp, Homo sapien
taagggaaaatcataaagttggatttggcaatg

SEQ ID NO: 822096 - DNA, 33 bp, Homo sapien
taagggaaaatcataacgttggatttggcaatg

SEQ ID NO: 822097 - DNA, 33 bp, Homo sapien
taagaattaagaggagaaccaattcatcaacat

SEQ ID NO: 822098 - DNA, 33 bp, Homo sapien
taagaattaagaggaggaccaattcatcaacat

SEQ ID NO: 822099 - DNA, 33 bp, Homo sapien
ctgcctgcttccttggaaaaaacttctttgact

SEQ ID NO: 822100 - DNA, 33 bp, Homo sapien
ctgcctgcttccttggcaaaaacttctttgact

SEQ ID NO: 822101 - DNA, 33 bp, Homo sapien
aatatctaggtgtcaacttacttgttccttgta

SEQ ID NO: 822102 - DNA, 33 bp, Homo sapien
aatatctaggtgtcaatttacttgttccttgta

SEQ ID NO: 822103 - DNA, 33 bp, Homo sapien
tccacttcctaataaaacttatgaaaccccatc

SEQ ID NO: 822104 - DNA, 33 bp, Homo sapien
tccacttcctaataaagcttatgaaaccccatc

SEQ ID NO: 822105 - DNA, 33 bp, Homo sapien
gttctcagcctgtaataacaccttcaacttggc

SEQ ID NO: 822106 - DNA, 33 bp, Homo sapien
gttctcagcctgtaatgacaccttcaacttggc

SEQ ID NO: 822107 - DNA, 33 bp, Homo sapien
gcatttcaaggtgagcaacggctgagagagcag

SEQ ID NO: 822108 - DNA, 33 bp, Homo sapien
gcatttcaaggtgagcgacggctgagagagcag

SEQ ID NO: 822109 - DNA, 33 bp, Homo sapien
agctcctgataacacacggttgaaaatagtttt

SEQ ID NO: 822110 - DNA, 33 bp, Homo sapien
agctcctgataacacatggttgaaaatagtttt

SEQ ID NO: 822111 - DNA, 33 bp, Homo sapien
gggttgcaagagggagcagaggcgtgcaagacc

SEQ ID NO: 822112 - DNA, 33 bp, Homo sapien
gggttgcaagagggagtagaggcgtgcaagacc

SEQ ID NO: 822113 - DNA, 33 bp, Homo sapien
ttttcatcctgtgacccacaatttcaaaagatg

SEQ ID NO: 822114 - DNA, 33 bp, Homo sapien
ttttcatcctgtgacctacaatttcaaaagatg

SEQ ID NO: 822115 - DNA, 33 bp, Homo sapien
gaattaatatatgcgaagagattagaatttgcc

SEQ ID NO: 822116 - DNA, 33 bp, Homo sapien
gaattaatatatgcgaggagattagaatttgcc

SEQ ID NO: 822117 - DNA, 33 bp, Homo sapien
accaaatgtaaagacacagaacaactgagaccc

SEQ ID NO: 822118 - DNA, 33 bp, Homo sapien
accaaatgtaaagacagagaacaactgagaccc

SEQ ID NO: 822119 - DNA, 33 bp, Homo sapien
atggagaagtacagataaatgagacatggtgct

SEQ ID NO: 822120 - DNA, 33 bp, Homo sapien
atggagaagtacagatgaatgagacatggtgct

SEQ ID NO: 822121 - DNA, 33 bp, Homo sapien
atacattttatagcaccgaatcatatttgttca

SEQ ID NO: 822122 - DNA, 33 bp, Homo sapien
atacattttatagcactgaatcatatttgttca

SEQ ID NO: 822123 - DNA, 33 bp, Homo sapien
attttctgactaagagaagctcttgtgctgaaa

SEQ ID NO: 822124 - DNA, 33 bp, Homo sapien
attttctgactaagagcagctcttgtgctgaaa

SEQ ID NO: 822125 - DNA, 33 bp, Homo sapien
gtaaggtggtcaatgaagccaaggtctttcaaa

SEQ ID NO: 822126 - DNA, 33 bp, Homo sapien
gtaaggtggtcaatgaggccaaggtctttcaaa

SEQ ID NO: 822127 - DNA, 33 bp, Homo sapien
aaagcaaacaaatgaaataaattgagataataa

SEQ ID NO: 822128 - DNA, 33 bp, Homo sapien
aaagcaaacaaatgaagtaaattgagataataa

SEQ ID NO: 822129 - DNA, 33 bp, Homo sapien
ttcttttctcaactaaaaatttcgctcacttgt

SEQ ID NO: 822130 - DNA, 33 bp, Homo sapien
ttcttttctcaactaataatttcgctcacttgt

SEQ ID NO: 822131 - DNA, 33 bp, Homo sapien
ttgaactgagcaggaaccctaaggtcaaacagc

SEQ ID NO: 822132 - DNA, 33 bp, Homo sapien
ttgaactgagcaggaatcctaaggtcaaacagc

SEQ ID NO: 822133 - DNA, 33 bp, Homo sapien
ttagagaaggttattacgttggcaatttttgtg

SEQ ID NO: 822134 - DNA, 33 bp, Homo sapien
ttagagaaggttattatgttggcaatttttgtg

SEQ ID NO: 822135 - DNA, 33 bp, Homo sapien
cccttcatacagtgtacagtgtataagaaggaa

SEQ ID NO: 822136 - DNA, 33 bp, Homo sapien
cccttcatacagtgtatagtgtataagaaggaa

SEQ ID NO: 822137 - DNA, 33 bp, Homo sapien
cctgacaatcaaaggccgacactgtgctggatt

SEQ ID NO: 822138 - DNA, 33 bp, Homo sapien
cctgacaatcaaaggctgacactgtgctggatt

SEQ ID NO: 822139 - DNA, 33 bp, Homo sapien
caattctgaaatagtaccagaccacccaacggt

SEQ ID NO: 822140 - DNA, 33 bp, Homo sapien
caattctgaaatagtatcagaccacccaacggt

SEQ ID NO: 822141 - DNA, 33 bp, Homo sapien
gctgctgtaggattcacagagtatttgtatttt

SEQ ID NO: 822142 - DNA, 33 bp, Homo sapien
gctgctgtaggattcatagagtatttgtatttt

SEQ ID NO: 822143 - DNA, 33 bp, Homo sapien
agcagacttcttcttgcagccaataaacagaaa

SEQ ID NO: 822144 - DNA, 33 bp, Homo sapien
agcagacttcttcttgtagccaataaacagaaa

SEQ ID NO: 822145 - DNA, 33 bp, Homo sapien
gaacctctgattctccacctgttaaataaggga

SEQ ID NO: 822146 - DNA, 33 bp, Homo sapien
gaacctctgattctcctcctgttaaataaggga

SEQ ID NO: 822147 - DNA, 33 bp, Homo sapien
gggaatactaattaccaaaacagaggataaagt

SEQ ID NO: 822148 - DNA, 33 bp, Homo sapien
gggaatactaattaccgaaacagaggataaagt

SEQ ID NO: 822149 - DNA, 33 bp, Homo sapien
aaactaacatatccagcccctggcagtagccaa

SEQ ID NO: 822150 - DNA, 33 bp, Homo sapien
aaactaacatatccagtccctggcagtagccaa

SEQ ID NO: 822151 - DNA, 33 bp, Homo sapien
tggaaaaatccaacaggagaatctttgaagtac

SEQ ID NO: 822152 - DNA, 33 bp, Homo sapien
tggaaaaatccaacagtagaatctttgaagtac

SEQ ID NO: 822153 - DNA, 33 bp, Homo sapien
cagttttaggcttgcaacaaaattgagaaggta

SEQ ID NO: 822154 - DNA, 33 bp, Homo sapien
cagttttaggcttgcagcaaaattgagaaggta

SEQ ID NO: 822155 - DNA, 33 bp, Homo sapien
atggctaaagatgatcacagttagcttcttgct

SEQ ID NO: 822156 - DNA, 33 bp, Homo sapien
atggctaaagatgatcgcagttagcttcttgct

SEQ ID NO: 822157 - DNA, 33 bp, Homo sapien
ttggtagttaggtgacgctgaaatctgtgttaa

SEQ ID NO: 822158 - DNA, 33 bp, Homo sapien
ttggtagttaggtgactctgaaatctgtgttaa

SEQ ID NO: 822159 - DNA, 33 bp, Homo sapien
gccaagaggggccataactgattggggaaagtg

SEQ ID NO: 822160 - DNA, 33 bp, Homo sapien
gccaagaggggccatagctgattggggaaagtg

SEQ ID NO: 822161 - DNA, 33 bp, Homo sapien
ccggcatggtggcttaccctgattggaggatta

SEQ ID NO: 822162 - DNA, 33 bp, Homo sapien
ccggcatggtggcttatcctgattggaggatta

SEQ ID NO: 822163 - DNA, 33 bp, Homo sapien
ccttctaactttggagaagaacatctgatgaaa

SEQ ID NO: 822164 - DNA, 33 bp, Homo sapien
ccttctaactttggaggagaacatctgatgaaa

SEQ ID NO: 822165 - DNA, 33 bp, Homo sapien
ctaaaatgcgtatggaaaaacagactccagaat

SEQ ID NO: 822166 - DNA, 33 bp, Homo sapien
ctaaaatgcgtatggagaaacagactccagaat

SEQ ID NO: 822167 - DNA, 33 bp, Homo sapien
atctttgcaccgttaagaaatctcagacatgca

SEQ ID NO: 822168 - DNA, 33 bp, Homo sapien
atctttgcaccgttaataaatctcagacatgca

SEQ ID NO: 822169 - DNA, 33 bp, Homo sapien
gtccccaagacaatcaccaggttcagtgattca

SEQ ID NO: 822170 - DNA, 33 bp, Homo sapien
gtccccaagacaatcatcaggttcagtgattca

SEQ ID NO: 822171 - DNA, 33 bp, Homo sapien
tgcaggggatgcgttccaagtcccccagtggat

SEQ ID NO: 822172 - DNA, 33 bp, Homo sapien
tgcaggggatgcgttctaagtcccccagtggat

SEQ ID NO: 822173 - DNA, 33 bp, Homo sapien
tccccctgcgatctcaacaccactaagcccaac

SEQ ID NO: 822174 - DNA, 33 bp, Homo sapien
tccccctgcgatctcatcaccactaagcccaac

SEQ ID NO: 822175 - DNA, 33 bp, Homo sapien
tccaagacagggctacaagcatcaggggaggtc

SEQ ID NO: 822176 - DNA, 33 bp, Homo sapien
tccaagacagggctacgagcatcaggggaggtc

SEQ ID NO: 822177 - DNA, 33 bp, Homo sapien
tttccgtggacttttcccaactacaccctggag

SEQ ID NO: 822178 - DNA, 33 bp, Homo sapien
tttccgtggacttttctcaactacaccctggag

SEQ ID NO: 822179 - DNA, 33 bp, Homo sapien
aatatttttttttccaagtcagctgcagcaagg

SEQ ID NO: 822180 - DNA, 33 bp, Homo sapien
aatatttttttttccaggtcagctgcagcaagg

SEQ ID NO: 822181 - DNA, 33 bp, Homo sapien
cagggctataggagccaagttcagtgggagctc

SEQ ID NO: 822182 - DNA, 33 bp, Homo sapien
cagggctataggagccgagttcagtgggagctc

SEQ ID NO: 822183 - DNA, 33 bp, Homo sapien
gtccatgacctcttacaaactgggcagcacagc

SEQ ID NO: 822184 - DNA, 33 bp, Homo sapien
gtccatgacctcttacgaactgggcagcacagc

SEQ ID NO: 822185 - DNA, 33 bp, Homo sapien
acccacagtcggatacaaatgatgaggaaggta

SEQ ID NO: 822186 - DNA, 33 bp, Homo sapien
acccacagtcggatactaatgatgaggaaggta

SEQ ID NO: 822187 - DNA, 33 bp, Homo sapien
tagcaccttaatctccaactttggacctccacc

SEQ ID NO: 822188 - DNA, 33 bp, Homo sapien
tagcaccttaatctccgactttggacctccacc

SEQ ID NO: 822189 - DNA, 33 bp, Homo sapien
atagcacgagggctacagaatgacatttggaat

SEQ ID NO: 822190 - DNA, 33 bp, Homo sapien
atagcacgagggctaccgaatgacatttggaat

SEQ ID NO: 822191 - DNA, 33 bp, Homo sapien
taccgtagtcccccccaagtctgctaggaatac

SEQ ID NO: 822192 - DNA, 33 bp, Homo sapien
taccgtagtccccccccagtctgctaggaatac

SEQ ID NO: 822193 - DNA, 33 bp, Homo sapien
aattggcctcactctaagctggggagtgatgag

SEQ ID NO: 822194 - DNA, 33 bp, Homo sapien
aattggcctcactctacgctggggagtgatgag

SEQ ID NO: 822195 - DNA, 33 bp, Homo sapien
agcctttcacacaaagcatttaccctgttgctt

SEQ ID NO: 822196 - DNA, 33 bp, Homo sapien
agcctttcacacaaagtatttaccctgttgctt

SEQ ID NO: 822197 - DNA, 33 bp, Homo sapien
agatttcaaccctccaagactctgagaaatcaa

SEQ ID NO: 822198 - DNA, 33 bp, Homo sapien
agatttcaaccctccaggactctgagaaatcaa

SEQ ID NO: 822199 - DNA, 33 bp, Homo sapien
ggtgtgtctactgagaggccatggtgactcaaa

SEQ ID NO: 822200 - DNA, 33 bp, Homo sapien
ggtgtgtctactgagatgccatggtgactcaaa

SEQ ID NO: 822201 - DNA, 33 bp, Homo sapien
tttttttctcaagtgacgtgctctttaagttgt

SEQ ID NO: 822202 - DNA, 33 bp, Homo sapien
tttttttctcaagtgatgtgctctttaagttgt

SEQ ID NO: 822203 - DNA, 33 bp, Homo sapien
aaaaatggaacagaagaactgatcagctcaagt

SEQ ID NO: 822204 - DNA, 33 bp, Homo sapien
aaaaatggaacagaaggactgatcagctcaagt

SEQ ID NO: 822205 - DNA, 33 bp, Homo sapien
atagcgaaaacattggaatgttgcttctgagat

SEQ ID NO: 822206 - DNA, 33 bp, Homo sapien
atagcgaaaacattgggatgttgcttctgagat

SEQ ID NO: 822207 - DNA, 33 bp, Homo sapien
tcttttgcttttcgcaataaattttgctggtgg

SEQ ID NO: 822208 - DNA, 33 bp, Homo sapien
tcttttgcttttcgcagtaaattttgctggtgg

SEQ ID NO: 822209 - DNA, 33 bp, Homo sapien
agtgacagtgacctgcacaatctcagtgaagaa

SEQ ID NO: 822210 - DNA, 33 bp, Homo sapien
agtgacagtgacctgcgcaatctcagtgaagaa

SEQ ID NO: 822211 - DNA, 33 bp, Homo sapien
gacagaagacagaagcagagctttagatggagg

SEQ ID NO: 822212 - DNA, 33 bp, Homo sapien
gacagaagacagaagcggagctttagatggagg

SEQ ID NO: 822213 - DNA, 33 bp, Homo sapien
ctgtctgcctcgctcacgtactgcagggtgaga

SEQ ID NO: 822214 - DNA, 33 bp, Homo sapien
ctgtctgcctcgctcatgtactgcagggtgaga

SEQ ID NO: 822215 - DNA, 33 bp, Homo sapien
ctttggactttctgaaacaataacatcggaaag

SEQ ID NO: 822216 - DNA, 33 bp, Homo sapien
ctttggactttctgaagcaataacatcggaaag

SEQ ID NO: 822217 - DNA, 33 bp, Homo sapien
tttgtagtaaatttgccgagaaccttaaagcag

SEQ ID NO: 822218 - DNA, 33 bp, Homo sapien
tttgtagtaaatttgctgagaaccttaaagcag

SEQ ID NO: 822219 - DNA, 33 bp, Homo sapien
agggttggtgcactgcagaaaaggtagctaata

SEQ ID NO: 822220 - DNA, 33 bp, Homo sapien
agggttggtgcactgccgaaaaggtagctaata

SEQ ID NO: 822221 - DNA, 33 bp, Homo sapien
tggtctttgaatccaacgtgatgcttgccttaa

SEQ ID NO: 822222 - DNA, 33 bp, Homo sapien
tggtctttgaatccaatgtgatgcttgccttaa

SEQ ID NO: 822223 - DNA, 33 bp, Homo sapien
agccctccactaagacaggaaaaagatttaaag

SEQ ID NO: 822224 - DNA, 33 bp, Homo sapien
agccctccactaagaccggaaaaagatttaaag

SEQ ID NO: 822225 - DNA, 33 bp, Homo sapien
atgtctatatctgctgcatgtattttataattg

SEQ ID NO: 822226 - DNA, 33 bp, Homo sapien
atgtctatatctgctgtatgtattttataattg

SEQ ID NO: 822227 - DNA, 33 bp, Homo sapien
cctggtgacagcccccacatacctgtgctcagt

SEQ ID NO: 822228 - DNA, 33 bp, Homo sapien
cctggtgacagcccccgcatacctgtgctcagt

SEQ ID NO: 822229 - DNA, 33 bp, Homo sapien
gactctgctttataagacctgtgccaaaaaatt

SEQ ID NO: 822230 - DNA, 33 bp, Homo sapien
gactctgctttataaggcctgtgccaaaaaatt

SEQ ID NO: 822231 - DNA, 33 bp, Homo sapien
gcttgaacaaaatgaaactcattgagagtggac

SEQ ID NO: 822232 - DNA, 33 bp, Homo sapien
gcttgaacaaaatgaacctcattgagagtggac

SEQ ID NO: 822233 - DNA, 33 bp, Homo sapien
ttccccttctgttataacctaaatcaatgcctg

SEQ ID NO: 822234 - DNA, 33 bp, Homo sapien
ttccccttctgttatagcctaaatcaatgcctg

SEQ ID NO: 822235 - DNA, 33 bp, Homo sapien
aaccatgctgcaactgaactttgacatcagtca

SEQ ID NO: 822236 - DNA, 33 bp, Homo sapien
aaccatgctgcaactgtactttgacatcagtca

SEQ ID NO: 822237 - DNA, 33 bp, Homo sapien
gtttagctttccagtcacattactctttcccag

SEQ ID NO: 822238 - DNA, 33 bp, Homo sapien
gtttagctttccagtcgcattactctttcccag

SEQ ID NO: 822239 - DNA, 33 bp, Homo sapien
ataaactcacaaacgaactcaggatggactgtt

SEQ ID NO: 822240 - DNA, 33 bp, Homo sapien
ataaactcacaaacgagctcaggatggactgtt

SEQ ID NO: 822241 - DNA, 33 bp, Homo sapien
gcaacccctggggaaccgcagcgtgtgcctcag

SEQ ID NO: 822242 - DNA, 33 bp, Homo sapien
gcaacccctggggaactgcagcgtgtgcctcag

SEQ ID NO: 822243 - DNA, 33 bp, Homo sapien
aggactgggctgaatcccagcagcatatgcttt

SEQ ID NO: 822244 - DNA, 33 bp, Homo sapien
aggactgggctgaatctcagcagcatatgcttt

SEQ ID NO: 822245 - DNA, 33 bp, Homo sapien
ttcagggcgaatgtcacggtagctagatcccag

SEQ ID NO: 822246 - DNA, 33 bp, Homo sapien
ttcagggcgaatgtcatggtagctagatcccag

SEQ ID NO: 822247 - DNA, 33 bp, Homo sapien
tataaacagtgattaacagcaactactgttttt

SEQ ID NO: 822248 - DNA, 33 bp, Homo sapien
tataaacagtgattaatagcaactactgttttt

SEQ ID NO: 822249 - DNA, 33 bp, Homo sapien
cagtaaccatcaccacaagtagtaaagtccctg

SEQ ID NO: 822250 - DNA, 33 bp, Homo sapien
cagtaaccatcaccacgagtagtaaagtccctg

SEQ ID NO: 822251 - DNA, 33 bp, Homo sapien
ttactgcaagtctaccagcaaggagacaggagg

SEQ ID NO: 822252 - DNA, 33 bp, Homo sapien
ttactgcaagtctaccggcaaggagacaggagg

SEQ ID NO: 822253 - DNA, 33 bp, Homo sapien
agggccacatcctgatgacaacccagactcgtt

SEQ ID NO: 822254 - DNA, 33 bp, Homo sapien
agggccacatcctgattacaacccagactcgtt

SEQ ID NO: 822255 - DNA, 33 bp, Homo sapien
cagtgaaaaagccagactatgcttatggcacat

SEQ ID NO: 822256 - DNA, 33 bp, Homo sapien
cagtgaaaaagccagattatgcttatggcacat

SEQ ID NO: 822257 - DNA, 33 bp, Homo sapien
catctcagctaaaagcaattctggaggcagaac

SEQ ID NO: 822258 - DNA, 33 bp, Homo sapien
catctcagctaaaagcgattctggaggcagaac

SEQ ID NO: 822259 - DNA, 33 bp, Homo sapien
acaccaaccacactccactatcattgcttgttg

SEQ ID NO: 822260 - DNA, 33 bp, Homo sapien
acaccaaccacactccgctatcattgcttgttg

SEQ ID NO: 822261 - DNA, 33 bp, Homo sapien
tcacacatctacagcaaataaatactcggcaat

SEQ ID NO: 822262 - DNA, 33 bp, Homo sapien
tcacacatctacagcagataaatactcggcaat

SEQ ID NO: 822263 - DNA, 33 bp, Homo sapien
tttgacttaaatgacccacttcctctgattctg

SEQ ID NO: 822264 - DNA, 33 bp, Homo sapien
tttgacttaaatgaccgacttcctctgattctg

SEQ ID NO: 822265 - DNA, 33 bp, Homo sapien
tttaaattattgcatcgaaggttgaaaaccagt

SEQ ID NO: 822266 - DNA, 33 bp, Homo sapien
tttaaattattgcatctaaggttgaaaaccagt

SEQ ID NO: 822267 - DNA, 33 bp, Homo sapien
aagatgaggggctcagccatagagtctgggcca

SEQ ID NO: 822268 - DNA, 33 bp, Homo sapien
aagatgaggggctcagtcatagagtctgggcca

SEQ ID NO: 822269 - DNA, 33 bp, Homo sapien
ctggcctaagtccctgaatagcctcttccccag

SEQ ID NO: 822270 - DNA, 33 bp, Homo sapien
ctggcctaagtccctgcatagcctcttccccag

SEQ ID NO: 822271 - DNA, 33 bp, Homo sapien
cattgatgttcctcacagagaagtctttgaaaa

SEQ ID NO: 822272 - DNA, 33 bp, Homo sapien
cattgatgttcctcacggagaagtctttgaaaa

SEQ ID NO: 822273 - DNA, 33 bp, Homo sapien
agacttttccttagcagtcttcaagatgtacta

SEQ ID NO: 822274 - DNA, 33 bp, Homo sapien
agacttttccttagcattcttcaagatgtacta

SEQ ID NO: 822275 - DNA, 33 bp, Homo sapien
gggccttgttcaatggaacttttcagccatcct

SEQ ID NO: 822276 - DNA, 33 bp, Homo sapien
gggccttgttcaatgggacttttcagccatcct

SEQ ID NO: 822277 - DNA, 33 bp, Homo sapien
gctgttgggataggcagatgtaagtgtcacttc

SEQ ID NO: 822278 - DNA, 33 bp, Homo sapien
gctgttgggataggcatatgtaagtgtcacttc

SEQ ID NO: 822279 - DNA, 33 bp, Homo sapien
ccatgtgctgcctttaacagaaccttctgtctt

SEQ ID NO: 822280 - DNA, 33 bp, Homo sapien
ccatgtgctgcctttatcagaaccttctgtctt

SEQ ID NO: 822281 - DNA, 33 bp, Homo sapien
tgctcagtttgaagtacattggagacattttct

SEQ ID NO: 822282 - DNA, 33 bp, Homo sapien
tgctcagtttgaagtagattggagacattttct

SEQ ID NO: 822283 - DNA, 33 bp, Homo sapien
ggtaggtatgtagatacggaacttgaaattttt

SEQ ID NO: 822284 - DNA, 33 bp, Homo sapien
ggtaggtatgtagatatggaacttgaaattttt

SEQ ID NO: 822285 - DNA, 33 bp, Homo sapien
acaagagaaactcactcaagactgggattaatt

SEQ ID NO: 822286 - DNA, 33 bp, Homo sapien
acaagagaaactcactgaagactgggattaatt

SEQ ID NO: 822287 - DNA, 33 bp, Homo sapien
cttggcatatgtttgccgaaataaaacccaact

SEQ ID NO: 822288 - DNA, 33 bp, Homo sapien
cttggcatatgtttgctgaaataaaacccaact

SEQ ID NO: 822289 - DNA, 33 bp, Homo sapien
cagatttacgcgccaaataaccttgcaccataa

SEQ ID NO: 822290 - DNA, 33 bp, Homo sapien
cagatttacgcgccaagtaaccttgcaccataa

SEQ ID NO: 822291 - DNA, 33 bp, Homo sapien
ataccctcttgactagaattgaggacgagaatg

SEQ ID NO: 822292 - DNA, 33 bp, Homo sapien
ataccctcttgactaggattgaggacgagaatg

SEQ ID NO: 822293 - DNA, 33 bp, Homo sapien
gactagtgccttactccaaacactggtagccct

SEQ ID NO: 822294 - DNA, 33 bp, Homo sapien
gactagtgccttactctaaacactggtagccct

SEQ ID NO: 822295 - DNA, 33 bp, Homo sapien
ttgcatctgtcaaatgaataggattcagtcctg

SEQ ID NO: 822296 - DNA, 33 bp, Homo sapien
ttgcatctgtcaaatgcataggattcagtcctg

SEQ ID NO: 822297 - DNA, 33 bp, Homo sapien
accaggcccaagcttacgggtgttgaacaatac

SEQ ID NO: 822298 - DNA, 33 bp, Homo sapien
accaggcccaagcttatgggtgttgaacaatac

SEQ ID NO: 822299 - DNA, 33 bp, Homo sapien
gtatatcttgtatggaaaaccacctgtttcctt

SEQ ID NO: 822300 - DNA, 33 bp, Homo sapien
gtatatcttgtatggagaaccacctgtttcctt

SEQ ID NO: 822301 - DNA, 33 bp, Homo sapien
ttctgaacttcatctccgaccttagccaagaaa

SEQ ID NO: 822302 - DNA, 33 bp, Homo sapien
ttctgaacttcatctctgaccttagccaagaaa

SEQ ID NO: 822303 - DNA, 33 bp, Homo sapien
tgcaaccagctgaagaacccatgacccttgact

SEQ ID NO: 822304 - DNA, 33 bp, Homo sapien
tgcaaccagctgaagatcccatgacccttgact

SEQ ID NO: 822305 - DNA, 33 bp, Homo sapien
tctcccgatttctacaacatcctcttccctggc

SEQ ID NO: 822306 - DNA, 33 bp, Homo sapien
tctcccgatttctacagcatcctcttccctggc

SEQ ID NO: 822307 - DNA, 33 bp, Homo sapien
ccagacttagtcctaacgccacacctagaagta

SEQ ID NO: 822308 - DNA, 33 bp, Homo sapien
ccagacttagtcctaatgccacacctagaagta

SEQ ID NO: 822309 - DNA, 33 bp, Homo sapien
gccaaagctaatgtacaaatactttcttgagga

SEQ ID NO: 822310 - DNA, 33 bp, Homo sapien
gccaaagctaatgtaccaatactttcttgagga

SEQ ID NO: 822311 - DNA, 33 bp, Homo sapien
attttctctcattagcacttgcccttagggaaa

SEQ ID NO: 822312 - DNA, 33 bp, Homo sapien
attttctctcattagcccttgcccttagggaaa

SEQ ID NO: 822313 - DNA, 33 bp, Homo sapien
cccttcacaggccaagaagtttggaagtcacca

SEQ ID NO: 822314 - DNA, 33 bp, Homo sapien
cccttcacaggccaagcagtttggaagtcacca

SEQ ID NO: 822315 - DNA, 33 bp, Homo sapien
ggaggagaactgaaaagctggtgacttccaaac

SEQ ID NO: 822316 - DNA, 33 bp, Homo sapien
ggaggagaactgaaaatctggtgacttccaaac

SEQ ID NO: 822317 - DNA, 33 bp, Homo sapien
aggatagaggaagatacgctgggtgagtcatcg

SEQ ID NO: 822318 - DNA, 33 bp, Homo sapien
aggatagaggaagatatgctgggtgagtcatcg

SEQ ID NO: 822319 - DNA, 33 bp, Homo sapien
gtaaacactacattgaacaaattggggagaaat

SEQ ID NO: 822320 - DNA, 33 bp, Homo sapien
gtaaacactacattgagcaaattggggagaaat

SEQ ID NO: 822321 - DNA, 33 bp, Homo sapien
ctcagctgtaaaactaagcatgaaaatgggatt

SEQ ID NO: 822322 - DNA, 33 bp, Homo sapien
ctcagctgtaaaactaggcatgaaaatgggatt

SEQ ID NO: 822323 - DNA, 33 bp, Homo sapien
aagcacctggagtgcacccttttatgctagcca

SEQ ID NO: 822324 - DNA, 33 bp, Homo sapien
aagcacctggagtgcatccttttatgctagcca

SEQ ID NO: 822325 - DNA, 33 bp, Homo sapien
attcctgcgtttaaagcccctcactgtcagttt

SEQ ID NO: 822326 - DNA, 33 bp, Homo sapien
attcctgcgtttaaagtccctcactgtcagttt

SEQ ID NO: 822327 - DNA, 33 bp, Homo sapien
aggccctgtgcttcacaccaagctctctgagaa

SEQ ID NO: 822328 - DNA, 33 bp, Homo sapien
aggccctgtgcttcacgccaagctctctgagaa

SEQ ID NO: 822329 - DNA, 33 bp, Homo sapien
gaatactttgatttatcaagcacttaactgggt

SEQ ID NO: 822330 - DNA, 33 bp, Homo sapien
gaatactttgatttattaagcacttaactgggt

SEQ ID NO: 822331 - DNA, 33 bp, Homo sapien
taaaaagtctgttttacgtttgaaatctgagca

SEQ ID NO: 822332 - DNA, 33 bp, Homo sapien
taaaaagtctgttttatgtttgaaatctgagca

SEQ ID NO: 822333 - DNA, 33 bp, Homo sapien
aggctacatggctgaaactgtggttgatgggag

SEQ ID NO: 822334 - DNA, 33 bp, Homo sapien
aggctacatggctgaatctgtggttgatgggag

SEQ ID NO: 822335 - DNA, 33 bp, Homo sapien
tctggaggaccatcaacaatcttctcagggaaa

SEQ ID NO: 822336 - DNA, 33 bp, Homo sapien
tctggaggaccatcaagaatcttctcagggaaa

SEQ ID NO: 822337 - DNA, 33 bp, Homo sapien
tccaggtagagagatcaagaggtcatttatttc

SEQ ID NO: 822338 - DNA, 33 bp, Homo sapien
tccaggtagagagatcgagaggtcatttatttc

SEQ ID NO: 822339 - DNA, 33 bp, Homo sapien
acctgaggttgagatccgacctgacacctaact

SEQ ID NO: 822340 - DNA, 33 bp, Homo sapien
acctgaggttgagatctgacctgacacctaact

SEQ ID NO: 822341 - DNA, 33 bp, Homo sapien
agcttatccagacaaacaagaggtgcacataga

SEQ ID NO: 822342 - DNA, 33 bp, Homo sapien
agcttatccagacaaataagaggtgcacataga

SEQ ID NO: 822343 - DNA, 33 bp, Homo sapien
tgtcccgcctcaaaccaactaaatctaaatgcc

SEQ ID NO: 822344 - DNA, 33 bp, Homo sapien
tgtcccgcctcaaacctactaaatctaaatgcc

SEQ ID NO: 822345 - DNA, 33 bp, Homo sapien
ccctggtaactgtcccagattctccgtaggtgt

SEQ ID NO: 822346 - DNA, 33 bp, Homo sapien
ccctggtaactgtccccgattctccgtaggtgt

SEQ ID NO: 822347 - DNA, 33 bp, Homo sapien
tgtagtagtttcaacacagactgtatagcctgc

SEQ ID NO: 822348 - DNA, 33 bp, Homo sapien
tgtagtagtttcaacatagactgtatagcctgc

SEQ ID NO: 822349 - DNA, 33 bp, Homo sapien
tgtggttgatcttgggaccaaacccatatctgt

SEQ ID NO: 822350 - DNA, 33 bp, Homo sapien
tgtggttgatcttggggccaaacccatatctgt

SEQ ID NO: 822351 - DNA, 33 bp, Homo sapien
acagcccccaccataaagaatcttctaggccga

SEQ ID NO: 822352 - DNA, 33 bp, Homo sapien
acagcccccaccataaggaatcttctaggccga

SEQ ID NO: 822353 - DNA, 33 bp, Homo sapien
tcaaaggggttatcgccagttgcctgaaaatat

SEQ ID NO: 822354 - DNA, 33 bp, Homo sapien
tcaaaggggttatcgctagttgcctgaaaatat

SEQ ID NO: 822355 - DNA, 33 bp, Homo sapien
ttctctgtgaagccacaaccttttaggattttc

SEQ ID NO: 822356 - DNA, 33 bp, Homo sapien
ttctctgtgaagccactaccttttaggattttc

SEQ ID NO: 822357 - DNA, 33 bp, Homo sapien
taagggtgggacagagaaagaggcgaatatttc

SEQ ID NO: 822358 - DNA, 33 bp, Homo sapien
taagggtgggacagaggaagaggcgaatatttc

SEQ ID NO: 822359 - DNA, 33 bp, Homo sapien
cagcctaaactaattacgagtggggaatttgta

SEQ ID NO: 822360 - DNA, 33 bp, Homo sapien
cagcctaaactaattatgagtggggaatttgta

SEQ ID NO: 822361 - DNA, 33 bp, Homo sapien
tcccatttggccagcccggaaaaaataaaatga

SEQ ID NO: 822362 - DNA, 33 bp, Homo sapien
tcccatttggccagcctggaaaaaataaaatga

SEQ ID NO: 822363 - DNA, 33 bp, Homo sapien
ctttctcagtttctaaagaagcctaagtttgaa

SEQ ID NO: 822364 - DNA, 33 bp, Homo sapien
ctttctcagtttctaaggaagcctaagtttgaa

SEQ ID NO: 822365 - DNA, 33 bp, Homo sapien
catctattttcctcacgctggcctttgtaaagg

SEQ ID NO: 822366 - DNA, 33 bp, Homo sapien
catctattttcctcactctggcctttgtaaagg

SEQ ID NO: 822367 - DNA, 33 bp, Homo sapien
cctggctccagcccacagtgcgcagcaaactcc

SEQ ID NO: 822368 - DNA, 33 bp, Homo sapien
cctggctccagcccacggtgcgcagcaaactcc

SEQ ID NO: 822369 - DNA, 33 bp, Homo sapien
gatcctgggagttgtgaaagtcagggaaagctc

SEQ ID NO: 822370 - DNA, 33 bp, Homo sapien
gatcctgggagttgtggaagtcagggaaagctc

SEQ ID NO: 822371 - DNA, 33 bp, Homo sapien
caaactagagcgtggcaagattagcgtttcaga

SEQ ID NO: 822372 - DNA, 33 bp, Homo sapien
caaactagagcgtggcgagattagcgtttcaga

SEQ ID NO: 822373 - DNA, 33 bp, Homo sapien
tccaggaaagacgatcgcctcaccaacacaagc

SEQ ID NO: 822374 - DNA, 33 bp, Homo sapien
tccaggaaagacgatctcctcaccaacacaagc

SEQ ID NO: 822375 - DNA, 33 bp, Homo sapien
tcaactacagtaagtgcattactatgtaagact

SEQ ID NO: 822376 - DNA, 33 bp, Homo sapien
tcaactacagtaagtggattactatgtaagact

SEQ ID NO: 822377 - DNA, 33 bp, Homo sapien
caaaacacattaaaaaatgatggattgtgccgt

SEQ ID NO: 822378 - DNA, 33 bp, Homo sapien
caaaacacattaaaaattgatggattgtgccgt

SEQ ID NO: 822379 - DNA, 33 bp, Homo sapien
ttcccctggctcacacacaaaggccaatgcata

SEQ ID NO: 822380 - DNA, 33 bp, Homo sapien
ttcccctggctcacacgcaaaggccaatgcata

SEQ ID NO: 822381 - DNA, 33 bp, Homo sapien
cctgtttgtttatgaacggaaagcgtgctggca

SEQ ID NO: 822382 - DNA, 33 bp, Homo sapien
cctgtttgtttatgaatggaaagcgtgctggca

SEQ ID NO: 822383 - DNA, 33 bp, Homo sapien
acgcaatgagcagaaacatctggaaacacgtct

SEQ ID NO: 822384 - DNA, 33 bp, Homo sapien
acgcaatgagcagaaagatctggaaacacgtct

SEQ ID NO: 822385 - DNA, 33 bp, Homo sapien
gatatcctattccaaggccagcctgttgcaggt

SEQ ID NO: 822386 - DNA, 33 bp, Homo sapien
gatatcctattccaagtccagcctgttgcaggt

SEQ ID NO: 822387 - DNA, 33 bp, Homo sapien
ggcactgggaacaagaaaagtcaagctcagtct

SEQ ID NO: 822388 - DNA, 33 bp, Homo sapien
ggcactgggaacaagacaagtcaagctcagtct

SEQ ID NO: 822389 - DNA, 33 bp, Homo sapien
gcttgctgtgagtataccttaataatttgaaaa

SEQ ID NO: 822390 - DNA, 33 bp, Homo sapien
gcttgctgtgagtatatcttaataatttgaaaa

SEQ ID NO: 822391 - DNA, 33 bp, Homo sapien
gacactttctaaatctcaagagctcagccttag

SEQ ID NO: 822392 - DNA, 33 bp, Homo sapien
gacactttctaaatctgaagagctcagccttag

SEQ ID NO: 822393 - DNA, 33 bp, Homo sapien
aaccgtctgcgaggacaaagatgtcataattct

SEQ ID NO: 822394 - DNA, 33 bp, Homo sapien
aaccgtctgcgaggacgaagatgtcataattct

SEQ ID NO: 822395 - DNA, 33 bp, Homo sapien
caggaggcttccctgcacttgagggactctttc

SEQ ID NO: 822396 - DNA, 33 bp, Homo sapien
caggaggcttccctgcgcttgagggactctttc

SEQ ID NO: 822397 - DNA, 33 bp, Homo sapien
cacaggagttctgacccgcttcatttccacctg

SEQ ID NO: 822398 - DNA, 33 bp, Homo sapien
cacaggagttctgacctgcttcatttccacctg

SEQ ID NO: 822399 - DNA, 33 bp, Homo sapien
ctcaaaactcgtgttacgaaattcctttactag

SEQ ID NO: 822400 - DNA, 33 bp, Homo sapien
ctcaaaactcgtgttatgaaattcctttactag

SEQ ID NO: 822401 - DNA, 33 bp, Homo sapien
tgttgtagtgggaaaacctagacagaagtgagt

SEQ ID NO: 822402 - DNA, 33 bp, Homo sapien
tgttgtagtgggaaaagctagacagaagtgagt

SEQ ID NO: 822403 - DNA, 33 bp, Homo sapien
gacaagggagaggacaccatttcttctggaggt

SEQ ID NO: 822404 - DNA, 33 bp, Homo sapien
gacaagggagaggacagcatttcttctggaggt

SEQ ID NO: 822405 - DNA, 33 bp, Homo sapien
gagggctttctgtatccgagttcttgccttgat

SEQ ID NO: 822406 - DNA, 33 bp, Homo sapien
gagggctttctgtatcggagttcttgccttgat

SEQ ID NO: 822407 - DNA, 33 bp, Homo sapien
ggggcggtcaggaccaccgagcggcttgacttc

SEQ ID NO: 822408 - DNA, 33 bp, Homo sapien
ggggcggtcaggaccatcgagcggcttgacttc

SEQ ID NO: 822409 - DNA, 33 bp, Homo sapien
gattttaaacctcacacatggacagagctctct

SEQ ID NO: 822410 - DNA, 33 bp, Homo sapien
gattttaaacctcacatatggacagagctctct

SEQ ID NO: 822411 - DNA, 33 bp, Homo sapien
tacttgaggagttcaccgctattgggtaaacaa

SEQ ID NO: 822412 - DNA, 33 bp, Homo sapien
tacttgaggagttcactgctattgggtaaacaa

SEQ ID NO: 822413 - DNA, 33 bp, Homo sapien
tcctcctaatttcaatctaagttagccatttgt

SEQ ID NO: 822414 - DNA, 33 bp, Homo sapien
tcctcctaatttcaatgtaagttagccatttgt

SEQ ID NO: 822415 - DNA, 33 bp, Homo sapien
agctgtgattcttccacctcttttctgtaaacg

SEQ ID NO: 822416 - DNA, 33 bp, Homo sapien
agctgtgattcttccatctcttttctgtaaacg

SEQ ID NO: 822417 - DNA, 33 bp, Homo sapien
agcagtcggcctcttccatgcagtgtacaccct

SEQ ID NO: 822418 - DNA, 33 bp, Homo sapien
agcagtcggcctcttctatgcagtgtacaccct

SEQ ID NO: 822419 - DNA, 33 bp, Homo sapien
tgttgttgcaatgatgacataaatgaaacattt

SEQ ID NO: 822420 - DNA, 33 bp, Homo sapien
tgttgttgcaatgatggcataaatgaaacattt

SEQ ID NO: 822421 - DNA, 33 bp, Homo sapien
gatctggaaactgctaagaattcgggaaaatct

SEQ ID NO: 822422 - DNA, 33 bp, Homo sapien
gatctggaaactgctatgaattcgggaaaatct

SEQ ID NO: 822423 - DNA, 33 bp, Homo sapien
tgcccaggcttcctcacactacagctggtctga

SEQ ID NO: 822424 - DNA, 33 bp, Homo sapien
tgcccaggcttcctcatactacagctggtctga

SEQ ID NO: 822425 - DNA, 33 bp, Homo sapien
aacaatcttctactaaacccttcagcggtgaac

SEQ ID NO: 822426 - DNA, 33 bp, Homo sapien
aacaatcttctactaagcccttcagcggtgaac

SEQ ID NO: 822427 - DNA, 33 bp, Homo sapien
gttcagtcttggaaaacgaggtctcttcaggcc

SEQ ID NO: 822428 - DNA, 33 bp, Homo sapien
gttcagtcttggaaaatgaggtctcttcaggcc

SEQ ID NO: 822429 - DNA, 33 bp, Homo sapien
cctcttgtcttgaagcagcattgcacactgtag

SEQ ID NO: 822430 - DNA, 33 bp, Homo sapien
cctcttgtcttgaagcggcattgcacactgtag

SEQ ID NO: 822431 - DNA, 33 bp, Homo sapien
ttgggcactgtgttcccagaacgtatgtaatac

SEQ ID NO: 822432 - DNA, 33 bp, Homo sapien
ttgggcactgtgttcctagaacgtatgtaatac

SEQ ID NO: 822433 - DNA, 33 bp, Homo sapien
cagctggtggatactacggacaggcatactcta

SEQ ID NO: 822434 - DNA, 33 bp, Homo sapien
cagctggtggatactatggacaggcatactcta

SEQ ID NO: 822435 - DNA, 33 bp, Homo sapien
acctcctttgggttaacaaatgtacttcgagat

SEQ ID NO: 822436 - DNA, 33 bp, Homo sapien
acctcctttgggttaataaatgtacttcgagat

SEQ ID NO: 822437 - DNA, 33 bp, Homo sapien
gactaccggtgtgcaccgccatgctcagctgct

SEQ ID NO: 822438 - DNA, 33 bp, Homo sapien
gactaccggtgtgcactgccatgctcagctgct

SEQ ID NO: 822439 - DNA, 33 bp, Homo sapien
aatatttctatggactaaggacaaaccaggctg

SEQ ID NO: 822440 - DNA, 33 bp, Homo sapien
aatatttctatggactgaggacaaaccaggctg

SEQ ID NO: 822441 - DNA, 33 bp, Homo sapien
tgactcttgcaccgtacacatcttgaatatttc

SEQ ID NO: 822442 - DNA, 33 bp, Homo sapien
tgactcttgcaccgtagacatcttgaatatttc

SEQ ID NO: 822443 - DNA, 33 bp, Homo sapien
tgtgtggccttcttccaacaccacttctaaata

SEQ ID NO: 822444 - DNA, 33 bp, Homo sapien
tgtgtggccttcttccgacaccacttctaaata

SEQ ID NO: 822445 - DNA, 33 bp, Homo sapien
ttatctctaatgcttacagcaacccttccagat

SEQ ID NO: 822446 - DNA, 33 bp, Homo sapien
ttatctctaatgcttatagcaacccttccagat

SEQ ID NO: 822447 - DNA, 33 bp, Homo sapien
tccatatccattggcccagtgattctcttttat

SEQ ID NO: 822448 - DNA, 33 bp, Homo sapien
tccatatccattggcctagtgattctcttttat

SEQ ID NO: 822449 - DNA, 33 bp, Homo sapien
tagctcttgtgtagcaatgaacttctaggctca

SEQ ID NO: 822450 - DNA, 33 bp, Homo sapien
tagctcttgtgtagcattgaacttctaggctca

SEQ ID NO: 822451 - DNA, 33 bp, Homo sapien
gccagaaaccacactgaaaaccagagatccaaa

SEQ ID NO: 822452 - DNA, 33 bp, Homo sapien
gccagaaaccacactggaaaccagagatccaaa

SEQ ID NO: 822453 - DNA, 33 bp, Homo sapien
tgcacctgactcttaaccctgagaagctgtgag

SEQ ID NO: 822454 - DNA, 33 bp, Homo sapien
tgcacctgactcttaatcctgagaagctgtgag

SEQ ID NO: 822455 - DNA, 33 bp, Homo sapien
agtcagaatctcaccacatttaagtcaaggtgt

SEQ ID NO: 822456 - DNA, 33 bp, Homo sapien
agtcagaatctcaccagatttaagtcaaggtgt

SEQ ID NO: 822457 - DNA, 33 bp, Homo sapien
aaagttaaaaaaagacacaatgggctgacacct

SEQ ID NO: 822458 - DNA, 33 bp, Homo sapien
aaagttaaaaaaagacgcaatgggctgacacct

SEQ ID NO: 822459 - DNA, 33 bp, Homo sapien
ggaggcccagtgcaagaaatatggtgtctcacc

SEQ ID NO: 822460 - DNA, 33 bp, Homo sapien
ggaggcccagtgcaaggaatatggtgtctcacc

SEQ ID NO: 822461 - DNA, 33 bp, Homo sapien
tggtaacattgtctgccaggtgttcaattgttg

SEQ ID NO: 822462 - DNA, 33 bp, Homo sapien
tggtaacattgtctgctaggtgttcaattgttg

SEQ ID NO: 822463 - DNA, 33 bp, Homo sapien
ttgaggaaggaaccacagaaataaggcaacaac

SEQ ID NO: 822464 - DNA, 33 bp, Homo sapien
ttgaggaaggaaccactgaaataaggcaacaac

SEQ ID NO: 822465 - DNA, 33 bp, Homo sapien
gagaaataaagagatacgcgtaattatggaatg

SEQ ID NO: 822466 - DNA, 33 bp, Homo sapien
gagaaataaagagatatgcgtaattatggaatg

SEQ ID NO: 822467 - DNA, 33 bp, Homo sapien
gttttgtagggagctgaaaaactgtaacatggg

SEQ ID NO: 822468 - DNA, 33 bp, Homo sapien
gttttgtagggagctgcaaaactgtaacatggg

SEQ ID NO: 822469 - DNA, 33 bp, Homo sapien
taacttttattataaacctgagatcttacattt

SEQ ID NO: 822470 - DNA, 33 bp, Homo sapien
taacttttattataaagctgagatcttacattt

SEQ ID NO: 822471 - DNA, 33 bp, Homo sapien
ctgtatttagctctgcagaaaggttacagaaaa

SEQ ID NO: 822472 - DNA, 33 bp, Homo sapien
ctgtatttagctctgcggaaaggttacagaaaa

SEQ ID NO: 822473 - DNA, 33 bp, Homo sapien
ctaaaacatttagcacacagccaagataacaga

SEQ ID NO: 822474 - DNA, 33 bp, Homo sapien
ctaaaacatttagcacgcagccaagataacaga

SEQ ID NO: 822475 - DNA, 33 bp, Homo sapien
atatagttcaattatacagttcgacagcactat

SEQ ID NO: 822476 - DNA, 33 bp, Homo sapien
atatagttcaattatatagttcgacagcactat

SEQ ID NO: 822477 - DNA, 33 bp, Homo sapien
aagacactagatttgcaaaaggcggagaaaggt

SEQ ID NO: 822478 - DNA, 33 bp, Homo sapien
aagacactagatttgcgaaaggcggagaaaggt

SEQ ID NO: 822479 - DNA, 33 bp, Homo sapien
acaacagagaggtaaaaaaaagcaatgcttcaa

SEQ ID NO: 822480 - DNA, 33 bp, Homo sapien
acaacagagaggtaaataaaagcaatgcttcaa

SEQ ID NO: 822481 - DNA, 33 bp, Homo sapien
gcttatctggtgcatacagagttctttcctgtt

SEQ ID NO: 822482 - DNA, 33 bp, Homo sapien
gcttatctggtgcatagagagttctttcctgtt

SEQ ID NO: 822483 - DNA, 33 bp, Homo sapien
atatgactattaagcacctcattttctttttct

SEQ ID NO: 822484 - DNA, 33 bp, Homo sapien
atatgactattaagcagctcattttctttttct

SEQ ID NO: 822485 - DNA, 33 bp, Homo sapien
tgttctccaagtattacgttccatatgtgcaga

SEQ ID NO: 822486 - DNA, 33 bp, Homo sapien
tgttctccaagtattatgttccatatgtgcaga

SEQ ID NO: 822487 - DNA, 33 bp, Homo sapien
gccattgttgtctgtgcagttgttttacaagga

SEQ ID NO: 822488 - DNA, 33 bp, Homo sapien
gccattgttgtctgtgtagttgttttacaagga

SEQ ID NO: 822489 - DNA, 33 bp, Homo sapien
cccaggccacgactaccgtacctttcaagcagg

SEQ ID NO: 822490 - DNA, 33 bp, Homo sapien
cccaggccacgactactgtacctttcaagcagg

SEQ ID NO: 822491 - DNA, 33 bp, Homo sapien
gctgagccatcgaccacaacagcttcacaaagc

SEQ ID NO: 822492 - DNA, 33 bp, Homo sapien
gctgagccatcgaccagaacagcttcacaaagc

SEQ ID NO: 822493 - DNA, 33 bp, Homo sapien
taaaagatcactcctgacactatattagacatt

SEQ ID NO: 822494 - DNA, 33 bp, Homo sapien
taaaagatcactcctgtcactatattagacatt

SEQ ID NO: 822495 - DNA, 33 bp, Homo sapien
cagtttataggttagacgagaagacagaaaagc

SEQ ID NO: 822496 - DNA, 33 bp, Homo sapien
cagtttataggttagaggagaagacagaaaagc

SEQ ID NO: 822497 - DNA, 33 bp, Homo sapien
gggggtaaaagttactcacaacagaagagctaa

SEQ ID NO: 822498 - DNA, 33 bp, Homo sapien
gggggtaaaagttacttacaacagaagagctaa

SEQ ID NO: 822499 - DNA, 33 bp, Homo sapien
tttggtggtgaaaaaccgactattttcaaaagg

SEQ ID NO: 822500 - DNA, 33 bp, Homo sapien
tttggtggtgaaaaactgactattttcaaaagg

SEQ ID NO: 822501 - DNA, 33 bp, Homo sapien
tcacttccacaaaacaatgaatctcccttctga

SEQ ID NO: 822502 - DNA, 33 bp, Homo sapien
tcacttccacaaaacactgaatctcccttctga

SEQ ID NO: 822503 - DNA, 33 bp, Homo sapien
tggtaaattgtgaatacgtagttcatcagaaat

SEQ ID NO: 822504 - DNA, 33 bp, Homo sapien
tggtaaattgtgaatatgtagttcatcagaaat

SEQ ID NO: 822505 - DNA, 33 bp, Homo sapien
aggattaccttctccaacaactaggaacaagtt

SEQ ID NO: 822506 - DNA, 33 bp, Homo sapien
aggattaccttctccagcaactaggaacaagtt

SEQ ID NO: 822507 - DNA, 33 bp, Homo sapien
tgaagaatcactattaagagaaaagcgaccacc

SEQ ID NO: 822508 - DNA, 33 bp, Homo sapien
tgaagaatcactattaggagaaaagcgaccacc

SEQ ID NO: 822509 - DNA, 33 bp, Homo sapien
agggagtgaacgaccacagcctgattacctgtg

SEQ ID NO: 822510 - DNA, 33 bp, Homo sapien
agggagtgaacgaccatagcctgattacctgtg

SEQ ID NO: 822511 - DNA, 33 bp, Homo sapien
catagctgctctcctcaagaataaacaagtgga

SEQ ID NO: 822512 - DNA, 33 bp, Homo sapien
catagctgctctcctcgagaataaacaagtgga

SEQ ID NO: 822513 - DNA, 33 bp, Homo sapien
cttgtgacataaactccatgctagaaatatgct

SEQ ID NO: 822514 - DNA, 33 bp, Homo sapien
cttgtgacataaactctatgctagaaatatgct

SEQ ID NO: 822515 - DNA, 33 bp, Homo sapien
agaacacaagggtatagaacgtgaagtgcccca

SEQ ID NO: 822516 - DNA, 33 bp, Homo sapien
agaacacaagggtatataacgtgaagtgcccca

SEQ ID NO: 822517 - DNA, 33 bp, Homo sapien
aaggggactggtgtgcaacggggccagaaggtg

SEQ ID NO: 822518 - DNA, 33 bp, Homo sapien
aaggggactggtgtgcgacggggccagaaggtg

SEQ ID NO: 822519 - DNA, 33 bp, Homo sapien
accataaaaatgttagaaatggtcttttattcc

SEQ ID NO: 822520 - DNA, 33 bp, Homo sapien
accataaaaatgttagtaatggtcttttattcc

SEQ ID NO: 822521 - DNA, 33 bp, Homo sapien
ggtagataggaccaacaaatactggccagcttg

SEQ ID NO: 822522 - DNA, 33 bp, Homo sapien
ggtagataggaccaactaatactggccagcttg

SEQ ID NO: 822523 - DNA, 33 bp, Homo sapien
gtgttcttggagaccccgaaacctgttgcaaaa

SEQ ID NO: 822524 - DNA, 33 bp, Homo sapien
gtgttcttggagaccctgaaacctgttgcaaaa

SEQ ID NO: 822525 - DNA, 33 bp, Homo sapien
gtaaaagggttctgaaagtttacagtgtactat

SEQ ID NO: 822526 - DNA, 33 bp, Homo sapien
gtaaaagggttctgaaggtttacagtgtactat

SEQ ID NO: 822527 - DNA, 33 bp, Homo sapien
tcacagctcactactaaagtctcagattctgga

SEQ ID NO: 822528 - DNA, 33 bp, Homo sapien
tcacagctcactactagagtctcagattctgga

SEQ ID NO: 822529 - DNA, 33 bp, Homo sapien
gcaaagcttgttccagaaagtgctgagctgcaa

SEQ ID NO: 822530 - DNA, 33 bp, Homo sapien
gcaaagcttgttccaggaagtgctgagctgcaa

SEQ ID NO: 822531 - DNA, 33 bp, Homo sapien
agaaaagctttctaaagtataccagaagtatgt

SEQ ID NO: 822532 - DNA, 33 bp, Homo sapien
agaaaagctttctaaattataccagaagtatgt

SEQ ID NO: 822533 - DNA, 33 bp, Homo sapien
ttgaggggggctgttcacttttgaaaagagaac

SEQ ID NO: 822534 - DNA, 33 bp, Homo sapien
ttgaggggggctgttcgcttttgaaaagagaac

SEQ ID NO: 822535 - DNA, 33 bp, Homo sapien
cttttgaaaagagaacacattacagaaacgcag

SEQ ID NO: 822536 - DNA, 33 bp, Homo sapien
cttttgaaaagagaacgcattacagaaacgcag

SEQ ID NO: 822537 - DNA, 33 bp, Homo sapien
aattgccactttaaaaatgttaactgccagaga

SEQ ID NO: 822538 - DNA, 33 bp, Homo sapien
aattgccactttaaaactgttaactgccagaga

SEQ ID NO: 822539 - DNA, 33 bp, Homo sapien
ctcctgtttctggacaccttcatacgtagtagg

SEQ ID NO: 822540 - DNA, 33 bp, Homo sapien
ctcctgtttctggacagcttcatacgtagtagg

SEQ ID NO: 822541 - DNA, 33 bp, Homo sapien
ccctcacccttaaatccctcctgtttctggaca

SEQ ID NO: 822542 - DNA, 33 bp, Homo sapien
ccctcacccttaaatctctcctgtttctggaca

SEQ ID NO: 822543 - DNA, 33 bp, Homo sapien
ggttggatttcagaaactggtgaagtggcggag

SEQ ID NO: 822544 - DNA, 33 bp, Homo sapien
ggttggatttcagaaattggtgaagtggcggag

SEQ ID NO: 822545 - DNA, 33 bp, Homo sapien
gtgatatcttcgcatacgaaaggaaaaaaggtt

SEQ ID NO: 822546 - DNA, 33 bp, Homo sapien
gtgatatcttcgcatatgaaaggaaaaaaggtt

SEQ ID NO: 822547 - DNA, 33 bp, Homo sapien
gctttgggtcttcagacgacactctgagcagta

SEQ ID NO: 822548 - DNA, 33 bp, Homo sapien
gctttgggtcttcagatgacactctgagcagta

SEQ ID NO: 822549 - DNA, 33 bp, Homo sapien
cctcttataaggacacccgtcagattgaattag

SEQ ID NO: 822550 - DNA, 33 bp, Homo sapien
cctcttataaggacactcgtcagattgaattag

SEQ ID NO: 822551 - DNA, 33 bp, Homo sapien
gtctgttgccatttccagcttggttggaatagg

SEQ ID NO: 822552 - DNA, 33 bp, Homo sapien
gtctgttgccatttccggcttggttggaatagg

SEQ ID NO: 822553 - DNA, 33 bp, Homo sapien
cacacacatgggtgaacaccatctaataatgaa

SEQ ID NO: 822554 - DNA, 33 bp, Homo sapien
cacacacatgggtgaataccatctaataatgaa

SEQ ID NO: 822555 - DNA, 33 bp, Homo sapien
aattgaagattttgcacggtgtcttcagcagta

SEQ ID NO: 822556 - DNA, 33 bp, Homo sapien
aattgaagattttgcatggtgtcttcagcagta

SEQ ID NO: 822557 - DNA, 33 bp, Homo sapien
tggtctgaaattgagacgcttattgaatgctta

SEQ ID NO: 822558 - DNA, 33 bp, Homo sapien
tggtctgaaattgagatgcttattgaatgctta

SEQ ID NO: 822559 - DNA, 33 bp, Homo sapien
aacagaaaatgtaagaagaccaagaaaattcat

SEQ ID NO: 822560 - DNA, 33 bp, Homo sapien
aacagaaaatgtaagaggaccaagaaaattcat

SEQ ID NO: 822561 - DNA, 33 bp, Homo sapien
atacttaatttttccaatatggtctaggttaga

SEQ ID NO: 822562 - DNA, 33 bp, Homo sapien
atacttaatttttccagtatggtctaggttaga

SEQ ID NO: 822563 - DNA, 33 bp, Homo sapien
ctttatgacatctcacactggtccagaccaaga

SEQ ID NO: 822564 - DNA, 33 bp, Homo sapien
ctttatgacatctcactctggtccagaccaaga

SEQ ID NO: 822565 - DNA, 33 bp, Homo sapien
atccagctcatagagaggtttagaaaattaaat

SEQ ID NO: 822566 - DNA, 33 bp, Homo sapien
atccagctcatagagatgtttagaaaattaaat

SEQ ID NO: 822567 - DNA, 33 bp, Homo sapien
ttcatgagtttcaaataagacctgctctgagct

SEQ ID NO: 822568 - DNA, 33 bp, Homo sapien
ttcatgagtttcaaatgagacctgctctgagct

SEQ ID NO: 822569 - DNA, 33 bp, Homo sapien
aaacacctgtcagacaccaacaagctcagagca

SEQ ID NO: 822570 - DNA, 33 bp, Homo sapien
aaacacctgtcagacatcaacaagctcagagca

SEQ ID NO: 822571 - DNA, 33 bp, Homo sapien
ctctctcctaacaccaaaaacaattgatgggaa

SEQ ID NO: 822572 - DNA, 33 bp, Homo sapien
ctctctcctaacaccagaaacaattgatgggaa

SEQ ID NO: 822573 - DNA, 33 bp, Homo sapien
tggtttagatcccatcccctgctcaaggacatg

SEQ ID NO: 822574 - DNA, 33 bp, Homo sapien
tggtttagatcccatctcctgctcaaggacatg

SEQ ID NO: 822575 - DNA, 33 bp, Homo sapien
tatgccatgctgctaaatcacttttggattatt

SEQ ID NO: 822576 - DNA, 33 bp, Homo sapien
tatgccatgctgctaagtcacttttggattatt

SEQ ID NO: 822577 - DNA, 33 bp, Homo sapien
gtcataggtgctattacgtcaaagggtatagtg

SEQ ID NO: 822578 - DNA, 33 bp, Homo sapien
gtcataggtgctattatgtcaaagggtatagtg

SEQ ID NO: 822579 - DNA, 33 bp, Homo sapien
cttgtagggctccttcacaccatccccactgct

SEQ ID NO: 822580 - DNA, 33 bp, Homo sapien
cttgtagggctccttcgcaccatccccactgct

SEQ ID NO: 822581 - DNA, 33 bp, Homo sapien
aagtcatgtttgttcaccataccatttgcaaat

SEQ ID NO: 822582 - DNA, 33 bp, Homo sapien
aagtcatgtttgttcagcataccatttgcaaat

SEQ ID NO: 822583 - DNA, 33 bp, Homo sapien
tctgggaaactctgagaacagagagctaaatcc

SEQ ID NO: 822584 - DNA, 33 bp, Homo sapien
tctgggaaactctgaggacagagagctaaatcc

SEQ ID NO: 822585 - DNA, 33 bp, Homo sapien
ggaacaggtgctgatagccacagctgatatcca

SEQ ID NO: 822586 - DNA, 33 bp, Homo sapien
ggaacaggtgctgatatccacagctgatatcca

SEQ ID NO: 822587 - DNA, 33 bp, Homo sapien
cttgtcctagtgggcccgagatctctaaggaag

SEQ ID NO: 822588 - DNA, 33 bp, Homo sapien
cttgtcctagtgggcctgagatctctaaggaag

SEQ ID NO: 822589 - DNA, 33 bp, Homo sapien
aggaattaagttgtggaagaagaaaatgaagaa

SEQ ID NO: 822590 - DNA, 33 bp, Homo sapien
aggaattaagttgtgggagaagaaaatgaagaa

SEQ ID NO: 822591 - DNA, 33 bp, Homo sapien
cacttctgaatggggacgttaggattaaggtag

SEQ ID NO: 822592 - DNA, 33 bp, Homo sapien
cacttctgaatggggatgttaggattaaggtag

SEQ ID NO: 822593 - DNA, 33 bp, Homo sapien
ctcttttgcatattgccaacaagtagatactta

SEQ ID NO: 822594 - DNA, 33 bp, Homo sapien
ctcttttgcatattgctaacaagtagatactta

SEQ ID NO: 822595 - DNA, 33 bp, Homo sapien
ggtagggaggcattgggaaataccatcctgaat

SEQ ID NO: 822596 - DNA, 33 bp, Homo sapien
ggtagggaggcattggtaaataccatcctgaat

SEQ ID NO: 822597 - DNA, 33 bp, Homo sapien
aagaagtaacaaaccaaatggcttaagaacaaa

SEQ ID NO: 822598 - DNA, 33 bp, Homo sapien
aagaagtaacaaaccagatggcttaagaacaaa

SEQ ID NO: 822599 - DNA, 33 bp, Homo sapien
caacatggtgccatcaactggaagatgtttttg

SEQ ID NO: 822600 - DNA, 33 bp, Homo sapien
caacatggtgccatcagctggaagatgtttttg

SEQ ID NO: 822601 - DNA, 33 bp, Homo sapien
actgacttaatgaagccgcagactctcgcgttc

SEQ ID NO: 822602 - DNA, 33 bp, Homo sapien
actgacttaatgaagctgcagactctcgcgttc

SEQ ID NO: 822603 - DNA, 33 bp, Homo sapien
tgtaatcctagtgtccacaattggggggtttat

SEQ ID NO: 822604 - DNA, 33 bp, Homo sapien
tgtaatcctagtgtccgcaattggggggtttat

SEQ ID NO: 822605 - DNA, 33 bp, Homo sapien
tggatgaacaacttctaaaaaatgttactgagg

SEQ ID NO: 822606 - DNA, 33 bp, Homo sapien
tggatgaacaacttctgaaaaatgttactgagg

SEQ ID NO: 822607 - DNA, 33 bp, Homo sapien
gcttattttgaagtaaaccagatcctgattgga

SEQ ID NO: 822608 - DNA, 33 bp, Homo sapien
gcttattttgaagtaagccagatcctgattgga

SEQ ID NO: 822609 - DNA, 33 bp, Homo sapien
atttaaacttcctatgaatgtctcatgtaatta

SEQ ID NO: 822610 - DNA, 33 bp, Homo sapien
atttaaacttcctatggatgtctcatgtaatta

SEQ ID NO: 822611 - DNA, 33 bp, Homo sapien
actatccggggataagaagcacatgcctatagt

SEQ ID NO: 822612 - DNA, 33 bp, Homo sapien
actatccggggataagtagcacatgcctatagt

SEQ ID NO: 822613 - DNA, 33 bp, Homo sapien
cacctgtgtctgtacccaaaaatcactgaactg

SEQ ID NO: 822614 - DNA, 33 bp, Homo sapien
cacctgtgtctgtacctaaaaatcactgaactg

SEQ ID NO: 822615 - DNA, 33 bp, Homo sapien
ccatcctcgtcattcccaagctactcaaaaagt

SEQ ID NO: 822616 - DNA, 33 bp, Homo sapien
ccatcctcgtcattcctaagctactcaaaaagt

SEQ ID NO: 822617 - DNA, 33 bp, Homo sapien
tttgcaaccacttcctcaaggagattctgtaat

SEQ ID NO: 822618 - DNA, 33 bp, Homo sapien
tttgcaaccacttcctgaaggagattctgtaat

SEQ ID NO: 822619 - DNA, 33 bp, Homo sapien
tgcaaaggcccactgccgagagagccaatttgt

SEQ ID NO: 822620 - DNA, 33 bp, Homo sapien
tgcaaaggcccactgctgagagagccaatttgt

SEQ ID NO: 822621 - DNA, 33 bp, Homo sapien
tgctctctcttttaaaaatgtacctgtctgaag

SEQ ID NO: 822622 - DNA, 33 bp, Homo sapien
tgctctctcttttaaacatgtacctgtctgaag

SEQ ID NO: 822623 - DNA, 33 bp, Homo sapien
catcacacttcttgcacctactagaatgtcctc

SEQ ID NO: 822624 - DNA, 33 bp, Homo sapien
catcacacttcttgcagctactagaatgtcctc

SEQ ID NO: 822625 - DNA, 33 bp, Homo sapien
tcccacatttactaaccccgtgtcactccaaga

SEQ ID NO: 822626 - DNA, 33 bp, Homo sapien
tcccacatttactaactccgtgtcactccaaga

SEQ ID NO: 822627 - DNA, 33 bp, Homo sapien
gggtaaaaagtggggcaatttaaggagcagact

SEQ ID NO: 822628 - DNA, 33 bp, Homo sapien
gggtaaaaagtggggcgatttaaggagcagact

SEQ ID NO: 822629 - DNA, 33 bp, Homo sapien
cagaggtggggggaaaagaagaaggcgcaggtg

SEQ ID NO: 822630 - DNA, 33 bp, Homo sapien
cagaggtggggggaaaggaagaaggcgcaggtg

SEQ ID NO: 822631 - DNA, 33 bp, Homo sapien
ccaaaatatacggtcactactccctacacacaa

SEQ ID NO: 822632 - DNA, 33 bp, Homo sapien
ccaaaatatacggtcagtactccctacacacaa

SEQ ID NO: 822633 - DNA, 33 bp, Homo sapien
ttcaaagacttttctaagtattgccaacagaga

SEQ ID NO: 822634 - DNA, 33 bp, Homo sapien
ttcaaagacttttctaggtattgccaacagaga

SEQ ID NO: 822635 - DNA, 33 bp, Homo sapien
caatgagaactgtataccctgcagatctgatgt

SEQ ID NO: 822636 - DNA, 33 bp, Homo sapien
caatgagaactgtatagcctgcagatctgatgt

SEQ ID NO: 822637 - DNA, 33 bp, Homo sapien
accagttccaggacaacaccagataggatcaat

SEQ ID NO: 822638 - DNA, 33 bp, Homo sapien
accagttccaggacaataccagataggatcaat

SEQ ID NO: 822639 - DNA, 33 bp, Homo sapien
catattgcatccttaactattgtttcaaagatt

SEQ ID NO: 822640 - DNA, 33 bp, Homo sapien
catattgcatccttaattattgtttcaaagatt

SEQ ID NO: 822641 - DNA, 33 bp, Homo sapien
tagaacaaccagaaggaatgaaaggaaatcatt

SEQ ID NO: 822642 - DNA, 33 bp, Homo sapien
tagaacaaccagaagggatgaaaggaaatcatt

SEQ ID NO: 822643 - DNA, 33 bp, Homo sapien
tgtgtttgtgcaaatcctaggtgctcaataaat

SEQ ID NO: 822644 - DNA, 33 bp, Homo sapien
tgtgtttgtgcaaatcttaggtgctcaataaat

SEQ ID NO: 822645 - DNA, 33 bp, Homo sapien
aggtgctcaataaatgcctactgagaaataaaa

SEQ ID NO: 822646 - DNA, 33 bp, Homo sapien
aggtgctcaataaatgtctactgagaaataaaa

SEQ ID NO: 822647 - DNA, 33 bp, Homo sapien
ctcaggccaaactttaagttcatacctgggctg

SEQ ID NO: 822648 - DNA, 33 bp, Homo sapien
ctcaggccaaactttacgttcatacctgggctg

SEQ ID NO: 822649 - DNA, 33 bp, Homo sapien
ggctgcttgcattaaaggtttacccagtgcgca

SEQ ID NO: 822650 - DNA, 33 bp, Homo sapien
ggctgcttgcattaaatgtttacccagtgcgca

SEQ ID NO: 822651 - DNA, 33 bp, Homo sapien
tttctggtacatgcagaagtgacgggttacagt

SEQ ID NO: 822652 - DNA, 33 bp, Homo sapien
tttctggtacatgcagtagtgacgggttacagt

SEQ ID NO: 822653 - DNA, 33 bp, Homo sapien
gtttggaaaagaattacagttgcatagcttttt

SEQ ID NO: 822654 - DNA, 33 bp, Homo sapien
gtttggaaaagaattatagttgcatagcttttt

SEQ ID NO: 822655 - DNA, 33 bp, Homo sapien
aggatagcgtggggtacagaaggatgtctactg

SEQ ID NO: 822656 - DNA, 33 bp, Homo sapien
aggatagcgtggggtagagaaggatgtctactg

SEQ ID NO: 822657 - DNA, 33 bp, Homo sapien
ctaattgaagaaatacaaaataagtgcacacag

SEQ ID NO: 822658 - DNA, 33 bp, Homo sapien
ctaattgaagaaatacgaaataagtgcacacag

SEQ ID NO: 822659 - DNA, 33 bp, Homo sapien
aaaaataacttcctccagaaagacagaccgctt

SEQ ID NO: 822660 - DNA, 33 bp, Homo sapien
aaaaataacttcctcctgaaagacagaccgctt

SEQ ID NO: 822661 - DNA, 33 bp, Homo sapien
ctttgtcttggccacaacaactctctgagaata

SEQ ID NO: 822662 - DNA, 33 bp, Homo sapien
ctttgtcttggccacagcaactctctgagaata

SEQ ID NO: 822663 - DNA, 33 bp, Homo sapien
cctacactggctaagaaaagtgaggccatgaga

SEQ ID NO: 822664 - DNA, 33 bp, Homo sapien
cctacactggctaagagaagtgaggccatgaga

SEQ ID NO: 822665 - DNA, 33 bp, Homo sapien
agttctgaggctttacaagtttttaaataactg

SEQ ID NO: 822666 - DNA, 33 bp, Homo sapien
agttctgaggctttaccagtttttaaataactg

SEQ ID NO: 822667 - DNA, 33 bp, Homo sapien
atgctatccaatgaaaagcagtcaaaaacttac

SEQ ID NO: 822668 - DNA, 33 bp, Homo sapien
atgctatccaatgaaaggcagtcaaaaacttac

SEQ ID NO: 822669 - DNA, 33 bp, Homo sapien
gtgttggtaaatgatacctcttcatcacaagaa

SEQ ID NO: 822670 - DNA, 33 bp, Homo sapien
gtgttggtaaatgatatctcttcatcacaagaa

SEQ ID NO: 822671 - DNA, 33 bp, Homo sapien
agtgcataatgtacaacatttcatttaggatgt

SEQ ID NO: 822672 - DNA, 33 bp, Homo sapien
agtgcataatgtacaatatttcatttaggatgt

SEQ ID NO: 822673 - DNA, 33 bp, Homo sapien
tttaaatggctggcaaaattttaaaacaaatgt

SEQ ID NO: 822674 - DNA, 33 bp, Homo sapien
tttaaatggctggcaacattttaaaacaaatgt

SEQ ID NO: 822675 - DNA, 33 bp, Homo sapien
acttaaagcctacttacaaacttgtcaagtctc

SEQ ID NO: 822676 - DNA, 33 bp, Homo sapien
acttaaagcctacttataaacttgtcaagtctc

SEQ ID NO: 822677 - DNA, 33 bp, Homo sapien
gcagtggtgctactgactacaaaatagcccaca

SEQ ID NO: 822678 - DNA, 33 bp, Homo sapien
gcagtggtgctactgagtacaaaatagcccaca

SEQ ID NO: 822679 - DNA, 33 bp, Homo sapien
ccagctctcgaaaccaagactgcccccacccac

SEQ ID NO: 822680 - DNA, 33 bp, Homo sapien
ccagctctcgaaaccaggactgcccccacccac

SEQ ID NO: 822681 - DNA, 33 bp, Homo sapien
aatgggtggccaaaaaagaaatgctttcccatg

SEQ ID NO: 822682 - DNA, 33 bp, Homo sapien
aatgggtggccaaaaacgaaatgctttcccatg

SEQ ID NO: 822683 - DNA, 33 bp, Homo sapien
ccaagtgattatttaacgtctgtgaaaagtcct

SEQ ID NO: 822684 - DNA, 33 bp, Homo sapien
ccaagtgattatttaatgtctgtgaaaagtcct

SEQ ID NO: 822685 - DNA, 33 bp, Homo sapien
tctgtatcttaaagaaagagatgacagagtttc

SEQ ID NO: 822686 - DNA, 33 bp, Homo sapien
tctgtatcttaaagaacgagatgacagagtttc

SEQ ID NO: 822687 - DNA, 33 bp, Homo sapien
tcagcccgacttgccactgaaatcttcatgctc

SEQ ID NO: 822688 - DNA, 33 bp, Homo sapien
tcagcccgacttgccagtgaaatcttcatgctc

SEQ ID NO: 822689 - DNA, 33 bp, Homo sapien
aaaaacgggacaaaaccactcctgtgagaccct

SEQ ID NO: 822690 - DNA, 33 bp, Homo sapien
aaaaacgggacaaaacgactcctgtgagaccct

SEQ ID NO: 822691 - DNA, 33 bp, Homo sapien
tgacattctttttttaactggatgaagaaattc

SEQ ID NO: 822692 - DNA, 33 bp, Homo sapien
tgacattctttttttacctggatgaagaaattc

SEQ ID NO: 822693 - DNA, 33 bp, Homo sapien
ggctgcgtgcctaacccggaaagcatcgcttat

SEQ ID NO: 822694 - DNA, 33 bp, Homo sapien
ggctgcgtgcctaacctggaaagcatcgcttat

SEQ ID NO: 822695 - DNA, 33 bp, Homo sapien
ctcagtctcctgggaacgaggtaaagcatgcag

SEQ ID NO: 822696 - DNA, 33 bp, Homo sapien
ctcagtctcctgggaatgaggtaaagcatgcag

SEQ ID NO: 822697 - DNA, 33 bp, Homo sapien
aaggaaggatttttcacgaccatttcaaagaag

SEQ ID NO: 822698 - DNA, 33 bp, Homo sapien
aaggaaggatttttcatgaccatttcaaagaag

SEQ ID NO: 822699 - DNA, 33 bp, Homo sapien
atcttcaaccacacacagaatagggagagtagt

SEQ ID NO: 822700 - DNA, 33 bp, Homo sapien
atcttcaaccacacactgaatagggagagtagt

SEQ ID NO: 822701 - DNA, 33 bp, Homo sapien
accattttaaaaagaaaggagtttgcataaaac

SEQ ID NO: 822702 - DNA, 33 bp, Homo sapien
accattttaaaaagaagggagtttgcataaaac

SEQ ID NO: 822703 - DNA, 33 bp, Homo sapien
tgctttgacgttgttccctttcattactagctg

SEQ ID NO: 822704 - DNA, 33 bp, Homo sapien
tgctttgacgttgttctctttcattactagctg

SEQ ID NO: 822705 - DNA, 33 bp, Homo sapien
ccttaattgaattggcacaaagttcagcaattt

SEQ ID NO: 822706 - DNA, 33 bp, Homo sapien
ccttaattgaattggcgcaaagttcagcaattt

SEQ ID NO: 822707 - DNA, 33 bp, Homo sapien
aattctttcctcttacaggacaaagtgaaacac

SEQ ID NO: 822708 - DNA, 33 bp, Homo sapien
aattctttcctcttacgggacaaagtgaaacac

SEQ ID NO: 822709 - DNA, 33 bp, Homo sapien
tcaaagagaaactactaaaattcacacatttgt

SEQ ID NO: 822710 - DNA, 33 bp, Homo sapien
tcaaagagaaactactgaaattcacacatttgt

SEQ ID NO: 822711 - DNA, 33 bp, Homo sapien
gaaagcattcaaggaccaatagggatacatgaa

SEQ ID NO: 822712 - DNA, 33 bp, Homo sapien
gaaagcattcaaggactaatagggatacatgaa

SEQ ID NO: 822713 - DNA, 33 bp, Homo sapien
aagaaacatccacatccctgtctatgaaatctg

SEQ ID NO: 822714 - DNA, 33 bp, Homo sapien
aagaaacatccacatctctgtctatgaaatctg

SEQ ID NO: 822715 - DNA, 33 bp, Homo sapien
actacttgtctacatactaagaggagagctgca

SEQ ID NO: 822716 - DNA, 33 bp, Homo sapien
actacttgtctacatattaagaggagagctgca

SEQ ID NO: 822717 - DNA, 33 bp, Homo sapien
agtctacaaagagatcactgtcattttcaataa

SEQ ID NO: 822718 - DNA, 33 bp, Homo sapien
agtctacaaagagatcgctgtcattttcaataa

SEQ ID NO: 822719 - DNA, 33 bp, Homo sapien
tgaagaaatgtaaagccatgatgtgcatctcaa

SEQ ID NO: 822720 - DNA, 33 bp, Homo sapien
tgaagaaatgtaaagctatgatgtgcatctcaa

SEQ ID NO: 822721 - DNA, 33 bp, Homo sapien
catttaagcttgattacaagggttatgagacga

SEQ ID NO: 822722 - DNA, 33 bp, Homo sapien
catttaagcttgattataagggttatgagacga

SEQ ID NO: 822723 - DNA, 33 bp, Homo sapien
aagatggtgacgtgaaccaaatgcagaaagaca

SEQ ID NO: 822724 - DNA, 33 bp, Homo sapien
aagatggtgacgtgaagcaaatgcagaaagaca

SEQ ID NO: 822725 - DNA, 33 bp, Homo sapien
tgacaaatttgcacaactataaagaaggaaaat

SEQ ID NO: 822726 - DNA, 33 bp, Homo sapien
tgacaaatttgcacaagtataaagaaggaaaat

SEQ ID NO: 822727 - DNA, 33 bp, Homo sapien
atgctaacaacttgtaaatagttctgtgtgagt

SEQ ID NO: 822728 - DNA, 33 bp, Homo sapien
atgctaacaacttgtacatagttctgtgtgagt

SEQ ID NO: 822729 - DNA, 33 bp, Homo sapien
cttattctgacaactccatgtgatttcccctgg

SEQ ID NO: 822730 - DNA, 33 bp, Homo sapien
cttattctgacaactctatgtgatttcccctgg

SEQ ID NO: 822731 - DNA, 33 bp, Homo sapien
tcatcctgattccctcaatgatacattcatatc

SEQ ID NO: 822732 - DNA, 33 bp, Homo sapien
tcatcctgattccctcgatgatacattcatatc

SEQ ID NO: 822733 - DNA, 33 bp, Homo sapien
caacactcccatgagacgaagtgagttctgttc

SEQ ID NO: 822734 - DNA, 33 bp, Homo sapien
caacactcccatgagatgaagtgagttctgttc

SEQ ID NO: 822735 - DNA, 33 bp, Homo sapien
atgcataggcacacacaattattttcagactgc

SEQ ID NO: 822736 - DNA, 33 bp, Homo sapien
atgcataggcacacacgattattttcagactgc

SEQ ID NO: 822737 - DNA, 33 bp, Homo sapien
tgaatctgctgttagaagcatttgttggaatga

SEQ ID NO: 822738 - DNA, 33 bp, Homo sapien
tgaatctgctgttagaggcatttgttggaatga

SEQ ID NO: 822739 - DNA, 33 bp, Homo sapien
taatgctgctatgggaaatacaaggattactta

SEQ ID NO: 822740 - DNA, 33 bp, Homo sapien
taatgctgctatgggagatacaaggattactta

SEQ ID NO: 822741 - DNA, 33 bp, Homo sapien
ctacccacgttcccccaaagactttagtatctg

SEQ ID NO: 822742 - DNA, 33 bp, Homo sapien
ctacccacgttcccccgaagactttagtatctg

SEQ ID NO: 822743 - DNA, 33 bp, Homo sapien
ataaggtggtacaataagaagtatatacatagc

SEQ ID NO: 822744 - DNA, 33 bp, Homo sapien
ataaggtggtacaataggaagtatatacatagc

SEQ ID NO: 822745 - DNA, 33 bp, Homo sapien
agagctccataaataactgattgactgattgac

SEQ ID NO: 822746 - DNA, 33 bp, Homo sapien
agagctccataaataattgattgactgattgac

SEQ ID NO: 822747 - DNA, 33 bp, Homo sapien
catcccaggtccagaaaaacctagaggatcact

SEQ ID NO: 822748 - DNA, 33 bp, Homo sapien
catcccaggtccagaacaacctagaggatcact

SEQ ID NO: 822749 - DNA, 33 bp, Homo sapien
aacttggaccctgaaacaaacagtcttgggatg

SEQ ID NO: 822750 - DNA, 33 bp, Homo sapien
aacttggaccctgaaagaaacagtcttgggatg

SEQ ID NO: 822751 - DNA, 33 bp, Homo sapien
tggaagcaatgaaaaaagcaatggtccacagtg

SEQ ID NO: 822752 - DNA, 33 bp, Homo sapien
tggaagcaatgaaaaaggcaatggtccacagtg

SEQ ID NO: 822753 - DNA, 33 bp, Homo sapien
cttggggttcacattagaatagtaacggagctc

SEQ ID NO: 822754 - DNA, 33 bp, Homo sapien
cttggggttcacattataatagtaacggagctc

SEQ ID NO: 822755 - DNA, 33 bp, Homo sapien
gactcccgtgcatttaaaggagggtctgataac

SEQ ID NO: 822756 - DNA, 33 bp, Homo sapien
gactcccgtgcatttagaggagggtctgataac

SEQ ID NO: 822757 - DNA, 33 bp, Homo sapien
attcacgatgagtcaccgctgagagagcatcag

SEQ ID NO: 822758 - DNA, 33 bp, Homo sapien
attcacgatgagtcactgctgagagagcatcag

SEQ ID NO: 822759 - DNA, 33 bp, Homo sapien
tgagaaatgttcaataatagtttctattccaaa

SEQ ID NO: 822760 - DNA, 33 bp, Homo sapien
tgagaaatgttcaatagtagtttctattccaaa

SEQ ID NO: 822761 - DNA, 33 bp, Homo sapien
aggtctgcaggggagcacactgagctgaattgc

SEQ ID NO: 822762 - DNA, 33 bp, Homo sapien
aggtctgcaggggagcgcactgagctgaattgc

SEQ ID NO: 822763 - DNA, 33 bp, Homo sapien
aagaagccttgggatgcataaggacagagatac

SEQ ID NO: 822764 - DNA, 33 bp, Homo sapien
aagaagccttgggatggataaggacagagatac

SEQ ID NO: 822765 - DNA, 33 bp, Homo sapien
cagctttaaatataaccgagcaaaagtcaagcc

SEQ ID NO: 822766 - DNA, 33 bp, Homo sapien
cagctttaaatataactgagcaaaagtcaagcc

SEQ ID NO: 822767 - DNA, 33 bp, Homo sapien
agttttttgcattaaaactctcactgtgaagag

SEQ ID NO: 822768 - DNA, 33 bp, Homo sapien
agttttttgcattaaatctctcactgtgaagag

SEQ ID NO: 822769 - DNA, 33 bp, Homo sapien
tccaattttccagtcaagcactcttttcctgtt

SEQ ID NO: 822770 - DNA, 33 bp, Homo sapien
tccaattttccagtcaggcactcttttcctgtt

SEQ ID NO: 822771 - DNA, 33 bp, Homo sapien
aattttcctccttatcacttagcaacataccca

SEQ ID NO: 822772 - DNA, 33 bp, Homo sapien
aattttcctccttatctcttagcaacataccca

SEQ ID NO: 822773 - DNA, 33 bp, Homo sapien
aaagtcactcaatagaccagcataatagtttat

SEQ ID NO: 822774 - DNA, 33 bp, Homo sapien
aaagtcactcaatagagcagcataatagtttat

SEQ ID NO: 822775 - DNA, 33 bp, Homo sapien
ttttacactgttttacactgctcctgggataag

SEQ ID NO: 822776 - DNA, 33 bp, Homo sapien
ttttacactgttttacgctgctcctgggataag

SEQ ID NO: 822777 - DNA, 33 bp, Homo sapien
aagccatgcattcccccaccaggccagtgacaa

SEQ ID NO: 822778 - DNA, 33 bp, Homo sapien
aagccatgcattccccgaccaggccagtgacaa

SEQ ID NO: 822779 - DNA, 33 bp, Homo sapien
aatttgtttaaacttaccatctatcgttagtgt

SEQ ID NO: 822780 - DNA, 33 bp, Homo sapien
aatttgtttaaacttatcatctatcgttagtgt

SEQ ID NO: 822781 - DNA, 33 bp, Homo sapien
ggaaaatgacttcagagacttctatgggtattg

SEQ ID NO: 822782 - DNA, 33 bp, Homo sapien
ggaaaatgacttcagatacttctatgggtattg

SEQ ID NO: 822783 - DNA, 33 bp, Homo sapien
aattggcttctttgcacagcataaaagcaggaa

SEQ ID NO: 822784 - DNA, 33 bp, Homo sapien
aattggcttctttgcagagcataaaagcaggaa

SEQ ID NO: 822785 - DNA, 33 bp, Homo sapien
ataccgaaataaaactaaaatttgccaatacac

SEQ ID NO: 822786 - DNA, 33 bp, Homo sapien
ataccgaaataaaactgaaatttgccaatacac

SEQ ID NO: 822787 - DNA, 33 bp, Homo sapien
attatgatgtgtcttcacgtggatttctttggg

SEQ ID NO: 822788 - DNA, 33 bp, Homo sapien
attatgatgtgtcttcccgtggatttctttggg

SEQ ID NO: 822789 - DNA, 33 bp, Homo sapien
aatgaacagagaagtcaacacatccgaccccaa

SEQ ID NO: 822790 - DNA, 33 bp, Homo sapien
aatgaacagagaagtctacacatccgaccccaa

SEQ ID NO: 822791 - DNA, 33 bp, Homo sapien
tgatggtaaaagagaaagcttcagatcggggta

SEQ ID NO: 822792 - DNA, 33 bp, Homo sapien
tgatggtaaaagagaaggcttcagatcggggta

SEQ ID NO: 822793 - DNA, 33 bp, Homo sapien
tatagagaatccaacactggtacgcaataactt

SEQ ID NO: 822794 - DNA, 33 bp, Homo sapien
tatagagaatccaacattggtacgcaataactt

SEQ ID NO: 822795 - DNA, 33 bp, Homo sapien
aaattaagctgcattaacaaaaaatttaaaaag

SEQ ID NO: 822796 - DNA, 33 bp, Homo sapien
aaattaagctgcattaccaaaaaatttaaaaag

SEQ ID NO: 822797 - DNA, 33 bp, Homo sapien
taagctgttccttatacgtcaatgtgtcaaatt

SEQ ID NO: 822798 - DNA, 33 bp, Homo sapien
taagctgttccttatatgtcaatgtgtcaaatt

SEQ ID NO: 822799 - DNA, 33 bp, Homo sapien
ctccctctctcattgaacgtgatgttttcgtgg

SEQ ID NO: 822800 - DNA, 33 bp, Homo sapien
ctccctctctcattgagcgtgatgttttcgtgg

SEQ ID NO: 822801 - DNA, 33 bp, Homo sapien
cttcagtgttagacatcacagagttaatttggt

SEQ ID NO: 822802 - DNA, 33 bp, Homo sapien
cttcagtgttagacatgacagagttaatttggt

SEQ ID NO: 822803 - DNA, 33 bp, Homo sapien
atagactagtgaaattaaaacaggaactgtgaa

SEQ ID NO: 822804 - DNA, 33 bp, Homo sapien
atagactagtgaaattgaaacaggaactgtgaa

SEQ ID NO: 822805 - DNA, 33 bp, Homo sapien
tatggacagaaaatcaatatgttgataagacat

SEQ ID NO: 822806 - DNA, 33 bp, Homo sapien
tatggacagaaaatcagtatgttgataagacat

SEQ ID NO: 822807 - DNA, 33 bp, Homo sapien
atacgcttgatccaacagagtttttcttttggc

SEQ ID NO: 822808 - DNA, 33 bp, Homo sapien
atacgcttgatccaacggagtttttcttttggc

SEQ ID NO: 822809 - DNA, 33 bp, Homo sapien
agagcgtcaagccaatgagtgatagagaagcag

SEQ ID NO: 822810 - DNA, 33 bp, Homo sapien
agagcgtcaagccaattagtgatagagaagcag

SEQ ID NO: 822811 - DNA, 33 bp, Homo sapien
cttactggataatctacgaaaaacgttatgtaa

SEQ ID NO: 822812 - DNA, 33 bp, Homo sapien
cttactggataatctaggaaaaacgttatgtaa

SEQ ID NO: 822813 - DNA, 33 bp, Homo sapien
ctctagtcaaacagccagaacactctctccctg

SEQ ID NO: 822814 - DNA, 33 bp, Homo sapien
ctctagtcaaacagccggaacactctctccctg

SEQ ID NO: 822815 - DNA, 33 bp, Homo sapien
ggagattcttttttaaatcacaagctcatggtg

SEQ ID NO: 822816 - DNA, 33 bp, Homo sapien
ggagattcttttttaagtcacaagctcatggtg

SEQ ID NO: 822817 - DNA, 33 bp, Homo sapien
taccacagcaagtcacagagaaggaaaaaaaaa

SEQ ID NO: 822818 - DNA, 33 bp, Homo sapien
taccacagcaagtcacggagaaggaaaaaaaaa

SEQ ID NO: 822819 - DNA, 33 bp, Homo sapien
aattctctaagtgtgaccatgaggttttaaagg

SEQ ID NO: 822820 - DNA, 33 bp, Homo sapien
aattctctaagtgtgagcatgaggttttaaagg

SEQ ID NO: 822821 - DNA, 33 bp, Homo sapien
taagttagtgatggtacacacatagtttggctg

SEQ ID NO: 822822 - DNA, 33 bp, Homo sapien
taagttagtgatggtatacacatagtttggctg

SEQ ID NO: 822823 - DNA, 33 bp, Homo sapien
aggcggatctctttagcccgggagtttgagacc

SEQ ID NO: 822824 - DNA, 33 bp, Homo sapien
aggcggatctctttagtccgggagtttgagacc

SEQ ID NO: 822825 - DNA, 33 bp, Homo sapien
tctctcccctctcctcagacaaaatccaaaagt

SEQ ID NO: 822826 - DNA, 33 bp, Homo sapien
tctctcccctctcctccgacaaaatccaaaagt

SEQ ID NO: 822827 - DNA, 33 bp, Homo sapien
aggcagaagtgggacaagtgagacaaaccaatt

SEQ ID NO: 822828 - DNA, 33 bp, Homo sapien
aggcagaagtgggacacgtgagacaaaccaatt

SEQ ID NO: 822829 - DNA, 33 bp, Homo sapien
agagaacatggaggaacgatcactttctaaggg

SEQ ID NO: 822830 - DNA, 33 bp, Homo sapien
agagaacatggaggaaggatcactttctaaggg

SEQ ID NO: 822831 - DNA, 33 bp, Homo sapien
taatggactctacagaaataaggacatatgtgg

SEQ ID NO: 822832 - DNA, 33 bp, Homo sapien
taatggactctacagagataaggacatatgtgg

SEQ ID NO: 822833 - DNA, 33 bp, Homo sapien
gaatgggactggcaaaatgtcactggcattgga

SEQ ID NO: 822834 - DNA, 33 bp, Homo sapien
gaatgggactggcaaagtgtcactggcattgga

SEQ ID NO: 822835 - DNA, 33 bp, Homo sapien
gttggaatcaaatagcacttcttcaaaaaaaga

SEQ ID NO: 822836 - DNA, 33 bp, Homo sapien
gttggaatcaaatagcccttcttcaaaaaaaga

SEQ ID NO: 822837 - DNA, 33 bp, Homo sapien
atgaccacagcctgaaaacctaaccctagccag

SEQ ID NO: 822838 - DNA, 33 bp, Homo sapien
atgaccacagcctgaagacctaaccctagccag

SEQ ID NO: 822839 - DNA, 33 bp, Homo sapien
ctgattgcccatgtgaagacatctttatgagtg

SEQ ID NO: 822840 - DNA, 33 bp, Homo sapien
ctgattgcccatgtgaggacatctttatgagtg

SEQ ID NO: 822841 - DNA, 33 bp, Homo sapien
acttaaatacaactaaacaggatttccagagca

SEQ ID NO: 822842 - DNA, 33 bp, Homo sapien
acttaaatacaactaagcaggatttccagagca

SEQ ID NO: 822843 - DNA, 33 bp, Homo sapien
acaaacctcgcaaatcaaaagctctgagaaaag

SEQ ID NO: 822844 - DNA, 33 bp, Homo sapien
acaaacctcgcaaatcgaaagctctgagaaaag

SEQ ID NO: 822845 - DNA, 33 bp, Homo sapien
agtcatcagcaagtcccgagagccagaaaaaca

SEQ ID NO: 822846 - DNA, 33 bp, Homo sapien
agtcatcagcaagtcctgagagccagaaaaaca

SEQ ID NO: 822847 - DNA, 33 bp, Homo sapien
atgtagatgttactaccccacaagcagagggag

SEQ ID NO: 822848 - DNA, 33 bp, Homo sapien
atgtagatgttactacgccacaagcagagggag

SEQ ID NO: 822849 - DNA, 33 bp, Homo sapien
ttccagtatacagtaaaatactcttgtctttgt

SEQ ID NO: 822850 - DNA, 33 bp, Homo sapien
ttccagtatacagtaagatactcttgtctttgt

SEQ ID NO: 822851 - DNA, 33 bp, Homo sapien
tggcaagagcaccccccctctctctcatgtgag

SEQ ID NO: 822852 - DNA, 33 bp, Homo sapien
tggcaagagcaccccctctctctctcatgtgag

SEQ ID NO: 822853 - DNA, 33 bp, Homo sapien
ttaaaacaacaaacccagacagatgtgttcagc

SEQ ID NO: 822854 - DNA, 33 bp, Homo sapien
ttaaaacaacaaacccggacagatgtgttcagc

SEQ ID NO: 822855 - DNA, 33 bp, Homo sapien
tgtattggagagcacaccgttggatgcttccat

SEQ ID NO: 822856 - DNA, 33 bp, Homo sapien
tgtattggagagcacatcgttggatgcttccat

SEQ ID NO: 822857 - DNA, 33 bp, Homo sapien
tttcactgttaactatcataggtgagatcataa

SEQ ID NO: 822858 - DNA, 33 bp, Homo sapien
tttcactgttaactatgataggtgagatcataa

SEQ ID NO: 822859 - DNA, 33 bp, Homo sapien
ctctcactcctaaagacgttataaactctgcct

SEQ ID NO: 822860 - DNA, 33 bp, Homo sapien
ctctcactcctaaagatgttataaactctgcct

SEQ ID NO: 822861 - DNA, 33 bp, Homo sapien
agggcaggggagtgataaacattattcctgatg

SEQ ID NO: 822862 - DNA, 33 bp, Homo sapien
agggcaggggagtgatgaacattattcctgatg

SEQ ID NO: 822863 - DNA, 33 bp, Homo sapien
ccagtggaaatttctcacctgtcctagaccttt

SEQ ID NO: 822864 - DNA, 33 bp, Homo sapien
ccagtggaaatttctctcctgtcctagaccttt

SEQ ID NO: 822865 - DNA, 33 bp, Homo sapien
cctttctgcctcagaccatcccagtggaaattt

SEQ ID NO: 822866 - DNA, 33 bp, Homo sapien
cctttctgcctcagactatcccagtggaaattt

SEQ ID NO: 822867 - DNA, 33 bp, Homo sapien
taatttttcaaggaggccaactattttgcaaca

SEQ ID NO: 822868 - DNA, 33 bp, Homo sapien
taatttttcaaggaggtcaactattttgcaaca

SEQ ID NO: 822869 - DNA, 33 bp, Homo sapien
gtctttaatatcagaaagctgacacacaacttc

SEQ ID NO: 822870 - DNA, 33 bp, Homo sapien
gtctttaatatcagaaggctgacacacaacttc

SEQ ID NO: 822871 - DNA, 33 bp, Homo sapien
caagataaagacgaagaaccggaaagaggtaag

SEQ ID NO: 822872 - DNA, 33 bp, Homo sapien
caagataaagacgaagtaccggaaagaggtaag

SEQ ID NO: 822873 - DNA, 33 bp, Homo sapien
aactttaattcctctccataacattctcttcta

SEQ ID NO: 822874 - DNA, 33 bp, Homo sapien
aactttaattcctctctataacattctcttcta

SEQ ID NO: 822875 - DNA, 33 bp, Homo sapien
ctttcgtggtttgccaacttgagagtatgtcac

SEQ ID NO: 822876 - DNA, 33 bp, Homo sapien
ctttcgtggtttgccaccttgagagtatgtcac

SEQ ID NO: 822877 - DNA, 33 bp, Homo sapien
tcactctggggccccacgaatttgcgttgttct

SEQ ID NO: 822878 - DNA, 33 bp, Homo sapien
tcactctggggccccatgaatttgcgttgttct

SEQ ID NO: 822879 - DNA, 33 bp, Homo sapien
agctctttgaatccaaaactaggtcctgttttt

SEQ ID NO: 822880 - DNA, 33 bp, Homo sapien
agctctttgaatccaagactaggtcctgttttt

SEQ ID NO: 822881 - DNA, 33 bp, Homo sapien
cattaggcccttcaggaaagactgactttttca

SEQ ID NO: 822882 - DNA, 33 bp, Homo sapien
cattaggcccttcagggaagactgactttttca

SEQ ID NO: 822883 - DNA, 33 bp, Homo sapien
ttactttatggctaataagctctaaaaacaggg

SEQ ID NO: 822884 - DNA, 33 bp, Homo sapien
ttactttatggctaatgagctctaaaaacaggg

SEQ ID NO: 822885 - DNA, 33 bp, Homo sapien
ggccttctgcacgatgaaatcagtggtagagaa

SEQ ID NO: 822886 - DNA, 33 bp, Homo sapien
ggccttctgcacgatgcaatcagtggtagagaa

SEQ ID NO: 822887 - DNA, 33 bp, Homo sapien
tacactgcagggtggaaacatttgattggcttt

SEQ ID NO: 822888 - DNA, 33 bp, Homo sapien
tacactgcagggtggagacatttgattggcttt

SEQ ID NO: 822889 - DNA, 33 bp, Homo sapien
atttcatttccctcaacgctattttagtctcaa

SEQ ID NO: 822890 - DNA, 33 bp, Homo sapien
atttcatttccctcaatgctattttagtctcaa

SEQ ID NO: 822891 - DNA, 33 bp, Homo sapien
ccatctttatgtccagaaacatgacgccacacg

SEQ ID NO: 822892 - DNA, 33 bp, Homo sapien
ccatctttatgtccaggaacatgacgccacacg

SEQ ID NO: 822893 - DNA, 33 bp, Homo sapien
caagaagtgtccctaaagagctgattgacggga

SEQ ID NO: 822894 - DNA, 33 bp, Homo sapien
caagaagtgtccctaaggagctgattgacggga

SEQ ID NO: 822895 - DNA, 33 bp, Homo sapien
gttctaggccaccaggaaataaaaataagaccg

SEQ ID NO: 822896 - DNA, 33 bp, Homo sapien
gttctaggccaccagggaataaaaataagaccg

SEQ ID NO: 822897 - DNA, 33 bp, Homo sapien
caacagggagcaagaaatgaattttaaacagga

SEQ ID NO: 822898 - DNA, 33 bp, Homo sapien
caacagggagcaagaagtgaattttaaacagga

SEQ ID NO: 822899 - DNA, 33 bp, Homo sapien
tctaggctgtggaaaagccagcaaaactcaaaa

SEQ ID NO: 822900 - DNA, 33 bp, Homo sapien
tctaggctgtggaaaatccagcaaaactcaaaa

SEQ ID NO: 822901 - DNA, 33 bp, Homo sapien
ttgcgactttgcacacagaatgaataatgggcc

SEQ ID NO: 822902 - DNA, 33 bp, Homo sapien
ttgcgactttgcacacggaatgaataatgggcc

SEQ ID NO: 822903 - DNA, 33 bp, Homo sapien
tccccctctttctgtacgagacttagtcatatg

SEQ ID NO: 822904 - DNA, 33 bp, Homo sapien
tccccctctttctgtatgagacttagtcatatg

SEQ ID NO: 822905 - DNA, 33 bp, Homo sapien
gagcagtcccccggcacgggaacaccacagtgc

SEQ ID NO: 822906 - DNA, 33 bp, Homo sapien
gagcagtcccccggcatgggaacaccacagtgc

SEQ ID NO: 822907 - DNA, 33 bp, Homo sapien
tataagacatgatcaacataaagaccacataaa

SEQ ID NO: 822908 - DNA, 33 bp, Homo sapien
tataagacatgatcaatataaagaccacataaa

SEQ ID NO: 822909 - DNA, 33 bp, Homo sapien
ttagtaaccggcataaatgagggcacagtagga

SEQ ID NO: 822910 - DNA, 33 bp, Homo sapien
ttagtaaccggcataactgagggcacagtagga

SEQ ID NO: 822911 - DNA, 33 bp, Homo sapien
gtaccagacatcacgtaaacacctctcaggcca

SEQ ID NO: 822912 - DNA, 33 bp, Homo sapien
gtaccagacatcacgttaacacctctcaggcca

SEQ ID NO: 822913 - DNA, 33 bp, Homo sapien
ccaagttcagaatccaagaaaatgtttatccta

SEQ ID NO: 822914 - DNA, 33 bp, Homo sapien
ccaagttcagaatccaggaaaatgtttatccta

SEQ ID NO: 822915 - DNA, 33 bp, Homo sapien
gaattctcaaccctagaaagtaggacaaagcca

SEQ ID NO: 822916 - DNA, 33 bp, Homo sapien
gaattctcaaccctaggaagtaggacaaagcca

SEQ ID NO: 822917 - DNA, 33 bp, Homo sapien
gtgactttagcactaacggactgtccagttaag

SEQ ID NO: 822918 - DNA, 33 bp, Homo sapien
gtgactttagcactaatggactgtccagttaag

SEQ ID NO: 822919 - DNA, 33 bp, Homo sapien
ttttcaagatacatggaaaaggtagatacaggt

SEQ ID NO: 822920 - DNA, 33 bp, Homo sapien
ttttcaagatacatgggaaaggtagatacaggt

SEQ ID NO: 822921 - DNA, 33 bp, Homo sapien
gtctacttctttactaagatttgtacttcccta

SEQ ID NO: 822922 - DNA, 33 bp, Homo sapien
gtctacttctttactatgatttgtacttcccta

SEQ ID NO: 822923 - DNA, 33 bp, Homo sapien
gccacaggcttttaaaccacagtcaaaggacat

SEQ ID NO: 822924 - DNA, 33 bp, Homo sapien
gccacaggcttttaaatcacagtcaaaggacat

SEQ ID NO: 822925 - DNA, 33 bp, Homo sapien
ttcctttgagctgaaaaaaaggcaactgcatgg

SEQ ID NO: 822926 - DNA, 33 bp, Homo sapien
ttcctttgagctgaaagaaaggcaactgcatgg

SEQ ID NO: 822927 - DNA, 33 bp, Homo sapien
gtttcaataacttaccacaggcccaaaatggat

SEQ ID NO: 822928 - DNA, 33 bp, Homo sapien
gtttcaataacttaccgcaggcccaaaatggat

SEQ ID NO: 822929 - DNA, 33 bp, Homo sapien
tctagacaatggcatcacgtcccatctgtaccc

SEQ ID NO: 822930 - DNA, 33 bp, Homo sapien
tctagacaatggcatcgcgtcccatctgtaccc

SEQ ID NO: 822931 - DNA, 33 bp, Homo sapien
ccaagagactaagaacactacaagcaaagtgtg

SEQ ID NO: 822932 - DNA, 33 bp, Homo sapien
ccaagagactaagaacgctacaagcaaagtgtg

SEQ ID NO: 822933 - DNA, 33 bp, Homo sapien
actaaccttgcctttacgaggtaggaggtggga

SEQ ID NO: 822934 - DNA, 33 bp, Homo sapien
actaaccttgcctttatgaggtaggaggtggga

SEQ ID NO: 822935 - DNA, 33 bp, Homo sapien
cccagtccatgccgtcaacaccatccaacattc

SEQ ID NO: 822936 - DNA, 33 bp, Homo sapien
cccagtccatgccgtccacaccatccaacattc

SEQ ID NO: 822937 - DNA, 33 bp, Homo sapien
acggcatggactgggcaaccgggaaaccatgtg

SEQ ID NO: 822938 - DNA, 33 bp, Homo sapien
acggcatggactgggcgaccgggaaaccatgtg

SEQ ID NO: 822939 - DNA, 33 bp, Homo sapien
taataaacaagaggcacggaggaaatagcagcc

SEQ ID NO: 822940 - DNA, 33 bp, Homo sapien
taataaacaagaggcatggaggaaatagcagcc

SEQ ID NO: 822941 - DNA, 33 bp, Homo sapien
caagagtgttccctaaacttgctctggatggaa

SEQ ID NO: 822942 - DNA, 33 bp, Homo sapien
caagagtgttccctaagcttgctctggatggaa

SEQ ID NO: 822943 - DNA, 33 bp, Homo sapien
caggcatttgctgaaacaaagtgcaggtggaaa

SEQ ID NO: 822944 - DNA, 33 bp, Homo sapien
caggcatttgctgaaataaagtgcaggtggaaa

SEQ ID NO: 822945 - DNA, 33 bp, Homo sapien
tgccatctgtaaaccacaaagcagccctcacca

SEQ ID NO: 822946 - DNA, 33 bp, Homo sapien
tgccatctgtaaaccagaaagcagccctcacca

SEQ ID NO: 822947 - DNA, 33 bp, Homo sapien
tgttcctcagagaccaatggctggtaagtaatg

SEQ ID NO: 822948 - DNA, 33 bp, Homo sapien
tgttcctcagagaccagtggctggtaagtaatg

SEQ ID NO: 822949 - DNA, 33 bp, Homo sapien; identical to SEQ ID NO: 822947

SEQ ID NO: 822950 - DNA, 33 bp, Homo sapien; identical to SEQ ID NO: 822948

SEQ ID NO: 822951 - DNA, 33 bp, Homo sapien
catgctggaaatgagactactggacttggcagt

SEQ ID NO: 822952 - DNA, 33 bp, Homo sapien
catgctggaaatgagattactggacttggcagt

SEQ ID NO: 822953 - DNA, 33 bp, Homo sapien
tctgtcctgaggaaatgaagagtccagttcctg

SEQ ID NO: 822954 - DNA, 33 bp, Homo sapien
tctgtcctgaggaaattaagagtccagttcctg

SEQ ID NO: 822955 - DNA, 33 bp, Homo sapien; identical to SEQ ID NO: 822953

SEQ ID NO: 822956 - DNA, 33 bp, Homo sapien; identical to SEQ ID NO: 822954

SEQ ID NO: 822957 - DNA, 33 bp, Homo sapien
caaaagattcctaaaacggtctgcgattgctac

SEQ ID NO: 822958 - DNA, 33 bp, Homo sapien
caaaagattcctaaaatggtctgcgattgctac

SEQ ID NO: 822959 - DNA, 33 bp, Homo sapien
ttagattgctaaggatcataaagatgcctcttc

SEQ ID NO: 822960 - DNA, 33 bp, Homo sapien
ttagattgctaaggattataaagatgcctcttc

SEQ ID NO: 822961 - DNA, 33 bp, Homo sapien
aggggaactgttatggacttcattctaagaagc

SEQ ID NO: 822962 - DNA, 33 bp, Homo sapien
aggggaactgttatggccttcattctaagaagc

SEQ ID NO: 822963 - DNA, 33 bp, Homo sapien
cattaaaaggtcaacaagtcatgatcataagaa

SEQ ID NO: 822964 - DNA, 33 bp, Homo sapien
cattaaaaggtcaacaggtcatgatcataagaa

SEQ ID NO: 822965 - DNA, 33 bp, Homo sapien
tgaccttttaatggatagattacacagagcaaa

SEQ ID NO: 822966 - DNA, 33 bp, Homo sapien
tgaccttttaatggatggattacacagagcaaa

SEQ ID NO: 822967 - DNA, 33 bp, Homo sapien
gtccctcaacaccaaaagtattggatagtggtg

SEQ ID NO: 822968 - DNA, 33 bp, Homo sapien
gtccctcaacaccaaatgtattggatagtggtg

SEQ ID NO: 822969 - DNA, 33 bp, Homo sapien
cttaacttcctctacacagctgagatcatgttg

SEQ ID NO: 822970 - DNA, 33 bp, Homo sapien
cttaacttcctctacatagctgagatcatgttg

SEQ ID NO: 822971 - DNA, 33 bp, Homo sapien
gaatctggtttacaaaacataactcactcatct

SEQ ID NO: 822972 - DNA, 33 bp, Homo sapien
gaatctggtttacaaagcataactcactcatct

SEQ ID NO: 822973 - DNA, 33 bp, Homo sapien
acagcattcctaaccaacatggaactcataggc

SEQ ID NO: 822974 - DNA, 33 bp, Homo sapien
acagcattcctaaccatcatggaactcataggc

SEQ ID NO: 822975 - DNA, 33 bp, Homo sapien
ggcacccttctttaaacatccaatcagaatgcc

SEQ ID NO: 822976 - DNA, 33 bp, Homo sapien
ggcacccttctttaaatatccaatcagaatgcc

SEQ ID NO: 822977 - DNA, 33 bp, Homo sapien
aacggtctggtgggaacagttttcaggagagag

SEQ ID NO: 822978 - DNA, 33 bp, Homo sapien
aacggtctggtgggaatagttttcaggagagag

SEQ ID NO: 822979 - DNA, 33 bp, Homo sapien
gctactaggaaaaagaaaccatcttcaggctgt

SEQ ID NO: 822980 - DNA, 33 bp, Homo sapien
gctactaggaaaaagagaccatcttcaggctgt

SEQ ID NO: 822981 - DNA, 33 bp, Homo sapien
ctgacacccaaacctacgccttttctatcacag

SEQ ID NO: 822982 - DNA, 33 bp, Homo sapien
ctgacacccaaacctatgccttttctatcacag

SEQ ID NO: 822983 - DNA, 33 bp, Homo sapien
tgtgcttaaagaagataaaaaccttggctttta

SEQ ID NO: 822984 - DNA, 33 bp, Homo sapien
tgtgcttaaagaagatgaaaaccttggctttta

SEQ ID NO: 822985 - DNA, 33 bp, Homo sapien
ggcatggacgaatctcaatgacattacactaaa

SEQ ID NO: 822986 - DNA, 33 bp, Homo sapien
ggcatggacgaatctcgatgacattacactaaa

SEQ ID NO: 822987 - DNA, 33 bp, Homo sapien
ctcattactactcccaactttgttctgagaacc

SEQ ID NO: 822988 - DNA, 33 bp, Homo sapien
ctcattactactcccatctttgttctgagaacc

SEQ ID NO: 822989 - DNA, 33 bp, Homo sapien
ttgtaaaatgcagctacaggtcaggtcttttgc

SEQ ID NO: 822990 - DNA, 33 bp, Homo sapien
ttgtaaaatgcagctagaggtcaggtcttttgc

SEQ ID NO: 822991 - DNA, 33 bp, Homo sapien
ttcttagtaatgatcacagttcttactttatcc

SEQ ID NO: 822992 - DNA, 33 bp, Homo sapien
ttcttagtaatgatcatagttcttactttatcc

SEQ ID NO: 822993 - DNA, 33 bp, Homo sapien
ttagaatagctgcaaaaaaagcaaaatacttgg

SEQ ID NO: 822994 - DNA, 33 bp, Homo sapien
ttagaatagctgcaaacaaagcaaaatacttgg

SEQ ID NO: 822995 - DNA, 33 bp, Homo sapien
tgtgtgtgtattttccaagtttcctcttgttac

SEQ ID NO: 822996 - DNA, 33 bp, Homo sapien
tgtgtgtgtattttccgagtttcctcttgttac

SEQ ID NO: 822997 - DNA, 33 bp, Homo sapien
gcaaaagcctgtatcaaaaaaatagaaagactt

SEQ ID NO: 822998 - DNA, 33 bp, Homo sapien
gcaaaagcctgtatcagaaaaatagaaagactt

SEQ ID NO: 822999 - DNA, 33 bp, Homo sapien
atactagagaaaactaaccaatgcaataatacc

SEQ ID NO: 823000 - DNA, 33 bp, Homo sapien
atactagagaaaactagccaatgcaataatacc

SEQ ID NO: 823001 - DNA, 33 bp, Homo sapien
atgaagtacccttatcacattacatcagtgggt

SEQ ID NO: 823002 - DNA, 33 bp, Homo sapien
atgaagtacccttatcgcattacatcagtgggt

SEQ ID NO: 823003 - DNA, 33 bp, Homo sapien
ggaatggtggccctataacgtcagctttttctt

SEQ ID NO: 823004 - DNA, 33 bp, Homo sapien
ggaatggtggccctatgacgtcagctttttctt

SEQ ID NO: 823005 - DNA, 33 bp, Homo sapien
cttgtgtttcagccacaattcttcctttctttt

SEQ ID NO: 823006 - DNA, 33 bp, Homo sapien
cttgtgtttcagccacgattcttcctttctttt

SEQ ID NO: 823007 - DNA, 33 bp, Homo sapien
ttttctgtgtctcccacattattcttattccta

SEQ ID NO: 823008 - DNA, 33 bp, Homo sapien
ttttctgtgtctcccatattattcttattccta

SEQ ID NO: 823009 - DNA, 33 bp, Homo sapien
tcaattgaggaaaaaaatacagaaaatgagtct

SEQ ID NO: 823010 - DNA, 33 bp, Homo sapien
tcaattgaggaaaaaattacagaaaatgagtct

SEQ ID NO: 823011 - DNA, 33 bp, Homo sapien
gactgcctgacttgtaggtggcagaaacaactg

SEQ ID NO: 823012 - DNA, 33 bp, Homo sapien
gactgcctgacttgtatgtggcagaaacaactg

SEQ ID NO: 823013 - DNA, 33 bp, Homo sapien
ttagaccatgactgaaatgggaactgtatgatt

SEQ ID NO: 823014 - DNA, 33 bp, Homo sapien
ttagaccatgactgaagtgggaactgtatgatt

SEQ ID NO: 823015 - DNA, 33 bp, Homo sapien
attccgtattgaataacgtgaacaaacaaatta

SEQ ID NO: 823016 - DNA, 33 bp, Homo sapien
attccgtattgaataatgtgaacaaacaaatta

SEQ ID NO: 823017 - DNA, 33 bp, Homo sapien
atatgaaaagatgctgcaatcactaatcattag

SEQ ID NO: 823018 - DNA, 33 bp, Homo sapien
atatgaaaagatgctggaatcactaatcattag

SEQ ID NO: 823019 - DNA, 33 bp, Homo sapien
acatcttaaatcagagactcccaattaaatatt

SEQ ID NO: 823020 - DNA, 33 bp, Homo sapien
acatcttaaatcagaggctcccaattaaatatt

SEQ ID NO: 823021 - DNA, 33 bp, Homo sapien
ctcatgaattatcacaacagcctttgaagcaga

SEQ ID NO: 823022 - DNA, 33 bp, Homo sapien
ctcatgaattatcacaccagcctttgaagcaga

SEQ ID NO: 823023 - DNA, 33 bp, Homo sapien
aatgcccaccaatttgcaggatgcttgatatga

SEQ ID NO: 823024 - DNA, 33 bp, Homo sapien
aatgcccaccaatttgtaggatgcttgatatga

SEQ ID NO: 823025 - DNA, 33 bp, Homo sapien
gggcagaaaagtataaccctcagttagggatgc

SEQ ID NO: 823026 - DNA, 33 bp, Homo sapien
gggcagaaaagtataatcctcagttagggatgc

SEQ ID NO: 823027 - DNA, 33 bp, Homo sapien
caccctgggtcctgcaaccagaaagaaggatct

SEQ ID NO: 823028 - DNA, 33 bp, Homo sapien
caccctgggtcctgcagccagaaagaaggatct

SEQ ID NO: 823029 - DNA, 33 bp, Homo sapien
agacaatatggcccacccttttagtgtctatga

SEQ ID NO: 823030 - DNA, 33 bp, Homo sapien
agacaatatggcccactcttttagtgtctatga

SEQ ID NO: 823031 - DNA, 33 bp, Homo sapien
ggagaatgcttccactaagaaattgtggacact

SEQ ID NO: 823032 - DNA, 33 bp, Homo sapien
ggagaatgcttccactgagaaattgtggacact

SEQ ID NO: 823033 - DNA, 33 bp, Homo sapien
gaagggagatggaagaaataatgggaagctccc

SEQ ID NO: 823034 - DNA, 33 bp, Homo sapien
gaagggagatggaagagataatgggaagctccc

SEQ ID NO: 823035 - DNA, 33 bp, Homo sapien
aggctattgatcaagaaccttgtggacccaccc

SEQ ID NO: 823036 - DNA, 33 bp, Homo sapien
aggctattgatcaagatccttgtggacccaccc

SEQ ID NO: 823037 - DNA, 33 bp, Homo sapien
ctcttatatgtgatcaatcacttttcttttgct

SEQ ID NO: 823038 - DNA, 33 bp, Homo sapien
ctcttatatgtgatcattcacttttcttttgct

SEQ ID NO: 823039 - DNA, 33 bp, Homo sapien
gaatttgctaagcaagccagaaagatggagggc

SEQ ID NO: 823040 - DNA, 33 bp, Homo sapien
gaatttgctaagcaaggcagaaagatggagggc

SEQ ID NO: 823041 - DNA, 33 bp, Homo sapien
gcttgaaggattttcactattcctcaaaaaatt

SEQ ID NO: 823042 - DNA, 33 bp, Homo sapien
gcttgaaggattttcagtattcctcaaaaaatt

SEQ ID NO: 823043 - DNA, 33 bp, Homo sapien
ctctccgtgctgttagaacagagaccaagctct

SEQ ID NO: 823044 - DNA, 33 bp, Homo sapien
ctctccgtgctgttaggacagagaccaagctct

SEQ ID NO: 823045 - DNA, 33 bp, Homo sapien
cttaatagcattgagaacatatgtagggaaata

SEQ ID NO: 823046 - DNA, 33 bp, Homo sapien
cttaatagcattgagagcatatgtagggaaata

SEQ ID NO: 823047 - DNA, 33 bp, Homo sapien
aagatagaaaagactaacctgtgattagacaga

SEQ ID NO: 823048 - DNA, 33 bp, Homo sapien
aagatagaaaagactatcctgtgattagacaga

SEQ ID NO: 823049 - DNA, 33 bp, Homo sapien
gatggtggatcagcaacggcttgaggactctct

SEQ ID NO: 823050 - DNA, 33 bp, Homo sapien
gatggtggatcagcaatggcttgaggactctct

SEQ ID NO: 823051 - DNA, 33 bp, Homo sapien
cttctaagtggactaaaggaagtttcttatgta

SEQ ID NO: 823052 - DNA, 33 bp, Homo sapien
cttctaagtggactaagggaagtttcttatgta

SEQ ID NO: 823053 - DNA, 33 bp, Homo sapien
agcatctgattaaacaccaaattgtagaaatca

SEQ ID NO: 823054 - DNA, 33 bp, Homo sapien
agcatctgattaaacatcaaattgtagaaatca

SEQ ID NO: 823055 - DNA, 33 bp, Homo sapien
atcagctcggttaggcgcattggcaatgtgagg

SEQ ID NO: 823056 - DNA, 33 bp, Homo sapien
atcagctcggttaggctcattggcaatgtgagg

SEQ ID NO: 823057 - DNA, 33 bp, Homo sapien
ggaaatcaagtcctgacggtaagctcagtgaga

SEQ ID NO: 823058 - DNA, 33 bp, Homo sapien
ggaaatcaagtcctgatggtaagctcagtgaga

SEQ ID NO: 823059 - DNA, 33 bp, Homo sapien
aaaatgcccatgaataagaaggtagagattggg

SEQ ID NO: 823060 - DNA, 33 bp, Homo sapien
aaaatgcccatgaataggaaggtagagattggg

SEQ ID NO: 823061 - DNA, 33 bp, Homo sapien
ctgatagaatattatcccttcaaaacactgggg

SEQ ID NO: 823062 - DNA, 33 bp, Homo sapien
ctgatagaatattatctcttcaaaacactgggg

SEQ ID NO: 823063 - DNA, 33 bp, Homo sapien
gtgtaatggtcatgtaagcaaatccctcaaata

SEQ ID NO: 823064 - DNA, 33 bp, Homo sapien
gtgtaatggtcatgtaggcaaatccctcaaata

SEQ ID NO: 823065 - DNA, 33 bp, Homo sapien
tctacaaggaggcaagcacaaagtcaagagtaa

SEQ ID NO: 823066 - DNA, 33 bp, Homo sapien
tctacaaggaggcaagtacaaagtcaagagtaa

SEQ ID NO: 823067 - DNA, 33 bp, Homo sapien
ggaacgatggcggaaactatgtagttcaagttc

SEQ ID NO: 823068 - DNA, 33 bp, Homo sapien
ggaacgatggcggaaattatgtagttcaagttc

SEQ ID NO: 823069 - DNA, 33 bp, Homo sapien
tgcttgataatgcagcaaaataccatgaggcta

SEQ ID NO: 823070 - DNA, 33 bp, Homo sapien
tgcttgataatgcagcgaaataccatgaggcta

SEQ ID NO: 823071 - DNA, 33 bp, Homo sapien
gctcaagaaaaatgtacagaggcgtaatgatgg

SEQ ID NO: 823072 - DNA, 33 bp, Homo sapien
gctcaagaaaaatgtatagaggcgtaatgatgg

SEQ ID NO: 823073 - DNA, 33 bp, Homo sapien
tgagcccccttttgaccgatgacacctcatttc

SEQ ID NO: 823074 - DNA, 33 bp, Homo sapien
tgagcccccttttgacggatgacacctcatttc

SEQ ID NO: 823075 - DNA, 33 bp, Homo sapien
gctgggtacaattctgcagcatatcagttattt

SEQ ID NO: 823076 - DNA, 33 bp, Homo sapien
gctgggtacaattctgtagcatatcagttattt

SEQ ID NO: 823077 - DNA, 33 bp, Homo sapien
gcatggagccagctggaaagccagagttttgcc

SEQ ID NO: 823078 - DNA, 33 bp, Homo sapien
gcatggagccagctgggaagccagagttttgcc

SEQ ID NO: 823079 - DNA, 33 bp, Homo sapien
aattcatctggctcaccccatcctgttaaaagg

SEQ ID NO: 823080 - DNA, 33 bp, Homo sapien
aattcatctggctcactccatcctgttaaaagg

SEQ ID NO: 823081 - DNA, 33 bp, Homo sapien
actcctaaacagtttaaagcagtcaagggtctg

SEQ ID NO: 823082 - DNA, 33 bp, Homo sapien
actcctaaacagtttacagcagtcaagggtctg

SEQ ID NO: 823083 - DNA, 33 bp, Homo sapien
tatattatatttccacccgcaatgtttgagagt

SEQ ID NO: 823084 - DNA, 33 bp, Homo sapien
tatattatatttccactcgcaatgtttgagagt

SEQ ID NO: 823085 - DNA, 33 bp, Homo sapien
tcagcaaacactggataaatgaactgaatgacc

SEQ ID NO: 823086 - DNA, 33 bp, Homo sapien
tcagcaaacactggatcaatgaactgaatgacc

SEQ ID NO: 823087 - DNA, 33 bp, Homo sapien
tatatatacatgaagccattagaacaaaatcac

SEQ ID NO: 823088 - DNA, 33 bp, Homo sapien
tatatatacatgaagctattagaacaaaatcac

SEQ ID NO: 823089 - DNA, 33 bp, Homo sapien
ccagaaatccagcctcactagactccaaaatga

SEQ ID NO: 823090 - DNA, 33 bp, Homo sapien
ccagaaatccagcctcgctagactccaaaatga

SEQ ID NO: 823091 - DNA, 33 bp, Homo sapien
tatttatataccccagccctgaagagctagtct

SEQ ID NO: 823092 - DNA, 33 bp, Homo sapien
tatttatataccccaggcctgaagagctagtct

SEQ ID NO: 823093 - DNA, 33 bp, Homo sapien
ctctcctaaatttttacgcagcatgagggagac

SEQ ID NO: 823094 - DNA, 33 bp, Homo sapien
ctctcctaaatttttatgcagcatgagggagac

SEQ ID NO: 823095 - DNA, 33 bp, Homo sapien
actatttctataggcaacatttttggcccttat

SEQ ID NO: 823096 - DNA, 33 bp, Homo sapien
actatttctataggcaccatttttggcccttat

SEQ ID NO: 823097 - DNA, 33 bp, Homo sapien
gtggatggttttgtggaataagaacacatgggc

SEQ ID NO: 823098 - DNA, 33 bp, Homo sapien
gtggatggttttgtgggataagaacacatgggc

SEQ ID NO: 823099 - DNA, 33 bp, Homo sapien
aaaagccaagtgcctacgtggatggttttgtgg

SEQ ID NO: 823100 - DNA, 33 bp, Homo sapien
aaaagccaagtgcctatgtggatggttttgtgg

SEQ ID NO: 823101 - DNA, 33 bp, Homo sapien
attggggcagagaatacggtgagcccaaaggtg

SEQ ID NO: 823102 - DNA, 33 bp, Homo sapien
attggggcagagaatatggtgagcccaaaggtg

SEQ ID NO: 823103 - DNA, 33 bp, Homo sapien
aaataacaaaattccactccttgctactcagag

SEQ ID NO: 823104 - DNA, 33 bp, Homo sapien
aaataacaaaattccattccttgctactcagag

SEQ ID NO: 823105 - DNA, 33 bp, Homo sapien
ttgaatgccaagtcacaatacagcccatctggt

SEQ ID NO: 823106 - DNA, 33 bp, Homo sapien
ttgaatgccaagtcaccatacagcccatctggt

SEQ ID NO: 823107 - DNA, 33 bp, Homo sapien
cttcataattattgacaatctatcgtatcagaa

SEQ ID NO: 823108 - DNA, 33 bp, Homo sapien
cttcataattattgacgatctatcgtatcagaa

SEQ ID NO: 823109 - DNA, 33 bp, Homo sapien
ccttctgttcttttagcaaatcaaggtattcac

SEQ ID NO: 823110 - DNA, 33 bp, Homo sapien
ccttctgttcttttagtaaatcaaggtattcac

SEQ ID NO: 823111 - DNA, 33 bp, Homo sapien
acacagaggaaacgcaaaagcagtctctcaagg

SEQ ID NO: 823112 - DNA, 33 bp, Homo sapien
acacagaggaaacgcagaagcagtctctcaagg

SEQ ID NO: 823113 - DNA, 33 bp, Homo sapien
aatctacaggacttcacgcaacctgattgagaa

SEQ ID NO: 823114 - DNA, 33 bp, Homo sapien
aatctacaggacttcatgcaacctgattgagaa

SEQ ID NO: 823115 - DNA, 33 bp, Homo sapien
acagataataatcaataaaaatcgaattgtcaa

SEQ ID NO: 823116 - DNA, 33 bp, Homo sapien
acagataataatcaatcaaaatcgaattgtcaa

SEQ ID NO: 823117 - DNA, 33 bp, Homo sapien
tttagttcgatttttgaagcttgtatcatgttg

SEQ ID NO: 823118 - DNA, 33 bp, Homo sapien
tttagttcgatttttgcagcttgtatcatgttg

SEQ ID NO: 823119 - DNA, 33 bp, Homo sapien
gaagggaagtttaagaatccatgagttcacatg

SEQ ID NO: 823120 - DNA, 33 bp, Homo sapien
gaagggaagtttaagattccatgagttcacatg

SEQ ID NO: 823121 - DNA, 33 bp, Homo sapien
gtattcttagccaaaactgctgagtacagataa

SEQ ID NO: 823122 - DNA, 33 bp, Homo sapien
gtattcttagccaaaagtgctgagtacagataa

SEQ ID NO: 823123 - DNA, 33 bp, Homo sapien
cccttgacaccatcaacgtactttcttcatcct

SEQ ID NO: 823124 - DNA, 33 bp, Homo sapien
cccttgacaccatcaatgtactttcttcatcct

SEQ ID NO: 823125 - DNA, 33 bp, Homo sapien
tgacattagctgaccactctgtagtccttgaaa

SEQ ID NO: 823126 - DNA, 33 bp, Homo sapien
tgacattagctgaccattctgtagtccttgaaa

SEQ ID NO: 823127 - DNA, 33 bp, Homo sapien
cccaaatctgtatttacagcacaaattactcat

SEQ ID NO: 823128 - DNA, 33 bp, Homo sapien
cccaaatctgtatttatagcacaaattactcat

SEQ ID NO: 823129 - DNA, 33 bp, Homo sapien
cacacttggcttcatccatccttttgttgctgt

SEQ ID NO: 823130 - DNA, 33 bp, Homo sapien
cacacttggcttcatctatccttttgttgctgt

SEQ ID NO: 823131 - DNA, 33 bp, Homo sapien
agtgctttcacttttgcaattgagaaaggtaaa

SEQ ID NO: 823132 - DNA, 33 bp, Homo sapien
agtgctttcacttttggaattgagaaaggtaaa

SEQ ID NO: 823133 - DNA, 33 bp, Homo sapien
tggtcaattcaggttacggagaagaaacaagtc

SEQ ID NO: 823134 - DNA, 33 bp, Homo sapien
tggtcaattcaggttagggagaagaaacaagtc

SEQ ID NO: 823135 - DNA, 33 bp, Homo sapien
atttacttctgagcaacgcattgttcttggcac

SEQ ID NO: 823136 - DNA, 33 bp, Homo sapien
atttacttctgagcaaggcattgttcttggcac

SEQ ID NO: 823137 - DNA, 33 bp, Homo sapien
ttctgcagcacccagacgtccaggtaaataagc

SEQ ID NO: 823138 - DNA, 33 bp, Homo sapien
ttctgcagcacccagatgtccaggtaaataagc

SEQ ID NO: 823139 - DNA, 33 bp, Homo sapien
aattccctttgtttagcagaagcactatcatca

SEQ ID NO: 823140 - DNA, 33 bp, Homo sapien
aattccctttgtttagtagaagcactatcatca

SEQ ID NO: 823141 - DNA, 33 bp, Homo sapien
taaaaatctcattcaacctttatctctctataa

SEQ ID NO: 823142 - DNA, 33 bp, Homo sapien
taaaaatctcattcaatctttatctctctataa

SEQ ID NO: 823143 - DNA, 33 bp, Homo sapien
gataggtatacaatggcatcatctcgttgtttt

SEQ ID NO: 823144 - DNA, 33 bp, Homo sapien
gataggtatacaatggtatcatctcgttgtttt

SEQ ID NO: 823145 - DNA, 33 bp, Homo sapien
ggcagaccgtttgttaacttagtcatttgcaag

SEQ ID NO: 823146 - DNA, 33 bp, Homo sapien
ggcagaccgtttgttaccttagtcatttgcaag

SEQ ID NO: 823147 - DNA, 33 bp, Homo sapien
cttctctgactttgacacctacactctattttt

SEQ ID NO: 823148 - DNA, 33 bp, Homo sapien
cttctctgactttgacgcctacactctattttt

SEQ ID NO: 823149 - DNA, 33 bp, Homo sapien
caccctagacactccaagtatggtccatggacc

SEQ ID NO: 823150 - DNA, 33 bp, Homo sapien
caccctagacactccaggtatggtccatggacc

SEQ ID NO: 823151 - DNA, 33 bp, Homo sapien
tgcaagactaatcaaacaacaagcaccagtaga

SEQ ID NO: 823152 - DNA, 33 bp, Homo sapien
tgcaagactaatcaaagaacaagcaccagtaga

SEQ ID NO: 823153 - DNA, 33 bp, Homo sapien
attaagttagttacacaaagagttcgtgcctat

SEQ ID NO: 823154 - DNA, 33 bp, Homo sapien
attaagttagttacactaagagttcgtgcctat

SEQ ID NO: 823155 - DNA, 33 bp, Homo sapien
tcaacattaaagtcaaccttcacttgtagagga

SEQ ID NO: 823156 - DNA, 33 bp, Homo sapien
tcaacattaaagtcaatcttcacttgtagagga

SEQ ID NO: 823157 - DNA, 33 bp, Homo sapien
tgtagtctctgataaacctagctttttaaggac

SEQ ID NO: 823158 - DNA, 33 bp, Homo sapien
tgtagtctctgataaatctagctttttaaggac

SEQ ID NO: 823159 - DNA, 33 bp, Homo sapien
ctctatggggtagagacgctaggccggcactgc

SEQ ID NO: 823160 - DNA, 33 bp, Homo sapien
ctctatggggtagagatgctaggccggcactgc

SEQ ID NO: 823161 - DNA, 33 bp, Homo sapien
tttagatcaagtagcaagcagaaggaagacaag

SEQ ID NO: 823162 - DNA, 33 bp, Homo sapien
tttagatcaagtagcacgcagaaggaagacaag

SEQ ID NO: 823163 - DNA, 33 bp, Homo sapien
atagctcatatcgtaaactatgcgtatgagctc

SEQ ID NO: 823164 - DNA, 33 bp, Homo sapien
atagctcatatcgtaatctatgcgtatgagctc

SEQ ID NO: 823165 - DNA, 33 bp, Homo sapien
ttctaagaggctaatcaaattacttcttacaaa

SEQ ID NO: 823166 - DNA, 33 bp, Homo sapien
ttctaagaggctaatcgaattacttcttacaaa

SEQ ID NO: 823167 - DNA, 33 bp, Homo sapien
caatctgtgtccagaaaatagatgaacaacaac

SEQ ID NO: 823168 - DNA, 33 bp, Homo sapien
caatctgtgtccagaatatagatgaacaacaac

SEQ ID NO: 823169 - DNA, 33 bp, Homo sapien
taataagctttcagcaccaaagtgattgtaaat

SEQ ID NO: 823170 - DNA, 33 bp, Homo sapien
taataagctttcagcagcaaagtgattgtaaat

SEQ ID NO: 823171 - DNA, 33 bp, Homo sapien
actcaaactttatacccaaagcacttaacactc

SEQ ID NO: 823172 - DNA, 33 bp, Homo sapien
actcaaactttatacctaaagcacttaacactc

SEQ ID NO: 823173 - DNA, 33 bp, Homo sapien
aagatgctacctctcacagtaataaagcttgac

SEQ ID NO: 823174 - DNA, 33 bp, Homo sapien
aagatgctacctctcatagtaataaagcttgac

SEQ ID NO: 823175 - DNA, 33 bp, Homo sapien
ttgtcgtggcccaagaaagggaactgttaatct

SEQ ID NO: 823176 - DNA, 33 bp, Homo sapien
ttgtcgtggcccaagagagggaactgttaatct

SEQ ID NO: 823177 - DNA, 33 bp, Homo sapien
ataagcagaaatcatcaagtcgttaaagatact

SEQ ID NO: 823178 - DNA, 33 bp, Homo sapien
ataagcagaaatcatcgagtcgttaaagatact

SEQ ID NO: 823179 - DNA, 33 bp, Homo sapien
acgcaattccctatagaaggagcaatacagagt

SEQ ID NO: 823180 - DNA, 33 bp, Homo sapien
acgcaattccctataggaggagcaatacagagt

SEQ ID NO: 823181 - DNA, 33 bp, Homo sapien
cagacccaaacaacgcgatttcatgcagaagga

SEQ ID NO: 823182 - DNA, 33 bp, Homo sapien
cagacccaaacaacgctatttcatgcagaagga

SEQ ID NO: 823183 - DNA, 33 bp, Homo sapien
gctcccacgtacaagtaacaacacatggtattt

SEQ ID NO: 823184 - DNA, 33 bp, Homo sapien
gctcccacgtacaagtgacaacacatggtattt

SEQ ID NO: 823185 - DNA, 33 bp, Homo sapien
gtatgttcatagtcacactctccacaatagcaa

SEQ ID NO: 823186 - DNA, 33 bp, Homo sapien
gtatgttcatagtcacgctctccacaatagcaa

SEQ ID NO: 823187 - DNA, 33 bp, Homo sapien
aaatcaataacaatcaagaagcacaaagaaggg

SEQ ID NO: 823188 - DNA, 33 bp, Homo sapien
aaatcaataacaatcaggaagcacaaagaaggg

SEQ ID NO: 823189 - DNA, 33 bp, Homo sapien
tttctgagagagaagacggagtaaacaacttga

SEQ ID NO: 823190 - DNA, 33 bp, Homo sapien
tttctgagagagaagagggagtaaacaacttga

SEQ ID NO: 823191 - DNA, 33 bp, Homo sapien
taggaacatctggaaacgttgtgaccctatcac

SEQ ID NO: 823192 - DNA, 33 bp, Homo sapien
taggaacatctggaaatgttgtgaccctatcac

SEQ ID NO: 823193 - DNA, 33 bp, Homo sapien
attcattggtataaaacaatgttgcactgtgat

SEQ ID NO: 823194 - DNA, 33 bp, Homo sapien
attcattggtataaaataatgttgcactgtgat

SEQ ID NO: 823195 - DNA, 33 bp, Homo sapien
aattagccaggtgatacggctaagctttgtgtc

SEQ ID NO: 823196 - DNA, 33 bp, Homo sapien
aattagccaggtgatatggctaagctttgtgtc

SEQ ID NO: 823197 - DNA, 33 bp, Homo sapien
tttaaattttaaagacaagatcaagaaatgaaa

SEQ ID NO: 823198 - DNA, 33 bp, Homo sapien
tttaaattttaaagacgagatcaagaaatgaaa

SEQ ID NO: 823199 - DNA, 33 bp, Homo sapien
cttatattcttcatcaatcatccacttgttatt

SEQ ID NO: 823200 - DNA, 33 bp, Homo sapien
cttatattcttcatcagtcatccacttgttatt

SEQ ID NO: 823201 - DNA, 33 bp, Homo sapien
acttcatacccatgcaatagtatggctataata

SEQ ID NO: 823202 - DNA, 33 bp, Homo sapien
acttcatacccatgcactagtatggctataata

SEQ ID NO: 823203 - DNA, 33 bp, Homo sapien
gaggtcagtaacatgactataatatggaaacac

SEQ ID NO: 823204 - DNA, 33 bp, Homo sapien
gaggtcagtaacatgattataatatggaaacac

SEQ ID NO: 823205 - DNA, 33 bp, Homo sapien
agttcaaatgtaaccaccttcttgaatgtttta

SEQ ID NO: 823206 - DNA, 33 bp, Homo sapien
agttcaaatgtaaccagcttcttgaatgtttta

SEQ ID NO: 823207 - DNA, 33 bp, Homo sapien
ggaagtcagtcagttacgtggtgcccactctaa

SEQ ID NO: 823208 - DNA, 33 bp, Homo sapien
ggaagtcagtcagttatgtggtgcccactctaa

SEQ ID NO: 823209 - DNA, 33 bp, Homo sapien
attaccaattttctggccatattatttacccat

SEQ ID NO: 823210 - DNA, 33 bp, Homo sapien
attaccaattttctggtcatattatttacccat

SEQ ID NO: 823211 - DNA, 33 bp, Homo sapien
tagatctagagcccaactcttcccctcaacctc

SEQ ID NO: 823212 - DNA, 33 bp, Homo sapien
tagatctagagcccaattcttcccctcaacctc

SEQ ID NO: 823213 - DNA, 33 bp, Homo sapien
atatacaaagcattcaataaatacagaaattat

SEQ ID NO: 823214 - DNA, 33 bp, Homo sapien
atatacaaagcattcagtaaatacagaaattat

SEQ ID NO: 823215 - DNA, 33 bp, Homo sapien
aaacattgtcagtaccagagcaagaatattcaa

SEQ ID NO: 823216 - DNA, 33 bp, Homo sapien
aaacattgtcagtaccggagcaagaatattcaa

SEQ ID NO: 823217 - DNA, 33 bp, Homo sapien
tgattttggttaaaagaactgcaattctcaatg

SEQ ID NO: 823218 - DNA, 33 bp, Homo sapien
tgattttggttaaaaggactgcaattctcaatg

SEQ ID NO: 823219 - DNA, 33 bp, Homo sapien
tttcacttagtaagaactggctatgaaatttaa

SEQ ID NO: 823220 - DNA, 33 bp, Homo sapien
tttcacttagtaagaattggctatgaaatttaa

SEQ ID NO: 823221 - DNA, 33 bp, Homo sapien
atcactgcaacaggaaagtaattttcaccccac

SEQ ID NO: 823222 - DNA, 33 bp, Homo sapien
atcactgcaacaggaatgtaattttcaccccac

SEQ ID NO: 823223 - DNA, 33 bp, Homo sapien
ggcttactgtccatcaatctttcatgccacttt

SEQ ID NO: 823224 - DNA, 33 bp, Homo sapien
ggcttactgtccatcagtctttcatgccacttt

SEQ ID NO: 823225 - DNA, 33 bp, Homo sapien
tggaatgtgaacagaactgatggatgtcttttc

SEQ ID NO: 823226 - DNA, 33 bp, Homo sapien
tggaatgtgaacagaagtgatggatgtcttttc

SEQ ID NO: 823227 - DNA, 33 bp, Homo sapien
gaaccacaagacacaaaaagtcatgaatatctg

SEQ ID NO: 823228 - DNA, 33 bp, Homo sapien
gaaccacaagacacaagaagtcatgaatatctg

SEQ ID NO: 823229 - DNA, 33 bp, Homo sapien
ccaacaggccagattacgcaactcaaaaagacc

SEQ ID NO: 823230 - DNA, 33 bp, Homo sapien
ccaacaggccagattatgcaactcaaaaagacc

SEQ ID NO: 823231 - DNA, 33 bp, Homo sapien
gtctggaaattgggaactgtgaaggaaatatga

SEQ ID NO: 823232 - DNA, 33 bp, Homo sapien
gtctggaaattgggaagtgtgaaggaaatatga

SEQ ID NO: 823233 - DNA, 33 bp, Homo sapien
gagtcaacatcatccaaacatttgctcatatga

SEQ ID NO: 823234 - DNA, 33 bp, Homo sapien
gagtcaacatcatccagacatttgctcatatga

SEQ ID NO: 823235 - DNA, 33 bp, Homo sapien
agagttttctggatatcataacctcagacatgt

SEQ ID NO: 823236 - DNA, 33 bp, Homo sapien
agagttttctggatatgataacctcagacatgt

SEQ ID NO: 823237 - DNA, 33 bp, Homo sapien
tatggtgcaaaaccaacaatcatagcagcctca

SEQ ID NO: 823238 - DNA, 33 bp, Homo sapien
tatggtgcaaaaccaataatcatagcagcctca

SEQ ID NO: 823239 - DNA, 33 bp, Homo sapien
gtaactgtgtaggaccagaactctttggttata

SEQ ID NO: 823240 - DNA, 33 bp, Homo sapien
gtaactgtgtaggaccggaactctttggttata

SEQ ID NO: 823241 - DNA, 33 bp, Homo sapien
ttcccagactttcatacgcaaagctttataaag

SEQ ID NO: 823242 - DNA, 33 bp, Homo sapien
ttcccagactttcatatgcaaagctttataaag

SEQ ID NO: 823243 - DNA, 33 bp, Homo sapien
gctgttttgctcaactaaatgatagactctcat

SEQ ID NO: 823244 - DNA, 33 bp, Homo sapien
gctgttttgctcaactgaatgatagactctcat

SEQ ID NO: 823245 - DNA, 33 bp, Homo sapien
acaggaattcagcagaaaagggaaagaaagagc

SEQ ID NO: 823246 - DNA, 33 bp, Homo sapien
acaggaattcagcagagaagggaaagaaagagc

SEQ ID NO: 823247 - DNA, 33 bp, Homo sapien
aggaaagtaaagttaactgcacataggaagttt

SEQ ID NO: 823248 - DNA, 33 bp, Homo sapien
aggaaagtaaagttaattgcacataggaagttt

SEQ ID NO: 823249 - DNA, 33 bp, Homo sapien
aagtcgccttacaataaatgcaattagcctata

SEQ ID NO: 823250 - DNA, 33 bp, Homo sapien
aagtcgccttacaatatatgcaattagcctata

SEQ ID NO: 823251 - DNA, 33 bp, Homo sapien
tggacagtagtgagcaaaaaggaaagtggctaa

SEQ ID NO: 823252 - DNA, 33 bp, Homo sapien
tggacagtagtgagcagaaaggaaagtggctaa

SEQ ID NO: 823253 - DNA, 33 bp, Homo sapien
aatccaaaggtacaaaataagagtgtggctaag

SEQ ID NO: 823254 - DNA, 33 bp, Homo sapien
aatccaaaggtacaaagtaagagtgtggctaag

SEQ ID NO: 823255 - DNA, 33 bp, Homo sapien
taaaagcttgcaaataaccttatctctctatca

SEQ ID NO: 823256 - DNA, 33 bp, Homo sapien
taaaagcttgcaaatacccttatctctctatca

SEQ ID NO: 823257 - DNA, 33 bp, Homo sapien
caaattttaagttttacagtcactatattgtct

SEQ ID NO: 823258 - DNA, 33 bp, Homo sapien
caaattttaagttttagagtcactatattgtct

SEQ ID NO: 823259 - DNA, 33 bp, Homo sapien
ttcttgactagaactacagtctctgtcttcaaa

SEQ ID NO: 823260 - DNA, 33 bp, Homo sapien
ttcttgactagaactagagtctctgtcttcaaa

SEQ ID NO: 823261 - DNA, 33 bp, Homo sapien
atttacagtgaaaaagcaccaaagattaaatca

SEQ ID NO: 823262 - DNA, 33 bp, Homo sapien
atttacagtgaaaaagtaccaaagattaaatca

SEQ ID NO: 823263 - DNA, 33 bp, Homo sapien
agtgctttctctgacaaattgcatggtggatag

SEQ ID NO: 823264 - DNA, 33 bp, Homo sapien
agtgctttctctgacagattgcatggtggatag

SEQ ID NO: 823265 - DNA, 33 bp, Homo sapien
ttgtgccctgggaaaccgtaagatggacgctca

SEQ ID NO: 823266 - DNA, 33 bp, Homo sapien
ttgtgccctgggaaactgtaagatggacgctca

SEQ ID NO: 823267 - DNA, 33 bp, Homo sapien
cacaaagttatagtcacctgaggggcaacttgc

SEQ ID NO: 823268 - DNA, 33 bp, Homo sapien
cacaaagttatagtcatctgaggggcaacttgc

SEQ ID NO: 823269 - DNA, 33 bp, Homo sapien
tctcaaggcccttccaatctatttctggcctat

SEQ ID NO: 823270 - DNA, 33 bp, Homo sapien
tctcaaggcccttccagtctatttctggcctat

SEQ ID NO: 823271 - DNA, 33 bp, Homo sapien
gttatagaaaagcatgaagaaaactgtgttttt

SEQ ID NO: 823272 - DNA, 33 bp, Homo sapien
gttatagaaaagcatggagaaaactgtgttttt

SEQ ID NO: 823273 - DNA, 33 bp, Homo sapien
aatactaccatacagagattggattcctttttg

SEQ ID NO: 823274 - DNA, 33 bp, Homo sapien
aatactaccatacagatattggattcctttttg

SEQ ID NO: 823275 - DNA, 33 bp, Homo sapien
cattgtaatccttatccacctacccttgacttt

SEQ ID NO: 823276 - DNA, 33 bp, Homo sapien
cattgtaatccttatcgacctacccttgacttt

SEQ ID NO: 823277 - DNA, 33 bp, Homo sapien
tggctggtgttctatggatggaaagaggaatga

SEQ ID NO: 823278 - DNA, 33 bp, Homo sapien
tggctggtgttctatgtatggaaagaggaatga

SEQ ID NO: 823279 - DNA, 33 bp, Homo sapien
acagtgtctgctctcacgtggtctgagtcctcc

SEQ ID NO: 823280 - DNA, 33 bp, Homo sapien
acagtgtctgctctcaggtggtctgagtcctcc

SEQ ID NO: 823281 - DNA, 33 bp, Homo sapien
gacacacactagcttgaaaacctctctgtggat

SEQ ID NO: 823282 - DNA, 33 bp, Homo sapien
gacacacactagcttgtaaacctctctgtggat

SEQ ID NO: 823283 - DNA, 33 bp, Homo sapien
acaagttaacatctccccagaaaacagtctgct

SEQ ID NO: 823284 - DNA, 33 bp, Homo sapien
acaagttaacatctccgcagaaaacagtctgct

SEQ ID NO: 823285 - DNA, 33 bp, Homo sapien
ttaaggagtcatgacaagaaaaaaaaactctgt

SEQ ID NO: 823286 - DNA, 33 bp, Homo sapien
ttaaggagtcatgacacgaaaaaaaaactctgt

SEQ ID NO: 823287 - DNA, 33 bp, Homo sapien
tctgaagtatgtcttcaccctcctgattttttc

SEQ ID NO: 823288 - DNA, 33 bp, Homo sapien
tctgaagtatgtcttctccctcctgattttttc

SEQ ID NO: 823289 - DNA, 33 bp, Homo sapien
ctggaattgctcatcacataccgctgaaatctg

SEQ ID NO: 823290 - DNA, 33 bp, Homo sapien
ctggaattgctcatcatataccgctgaaatctg

SEQ ID NO: 823291 - DNA, 33 bp, Homo sapien
ctgatgtgtatgagccactaaaactagagacag

SEQ ID NO: 823292 - DNA, 33 bp, Homo sapien
ctgatgtgtatgagccgctaaaactagagacag

SEQ ID NO: 823293 - DNA, 33 bp, Homo sapien
tgagtcctgttcactacaacaaacactccccat

SEQ ID NO: 823294 - DNA, 33 bp, Homo sapien
tgagtcctgttcactataacaaacactccccat

SEQ ID NO: 823295 - DNA, 33 bp, Homo sapien
gacatgagatttccatcaagtgttagttaacat

SEQ ID NO: 823296 - DNA, 33 bp, Homo sapien
gacatgagatttccatgaagtgttagttaacat

SEQ ID NO: 823297 - DNA, 33 bp, Homo sapien
tttactccattgcctacatgaaccttatcatcc

SEQ ID NO: 823298 - DNA, 33 bp, Homo sapien
tttactccattgcctatatgaaccttatcatcc

SEQ ID NO: 823299 - DNA, 33 bp, Homo sapien
gtcaacaggagattgacaaaggtaactgtcaag

SEQ ID NO: 823300 - DNA, 33 bp, Homo sapien
gtcaacaggagattgataaaggtaactgtcaag

SEQ ID NO: 823301 - DNA, 33 bp, Homo sapien
cttttgttccacattcaaaaaaaatttactctg

SEQ ID NO: 823302 - DNA, 33 bp, Homo sapien
cttttgttccacattcgaaaaaaatttactctg

SEQ ID NO: 823303 - DNA, 33 bp, Homo sapien
ccatgggtcacattcaagtcctatgaactgaca

SEQ ID NO: 823304 - DNA, 33 bp, Homo sapien
ccatgggtcacattcaggtcctatgaactgaca

SEQ ID NO: 823305 - DNA, 33 bp, Homo sapien
tatgccattcaacaaactgatagacgttctctt

SEQ ID NO: 823306 - DNA, 33 bp, Homo sapien
tatgccattcaacaaattgatagacgttctctt

SEQ ID NO: 823307 - DNA, 33 bp, Homo sapien
tggtgacgatcaataacgtttattcaatactca

SEQ ID NO: 823308 - DNA, 33 bp, Homo sapien
tggtgacgatcaataatgtttattcaatactca

SEQ ID NO: 823309 - DNA, 33 bp, Homo sapien
atttgcaataggtcaagtcagacaaactggaac

SEQ ID NO: 823310 - DNA, 33 bp, Homo sapien
atttgcaataggtcaattcagacaaactggaac

SEQ ID NO: 823311 - DNA, 33 bp, Homo sapien
gcgagcttcccgtttacagatgctgctgcaatc

SEQ ID NO: 823312 - DNA, 33 bp, Homo sapien
gcgagcttcccgtttagagatgctgctgcaatc

SEQ ID NO: 823313 - DNA, 33 bp, Homo sapien
tggcagagaaagggagaccatctttcgtgtctt

SEQ ID NO: 823314 - DNA, 33 bp, Homo sapien
tggcagagaaagggaggccatctttcgtgtctt

SEQ ID NO: 823315 - DNA, 33 bp, Homo sapien
ggagagatggagtagaaaacaaagccagagttt

SEQ ID NO: 823316 - DNA, 33 bp, Homo sapien
ggagagatggagtagagaacaaagccagagttt

SEQ ID NO: 823317 - DNA, 33 bp, Homo sapien
agtcaggatgtgaaacaccattaagtataacag

SEQ ID NO: 823318 - DNA, 33 bp, Homo sapien
agtcaggatgtgaaacgccattaagtataacag

SEQ ID NO: 823319 - DNA, 33 bp, Homo sapien
gtttgatattcttcacactttttagttggctaa

SEQ ID NO: 823320 - DNA, 33 bp, Homo sapien
gtttgatattcttcactctttttagttggctaa

SEQ ID NO: 823321 - DNA, 33 bp, Homo sapien
ctttttcttgatagacgatatgttctgtgatgt

SEQ ID NO: 823322 - DNA, 33 bp, Homo sapien
ctttttcttgatagactatatgttctgtgatgt

SEQ ID NO: 823323 - DNA, 33 bp, Homo sapien
ctgttagagatatggacaattaagttcaggctg

SEQ ID NO: 823324 - DNA, 33 bp, Homo sapien
ctgttagagatatggagaattaagttcaggctg

SEQ ID NO: 823325 - DNA, 33 bp, Homo sapien
ttatgtctttaatgtacaattgtgcactacatg

SEQ ID NO: 823326 - DNA, 33 bp, Homo sapien
ttatgtctttaatgtataattgtgcactacatg

SEQ ID NO: 823327 - DNA, 33 bp, Homo sapien
caaccactgtcataccggcagtccatcattgac

SEQ ID NO: 823328 - DNA, 33 bp, Homo sapien
caaccactgtcatacctgcagtccatcattgac

SEQ ID NO: 823329 - DNA, 33 bp, Homo sapien
tgcaggattcagtctcacatctgcaaagctcag

SEQ ID NO: 823330 - DNA, 33 bp, Homo sapien
tgcaggattcagtctcgcatctgcaaagctcag

SEQ ID NO: 823331 - DNA, 33 bp, Homo sapien
gcacccaagcacacaactatttttgtttgttag

SEQ ID NO: 823332 - DNA, 33 bp, Homo sapien
gcacccaagcacacaattatttttgtttgttag

SEQ ID NO: 823333 - DNA, 33 bp, Homo sapien
taataagaaataataacaccccagcttgttgtg

SEQ ID NO: 823334 - DNA, 33 bp, Homo sapien
taataagaaataataagaccccagcttgttgtg

SEQ ID NO: 823335 - DNA, 33 bp, Homo sapien
tgtgtgcctacttttcgaatctcaggacacctg

SEQ ID NO: 823336 - DNA, 33 bp, Homo sapien
tgtgtgcctacttttctaatctcaggacacctg

SEQ ID NO: 823337 - DNA, 33 bp, Homo sapien
tttatgaattttcttcaatcctaataatgttga

SEQ ID NO: 823338 - DNA, 33 bp, Homo sapien
tttatgaattttcttccatcctaataatgttga

SEQ ID NO: 823339 - DNA, 33 bp, Homo sapien
caaagaaaattgaatgccaagccaatgtttttt

SEQ ID NO: 823340 - DNA, 33 bp, Homo sapien
caaagaaaattgaatgtcaagccaatgtttttt

SEQ ID NO: 823341 - DNA, 33 bp, Homo sapien
tttatttgaatcagcaccctttctcctggctgt

SEQ ID NO: 823342 - DNA, 33 bp, Homo sapien
tttatttgaatcagcatcctttctcctggctgt

SEQ ID NO: 823343 - DNA, 33 bp, Homo sapien
agtatgcacaggttcccagtggacacagtaggc

SEQ ID NO: 823344 - DNA, 33 bp, Homo sapien
agtatgcacaggttcctagtggacacagtaggc

SEQ ID NO: 823345 - DNA, 33 bp, Homo sapien
acttcttcctttccaacggacggcttctatttt

SEQ ID NO: 823346 - DNA, 33 bp, Homo sapien
acttcttcctttccaatggacggcttctatttt

SEQ ID NO: 823347 - DNA, 33 bp, Homo sapien
tccatgttgcagcacactcattttatggttgaa

SEQ ID NO: 823348 - DNA, 33 bp, Homo sapien
tccatgttgcagcacattcattttatggttgaa

SEQ ID NO: 823349 - DNA, 33 bp, Homo sapien
aaaaacaatttcacaaatgacagttatcttttt

SEQ ID NO: 823350 - DNA, 33 bp, Homo sapien
aaaaacaatttcacaagtgacagttatcttttt

SEQ ID NO: 823351 - DNA, 33 bp, Homo sapien
tatcacctatcgaagccaaaacatttcttaaag

SEQ ID NO: 823352 - DNA, 33 bp, Homo sapien
tatcacctatcgaagctaaaacatttcttaaag

SEQ ID NO: 823353 - DNA, 33 bp, Homo sapien
tgacttttctctgtgacgagtaagactccctcc

SEQ ID NO: 823354 - DNA, 33 bp, Homo sapien
tgacttttctctgtgatgagtaagactccctcc

SEQ ID NO: 823355 - DNA, 33 bp, Homo sapien
taggtgttaaacacacagaggcaaattaaactt

SEQ ID NO: 823356 - DNA, 33 bp, Homo sapien
taggtgttaaacacacggaggcaaattaaactt

SEQ ID NO: 823357 - DNA, 33 bp, Homo sapien
ctgttctcggttacacccatctttcatctatgt

SEQ ID NO: 823358 - DNA, 33 bp, Homo sapien
ctgttctcggttacactcatctttcatctatgt

SEQ ID NO: 823359 - DNA, 33 bp, Homo sapien
gatagtttctggttacacaagattggtgtggga

SEQ ID NO: 823360 - DNA, 33 bp, Homo sapien
gatagtttctggttacgcaagattggtgtggga

SEQ ID NO: 823361 - DNA, 33 bp, Homo sapien
tcctaagcatatgggcaagttaccttgtttaac

SEQ ID NO: 823362 - DNA, 33 bp, Homo sapien
tcctaagcatatgggcgagttaccttgtttaac

SEQ ID NO: 823363 - DNA, 33 bp, Homo sapien
gccgcttctaaatcacacaagtcgttactgtgg

SEQ ID NO: 823364 - DNA, 33 bp, Homo sapien
gccgcttctaaatcacgcaagtcgttactgtgg

SEQ ID NO: 823365 - DNA, 33 bp, Homo sapien
ttagggtgcttaataacgttttttgttgaatag

SEQ ID NO: 823366 - DNA, 33 bp, Homo sapien
ttagggtgcttaataatgttttttgttgaatag

SEQ ID NO: 823367 - DNA, 33 bp, Homo sapien
tggaggaaaaagtagcaagatcagaataaagtc

SEQ ID NO: 823368 - DNA, 33 bp, Homo sapien
tggaggaaaaagtagcgagatcagaataaagtc

SEQ ID NO: 823369 - DNA, 33 bp, Homo sapien
aatttcatttagcaacacaagcccagggaacac

SEQ ID NO: 823370 - DNA, 33 bp, Homo sapien
aatttcatttagcaacgcaagcccagggaacac

SEQ ID NO: 823371 - DNA, 33 bp, Homo sapien
gaaaaaaatggagcacagcctcgagtctagctg

SEQ ID NO: 823372 - DNA, 33 bp, Homo sapien
gaaaaaaatggagcacggcctcgagtctagctg

SEQ ID NO: 823373 - DNA, 33 bp, Homo sapien
ttataggataggattcaaaacaagtttgtaaac

SEQ ID NO: 823374 - DNA, 33 bp, Homo sapien
ttataggataggattccaaacaagtttgtaaac

SEQ ID NO: 823375 - DNA, 33 bp, Homo sapien
ctcttctcgtgttttacatcagatgtcttctga

SEQ ID NO: 823376 - DNA, 33 bp, Homo sapien
ctcttctcgtgttttatatcagatgtcttctga

SEQ ID NO: 823377 - DNA, 33 bp, Homo sapien
ctcacggtgaaaaaaaaaatgttgcttatgact

SEQ ID NO: 823378 - DNA, 33 bp, Homo sapien
ctcacggtgaaaaaaagaatgttgcttatgact

SEQ ID NO: 823379 - DNA, 33 bp, Homo sapien
cattaaaagcttttcccgacaaacctcatcatg

SEQ ID NO: 823380 - DNA, 33 bp, Homo sapien
cattaaaagcttttcctgacaaacctcatcatg

SEQ ID NO: 823381 - DNA, 33 bp, Homo sapien
tgattccattatctgaggggttcagacctcact

SEQ ID NO: 823382 - DNA, 33 bp, Homo sapien
tgattccattatctgatgggttcagacctcact

SEQ ID NO: 823383 - DNA, 33 bp, Homo sapien
gctgaactttgcctccccacaaccaaacactga

SEQ ID NO: 823384 - DNA, 33 bp, Homo sapien
gctgaactttgcctccgcacaaccaaacactga

SEQ ID NO: 823385 - DNA, 33 bp, Homo sapien
tctcacatattgattcactgtataaaaaacttt

SEQ ID NO: 823386 - DNA, 33 bp, Homo sapien
tctcacatattgattcgctgtataaaaaacttt

SEQ ID NO: 823387 - DNA, 33 bp, Homo sapien
aattacacagtatgtaccgtttccagattagct

SEQ ID NO: 823388 - DNA, 33 bp, Homo sapien
aattacacagtatgtatcgtttccagattagct

SEQ ID NO: 823389 - DNA, 33 bp, Homo sapien
caggaggccatgcacacagttgctggttcagtg

SEQ ID NO: 823390 - DNA, 33 bp, Homo sapien
caggaggccatgcacagagttgctggttcagtg

SEQ ID NO: 823391 - DNA, 33 bp, Homo sapien
ttccattcacagttataaacaaagaaacgagat

SEQ ID NO: 823392 - DNA, 33 bp, Homo sapien
ttccattcacagttatgaacaaagaaacgagat

SEQ ID NO: 823393 - DNA, 33 bp, Homo sapien
attgaataaagccggcaatatttgactctcact

SEQ ID NO: 823394 - DNA, 33 bp, Homo sapien
attgaataaagccggcgatatttgactctcact

SEQ ID NO: 823395 - DNA, 33 bp, Homo sapien
ttcaacatttgtcaaacaagggctgagcagggc

SEQ ID NO: 823396 - DNA, 33 bp, Homo sapien
ttcaacatttgtcaaagaagggctgagcagggc

SEQ ID NO: 823397 - DNA, 33 bp, Homo sapien
cagagaaaagtctggacacaggttaggtcatca

SEQ ID NO: 823398 - DNA, 33 bp, Homo sapien
cagagaaaagtctggatacaggttaggtcatca

SEQ ID NO: 823399 - DNA, 33 bp, Homo sapien
aaacaaaaaaaacgccaatttctggatccaaca

SEQ ID NO: 823400 - DNA, 33 bp, Homo sapien
aaacaaaaaaaacgccgatttctggatccaaca

SEQ ID NO: 823401 - DNA, 33 bp, Homo sapien
tatagtttgaaagttccccatgtgattctaatg

SEQ ID NO: 823402 - DNA, 33 bp, Homo sapien
tatagtttgaaagttctccatgtgattctaatg

SEQ ID NO: 823403 - DNA, 33 bp, Homo sapien
ttatatttgtgttctagatctgcaacaaaagta

SEQ ID NO: 823404 - DNA, 33 bp, Homo sapien
ttatatttgtgttctatatctgcaacaaaagta

SEQ ID NO: 823405 - DNA, 33 bp, Homo sapien
tgtttctctactcaaccggaaatgggaaggcct

SEQ ID NO: 823406 - DNA, 33 bp, Homo sapien
tgtttctctactcaactggaaatgggaaggcct

SEQ ID NO: 823407 - DNA, 33 bp, Homo sapien
cctgttgactataccgaagattcaaagatgcga

SEQ ID NO: 823408 - DNA, 33 bp, Homo sapien
cctgttgactataccggagattcaaagatgcga

SEQ ID NO: 823409 - DNA, 33 bp, Homo sapien
cctgaaacacagaagacgtcaaatgctcgatga

SEQ ID NO: 823410 - DNA, 33 bp, Homo sapien
cctgaaacacagaagatgtcaaatgctcgatga

SEQ ID NO: 823411 - DNA, 33 bp, Homo sapien
cgcaggagagtactcacagctccaagccagaag

SEQ ID NO: 823412 - DNA, 33 bp, Homo sapien
cgcaggagagtactcatagctccaagccagaag

SEQ ID NO: 823413 - DNA, 33 bp, Homo sapien
atgatagtccaccctaagcataggcccattgac

SEQ ID NO: 823414 - DNA, 33 bp, Homo sapien
atgatagtccaccctaggcataggcccattgac

SEQ ID NO: 823415 - DNA, 33 bp, Homo sapien
atcccaaatccaacacagcatctatttgagaga

SEQ ID NO: 823416 - DNA, 33 bp, Homo sapien
atcccaaatccaacacggcatctatttgagaga

SEQ ID NO: 823417 - DNA, 33 bp, Homo sapien
catcttctgttacttacactcaagcaatcaggg

SEQ ID NO: 823418 - DNA, 33 bp, Homo sapien
catcttctgttacttagactcaagcaatcaggg

SEQ ID NO: 823419 - DNA, 33 bp, Homo sapien
agtggcgtgacttccacgttgactacattttag

SEQ ID NO: 823420 - DNA, 33 bp, Homo sapien
agtggcgtgacttccatgttgactacattttag

SEQ ID NO: 823421 - DNA, 33 bp, Homo sapien
tcttgactttgtacaccgatcccactggtgtga

SEQ ID NO: 823422 - DNA, 33 bp, Homo sapien
tcttgactttgtacactgatcccactggtgtga

SEQ ID NO: 823423 - DNA, 33 bp, Homo sapien
tcatttctatgccatcaagcattttctagaaag

SEQ ID NO: 823424 - DNA, 33 bp, Homo sapien
tcatttctatgccatcgagcattttctagaaag

SEQ ID NO: 823425 - DNA, 33 bp, Homo sapien
aacttctgaggtcagccaccatatcttcctcta

SEQ ID NO: 823426 - DNA, 33 bp, Homo sapien
aacttctgaggtcagctaccatatcttcctcta

SEQ ID NO: 823427 - DNA, 33 bp, Homo sapien
aatatcttaattaaacacacatctgagaacctt

SEQ ID NO: 823428 - DNA, 33 bp, Homo sapien
aatatcttaattaaacgcacatctgagaacctt

SEQ ID NO: 823429 - DNA, 33 bp, Homo sapien
aagttccttttgccaacagggtttcaacacatt

SEQ ID NO: 823430 - DNA, 33 bp, Homo sapien
aagttccttttgccaatagggtttcaacacatt

SEQ ID NO: 823431 - DNA, 33 bp, Homo sapien
atcatgacattttaaacttcaggatgtcaagtt

SEQ ID NO: 823432 - DNA, 33 bp, Homo sapien
atcatgacattttaaagttcaggatgtcaagtt

SEQ ID NO: 823433 - DNA, 33 bp, Homo sapien
ttgagggtctatttcaaggggaatctaaactaa

SEQ ID NO: 823434 - DNA, 33 bp, Homo sapien
ttgagggtctatttcagggggaatctaaactaa

SEQ ID NO: 823435 - DNA, 33 bp, Homo sapien
cgtgggtagaatggcaccaggagggtctgcctg

SEQ ID NO: 823436 - DNA, 33 bp, Homo sapien
cgtgggtagaatggcatcaggagggtctgcctg

SEQ ID NO: 823437 - DNA, 33 bp, Homo sapien
tgagaacacatagataagaagaaggaagcaatg

SEQ ID NO: 823438 - DNA, 33 bp, Homo sapien
tgagaacacatagatacgaagaaggaagcaatg

SEQ ID NO: 823439 - DNA, 33 bp, Homo sapien
tcttaattcaaacagtaaacacgtattcaatga

SEQ ID NO: 823440 - DNA, 33 bp, Homo sapien
tcttaattcaaacagtcaacacgtattcaatga

SEQ ID NO: 823441 - DNA, 33 bp, Homo sapien
ttccccagatgccagcaaaaggtgaactgactc

SEQ ID NO: 823442 - DNA, 33 bp, Homo sapien
ttccccagatgccagccaaaggtgaactgactc

SEQ ID NO: 823443 - DNA, 33 bp, Homo sapien
tgattaacagctaaaacattcttacggccttta

SEQ ID NO: 823444 - DNA, 33 bp, Homo sapien
tgattaacagctaaaatattcttacggccttta

SEQ ID NO: 823445 - DNA, 33 bp, Homo sapien
tatttaagtgtatctacagtgactttccttttc

SEQ ID NO: 823446 - DNA, 33 bp, Homo sapien
tatttaagtgtatctagagtgactttccttttc

SEQ ID NO: 823447 - DNA, 33 bp, Homo sapien
ttgcctgaaattgttaaacatcatgcattaata

SEQ ID NO: 823448 - DNA, 33 bp, Homo sapien
ttgcctgaaattgttacacatcatgcattaata

SEQ ID NO: 823449 - DNA, 33 bp, Homo sapien
tatgttttcttataaacttcaaatggcttaaat

SEQ ID NO: 823450 - DNA, 33 bp, Homo sapien
tatgttttcttataaatttcaaatggcttaaat

SEQ ID NO: 823451 - DNA, 33 bp, Homo sapien
attgtttgtatccacaataaaccaataaaatct

SEQ ID NO: 823452 - DNA, 33 bp, Homo sapien
attgtttgtatccacagtaaaccaataaaatct

SEQ ID NO: 823453 - DNA, 33 bp, Homo sapien
accatacttatagtcaagtttctgagtaaatgt

SEQ ID NO: 823454 - DNA, 33 bp, Homo sapien
accatacttatagtcaggtttctgagtaaatgt

SEQ ID NO: 823455 - DNA, 33 bp, Homo sapien
gtagcagttgataaccactaaggaagcatgaac

SEQ ID NO: 823456 - DNA, 33 bp, Homo sapien
gtagcagttgataaccgctaaggaagcatgaac

SEQ ID NO: 823457 - DNA, 33 bp, Homo sapien
ttttgattgatgcaagactataaataataaatg

SEQ ID NO: 823458 - DNA, 33 bp, Homo sapien
ttttgattgatgcaaggctataaataataaatg

SEQ ID NO: 823459 - DNA, 33 bp, Homo sapien
aactgcaattcccccaactgaggcaagttacat

SEQ ID NO: 823460 - DNA, 33 bp, Homo sapien
aactgcaattcccccagctgaggcaagttacat

SEQ ID NO: 823461 - DNA, 33 bp, Homo sapien
caactcttccatccataaagtcctgtatattga

SEQ ID NO: 823462 - DNA, 33 bp, Homo sapien
caactcttccatccattaagtcctgtatattga

SEQ ID NO: 823463 - DNA, 33 bp, Homo sapien
aaagggtacagctcaaagaaggctatagataac

SEQ ID NO: 823464 - DNA, 33 bp, Homo sapien
aaagggtacagctcaacgaaggctatagataac

SEQ ID NO: 823465 - DNA, 33 bp, Homo sapien
ttttaccttgtagctaagtgcagtccacagagc

SEQ ID NO: 823466 - DNA, 33 bp, Homo sapien
ttttaccttgtagctaggtgcagtccacagagc

SEQ ID NO: 823467 - DNA, 33 bp, Homo sapien
cttgtttgaaccgctaagattctgttctacaca

SEQ ID NO: 823468 - DNA, 33 bp, Homo sapien
cttgtttgaaccgctaggattctgttctacaca

SEQ ID NO: 823469 - DNA, 33 bp, Homo sapien
tacataaagagccctgacactgagcttttaaaa

SEQ ID NO: 823470 - DNA, 33 bp, Homo sapien
tacataaagagccctggcactgagcttttaaaa

SEQ ID NO: 823471 - DNA, 33 bp, Homo sapien
ttgccaatgcgtggaaagttgtattgttctaac

SEQ ID NO: 823472 - DNA, 33 bp, Homo sapien
ttgccaatgcgtggaaggttgtattgttctaac

SEQ ID NO: 823473 - DNA, 33 bp, Homo sapien
gctaatcctgtcagagccctccacttgattttc

SEQ ID NO: 823474 - DNA, 33 bp, Homo sapien
gctaatcctgtcagagtcctccacttgattttc

SEQ ID NO: 823475 - DNA, 33 bp, Homo sapien
agatcagattggatggacaagacatggttagat

SEQ ID NO: 823476 - DNA, 33 bp, Homo sapien
agatcagattggatggtcaagacatggttagat

SEQ ID NO: 823477 - DNA, 33 bp, Homo sapien
gcagagttcacactggcaaggaatgggagatca

SEQ ID NO: 823478 - DNA, 33 bp, Homo sapien
gcagagttcacactgggaaggaatgggagatca

SEQ ID NO: 823479 - DNA, 33 bp, Homo sapien
taatacctgagacttacggccttctaactcagg

SEQ ID NO: 823480 - DNA, 33 bp, Homo sapien
taatacctgagacttatggccttctaactcagg

SEQ ID NO: 823481 - DNA, 33 bp, Homo sapien
tttcagattgtgtcggccacaggtattccccta

SEQ ID NO: 823482 - DNA, 33 bp, Homo sapien
tttcagattgtgtcggtcacaggtattccccta

SEQ ID NO: 823483 - DNA, 33 bp, Homo sapien
agagtccataggcctgaaaaattatgctatccc

SEQ ID NO: 823484 - DNA, 33 bp, Homo sapien
agagtccataggcctggaaaattatgctatccc

SEQ ID NO: 823485 - DNA, 33 bp, Homo sapien
ttcatgttgaagaaaacgagacggataaagtaa

SEQ ID NO: 823486 - DNA, 33 bp, Homo sapien
ttcatgttgaagaaaatgagacggataaagtaa

SEQ ID NO: 823487 - DNA, 33 bp, Homo sapien
gccgctctcagatcacgctatgtcagttagggc

SEQ ID NO: 823488 - DNA, 33 bp, Homo sapien
gccgctctcagatcactctatgtcagttagggc

SEQ ID NO: 823489 - DNA, 33 bp, Homo sapien
aaatgggacgtccacaaagatgtcagtcatacc

SEQ ID NO: 823490 - DNA, 33 bp, Homo sapien
aaatgggacgtccacagagatgtcagtcatacc

SEQ ID NO: 823491 - DNA, 33 bp, Homo sapien
agaggtgaacttgataaaacaaatgtgactgtc

SEQ ID NO: 823492 - DNA, 33 bp, Homo sapien
agaggtgaacttgatataacaaatgtgactgtc

SEQ ID NO: 823493 - DNA, 33 bp, Homo sapien
agtgacaggttctgaaataaacaggccttcggt

SEQ ID NO: 823494 - DNA, 33 bp, Homo sapien
agtgacaggttctgaagtaaacaggccttcggt

SEQ ID NO: 823495 - DNA, 33 bp, Homo sapien
caccagaggttagtataaatgactaaggaactg

SEQ ID NO: 823496 - DNA, 33 bp, Homo sapien
caccagaggttagtatgaatgactaaggaactg

SEQ ID NO: 823497 - DNA, 33 bp, Homo sapien
catgagtacagactagaatgaaagcaagaaact

SEQ ID NO: 823498 - DNA, 33 bp, Homo sapien
catgagtacagactagcatgaaagcaagaaact

SEQ ID NO: 823499 - DNA, 33 bp, Homo sapien
atttctcctaatgatacgattttctgtgcatat

SEQ ID NO: 823500 - DNA, 33 bp, Homo sapien
atttctcctaatgatatgattttctgtgcatat

SEQ ID NO: 823501 - DNA, 33 bp, Homo sapien
tcacgccaaaagtcaaactagaaagtatgtgcg

SEQ ID NO: 823502 - DNA, 33 bp, Homo sapien
tcacgccaaaagtcaagctagaaagtatgtgcg

SEQ ID NO: 823503 - DNA, 33 bp, Homo sapien
agccagtgcctgtccacgaaaccacattgccac

SEQ ID NO: 823504 - DNA, 33 bp, Homo sapien
agccagtgcctgtccatgaaaccacattgccac

SEQ ID NO: 823505 - DNA, 33 bp, Homo sapien
agcataagcttgtttgaacagatgcaaatagcg

SEQ ID NO: 823506 - DNA, 33 bp, Homo sapien
agcataagcttgtttgtacagatgcaaatagcg

SEQ ID NO: 823507 - DNA, 33 bp, Homo sapien
ttcagtactcagcaaacgcttcagagaacccct

SEQ ID NO: 823508 - DNA, 33 bp, Homo sapien
ttcagtactcagcaaatgcttcagagaacccct

SEQ ID NO: 823509 - DNA, 33 bp, Homo sapien
tattttttgtaaaatacgggtgaatgccctgtt

SEQ ID NO: 823510 - DNA, 33 bp, Homo sapien
tattttttgtaaaatatgggtgaatgccctgtt

SEQ ID NO: 823511 - DNA, 33 bp, Homo sapien
agtatacaaaacaaacactgttgaatctgaatc

SEQ ID NO: 823512 - DNA, 33 bp, Homo sapien
agtatacaaaacaaacgctgttgaatctgaatc

SEQ ID NO: 823513 - DNA, 33 bp, Homo sapien
gatgcacaaatatataacattgtattacaactg

SEQ ID NO: 823514 - DNA, 33 bp, Homo sapien
gatgcacaaatatataccattgtattacaactg

SEQ ID NO: 823515 - DNA, 33 bp, Homo sapien
atagacatttcttgtacgtcaaactctgttact

SEQ ID NO: 823516 - DNA, 33 bp, Homo sapien
atagacatttcttgtatgtcaaactctgttact

SEQ ID NO: 823517 - DNA, 33 bp, Homo sapien
gaaacctgttgctactaaactctcttaaacagt

SEQ ID NO: 823518 - DNA, 33 bp, Homo sapien
gaaacctgttgctactcaactctcttaaacagt

SEQ ID NO: 823519 - DNA, 33 bp, Homo sapien
tagcagatgatctgaggccaaaccttcctgcag

SEQ ID NO: 823520 - DNA, 33 bp, Homo sapien
tagcagatgatctgagtccaaaccttcctgcag

SEQ ID NO: 823521 - DNA, 33 bp, Homo sapien
ttcaaacatgagaggccataaatcttgggaatg

SEQ ID NO: 823522 - DNA, 33 bp, Homo sapien
ttcaaacatgagaggctataaatcttgggaatg

SEQ ID NO: 823523 - DNA, 33 bp, Homo sapien
ctcaataaatcatttgaaacctactagtttaga

SEQ ID NO: 823524 - DNA, 33 bp, Homo sapien
ctcaataaatcatttggaacctactagtttaga

SEQ ID NO: 823525 - DNA, 33 bp, Homo sapien
agtaccaaaaatgagaagtggtaagagagaaag

SEQ ID NO: 823526 - DNA, 33 bp, Homo sapien
agtaccaaaaatgagaggtggtaagagagaaag

SEQ ID NO: 823527 - DNA, 33 bp, Homo sapien
ggacttaaaagcacacactgtctatgttgcatc

SEQ ID NO: 823528 - DNA, 33 bp, Homo sapien
ggacttaaaagcacacgctgtctatgttgcatc

SEQ ID NO: 823529 - DNA, 33 bp, Homo sapien
tactctctattgttccacagacattcttagaca

SEQ ID NO: 823530 - DNA, 33 bp, Homo sapien
tactctctattgttccgcagacattcttagaca

SEQ ID NO: 823531 - DNA, 33 bp, Homo sapien
atcagtcagttgattacctatttagctacttat

SEQ ID NO: 823532 - DNA, 33 bp, Homo sapien
atcagtcagttgattatctatttagctacttat

SEQ ID NO: 823533 - DNA, 33 bp, Homo sapien
caccaaaagccaagccaattctggcaccatgct

SEQ ID NO: 823534 - DNA, 33 bp, Homo sapien
caccaaaagccaagccgattctggcaccatgct

SEQ ID NO: 823535 - DNA, 33 bp, Homo sapien
tatttcattcagcgaaatgaaatttaatattgt

SEQ ID NO: 823536 - DNA, 33 bp, Homo sapien
tatttcattcagcgaagtgaaatttaatattgt

SEQ ID NO: 823537 - DNA, 33 bp, Homo sapien
aaatgatgcttagaaccaaattgagtataaggg

SEQ ID NO: 823538 - DNA, 33 bp, Homo sapien
aaatgatgcttagaactaaattgagtataaggg

SEQ ID NO: 823539 - DNA, 33 bp, Homo sapien
atgattttggtatggaagtagctcagagattat

SEQ ID NO: 823540 - DNA, 33 bp, Homo sapien
atgattttggtatggaggtagctcagagattat

SEQ ID NO: 823541 - DNA, 33 bp, Homo sapien
tttgtttagattctccactagctcctggagcaa

SEQ ID NO: 823542 - DNA, 33 bp, Homo sapien
tttgtttagattctcccctagctcctggagcaa

SEQ ID NO: 823543 - DNA, 33 bp, Homo sapien
agcctttctgcagacaatgctgaacatctaaat

SEQ ID NO: 823544 - DNA, 33 bp, Homo sapien
agcctttctgcagacagtgctgaacatctaaat

SEQ ID NO: 823545 - DNA, 33 bp, Homo sapien
agctagcctcaccacgaaaggtaaattgcggct

SEQ ID NO: 823546 - DNA, 33 bp, Homo sapien
agctagcctcaccacggaaggtaaattgcggct

SEQ ID NO: 823547 - DNA, 33 bp, Homo sapien
gctcagatcacttactcaccttgttctcaatta

SEQ ID NO: 823548 - DNA, 33 bp, Homo sapien
gctcagatcacttacttaccttgttctcaatta

SEQ ID NO: 823549 - DNA, 33 bp, Homo sapien
tcagggaatttaaactcagagccacatgagcag

SEQ ID NO: 823550 - DNA, 33 bp, Homo sapien
tcagggaatttaaactgagagccacatgagcag

SEQ ID NO: 823551 - DNA, 33 bp, Homo sapien
acactaattttataaccgtcatggggggcgtcc

SEQ ID NO: 823552 - DNA, 33 bp, Homo sapien
acactaattttataactgtcatggggggcgtcc

SEQ ID NO: 823553 - DNA, 33 bp, Homo sapien
tgatggcaccatgatgccagacaggtaatttat

SEQ ID NO: 823554 - DNA, 33 bp, Homo sapien
tgatggcaccatgatgtcagacaggtaatttat

SEQ ID NO: 823555 - DNA, 33 bp, Homo sapien
ctatgtaagtgctgaaagaacatgaatgtattt

SEQ ID NO: 823556 - DNA, 33 bp, Homo sapien
ctatgtaagtgctgaaggaacatgaatgtattt

SEQ ID NO: 823557 - DNA, 33 bp, Homo sapien
ttttcatggtgacataaggttatcctgtaattt

SEQ ID NO: 823558 - DNA, 33 bp, Homo sapien
ttttcatggtgacatagggttatcctgtaattt

SEQ ID NO: 823559 - DNA, 33 bp, Homo sapien
ttctggcattgcacaaataataaaaaagtaatc

SEQ ID NO: 823560 - DNA, 33 bp, Homo sapien
ttctggcattgcacaagtaataaaaaagtaatc

SEQ ID NO: 823561 - DNA, 33 bp, Homo sapien
aagtacttccatccaaaaggtgattgactgtac

SEQ ID NO: 823562 - DNA, 33 bp, Homo sapien
aagtacttccatccaagaggtgattgactgtac

SEQ ID NO: 823563 - DNA, 33 bp, Homo sapien
aacagcattggctgaacaggctgaaataggtgt

SEQ ID NO: 823564 - DNA, 33 bp, Homo sapien
aacagcattggctgaataggctgaaataggtgt

SEQ ID NO: 823565 - DNA, 33 bp, Homo sapien
tgcacagactttttaagaccacacaaattttgt

SEQ ID NO: 823566 - DNA, 33 bp, Homo sapien
tgcacagactttttaataccacacaaattttgt

SEQ ID NO: 823567 - DNA, 33 bp, Homo sapien
catcagaaagtttaaggacagttttcaggattt

SEQ ID NO: 823568 - DNA, 33 bp, Homo sapien
catcagaaagtttaagtacagttttcaggattt

SEQ ID NO: 823569 - DNA, 33 bp, Homo sapien
actcctactcagatcactatcaaaccccttagg

SEQ ID NO: 823570 - DNA, 33 bp, Homo sapien
actcctactcagatcattatcaaaccccttagg

SEQ ID NO: 823571 - DNA, 33 bp, Homo sapien
ttgcggtgccttttcaaggtatcaatgtattgc

SEQ ID NO: 823572 - DNA, 33 bp, Homo sapien
ttgcggtgccttttcatggtatcaatgtattgc

SEQ ID NO: 823573 - DNA, 33 bp, Homo sapien
aaaaaattgaggcaaaaatagaattgagctggt

SEQ ID NO: 823574 - DNA, 33 bp, Homo sapien
aaaaaattgaggcaaacatagaattgagctggt

SEQ ID NO: 823575 - DNA, 33 bp, Homo sapien
actgaaactctgattccaattgttgaattgtct

SEQ ID NO: 823576 - DNA, 33 bp, Homo sapien
actgaaactctgattctaattgttgaattgtct

SEQ ID NO: 823577 - DNA, 33 bp, Homo sapien
cagctgttttttataacctcaatgttgggccac

SEQ ID NO: 823578 - DNA, 33 bp, Homo sapien
cagctgttttttataatctcaatgttgggccac

SEQ ID NO: 823579 - DNA, 33 bp, Homo sapien
ctacctctggaagcaacgacgatagggcgtgag

SEQ ID NO: 823580 - DNA, 33 bp, Homo sapien
ctacctctggaagcaatgacgatagggcgtgag

SEQ ID NO: 823581 - DNA, 33 bp, Homo sapien
ttgtttttgttgcttacaggaagtgagcctcta

SEQ ID NO: 823582 - DNA, 33 bp, Homo sapien
ttgtttttgttgcttataggaagtgagcctcta

SEQ ID NO: 823583 - DNA, 33 bp, Homo sapien
ggtagcttgattgatagggaaatatgacctgta

SEQ ID NO: 823584 - DNA, 33 bp, Homo sapien
ggtagcttgattgatatggaaatatgacctgta

SEQ ID NO: 823585 - DNA, 33 bp, Homo sapien
aaaagaaatgtcagcaaaattttcagatagtat

SEQ ID NO: 823586 - DNA, 33 bp, Homo sapien
aaaagaaatgtcagcataattttcagatagtat

SEQ ID NO: 823587 - DNA, 33 bp, Homo sapien
cttctgggcctgaaaccgctgcatttggccagg

SEQ ID NO: 823588 - DNA, 33 bp, Homo sapien
cttctgggcctgaaactgctgcatttggccagg

SEQ ID NO: 823589 - DNA, 33 bp, Homo sapien
tgctagatgatagcaactgattttggagcaaca

SEQ ID NO: 823590 - DNA, 33 bp, Homo sapien
tgctagatgatagcaattgattttggagcaaca

SEQ ID NO: 823591 - DNA, 33 bp, Homo sapien
acctgttgtagatttgaatcctgacctagtcac

SEQ ID NO: 823592 - DNA, 33 bp, Homo sapien
acctgttgtagatttgcatcctgacctagtcac

SEQ ID NO: 823593 - DNA, 33 bp, Homo sapien
aggaatgataacagcaataagtagagacaaatc

SEQ ID NO: 823594 - DNA, 33 bp, Homo sapien
aggaatgataacagcagtaagtagagacaaatc

SEQ ID NO: 823595 - DNA, 33 bp, Homo sapien
ctgcatgaaaacataactgtgttctctcataag

SEQ ID NO: 823596 - DNA, 33 bp, Homo sapien
ctgcatgaaaacataattgtgttctctcataag

SEQ ID NO: 823597 - DNA, 33 bp, Homo sapien
aaagagctacagttataagatagaagaggttag

SEQ ID NO: 823598 - DNA, 33 bp, Homo sapien
aaagagctacagttatgagatagaagaggttag

SEQ ID NO: 823599 - DNA, 33 bp, Homo sapien
aactatgcagaaatcacaccccactcactcctc

SEQ ID NO: 823600 - DNA, 33 bp, Homo sapien
aactatgcagaaatcataccccactcactcctc

SEQ ID NO: 823601 - DNA, 33 bp, Homo sapien
tttacaatagtgttaagcaattcataagggtgg

SEQ ID NO: 823602 - DNA, 33 bp, Homo sapien
tttacaatagtgttaatcaattcataagggtgg

SEQ ID NO: 823603 - DNA, 33 bp, Homo sapien
atgaaccatgaattccagcagaggaaattttag

SEQ ID NO: 823604 - DNA, 33 bp, Homo sapien
atgaaccatgaattccggcagaggaaattttag

SEQ ID NO: 823605 - DNA, 33 bp, Homo sapien
gctatacttttggaacaactgaaatatagagtc

SEQ ID NO: 823606 - DNA, 33 bp, Homo sapien
gctatacttttggaacgactgaaatatagagtc

SEQ ID NO: 823607 - DNA, 33 bp, Homo sapien
tgtaaaaaacactaaaacattagtaggcagaat

SEQ ID NO: 823608 - DNA, 33 bp, Homo sapien
tgtaaaaaacactaaaccattagtaggcagaat

SEQ ID NO: 823609 - DNA, 33 bp, Homo sapien
tttcagatttaccaagaagtttgacaaggtgtt

SEQ ID NO: 823610 - DNA, 33 bp, Homo sapien
tttcagatttaccaaggagtttgacaaggtgtt

SEQ ID NO: 823611 - DNA, 33 bp, Homo sapien
cagaagttgatcaaaccgttgaaccaaagaaca

SEQ ID NO: 823612 - DNA, 33 bp, Homo sapien
cagaagttgatcaaactgttgaaccaaagaaca

SEQ ID NO: 823613 - DNA, 33 bp, Homo sapien
tttctaaaaggacatacgggaactcgatgcact

SEQ ID NO: 823614 - DNA, 33 bp, Homo sapien
tttctaaaaggacatatgggaactcgatgcact

SEQ ID NO: 823615 - DNA, 33 bp, Homo sapien
tacacctacttgaccccgctttaagtgaaatct

SEQ ID NO: 823616 - DNA, 33 bp, Homo sapien
tacacctacttgaccctgctttaagtgaaatct

SEQ ID NO: 823617 - DNA, 33 bp, Homo sapien
gccctagacgacaggcaaagtgactgtgaactt

SEQ ID NO: 823618 - DNA, 33 bp, Homo sapien
gccctagacgacaggcgaagtgactgtgaactt

SEQ ID NO: 823619 - DNA, 33 bp, Homo sapien
gataatttgctagtaccgaattgcacttgagtt

SEQ ID NO: 823620 - DNA, 33 bp, Homo sapien
gataatttgctagtactgaattgcacttgagtt

SEQ ID NO: 823621 - DNA, 33 bp, Homo sapien
gtgatagacaaggaagcacggaattatctgcat

SEQ ID NO: 823622 - DNA, 33 bp, Homo sapien
gtgatagacaaggaagtacggaattatctgcat

SEQ ID NO: 823623 - DNA, 33 bp, Homo sapien
agccaaagaaaaactccaagtaactgtgtatta

SEQ ID NO: 823624 - DNA, 33 bp, Homo sapien
agccaaagaaaaactctaagtaactgtgtatta

SEQ ID NO: 823625 - DNA, 33 bp, Homo sapien
caactccctgaatcgacgaattgttcaattaat

SEQ ID NO: 823626 - DNA, 33 bp, Homo sapien
caactccctgaatcgatgaattgttcaattaat

SEQ ID NO: 823627 - DNA, 33 bp, Homo sapien
ttaggagaaaaagcacggtagaagatgaataat

SEQ ID NO: 823628 - DNA, 33 bp, Homo sapien
ttaggagaaaaagcactgtagaagatgaataat

SEQ ID NO: 823629 - DNA, 33 bp, Homo sapien
agagatatgttcttttcaaaacctcaggagcaa

SEQ ID NO: 823630 - DNA, 33 bp, Homo sapien
agagatatgttcttttgaaaacctcaggagcaa

SEQ ID NO: 823631 - DNA, 33 bp, Homo sapien
ggagcagtcatttaaaggttctaagtagcaaaa

SEQ ID NO: 823632 - DNA, 33 bp, Homo sapien
ggagcagtcatttaaatgttctaagtagcaaaa

SEQ ID NO: 823633 - DNA, 33 bp, Homo sapien
tgtagtgatgaaaggcaaggataaacttttaat

SEQ ID NO: 823634 - DNA, 33 bp, Homo sapien
tgtagtgatgaaaggcgaggataaacttttaat

SEQ ID NO: 823635 - DNA, 33 bp, Homo sapien
ctgcttaccccttagacctatgactatcaagga

SEQ ID NO: 823636 - DNA, 33 bp, Homo sapien
ctgcttaccccttagatctatgactatcaagga

SEQ ID NO: 823637 - DNA, 33 bp, Homo sapien
gggaaaaaatcaggaaccaatcattttctattt

SEQ ID NO: 823638 - DNA, 33 bp, Homo sapien
gggaaaaaatcaggaatcaatcattttctattt

SEQ ID NO: 823639 - DNA, 33 bp, Homo sapien
ttcagatgaacaatacagaaggacatcgtgaaa

SEQ ID NO: 823640 - DNA, 33 bp, Homo sapien
ttcagatgaacaatacggaaggacatcgtgaaa

SEQ ID NO: 823641 - DNA, 33 bp, Homo sapien
gtcaggtcctctagcactcacttatctagagtc

SEQ ID NO: 823642 - DNA, 33 bp, Homo sapien
gtcaggtcctctagcattcacttatctagagtc

SEQ ID NO: 823643 - DNA, 33 bp, Homo sapien
caaaaggaagcatttcaatatactgtttagact

SEQ ID NO: 823644 - DNA, 33 bp, Homo sapien
caaaaggaagcatttcgatatactgtttagact

SEQ ID NO: 823645 - DNA, 33 bp, Homo sapien
tcataaatcttcaggacagaccgttaagatcac

SEQ ID NO: 823646 - DNA, 33 bp, Homo sapien
tcataaatcttcaggagagaccgttaagatcac

SEQ ID NO: 823647 - DNA, 33 bp, Homo sapien
cagatgcggtagcccacgccaaagtcacccagt

SEQ ID NO: 823648 - DNA, 33 bp, Homo sapien
cagatgcggtagcccaggccaaagtcacccagt

SEQ ID NO: 823649 - DNA, 33 bp, Homo sapien
gagagtagcagcctaacagcagtttttgcagtc

SEQ ID NO: 823650 - DNA, 33 bp, Homo sapien
gagagtagcagcctaagagcagtttttgcagtc

SEQ ID NO: 823651 - DNA, 33 bp, Homo sapien
ttgggactgtcgtatgaatcaaatgaagctgat

SEQ ID NO: 823652 - DNA, 33 bp, Homo sapien
ttgggactgtcgtatggatcaaatgaagctgat

SEQ ID NO: 823653 - DNA, 33 bp, Homo sapien
gatatataaacccccaatgacacgatggctgat

SEQ ID NO: 823654 - DNA, 33 bp, Homo sapien
gatatataaacccccattgacacgatggctgat

SEQ ID NO: 823655 - DNA, 33 bp, Homo sapien
gtaaagcaagtgataactgagtggtcttaatcc

SEQ ID NO: 823656 - DNA, 33 bp, Homo sapien
gtaaagcaagtgataattgagtggtcttaatcc

SEQ ID NO: 823657 - DNA, 33 bp, Homo sapien
ttgagccgaaatgttaaaatccaatcaccataa

SEQ ID NO: 823658 - DNA, 33 bp, Homo sapien
ttgagccgaaatgttataatccaatcaccataa

SEQ ID NO: 823659 - DNA, 33 bp, Homo sapien
tcttgattatcacaacaaccatcccaggtaact

SEQ ID NO: 823660 - DNA, 33 bp, Homo sapien
tcttgattatcacaaccaccatcccaggtaact

SEQ ID NO: 823661 - DNA, 33 bp, Homo sapien
tttacctacattaagaagacaatgagaatcaac

SEQ ID NO: 823662 - DNA, 33 bp, Homo sapien
tttacctacattaagaggacaatgagaatcaac

SEQ ID NO: 823663 - DNA, 33 bp, Homo sapien
tagctcagaatcataccggcaaaggaatctggg

SEQ ID NO: 823664 - DNA, 33 bp, Homo sapien
tagctcagaatcatactggcaaaggaatctggg

SEQ ID NO: 823665 - DNA, 33 bp, Homo sapien
tagcatcctcaaaacactatagttgtgcttact

SEQ ID NO: 823666 - DNA, 33 bp, Homo sapien
tagcatcctcaaaacattatagttgtgcttact

SEQ ID NO: 823667 - DNA, 33 bp, Homo sapien
catggtgtgctcaataatacaataccgttctgt

SEQ ID NO: 823668 - DNA, 33 bp, Homo sapien
catggtgtgctcaatagtacaataccgttctgt

SEQ ID NO: 823669 - DNA, 33 bp, Homo sapien
ttggtagaaaaagaaacctaagtgacacacttg

SEQ ID NO: 823670 - DNA, 33 bp, Homo sapien
ttggtagaaaaagaaatctaagtgacacacttg

SEQ ID NO: 823671 - DNA, 33 bp, Homo sapien
gtgcactcatcctcacagctggctagtaaagtc

SEQ ID NO: 823672 - DNA, 33 bp, Homo sapien
gtgcactcatcctcacggctggctagtaaagtc

SEQ ID NO: 823673 - DNA, 33 bp, Homo sapien
tctccaaccctctagacctttgaaaactaccag

SEQ ID NO: 823674 - DNA, 33 bp, Homo sapien
tctccaaccctctagatctttgaaaactaccag

SEQ ID NO: 823675 - DNA, 33 bp, Homo sapien
agaaaaggctgcataactgttaagtgaccacaa

SEQ ID NO: 823676 - DNA, 33 bp, Homo sapien
agaaaaggctgcataattgttaagtgaccacaa

SEQ ID NO: 823677 - DNA, 33 bp, Homo sapien
catgttccaactgaaccaaaacacatggagata

SEQ ID NO: 823678 - DNA, 33 bp, Homo sapien
catgttccaactgaactaaaacacatggagata

SEQ ID NO: 823679 - DNA, 33 bp, Homo sapien
aaaagaaatggagctaatacatacatttgaatc

SEQ ID NO: 823680 - DNA, 33 bp, Homo sapien
aaaagaaatggagctagtacatacatttgaatc

SEQ ID NO: 823681 - DNA, 33 bp, Homo sapien
aaggtgacttgggtgaaatgttaagtccctatt

SEQ ID NO: 823682 - DNA, 33 bp, Homo sapien
aaggtgacttgggtgagatgttaagtccctatt

SEQ ID NO: 823683 - DNA, 33 bp, Homo sapien
agttggtgtatcccaactagattagaaggaact

SEQ ID NO: 823684 - DNA, 33 bp, Homo sapien
agttggtgtatcccaattagattagaaggaact

SEQ ID NO: 823685 - DNA, 33 bp, Homo sapien
gaatgtgattgaagtacaagagtgattgatagc

SEQ ID NO: 823686 - DNA, 33 bp, Homo sapien
gaatgtgattgaagtagaagagtgattgatagc

SEQ ID NO: 823687 - DNA, 33 bp, Homo sapien
tctgtatcctctcaaacctctcatgttttatag

SEQ ID NO: 823688 - DNA, 33 bp, Homo sapien
tctgtatcctctcaaatctctcatgttttatag

SEQ ID NO: 823689 - DNA, 33 bp, Homo sapien
ttcagctcttgaaagaaagagttgtaacaaaag

SEQ ID NO: 823690 - DNA, 33 bp, Homo sapien
ttcagctcttgaaagatagagttgtaacaaaag

SEQ ID NO: 823691 - DNA, 33 bp, Homo sapien
aaataagctacgttaaacccatcacgattctgt

SEQ ID NO: 823692 - DNA, 33 bp, Homo sapien
aaataagctacgttaatcccatcacgattctgt

SEQ ID NO: 823693 - DNA, 33 bp, Homo sapien
ggcatggctcagttgaaaatgaataatattatc

SEQ ID NO: 823694 - DNA, 33 bp, Homo sapien
ggcatggctcagttgacaatgaataatattatc

SEQ ID NO: 823695 - DNA, 33 bp, Homo sapien
aattcttggaatgtagcatgttgcttataacta

SEQ ID NO: 823696 - DNA, 33 bp, Homo sapien
aattcttggaatgtagtatgttgcttataacta

SEQ ID NO: 823697 - DNA, 33 bp, Homo sapien
gcaaagatgttcttgaaaaaattgtaagaacca

SEQ ID NO: 823698 - DNA, 33 bp, Homo sapien
gcaaagatgttcttgagaaaattgtaagaacca

SEQ ID NO: 823699 - DNA, 33 bp, Homo sapien
taggaggtttcataagaattttggagcagtggt

SEQ ID NO: 823700 - DNA, 33 bp, Homo sapien
taggaggtttcataaggattttggagcagtggt

SEQ ID NO: 823701 - DNA, 33 bp, Homo sapien
cgttgtacatttaaaaacatcagaattggctaa

SEQ ID NO: 823702 - DNA, 33 bp, Homo sapien
cgttgtacatttaaaaccatcagaattggctaa

SEQ ID NO: 823703 - DNA, 33 bp, Homo sapien
tcattgaggaggcaatgatcttttctctttgcg

SEQ ID NO: 823704 - DNA, 33 bp, Homo sapien
tcattgaggaggcaattatcttttctctttgcg

SEQ ID NO: 823705 - DNA, 33 bp, Homo sapien
acgaaatatagatggcagcatgtgtcacttggc

SEQ ID NO: 823706 - DNA, 33 bp, Homo sapien
acgaaatatagatggcggcatgtgtcacttggc

SEQ ID NO: 823707 - DNA, 33 bp, Homo sapien
aggatgtaaagctgtcaatatgctatgctccat

SEQ ID NO: 823708 - DNA, 33 bp, Homo sapien
aggatgtaaagctgtcgatatgctatgctccat

SEQ ID NO: 823709 - DNA, 33 bp, Homo sapien
gtgtgttggtatgatgacagtgttttcctaaag

SEQ ID NO: 823710 - DNA, 33 bp, Homo sapien
gtgtgttggtatgatggcagtgttttcctaaag

SEQ ID NO: 823711 - DNA, 33 bp, Homo sapien
tgccctccttattactcaaacagttgaacaaac

SEQ ID NO: 823712 - DNA, 33 bp, Homo sapien
tgccctccttattactgaaacagttgaacaaac

SEQ ID NO: 823713 - DNA, 33 bp, Homo sapien
agcatctaattactgaagctcttggaggaatca

SEQ ID NO: 823714 - DNA, 33 bp, Homo sapien
agcatctaattactgaggctcttggaggaatca

SEQ ID NO: 823715 - DNA, 33 bp, Homo sapien
gttacatgaaaagtcccagatttcaccactaca

SEQ ID NO: 823716 - DNA, 33 bp, Homo sapien
gttacatgaaaagtcctagatttcaccactaca

SEQ ID NO: 823717 - DNA, 33 bp, Homo sapien
aagaaggtagaactgaacagaaggagaacctga

SEQ ID NO: 823718 - DNA, 33 bp, Homo sapien
aagaaggtagaactgagcagaaggagaacctga

SEQ ID NO: 823719 - DNA, 33 bp, Homo sapien
ccttctcaaaacttaccacatacattttctctt

SEQ ID NO: 823720 - DNA, 33 bp, Homo sapien
ccttctcaaaacttactacatacattttctctt

SEQ ID NO: 823721 - DNA, 33 bp, Homo sapien
caaactgcaatttccactaaagacacttatgac

SEQ ID NO: 823722 - DNA, 33 bp, Homo sapien
caaactgcaatttccattaaagacacttatgac

SEQ ID NO: 823723 - DNA, 33 bp, Homo sapien
attcctgttgagtcaaaccaccatagaatatcc

SEQ ID NO: 823724 - DNA, 33 bp, Homo sapien
attcctgttgagtcaagccaccatagaatatcc

SEQ ID NO: 823725 - DNA, 33 bp, Homo sapien
acaagagagacagaaaacagtaatatctggaaa

SEQ ID NO: 823726 - DNA, 33 bp, Homo sapien
acaagagagacagaaagcagtaatatctggaaa

SEQ ID NO: 823727 - DNA, 33 bp, Homo sapien
agtctctctctacaacactaggagacatcttag

SEQ ID NO: 823728 - DNA, 33 bp, Homo sapien
agtctctctctacaacgctaggagacatcttag

SEQ ID NO: 823729 - DNA, 33 bp, Homo sapien
atgtcccctggcattgcatagagattgttgcta

SEQ ID NO: 823730 - DNA, 33 bp, Homo sapien
atgtcccctggcattgtatagagattgttgcta

SEQ ID NO: 823731 - DNA, 33 bp, Homo sapien
ttgcatcattgtgcaaagaggacaggagttaga

SEQ ID NO: 823732 - DNA, 33 bp, Homo sapien
ttgcatcattgtgcaaggaggacaggagttaga

SEQ ID NO: 823733 - DNA, 33 bp, Homo sapien
caaaattggacatcatgaaggtacaaataccta

SEQ ID NO: 823734 - DNA, 33 bp, Homo sapien
caaaattggacatcattaaggtacaaataccta

SEQ ID NO: 823735 - DNA, 33 bp, Homo sapien
aggtgtcctctggaaactgtgatcagccttcta

SEQ ID NO: 823736 - DNA, 33 bp, Homo sapien
aggtgtcctctggaaagtgtgatcagccttcta

SEQ ID NO: 823737 - DNA, 33 bp, Homo sapien
gccacttggcatcacacaagtaaactgttctct

SEQ ID NO: 823738 - DNA, 33 bp, Homo sapien
gccacttggcatcacagaagtaaactgttctct

SEQ ID NO: 823739 - DNA, 33 bp, Homo sapien
cgatatgccaaaggtaactaaaactctattttc

SEQ ID NO: 823740 - DNA, 33 bp, Homo sapien
cgatatgccaaaggtacctaaaactctattttc

SEQ ID NO: 823741 - DNA, 33 bp, Homo sapien
tggagggatatcagaactgcagtatgtatgtaa

SEQ ID NO: 823742 - DNA, 33 bp, Homo sapien
tggagggatatcagaattgcagtatgtatgtaa

SEQ ID NO: 823743 - DNA, 33 bp, Homo sapien
acattttgttacagcaagtccaaaaaacaaaaa

SEQ ID NO: 823744 - DNA, 33 bp, Homo sapien
acattttgttacagcaggtccaaaaaacaaaaa

SEQ ID NO: 823745 - DNA, 33 bp, Homo sapien
ccaagtgtctgcatatcatacataaagagcacg

SEQ ID NO: 823746 - DNA, 33 bp, Homo sapien
ccaagtgtctgcatattatacataaagagcacg

SEQ ID NO: 823747 - DNA, 33 bp, Homo sapien
attgcagtggatcaaactgagtcaagaactaca

SEQ ID NO: 823748 - DNA, 33 bp, Homo sapien
attgcagtggatcaaattgagtcaagaactaca

SEQ ID NO: 823749 - DNA, 33 bp, Homo sapien
gccagaaaatacttataaaaggccagaagaaga

SEQ ID NO: 823750 - DNA, 33 bp, Homo sapien
gccagaaaatacttatgaaaggccagaagaaga

SEQ ID NO: 823751 - DNA, 33 bp, Homo sapien
gttttctaatatatcaaggctgtgatacagtgt

SEQ ID NO: 823752 - DNA, 33 bp, Homo sapien
gttttctaatatatcagggctgtgatacagtgt

SEQ ID NO: 823753 - DNA, 33 bp, Homo sapien
aggtcaggtgtgaataaggaagcccaggcctca

SEQ ID NO: 823754 - DNA, 33 bp, Homo sapien
aggtcaggtgtgaatacggaagcccaggcctca

SEQ ID NO: 823755 - DNA, 33 bp, Homo sapien
tgatctatctaaagttaaaatggaaatccataa

SEQ ID NO: 823756 - DNA, 33 bp, Homo sapien
tgatctatctaaagttgaaatggaaatccataa

SEQ ID NO: 823757 - DNA, 33 bp, Homo sapien
agtgggtagccattataaaggggcgttatggat

SEQ ID NO: 823758 - DNA, 33 bp, Homo sapien
agtgggtagccattattaaggggcgttatggat

SEQ ID NO: 823759 - DNA, 33 bp, Homo sapien
ttttcaatgggcaagacgtgctaaaagcccttg

SEQ ID NO: 823760 - DNA, 33 bp, Homo sapien
ttttcaatgggcaagatgtgctaaaagcccttg

SEQ ID NO: 823761 - DNA, 33 bp, Homo sapien
atagttaaatatgtaaatcagaaatggaggata

SEQ ID NO: 823762 - DNA, 33 bp, Homo sapien
atagttaaatatgtaagtcagaaatggaggata

SEQ ID NO: 823763 - DNA, 33 bp, Homo sapien
caaagctgaattccaccgcatagcataagggtg

SEQ ID NO: 823764 - DNA, 33 bp, Homo sapien
caaagctgaattccactgcatagcataagggtg

SEQ ID NO: 823765 - DNA, 33 bp, Homo sapien
gaaggttggctttagacgtagaaacaaatctga

SEQ ID NO: 823766 - DNA, 33 bp, Homo sapien
gaaggttggctttagatgtagaaacaaatctga

SEQ ID NO: 823767 - DNA, 33 bp, Homo sapien
ctttaaaaagtctcagacaatcctttcttaatt

SEQ ID NO: 823768 - DNA, 33 bp, Homo sapien
ctttaaaaagtctcagtcaatcctttcttaatt

SEQ ID NO: 823769 - DNA, 33 bp, Homo sapien
aagagctgatacatcacattatttaatgctcat

SEQ ID NO: 823770 - DNA, 33 bp, Homo sapien
aagagctgatacatcatattatttaatgctcat

SEQ ID NO: 823771 - DNA, 33 bp, Homo sapien
ttaccatatagtcatcaagctgggactggcact

SEQ ID NO: 823772 - DNA, 33 bp, Homo sapien
ttaccatatagtcatctagctgggactggcact

SEQ ID NO: 823773 - DNA, 33 bp, Homo sapien
cagaatttttagaccaatacagaagattgagag

SEQ ID NO: 823774 - DNA, 33 bp, Homo sapien
cagaatttttagaccagtacagaagattgagag

SEQ ID NO: 823775 - DNA, 33 bp, Homo sapien
ttaaaaactgcatcaagtcggtagggaaaagtg

SEQ ID NO: 823776 - DNA, 33 bp, Homo sapien
ttaaaaactgcatcaattcggtagggaaaagtg

SEQ ID NO: 823777 - DNA, 33 bp, Homo sapien
tgtgacaacgactataacctcagcagaggaata

SEQ ID NO: 823778 - DNA, 33 bp, Homo sapien
tgtgacaacgactataccctcagcagaggaata

SEQ ID NO: 823779 - DNA, 33 bp, Homo sapien
acaagcagaaaaatcacgtatttggactaaaag

SEQ ID NO: 823780 - DNA, 33 bp, Homo sapien
acaagcagaaaaatcatgtatttggactaaaag

SEQ ID NO: 823781 - DNA, 33 bp, Homo sapien
attccagctttatctacgcagctttaattctga

SEQ ID NO: 823782 - DNA, 33 bp, Homo sapien
attccagctttatctatgcagctttaattctga

SEQ ID NO: 823783 - DNA, 33 bp, Homo sapien
ctacaacagacatttaaaaattcaaagtaaaga

SEQ ID NO: 823784 - DNA, 33 bp, Homo sapien
ctacaacagacatttacaaattcaaagtaaaga

SEQ ID NO: 823785 - DNA, 33 bp, Homo sapien
caatggaagaagtatccctgatcctgaaacaaa

SEQ ID NO: 823786 - DNA, 33 bp, Homo sapien
caatggaagaagtatcgctgatcctgaaacaaa

SEQ ID NO: 823787 - DNA, 33 bp, Homo sapien
agatctactacatacaaaactgttacttatata

SEQ ID NO: 823788 - DNA, 33 bp, Homo sapien
agatctactacatacagaactgttacttatata

SEQ ID NO: 823789 - DNA, 33 bp, Homo sapien
actggaattccaagagaagcaggctaccgttga

SEQ ID NO: 823790 - DNA, 33 bp, Homo sapien
actggaattccaagaggagcaggctaccgttga

SEQ ID NO: 823791 - DNA, 33 bp, Homo sapien
gatataaaaagtcagcacaaatatttctaaagt

SEQ ID NO: 823792 - DNA, 33 bp, Homo sapien
gatataaaaagtcagcgcaaatatttctaaagt

SEQ ID NO: 823793 - DNA, 33 bp, Homo sapien
ccactttttattgcacaggtatcagtctacatg

SEQ ID NO: 823794 - DNA, 33 bp, Homo sapien
ccactttttattgcaccggtatcagtctacatg

SEQ ID NO: 823795 - DNA, 33 bp, Homo sapien
aattctttggtaaaaactgtaatatggttctgg

SEQ ID NO: 823796 - DNA, 33 bp, Homo sapien
aattctttggtaaaaagtgtaatatggttctgg

SEQ ID NO: 823797 - DNA, 33 bp, Homo sapien
gatgtgtagaactcacagatgattatatttact

SEQ ID NO: 823798 - DNA, 33 bp, Homo sapien
gatgtgtagaactcacggatgattatatttact

SEQ ID NO: 823799 - DNA, 33 bp, Homo sapien
agtagttgattgacaacataaggactatgctac

SEQ ID NO: 823800 - DNA, 33 bp, Homo sapien
agtagttgattgacaatataaggactatgctac

SEQ ID NO: 823801 - DNA, 33 bp, Homo sapien
aatcttggccaaagcacaactgggtaaaaataa

SEQ ID NO: 823802 - DNA, 33 bp, Homo sapien
aatcttggccaaagcataactgggtaaaaataa

SEQ ID NO: 823803 - DNA, 33 bp, Homo sapien
ttccctgaaacacaacaatatagaaactaaacc

SEQ ID NO: 823804 - DNA, 33 bp, Homo sapien
ttccctgaaacacaaccatatagaaactaaacc

SEQ ID NO: 823805 - DNA, 33 bp, Homo sapien
gaaaaataattatagacgtgaatagtggaacag

SEQ ID NO: 823806 - DNA, 33 bp, Homo sapien
gaaaaataattatagatgtgaatagtggaacag

SEQ ID NO: 823807 - DNA, 33 bp, Homo sapien
agcacatccagaattaacatagttgaaaagaga

SEQ ID NO: 823808 - DNA, 33 bp, Homo sapien
agcacatccagaattatcatagttgaaaagaga

SEQ ID NO: 823809 - DNA, 33 bp, Homo sapien
gagcagcccttcgttacaaattcatatttagca

SEQ ID NO: 823810 - DNA, 33 bp, Homo sapien
gagcagcccttcgttataaattcatatttagca

SEQ ID NO: 823811 - DNA, 33 bp, Homo sapien
aggccaaatggatgccaaggaactctaaccctc

SEQ ID NO: 823812 - DNA, 33 bp, Homo sapien
aggccaaatggatgccgaggaactctaaccctc

SEQ ID NO: 823813 - DNA, 33 bp, Homo sapien
tcggaactatccctaactcagaaaatcaaggaa

SEQ ID NO: 823814 - DNA, 33 bp, Homo sapien
tcggaactatccctaagtcagaaaatcaaggaa

SEQ ID NO: 823815 - DNA, 33 bp, Homo sapien
atatgtctgcagaatacatttttgatgacaata

SEQ ID NO: 823816 - DNA, 33 bp, Homo sapien
atatgtctgcagaatatatttttgatgacaata

SEQ ID NO: 823817 - DNA, 33 bp, Homo sapien
aattcctcattatctcagacaaaatgtagagtt

SEQ ID NO: 823818 - DNA, 33 bp, Homo sapien
aattcctcattatctccgacaaaatgtagagtt

SEQ ID NO: 823819 - DNA, 33 bp, Homo sapien
aagttaaatgctacacagaccgcagtctttatg

SEQ ID NO: 823820 - DNA, 33 bp, Homo sapien
aagttaaatgctacacggaccgcagtctttatg

SEQ ID NO: 823821 - DNA, 33 bp, Homo sapien
acaccaaatttgactaaatggtagcataatgat

SEQ ID NO: 823822 - DNA, 33 bp, Homo sapien
acaccaaatttgactatatggtagcataatgat

SEQ ID NO: 823823 - DNA, 33 bp, Homo sapien
gaaacagctggtgaaaaagtttgctaagtggtg

SEQ ID NO: 823824 - DNA, 33 bp, Homo sapien
gaaacagctggtgaaagagtttgctaagtggtg

SEQ ID NO: 823825 - DNA, 33 bp, Homo sapien
actgatattactcacacgggttttatagagtcg

SEQ ID NO: 823826 - DNA, 33 bp, Homo sapien
actgatattactcacatgggttttatagagtcg

SEQ ID NO: 823827 - DNA, 33 bp, Homo sapien
catatctaaatatcaacgtctcaggttaatcat

SEQ ID NO: 823828 - DNA, 33 bp, Homo sapien
catatctaaatatcaatgtctcaggttaatcat

SEQ ID NO: 823829 - DNA, 33 bp, Homo sapien
cacacagaagcataacacactcatatatatgct

SEQ ID NO: 823830 - DNA, 33 bp, Homo sapien
cacacagaagcataacgcactcatatatatgct

SEQ ID NO: 823831 - DNA, 33 bp, Homo sapien
tgtgagaaaattgcccaaccacatattaccaag

SEQ ID NO: 823832 - DNA, 33 bp, Homo sapien
tgtgagaaaattgcccgaccacatattaccaag

SEQ ID NO: 823833 - DNA, 33 bp, Homo sapien
aatacatctagcacacaagaatttgtatccaga

SEQ ID NO: 823834 - DNA, 33 bp, Homo sapien
aatacatctagcacaccagaatttgtatccaga

SEQ ID NO: 823835 - DNA, 33 bp, Homo sapien
gaaactttctgaaaaacacggatagctcagtgc

SEQ ID NO: 823836 - DNA, 33 bp, Homo sapien
gaaactttctgaaaaatacggatagctcagtgc

SEQ ID NO: 823837 - DNA, 33 bp, Homo sapien
ctaagatagtagccaacacaatgaacacgaaat

SEQ ID NO: 823838 - DNA, 33 bp, Homo sapien
ctaagatagtagccaatacaatgaacacgaaat

SEQ ID NO: 823839 - DNA, 33 bp, Homo sapien
atggcaggtttaatcaataaatgtttggtgtgt

SEQ ID NO: 823840 - DNA, 33 bp, Homo sapien
atggcaggtttaatcagtaaatgtttggtgtgt

SEQ ID NO: 823841 - DNA, 33 bp, Homo sapien
gccatcctatctgccaaaataaatcaagctttc

SEQ ID NO: 823842 - DNA, 33 bp, Homo sapien
gccatcctatctgccagaataaatcaagctttc

SEQ ID NO: 823843 - DNA, 33 bp, Homo sapien
tttttgagcaattgcaactgtagagtgtaagaa

SEQ ID NO: 823844 - DNA, 33 bp, Homo sapien
tttttgagcaattgcagctgtagagtgtaagaa

SEQ ID NO: 823845 - DNA, 33 bp, Homo sapien
agtcctgcgagaataacaagtggacaagtaaaa

SEQ ID NO: 823846 - DNA, 33 bp, Homo sapien
agtcctgcgagaataagaagtggacaagtaaaa

SEQ ID NO: 823847 - DNA, 33 bp, Homo sapien
caatattatgtcattacatctaccgccaggata

SEQ ID NO: 823848 - DNA, 33 bp, Homo sapien
caatattatgtcattatatctaccgccaggata

SEQ ID NO: 823849 - DNA, 33 bp, Homo sapien
tcattccacttatgaaacttgtgaaggaatgac

SEQ ID NO: 823850 - DNA, 33 bp, Homo sapien
tcattccacttatgaagcttgtgaaggaatgac

SEQ ID NO: 823851 - DNA, 33 bp, Homo sapien
gcctgttattttgtcacctttctcatttagcaa

SEQ ID NO: 823852 - DNA, 33 bp, Homo sapien
gcctgttattttgtcagctttctcatttagcaa

SEQ ID NO: 823853 - DNA, 33 bp, Homo sapien
gagattattgacgcacagctaattaatctcaag

SEQ ID NO: 823854 - DNA, 33 bp, Homo sapien
gagattattgacgcacggctaattaatctcaag

SEQ ID NO: 823855 - DNA, 33 bp, Homo sapien
aattaaacaattgcataagtcagttgccatctg

SEQ ID NO: 823856 - DNA, 33 bp, Homo sapien
aattaaacaattgcatgagtcagttgccatctg

SEQ ID NO: 823857 - DNA, 33 bp, Homo sapien
agatcacaagtgttaaataacgtggtaactttt

SEQ ID NO: 823858 - DNA, 33 bp, Homo sapien
agatcacaagtgttaagtaacgtggtaactttt

SEQ ID NO: 823859 - DNA, 33 bp, Homo sapien
acatagcgattagcccactagcttactagttat

SEQ ID NO: 823860 - DNA, 33 bp, Homo sapien
acatagcgattagccctctagcttactagttat

SEQ ID NO: 823861 - DNA, 33 bp, Homo sapien
agacatagtttatttcaatgtcttttcagcacc

SEQ ID NO: 823862 - DNA, 33 bp, Homo sapien
agacatagtttatttcgatgtcttttcagcacc

SEQ ID NO: 823863 - DNA, 33 bp, Homo sapien
tgtagatgtacagaataatggcatcttgttaaa

SEQ ID NO: 823864 - DNA, 33 bp, Homo sapien
tgtagatgtacagaatcatggcatcttgttaaa

SEQ ID NO: 823865 - DNA, 33 bp, Homo sapien
attgctaacatttaaaaagaataggctatttgg

SEQ ID NO: 823866 - DNA, 33 bp, Homo sapien
attgctaacatttaaagagaataggctatttgg

SEQ ID NO: 823867 - DNA, 33 bp, Homo sapien
agtgaggccaacagatgaggggataactgccat

SEQ ID NO: 823868 - DNA, 33 bp, Homo sapien
agtgaggccaacagattaggggataactgccat

SEQ ID NO: 823869 - DNA, 33 bp, Homo sapien
tttccaaattgacttcagaaagcaaggtagcga

SEQ ID NO: 823870 - DNA, 33 bp, Homo sapien
tttccaaattgacttcggaaagcaaggtagcga

SEQ ID NO: 823871 - DNA, 33 bp, Homo sapien
atcacattaaagtagaagcagtagctgaactca

SEQ ID NO: 823872 - DNA, 33 bp, Homo sapien
atcacattaaagtagacgcagtagctgaactca

SEQ ID NO: 823873 - DNA, 33 bp, Homo sapien
ggtgtggtttccctaccagggccagatcagttt

SEQ ID NO: 823874 - DNA, 33 bp, Homo sapien
ggtgtggtttccctacgagggccagatcagttt

SEQ ID NO: 823875 - DNA, 33 bp, Homo sapien
agagattgttcggtcaagtgggagaatgactga

SEQ ID NO: 823876 - DNA, 33 bp, Homo sapien
agagattgttcggtcacgtgggagaatgactga

SEQ ID NO: 823877 - DNA, 33 bp, Homo sapien
ttgtgcctactgagcccacaattagcatcaatg

SEQ ID NO: 823878 - DNA, 33 bp, Homo sapien
ttgtgcctactgagcctacaattagcatcaatg

SEQ ID NO: 823879 - DNA, 33 bp, Homo sapien
attacagtagatttgccgatattcggatgtatt

SEQ ID NO: 823880 - DNA, 33 bp, Homo sapien
attacagtagatttgctgatattcggatgtatt

SEQ ID NO: 823881 - DNA, 33 bp, Homo sapien
tcaatgaggagcaataactgtaaaacccagatt

SEQ ID NO: 823882 - DNA, 33 bp, Homo sapien
tcaatgaggagcaatatctgtaaaacccagatt

SEQ ID NO: 823883 - DNA, 33 bp, Homo sapien
cttttaaaataggcacagcgttcatcctgggtt

SEQ ID NO: 823884 - DNA, 33 bp, Homo sapien
cttttaaaataggcacggcgttcatcctgggtt

SEQ ID NO: 823885 - DNA, 33 bp, Homo sapien
accatgagcttgaagaactaagggaagaagtca

SEQ ID NO: 823886 - DNA, 33 bp, Homo sapien
accatgagcttgaagagctaagggaagaagtca

SEQ ID NO: 823887 - DNA, 33 bp, Homo sapien
ctatggcttgactagaaaaggatctgcttccaa

SEQ ID NO: 823888 - DNA, 33 bp, Homo sapien
ctatggcttgactagacaaggatctgcttccaa

SEQ ID NO: 823889 - DNA, 33 bp, Homo sapien
tgtaagtcaggaattcaagcatggcttagctgg

SEQ ID NO: 823890 - DNA, 33 bp, Homo sapien
tgtaagtcaggaattcgagcatggcttagctgg

SEQ ID NO: 823891 - DNA, 33 bp, Homo sapien
ccattggtcctagtccaaaagccggtcaaaatt

SEQ ID NO: 823892 - DNA, 33 bp, Homo sapien
ccattggtcctagtcccaaagccggtcaaaatt

SEQ ID NO: 823893 - DNA, 33 bp, Homo sapien
ggctctgtccttataccgaatacggcaacacat

SEQ ID NO: 823894 - DNA, 33 bp, Homo sapien
ggctctgtccttatactgaatacggcaacacat

SEQ ID NO: 823895 - DNA, 33 bp, Homo sapien
gagaagagacgtcgccacagtcaaatcacatcg

SEQ ID NO: 823896 - DNA, 33 bp, Homo sapien
gagaagagacgtcgccgcagtcaaatcacatcg

SEQ ID NO: 823897 - DNA, 33 bp, Homo sapien
aagttttccaattctgacaacacattattttgg

SEQ ID NO: 823898 - DNA, 33 bp, Homo sapien
aagttttccaattctggcaacacattattttgg

SEQ ID NO: 823899 - DNA, 33 bp, Homo sapien
tacacatgtgtttgtccaagcaataactaaacc

SEQ ID NO: 823900 - DNA, 33 bp, Homo sapien
tacacatgtgtttgtctaagcaataactaaacc

SEQ ID NO: 823901 - DNA, 33 bp, Homo sapien
ttatccctattttatacgtggggcaacaataac

SEQ ID NO: 823902 - DNA, 33 bp, Homo sapien
ttatccctattttatatgtggggcaacaataac

SEQ ID NO: 823903 - DNA, 33 bp, Homo sapien
tcaaaagaggcaagaccataattctgcaaccaa

SEQ ID NO: 823904 - DNA, 33 bp, Homo sapien
tcaaaagaggcaagacgataattctgcaaccaa

SEQ ID NO: 823905 - DNA, 33 bp, Homo sapien
tgatattcataaaacactgcttgtttgtttagg

SEQ ID NO: 823906 - DNA, 33 bp, Homo sapien
tgatattcataaaacattgcttgtttgtttagg

SEQ ID NO: 823907 - DNA, 33 bp, Homo sapien
tttaactacttaaagacacaatgacggctggcg

SEQ ID NO: 823908 - DNA, 33 bp, Homo sapien
tttaactacttaaagatacaatgacggctggcg

SEQ ID NO: 823909 - DNA, 33 bp, Homo sapien
gctcccatctgagcaagaaaagggtatgtgata

SEQ ID NO: 823910 - DNA, 33 bp, Homo sapien
gctcccatctgagcaataaaagggtatgtgata

SEQ ID NO: 823911 - DNA, 33 bp, Homo sapien
ggccagtcaaggataccgacaagcacaccaaag

SEQ ID NO: 823912 - DNA, 33 bp, Homo sapien
ggccagtcaaggatactgacaagcacaccaaag

SEQ ID NO: 823913 - DNA, 33 bp, Homo sapien
agagctgttaatgttccctgaagactttcctgc

SEQ ID NO: 823914 - DNA, 33 bp, Homo sapien
agagctgttaatgttctctgaagactttcctgc

SEQ ID NO: 823915 - DNA, 33 bp, Homo sapien
gtgtgagctcatggtgcaaagtgacaaagtagg

SEQ ID NO: 823916 - DNA, 33 bp, Homo sapien
gtgtgagctcatggtggaaagtgacaaagtagg

SEQ ID NO: 823917 - DNA, 33 bp, Homo sapien
accataagcctccatgaatgttgaattaaccta

SEQ ID NO: 823918 - DNA, 33 bp, Homo sapien
accataagcctccatgtatgttgaattaaccta

SEQ ID NO: 823919 - DNA, 33 bp, Homo sapien
tcactaacggtgtgatgatagctgaggtgaaga

SEQ ID NO: 823920 - DNA, 33 bp, Homo sapien
tcactaacggtgtgattatagctgaggtgaaga

SEQ ID NO: 823921 - DNA, 33 bp, Homo sapien
tttatattctttaaatcaggccctttcaatacc

SEQ ID NO: 823922 - DNA, 33 bp, Homo sapien
tttatattctttaaattaggccctttcaatacc

SEQ ID NO: 823923 - DNA, 33 bp, Homo sapien
aagtgaggaaggtagaagaaaatggccagtttg

SEQ ID NO: 823924 - DNA, 33 bp, Homo sapien
aagtgaggaaggtagacgaaaatggccagtttg

SEQ ID NO: 823925 - DNA, 33 bp, Homo sapien
ctttatgttgactctacgatttaattctcacca

SEQ ID NO: 823926 - DNA, 33 bp, Homo sapien
ctttatgttgactctatgatttaattctcacca

SEQ ID NO: 823927 - DNA, 33 bp, Homo sapien
aggacaccacatgaacaaaaggtgcttgccagg

SEQ ID NO: 823928 - DNA, 33 bp, Homo sapien
aggacaccacatgaacgaaaggtgcttgccagg

SEQ ID NO: 823929 - DNA, 33 bp, Homo sapien
ctgtgaaggtaagggacggtggtcagcctggca

SEQ ID NO: 823930 - DNA, 33 bp, Homo sapien
ctgtgaaggtaagggatggtggtcagcctggca

SEQ ID NO: 823931 - DNA, 33 bp, Homo sapien
caagggagctaaggcagctttctgacacatggt

SEQ ID NO: 823932 - DNA, 33 bp, Homo sapien
caagggagctaaggcatctttctgacacatggt

SEQ ID NO: 823933 - DNA, 33 bp, Homo sapien
attacccttaaaagtacacctcccagtgaatcc

SEQ ID NO: 823934 - DNA, 33 bp, Homo sapien
attacccttaaaagtatacctcccagtgaatcc

SEQ ID NO: 823935 - DNA, 33 bp, Homo sapien
acgaacgaaaaagcagcagaagctgaattgcag

SEQ ID NO: 823936 - DNA, 33 bp, Homo sapien
acgaacgaaaaagcagtagaagctgaattgcag

SEQ ID NO: 823937 - DNA, 33 bp, Homo sapien
gtacaaattcaatgtacagtatcataccgatat

SEQ ID NO: 823938 - DNA, 33 bp, Homo sapien
gtacaaattcaatgtatagtatcataccgatat

SEQ ID NO: 823939 - DNA, 33 bp, Homo sapien
ggagaaatgaggtagaaaaggacattatgaata

SEQ ID NO: 823940 - DNA, 33 bp, Homo sapien
ggagaaatgaggtagagaaggacattatgaata

SEQ ID NO: 823941 - DNA, 33 bp, Homo sapien
aatgtgatttcaacacagtggatgataaagagc

SEQ ID NO: 823942 - DNA, 33 bp, Homo sapien
aatgtgatttcaacacggtggatgataaagagc

SEQ ID NO: 823943 - DNA, 33 bp, Homo sapien
cagtctagcagagagaaagaattcctcctttgt

SEQ ID NO: 823944 - DNA, 33 bp, Homo sapien
cagtctagcagagagagagaattcctcctttgt

SEQ ID NO: 823945 - DNA, 33 bp, Homo sapien
tcaaaaataccttccacgcatcagaattttcta

SEQ ID NO: 823946 - DNA, 33 bp, Homo sapien
tcaaaaataccttccatgcatcagaattttcta

SEQ ID NO: 823947 - DNA, 33 bp, Homo sapien
gtattttaaagtgtcgcaaccagtttgaatatc

SEQ ID NO: 823948 - DNA, 33 bp, Homo sapien
gtattttaaagtgtcgtaaccagtttgaatatc

SEQ ID NO: 823949 - DNA, 33 bp, Homo sapien
tgctgagcattttctaaaagctatgcatcttgt

SEQ ID NO: 823950 - DNA, 33 bp, Homo sapien
tgctgagcattttctagaagctatgcatcttgt

SEQ ID NO: 823951 - DNA, 33 bp, Homo sapien
ttattataaatgaaggcactttccttgaatgtt

SEQ ID NO: 823952 - DNA, 33 bp, Homo sapien
ttattataaatgaaggtactttccttgaatgtt

SEQ ID NO: 823953 - DNA, 33 bp, Homo sapien
ttctttagatactgatgaactaagtgacttttt

SEQ ID NO: 823954 - DNA, 33 bp, Homo sapien
ttctttagatactgattaactaagtgacttttt

SEQ ID NO: 823955 - DNA, 33 bp, Homo sapien
ttacttaagctcttgtcaacatcggctcatcca

SEQ ID NO: 823956 - DNA, 33 bp, Homo sapien
ttacttaagctcttgttaacatcggctcatcca

SEQ ID NO: 823957 - DNA, 33 bp, Homo sapien
attcccgatagcgatcaccgaaaagcttttaag

SEQ ID NO: 823958 - DNA, 33 bp, Homo sapien
attcccgatagcgatcgccgaaaagcttttaag

SEQ ID NO: 823959 - DNA, 33 bp, Homo sapien
ctgaaactgtcctaaaagtttatgtgattgaat

SEQ ID NO: 823960 - DNA, 33 bp, Homo sapien
ctgaaactgtcctaaaggtttatgtgattgaat

SEQ ID NO: 823961 - DNA, 33 bp, Homo sapien
gttctctacaatgaaaatattatacaatgagag

SEQ ID NO: 823962 - DNA, 33 bp, Homo sapien
gttctctacaatgaaactattatacaatgagag

SEQ ID NO: 823963 - DNA, 33 bp, Homo sapien
caaaattggtgtttcacgtattgattatgtaag

SEQ ID NO: 823964 - DNA, 33 bp, Homo sapien
caaaattggtgtttcaggtattgattatgtaag

SEQ ID NO: 823965 - DNA, 33 bp, Homo sapien
cttccattattaaagaagagcttgctagactgt

SEQ ID NO: 823966 - DNA, 33 bp, Homo sapien
cttccattattaaagaggagcttgctagactgt

SEQ ID NO: 823967 - DNA, 33 bp, Homo sapien
ggtttgcattatttgaataagtaggaggtttac

SEQ ID NO: 823968 - DNA, 33 bp, Homo sapien
ggtttgcattatttgagtaagtaggaggtttac

SEQ ID NO: 823969 - DNA, 33 bp, Homo sapien
catgcaaaacaaataaatcagttaaagacagca

SEQ ID NO: 823970 - DNA, 33 bp, Homo sapien
catgcaaaacaaataattcagttaaagacagca

SEQ ID NO: 823971 - DNA, 33 bp, Homo sapien
gtaagcccttaataaacagcagttctcttcaag

SEQ ID NO: 823972 - DNA, 33 bp, Homo sapien
gtaagcccttaataaatagcagttctcttcaag

SEQ ID NO: 823973 - DNA, 33 bp, Homo sapien
ggaaatgagcatgaatcagttaaggaacacact

SEQ ID NO: 823974 - DNA, 33 bp, Homo sapien
ggaaatgagcatgaattagttaaggaacacact

SEQ ID NO: 823975 - DNA, 33 bp, Homo sapien
atgtggtcttctgctacagtggcaaacacaagt

SEQ ID NO: 823976 - DNA, 33 bp, Homo sapien
atgtggtcttctgctagagtggcaaacacaagt

SEQ ID NO: 823977 - DNA, 33 bp, Homo sapien
aaatgaaatcaacttacggcaaatactgttttc

SEQ ID NO: 823978 - DNA, 33 bp, Homo sapien
aaatgaaatcaacttatggcaaatactgttttc

SEQ ID NO: 823979 - DNA, 33 bp, Homo sapien
accacattgttacattgaaagcatcacactagt

SEQ ID NO: 823980 - DNA, 33 bp, Homo sapien
accacattgttacatttaaagcatcacactagt

SEQ ID NO: 823981 - DNA, 33 bp, Homo sapien
aaacagtacaagcagtaactattgcaccagcca

SEQ ID NO: 823982 - DNA, 33 bp, Homo sapien
aaacagtacaagcagtcactattgcaccagcca

SEQ ID NO: 823983 - DNA, 33 bp, Homo sapien
gttatggtttctttccactctagataagggttg

SEQ ID NO: 823984 - DNA, 33 bp, Homo sapien
gttatggtttctttccgctctagataagggttg

SEQ ID NO: 823985 - DNA, 33 bp, Homo sapien
ccccttcatggtacccactgcacagatagatgt

SEQ ID NO: 823986 - DNA, 33 bp, Homo sapien
ccccttcatggtacccgctgcacagatagatgt

SEQ ID NO: 823987 - DNA, 33 bp, Homo sapien
cacaggagaaagcctacatgaccttaggtatgg

SEQ ID NO: 823988 - DNA, 33 bp, Homo sapien
cacaggagaaagcctatatgaccttaggtatgg

SEQ ID NO: 823989 - DNA, 33 bp, Homo sapien
atgactttttagatacagctccaatggtaaaat

SEQ ID NO: 823990 - DNA, 33 bp, Homo sapien
atgactttttagatacggctccaatggtaaaat

SEQ ID NO: 823991 - DNA, 33 bp, Homo sapien
aaaggttggatgaaagacttgagggaaaaaaca

SEQ ID NO: 823992 - DNA, 33 bp, Homo sapien
aaaggttggatgaaagtcttgagggaaaaaaca

SEQ ID NO: 823993 - DNA, 33 bp, Homo sapien
tgatggctgaagagttaaacgacaaagatcagc

SEQ ID NO: 823994 - DNA, 33 bp, Homo sapien
tgatggctgaagagttcaacgacaaagatcagc

SEQ ID NO: 823995 - DNA, 33 bp, Homo sapien
tcatttaaaaactacgacgactccagccagtca

SEQ ID NO: 823996 - DNA, 33 bp, Homo sapien
tcatttaaaaactacggcgactccagccagtca

SEQ ID NO: 823997 - DNA, 33 bp, Homo sapien
attaagtgctagaggaaaatggagacataattc

SEQ ID NO: 823998 - DNA, 33 bp, Homo sapien
attaagtgctagaggagaatggagacataattc

SEQ ID NO: 823999 - DNA, 33 bp, Homo sapien
tttagggaaaatcccccacccataatagctgat

SEQ ID NO: 824000 - DNA, 33 bp, Homo sapien
tttagggaaaatcccctacccataatagctgat

SEQ ID NO: 824001 - DNA, 33 bp, Homo sapien
aagaacttgaagcctggagaagttaaaatcact

SEQ ID NO: 824002 - DNA, 33 bp, Homo sapien
aagaacttgaagcctgtagaagttaaaatcact

SEQ ID NO: 824003 - DNA, 33 bp, Homo sapien
atcaatatgattttcacactccttttcattgac

SEQ ID NO: 824004 - DNA, 33 bp, Homo sapien
atcaatatgattttcatactccttttcattgac

SEQ ID NO: 824005 - DNA, 33 bp, Homo sapien
gcccttcgtactgtgaaacttttggaagaatgc

SEQ ID NO: 824006 - DNA, 33 bp, Homo sapien
gcccttcgtactgtgacacttttggaagaatgc

SEQ ID NO: 824007 - DNA, 33 bp, Homo sapien
atgtcaattccatatcccagtcaatagtcttat

SEQ ID NO: 824008 - DNA, 33 bp, Homo sapien
atgtcaattccatatctcagtcaatagtcttat

SEQ ID NO: 824009 - DNA, 33 bp, Homo sapien
tacccagtggaataaactcttctgcaatagaat

SEQ ID NO: 824010 - DNA, 33 bp, Homo sapien
tacccagtggaataaattcttctgcaatagaat

SEQ ID NO: 824011 - DNA, 33 bp, Homo sapien
caaagcttgtttctcacagataccccaagtatt

SEQ ID NO: 824012 - DNA, 33 bp, Homo sapien
caaagcttgtttctcatagataccccaagtatt

SEQ ID NO: 824013 - DNA, 33 bp, Homo sapien
tagaattctttttgaacgaccaagtaggtatgc

SEQ ID NO: 824014 - DNA, 33 bp, Homo sapien
tagaattctttttgaatgaccaagtaggtatgc

SEQ ID NO: 824015 - DNA, 33 bp, Homo sapien
tttgatgaaagacaacaaggaggaacacagaaa

SEQ ID NO: 824016 - DNA, 33 bp, Homo sapien
tttgatgaaagacaacgaggaggaacacagaaa

SEQ ID NO: 824017 - DNA, 33 bp, Homo sapien
ctgagtcttgaatgcacctgtttaaaactcgtc

SEQ ID NO: 824018 - DNA, 33 bp, Homo sapien
ctgagtcttgaatgcatctgtttaaaactcgtc

SEQ ID NO: 824019 - DNA, 33 bp, Homo sapien
tcattgttactcttcacggaatcaatgtggttt

SEQ ID NO: 824020 - DNA, 33 bp, Homo sapien
tcattgttactcttcatggaatcaatgtggttt

SEQ ID NO: 824021 - DNA, 33 bp, Homo sapien
ctggacaagcttaagaacagtcttgggccagca

SEQ ID NO: 824022 - DNA, 33 bp, Homo sapien
ctggacaagcttaagatcagtcttgggccagca

SEQ ID NO: 824023 - DNA, 33 bp, Homo sapien
ggccaggctctaggccagaaggagttgggggct

SEQ ID NO: 824024 - DNA, 33 bp, Homo sapien
ggccaggctctaggccggaaggagttgggggct

SEQ ID NO: 824025 - DNA, 33 bp, Homo sapien
tggtgatatttgtttaaggttgcttgagtatag

SEQ ID NO: 824026 - DNA, 33 bp, Homo sapien
tggtgatatttgtttagggttgcttgagtatag

SEQ ID NO: 824027 - DNA, 33 bp, Homo sapien
agtgaagcattgcaatcatccgcctttcaaaca

SEQ ID NO: 824028 - DNA, 33 bp, Homo sapien
agtgaagcattgcaattatccgcctttcaaaca

SEQ ID NO: 824029 - DNA, 33 bp, Homo sapien
atcctcctgcctcacactctcaagctaatgttt

SEQ ID NO: 824030 - DNA, 33 bp, Homo sapien
atcctcctgcctcacattctcaagctaatgttt

SEQ ID NO: 824031 - DNA, 33 bp, Homo sapien
ctaaaagcctgaaccactgaagaatagtcctgg

SEQ ID NO: 824032 - DNA, 33 bp, Homo sapien
ctaaaagcctgaaccattgaagaatagtcctgg

SEQ ID NO: 824033 - DNA, 33 bp, Homo sapien
tctaccttttggtttccctgctcagaggcaatc

SEQ ID NO: 824034 - DNA, 33 bp, Homo sapien
tctaccttttggtttctctgctcagaggcaatc

SEQ ID NO: 824035 - DNA, 33 bp, Homo sapien
tcttttcaaacactcaaagagatgaaggtctct

SEQ ID NO: 824036 - DNA, 33 bp, Homo sapien
tcttttcaaacactcagagagatgaaggtctct

SEQ ID NO: 824037 - DNA, 33 bp, Homo sapien
tcattattaaatgagaccattcttggagggatt

SEQ ID NO: 824038 - DNA, 33 bp, Homo sapien
tcattattaaatgagatcattcttggagggatt

SEQ ID NO: 824039 - DNA, 33 bp, Homo sapien
cagtcatgggactgcacctattaaaccataggt

SEQ ID NO: 824040 - DNA, 33 bp, Homo sapien
cagtcatgggactgcagctattaaaccataggt

SEQ ID NO: 824041 - DNA, 33 bp, Homo sapien
aaaaccttccaacctgccacaagagttgcaata

SEQ ID NO: 824042 - DNA, 33 bp, Homo sapien
aaaaccttccaacctgtcacaagagttgcaata

SEQ ID NO: 824043 - DNA, 33 bp, Homo sapien
attcctgtatattttccctgctgttacaatcac

SEQ ID NO: 824044 - DNA, 33 bp, Homo sapien
attcctgtatattttctctgctgttacaatcac

SEQ ID NO: 824045 - DNA, 33 bp, Homo sapien
ctgtgtcagtgaaagactacaaagggaaagcaa

SEQ ID NO: 824046 - DNA, 33 bp, Homo sapien
ctgtgtcagtgaaagattacaaagggaaagcaa

SEQ ID NO: 824047 - DNA, 33 bp, Homo sapien
gaagggtttaacatcaaccattctagtcttttc

SEQ ID NO: 824048 - DNA, 33 bp, Homo sapien
gaagggtttaacatcagccattctagtcttttc

SEQ ID NO: 824049 - DNA, 33 bp, Homo sapien
taatggcctaaatctgaaacaagagaaagaact

SEQ ID NO: 824050 - DNA, 33 bp, Homo sapien
taatggcctaaatctgtaacaagagaaagaact

SEQ ID NO: 824051 - DNA, 33 bp, Homo sapien
ctttcgcatctcagcaactggagtgtgcaggga

SEQ ID NO: 824052 - DNA, 33 bp, Homo sapien
ctttcgcatctcagcatctggagtgtgcaggga

SEQ ID NO: 824053 - DNA, 33 bp, Homo sapien
ttcttggagagatggacgttaaagaagcgtcaa

SEQ ID NO: 824054 - DNA, 33 bp, Homo sapien
ttcttggagagatggaggttaaagaagcgtcaa

SEQ ID NO: 824055 - DNA, 33 bp, Homo sapien
caaacattttctccataaccagatggtctaata

SEQ ID NO: 824056 - DNA, 33 bp, Homo sapien
caaacattttctccattaccagatggtctaata

SEQ ID NO: 824057 - DNA, 33 bp, Homo sapien
tgggctacacaaataacgccaataatattcagt

SEQ ID NO: 824058 - DNA, 33 bp, Homo sapien
tgggctacacaaataatgccaataatattcagt

SEQ ID NO: 824059 - DNA, 33 bp, Homo sapien
actggctcaacaaaataatatccactgttagtc

SEQ ID NO: 824060 - DNA, 33 bp, Homo sapien
actggctcaacaaaattatatccactgttagtc

SEQ ID NO: 824061 - DNA, 33 bp, Homo sapien
ctctgtccactggagaaaagtgcttgccacaga

SEQ ID NO: 824062 - DNA, 33 bp, Homo sapien
ctctgtccactggagagaagtgcttgccacaga

SEQ ID NO: 824063 - DNA, 33 bp, Homo sapien
agagaatagaagaaacacgttcagtctgtattt

SEQ ID NO: 824064 - DNA, 33 bp, Homo sapien
agagaatagaagaaacgcgttcagtctgtattt

SEQ ID NO: 824065 - DNA, 33 bp, Homo sapien
ctactgcctttaaggaacctacattctggtgag

SEQ ID NO: 824066 - DNA, 33 bp, Homo sapien
ctactgcctttaaggagcctacattctggtgag

SEQ ID NO: 824067 - DNA, 33 bp, Homo sapien
gagcccgagaagaagcaaaaagtggaagtgaaa

SEQ ID NO: 824068 - DNA, 33 bp, Homo sapien
gagcccgagaagaagcgaaaagtggaagtgaaa

SEQ ID NO: 824069 - DNA, 33 bp, Homo sapien
tcttgtgagattaaaaatttctttctgacataa

SEQ ID NO: 824070 - DNA, 33 bp, Homo sapien
tcttgtgagattaaaattttctttctgacataa

SEQ ID NO: 824071 - DNA, 33 bp, Homo sapien
taattagaagaacaccactacattaaaaacatt

SEQ ID NO: 824072 - DNA, 33 bp, Homo sapien
taattagaagaacaccgctacattaaaaacatt

SEQ ID NO: 824073 - DNA, 33 bp, Homo sapien
gatcagtggtgccacacgtcttccctaccctca

SEQ ID NO: 824074 - DNA, 33 bp, Homo sapien
gatcagtggtgccacatgtcttccctaccctca

SEQ ID NO: 824075 - DNA, 33 bp, Homo sapien
actctggaaaggaacacaagtggatataaaaag

SEQ ID NO: 824076 - DNA, 33 bp, Homo sapien
actctggaaaggaacataagtggatataaaaag

SEQ ID NO: 824077 - DNA, 33 bp, Homo sapien
ccatagcagcagctgaaattagaggcaagccca

SEQ ID NO: 824078 - DNA, 33 bp, Homo sapien
ccatagcagcagctgatattagaggcaagccca

SEQ ID NO: 824079 - DNA, 33 bp, Homo sapien
agggtcactgagtacccgatttactgacatggg

SEQ ID NO: 824080 - DNA, 33 bp, Homo sapien
agggtcactgagtacctgatttactgacatggg

SEQ ID NO: 824081 - DNA, 33 bp, Homo sapien
agctggaagtgaggaacaggtaactctgctgct

SEQ ID NO: 824082 - DNA, 33 bp, Homo sapien
agctggaagtgaggaataggtaactctgctgct

SEQ ID NO: 824083 - DNA, 33 bp, Homo sapien
ctgtagtactttttacaattggatctacagtta

SEQ ID NO: 824084 - DNA, 33 bp, Homo sapien
ctgtagtactttttacgattggatctacagtta

SEQ ID NO: 824085 - DNA, 33 bp, Homo sapien
tggatggatctcatccaatcaactgaagacctg

SEQ ID NO: 824086 - DNA, 33 bp, Homo sapien
tggatggatctcatccgatcaactgaagacctg

SEQ ID NO: 824087 - DNA, 33 bp, Homo sapien
tattaaatttcttataagcggcatgtctggagc

SEQ ID NO: 824088 - DNA, 33 bp, Homo sapien
tattaaatttcttataggcggcatgtctggagc

SEQ ID NO: 824089 - DNA, 33 bp, Homo sapien
ggcaggaatagcacacactacctgccactgcca

SEQ ID NO: 824090 - DNA, 33 bp, Homo sapien
ggcaggaatagcacacgctacctgccactgcca

SEQ ID NO: 824091 - DNA, 33 bp, Homo sapien
atggacccgttttctccagtggtgcttgaaacg

SEQ ID NO: 824092 - DNA, 33 bp, Homo sapien
atggacccgttttctctagtggtgcttgaaacg

SEQ ID NO: 824093 - DNA, 33 bp, Homo sapien
aggtgactagaaaataaagacggggccaggcat

SEQ ID NO: 824094 - DNA, 33 bp, Homo sapien
aggtgactagaaaatagagacggggccaggcat

SEQ ID NO: 824095 - DNA, 33 bp, Homo sapien
gaattaagttggaaatcagtagcagaaaacgcc

SEQ ID NO: 824096 - DNA, 33 bp, Homo sapien
gaattaagttggaaattagtagcagaaaacgcc

SEQ ID NO: 824097 - DNA, 33 bp, Homo sapien
gcaagcttagtgctaactaaaatcacaaggaaa

SEQ ID NO: 824098 - DNA, 33 bp, Homo sapien
gcaagcttagtgctaattaaaatcacaaggaaa

SEQ ID NO: 824099 - DNA, 33 bp, Homo sapien
gcaatcgcggggctcacatcattagtttcccct

SEQ ID NO: 824100 - DNA, 33 bp, Homo sapien
gcaatcgcggggctcatatcattagtttcccct

SEQ ID NO: 824101 - DNA, 33 bp, Homo sapien
cgcataggatgcagacagagaaccctgatgctt

SEQ ID NO: 824102 - DNA, 33 bp, Homo sapien
cgcataggatgcagacggagaaccctgatgctt

SEQ ID NO: 824103 - DNA, 33 bp, Homo sapien
gggcaaaataaacttgaaattcactatgttagc

SEQ ID NO: 824104 - DNA, 33 bp, Homo sapien
gggcaaaataaacttggaattcactatgttagc

SEQ ID NO: 824105 - DNA, 33 bp, Homo sapien
tctaatggatttagcacaggtggcagcaaagga

SEQ ID NO: 824106 - DNA, 33 bp, Homo sapien
tctaatggatttagcataggtggcagcaaagga

SEQ ID NO: 824107 - DNA, 33 bp, Homo sapien
aattcagtcctcaaaacggatggagggtaattg

SEQ ID NO: 824108 - DNA, 33 bp, Homo sapien
aattcagtcctcaaaatggatggagggtaattg

SEQ ID NO: 824109 - DNA, 33 bp, Homo sapien
gggacacaggtttgagcagcaacactagacatg

SEQ ID NO: 824110 - DNA, 33 bp, Homo sapien
gggacacaggtttgagtagcaacactagacatg

SEQ ID NO: 824111 - DNA, 33 bp, Homo sapien
atgagaagtcttcttgcaaggaatacttgaccc

SEQ ID NO: 824112 - DNA, 33 bp, Homo sapien
atgagaagtcttcttgtaaggaatacttgaccc

SEQ ID NO: 824113 - DNA, 33 bp, Homo sapien
atggattaaagcacggaacagggaaactagtta

SEQ ID NO: 824114 - DNA, 33 bp, Homo sapien
atggattaaagcacgggacagggaaactagtta

SEQ ID NO: 824115 - DNA, 33 bp, Homo sapien
tagtacaacgttgtacaggagtccagatgagtg

SEQ ID NO: 824116 - DNA, 33 bp, Homo sapien
tagtacaacgttgtacgggagtccagatgagtg

SEQ ID NO: 824117 - DNA, 33 bp, Homo sapien
taaaaggtcactaggaatatacaacacagcact

SEQ ID NO: 824118 - DNA, 33 bp, Homo sapien
taaaaggtcactaggattatacaacacagcact

SEQ ID NO: 824119 - DNA, 33 bp, Homo sapien
ttcttaagagattgaaataggctagtatataaa

SEQ ID NO: 824120 - DNA, 33 bp, Homo sapien
ttcttaagagattgaagtaggctagtatataaa

SEQ ID NO: 824121 - DNA, 33 bp, Homo sapien
cctgaaacgcttgaagaaaaacgatcagaaaaa

SEQ ID NO: 824122 - DNA, 33 bp, Homo sapien
cctgaaacgcttgaaggaaaacgatcagaaaaa

SEQ ID NO: 824123 - DNA, 33 bp, Homo sapien; identical to SEQ ID NO: 824121

SEQ ID NO: 824124 - DNA, 33 bp, Homo sapien; identical to SEQ ID NO: 824122

SEQ ID NO: 824125 - DNA, 33 bp, Homo sapien
cccacatttacttcatcatatgatatcaacact

SEQ ID NO: 824126 - DNA, 33 bp, Homo sapien
cccacatttacttcattatatgatatcaacact

SEQ ID NO: 824127 - DNA, 33 bp, Homo sapien
gcttatttaatactcacaacttctctgggaact

SEQ ID NO: 824128 - DNA, 33 bp, Homo sapien
gcttatttaatactcataacttctctgggaact

SEQ ID NO: 824129 - DNA, 33 bp, Homo sapien
aactcaaagcaaaaaaaccgaaaatgtatgaca

SEQ ID NO: 824130 - DNA, 33 bp, Homo sapien
aactcaaagcaaaaaagccgaaaatgtatgaca

SEQ ID NO: 824131 - DNA, 33 bp, Homo sapien
tgacagactcataaaacttgccatcaatcaatc

SEQ ID NO: 824132 - DNA, 33 bp, Homo sapien
tgacagactcataaaagttgccatcaatcaatc

SEQ ID NO: 824133 - DNA, 33 bp, Homo sapien
agtgcagatgtgctaaagaacttgttgattttg

SEQ ID NO: 824134 - DNA, 33 bp, Homo sapien
agtgcagatgtgctaaggaacttgttgattttg

SEQ ID NO: 824135 - DNA, 33 bp, Homo sapien
cctcaacattggaagaaggaaacagaagagctg

SEQ ID NO: 824136 - DNA, 33 bp, Homo sapien
cctcaacattggaagagggaaacagaagagctg

SEQ ID NO: 824137 - DNA, 33 bp, Homo sapien
ggtcatagagattgaaaggtctatttaatcata

SEQ ID NO: 824138 - DNA, 33 bp, Homo sapien
ggtcatagagattgaagggtctatttaatcata

SEQ ID NO: 824139 - DNA, 33 bp, Homo sapien
aatcatccagcccaaactgtcaatcgcgctgaa

SEQ ID NO: 824140 - DNA, 33 bp, Homo sapien
aatcatccagcccaaagtgtcaatcgcgctgaa

SEQ ID NO: 824141 - DNA, 33 bp, Homo sapien
cacctgagaagaggaaacgttttacactggatg

SEQ ID NO: 824142 - DNA, 33 bp, Homo sapien
cacctgagaagaggaaccgttttacactggatg

SEQ ID NO: 824143 - DNA, 33 bp, Homo sapien
tgtaaattttgtttaacaccaggagaattgcct

SEQ ID NO: 824144 - DNA, 33 bp, Homo sapien
tgtaaattttgtttaataccaggagaattgcct

SEQ ID NO: 824145 - DNA, 33 bp, Homo sapien
ttttaaatgaacaataaaggcaggtaaataata

SEQ ID NO: 824146 - DNA, 33 bp, Homo sapien
ttttaaatgaacaatagaggcaggtaaataata

SEQ ID NO: 824147 - DNA, 33 bp, Homo sapien
ttccaggtaagataaacgcagacaacaggccca

SEQ ID NO: 824148 - DNA, 33 bp, Homo sapien
ttccaggtaagataaatgcagacaacaggccca

SEQ ID NO: 824149 - DNA, 33 bp, Homo sapien
atcagaaagtatctaacgtgtggatttctttta

SEQ ID NO: 824150 - DNA, 33 bp, Homo sapien
atcagaaagtatctaatgtgtggatttctttta

SEQ ID NO: 824151 - DNA, 33 bp, Homo sapien
gcccacatactttggcacctggtcatctttctc

SEQ ID NO: 824152 - DNA, 33 bp, Homo sapien
gcccacatactttggcgcctggtcatctttctc

SEQ ID NO: 824153 - DNA, 33 bp, Homo sapien
tgtggtattgacataacagtaccaatgacatag

SEQ ID NO: 824154 - DNA, 33 bp, Homo sapien
tgtggtattgacataatagtaccaatgacatag

SEQ ID NO: 824155 - DNA, 33 bp, Homo sapien
gatgatgatcttagaacgcacgttttgggctga

SEQ ID NO: 824156 - DNA, 33 bp, Homo sapien
gatgatgatcttagaatgcacgttttgggctga

SEQ ID NO: 824157 - DNA, 33 bp, Homo sapien
aaagtgaagaactctacgactccctcatgaatt

SEQ ID NO: 824158 - DNA, 33 bp, Homo sapien
aaagtgaagaactctatgactccctcatgaatt

SEQ ID NO: 824159 - DNA, 33 bp, Homo sapien
gatttagtccctaataagcatacagatgaatag

SEQ ID NO: 824160 - DNA, 33 bp, Homo sapien
gatttagtccctaataggcatacagatgaatag

SEQ ID NO: 824161 - DNA, 33 bp, Homo sapien
tctgaaagaaatcccacaaagttgaaataagca

SEQ ID NO: 824162 - DNA, 33 bp, Homo sapien
tctgaaagaaatcccagaaagttgaaataagca

SEQ ID NO: 824163 - DNA, 33 bp, Homo sapien
gtcctgcttactaataccttgtctcacgtccag

SEQ ID NO: 824164 - DNA, 33 bp, Homo sapien
gtcctgcttactaatatcttgtctcacgtccag

SEQ ID NO: 824165 - DNA, 33 bp, Homo sapien
acttgggagatacacaaaggttttccactacac

SEQ ID NO: 824166 - DNA, 33 bp, Homo sapien
acttgggagatacacagaggttttccactacac

SEQ ID NO: 824167 - DNA, 33 bp, Homo sapien
ctgacactagggtgaccggaaattgtatacggg

SEQ ID NO: 824168 - DNA, 33 bp, Homo sapien
ctgacactagggtgacgggaaattgtatacggg

SEQ ID NO: 824169 - DNA, 33 bp, Homo sapien
atttaatgagtaaaataaagttaatgcatggca

SEQ ID NO: 824170 - DNA, 33 bp, Homo sapien
atttaatgagtaaaatcaagttaatgcatggca

SEQ ID NO: 824171 - DNA, 33 bp, Homo sapien
attcactgaacaaatacctactgagaatctacc

SEQ ID NO: 824172 - DNA, 33 bp, Homo sapien
attcactgaacaaatatctactgagaatctacc

SEQ ID NO: 824173 - DNA, 33 bp, Homo sapien
ataagggttatgaaaacgcttgtaagtgaaaaa

SEQ ID NO: 824174 - DNA, 33 bp, Homo sapien
ataagggttatgaaaatgcttgtaagtgaaaaa

SEQ ID NO: 824175 - DNA, 33 bp, Homo sapien
ctcagcatgaaaatcacagaaaacatctgaatt

SEQ ID NO: 824176 - DNA, 33 bp, Homo sapien
ctcagcatgaaaatcatagaaaacatctgaatt

SEQ ID NO: 824177 - DNA, 33 bp, Homo sapien
tcttcaagatatacacactccttcatctggctt

SEQ ID NO: 824178 - DNA, 33 bp, Homo sapien
tcttcaagatatacacgctccttcatctggctt

SEQ ID NO: 824179 - DNA, 33 bp, Homo sapien
ttgggtacagtcccacagatggttattactgtc

SEQ ID NO: 824180 - DNA, 33 bp, Homo sapien
ttgggtacagtcccacggatggttattactgtc

SEQ ID NO: 824181 - DNA, 33 bp, Homo sapien
aactaaagcaagaatacgtgtggatatgttggt

SEQ ID NO: 824182 - DNA, 33 bp, Homo sapien
aactaaagcaagaatatgtgtggatatgttggt

SEQ ID NO: 824183 - DNA, 33 bp, Homo sapien
aacgagatgagactctaaagatgtcaacgtaaa

SEQ ID NO: 824184 - DNA, 33 bp, Homo sapien
aacgagatgagactctgaagatgtcaacgtaaa

SEQ ID NO: 824185 - DNA, 33 bp, Homo sapien
ctccatcctctgacaaatcaaaagcatcgcaat

SEQ ID NO: 824186 - DNA, 33 bp, Homo sapien
ctccatcctctgacaagtcaaaagcatcgcaat

SEQ ID NO: 824187 - DNA, 33 bp, Homo sapien
tttggggtcataaaacacaatctttggaaatat

SEQ ID NO: 824188 - DNA, 33 bp, Homo sapien
tttggggtcataaaacgcaatctttggaaatat

SEQ ID NO: 824189 - DNA, 33 bp, Homo sapien
acaaaagatgaaggcacgggggaaaatatcaag

SEQ ID NO: 824190 - DNA, 33 bp, Homo sapien
acaaaagatgaaggcatgggggaaaatatcaag

SEQ ID NO: 824191 - DNA, 33 bp, Homo sapien
aaatccggaatcataaatcttgcacttgattat

SEQ ID NO: 824192 - DNA, 33 bp, Homo sapien
aaatccggaatcataagtcttgcacttgattat

SEQ ID NO: 824193 - DNA, 33 bp, Homo sapien
tggggtttactaccaccgtgaatgtccaatcca

SEQ ID NO: 824194 - DNA, 33 bp, Homo sapien
tggggtttactaccactgtgaatgtccaatcca

SEQ ID NO: 824195 - DNA, 33 bp, Homo sapien
gtaaagagtgagagaacattaaagcctgccagg

SEQ ID NO: 824196 - DNA, 33 bp, Homo sapien
gtaaagagtgagagaatattaaagcctgccagg

SEQ ID NO: 824197 - DNA, 33 bp, Homo sapien
taccaacactgtccaacagaactccctgtgacg

SEQ ID NO: 824198 - DNA, 33 bp, Homo sapien
taccaacactgtccaatagaactccctgtgacg

SEQ ID NO: 824199 - DNA, 33 bp, Homo sapien
acctgtaacaatagccaagaagtaagtaaaaac

SEQ ID NO: 824200 - DNA, 33 bp, Homo sapien
acctgtaacaatagcctagaagtaagtaaaaac

SEQ ID NO: 824201 - DNA, 33 bp, Homo sapien
ctacagccaggacttcaacatcactcaattttg

SEQ ID NO: 824202 - DNA, 33 bp, Homo sapien
ctacagccaggacttccacatcactcaattttg

SEQ ID NO: 824203 - DNA, 33 bp, Homo sapien
gaagcaatttactatacacagcccacaattcca

SEQ ID NO: 824204 - DNA, 33 bp, Homo sapien
gaagcaatttactatatacagcccacaattcca

SEQ ID NO: 824205 - DNA, 33 bp, Homo sapien
cagaaagtaactgtaacggactttttggtggcc

SEQ ID NO: 824206 - DNA, 33 bp, Homo sapien
cagaaagtaactgtaatggactttttggtggcc

SEQ ID NO: 824207 - DNA, 33 bp, Homo sapien
ctaaatgtttcaggaaagaccttgcaaggacac

SEQ ID NO: 824208 - DNA, 33 bp, Homo sapien
ctaaatgtttcaggaaggaccttgcaaggacac

SEQ ID NO: 824209 - DNA, 33 bp, Homo sapien
atttttaaacacactccaacaagccactaggca

SEQ ID NO: 824210 - DNA, 33 bp, Homo sapien
atttttaaacacactcgaacaagccactaggca

SEQ ID NO: 824211 - DNA, 33 bp, Homo sapien
gggtcagaagaaataccatgagggctacatcaa

SEQ ID NO: 824212 - DNA, 33 bp, Homo sapien
gggtcagaagaaatactatgagggctacatcaa

SEQ ID NO: 824213 - DNA, 33 bp, Homo sapien
tgagtaaaatgtccggcaagattagtattttgg

SEQ ID NO: 824214 - DNA, 33 bp, Homo sapien
tgagtaaaatgtccggtaagattagtattttgg

SEQ ID NO: 824215 - DNA, 33 bp, Homo sapien
aactcatctgtaacaactgttggttaatttcat

SEQ ID NO: 824216 - DNA, 33 bp, Homo sapien
aactcatctgtaacaattgttggttaatttcat

SEQ ID NO: 824217 - DNA, 33 bp, Homo sapien
tctgtctctctcttaactaaatctctgaaataa

SEQ ID NO: 824218 - DNA, 33 bp, Homo sapien
tctgtctctctcttaagtaaatctctgaaataa

SEQ ID NO: 824219 - DNA, 33 bp, Homo sapien
attgataatagcttacaaaaaacacataaaaat

SEQ ID NO: 824220 - DNA, 33 bp, Homo sapien
attgataatagcttacgaaaaacacataaaaat

SEQ ID NO: 824221 - DNA, 33 bp, Homo sapien
gaaacataagctgagaaacttggaagacaaagg

SEQ ID NO: 824222 - DNA, 33 bp, Homo sapien
gaaacataagctgagagacttggaagacaaagg

SEQ ID NO: 824223 - DNA, 33 bp, Homo sapien
tcaagcaggagaaagaagaatgagccaaaagca

SEQ ID NO: 824224 - DNA, 33 bp, Homo sapien
tcaagcaggagaaagaggaatgagccaaaagca

SEQ ID NO: 824225 - DNA, 33 bp, Homo sapien
aaactctgcttgattcactatttaagcatttat

SEQ ID NO: 824226 - DNA, 33 bp, Homo sapien
aaactctgcttgattcgctatttaagcatttat

SEQ ID NO: 824227 - DNA, 33 bp, Homo sapien
aaaccactctctccccagcactgtacctttagt

SEQ ID NO: 824228 - DNA, 33 bp, Homo sapien
aaaccactctctcccccgcactgtacctttagt

SEQ ID NO: 824229 - DNA, 33 bp, Homo sapien
ctgagctctctcaagcagccaacttgtgtctcc

SEQ ID NO: 824230 - DNA, 33 bp, Homo sapien
ctgagctctctcaagcggccaacttgtgtctcc

SEQ ID NO: 824231 - DNA, 33 bp, Homo sapien
gagaaaggggatcccgaagcaacctcttcttcc

SEQ ID NO: 824232 - DNA, 33 bp, Homo sapien
gagaaaggggatcccggagcaacctcttcttcc

SEQ ID NO: 824233 - DNA, 33 bp, Homo sapien
caacttatttgtctccaaaagcacaaaagctta

SEQ ID NO: 824234 - DNA, 33 bp, Homo sapien
caacttatttgtctccgaaagcacaaaagctta

SEQ ID NO: 824235 - DNA, 33 bp, Homo sapien
gttgataactatcaaccatatcagagacctata

SEQ ID NO: 824236 - DNA, 33 bp, Homo sapien
gttgataactatcaactatatcagagacctata

SEQ ID NO: 824237 - DNA, 33 bp, Homo sapien
tggacaaatggtaccacgcattttgaaacaaag

SEQ ID NO: 824238 - DNA, 33 bp, Homo sapien
tggacaaatggtaccatgcattttgaaacaaag

SEQ ID NO: 824239 - DNA, 33 bp, Homo sapien
aaacaaagggctccaacgcaacagatttgaaag

SEQ ID NO: 824240 - DNA, 33 bp, Homo sapien
aaacaaagggctccaatgcaacagatttgaaag

SEQ ID NO: 824241 - DNA, 33 bp, Homo sapien
aaactttcagttacaaattaataagttctggag

SEQ ID NO: 824242 - DNA, 33 bp, Homo sapien
aaactttcagttacaagttaataagttctggag

SEQ ID NO: 824243 - DNA, 33 bp, Homo sapien
cagatagctaaaataaagtcttctcctattccc

SEQ ID NO: 824244 - DNA, 33 bp, Homo sapien
cagatagctaaaataaggtcttctcctattccc

SEQ ID NO: 824245 - DNA, 33 bp, Homo sapien
aataaaactcgcaacacgcatttaatgtaaaaa

SEQ ID NO: 824246 - DNA, 33 bp, Homo sapien
aataaaactcgcaacatgcatttaatgtaaaaa

SEQ ID NO: 824247 - DNA, 33 bp, Homo sapien
tttttatctacaaagaaaaatggcttctgcagc

SEQ ID NO: 824248 - DNA, 33 bp, Homo sapien
tttttatctacaaagagaaatggcttctgcagc

SEQ ID NO: 824249 - DNA, 33 bp, Homo sapien
tatatgcgatctctaccgagaagcaagcacaaa

SEQ ID NO: 824250 - DNA, 33 bp, Homo sapien
tatatgcgatctctactgagaagcaagcacaaa

SEQ ID NO: 824251 - DNA, 33 bp, Homo sapien
tttgaagctgggaggaaaaagatggagtagctt

SEQ ID NO: 824252 - DNA, 33 bp, Homo sapien
tttgaagctgggaggagaaagatggagtagctt

SEQ ID NO: 824253 - DNA, 33 bp, Homo sapien
aaatggaatgattatgcactggcattattgctt

SEQ ID NO: 824254 - DNA, 33 bp, Homo sapien
aaatggaatgattatgtactggcattattgctt

SEQ ID NO: 824255 - DNA, 33 bp, Homo sapien
ttgctttaaaacaagccaatctgttaggctagt

SEQ ID NO: 824256 - DNA, 33 bp, Homo sapien
ttgctttaaaacaagcgaatctgttaggctagt

SEQ ID NO: 824257 - DNA, 33 bp, Homo sapien
ctgaaataaactgttacggcgcttgaatttata

SEQ ID NO: 824258 - DNA, 33 bp, Homo sapien
ctgaaataaactgttatggcgcttgaatttata

SEQ ID NO: 824259 - DNA, 33 bp, Homo sapien
tatgatgtgtggaaaacaaaacagttttaaatt

SEQ ID NO: 824260 - DNA, 33 bp, Homo sapien
tatgatgtgtggaaaagaaaacagttttaaatt

SEQ ID NO: 824261 - DNA, 33 bp, Homo sapien
atcacttagttcagttcaaaatcactaccattg

SEQ ID NO: 824262 - DNA, 33 bp, Homo sapien
atcacttagttcagttgaaaatcactaccattg

SEQ ID NO: 824263 - DNA, 33 bp, Homo sapien
agtgattttacacctacacaaagtttaagagaa

SEQ ID NO: 824264 - DNA, 33 bp, Homo sapien
agtgattttacacctatacaaagtttaagagaa

SEQ ID NO: 824265 - DNA, 33 bp, Homo sapien
actcttgagtgacttggaaggattgatgacttc

SEQ ID NO: 824266 - DNA, 33 bp, Homo sapien
actcttgagtgacttgtaaggattgatgacttc

SEQ ID NO: 824267 - DNA, 33 bp, Homo sapien
taagcggtggataatgccacaaatatagctgcc

SEQ ID NO: 824268 - DNA, 33 bp, Homo sapien
taagcggtggataatggcacaaatatagctgcc

SEQ ID NO: 824269 - DNA, 33 bp, Homo sapien
aaaacctcaggtgctacattagtttgcagtatg

SEQ ID NO: 824270 - DNA, 33 bp, Homo sapien
aaaacctcaggtgctatattagtttgcagtatg

SEQ ID NO: 824271 - DNA, 33 bp, Homo sapien
gtttaactgtctagtcaaagtgtcaaacagaaa

SEQ ID NO: 824272 - DNA, 33 bp, Homo sapien
gtttaactgtctagtcgaagtgtcaaacagaaa

SEQ ID NO: 824273 - DNA, 33 bp, Homo sapien
gttctggaagtggatccagggttatttcgcaga

SEQ ID NO: 824274 - DNA, 33 bp, Homo sapien
gttctggaagtggatctagggttatttcgcaga

SEQ ID NO: 824275 - DNA, 33 bp, Homo sapien
ctctttatggttgtcacaataaccttgcaagtt

SEQ ID NO: 824276 - DNA, 33 bp, Homo sapien
ctctttatggttgtcataataaccttgcaagtt

SEQ ID NO: 824277 - DNA, 33 bp, Homo sapien
gtagaaagttcctctgaagttgatcacaaatta

SEQ ID NO: 824278 - DNA, 33 bp, Homo sapien
gtagaaagttcctctggagttgatcacaaatta

SEQ ID NO: 824279 - DNA, 33 bp, Homo sapien
ttcctaggctacgtgaagtcggacctacagaat

SEQ ID NO: 824280 - DNA, 33 bp, Homo sapien
ttcctaggctacgtgaggtcggacctacagaat

SEQ ID NO: 824281 - DNA, 33 bp, Homo sapien
acggaggcacatttaccggactgagtggtccaa

SEQ ID NO: 824282 - DNA, 33 bp, Homo sapien
acggaggcacatttactggactgagtggtccaa

SEQ ID NO: 824283 - DNA, 33 bp, Homo sapien
cctgtctcttggaaaaggtatatctctcgctga

SEQ ID NO: 824284 - DNA, 33 bp, Homo sapien
cctgtctcttggaaaatgtatatctctcgctga

SEQ ID NO: 824285 - DNA, 33 bp, Homo sapien
gacatgtattgaaaagaatgtctctctgaactg

SEQ ID NO: 824286 - DNA, 33 bp, Homo sapien
gacatgtattgaaaaggatgtctctctgaactg

SEQ ID NO: 824287 - DNA, 33 bp, Homo sapien
ggcataagagatagccacctagactcgtcattg

SEQ ID NO: 824288 - DNA, 33 bp, Homo sapien
ggcataagagatagccgcctagactcgtcattg

SEQ ID NO: 824289 - DNA, 33 bp, Homo sapien
ttgcagttactccccacctgtgcattaacataa

SEQ ID NO: 824290 - DNA, 33 bp, Homo sapien
ttgcagttactccccatctgtgcattaacataa

SEQ ID NO: 824291 - DNA, 33 bp, Homo sapien
ctacaaggaaatcaaacagctcaagaagaaaaa

SEQ ID NO: 824292 - DNA, 33 bp, Homo sapien
ctacaaggaaatcaaatagctcaagaagaaaaa

SEQ ID NO: 824293 - DNA, 33 bp, Homo sapien
tggagttaggctcaaactttacattgtaattta

SEQ ID NO: 824294 - DNA, 33 bp, Homo sapien
tggagttaggctcaaagtttacattgtaattta

SEQ ID NO: 824295 - DNA, 33 bp, Homo sapien
agataaaacatttggaccgaaatctgacgagca

SEQ ID NO: 824296 - DNA, 33 bp, Homo sapien
agataaaacatttggatcgaaatctgacgagca

SEQ ID NO: 824297 - DNA, 33 bp, Homo sapien
aaaatacttggttaaaattgaaaggacctagtt

SEQ ID NO: 824298 - DNA, 33 bp, Homo sapien
aaaatacttggttaaagttgaaaggacctagtt

SEQ ID NO: 824299 - DNA, 33 bp, Homo sapien
tctacccaattatatcaaagtctcccagaagcc

SEQ ID NO: 824300 - DNA, 33 bp, Homo sapien
tctacccaattatatcgaagtctcccagaagcc

SEQ ID NO: 824301 - DNA, 33 bp, Homo sapien
cactaatggcccccccagacaggaggctgatga

SEQ ID NO: 824302 - DNA, 33 bp, Homo sapien
cactaatggcccccccggacaggaggctgatga

SEQ ID NO: 824303 - DNA, 33 bp, Homo sapien
ggtttgcctttgtgaacgtcccatatataatca

SEQ ID NO: 824304 - DNA, 33 bp, Homo sapien
ggtttgcctttgtgaatgtcccatatataatca

SEQ ID NO: 824305 - DNA, 33 bp, Homo sapien
aaataggtcatattgaagtaatagtattgtaga

SEQ ID NO: 824306 - DNA, 33 bp, Homo sapien
aaataggtcatattgaggtaatagtattgtaga

SEQ ID NO: 824307 - DNA, 33 bp, Homo sapien
catgtaacaagctaaaatgaatgcctaaaacat

SEQ ID NO: 824308 - DNA, 33 bp, Homo sapien
catgtaacaagctaaagtgaatgcctaaaacat

SEQ ID NO: 824309 - DNA, 33 bp, Homo sapien
cttggagcaagatacaatcattctttatgtcca

SEQ ID NO: 824310 - DNA, 33 bp, Homo sapien
cttggagcaagatacagtcattctttatgtcca

SEQ ID NO: 824311 - DNA, 33 bp, Homo sapien
cagaacaacagttgaccacagaacctgagaaga

SEQ ID NO: 824312 - DNA, 33 bp, Homo sapien
cagaacaacagttgactacagaacctgagaaga

SEQ ID NO: 824313 - DNA, 33 bp, Homo sapien
tgaagaactccttttagcacttgtaggacaggt

SEQ ID NO: 824314 - DNA, 33 bp, Homo sapien
tgaagaactccttttatcacttgtaggacaggt

SEQ ID NO: 824315 - DNA, 33 bp, Homo sapien
cagccaggtatgctcaaataaattagggtttca

SEQ ID NO: 824316 - DNA, 33 bp, Homo sapien
cagccaggtatgctcatataaattagggtttca

SEQ ID NO: 824317 - DNA, 33 bp, Homo sapien
cagataccgagtatccacaagccaccctcatta

SEQ ID NO: 824318 - DNA, 33 bp, Homo sapien
cagataccgagtatccgcaagccaccctcatta

SEQ ID NO: 824319 - DNA, 33 bp, Homo sapien
aaccatagtgagccacaaggcaccagggatgcg

SEQ ID NO: 824320 - DNA, 33 bp, Homo sapien
aaccatagtgagccacgaggcaccagggatgcg

SEQ ID NO: 824321 - DNA, 33 bp, Homo sapien
tctgcgtatatcgccactggatagttgagatcg

SEQ ID NO: 824322 - DNA, 33 bp, Homo sapien
tctgcgtatatcgccattggatagttgagatcg

SEQ ID NO: 824323 - DNA, 33 bp, Homo sapien
tttggctgtgaccaaactgctgttaaaccacat

SEQ ID NO: 824324 - DNA, 33 bp, Homo sapien
tttggctgtgaccaaattgctgttaaaccacat

SEQ ID NO: 824325 - DNA, 33 bp, Homo sapien
tggatgagtgggatgaagtttttaaaggaaaga

SEQ ID NO: 824326 - DNA, 33 bp, Homo sapien
tggatgagtgggatgaggtttttaaaggaaaga

SEQ ID NO: 824327 - DNA, 33 bp, Homo sapien
gcaggagaaacagcagaaacgatttaggaaggt

SEQ ID NO: 824328 - DNA, 33 bp, Homo sapien
gcaggagaaacagcaggaacgatttaggaaggt

SEQ ID NO: 824329 - DNA, 33 bp, Homo sapien
tctcttacagaaccaccgagtatttatccactt

SEQ ID NO: 824330 - DNA, 33 bp, Homo sapien
tctcttacagaaccactgagtatttatccactt

SEQ ID NO: 824331 - DNA, 33 bp, Homo sapien
atgatcaaaatcaacaacgccaatgaggtgaga

SEQ ID NO: 824332 - DNA, 33 bp, Homo sapien
atgatcaaaatcaacaccgccaatgaggtgaga

SEQ ID NO: 824333 - DNA, 33 bp, Homo sapien
ggggaactatgaaacaagcaataaaacaaaaga

SEQ ID NO: 824334 - DNA, 33 bp, Homo sapien
ggggaactatgaaacaggcaataaaacaaaaga

SEQ ID NO: 824335 - DNA, 33 bp, Homo sapien
aggcaaagcatttcccaactaactctaatgctc

SEQ ID NO: 824336 - DNA, 33 bp, Homo sapien
aggcaaagcatttcccgactaactctaatgctc

SEQ ID NO: 824337 - DNA, 33 bp, Homo sapien
actttctgcaatggtaaaaatgtcttccatttg

SEQ ID NO: 824338 - DNA, 33 bp, Homo sapien
actttctgcaatggtagaaatgtcttccatttg

SEQ ID NO: 824339 - DNA, 33 bp, Homo sapien
tatgctatttaaaagacgctcgcttgaaataaa

SEQ ID NO: 824340 - DNA, 33 bp, Homo sapien
tatgctatttaaaagatgctcgcttgaaataaa

SEQ ID NO: 824341 - DNA, 33 bp, Homo sapien
ttcaaaatcattatgacgcaaaaaagaagcaag

SEQ ID NO: 824342 - DNA, 33 bp, Homo sapien
ttcaaaatcattatgatgcaaaaaagaagcaag

SEQ ID NO: 824343 - DNA, 33 bp, Homo sapien
aatttaggaaagcaagacagcttgacccaggct

SEQ ID NO: 824344 - DNA, 33 bp, Homo sapien
aatttaggaaagcaaggcagcttgacccaggct

SEQ ID NO: 824345 - DNA, 33 bp, Homo sapien
gattggactactggtcacttgtaccctctggct

SEQ ID NO: 824346 - DNA, 33 bp, Homo sapien
gattggactactggtctcttgtaccctctggct

SEQ ID NO: 824347 - DNA, 33 bp, Homo sapien
agttaacgtttacaaaatgcttataatagtttg

SEQ ID NO: 824348 - DNA, 33 bp, Homo sapien
agttaacgtttacaaagtgcttataatagtttg

SEQ ID NO: 824349 - DNA, 33 bp, Homo sapien
atcctactctttctgtcaagattgatagacatg

SEQ ID NO: 824350 - DNA, 33 bp, Homo sapien
atcctactctttctgtgaagattgatagacatg

SEQ ID NO: 824351 - DNA, 33 bp, Homo sapien
tcagatttcctaaatacagcatgccatttcatg

SEQ ID NO: 824352 - DNA, 33 bp, Homo sapien
tcagatttcctaaatatagcatgccatttcatg

SEQ ID NO: 824353 - DNA, 33 bp, Homo sapien
agaacccataaatggccactcagaacttctata

SEQ ID NO: 824354 - DNA, 33 bp, Homo sapien
agaacccataaatggctactcagaacttctata

SEQ ID NO: 824355 - DNA, 33 bp, Homo sapien
tttggcataatagttacgtagttctcagtataa

SEQ ID NO: 824356 - DNA, 33 bp, Homo sapien
tttggcataatagttatgtagttctcagtataa

SEQ ID NO: 824357 - DNA, 33 bp, Homo sapien
agctggtgtgataaccaaaaagaccgggggaga

SEQ ID NO: 824358 - DNA, 33 bp, Homo sapien
agctggtgtgataaccgaaaagaccgggggaga

SEQ ID NO: 824359 - DNA, 33 bp, Homo sapien
tgatccacacatctctaacagcacttatcactt

SEQ ID NO: 824360 - DNA, 33 bp, Homo sapien
tgatccacacatctctgacagcacttatcactt

SEQ ID NO: 824361 - DNA, 33 bp, Homo sapien
tgccgtctttctcttgcataaatatcttcatct

SEQ ID NO: 824362 - DNA, 33 bp, Homo sapien
tgccgtctttctcttggataaatatcttcatct

SEQ ID NO: 824363 - DNA, 33 bp, Homo sapien
aagtaattcaccttcaaaaatacatggggaaaa

SEQ ID NO: 824364 - DNA, 33 bp, Homo sapien
aagtaattcaccttcagaaatacatggggaaaa

SEQ ID NO: 824365 - DNA, 33 bp, Homo sapien
cgggtttgctgcccaacgctgtgtcaaatgaaa

SEQ ID NO: 824366 - DNA, 33 bp, Homo sapien
cgggtttgctgcccaatgctgtgtcaaatgaaa

SEQ ID NO: 824367 - DNA, 33 bp, Homo sapien
tttccatcgctgccaacagtgtggtcttgggca

SEQ ID NO: 824368 - DNA, 33 bp, Homo sapien
tttccatcgctgccaatagtgtggtcttgggca

SEQ ID NO: 824369 - DNA, 33 bp, Homo sapien
agcacaacatcttagacagtttcctgcaaaagg

SEQ ID NO: 824370 - DNA, 33 bp, Homo sapien
agcacaacatcttagatagtttcctgcaaaagg

SEQ ID NO: 824371 - DNA, 33 bp, Homo sapien
gaaatgaacgcagcccaacagcctcctttctct

SEQ ID NO: 824372 - DNA, 33 bp, Homo sapien
gaaatgaacgcagcccgacagcctcctttctct

SEQ ID NO: 824373 - DNA, 33 bp, Homo sapien
aacattttgctaggccaatgctgctgtggtagt

SEQ ID NO: 824374 - DNA, 33 bp, Homo sapien
aacattttgctaggcccatgctgctgtggtagt

SEQ ID NO: 824375 - DNA, 33 bp, Homo sapien
tgcagtcactgtcatacgtacttaattttccat

SEQ ID NO: 824376 - DNA, 33 bp, Homo sapien
tgcagtcactgtcatatgtacttaattttccat

SEQ ID NO: 824377 - DNA, 33 bp, Homo sapien
acatgtgctcagataacgaagtgcattaattca

SEQ ID NO: 824378 - DNA, 33 bp, Homo sapien
acatgtgctcagataatgaagtgcattaattca

SEQ ID NO: 824379 - DNA, 33 bp, Homo sapien
cttaagaaacaattagaaatgcttaggcctctc

SEQ ID NO: 824380 - DNA, 33 bp, Homo sapien
cttaagaaacaattaggaatgcttaggcctctc

SEQ ID NO: 824381 - DNA, 33 bp, Homo sapien
ttaggaggggtggagaatagtgacaagaagaaa

SEQ ID NO: 824382 - DNA, 33 bp, Homo sapien
ttaggaggggtggagagtagtgacaagaagaaa

SEQ ID NO: 824383 - DNA, 33 bp, Homo sapien
ccctgttatgaaatcaactccttcggtttccaa

SEQ ID NO: 824384 - DNA, 33 bp, Homo sapien
ccctgttatgaaatcagctccttcggtttccaa

SEQ ID NO: 824385 - DNA, 33 bp, Homo sapien
aaacatattcaccaccaagcaaacatttacagt

SEQ ID NO: 824386 - DNA, 33 bp, Homo sapien
aaacatattcaccaccgagcaaacatttacagt

SEQ ID NO: 824387 - DNA, 33 bp, Homo sapien
ttatgtgtgtgatagcagcagtgttttgtctac

SEQ ID NO: 824388 - DNA, 33 bp, Homo sapien
ttatgtgtgtgatagcggcagtgttttgtctac

SEQ ID NO: 824389 - DNA, 33 bp, Homo sapien
aggaactggactggaacgtggaaagctggaatc

SEQ ID NO: 824390 - DNA, 33 bp, Homo sapien
aggaactggactggaatgtggaaagctggaatc

SEQ ID NO: 824391 - DNA, 33 bp, Homo sapien
gaggagtaggagatgaaagaagggttcatggag

SEQ ID NO: 824392 - DNA, 33 bp, Homo sapien
gaggagtaggagatgagagaagggttcatggag

SEQ ID NO: 824393 - DNA, 33 bp, Homo sapien
tgcttaaatacataaaatgattccatagtgctc

SEQ ID NO: 824394 - DNA, 33 bp, Homo sapien
tgcttaaatacataaagtgattccatagtgctc

SEQ ID NO: 824395 - DNA, 33 bp, Homo sapien
tgtatgcttctgtaagcctacatccttgcaaac

SEQ ID NO: 824396 - DNA, 33 bp, Homo sapien
tgtatgcttctgtaagtctacatccttgcaaac

SEQ ID NO: 824397 - DNA, 33 bp, Homo sapien
gctttcgttgctaaaacaggatctgcttccagg

SEQ ID NO: 824398 - DNA, 33 bp, Homo sapien
gctttcgttgctaaaataggatctgcttccagg

SEQ ID NO: 824399 - DNA, 33 bp, Homo sapien
attccagtggccagaaagaataaatttagcatc

SEQ ID NO: 824400 - DNA, 33 bp, Homo sapien
attccagtggccagaaggaataaatttagcatc

SEQ ID NO: 824401 - DNA, 33 bp, Homo sapien
tatcctggcttagactcagaccactggttacaa

SEQ ID NO: 824402 - DNA, 33 bp, Homo sapien
tatcctggcttagacttagaccactggttacaa

SEQ ID NO: 824403 - DNA, 33 bp, Homo sapien
agctgctgtgacaataaatttctgactttctct

SEQ ID NO: 824404 - DNA, 33 bp, Homo sapien
agctgctgtgacaatacatttctgactttctct

SEQ ID NO: 824405 - DNA, 33 bp, Homo sapien
tagtcaatctagtttacggactatttcattcac

SEQ ID NO: 824406 - DNA, 33 bp, Homo sapien
tagtcaatctagtttatggactatttcattcac

SEQ ID NO: 824407 - DNA, 33 bp, Homo sapien
atgttccagggatctcaatatatcttcacagag

SEQ ID NO: 824408 - DNA, 33 bp, Homo sapien
atgttccagggatctcgatatatcttcacagag

SEQ ID NO: 824409 - DNA, 33 bp, Homo sapien
ctaagtgctgtgttaaataacttcactgaacca

SEQ ID NO: 824410 - DNA, 33 bp, Homo sapien
ctaagtgctgtgttaagtaacttcactgaacca

SEQ ID NO: 824411 - DNA, 33 bp, Homo sapien
cattggggaagtggtacgtcatccattccaagg

SEQ ID NO: 824412 - DNA, 33 bp, Homo sapien
cattggggaagtggtatgtcatccattccaagg

SEQ ID NO: 824413 - DNA, 33 bp, Homo sapien
cctctcttctatggaacattagaaagcaagagg

SEQ ID NO: 824414 - DNA, 33 bp, Homo sapien
cctctcttctatggaatattagaaagcaagagg

SEQ ID NO: 824415 - DNA, 33 bp, Homo sapien
attctacatcttgtaccgagtcgcccctctctt

SEQ ID NO: 824416 - DNA, 33 bp, Homo sapien
attctacatcttgtactgagtcgcccctctctt

SEQ ID NO: 824417 - DNA, 33 bp, Homo sapien
tacatgcacatttgaacgcagcttggtctagat

SEQ ID NO: 824418 - DNA, 33 bp, Homo sapien
tacatgcacatttgaatgcagcttggtctagat

SEQ ID NO: 824419 - DNA, 33 bp, Homo sapien
tgggaaattcttccaaaccactcaaatcactca

SEQ ID NO: 824420 - DNA, 33 bp, Homo sapien
tgggaaattcttccaagccactcaaatcactca

SEQ ID NO: 824421 - DNA, 33 bp, Homo sapien
tcctggcaaaggaatagctctttggttacagga

SEQ ID NO: 824422 - DNA, 33 bp, Homo sapien
tcctggcaaaggaatatctctttggttacagga

SEQ ID NO: 824423 - DNA, 33 bp, Homo sapien
ggttttggagagcaaacgtaaacacagccaaga

SEQ ID NO: 824424 - DNA, 33 bp, Homo sapien
ggttttggagagcaaatgtaaacacagccaaga

SEQ ID NO: 824425 - DNA, 33 bp, Homo sapien
actgagatggttcaacactgctatgggcaaaag

SEQ ID NO: 824426 - DNA, 33 bp, Homo sapien
actgagatggttcaacgctgctatgggcaaaag

SEQ ID NO: 824427 - DNA, 33 bp, Homo sapien
ccagctgtcgcctcacgcactgttttcaagtct

SEQ ID NO: 824428 - DNA, 33 bp, Homo sapien
ccagctgtcgcctcactcactgttttcaagtct

SEQ ID NO: 824429 - DNA, 33 bp, Homo sapien
gtaatgaggaagatgaatatatggttgtaagtc

SEQ ID NO: 824430 - DNA, 33 bp, Homo sapien
gtaatgaggaagatgagtatatggttgtaagtc

SEQ ID NO: 824431 - DNA, 33 bp, Homo sapien
gagcttgagatgaaaaagtgaacaatgaaggca

SEQ ID NO: 824432 - DNA, 33 bp, Homo sapien
gagcttgagatgaaaaggtgaacaatgaaggca

SEQ ID NO: 824433 - DNA, 33 bp, Homo sapien
ctccagacagccttacaattccgttaaggagac

SEQ ID NO: 824434 - DNA, 33 bp, Homo sapien
ctccagacagccttacgattccgttaaggagac

SEQ ID NO: 824435 - DNA, 33 bp, Homo sapien
ttattgatcatttgggaaaaatagacttacttt

SEQ ID NO: 824436 - DNA, 33 bp, Homo sapien
ttattgatcatttggggaaaatagacttacttt

SEQ ID NO: 824437 - DNA, 33 bp, Homo sapien
atttccctggaaggcactaaaaacaagtttgat

SEQ ID NO: 824438 - DNA, 33 bp, Homo sapien
atttccctggaaggcattaaaaacaagtttgat

SEQ ID NO: 824439 - DNA, 33 bp, Homo sapien
ttgcactggaaagggcacttggaaagcttctgg

SEQ ID NO: 824440 - DNA, 33 bp, Homo sapien
ttgcactggaaagggctcttggaaagcttctgg

SEQ ID NO: 824441 - DNA, 33 bp, Homo sapien
gttctacaaacagcaacgtattccaaactactg

SEQ ID NO: 824442 - DNA, 33 bp, Homo sapien
gttctacaaacagcaaggtattccaaactactg

SEQ ID NO: 824443 - DNA, 33 bp, Homo sapien
ggtcctggcacctgagaactgagctgggggaac

SEQ ID NO: 824444 - DNA, 33 bp, Homo sapien
ggtcctggcacctgaggactgagctgggggaac

SEQ ID NO: 824445 - DNA, 33 bp, Homo sapien
tgaacatttggggccagacagttttctgttgtg

SEQ ID NO: 824446 - DNA, 33 bp, Homo sapien
tgaacatttggggccatacagttttctgttgtg

SEQ ID NO: 824447 - DNA, 33 bp, Homo sapien
cccacccattcttaacaatgataaatcaggaaa

SEQ ID NO: 824448 - DNA, 33 bp, Homo sapien
cccacccattcttaacgatgataaatcaggaaa

SEQ ID NO: 824449 - DNA, 33 bp, Homo sapien
acaagacatcttctagcagtgaggcaacctccc

SEQ ID NO: 824450 - DNA, 33 bp, Homo sapien
acaagacatcttctaggagtgaggcaacctccc

SEQ ID NO: 824451 - DNA, 33 bp, Homo sapien
attcaacagtgctgtcaagtttgagagaaaaga

SEQ ID NO: 824452 - DNA, 33 bp, Homo sapien
attcaacagtgctgtcgagtttgagagaaaaga

SEQ ID NO: 824453 - DNA, 33 bp, Homo sapien
tcataaagatgtttgcccttgcacgggtgtttg

SEQ ID NO: 824454 - DNA, 33 bp, Homo sapien
tcataaagatgtttgctcttgcacgggtgtttg

SEQ ID NO: 824455 - DNA, 33 bp, Homo sapien
aacattcattaaagtgcataaaatggcctgcaa

SEQ ID NO: 824456 - DNA, 33 bp, Homo sapien
aacattcattaaagtggataaaatggcctgcaa

SEQ ID NO: 824457 - DNA, 33 bp, Homo sapien
atacaacaacgagtgacgaccaggtgagtggtt

SEQ ID NO: 824458 - DNA, 33 bp, Homo sapien
atacaacaacgagtgatgaccaggtgagtggtt

SEQ ID NO: 824459 - DNA, 33 bp, Homo sapien
taccactatcgtatcacgcagaggactttcact

SEQ ID NO: 824460 - DNA, 33 bp, Homo sapien
taccactatcgtatcatgcagaggactttcact

SEQ ID NO: 824461 - DNA, 33 bp, Homo sapien
catccattatcaaaccacctctctctctttcct

SEQ ID NO: 824462 - DNA, 33 bp, Homo sapien
catccattatcaaacctcctctctctctttcct

SEQ ID NO: 824463 - DNA, 33 bp, Homo sapien
gataataaggttgtcaatctcaagtattttatg

SEQ ID NO: 824464 - DNA, 33 bp, Homo sapien
gataataaggttgtcagtctcaagtattttatg

SEQ ID NO: 824465 - DNA, 33 bp, Homo sapien
tcttgtaaagaactaaaattgcagatgaggttc

SEQ ID NO: 824466 - DNA, 33 bp, Homo sapien
tcttgtaaagaactaacattgcagatgaggttc

SEQ ID NO: 824467 - DNA, 33 bp, Homo sapien
acacaaaaatctgaaccatagcacctaccgtgt

SEQ ID NO: 824468 - DNA, 33 bp, Homo sapien
acacaaaaatctgaactatagcacctaccgtgt

SEQ ID NO: 824469 - DNA, 33 bp, Homo sapien
gataaaataccactgagaactagctaaaataaa

SEQ ID NO: 824470 - DNA, 33 bp, Homo sapien
gataaaataccactgataactagctaaaataaa

SEQ ID NO: 824471 - DNA, 33 bp, Homo sapien
aggctttcttctataaaaccagtattacctgac

SEQ ID NO: 824472 - DNA, 33 bp, Homo sapien
aggctttcttctataagaccagtattacctgac

SEQ ID NO: 824473 - DNA, 33 bp, Homo sapien
catgctatatatttgtaaattttctgcttctat

SEQ ID NO: 824474 - DNA, 33 bp, Homo sapien
catgctatatatttgtgaattttctgcttctat

SEQ ID NO: 824475 - DNA, 33 bp, Homo sapien
acctgaaaaccagagacgttgagcagcttaccc

SEQ ID NO: 824476 - DNA, 33 bp, Homo sapien
acctgaaaaccagagaggttgagcagcttaccc

SEQ ID NO: 824477 - DNA, 33 bp, Homo sapien
agttgagagttttccaccatctaatcctcaata

SEQ ID NO: 824478 - DNA, 33 bp, Homo sapien
agttgagagttttccatcatctaatcctcaata

SEQ ID NO: 824479 - DNA, 33 bp, Homo sapien
gggcctggtacgcaccagccttcgcactgtggg

SEQ ID NO: 824480 - DNA, 33 bp, Homo sapien
gggcctggtacgcaccggccttcgcactgtggg

SEQ ID NO: 824481 - DNA, 33 bp, Homo sapien
tgtgtggagaagcaaaattcaaacaggtgttat

SEQ ID NO: 824482 - DNA, 33 bp, Homo sapien
tgtgtggagaagcaaagttcaaacaggtgttat

SEQ ID NO: 824483 - DNA, 33 bp, Homo sapien
catagtattttaagcaagtgaaacaacatgggt

SEQ ID NO: 824484 - DNA, 33 bp, Homo sapien
catagtattttaagcaggtgaaacaacatgggt

SEQ ID NO: 824485 - DNA, 33 bp, Homo sapien
ctataaggcagctacacggacactatttcagtt

SEQ ID NO: 824486 - DNA, 33 bp, Homo sapien
ctataaggcagctacatggacactatttcagtt

SEQ ID NO: 824487 - DNA, 33 bp, Homo sapien
tagctaaggaatgcaacatttcccctttgaaaa

SEQ ID NO: 824488 - DNA, 33 bp, Homo sapien
tagctaaggaatgcaatatttcccctttgaaaa

SEQ ID NO: 824489 - DNA, 33 bp, Homo sapien
acatgaaagatgcaccaatgcagtggtgatgca

SEQ ID NO: 824490 - DNA, 33 bp, Homo sapien
acatgaaagatgcacccatgcagtggtgatgca

SEQ ID NO: 824491 - DNA, 33 bp, Homo sapien
gtacatttctaaatcgcatctcaggtgcttaga

SEQ ID NO: 824492 - DNA, 33 bp, Homo sapien
gtacatttctaaatcgtatctcaggtgcttaga

SEQ ID NO: 824493 - DNA, 33 bp, Homo sapien
tctggatatatatctaaaataatcaccacatac

SEQ ID NO: 824494 - DNA, 33 bp, Homo sapien
tctggatatatatctagaataatcaccacatac

SEQ ID NO: 824495 - DNA, 33 bp, Homo sapien
gcccgggttctgcaaaccactgcaatatcgctc

SEQ ID NO: 824496 - DNA, 33 bp, Homo sapien
gcccgggttctgcaaagcactgcaatatcgctc

SEQ ID NO: 824497 - DNA, 33 bp, Homo sapien
gttgcctgtttccatcagagtgcccttttaaac

SEQ ID NO: 824498 - DNA, 33 bp, Homo sapien
gttgcctgtttccatcggagtgcccttttaaac

SEQ ID NO: 824499 - DNA, 33 bp, Homo sapien
caactagagtattgtaaattggaggaaagctgt

SEQ ID NO: 824500 - DNA, 33 bp, Homo sapien
caactagagtattgtatattggaggaaagctgt

SEQ ID NO: 824501 - DNA, 33 bp, Homo sapien
cacttaaaatacaatggacagctttcctccaat

SEQ ID NO: 824502 - DNA, 33 bp, Homo sapien
cacttaaaatacaatgtacagctttcctccaat

SEQ ID NO: 824503 - DNA, 33 bp, Homo sapien
aaagcccatcgcagtaagtaaggaagtggatcc

SEQ ID NO: 824504 - DNA, 33 bp, Homo sapien
aaagcccatcgcagtaggtaaggaagtggatcc

SEQ ID NO: 824505 - DNA, 33 bp, Homo sapien
agcagttagaagaagacgtagggtcaaaggagg

SEQ ID NO: 824506 - DNA, 33 bp, Homo sapien
agcagttagaagaagatgtagggtcaaaggagg

SEQ ID NO: 824507 - DNA, 33 bp, Homo sapien
gtcaggctcccaacaaagacatgaaggagcctt

SEQ ID NO: 824508 - DNA, 33 bp, Homo sapien
gtcaggctcccaacaaggacatgaaggagcctt

SEQ ID NO: 824509 - DNA, 33 bp, Homo sapien
aggcagatggcggatactaggaataaggtctag

SEQ ID NO: 824510 - DNA, 33 bp, Homo sapien
aggcagatggcggatattaggaataaggtctag

SEQ ID NO: 824511 - DNA, 33 bp, Homo sapien
tcctagaaaattctcaaagggcaagcctctttc

SEQ ID NO: 824512 - DNA, 33 bp, Homo sapien
tcctagaaaattctcatagggcaagcctctttc

SEQ ID NO: 824513 - DNA, 33 bp, Homo sapien
gtcagaaatgtttatcaagctatctagcacagc

SEQ ID NO: 824514 - DNA, 33 bp, Homo sapien
gtcagaaatgtttatccagctatctagcacagc

SEQ ID NO: 824515 - DNA, 33 bp, Homo sapien
ggaacccagtggtttgcatgggtcaattcactt

SEQ ID NO: 824516 - DNA, 33 bp, Homo sapien
ggaacccagtggtttggatgggtcaattcactt

SEQ ID NO: 824517 - DNA, 33 bp, Homo sapien
acacaacacatacacacgaccctacatacatca

SEQ ID NO: 824518 - DNA, 33 bp, Homo sapien
acacaacacatacacatgaccctacatacatca

SEQ ID NO: 824519 - DNA, 33 bp, Homo sapien
cttactacagatttaactgggatgggatatccc

SEQ ID NO: 824520 - DNA, 33 bp, Homo sapien
cttactacagatttaattgggatgggatatccc

SEQ ID NO: 824521 - DNA, 33 bp, Homo sapien
cagagctgagcttctcacaccattagagtttga

SEQ ID NO: 824522 - DNA, 33 bp, Homo sapien
cagagctgagcttctcgcaccattagagtttga

SEQ ID NO: 824523 - DNA, 33 bp, Homo sapien
aagcagaagccggctccaaggttccgctcattt

SEQ ID NO: 824524 - DNA, 33 bp, Homo sapien
aagcagaagccggctcgaaggttccgctcattt

SEQ ID NO: 824525 - DNA, 33 bp, Homo sapien
gcccattgtaaattcaaatgtgtccagtcacat

SEQ ID NO: 824526 - DNA, 33 bp, Homo sapien
gcccattgtaaattcagatgtgtccagtcacat

SEQ ID NO: 824527 - DNA, 33 bp, Homo sapien
gtgcttagtagtgacccgaaaatcctgctgtca

SEQ ID NO: 824528 - DNA, 33 bp, Homo sapien
gtgcttagtagtgacctgaaaatcctgctgtca

SEQ ID NO: 824529 - DNA, 33 bp, Homo sapien
tgggagagattggagacgttctgaggctctcat

SEQ ID NO: 824530 - DNA, 33 bp, Homo sapien
tgggagagattggagatgttctgaggctctcat

SEQ ID NO: 824531 - DNA, 33 bp, Homo sapien
ctctaatcagataagcagatcacaaaaccatct

SEQ ID NO: 824532 - DNA, 33 bp, Homo sapien
ctctaatcagataagcggatcacaaaaccatct

SEQ ID NO: 824533 - DNA, 33 bp, Homo sapien
ataacatctgtaccacaattttagcttaaacat

SEQ ID NO: 824534 - DNA, 33 bp, Homo sapien
ataacatctgtaccaccattttagcttaaacat

SEQ ID NO: 824535 - DNA, 33 bp, Homo sapien
ctagataatggcaaaaattaagtacagtattgt

SEQ ID NO: 824536 - DNA, 33 bp, Homo sapien
ctagataatggcaaaagttaagtacagtattgt

SEQ ID NO: 824537 - DNA, 33 bp, Homo sapien
tgcacaaatatatatcccatcccacatgctctt

SEQ ID NO: 824538 - DNA, 33 bp, Homo sapien
tgcacaaatatatatcgcatcccacatgctctt

SEQ ID NO: 824539 - DNA, 33 bp, Homo sapien
tttcaattaatttaaaactggattctgtctctg

SEQ ID NO: 824540 - DNA, 33 bp, Homo sapien
tttcaattaatttaaacctggattctgtctctg

SEQ ID NO: 824541 - DNA, 33 bp, Homo sapien
atgtattggggacttaccatatgctagacactc

SEQ ID NO: 824542 - DNA, 33 bp, Homo sapien
atgtattggggacttatcatatgctagacactc

SEQ ID NO: 824543 - DNA, 33 bp, Homo sapien
ttgcaaagaagacatcagaggtgtggccctgga

SEQ ID NO: 824544 - DNA, 33 bp, Homo sapien
ttgcaaagaagacatcggaggtgtggccctgga

SEQ ID NO: 824545 - DNA, 33 bp, Homo sapien
cattgttggaggttaacgccaaaacgcagaaaa

SEQ ID NO: 824546 - DNA, 33 bp, Homo sapien
cattgttggaggttaaggccaaaacgcagaaaa

SEQ ID NO: 824547 - DNA, 33 bp, Homo sapien
ttttctatggctgagaagtaatatatatgtata

SEQ ID NO: 824548 - DNA, 33 bp, Homo sapien
ttttctatggctgagacgtaatatatatgtata

SEQ ID NO: 824549 - DNA, 33 bp, Homo sapien
tgcacaataaacttaacgtgacagtagatgaca

SEQ ID NO: 824550 - DNA, 33 bp, Homo sapien
tgcacaataaacttaatgtgacagtagatgaca

SEQ ID NO: 824551 - DNA, 33 bp, Homo sapien
aaggcaggaatgaaaccggagttctggaaggaa

SEQ ID NO: 824552 - DNA, 33 bp, Homo sapien
aaggcaggaatgaaactggagttctggaaggaa

SEQ ID NO: 824553 - DNA, 33 bp, Homo sapien
tgacaggctctgatggccacagtacctgaatcc

SEQ ID NO: 824554 - DNA, 33 bp, Homo sapien
tgacaggctctgatggtcacagtacctgaatcc

SEQ ID NO: 824555 - DNA, 33 bp, Homo sapien
ttagggaagctcaaccactgaaggaaaagtccc

SEQ ID NO: 824556 - DNA, 33 bp, Homo sapien
ttagggaagctcaaccgctgaaggaaaagtccc

SEQ ID NO: 824557 - DNA, 33 bp, Homo sapien
aaggaaaagtcccaaaatacaacaggttgctaa

SEQ ID NO: 824558 - DNA, 33 bp, Homo sapien
aaggaaaagtcccaaattacaacaggttgctaa

SEQ ID NO: 824559 - DNA, 33 bp, Homo sapien
attgcctttgaataaacgggactactactacta

SEQ ID NO: 824560 - DNA, 33 bp, Homo sapien
attgcctttgaataaatgggactactactacta

SEQ ID NO: 824561 - DNA, 33 bp, Homo sapien
ctctatggtatagtataactggtagagactggc

SEQ ID NO: 824562 - DNA, 33 bp, Homo sapien
ctctatggtatagtatgactggtagagactggc

SEQ ID NO: 824563 - DNA, 33 bp, Homo sapien
aagtcattgctgttagaaaatgggtgcaagttc

SEQ ID NO: 824564 - DNA, 33 bp, Homo sapien
aagtcattgctgttaggaaatgggtgcaagttc

SEQ ID NO: 824565 - DNA, 33 bp, Homo sapien
acccaacctctctattaaaagtcattagcaagt

SEQ ID NO: 824566 - DNA, 33 bp, Homo sapien
acccaacctctctattgaaagtcattagcaagt

SEQ ID NO: 824567 - DNA, 33 bp, Homo sapien
ggttcctggcacaaccacactaagcaagtagat

SEQ ID NO: 824568 - DNA, 33 bp, Homo sapien
ggttcctggcacaacctcactaagcaagtagat

SEQ ID NO: 824569 - DNA, 33 bp, Homo sapien
aatgaagtggagaaagaaatactgccaagatga

SEQ ID NO: 824570 - DNA, 33 bp, Homo sapien
aatgaagtggagaaagcaatactgccaagatga

SEQ ID NO: 824571 - DNA, 33 bp, Homo sapien
catatatcaatacctcaaaacgtccctgtaact

SEQ ID NO: 824572 - DNA, 33 bp, Homo sapien
catatatcaatacctcgaaacgtccctgtaact

SEQ ID NO: 824573 - DNA, 33 bp, Homo sapien
agttcttgatttatgacatgaagttatgattta

SEQ ID NO: 824574 - DNA, 33 bp, Homo sapien
agttcttgatttatgatatgaagttatgattta

SEQ ID NO: 824575 - DNA, 33 bp, Homo sapien
gctatatgccctcacaaattcttctactaaact

SEQ ID NO: 824576 - DNA, 33 bp, Homo sapien
gctatatgccctcacagattcttctactaaact

SEQ ID NO: 824577 - DNA, 33 bp, Homo sapien
tcacagaatgttgtggaaaaggtctttaaagaa

SEQ ID NO: 824578 - DNA, 33 bp, Homo sapien
tcacagaatgttgtgggaaaggtctttaaagaa

SEQ ID NO: 824579 - DNA, 33 bp, Homo sapien
actgagctatgaactacaatcatctcttcccct

SEQ ID NO: 824580 - DNA, 33 bp, Homo sapien
actgagctatgaactataatcatctcttcccct

SEQ ID NO: 824581 - DNA, 33 bp, Homo sapien
gacagcatcagtatagacctgttattctcagac

SEQ ID NO: 824582 - DNA, 33 bp, Homo sapien
gacagcatcagtataggcctgttattctcagac

SEQ ID NO: 824583 - DNA, 33 bp, Homo sapien
actcaggtaatccctaaaggcccaaagggatcc

SEQ ID NO: 824584 - DNA, 33 bp, Homo sapien
actcaggtaatccctagaggcccaaagggatcc

SEQ ID NO: 824585 - DNA, 33 bp, Homo sapien
catttgggcctttgtacgtcctgtctcttaaaa

SEQ ID NO: 824586 - DNA, 33 bp, Homo sapien
catttgggcctttgtatgtcctgtctcttaaaa

SEQ ID NO: 824587 - DNA, 33 bp, Homo sapien
cagtctcgaaaacacaacttcccatatcaataa

SEQ ID NO: 824588 - DNA, 33 bp, Homo sapien
cagtctcgaaaacacagcttcccatatcaataa

SEQ ID NO: 824589 - DNA, 33 bp, Homo sapien
attaacctccgaatcaagattaggtcaaaacac

SEQ ID NO: 824590 - DNA, 33 bp, Homo sapien
attaacctccgaatcaggattaggtcaaaacac

SEQ ID NO: 824591 - DNA, 33 bp, Homo sapien
gacacaaagctccttaagggaggagacgatcct

SEQ ID NO: 824592 - DNA, 33 bp, Homo sapien
gacacaaagctccttatgggaggagacgatcct

SEQ ID NO: 824593 - DNA, 33 bp, Homo sapien
ttctgcttgtttttaacctgtttttctcaggat

SEQ ID NO: 824594 - DNA, 33 bp, Homo sapien
ttctgcttgtttttaatctgtttttctcaggat

SEQ ID NO: 824595 - DNA, 33 bp, Homo sapien
agtacacaaggtcagcagacgaaaaattcctag

SEQ ID NO: 824596 - DNA, 33 bp, Homo sapien
agtacacaaggtcagcggacgaaaaattcctag

SEQ ID NO: 824597 - DNA, 33 bp, Homo sapien
ttgctcttgccaaaaacattcaaaagctatcag

SEQ ID NO: 824598 - DNA, 33 bp, Homo sapien
ttgctcttgccaaaaatattcaaaagctatcag

SEQ ID NO: 824599 - DNA, 33 bp, Homo sapien
tcttgctgagactaacagagggcaatctctacc

SEQ ID NO: 824600 - DNA, 33 bp, Homo sapien
tcttgctgagactaacggagggcaatctctacc

SEQ ID NO: 824601 - DNA, 33 bp, Homo sapien
ggcttctatgttctgacggctaaactggaaagc

SEQ ID NO: 824602 - DNA, 33 bp, Homo sapien
ggcttctatgttctgatggctaaactggaaagc

SEQ ID NO: 824603 - DNA, 33 bp, Homo sapien
acctatgactgtgttaccttacatggcaaaaga

SEQ ID NO: 824604 - DNA, 33 bp, Homo sapien
acctatgactgtgttatcttacatggcaaaaga

SEQ ID NO: 824605 - DNA, 33 bp, Homo sapien
ccaagaagaaggatacggagctcttctgattca

SEQ ID NO: 824606 - DNA, 33 bp, Homo sapien
ccaagaagaaggatactgagctcttctgattca

SEQ ID NO: 824607 - DNA, 33 bp, Homo sapien
cacgtacagtgcaggccaatgttgacagaagaa

SEQ ID NO: 824608 - DNA, 33 bp, Homo sapien
cacgtacagtgcaggcgaatgttgacagaagaa

SEQ ID NO: 824609 - DNA, 33 bp, Homo sapien
tttattctgtccacaaatcccacaagacaaaga

SEQ ID NO: 824610 - DNA, 33 bp, Homo sapien
tttattctgtccacaagtcccacaagacaaaga

SEQ ID NO: 824611 - DNA, 33 bp, Homo sapien
agaatcataattgtgccaggggagcaaagtacc

SEQ ID NO: 824612 - DNA, 33 bp, Homo sapien
agaatcataattgtgctaggggagcaaagtacc

SEQ ID NO: 824613 - DNA, 33 bp, Homo sapien
tcttaaacgtatttacactgtgcctatgtgatc

SEQ ID NO: 824614 - DNA, 33 bp, Homo sapien
tcttaaacgtatttactctgtgcctatgtgatc

SEQ ID NO: 824615 - DNA, 33 bp, Homo sapien
ggcagtcaagttcaaaaccaaacgttgaatgct

SEQ ID NO: 824616 - DNA, 33 bp, Homo sapien
ggcagtcaagttcaaagccaaacgttgaatgct

SEQ ID NO: 824617 - DNA, 33 bp, Homo sapien
atgtgggtacctgagccaggttggggaggcttg

SEQ ID NO: 824618 - DNA, 33 bp, Homo sapien
atgtgggtacctgagctaggttggggaggcttg

SEQ ID NO: 824619 - DNA, 33 bp, Homo sapien
taaccaccagagctcaagccagatttatggaaa

SEQ ID NO: 824620 - DNA, 33 bp, Homo sapien
taaccaccagagctcacgccagatttatggaaa

SEQ ID NO: 824621 - DNA, 33 bp, Homo sapien
ctgtgacctgttttgacagaatcagagaaggtt

SEQ ID NO: 824622 - DNA, 33 bp, Homo sapien
ctgtgacctgttttgagagaatcagagaaggtt

SEQ ID NO: 824623 - DNA, 33 bp, Homo sapien
cacccaataatatccaccacctcagacagacat

SEQ ID NO: 824624 - DNA, 33 bp, Homo sapien
cacccaataatatccatcacctcagacagacat

SEQ ID NO: 824625 - DNA, 33 bp, Homo sapien
caagtggctttcctcaaggtcatttcctgctag

SEQ ID NO: 824626 - DNA, 33 bp, Homo sapien
caagtggctttcctcagggtcatttcctgctag

SEQ ID NO: 824627 - DNA, 33 bp, Homo sapien
gaagtcacagtaagagaaattaggcaagagaaa

SEQ ID NO: 824628 - DNA, 33 bp, Homo sapien
gaagtcacagtaagaggaattaggcaagagaaa

SEQ ID NO: 824629 - DNA, 33 bp, Homo sapien
aaagagaatagaaaaaccagaaacggacccatg

SEQ ID NO: 824630 - DNA, 33 bp, Homo sapien
aaagagaatagaaaaatcagaaacggacccatg

SEQ ID NO: 824631 - DNA, 33 bp, Homo sapien
cctcaaatgacggtgaagattccacattgatat

SEQ ID NO: 824632 - DNA, 33 bp, Homo sapien
cctcaaatgacggtgaggattccacattgatat

SEQ ID NO: 824633 - DNA, 33 bp, Homo sapien
tctcttgtttgctgaaaataagacacaaaagtt

SEQ ID NO: 824634 - DNA, 33 bp, Homo sapien
tctcttgtttgctgaagataagacacaaaagtt

SEQ ID NO: 824635 - DNA, 33 bp, Homo sapien
agcacttgaaaagcaaacacaggtaatagtttt

SEQ ID NO: 824636 - DNA, 33 bp, Homo sapien
agcacttgaaaagcaaccacaggtaatagtttt

SEQ ID NO: 824637 - DNA, 33 bp, Homo sapien
tgttacgtagataaacacacattatgggggttt

SEQ ID NO: 824638 - DNA, 33 bp, Homo sapien
tgttacgtagataaactcacattatgggggttt

SEQ ID NO: 824639 - DNA, 33 bp, Homo sapien
caagcccttcaggaaacagtctctactttgagt

SEQ ID NO: 824640 - DNA, 33 bp, Homo sapien
caagcccttcaggaaatagtctctactttgagt

SEQ ID NO: 824641 - DNA, 33 bp, Homo sapien
tcaatagaaataaagacaagtagagctggcagg

SEQ ID NO: 824642 - DNA, 33 bp, Homo sapien
tcaatagaaataaagagaagtagagctggcagg

SEQ ID NO: 824643 - DNA, 33 bp, Homo sapien
tatatagaggaggaacacaatacctgctttgtg

SEQ ID NO: 824644 - DNA, 33 bp, Homo sapien
tatatagaggaggaacgcaatacctgctttgtg

SEQ ID NO: 824645 - DNA, 33 bp, Homo sapien
gaatttagttgacctaccagctgccaaaatcat

SEQ ID NO: 824646 - DNA, 33 bp, Homo sapien
gaatttagttgacctatcagctgccaaaatcat

SEQ ID NO: 824647 - DNA, 33 bp, Homo sapien
gctgccaaaatcatggaccaacttcattttggg

SEQ ID NO: 824648 - DNA, 33 bp, Homo sapien
gctgccaaaatcatgggccaacttcattttggg

SEQ ID NO: 824649 - DNA, 33 bp, Homo sapien
tttccagctgtgagacaaaggagcaaatatgag

SEQ ID NO: 824650 - DNA, 33 bp, Homo sapien
tttccagctgtgagacgaaggagcaaatatgag

SEQ ID NO: 824651 - DNA, 33 bp, Homo sapien
tttatacagcattgaaaatccacagctataaat

SEQ ID NO: 824652 - DNA, 33 bp, Homo sapien
tttatacagcattgaatatccacagctataaat

SEQ ID NO: 824653 - DNA, 33 bp, Homo sapien
caaaacaataacacaccgattaaacatttgcta

SEQ ID NO: 824654 - DNA, 33 bp, Homo sapien
caaaacaataacacactgattaaacatttgcta

SEQ ID NO: 824655 - DNA, 33 bp, Homo sapien
gaagggtggatgttcaactaattggggtcattc

SEQ ID NO: 824656 - DNA, 33 bp, Homo sapien
gaagggtggatgttcacctaattggggtcattc

SEQ ID NO: 824657 - DNA, 33 bp, Homo sapien
ccttcaaaccctgccaacttcatcaattctatc

SEQ ID NO: 824658 - DNA, 33 bp, Homo sapien
ccttcaaaccctgccaccttcatcaattctatc

SEQ ID NO: 824659 - DNA, 33 bp, Homo sapien
gagcagacgaagaagacagagttttgatcttga

SEQ ID NO: 824660 - DNA, 33 bp, Homo sapien
gagcagacgaagaagagagagttttgatcttga

SEQ ID NO: 824661 - DNA, 33 bp, Homo sapien
agaagagaaagaagtacacacaccaatgaaaac

SEQ ID NO: 824662 - DNA, 33 bp, Homo sapien
agaagagaaagaagtagacacaccaatgaaaac

SEQ ID NO: 824663 - DNA, 33 bp, Homo sapien
tgcattactgcctaacactctatttatggctat

SEQ ID NO: 824664 - DNA, 33 bp, Homo sapien
tgcattactgcctaacgctctatttatggctat

SEQ ID NO: 824665 - DNA, 33 bp, Homo sapien
tgttagtaaggacatacagaaattggaaccctt

SEQ ID NO: 824666 - DNA, 33 bp, Homo sapien
tgttagtaaggacatagagaaattggaaccctt

SEQ ID NO: 824667 - DNA, 33 bp, Homo sapien
cagataaagtgtaaggaaagttataggtgtggt

SEQ ID NO: 824668 - DNA, 33 bp, Homo sapien
cagataaagtgtaagggaagttataggtgtggt

SEQ ID NO: 824669 - DNA, 33 bp, Homo sapien
attttttctagctccaatcctgccggtccttca

SEQ ID NO: 824670 - DNA, 33 bp, Homo sapien
attttttctagctccactcctgccggtccttca

SEQ ID NO: 824671 - DNA, 33 bp, Homo sapien
tctaaccagggcgtgaacagaaatagagatgct

SEQ ID NO: 824672 - DNA, 33 bp, Homo sapien
tctaaccagggcgtgagcagaaatagagatgct

SEQ ID NO: 824673 - DNA, 33 bp, Homo sapien
atcaacaggatcacatcaaacaccctcctttaa

SEQ ID NO: 824674 - DNA, 33 bp, Homo sapien
atcaacaggatcacattaaacaccctcctttaa

SEQ ID NO: 824675 - DNA, 33 bp, Homo sapien
atgaggtctgggcaccaagtttatttgctctaa

SEQ ID NO: 824676 - DNA, 33 bp, Homo sapien
atgaggtctgggcaccgagtttatttgctctaa

SEQ ID NO: 824677 - DNA, 33 bp, Homo sapien
agggtcttgaacgacaagcctaagttgactttc

SEQ ID NO: 824678 - DNA, 33 bp, Homo sapien
agggtcttgaacgacaggcctaagttgactttc

SEQ ID NO: 824679 - DNA, 33 bp, Homo sapien
cctctgtctggctaccaaggactttgcaatgtg

SEQ ID NO: 824680 - DNA, 33 bp, Homo sapien
cctctgtctggctaccgaggactttgcaatgtg

SEQ ID NO: 824681 - DNA, 33 bp, Homo sapien
tgtttttgctttctcacaaatctctccacctgt

SEQ ID NO: 824682 - DNA, 33 bp, Homo sapien
tgtttttgctttctcataaatctctccacctgt

SEQ ID NO: 824683 - DNA, 33 bp, Homo sapien
gacattgggggaaacacgaatagtctttactga

SEQ ID NO: 824684 - DNA, 33 bp, Homo sapien
gacattgggggaaacatgaatagtctttactga

SEQ ID NO: 824685 - DNA, 33 bp, Homo sapien
cagtgacattaatgaacgaatcaatgaaacaaa

SEQ ID NO: 824686 - DNA, 33 bp, Homo sapien
cagtgacattaatgaatgaatcaatgaaacaaa

SEQ ID NO: 824687 - DNA, 33 bp, Homo sapien
attgactcccaacaccaatttccaagctttggc

SEQ ID NO: 824688 - DNA, 33 bp, Homo sapien
attgactcccaacacccatttccaagctttggc

SEQ ID NO: 824689 - DNA, 33 bp, Homo sapien
agcagaactgcttctcaagagatatttgatggg

SEQ ID NO: 824690 - DNA, 33 bp, Homo sapien
agcagaactgcttctcgagagatatttgatggg

SEQ ID NO: 824691 - DNA, 33 bp, Homo sapien
tatactctttgggttaactcatctattaccact

SEQ ID NO: 824692 - DNA, 33 bp, Homo sapien
tatactctttgggttatctcatctattaccact

SEQ ID NO: 824693 - DNA, 33 bp, Homo sapien
gcatataggagaaagcactgtggagacacacca

SEQ ID NO: 824694 - DNA, 33 bp, Homo sapien
gcatataggagaaagcgctgtggagacacacca

SEQ ID NO: 824695 - DNA, 33 bp, Homo sapien
gagttcaggtttattccaagtgaagcgggaagc

SEQ ID NO: 824696 - DNA, 33 bp, Homo sapien
gagttcaggtttattctaagtgaagcgggaagc

SEQ ID NO: 824697 - DNA, 33 bp, Homo sapien
gctatatggccagaaacgaaatcactcaggact

SEQ ID NO: 824698 - DNA, 33 bp, Homo sapien
gctatatggccagaaatgaaatcactcaggact

SEQ ID NO: 824699 - DNA, 33 bp, Homo sapien
gacgtgaaaaatccccaagagcagcctgctggg

SEQ ID NO: 824700 - DNA, 33 bp, Homo sapien
gacgtgaaaaatccccgagagcagcctgctggg

SEQ ID NO: 824701 - DNA, 33 bp, Homo sapien
aataatcacaataaagccattttgcctctcaag

SEQ ID NO: 824702 - DNA, 33 bp, Homo sapien
aataatcacaataaagtcattttgcctctcaag

SEQ ID NO: 824703 - DNA, 33 bp, Homo sapien
aggaaccacccatcaacaacactgtaatgctaa

SEQ ID NO: 824704 - DNA, 33 bp, Homo sapien
aggaaccacccatcaataacactgtaatgctaa

SEQ ID NO: 824705 - DNA, 33 bp, Homo sapien
gatagagattgtatgacacagatgcaaagtgtg

SEQ ID NO: 824706 - DNA, 33 bp, Homo sapien
gatagagattgtatgatacagatgcaaagtgtg

SEQ ID NO: 824707 - DNA, 33 bp, Homo sapien
tatgggaggaaatccaggtaccagcagagtggc

SEQ ID NO: 824708 - DNA, 33 bp, Homo sapien
tatgggaggaaatccatgtaccagcagagtggc

SEQ ID NO: 824709 - DNA, 33 bp, Homo sapien
cctgtggcttaggctaaaaatattttctctttc

SEQ ID NO: 824710 - DNA, 33 bp, Homo sapien
cctgtggcttaggctataaatattttctctttc

SEQ ID NO: 824711 - DNA, 33 bp, Homo sapien
atctcctccctcctcaatctgaaccagccatgc

SEQ ID NO: 824712 - DNA, 33 bp, Homo sapien
atctcctccctcctcagtctgaaccagccatgc

SEQ ID NO: 824713 - DNA, 33 bp, Homo sapien
cctctacctctgcccacgtaaaatcttctaatg

SEQ ID NO: 824714 - DNA, 33 bp, Homo sapien
cctctacctctgcccatgtaaaatcttctaatg

SEQ ID NO: 824715 - DNA, 33 bp, Homo sapien
caaccttaagtaataacctatggcactatttat

SEQ ID NO: 824716 - DNA, 33 bp, Homo sapien
caaccttaagtaataatctatggcactatttat

SEQ ID NO: 824717 - DNA, 33 bp, Homo sapien
cttagggcatgaacagcagaaaggaaaagtgtg

SEQ ID NO: 824718 - DNA, 33 bp, Homo sapien
cttagggcatgaacagtagaaaggaaaagtgtg

SEQ ID NO: 824719 - DNA, 33 bp, Homo sapien
ggataaggtacaaaacacagggagtcagggcaa

SEQ ID NO: 824720 - DNA, 33 bp, Homo sapien
ggataaggtacaaaacgcagggagtcagggcaa

SEQ ID NO: 824721 - DNA, 33 bp, Homo sapien
acttgccttgtcttcaagtttaacatctgagag

SEQ ID NO: 824722 - DNA, 33 bp, Homo sapien
acttgccttgtcttcaggtttaacatctgagag

SEQ ID NO: 824723 - DNA, 33 bp, Homo sapien
ataggatactcaatcaaactaacccctctctgg

SEQ ID NO: 824724 - DNA, 33 bp, Homo sapien
ataggatactcaatcagactaacccctctctgg

SEQ ID NO: 824725 - DNA, 33 bp, Homo sapien; identical to SEQ ID NO: 824723

SEQ ID NO: 824726 - DNA, 33 bp, Homo sapien; identical to SEQ ID NO: 824724

SEQ ID NO: 824727 - DNA, 33 bp, Homo sapien
cctatgctcacaattacatccttcagcactgaa

SEQ ID NO: 824728 - DNA, 33 bp, Homo sapien
cctatgctcacaattatatccttcagcactgaa

SEQ ID NO: 824729 - DNA, 33 bp, Homo sapien
aagtcaaatgaaccataagaacagcaaaatgaa

SEQ ID NO: 824730 - DNA, 33 bp, Homo sapien
aagtcaaatgaaccatgagaacagcaaaatgaa

SEQ ID NO: 824731 - DNA, 33 bp, Homo sapien
ccctccgcagacctatgaaatcagaatctcttg

SEQ ID NO: 824732 - DNA, 33 bp, Homo sapien
ccctccgcagacctattaaatcagaatctcttg

SEQ ID NO: 824733 - DNA, 33 bp, Homo sapien
gaagtaacatgatttcccagtggatttcaaaca

SEQ ID NO: 824734 - DNA, 33 bp, Homo sapien
gaagtaacatgatttcgcagtggatttcaaaca

SEQ ID NO: 824735 - DNA, 33 bp, Homo sapien
gaaataataacccttacattgcaaggtatcttc

SEQ ID NO: 824736 - DNA, 33 bp, Homo sapien
gaaataataacccttatattgcaaggtatcttc

SEQ ID NO: 824737 - DNA, 33 bp, Homo sapien
tttacaatgaaatcaacatacagtgtcccatga

SEQ ID NO: 824738 - DNA, 33 bp, Homo sapien
tttacaatgaaatcaatatacagtgtcccatga

SEQ ID NO: 824739 - DNA, 33 bp, Homo sapien
gtaggttcgtagcaaacgcctcttgacttatat

SEQ ID NO: 824740 - DNA, 33 bp, Homo sapien
gtaggttcgtagcaaatgcctcttgacttatat

SEQ ID NO: 824741 - DNA, 33 bp, Homo sapien
aggtaacctggaaacacgggcagatctgattga

SEQ ID NO: 824742 - DNA, 33 bp, Homo sapien
aggtaacctggaaacaggggcagatctgattga

SEQ ID NO: 824743 - DNA, 33 bp, Homo sapien
ctgggtccaggagtgaaaagacacttggaacag

SEQ ID NO: 824744 - DNA, 33 bp, Homo sapien
ctgggtccaggagtgagaagacacttggaacag

SEQ ID NO: 824745 - DNA, 33 bp, Homo sapien
ttatatcttgctctcagatctacttcttgtctg

SEQ ID NO: 824746 - DNA, 33 bp, Homo sapien
ttatatcttgctctcatatctacttcttgtctg

SEQ ID NO: 824747 - DNA, 33 bp, Homo sapien
agcagtaaactgagtcacagaataaagaatgat

SEQ ID NO: 824748 - DNA, 33 bp, Homo sapien
agcagtaaactgagtcgcagaataaagaatgat

SEQ ID NO: 824749 - DNA, 33 bp, Homo sapien
aggcttatgtccaagacgcacaggagggattct

SEQ ID NO: 824750 - DNA, 33 bp, Homo sapien
aggcttatgtccaagatgcacaggagggattct

SEQ ID NO: 824751 - DNA, 33 bp, Homo sapien
ttcgtcctgaggtaaactagcctaagtgattat

SEQ ID NO: 824752 - DNA, 33 bp, Homo sapien
ttcgtcctgaggtaaattagcctaagtgattat

SEQ ID NO: 824753 - DNA, 33 bp, Homo sapien
cttgcatcttccaggaaaagagatctctagtgg

SEQ ID NO: 824754 - DNA, 33 bp, Homo sapien
cttgcatcttccaggacaagagatctctagtgg

SEQ ID NO: 824755 - DNA, 33 bp, Homo sapien
agtgccaattggataacgcctttagtggaattg

SEQ ID NO: 824756 - DNA, 33 bp, Homo sapien
agtgccaattggataatgcctttagtggaattg

SEQ ID NO: 824757 - DNA, 33 bp, Homo sapien
ctgttcctagcctctgaaaatcccatctccttt

SEQ ID NO: 824758 - DNA, 33 bp, Homo sapien
ctgttcctagcctctggaaatcccatctccttt

SEQ ID NO: 824759 - DNA, 33 bp, Homo sapien
gagtgactctccaatacgaggaatgatctacgt

SEQ ID NO: 824760 - DNA, 33 bp, Homo sapien
gagtgactctccaatatgaggaatgatctacgt

SEQ ID NO: 824761 - DNA, 33 bp, Homo sapien
aaaattctaggactaaccactagaaacctactt

SEQ ID NO: 824762 - DNA, 33 bp, Homo sapien
aaaattctaggactaagcactagaaacctactt

SEQ ID NO: 824763 - DNA, 33 bp, Homo sapien
ctataaatacctgaaagaatggatgtcaaaaat

SEQ ID NO: 824764 - DNA, 33 bp, Homo sapien
ctataaatacctgaaataatggatgtcaaaaat

SEQ ID NO: 824765 - DNA, 33 bp, Homo sapien
tagttcaaaggaccaacgctcaacacatgattt

SEQ ID NO: 824766 - DNA, 33 bp, Homo sapien
tagttcaaaggaccaatgctcaacacatgattt

SEQ ID NO: 824767 - DNA, 33 bp, Homo sapien
ttctatttgcggtgatgaaaagttttgggaatg

SEQ ID NO: 824768 - DNA, 33 bp, Homo sapien
ttctatttgcggtgattaaaagttttgggaatg

SEQ ID NO: 824769 - DNA, 33 bp, Homo sapien
ttctattcagtttctaagggggaaaagagattt

SEQ ID NO: 824770 - DNA, 33 bp, Homo sapien
ttctattcagtttctacgggggaaaagagattt

SEQ ID NO: 824771 - DNA, 33 bp, Homo sapien
tggaagagagaaaaatcattctggttgtgagga

SEQ ID NO: 824772 - DNA, 33 bp, Homo sapien
tggaagagagaaaaatgattctggttgtgagga

SEQ ID NO: 824773 - DNA, 33 bp, Homo sapien
tgacccaaagccaaaccgccagtactagatgta

SEQ ID NO: 824774 - DNA, 33 bp, Homo sapien
tgacccaaagccaaactgccagtactagatgta

SEQ ID NO: 824775 - DNA, 33 bp, Homo sapien
tcccatctcgagtcccaaaatgcgtcatgaact

SEQ ID NO: 824776 - DNA, 33 bp, Homo sapien
tcccatctcgagtcccgaaatgcgtcatgaact

SEQ ID NO: 824777 - DNA, 33 bp, Homo sapien
tgttttgaactctacacaaatggaatcacacag

SEQ ID NO: 824778 - DNA, 33 bp, Homo sapien
tgttttgaactctacataaatggaatcacacag

SEQ ID NO: 824779 - DNA, 33 bp, Homo sapien
atacttgaaaaaagccagatgaaaaagagtata

SEQ ID NO: 824780 - DNA, 33 bp, Homo sapien
atacttgaaaaaagccggatgaaaaagagtata

SEQ ID NO: 824781 - DNA, 33 bp, Homo sapien
tttcccttcttgagaaacttatttccgtcatat

SEQ ID NO: 824782 - DNA, 33 bp, Homo sapien
tttcccttcttgagaatcttatttccgtcatat

SEQ ID NO: 824783 - DNA, 33 bp, Homo sapien
attgataggtggaagacggaaagagaaagctga

SEQ ID NO: 824784 - DNA, 33 bp, Homo sapien
attgataggtggaagatggaaagagaaagctga

SEQ ID NO: 824785 - DNA, 33 bp, Homo sapien
tagatgagaaaactacagcttgataggataaat

SEQ ID NO: 824786 - DNA, 33 bp, Homo sapien
tagatgagaaaactacggcttgataggataaat

SEQ ID NO: 824787 - DNA, 33 bp, Homo sapien
cttctgttagttgaagacaaatgcattcctaac

SEQ ID NO: 824788 - DNA, 33 bp, Homo sapien
cttctgttagttgaaggcaaatgcattcctaac

SEQ ID NO: 824789 - DNA, 33 bp, Homo sapien
aagataagaccaaaaagaaatgttagagatcaa

SEQ ID NO: 824790 - DNA, 33 bp, Homo sapien
aagataagaccaaaaataaatgttagagatcaa

SEQ ID NO: 824791 - DNA, 33 bp, Homo sapien
gttcacagttgagacacaggtcgagtgaaagac

SEQ ID NO: 824792 - DNA, 33 bp, Homo sapien
gttcacagttgagacataggtcgagtgaaagac

SEQ ID NO: 824793 - DNA, 33 bp, Homo sapien
attaacaactcttctaggatctgaaagagaggt

SEQ ID NO: 824794 - DNA, 33 bp, Homo sapien
attaacaactcttctatgatctgaaagagaggt

SEQ ID NO: 824795 - DNA, 33 bp, Homo sapien
acgtggtttctgatgaaaattcagtcgttctta

SEQ ID NO: 824796 - DNA, 33 bp, Homo sapien
acgtggtttctgatgagaattcagtcgttctta

SEQ ID NO: 824797 - DNA, 33 bp, Homo sapien
attgtcagaaatgttacaaatttgatgaaaact

SEQ ID NO: 824798 - DNA, 33 bp, Homo sapien
attgtcagaaatgttagaaatttgatgaaaact

SEQ ID NO: 824799 - DNA, 33 bp, Homo sapien
ttaaaaggcccaaatgcaacttctatatgtgtg

SEQ ID NO: 824800 - DNA, 33 bp, Homo sapien
ttaaaaggcccaaatggaacttctatatgtgtg

SEQ ID NO: 824801 - DNA, 33 bp, Homo sapien
aagagtgtgtccaacaacaaatttcatagattt

SEQ ID NO: 824802 - DNA, 33 bp, Homo sapien
aagagtgtgtccaacatcaaatttcatagattt

SEQ ID NO: 824803 - DNA, 33 bp, Homo sapien
ttggttttgaaatttcgcttttgctgatgaaca

SEQ ID NO: 824804 - DNA, 33 bp, Homo sapien
ttggttttgaaatttctcttttgctgatgaaca

SEQ ID NO: 824805 - DNA, 33 bp, Homo sapien
caggaaaaaaatgggcagattcgaagcctcaag

SEQ ID NO: 824806 - DNA, 33 bp, Homo sapien
caggaaaaaaatgggcggattcgaagcctcaag

SEQ ID NO: 824807 - DNA, 33 bp, Homo sapien
agattatagtcctaaaagaagaggccgatgttt

SEQ ID NO: 824808 - DNA, 33 bp, Homo sapien
agattatagtcctaaatgaagaggccgatgttt

SEQ ID NO: 824809 - DNA, 33 bp, Homo sapien
caagaatactgacctcagaacttcccataggta

SEQ ID NO: 824810 - DNA, 33 bp, Homo sapien
caagaatactgacctcggaacttcccataggta

SEQ ID NO: 824811 - DNA, 33 bp, Homo sapien
cggccatttgaaaataagtatcttctgattgca

SEQ ID NO: 824812 - DNA, 33 bp, Homo sapien
cggccatttgaaaatacgtatcttctgattgca

SEQ ID NO: 824813 - DNA, 33 bp, Homo sapien
ttgttattgcacaaacaagattggtctgcccta

SEQ ID NO: 824814 - DNA, 33 bp, Homo sapien
ttgttattgcacaaacgagattggtctgcccta

SEQ ID NO: 824815 - DNA, 33 bp, Homo sapien
ctggagaaatgctacaaaaggaaccaaactgtc

SEQ ID NO: 824816 - DNA, 33 bp, Homo sapien
ctggagaaatgctacagaaggaaccaaactgtc

SEQ ID NO: 824817 - DNA, 33 bp, Homo sapien
ctccactctgccattacagcatgcaagcagcca

SEQ ID NO: 824818 - DNA, 33 bp, Homo sapien
ctccactctgccattagagcatgcaagcagcca

SEQ ID NO: 824819 - DNA, 33 bp, Homo sapien
ttcccgtctaataagcactggatatacagcatg

SEQ ID NO: 824820 - DNA, 33 bp, Homo sapien
ttcccgtctaataagcgctggatatacagcatg

SEQ ID NO: 824821 - DNA, 33 bp, Homo sapien
tttccatatatactcacgtgctgcataacaatg

SEQ ID NO: 824822 - DNA, 33 bp, Homo sapien
tttccatatatactcatgtgctgcataacaatg

SEQ ID NO: 824823 - DNA, 33 bp, Homo sapien
gtacaatatgttgctacactgaataggctaggc

SEQ ID NO: 824824 - DNA, 33 bp, Homo sapien
gtacaatatgttgctatactgaataggctaggc

SEQ ID NO: 824825 - DNA, 33 bp, Homo sapien
tctcctgggctacaaaaatgttgtacaatatgt

SEQ ID NO: 824826 - DNA, 33 bp, Homo sapien
tctcctgggctacaaagatgttgtacaatatgt

SEQ ID NO: 824827 - DNA, 33 bp, Homo sapien
atgagtgtagacccttcaaaagctagagctggc

SEQ ID NO: 824828 - DNA, 33 bp, Homo sapien
atgagtgtagacccttgaaaagctagagctggc

SEQ ID NO: 824829 - DNA, 33 bp, Homo sapien
ttctgggcttatcttacatcttccctgccagag

SEQ ID NO: 824830 - DNA, 33 bp, Homo sapien
ttctgggcttatcttatatcttccctgccagag

SEQ ID NO: 824831 - DNA, 33 bp, Homo sapien
gaggctgttgcaagaaaccagacataagacaac

SEQ ID NO: 824832 - DNA, 33 bp, Homo sapien
gaggctgttgcaagaatccagacataagacaac

SEQ ID NO: 824833 - DNA, 33 bp, Homo sapien
tgcgttttaaaaggaacacttttgttgctgggt

SEQ ID NO: 824834 - DNA, 33 bp, Homo sapien
tgcgttttaaaaggaagacttttgttgctgggt

SEQ ID NO: 824835 - DNA, 33 bp, Homo sapien
ttaaatgacaacagacaggttaaagagggaact

SEQ ID NO: 824836 - DNA, 33 bp, Homo sapien
ttaaatgacaacagacgggttaaagagggaact

SEQ ID NO: 824837 - DNA, 33 bp, Homo sapien
taggcaacagaaataacgcaaaataacccagaa

SEQ ID NO: 824838 - DNA, 33 bp, Homo sapien
taggcaacagaaataatgcaaaataacccagaa

SEQ ID NO: 824839 - DNA, 33 bp, Homo sapien
cctgaccatattgacaaaggagcatttgatgtc

SEQ ID NO: 824840 - DNA, 33 bp, Homo sapien
cctgaccatattgacagaggagcatttgatgtc

SEQ ID NO: 824841 - DNA, 33 bp, Homo sapien
tctacctcggctcccccagacagacagtggcat

SEQ ID NO: 824842 - DNA, 33 bp, Homo sapien
tctacctcggctcccctagacagacagtggcat

SEQ ID NO: 824843 - DNA, 33 bp, Homo sapien
tggaccagaaacccagaagtcattctagatatc

SEQ ID NO: 824844 - DNA, 33 bp, Homo sapien
tggaccagaaacccaggagtcattctagatatc

SEQ ID NO: 824845 - DNA, 33 bp, Homo sapien
tctcacctgcacttggcatgtttagagttagga

SEQ ID NO: 824846 - DNA, 33 bp, Homo sapien
tctcacctgcacttggtatgtttagagttagga

SEQ ID NO: 824847 - DNA, 33 bp, Homo sapien
cactgtttctctgaaaatggcttctctgtgctt

SEQ ID NO: 824848 - DNA, 33 bp, Homo sapien
cactgtttctctgaaagtggcttctctgtgctt

SEQ ID NO: 824849 - DNA, 33 bp, Homo sapien
aaaaaatgcatattaggaatttctcaagtaatt

SEQ ID NO: 824850 - DNA, 33 bp, Homo sapien
aaaaaatgcatattagtaatttctcaagtaatt

SEQ ID NO: 824851 - DNA, 33 bp, Homo sapien
gttcagtgtaatggaccggaagtaaaagtgaaa

SEQ ID NO: 824852 - DNA, 33 bp, Homo sapien
gttcagtgtaatggactggaagtaaaagtgaaa

SEQ ID NO: 824853 - DNA, 33 bp, Homo sapien
gctaagtatatgtgtcccaacaaactaaagaac

SEQ ID NO: 824854 - DNA, 33 bp, Homo sapien
gctaagtatatgtgtctcaacaaactaaagaac

SEQ ID NO: 824855 - DNA, 33 bp, Homo sapien
tttttttctgaaatgaagttgatgtatcctaag

SEQ ID NO: 824856 - DNA, 33 bp, Homo sapien
tttttttctgaaatgatgttgatgtatcctaag

SEQ ID NO: 824857 - DNA, 33 bp, Homo sapien
tgaagtgatccacaagactcatgtaaaattcgc

SEQ ID NO: 824858 - DNA, 33 bp, Homo sapien
tgaagtgatccacaaggctcatgtaaaattcgc

SEQ ID NO: 824859 - DNA, 33 bp, Homo sapien
taagcacactaaagccacctcagtgggacttct

SEQ ID NO: 824860 - DNA, 33 bp, Homo sapien
taagcacactaaagcctcctcagtgggacttct

SEQ ID NO: 824861 - DNA, 33 bp, Homo sapien
acattgtgaggagcgcagaagtttctaggtgtc

SEQ ID NO: 824862 - DNA, 33 bp, Homo sapien
acattgtgaggagcgcggaagtttctaggtgtc

SEQ ID NO: 824863 - DNA, 33 bp, Homo sapien
tactccatctccttataaaagcagtctatgcag

SEQ ID NO: 824864 - DNA, 33 bp, Homo sapien
tactccatctccttatgaaagcagtctatgcag

SEQ ID NO: 824865 - DNA, 33 bp, Homo sapien
ccatgtgtcaatcaagcccatgatctgatcaca

SEQ ID NO: 824866 - DNA, 33 bp, Homo sapien
ccatgtgtcaatcaaggccatgatctgatcaca

SEQ ID NO: 824867 - DNA, 33 bp, Homo sapien
ggcatcttgtgcatagccatttgccatttcagg

SEQ ID NO: 824868 - DNA, 33 bp, Homo sapien
ggcatcttgtgcatagtcatttgccatttcagg

SEQ ID NO: 824869 - DNA, 33 bp, Homo sapien
ggagtggagtaaagcaatgaggaaatacctcgc

SEQ ID NO: 824870 - DNA, 33 bp, Homo sapien
ggagtggagtaaagcattgaggaaatacctcgc

SEQ ID NO: 824871 - DNA, 33 bp, Homo sapien
aaatcctgcctgggaaatagagagttaacacat

SEQ ID NO: 824872 - DNA, 33 bp, Homo sapien
aaatcctgcctgggaagtagagagttaacacat

SEQ ID NO: 824873 - DNA, 33 bp, Homo sapien
tgtgtatgtgtatgtaacaggatctatatatgg

SEQ ID NO: 824874 - DNA, 33 bp, Homo sapien
tgtgtatgtgtatgtaccaggatctatatatgg

SEQ ID NO: 824875 - DNA, 33 bp, Homo sapien
agattaatctttctaaatgtatcctgatttgtc

SEQ ID NO: 824876 - DNA, 33 bp, Homo sapien
agattaatctttctaagtgtatcctgatttgtc

SEQ ID NO: 824877 - DNA, 33 bp, Homo sapien
caaaatggaacagcaacagttgagcctacagct

SEQ ID NO: 824878 - DNA, 33 bp, Homo sapien
caaaatggaacagcaagagttgagcctacagct

SEQ ID NO: 824879 - DNA, 33 bp, Homo sapien
ataatgaccttaagtaaaagatacgttatgtac

SEQ ID NO: 824880 - DNA, 33 bp, Homo sapien
ataatgaccttaagtacaagatacgttatgtac

SEQ ID NO: 824881 - DNA, 33 bp, Homo sapien
agaaagaatgtatccaagttttcttatgtcttt

SEQ ID NO: 824882 - DNA, 33 bp, Homo sapien
agaaagaatgtatccatgttttcttatgtcttt

SEQ ID NO: 824883 - DNA, 33 bp, Homo sapien
ataaagatgttgaaaactgataagctttccaat

SEQ ID NO: 824884 - DNA, 33 bp, Homo sapien
ataaagatgttgaaaattgataagctttccaat

SEQ ID NO: 824885 - DNA, 33 bp, Homo sapien
gtcaaaatcagtagagaatgcaaaaggtaagga

SEQ ID NO: 824886 - DNA, 33 bp, Homo sapien
gtcaaaatcagtagaggatgcaaaaggtaagga

SEQ ID NO: 824887 - DNA, 33 bp, Homo sapien
agtctcaggatagaccagattactctattaaaa

SEQ ID NO: 824888 - DNA, 33 bp, Homo sapien
agtctcaggatagaccggattactctattaaaa

SEQ ID NO: 824889 - DNA, 33 bp, Homo sapien
tcctgaactctttaccactagactctgctctct

SEQ ID NO: 824890 - DNA, 33 bp, Homo sapien
tcctgaactctttaccgctagactctgctctct

SEQ ID NO: 824891 - DNA, 33 bp, Homo sapien
gttgtgtgtttttctacgattttactagttcat

SEQ ID NO: 824892 - DNA, 33 bp, Homo sapien
gttgtgtgtttttctaggattttactagttcat

SEQ ID NO: 824893 - DNA, 33 bp, Homo sapien
gtgtgtttttttccaggactatttcaacttcac

SEQ ID NO: 824894 - DNA, 33 bp, Homo sapien
gtgtgtttttttccagtactatttcaacttcac

SEQ ID NO: 824895 - DNA, 33 bp, Homo sapien
ccagtcagtggaagaacagttgaatcatttgta

SEQ ID NO: 824896 - DNA, 33 bp, Homo sapien
ccagtcagtggaagaatagttgaatcatttgta

SEQ ID NO: 824897 - DNA, 33 bp, Homo sapien
atattttggggtatcacgcagctttgaaaaagt

SEQ ID NO: 824898 - DNA, 33 bp, Homo sapien
atattttggggtatcatgcagctttgaaaaagt

SEQ ID NO: 824899 - DNA, 33 bp, Homo sapien
tgtgggcaaaactgtacaggggaagatgtgagg

SEQ ID NO: 824900 - DNA, 33 bp, Homo sapien
tgtgggcaaaactgtataggggaagatgtgagg

SEQ ID NO: 824901 - DNA, 33 bp, Homo sapien
aaaagaattgaaataacatagtttgctccaact

SEQ ID NO: 824902 - DNA, 33 bp, Homo sapien
aaaagaattgaaataatatagtttgctccaact

SEQ ID NO: 824903 - DNA, 33 bp, Homo sapien
acttcttatggtaacactatgtttaggcaaact

SEQ ID NO: 824904 - DNA, 33 bp, Homo sapien
acttcttatggtaacattatgtttaggcaaact

SEQ ID NO: 824905 - DNA, 33 bp, Homo sapien
ttaagtctctggaaaaaaggtaacgaacgtcaa

SEQ ID NO: 824906 - DNA, 33 bp, Homo sapien
ttaagtctctggaaaagaggtaacgaacgtcaa

SEQ ID NO: 824907 - DNA, 33 bp, Homo sapien
atttccagtgaaagatgagcatgcttgtgtttt

SEQ ID NO: 824908 - DNA, 33 bp, Homo sapien
atttccagtgaaagattagcatgcttgtgtttt

SEQ ID NO: 824909 - DNA, 33 bp, Homo sapien
gatcacaagtaaattcactgggtgctaaaagat

SEQ ID NO: 824910 - DNA, 33 bp, Homo sapien
gatcacaagtaaattcgctgggtgctaaaagat

SEQ ID NO: 824911 - DNA, 33 bp, Homo sapien
gcaaagacagcaaaacactctcagaaaaatgat

SEQ ID NO: 824912 - DNA, 33 bp, Homo sapien
gcaaagacagcaaaacgctctcagaaaaatgat

SEQ ID NO: 824913 - DNA, 33 bp, Homo sapien
gttaagaggctgataccaacgacttttagataa

SEQ ID NO: 824914 - DNA, 33 bp, Homo sapien
gttaagaggctgatactaacgacttttagataa

SEQ ID NO: 824915 - DNA, 33 bp, Homo sapien
tccgtatttatccctaaggcgtgccatctataa

SEQ ID NO: 824916 - DNA, 33 bp, Homo sapien
tccgtatttatccctacggcgtgccatctataa

SEQ ID NO: 824917 - DNA, 33 bp, Homo sapien
acacataagcaaatagcagggaacgtgaaaggg

SEQ ID NO: 824918 - DNA, 33 bp, Homo sapien
acacataagcaaatagtagggaacgtgaaaggg

SEQ ID NO: 824919 - DNA, 33 bp, Homo sapien
atattatggttggattcaaggatgattagtacg

SEQ ID NO: 824920 - DNA, 33 bp, Homo sapien
atattatggttggatttaaggatgattagtacg

SEQ ID NO: 824921 - DNA, 33 bp, Homo sapien
tctattgtcccatccccaactagcagcaaaagt

SEQ ID NO: 824922 - DNA, 33 bp, Homo sapien
tctattgtcccatccctaactagcagcaaaagt

SEQ ID NO: 824923 - DNA, 33 bp, Homo sapien
atctacacaagtcagaatccttattttccccat

SEQ ID NO: 824924 - DNA, 33 bp, Homo sapien
atctacacaagtcagattccttattttccccat

SEQ ID NO: 824925 - DNA, 33 bp, Homo sapien
aagcttctcaaccacaaagtagaagaggatgta

SEQ ID NO: 824926 - DNA, 33 bp, Homo sapien
aagcttctcaaccacagagtagaagaggatgta

SEQ ID NO: 824927 - DNA, 33 bp, Homo sapien
gagggctgaactgccaaagatgacttataatgt

SEQ ID NO: 824928 - DNA, 33 bp, Homo sapien
gagggctgaactgccagagatgacttataatgt

SEQ ID NO: 824929 - DNA, 33 bp, Homo sapien
tcacaaatggaaatcaaaattcagagctgtaac

SEQ ID NO: 824930 - DNA, 33 bp, Homo sapien
tcacaaatggaaatcacaattcagagctgtaac

SEQ ID NO: 824931 - DNA, 33 bp, Homo sapien
acacattccttgctctaaaaaaatgtgaagttt

SEQ ID NO: 824932 - DNA, 33 bp, Homo sapien
acacattccttgctctcaaaaaatgtgaagttt

SEQ ID NO: 824933 - DNA, 33 bp, Homo sapien
ggcctcaatgttggaaatgttgagtttgagatg

SEQ ID NO: 824934 - DNA, 33 bp, Homo sapien
ggcctcaatgttggaactgttgagtttgagatg

SEQ ID NO: 824935 - DNA, 33 bp, Homo sapien
ttctgctcccaggaaaattattacttatatgtt

SEQ ID NO: 824936 - DNA, 33 bp, Homo sapien
ttctgctcccaggaaagttattacttatatgtt

SEQ ID NO: 824937 - DNA, 33 bp, Homo sapien
gggcaaagctaagtacccttgtggcctaagctc

SEQ ID NO: 824938 - DNA, 33 bp, Homo sapien
gggcaaagctaagtacgcttgtggcctaagctc

SEQ ID NO: 824939 - DNA, 33 bp, Homo sapien
tgcctgccctgcatcaaaaccatgctaatgtgg

SEQ ID NO: 824940 - DNA, 33 bp, Homo sapien
tgcctgccctgcatcagaaccatgctaatgtgg

SEQ ID NO: 824941 - DNA, 33 bp, Homo sapien
caccaaagcatctctcaagccaaagggaataaa

SEQ ID NO: 824942 - DNA, 33 bp, Homo sapien
caccaaagcatctctcgagccaaagggaataaa

SEQ ID NO: 824943 - DNA, 33 bp, Homo sapien
tattttaaaaattacacgacttttgcattctac

SEQ ID NO: 824944 - DNA, 33 bp, Homo sapien
tattttaaaaattacatgacttttgcattctac

SEQ ID NO: 824945 - DNA, 33 bp, Homo sapien
tgggattctccaataccacagaccgtgccttat

SEQ ID NO: 824946 - DNA, 33 bp, Homo sapien
tgggattctccaatactacagaccgtgccttat

SEQ ID NO: 824947 - DNA, 33 bp, Homo sapien
gtcttaaactaaagcacatacctgtagttaaaa

SEQ ID NO: 824948 - DNA, 33 bp, Homo sapien
gtcttaaactaaagcatatacctgtagttaaaa

SEQ ID NO: 824949 - DNA, 33 bp, Homo sapien
tagtttaagactatacagattgacttcctactt

SEQ ID NO: 824950 - DNA, 33 bp, Homo sapien
tagtttaagactatacggattgacttcctactt

SEQ ID NO: 824951 - DNA, 33 bp, Homo sapien
cttctgagtttttactaaaggacacaatggtcc

SEQ ID NO: 824952 - DNA, 33 bp, Homo sapien
cttctgagtttttactgaaggacacaatggtcc

SEQ ID NO: 824953 - DNA, 33 bp, Homo sapien
tgaggtggtgtagttacagatattgaaaagcct

SEQ ID NO: 824954 - DNA, 33 bp, Homo sapien
tgaggtggtgtagttatagatattgaaaagcct

SEQ ID NO: 824955 - DNA, 33 bp, Homo sapien
ctataaaaagcaacccaaggagaactttcatgt

SEQ ID NO: 824956 - DNA, 33 bp, Homo sapien
ctataaaaagcaacccgaggagaactttcatgt

SEQ ID NO: 824957 - DNA, 33 bp, Homo sapien
ctaatgacagatcctgaagaaagggaggaaata

SEQ ID NO: 824958 - DNA, 33 bp, Homo sapien
ctaatgacagatcctgcagaaagggaggaaata

SEQ ID NO: 824959 - DNA, 33 bp, Homo sapien
ctatgcgttaatgacaacgtagacccaaatccc

SEQ ID NO: 824960 - DNA, 33 bp, Homo sapien
ctatgcgttaatgacagcgtagacccaaatccc

SEQ ID NO: 824961 - DNA, 33 bp, Homo sapien
ctgcaggtagaataaaacatgaggtcctgaaca

SEQ ID NO: 824962 - DNA, 33 bp, Homo sapien
ctgcaggtagaataaagcatgaggtcctgaaca

SEQ ID NO: 824963 - DNA, 33 bp, Homo sapien
acagagaaaaataacaccaggcatctgctttag

SEQ ID NO: 824964 - DNA, 33 bp, Homo sapien
acagagaaaaataacatcaggcatctgctttag

SEQ ID NO: 824965 - DNA, 33 bp, Homo sapien
aggctcatcgctgtgacagccaaactagaacag

SEQ ID NO: 824966 - DNA, 33 bp, Homo sapien
aggctcatcgctgtgatagccaaactagaacag

SEQ ID NO: 824967 - DNA, 33 bp, Homo sapien
gcctagcacacaattaacacttggtatatgttg

SEQ ID NO: 824968 - DNA, 33 bp, Homo sapien
gcctagcacacaattagcacttggtatatgttg

SEQ ID NO: 824969 - DNA, 33 bp, Homo sapien
ttgaagacaaaattccaatgcaaagataggagc

SEQ ID NO: 824970 - DNA, 33 bp, Homo sapien
ttgaagacaaaattccgatgcaaagataggagc

SEQ ID NO: 824971 - DNA, 33 bp, Homo sapien
ctcaacctcttaaaaaccagtttcatcttaact

SEQ ID NO: 824972 - DNA, 33 bp, Homo sapien
ctcaacctcttaaaaatcagtttcatcttaact

SEQ ID NO: 824973 - DNA, 33 bp, Homo sapien
cttctgtaagagagtcactgttaggttaaagtt

SEQ ID NO: 824974 - DNA, 33 bp, Homo sapien
cttctgtaagagagtcgctgttaggttaaagtt

SEQ ID NO: 824975 - DNA, 33 bp, Homo sapien
agagacttttgcttcagaaagacttgacttcca

SEQ ID NO: 824976 - DNA, 33 bp, Homo sapien
agagacttttgcttcataaagacttgacttcca

SEQ ID NO: 824977 - DNA, 33 bp, Homo sapien
tgaccatcgataccaaaggctttctggaggtgt

SEQ ID NO: 824978 - DNA, 33 bp, Homo sapien
tgaccatcgataccaatggctttctggaggtgt

SEQ ID NO: 824979 - DNA, 33 bp, Homo sapien
tatttttgcatggaagaattttttccctaaaag

SEQ ID NO: 824980 - DNA, 33 bp, Homo sapien
tatttttgcatggaagcattttttccctaaaag

SEQ ID NO: 824981 - DNA, 33 bp, Homo sapien
aacatggaatgatacaaatgatggcattgagaa

SEQ ID NO: 824982 - DNA, 33 bp, Homo sapien
aacatggaatgatacagatgatggcattgagaa

SEQ ID NO: 824983 - DNA, 33 bp, Homo sapien
taatcaaatccaacaactcatttctgcttaact

SEQ ID NO: 824984 - DNA, 33 bp, Homo sapien
taatcaaatccaacaagtcatttctgcttaact

SEQ ID NO: 824985 - DNA, 33 bp, Homo sapien
aatctctctaaagatacgttggaatgtctcaca

SEQ ID NO: 824986 - DNA, 33 bp, Homo sapien
aatctctctaaagatatgttggaatgtctcaca

SEQ ID NO: 824987 - DNA, 33 bp, Homo sapien
gttgaaatgatttatgaaaactgacaattgaag

SEQ ID NO: 824988 - DNA, 33 bp, Homo sapien
gttgaaatgatttatgcaaactgacaattgaag

SEQ ID NO: 824989 - DNA, 33 bp, Homo sapien
cagataatggttctgaaggacagaataatcatt

SEQ ID NO: 824990 - DNA, 33 bp, Homo sapien
cagataatggttctgacggacagaataatcatt

SEQ ID NO: 824991 - DNA, 33 bp, Homo sapien
cctttatcatccatctcaacacttcatcttctg

SEQ ID NO: 824992 - DNA, 33 bp, Homo sapien
cctttatcatccatctgaacacttcatcttctg

SEQ ID NO: 824993 - DNA, 33 bp, Homo sapien
tggtgtggactgtgtcaccattaaaaggttcag

SEQ ID NO: 824994 - DNA, 33 bp, Homo sapien
tggtgtggactgtgtcgccattaaaaggttcag

SEQ ID NO: 824995 - DNA, 33 bp, Homo sapien
ttgccaagccaataaacttggtatgagatgttg

SEQ ID NO: 824996 - DNA, 33 bp, Homo sapien
ttgccaagccaataaatttggtatgagatgttg

SEQ ID NO: 824997 - DNA, 33 bp, Homo sapien
cagcgctaatgaatgaatagggttacaatgccc

SEQ ID NO: 824998 - DNA, 33 bp, Homo sapien
cagcgctaatgaatgactagggttacaatgccc

SEQ ID NO: 824999 - DNA, 33 bp, Homo sapien
tggcctgagctcagaacactttaatcatagaac

SEQ ID NO: 825000 - DNA, 33 bp, Homo sapien
tggcctgagctcagaatactttaatcatagaac

SEQ ID NO: 825001 - DNA, 33 bp, Homo sapien
acaaatcagtagtaaacaactcagaagtagttc

SEQ ID NO: 825002 - DNA, 33 bp, Homo sapien
acaaatcagtagtaaataactcagaagtagttc

SEQ ID NO: 825003 - DNA, 33 bp, Homo sapien
ggtgtgaagaaaccgacagctgaggctgcccca

SEQ ID NO: 825004 - DNA, 33 bp, Homo sapien
ggtgtgaagaaaccgatagctgaggctgcccca

SEQ ID NO: 825005 - DNA, 33 bp, Homo sapien
ccaagctgaaaggcaagccctccagagagcgtt

SEQ ID NO: 825006 - DNA, 33 bp, Homo sapien
ccaagctgaaaggcaatccctccagagagcgtt

SEQ ID NO: 825007 - DNA, 33 bp, Homo sapien
ccaacgtgattaagtaccataaaggcaaataaa

SEQ ID NO: 825008 - DNA, 33 bp, Homo sapien
ccaacgtgattaagtatcataaaggcaaataaa

SEQ ID NO: 825009 - DNA, 33 bp, Homo sapien
ctgatgttggcctgtaagggaccttgtgatctg

SEQ ID NO: 825010 - DNA, 33 bp, Homo sapien
ctgatgttggcctgtaggggaccttgtgatctg

SEQ ID NO: 825011 - DNA, 33 bp, Homo sapien
ttttaaatctgacgtacacaggagcacatacca

SEQ ID NO: 825012 - DNA, 33 bp, Homo sapien
ttttaaatctgacgtatacaggagcacatacca

SEQ ID NO: 825013 - DNA, 33 bp, Homo sapien
agaaactgatattccaaagagatgcccagtctt

SEQ ID NO: 825014 - DNA, 33 bp, Homo sapien
agaaactgatattccagagagatgcccagtctt

SEQ ID NO: 825015 - DNA, 33 bp, Homo sapien
agaatattgctgaataaaagtgttgagtgaatg

SEQ ID NO: 825016 - DNA, 33 bp, Homo sapien
agaatattgctgaatagaagtgttgagtgaatg

SEQ ID NO: 825017 - DNA, 33 bp, Homo sapien
gaacctcaataaatggccactggattccctggt

SEQ ID NO: 825018 - DNA, 33 bp, Homo sapien
gaacctcaataaatggtcactggattccctggt

SEQ ID NO: 825019 - DNA, 33 bp, Homo sapien
acgtgtcccaggtgccaaacagaacatggagag

SEQ ID NO: 825020 - DNA, 33 bp, Homo sapien
acgtgtcccaggtgccgaacagaacatggagag

SEQ ID NO: 825021 - DNA, 33 bp, Homo sapien
tgcaataagggaatacacaacgtggcaccagcc

SEQ ID NO: 825022 - DNA, 33 bp, Homo sapien
tgcaataagggaatacgcaacgtggcaccagcc

SEQ ID NO: 825023 - DNA, 33 bp, Homo sapien
atttgttcgtggatacccagtgtttctctgaat

SEQ ID NO: 825024 - DNA, 33 bp, Homo sapien
atttgttcgtggatactcagtgtttctctgaat

SEQ ID NO: 825025 - DNA, 33 bp, Homo sapien
actgagtacatcacaacgctgtttagtgcatta

SEQ ID NO: 825026 - DNA, 33 bp, Homo sapien
actgagtacatcacaatgctgtttagtgcatta

SEQ ID NO: 825027 - DNA, 33 bp, Homo sapien
gttacaatcggttataagccaaacacatcccca

SEQ ID NO: 825028 - DNA, 33 bp, Homo sapien
gttacaatcggttatacgccaaacacatcccca

SEQ ID NO: 825029 - DNA, 33 bp, Homo sapien
gcaagtaagacttaataaagaacccaggcattt

SEQ ID NO: 825030 - DNA, 33 bp, Homo sapien
gcaagtaagacttaatgaagaacccaggcattt

SEQ ID NO: 825031 - DNA, 33 bp, Homo sapien
ttcaagttcagcttaaaaaaacattttgtttca

SEQ ID NO: 825032 - DNA, 33 bp, Homo sapien
ttcaagttcagcttaagaaaacattttgtttca

SEQ ID NO: 825033 - DNA, 33 bp, Homo sapien
caattgcactgattaaatggttgttacacaagt

SEQ ID NO: 825034 - DNA, 33 bp, Homo sapien
caattgcactgattaagtggttgttacacaagt

SEQ ID NO: 825035 - DNA, 33 bp, Homo sapien
ggaatgtacctcaaccaaactttggaatatacc

SEQ ID NO: 825036 - DNA, 33 bp, Homo sapien
ggaatgtacctcaaccgaactttggaatatacc

SEQ ID NO: 825037 - DNA, 33 bp, Homo sapien
aatagtacatagataaaagattcgtttagacta

SEQ ID NO: 825038 - DNA, 33 bp, Homo sapien
aatagtacatagataagagattcgtttagacta

SEQ ID NO: 825039 - DNA, 33 bp, Homo sapien
gcttgaagggtcaccacgatcacccatcagctt

SEQ ID NO: 825040 - DNA, 33 bp, Homo sapien
gcttgaagggtcaccatgatcacccatcagctt

SEQ ID NO: 825041 - DNA, 33 bp, Homo sapien
ggtcccttgccagtaacgcacaaagccttagac

SEQ ID NO: 825042 - DNA, 33 bp, Homo sapien
ggtcccttgccagtaatgcacaaagccttagac

SEQ ID NO: 825043 - DNA, 33 bp, Homo sapien
ttataggaagaacactcacaataatgctttaag

SEQ ID NO: 825044 - DNA, 33 bp, Homo sapien
ttataggaagaacactgacaataatgctttaag

SEQ ID NO: 825045 - DNA, 33 bp, Homo sapien
gattcaatgagcaaaacaaaagatccagtcctc

SEQ ID NO: 825046 - DNA, 33 bp, Homo sapien
gattcaatgagcaaaataaaagatccagtcctc

SEQ ID NO: 825047 - DNA, 33 bp, Homo sapien
gtcctgtacaaatctccatcagctgaatggatg

SEQ ID NO: 825048 - DNA, 33 bp, Homo sapien
gtcctgtacaaatctctatcagctgaatggatg

SEQ ID NO: 825049 - DNA, 33 bp, Homo sapien
tagcagaaaaaagaaacggttcagagtttttga

SEQ ID NO: 825050 - DNA, 33 bp, Homo sapien
tagcagaaaaaagaaatggttcagagtttttga

SEQ ID NO: 825051 - DNA, 33 bp, Homo sapien
ctgtgaagtccaaccacgtcacacctccctttc

SEQ ID NO: 825052 - DNA, 33 bp, Homo sapien
ctgtgaagtccaaccatgtcacacctccctttc

SEQ ID NO: 825053 - DNA, 33 bp, Homo sapien
tagctcttaccttcaaagatattaaaattagca

SEQ ID NO: 825054 - DNA, 33 bp, Homo sapien
tagctcttaccttcaaggatattaaaattagca

SEQ ID NO: 825055 - DNA, 33 bp, Homo sapien
gaattccaggcaagacactagagacacaagtta

SEQ ID NO: 825056 - DNA, 33 bp, Homo sapien
gaattccaggcaagacgctagagacacaagtta

SEQ ID NO: 825057 - DNA, 33 bp, Homo sapien
tctgggaacagtggagaatatccaaagcaaaag

SEQ ID NO: 825058 - DNA, 33 bp, Homo sapien
tctgggaacagtggagcatatccaaagcaaaag

SEQ ID NO: 825059 - DNA, 33 bp, Homo sapien
gaacttcaagcaaacgaatctattcagaatttt

SEQ ID NO: 825060 - DNA, 33 bp, Homo sapien
gaacttcaagcaaacggatctattcagaatttt

SEQ ID NO: 825061 - DNA, 33 bp, Homo sapien
cataaagttgtttttacaatgacaagatcctgt

SEQ ID NO: 825062 - DNA, 33 bp, Homo sapien
cataaagttgtttttataatgacaagatcctgt

SEQ ID NO: 825063 - DNA, 33 bp, Homo sapien
aaggttatcgattttacacagggccacttagta

SEQ ID NO: 825064 - DNA, 33 bp, Homo sapien
aaggttatcgattttatacagggccacttagta

SEQ ID NO: 825065 - DNA, 33 bp, Homo sapien
attctcacactactaaccggtaactatgaatct

SEQ ID NO: 825066 - DNA, 33 bp, Homo sapien
attctcacactactaatcggtaactatgaatct

SEQ ID NO: 825067 - DNA, 33 bp, Homo sapien
tattgtcatgtcccaactggtagagaagaagtt

SEQ ID NO: 825068 - DNA, 33 bp, Homo sapien
tattgtcatgtcccaattggtagagaagaagtt

SEQ ID NO: 825069 - DNA, 33 bp, Homo sapien
agttatttgacatagacgactgtattacagtcc

SEQ ID NO: 825070 - DNA, 33 bp, Homo sapien
agttatttgacatagatgactgtattacagtcc

SEQ ID NO: 825071 - DNA, 33 bp, Homo sapien
aaatcatttcgttttacatggtctgaaactttg

SEQ ID NO: 825072 - DNA, 33 bp, Homo sapien
aaatcatttcgttttatatggtctgaaactttg

SEQ ID NO: 825073 - DNA, 33 bp, Homo sapien
tctcactccttttttcccatagttagtgccaag

SEQ ID NO: 825074 - DNA, 33 bp, Homo sapien
tctcactccttttttctcatagttagtgccaag

SEQ ID NO: 825075 - DNA, 33 bp, Homo sapien
tcaataggccactcaaatccatagcttcttctt

SEQ ID NO: 825076 - DNA, 33 bp, Homo sapien
tcaataggccactcaactccatagcttcttctt

SEQ ID NO: 825077 - DNA, 33 bp, Homo sapien
gaaataaaatgatatacgttagctgcttctaat

SEQ ID NO: 825078 - DNA, 33 bp, Homo sapien
gaaataaaatgatatatgttagctgcttctaat

SEQ ID NO: 825079 - DNA, 33 bp, Homo sapien
ccagccaatgttttctgaaagtttgccccttga

SEQ ID NO: 825080 - DNA, 33 bp, Homo sapien
ccagccaatgttttcttaaagtttgccccttga

SEQ ID NO: 825081 - DNA, 33 bp, Homo sapien
caagcagcacatgttaagagttgaaagttgaac

SEQ ID NO: 825082 - DNA, 33 bp, Homo sapien
caagcagcacatgttaggagttgaaagttgaac

SEQ ID NO: 825083 - DNA, 33 bp, Homo sapien
tatagttctacaaacaatgaatcacaaaatata

SEQ ID NO: 825084 - DNA, 33 bp, Homo sapien
tatagttctacaaacattgaatcacaaaatata

SEQ ID NO: 825085 - DNA, 33 bp, Homo sapien
ggttctatcttcattgcaaagtcctaaaaccta

SEQ ID NO: 825086 - DNA, 33 bp, Homo sapien
ggttctatcttcattgtaaagtcctaaaaccta

SEQ ID NO: 825087 - DNA, 33 bp, Homo sapien
aaaagtagaccaaccaagtaatagtttttaata

SEQ ID NO: 825088 - DNA, 33 bp, Homo sapien
aaaagtagaccaaccatgtaatagtttttaata

SEQ ID NO: 825089 - DNA, 33 bp, Homo sapien
ctctcaatagttctcactatgcacccaggatgg

SEQ ID NO: 825090 - DNA, 33 bp, Homo sapien
ctctcaatagttctcattatgcacccaggatgg

SEQ ID NO: 825091 - DNA, 33 bp, Homo sapien
agtgattctccttacccgaggcacttgagaaat

SEQ ID NO: 825092 - DNA, 33 bp, Homo sapien
agtgattctccttacctgaggcacttgagaaat

SEQ ID NO: 825093 - DNA, 33 bp, Homo sapien
ataaagtatgatgatcagatcagggtaattagc

SEQ ID NO: 825094 - DNA, 33 bp, Homo sapien
ataaagtatgatgatcggatcagggtaattagc

SEQ ID NO: 825095 - DNA, 33 bp, Homo sapien
caaattggcagagaagaagttgttgctaacaat

SEQ ID NO: 825096 - DNA, 33 bp, Homo sapien
caaattggcagagaaggagttgttgctaacaat

SEQ ID NO: 825097 - DNA, 33 bp, Homo sapien
agtgtaagtgcagatacgctaaccctggtcaac

SEQ ID NO: 825098 - DNA, 33 bp, Homo sapien
agtgtaagtgcagatatgctaaccctggtcaac

SEQ ID NO: 825099 - DNA, 33 bp, Homo sapien
tcatcattagcattaaatcatggtcaagccaga

SEQ ID NO: 825100 - DNA, 33 bp, Homo sapien
tcatcattagcattaagtcatggtcaagccaga

SEQ ID NO: 825101 - DNA, 33 bp, Homo sapien
atatttctgttgtaggcaggcaaacaaaagtaa

SEQ ID NO: 825102 - DNA, 33 bp, Homo sapien
atatttctgttgtaggtaggcaaacaaaagtaa

SEQ ID NO: 825103 - DNA, 33 bp, Homo sapien
attagtacaaatatgaaatctgaagctattttt

SEQ ID NO: 825104 - DNA, 33 bp, Homo sapien
attagtacaaatatgagatctgaagctattttt

SEQ ID NO: 825105 - DNA, 33 bp, Homo sapien
aatccagggaatgggacacaagtgcttggagag

SEQ ID NO: 825106 - DNA, 33 bp, Homo sapien
aatccagggaatgggatacaagtgcttggagag

SEQ ID NO: 825107 - DNA, 33 bp, Homo sapien
ttgcactaaacatagacactcagactcctccaa

SEQ ID NO: 825108 - DNA, 33 bp, Homo sapien
ttgcactaaacatagatactcagactcctccaa

SEQ ID NO: 825109 - DNA, 33 bp, Homo sapien
acagaatctagactaaagggattaggaaaccat

SEQ ID NO: 825110 - DNA, 33 bp, Homo sapien
acagaatctagactaacgggattaggaaaccat

SEQ ID NO: 825111 - DNA, 33 bp, Homo sapien
cactcaagcagatgtccatcaagtagaatggat

SEQ ID NO: 825112 - DNA, 33 bp, Homo sapien
cactcaagcagatgtctatcaagtagaatggat

SEQ ID NO: 825113 - DNA, 33 bp, Homo sapien
tatgtggactaagacaaggctatgggcttctgc

SEQ ID NO: 825114 - DNA, 33 bp, Homo sapien
tatgtggactaagacatggctatgggcttctgc

SEQ ID NO: 825115 - DNA, 33 bp, Homo sapien
attcctgggcaggctccagttttcattttctgt

SEQ ID NO: 825116 - DNA, 33 bp, Homo sapien
attcctgggcaggctctagttttcattttctgt

SEQ ID NO: 825117 - DNA, 33 bp, Homo sapien
ggagtgatgctgatcaatagaacatagaccatg

SEQ ID NO: 825118 - DNA, 33 bp, Homo sapien
ggagtgatgctgatcagtagaacatagaccatg

SEQ ID NO: 825119 - DNA, 33 bp, Homo sapien
atgtttggctataggaccacatggcctgagctg

SEQ ID NO: 825120 - DNA, 33 bp, Homo sapien
atgtttggctataggagcacatggcctgagctg

SEQ ID NO: 825121 - DNA, 33 bp, Homo sapien
tagccaggaaagttgacgataaagaggggttga

SEQ ID NO: 825122 - DNA, 33 bp, Homo sapien
tagccaggaaagttgatgataaagaggggttga

SEQ ID NO: 825123 - DNA, 33 bp, Homo sapien
ccacacattcttctaaactaactccagaaacat

SEQ ID NO: 825124 - DNA, 33 bp, Homo sapien
ccacacattcttctaagctaactccagaaacat

SEQ ID NO: 825125 - DNA, 33 bp, Homo sapien
agctcccgtccgaataaagtccttccttcttta

SEQ ID NO: 825126 - DNA, 33 bp, Homo sapien
agctcccgtccgaatagagtccttccttcttta

SEQ ID NO: 825127 - DNA, 33 bp, Homo sapien
gacataaataaactccggacatgagaaagtatt

SEQ ID NO: 825128 - DNA, 33 bp, Homo sapien
gacataaataaactcctgacatgagaaagtatt

SEQ ID NO: 825129 - DNA, 33 bp, Homo sapien
gcagatcgatgactagaccaaaattactctgcc

SEQ ID NO: 825130 - DNA, 33 bp, Homo sapien
gcagatcgatgactaggccaaaattactctgcc

SEQ ID NO: 825131 - DNA, 33 bp, Homo sapien
agctatggttgttgaaatgtggtccctggagca

SEQ ID NO: 825132 - DNA, 33 bp, Homo sapien
agctatggttgttgaagtgtggtccctggagca

SEQ ID NO: 825133 - DNA, 33 bp, Homo sapien
tatagaattcacgaagactctggctaatggatt

SEQ ID NO: 825134 - DNA, 33 bp, Homo sapien
tatagaattcacgaagtctctggctaatggatt

SEQ ID NO: 825135 - DNA, 33 bp, Homo sapien
atctcatgaagtgaccaagaatgagaataacca

SEQ ID NO: 825136 - DNA, 33 bp, Homo sapien
atctcatgaagtgaccgagaatgagaataacca

SEQ ID NO: 825137 - DNA, 33 bp, Homo sapien
cagaatagcctctgaacggtagtctcgctcatt

SEQ ID NO: 825138 - DNA, 33 bp, Homo sapien
cagaatagcctctgaatggtagtctcgctcatt

SEQ ID NO: 825139 - DNA, 33 bp, Homo sapien
ttggattttgagcccaatagtttatccttaggg

SEQ ID NO: 825140 - DNA, 33 bp, Homo sapien
ttggattttgagcccagtagtttatccttaggg

SEQ ID NO: 825141 - DNA, 33 bp, Homo sapien
cattgtattgagggtaccgtgagttgtttttca

SEQ ID NO: 825142 - DNA, 33 bp, Homo sapien
cattgtattgagggtatcgtgagttgtttttca

SEQ ID NO: 825143 - DNA, 33 bp, Homo sapien
ctttgaactaatcccaagcctatgtcagaaaag

SEQ ID NO: 825144 - DNA, 33 bp, Homo sapien
ctttgaactaatcccaggcctatgtcagaaaag

SEQ ID NO: 825145 - DNA, 33 bp, Homo sapien
aatggacagaaaattaaagagagctgtcacctc

SEQ ID NO: 825146 - DNA, 33 bp, Homo sapien
aatggacagaaaattagagagagctgtcacctc

SEQ ID NO: 825147 - DNA, 33 bp, Homo sapien
cagtatttcagaaccaacttcctcacctagtaa

SEQ ID NO: 825148 - DNA, 33 bp, Homo sapien
cagtatttcagaaccaccttcctcacctagtaa

SEQ ID NO: 825149 - DNA, 33 bp, Homo sapien
gaataacacttaagaactagaatattgccagta

SEQ ID NO: 825150 - DNA, 33 bp, Homo sapien
gaataacacttaagaagtagaatattgccagta

SEQ ID NO: 825151 - DNA, 33 bp, Homo sapien
aaagacatagatctgacaacctctgtaagtctc

SEQ ID NO: 825152 - DNA, 33 bp, Homo sapien
aaagacatagatctgataacctctgtaagtctc

SEQ ID NO: 825153 - DNA, 33 bp, Homo sapien
gcaactgcctcctaaccgcttccacctgggcat

SEQ ID NO: 825154 - DNA, 33 bp, Homo sapien
gcaactgcctcctaacggcttccacctgggcat

SEQ ID NO: 825155 - DNA, 33 bp, Homo sapien
ccagacagtttcaagaatcccttccgagtatga

SEQ ID NO: 825156 - DNA, 33 bp, Homo sapien
ccagacagtttcaagagtcccttccgagtatga

SEQ ID NO: 825157 - DNA, 33 bp, Homo sapien
gttgtacctactgaagaaaaaactagaaataac

SEQ ID NO: 825158 - DNA, 33 bp, Homo sapien
gttgtacctactgaaggaaaaactagaaataac

SEQ ID NO: 825159 - DNA, 33 bp, Homo sapien
ggccctcacttgaaggccagcctgcaacctgtg

SEQ ID NO: 825160 - DNA, 33 bp, Homo sapien
ggccctcacttgaaggtcagcctgcaacctgtg

SEQ ID NO: 825161 - DNA, 33 bp, Homo sapien
attttctttacaatgaacaccaacaaaggcata

SEQ ID NO: 825162 - DNA, 33 bp, Homo sapien
attttctttacaatgagcaccaacaaaggcata

SEQ ID NO: 825163 - DNA, 33 bp, Homo sapien
tgatttctgtgactgaacatttttactaagtta

SEQ ID NO: 825164 - DNA, 33 bp, Homo sapien
tgatttctgtgactgaccatttttactaagtta

SEQ ID NO: 825165 - DNA, 33 bp, Homo sapien
ggaaagcttgcaagaaattagtagaacacttga

SEQ ID NO: 825166 - DNA, 33 bp, Homo sapien
ggaaagcttgcaagaacttagtagaacacttga

SEQ ID NO: 825167 - DNA, 33 bp, Homo sapien
acagcatttgaaggtaaccatgtctgctttgtg

SEQ ID NO: 825168 - DNA, 33 bp, Homo sapien
acagcatttgaaggtagccatgtctgctttgtg

SEQ ID NO: 825169 - DNA, 33 bp, Homo sapien
ttatctatttctgatccaagtgtgacagaacaa

SEQ ID NO: 825170 - DNA, 33 bp, Homo sapien
ttatctatttctgatctaagtgtgacagaacaa

SEQ ID NO: 825171 - DNA, 33 bp, Homo sapien
ttcatgcaccttgtggaaattctgtgaagtaaa

SEQ ID NO: 825172 - DNA, 33 bp, Homo sapien
ttcatgcaccttgtgggaattctgtgaagtaaa

SEQ ID NO: 825173 - DNA, 33 bp, Homo sapien
atcttctttgcaaacaactctgtcagtcatcct

SEQ ID NO: 825174 - DNA, 33 bp, Homo sapien
atcttctttgcaaacagctctgtcagtcatcct

SEQ ID NO: 825175 - DNA, 33 bp, Homo sapien
gctatacaattcacttaaagtacaatgagatga

SEQ ID NO: 825176 - DNA, 33 bp, Homo sapien
gctatacaattcacttgaagtacaatgagatga

SEQ ID NO: 825177 - DNA, 33 bp, Homo sapien
tcaccaagatccctacagccttcaacccagaac

SEQ ID NO: 825178 - DNA, 33 bp, Homo sapien
tcaccaagatccctacggccttcaacccagaac

SEQ ID NO: 825179 - DNA, 33 bp, Homo sapien
agatatatgataggtacgtaggtagataggtag

SEQ ID NO: 825180 - DNA, 33 bp, Homo sapien
agatatatgataggtatgtaggtagataggtag

SEQ ID NO: 825181 - DNA, 33 bp, Homo sapien
tttaaatagctgcttaaaatttcatggcatagg

SEQ ID NO: 825182 - DNA, 33 bp, Homo sapien
tttaaatagctgcttacaatttcatggcatagg

SEQ ID NO: 825183 - DNA, 33 bp, Homo sapien
agatataaccactgccaatagctatagaaagca

SEQ ID NO: 825184 - DNA, 33 bp, Homo sapien
agatataaccactgccgatagctatagaaagca

SEQ ID NO: 825185 - DNA, 33 bp, Homo sapien
gaaggatcaagaatgacgtgttccctaagcaga

SEQ ID NO: 825186 - DNA, 33 bp, Homo sapien
gaaggatcaagaatgatgtgttccctaagcaga

SEQ ID NO: 825187 - DNA, 33 bp, Homo sapien
catgctttaatgcaccaaaggatcccctaggat

SEQ ID NO: 825188 - DNA, 33 bp, Homo sapien
catgctttaatgcaccgaaggatcccctaggat

SEQ ID NO: 825189 - DNA, 33 bp, Homo sapien
gaaaaacacagcaaaggcgaatgttctggcagc

SEQ ID NO: 825190 - DNA, 33 bp, Homo sapien
gaaaaacacagcaaagtcgaatgttctggcagc

SEQ ID NO: 825191 - DNA, 33 bp, Homo sapien
agaatgtaattgcatacaatatagccttaaata

SEQ ID NO: 825192 - DNA, 33 bp, Homo sapien
agaatgtaattgcatagaatatagccttaaata

SEQ ID NO: 825193 - DNA, 33 bp, Homo sapien
tccatagaggtggttacattagtttcctagggc

SEQ ID NO: 825194 - DNA, 33 bp, Homo sapien
tccatagaggtggttatattagtttcctagggc

SEQ ID NO: 825195 - DNA, 33 bp, Homo sapien
gattgggaattcatacaaatcagctctgcaaag

SEQ ID NO: 825196 - DNA, 33 bp, Homo sapien
gattgggaattcatacgaatcagctctgcaaag

SEQ ID NO: 825197 - DNA, 33 bp, Homo sapien
tggaggctcggattcccaggcaattttccctgc

SEQ ID NO: 825198 - DNA, 33 bp, Homo sapien
tggaggctcggattcctaggcaattttccctgc

SEQ ID NO: 825199 - DNA, 33 bp, Homo sapien
cataattaacataagaacggatacattcattaa

SEQ ID NO: 825200 - DNA, 33 bp, Homo sapien
cataattaacataagagcggatacattcattaa

SEQ ID NO: 825201 - DNA, 33 bp, Homo sapien
aagcaattttttaatacgtgaatctgagaagag

SEQ ID NO: 825202 - DNA, 33 bp, Homo sapien
aagcaattttttaataggtgaatctgagaagag

SEQ ID NO: 825203 - DNA, 33 bp, Homo sapien
cagtttgagaattaccacatttaagataagtac

SEQ ID NO: 825204 - DNA, 33 bp, Homo sapien
cagtttgagaattaccgcatttaagataagtac

SEQ ID NO: 825205 - DNA, 33 bp, Homo sapien
atgactgaatttagccaacacagacaaggctgg

SEQ ID NO: 825206 - DNA, 33 bp, Homo sapien
atgactgaatttagccgacacagacaaggctgg

SEQ ID NO: 825207 - DNA, 33 bp, Homo sapien
gggggacttaaatgccaaatgagttttgtgcag

SEQ ID NO: 825208 - DNA, 33 bp, Homo sapien
gggggacttaaatgccgaatgagttttgtgcag

SEQ ID NO: 825209 - DNA, 33 bp, Homo sapien
atatacaatcttgtgaaccagggggacttaaat

SEQ ID NO: 825210 - DNA, 33 bp, Homo sapien
atatacaatcttgtgagccagggggacttaaat

SEQ ID NO: 825211 - DNA, 33 bp, Homo sapien
atcattctcaaatactcagcaaatatactaatt

SEQ ID NO: 825212 - DNA, 33 bp, Homo sapien
atcattctcaaatactgagcaaatatactaatt

SEQ ID NO: 825213 - DNA, 33 bp, Homo sapien
gagttttgggatcacactccaaaacagtacctg

SEQ ID NO: 825214 - DNA, 33 bp, Homo sapien
gagttttgggatcacattccaaaacagtacctg

SEQ ID NO: 825215 - DNA, 33 bp, Homo sapien
cattcttcatgttccacaggaccagagtgggga

SEQ ID NO: 825216 - DNA, 33 bp, Homo sapien
cattcttcatgttccataggaccagagtgggga

SEQ ID NO: 825217 - DNA, 33 bp, Homo sapien
attctgagatgttaaaaccattagtcaaaggga

SEQ ID NO: 825218 - DNA, 33 bp, Homo sapien
attctgagatgttaaacccattagtcaaaggga

SEQ ID NO: 825219 - DNA, 33 bp, Homo sapien
ataaaaacttcttcccaatgcgttttctccctc

SEQ ID NO: 825220 - DNA, 33 bp, Homo sapien
ataaaaacttcttccccatgcgttttctccctc

SEQ ID NO: 825221 - DNA, 33 bp, Homo sapien
tatctcgtgtttcttgaacattcatgcatgtgt

SEQ ID NO: 825222 - DNA, 33 bp, Homo sapien
tatctcgtgtttcttgcacattcatgcatgtgt

SEQ ID NO: 825223 - DNA, 33 bp, Homo sapien
tactatatccttttcaaaggtgagtcgtagagc

SEQ ID NO: 825224 - DNA, 33 bp, Homo sapien
tactatatccttttcagaggtgagtcgtagagc

SEQ ID NO: 825225 - DNA, 33 bp, Homo sapien
ttgctcagcacaggtaaagtaagtggtgtgagt

SEQ ID NO: 825226 - DNA, 33 bp, Homo sapien
ttgctcagcacaggtagagtaagtggtgtgagt

SEQ ID NO: 825227 - DNA, 33 bp, Homo sapien
cactctgttccaaaaaaggttaatacatttggc

SEQ ID NO: 825228 - DNA, 33 bp, Homo sapien
cactctgttccaaaaacggttaatacatttggc

SEQ ID NO: 825229 - DNA, 33 bp, Homo sapien
tatagaatcttttccccggagccactggaagca

SEQ ID NO: 825230 - DNA, 33 bp, Homo sapien
tatagaatcttttccctggagccactggaagca

SEQ ID NO: 825231 - DNA, 33 bp, Homo sapien
agaaaggaagctttcaatccagaaatctggagg

SEQ ID NO: 825232 - DNA, 33 bp, Homo sapien
agaaaggaagctttcactccagaaatctggagg

SEQ ID NO: 825233 - DNA, 33 bp, Homo sapien
ggtaatgaaataaatacggagtttgagataaga

SEQ ID NO: 825234 - DNA, 33 bp, Homo sapien
ggtaatgaaataaatatggagtttgagataaga

SEQ ID NO: 825235 - DNA, 33 bp, Homo sapien
aatggcatacaatgagacataaaatcaattcgt

SEQ ID NO: 825236 - DNA, 33 bp, Homo sapien
aatggcatacaatgaggcataaaatcaattcgt

SEQ ID NO: 825237 - DNA, 33 bp, Homo sapien
tttctcttaaagttaaaagagtgactcctaatt

SEQ ID NO: 825238 - DNA, 33 bp, Homo sapien
tttctcttaaagttaacagagtgactcctaatt

SEQ ID NO: 825239 - DNA, 33 bp, Homo sapien
tggcttcaacttccaaactttcttaactcaata

SEQ ID NO: 825240 - DNA, 33 bp, Homo sapien
tggcttcaacttccaacctttcttaactcaata

SEQ ID NO: 825241 - DNA, 33 bp, Homo sapien
tattgtggaagatcaccaccaattaaaggtaag

SEQ ID NO: 825242 - DNA, 33 bp, Homo sapien
tattgtggaagatcactaccaattaaaggtaag

SEQ ID NO: 825243 - DNA, 33 bp, Homo sapien
gaacaaaagagcaaaccgagtaactccatgaaa

SEQ ID NO: 825244 - DNA, 33 bp, Homo sapien
gaacaaaagagcaaactgagtaactccatgaaa

SEQ ID NO: 825245 - DNA, 33 bp, Homo sapien
agaacctgtgtgacaacggacttctaagaacca

SEQ ID NO: 825246 - DNA, 33 bp, Homo sapien
agaacctgtgtgacaatggacttctaagaacca

SEQ ID NO: 825247 - DNA, 33 bp, Homo sapien
aaaaggcaggaaacagacctttgagattcactg

SEQ ID NO: 825248 - DNA, 33 bp, Homo sapien
aaaaggcaggaaacaggcctttgagattcactg

SEQ ID NO: 825249 - DNA, 33 bp, Homo sapien
atctcacaggcaaaagccatctgttctacaagt

SEQ ID NO: 825250 - DNA, 33 bp, Homo sapien
atctcacaggcaaaagtcatctgttctacaagt

SEQ ID NO: 825251 - DNA, 33 bp, Homo sapien
gaaatgtttactgtacacattcttggccaactc

SEQ ID NO: 825252 - DNA, 33 bp, Homo sapien
gaaatgtttactgtactcattcttggccaactc

SEQ ID NO: 825253 - DNA, 33 bp, Homo sapien
gattcattctaagacaactgtttttctaccttt

SEQ ID NO: 825254 - DNA, 33 bp, Homo sapien
gattcattctaagacagctgtttttctaccttt

SEQ ID NO: 825255 - DNA, 33 bp, Homo sapien
agaaagccatttgaaaaaacattcagaaccaga

SEQ ID NO: 825256 - DNA, 33 bp, Homo sapien
agaaagccatttgaaacaacattcagaaccaga

SEQ ID NO: 825257 - DNA, 33 bp, Homo sapien
aaagcagcttcaggccaaactctttggagacat

SEQ ID NO: 825258 - DNA, 33 bp, Homo sapien
aaagcagcttcaggccgaactctttggagacat

SEQ ID NO: 825259 - DNA, 33 bp, Homo sapien
tcccttattaatgtcccagattgttatttaaat

SEQ ID NO: 825260 - DNA, 33 bp, Homo sapien
tcccttattaatgtcctagattgttatttaaat

SEQ ID NO: 825261 - DNA, 33 bp, Homo sapien
tggtaacattttctaacgccatcaaaacccact

SEQ ID NO: 825262 - DNA, 33 bp, Homo sapien
tggtaacattttctaatgccatcaaaacccact

SEQ ID NO: 825263 - DNA, 33 bp, Homo sapien
attttatccttaattacgcaagcacccagtaac

SEQ ID NO: 825264 - DNA, 33 bp, Homo sapien
attttatccttaattatgcaagcacccagtaac

SEQ ID NO: 825265 - DNA, 33 bp, Homo sapien
ccattttaaatgaatcaatcaaagtagtacatt

SEQ ID NO: 825266 - DNA, 33 bp, Homo sapien
ccattttaaatgaatcgatcaaagtagtacatt

SEQ ID NO: 825267 - DNA, 33 bp, Homo sapien
gatttgcatttggtcccgcaattatttttcaga

SEQ ID NO: 825268 - DNA, 33 bp, Homo sapien
gatttgcatttggtcctgcaattatttttcaga

SEQ ID NO: 825269 - DNA, 33 bp, Homo sapien
ttctgtctagattccaatatgaggctattgctg

SEQ ID NO: 825270 - DNA, 33 bp, Homo sapien
ttctgtctagattccagtatgaggctattgctg

SEQ ID NO: 825271 - DNA, 33 bp, Homo sapien
taccaattttcagaataagttagtgaccaatga

SEQ ID NO: 825272 - DNA, 33 bp, Homo sapien
taccaattttcagaatgagttagtgaccaatga

SEQ ID NO: 825273 - DNA, 33 bp, Homo sapien
actattagtgatacacagaacaagagcatggat

SEQ ID NO: 825274 - DNA, 33 bp, Homo sapien
actattagtgatacacggaacaagagcatggat

SEQ ID NO: 825275 - DNA, 33 bp, Homo sapien
ggaagaagagtgatgacgttatgaagtaaacaa

SEQ ID NO: 825276 - DNA, 33 bp, Homo sapien
ggaagaagagtgatgatgttatgaagtaaacaa

SEQ ID NO: 825277 - DNA, 33 bp, Homo sapien
tatgatgtcccatgccagcagagagtgagaaag

SEQ ID NO: 825278 - DNA, 33 bp, Homo sapien
tatgatgtcccatgccggcagagagtgagaaag

SEQ ID NO: 825279 - DNA, 33 bp, Homo sapien
atgtatttctctctcacgttatatgtgtgcttg

SEQ ID NO: 825280 - DNA, 33 bp, Homo sapien
atgtatttctctctcatgttatatgtgtgcttg

SEQ ID NO: 825281 - DNA, 33 bp, Homo sapien
aaggaagtagcctagcaacctacaaaaatcttt

SEQ ID NO: 825282 - DNA, 33 bp, Homo sapien
aaggaagtagcctagcgacctacaaaaatcttt

SEQ ID NO: 825283 - DNA, 33 bp, Homo sapien
atcattcccaagtaaaatgtaaaggttctacat

SEQ ID NO: 825284 - DNA, 33 bp, Homo sapien
atcattcccaagtaaagtgtaaaggttctacat

SEQ ID NO: 825285 - DNA, 33 bp, Homo sapien
tcctcttgtcttgggagacccaatgatatgaga

SEQ ID NO: 825286 - DNA, 33 bp, Homo sapien
tcctcttgtcttgggatacccaatgatatgaga

SEQ ID NO: 825287 - DNA, 33 bp, Homo sapien
ctcctttggcaaagaccacgaattttgacaaga

SEQ ID NO: 825288 - DNA, 33 bp, Homo sapien
ctcctttggcaaagactacgaattttgacaaga

SEQ ID NO: 825289 - DNA, 33 bp, Homo sapien
ccaaactcggtccttcacttgaagattttgcag

SEQ ID NO: 825290 - DNA, 33 bp, Homo sapien
ccaaactcggtccttcgcttgaagattttgcag

SEQ ID NO: 825291 - DNA, 33 bp, Homo sapien
cacccctaaccacatactagagttagacaggtc

SEQ ID NO: 825292 - DNA, 33 bp, Homo sapien
cacccctaaccacatagtagagttagacaggtc

SEQ ID NO: 825293 - DNA, 33 bp, Homo sapien
ctgccccggaagttcaatagaataaagatatca

SEQ ID NO: 825294 - DNA, 33 bp, Homo sapien
ctgccccggaagttcagtagaataaagatatca

SEQ ID NO: 825295 - DNA, 33 bp, Homo sapien
tgaggtggcctgaggtcaaataaaatgagtgat

SEQ ID NO: 825296 - DNA, 33 bp, Homo sapien
tgaggtggcctgaggtgaaataaaatgagtgat

SEQ ID NO: 825297 - DNA, 33 bp, Homo sapien
cactagtttccatcaacatgtaaccaaatggtg

SEQ ID NO: 825298 - DNA, 33 bp, Homo sapien
cactagtttccatcaatatgtaaccaaatggtg

SEQ ID NO: 825299 - DNA, 33 bp, Homo sapien
actaattgaacatggacgtgaatttaaaaatat

SEQ ID NO: 825300 - DNA, 33 bp, Homo sapien
actaattgaacatggatgtgaatttaaaaatat

SEQ ID NO: 825301 - DNA, 33 bp, Homo sapien
ggaggggatacatgggccattgtatttacactg

SEQ ID NO: 825302 - DNA, 33 bp, Homo sapien
ggaggggatacatgggtcattgtatttacactg

SEQ ID NO: 825303 - DNA, 33 bp, Homo sapien
aaaaataggaaaagaaaatctgcttgatcaaat

SEQ ID NO: 825304 - DNA, 33 bp, Homo sapien
aaaaataggaaaagaacatctgcttgatcaaat

SEQ ID NO: 825305 - DNA, 33 bp, Homo sapien
aacaagaaaaagttgcaaaatttctttgatttt

SEQ ID NO: 825306 - DNA, 33 bp, Homo sapien
aacaagaaaaagttgcgaaatttctttgatttt

SEQ ID NO: 825307 - DNA, 33 bp, Homo sapien
tgttaatcttccaaaactgatcatctttgcaag

SEQ ID NO: 825308 - DNA, 33 bp, Homo sapien
tgttaatcttccaaaattgatcatctttgcaag

SEQ ID NO: 825309 - DNA, 33 bp, Homo sapien
aggatttgaatccaagcctgtttaattccagaa

SEQ ID NO: 825310 - DNA, 33 bp, Homo sapien
aggatttgaatccaagtctgtttaattccagaa

SEQ ID NO: 825311 - DNA, 33 bp, Homo sapien
cgcatctcctgttctacgtgttaatgagccctg

SEQ ID NO: 825312 - DNA, 33 bp, Homo sapien
cgcatctcctgttctatgtgttaatgagccctg

SEQ ID NO: 825313 - DNA, 33 bp, Homo sapien
aaagctgttttcgctacgtgtgttagaagccac

SEQ ID NO: 825314 - DNA, 33 bp, Homo sapien
aaagctgttttcgctatgtgtgttagaagccac

SEQ ID NO: 825315 - DNA, 33 bp, Homo sapien
caagcgtgtcagaaataatcattttaattttct

SEQ ID NO: 825316 - DNA, 33 bp, Homo sapien
caagcgtgtcagaaatcatcattttaattttct

SEQ ID NO: 825317 - DNA, 33 bp, Homo sapien
tctggtatttctccaacgattgtgacttttcag

SEQ ID NO: 825318 - DNA, 33 bp, Homo sapien
tctggtatttctccaatgattgtgacttttcag

SEQ ID NO: 825319 - DNA, 33 bp, Homo sapien
tcctctgcttgcctgcactaacagaaagaatac

SEQ ID NO: 825320 - DNA, 33 bp, Homo sapien
tcctctgcttgcctgcgctaacagaaagaatac

SEQ ID NO: 825321 - DNA, 33 bp, Homo sapien
tggataggtggctagcacaactccagatccatg

SEQ ID NO: 825322 - DNA, 33 bp, Homo sapien
tggataggtggctagcgcaactccagatccatg

SEQ ID NO: 825323 - DNA, 33 bp, Homo sapien
aggaagtcttttgtacccactgaaacacttgcc

SEQ ID NO: 825324 - DNA, 33 bp, Homo sapien
aggaagtcttttgtacgcactgaaacacttgcc

SEQ ID NO: 825325 - DNA, 33 bp, Homo sapien
tcacctacttaaacagcatcatagcctcaatgt

SEQ ID NO: 825326 - DNA, 33 bp, Homo sapien
tcacctacttaaacagtatcatagcctcaatgt

SEQ ID NO: 825327 - DNA, 33 bp, Homo sapien
gaagcttttcaactgacgacgcacttgatcatt

SEQ ID NO: 825328 - DNA, 33 bp, Homo sapien
gaagcttttcaactgatgacgcacttgatcatt

SEQ ID NO: 825329 - DNA, 33 bp, Homo sapien
gctgccactttagagacgtctgagtacccgcag

SEQ ID NO: 825330 - DNA, 33 bp, Homo sapien
gctgccactttagagaggtctgagtacccgcag

SEQ ID NO: 825331 - DNA, 33 bp, Homo sapien
taattttgtacactaacctgttgcttctctgcc

SEQ ID NO: 825332 - DNA, 33 bp, Homo sapien
taattttgtacactaatctgttgcttctctgcc

SEQ ID NO: 825333 - DNA, 33 bp, Homo sapien
gtagatgcattgaaaacaatttgaataccaagc

SEQ ID NO: 825334 - DNA, 33 bp, Homo sapien
gtagatgcattgaaaagaatttgaataccaagc

SEQ ID NO: 825335 - DNA, 33 bp, Homo sapien
caagatacaatggacactcaaaaatcaaagaaa

SEQ ID NO: 825336 - DNA, 33 bp, Homo sapien
caagatacaatggacagtcaaaaatcaaagaaa

SEQ ID NO: 825337 - DNA, 33 bp, Homo sapien
agtactctgcatggaaatacctatctctctcat

SEQ ID NO: 825338 - DNA, 33 bp, Homo sapien
agtactctgcatggaattacctatctctctcat

SEQ ID NO: 825339 - DNA, 33 bp, Homo sapien
ggtgtatctgagaaaccgctgggctttttatta

SEQ ID NO: 825340 - DNA, 33 bp, Homo sapien
ggtgtatctgagaaactgctgggctttttatta

SEQ ID NO: 825341 - DNA, 33 bp, Homo sapien
cacaagatacttatacaaaattcagattttagt

SEQ ID NO: 825342 - DNA, 33 bp, Homo sapien
cacaagatacttatacgaaattcagattttagt

SEQ ID NO: 825343 - DNA, 33 bp, Homo sapien
ttttctaagtgaagcagatctgagcctattcca

SEQ ID NO: 825344 - DNA, 33 bp, Homo sapien
ttttctaagtgaagcatatctgagcctattcca

SEQ ID NO: 825345 - DNA, 33 bp, Homo sapien
gacagctcctcttttcccttgctacagtaggat

SEQ ID NO: 825346 - DNA, 33 bp, Homo sapien
gacagctcctcttttctcttgctacagtaggat

SEQ ID NO: 825347 - DNA, 33 bp, Homo sapien
aatggaaaccaaaaaacaggtctcaggataaag

SEQ ID NO: 825348 - DNA, 33 bp, Homo sapien
aatggaaaccaaaaaataggtctcaggataaag

SEQ ID NO: 825349 - DNA, 33 bp, Homo sapien
gacatgctgcaatgaacagggcacttaaacctt

SEQ ID NO: 825350 - DNA, 33 bp, Homo sapien
gacatgctgcaatgaagagggcacttaaacctt

SEQ ID NO: 825351 - DNA, 33 bp, Homo sapien
aaaaacaaaacaggacaattaagtctgctttgc

SEQ ID NO: 825352 - DNA, 33 bp, Homo sapien
aaaaacaaaacaggaccattaagtctgctttgc

SEQ ID NO: 825353 - DNA, 33 bp, Homo sapien
tttaccctcacctatcaaacaggtattaggcat

SEQ ID NO: 825354 - DNA, 33 bp, Homo sapien
tttaccctcacctatcgaacaggtattaggcat

SEQ ID NO: 825355 - DNA, 33 bp, Homo sapien
gggctttacttggaaacatcacagttacccatg

SEQ ID NO: 825356 - DNA, 33 bp, Homo sapien
gggctttacttggaaatatcacagttacccatg

SEQ ID NO: 825357 - DNA, 33 bp, Homo sapien
tccaacccagaaaaataagacacaattcccgca

SEQ ID NO: 825358 - DNA, 33 bp, Homo sapien
tccaacccagaaaaatgagacacaattcccgca

SEQ ID NO: 825359 - DNA, 33 bp, Homo sapien
caacataaatgtgtcaacccattcaggaactcc

SEQ ID NO: 825360 - DNA, 33 bp, Homo sapien
caacataaatgtgtcagcccattcaggaactcc

SEQ ID NO: 825361 - DNA, 33 bp, Homo sapien
tcctgaaatgaataggaaatgtcatttagaatc

SEQ ID NO: 825362 - DNA, 33 bp, Homo sapien
tcctgaaatgaatagggaatgtcatttagaatc

SEQ ID NO: 825363 - DNA, 33 bp, Homo sapien
gcagttgagtgaagcgccatctatatttacagc

SEQ ID NO: 825364 - DNA, 33 bp, Homo sapien
gcagttgagtgaagcgtcatctatatttacagc

SEQ ID NO: 825365 - DNA, 33 bp, Homo sapien
aatgatctttcttataaaacatttggctcaatt

SEQ ID NO: 825366 - DNA, 33 bp, Homo sapien
aatgatctttcttatagaacatttggctcaatt

SEQ ID NO: 825367 - DNA, 33 bp, Homo sapien
tcttcagccctaaaaaacttcctctaatatgtc

SEQ ID NO: 825368 - DNA, 33 bp, Homo sapien
tcttcagccctaaaaatcttcctctaatatgtc

SEQ ID NO: 825369 - DNA, 33 bp, Homo sapien
tgacagggatctgccacgtatgtgaccaagtgg

SEQ ID NO: 825370 - DNA, 33 bp, Homo sapien
tgacagggatctgccatgtatgtgaccaagtgg

SEQ ID NO: 825371 - DNA, 33 bp, Homo sapien
ggaaatatgaaagtcaaattttgaatgacagct

SEQ ID NO: 825372 - DNA, 33 bp, Homo sapien
ggaaatatgaaagtcagattttgaatgacagct

SEQ ID NO: 825373 - DNA, 33 bp, Homo sapien
ttcaaatagtcacccactccatgactgtaaaca

SEQ ID NO: 825374 - DNA, 33 bp, Homo sapien
ttcaaatagtcacccattccatgactgtaaaca

SEQ ID NO: 825375 - DNA, 33 bp, Homo sapien
tagctgaaatttccaacaaaacgcagtcagagc

SEQ ID NO: 825376 - DNA, 33 bp, Homo sapien
tagctgaaatttccaataaaacgcagtcagagc

SEQ ID NO: 825377 - DNA, 33 bp, Homo sapien; identical to SEQ ID NO: 825375

SEQ ID NO: 825378 - DNA, 33 bp, Homo sapien; identical to SEQ ID NO: 825376

SEQ ID NO: 825379 - DNA, 33 bp, Homo sapien
atcagatcgccataatcacagatcaccataaca

SEQ ID NO: 825380 - DNA, 33 bp, Homo sapien
atcagatcgccataattacagatcaccataaca

SEQ ID NO: 825381 - DNA, 33 bp, Homo sapien
ttctaggctttgaaaacatccttgcatattctg

SEQ ID NO: 825382 - DNA, 33 bp, Homo sapien
ttctaggctttgaaaagatccttgcatattctg

SEQ ID NO: 825383 - DNA, 33 bp, Homo sapien
aggacagaaaacggtaaatagatgaattaattc

SEQ ID NO: 825384 - DNA, 33 bp, Homo sapien
aggacagaaaacggtacatagatgaattaattc

SEQ ID NO: 825385 - DNA, 33 bp, Homo sapien
atcttagcatgaaaacagttgcatgggattcaa

SEQ ID NO: 825386 - DNA, 33 bp, Homo sapien
atcttagcatgaaaaccgttgcatgggattcaa

SEQ ID NO: 825387 - DNA, 33 bp, Homo sapien
tccattgtatatatagaccactttttaaaatcc

SEQ ID NO: 825388 - DNA, 33 bp, Homo sapien
tccattgtatatataggccactttttaaaatcc

SEQ ID NO: 825389 - DNA, 33 bp, Homo sapien
cttcaggcttctcatacgttggttttgaattgt

SEQ ID NO: 825390 - DNA, 33 bp, Homo sapien
cttcaggcttctcatatgttggttttgaattgt

SEQ ID NO: 825391 - DNA, 33 bp, Homo sapien
cattgccaccttcacacgtcttgggtgcatctt

SEQ ID NO: 825392 - DNA, 33 bp, Homo sapien
cattgccaccttcacatgtcttgggtgcatctt

SEQ ID NO: 825393 - DNA, 33 bp, Homo sapien
ggagagacctggtctacagcgctaaaggaagat

SEQ ID NO: 825394 - DNA, 33 bp, Homo sapien
ggagagacctggtctatagcgctaaaggaagat

SEQ ID NO: 825395 - DNA, 33 bp, Homo sapien
tgcctttgaatatgaacgtatgcagtgaactac

SEQ ID NO: 825396 - DNA, 33 bp, Homo sapien
tgcctttgaatatgaatgtatgcagtgaactac

SEQ ID NO: 825397 - DNA, 33 bp, Homo sapien
gccagctttatccatcaatttctgtgtatgacc

SEQ ID NO: 825398 - DNA, 33 bp, Homo sapien
gccagctttatccatcgatttctgtgtatgacc

SEQ ID NO: 825399 - DNA, 33 bp, Homo sapien
ttgtgttagcgcacataactctagctagttacc

SEQ ID NO: 825400 - DNA, 33 bp, Homo sapien
ttgtgttagcgcacatgactctagctagttacc

SEQ ID NO: 825401 - DNA, 33 bp, Homo sapien
tattgtttggtcattaataaaatagtgataata

SEQ ID NO: 825402 - DNA, 33 bp, Homo sapien
tattgtttggtcattagtaaaatagtgataata

SEQ ID NO: 825403 - DNA, 33 bp, Homo sapien
tttgtgtagcacctaaacacttaatacaatagg

SEQ ID NO: 825404 - DNA, 33 bp, Homo sapien
tttgtgtagcacctaagcacttaatacaatagg

SEQ ID NO: 825405 - DNA, 33 bp, Homo sapien
aacaggcactcacagacatataatgaatgaata

SEQ ID NO: 825406 - DNA, 33 bp, Homo sapien
aacaggcactcacagatatataatgaatgaata

SEQ ID NO: 825407 - DNA, 33 bp, Homo sapien
cagttgtttctacaagcatcataatgagctaac

SEQ ID NO: 825408 - DNA, 33 bp, Homo sapien
cagttgtttctacaagtatcataatgagctaac

SEQ ID NO: 825409 - DNA, 33 bp, Homo sapien
agggtggtgatatgatcagtgtcttacaccttc

SEQ ID NO: 825410 - DNA, 33 bp, Homo sapien
agggtggtgatatgattagtgtcttacaccttc

SEQ ID NO: 825411 - DNA, 33 bp, Homo sapien
ccagcattctaccagaacattagccactgtcac

SEQ ID NO: 825412 - DNA, 33 bp, Homo sapien
ccagcattctaccagaccattagccactgtcac

SEQ ID NO: 825413 - DNA, 33 bp, Homo sapien
ggctccagaagtcagacgttcaacgctgcatga

SEQ ID NO: 825414 - DNA, 33 bp, Homo sapien
ggctccagaagtcagatgttcaacgctgcatga

SEQ ID NO: 825415 - DNA, 33 bp, Homo sapien
cctgctatgaagatacaggcaaaagatcatcaa

SEQ ID NO: 825416 - DNA, 33 bp, Homo sapien
cctgctatgaagataccggcaaaagatcatcaa

SEQ ID NO: 825417 - DNA, 33 bp, Homo sapien
cgtagttctcaggccgcacactaagaattttgg

SEQ ID NO: 825418 - DNA, 33 bp, Homo sapien
cgtagttctcaggccgtacactaagaattttgg

SEQ ID NO: 825419 - DNA, 33 bp, Homo sapien
ttacaaagtctccatagaggtcagcagaaggcc

SEQ ID NO: 825420 - DNA, 33 bp, Homo sapien
ttacaaagtctccatataggtcagcagaaggcc

SEQ ID NO: 825421 - DNA, 33 bp, Homo sapien
caaggtgctgaggggaacttagggttgaaatct

SEQ ID NO: 825422 - DNA, 33 bp, Homo sapien
caaggtgctgaggggaccttagggttgaaatct

SEQ ID NO: 825423 - DNA, 33 bp, Homo sapien
aggaactagctgggaaaacagggctgacccaaa

SEQ ID NO: 825424 - DNA, 33 bp, Homo sapien
aggaactagctgggaagacagggctgacccaaa

SEQ ID NO: 825425 - DNA, 33 bp, Homo sapien
agtctctatctttccccaaaattgtggataact

SEQ ID NO: 825426 - DNA, 33 bp, Homo sapien
agtctctatctttccctaaaattgtggataact

SEQ ID NO: 825427 - DNA, 33 bp, Homo sapien
ggcagcgaataaaagcaaatcatttaaaatcat

SEQ ID NO: 825428 - DNA, 33 bp, Homo sapien
ggcagcgaataaaagcgaatcatttaaaatcat

SEQ ID NO: 825429 - DNA, 33 bp, Homo sapien
acttgccttagagaatcagagtcttcaaatgaa

SEQ ID NO: 825430 - DNA, 33 bp, Homo sapien
acttgccttagagaatgagagtcttcaaatgaa

SEQ ID NO: 825431 - DNA, 33 bp, Homo sapien
agttatgtaaacaggaagtgcagcatagtgtct

SEQ ID NO: 825432 - DNA, 33 bp, Homo sapien
agttatgtaaacaggaggtgcagcatagtgtct

SEQ ID NO: 825433 - DNA, 33 bp, Homo sapien
aaaaactcatggtgaaatataattgtcaatgta

SEQ ID NO: 825434 - DNA, 33 bp, Homo sapien
aaaaactcatggtgaactataattgtcaatgta

SEQ ID NO: 825435 - DNA, 33 bp, Homo sapien
agatgactggagacacacagaaaaatctctcca

SEQ ID NO: 825436 - DNA, 33 bp, Homo sapien
agatgactggagacactcagaaaaatctctcca

SEQ ID NO: 825437 - DNA, 33 bp, Homo sapien
gaaagccgctccgacaactctggagactggact

SEQ ID NO: 825438 - DNA, 33 bp, Homo sapien
gaaagccgctccgacagctctggagactggact

SEQ ID NO: 825439 - DNA, 33 bp, Homo sapien
atttatgacctttaaaagtgctaagagacaaga

SEQ ID NO: 825440 - DNA, 33 bp, Homo sapien
atttatgacctttaaatgtgctaagagacaaga

SEQ ID NO: 825441 - DNA, 33 bp, Homo sapien
gcatactgttggatgacgcctatgtctacataa

SEQ ID NO: 825442 - DNA, 33 bp, Homo sapien
gcatactgttggatgatgcctatgtctacataa

SEQ ID NO: 825443 - DNA, 33 bp, Homo sapien
ctgcctgatgtgctgaactctgtacaactttgc

SEQ ID NO: 825444 - DNA, 33 bp, Homo sapien
ctgcctgatgtgctgatctctgtacaactttgc

SEQ ID NO: 825445 - DNA, 33 bp, Homo sapien
cactggggtgccaggcaaaaattgtagagcttc

SEQ ID NO: 825446 - DNA, 33 bp, Homo sapien
cactggggtgccaggcgaaaattgtagagcttc

SEQ ID NO: 825447 - DNA, 33 bp, Homo sapien
tcctagttcaggatgcagaatcccaagaggaga

SEQ ID NO: 825448 - DNA, 33 bp, Homo sapien
tcctagttcaggatgcggaatcccaagaggaga

SEQ ID NO: 825449 - DNA, 33 bp, Homo sapien
ctgactggtgtgagatgatatgtggttttgatt

SEQ ID NO: 825450 - DNA, 33 bp, Homo sapien
ctgactggtgtgagattatatgtggttttgatt

SEQ ID NO: 825451 - DNA, 33 bp, Homo sapien
tttggggctttgcgatcacctcaacatgaggat

SEQ ID NO: 825452 - DNA, 33 bp, Homo sapien
tttggggctttgcgattacctcaacatgaggat

SEQ ID NO: 825453 - DNA, 33 bp, Homo sapien
ttactctaatcatcaaaataatcccatttacct

SEQ ID NO: 825454 - DNA, 33 bp, Homo sapien
ttactctaatcatcaagataatcccatttacct

SEQ ID NO: 825455 - DNA, 33 bp, Homo sapien
agtgaagataaacacccgcctccatcctgaggg

SEQ ID NO: 825456 - DNA, 33 bp, Homo sapien
agtgaagataaacacctgcctccatcctgaggg

SEQ ID NO: 825457 - DNA, 33 bp, Homo sapien
cctctctatagcaaacaccagaacttcctctct

SEQ ID NO: 825458 - DNA, 33 bp, Homo sapien
cctctctatagcaaacgccagaacttcctctct

SEQ ID NO: 825459 - DNA, 33 bp, Homo sapien
ctctatccttaaagagaaatggtgcaaaggtca

SEQ ID NO: 825460 - DNA, 33 bp, Homo sapien
ctctatccttaaagaggaatggtgcaaaggtca

SEQ ID NO: 825461 - DNA, 33 bp, Homo sapien
agcagttcgagaaaagactaatacagaaatttg

SEQ ID NO: 825462 - DNA, 33 bp, Homo sapien
agcagttcgagaaaaggctaatacagaaatttg

SEQ ID NO: 825463 - DNA, 33 bp, Homo sapien
gatctttctaagggaccgatctgatcacaccac

SEQ ID NO: 825464 - DNA, 33 bp, Homo sapien
gatctttctaagggactgatctgatcacaccac

SEQ ID NO: 825465 - DNA, 33 bp, Homo sapien
ttcctttgtcctgaaaggcagatacagtttcag

SEQ ID NO: 825466 - DNA, 33 bp, Homo sapien
ttcctttgtcctgaaatgcagatacagtttcag

SEQ ID NO: 825467 - DNA, 33 bp, Homo sapien
agaatcaaagtcaagacgcctcctgaatatact

SEQ ID NO: 825468 - DNA, 33 bp, Homo sapien
agaatcaaagtcaagatgcctcctgaatatact

SEQ ID NO: 825469 - DNA, 33 bp, Homo sapien
taagtactggttaacacagaaagctgagcagca

SEQ ID NO: 825470 - DNA, 33 bp, Homo sapien
taagtactggttaacatagaaagctgagcagca

SEQ ID NO: 825471 - DNA, 33 bp, Homo sapien
tctacttctctcacccccttcaaagccaggctt

SEQ ID NO: 825472 - DNA, 33 bp, Homo sapien
tctacttctctcacccgcttcaaagccaggctt

SEQ ID NO: 825473 - DNA, 33 bp, Homo sapien
ggaaaaatggatgcaccgaagctggaggactta

SEQ ID NO: 825474 - DNA, 33 bp, Homo sapien
ggaaaaatggatgcactgaagctggaggactta

SEQ ID NO: 825475 - DNA, 33 bp, Homo sapien
acccatttctaaaacaagtcttgataggaatga

SEQ ID NO: 825476 - DNA, 33 bp, Homo sapien
acccatttctaaaacaggtcttgataggaatga

SEQ ID NO: 825477 - DNA, 33 bp, Homo sapien
tgagcccagctggttacactttttttgagcctg

SEQ ID NO: 825478 - DNA, 33 bp, Homo sapien
tgagcccagctggttatactttttttgagcctg

SEQ ID NO: 825479 - DNA, 33 bp, Homo sapien
ttttgtctgccataaccatgatactttactagt

SEQ ID NO: 825480 - DNA, 33 bp, Homo sapien
ttttgtctgccataactatgatactttactagt

SEQ ID NO: 825481 - DNA, 33 bp, Homo sapien
tatgctcttttctctgcaaatcataaatactag

SEQ ID NO: 825482 - DNA, 33 bp, Homo sapien
tatgctcttttctctgtaaatcataaatactag

SEQ ID NO: 825483 - DNA, 33 bp, Homo sapien
agacatgaagcacttcacttggaaatgctttct

SEQ ID NO: 825484 - DNA, 33 bp, Homo sapien
agacatgaagcacttcgcttggaaatgctttct

SEQ ID NO: 825485 - DNA, 33 bp, Homo sapien
ctttcagctggtgacactcaatgttgtttgatt

SEQ ID NO: 825486 - DNA, 33 bp, Homo sapien
ctttcagctggtgacattcaatgttgtttgatt

SEQ ID NO: 825487 - DNA, 33 bp, Homo sapien
ccatcgagttgttaggaagtaggtgggtgtcac

SEQ ID NO: 825488 - DNA, 33 bp, Homo sapien
ccatcgagttgttagggagtaggtgggtgtcac

SEQ ID NO: 825489 - DNA, 33 bp, Homo sapien
agataggacattagtaaaatccaggtcagtttc

SEQ ID NO: 825490 - DNA, 33 bp, Homo sapien
agataggacattagtagaatccaggtcagtttc

SEQ ID NO: 825491 - DNA, 33 bp, Homo sapien
gagatggcaaaatacacacgaatcttcctttta

SEQ ID NO: 825492 - DNA, 33 bp, Homo sapien
gagatggcaaaatacatacgaatcttcctttta

SEQ ID NO: 825493 - DNA, 33 bp, Homo sapien
cctgcgagctctgttacgaaggaaatcgaaagc

SEQ ID NO: 825494 - DNA, 33 bp, Homo sapien
cctgcgagctctgttatgaaggaaatcgaaagc

SEQ ID NO: 825495 - DNA, 33 bp, Homo sapien
caatggcctcgttgacaggtgtgcatcctaaga

SEQ ID NO: 825496 - DNA, 33 bp, Homo sapien
caatggcctcgttgacgggtgtgcatcctaaga

SEQ ID NO: 825497 - DNA, 33 bp, Homo sapien
gagagtagttgagtgacattagaagcaaaaagc

SEQ ID NO: 825498 - DNA, 33 bp, Homo sapien
gagagtagttgagtgatattagaagcaaaaagc

SEQ ID NO: 825499 - DNA, 33 bp, Homo sapien
gggtcacttagtccaaaccttctggtcacaaca

SEQ ID NO: 825500 - DNA, 33 bp, Homo sapien
gggtcacttagtccaacccttctggtcacaaca

SEQ ID NO: 825501 - DNA, 33 bp, Homo sapien
agaagccctgttccaacgcaatgccctaaagag

SEQ ID NO: 825502 - DNA, 33 bp, Homo sapien
agaagccctgttccaatgcaatgccctaaagag

SEQ ID NO: 825503 - DNA, 33 bp, Homo sapien
ggtaacccatggaaaacacttagcacaggcttc

SEQ ID NO: 825504 - DNA, 33 bp, Homo sapien
ggtaacccatggaaaatacttagcacaggcttc

SEQ ID NO: 825505 - DNA, 33 bp, Homo sapien
actggttgtgaggatgcaaaagactatgagctc

SEQ ID NO: 825506 - DNA, 33 bp, Homo sapien
actggttgtgaggatggaaaagactatgagctc

SEQ ID NO: 825507 - DNA, 33 bp, Homo sapien
tcacttgatgccgaaaccaaacagcaagcaaca

SEQ ID NO: 825508 - DNA, 33 bp, Homo sapien
tcacttgatgccgaaatcaaacagcaagcaaca

SEQ ID NO: 825509 - DNA, 33 bp, Homo sapien
aacacaaggaagtttaagttttgtatacattct

SEQ ID NO: 825510 - DNA, 33 bp, Homo sapien
aacacaaggaagtttaggttttgtatacattct

SEQ ID NO: 825511 - DNA, 33 bp, Homo sapien
agttatgaagttctcaaaaaagtcatccagaat

SEQ ID NO: 825512 - DNA, 33 bp, Homo sapien
agttatgaagttctcagaaaagtcatccagaat

SEQ ID NO: 825513 - DNA, 33 bp, Homo sapien
aagatgaggaaacgaaagtttaagggacatgaa

SEQ ID NO: 825514 - DNA, 33 bp, Homo sapien
aagatgaggaaacgaaggtttaagggacatgaa

SEQ ID NO: 825515 - DNA, 33 bp, Homo sapien
tagaacagcacttacacggtgtatttgtcagtt

SEQ ID NO: 825516 - DNA, 33 bp, Homo sapien
tagaacagcacttacatggtgtatttgtcagtt

SEQ ID NO: 825517 - DNA, 33 bp, Homo sapien
caagagtgactatataacaataactcttacaaa

SEQ ID NO: 825518 - DNA, 33 bp, Homo sapien
caagagtgactatataccaataactcttacaaa

SEQ ID NO: 825519 - DNA, 33 bp, Homo sapien
ttactctcagtatggacctcttaggtttaaata

SEQ ID NO: 825520 - DNA, 33 bp, Homo sapien
ttactctcagtatggatctcttaggtttaaata

SEQ ID NO: 825521 - DNA, 33 bp, Homo sapien
tagcatttcctgttacaaatttgctctatttaa

SEQ ID NO: 825522 - DNA, 33 bp, Homo sapien
tagcatttcctgttacgaatttgctctatttaa

SEQ ID NO: 825523 - DNA, 33 bp, Homo sapien
taaagtagctactaacacttacaaatgctttct

SEQ ID NO: 825524 - DNA, 33 bp, Homo sapien
taaagtagctactaacgcttacaaatgctttct

SEQ ID NO: 825525 - DNA, 33 bp, Homo sapien
gttgacaaaagtctcaaagtgttatctcttagg

SEQ ID NO: 825526 - DNA, 33 bp, Homo sapien
gttgacaaaagtctcagagtgttatctcttagg

SEQ ID NO: 825527 - DNA, 33 bp, Homo sapien
tgtgaaagaaggaaaaagtagaactgcatacag

SEQ ID NO: 825528 - DNA, 33 bp, Homo sapien
tgtgaaagaaggaaaaggtagaactgcatacag

SEQ ID NO: 825529 - DNA, 33 bp, Homo sapien
ctcatggacagcaccaaagaggggaccgcactt

SEQ ID NO: 825530 - DNA, 33 bp, Homo sapien
ctcatggacagcaccagagaggggaccgcactt

SEQ ID NO: 825531 - DNA, 33 bp, Homo sapien
cgagagttgtcaagaccgtccctcctcaagttc

SEQ ID NO: 825532 - DNA, 33 bp, Homo sapien
cgagagttgtcaagactgtccctcctcaagttc

SEQ ID NO: 825533 - DNA, 33 bp, Homo sapien
atctctgtgcactaagcaagtactccagagtca

SEQ ID NO: 825534 - DNA, 33 bp, Homo sapien
atctctgtgcactaaggaagtactccagagtca

SEQ ID NO: 825535 - DNA, 33 bp, Homo sapien
ggactcaaatgtttgccgaagaaggaatgtcca

SEQ ID NO: 825536 - DNA, 33 bp, Homo sapien
ggactcaaatgtttgctgaagaaggaatgtcca

SEQ ID NO: 825537 - DNA, 33 bp, Homo sapien
tgattgctaatccacgcccgatggtttgatgac

SEQ ID NO: 825538 - DNA, 33 bp, Homo sapien
tgattgctaatccacggccgatggtttgatgac

SEQ ID NO: 825539 - DNA, 33 bp, Homo sapien
gcttgggtatgtccaaatgcatacataaaacat

SEQ ID NO: 825540 - DNA, 33 bp, Homo sapien
gcttgggtatgtccaattgcatacataaaacat

SEQ ID NO: 825541 - DNA, 33 bp, Homo sapien
gagcactagatcatacaagttagtatttttaat

SEQ ID NO: 825542 - DNA, 33 bp, Homo sapien
gagcactagatcataccagttagtatttttaat

SEQ ID NO: 825543 - DNA, 33 bp, Homo sapien
catggtatgatccctgcaagagaataaataaga

SEQ ID NO: 825544 - DNA, 33 bp, Homo sapien
catggtatgatccctggaagagaataaataaga

SEQ ID NO: 825545 - DNA, 33 bp, Homo sapien
accgattacgtaacacacaactctgatgatgga

SEQ ID NO: 825546 - DNA, 33 bp, Homo sapien
accgattacgtaacacgcaactctgatgatgga

SEQ ID NO: 825547 - DNA, 33 bp, Homo sapien
agctaaaccaaaccacgctcgtgcaaataccca

SEQ ID NO: 825548 - DNA, 33 bp, Homo sapien
agctaaaccaaaccactctcgtgcaaataccca

SEQ ID NO: 825549 - DNA, 33 bp, Homo sapien
tccacagctttcagtaagaatcataaagaggtc

SEQ ID NO: 825550 - DNA, 33 bp, Homo sapien
tccacagctttcagtaggaatcataaagaggtc

SEQ ID NO: 825551 - DNA, 33 bp, Homo sapien
gggaaactgctaataccggactgtttataaaaa

SEQ ID NO: 825552 - DNA, 33 bp, Homo sapien
gggaaactgctaatactggactgtttataaaaa

SEQ ID NO: 825553 - DNA, 33 bp, Homo sapien
ttgaaacatcactataccccagcaatatgtata

SEQ ID NO: 825554 - DNA, 33 bp, Homo sapien
ttgaaacatcactatatcccagcaatatgtata

SEQ ID NO: 825555 - DNA, 33 bp, Homo sapien
ctgagcctcagaactaccagatgggttaataaa

SEQ ID NO: 825556 - DNA, 33 bp, Homo sapien
ctgagcctcagaactatcagatgggttaataaa

SEQ ID NO: 825557 - DNA, 33 bp, Homo sapien
caaacatttattaagaacctactggagaaaaga

SEQ ID NO: 825558 - DNA, 33 bp, Homo sapien
caaacatttattaagagcctactggagaaaaga

SEQ ID NO: 825559 - DNA, 33 bp, Homo sapien
gaagtgcagtgccccacaggcatacacatctca

SEQ ID NO: 825560 - DNA, 33 bp, Homo sapien
gaagtgcagtgccccataggcatacacatctca

SEQ ID NO: 825561 - DNA, 33 bp, Homo sapien
ataagttcctgaaacgcaggagccttctcatac

SEQ ID NO: 825562 - DNA, 33 bp, Homo sapien
ataagttcctgaaacgtaggagccttctcatac

SEQ ID NO: 825563 - DNA, 33 bp, Homo sapien
tggccatctcccaagaagcactggatccatgat

SEQ ID NO: 825564 - DNA, 33 bp, Homo sapien
tggccatctcccaagaggcactggatccatgat

SEQ ID NO: 825565 - DNA, 33 bp, Homo sapien
tttatcgggtggtttacaggctctttatcatgg

SEQ ID NO: 825566 - DNA, 33 bp, Homo sapien
tttatcgggtggtttataggctctttatcatgg

SEQ ID NO: 825567 - DNA, 33 bp, Homo sapien
aggcaattctagtctaactgtgctttgtttact

SEQ ID NO: 825568 - DNA, 33 bp, Homo sapien
aggcaattctagtctagctgtgctttgtttact

SEQ ID NO: 825569 - DNA, 33 bp, Homo sapien
cacggcacccagcaagacagatttttaataaag

SEQ ID NO: 825570 - DNA, 33 bp, Homo sapien
cacggcacccagcaaggcagatttttaataaag

SEQ ID NO: 825571 - DNA, 33 bp, Homo sapien
tgccaaaaactggcaacgactcaacatccaaca

SEQ ID NO: 825572 - DNA, 33 bp, Homo sapien
tgccaaaaactggcaatgactcaacatccaaca

SEQ ID NO: 825573 - DNA, 33 bp, Homo sapien
gtgcctggccatactcaataaaaacatatttca

SEQ ID NO: 825574 - DNA, 33 bp, Homo sapien
gtgcctggccatactccataaaaacatatttca

SEQ ID NO: 825575 - DNA, 33 bp, Homo sapien
agaatagcttttctaccgatggctgcttttcta

SEQ ID NO: 825576 - DNA, 33 bp, Homo sapien
agaatagcttttctactgatggctgcttttcta

SEQ ID NO: 825577 - DNA, 33 bp, Homo sapien
agcagatggaaagcatcatctgtagaatctaga

SEQ ID NO: 825578 - DNA, 33 bp, Homo sapien
agcagatggaaagcattatctgtagaatctaga

SEQ ID NO: 825579 - DNA, 33 bp, Homo sapien
tcaggttcttttggaaaatatttctagactcag

SEQ ID NO: 825580 - DNA, 33 bp, Homo sapien
tcaggttcttttggaagatatttctagactcag

SEQ ID NO: 825581 - DNA, 33 bp, Homo sapien
aattgctaaatgagccaatggacttaaatcagc

SEQ ID NO: 825582 - DNA, 33 bp, Homo sapien
aattgctaaatgagccgatggacttaaatcagc

SEQ ID NO: 825583 - DNA, 33 bp, Homo sapien
cctgtcaggcacagacacagaacaacatcaggc

SEQ ID NO: 825584 - DNA, 33 bp, Homo sapien
cctgtcaggcacagacgcagaacaacatcaggc

SEQ ID NO: 825585 - DNA, 33 bp, Homo sapien
acaatatcagttgccacgtttttgtcgaaacaa

SEQ ID NO: 825586 - DNA, 33 bp, Homo sapien
acaatatcagttgccatgtttttgtcgaaacaa

SEQ ID NO: 825587 - DNA, 33 bp, Homo sapien
ttccactctcaagctacctgtatctaggaagtg

SEQ ID NO: 825588 - DNA, 33 bp, Homo sapien
ttccactctcaagctagctgtatctaggaagtg

SEQ ID NO: 825589 - DNA, 33 bp, Homo sapien
tcagtcctttgttgaagtagagccattggcctg

SEQ ID NO: 825590 - DNA, 33 bp, Homo sapien
tcagtcctttgttgaattagagccattggcctg

SEQ ID NO: 825591 - DNA, 33 bp, Homo sapien
tggtgctttctggagaaaaaacgcagccgttgc

SEQ ID NO: 825592 - DNA, 33 bp, Homo sapien
tggtgctttctggagataaaacgcagccgttgc

SEQ ID NO: 825593 - DNA, 33 bp, Homo sapien
gtttaaacaaaggaaccagcctactggtatctg

SEQ ID NO: 825594 - DNA, 33 bp, Homo sapien
gtttaaacaaaggaactagcctactggtatctg

SEQ ID NO: 825595 - DNA, 33 bp, Homo sapien
taagccttctgacaccaatcttctgtgatcttt

SEQ ID NO: 825596 - DNA, 33 bp, Homo sapien
taagccttctgacaccgatcttctgtgatcttt

SEQ ID NO: 825597 - DNA, 33 bp, Homo sapien
ggagctgcgactagaacgtggtcggataatgcc

SEQ ID NO: 825598 - DNA, 33 bp, Homo sapien
ggagctgcgactagaaggtggtcggataatgcc

SEQ ID NO: 825599 - DNA, 33 bp, Homo sapien
gaggagctttaaaaaacatgtatacctagttcc

SEQ ID NO: 825600 - DNA, 33 bp, Homo sapien
gaggagctttaaaaaatatgtatacctagttcc

SEQ ID NO: 825601 - DNA, 33 bp, Homo sapien
tgttcctaactcatagccaagcctgagaaccac

SEQ ID NO: 825602 - DNA, 33 bp, Homo sapien
tgttcctaactcatagtcaagcctgagaaccac

SEQ ID NO: 825603 - DNA, 33 bp, Homo sapien
tccctcggcatgtagtcacccttcttcaaaggt

SEQ ID NO: 825604 - DNA, 33 bp, Homo sapien
tccctcggcatgtagttacccttcttcaaaggt

SEQ ID NO: 825605 - DNA, 33 bp, Homo sapien
tccctagacctttattcaaccacttccacttcc

SEQ ID NO: 825606 - DNA, 33 bp, Homo sapien
tccctagacctttattgaaccacttccacttcc

SEQ ID NO: 825607 - DNA, 33 bp, Homo sapien
tcctgcaagaactttcaagaacacctggcagct

SEQ ID NO: 825608 - DNA, 33 bp, Homo sapien
tcctgcaagaactttcgagaacacctggcagct

SEQ ID NO: 825609 - DNA, 33 bp, Homo sapien
ttaaaagatccctagaagtgacaaaaattgtct

SEQ ID NO: 825610 - DNA, 33 bp, Homo sapien
ttaaaagatccctagatgtgacaaaaattgtct

SEQ ID NO: 825611 - DNA, 33 bp, Homo sapien
cacttctgaatgctgacaggtgagaaagggagg

SEQ ID NO: 825612 - DNA, 33 bp, Homo sapien
cacttctgaatgctgagaggtgagaaagggagg

SEQ ID NO: 825613 - DNA, 33 bp, Homo sapien
ttttgtgtgtttgaatcagacacttgcagcaca

SEQ ID NO: 825614 - DNA, 33 bp, Homo sapien
ttttgtgtgtttgaatgagacacttgcagcaca

SEQ ID NO: 825615 - DNA, 33 bp, Homo sapien
ggtcctcagctgatgacgccaaacaagttggga

SEQ ID NO: 825616 - DNA, 33 bp, Homo sapien
ggtcctcagctgatgatgccaaacaagttggga

SEQ ID NO: 825617 - DNA, 33 bp, Homo sapien
ggaactgccatctttacggtggagaaacgatgt

SEQ ID NO: 825618 - DNA, 33 bp, Homo sapien
ggaactgccatctttatggtggagaaacgatgt

SEQ ID NO: 825619 - DNA, 33 bp, Homo sapien
aggggtgttgccctcaatactaacaggcttctt

SEQ ID NO: 825620 - DNA, 33 bp, Homo sapien
aggggtgttgccctcagtactaacaggcttctt

SEQ ID NO: 825621 - DNA, 33 bp, Homo sapien
aatgaccattaagccacctgtagtaacaagagc

SEQ ID NO: 825622 - DNA, 33 bp, Homo sapien
aatgaccattaagccatctgtagtaacaagagc

SEQ ID NO: 825623 - DNA, 33 bp, Homo sapien
gttcacagagtatgtacatattaggtttaacta

SEQ ID NO: 825624 - DNA, 33 bp, Homo sapien
gttcacagagtatgtatatattaggtttaacta

SEQ ID NO: 825625 - DNA, 33 bp, Homo sapien
cagtatatttaaggccaagcagaatggctcacg

SEQ ID NO: 825626 - DNA, 33 bp, Homo sapien
cagtatatttaaggccgagcagaatggctcacg

SEQ ID NO: 825627 - DNA, 33 bp, Homo sapien
agtaaaagataagcagcccaatagaaaaacaaa

SEQ ID NO: 825628 - DNA, 33 bp, Homo sapien
agtaaaagataagcagtccaatagaaaaacaaa

SEQ ID NO: 825629 - DNA, 33 bp, Homo sapien
atttaaaaaggctgaaacaaacataacaaagtg

SEQ ID NO: 825630 - DNA, 33 bp, Homo sapien
atttaaaaaggctgaaccaaacataacaaagtg

SEQ ID NO: 825631 - DNA, 33 bp, Homo sapien
ctttgggtcgggaagccgatcaaagaaccagga

SEQ ID NO: 825632 - DNA, 33 bp, Homo sapien
ctttgggtcgggaagctgatcaaagaaccagga

SEQ ID NO: 825633 - DNA, 33 bp, Homo sapien
cttctgtgaaccactcaacctctccaaatttcg

SEQ ID NO: 825634 - DNA, 33 bp, Homo sapien
cttctgtgaaccactcgacctctccaaatttcg

SEQ ID NO: 825635 - DNA, 33 bp, Homo sapien
tttccataaaactgacccaactatggccagaga

SEQ ID NO: 825636 - DNA, 33 bp, Homo sapien
tttccataaaactgactcaactatggccagaga

SEQ ID NO: 825637 - DNA, 33 bp, Homo sapien
tgaagaacgatttcacaaaatgccaaatcagga

SEQ ID NO: 825638 - DNA, 33 bp, Homo sapien
tgaagaacgatttcacgaaatgccaaatcagga

SEQ ID NO: 825639 - DNA, 33 bp, Homo sapien
gaagatgaaatctgaccagaattagggttcctt

SEQ ID NO: 825640 - DNA, 33 bp, Homo sapien
gaagatgaaatctgactagaattagggttcctt

SEQ ID NO: 825641 - DNA, 33 bp, Homo sapien
aacttgctttctttctcacctggtaattgagtt

SEQ ID NO: 825642 - DNA, 33 bp, Homo sapien
aacttgctttctttcttacctggtaattgagtt

SEQ ID NO: 825643 - DNA, 33 bp, Homo sapien
ctcacaccataagcccagcaaccaagacagaaa

SEQ ID NO: 825644 - DNA, 33 bp, Homo sapien
ctcacaccataagcccggcaaccaagacagaaa

SEQ ID NO: 825645 - DNA, 33 bp, Homo sapien
gctagaaccttcaaacaagctttcaaaataatg

SEQ ID NO: 825646 - DNA, 33 bp, Homo sapien
gctagaaccttcaaacgagctttcaaaataatg

SEQ ID NO: 825647 - DNA, 33 bp, Homo sapien
tcttctattttccatcccaaattaagttcatca

SEQ ID NO: 825648 - DNA, 33 bp, Homo sapien
tcttctattttccatctcaaattaagttcatca

SEQ ID NO: 825649 - DNA, 33 bp, Homo sapien
tggttaaggccacataactggcggttcactagg

SEQ ID NO: 825650 - DNA, 33 bp, Homo sapien
tggttaaggccacatagctggcggttcactagg

SEQ ID NO: 825651 - DNA, 33 bp, Homo sapien
gaagctgactgacttcgccatgctgcatggaag

SEQ ID NO: 825652 - DNA, 33 bp, Homo sapien
gaagctgactgacttctccatgctgcatggaag

SEQ ID NO: 825653 - DNA, 33 bp, Homo sapien
tcctctataactggaacatccgcagatctcact

SEQ ID NO: 825654 - DNA, 33 bp, Homo sapien
tcctctataactggaatatccgcagatctcact

SEQ ID NO: 825655 - DNA, 33 bp, Homo sapien
aactgtaaagtgcatacagtcaccttaggatct

SEQ ID NO: 825656 - DNA, 33 bp, Homo sapien
aactgtaaagtgcatagagtcaccttaggatct

SEQ ID NO: 825657 - DNA, 33 bp, Homo sapien
tgaagactcttcagcaataagaacaaactacta

SEQ ID NO: 825658 - DNA, 33 bp, Homo sapien
tgaagactcttcagcagtaagaacaaactacta

SEQ ID NO: 825659 - DNA, 33 bp, Homo sapien
tataatataatatacacgatgcgtttctgtaat

SEQ ID NO: 825660 - DNA, 33 bp, Homo sapien
tataatataatatacatgatgcgtttctgtaat

SEQ ID NO: 825661 - DNA, 33 bp, Homo sapien
gcaggaggcaaaacaccgaaacatctgccaggc

SEQ ID NO: 825662 - DNA, 33 bp, Homo sapien
gcaggaggcaaaacacggaaacatctgccaggc

SEQ ID NO: 825663 - DNA, 33 bp, Homo sapien
cacctcaaagagtgagaaaagctgaaagaagga

SEQ ID NO: 825664 - DNA, 33 bp, Homo sapien
cacctcaaagagtgagcaaagctgaaagaagga

SEQ ID NO: 825665 - DNA, 33 bp, Homo sapien
ggctgaatgaatacgcaccacaagaaagtgcct

SEQ ID NO: 825666 - DNA, 33 bp, Homo sapien
ggctgaatgaatacgcgccacaagaaagtgcct

SEQ ID NO: 825667 - DNA, 33 bp, Homo sapien
ctgaatgcaactcaaacgaatgcctgtggactt

SEQ ID NO: 825668 - DNA, 33 bp, Homo sapien
ctgaatgcaactcaaatgaatgcctgtggactt

SEQ ID NO: 825669 - DNA, 33 bp, Homo sapien
acgttaagaacatagactaataattgtcacaag

SEQ ID NO: 825670 - DNA, 33 bp, Homo sapien
acgttaagaacatagattaataattgtcacaag

SEQ ID NO: 825671 - DNA, 33 bp, Homo sapien
ctatattcatagcctacatcctaacacaccacc

SEQ ID NO: 825672 - DNA, 33 bp, Homo sapien
ctatattcatagcctatatcctaacacaccacc

SEQ ID NO: 825673 - DNA, 33 bp, Homo sapien
tacaataatcatctaaagttgttatcatgtcta

SEQ ID NO: 825674 - DNA, 33 bp, Homo sapien
tacaataatcatctaaggttgttatcatgtcta

SEQ ID NO: 825675 - DNA, 33 bp, Homo sapien
tctggtgttataaaaacgaacctatttccttga

SEQ ID NO: 825676 - DNA, 33 bp, Homo sapien
tctggtgttataaaaatgaacctatttccttga

SEQ ID NO: 825677 - DNA, 33 bp, Homo sapien
acccccagtcattagcccttgaacacttcctaa

SEQ ID NO: 825678 - DNA, 33 bp, Homo sapien
acccccagtcattagcgcttgaacacttcctaa

SEQ ID NO: 825679 - DNA, 33 bp, Homo sapien
gttagaagtgagtcatcagtttcatcccatatt

SEQ ID NO: 825680 - DNA, 33 bp, Homo sapien
gttagaagtgagtcattagtttcatcccatatt

SEQ ID NO: 825681 - DNA, 33 bp, Homo sapien
caaattcaaatggatgacaaatggctgaacaat

SEQ ID NO: 825682 - DNA, 33 bp, Homo sapien
caaattcaaatggatggcaaatggctgaacaat

SEQ ID NO: 825683 - DNA, 33 bp, Homo sapien
ttagtaaactatagcaataaagggtccaagttt

SEQ ID NO: 825684 - DNA, 33 bp, Homo sapien
ttagtaaactatagcagtaaagggtccaagttt

SEQ ID NO: 825685 - DNA, 33 bp, Homo sapien
aaacagcagtatggaaactacttcttcggtgaa

SEQ ID NO: 825686 - DNA, 33 bp, Homo sapien
aaacagcagtatggaatctacttcttcggtgaa

SEQ ID NO: 825687 - DNA, 33 bp, Homo sapien
acctctctttaaataactgatgcctgtttcaaa

SEQ ID NO: 825688 - DNA, 33 bp, Homo sapien
acctctctttaaataattgatgcctgtttcaaa

SEQ ID NO: 825689 - DNA, 33 bp, Homo sapien
aaccacaggaagataaagaggggtgtatatatt

SEQ ID NO: 825690 - DNA, 33 bp, Homo sapien
aaccacaggaagataaggaggggtgtatatatt

SEQ ID NO: 825691 - DNA, 33 bp, Homo sapien
taaacactgtggtagaaccaaaaatggcaccct

SEQ ID NO: 825692 - DNA, 33 bp, Homo sapien
taaacactgtggtagatccaaaaatggcaccct

SEQ ID NO: 825693 - DNA, 33 bp, Homo sapien
gataaagatggaaaagaaatagcagagaattat

SEQ ID NO: 825694 - DNA, 33 bp, Homo sapien
gataaagatggaaaaggaatagcagagaattat

SEQ ID NO: 825695 - DNA, 33 bp, Homo sapien
gaaaaggggaaaatcaactatgacaacagaaag

SEQ ID NO: 825696 - DNA, 33 bp, Homo sapien
gaaaaggggaaaatcatctatgacaacagaaag

SEQ ID NO: 825697 - DNA, 33 bp, Homo sapien
agataagtagattcacgatagtcactgctgatg

SEQ ID NO: 825698 - DNA, 33 bp, Homo sapien
agataagtagattcactatagtcactgctgatg

SEQ ID NO: 825699 - DNA, 33 bp, Homo sapien
ttttgtactagatggaatagagaactaaaatat

SEQ ID NO: 825700 - DNA, 33 bp, Homo sapien
ttttgtactagatggactagagaactaaaatat

SEQ ID NO: 825701 - DNA, 33 bp, Homo sapien
aggaaatgtattggcccatgtaactggaagttc

SEQ ID NO: 825702 - DNA, 33 bp, Homo sapien
aggaaatgtattggcctatgtaactggaagttc

SEQ ID NO: 825703 - DNA, 33 bp, Homo sapien
gctaccagatacagtaagcattataatccctac

SEQ ID NO: 825704 - DNA, 33 bp, Homo sapien
gctaccagatacagtaggcattataatccctac

SEQ ID NO: 825705 - DNA, 33 bp, Homo sapien
ttgtagcagcagcagaacttgcccaaaaacata

SEQ ID NO: 825706 - DNA, 33 bp, Homo sapien
ttgtagcagcagcagaccttgcccaaaaacata

SEQ ID NO: 825707 - DNA, 33 bp, Homo sapien
acgaaaactagctagacatggtagtgcgtgctt

SEQ ID NO: 825708 - DNA, 33 bp, Homo sapien
acgaaaactagctagatatggtagtgcgtgctt

SEQ ID NO: 825709 - DNA, 33 bp, Homo sapien
aaactcagggtgactccgagacccaaacagtgg

SEQ ID NO: 825710 - DNA, 33 bp, Homo sapien
aaactcagggtgactctgagacccaaacagtgg

SEQ ID NO: 825711 - DNA, 33 bp, Homo sapien
tctcctgcacgaatcactcatcattcttggagg

SEQ ID NO: 825712 - DNA, 33 bp, Homo sapien
tctcctgcacgaatcagtcatcattcttggagg

SEQ ID NO: 825713 - DNA, 33 bp, Homo sapien
tattcaccaaactgataaaaaaatctgcctgtg

SEQ ID NO: 825714 - DNA, 33 bp, Homo sapien
tattcaccaaactgatcaaaaaatctgcctgtg

SEQ ID NO: 825715 - DNA, 33 bp, Homo sapien
ccattctcatcttattcaaattactggcacatg

SEQ ID NO: 825716 - DNA, 33 bp, Homo sapien
ccattctcatcttattgaaattactggcacatg

SEQ ID NO: 825717 - DNA, 33 bp, Homo sapien
aaggagtaaaacgtggaagtaggccaggtgtgg

SEQ ID NO: 825718 - DNA, 33 bp, Homo sapien
aaggagtaaaacgtggcagtaggccaggtgtgg

SEQ ID NO: 825719 - DNA, 33 bp, Homo sapien
tacaccacctgtgtataaacaaaactagtgtaa

SEQ ID NO: 825720 - DNA, 33 bp, Homo sapien
tacaccacctgtgtatgaacaaaactagtgtaa

SEQ ID NO: 825721 - DNA, 33 bp, Homo sapien
tactgtgcttgatctgcagtatgagctcaataa

SEQ ID NO: 825722 - DNA, 33 bp, Homo sapien
tactgtgcttgatctgtagtatgagctcaataa

SEQ ID NO: 825723 - DNA, 33 bp, Homo sapien
atctgatacacaaatcactacatcattcttacc

SEQ ID NO: 825724 - DNA, 33 bp, Homo sapien
atctgatacacaaatcgctacatcattcttacc

SEQ ID NO: 825725 - DNA, 33 bp, Homo sapien
gcaccccgaatccagaatctcaggtaatctcgc

SEQ ID NO: 825726 - DNA, 33 bp, Homo sapien
gcaccccgaatccagagtctcaggtaatctcgc

SEQ ID NO: 825727 - DNA, 33 bp, Homo sapien
tccagtgatcttcccactataccatacaacaaa

SEQ ID NO: 825728 - DNA, 33 bp, Homo sapien
tccagtgatcttcccattataccatacaacaaa

SEQ ID NO: 825729 - DNA, 33 bp, Homo sapien
agaggaataatagtaaaatgggggccaagaaac

SEQ ID NO: 825730 - DNA, 33 bp, Homo sapien
agaggaataatagtaacatgggggccaagaaac

SEQ ID NO: 825731 - DNA, 33 bp, Homo sapien
gggcaaccccaaccaacggatggacagaactgg

SEQ ID NO: 825732 - DNA, 33 bp, Homo sapien
gggcaaccccaaccaatggatggacagaactgg

SEQ ID NO: 825733 - DNA, 33 bp, Homo sapien
ggcgaatctgaactagcaggaactgtttactgc

SEQ ID NO: 825734 - DNA, 33 bp, Homo sapien
ggcgaatctgaactaggaggaactgtttactgc

SEQ ID NO: 825735 - DNA, 33 bp, Homo sapien
ttcctttaaagcaatgcaaacaaactaacacat

SEQ ID NO: 825736 - DNA, 33 bp, Homo sapien
ttcctttaaagcaatgtaaacaaactaacacat

SEQ ID NO: 825737 - DNA, 33 bp, Homo sapien
caccttggagtccaaacgcatggccttcctttg

SEQ ID NO: 825738 - DNA, 33 bp, Homo sapien
caccttggagtccaaatgcatggccttcctttg

SEQ ID NO: 825739 - DNA, 33 bp, Homo sapien
gtctagcatacttgtaaaaataaggctttcaga

SEQ ID NO: 825740 - DNA, 33 bp, Homo sapien
gtctagcatacttgtacaaataaggctttcaga

SEQ ID NO: 825741 - DNA, 33 bp, Homo sapien
ctattatgagtaatcccgctatgaacagtcatg

SEQ ID NO: 825742 - DNA, 33 bp, Homo sapien
ctattatgagtaatcctgctatgaacagtcatg

SEQ ID NO: 825743 - DNA, 33 bp, Homo sapien
gtgctgaggattaaaacagttaacatatgcaaa

SEQ ID NO: 825744 - DNA, 33 bp, Homo sapien
gtgctgaggattaaaagagttaacatatgcaaa

SEQ ID NO: 825745 - DNA, 33 bp, Homo sapien
tatatatggaaaaacaaggcacgcttagggtgg

SEQ ID NO: 825746 - DNA, 33 bp, Homo sapien
tatatatggaaaaacacggcacgcttagggtgg

SEQ ID NO: 825747 - DNA, 33 bp, Homo sapien
cttgcctcattgctccaaaagcactcttattgg

SEQ ID NO: 825748 - DNA, 33 bp, Homo sapien
cttgcctcattgctccgaaagcactcttattgg

SEQ ID NO: 825749 - DNA, 33 bp, Homo sapien
cttaatgagatagtaacgagcaaacatcgaagc

SEQ ID NO: 825750 - DNA, 33 bp, Homo sapien
cttaatgagatagtaatgagcaaacatcgaagc

SEQ ID NO: 825751 - DNA, 33 bp, Homo sapien
ctcaacaagacagatacacgggttgggtggagt

SEQ ID NO: 825752 - DNA, 33 bp, Homo sapien
ctcaacaagacagatatacgggttgggtggagt

SEQ ID NO: 825753 - DNA, 33 bp, Homo sapien
tagaatctgaatagtaaggaataaacccacttt

SEQ ID NO: 825754 - DNA, 33 bp, Homo sapien
tagaatctgaatagtatggaataaacccacttt

SEQ ID NO: 825755 - DNA, 33 bp, Homo sapien
caccatctgtgaaccaataagtggtctttgacc

SEQ ID NO: 825756 - DNA, 33 bp, Homo sapien
caccatctgtgaaccagtaagtggtctttgacc

SEQ ID NO: 825757 - DNA, 33 bp, Homo sapien
aaagttttgcagccgacacttttaaaaatgata

SEQ ID NO: 825758 - DNA, 33 bp, Homo sapien
aaagttttgcagccgatacttttaaaaatgata

SEQ ID NO: 825759 - DNA, 33 bp, Homo sapien
catttgaagtcaaaaaaatctgggttggaatcc

SEQ ID NO: 825760 - DNA, 33 bp, Homo sapien
catttgaagtcaaaaacatctgggttggaatcc

SEQ ID NO: 825761 - DNA, 33 bp, Homo sapien
tcaagcttggattaaggcatgtattaaatgtgg

SEQ ID NO: 825762 - DNA, 33 bp, Homo sapien
tcaagcttggattaagtcatgtattaaatgtgg

SEQ ID NO: 825763 - DNA, 33 bp, Homo sapien
aggaaagatacttcaacggatgttcatatgcct

SEQ ID NO: 825764 - DNA, 33 bp, Homo sapien
aggaaagatacttcaatggatgttcatatgcct

SEQ ID NO: 825765 - DNA, 33 bp, Homo sapien
aaaaagatgtatcaagaaactgccatggcagca

SEQ ID NO: 825766 - DNA, 33 bp, Homo sapien
aaaaagatgtatcaaggaactgccatggcagca

SEQ ID NO: 825767 - DNA, 33 bp, Homo sapien
gcttggttcgtggtagcagttttgaaatacagg

SEQ ID NO: 825768 - DNA, 33 bp, Homo sapien
gcttggttcgtggtagtagttttgaaatacagg

SEQ ID NO: 825769 - DNA, 33 bp, Homo sapien
ggcatctatcaagtcacacaataaattctgtag

SEQ ID NO: 825770 - DNA, 33 bp, Homo sapien
ggcatctatcaagtcatacaataaattctgtag

SEQ ID NO: 825771 - DNA, 33 bp, Homo sapien
taatgtgccagtttaccctcatggcgacagccc

SEQ ID NO: 825772 - DNA, 33 bp, Homo sapien
taatgtgccagtttactctcatggcgacagccc

SEQ ID NO: 825773 - DNA, 33 bp, Homo sapien
caggcttcatggaggaatagacaaggggatctg

SEQ ID NO: 825774 - DNA, 33 bp, Homo sapien
caggcttcatggaggagtagacaaggggatctg

SEQ ID NO: 825775 - DNA, 33 bp, Homo sapien
tcctcagtagcaatctcaccaaagagagagatt

SEQ ID NO: 825776 - DNA, 33 bp, Homo sapien
tcctcagtagcaatcttaccaaagagagagatt

SEQ ID NO: 825777 - DNA, 33 bp, Homo sapien
atggaaaaatggtcaccggcttagaagttattt

SEQ ID NO: 825778 - DNA, 33 bp, Homo sapien
atggaaaaatggtcactggcttagaagttattt

SEQ ID NO: 825779 - DNA, 33 bp, Homo sapien
ctgctcatggttattcaaattccattaaaaata

SEQ ID NO: 825780 - DNA, 33 bp, Homo sapien
ctgctcatggttattcgaattccattaaaaata

SEQ ID NO: 825781 - DNA, 33 bp, Homo sapien
agacttaagttaaaacagagaatgatttctgct

SEQ ID NO: 825782 - DNA, 33 bp, Homo sapien
agacttaagttaaaacggagaatgatttctgct

SEQ ID NO: 825783 - DNA, 33 bp, Homo sapien
gagcctgttcttctgacgttaagagaagtctaa

SEQ ID NO: 825784 - DNA, 33 bp, Homo sapien
gagcctgttcttctgaggttaagagaagtctaa

SEQ ID NO: 825785 - DNA, 33 bp, Homo sapien
ctgttctgaacacaagaaaaatggaaattcatc

SEQ ID NO: 825786 - DNA, 33 bp, Homo sapien
ctgttctgaacacaaggaaaatggaaattcatc

SEQ ID NO: 825787 - DNA, 33 bp, Homo sapien
tcatcatgaacatctcccggtgctactgataga

SEQ ID NO: 825788 - DNA, 33 bp, Homo sapien
tcatcatgaacatctctcggtgctactgataga

SEQ ID NO: 825789 - DNA, 33 bp, Homo sapien
gaataggttctggctaatacactctgccctctt

SEQ ID NO: 825790 - DNA, 33 bp, Homo sapien
gaataggttctggctagtacactctgccctctt

SEQ ID NO: 825791 - DNA, 33 bp, Homo sapien
atcttgacagacaagactcagttatgatttctt

SEQ ID NO: 825792 - DNA, 33 bp, Homo sapien
atcttgacagacaagattcagttatgatttctt

SEQ ID NO: 825793 - DNA, 33 bp, Homo sapien
agaagacataagaagaatcaactataagtgggg

SEQ ID NO: 825794 - DNA, 33 bp, Homo sapien
agaagacataagaagattcaactataagtgggg

SEQ ID NO: 825795 - DNA, 33 bp, Homo sapien
tctcataactttgctgaaactagggcttttaaa

SEQ ID NO: 825796 - DNA, 33 bp, Homo sapien
tctcataactttgctggaactagggcttttaaa

SEQ ID NO: 825797 - DNA, 33 bp, Homo sapien
ggaggattaagtctgacgggagcatgtagcctt

SEQ ID NO: 825798 - DNA, 33 bp, Homo sapien
ggaggattaagtctgatgggagcatgtagcctt

SEQ ID NO: 825799 - DNA, 33 bp, Homo sapien
atcaaatcccaaaaaacaaaggatgtcaatcag

SEQ ID NO: 825800 - DNA, 33 bp, Homo sapien
atcaaatcccaaaaaagaaaggatgtcaatcag

SEQ ID NO: 825801 - DNA, 33 bp, Homo sapien
cactgaattaaccagcaatttggttcatgaagt

SEQ ID NO: 825802 - DNA, 33 bp, Homo sapien
cactgaattaaccagcgatttggttcatgaagt

SEQ ID NO: 825803 - DNA, 33 bp, Homo sapien
aatgctagaacagggaaaaggagacatctctgt

SEQ ID NO: 825804 - DNA, 33 bp, Homo sapien
aatgctagaacagggagaaggagacatctctgt

SEQ ID NO: 825805 - DNA, 33 bp, Homo sapien
agagaatgctggattaccaaacagtgcagggca

SEQ ID NO: 825806 - DNA, 33 bp, Homo sapien
agagaatgctggattatcaaacagtgcagggca

SEQ ID NO: 825807 - DNA, 33 bp, Homo sapien
acagaaacactttcagaatgtcgaagccgggct

SEQ ID NO: 825808 - DNA, 33 bp, Homo sapien
acagaaacactttcaggatgtcgaagccgggct

SEQ ID NO: 825809 - DNA, 33 bp, Homo sapien
tgagatgaataaactcaattgctgccttgaagg

SEQ ID NO: 825810 - DNA, 33 bp, Homo sapien
tgagatgaataaactcgattgctgccttgaagg

SEQ ID NO: 825811 - DNA, 33 bp, Homo sapien
ctgtggctataacttacgtttgtgtcttatttc

SEQ ID NO: 825812 - DNA, 33 bp, Homo sapien
ctgtggctataacttatgtttgtgtcttatttc

SEQ ID NO: 825813 - DNA, 33 bp, Homo sapien
tcaagcctcaagacttaaaacttggcagcctgc

SEQ ID NO: 825814 - DNA, 33 bp, Homo sapien
tcaagcctcaagacttgaaacttggcagcctgc

SEQ ID NO: 825815 - DNA, 33 bp, Homo sapien
agccaccacgccgagcaacaactaactttttta

SEQ ID NO: 825816 - DNA, 33 bp, Homo sapien
agccaccacgccgagcgacaactaactttttta

SEQ ID NO: 825817 - DNA, 33 bp, Homo sapien
caaagttcttgctaacaacttagtaatgatttt

SEQ ID NO: 825818 - DNA, 33 bp, Homo sapien
caaagttcttgctaacgacttagtaatgatttt

SEQ ID NO: 825819 - DNA, 33 bp, Homo sapien
aattaccagatcttcaaagtggatactggatgg

SEQ ID NO: 825820 - DNA, 33 bp, Homo sapien
aattaccagatcttcagagtggatactggatgg

SEQ ID NO: 825821 - DNA, 33 bp, Homo sapien
tgctgtgagtgtatggaactaacacactgctgc

SEQ ID NO: 825822 - DNA, 33 bp, Homo sapien
tgctgtgagtgtatgggactaacacactgctgc

SEQ ID NO: 825823 - DNA, 33 bp, Homo sapien
tagatttgtcctgaagcaaataggcaatggtac

SEQ ID NO: 825824 - DNA, 33 bp, Homo sapien
tagatttgtcctgaagtaaataggcaatggtac

SEQ ID NO: 825825 - DNA, 33 bp, Homo sapien
atgcaaggatagggtaataattcatctctagtc

SEQ ID NO: 825826 - DNA, 33 bp, Homo sapien
atgcaaggatagggtagtaattcatctctagtc

SEQ ID NO: 825827 - DNA, 33 bp, Homo sapien
agcccagagcaatggacaaaatggagcaagtcc

SEQ ID NO: 825828 - DNA, 33 bp, Homo sapien
agcccagagcaatggataaaatggagcaagtcc

SEQ ID NO: 825829 - DNA, 33 bp, Homo sapien
ctcattccatacaaagcccttgttctcaaactt

SEQ ID NO: 825830 - DNA, 33 bp, Homo sapien
ctcattccatacaaagtccttgttctcaaactt

SEQ ID NO: 825831 - DNA, 33 bp, Homo sapien
tggaaggaagagagcaatgctaagaggggaaca

SEQ ID NO: 825832 - DNA, 33 bp, Homo sapien
tggaaggaagagagcagtgctaagaggggaaca

SEQ ID NO: 825833 - DNA, 33 bp, Homo sapien
ctaggcttctcttcctcagctggttttaatctg

SEQ ID NO: 825834 - DNA, 33 bp, Homo sapien
ctaggcttctcttccttagctggttttaatctg

SEQ ID NO: 825835 - DNA, 33 bp, Homo sapien
aatgcgtgaattttagaaagagtgagaaagtta

SEQ ID NO: 825836 - DNA, 33 bp, Homo sapien
aatgcgtgaattttaggaagagtgagaaagtta

SEQ ID NO: 825837 - DNA, 33 bp, Homo sapien
gaactatttaatgcacccttcacaatgctaata

SEQ ID NO: 825838 - DNA, 33 bp, Homo sapien
gaactatttaatgcacgcttcacaatgctaata

SEQ ID NO: 825839 - DNA, 33 bp, Homo sapien
ataaacattggagctcactcaaaatcaaccact

SEQ ID NO: 825840 - DNA, 33 bp, Homo sapien
ataaacattggagctcgctcaaaatcaaccact

SEQ ID NO: 825841 - DNA, 33 bp, Homo sapien
aggcaagggctttcaacagaccagagaccgagg

SEQ ID NO: 825842 - DNA, 33 bp, Homo sapien
aggcaagggctttcaagagaccagagaccgagg

SEQ ID NO: 825843 - DNA, 33 bp, Homo sapien
ttcatttattaattcacagcatataccacaagg

SEQ ID NO: 825844 - DNA, 33 bp, Homo sapien
ttcatttattaattcagagcatataccacaagg

SEQ ID NO: 825845 - DNA, 33 bp, Homo sapien
tgtactcaggacagaccagccggacttggggag

SEQ ID NO: 825846 - DNA, 33 bp, Homo sapien
tgtactcaggacagactagccggacttggggag

SEQ ID NO: 825847 - DNA, 33 bp, Homo sapien
gaaatcaacggttgtacggaatcaggggctctg

SEQ ID NO: 825848 - DNA, 33 bp, Homo sapien
gaaatcaacggttgtatggaatcaggggctctg

SEQ ID NO: 825849 - DNA, 33 bp, Homo sapien
tgagtgtagtgcccgggatagactgaatgacca

SEQ ID NO: 825850 - DNA, 33 bp, Homo sapien
tgagtgtagtgcccggtatagactgaatgacca

SEQ ID NO: 825851 - DNA, 33 bp, Homo sapien
tttccgaatcttcagaacaggcctgagtagtcc

SEQ ID NO: 825852 - DNA, 33 bp, Homo sapien
tttccgaatcttcagagcaggcctgagtagtcc

SEQ ID NO: 825853 - DNA, 33 bp, Homo sapien
aagaataatctctctcaccattattaaatgatt

SEQ ID NO: 825854 - DNA, 33 bp, Homo sapien
aagaataatctctctcgccattattaaatgatt

SEQ ID NO: 825855 - DNA, 33 bp, Homo sapien
ctgagggctttgagccagaacctgcaaccaaca

SEQ ID NO: 825856 - DNA, 33 bp, Homo sapien
ctgagggctttgagccggaacctgcaaccaaca

SEQ ID NO: 825857 - DNA, 33 bp, Homo sapien
cctcgattgaggcctacgaagatgtttcagagg

SEQ ID NO: 825858 - DNA, 33 bp, Homo sapien
cctcgattgaggcctatgaagatgtttcagagg

SEQ ID NO: 825859 - DNA, 33 bp, Homo sapien
ttgcacggtgtctgcaacagtattgtatctgga

SEQ ID NO: 825860 - DNA, 33 bp, Homo sapien
ttgcacggtgtctgcagcagtattgtatctgga

SEQ ID NO: 825861 - DNA, 33 bp, Homo sapien
ttcttgagacacaattcaatctacaacaactac

SEQ ID NO: 825862 - DNA, 33 bp, Homo sapien
ttcttgagacacaatttaatctacaacaactac

SEQ ID NO: 825863 - DNA, 33 bp, Homo sapien
aggctcgtcccttgtccactacagaccccagat

SEQ ID NO: 825864 - DNA, 33 bp, Homo sapien
aggctcgtcccttgtctactacagaccccagat

SEQ ID NO: 825865 - DNA, 33 bp, Homo sapien
gtgcacagctctgttacgaatgctgatctcagg

SEQ ID NO: 825866 - DNA, 33 bp, Homo sapien
gtgcacagctctgttatgaatgctgatctcagg

SEQ ID NO: 825867 - DNA, 33 bp, Homo sapien
aggagactgtcccccacgtgcttttctctctag

SEQ ID NO: 825868 - DNA, 33 bp, Homo sapien
aggagactgtcccccatgtgcttttctctctag

SEQ ID NO: 825869 - DNA, 33 bp, Homo sapien
gacttcagagctggaaactctcctggtgtggag

SEQ ID NO: 825870 - DNA, 33 bp, Homo sapien
gacttcagagctggaacctctcctggtgtggag

SEQ ID NO: 825871 - DNA, 33 bp, Homo sapien
acgcctatgaggaaaaacttagtagatgcatac

SEQ ID NO: 825872 - DNA, 33 bp, Homo sapien
acgcctatgaggaaaagcttagtagatgcatac

SEQ ID NO: 825873 - DNA, 33 bp, Homo sapien
gcgtgagctgaagagacggaaggacagtgtgtg

SEQ ID NO: 825874 - DNA, 33 bp, Homo sapien
gcgtgagctgaagagatggaaggacagtgtgtg

SEQ ID NO: 825875 - DNA, 33 bp, Homo sapien
tggcctccttccacccaacagtaggcaagaaac

SEQ ID NO: 825876 - DNA, 33 bp, Homo sapien
tggcctccttccacccgacagtaggcaagaaac

SEQ ID NO: 825877 - DNA, 33 bp, Homo sapien
ctttctattgcctatacgacagatccatgtact

SEQ ID NO: 825878 - DNA, 33 bp, Homo sapien
ctttctattgcctatatgacagatccatgtact

SEQ ID NO: 825879 - DNA, 33 bp, Homo sapien
ctataataacaccttaccacggtatcacagctt

SEQ ID NO: 825880 - DNA, 33 bp, Homo sapien
ctataataacaccttagcacggtatcacagctt

SEQ ID NO: 825881 - DNA, 33 bp, Homo sapien
ctcgaggccaggcatggattagatacccttctg

SEQ ID NO: 825882 - DNA, 33 bp, Homo sapien
ctcgaggccaggcatgtattagatacccttctg

SEQ ID NO: 825883 - DNA, 33 bp, Homo sapien
tggttactcctatagccaacttccagccatcca

SEQ ID NO: 825884 - DNA, 33 bp, Homo sapien
tggttactcctatagctaacttccagccatcca

SEQ ID NO: 825885 - DNA, 33 bp, Homo sapien
caaaccggactgagaaatagaaaatggaataat

SEQ ID NO: 825886 - DNA, 33 bp, Homo sapien
caaaccggactgagaagtagaaaatggaataat

SEQ ID NO: 825887 - DNA, 33 bp, Homo sapien
actgtgaaagacaagccgagtgtgaataatata

SEQ ID NO: 825888 - DNA, 33 bp, Homo sapien
actgtgaaagacaagctgagtgtgaataatata

SEQ ID NO: 825889 - DNA, 33 bp, Homo sapien
acagtactgaaatatacagggtgtggagagaag

SEQ ID NO: 825890 - DNA, 33 bp, Homo sapien
acagtactgaaatatagagggtgtggagagaag

SEQ ID NO: 825891 - DNA, 33 bp, Homo sapien
ggagcaacactaacaccgaacttctcaaaagaa

SEQ ID NO: 825892 - DNA, 33 bp, Homo sapien
ggagcaacactaacactgaacttctcaaaagaa

SEQ ID NO: 825893 - DNA, 33 bp, Homo sapien
ccacaggccgcccagacgtgtgcatccttcctt

SEQ ID NO: 825894 - DNA, 33 bp, Homo sapien
ccacaggccgcccagatgtgtgcatccttcctt

SEQ ID NO: 825895 - DNA, 33 bp, Homo sapien
gtaactgtcatctctcaattccaggaattcctt

SEQ ID NO: 825896 - DNA, 33 bp, Homo sapien
gtaactgtcatctctccattccaggaattcctt

SEQ ID NO: 825897 - DNA, 33 bp, Homo sapien
ttcctttctgcccatggaggtttgggtttatac

SEQ ID NO: 825898 - DNA, 33 bp, Homo sapien
ttcctttctgcccatgtaggtttgggtttatac

SEQ ID NO: 825899 - DNA, 33 bp, Homo sapien
cagaagcatcttgttacctcatgggggaactca

SEQ ID NO: 825900 - DNA, 33 bp, Homo sapien
cagaagcatcttgttatctcatgggggaactca

SEQ ID NO: 825901 - DNA, 33 bp, Homo sapien
tctggtattcccaaagcagttaatggaagaagg

SEQ ID NO: 825902 - DNA, 33 bp, Homo sapien
tctggtattcccaaaggagttaatggaagaagg

SEQ ID NO: 825903 - DNA, 33 bp, Homo sapien
cccctcctttttgcccaagtaaatgcaatcaga

SEQ ID NO: 825904 - DNA, 33 bp, Homo sapien
cccctcctttttgcccgagtaaatgcaatcaga

SEQ ID NO: 825905 - DNA, 33 bp, Homo sapien
gtgacctagaaaatcactgactttcatgtaaac

SEQ ID NO: 825906 - DNA, 33 bp, Homo sapien
gtgacctagaaaatcattgactttcatgtaaac

SEQ ID NO: 825907 - DNA, 33 bp, Homo sapien
cataaataacttgtgcagcaactaataggtcct

SEQ ID NO: 825908 - DNA, 33 bp, Homo sapien
cataaataacttgtgcggcaactaataggtcct

SEQ ID NO: 825909 - DNA, 33 bp, Homo sapien
accaatgtatggacacaagcaatcctaacgaaa

SEQ ID NO: 825910 - DNA, 33 bp, Homo sapien
accaatgtatggacaccagcaatcctaacgaaa

SEQ ID NO: 825911 - DNA, 33 bp, Homo sapien
gaatcttacttgcacaagttttgctttgaacta

SEQ ID NO: 825912 - DNA, 33 bp, Homo sapien
gaatcttacttgcacaggttttgctttgaacta

SEQ ID NO: 825913 - DNA, 33 bp, Homo sapien
tcaagtcttgccctgacaaaaaaatgcaaagaa

SEQ ID NO: 825914 - DNA, 33 bp, Homo sapien
tcaagtcttgccctgagaaaaaaatgcaaagaa

SEQ ID NO: 825915 - DNA, 33 bp, Homo sapien
gcctggcatcttggtacaggacatcattacccc

SEQ ID NO: 825916 - DNA, 33 bp, Homo sapien
gcctggcatcttggtagaggacatcattacccc

SEQ ID NO: 825917 - DNA, 33 bp, Homo sapien
ctttctgtgaatggaaactccatggcttaggaa

SEQ ID NO: 825918 - DNA, 33 bp, Homo sapien
ctttctgtgaatggaagctccatggcttaggaa

SEQ ID NO: 825919 - DNA, 33 bp, Homo sapien
taaggtccctgttcaacggggataatgaggctt

SEQ ID NO: 825920 - DNA, 33 bp, Homo sapien
taaggtccctgttcaatggggataatgaggctt

SEQ ID NO: 825921 - DNA, 33 bp, Homo sapien
gaaatgaatttagttcccaagcaacattttaaa

SEQ ID NO: 825922 - DNA, 33 bp, Homo sapien
gaaatgaatttagttcgcaagcaacattttaaa

SEQ ID NO: 825923 - DNA, 33 bp, Homo sapien
accagactagactacaaagtatcagtgcacccc

SEQ ID NO: 825924 - DNA, 33 bp, Homo sapien
accagactagactacacagtatcagtgcacccc

SEQ ID NO: 825925 - DNA, 33 bp, Homo sapien
aacccatgttcgcaaacagggaaatagttcaag

SEQ ID NO: 825926 - DNA, 33 bp, Homo sapien
aacccatgttcgcaaatagggaaatagttcaag

SEQ ID NO: 825927 - DNA, 33 bp, Homo sapien
aatcttctcggcctgcacttgtccaggttatgt

SEQ ID NO: 825928 - DNA, 33 bp, Homo sapien
aatcttctcggcctgcgcttgtccaggttatgt

SEQ ID NO: 825929 - DNA, 33 bp, Homo sapien
aaacctgggtagttgcactaactttgccactaa

SEQ ID NO: 825930 - DNA, 33 bp, Homo sapien
aaacctgggtagttgcgctaactttgccactaa

SEQ ID NO: 825931 - DNA, 33 bp, Homo sapien
tagaaacaggattgaaataaggaactcagatgc

SEQ ID NO: 825932 - DNA, 33 bp, Homo sapien
tagaaacaggattgaagtaaggaactcagatgc

SEQ ID NO: 825933 - DNA, 33 bp, Homo sapien
atttgctataggaaaaccataaccaggtcaggg

SEQ ID NO: 825934 - DNA, 33 bp, Homo sapien
atttgctataggaaaatcataaccaggtcaggg

SEQ ID NO: 825935 - DNA, 33 bp, Homo sapien
cctaaagacacagggaaaactattttgatgcta

SEQ ID NO: 825936 - DNA, 33 bp, Homo sapien
cctaaagacacagggagaactattttgatgcta

SEQ ID NO: 825937 - DNA, 33 bp, Homo sapien
aatgatgtccagcccaatacatcaagcaaaact

SEQ ID NO: 825938 - DNA, 33 bp, Homo sapien
aatgatgtccagcccagtacatcaagcaaaact

SEQ ID NO: 825939 - DNA, 33 bp, Homo sapien
cacaactttctgttcaatcttagcaatagaaaa

SEQ ID NO: 825940 - DNA, 33 bp, Homo sapien
cacaactttctgttcagtcttagcaatagaaaa

SEQ ID NO: 825941 - DNA, 33 bp, Homo sapien
atcatttacctaacaaatcctttatgactagac

SEQ ID NO: 825942 - DNA, 33 bp, Homo sapien
atcatttacctaacaagtcctttatgactagac

SEQ ID NO: 825943 - DNA, 33 bp, Homo sapien
atggctactaggcccacgtctaacaattcctca

SEQ ID NO: 825944 - DNA, 33 bp, Homo sapien
atggctactaggcccatgtctaacaattcctca

SEQ ID NO: 825945 - DNA, 33 bp, Homo sapien
acgacagacagattaacaggaagacaggtatac

SEQ ID NO: 825946 - DNA, 33 bp, Homo sapien
acgacagacagattaataggaagacaggtatac

SEQ ID NO: 825947 - DNA, 33 bp, Homo sapien
tactctcccgttaacaggctgggattgacacca

SEQ ID NO: 825948 - DNA, 33 bp, Homo sapien
tactctcccgttaacatgctgggattgacacca

SEQ ID NO: 825949 - DNA, 33 bp, Homo sapien
gccagatcaagaaccacggcaagaactttccct

SEQ ID NO: 825950 - DNA, 33 bp, Homo sapien
gccagatcaagaaccagggcaagaactttccct

SEQ ID NO: 825951 - DNA, 33 bp, Homo sapien
attacatctaccggtccattatagaagagagag

SEQ ID NO: 825952 - DNA, 33 bp, Homo sapien
attacatctaccggtctattatagaagagagag

SEQ ID NO: 825953 - DNA, 33 bp, Homo sapien
aggatgggaatcttctaacacaatttcatttta

SEQ ID NO: 825954 - DNA, 33 bp, Homo sapien
aggatgggaatcttctcacacaatttcatttta

SEQ ID NO: 825955 - DNA, 33 bp, Homo sapien
gttgttggataatacccgcttacctggcggtgg

SEQ ID NO: 825956 - DNA, 33 bp, Homo sapien
gttgttggataatacctgcttacctggcggtgg

SEQ ID NO: 825957 - DNA, 33 bp, Homo sapien
tattcttttcttttccaaaattgtttcagctat

SEQ ID NO: 825958 - DNA, 33 bp, Homo sapien
tattcttttcttttccgaaattgtttcagctat

SEQ ID NO: 825959 - DNA, 33 bp, Homo sapien
gttttgttagattttcacgtaaaaattccattt

SEQ ID NO: 825960 - DNA, 33 bp, Homo sapien
gttttgttagattttcgcgtaaaaattccattt

SEQ ID NO: 825961 - DNA, 33 bp, Homo sapien
tcaatagcaaaaagtcaatcaggcatgttggta

SEQ ID NO: 825962 - DNA, 33 bp, Homo sapien
tcaatagcaaaaagtcgatcaggcatgttggta

SEQ ID NO: 825963 - DNA, 33 bp, Homo sapien
tttccttcctcttaaaactcaataaccattagg

SEQ ID NO: 825964 - DNA, 33 bp, Homo sapien
tttccttcctcttaaagctcaataaccattagg

SEQ ID NO: 825965 - DNA, 33 bp, Homo sapien
gaagacagataaataacaaagggtatgttatga

SEQ ID NO: 825966 - DNA, 33 bp, Homo sapien
gaagacagataaataataaagggtatgttatga

SEQ ID NO: 825967 - DNA, 33 bp, Homo sapien
tggcccagatagtagcactggactccgctttgc

SEQ ID NO: 825968 - DNA, 33 bp, Homo sapien
tggcccagatagtagcgctggactccgctttgc

SEQ ID NO: 825969 - DNA, 33 bp, Homo sapien
ataagtggtgtaagtacagaatatcccgtgtgt

SEQ ID NO: 825970 - DNA, 33 bp, Homo sapien
ataagtggtgtaagtatagaatatcccgtgtgt

SEQ ID NO: 825971 - DNA, 33 bp, Homo sapien
ttttacatgacatggaaacttcaaaaatgaaga

SEQ ID NO: 825972 - DNA, 33 bp, Homo sapien
ttttacatgacatggagacttcaaaaatgaaga

SEQ ID NO: 825973 - DNA, 33 bp, Homo sapien
attagaggtataaatcaagtgtcagggatcttt

SEQ ID NO: 825974 - DNA, 33 bp, Homo sapien
attagaggtataaatcgagtgtcagggatcttt

SEQ ID NO: 825975 - DNA, 33 bp, Homo sapien
aatgaaaacttgagaaatgttatattaccaaag

SEQ ID NO: 825976 - DNA, 33 bp, Homo sapien
aatgaaaacttgagaactgttatattaccaaag

SEQ ID NO: 825977 - DNA, 33 bp, Homo sapien
atggcagcccaagtgaataagacagtaccaaat

SEQ ID NO: 825978 - DNA, 33 bp, Homo sapien
atggcagcccaagtgattaagacagtaccaaat

SEQ ID NO: 825979 - DNA, 33 bp, Homo sapien
atcatttcagaagcaacggttgcatttcccaag

SEQ ID NO: 825980 - DNA, 33 bp, Homo sapien
atcatttcagaagcaatggttgcatttcccaag

SEQ ID NO: 825981 - DNA, 33 bp, Homo sapien
actcagtccaaaataaatatggttataaaacgt

SEQ ID NO: 825982 - DNA, 33 bp, Homo sapien
actcagtccaaaataagtatggttataaaacgt

SEQ ID NO: 825983 - DNA, 33 bp, Homo sapien
tgctatctggtaaaggaagattgaatatacaaa

SEQ ID NO: 825984 - DNA, 33 bp, Homo sapien
tgctatctggtaaagggagattgaatatacaaa

SEQ ID NO: 825985 - DNA, 33 bp, Homo sapien
gttgaagttgtagttaagcaaattttgtaattc

SEQ ID NO: 825986 - DNA, 33 bp, Homo sapien
gttgaagttgtagttacgcaaattttgtaattc

SEQ ID NO: 825987 - DNA, 33 bp, Homo sapien
tcatgataaaaagctcaccatactagtgtcaca

SEQ ID NO: 825988 - DNA, 33 bp, Homo sapien
tcatgataaaaagctcgccatactagtgtcaca

SEQ ID NO: 825989 - DNA, 33 bp, Homo sapien
ttaggttgttaggagcagataaagataagggcc

SEQ ID NO: 825990 - DNA, 33 bp, Homo sapien
ttaggttgttaggagcggataaagataagggcc

SEQ ID NO: 825991 - DNA, 33 bp, Homo sapien
ccacacctggcccactaaggaactttctatatg

SEQ ID NO: 825992 - DNA, 33 bp, Homo sapien
ccacacctggcccacttaggaactttctatatg

SEQ ID NO: 825993 - DNA, 33 bp, Homo sapien
actgtgaacacattacccttcaaagtaggttat

SEQ ID NO: 825994 - DNA, 33 bp, Homo sapien
actgtgaacacattactcttcaaagtaggttat

SEQ ID NO: 825995 - DNA, 33 bp, Homo sapien
cattttatcaatgaaaatactgagacacaaagg

SEQ ID NO: 825996 - DNA, 33 bp, Homo sapien
cattttatcaatgaaagtactgagacacaaagg

SEQ ID NO: 825997 - DNA, 33 bp, Homo sapien
tgtccctctacccaataagcgctgtctgatctt

SEQ ID NO: 825998 - DNA, 33 bp, Homo sapien
tgtccctctacccaatgagcgctgtctgatctt

SEQ ID NO: 825999 - DNA, 33 bp, Homo sapien
tccacttaataaacaccgtgtctctggccaggc

SEQ ID NO: 826000 - DNA, 33 bp, Homo sapien
tccacttaataaacactgtgtctctggccaggc

SEQ ID NO: 826001 - DNA, 33 bp, Homo sapien
gtcctccaatgtgaaccctcaggcctatggagg

SEQ ID NO: 826002 - DNA, 33 bp, Homo sapien
gtcctccaatgtgaactctcaggcctatggagg

SEQ ID NO: 826003 - DNA, 33 bp, Homo sapien
ccctggcctaatctacaatatgaaggaaatgct

SEQ ID NO: 826004 - DNA, 33 bp, Homo sapien
ccctggcctaatctacgatatgaaggaaatgct

SEQ ID NO: 826005 - DNA, 33 bp, Homo sapien
gctctcatcattgtcacggtggaaaaaacagac

SEQ ID NO: 826006 - DNA, 33 bp, Homo sapien
gctctcatcattgtcatggtggaaaaaacagac

SEQ ID NO: 826007 - DNA, 33 bp, Homo sapien
gtctgccaaggtttgacgcatttagggaatagt

SEQ ID NO: 826008 - DNA, 33 bp, Homo sapien
gtctgccaaggtttgatgcatttagggaatagt

SEQ ID NO: 826009 - DNA, 33 bp, Homo sapien
atcctgtagcaccctgaacacactgcttttggc

SEQ ID NO: 826010 - DNA, 33 bp, Homo sapien
atcctgtagcaccctggacacactgcttttggc

SEQ ID NO: 826011 - DNA, 33 bp, Homo sapien
atgggattcattccatgataaaagagactccag

SEQ ID NO: 826012 - DNA, 33 bp, Homo sapien
atgggattcattccattataaaagagactccag

SEQ ID NO: 826013 - DNA, 33 bp, Homo sapien
gtcctttgccttcttaaaactgcagagcattac

SEQ ID NO: 826014 - DNA, 33 bp, Homo sapien
gtcctttgccttcttagaactgcagagcattac

SEQ ID NO: 826015 - DNA, 33 bp, Homo sapien
agaaaccacaagatgcaattagtggacctcttg

SEQ ID NO: 826016 - DNA, 33 bp, Homo sapien
agaaaccacaagatgctattagtggacctcttg

SEQ ID NO: 826017 - DNA, 33 bp, Homo sapien
ggaccagagagatgaaatgatttgctccaagcc

SEQ ID NO: 826018 - DNA, 33 bp, Homo sapien
ggaccagagagatgaagtgatttgctccaagcc

SEQ ID NO: 826019 - DNA, 33 bp, Homo sapien
gcttttcaaatccctcactctcaattccagttg

SEQ ID NO: 826020 - DNA, 33 bp, Homo sapien
gcttttcaaatccctcgctctcaattccagttg

SEQ ID NO: 826021 - DNA, 33 bp, Homo sapien
caaatcaacccccaccacaaacaatatatcaat

SEQ ID NO: 826022 - DNA, 33 bp, Homo sapien
caaatcaacccccaccgcaaacaatatatcaat

SEQ ID NO: 826023 - DNA, 33 bp, Homo sapien
gtgtttgctaggcatcacattaggcaaaaagtg

SEQ ID NO: 826024 - DNA, 33 bp, Homo sapien
gtgtttgctaggcatcgcattaggcaaaaagtg

SEQ ID NO: 826025 - DNA, 33 bp, Homo sapien
tccttagtgttttgcaatctggtagctacagca

SEQ ID NO: 826026 - DNA, 33 bp, Homo sapien
tccttagtgttttgcagtctggtagctacagca

SEQ ID NO: 826027 - DNA, 33 bp, Homo sapien
cattgtatgtgtagaccatatttatctatcttt

SEQ ID NO: 826028 - DNA, 33 bp, Homo sapien
cattgtatgtgtagactatatttatctatcttt

SEQ ID NO: 826029 - DNA, 33 bp, Homo sapien
gttaactgctagaagacggcagcagatgacact

SEQ ID NO: 826030 - DNA, 33 bp, Homo sapien
gttaactgctagaagatggcagcagatgacact

SEQ ID NO: 826031 - DNA, 33 bp, Homo sapien
ctaaacattactttaacctacttggtcaaaatg

SEQ ID NO: 826032 - DNA, 33 bp, Homo sapien
ctaaacattactttaatctacttggtcaaaatg

SEQ ID NO: 826033 - DNA, 33 bp, Homo sapien
atgtggctctatctaaatcaggacagtggccct

SEQ ID NO: 826034 - DNA, 33 bp, Homo sapien
atgtggctctatctaagtcaggacagtggccct

SEQ ID NO: 826035 - DNA, 33 bp, Homo sapien
ggccactaaaggtccacctcctaatgcctgcat

SEQ ID NO: 826036 - DNA, 33 bp, Homo sapien
ggccactaaaggtccatctcctaatgcctgcat

SEQ ID NO: 826037 - DNA, 33 bp, Homo sapien
catcctaaagtctaaactagccactaccaagtg

SEQ ID NO: 826038 - DNA, 33 bp, Homo sapien
catcctaaagtctaaagtagccactaccaagtg

SEQ ID NO: 826039 - DNA, 33 bp, Homo sapien
cttgtccaatgtgggaagagtccatacaggtat

SEQ ID NO: 826040 - DNA, 33 bp, Homo sapien
cttgtccaatgtgggaggagtccatacaggtat

SEQ ID NO: 826041 - DNA, 33 bp, Homo sapien
catctggataagccaggcccaaagtctgggaag

SEQ ID NO: 826042 - DNA, 33 bp, Homo sapien
catctggataagccagtcccaaagtctgggaag

SEQ ID NO: 826043 - DNA, 33 bp, Homo sapien
accagcaatgcataaacggaccttaataggaat

SEQ ID NO: 826044 - DNA, 33 bp, Homo sapien
accagcaatgcataaatggaccttaataggaat

SEQ ID NO: 826045 - DNA, 33 bp, Homo sapien
cttatcattagggtgacgaaggtttttgctttc

SEQ ID NO: 826046 - DNA, 33 bp, Homo sapien
cttatcattagggtgatgaaggtttttgctttc

SEQ ID NO: 826047 - DNA, 33 bp, Homo sapien
gaggcaagtcataacacagaaagcctgagaatc

SEQ ID NO: 826048 - DNA, 33 bp, Homo sapien
gaggcaagtcataacatagaaagcctgagaatc

SEQ ID NO: 826049 - DNA, 33 bp, Homo sapien
cttttgttgatatcaaatgtgtactgtcatctc

SEQ ID NO: 826050 - DNA, 33 bp, Homo sapien
cttttgttgatatcaattgtgtactgtcatctc

SEQ ID NO: 826051 - DNA, 33 bp, Homo sapien
tcaaaagtttcaagtccgaagtctcaattggag

SEQ ID NO: 826052 - DNA, 33 bp, Homo sapien
tcaaaagtttcaagtctgaagtctcaattggag

SEQ ID NO: 826053 - DNA, 33 bp, Homo sapien
gcatcacaaaaatggcaatgatgagaagcagta

SEQ ID NO: 826054 - DNA, 33 bp, Homo sapien
gcatcacaaaaatggcgatgatgagaagcagta

SEQ ID NO: 826055 - DNA, 33 bp, Homo sapien
ctgcaacaggctctagaaaatcaacacacttcc

SEQ ID NO: 826056 - DNA, 33 bp, Homo sapien
ctgcaacaggctctaggaaatcaacacacttcc

SEQ ID NO: 826057 - DNA, 33 bp, Homo sapien
aggagtttaggagaagccccagagctgcaacag

SEQ ID NO: 826058 - DNA, 33 bp, Homo sapien
aggagtttaggagaaggcccagagctgcaacag

SEQ ID NO: 826059 - DNA, 33 bp, Homo sapien
gcaacagaaaatacatcacggcattcctccaaa

SEQ ID NO: 826060 - DNA, 33 bp, Homo sapien
gcaacagaaaatacattacggcattcctccaaa

SEQ ID NO: 826061 - DNA, 33 bp, Homo sapien
tccaaaattggcaacaaaacacgtgactctgca

SEQ ID NO: 826062 - DNA, 33 bp, Homo sapien
tccaaaattggcaacagaacacgtgactctgca

SEQ ID NO: 826063 - DNA, 33 bp, Homo sapien
tgaaaatgtagtattcaaatccaaggttttttt

SEQ ID NO: 826064 - DNA, 33 bp, Homo sapien
tgaaaatgtagtattcgaatccaaggttttttt

SEQ ID NO: 826065 - DNA, 33 bp, Homo sapien
attagtcatgataacactgaaaataacttaacc

SEQ ID NO: 826066 - DNA, 33 bp, Homo sapien
attagtcatgataacattgaaaataacttaacc

SEQ ID NO: 826067 - DNA, 33 bp, Homo sapien
cctcatgcagcctctacgtttaacacatggatc

SEQ ID NO: 826068 - DNA, 33 bp, Homo sapien
cctcatgcagcctctatgtttaacacatggatc

SEQ ID NO: 826069 - DNA, 33 bp, Homo sapien
aacttctctgtacctgaagaaagctccttatgc

SEQ ID NO: 826070 - DNA, 33 bp, Homo sapien
aacttctctgtacctggagaaagctccttatgc

SEQ ID NO: 826071 - DNA, 33 bp, Homo sapien
aatttgttgcatataaacagcacctttgacaag

SEQ ID NO: 826072 - DNA, 33 bp, Homo sapien
aatttgttgcatataagcagcacctttgacaag

SEQ ID NO: 826073 - DNA, 33 bp, Homo sapien
ttagcttaaaggtacaaaaactctcatttcgaa

SEQ ID NO: 826074 - DNA, 33 bp, Homo sapien
ttagcttaaaggtacagaaactctcatttcgaa

SEQ ID NO: 826075 - DNA, 33 bp, Homo sapien
tcaaccacaggtaaaaatttacaattcgagaag

SEQ ID NO: 826076 - DNA, 33 bp, Homo sapien
tcaaccacaggtaaaactttacaattcgagaag

SEQ ID NO: 826077 - DNA, 33 bp, Homo sapien
ctacatagagaaaaggcatagtcttgccacaca

SEQ ID NO: 826078 - DNA, 33 bp, Homo sapien
ctacatagagaaaaggtatagtcttgccacaca

SEQ ID NO: 826079 - DNA, 33 bp, Homo sapien
tttgttcttaaataacacagtgtgcaggacacc

SEQ ID NO: 826080 - DNA, 33 bp, Homo sapien
tttgttcttaaataacgcagtgtgcaggacacc

SEQ ID NO: 826081 - DNA, 33 bp, Homo sapien
tcatgaaaagtctccactgagcaagaaagcata

SEQ ID NO: 826082 - DNA, 33 bp, Homo sapien
tcatgaaaagtctccattgagcaagaaagcata

SEQ ID NO: 826083 - DNA, 33 bp, Homo sapien
tccacaggccaaagggcaccaaattgctcaaag

SEQ ID NO: 826084 - DNA, 33 bp, Homo sapien
tccacaggccaaagggtaccaaattgctcaaag

SEQ ID NO: 826085 - DNA, 33 bp, Homo sapien
gagccagatgtgaaacagaaaatgttgggactt

SEQ ID NO: 826086 - DNA, 33 bp, Homo sapien
gagccagatgtgaaacggaaaatgttgggactt

SEQ ID NO: 826087 - DNA, 33 bp, Homo sapien
gccattcctcggactccgaagaagtttgctgac

SEQ ID NO: 826088 - DNA, 33 bp, Homo sapien
gccattcctcggactctgaagaagtttgctgac

SEQ ID NO: 826089 - DNA, 33 bp, Homo sapien
gcagtgatccttgttacacgggttgaacattgc

SEQ ID NO: 826090 - DNA, 33 bp, Homo sapien
gcagtgatccttgttatacgggttgaacattgc

SEQ ID NO: 826091 - DNA, 33 bp, Homo sapien
gtcaaaaaggtgtagacggaacaattttatatc

SEQ ID NO: 826092 - DNA, 33 bp, Homo sapien
gtcaaaaaggtgtagatggaacaattttatatc

SEQ ID NO: 826093 - DNA, 33 bp, Homo sapien
tacggtttgtgcaatacgataaactaaaataag

SEQ ID NO: 826094 - DNA, 33 bp, Homo sapien
tacggtttgtgcaatatgataaactaaaataag

SEQ ID NO: 826095 - DNA, 33 bp, Homo sapien
tcccaactctgtctctcagaagtcaaatggctc

SEQ ID NO: 826096 - DNA, 33 bp, Homo sapien
tcccaactctgtctcttagaagtcaaatggctc

SEQ ID NO: 826097 - DNA, 33 bp, Homo sapien
atggtagaaataatcacgaaactaagtataacc

SEQ ID NO: 826098 - DNA, 33 bp, Homo sapien
atggtagaaataatcatgaaactaagtataacc

SEQ ID NO: 826099 - DNA, 33 bp, Homo sapien
ttacctgtttttcatggataggattattaacat

SEQ ID NO: 826100 - DNA, 33 bp, Homo sapien
ttacctgtttttcatgtataggattattaacat

SEQ ID NO: 826101 - DNA, 33 bp, Homo sapien
cctatgcagagctttcacagcaatcttgcgaat

SEQ ID NO: 826102 - DNA, 33 bp, Homo sapien
cctatgcagagctttcgcagcaatcttgcgaat

SEQ ID NO: 826103 - DNA, 33 bp, Homo sapien
gctcactggtcagcccactcccagaccaagctg

SEQ ID NO: 826104 - DNA, 33 bp, Homo sapien
gctcactggtcagcccgctcccagaccaagctg

SEQ ID NO: 826105 - DNA, 33 bp, Homo sapien
ctccaggtccctttgcactgttccatattaaca

SEQ ID NO: 826106 - DNA, 33 bp, Homo sapien
ctccaggtccctttgcgctgttccatattaaca

SEQ ID NO: 826107 - DNA, 33 bp, Homo sapien
aaaaaatgcatgatgtaaaaggagaaaagaatg

SEQ ID NO: 826108 - DNA, 33 bp, Homo sapien
aaaaaatgcatgatgtgaaaggagaaaagaatg

SEQ ID NO: 826109 - DNA, 33 bp, Homo sapien
acattttctgaaattgcatcccatactgctggt

SEQ ID NO: 826110 - DNA, 33 bp, Homo sapien
acattttctgaaattggatcccatactgctggt

SEQ ID NO: 826111 - DNA, 33 bp, Homo sapien
atgtttggttggcatcagaggtacaagatgaat

SEQ ID NO: 826112 - DNA, 33 bp, Homo sapien
atgtttggttggcatcggaggtacaagatgaat

SEQ ID NO: 826113 - DNA, 33 bp, Homo sapien
aaatatccgtaagacacactgatgaaaatgtgg

SEQ ID NO: 826114 - DNA, 33 bp, Homo sapien
aaatatccgtaagacatactgatgaaaatgtgg

SEQ ID NO: 826115 - DNA, 33 bp, Homo sapien
tgcatagtcacttacaccaccccaattaggaaa

SEQ ID NO: 826116 - DNA, 33 bp, Homo sapien
tgcatagtcacttacagcaccccaattaggaaa

SEQ ID NO: 826117 - DNA, 33 bp, Homo sapien
caacgcagttgagaaacagcagttccgagcact

SEQ ID NO: 826118 - DNA, 33 bp, Homo sapien
caacgcagttgagaaatagcagttccgagcact

SEQ ID NO: 826119 - DNA, 33 bp, Homo sapien
tctgagttcatttggacgctaaagaatgtctgt

SEQ ID NO: 826120 - DNA, 33 bp, Homo sapien
tctgagttcatttggatgctaaagaatgtctgt

SEQ ID NO: 826121 - DNA, 33 bp, Homo sapien
cttttgctgacttacaagtgtttcaaaggactg

SEQ ID NO: 826122 - DNA, 33 bp, Homo sapien
cttttgctgacttacacgtgtttcaaaggactg

SEQ ID NO: 826123 - DNA, 33 bp, Homo sapien
gggacaagccagtcccacaaaggaatgatgtat

SEQ ID NO: 826124 - DNA, 33 bp, Homo sapien
gggacaagccagtcccgcaaaggaatgatgtat

SEQ ID NO: 826125 - DNA, 33 bp, Homo sapien
aatccattccttacgacgaatagctaattaaca

SEQ ID NO: 826126 - DNA, 33 bp, Homo sapien
aatccattccttacgatgaatagctaattaaca

SEQ ID NO: 826127 - DNA, 33 bp, Homo sapien
tttttataaatttggccaaagctagtttctgaa

SEQ ID NO: 826128 - DNA, 33 bp, Homo sapien
tttttataaatttggctaaagctagtttctgaa

SEQ ID NO: 826129 - DNA, 33 bp, Homo sapien
aagatatgaagttagacactcggtgaattatat

SEQ ID NO: 826130 - DNA, 33 bp, Homo sapien
aagatatgaagttagatactcggtgaattatat

SEQ ID NO: 826131 - DNA, 33 bp, Homo sapien
ggacagcccaagacaacagaatcctccttctgt

SEQ ID NO: 826132 - DNA, 33 bp, Homo sapien
ggacagcccaagacaatagaatcctccttctgt

SEQ ID NO: 826133 - DNA, 33 bp, Homo sapien
ccccttacctgctttcaatcactcatcctgaac

SEQ ID NO: 826134 - DNA, 33 bp, Homo sapien
ccccttacctgctttcgatcactcatcctgaac

SEQ ID NO: 826135 - DNA, 33 bp, Homo sapien
ctagagagtttcctgaagatgtggatcattttc

SEQ ID NO: 826136 - DNA, 33 bp, Homo sapien
ctagagagtttcctgaggatgtggatcattttc

SEQ ID NO: 826137 - DNA, 33 bp, Homo sapien
aagaacaagatccacaatggaggctggaacatg

SEQ ID NO: 826138 - DNA, 33 bp, Homo sapien
aagaacaagatccacagtggaggctggaacatg

SEQ ID NO: 826139 - DNA, 33 bp, Homo sapien
atcatgaagtaaaaaacagcaggggaaatcaga

SEQ ID NO: 826140 - DNA, 33 bp, Homo sapien
atcatgaagtaaaaaatagcaggggaaatcaga

SEQ ID NO: 826141 - DNA, 33 bp, Homo sapien
aatttcagtcaagttccactggcgatttataga

SEQ ID NO: 826142 - DNA, 33 bp, Homo sapien
aatttcagtcaagttctactggcgatttataga

SEQ ID NO: 826143 - DNA, 33 bp, Homo sapien
cgaattcccttctagacaccaaatgatgacctg

SEQ ID NO: 826144 - DNA, 33 bp, Homo sapien
cgaattcccttctagataccaaatgatgacctg

SEQ ID NO: 826145 - DNA, 33 bp, Homo sapien
atgacctgagccttagccaggaacgaagcaact

SEQ ID NO: 826146 - DNA, 33 bp, Homo sapien
atgacctgagccttagtcaggaacgaagcaact

SEQ ID NO: 826147 - DNA, 33 bp, Homo sapien
gccaaatgaaggttgcaaataagaagtgcttca

SEQ ID NO: 826148 - DNA, 33 bp, Homo sapien
gccaaatgaaggttgccaataagaagtgcttca

SEQ ID NO: 826149 - DNA, 33 bp, Homo sapien
atatttgaaactaaaagtctgaattatgcttta

SEQ ID NO: 826150 - DNA, 33 bp, Homo sapien
atatttgaaactaaaattctgaattatgcttta

SEQ ID NO: 826151 - DNA, 33 bp, Homo sapien
gccctcttggattagcaagctaggccccgtctc

SEQ ID NO: 826152 - DNA, 33 bp, Homo sapien
gccctcttggattagcgagctaggccccgtctc

SEQ ID NO: 826153 - DNA, 33 bp, Homo sapien
gctccattagggagaactggggtgtgtcaaaat

SEQ ID NO: 826154 - DNA, 33 bp, Homo sapien
gctccattagggagaattggggtgtgtcaaaat

SEQ ID NO: 826155 - DNA, 33 bp, Homo sapien
tccactgtggtggcaccagcttactctcctcca

SEQ ID NO: 826156 - DNA, 33 bp, Homo sapien
tccactgtggtggcacgagcttactctcctcca

SEQ ID NO: 826157 - DNA, 33 bp, Homo sapien
gagaactcgggagaccagagtggaggagagtaa

SEQ ID NO: 826158 - DNA, 33 bp, Homo sapien
gagaactcgggagaccggagtggaggagagtaa

SEQ ID NO: 826159 - DNA, 33 bp, Homo sapien
cagttggctgaaattacaagaaagaatttggac

SEQ ID NO: 826160 - DNA, 33 bp, Homo sapien
cagttggctgaaattagaagaaagaatttggac

SEQ ID NO: 826161 - DNA, 33 bp, Homo sapien
attacacattgtgtgcaactatcaaatatcaaa

SEQ ID NO: 826162 - DNA, 33 bp, Homo sapien
attacacattgtgtgccactatcaaatatcaaa

SEQ ID NO: 826163 - DNA, 33 bp, Homo sapien
ttgtgtactctaatcccactgtaataaactgtg

SEQ ID NO: 826164 - DNA, 33 bp, Homo sapien
ttgtgtactctaatcctactgtaataaactgtg

SEQ ID NO: 826165 - DNA, 33 bp, Homo sapien
tgttgatgtctgacaaatgacaaaaatgataaa

SEQ ID NO: 826166 - DNA, 33 bp, Homo sapien
tgttgatgtctgacaagtgacaaaaatgataaa

SEQ ID NO: 826167 - DNA, 33 bp, Homo sapien
ggctgcgtgttctccaaatggagtcagtaacac

SEQ ID NO: 826168 - DNA, 33 bp, Homo sapien
ggctgcgtgttctccagatggagtcagtaacac

SEQ ID NO: 826169 - DNA, 33 bp, Homo sapien
attacactggtaactccgaaacctggtacagat

SEQ ID NO: 826170 - DNA, 33 bp, Homo sapien
attacactggtaactctgaaacctggtacagat

SEQ ID NO: 826171 - DNA, 33 bp, Homo sapien
tctgtttcttggggaacgtaactgagtacccgt

SEQ ID NO: 826172 - DNA, 33 bp, Homo sapien
tctgtttcttggggaatgtaactgagtacccgt

SEQ ID NO: 826173 - DNA, 33 bp, Homo sapien
ccgaggcctctttggcaaccgcatctctcactc

SEQ ID NO: 826174 - DNA, 33 bp, Homo sapien
ccgaggcctctttggcgaccgcatctctcactc

SEQ ID NO: 826175 - DNA, 33 bp, Homo sapien
ggctttaggaaaactacgagagcttcagcatgg

SEQ ID NO: 826176 - DNA, 33 bp, Homo sapien
ggctttaggaaaactaggagagcttcagcatgg

SEQ ID NO: 826177 - DNA, 33 bp, Homo sapien
ctgagataaattcccaaaaagaaacacatcagg

SEQ ID NO: 826178 - DNA, 33 bp, Homo sapien
ctgagataaattcccagaaagaaacacatcagg

SEQ ID NO: 826179 - DNA, 33 bp, Homo sapien
ggaagggctggcaaccaatggaggaaggagtgg

SEQ ID NO: 826180 - DNA, 33 bp, Homo sapien
ggaagggctggcaacccatggaggaaggagtgg

SEQ ID NO: 826181 - DNA, 33 bp, Homo sapien
aattctctcgcaacagcaagttaggttccggta

SEQ ID NO: 826182 - DNA, 33 bp, Homo sapien
aattctctcgcaacaggaagttaggttccggta

SEQ ID NO: 826183 - DNA, 33 bp, Homo sapien
ctgtaatggacttataaaatcgatgtgggagca

SEQ ID NO: 826184 - DNA, 33 bp, Homo sapien
ctgtaatggacttatataatcgatgtgggagca

SEQ ID NO: 826185 - DNA, 33 bp, Homo sapien
aaggcataatccagggaagaaatgatggggatt

SEQ ID NO: 826186 - DNA, 33 bp, Homo sapien
aaggcataatccaggggagaaatgatggggatt

SEQ ID NO: 826187 - DNA, 33 bp, Homo sapien
agatggaggctgaaaacagaatagtctcaggaa

SEQ ID NO: 826188 - DNA, 33 bp, Homo sapien
agatggaggctgaaaatagaatagtctcaggaa

SEQ ID NO: 826189 - DNA, 33 bp, Homo sapien
tctgtaagtaaattgaagccaaacttacacttc

SEQ ID NO: 826190 - DNA, 33 bp, Homo sapien
tctgtaagtaaattgaggccaaacttacacttc

SEQ ID NO: 826191 - DNA, 33 bp, Homo sapien
tgtttcaacgtgtctacgactacctgtctttta

SEQ ID NO: 826192 - DNA, 33 bp, Homo sapien
tgtttcaacgtgtctatgactacctgtctttta

SEQ ID NO: 826193 - DNA, 33 bp, Homo sapien
tatgcattttaaatacaacaaatccaagatggc

SEQ ID NO: 826194 - DNA, 33 bp, Homo sapien
tatgcattttaaatacgacaaatccaagatggc

SEQ ID NO: 826195 - DNA, 33 bp, Homo sapien
aaaaagagttgtgtctcaaagtttcctgagcta

SEQ ID NO: 826196 - DNA, 33 bp, Homo sapien
aaaaagagttgtgtctgaaagtttcctgagcta

SEQ ID NO: 826197 - DNA, 33 bp, Homo sapien
tttgctttgttgtttcaaattcattctgatttg

SEQ ID NO: 826198 - DNA, 33 bp, Homo sapien
tttgctttgttgtttcgaattcattctgatttg

SEQ ID NO: 826199 - DNA, 33 bp, Homo sapien
ttctgtgagactgaagaagcagtttgcagagcc

SEQ ID NO: 826200 - DNA, 33 bp, Homo sapien
ttctgtgagactgaaggagcagtttgcagagcc

SEQ ID NO: 826201 - DNA, 33 bp, Homo sapien
gcaacagcatattcaaatcgtctgtctggcaaa

SEQ ID NO: 826202 - DNA, 33 bp, Homo sapien
gcaacagcatattcaagtcgtctgtctggcaaa

SEQ ID NO: 826203 - DNA, 33 bp, Homo sapien
agcctcggtaacataacgagatccctgtccaaa

SEQ ID NO: 826204 - DNA, 33 bp, Homo sapien
agcctcggtaacataatgagatccctgtccaaa

SEQ ID NO: 826205 - DNA, 33 bp, Homo sapien
ctttgccctgttttcacctttcttgttacacaa

SEQ ID NO: 826206 - DNA, 33 bp, Homo sapien
ctttgccctgttttcatctttcttgttacacaa

SEQ ID NO: 826207 - DNA, 33 bp, Homo sapien
ccttccaaaatttctgcagttcttggggaaaaa

SEQ ID NO: 826208 - DNA, 33 bp, Homo sapien
ccttccaaaatttctgtagttcttggggaaaaa

SEQ ID NO: 826209 - DNA, 33 bp, Homo sapien
tctctgggatgaatcacctcatatgccactggg

SEQ ID NO: 826210 - DNA, 33 bp, Homo sapien
tctctgggatgaatcatctcatatgccactggg

SEQ ID NO: 826211 - DNA, 33 bp, Homo sapien
ctatacgaagctaactcacctgtctcaggaata

SEQ ID NO: 826212 - DNA, 33 bp, Homo sapien
ctatacgaagctaacttacctgtctcaggaata

SEQ ID NO: 826213 - DNA, 33 bp, Homo sapien
tttatacaaaaggatcaaagaattcacgttgtg

SEQ ID NO: 826214 - DNA, 33 bp, Homo sapien
tttatacaaaaggatcgaagaattcacgttgtg

SEQ ID NO: 826215 - DNA, 33 bp, Homo sapien
aataaatcattttgggaacttcctgaatctctg

SEQ ID NO: 826216 - DNA, 33 bp, Homo sapien
aataaatcattttgggcacttcctgaatctctg

SEQ ID NO: 826217 - DNA, 33 bp, Homo sapien
ccgtttttcaaggatcacacttagtccttggtc

SEQ ID NO: 826218 - DNA, 33 bp, Homo sapien
ccgtttttcaaggatcgcacttagtccttggtc

SEQ ID NO: 826219 - DNA, 33 bp, Homo sapien
cttaattgtcctacaaggtctcggataccagtt

SEQ ID NO: 826220 - DNA, 33 bp, Homo sapien
cttaattgtcctacaatgtctcggataccagtt

SEQ ID NO: 826221 - DNA, 33 bp, Homo sapien
cttgctgagctaagaaacctgtgaacccctcag

SEQ ID NO: 826222 - DNA, 33 bp, Homo sapien
cttgctgagctaagaagcctgtgaacccctcag

SEQ ID NO: 826223 - DNA, 33 bp, Homo sapien
gcaagatcttgtgtctcacaaacatagttggta

SEQ ID NO: 826224 - DNA, 33 bp, Homo sapien
gcaagatcttgtgtcttacaaacatagttggta

SEQ ID NO: 826225 - DNA, 33 bp, Homo sapien
ctaatgcaataatcaaagtgaaatacaagggtg

SEQ ID NO: 826226 - DNA, 33 bp, Homo sapien
ctaatgcaataatcaaggtgaaatacaagggtg

SEQ ID NO: 826227 - DNA, 33 bp, Homo sapien
caatgggatcttccctcaggagtccacaggcat

SEQ ID NO: 826228 - DNA, 33 bp, Homo sapien
caatgggatcttcccttaggagtccacaggcat

SEQ ID NO: 826229 - DNA, 33 bp, Homo sapien
gtcgatctgaaaaaaaaacaccctctaggtcac

SEQ ID NO: 826230 - DNA, 33 bp, Homo sapien
gtcgatctgaaaaaaacacaccctctaggtcac

SEQ ID NO: 826231 - DNA, 33 bp, Homo sapien
aagagcttgaatgtgacggagatgtcttactac

SEQ ID NO: 826232 - DNA, 33 bp, Homo sapien
aagagcttgaatgtgatggagatgtcttactac

SEQ ID NO: 826233 - DNA, 33 bp, Homo sapien
ggctttagattcttcaactgtaagatgtaaaga

SEQ ID NO: 826234 - DNA, 33 bp, Homo sapien
ggctttagattcttcagctgtaagatgtaaaga

SEQ ID NO: 826235 - DNA, 33 bp, Homo sapien
gtttaataactttagacaggtttgaagaggtgg

SEQ ID NO: 826236 - DNA, 33 bp, Homo sapien
gtttaataactttagataggtttgaagaggtgg

SEQ ID NO: 826237 - DNA, 33 bp, Homo sapien
gagacacaaagacgagaagatcatgtgaagacg

SEQ ID NO: 826238 - DNA, 33 bp, Homo sapien
gagacacaaagacgaggagatcatgtgaagacg

SEQ ID NO: 826239 - DNA, 33 bp, Homo sapien
gacagaagctctgcagccctagcgacctgttat

SEQ ID NO: 826240 - DNA, 33 bp, Homo sapien
gacagaagctctgcagtcctagcgacctgttat

SEQ ID NO: 826241 - DNA, 33 bp, Homo sapien
actttcccttggtgtcactgaggagcacatgaa

SEQ ID NO: 826242 - DNA, 33 bp, Homo sapien
actttcccttggtgtcgctgaggagcacatgaa

SEQ ID NO: 826243 - DNA, 33 bp, Homo sapien
gtgtaatgtagataagaagccaaaaaagtgctg

SEQ ID NO: 826244 - DNA, 33 bp, Homo sapien
gtgtaatgtagataagcagccaaaaaagtgctg

SEQ ID NO: 826245 - DNA, 33 bp, Homo sapien
atcaacagacattttgcaggtagaatgaatggt

SEQ ID NO: 826246 - DNA, 33 bp, Homo sapien
atcaacagacattttgtaggtagaatgaatggt

SEQ ID NO: 826247 - DNA, 33 bp, Homo sapien
gcagtctcagttttaaccccactgtcagacaga

SEQ ID NO: 826248 - DNA, 33 bp, Homo sapien
gcagtctcagttttaatcccactgtcagacaga

SEQ ID NO: 826249 - DNA, 33 bp, Homo sapien
gggagaagactgcctaaacattctaaaggtgca

SEQ ID NO: 826250 - DNA, 33 bp, Homo sapien
gggagaagactgcctagacattctaaaggtgca

SEQ ID NO: 826251 - DNA, 33 bp, Homo sapien
ccattgatatttttgacaggcagtttattgaga

SEQ ID NO: 826252 - DNA, 33 bp, Homo sapien
ccattgatatttttgagaggcagtttattgaga

SEQ ID NO: 826253 - DNA, 33 bp, Homo sapien
tgcatgcccgcacataactttcagtctcaatca

SEQ ID NO: 826254 - DNA, 33 bp, Homo sapien
tgcatgcccgcacatacctttcagtctcaatca

SEQ ID NO: 826255 - DNA, 33 bp, Homo sapien
cattgaggtgtctctccacctatgtcatctctt

SEQ ID NO: 826256 - DNA, 33 bp, Homo sapien
cattgaggtgtctctctacctatgtcatctctt

SEQ ID NO: 826257 - DNA, 33 bp, Homo sapien
aatgtcatatttctaccggtgtgagtttcctag

SEQ ID NO: 826258 - DNA, 33 bp, Homo sapien
aatgtcatatttctactggtgtgagtttcctag

SEQ ID NO: 826259 - DNA, 33 bp, Homo sapien
agttattttatactgaactcatagtcagtctcc

SEQ ID NO: 826260 - DNA, 33 bp, Homo sapien
agttattttatactgagctcatagtcagtctcc

SEQ ID NO: 826261 - DNA, 33 bp, Homo sapien
ctttcaaaaattggtgcactaacacctgttttt

SEQ ID NO: 826262 - DNA, 33 bp, Homo sapien
ctttcaaaaattggtggactaacacctgttttt

SEQ ID NO: 826263 - DNA, 33 bp, Homo sapien
tgtgggcagaaatatacgaaggcagaaaaagag

SEQ ID NO: 826264 - DNA, 33 bp, Homo sapien
tgtgggcagaaatatatgaaggcagaaaaagag

SEQ ID NO: 826265 - DNA, 33 bp, Homo sapien
ttgtgataagcagtacgcccttctcaagcaatt

SEQ ID NO: 826266 - DNA, 33 bp, Homo sapien
ttgtgataagcagtactcccttctcaagcaatt

SEQ ID NO: 826267 - DNA, 33 bp, Homo sapien
tctacattcagatatgcagccatagaatcagag

SEQ ID NO: 826268 - DNA, 33 bp, Homo sapien
tctacattcagatatggagccatagaatcagag

SEQ ID NO: 826269 - DNA, 33 bp, Homo sapien
ataataacaacaacaacaacatctgaagtgcat

SEQ ID NO: 826270 - DNA, 33 bp, Homo sapien
ataataacaacaacaagaacatctgaagtgcat

SEQ ID NO: 826271 - DNA, 33 bp, Homo sapien
tgcagcacaatagacacaataaaaccttgcttg

SEQ ID NO: 826272 - DNA, 33 bp, Homo sapien
tgcagcacaatagacataataaaaccttgcttg

SEQ ID NO: 826273 - DNA, 33 bp, Homo sapien
ttacacgagctctttcaatctctttatcataac

SEQ ID NO: 826274 - DNA, 33 bp, Homo sapien
ttacacgagctctttccatctctttatcataac

SEQ ID NO: 826275 - DNA, 33 bp, Homo sapien
ttgtttcaggcaccaacagagaagcacatatac

SEQ ID NO: 826276 - DNA, 33 bp, Homo sapien
ttgtttcaggcaccaatagagaagcacatatac

SEQ ID NO: 826277 - DNA, 33 bp, Homo sapien
gcacctagagctgaggcagactacagacatagc

SEQ ID NO: 826278 - DNA, 33 bp, Homo sapien
gcacctagagctgagggagactacagacatagc

SEQ ID NO: 826279 - DNA, 33 bp, Homo sapien
cctgcaatgtgccaggcaagtatgtaaactcag

SEQ ID NO: 826280 - DNA, 33 bp, Homo sapien
cctgcaatgtgccagggaagtatgtaaactcag

SEQ ID NO: 826281 - DNA, 33 bp, Homo sapien
ttgctattgttaccagaaaggcgtccagatcca

SEQ ID NO: 826282 - DNA, 33 bp, Homo sapien
ttgctattgttaccagtaaggcgtccagatcca

SEQ ID NO: 826283 - DNA, 33 bp, Homo sapien
aacttgaaggtaaatacaggttctcaaccagta

SEQ ID NO: 826284 - DNA, 33 bp, Homo sapien
aacttgaaggtaaatagaggttctcaaccagta

SEQ ID NO: 826285 - DNA, 33 bp, Homo sapien
aatgggactgttcataagtcttgttcatgtgag

SEQ ID NO: 826286 - DNA, 33 bp, Homo sapien
aatgggactgttcatacgtcttgttcatgtgag

SEQ ID NO: 826287 - DNA, 33 bp, Homo sapien
ctctagaaagtagttaggtacccacgctcataa

SEQ ID NO: 826288 - DNA, 33 bp, Homo sapien
ctctagaaagtagttatgtacccacgctcataa

SEQ ID NO: 826289 - DNA, 33 bp, Homo sapien
tggttattttatgttgaactctttaggaactgc

SEQ ID NO: 826290 - DNA, 33 bp, Homo sapien
tggttattttatgttggactctttaggaactgc

SEQ ID NO: 826291 - DNA, 33 bp, Homo sapien
taaagaataaatagaacgtcatgagttgggtaa

SEQ ID NO: 826292 - DNA, 33 bp, Homo sapien
taaagaataaatagaaggtcatgagttgggtaa

SEQ ID NO: 826293 - DNA, 33 bp, Homo sapien
tctctgcgggcacagacctaaagggggatgcag

SEQ ID NO: 826294 - DNA, 33 bp, Homo sapien
tctctgcgggcacagatctaaagggggatgcag

SEQ ID NO: 826295 - DNA, 33 bp, Homo sapien
actgcagcctcaacccgctatgctcaagcgatc

SEQ ID NO: 826296 - DNA, 33 bp, Homo sapien
actgcagcctcaaccctctatgctcaagcgatc

SEQ ID NO: 826297 - DNA, 33 bp, Homo sapien
aggagcaggcactctaacccatgtaaaataaac

SEQ ID NO: 826298 - DNA, 33 bp, Homo sapien
aggagcaggcactctagcccatgtaaaataaac

SEQ ID NO: 826299 - DNA, 33 bp, Homo sapien
aggccagcagaaggaaaacaatcttccctaaaa

SEQ ID NO: 826300 - DNA, 33 bp, Homo sapien
aggccagcagaaggaacacaatcttccctaaaa

SEQ ID NO: 826301 - DNA, 33 bp, Homo sapien
tgtgcctgactctacacggaattaaacagaaat

SEQ ID NO: 826302 - DNA, 33 bp, Homo sapien
tgtgcctgactctacatggaattaaacagaaat

SEQ ID NO: 826303 - DNA, 33 bp, Homo sapien
ctctgtggtgaggatacggttattcattgtact

SEQ ID NO: 826304 - DNA, 33 bp, Homo sapien
ctctgtggtgaggatatggttattcattgtact

SEQ ID NO: 826305 - DNA, 33 bp, Homo sapien
ctgaaggcttattaaacaaaaggtccagtttcc

SEQ ID NO: 826306 - DNA, 33 bp, Homo sapien
ctgaaggcttattaaataaaaggtccagtttcc

SEQ ID NO: 826307 - DNA, 33 bp, Homo sapien
ccctgctgctccagaagaaacatgctcatctct

SEQ ID NO: 826308 - DNA, 33 bp, Homo sapien
ccctgctgctccagaataaacatgctcatctct

SEQ ID NO: 826309 - DNA, 33 bp, Homo sapien
tcctctcagcttttcacgccctgctttctggaa

SEQ ID NO: 826310 - DNA, 33 bp, Homo sapien
tcctctcagcttttcatgccctgctttctggaa

SEQ ID NO: 826311 - DNA, 33 bp, Homo sapien
tcacatataagctgtcccatacgaaccctaaga

SEQ ID NO: 826312 - DNA, 33 bp, Homo sapien
tcacatataagctgtctcatacgaaccctaaga

SEQ ID NO: 826313 - DNA, 33 bp, Homo sapien
accaaaatttagcagtgaaaaggatgagctcgg

SEQ ID NO: 826314 - DNA, 33 bp, Homo sapien
accaaaatttagcagttaaaaggatgagctcgg

SEQ ID NO: 826315 - DNA, 33 bp, Homo sapien
aacctggtgttaaagaaagagaataaagtagaa

SEQ ID NO: 826316 - DNA, 33 bp, Homo sapien
aacctggtgttaaagagagagaataaagtagaa

SEQ ID NO: 826317 - DNA, 33 bp, Homo sapien
tctcctccaaaagcttaaaagcaacaaagcaag

SEQ ID NO: 826318 - DNA, 33 bp, Homo sapien
tctcctccaaaagcttgaaagcaacaaagcaag

SEQ ID NO: 826319 - DNA, 33 bp, Homo sapien
gcgcagccggacagaaggagaagtcagaggagt

SEQ ID NO: 826320 - DNA, 33 bp, Homo sapien
gcgcagccggacagaatgagaagtcagaggagt

SEQ ID NO: 826321 - DNA, 33 bp, Homo sapien
catatgtataaagtgggaacagcaaacgccagc

SEQ ID NO: 826322 - DNA, 33 bp, Homo sapien
catatgtataaagtggtaacagcaaacgccagc

SEQ ID NO: 826323 - DNA, 33 bp, Homo sapien
caatgaacgagtcaaacagaatgagcactttta

SEQ ID NO: 826324 - DNA, 33 bp, Homo sapien
caatgaacgagtcaaatagaatgagcactttta

SEQ ID NO: 826325 - DNA, 33 bp, Homo sapien
aaagtgctagatgagcacaaaattttataactg

SEQ ID NO: 826326 - DNA, 33 bp, Homo sapien
aaagtgctagatgagcgcaaaattttataactg

SEQ ID NO: 826327 - DNA, 33 bp, Homo sapien
gctccctgtgtgttgcaaggattagtttaatta

SEQ ID NO: 826328 - DNA, 33 bp, Homo sapien
gctccctgtgtgttgcgaggattagtttaatta

SEQ ID NO: 826329 - DNA, 33 bp, Homo sapien
tactttttgtttctctcaatggggcatcctcat

SEQ ID NO: 826330 - DNA, 33 bp, Homo sapien
tactttttgtttctcttaatggggcatcctcat

SEQ ID NO: 826331 - DNA, 33 bp, Homo sapien
ccatgagtagataccaagttcccaatccagctg

SEQ ID NO: 826332 - DNA, 33 bp, Homo sapien
ccatgagtagataccatgttcccaatccagctg

SEQ ID NO: 826333 - DNA, 33 bp, Homo sapien
gagcggcagtgaaaagaatggagctgaaataga

SEQ ID NO: 826334 - DNA, 33 bp, Homo sapien
gagcggcagtgaaaagcatggagctgaaataga

SEQ ID NO: 826335 - DNA, 33 bp, Homo sapien
tgtcagcacagtagaaccttagtcatgcaaatc

SEQ ID NO: 826336 - DNA, 33 bp, Homo sapien
tgtcagcacagtagaagcttagtcatgcaaatc

SEQ ID NO: 826337 - DNA, 33 bp, Homo sapien
ctcagccctgtgtagacgggaagacctttcctc

SEQ ID NO: 826338 - DNA, 33 bp, Homo sapien
ctcagccctgtgtagatgggaagacctttcctc

SEQ ID NO: 826339 - DNA, 33 bp, Homo sapien
gtacacagattgtagaagactaaaaatagacca

SEQ ID NO: 826340 - DNA, 33 bp, Homo sapien
gtacacagattgtagacgactaaaaatagacca

SEQ ID NO: 826341 - DNA, 33 bp, Homo sapien
gtgtataaagtgcaccacaaaattcttgcacat

SEQ ID NO: 826342 - DNA, 33 bp, Homo sapien
gtgtataaagtgcaccgcaaaattcttgcacat

SEQ ID NO: 826343 - DNA, 33 bp, Homo sapien
tcaatcctttataacgaaactgtgatagagatt

SEQ ID NO: 826344 - DNA, 33 bp, Homo sapien
tcaatcctttataacgcaactgtgatagagatt

SEQ ID NO: 826345 - DNA, 33 bp, Homo sapien
gagaggatagatgaaacgagaatggcaaaatat

SEQ ID NO: 826346 - DNA, 33 bp, Homo sapien
gagaggatagatgaaatgagaatggcaaaatat

SEQ ID NO: 826347 - DNA, 33 bp, Homo sapien
caagtgttggctaatagaggacagaggtagaag

SEQ ID NO: 826348 - DNA, 33 bp, Homo sapien
caagtgttggctaatataggacagaggtagaag

SEQ ID NO: 826349 - DNA, 33 bp, Homo sapien
ttctatcctcttcctcaaacaactgggatatac

SEQ ID NO: 826350 - DNA, 33 bp, Homo sapien
ttctatcctcttcctcgaacaactgggatatac

SEQ ID NO: 826351 - DNA, 33 bp, Homo sapien
gctacttgaatagaaaatgtgtttcatcctggg

SEQ ID NO: 826352 - DNA, 33 bp, Homo sapien
gctacttgaatagaaagtgtgtttcatcctggg

SEQ ID NO: 826353 - DNA, 33 bp, Homo sapien
aggatttaaattggtcaaaggttgtgtgtattt

SEQ ID NO: 826354 - DNA, 33 bp, Homo sapien
aggatttaaattggtcgaaggttgtgtgtattt

SEQ ID NO: 826355 - DNA, 33 bp, Homo sapien
catgtgatgctattaaaataataactttgtcca

SEQ ID NO: 826356 - DNA, 33 bp, Homo sapien
catgtgatgctattaagataataactttgtcca

SEQ ID NO: 826357 - DNA, 33 bp, Homo sapien
aaggacaaaggacagactaggagacaatatttg

SEQ ID NO: 826358 - DNA, 33 bp, Homo sapien
aaggacaaaggacagagtaggagacaatatttg

SEQ ID NO: 826359 - DNA, 33 bp, Homo sapien
tcaaaattaaggctcacgggtcagtgaagtttg

SEQ ID NO: 826360 - DNA, 33 bp, Homo sapien
tcaaaattaaggctcatgggtcagtgaagtttg

SEQ ID NO: 826361 - DNA, 33 bp, Homo sapien
ttaccaatgaccaaaaacacataccaacgtaaa

SEQ ID NO: 826362 - DNA, 33 bp, Homo sapien
ttaccaatgaccaaaagcacataccaacgtaaa

SEQ ID NO: 826363 - DNA, 33 bp, Homo sapien
ttgctgttcacatctaagcaggctgttggtgcc

SEQ ID NO: 826364 - DNA, 33 bp, Homo sapien
ttgctgttcacatctacgcaggctgttggtgcc

SEQ ID NO: 826365 - DNA, 33 bp, Homo sapien
aattggcttgtaaatacgaggagaagctgaagg

SEQ ID NO: 826366 - DNA, 33 bp, Homo sapien
aattggcttgtaaatatgaggagaagctgaagg

SEQ ID NO: 826367 - DNA, 33 bp, Homo sapien
attcttgtccttcaagactcaatgttatgtctt

SEQ ID NO: 826368 - DNA, 33 bp, Homo sapien
attcttgtccttcaaggctcaatgttatgtctt

SEQ ID NO: 826369 - DNA, 33 bp, Homo sapien
acaatgttgctgttagcatatttcacttcttat

SEQ ID NO: 826370 - DNA, 33 bp, Homo sapien
acaatgttgctgttagtatatttcacttcttat

SEQ ID NO: 826371 - DNA, 33 bp, Homo sapien
atccaataattcattcccaatcatatgttcaag

SEQ ID NO: 826372 - DNA, 33 bp, Homo sapien
atccaataattcattctcaatcatatgttcaag

SEQ ID NO: 826373 - DNA, 33 bp, Homo sapien
tgtctgttgctccagaacgaatacaagttctta

SEQ ID NO: 826374 - DNA, 33 bp, Homo sapien
tgtctgttgctccagatcgaatacaagttctta

SEQ ID NO: 826375 - DNA, 33 bp, Homo sapien
agctaccatcttaaacaaagtgtactttcttat

SEQ ID NO: 826376 - DNA, 33 bp, Homo sapien
agctaccatcttaaacgaagtgtactttcttat

SEQ ID NO: 826377 - DNA, 33 bp, Homo sapien
ctttaaaaatgcaaatgaggctgtgctatgctc

SEQ ID NO: 826378 - DNA, 33 bp, Homo sapien
ctttaaaaatgcaaattaggctgtgctatgctc

SEQ ID NO: 826379 - DNA, 33 bp, Homo sapien
caatagaaggatcagcgagagctaaacagagta

SEQ ID NO: 826380 - DNA, 33 bp, Homo sapien
caatagaaggatcagctagagctaaacagagta

SEQ ID NO: 826381 - DNA, 33 bp, Homo sapien
ctgaaacatacagagaaatcaagtcacatagat

SEQ ID NO: 826382 - DNA, 33 bp, Homo sapien
ctgaaacatacagagagatcaagtcacatagat

SEQ ID NO: 826383 - DNA, 33 bp, Homo sapien
cacctaactgcagaaaaaaaacagggactcagt

SEQ ID NO: 826384 - DNA, 33 bp, Homo sapien
cacctaactgcagaaagaaaacagggactcagt

SEQ ID NO: 826385 - DNA, 33 bp, Homo sapien
gaggtggtattcttacaatgaatgcagttgatt

SEQ ID NO: 826386 - DNA, 33 bp, Homo sapien
gaggtggtattcttacgatgaatgcagttgatt

SEQ ID NO: 826387 - DNA, 33 bp, Homo sapien
ttaaaattcattaaccagatcaccttcaaatat

SEQ ID NO: 826388 - DNA, 33 bp, Homo sapien
ttaaaattcattaaccggatcaccttcaaatat

SEQ ID NO: 826389 - DNA, 33 bp, Homo sapien
ttttgaaagtcaaatactagcacagtagatccc

SEQ ID NO: 826390 - DNA, 33 bp, Homo sapien
ttttgaaagtcaaatattagcacagtagatccc

SEQ ID NO: 826391 - DNA, 33 bp, Homo sapien
cttctatcatacgacaatccacaccaccctacc

SEQ ID NO: 826392 - DNA, 33 bp, Homo sapien
cttctatcatacgacagtccacaccaccctacc

SEQ ID NO: 826393 - DNA, 33 bp, Homo sapien
tagcattttgtttcaccgcatttgattataaac

SEQ ID NO: 826394 - DNA, 33 bp, Homo sapien
tagcattttgtttcactgcatttgattataaac

SEQ ID NO: 826395 - DNA, 33 bp, Homo sapien
atatcaactagacactaaggaggaccatcatct

SEQ ID NO: 826396 - DNA, 33 bp, Homo sapien
atatcaactagacactgaggaggaccatcatct

SEQ ID NO: 826397 - DNA, 33 bp, Homo sapien
gggcccaacatgtggaaagtcttgtgttcagat

SEQ ID NO: 826398 - DNA, 33 bp, Homo sapien
gggcccaacatgtggacagtcttgtgttcagat

SEQ ID NO: 826399 - DNA, 33 bp, Homo sapien
ggggctggtctcataacggaaagggataattat

SEQ ID NO: 826400 - DNA, 33 bp, Homo sapien
ggggctggtctcataagggaaagggataattat

SEQ ID NO: 826401 - DNA, 33 bp, Homo sapien
ctgaagtcttagctgaataagaggtgaatgcat

SEQ ID NO: 826402 - DNA, 33 bp, Homo sapien
ctgaagtcttagctgagtaagaggtgaatgcat

SEQ ID NO: 826403 - DNA, 33 bp, Homo sapien
ataaaaaacgaactaaataaggactaggagcag

SEQ ID NO: 826404 - DNA, 33 bp, Homo sapien
ataaaaaacgaactaagtaaggactaggagcag

SEQ ID NO: 826405 - DNA, 33 bp, Homo sapien
agaggatgcacatcgtaaatatgtatcgtcttg

SEQ ID NO: 826406 - DNA, 33 bp, Homo sapien
agaggatgcacatcgtgaatatgtatcgtcttg

SEQ ID NO: 826407 - DNA, 33 bp, Homo sapien
ctcttctttcagataactgactcccccagggac

SEQ ID NO: 826408 - DNA, 33 bp, Homo sapien
ctcttctttcagataattgactcccccagggac

SEQ ID NO: 826409 - DNA, 33 bp, Homo sapien
tgcaaagatcaattgaagccaccaggagttcgc

SEQ ID NO: 826410 - DNA, 33 bp, Homo sapien
tgcaaagatcaattgaggccaccaggagttcgc

SEQ ID NO: 826411 - DNA, 33 bp, Homo sapien
attgagttcccaagccaatttctgtcccagagg

SEQ ID NO: 826412 - DNA, 33 bp, Homo sapien
attgagttcccaagccgatttctgtcccagagg

SEQ ID NO: 826413 - DNA, 33 bp, Homo sapien
cctcaaagggtcggacaagaatatcttctgact

SEQ ID NO: 826414 - DNA, 33 bp, Homo sapien
cctcaaagggtcggacgagaatatcttctgact

SEQ ID NO: 826415 - DNA, 33 bp, Homo sapien
aatgccactatctctacgtcatggggaacaaag

SEQ ID NO: 826416 - DNA, 33 bp, Homo sapien
aatgccactatctctatgtcatggggaacaaag

SEQ ID NO: 826417 - DNA, 33 bp, Homo sapien
gattggtggactggtgaaggcagaaactattat

SEQ ID NO: 826418 - DNA, 33 bp, Homo sapien
gattggtggactggtggaggcagaaactattat

SEQ ID NO: 826419 - DNA, 33 bp, Homo sapien
agattagacacaggaaagcagtattggtggtgg

SEQ ID NO: 826420 - DNA, 33 bp, Homo sapien
agattagacacaggaaggcagtattggtggtgg

SEQ ID NO: 826421 - DNA, 33 bp, Homo sapien
caatgaggccagcaacactctttagaaaaaaca

SEQ ID NO: 826422 - DNA, 33 bp, Homo sapien
caatgaggccagcaacgctctttagaaaaaaca

SEQ ID NO: 826423 - DNA, 33 bp, Homo sapien
aatgggatttcattatcagtatccatcagtcat

SEQ ID NO: 826424 - DNA, 33 bp, Homo sapien
aatgggatttcattatgagtatccatcagtcat

SEQ ID NO: 826425 - DNA, 33 bp, Homo sapien
agttgcacggcgaagcaaggacctgggcctccc

SEQ ID NO: 826426 - DNA, 33 bp, Homo sapien
agttgcacggcgaagcgaggacctgggcctccc

SEQ ID NO: 826427 - DNA, 33 bp, Homo sapien
ccaaataacacaatcaaaacactgcttcatggg

SEQ ID NO: 826428 - DNA, 33 bp, Homo sapien
ccaaataacacaatcagaacactgcttcatggg

SEQ ID NO: 826429 - DNA, 33 bp, Homo sapien
attgctaggaaaactcaagaaagtttatgtatc

SEQ ID NO: 826430 - DNA, 33 bp, Homo sapien
attgctaggaaaactcgagaaagtttatgtatc

SEQ ID NO: 826431 - DNA, 33 bp, Homo sapien
tcatccaaacacaagacggaatcctgatgtgta

SEQ ID NO: 826432 - DNA, 33 bp, Homo sapien
tcatccaaacacaagagggaatcctgatgtgta

SEQ ID NO: 826433 - DNA, 33 bp, Homo sapien
ctatgagaaactgatcgcaaggtttttaatacc

SEQ ID NO: 826434 - DNA, 33 bp, Homo sapien
ctatgagaaactgatctcaaggtttttaatacc

SEQ ID NO: 826435 - DNA, 33 bp, Homo sapien
tacaatccgacgttgcacaagattctactggat

SEQ ID NO: 826436 - DNA, 33 bp, Homo sapien
tacaatccgacgttgcccaagattctactggat

SEQ ID NO: 826437 - DNA, 33 bp, Homo sapien
cacatctcaagtctcactgaaggtcagagtcag

SEQ ID NO: 826438 - DNA, 33 bp, Homo sapien
cacatctcaagtctcattgaaggtcagagtcag

SEQ ID NO: 826439 - DNA, 33 bp, Homo sapien
ccctattattcctttgaagccagtctggccaac

SEQ ID NO: 826440 - DNA, 33 bp, Homo sapien
ccctattattcctttggagccagtctggccaac

SEQ ID NO: 826441 - DNA, 33 bp, Homo sapien
tattgaaatgtggaggaatgtaatttttagggg

SEQ ID NO: 826442 - DNA, 33 bp, Homo sapien
tattgaaatgtggagggatgtaatttttagggg

SEQ ID NO: 826443 - DNA, 33 bp, Homo sapien
accctctgacttggacactctgccggtagggcc

SEQ ID NO: 826444 - DNA, 33 bp, Homo sapien
accctctgacttggacgctctgccggtagggcc

SEQ ID NO: 826445 - DNA, 33 bp, Homo sapien
tgagagtggtgaacagcagactcccggtccaca

SEQ ID NO: 826446 - DNA, 33 bp, Homo sapien
tgagagtggtgaacagtagactcccggtccaca

SEQ ID NO: 826447 - DNA, 33 bp, Homo sapien
aattccaagccgctcccgatagtctgtttcttg

SEQ ID NO: 826448 - DNA, 33 bp, Homo sapien
aattccaagccgctcctgatagtctgtttcttg

SEQ ID NO: 826449 - DNA, 33 bp, Homo sapien
aatttgcatggaagtacgttcctgtagttagaa

SEQ ID NO: 826450 - DNA, 33 bp, Homo sapien
aatttgcatggaagtatgttcctgtagttagaa

SEQ ID NO: 826451 - DNA, 33 bp, Homo sapien
atttgacctagtacacaataggtgctcaggaga

SEQ ID NO: 826452 - DNA, 33 bp, Homo sapien
atttgacctagtacaccataggtgctcaggaga

SEQ ID NO: 826453 - DNA, 33 bp, Homo sapien
ggctgttgcctgtggagcggggactgacaggag

SEQ ID NO: 826454 - DNA, 33 bp, Homo sapien
ggctgttgcctgtggatcggggactgacaggag

SEQ ID NO: 826455 - DNA, 33 bp, Homo sapien
caatgcaaactgtcaacgtataagtcaaacccc

SEQ ID NO: 826456 - DNA, 33 bp, Homo sapien
caatgcaaactgtcaatgtataagtcaaacccc

SEQ ID NO: 826457 - DNA, 33 bp, Homo sapien
acattattggcaattacgtaaaaatcaagaacc

SEQ ID NO: 826458 - DNA, 33 bp, Homo sapien
acattattggcaattatgtaaaaatcaagaacc

SEQ ID NO: 826459 - DNA, 33 bp, Homo sapien
aaatctttgagaagaactcatgacggaaccaca

SEQ ID NO: 826460 - DNA, 33 bp, Homo sapien
aaatctttgagaagaattcatgacggaaccaca

SEQ ID NO: 826461 - DNA, 33 bp, Homo sapien
actcacttaatgcagaaattagtcttcagcgtc

SEQ ID NO: 826462 - DNA, 33 bp, Homo sapien
actcacttaatgcagagattagtcttcagcgtc

SEQ ID NO: 826463 - DNA, 33 bp, Homo sapien
aaagccaaataatgaccaggtagaagagactga

SEQ ID NO: 826464 - DNA, 33 bp, Homo sapien
aaagccaaataatgactaggtagaagagactga

SEQ ID NO: 826465 - DNA, 33 bp, Homo sapien
tctttcgtaccttttacgctctcttgtatttcc

SEQ ID NO: 826466 - DNA, 33 bp, Homo sapien
tctttcgtaccttttatgctctcttgtatttcc

SEQ ID NO: 826467 - DNA, 33 bp, Homo sapien
ttgtccgttggtataaatgttacagtttcaagt

SEQ ID NO: 826468 - DNA, 33 bp, Homo sapien
ttgtccgttggtataagtgttacagtttcaagt

SEQ ID NO: 826469 - DNA, 33 bp, Homo sapien
ctccacagctagcaaggcagcgggctggcagag

SEQ ID NO: 826470 - DNA, 33 bp, Homo sapien
ctccacagctagcaagtcagcgggctggcagag

SEQ ID NO: 826471 - DNA, 33 bp, Homo sapien
caatttgcagcaaacacggaagcaccagaatcc

SEQ ID NO: 826472 - DNA, 33 bp, Homo sapien
caatttgcagcaaacatggaagcaccagaatcc

SEQ ID NO: 826473 - DNA, 33 bp, Homo sapien
gagttagtagaaggacaacctgagaagctggtc

SEQ ID NO: 826474 - DNA, 33 bp, Homo sapien
gagttagtagaaggacgacctgagaagctggtc

SEQ ID NO: 826475 - DNA, 33 bp, Homo sapien
tgggtgctattactccagaaaatctagtcatct

SEQ ID NO: 826476 - DNA, 33 bp, Homo sapien
tgggtgctattactccggaaaatctagtcatct

SEQ ID NO: 826477 - DNA, 33 bp, Homo sapien
acataaatacgcacacaagataaaacactttcc

SEQ ID NO: 826478 - DNA, 33 bp, Homo sapien
acataaatacgcacacgagataaaacactttcc

SEQ ID NO: 826479 - DNA, 33 bp, Homo sapien
agaattgggttagaggaccaacttagcagggtt

SEQ ID NO: 826480 - DNA, 33 bp, Homo sapien
agaattgggttagaggcccaacttagcagggtt

SEQ ID NO: 826481 - DNA, 33 bp, Homo sapien
cttatctagaatctaacggctccaaagcagtca

SEQ ID NO: 826482 - DNA, 33 bp, Homo sapien
cttatctagaatctaatggctccaaagcagtca

SEQ ID NO: 826483 - DNA, 33 bp, Homo sapien
ctaaggtgggagtaatcaaccagagagaggtca

SEQ ID NO: 826484 - DNA, 33 bp, Homo sapien
ctaaggtgggagtaattaaccagagagaggtca

SEQ ID NO: 826485 - DNA, 33 bp, Homo sapien
attatgataccaaagaaaatggaaagaagtggt

SEQ ID NO: 826486 - DNA, 33 bp, Homo sapien
attatgataccaaagagaatggaaagaagtggt

SEQ ID NO: 826487 - DNA, 33 bp, Homo sapien
ggatgaggtaggacaaaagtggtcagagaaaca

SEQ ID NO: 826488 - DNA, 33 bp, Homo sapien
ggatgaggtaggacaagagtggtcagagaaaca

SEQ ID NO: 826489 - DNA, 33 bp, Homo sapien
tcgagagaacatctgacaccaatgaactctcaa

SEQ ID NO: 826490 - DNA, 33 bp, Homo sapien
tcgagagaacatctgataccaatgaactctcaa

SEQ ID NO: 826491 - DNA, 33 bp, Homo sapien
gagctgatgcattttcaaggacagtataactga

SEQ ID NO: 826492 - DNA, 33 bp, Homo sapien
gagctgatgcattttcgaggacagtataactga

SEQ ID NO: 826493 - DNA, 33 bp, Homo sapien
gttgatgtatgcatgaagtaaaatccccaacat

SEQ ID NO: 826494 - DNA, 33 bp, Homo sapien
gttgatgtatgcatgaggtaaaatccccaacat

SEQ ID NO: 826495 - DNA, 33 bp, Homo sapien
acaagactacagacagcaagactaattaagagg

SEQ ID NO: 826496 - DNA, 33 bp, Homo sapien
acaagactacagacaggaagactaattaagagg

SEQ ID NO: 826497 - DNA, 33 bp, Homo sapien
agattgatttgtcaagaaccttagttacttaaa

SEQ ID NO: 826498 - DNA, 33 bp, Homo sapien
agattgatttgtcaaggaccttagttacttaaa

SEQ ID NO: 826499 - DNA, 33 bp, Homo sapien
caaattgctcacataaaataaatcctttgccct

SEQ ID NO: 826500 - DNA, 33 bp, Homo sapien
caaattgctcacataacataaatcctttgccct

SEQ ID NO: 826501 - DNA, 33 bp, Homo sapien
atatttacacagcctcaaagtatctgcccattg

SEQ ID NO: 826502 - DNA, 33 bp, Homo sapien
atatttacacagcctcgaagtatctgcccattg

SEQ ID NO: 826503 - DNA, 33 bp, Homo sapien
attttagagactgttccatgcacagatgagaag

SEQ ID NO: 826504 - DNA, 33 bp, Homo sapien
attttagagactgttcgatgcacagatgagaag

SEQ ID NO: 826505 - DNA, 33 bp, Homo sapien
aaagaagatatgcaaacgaccgataagcacatg

SEQ ID NO: 826506 - DNA, 33 bp, Homo sapien
aaagaagatatgcaaatgaccgataagcacatg

SEQ ID NO: 826507 - DNA, 33 bp, Homo sapien
catgtagagtccctacactttgatgaatggagt

SEQ ID NO: 826508 - DNA, 33 bp, Homo sapien
catgtagagtccctacgctttgatgaatggagt

SEQ ID NO: 826509 - DNA, 33 bp, Homo sapien
accagggaagcttttaaaccgcatgaaggagga

SEQ ID NO: 826510 - DNA, 33 bp, Homo sapien
accagggaagcttttagaccgcatgaaggagga

SEQ ID NO: 826511 - DNA, 33 bp, Homo sapien
gaaactttggagcccaactttttcatagagtgt

SEQ ID NO: 826512 - DNA, 33 bp, Homo sapien
gaaactttggagcccagctttttcatagagtgt

SEQ ID NO: 826513 - DNA, 33 bp, Homo sapien
ttgcatacttgtgatgaagattgaccatagaaa

SEQ ID NO: 826514 - DNA, 33 bp, Homo sapien
ttgcatacttgtgatgcagattgaccatagaaa

SEQ ID NO: 826515 - DNA, 33 bp, Homo sapien
tgttattggccatcagacaaagtgaggaacagc

SEQ ID NO: 826516 - DNA, 33 bp, Homo sapien
tgttattggccatcaggcaaagtgaggaacagc

SEQ ID NO: 826517 - DNA, 33 bp, Homo sapien
gagcagatgactgtccactacaatccttactgc

SEQ ID NO: 826518 - DNA, 33 bp, Homo sapien
gagcagatgactgtcctctacaatccttactgc

SEQ ID NO: 826519 - DNA, 33 bp, Homo sapien
tatcgtatccttttccggcagtaaactgtagat

SEQ ID NO: 826520 - DNA, 33 bp, Homo sapien
tatcgtatccttttcctgcagtaaactgtagat

SEQ ID NO: 826521 - DNA, 33 bp, Homo sapien
tgaggacatagagaaactgaaaccctcgtgcat

SEQ ID NO: 826522 - DNA, 33 bp, Homo sapien
tgaggacatagagaaattgaaaccctcgtgcat

SEQ ID NO: 826523 - DNA, 33 bp, Homo sapien
taattttgaatgttgaactacttcttaatagta

SEQ ID NO: 826524 - DNA, 33 bp, Homo sapien
taattttgaatgttgagctacttcttaatagta

SEQ ID NO: 826525 - DNA, 33 bp, Homo sapien
ttgaaatgcagtctaacgttcttattgagtata

SEQ ID NO: 826526 - DNA, 33 bp, Homo sapien
ttgaaatgcagtctaatgttcttattgagtata

SEQ ID NO: 826527 - DNA, 33 bp, Homo sapien
cttcttcatagcctcaaaagaaagtaactctgc

SEQ ID NO: 826528 - DNA, 33 bp, Homo sapien
cttcttcatagcctcagaagaaagtaactctgc

SEQ ID NO: 826529 - DNA, 33 bp, Homo sapien
atgtagagggaagtaaatatcatgtagaaaaca

SEQ ID NO: 826530 - DNA, 33 bp, Homo sapien
atgtagagggaagtaagtatcatgtagaaaaca

SEQ ID NO: 826531 - DNA, 33 bp, Homo sapien
tgttcccaaatggtcccgcctcttaataccacc

SEQ ID NO: 826532 - DNA, 33 bp, Homo sapien
tgttcccaaatggtcctgcctcttaataccacc

SEQ ID NO: 826533 - DNA, 33 bp, Homo sapien
tataaactgtaagtcacaccagacgaaaagtag

SEQ ID NO: 826534 - DNA, 33 bp, Homo sapien
tataaactgtaagtcataccagacgaaaagtag

SEQ ID NO: 826535 - DNA, 33 bp, Homo sapien
ttctcccttggaaaccactgtgtacctttgatt

SEQ ID NO: 826536 - DNA, 33 bp, Homo sapien
ttctcccttggaaaccgctgtgtacctttgatt

SEQ ID NO: 826537 - DNA, 33 bp, Homo sapien
ccatgacagatgactacgccaaagcacagagaa

SEQ ID NO: 826538 - DNA, 33 bp, Homo sapien
ccatgacagatgactatgccaaagcacagagaa

SEQ ID NO: 826539 - DNA, 33 bp, Homo sapien
aattagaatcctgtcacgtcagtttagccagag

SEQ ID NO: 826540 - DNA, 33 bp, Homo sapien
aattagaatcctgtcatgtcagtttagccagag

SEQ ID NO: 826541 - DNA, 33 bp, Homo sapien
ttttgatccagcgatcccaattctaaaaatctg

SEQ ID NO: 826542 - DNA, 33 bp, Homo sapien
ttttgatccagcgatctcaattctaaaaatctg

SEQ ID NO: 826543 - DNA, 33 bp, Homo sapien
gtttgaggactgtatcaaaccttatttaatgcc

SEQ ID NO: 826544 - DNA, 33 bp, Homo sapien
gtttgaggactgtatcgaaccttatttaatgcc

SEQ ID NO: 826545 - DNA, 33 bp, Homo sapien
cttcagatcaccatcaaagaattgctaaaatga

SEQ ID NO: 826546 - DNA, 33 bp, Homo sapien
cttcagatcaccatcagagaattgctaaaatga

SEQ ID NO: 826547 - DNA, 33 bp, Homo sapien
ttcacactcatcatgaaggaagtagaaagtatc

SEQ ID NO: 826548 - DNA, 33 bp, Homo sapien
ttcacactcatcatgagggaagtagaaagtatc

SEQ ID NO: 826549 - DNA, 33 bp, Homo sapien
aaagaattctgggaaacgtagtctagcctagcc

SEQ ID NO: 826550 - DNA, 33 bp, Homo sapien
aaagaattctgggaaatgtagtctagcctagcc

SEQ ID NO: 826551 - DNA, 33 bp, Homo sapien
agggaggaagccgagaaaaacttggagagcttt

SEQ ID NO: 826552 - DNA, 33 bp, Homo sapien
agggaggaagccgagagaaacttggagagcttt

SEQ ID NO: 826553 - DNA, 33 bp, Homo sapien
gtcgtcaaatgattgcacaatagttaagtgtaa

SEQ ID NO: 826554 - DNA, 33 bp, Homo sapien
gtcgtcaaatgattgcccaatagttaagtgtaa

SEQ ID NO: 826555 - DNA, 33 bp, Homo sapien
aaagctatgtgactgaataaacaataagccaat

SEQ ID NO: 826556 - DNA, 33 bp, Homo sapien
aaagctatgtgactgagtaaacaataagccaat

SEQ ID NO: 826557 - DNA, 33 bp, Homo sapien
tcagaatgtcacaccaagagttttcaaacggca

SEQ ID NO: 826558 - DNA, 33 bp, Homo sapien
tcagaatgtcacaccaggagttttcaaacggca

SEQ ID NO: 826559 - DNA, 33 bp, Homo sapien
ataatgacaccaataacgattacaataataaac

SEQ ID NO: 826560 - DNA, 33 bp, Homo sapien
ataatgacaccaataatgattacaataataaac

SEQ ID NO: 826561 - DNA, 33 bp, Homo sapien
atagaaacataaaatcaaaagactggaggagag

SEQ ID NO: 826562 - DNA, 33 bp, Homo sapien
atagaaacataaaatcgaaagactggaggagag

SEQ ID NO: 826563 - DNA, 33 bp, Homo sapien
cacctagtataacccaggtttcgcattagatgt

SEQ ID NO: 826564 - DNA, 33 bp, Homo sapien
cacctagtataacccatgtttcgcattagatgt

SEQ ID NO: 826565 - DNA, 33 bp, Homo sapien
gtctcattagcttccaaatggtcttcctgatga

SEQ ID NO: 826566 - DNA, 33 bp, Homo sapien
gtctcattagcttccagatggtcttcctgatga

SEQ ID NO: 826567 - DNA, 33 bp, Homo sapien
caggtggaaatactaaaatgcagaaaactaatc

SEQ ID NO: 826568 - DNA, 33 bp, Homo sapien
caggtggaaatactaagatgcagaaaactaatc

SEQ ID NO: 826569 - DNA, 33 bp, Homo sapien
tttgaggccaccgtctgacatcttagttcaaac

SEQ ID NO: 826570 - DNA, 33 bp, Homo sapien
tttgaggccaccgtcttacatcttagttcaaac

SEQ ID NO: 826571 - DNA, 33 bp, Homo sapien
aatttccctttgcctcactcttataaaggcacc

SEQ ID NO: 826572 - DNA, 33 bp, Homo sapien
aatttccctttgcctcgctcttataaaggcacc

SEQ ID NO: 826573 - DNA, 33 bp, Homo sapien
gagttagacactcataaccaattgccagagacg

SEQ ID NO: 826574 - DNA, 33 bp, Homo sapien
gagttagacactcatagccaattgccagagacg

SEQ ID NO: 826575 - DNA, 33 bp, Homo sapien
attactaaattgtcacactgataccttcatata

SEQ ID NO: 826576 - DNA, 33 bp, Homo sapien
attactaaattgtcacgctgataccttcatata

SEQ ID NO: 826577 - DNA, 33 bp, Homo sapien
gcttttggaatttgcagacacttgtgatcatgt

SEQ ID NO: 826578 - DNA, 33 bp, Homo sapien
gcttttggaatttgcatacacttgtgatcatgt

SEQ ID NO: 826579 - DNA, 33 bp, Homo sapien
acctggagaggagaacagcttcaacaataccaa

SEQ ID NO: 826580 - DNA, 33 bp, Homo sapien
acctggagaggagaaccgcttcaacaataccaa

SEQ ID NO: 826581 - DNA, 33 bp, Homo sapien
ctgtttcaagaatatcactcagtactagctaga

SEQ ID NO: 826582 - DNA, 33 bp, Homo sapien
ctgtttcaagaatatcgctcagtactagctaga

SEQ ID NO: 826583 - DNA, 33 bp, Homo sapien
gaaccaggtgggaagccgaatgtgagaaaagga

SEQ ID NO: 826584 - DNA, 33 bp, Homo sapien
gaaccaggtgggaagcggaatgtgagaaaagga

SEQ ID NO: 826585 - DNA, 33 bp, Homo sapien
ttccagcactggacacagagaaacagccttgta

SEQ ID NO: 826586 - DNA, 33 bp, Homo sapien
ttccagcactggacacggagaaacagccttgta

SEQ ID NO: 826587 - DNA, 33 bp, Homo sapien
gaagtgtcaaattataaccatgaacaagcactt

SEQ ID NO: 826588 - DNA, 33 bp, Homo sapien
gaagtgtcaaattatagccatgaacaagcactt

SEQ ID NO: 826589 - DNA, 33 bp, Homo sapien
cgatatttttcacctaaatgttcaaagcagtaa

SEQ ID NO: 826590 - DNA, 33 bp, Homo sapien
cgatatttttcacctagatgttcaaagcagtaa

SEQ ID NO: 826591 - DNA, 33 bp, Homo sapien
ttattagcagctatccaatattaggttcttact

SEQ ID NO: 826592 - DNA, 33 bp, Homo sapien
ttattagcagctatcccatattaggttcttact

SEQ ID NO: 826593 - DNA, 33 bp, Homo sapien
ttcaggaaacactaataatcatcatcatctcat

SEQ ID NO: 826594 - DNA, 33 bp, Homo sapien
ttcaggaaacactaatcatcatcatcatctcat

SEQ ID NO: 826595 - DNA, 33 bp, Homo sapien
aaagcactctggttggaaaacaggagtgctaac

SEQ ID NO: 826596 - DNA, 33 bp, Homo sapien
aaagcactctggttgggaaacaggagtgctaac

SEQ ID NO: 826597 - DNA, 33 bp, Homo sapien
cacttgttatgtgtaaagaattgcactatgtgg

SEQ ID NO: 826598 - DNA, 33 bp, Homo sapien
cacttgttatgtgtaatgaattgcactatgtgg

SEQ ID NO: 826599 - DNA, 33 bp, Homo sapien
ctttgtacagagttgaaacaggatgacatgaca

SEQ ID NO: 826600 - DNA, 33 bp, Homo sapien
ctttgtacagagttgagacaggatgacatgaca

SEQ ID NO: 826601 - DNA, 33 bp, Homo sapien
catgctatccaataaaaatgatgtctttcaaac

SEQ ID NO: 826602 - DNA, 33 bp, Homo sapien
catgctatccaataaagatgatgtctttcaaac

SEQ ID NO: 826603 - DNA, 33 bp, Homo sapien
tgtccaggaaagagaacggaatggagaagcctt

SEQ ID NO: 826604 - DNA, 33 bp, Homo sapien
tgtccaggaaagagaagggaatggagaagcctt

SEQ ID NO: 826605 - DNA, 33 bp, Homo sapien
gaatcagagagaagaaatgaaacagggcttggc

SEQ ID NO: 826606 - DNA, 33 bp, Homo sapien
gaatcagagagaagaagtgaaacagggcttggc

SEQ ID NO: 826607 - DNA, 33 bp, Homo sapien
aagtgttgcaggaaacccttagagccctttggc

SEQ ID NO: 826608 - DNA, 33 bp, Homo sapien
aagtgttgcaggaaacgcttagagccctttggc

SEQ ID NO: 826609 - DNA, 33 bp, Homo sapien
agctgtcttggtcttccccataatggctgtgac

SEQ ID NO: 826610 - DNA, 33 bp, Homo sapien
agctgtcttggtcttctccataatggctgtgac

SEQ ID NO: 826611 - DNA, 33 bp, Homo sapien
cccagaatactgcgataagagccttaaataatt

SEQ ID NO: 826612 - DNA, 33 bp, Homo sapien
cccagaatactgcgatgagagccttaaataatt

SEQ ID NO: 826613 - DNA, 33 bp, Homo sapien
tcaattgtgaattgagaaggctccactaagtga

SEQ ID NO: 826614 - DNA, 33 bp, Homo sapien
tcaattgtgaattgaggaggctccactaagtga

SEQ ID NO: 826615 - DNA, 33 bp, Homo sapien
ctcccaggctcaagaaattcaacctcccaagta

SEQ ID NO: 826616 - DNA, 33 bp, Homo sapien
ctcccaggctcaagaagttcaacctcccaagta

SEQ ID NO: 826617 - DNA, 33 bp, Homo sapien
tttgccaaggacatgaagtgaagcagccctatg

SEQ ID NO: 826618 - DNA, 33 bp, Homo sapien
tttgccaaggacatgaggtgaagcagccctatg

SEQ ID NO: 826619 - DNA, 33 bp, Homo sapien
cagtacaaacaggagaacgagatcaagtttgtg

SEQ ID NO: 826620 - DNA, 33 bp, Homo sapien
cagtacaaacaggagagcgagatcaagtttgtg

SEQ ID NO: 826621 - DNA, 33 bp, Homo sapien
tgtgtgtcatactataacaagcctataacctga

SEQ ID NO: 826622 - DNA, 33 bp, Homo sapien
tgtgtgtcatactataccaagcctataacctga

SEQ ID NO: 826623 - DNA, 33 bp, Homo sapien
ctgttaagcagggggaagaaaatcaatcctttc

SEQ ID NO: 826624 - DNA, 33 bp, Homo sapien
ctgttaagcagggggaggaaaatcaatcctttc

SEQ ID NO: 826625 - DNA, 33 bp, Homo sapien
attaagccattgagaccggtaatgaagaaaacc

SEQ ID NO: 826626 - DNA, 33 bp, Homo sapien
attaagccattgagactggtaatgaagaaaacc

SEQ ID NO: 826627 - DNA, 33 bp, Homo sapien
aaatgacttaacggacacctaatataaatttgc

SEQ ID NO: 826628 - DNA, 33 bp, Homo sapien
aaatgacttaacggacccctaatataaatttgc

SEQ ID NO: 826629 - DNA, 33 bp, Homo sapien
tgagcctgcttcctacgggtagaaagttggaga

SEQ ID NO: 826630 - DNA, 33 bp, Homo sapien
tgagcctgcttcctactggtagaaagttggaga

SEQ ID NO: 826631 - DNA, 33 bp, Homo sapien
tctttttatttttcaaaactggagtaatactct

SEQ ID NO: 826632 - DNA, 33 bp, Homo sapien
tctttttatttttcaagactggagtaatactct

SEQ ID NO: 826633 - DNA, 33 bp, Homo sapien
atatcaacattcaaaaaaattttgctgctctgt

SEQ ID NO: 826634 - DNA, 33 bp, Homo sapien
atatcaacattcaaaacaattttgctgctctgt

SEQ ID NO: 826635 - DNA, 33 bp, Homo sapien
atattccagataaataaaatttccaggctttta

SEQ ID NO: 826636 - DNA, 33 bp, Homo sapien
atattccagataaatagaatttccaggctttta

SEQ ID NO: 826637 - DNA, 33 bp, Homo sapien
atttctgtggtcaccccacataacagtcttcat

SEQ ID NO: 826638 - DNA, 33 bp, Homo sapien
atttctgtggtcaccctacataacagtcttcat

SEQ ID NO: 826639 - DNA, 33 bp, Homo sapien
cacactgtgaaaaaccagaggctgtctgcatcc

SEQ ID NO: 826640 - DNA, 33 bp, Homo sapien
cacactgtgaaaaaccggaggctgtctgcatcc

SEQ ID NO: 826641 - DNA, 33 bp, Homo sapien
agaactgttaccaaaaaagccacaaaatattgc

SEQ ID NO: 826642 - DNA, 33 bp, Homo sapien
agaactgttaccaaaagagccacaaaatattgc

SEQ ID NO: 826643 - DNA, 33 bp, Homo sapien
tgtggaaatttcattaaagctgctgtattttac

SEQ ID NO: 826644 - DNA, 33 bp, Homo sapien
tgtggaaatttcattagagctgctgtattttac

SEQ ID NO: 826645 - DNA, 33 bp, Homo sapien
gggcatccggttgagcagcaccagatgtgcttt

SEQ ID NO: 826646 - DNA, 33 bp, Homo sapien
gggcatccggttgagcggcaccagatgtgcttt

SEQ ID NO: 826647 - DNA, 33 bp, Homo sapien
tataaaggcttgcctaagtaggccaggactgaa

SEQ ID NO: 826648 - DNA, 33 bp, Homo sapien
tataaaggcttgcctaggtaggccaggactgaa

SEQ ID NO: 826649 - DNA, 33 bp, Homo sapien
accaggttataacaggaatgcactggctgcctc

SEQ ID NO: 826650 - DNA, 33 bp, Homo sapien
accaggttataacagggatgcactggctgcctc

SEQ ID NO: 826651 - DNA, 33 bp, Homo sapien
gggttatcattcagataaacttagcaagagaat

SEQ ID NO: 826652 - DNA, 33 bp, Homo sapien
gggttatcattcagatgaacttagcaagagaat

SEQ ID NO: 826653 - DNA, 33 bp, Homo sapien
taagccagctttcttaggtataaaatggggata

SEQ ID NO: 826654 - DNA, 33 bp, Homo sapien
taagccagctttcttatgtataaaatggggata

SEQ ID NO: 826655 - DNA, 33 bp, Homo sapien
gactttttttagtgaacctttagagggccaaga

SEQ ID NO: 826656 - DNA, 33 bp, Homo sapien
gactttttttagtgaatctttagagggccaaga

SEQ ID NO: 826657 - DNA, 33 bp, Homo sapien
ctgctgcggaaaacagacaatgataaaataatg

SEQ ID NO: 826658 - DNA, 33 bp, Homo sapien
ctgctgcggaaaacagccaatgataaaataatg

SEQ ID NO: 826659 - DNA, 33 bp, Homo sapien
ccaaagcccttccctaaacaactggcagcttca

SEQ ID NO: 826660 - DNA, 33 bp, Homo sapien
ccaaagcccttccctatacaactggcagcttca

SEQ ID NO: 826661 - DNA, 33 bp, Homo sapien
atttgaatgtttaacacaagaggcttttctgtt

SEQ ID NO: 826662 - DNA, 33 bp, Homo sapien
atttgaatgtttaacataagaggcttttctgtt

SEQ ID NO: 826663 - DNA, 33 bp, Homo sapien
ggcttttctgttctgaaaaacagcttgcccctg

SEQ ID NO: 826664 - DNA, 33 bp, Homo sapien
ggcttttctgttctgataaacagcttgcccctg

SEQ ID NO: 826665 - DNA, 33 bp, Homo sapien
gtatgtgcaaacattacatgaacacaagatggt

SEQ ID NO: 826666 - DNA, 33 bp, Homo sapien
gtatgtgcaaacattatatgaacacaagatggt

SEQ ID NO: 826667 - DNA, 33 bp, Homo sapien
aaatctgttcaattttaaaaaaagatttgattg

SEQ ID NO: 826668 - DNA, 33 bp, Homo sapien
aaatctgttcaattttgaaaaaagatttgattg

SEQ ID NO: 826669 - DNA, 33 bp, Homo sapien
tgttggaagttcagtcaacatttgtacagtgga

SEQ ID NO: 826670 - DNA, 33 bp, Homo sapien
tgttggaagttcagtcgacatttgtacagtgga

SEQ ID NO: 826671 - DNA, 33 bp, Homo sapien
ttttagacatcacctcgacttagcacagtccac

SEQ ID NO: 826672 - DNA, 33 bp, Homo sapien
ttttagacatcacctctacttagcacagtccac

SEQ ID NO: 826673 - DNA, 33 bp, Homo sapien
aattggtttagtctaactgtgatgtatacactg

SEQ ID NO: 826674 - DNA, 33 bp, Homo sapien
aattggtttagtctaattgtgatgtatacactg

SEQ ID NO: 826675 - DNA, 33 bp, Homo sapien
aactggagcaatagaacgttaaagctttgagaa

SEQ ID NO: 826676 - DNA, 33 bp, Homo sapien
aactggagcaatagaatgttaaagctttgagaa

SEQ ID NO: 826677 - DNA, 33 bp, Homo sapien
tacagaagtgagcaaaatagacaaagccctgcc

SEQ ID NO: 826678 - DNA, 33 bp, Homo sapien
tacagaagtgagcaaagtagacaaagccctgcc

SEQ ID NO: 826679 - DNA, 33 bp, Homo sapien
tactcctctcattcaaagataaattctatgccc

SEQ ID NO: 826680 - DNA, 33 bp, Homo sapien
tactcctctcattcaaggataaattctatgccc

SEQ ID NO: 826681 - DNA, 33 bp, Homo sapien
gattgatctgcataggcatggtaagaacagggc

SEQ ID NO: 826682 - DNA, 33 bp, Homo sapien
gattgatctgcataggtatggtaagaacagggc

SEQ ID NO: 826683 - DNA, 33 bp, Homo sapien
aatgcattagaaaaggacaaagatggatacaga

SEQ ID NO: 826684 - DNA, 33 bp, Homo sapien
aatgcattagaaaagggcaaagatggatacaga

SEQ ID NO: 826685 - DNA, 33 bp, Homo sapien
caataggcaatggaaacggacaagagaataaat

SEQ ID NO: 826686 - DNA, 33 bp, Homo sapien
caataggcaatggaaatggacaagagaataaat

SEQ ID NO: 826687 - DNA, 33 bp, Homo sapien
ctgctgtctcttcatcgatcaagcttagagctg

SEQ ID NO: 826688 - DNA, 33 bp, Homo sapien
ctgctgtctcttcatctatcaagcttagagctg

SEQ ID NO: 826689 - DNA, 33 bp, Homo sapien
aagatcaaagagaagacaccatagagttgtaaa

SEQ ID NO: 826690 - DNA, 33 bp, Homo sapien
aagatcaaagagaagataccatagagttgtaaa

SEQ ID NO: 826691 - DNA, 33 bp, Homo sapien
tcaattgggacacaccgattgctgagttccagt

SEQ ID NO: 826692 - DNA, 33 bp, Homo sapien
tcaattgggacacacctattgctgagttccagt

SEQ ID NO: 826693 - DNA, 33 bp, Homo sapien
caacgctagcgaataacggagagaaagcaggat

SEQ ID NO: 826694 - DNA, 33 bp, Homo sapien
caacgctagcgaataatggagagaaagcaggat

SEQ ID NO: 826695 - DNA, 33 bp, Homo sapien
agggtctgtttgccaaatgcggtaagaccagat

SEQ ID NO: 826696 - DNA, 33 bp, Homo sapien
agggtctgtttgccaagtgcggtaagaccagat

SEQ ID NO: 826697 - DNA, 33 bp, Homo sapien
ttaccttcttgcttatcaagtcgcttatttact

SEQ ID NO: 826698 - DNA, 33 bp, Homo sapien
ttaccttcttgcttattaagtcgcttatttact

SEQ ID NO: 826699 - DNA, 33 bp, Homo sapien
gtttcaccttggcttaccttggtcctattacct

SEQ ID NO: 826700 - DNA, 33 bp, Homo sapien
gtttcaccttggcttatcttggtcctattacct

SEQ ID NO: 826701 - DNA, 33 bp, Homo sapien
agtgtagcaaatggaccacagtggtatgttaat

SEQ ID NO: 826702 - DNA, 33 bp, Homo sapien
agtgtagcaaatggactacagtggtatgttaat

SEQ ID NO: 826703 - DNA, 33 bp, Homo sapien
attcagccttcattccagaacagagtgaaaggt

SEQ ID NO: 826704 - DNA, 33 bp, Homo sapien
attcagccttcattccggaacagagtgaaaggt

SEQ ID NO: 826705 - DNA, 33 bp, Homo sapien
gatccatatcgatataacaaagcagagtgatat

SEQ ID NO: 826706 - DNA, 33 bp, Homo sapien
gatccatatcgatataccaaagcagagtgatat

SEQ ID NO: 826707 - DNA, 33 bp, Homo sapien
ttcttccggagacaaaattacattaatgaaaaa

SEQ ID NO: 826708 - DNA, 33 bp, Homo sapien
ttcttccggagacaaacttacattaatgaaaaa

SEQ ID NO: 826709 - DNA, 33 bp, Homo sapien
agtaaaaagggccttcaaatagcttcctagagc

SEQ ID NO: 826710 - DNA, 33 bp, Homo sapien
agtaaaaagggccttcgaatagcttcctagagc

SEQ ID NO: 826711 - DNA, 33 bp, Homo sapien
tggaaggccaggagaacgggtcttttaattagc

SEQ ID NO: 826712 - DNA, 33 bp, Homo sapien
tggaaggccaggagaatgggtcttttaattagc

SEQ ID NO: 826713 - DNA, 33 bp, Homo sapien
tgtctcctgtcttcaccgatctttctatcccag

SEQ ID NO: 826714 - DNA, 33 bp, Homo sapien
tgtctcctgtcttcactgatctttctatcccag

SEQ ID NO: 826715 - DNA, 33 bp, Homo sapien
aagaagaaaaaacccacagaactcagaaagact

SEQ ID NO: 826716 - DNA, 33 bp, Homo sapien
aagaagaaaaaacccatagaactcagaaagact

SEQ ID NO: 826717 - DNA, 33 bp, Homo sapien
ggcacacctaataacacgaaaaggcaacaggct

SEQ ID NO: 826718 - DNA, 33 bp, Homo sapien
ggcacacctaataacatgaaaaggcaacaggct

SEQ ID NO: 826719 - DNA, 33 bp, Homo sapien
gaatattagctacttcaacaggaatgtggctat

SEQ ID NO: 826720 - DNA, 33 bp, Homo sapien
gaatattagctacttcgacaggaatgtggctat

SEQ ID NO: 826721 - DNA, 33 bp, Homo sapien
ccctgcgtcctgaacaaagacctgcctcccaaa

SEQ ID NO: 826722 - DNA, 33 bp, Homo sapien
ccctgcgtcctgaacagagacctgcctcccaaa

SEQ ID NO: 826723 - DNA, 33 bp, Homo sapien
ttcgcctgggaggaaaatgttctgaatatacta

SEQ ID NO: 826724 - DNA, 33 bp, Homo sapien
ttcgcctgggaggaaagtgttctgaatatacta

SEQ ID NO: 826725 - DNA, 33 bp, Homo sapien
tgctggcatatattcaacttgcctttgagggag

SEQ ID NO: 826726 - DNA, 33 bp, Homo sapien
tgctggcatatattcagcttgcctttgagggag

SEQ ID NO: 826727 - DNA, 33 bp, Homo sapien
taaataacatctgcccacagtgatattccgtgg

SEQ ID NO: 826728 - DNA, 33 bp, Homo sapien
taaataacatctgcccgcagtgatattccgtgg

SEQ ID NO: 826729 - DNA, 33 bp, Homo sapien
ggtatgtgttcgtagaaaaatgggtgactcaaa

SEQ ID NO: 826730 - DNA, 33 bp, Homo sapien
ggtatgtgttcgtagataaatgggtgactcaaa

SEQ ID NO: 826731 - DNA, 33 bp, Homo sapien
tcagtactttcacttcactgaatctctaaaaat

SEQ ID NO: 826732 - DNA, 33 bp, Homo sapien
tcagtactttcacttctctgaatctctaaaaat

SEQ ID NO: 826733 - DNA, 33 bp, Homo sapien
tcagtcatcttaccaaggtccatttttagagat

SEQ ID NO: 826734 - DNA, 33 bp, Homo sapien
tcagtcatcttaccaatgtccatttttagagat

SEQ ID NO: 826735 - DNA, 33 bp, Homo sapien
agtggcatccagtggccatggaactatttgcca

SEQ ID NO: 826736 - DNA, 33 bp, Homo sapien
agtggcatccagtggctatggaactatttgcca

SEQ ID NO: 826737 - DNA, 33 bp, Homo sapien
acaaagcacgttcacacacacatatatatttta

SEQ ID NO: 826738 - DNA, 33 bp, Homo sapien
acaaagcacgttcacatacacatatatatttta

SEQ ID NO: 826739 - DNA, 33 bp, Homo sapien
actattctcaaagggaagctgactcttcaagca

SEQ ID NO: 826740 - DNA, 33 bp, Homo sapien
actattctcaaagggaggctgactcttcaagca

SEQ ID NO: 826741 - DNA, 33 bp, Homo sapien
aaggagagaaaaggagacggagaagacgagaaa

SEQ ID NO: 826742 - DNA, 33 bp, Homo sapien
aaggagagaaaaggaggcggagaagacgagaaa

SEQ ID NO: 826743 - DNA, 33 bp, Homo sapien
aaggtaaattcattcacgatgatgatgaactca

SEQ ID NO: 826744 - DNA, 33 bp, Homo sapien
aaggtaaattcattcaggatgatgatgaactca

SEQ ID NO: 826745 - DNA, 33 bp, Homo sapien
tatggaagtttttcaacgacagaagttttgaca

SEQ ID NO: 826746 - DNA, 33 bp, Homo sapien
tatggaagtttttcaatgacagaagttttgaca

SEQ ID NO: 826747 - DNA, 33 bp, Homo sapien
accatttattgatagagtactatgtgccaggca

SEQ ID NO: 826748 - DNA, 33 bp, Homo sapien
accatttattgatagattactatgtgccaggca

SEQ ID NO: 826749 - DNA, 33 bp, Homo sapien
aaaataccaaagaccaatctccccgtgtagata

SEQ ID NO: 826750 - DNA, 33 bp, Homo sapien
aaaataccaaagaccagtctccccgtgtagata

SEQ ID NO: 826751 - DNA, 33 bp, Homo sapien
ggcattctggaactgaccccccgcatataccaa

SEQ ID NO: 826752 - DNA, 33 bp, Homo sapien
ggcattctggaactgatcccccgcatataccaa

SEQ ID NO: 826753 - DNA, 33 bp, Homo sapien
tcatcagtgttttctccaatcatacaatttgcc

SEQ ID NO: 826754 - DNA, 33 bp, Homo sapien
tcatcagtgttttctctaatcatacaatttgcc

SEQ ID NO: 826755 - DNA, 33 bp, Homo sapien
ttccttgctcattttaacttagataatcaagaa

SEQ ID NO: 826756 - DNA, 33 bp, Homo sapien
ttccttgctcattttagcttagataatcaagaa

SEQ ID NO: 826757 - DNA, 33 bp, Homo sapien
aagctttgctttaagaatactacaaggcacatt

SEQ ID NO: 826758 - DNA, 33 bp, Homo sapien
aagctttgctttaagagtactacaaggcacatt

SEQ ID NO: 826759 - DNA, 33 bp, Homo sapien
acactaaatcacatagacatttatactgctaat

SEQ ID NO: 826760 - DNA, 33 bp, Homo sapien
acactaaatcacataggcatttatactgctaat

SEQ ID NO: 826761 - DNA, 33 bp, Homo sapien
atcaaaggctggaaaccgacaactgtgtcccaa

SEQ ID NO: 826762 - DNA, 33 bp, Homo sapien
atcaaaggctggaaactgacaactgtgtcccaa

SEQ ID NO: 826763 - DNA, 33 bp, Homo sapien
gctgttgagagatgcacagcgagactgcagaga

SEQ ID NO: 826764 - DNA, 33 bp, Homo sapien
gctgttgagagatgcatagcgagactgcagaga

SEQ ID NO: 826765 - DNA, 33 bp, Homo sapien
atatagaaaaacaacactgacattataaagtaa

SEQ ID NO: 826766 - DNA, 33 bp, Homo sapien
atatagaaaaacaacattgacattataaagtaa

SEQ ID NO: 826767 - DNA, 33 bp, Homo sapien
tcagctgaccacagatgactcaaagataaccct

SEQ ID NO: 826768 - DNA, 33 bp, Homo sapien
tcagctgaccacagattactcaaagataaccct

SEQ ID NO: 826769 - DNA, 33 bp, Homo sapien
cctcgaaggagaaggaagggaagtgagccctga

SEQ ID NO: 826770 - DNA, 33 bp, Homo sapien
cctcgaaggagaaggatgggaagtgagccctga

SEQ ID NO: 826771 - DNA, 33 bp, Homo sapien
ggtatgcttttgactcacaagactgccaaatga

SEQ ID NO: 826772 - DNA, 33 bp, Homo sapien
ggtatgcttttgactcgcaagactgccaaatga

SEQ ID NO: 826773 - DNA, 33 bp, Homo sapien
aatgcagagaaagtggaaaggtagtaaactagt

SEQ ID NO: 826774 - DNA, 33 bp, Homo sapien
aatgcagagaaagtggtaaggtagtaaactagt

SEQ ID NO: 826775 - DNA, 33 bp, Homo sapien
gcagggttggttcatactagagattgtgaggga

SEQ ID NO: 826776 - DNA, 33 bp, Homo sapien
gcagggttggttcatattagagattgtgaggga

SEQ ID NO: 826777 - DNA, 33 bp, Homo sapien
atacatgaattcatctcaacctgattacatctg

SEQ ID NO: 826778 - DNA, 33 bp, Homo sapien
atacatgaattcatcttaacctgattacatctg

SEQ ID NO: 826779 - DNA, 33 bp, Homo sapien
ctccaggttatcctaccgcttccttcagtctcc

SEQ ID NO: 826780 - DNA, 33 bp, Homo sapien
ctccaggttatcctactgcttccttcagtctcc

SEQ ID NO: 826781 - DNA, 33 bp, Homo sapien
ttctacatttccgcgtcaagtcactatccctct

SEQ ID NO: 826782 - DNA, 33 bp, Homo sapien
ttctacatttccgcgttaagtcactatccctct

SEQ ID NO: 826783 - DNA, 33 bp, Homo sapien
aagtctgtactgagaaacaaataatcttcaaaa

SEQ ID NO: 826784 - DNA, 33 bp, Homo sapien
aagtctgtactgagaagcaaataatcttcaaaa

SEQ ID NO: 826785 - DNA, 33 bp, Homo sapien
ggatagaatatgagacccaagagtacagagggc

SEQ ID NO: 826786 - DNA, 33 bp, Homo sapien
ggatagaatatgagactcaagagtacagagggc

SEQ ID NO: 826787 - DNA, 33 bp, Homo sapien
gaaaagaaagcagatccagaaggagtgattctt

SEQ ID NO: 826788 - DNA, 33 bp, Homo sapien
gaaaagaaagcagatctagaaggagtgattctt

SEQ ID NO: 826789 - DNA, 33 bp, Homo sapien
gagtcgtcactgtgtacggaaggattttttaat

SEQ ID NO: 826790 - DNA, 33 bp, Homo sapien
gagtcgtcactgtgtatggaaggattttttaat

SEQ ID NO: 826791 - DNA, 33 bp, Homo sapien
tctccttaatgtatcccgaggtaagtttcctac

SEQ ID NO: 826792 - DNA, 33 bp, Homo sapien
tctccttaatgtatcctgaggtaagtttcctac

SEQ ID NO: 826793 - DNA, 33 bp, Homo sapien
tgttctacggggcataacttttttctcatattg

SEQ ID NO: 826794 - DNA, 33 bp, Homo sapien
tgttctacggggcataccttttttctcatattg

SEQ ID NO: 826795 - DNA, 33 bp, Homo sapien
gcgagagccaggcaaaactgctgtgtctaaact

SEQ ID NO: 826796 - DNA, 33 bp, Homo sapien
gcgagagccaggcaaagctgctgtgtctaaact

SEQ ID NO: 826797 - DNA, 33 bp, Homo sapien
tatggaggaaatcaatcacaagttatccataaa

SEQ ID NO: 826798 - DNA, 33 bp, Homo sapien
tatggaggaaatcaattacaagttatccataaa

SEQ ID NO: 826799 - DNA, 33 bp, Homo sapien
gactggcagaagaaagccttgtccatacgcagg

SEQ ID NO: 826800 - DNA, 33 bp, Homo sapien
gactggcagaagaaaggcttgtccatacgcagg

SEQ ID NO: 826801 - DNA, 33 bp, Homo sapien
ttcttcacttaacatccacatgactttccatct

SEQ ID NO: 826802 - DNA, 33 bp, Homo sapien
ttcttcacttaacatctacatgactttccatct

SEQ ID NO: 826803 - DNA, 33 bp, Homo sapien
ttgggacaagtcgaataagctctctaaactttg

SEQ ID NO: 826804 - DNA, 33 bp, Homo sapien
ttgggacaagtcgaatgagctctctaaactttg

SEQ ID NO: 826805 - DNA, 33 bp, Homo sapien
ccttcaccaaaataagcctaaatatacttcttc

SEQ ID NO: 826806 - DNA, 33 bp, Homo sapien
ccttcaccaaaataaggctaaatatacttcttc

SEQ ID NO: 826807 - DNA, 33 bp, Homo sapien
tctgacagtgacctccaacatcgacctcaaaaa

SEQ ID NO: 826808 - DNA, 33 bp, Homo sapien
tctgacagtgacctccgacatcgacctcaaaaa

SEQ ID NO: 826809 - DNA, 33 bp, Homo sapien
tctgcttcgctgtgacaacaaatgaaacaacat

SEQ ID NO: 826810 - DNA, 33 bp, Homo sapien
tctgcttcgctgtgacgacaaatgaaacaacat

SEQ ID NO: 826811 - DNA, 33 bp, Homo sapien
tgctgttttctgcaaacagaacaactctttcaa

SEQ ID NO: 826812 - DNA, 33 bp, Homo sapien
tgctgttttctgcaaatagaacaactctttcaa

SEQ ID NO: 826813 - DNA, 33 bp, Homo sapien
actctcaccttagcacaattccaactcagtccg

SEQ ID NO: 826814 - DNA, 33 bp, Homo sapien
actctcaccttagcacgattccaactcagtccg

SEQ ID NO: 826815 - DNA, 33 bp, Homo sapien
attagaagcaatgaaaaaattacacctaaaata

SEQ ID NO: 826816 - DNA, 33 bp, Homo sapien
attagaagcaatgaaacaattacacctaaaata

SEQ ID NO: 826817 - DNA, 33 bp, Homo sapien
gccactggtgctcagaaaagtctgggtgggaaa

SEQ ID NO: 826818 - DNA, 33 bp, Homo sapien
gccactggtgctcagataagtctgggtgggaaa

SEQ ID NO: 826819 - DNA, 33 bp, Homo sapien
aaatgacccagaaaaaattaatgtgtgtgtctg

SEQ ID NO: 826820 - DNA, 33 bp, Homo sapien
aaatgacccagaaaaacttaatgtgtgtgtctg

SEQ ID NO: 826821 - DNA, 33 bp, Homo sapien
aatacttccatcaagaatcataaaatgtcactt

SEQ ID NO: 826822 - DNA, 33 bp, Homo sapien
aatacttccatcaagagtcataaaatgtcactt

SEQ ID NO: 826823 - DNA, 33 bp, Homo sapien
tttatcttccagctccagaaaaggcctgtagtt

SEQ ID NO: 826824 - DNA, 33 bp, Homo sapien
tttatcttccagctccggaaaaggcctgtagtt

SEQ ID NO: 826825 - DNA, 33 bp, Homo sapien
aaaaaaatctctgtatgaaactatccaccagag

SEQ ID NO: 826826 - DNA, 33 bp, Homo sapien
aaaaaaatctctgtattaaactatccaccagag

SEQ ID NO: 826827 - DNA, 33 bp, Homo sapien
ttgggcttcttccaccaagacccctggaagaag

SEQ ID NO: 826828 - DNA, 33 bp, Homo sapien
ttgggcttcttccaccgagacccctggaagaag

SEQ ID NO: 826829 - DNA, 33 bp, Homo sapien
ccgtgttttatctttaacacatatgcgcatttt

SEQ ID NO: 826830 - DNA, 33 bp, Homo sapien
ccgtgttttatctttagcacatatgcgcatttt

SEQ ID NO: 826831 - DNA, 33 bp, Homo sapien
ctcaagggaggacaataagcaagaaccaaaagt

SEQ ID NO: 826832 - DNA, 33 bp, Homo sapien
ctcaagggaggacaatgagcaagaaccaaaagt

SEQ ID NO: 826833 - DNA, 33 bp, Homo sapien
gagtcacactggggaaatcgcattctttctgaa

SEQ ID NO: 826834 - DNA, 33 bp, Homo sapien
gagtcacactggggaagtcgcattctttctgaa

SEQ ID NO: 826835 - DNA, 33 bp, Homo sapien
atacgtatcaggtgaggaaccaaaggtgatcat

SEQ ID NO: 826836 - DNA, 33 bp, Homo sapien
atacgtatcaggtgagtaaccaaaggtgatcat

SEQ ID NO: 826837 - DNA, 33 bp, Homo sapien
agcattattggatgtccattgattgatagattt

SEQ ID NO: 826838 - DNA, 33 bp, Homo sapien
agcattattggatgtctattgattgatagattt

SEQ ID NO: 826839 - DNA, 33 bp, Homo sapien
gatttctgatcttagaccagacaggcgggaggt

SEQ ID NO: 826840 - DNA, 33 bp, Homo sapien
gatttctgatcttagagcagacaggcgggaggt

SEQ ID NO: 826841 - DNA, 33 bp, Homo sapien
ttccaatgagcacaataagccatttttaccctg

SEQ ID NO: 826842 - DNA, 33 bp, Homo sapien
ttccaatgagcacaattagccatttttaccctg

SEQ ID NO: 826843 - DNA, 33 bp, Homo sapien
tgccctgcccagtacagcttttctccactcgag

SEQ ID NO: 826844 - DNA, 33 bp, Homo sapien
tgccctgcccagtacatcttttctccactcgag

SEQ ID NO: 826845 - DNA, 33 bp, Homo sapien
gccacagggatagtgacaaacacggaaaagcat

SEQ ID NO: 826846 - DNA, 33 bp, Homo sapien
gccacagggatagtgataaacacggaaaagcat

SEQ ID NO: 826847 - DNA, 33 bp, Homo sapien
cagcatttgttatttgcagccgtattaggttta

SEQ ID NO: 826848 - DNA, 33 bp, Homo sapien
cagcatttgttatttgtagccgtattaggttta

SEQ ID NO: 826849 - DNA, 33 bp, Homo sapien
gggatatatgttgcgaataagattcaaatatat

SEQ ID NO: 826850 - DNA, 33 bp, Homo sapien
gggatatatgttgcgattaagattcaaatatat

SEQ ID NO: 826851 - DNA, 33 bp, Homo sapien
cctttccctgtaataactatgagtagaacagct

SEQ ID NO: 826852 - DNA, 33 bp, Homo sapien
cctttccctgtaataagtatgagtagaacagct

SEQ ID NO: 826853 - DNA, 33 bp, Homo sapien
ctgcagctgtagatccaagtctccctgtgctct

SEQ ID NO: 826854 - DNA, 33 bp, Homo sapien
ctgcagctgtagatccgagtctccctgtgctct

SEQ ID NO: 826855 - DNA, 33 bp, Homo sapien
gggctagcaaagaaaacacgcccactcacccac

SEQ ID NO: 826856 - DNA, 33 bp, Homo sapien
gggctagcaaagaaaagacgcccactcacccac

SEQ ID NO: 826857 - DNA, 33 bp, Homo sapien
cttcagttcagcctaacacttcattcaccaaat

SEQ ID NO: 826858 - DNA, 33 bp, Homo sapien
cttcagttcagcctaatacttcattcaccaaat

SEQ ID NO: 826859 - DNA, 33 bp, Homo sapien
tccagcctctaaagcaatctgcattacaggatc

SEQ ID NO: 826860 - DNA, 33 bp, Homo sapien
tccagcctctaaagcagtctgcattacaggatc

SEQ ID NO: 826861 - DNA, 33 bp, Homo sapien
tcttttagtcctaatacgcgtttcttcatttct

SEQ ID NO: 826862 - DNA, 33 bp, Homo sapien
tcttttagtcctaatatgcgtttcttcatttct

SEQ ID NO: 826863 - DNA, 33 bp, Homo sapien
cttaaaacaacttggaaacattgttgggatgag

SEQ ID NO: 826864 - DNA, 33 bp, Homo sapien
cttaaaacaacttggagacattgttgggatgag

SEQ ID NO: 826865 - DNA, 33 bp, Homo sapien
ctcccaattgcataaactcagccagagaggaaa

SEQ ID NO: 826866 - DNA, 33 bp, Homo sapien
ctcccaattgcataaattcagccagagaggaaa

SEQ ID NO: 826867 - DNA, 33 bp, Homo sapien
gatgtgatcattaaacaacaatcttggttttca

SEQ ID NO: 826868 - DNA, 33 bp, Homo sapien
gatgtgatcattaaacgacaatcttggttttca

SEQ ID NO: 826869 - DNA, 33 bp, Homo sapien
aaagaatctgcagtcaaggtgaaaggggctgca

SEQ ID NO: 826870 - DNA, 33 bp, Homo sapien
aaagaatctgcagtcacggtgaaaggggctgca

SEQ ID NO: 826871 - DNA, 33 bp, Homo sapien
tcacataggcactgcaatcgttctatttcaaat

SEQ ID NO: 826872 - DNA, 33 bp, Homo sapien
tcacataggcactgcattcgttctatttcaaat

SEQ ID NO: 826873 - DNA, 33 bp, Homo sapien
ccaggaaggtgataggacaacagatactgaaaa

SEQ ID NO: 826874 - DNA, 33 bp, Homo sapien
ccaggaaggtgatagggcaacagatactgaaaa

SEQ ID NO: 826875 - DNA, 33 bp, Homo sapien
gccctgcatcttgggccccactgagagctttgc

SEQ ID NO: 826876 - DNA, 33 bp, Homo sapien
gccctgcatcttgggctccactgagagctttgc

SEQ ID NO: 826877 - DNA, 33 bp, Homo sapien
ttcaatcagaggttctcaaacatggctgcccat

SEQ ID NO: 826878 - DNA, 33 bp, Homo sapien
ttcaatcagaggttcttaaacatggctgcccat

SEQ ID NO: 826879 - DNA, 33 bp, Homo sapien
ggcttctggtggcctacggtctcctttactgta

SEQ ID NO: 826880 - DNA, 33 bp, Homo sapien
ggcttctggtggcctatggtctcctttactgta

SEQ ID NO: 826881 - DNA, 33 bp, Homo sapien
ttcctttggggtatcagagagtttctgccaccc

SEQ ID NO: 826882 - DNA, 33 bp, Homo sapien
ttcctttggggtatcatagagtttctgccaccc

SEQ ID NO: 826883 - DNA, 33 bp, Homo sapien
ttgctaattcatggtacaactttgtactgtaac

SEQ ID NO: 826884 - DNA, 33 bp, Homo sapien
ttgctaattcatggtataactttgtactgtaac

SEQ ID NO: 826885 - DNA, 33 bp, Homo sapien
agtttttgtgcatctacacatagaataggtaca

SEQ ID NO: 826886 - DNA, 33 bp, Homo sapien
agtttttgtgcatctagacatagaataggtaca

SEQ ID NO: 826887 - DNA, 33 bp, Homo sapien
acatagcaatggttgcaaggagttaatgaggta

SEQ ID NO: 826888 - DNA, 33 bp, Homo sapien
acatagcaatggttgcgaggagttaatgaggta

SEQ ID NO: 826889 - DNA, 33 bp, Homo sapien
tctgtcatgaaaatggaacttttttttcaaaag

SEQ ID NO: 826890 - DNA, 33 bp, Homo sapien
tctgtcatgaaaatgggacttttttttcaaaag

SEQ ID NO: 826891 - DNA, 33 bp, Homo sapien
tttgcctttatttgacagcctgattactttaag

SEQ ID NO: 826892 - DNA, 33 bp, Homo sapien
tttgcctttatttgacggcctgattactttaag

SEQ ID NO: 826893 - DNA, 33 bp, Homo sapien
caacatttctaaagacagaaatagcgaaaagag

SEQ ID NO: 826894 - DNA, 33 bp, Homo sapien
caacatttctaaagacggaaatagcgaaaagag

SEQ ID NO: 826895 - DNA, 33 bp, Homo sapien
gccagagggttagaagaagaattatgtgtcttc

SEQ ID NO: 826896 - DNA, 33 bp, Homo sapien
gccagagggttagaaggagaattatgtgtcttc

SEQ ID NO: 826897 - DNA, 33 bp, Homo sapien
ggacagacgctaaggcaattgtgtggaacagag

SEQ ID NO: 826898 - DNA, 33 bp, Homo sapien
ggacagacgctaaggctattgtgtggaacagag

SEQ ID NO: 826899 - DNA, 33 bp, Homo sapien
ccctaagaaatttgaacggtacgcaaaatccaa

SEQ ID NO: 826900 - DNA, 33 bp, Homo sapien
ccctaagaaatttgaagggtacgcaaaatccaa

SEQ ID NO: 826901 - DNA, 33 bp, Homo sapien
ttaggcagtgaaacaacaagtggtttttttgtt

SEQ ID NO: 826902 - DNA, 33 bp, Homo sapien
ttaggcagtgaaacaataagtggtttttttgtt

SEQ ID NO: 826903 - DNA, 33 bp, Homo sapien
actccttgcatttgtacagaaatggaatcggtt

SEQ ID NO: 826904 - DNA, 33 bp, Homo sapien
actccttgcatttgtatagaaatggaatcggtt

SEQ ID NO: 826905 - DNA, 33 bp, Homo sapien
cagtcttataggattacctggaggatcatgtga

SEQ ID NO: 826906 - DNA, 33 bp, Homo sapien
cagtcttataggattatctggaggatcatgtga

SEQ ID NO: 826907 - DNA, 33 bp, Homo sapien
ttcaggtgcaaaggaaatgtgggtgctccatga

SEQ ID NO: 826908 - DNA, 33 bp, Homo sapien
ttcaggtgcaaaggaactgtgggtgctccatga

SEQ ID NO: 826909 - DNA, 33 bp, Homo sapien
agcaatatttgagctacggccttttttccctct

SEQ ID NO: 826910 - DNA, 33 bp, Homo sapien
agcaatatttgagctatggccttttttccctct

SEQ ID NO: 826911 - DNA, 33 bp, Homo sapien
ttcatattttaaagtgcacagatgcctgatttc

SEQ ID NO: 826912 - DNA, 33 bp, Homo sapien
ttcatattttaaagtggacagatgcctgatttc

SEQ ID NO: 826913 - DNA, 33 bp, Homo sapien
catggaccagattgtacgtcggagaagagcagg

SEQ ID NO: 826914 - DNA, 33 bp, Homo sapien
catggaccagattgtatgtcggagaagagcagg

SEQ ID NO: 826915 - DNA, 33 bp, Homo sapien
attctgcttgaaagaaatgcaaagaaggtcttt

SEQ ID NO: 826916 - DNA, 33 bp, Homo sapien
attctgcttgaaagaagtgcaaagaaggtcttt

SEQ ID NO: 826917 - DNA, 33 bp, Homo sapien
ctgaccgtgccgtaagaacctttggaagcttgg

SEQ ID NO: 826918 - DNA, 33 bp, Homo sapien
ctgaccgtgccgtaaggacctttggaagcttgg

SEQ ID NO: 826919 - DNA, 33 bp, Homo sapien
ggaaggctgtgggaaaccacatttgagaaacac

SEQ ID NO: 826920 - DNA, 33 bp, Homo sapien
ggaaggctgtgggaaatcacatttgagaaacac

SEQ ID NO: 826921 - DNA, 33 bp, Homo sapien
tttcttactaagcctcaaacttttaaatgtata

SEQ ID NO: 826922 - DNA, 33 bp, Homo sapien
tttcttactaagcctcgaacttttaaatgtata

SEQ ID NO: 826923 - DNA, 33 bp, Homo sapien; identical to SEQ ID NO: 826921

SEQ ID NO: 826924 - DNA, 33 bp, Homo sapien; identical to SEQ ID NO: 826922

SEQ ID NO: 826925 - DNA, 33 bp, Homo sapien
ataaaaaccagaataacaatttgtctcctattt

SEQ ID NO: 826926 - DNA, 33 bp, Homo sapien
ataaaaaccagaataataatttgtctcctattt

SEQ ID NO: 826927 - DNA, 33 bp, Homo sapien
ttacctataaaagataccacttccaacatttga

SEQ ID NO: 826928 - DNA, 33 bp, Homo sapien
ttacctataaaagatagcacttccaacatttga

SEQ ID NO: 826929 - DNA, 33 bp, Homo sapien
gaagtctcatgaagaaaaagccagatcataaag

SEQ ID NO: 826930 - DNA, 33 bp, Homo sapien
gaagtctcatgaagaagaagccagatcataaag

SEQ ID NO: 826931 - DNA, 33 bp, Homo sapien
tgttttgtatgagataaagtaaatcagttttgt

SEQ ID NO: 826932 - DNA, 33 bp, Homo sapien
tgttttgtatgagatagagtaaatcagttttgt

SEQ ID NO: 826933 - DNA, 33 bp, Homo sapien
attcatatcctgatcactaatattttccacacc

SEQ ID NO: 826934 - DNA, 33 bp, Homo sapien
attcatatcctgatcattaatattttccacacc

SEQ ID NO: 826935 - DNA, 33 bp, Homo sapien
cagctttgaggatgacaagaaacagaatttaag

SEQ ID NO: 826936 - DNA, 33 bp, Homo sapien
cagctttgaggatgacgagaaacagaatttaag

SEQ ID NO: 826937 - DNA, 33 bp, Homo sapien
ttaatttcggtgagagaaacacccctgatgcag

SEQ ID NO: 826938 - DNA, 33 bp, Homo sapien
ttaatttcggtgagaggaacacccctgatgcag

SEQ ID NO: 826939 - DNA, 33 bp, Homo sapien
atagaccaaattctaacgtagcccacaagattg

SEQ ID NO: 826940 - DNA, 33 bp, Homo sapien
atagaccaaattctaatgtagcccacaagattg

SEQ ID NO: 826941 - DNA, 33 bp, Homo sapien
tttttgtaagcttcacagggctttcgcaaatga

SEQ ID NO: 826942 - DNA, 33 bp, Homo sapien
tttttgtaagcttcacggggctttcgcaaatga

SEQ ID NO: 826943 - DNA, 33 bp, Homo sapien
tatctgaattgagaaaaatatggcccaactaca

SEQ ID NO: 826944 - DNA, 33 bp, Homo sapien
tatctgaattgagaaacatatggcccaactaca

SEQ ID NO: 826945 - DNA, 33 bp, Homo sapien
aatggctacaagaaggcattagctattcatctg

SEQ ID NO: 826946 - DNA, 33 bp, Homo sapien
aatggctacaagaaggtattagctattcatctg

SEQ ID NO: 826947 - DNA, 33 bp, Homo sapien
tcaaggattatatagacgaggaaacattagaga

SEQ ID NO: 826948 - DNA, 33 bp, Homo sapien
tcaaggattatatagatgaggaaacattagaga

SEQ ID NO: 826949 - DNA, 33 bp, Homo sapien
ctctcatcaagttccaagatggaccgagacagg

SEQ ID NO: 826950 - DNA, 33 bp, Homo sapien
ctctcatcaagttccaggatggaccgagacagg

SEQ ID NO: 826951 - DNA, 33 bp, Homo sapien
tattttgatgtgggtaaaaatacatgaaagatt

SEQ ID NO: 826952 - DNA, 33 bp, Homo sapien
tattttgatgtgggtagaaatacatgaaagatt

SEQ ID NO: 826953 - DNA, 33 bp, Homo sapien
ttggatttggatgttaaaatctaaaccgcatgg

SEQ ID NO: 826954 - DNA, 33 bp, Homo sapien
ttggatttggatgttagaatctaaaccgcatgg

SEQ ID NO: 826955 - DNA, 33 bp, Homo sapien
gaaaatataatgataacgtaactgtggaacatg

SEQ ID NO: 826956 - DNA, 33 bp, Homo sapien
gaaaatataatgataatgtaactgtggaacatg

SEQ ID NO: 826957 - DNA, 33 bp, Homo sapien
ttccttgctattctacacagcaaatcaatggcc

SEQ ID NO: 826958 - DNA, 33 bp, Homo sapien
ttccttgctattctacgcagcaaatcaatggcc

SEQ ID NO: 826959 - DNA, 33 bp, Homo sapien
actgacgatattatacacagtcatggcagtgac

SEQ ID NO: 826960 - DNA, 33 bp, Homo sapien
actgacgatattatacgcagtcatggcagtgac

SEQ ID NO: 826961 - DNA, 33 bp, Homo sapien
atggacacacagctaagaaaccacagagccaaa

SEQ ID NO: 826962 - DNA, 33 bp, Homo sapien
atggacacacagctaataaaccacagagccaaa

SEQ ID NO: 826963 - DNA, 33 bp, Homo sapien
cattttttgcaacatacagtatgacacagtctg

SEQ ID NO: 826964 - DNA, 33 bp, Homo sapien
cattttttgcaacatatagtatgacacagtctg

SEQ ID NO: 826965 - DNA, 33 bp, Homo sapien
tccaaatactgtatgactcaaaggctatctcga

SEQ ID NO: 826966 - DNA, 33 bp, Homo sapien
tccaaatactgtatgattcaaaggctatctcga

SEQ ID NO: 826967 - DNA, 33 bp, Homo sapien
ctatgagcccactagaaaagcaatgatgactct

SEQ ID NO: 826968 - DNA, 33 bp, Homo sapien
ctatgagcccactagagaagcaatgatgactct

SEQ ID NO: 826969 - DNA, 33 bp, Homo sapien
atctaacacatggaagcaaaatactttagttaa

SEQ ID NO: 826970 - DNA, 33 bp, Homo sapien
atctaacacatggaaggaaaatactttagttaa

SEQ ID NO: 826971 - DNA, 33 bp, Homo sapien
agcctgttagccctcacagagtcagtcttgggg

SEQ ID NO: 826972 - DNA, 33 bp, Homo sapien
agcctgttagccctcatagagtcagtcttgggg

SEQ ID NO: 826973 - DNA, 33 bp, Homo sapien
acgaatttccacttatcactcaagaataaccat

SEQ ID NO: 826974 - DNA, 33 bp, Homo sapien
acgaatttccacttattactcaagaataaccat

SEQ ID NO: 826975 - DNA, 33 bp, Homo sapien
gctgtagataagattgaaagcttcaggctgcct

SEQ ID NO: 826976 - DNA, 33 bp, Homo sapien
gctgtagataagattgcaagcttcaggctgcct

SEQ ID NO: 826977 - DNA, 33 bp, Homo sapien
ctgagtcctacaacaccgctggaaggagaagcc

SEQ ID NO: 826978 - DNA, 33 bp, Homo sapien
ctgagtcctacaacactgctggaaggagaagcc

SEQ ID NO: 826979 - DNA, 33 bp, Homo sapien
tttgaaaggccgctaccaagaagataaaccctc

SEQ ID NO: 826980 - DNA, 33 bp, Homo sapien
tttgaaaggccgctactaagaagataaaccctc

SEQ ID NO: 826981 - DNA, 33 bp, Homo sapien
ctgactgaatgttcaacgctaatcaaattcatc

SEQ ID NO: 826982 - DNA, 33 bp, Homo sapien
ctgactgaatgttcaatgctaatcaaattcatc

SEQ ID NO: 826983 - DNA, 33 bp, Homo sapien
agttacacatgaatataacactgacacattggg

SEQ ID NO: 826984 - DNA, 33 bp, Homo sapien
agttacacatgaatatgacactgacacattggg

SEQ ID NO: 826985 - DNA, 33 bp, Homo sapien
acagaggtaatattgccagggttgcgtggaaca

SEQ ID NO: 826986 - DNA, 33 bp, Homo sapien
acagaggtaatattgctagggttgcgtggaaca

SEQ ID NO: 826987 - DNA, 33 bp, Homo sapien
gattaatatcatagtgcagctagtcggtggcta

SEQ ID NO: 826988 - DNA, 33 bp, Homo sapien
gattaatatcatagtgtagctagtcggtggcta

SEQ ID NO: 826989 - DNA, 33 bp, Homo sapien
aactcactacttttaactgtggctcattaaaga

SEQ ID NO: 826990 - DNA, 33 bp, Homo sapien
aactcactacttttaattgtggctcattaaaga

SEQ ID NO: 826991 - DNA, 33 bp, Homo sapien
caaaagacgtgtctacaactccagggaagtgaa

SEQ ID NO: 826992 - DNA, 33 bp, Homo sapien
caaaagacgtgtctaccactccagggaagtgaa

SEQ ID NO: 826993 - DNA, 33 bp, Homo sapien
tacacaaattttgtcaatcataactcaataatg

SEQ ID NO: 826994 - DNA, 33 bp, Homo sapien
tacacaaattttgtcagtcataactcaataatg

SEQ ID NO: 826995 - DNA, 33 bp, Homo sapien
tccctcttcagttgccaagctttttcaggatgt

SEQ ID NO: 826996 - DNA, 33 bp, Homo sapien
tccctcttcagttgcccagctttttcaggatgt

SEQ ID NO: 826997 - DNA, 33 bp, Homo sapien
agcaacatcaagccataagggttgcattccctc

SEQ ID NO: 826998 - DNA, 33 bp, Homo sapien
agcaacatcaagccatgagggttgcattccctc

SEQ ID NO: 826999 - DNA, 33 bp, Homo sapien
taaataaatgataaaaacattccagagcataca

SEQ ID NO: 827000 - DNA, 33 bp, Homo sapien
taaataaatgataaaaccattccagagcataca

SEQ ID NO: 827001 - DNA, 33 bp, Homo sapien
aatgttctctctcttacgctttatcttttttgt

SEQ ID NO: 827002 - DNA, 33 bp, Homo sapien
aatgttctctctcttatgctttatcttttttgt

SEQ ID NO: 827003 - DNA, 33 bp, Homo sapien
acatcatacttgtaaccctaaactccataaatc

SEQ ID NO: 827004 - DNA, 33 bp, Homo sapien
acatcatacttgtaactctaaactccataaatc

SEQ ID NO: 827005 - DNA, 33 bp, Homo sapien
catatcctctttcttacaacttggtcacttgat

SEQ ID NO: 827006 - DNA, 33 bp, Homo sapien
catatcctctttcttataacttggtcacttgat

SEQ ID NO: 827007 - DNA, 33 bp, Homo sapien
cagacaaaccaagtaactgaagacatgtatttt

SEQ ID NO: 827008 - DNA, 33 bp, Homo sapien
cagacaaaccaagtaattgaagacatgtatttt

SEQ ID NO: 827009 - DNA, 33 bp, Homo sapien
acccacagaagtgaccagacccaggagtctctc

SEQ ID NO: 827010 - DNA, 33 bp, Homo sapien
acccacagaagtgaccggacccaggagtctctc

SEQ ID NO: 827011 - DNA, 33 bp, Homo sapien
ttgatagcacagaggaagatcgcagagagtaat

SEQ ID NO: 827012 - DNA, 33 bp, Homo sapien
ttgatagcacagaggaggatcgcagagagtaat

SEQ ID NO: 827013 - DNA, 33 bp, Homo sapien
tctaaacaagtgaaaaacaatagctgaaaaatt

SEQ ID NO: 827014 - DNA, 33 bp, Homo sapien
tctaaacaagtgaaaaccaatagctgaaaaatt

SEQ ID NO: 827015 - DNA, 33 bp, Homo sapien
tctccagatccttaatatcatcacatctgtgaa

SEQ ID NO: 827016 - DNA, 33 bp, Homo sapien
tctccagatccttaatgtcatcacatctgtgaa

SEQ ID NO: 827017 - DNA, 33 bp, Homo sapien
tgggtccaatgtaatcacaaggaagtttaaaag

SEQ ID NO: 827018 - DNA, 33 bp, Homo sapien
tgggtccaatgtaatcgcaaggaagtttaaaag

SEQ ID NO: 827019 - DNA, 33 bp, Homo sapien
aaaagaggtagcagcactgcatgaaaataaact

SEQ ID NO: 827020 - DNA, 33 bp, Homo sapien
aaaagaggtagcagcattgcatgaaaataaact

SEQ ID NO: 827021 - DNA, 33 bp, Homo sapien
ctttgttattttgaaaatgaaagtctgagcaga

SEQ ID NO: 827022 - DNA, 33 bp, Homo sapien
ctttgttattttgaaattgaaagtctgagcaga

SEQ ID NO: 827023 - DNA, 33 bp, Homo sapien
aagtaatacttgctggaaaacaccaatatttta

SEQ ID NO: 827024 - DNA, 33 bp, Homo sapien
aagtaatacttgctgggaaacaccaatatttta

SEQ ID NO: 827025 - DNA, 33 bp, Homo sapien
gtttgtaactttgaaccccattctagtacaaac

SEQ ID NO: 827026 - DNA, 33 bp, Homo sapien
gtttgtaactttgaactccattctagtacaaac

SEQ ID NO: 827027 - DNA, 33 bp, Homo sapien
cagtgtcattgggcaaaagccttcatttttaaa

SEQ ID NO: 827028 - DNA, 33 bp, Homo sapien
cagtgtcattgggcaacagccttcatttttaaa

SEQ ID NO: 827029 - DNA, 33 bp, Homo sapien
tccatctagtgtttacaatgacactataagcct

SEQ ID NO: 827030 - DNA, 33 bp, Homo sapien
tccatctagtgtttacgatgacactataagcct

SEQ ID NO: 827031 - DNA, 33 bp, Homo sapien
acctctatgtggtagaaccttgtggaaattttc

SEQ ID NO: 827032 - DNA, 33 bp, Homo sapien
acctctatgtggtagacccttgtggaaattttc

SEQ ID NO: 827033 - DNA, 33 bp, Homo sapien
ttagattttattggtaacatccagacaatcttg

SEQ ID NO: 827034 - DNA, 33 bp, Homo sapien
ttagattttattggtagcatccagacaatcttg

SEQ ID NO: 827035 - DNA, 33 bp, Homo sapien
catatacaggctgaagcacaatgtcaagaaaac

SEQ ID NO: 827036 - DNA, 33 bp, Homo sapien
catatacaggctgaagtacaatgtcaagaaaac

SEQ ID NO: 827037 - DNA, 33 bp, Homo sapien
ctgaggaagttggtgaagtcttacgttaataaa

SEQ ID NO: 827038 - DNA, 33 bp, Homo sapien
ctgaggaagttggtgaggtcttacgttaataaa

SEQ ID NO: 827039 - DNA, 33 bp, Homo sapien
ggttttagcacctttaaactctggaatgaaccg

SEQ ID NO: 827040 - DNA, 33 bp, Homo sapien
ggttttagcacctttagactctggaatgaaccg

SEQ ID NO: 827041 - DNA, 33 bp, Homo sapien
ttgttttaaaccagaacgtcacaacacgtatgc

SEQ ID NO: 827042 - DNA, 33 bp, Homo sapien
ttgttttaaaccagaatgtcacaacacgtatgc

SEQ ID NO: 827043 - DNA, 33 bp, Homo sapien
aaatcttgaaaacagagagcgtgagtcctctct

SEQ ID NO: 827044 - DNA, 33 bp, Homo sapien
aaatcttgaaaacagatagcgtgagtcctctct

SEQ ID NO: 827045 - DNA, 33 bp, Homo sapien
ctgggcaacagaatgacgtgtcgcaaaacaaac

SEQ ID NO: 827046 - DNA, 33 bp, Homo sapien
ctgggcaacagaatgatgtgtcgcaaaacaaac

SEQ ID NO: 827047 - DNA, 33 bp, Homo sapien
cccgcctttgtagaacagctacccaaaaagaca

SEQ ID NO: 827048 - DNA, 33 bp, Homo sapien
cccgcctttgtagaacggctacccaaaaagaca

SEQ ID NO: 827049 - DNA, 33 bp, Homo sapien
cctgcacattcataccaacacaaagcatggtct

SEQ ID NO: 827050 - DNA, 33 bp, Homo sapien
cctgcacattcataccgacacaaagcatggtct

SEQ ID NO: 827051 - DNA, 33 bp, Homo sapien
aggaaatctagttggaaaagtaagttggagcca

SEQ ID NO: 827052 - DNA, 33 bp, Homo sapien
aggaaatctagttggagaagtaagttggagcca

SEQ ID NO: 827053 - DNA, 33 bp, Homo sapien
taccattccccaaccaagaacttgacaacgggg

SEQ ID NO: 827054 - DNA, 33 bp, Homo sapien
taccattccccaaccaggaacttgacaacgggg

SEQ ID NO: 827055 - DNA, 33 bp, Homo sapien
ggctgctatgagaacccattgaggtaacccatc

SEQ ID NO: 827056 - DNA, 33 bp, Homo sapien
ggctgctatgagaacctattgaggtaacccatc

SEQ ID NO: 827057 - DNA, 33 bp, Homo sapien
gccttagcaaattagacagatgcactgacttac

SEQ ID NO: 827058 - DNA, 33 bp, Homo sapien
gccttagcaaattagatagatgcactgacttac

SEQ ID NO: 827059 - DNA, 33 bp, Homo sapien
gtaacaccaagcagtaaaacgatgagattgaag

SEQ ID NO: 827060 - DNA, 33 bp, Homo sapien
gtaacaccaagcagtataacgatgagattgaag

SEQ ID NO: 827061 - DNA, 33 bp, Homo sapien
tcagcaatcaagttccacttttttaagagccac

SEQ ID NO: 827062 - DNA, 33 bp, Homo sapien
tcagcaatcaagttccgcttttttaagagccac

SEQ ID NO: 827063 - DNA, 33 bp, Homo sapien
ttccaggctctgtgtccagttcacctctggagc

SEQ ID NO: 827064 - DNA, 33 bp, Homo sapien
ttccaggctctgtgtctagttcacctctggagc

SEQ ID NO: 827065 - DNA, 33 bp, Homo sapien
ccagggcttcagtttccaatgggaggcatttcc

SEQ ID NO: 827066 - DNA, 33 bp, Homo sapien
ccagggcttcagtttctaatgggaggcatttcc

SEQ ID NO: 827067 - DNA, 33 bp, Homo sapien
catctcctctgggttgcaaatgacttcatctcg

SEQ ID NO: 827068 - DNA, 33 bp, Homo sapien
catctcctctgggttgtaaatgacttcatctcg

SEQ ID NO: 827069 - DNA, 33 bp, Homo sapien
gagatggatggtcacccggccggccaactcaaa

SEQ ID NO: 827070 - DNA, 33 bp, Homo sapien
gagatggatggtcacctggccggccaactcaaa

SEQ ID NO: 827071 - DNA, 33 bp, Homo sapien
atgtctaaaggctggaacaaaaaacagagtatg

SEQ ID NO: 827072 - DNA, 33 bp, Homo sapien
atgtctaaaggctggagcaaaaaacagagtatg

SEQ ID NO: 827073 - DNA, 33 bp, Homo sapien
aaaaacagagtatggcacttgaaggaggaagtg

SEQ ID NO: 827074 - DNA, 33 bp, Homo sapien
aaaaacagagtatggcgcttgaaggaggaagtg

SEQ ID NO: 827075 - DNA, 33 bp, Homo sapien
aggtcctcaaaacctacggagccaggctaagga

SEQ ID NO: 827076 - DNA, 33 bp, Homo sapien
aggtcctcaaaacctatggagccaggctaagga

SEQ ID NO: 827077 - DNA, 33 bp, Homo sapien
agcagatttcaaatacgaacaaatgttcatttt

SEQ ID NO: 827078 - DNA, 33 bp, Homo sapien
agcagatttcaaatactaacaaatgttcatttt

SEQ ID NO: 827079 - DNA, 33 bp, Homo sapien
gagctacaacaggaaacgaatcagggtagcatc

SEQ ID NO: 827080 - DNA, 33 bp, Homo sapien
gagctacaacaggaaaggaatcagggtagcatc

SEQ ID NO: 827081 - DNA, 33 bp, Homo sapien
ccctgactagggcctaaagagatcagtcaggaa

SEQ ID NO: 827082 - DNA, 33 bp, Homo sapien
ccctgactagggcctagagagatcagtcaggaa

SEQ ID NO: 827083 - DNA, 33 bp, Homo sapien
aatactaaaatactgacgaagtagcgcaaagtc

SEQ ID NO: 827084 - DNA, 33 bp, Homo sapien
aatactaaaatactgaggaagtagcgcaaagtc

SEQ ID NO: 827085 - DNA, 33 bp, Homo sapien
aatggaatagaagaaacgaaaaaatgcagaaaa

SEQ ID NO: 827086 - DNA, 33 bp, Homo sapien
aatggaatagaagaaaggaaaaaatgcagaaaa

SEQ ID NO: 827087 - DNA, 33 bp, Homo sapien
tagggctaaaaaaatacgttagcagatcgagtc

SEQ ID NO: 827088 - DNA, 33 bp, Homo sapien
tagggctaaaaaaatatgttagcagatcgagtc

SEQ ID NO: 827089 - DNA, 33 bp, Homo sapien
aacttcctgaaacaaacgagcttctcggttttt

SEQ ID NO: 827090 - DNA, 33 bp, Homo sapien
aacttcctgaaacaaatgagcttctcggttttt

SEQ ID NO: 827091 - DNA, 33 bp, Homo sapien
aaaattatacttgttacatatacacatggaatt

SEQ ID NO: 827092 - DNA, 33 bp, Homo sapien
aaaattatacttgttagatatacacatggaatt

SEQ ID NO: 827093 - DNA, 33 bp, Homo sapien
tcattactgctctactaaaaataattcacttaa

SEQ ID NO: 827094 - DNA, 33 bp, Homo sapien
tcattactgctctactgaaaataattcacttaa

SEQ ID NO: 827095 - DNA, 33 bp, Homo sapien
ttactaaccagtgctacacaaggatgagaacac

SEQ ID NO: 827096 - DNA, 33 bp, Homo sapien
ttactaaccagtgctatacaaggatgagaacac

SEQ ID NO: 827097 - DNA, 33 bp, Homo sapien
ctattttcttgtctacaaatactccactaatct

SEQ ID NO: 827098 - DNA, 33 bp, Homo sapien
ctattttcttgtctacgaatactccactaatct

SEQ ID NO: 827099 - DNA, 33 bp, Homo sapien
tgaaactgaacagttgcagattttaaaatgttg

SEQ ID NO: 827100 - DNA, 33 bp, Homo sapien
tgaaactgaacagttgtagattttaaaatgttg

SEQ ID NO: 827101 - DNA, 33 bp, Homo sapien
agtttcaaatacctacgggtaatagcactttgc

SEQ ID NO: 827102 - DNA, 33 bp, Homo sapien
agtttcaaatacctactggtaatagcactttgc

SEQ ID NO: 827103 - DNA, 33 bp, Homo sapien
atgcaacagtagttaaaagacatgaatctggac

SEQ ID NO: 827104 - DNA, 33 bp, Homo sapien
atgcaacagtagttaacagacatgaatctggac

SEQ ID NO: 827105 - DNA, 33 bp, Homo sapien
agaagaacaacatcaacgatctaacatttcacc

SEQ ID NO: 827106 - DNA, 33 bp, Homo sapien
agaagaacaacatcaatgatctaacatttcacc

SEQ ID NO: 827107 - DNA, 33 bp, Homo sapien
atacagacagatcccacgtactctttactcagt

SEQ ID NO: 827108 - DNA, 33 bp, Homo sapien
atacagacagatcccatgtactctttactcagt

SEQ ID NO: 827109 - DNA, 33 bp, Homo sapien
ggacttttgtgttctccacattatctggatgtc

SEQ ID NO: 827110 - DNA, 33 bp, Homo sapien
ggacttttgtgttctctacattatctggatgtc

SEQ ID NO: 827111 - DNA, 33 bp, Homo sapien
agctaggcagccctcaaggaatatataaaagca

SEQ ID NO: 827112 - DNA, 33 bp, Homo sapien
agctaggcagccctcagggaatatataaaagca

SEQ ID NO: 827113 - DNA, 33 bp, Homo sapien
tattgtgcatacagccagcaactgttgagtgtt

SEQ ID NO: 827114 - DNA, 33 bp, Homo sapien
tattgtgcatacagccggcaactgttgagtgtt

SEQ ID NO: 827115 - DNA, 33 bp, Homo sapien
ttccattttagattcaagtacaggagttaaagt

SEQ ID NO: 827116 - DNA, 33 bp, Homo sapien
ttccattttagattcacgtacaggagttaaagt

SEQ ID NO: 827117 - DNA, 33 bp, Homo sapien
gtcttgcctactgagcaaagggatgccttttaa

SEQ ID NO: 827118 - DNA, 33 bp, Homo sapien
gtcttgcctactgagctaagggatgccttttaa

SEQ ID NO: 827119 - DNA, 33 bp, Homo sapien
cactttaggaaatgttaaaagctaacaacacat

SEQ ID NO: 827120 - DNA, 33 bp, Homo sapien
cactttaggaaatgttgaaagctaacaacacat

SEQ ID NO: 827121 - DNA, 33 bp, Homo sapien
ttcacggtgcatataaaaagttttcccccaatg

SEQ ID NO: 827122 - DNA, 33 bp, Homo sapien
ttcacggtgcatataagaagttttcccccaatg

SEQ ID NO: 827123 - DNA, 33 bp, Homo sapien
attttccagccctgcacggtagcttacacataa

SEQ ID NO: 827124 - DNA, 33 bp, Homo sapien
attttccagccctgcatggtagcttacacataa

SEQ ID NO: 827125 - DNA, 33 bp, Homo sapien
tcaaaagcagaaaacaaagatggctcctctttt

SEQ ID NO: 827126 - DNA, 33 bp, Homo sapien
tcaaaagcagaaaacagagatggctcctctttt

SEQ ID NO: 827127 - DNA, 33 bp, Homo sapien
ttatcttttctcaccaactatcatcaaagaatt

SEQ ID NO: 827128 - DNA, 33 bp, Homo sapien
ttatcttttctcaccacctatcatcaaagaatt

SEQ ID NO: 827129 - DNA, 33 bp, Homo sapien
agcaggctcttcagtaaaaaggggcaaaccacg

SEQ ID NO: 827130 - DNA, 33 bp, Homo sapien
agcaggctcttcagtagaaaggggcaaaccacg

SEQ ID NO: 827131 - DNA, 33 bp, Homo sapien
cacccagaacaaactccatgccatattctgagt

SEQ ID NO: 827132 - DNA, 33 bp, Homo sapien
cacccagaacaaactctatgccatattctgagt

SEQ ID NO: 827133 - DNA, 33 bp, Homo sapien
ccaggttccaaacatccagtctccaacctgtgc

SEQ ID NO: 827134 - DNA, 33 bp, Homo sapien
ccaggttccaaacatctagtctccaacctgtgc

SEQ ID NO: 827135 - DNA, 33 bp, Homo sapien
tttcccctggcatgggaacttacactgccaaag

SEQ ID NO: 827136 - DNA, 33 bp, Homo sapien
tttcccctggcatgggcacttacactgccaaag

SEQ ID NO: 827137 - DNA, 33 bp, Homo sapien
tcaccaactcgccaccaagcgggtctccctttg

SEQ ID NO: 827138 - DNA, 33 bp, Homo sapien
tcaccaactcgccaccgagcgggtctccctttg

SEQ ID NO: 827139 - DNA, 33 bp, Homo sapien
ctgactggggactggacggaacactttgaagtg

SEQ ID NO: 827140 - DNA, 33 bp, Homo sapien
ctgactggggactggatggaacactttgaagtg

SEQ ID NO: 827141 - DNA, 33 bp, Homo sapien
ggtggtgtccagaccacagagcgtacgtgtagt

SEQ ID NO: 827142 - DNA, 33 bp, Homo sapien
ggtggtgtccagaccatagagcgtacgtgtagt

SEQ ID NO: 827143 - DNA, 33 bp, Homo sapien
atctgctgcagctttaaatgccagtacacgtaa

SEQ ID NO: 827144 - DNA, 33 bp, Homo sapien
atctgctgcagctttagatgccagtacacgtaa

SEQ ID NO: 827145 - DNA, 33 bp, Homo sapien
tatgggaaacatggataaaaattgcagcgctgg

SEQ ID NO: 827146 - DNA, 33 bp, Homo sapien
tatgggaaacatggatcaaaattgcagcgctgg

SEQ ID NO: 827147 - DNA, 33 bp, Homo sapien
cattaagatgaagagactccaatgtccctaagt

SEQ ID NO: 827148 - DNA, 33 bp, Homo sapien
cattaagatgaagagattccaatgtccctaagt

SEQ ID NO: 827149 - DNA, 33 bp, Homo sapien
cccagaagccggctaactggtaaaaattgagaa

SEQ ID NO: 827150 - DNA, 33 bp, Homo sapien
cccagaagccggctaagtggtaaaaattgagaa

SEQ ID NO: 827151 - DNA, 33 bp, Homo sapien
gtcctgactaggaagacgattttactttttctg

SEQ ID NO: 827152 - DNA, 33 bp, Homo sapien
gtcctgactaggaagatgattttactttttctg

SEQ ID NO: 827153 - DNA, 33 bp, Homo sapien
tgtcagagcggacgaccgggtttgaactgaaag

SEQ ID NO: 827154 - DNA, 33 bp, Homo sapien
tgtcagagcggacgactgggtttgaactgaaag

SEQ ID NO: 827155 - DNA, 33 bp, Homo sapien
atcagctgctgggataagtagggaaacagattc

SEQ ID NO: 827156 - DNA, 33 bp, Homo sapien
atcagctgctgggataggtagggaaacagattc

SEQ ID NO: 827157 - DNA, 33 bp, Homo sapien
gggttagctatgacgcagacgcaatgttataga

SEQ ID NO: 827158 - DNA, 33 bp, Homo sapien
gggttagctatgacgcggacgcaatgttataga

SEQ ID NO: 827159 - DNA, 33 bp, Homo sapien
aagctcttgccattcccaaaacagggtgcattt

SEQ ID NO: 827160 - DNA, 33 bp, Homo sapien
aagctcttgccattcctaaaacagggtgcattt

SEQ ID NO: 827161 - DNA, 33 bp, Homo sapien
cagcaaccaatcagaaagcagtgcctaggcgag

SEQ ID NO: 827162 - DNA, 33 bp, Homo sapien
cagcaaccaatcagaacgcagtgcctaggcgag

SEQ ID NO: 827163 - DNA, 33 bp, Homo sapien
ctccagaaggtgagaaatgtaccactggggata

SEQ ID NO: 827164 - DNA, 33 bp, Homo sapien
ctccagaaggtgagaagtgtaccactggggata

SEQ ID NO: 827165 - DNA, 33 bp, Homo sapien
cacagccaatgtgcagcccctctgtttacccag

SEQ ID NO: 827166 - DNA, 33 bp, Homo sapien
cacagccaatgtgcagtccctctgtttacccag

SEQ ID NO: 827167 - DNA, 33 bp, Homo sapien
tttcctctatcccaaaccgtggctggcgcacag

SEQ ID NO: 827168 - DNA, 33 bp, Homo sapien
tttcctctatcccaaatcgtggctggcgcacag

SEQ ID NO: 827169 - DNA, 33 bp, Homo sapien
ccttcagaatttcaacacctgggacatctcagt

SEQ ID NO: 827170 - DNA, 33 bp, Homo sapien
ccttcagaatttcaacccctgggacatctcagt

SEQ ID NO: 827171 - DNA, 33 bp, Homo sapien
ttccatttgtttaataaaatagcacaacacata

SEQ ID NO: 827172 - DNA, 33 bp, Homo sapien
ttccatttgtttaatacaatagcacaacacata

SEQ ID NO: 827173 - DNA, 33 bp, Homo sapien
tcccaggtctttcatccagaatgttgaggctat

SEQ ID NO: 827174 - DNA, 33 bp, Homo sapien
tcccaggtctttcatctagaatgttgaggctat

SEQ ID NO: 827175 - DNA, 33 bp, Homo sapien
aaatgaagtttaagagaagccactggtatatct

SEQ ID NO: 827176 - DNA, 33 bp, Homo sapien
aaatgaagtttaagagcagccactggtatatct

SEQ ID NO: 827177 - DNA, 33 bp, Homo sapien
caagtccaagtaaaagaagctgcagtgactaca

SEQ ID NO: 827178 - DNA, 33 bp, Homo sapien
caagtccaagtaaaaggagctgcagtgactaca

SEQ ID NO: 827179 - DNA, 33 bp, Homo sapien
aggaaaatgttggagcaattttaaatggtatgc

SEQ ID NO: 827180 - DNA, 33 bp, Homo sapien
aggaaaatgttggagctattttaaatggtatgc

SEQ ID NO: 827181 - DNA, 33 bp, Homo sapien
tgcacctattatttcaagtgtcgatcagctcag

SEQ ID NO: 827182 - DNA, 33 bp, Homo sapien
tgcacctattatttcaggtgtcgatcagctcag

SEQ ID NO: 827183 - DNA, 33 bp, Homo sapien
gaggtgtttatcagaaccttgaaagagctaaat

SEQ ID NO: 827184 - DNA, 33 bp, Homo sapien
gaggtgtttatcagaatcttgaaagagctaaat

SEQ ID NO: 827185 - DNA, 33 bp, Homo sapien
gatctaaaatccatccacttcactctatcacct

SEQ ID NO: 827186 - DNA, 33 bp, Homo sapien
gatctaaaatccatccgcttcactctatcacct

SEQ ID NO: 827187 - DNA, 33 bp, Homo sapien
tggggatgcttctttgaatgatcccagtccagg

SEQ ID NO: 827188 - DNA, 33 bp, Homo sapien
tggggatgcttctttgcatgatcccagtccagg

SEQ ID NO: 827189 - DNA, 33 bp, Homo sapien
acttgttcacgagttcccatatcccggtcagcc

SEQ ID NO: 827190 - DNA, 33 bp, Homo sapien
acttgttcacgagttcgcatatcccggtcagcc

SEQ ID NO: 827191 - DNA, 33 bp, Homo sapien
tctaaaattatttcccacttattctacgcataa

SEQ ID NO: 827192 - DNA, 33 bp, Homo sapien
tctaaaattatttcccgcttattctacgcataa

SEQ ID NO: 827193 - DNA, 33 bp, Homo sapien
tatctgtcactccttcgcttgtttatgaataaa

SEQ ID NO: 827194 - DNA, 33 bp, Homo sapien
tatctgtcactccttctcttgtttatgaataaa

SEQ ID NO: 827195 - DNA, 33 bp, Homo sapien
aaaactagaaagaccacggataaaagccacaaa

SEQ ID NO: 827196 - DNA, 33 bp, Homo sapien
aaaactagaaagaccatggataaaagccacaaa

SEQ ID NO: 827197 - DNA, 33 bp, Homo sapien
tctgcccttgcagatgcaaattgctcaggtctt

SEQ ID NO: 827198 - DNA, 33 bp, Homo sapien
tctgcccttgcagatgtaaattgctcaggtctt

SEQ ID NO: 827199 - DNA, 33 bp, Homo sapien
acagatctatgacatcacatttcagccactaaa

SEQ ID NO: 827200 - DNA, 33 bp, Homo sapien
acagatctatgacatcgcatttcagccactaaa

SEQ ID NO: 827201 - DNA, 33 bp, Homo sapien
attgttgtcttgcacaatctatttctatgggga

SEQ ID NO: 827202 - DNA, 33 bp, Homo sapien
attgttgtcttgcacagtctatttctatgggga

SEQ ID NO: 827203 - DNA, 33 bp, Homo sapien
tttatcagtggcattagacatactcacctactt

SEQ ID NO: 827204 - DNA, 33 bp, Homo sapien
tttatcagtggcattatacatactcacctactt

SEQ ID NO: 827205 - DNA, 33 bp, Homo sapien
tgttctaggatccaaaatagtgattctgtatta

SEQ ID NO: 827206 - DNA, 33 bp, Homo sapien
tgttctaggatccaaagtagtgattctgtatta

SEQ ID NO: 827207 - DNA, 33 bp, Homo sapien
gaaacagaattgtggaataaagatggaatactt

SEQ ID NO: 827208 - DNA, 33 bp, Homo sapien
gaaacagaattgtggagtaaagatggaatactt

SEQ ID NO: 827209 - DNA, 33 bp, Homo sapien
cttacaaaactaatcacactcataccatgcaat

SEQ ID NO: 827210 - DNA, 33 bp, Homo sapien
cttacaaaactaatcatactcataccatgcaat

SEQ ID NO: 827211 - DNA, 33 bp, Homo sapien
ctctgctatgcacacaccagatgttctttcatt

SEQ ID NO: 827212 - DNA, 33 bp, Homo sapien
ctctgctatgcacacagcagatgttctttcatt

SEQ ID NO: 827213 - DNA, 33 bp, Homo sapien
aaatcagagaagaacaaagggctttgcaaggca

SEQ ID NO: 827214 - DNA, 33 bp, Homo sapien
aaatcagagaagaacagagggctttgcaaggca

SEQ ID NO: 827215 - DNA, 33 bp, Homo sapien
caagattatggtggaaagttgaaatgcaggtga

SEQ ID NO: 827216 - DNA, 33 bp, Homo sapien
caagattatggtggaatgttgaaatgcaggtga

SEQ ID NO: 827217 - DNA, 33 bp, Homo sapien
gattgcttcttcccacaaaaggaaagattttcc

SEQ ID NO: 827218 - DNA, 33 bp, Homo sapien
gattgcttcttcccacgaaaggaaagattttcc

SEQ ID NO: 827219 - DNA, 33 bp, Homo sapien
gtattcaaatcacccaaagtatattttatggca

SEQ ID NO: 827220 - DNA, 33 bp, Homo sapien
gtattcaaatcacccagagtatattttatggca

SEQ ID NO: 827221 - DNA, 33 bp, Homo sapien
aattggaaaatgtgagcccgttaactttgtttt

SEQ ID NO: 827222 - DNA, 33 bp, Homo sapien
aattggaaaatgtgagtccgttaactttgtttt

SEQ ID NO: 827223 - DNA, 33 bp, Homo sapien
ggaggaggaagactagaattgcttgagattgca

SEQ ID NO: 827224 - DNA, 33 bp, Homo sapien
ggaggaggaagactagcattgcttgagattgca

SEQ ID NO: 827225 - DNA, 33 bp, Homo sapien
atttgttctagcactaagctagtttggcgaggg

SEQ ID NO: 827226 - DNA, 33 bp, Homo sapien
atttgttctagcactatgctagtttggcgaggg

SEQ ID NO: 827227 - DNA, 33 bp, Homo sapien
gcctgggacataccaaatgcttggtaaatgtca

SEQ ID NO: 827228 - DNA, 33 bp, Homo sapien
gcctgggacataccaagtgcttggtaaatgtca

SEQ ID NO: 827229 - DNA, 33 bp, Homo sapien
tgagttacgcaaaagggatgtgaaacataaatg

SEQ ID NO: 827230 - DNA, 33 bp, Homo sapien
tgagttacgcaaaaggtatgtgaaacataaatg

SEQ ID NO: 827231 - DNA, 33 bp, Homo sapien
caatttcactggagtaccagcaagggtaaggaa

SEQ ID NO: 827232 - DNA, 33 bp, Homo sapien
caatttcactggagtatcagcaagggtaaggaa

SEQ ID NO: 827233 - DNA, 33 bp, Homo sapien
atggctggagagagttaaacaacagaagaaagg

SEQ ID NO: 827234 - DNA, 33 bp, Homo sapien
atggctggagagagttgaacaacagaagaaagg

SEQ ID NO: 827235 - DNA, 33 bp, Homo sapien
cttagaatggcaaaaacgtagaaagagttcaag

SEQ ID NO: 827236 - DNA, 33 bp, Homo sapien
cttagaatggcaaaaatgtagaaagagttcaag

SEQ ID NO: 827237 - DNA, 33 bp, Homo sapien
cgggactagacggatgcataaatatcaaaatat

SEQ ID NO: 827238 - DNA, 33 bp, Homo sapien
cgggactagacggatggataaatatcaaaatat

SEQ ID NO: 827239 - DNA, 33 bp, Homo sapien
ggtgtgaccaccttcgcaatctctttaaacacc

SEQ ID NO: 827240 - DNA, 33 bp, Homo sapien
ggtgtgaccaccttcgtaatctctttaaacacc

SEQ ID NO: 827241 - DNA, 33 bp, Homo sapien
gtaactgtgtccatgaagaaggacagatggacg

SEQ ID NO: 827242 - DNA, 33 bp, Homo sapien
gtaactgtgtccatgatgaaggacagatggacg

SEQ ID NO: 827243 - DNA, 33 bp, Homo sapien
ggtaactccagctaaaccaatatcagttcattg

SEQ ID NO: 827244 - DNA, 33 bp, Homo sapien
ggtaactccagctaaatcaatatcagttcattg

SEQ ID NO: 827245 - DNA, 33 bp, Homo sapien
ttcctgtcgcattcaaaatagaatcaatctcct

SEQ ID NO: 827246 - DNA, 33 bp, Homo sapien
ttcctgtcgcattcaacatagaatcaatctcct

SEQ ID NO: 827247 - DNA, 33 bp, Homo sapien
cagcctgtgcagcccacacaatcatccttaagc

SEQ ID NO: 827248 - DNA, 33 bp, Homo sapien
cagcctgtgcagcccatacaatcatccttaagc

SEQ ID NO: 827249 - DNA, 33 bp, Homo sapien
taaatttctcctttgaccacttaaatgtaaata

SEQ ID NO: 827250 - DNA, 33 bp, Homo sapien
taaatttctcctttgatcacttaaatgtaaata

SEQ ID NO: 827251 - DNA, 33 bp, Homo sapien
caacttgctgaatcaagtgggccctttgaattt

SEQ ID NO: 827252 - DNA, 33 bp, Homo sapien
caacttgctgaatcaattgggccctttgaattt

SEQ ID NO: 827253 - DNA, 33 bp, Homo sapien
ctactgaccctgcttgcatgagaaatgagggga

SEQ ID NO: 827254 - DNA, 33 bp, Homo sapien
ctactgaccctgcttgtatgagaaatgagggga

SEQ ID NO: 827255 - DNA, 33 bp, Homo sapien
attgtttactgttcagcagttgtgtaggggtgg

SEQ ID NO: 827256 - DNA, 33 bp, Homo sapien
attgtttactgttcaggagttgtgtaggggtgg

SEQ ID NO: 827257 - DNA, 33 bp, Homo sapien
tggatccactgggaagacagaagtgatactaga

SEQ ID NO: 827258 - DNA, 33 bp, Homo sapien
tggatccactgggaaggcagaagtgatactaga

SEQ ID NO: 827259 - DNA, 33 bp, Homo sapien
ttcatgcaaacaagaactggttcttcctcacaa

SEQ ID NO: 827260 - DNA, 33 bp, Homo sapien
ttcatgcaaacaagaagtggttcttcctcacaa

SEQ ID NO: 827261 - DNA, 33 bp, Homo sapien
acagaaatcacctcaaaaataaatgaaaaaagc

SEQ ID NO: 827262 - DNA, 33 bp, Homo sapien
acagaaatcacctcaagaataaatgaaaaaagc

SEQ ID NO: 827263 - DNA, 33 bp, Homo sapien
gtattcacttttgaacaggcattctccttgagc

SEQ ID NO: 827264 - DNA, 33 bp, Homo sapien
gtattcacttttgaactggcattctccttgagc

SEQ ID NO: 827265 - DNA, 33 bp, Homo sapien
tgccacaggttgaagaacacaaagctgtgccta

SEQ ID NO: 827266 - DNA, 33 bp, Homo sapien
tgccacaggttgaagagcacaaagctgtgccta

SEQ ID NO: 827267 - DNA, 33 bp, Homo sapien
aagcacggaaattttacgcttattgataagcct

SEQ ID NO: 827268 - DNA, 33 bp, Homo sapien
aagcacggaaattttatgcttattgataagcct

SEQ ID NO: 827269 - DNA, 33 bp, Homo sapien
actaatacggtgaccacgtttatgtacccattg

SEQ ID NO: 827270 - DNA, 33 bp, Homo sapien
actaatacggtgaccatgtttatgtacccattg

SEQ ID NO: 827271 - DNA, 33 bp, Homo sapien
atatcttttggggagagagttggccttttctgc

SEQ ID NO: 827272 - DNA, 33 bp, Homo sapien
atatcttttggggagatagttggccttttctgc

SEQ ID NO: 827273 - DNA, 33 bp, Homo sapien
atattttaggctctccaaggtctttcgggttct

SEQ ID NO: 827274 - DNA, 33 bp, Homo sapien
atattttaggctctccgaggtctttcgggttct

SEQ ID NO: 827275 - DNA, 33 bp, Homo sapien
tctctgtctttcaaaactctgatttgaggcatg

SEQ ID NO: 827276 - DNA, 33 bp, Homo sapien
tctctgtctttcaaaattctgatttgaggcatg

SEQ ID NO: 827277 - DNA, 33 bp, Homo sapien
gttttgtggagtcagaacatgagttttgttttg

SEQ ID NO: 827278 - DNA, 33 bp, Homo sapien
gttttgtggagtcagatcatgagttttgttttg

SEQ ID NO: 827279 - DNA, 33 bp, Homo sapien
ccagaaggcatcttaaagagcacacaacacatc

SEQ ID NO: 827280 - DNA, 33 bp, Homo sapien
ccagaaggcatcttaaggagcacacaacacatc

SEQ ID NO: 827281 - DNA, 33 bp, Homo sapien
aagccataaaaattgccactggctaccttgatt

SEQ ID NO: 827282 - DNA, 33 bp, Homo sapien
aagccataaaaattgctactggctaccttgatt

SEQ ID NO: 827283 - DNA, 33 bp, Homo sapien
gaacagacattttaccaaagaagacatttgaat

SEQ ID NO: 827284 - DNA, 33 bp, Homo sapien
gaacagacattttaccgaagaagacatttgaat

SEQ ID NO: 827285 - DNA, 33 bp, Homo sapien
agtactagattgttagcatccagttgcatcttt

SEQ ID NO: 827286 - DNA, 33 bp, Homo sapien
agtactagattgttagtatccagttgcatcttt

SEQ ID NO: 827287 - DNA, 33 bp, Homo sapien
aatgaggtttagtaaccattcatgtactttgat

SEQ ID NO: 827288 - DNA, 33 bp, Homo sapien
aatgaggtttagtaactattcatgtactttgat

SEQ ID NO: 827289 - DNA, 33 bp, Homo sapien
ggaaatactagaccaccccgcaggatatacaat

SEQ ID NO: 827290 - DNA, 33 bp, Homo sapien
ggaaatactagaccactccgcaggatatacaat

SEQ ID NO: 827291 - DNA, 33 bp, Homo sapien
atgtcaagtaaccaatcagttgaaactgtccat

SEQ ID NO: 827292 - DNA, 33 bp, Homo sapien
atgtcaagtaaccaattagttgaaactgtccat

SEQ ID NO: 827293 - DNA, 33 bp, Homo sapien
tatgagtgtatatgtaaaacagacagacagcac

SEQ ID NO: 827294 - DNA, 33 bp, Homo sapien
tatgagtgtatatgtataacagacagacagcac

SEQ ID NO: 827295 - DNA, 33 bp, Homo sapien
taccaaatcctacatagaccacgttttttccta

SEQ ID NO: 827296 - DNA, 33 bp, Homo sapien
taccaaatcctacatataccacgttttttccta

SEQ ID NO: 827297 - DNA, 33 bp, Homo sapien
tttggaagtttcttcaaaagttaagcacatatt

SEQ ID NO: 827298 - DNA, 33 bp, Homo sapien
tttggaagtttcttcagaagttaagcacatatt

SEQ ID NO: 827299 - DNA, 33 bp, Homo sapien
gtaaattcctcacaacaagttcacaaaacaagt

SEQ ID NO: 827300 - DNA, 33 bp, Homo sapien
gtaaattcctcacaacgagttcacaaaacaagt

SEQ ID NO: 827301 - DNA, 33 bp, Homo sapien
gtgttcttggaataaaattcaacccccacttct

SEQ ID NO: 827302 - DNA, 33 bp, Homo sapien
gtgttcttggaataaagttcaacccccacttct

SEQ ID NO: 827303 - DNA, 33 bp, Homo sapien
tgattttaaataaaaaagcaaagacaagcaaga

SEQ ID NO: 827304 - DNA, 33 bp, Homo sapien
tgattttaaataaaaaggcaaagacaagcaaga

SEQ ID NO: 827305 - DNA, 33 bp, Homo sapien
gtcttcctctccaaaaccaggatatgtctctcc

SEQ ID NO: 827306 - DNA, 33 bp, Homo sapien
gtcttcctctccaaaatcaggatatgtctctcc

SEQ ID NO: 827307 - DNA, 33 bp, Homo sapien
ttcatagttaaactacagccaacagatttgaaa

SEQ ID NO: 827308 - DNA, 33 bp, Homo sapien
ttcatagttaaactacggccaacagatttgaaa

SEQ ID NO: 827309 - DNA, 33 bp, Homo sapien
aattgcccctaaagtaccaactactgaaaacag

SEQ ID NO: 827310 - DNA, 33 bp, Homo sapien
aattgcccctaaagtatcaactactgaaaacag

SEQ ID NO: 827311 - DNA, 33 bp, Homo sapien
aaaaaaactgaaatacaaagtatagtacaagtc

SEQ ID NO: 827312 - DNA, 33 bp, Homo sapien
aaaaaaactgaaatacgaagtatagtacaagtc

SEQ ID NO: 827313 - DNA, 33 bp, Homo sapien
tacatctataaacagaagcagtccatggtgttt

SEQ ID NO: 827314 - DNA, 33 bp, Homo sapien
tacatctataaacagacgcagtccatggtgttt

SEQ ID NO: 827315 - DNA, 33 bp, Homo sapien
ctagcctcctttctgacacattacttgtagctg

SEQ ID NO: 827316 - DNA, 33 bp, Homo sapien
ctagcctcctttctgatacattacttgtagctg

SEQ ID NO: 827317 - DNA, 33 bp, Homo sapien
tttttaactggccaggcattcattattgtgtat

SEQ ID NO: 827318 - DNA, 33 bp, Homo sapien
tttttaactggccaggtattcattattgtgtat

SEQ ID NO: 827319 - DNA, 33 bp, Homo sapien
aaatcttagtgatggacaactgcagaggtttat

SEQ ID NO: 827320 - DNA, 33 bp, Homo sapien
aaatcttagtgatggataactgcagaggtttat

SEQ ID NO: 827321 - DNA, 33 bp, Homo sapien
tccatagcagttgcacaagtctgcgtctgtgta

SEQ ID NO: 827322 - DNA, 33 bp, Homo sapien
tccatagcagttgcacgagtctgcgtctgtgta

SEQ ID NO: 827323 - DNA, 33 bp, Homo sapien
tctattgtgtgtcagacatgatgcacatattgt

SEQ ID NO: 827324 - DNA, 33 bp, Homo sapien
tctattgtgtgtcagatatgatgcacatattgt

SEQ ID NO: 827325 - DNA, 33 bp, Homo sapien
tattgcagtagtctcgaatacgatgtccctagt

SEQ ID NO: 827326 - DNA, 33 bp, Homo sapien
tattgcagtagtctcggatacgatgtccctagt

SEQ ID NO: 827327 - DNA, 33 bp, Homo sapien
tctgctcaaaactccacggtgatctccgcttta

SEQ ID NO: 827328 - DNA, 33 bp, Homo sapien
tctgctcaaaactccatggtgatctccgcttta

SEQ ID NO: 827329 - DNA, 33 bp, Homo sapien
gaaaaacatcaggttaagcaaagttaaacaggt

SEQ ID NO: 827330 - DNA, 33 bp, Homo sapien
gaaaaacatcaggttacgcaaagttaaacaggt

SEQ ID NO: 827331 - DNA, 33 bp, Homo sapien
tgcaacacccatttaccggtggactcaagcccg

SEQ ID NO: 827332 - DNA, 33 bp, Homo sapien
tgcaacacccatttactggtggactcaagcccg

SEQ ID NO: 827333 - DNA, 33 bp, Homo sapien
actgtgagcagtgaaacctgtatctgtgcaacg

SEQ ID NO: 827334 - DNA, 33 bp, Homo sapien
actgtgagcagtgaaatctgtatctgtgcaacg

SEQ ID NO: 827335 - DNA, 33 bp, Homo sapien
cattaggagctgcaaaactatcttcagttttca

SEQ ID NO: 827336 - DNA, 33 bp, Homo sapien
cattaggagctgcaaacctatcttcagttttca

SEQ ID NO: 827337 - DNA, 33 bp, Homo sapien
tggaataatctgtctggaatgtcttcttacatt

SEQ ID NO: 827338 - DNA, 33 bp, Homo sapien
tggaataatctgtctgtaatgtcttcttacatt

SEQ ID NO: 827339 - DNA, 33 bp, Homo sapien
taaatgcagactattaccctgttctaaaaacag

SEQ ID NO: 827340 - DNA, 33 bp, Homo sapien
taaatgcagactattatcctgttctaaaaacag

SEQ ID NO: 827341 - DNA, 33 bp, Homo sapien
gctaagaaggtggggccatgtagtgtttgaagt

SEQ ID NO: 827342 - DNA, 33 bp, Homo sapien
gctaagaaggtggggctatgtagtgtttgaagt

SEQ ID NO: 827343 - DNA, 33 bp, Homo sapien
agagtagagtccagaaaaatataatgaacacat

SEQ ID NO: 827344 - DNA, 33 bp, Homo sapien
agagtagagtccagaagaatataatgaacacat

SEQ ID NO: 827345 - DNA, 33 bp, Homo sapien
ctatagtcaagtaaaaaggtgcacataaaacta

SEQ ID NO: 827346 - DNA, 33 bp, Homo sapien
ctatagtcaagtaaaacggtgcacataaaacta

SEQ ID NO: 827347 - DNA, 33 bp, Homo sapien
taaaagtgtgctataaatatgaatgtaaaattt

SEQ ID NO: 827348 - DNA, 33 bp, Homo sapien
taaaagtgtgctataagtatgaatgtaaaattt

SEQ ID NO: 827349 - DNA, 33 bp, Homo sapien
agtaaatgaactaatccataagtgtggttatgg

SEQ ID NO: 827350 - DNA, 33 bp, Homo sapien
agtaaatgaactaatctataagtgtggttatgg

SEQ ID NO: 827351 - DNA, 33 bp, Homo sapien; identical to SEQ ID NO: 827349

SEQ ID NO: 827352 - DNA, 33 bp, Homo sapien; identical to SEQ ID NO: 827350

SEQ ID NO: 827353 - DNA, 33 bp, Homo sapien
gcatgggggtacccaagtctgaagtcagtaaat

SEQ ID NO: 827354 - DNA, 33 bp, Homo sapien
gcatgggggtacccaattctgaagtcagtaaat

SEQ ID NO: 827355 - DNA, 33 bp, Homo sapien
cctgctgtgccagaaacgcttaagaaaaagcga

SEQ ID NO: 827356 - DNA, 33 bp, Homo sapien
cctgctgtgccagaaatgcttaagaaaaagcga

SEQ ID NO: 827357 - DNA, 33 bp, Homo sapien; identical to SEQ ID NO: 827355

SEQ ID NO: 827358 - DNA, 33 bp, Homo sapien; identical to SEQ ID NO: 827356

SEQ ID NO: 827359 - DNA, 33 bp, Homo sapien
gagtggtggtaaaatacacgtagcataaaatgg

SEQ ID NO: 827360 - DNA, 33 bp, Homo sapien
gagtggtggtaaaatagacgtagcataaaatgg

SEQ ID NO: 827361 - DNA, 33 bp, Homo sapien
atgacttggcgctcacaatctcacagtctaatg

SEQ ID NO: 827362 - DNA, 33 bp, Homo sapien
atgacttggcgctcacgatctcacagtctaatg

SEQ ID NO: 827363 - DNA, 33 bp, Homo sapien
agtcaagaagctaataagcgggaagagatgtgg

SEQ ID NO: 827364 - DNA, 33 bp, Homo sapien
agtcaagaagctaataggcgggaagagatgtgg

SEQ ID NO: 827365 - DNA, 33 bp, Homo sapien
gaaagatcagtcttcccaaacctcattctccca

SEQ ID NO: 827366 - DNA, 33 bp, Homo sapien
gaaagatcagtcttccgaaacctcattctccca

SEQ ID NO: 827367 - DNA, 33 bp, Homo sapien
gcaccggattgtgtctaacatttgtgagttctc

SEQ ID NO: 827368 - DNA, 33 bp, Homo sapien
gcaccggattgtgtctgacatttgtgagttctc

SEQ ID NO: 827369 - DNA, 33 bp, Homo sapien
cctgtctgctgttggaccatatcgattgtatct

SEQ ID NO: 827370 - DNA, 33 bp, Homo sapien
cctgtctgctgttggagcatatcgattgtatct

SEQ ID NO: 827371 - DNA, 33 bp, Homo sapien; identical to SEQ ID NO: 827369

SEQ ID NO: 827372 - DNA, 33 bp, Homo sapien; identical to SEQ ID NO: 827370

SEQ ID NO: 827373 - DNA, 33 bp, Homo sapien
tagtctcagtaacagacctacattagaaaactt

SEQ ID NO: 827374 - DNA, 33 bp, Homo sapien
tagtctcagtaacagagctacattagaaaactt

SEQ ID NO: 827375 - DNA, 33 bp, Homo sapien
gtgaaggagaggttcaaaacttggaggtatatg

SEQ ID NO: 827376 - DNA, 33 bp, Homo sapien
gtgaaggagaggttcagaacttggaggtatatg

SEQ ID NO: 827377 - DNA, 33 bp, Homo sapien
actgagattttctagacgcctaaattaactgcc

SEQ ID NO: 827378 - DNA, 33 bp, Homo sapien
actgagattttctagatgcctaaattaactgcc

SEQ ID NO: 827379 - DNA, 33 bp, Homo sapien
atttaagtggtatttacgtgtcctacactcata

SEQ ID NO: 827380 - DNA, 33 bp, Homo sapien
atttaagtggtatttatgtgtcctacactcata

SEQ ID NO: 827381 - DNA, 33 bp, Homo sapien
tgtcctacactcataaaaactacaggtagccaa

SEQ ID NO: 827382 - DNA, 33 bp, Homo sapien
tgtcctacactcataacaactacaggtagccaa

SEQ ID NO: 827383 - DNA, 33 bp, Homo sapien
aaaagtatggaattcaacaaatagctatgagca

SEQ ID NO: 827384 - DNA, 33 bp, Homo sapien
aaaagtatggaattcagcaaatagctatgagca

SEQ ID NO: 827385 - DNA, 33 bp, Homo sapien
ttatagacccagaatcagatgacacacctattt

SEQ ID NO: 827386 - DNA, 33 bp, Homo sapien
ttatagacccagaatcggatgacacacctattt

SEQ ID NO: 827387 - DNA, 33 bp, Homo sapien
cgcactccctttctgcccctttgattttatcag

SEQ ID NO: 827388 - DNA, 33 bp, Homo sapien
cgcactccctttctgctcctttgattttatcag

SEQ ID NO: 827389 - DNA, 33 bp, Homo sapien
ttacaacaggatttagaaggattcaatttttct

SEQ ID NO: 827390 - DNA, 33 bp, Homo sapien
ttacaacaggatttaggaggattcaatttttct

SEQ ID NO: 827391 - DNA, 33 bp, Homo sapien
atcaaagaatagataacaagtgcagtgtgagta

SEQ ID NO: 827392 - DNA, 33 bp, Homo sapien
atcaaagaatagataagaagtgcagtgtgagta

SEQ ID NO: 827393 - DNA, 33 bp, Homo sapien
atatatgggagaataaacaggaaagcaagtaca

SEQ ID NO: 827394 - DNA, 33 bp, Homo sapien
atatatgggagaataatcaggaaagcaagtaca

SEQ ID NO: 827395 - DNA, 33 bp, Homo sapien
acttgggaattcttcaatccttaaaaccagtca

SEQ ID NO: 827396 - DNA, 33 bp, Homo sapien
acttgggaattcttcagtccttaaaaccagtca

SEQ ID NO: 827397 - DNA, 33 bp, Homo sapien
atgtctttgggatttacatagaggttatattga

SEQ ID NO: 827398 - DNA, 33 bp, Homo sapien
atgtctttgggatttagatagaggttatattga

SEQ ID NO: 827399 - DNA, 33 bp, Homo sapien
atagcattctaactgcagaattttcaaaatggg

SEQ ID NO: 827400 - DNA, 33 bp, Homo sapien
atagcattctaactgcggaattttcaaaatggg

SEQ ID NO: 827401 - DNA, 33 bp, Homo sapien
tcttgctgacacatacaatttactgtcagaaac

SEQ ID NO: 827402 - DNA, 33 bp, Homo sapien
tcttgctgacacataccatttactgtcagaaac

SEQ ID NO: 827403 - DNA, 33 bp, Homo sapien
tcattttgttttggtaaggtggaataactacat

SEQ ID NO: 827404 - DNA, 33 bp, Homo sapien
tcattttgttttggtagggtggaataactacat

SEQ ID NO: 827405 - DNA, 33 bp, Homo sapien
aagaagggccacacaacggaaagatatttaagg

SEQ ID NO: 827406 - DNA, 33 bp, Homo sapien
aagaagggccacacaatggaaagatatttaagg

SEQ ID NO: 827407 - DNA, 33 bp, Homo sapien
agacctaaggttgcaaaggaacaaactgtgtcc

SEQ ID NO: 827408 - DNA, 33 bp, Homo sapien
agacctaaggttgcaagggaacaaactgtgtcc

SEQ ID NO: 827409 - DNA, 33 bp, Homo sapien
ctttgaacacaggtctcactgatttttaaaaac

SEQ ID NO: 827410 - DNA, 33 bp, Homo sapien
ctttgaacacaggtctgactgatttttaaaaac

SEQ ID NO: 827411 - DNA, 33 bp, Homo sapien
agtgtcacctggctaacggaagaactagagttt

SEQ ID NO: 827412 - DNA, 33 bp, Homo sapien
agtgtcacctggctaatggaagaactagagttt

SEQ ID NO: 827413 - DNA, 33 bp, Homo sapien
agctcttaaggtagcacgtctgaagttattcgt

SEQ ID NO: 827414 - DNA, 33 bp, Homo sapien
agctcttaaggtagcatgtctgaagttattcgt

SEQ ID NO: 827415 - DNA, 33 bp, Homo sapien; identical to SEQ ID NO: 827413

SEQ ID NO: 827416 - DNA, 33 bp, Homo sapien; identical to SEQ ID NO: 827414

SEQ ID NO: 827417 - DNA, 33 bp, Homo sapien
cagcctcactgctgaaaacagaaagaccacaag

SEQ ID NO: 827418 - DNA, 33 bp, Homo sapien
cagcctcactgctgaagacagaaagaccacaag

SEQ ID NO: 827419 - DNA, 33 bp, Homo sapien
atctttgggaggaacgcactattctggaaactt

SEQ ID NO: 827420 - DNA, 33 bp, Homo sapien
atctttgggaggaacgtactattctggaaactt

SEQ ID NO: 827421 - DNA, 33 bp, Homo sapien
tgatggagaagaatccacacattaatagctgct

SEQ ID NO: 827422 - DNA, 33 bp, Homo sapien
tgatggagaagaatccgcacattaatagctgct

SEQ ID NO: 827423 - DNA, 33 bp, Homo sapien
cttttcttctttcttcacattaggaatgagaag

SEQ ID NO: 827424 - DNA, 33 bp, Homo sapien
cttttcttctttcttcgcattaggaatgagaag

SEQ ID NO: 827425 - DNA, 33 bp, Homo sapien
agagacgatgagatgcaacataaacatcaagca

SEQ ID NO: 827426 - DNA, 33 bp, Homo sapien
agagacgatgagatgcgacataaacatcaagca

SEQ ID NO: 827427 - DNA, 33 bp, Homo sapien
gtgtgtccctggtacacagaagcaggctacact

SEQ ID NO: 827428 - DNA, 33 bp, Homo sapien
gtgtgtccctggtacagagaagcaggctacact

SEQ ID NO: 827429 - DNA, 33 bp, Homo sapien
cccttactggatgacactgacctctgctatcct

SEQ ID NO: 827430 - DNA, 33 bp, Homo sapien
cccttactggatgacattgacctctgctatcct

SEQ ID NO: 827431 - DNA, 33 bp, Homo sapien
tgccagccacttcttacagacagcctactcacc

SEQ ID NO: 827432 - DNA, 33 bp, Homo sapien
tgccagccacttcttatagacagcctactcacc

SEQ ID NO: 827433 - DNA, 33 bp, Homo sapien
aaaccgtatgactttgaacaatttgctttcttc

SEQ ID NO: 827434 - DNA, 33 bp, Homo sapien
aaaccgtatgactttggacaatttgctttcttc

SEQ ID NO: 827435 - DNA, 33 bp, Homo sapien
tgtcaaatggatgaccaatttgtttcatcgctt

SEQ ID NO: 827436 - DNA, 33 bp, Homo sapien
tgtcaaatggatgaccgatttgtttcatcgctt

SEQ ID NO: 827437 - DNA, 33 bp, Homo sapien
tagaattcactcttaaaaaggtaccatagcagg

SEQ ID NO: 827438 - DNA, 33 bp, Homo sapien
tagaattcactcttaagaaggtaccatagcagg

SEQ ID NO: 827439 - DNA, 33 bp, Homo sapien
agagaagttatatatgacacagagcaattgcta

SEQ ID NO: 827440 - DNA, 33 bp, Homo sapien
agagaagttatatatggcacagagcaattgcta

SEQ ID NO: 827441 - DNA, 33 bp, Homo sapien
ttacccttcaataaaaatggtgccaagttgcaa

SEQ ID NO: 827442 - DNA, 33 bp, Homo sapien
ttacccttcaataaaagtggtgccaagttgcaa

SEQ ID NO: 827443 - DNA, 33 bp, Homo sapien
aactcttaatcccatacgtgatattgccaatta

SEQ ID NO: 827444 - DNA, 33 bp, Homo sapien
aactcttaatcccatatgtgatattgccaatta

SEQ ID NO: 827445 - DNA, 33 bp, Homo sapien
cttggtaatgaccaataagctggatactgtgga

SEQ ID NO: 827446 - DNA, 33 bp, Homo sapien
cttggtaatgaccaatgagctggatactgtgga

SEQ ID NO: 827447 - DNA, 33 bp, Homo sapien
tttccaagataccctaacaacttgtaaaataca

SEQ ID NO: 827448 - DNA, 33 bp, Homo sapien
tttccaagataccctatcaacttgtaaaataca

SEQ ID NO: 827449 - DNA, 33 bp, Homo sapien
cccccaccttgataccagacatctccagggaaa

SEQ ID NO: 827450 - DNA, 33 bp, Homo sapien
cccccaccttgataccggacatctccagggaaa

SEQ ID NO: 827451 - DNA, 33 bp, Homo sapien
tgaaccagaatcatggaaagtactcaagaagaa

SEQ ID NO: 827452 - DNA, 33 bp, Homo sapien
tgaaccagaatcatgggaagtactcaagaagaa

SEQ ID NO: 827453 - DNA, 33 bp, Homo sapien
taaatgatctaaatcacgtaatcaccaagcctt

SEQ ID NO: 827454 - DNA, 33 bp, Homo sapien
taaatgatctaaatcatgtaatcaccaagcctt

SEQ ID NO: 827455 - DNA, 33 bp, Homo sapien
aaattcctttctcaaaaatctttggtgtatgga

SEQ ID NO: 827456 - DNA, 33 bp, Homo sapien
aaattcctttctcaaacatctttggtgtatgga

SEQ ID NO: 827457 - DNA, 33 bp, Homo sapien
gttaagcaatatgaagcagaaatcatttctagc

SEQ ID NO: 827458 - DNA, 33 bp, Homo sapien
gttaagcaatatgaaggagaaatcatttctagc

SEQ ID NO: 827459 - DNA, 33 bp, Homo sapien
ctgtatcttcctttacagaaaagtcaaatgaaa

SEQ ID NO: 827460 - DNA, 33 bp, Homo sapien
ctgtatcttcctttacggaaaagtcaaatgaaa

SEQ ID NO: 827461 - DNA, 33 bp, Homo sapien
ctgggaaggcaccagaaagcagatggaacatag

SEQ ID NO: 827462 - DNA, 33 bp, Homo sapien
ctgggaaggcaccagagagcagatggaacatag

SEQ ID NO: 827463 - DNA, 33 bp, Homo sapien
gaagtgattaagcattaaaggatcctgcccatg

SEQ ID NO: 827464 - DNA, 33 bp, Homo sapien
gaagtgattaagcattgaaggatcctgcccatg

SEQ ID NO: 827465 - DNA, 33 bp, Homo sapien
aagcaggatccatatcaaattcatctttgaagc

SEQ ID NO: 827466 - DNA, 33 bp, Homo sapien
aagcaggatccatatcgaattcatctttgaagc

SEQ ID NO: 827467 - DNA, 33 bp, Homo sapien
aacaacctatactccaagactggtttgaggtat

SEQ ID NO: 827468 - DNA, 33 bp, Homo sapien
aacaacctatactccatgactggtttgaggtat

SEQ ID NO: 827469 - DNA, 33 bp, Homo sapien
ctccatcactgggtgcaacactccttacagagc

SEQ ID NO: 827470 - DNA, 33 bp, Homo sapien
ctccatcactgggtgcgacactccttacagagc

SEQ ID NO: 827471 - DNA, 33 bp, Homo sapien
tgagaaatgctgctgaacacagttaaatatggg

SEQ ID NO: 827472 - DNA, 33 bp, Homo sapien
tgagaaatgctgctgagcacagttaaatatggg

SEQ ID NO: 827473 - DNA, 33 bp, Homo sapien
actttaagttccaagacaaagcctggtttgaaa

SEQ ID NO: 827474 - DNA, 33 bp, Homo sapien
actttaagttccaagataaagcctggtttgaaa

SEQ ID NO: 827475 - DNA, 33 bp, Homo sapien
tgtaaggtacaatacacctccatgacagtgaaa

SEQ ID NO: 827476 - DNA, 33 bp, Homo sapien
tgtaaggtacaatacagctccatgacagtgaaa

SEQ ID NO: 827477 - DNA, 33 bp, Homo sapien
aaacttgagatgaataagagtacatccacaata

SEQ ID NO: 827478 - DNA, 33 bp, Homo sapien
aaacttgagatgaatatgagtacatccacaata

SEQ ID NO: 827479 - DNA, 33 bp, Homo sapien
tgcctggagacgaagacgttaggaaatagtctt

SEQ ID NO: 827480 - DNA, 33 bp, Homo sapien
tgcctggagacgaagatgttaggaaatagtctt

SEQ ID NO: 827481 - DNA, 33 bp, Homo sapien
atatgttcacacaaaacacctacgctatagaga

SEQ ID NO: 827482 - DNA, 33 bp, Homo sapien
atatgttcacacaaaatacctacgctatagaga

SEQ ID NO: 827483 - DNA, 33 bp, Homo sapien
ctagttactttcaaaactcaaaagttgatgtac

SEQ ID NO: 827484 - DNA, 33 bp, Homo sapien
ctagttactttcaaaattcaaaagttgatgtac

SEQ ID NO: 827485 - DNA, 33 bp, Homo sapien
agatgctaaaactcgccgaccactatacatcat

SEQ ID NO: 827486 - DNA, 33 bp, Homo sapien
agatgctaaaactcgctgaccactatacatcat

SEQ ID NO: 827487 - DNA, 33 bp, Homo sapien
ataaggtgctcattaaataagtctgtaaaagct

SEQ ID NO: 827488 - DNA, 33 bp, Homo sapien
ataaggtgctcattaagtaagtctgtaaaagct

SEQ ID NO: 827489 - DNA, 33 bp, Homo sapien
caagtcagtggcagaaccagatggcacccagac

SEQ ID NO: 827490 - DNA, 33 bp, Homo sapien
caagtcagtggcagaatcagatggcacccagac

SEQ ID NO: 827491 - DNA, 33 bp, Homo sapien
tttactatactagaccaacggttttcaaccttg

SEQ ID NO: 827492 - DNA, 33 bp, Homo sapien
tttactatactagaccgacggttttcaaccttg

SEQ ID NO: 827493 - DNA, 33 bp, Homo sapien
aggttagtagttgataagtatactgatcaccat

SEQ ID NO: 827494 - DNA, 33 bp, Homo sapien
aggttagtagttgatatgtatactgatcaccat

SEQ ID NO: 827495 - DNA, 33 bp, Homo sapien
attgtatgttttcttcaatgtggaaccaatcag

SEQ ID NO: 827496 - DNA, 33 bp, Homo sapien
attgtatgttttcttcgatgtggaaccaatcag

SEQ ID NO: 827497 - DNA, 33 bp, Homo sapien
catagttcaaaagagcagactcacatcctgaac

SEQ ID NO: 827498 - DNA, 33 bp, Homo sapien
catagttcaaaagagcggactcacatcctgaac

SEQ ID NO: 827499 - DNA, 33 bp, Homo sapien
actggttctaatagaccgtcagaaaacatttta

SEQ ID NO: 827500 - DNA, 33 bp, Homo sapien
actggttctaatagactgtcagaaaacatttta

SEQ ID NO: 827501 - DNA, 33 bp, Homo sapien
ttttagagcaaagggaaaagtttacacttctaa

SEQ ID NO: 827502 - DNA, 33 bp, Homo sapien
ttttagagcaaagggacaagtttacacttctaa

SEQ ID NO: 827503 - DNA, 33 bp, Homo sapien
ttctaaaggaactgacaatgctggagaggaggg

SEQ ID NO: 827504 - DNA, 33 bp, Homo sapien
ttctaaaggaactgacgatgctggagaggaggg

SEQ ID NO: 827505 - DNA, 33 bp, Homo sapien
tgcactattttatgtacagtatctgtgtctgtt

SEQ ID NO: 827506 - DNA, 33 bp, Homo sapien
tgcactattttatgtatagtatctgtgtctgtt

SEQ ID NO: 827507 - DNA, 33 bp, Homo sapien
caaaaactgtgcaatacataagccagaaatatt

SEQ ID NO: 827508 - DNA, 33 bp, Homo sapien
caaaaactgtgcaatagataagccagaaatatt

SEQ ID NO: 827509 - DNA, 33 bp, Homo sapien
gctggggtagggaagaacaaccacaatctgtgt

SEQ ID NO: 827510 - DNA, 33 bp, Homo sapien
gctggggtagggaagagcaaccacaatctgtgt

SEQ ID NO: 827511 - DNA, 33 bp, Homo sapien
atgggatccagtgtcaagctcaaaggcacagat

SEQ ID NO: 827512 - DNA, 33 bp, Homo sapien
atgggatccagtgtcaggctcaaaggcacagat

SEQ ID NO: 827513 - DNA, 33 bp, Homo sapien
caccctagtgaagttaaaagattctgatttcaa

SEQ ID NO: 827514 - DNA, 33 bp, Homo sapien
caccctagtgaagttagaagattctgatttcaa

SEQ ID NO: 827515 - DNA, 33 bp, Homo sapien
atgtcaggttgtgatacgtgctaagaagataaa

SEQ ID NO: 827516 - DNA, 33 bp, Homo sapien
atgtcaggttgtgatatgtgctaagaagataaa

SEQ ID NO: 827517 - DNA, 33 bp, Homo sapien
cagtgctttgcccgtacagacaattcaacaaat

SEQ ID NO: 827518 - DNA, 33 bp, Homo sapien
cagtgctttgcccgtagagacaattcaacaaat

SEQ ID NO: 827519 - DNA, 33 bp, Homo sapien
ggctgcatggtaccaactgaaaggattttttgg

SEQ ID NO: 827520 - DNA, 33 bp, Homo sapien
ggctgcatggtaccaattgaaaggattttttgg

SEQ ID NO: 827521 - DNA, 33 bp, Homo sapien
ggaagagagagtatggaacacaagtgaaggtca

SEQ ID NO: 827522 - DNA, 33 bp, Homo sapien
ggaagagagagtatgggacacaagtgaaggtca

SEQ ID NO: 827523 - DNA, 33 bp, Homo sapien
cagaaaatttaacacaagccctagcagaaaata

SEQ ID NO: 827524 - DNA, 33 bp, Homo sapien
cagaaaatttaacacacgccctagcagaaaata

SEQ ID NO: 827525 - DNA, 33 bp, Homo sapien
tagcccatcaaatcaaactgagtgtggtttcca

SEQ ID NO: 827526 - DNA, 33 bp, Homo sapien
tagcccatcaaatcaacctgagtgtggtttcca

SEQ ID NO: 827527 - DNA, 33 bp, Homo sapien
agatgccaagagcacaaaaggagaaggcagaag

SEQ ID NO: 827528 - DNA, 33 bp, Homo sapien
agatgccaagagcacagaaggagaaggcagaag

SEQ ID NO: 827529 - DNA, 33 bp, Homo sapien
tggcctcctgtatcaccaatttcacagtcactc

SEQ ID NO: 827530 - DNA, 33 bp, Homo sapien
tggcctcctgtatcactaatttcacagtcactc

SEQ ID NO: 827531 - DNA, 33 bp, Homo sapien
ggtttattttggaacaccttgctcatcagaaag

SEQ ID NO: 827532 - DNA, 33 bp, Homo sapien
ggtttattttggaacatcttgctcatcagaaag

SEQ ID NO: 827533 - DNA, 33 bp, Homo sapien
aactcaatttttgtgaagtgatgagaagaagaa

SEQ ID NO: 827534 - DNA, 33 bp, Homo sapien
aactcaatttttgtgatgtgatgagaagaagaa

SEQ ID NO: 827535 - DNA, 33 bp, Homo sapien
tgagtgtcagatggggcaaccatgctggaagtg

SEQ ID NO: 827536 - DNA, 33 bp, Homo sapien
tgagtgtcagatgggggaaccatgctggaagtg

SEQ ID NO: 827537 - DNA, 33 bp, Homo sapien
acacatattacataaaagatcaactacctaagg

SEQ ID NO: 827538 - DNA, 33 bp, Homo sapien
acacatattacataaatgatcaactacctaagg

SEQ ID NO: 827539 - DNA, 33 bp, Homo sapien
ctaaagatggatatgacggggatgtaacattgc

SEQ ID NO: 827540 - DNA, 33 bp, Homo sapien
ctaaagatggatatgatggggatgtaacattgc

SEQ ID NO: 827541 - DNA, 33 bp, Homo sapien
ggcactccagtttctacggagcctggctagact

SEQ ID NO: 827542 - DNA, 33 bp, Homo sapien
ggcactccagtttctatggagcctggctagact

SEQ ID NO: 827543 - DNA, 33 bp, Homo sapien
tttgaacaatacctggaataggcaagtgaccag

SEQ ID NO: 827544 - DNA, 33 bp, Homo sapien
tttgaacaatacctggcataggcaagtgaccag

SEQ ID NO: 827545 - DNA, 33 bp, Homo sapien
ggttaaggttcaataaaatcgagaaaacaaatc

SEQ ID NO: 827546 - DNA, 33 bp, Homo sapien
ggttaaggttcaataacatcgagaaaacaaatc

SEQ ID NO: 827547 - DNA, 33 bp, Homo sapien
tttatggcccgtaatgcagtgtatcttggtaaa

SEQ ID NO: 827548 - DNA, 33 bp, Homo sapien
tttatggcccgtaatgtagtgtatcttggtaaa

SEQ ID NO: 827549 - DNA, 33 bp, Homo sapien
acaaataatcatggtacgtaagatgacaacatt

SEQ ID NO: 827550 - DNA, 33 bp, Homo sapien
acaaataatcatggtatgtaagatgacaacatt

SEQ ID NO: 827551 - DNA, 33 bp, Homo sapien
agtttgcatttccctaataactggtgatcttga

SEQ ID NO: 827552 - DNA, 33 bp, Homo sapien
agtttgcatttccctactaactggtgatcttga

SEQ ID NO: 827553 - DNA, 33 bp, Homo sapien
aataaaataaaataaaacaatggtgctaagata

SEQ ID NO: 827554 - DNA, 33 bp, Homo sapien
aataaaataaaataaagcaatggtgctaagata

SEQ ID NO: 827555 - DNA, 33 bp, Homo sapien
cagacatctagaacaacccaatcctgaatcact

SEQ ID NO: 827556 - DNA, 33 bp, Homo sapien
cagacatctagaacaatccaatcctgaatcact

SEQ ID NO: 827557 - DNA, 33 bp, Homo sapien
gaaactgggcataaaaaataatgctcccaagta

SEQ ID NO: 827558 - DNA, 33 bp, Homo sapien
gaaactgggcataaaacataatgctcccaagta

SEQ ID NO: 827559 - DNA, 33 bp, Homo sapien
ggaatagaattgttaaatctgagcaagaaaaag

SEQ ID NO: 827560 - DNA, 33 bp, Homo sapien
ggaatagaattgttaagtctgagcaagaaaaag

SEQ ID NO: 827561 - DNA, 33 bp, Homo sapien
tttattaatttaatcagcagtttgcgtcattgc

SEQ ID NO: 827562 - DNA, 33 bp, Homo sapien
tttattaatttaatcatcagtttgcgtcattgc

SEQ ID NO: 827563 - DNA, 33 bp, Homo sapien
aagagttggtaggcccaagactttttctgaaat

SEQ ID NO: 827564 - DNA, 33 bp, Homo sapien
aagagttggtaggcccgagactttttctgaaat

SEQ ID NO: 827565 - DNA, 33 bp, Homo sapien
gacctcgcaaatgaacaatgccactgctgatga

SEQ ID NO: 827566 - DNA, 33 bp, Homo sapien
gacctcgcaaatgaacgatgccactgctgatga

SEQ ID NO: 827567 - DNA, 33 bp, Homo sapien
cctggcacacacaaacccttacctagaaaagac

SEQ ID NO: 827568 - DNA, 33 bp, Homo sapien
cctggcacacacaaactcttacctagaaaagac

SEQ ID NO: 827569 - DNA, 33 bp, Homo sapien
attgtaggccaaataaatatcaatttaagaagc

SEQ ID NO: 827570 - DNA, 33 bp, Homo sapien
attgtaggccaaataagtatcaatttaagaagc

SEQ ID NO: 827571 - DNA, 33 bp, Homo sapien
taagttttgactgatacactacaagagaacatt

SEQ ID NO: 827572 - DNA, 33 bp, Homo sapien
taagttttgactgatatactacaagagaacatt

SEQ ID NO: 827573 - DNA, 33 bp, Homo sapien
tttcagaaatatactcccgtcaacagggatcat

SEQ ID NO: 827574 - DNA, 33 bp, Homo sapien
tttcagaaatatactctcgtcaacagggatcat

SEQ ID NO: 827575 - DNA, 33 bp, Homo sapien
aaagctggggaaactcaaatctaaatactaagg

SEQ ID NO: 827576 - DNA, 33 bp, Homo sapien
aaagctggggaaactcgaatctaaatactaagg

SEQ ID NO: 827577 - DNA, 33 bp, Homo sapien
ctcaaggctttcatcaaaatgttcagttcttgc

SEQ ID NO: 827578 - DNA, 33 bp, Homo sapien
ctcaaggctttcatcacaatgttcagttcttgc

SEQ ID NO: 827579 - DNA, 33 bp, Homo sapien
tttccaaaatcgtgcaaggtttctattctgtag

SEQ ID NO: 827580 - DNA, 33 bp, Homo sapien
tttccaaaatcgtgcagggtttctattctgtag

SEQ ID NO: 827581 - DNA, 33 bp, Homo sapien
gaattctatgagggtaaaactgtatttgatcaa

SEQ ID NO: 827582 - DNA, 33 bp, Homo sapien
gaattctatgagggtagaactgtatttgatcaa

SEQ ID NO: 827583 - DNA, 33 bp, Homo sapien
gaccttttgttctcaaataaactttcctcaaat

SEQ ID NO: 827584 - DNA, 33 bp, Homo sapien
gaccttttgttctcaagtaaactttcctcaaat

SEQ ID NO: 827585 - DNA, 33 bp, Homo sapien
gtttagccagggtctacaagtacttttgtggct

SEQ ID NO: 827586 - DNA, 33 bp, Homo sapien
gtttagccagggtctagaagtacttttgtggct

SEQ ID NO: 827587 - DNA, 33 bp, Homo sapien
gggctgcacgtcggaaccacctgggaggcgctt

SEQ ID NO: 827588 - DNA, 33 bp, Homo sapien
gggctgcacgtcggaatcacctgggaggcgctt

SEQ ID NO: 827589 - DNA, 33 bp, Homo sapien
taccctgctttgcctcaaaagtgtcatcaattt

SEQ ID NO: 827590 - DNA, 33 bp, Homo sapien
taccctgctttgcctcgaaagtgtcatcaattt

SEQ ID NO: 827591 - DNA, 33 bp, Homo sapien
ccctgcactacctcaacaatataccactggctg

SEQ ID NO: 827592 - DNA, 33 bp, Homo sapien
ccctgcactacctcaataatataccactggctg

SEQ ID NO: 827593 - DNA, 33 bp, Homo sapien
gcgaaagttatggccacagtgcaggataagtgc

SEQ ID NO: 827594 - DNA, 33 bp, Homo sapien
gcgaaagttatggccatagtgcaggataagtgc

SEQ ID NO: 827595 - DNA, 33 bp, Homo sapien
actgccatcaagacaacgagcaggtgaatatat

SEQ ID NO: 827596 - DNA, 33 bp, Homo sapien
actgccatcaagacaatgagcaggtgaatatat

SEQ ID NO: 827597 - DNA, 33 bp, Homo sapien
ataattgaccactggaaataccaatgttgtgtt

SEQ ID NO: 827598 - DNA, 33 bp, Homo sapien
ataattgaccactggatataccaatgttgtgtt

SEQ ID NO: 827599 - DNA, 33 bp, Homo sapien
agtatctgtaaggtccacaaagaagagagaggg

SEQ ID NO: 827600 - DNA, 33 bp, Homo sapien
agtatctgtaaggtccgcaaagaagagagaggg

SEQ ID NO: 827601 - DNA, 33 bp, Homo sapien
tcgtgcagtaaagaatcacctgcaaagtgcagt

SEQ ID NO: 827602 - DNA, 33 bp, Homo sapien
tcgtgcagtaaagaatgacctgcaaagtgcagt

SEQ ID NO: 827603 - DNA, 33 bp, Homo sapien
ggaaacaaatgcattgaaagaatggtagtgaaa

SEQ ID NO: 827604 - DNA, 33 bp, Homo sapien
ggaaacaaatgcattggaagaatggtagtgaaa

SEQ ID NO: 827605 - DNA, 33 bp, Homo sapien
ctttgtccaatactggaagttgatcggaatgag

SEQ ID NO: 827606 - DNA, 33 bp, Homo sapien
ctttgtccaatactggtagttgatcggaatgag

SEQ ID NO: 827607 - DNA, 33 bp, Homo sapien
aaaggtatatttaacaatccatgctgaagattt

SEQ ID NO: 827608 - DNA, 33 bp, Homo sapien
aaaggtatatttaacagtccatgctgaagattt

SEQ ID NO: 827609 - DNA, 33 bp, Homo sapien
ccttctgtaaatcaaaccaggattcttaactat

SEQ ID NO: 827610 - DNA, 33 bp, Homo sapien
ccttctgtaaatcaaagcaggattcttaactat

SEQ ID NO: 827611 - DNA, 33 bp, Homo sapien
cattggtattcctagaacatggaaaaatgcaat

SEQ ID NO: 827612 - DNA, 33 bp, Homo sapien
cattggtattcctagagcatggaaaaatgcaat

SEQ ID NO: 827613 - DNA, 33 bp, Homo sapien
gccttagaaggaagcacgatatttcctgaaggg

SEQ ID NO: 827614 - DNA, 33 bp, Homo sapien
gccttagaaggaagcatgatatttcctgaaggg

SEQ ID NO: 827615 - DNA, 33 bp, Homo sapien
agggctctagctcacccggagttttgaagggga

SEQ ID NO: 827616 - DNA, 33 bp, Homo sapien
agggctctagctcacctggagttttgaagggga

SEQ ID NO: 827617 - DNA, 33 bp, Homo sapien
gccttgttttgattaacggaggcatagcttagc

SEQ ID NO: 827618 - DNA, 33 bp, Homo sapien
gccttgttttgattaagggaggcatagcttagc

SEQ ID NO: 827619 - DNA, 33 bp, Homo sapien
agacagtttaagatgaagtcagataacaccaca

SEQ ID NO: 827620 - DNA, 33 bp, Homo sapien
agacagtttaagatgatgtcagataacaccaca

SEQ ID NO: 827621 - DNA, 33 bp, Homo sapien
aatagcatttccctgaaaggaggtcaatgttta

SEQ ID NO: 827622 - DNA, 33 bp, Homo sapien
aatagcatttccctgataggaggtcaatgttta

SEQ ID NO: 827623 - DNA, 33 bp, Homo sapien
ttacctgattgaaatcaacggatgagtttatta

SEQ ID NO: 827624 - DNA, 33 bp, Homo sapien
ttacctgattgaaatcgacggatgagtttatta

SEQ ID NO: 827625 - DNA, 33 bp, Homo sapien
ggtaatgcttgctttaaagatttgcagataaat

SEQ ID NO: 827626 - DNA, 33 bp, Homo sapien
ggtaatgcttgctttacagatttgcagataaat

SEQ ID NO: 827627 - DNA, 33 bp, Homo sapien
caaagccaaagttacccagagaatgaatctgaa

SEQ ID NO: 827628 - DNA, 33 bp, Homo sapien
caaagccaaagttacctagagaatgaatctgaa

SEQ ID NO: 827629 - DNA, 33 bp, Homo sapien
acttatcagacacaccaactagggccttgcccc

SEQ ID NO: 827630 - DNA, 33 bp, Homo sapien
acttatcagacacaccgactagggccttgcccc

SEQ ID NO: 827631 - DNA, 33 bp, Homo sapien
gaataaaccaaaatacaaacttgaaactagtta

SEQ ID NO: 827632 - DNA, 33 bp, Homo sapien
gaataaaccaaaatacgaacttgaaactagtta

SEQ ID NO: 827633 - DNA, 33 bp, Homo sapien
tcagcatattggccacacctgtcctagtcttat

SEQ ID NO: 827634 - DNA, 33 bp, Homo sapien
tcagcatattggccacgcctgtcctagtcttat

SEQ ID NO: 827635 - DNA, 33 bp, Homo sapien
tctaaacaactagaacactaaacatttaggaac

SEQ ID NO: 827636 - DNA, 33 bp, Homo sapien
tctaaacaactagaacgctaaacatttaggaac

SEQ ID NO: 827637 - DNA, 33 bp, Homo sapien
cttattttattttggaaacaatactgtacttgc

SEQ ID NO: 827638 - DNA, 33 bp, Homo sapien
cttattttattttggatacaatactgtacttgc

SEQ ID NO: 827639 - DNA, 33 bp, Homo sapien
gtaccatctactgccactacatctttcaatacc

SEQ ID NO: 827640 - DNA, 33 bp, Homo sapien
gtaccatctactgccattacatctttcaatacc

SEQ ID NO: 827641 - DNA, 33 bp, Homo sapien
agctcattggctgtcactaatgttagtgtattt

SEQ ID NO: 827642 - DNA, 33 bp, Homo sapien
agctcattggctgtcattaatgttagtgtattt

SEQ ID NO: 827643 - DNA, 33 bp, Homo sapien
cattgtggccacaccacgctgtctgctggacca

SEQ ID NO: 827644 - DNA, 33 bp, Homo sapien
cattgtggccacaccaggctgtctgctggacca

SEQ ID NO: 827645 - DNA, 33 bp, Homo sapien; identical to SEQ ID NO: 827643

SEQ ID NO: 827646 - DNA, 33 bp, Homo sapien; identical to SEQ ID NO: 827644

SEQ ID NO: 827647 - DNA, 33 bp, Homo sapien
ccagtacttcttaagccgcaccccgtctgagaa

SEQ ID NO: 827648 - DNA, 33 bp, Homo sapien
ccagtacttcttaagctgcaccccgtctgagaa

SEQ ID NO: 827649 - DNA, 33 bp, Homo sapien
gttcaatgaatcatgcagaggccttcctgatat

SEQ ID NO: 827650 - DNA, 33 bp, Homo sapien
gttcaatgaatcatgcggaggccttcctgatat

SEQ ID NO: 827651 - DNA, 33 bp, Homo sapien
gcaaacctgctgcccaaccataaatccaaaaga

SEQ ID NO: 827652 - DNA, 33 bp, Homo sapien
gcaaacctgctgcccacccataaatccaaaaga

SEQ ID NO: 827653 - DNA, 33 bp, Homo sapien
tttctattgcatctaacggggtggatcttattc

SEQ ID NO: 827654 - DNA, 33 bp, Homo sapien
tttctattgcatctaatggggtggatcttattc

SEQ ID NO: 827655 - DNA, 33 bp, Homo sapien
tgtatgctttataacacattgtacttcctttat

SEQ ID NO: 827656 - DNA, 33 bp, Homo sapien
tgtatgctttataacatattgtacttcctttat

SEQ ID NO: 827657 - DNA, 33 bp, Homo sapien
ttgacaaaggaccatacattgtatcattccatt

SEQ ID NO: 827658 - DNA, 33 bp, Homo sapien
ttgacaaaggaccatatattgtatcattccatt

SEQ ID NO: 827659 - DNA, 33 bp, Homo sapien
aacatctcacactgagaacaacattctgcttat

SEQ ID NO: 827660 - DNA, 33 bp, Homo sapien
aacatctcacactgaggacaacattctgcttat

SEQ ID NO: 827661 - DNA, 33 bp, Homo sapien
aggtacaatgcaaacactgaagtacatattcca

SEQ ID NO: 827662 - DNA, 33 bp, Homo sapien
aggtacaatgcaaacattgaagtacatattcca

SEQ ID NO: 827663 - DNA, 33 bp, Homo sapien
ttgcctttgaatagaaatgcatgcccacactga

SEQ ID NO: 827664 - DNA, 33 bp, Homo sapien
ttgcctttgaatagaagtgcatgcccacactga

SEQ ID NO: 827665 - DNA, 33 bp, Homo sapien
gcacaggcacttgacactccatcagtgtgggca

SEQ ID NO: 827666 - DNA, 33 bp, Homo sapien
gcacaggcacttgacattccatcagtgtgggca

SEQ ID NO: 827667 - DNA, 33 bp, Homo sapien
gttggtgcaacagcaacatttttaatgcagtaa

SEQ ID NO: 827668 - DNA, 33 bp, Homo sapien
gttggtgcaacagcaatatttttaatgcagtaa

SEQ ID NO: 827669 - DNA, 33 bp, Homo sapien
tcagatgcctgctacacatcaattgaaaggtct

SEQ ID NO: 827670 - DNA, 33 bp, Homo sapien
tcagatgcctgctacagatcaattgaaaggtct

SEQ ID NO: 827671 - DNA, 33 bp, Homo sapien
ttgtaagcctctgaacaacatcccaagaaacag

SEQ ID NO: 827672 - DNA, 33 bp, Homo sapien
ttgtaagcctctgaacgacatcccaagaaacag

SEQ ID NO: 827673 - DNA, 33 bp, Homo sapien
caattctgaagtgacacagatcaacaatattct

SEQ ID NO: 827674 - DNA, 33 bp, Homo sapien
caattctgaagtgacatagatcaacaatattct

SEQ ID NO: 827675 - DNA, 33 bp, Homo sapien
accttgccccacataaagatggatgttgccaat

SEQ ID NO: 827676 - DNA, 33 bp, Homo sapien
accttgccccacataacgatggatgttgccaat

SEQ ID NO: 827677 - DNA, 33 bp, Homo sapien
tctgttacaaattgatcaaatagttttattcat

SEQ ID NO: 827678 - DNA, 33 bp, Homo sapien
tctgttacaaattgatgaaatagttttattcat

SEQ ID NO: 827679 - DNA, 33 bp, Homo sapien
gattttgaaatctgaaagcaatcattaaggtca

SEQ ID NO: 827680 - DNA, 33 bp, Homo sapien
gattttgaaatctgaaggcaatcattaaggtca

SEQ ID NO: 827681 - DNA, 33 bp, Homo sapien
gaagcaaagccccacaactatgtgatcttgaga

SEQ ID NO: 827682 - DNA, 33 bp, Homo sapien
gaagcaaagccccacagctatgtgatcttgaga

SEQ ID NO: 827683 - DNA, 33 bp, Homo sapien
ctactttttgtaagtaaattgcagtttaagtct

SEQ ID NO: 827684 - DNA, 33 bp, Homo sapien
ctactttttgtaagtagattgcagtttaagtct

SEQ ID NO: 827685 - DNA, 33 bp, Homo sapien
ataaaattttgaaggcactattatttaggggct

SEQ ID NO: 827686 - DNA, 33 bp, Homo sapien
ataaaattttgaaggcgctattatttaggggct

SEQ ID NO: 827687 - DNA, 33 bp, Homo sapien
agatatacaaaatgcaaaattatccagaagttt

SEQ ID NO: 827688 - DNA, 33 bp, Homo sapien
agatatacaaaatgcacaattatccagaagttt

SEQ ID NO: 827689 - DNA, 33 bp, Homo sapien
ggagttggaaagagacacaattggttctcatga

SEQ ID NO: 827690 - DNA, 33 bp, Homo sapien
ggagttggaaagagacgcaattggttctcatga

SEQ ID NO: 827691 - DNA, 33 bp, Homo sapien
ggtacttgttagagaccctgggcacatggagat

SEQ ID NO: 827692 - DNA, 33 bp, Homo sapien
ggtacttgttagagactctgggcacatggagat

SEQ ID NO: 827693 - DNA, 33 bp, Homo sapien
acctatccattcttaaatgaactaccttctatt

SEQ ID NO: 827694 - DNA, 33 bp, Homo sapien
acctatccattcttaagtgaactaccttctatt

SEQ ID NO: 827695 - DNA, 33 bp, Homo sapien
attcatacagttgaacgccacatagctttttta

SEQ ID NO: 827696 - DNA, 33 bp, Homo sapien
attcatacagttgaactccacatagctttttta

SEQ ID NO: 827697 - DNA, 33 bp, Homo sapien
aagtgactttaacagcaagggcatttcagtacc

SEQ ID NO: 827698 - DNA, 33 bp, Homo sapien
aagtgactttaacagcgagggcatttcagtacc

SEQ ID NO: 827699 - DNA, 33 bp, Homo sapien
gaaaatgtaggcaacactggtttgaatccggct

SEQ ID NO: 827700 - DNA, 33 bp, Homo sapien
gaaaatgtaggcaacagtggtttgaatccggct

SEQ ID NO: 827701 - DNA, 33 bp, Homo sapien
cacagttatccatgctgaattcacttccaaaag

SEQ ID NO: 827702 - DNA, 33 bp, Homo sapien
cacagttatccatgcttaattcacttccaaaag

SEQ ID NO: 827703 - DNA, 33 bp, Homo sapien
aagaaatgccctgaaaacaaaagcttgccttta

SEQ ID NO: 827704 - DNA, 33 bp, Homo sapien
aagaaatgccctgaaatcaaaagcttgccttta

SEQ ID NO: 827705 - DNA, 33 bp, Homo sapien
cctgtgtttctcatggcagtcaaatcaacacag

SEQ ID NO: 827706 - DNA, 33 bp, Homo sapien
cctgtgtttctcatggtagtcaaatcaacacag

SEQ ID NO: 827707 - DNA, 33 bp, Homo sapien
agtcagatttgaataacgaggttttgaaaggat

SEQ ID NO: 827708 - DNA, 33 bp, Homo sapien
agtcagatttgaataatgaggttttgaaaggat

SEQ ID NO: 827709 - DNA, 33 bp, Homo sapien
tagaaatcctatgaaacgtattagcacaatatc

SEQ ID NO: 827710 - DNA, 33 bp, Homo sapien
tagaaatcctatgaaatgtattagcacaatatc

SEQ ID NO: 827711 - DNA, 33 bp, Homo sapien
aaagtagaacacaaaactacttgtgaactttga

SEQ ID NO: 827712 - DNA, 33 bp, Homo sapien
aaagtagaacacaaaattacttgtgaactttga

SEQ ID NO: 827713 - DNA, 33 bp, Homo sapien
cgttggtctacagaaaaaggaatgactgcattg

SEQ ID NO: 827714 - DNA, 33 bp, Homo sapien
cgttggtctacagaaagaggaatgactgcattg

SEQ ID NO: 827715 - DNA, 33 bp, Homo sapien
tttacagatagaaaaaaaataaagcagtaaggt

SEQ ID NO: 827716 - DNA, 33 bp, Homo sapien
tttacagatagaaaaagaataaagcagtaaggt

SEQ ID NO: 827717 - DNA, 33 bp, Homo sapien
tgaaattccagatgcaaaaaggccattgtttta

SEQ ID NO: 827718 - DNA, 33 bp, Homo sapien
tgaaattccagatgcacaaaggccattgtttta

SEQ ID NO: 827719 - DNA, 33 bp, Homo sapien
ttgtaaaagacccataagcattttacagagcag

SEQ ID NO: 827720 - DNA, 33 bp, Homo sapien
ttgtaaaagacccatatgcattttacagagcag

SEQ ID NO: 827721 - DNA, 33 bp, Homo sapien
gtgcaatactttgagacgatgatcttcaatcct

SEQ ID NO: 827722 - DNA, 33 bp, Homo sapien
gtgcaatactttgagaggatgatcttcaatcct

SEQ ID NO: 827723 - DNA, 33 bp, Homo sapien
ttggatcactgcttccagaatgttttttcaata

SEQ ID NO: 827724 - DNA, 33 bp, Homo sapien
ttggatcactgcttccggaatgttttttcaata

SEQ ID NO: 827725 - DNA, 33 bp, Homo sapien
cacaagcattgaaaagaattccaaaaaggaggt

SEQ ID NO: 827726 - DNA, 33 bp, Homo sapien
cacaagcattgaaaaggattccaaaaaggaggt

SEQ ID NO: 827727 - DNA, 33 bp, Homo sapien
gtccttccatttgatagatttcacacaggaatc

SEQ ID NO: 827728 - DNA, 33 bp, Homo sapien
gtccttccatttgatatatttcacacaggaatc

SEQ ID NO: 827729 - DNA, 33 bp, Homo sapien
cacatcatggatcaaaacggaggcaaacttgct

SEQ ID NO: 827730 - DNA, 33 bp, Homo sapien
cacatcatggatcaaagcggaggcaaacttgct

SEQ ID NO: 827731 - DNA, 33 bp, Homo sapien
ctgaatgggaagaacccgaataaaggtgacagt

SEQ ID NO: 827732 - DNA, 33 bp, Homo sapien
ctgaatgggaagaacctgaataaaggtgacagt

SEQ ID NO: 827733 - DNA, 33 bp, Homo sapien
gatatttacaaaagccaaagagaggcatttttc

SEQ ID NO: 827734 - DNA, 33 bp, Homo sapien
gatatttacaaaagccgaagagaggcatttttc

SEQ ID NO: 827735 - DNA, 33 bp, Homo sapien
acttgtggacggaggaaacttagggattatcta

SEQ ID NO: 827736 - DNA, 33 bp, Homo sapien
acttgtggacggaggagacttagggattatcta

SEQ ID NO: 827737 - DNA, 33 bp, Homo sapien
gttctgttgaatatgccctggtttggaaagtct

SEQ ID NO: 827738 - DNA, 33 bp, Homo sapien
gttctgttgaatatgctctggtttggaaagtct

SEQ ID NO: 827739 - DNA, 33 bp, Homo sapien
gcttctctgtctttagccattgcgatatatatt

SEQ ID NO: 827740 - DNA, 33 bp, Homo sapien
gcttctctgtctttaggcattgcgatatatatt

SEQ ID NO: 827741 - DNA, 33 bp, Homo sapien
agccaggaaggaaatgacatttatgatttgtgt

SEQ ID NO: 827742 - DNA, 33 bp, Homo sapien
agccaggaaggaaatggcatttatgatttgtgt

SEQ ID NO: 827743 - DNA, 33 bp, Homo sapien
ggaaattaaactttcaatacagtgctggtctga

SEQ ID NO: 827744 - DNA, 33 bp, Homo sapien
ggaaattaaactttcattacagtgctggtctga

SEQ ID NO: 827745 - DNA, 33 bp, Homo sapien
tagtcccagtcatgaaagattgtatatgtgtgt

SEQ ID NO: 827746 - DNA, 33 bp, Homo sapien
tagtcccagtcatgaaggattgtatatgtgtgt

SEQ ID NO: 827747 - DNA, 33 bp, Homo sapien
acaagacttcctgatacgtcctcaaggatgatc

SEQ ID NO: 827748 - DNA, 33 bp, Homo sapien
acaagacttcctgatatgtcctcaaggatgatc

SEQ ID NO: 827749 - DNA, 33 bp, Homo sapien
tactcaaacatcttaacgagaactaaacacata

SEQ ID NO: 827750 - DNA, 33 bp, Homo sapien
tactcaaacatcttaatgagaactaaacacata

SEQ ID NO: 827751 - DNA, 33 bp, Homo sapien
atagaaaggcggctgaatacttgtcgcgaagag

SEQ ID NO: 827752 - DNA, 33 bp, Homo sapien
atagaaaggcggctgagtacttgtcgcgaagag

SEQ ID NO: 827753 - DNA, 33 bp, Homo sapien
tctggttagattttgccaccaatgagttttggt

SEQ ID NO: 827754 - DNA, 33 bp, Homo sapien
tctggttagattttgctaccaatgagttttggt

SEQ ID NO: 827755 - DNA, 33 bp, Homo sapien
atatgaatattcactcaaagtgggataaatatg

SEQ ID NO: 827756 - DNA, 33 bp, Homo sapien
atatgaatattcactcgaagtgggataaatatg

SEQ ID NO: 827757 - DNA, 33 bp, Homo sapien
ttgaaccactttgaggcccagtagcttagacgg

SEQ ID NO: 827758 - DNA, 33 bp, Homo sapien
ttgaaccactttgaggtccagtagcttagacgg

SEQ ID NO: 827759 - DNA, 33 bp, Homo sapien
aggcaatttctccctcagaattgaaacagacag

SEQ ID NO: 827760 - DNA, 33 bp, Homo sapien
aggcaatttctccctccgaattgaaacagacag

SEQ ID NO: 827761 - DNA, 33 bp, Homo sapien
tccgcaatcctggtaacgctgtaaattggaaac

SEQ ID NO: 827762 - DNA, 33 bp, Homo sapien
tccgcaatcctggtaatgctgtaaattggaaac

SEQ ID NO: 827763 - DNA, 33 bp, Homo sapien
tggtacaacttacaaccgatggcttcttagatt

SEQ ID NO: 827764 - DNA, 33 bp, Homo sapien
tggtacaacttacaactgatggcttcttagatt

SEQ ID NO: 827765 - DNA, 33 bp, Homo sapien
gttccagaattgttaaaatgtgaaacaatatgc

SEQ ID NO: 827766 - DNA, 33 bp, Homo sapien
gttccagaattgttaagatgtgaaacaatatgc

SEQ ID NO: 827767 - DNA, 33 bp, Homo sapien
aacatttcatccccggaccaaagcattagtttt

SEQ ID NO: 827768 - DNA, 33 bp, Homo sapien
aacatttcatccccggtccaaagcattagtttt

SEQ ID NO: 827769 - DNA, 33 bp, Homo sapien
ctgtgtaaatctttgaataagagggcagcagca

SEQ ID NO: 827770 - DNA, 33 bp, Homo sapien
ctgtgtaaatctttgattaagagggcagcagca

SEQ ID NO: 827771 - DNA, 33 bp, Homo sapien
ccttagctcaggtcggacactctctccttcctc

SEQ ID NO: 827772 - DNA, 33 bp, Homo sapien
ccttagctcaggtcgggcactctctccttcctc

SEQ ID NO: 827773 - DNA, 33 bp, Homo sapien
tcaagctcacaatacacattatcatttcaattc

SEQ ID NO: 827774 - DNA, 33 bp, Homo sapien
tcaagctcacaatacatattatcatttcaattc

SEQ ID NO: 827775 - DNA, 33 bp, Homo sapien
cttctctagtcattagaaaatgtaattcacatc

SEQ ID NO: 827776 - DNA, 33 bp, Homo sapien
cttctctagtcattaggaaatgtaattcacatc

SEQ ID NO: 827777 - DNA, 33 bp, Homo sapien
tttgttacatagttaaacacgtctcatgggggt

SEQ ID NO: 827778 - DNA, 33 bp, Homo sapien
tttgttacatagttaagcacgtctcatgggggt

SEQ ID NO: 827779 - DNA, 33 bp, Homo sapien
gtgggaggagtgaaagaagcaggaacagtaact

SEQ ID NO: 827780 - DNA, 33 bp, Homo sapien
gtgggaggagtgaaaggagcaggaacagtaact

SEQ ID NO: 827781 - DNA, 33 bp, Homo sapien
caagctcattaatatagccatcagctcacatag

SEQ ID NO: 827782 - DNA, 33 bp, Homo sapien
caagctcattaatatatccatcagctcacatag

SEQ ID NO: 827783 - DNA, 33 bp, Homo sapien
gtttctcttattctcacacatctgtatttggag

SEQ ID NO: 827784 - DNA, 33 bp, Homo sapien
gtttctcttattctcagacatctgtatttggag

SEQ ID NO: 827785 - DNA, 33 bp, Homo sapien
ttccttagtgtcaacaatgaggtagtgctgaac

SEQ ID NO: 827786 - DNA, 33 bp, Homo sapien
ttccttagtgtcaacagtgaggtagtgctgaac

SEQ ID NO: 827787 - DNA, 33 bp, Homo sapien
ctttaatggcttaaaacggaaagaaaatgaaca

SEQ ID NO: 827788 - DNA, 33 bp, Homo sapien
ctttaatggcttaaaatggaaagaaaatgaaca

SEQ ID NO: 827789 - DNA, 33 bp, Homo sapien
gggagggcagaggtaccagtagatagaggaagg

SEQ ID NO: 827790 - DNA, 33 bp, Homo sapien
gggagggcagaggtactagtagatagaggaagg

SEQ ID NO: 827791 - DNA, 33 bp, Homo sapien
caatagctttctggtgcatttcgttcttctata

SEQ ID NO: 827792 - DNA, 33 bp, Homo sapien
caatagctttctggtgtatttcgttcttctata

SEQ ID NO: 827793 - DNA, 33 bp, Homo sapien
ttctactgtattacaacgcactgaggataaggg

SEQ ID NO: 827794 - DNA, 33 bp, Homo sapien
ttctactgtattacaatgcactgaggataaggg

SEQ ID NO: 827795 - DNA, 33 bp, Homo sapien
caactcagtactctggccacttcatgtgttcat

SEQ ID NO: 827796 - DNA, 33 bp, Homo sapien
caactcagtactctggtcacttcatgtgttcat

SEQ ID NO: 827797 - DNA, 33 bp, Homo sapien
aaacacttgaggattaagcaacatcaaagataa

SEQ ID NO: 827798 - DNA, 33 bp, Homo sapien
aaacacttgaggattaggcaacatcaaagataa

SEQ ID NO: 827799 - DNA, 33 bp, Homo sapien
aagttttcctgaggaacatgttgagtttagctt

SEQ ID NO: 827800 - DNA, 33 bp, Homo sapien
aagttttcctgaggaagatgttgagtttagctt

SEQ ID NO: 827801 - DNA, 33 bp, Homo sapien
aattcatgagaagtcccgaaagtaagcatcttg

SEQ ID NO: 827802 - DNA, 33 bp, Homo sapien
aattcatgagaagtcctgaaagtaagcatcttg

SEQ ID NO: 827803 - DNA, 33 bp, Homo sapien
agatggttgaccaatgccacaaaaaagcagaaa

SEQ ID NO: 827804 - DNA, 33 bp, Homo sapien
agatggttgaccaatggcacaaaaaagcagaaa

SEQ ID NO: 827805 - DNA, 33 bp, Homo sapien
ataacatttcagagagacaaacatcactgtttt

SEQ ID NO: 827806 - DNA, 33 bp, Homo sapien
ataacatttcagagagtcaaacatcactgtttt

SEQ ID NO: 827807 - DNA, 33 bp, Homo sapien
ctagctgtttgttaagaaactaatcaattaatt

SEQ ID NO: 827808 - DNA, 33 bp, Homo sapien
ctagctgtttgttaaggaactaatcaattaatt

SEQ ID NO: 827809 - DNA, 33 bp, Homo sapien
tctcattgtgctctcacacattgcatctagttt

SEQ ID NO: 827810 - DNA, 33 bp, Homo sapien
tctcattgtgctctcatacattgcatctagttt

SEQ ID NO: 827811 - DNA, 33 bp, Homo sapien
cctggaatgatttgaacgtctgttgcatgcaca

SEQ ID NO: 827812 - DNA, 33 bp, Homo sapien
cctggaatgatttgaatgtctgttgcatgcaca

SEQ ID NO: 827813 - DNA, 33 bp, Homo sapien
tcaatagtgataactccacagttctaggtggca

SEQ ID NO: 827814 - DNA, 33 bp, Homo sapien
tcaatagtgataactctacagttctaggtggca

SEQ ID NO: 827815 - DNA, 33 bp, Homo sapien
aacctaatgcagtagacggagcaagcaggagag

SEQ ID NO: 827816 - DNA, 33 bp, Homo sapien
aacctaatgcagtagatggagcaagcaggagag

SEQ ID NO: 827817 - DNA, 33 bp, Homo sapien
ttctctgcacccttaactgaaagatcctggagt

SEQ ID NO: 827818 - DNA, 33 bp, Homo sapien
ttctctgcacccttaattgaaagatcctggagt

SEQ ID NO: 827819 - DNA, 33 bp, Homo sapien
aagatttcccctttaaacataagaatcatgata

SEQ ID NO: 827820 - DNA, 33 bp, Homo sapien
aagatttcccctttaagcataagaatcatgata

SEQ ID NO: 827821 - DNA, 33 bp, Homo sapien
gcaatgatagccccacagaaacaggagttcttt

SEQ ID NO: 827822 - DNA, 33 bp, Homo sapien
gcaatgatagccccacggaaacaggagttcttt

SEQ ID NO: 827823 - DNA, 33 bp, Homo sapien
catggacaggggaagacctacaattcaaaagag

SEQ ID NO: 827824 - DNA, 33 bp, Homo sapien
catggacaggggaagagctacaattcaaaagag

SEQ ID NO: 827825 - DNA, 33 bp, Homo sapien
tcattcctgttaataactaaaagtaactgccaa

SEQ ID NO: 827826 - DNA, 33 bp, Homo sapien
tcattcctgttaataagtaaaagtaactgccaa

SEQ ID NO: 827827 - DNA, 33 bp, Homo sapien
agacaagacactcagagaaaggtctcaaaggca

SEQ ID NO: 827828 - DNA, 33 bp, Homo sapien
agacaagacactcagataaaggtctcaaaggca

SEQ ID NO: 827829 - DNA, 33 bp, Homo sapien
gaaaagataacttgcaaggaactggccaatgag

SEQ ID NO: 827830 - DNA, 33 bp, Homo sapien
gaaaagataacttgcatggaactggccaatgag

SEQ ID NO: 827831 - DNA, 33 bp, Homo sapien
caaagaacttgacccaatgcaagggcccaacac

SEQ ID NO: 827832 - DNA, 33 bp, Homo sapien
caaagaacttgacccagtgcaagggcccaacac

SEQ ID NO: 827833 - DNA, 33 bp, Homo sapien
cacacaaagagtcataaaaggaactgaggaggg

SEQ ID NO: 827834 - DNA, 33 bp, Homo sapien
cacacaaagagtcatataaggaactgaggaggg

SEQ ID NO: 827835 - DNA, 33 bp, Homo sapien
cttagtgaaatgaaacagaactctaactatgtc

SEQ ID NO: 827836 - DNA, 33 bp, Homo sapien
cttagtgaaatgaaacggaactctaactatgtc

SEQ ID NO: 827837 - DNA, 33 bp, Homo sapien
gtcactcctgcgattacgttataaaagattcag

SEQ ID NO: 827838 - DNA, 33 bp, Homo sapien
gtcactcctgcgattatgttataaaagattcag

SEQ ID NO: 827839 - DNA, 33 bp, Homo sapien
gatgtttaaagctctgcagagattccagtatgc

SEQ ID NO: 827840 - DNA, 33 bp, Homo sapien
gatgtttaaagctctgtagagattccagtatgc

SEQ ID NO: 827841 - DNA, 33 bp, Homo sapien
ttatagttatattaacactttccctgtggtcac

SEQ ID NO: 827842 - DNA, 33 bp, Homo sapien
ttatagttatattaactctttccctgtggtcac

SEQ ID NO: 827843 - DNA, 33 bp, Homo sapien
tcaactaattcaataaacttttgcacaccctag

SEQ ID NO: 827844 - DNA, 33 bp, Homo sapien
tcaactaattcaataagcttttgcacaccctag

SEQ ID NO: 827845 - DNA, 33 bp, Homo sapien
tctcctttctttcagactcaaataaagtgtcaa

SEQ ID NO: 827846 - DNA, 33 bp, Homo sapien
tctcctttctttcagattcaaataaagtgtcaa

SEQ ID NO: 827847 - DNA, 33 bp, Homo sapien
ggactggagtagaacacagtcatatggaatgcc

SEQ ID NO: 827848 - DNA, 33 bp, Homo sapien
ggactggagtagaacatagtcatatggaatgcc

SEQ ID NO: 827849 - DNA, 33 bp, Homo sapien
tatgtaaacttccacccctcttacactaagctg

SEQ ID NO: 827850 - DNA, 33 bp, Homo sapien
tatgtaaacttccacctctcttacactaagctg

SEQ ID NO: 827851 - DNA, 33 bp, Homo sapien
taagcaatgagaaacaggaggggttaagcaata

SEQ ID NO: 827852 - DNA, 33 bp, Homo sapien
taagcaatgagaaacatgaggggttaagcaata

SEQ ID NO: 827853 - DNA, 33 bp, Homo sapien
ggatggccataatttgaacctcatttgaggaat

SEQ ID NO: 827854 - DNA, 33 bp, Homo sapien
ggatggccataatttgtacctcatttgaggaat

SEQ ID NO: 827855 - DNA, 33 bp, Homo sapien
acgagaacttcgtgaaccataaccaagtgtcaa

SEQ ID NO: 827856 - DNA, 33 bp, Homo sapien
acgagaacttcgtgaagcataaccaagtgtcaa

SEQ ID NO: 827857 - DNA, 33 bp, Homo sapien
tgcagatagtcatcaaatgaggtacaatatttg

SEQ ID NO: 827858 - DNA, 33 bp, Homo sapien
tgcagatagtcatcaactgaggtacaatatttg

SEQ ID NO: 827859 - DNA, 33 bp, Homo sapien
tcgggaggctgaacaccggccctcagaccagaa

SEQ ID NO: 827860 - DNA, 33 bp, Homo sapien
tcgggaggctgaacactggccctcagaccagaa

SEQ ID NO: 827861 - DNA, 33 bp, Homo sapien
aaatcttcccccacaaacttgctgctgtttctt

SEQ ID NO: 827862 - DNA, 33 bp, Homo sapien
aaatcttcccccacaaccttgctgctgtttctt

SEQ ID NO: 827863 - DNA, 33 bp, Homo sapien
gcttctcagtggttaaacaatccccctccaatt

SEQ ID NO: 827864 - DNA, 33 bp, Homo sapien
gcttctcagtggttaagcaatccccctccaatt

SEQ ID NO: 827865 - DNA, 33 bp, Homo sapien
ggtgagactccagctaacactaatttaccactt

SEQ ID NO: 827866 - DNA, 33 bp, Homo sapien
ggtgagactccagctatcactaatttaccactt

SEQ ID NO: 827867 - DNA, 33 bp, Homo sapien
tctcagacattcaaacccatttgtttcagaaac

SEQ ID NO: 827868 - DNA, 33 bp, Homo sapien
tctcagacattcaaactcatttgtttcagaaac

SEQ ID NO: 827869 - DNA, 33 bp, Homo sapien
tacaaagtccataggtaacattaaggttcactc

SEQ ID NO: 827870 - DNA, 33 bp, Homo sapien
tacaaagtccataggtcacattaaggttcactc

SEQ ID NO: 827871 - DNA, 33 bp, Homo sapien
tttgtgttccaaataactggctcaaaaattcgc

SEQ ID NO: 827872 - DNA, 33 bp, Homo sapien
tttgtgttccaaataattggctcaaaaattcgc

SEQ ID NO: 827873 - DNA, 33 bp, Homo sapien
taatgactatcctaaacaatatcaggcacttta

SEQ ID NO: 827874 - DNA, 33 bp, Homo sapien
taatgactatcctaaataatatcaggcacttta

SEQ ID NO: 827875 - DNA, 33 bp, Homo sapien
acatttttacatatacaaaagctgaaaaagtgc

SEQ ID NO: 827876 - DNA, 33 bp, Homo sapien
acatttttacatatacgaaagctgaaaaagtgc

SEQ ID NO: 827877 - DNA, 33 bp, Homo sapien
tgtttccttcctcttaactttcttggacttcat

SEQ ID NO: 827878 - DNA, 33 bp, Homo sapien
tgtttccttcctcttatctttcttggacttcat

SEQ ID NO: 827879 - DNA, 33 bp, Homo sapien
aggtagaaagacaaaactcaagatactgctata

SEQ ID NO: 827880 - DNA, 33 bp, Homo sapien
aggtagaaagacaaaattcaagatactgctata

SEQ ID NO: 827881 - DNA, 33 bp, Homo sapien
ggtcagtcatttctaccgatacctaaggtcaca

SEQ ID NO: 827882 - DNA, 33 bp, Homo sapien
ggtcagtcatttctactgatacctaaggtcaca

SEQ ID NO: 827883 - DNA, 33 bp, Homo sapien
aattctcttcttctaacctagtctgtgtaagaa

SEQ ID NO: 827884 - DNA, 33 bp, Homo sapien
aattctcttcttctaatctagtctgtgtaagaa

SEQ ID NO: 827885 - DNA, 33 bp, Homo sapien
tttttaaaaagaggaaaggacaaatctatgtag

SEQ ID NO: 827886 - DNA, 33 bp, Homo sapien
tttttaaaaagaggaacggacaaatctatgtag

SEQ ID NO: 827887 - DNA, 33 bp, Homo sapien
cagtgatgtgcagataaaagaaaaacattgttt

SEQ ID NO: 827888 - DNA, 33 bp, Homo sapien
cagtgatgtgcagatagaagaaaaacattgttt

SEQ ID NO: 827889 - DNA, 33 bp, Homo sapien
tatgaaggaacataaaattacacatgttttcac

SEQ ID NO: 827890 - DNA, 33 bp, Homo sapien
tatgaaggaacataaagttacacatgttttcac

SEQ ID NO: 827891 - DNA, 33 bp, Homo sapien
agacacacaaagcacaccgcatttgctacagct

SEQ ID NO: 827892 - DNA, 33 bp, Homo sapien
agacacacaaagcacatcgcatttgctacagct

SEQ ID NO: 827893 - DNA, 33 bp, Homo sapien
tgaacctcttaggagaaaccatattctaggatt

SEQ ID NO: 827894 - DNA, 33 bp, Homo sapien
tgaacctcttaggagataccatattctaggatt

SEQ ID NO: 827895 - DNA, 33 bp, Homo sapien
ttcagccaaaacagaccgtaaacaaacaaagat

SEQ ID NO: 827896 - DNA, 33 bp, Homo sapien
ttcagccaaaacagactgtaaacaaacaaagat

SEQ ID NO: 827897 - DNA, 33 bp, Homo sapien
aggaattggatcatgacggtagtacaaagatag

SEQ ID NO: 827898 - DNA, 33 bp, Homo sapien
aggaattggatcatgatggtagtacaaagatag

SEQ ID NO: 827899 - DNA, 33 bp, Homo sapien
gtaggtaccttgcataacattaaaactgatact

SEQ ID NO: 827900 - DNA, 33 bp, Homo sapien
gtaggtaccttgcatagcattaaaactgatact

SEQ ID NO: 827901 - DNA, 33 bp, Homo sapien
aagactgggatagttaagaccaaaatctatgtc

SEQ ID NO: 827902 - DNA, 33 bp, Homo sapien
aagactgggatagttatgaccaaaatctatgtc

SEQ ID NO: 827903 - DNA, 33 bp, Homo sapien
ccctctctgcaaaatgaactctttgtaaactac

SEQ ID NO: 827904 - DNA, 33 bp, Homo sapien
ccctctctgcaaaatgtactctttgtaaactac

SEQ ID NO: 827905 - DNA, 33 bp, Homo sapien
ctcttctcctttctgcccgcagcatttcagcgt

SEQ ID NO: 827906 - DNA, 33 bp, Homo sapien
ctcttctcctttctgctcgcagcatttcagcgt

SEQ ID NO: 827907 - DNA, 33 bp, Homo sapien
agaggtaataggggtaactccaaacacattttt

SEQ ID NO: 827908 - DNA, 33 bp, Homo sapien
agaggtaataggggtatctccaaacacattttt

SEQ ID NO: 827909 - DNA, 33 bp, Homo sapien
ggactcagtaatccaacgcttgactagcagtct

SEQ ID NO: 827910 - DNA, 33 bp, Homo sapien
ggactcagtaatccaaggcttgactagcagtct

SEQ ID NO: 827911 - DNA, 33 bp, Homo sapien
gggctcagaggcctgacatgggtaaagaaagta

SEQ ID NO: 827912 - DNA, 33 bp, Homo sapien
gggctcagaggcctgatatgggtaaagaaagta

SEQ ID NO: 827913 - DNA, 33 bp, Homo sapien
ttggcaacggttcataaccatgtaaagctgata

SEQ ID NO: 827914 - DNA, 33 bp, Homo sapien
ttggcaacggttcatacccatgtaaagctgata

SEQ ID NO: 827915 - DNA, 33 bp, Homo sapien
atactatcgtgctaaaagtagaggaggctagag

SEQ ID NO: 827916 - DNA, 33 bp, Homo sapien
atactatcgtgctaaaggtagaggaggctagag

SEQ ID NO: 827917 - DNA, 33 bp, Homo sapien
agtgagcagaaaaaacaaagagcacagaggaag

SEQ ID NO: 827918 - DNA, 33 bp, Homo sapien
agtgagcagaaaaaaccaagagcacagaggaag

SEQ ID NO: 827919 - DNA, 33 bp, Homo sapien
cctgtgctgtctatcacgtaatgtctaaaaata

SEQ ID NO: 827920 - DNA, 33 bp, Homo sapien
cctgtgctgtctatcatgtaatgtctaaaaata

SEQ ID NO: 827921 - DNA, 33 bp, Homo sapien
caaattttctgtcctacgcagaatctccacgta

SEQ ID NO: 827922 - DNA, 33 bp, Homo sapien
caaattttctgtcctatgcagaatctccacgta

SEQ ID NO: 827923 - DNA, 33 bp, Homo sapien
taggggctatatttacaaagaggcttcaatatc

SEQ ID NO: 827924 - DNA, 33 bp, Homo sapien
taggggctatatttacgaagaggcttcaatatc

SEQ ID NO: 827925 - DNA, 33 bp, Homo sapien
tcctctatttccactaccaaaacatcaaagttt

SEQ ID NO: 827926 - DNA, 33 bp, Homo sapien
tcctctatttccactagcaaaacatcaaagttt

SEQ ID NO: 827927 - DNA, 33 bp, Homo sapien
agagtaaacatatcctcagccgcacagaccatg

SEQ ID NO: 827928 - DNA, 33 bp, Homo sapien
agagtaaacatatccttagccgcacagaccatg

SEQ ID NO: 827929 - DNA, 33 bp, Homo sapien
gagaggctcaagattaactaagaactttctcac

SEQ ID NO: 827930 - DNA, 33 bp, Homo sapien
gagaggctcaagattagctaagaactttctcac

SEQ ID NO: 827931 - DNA, 33 bp, Homo sapien
actatggtacaccaaacgatggaatattactca

SEQ ID NO: 827932 - DNA, 33 bp, Homo sapien
actatggtacaccaaatgatggaatattactca

SEQ ID NO: 827933 - DNA, 33 bp, Homo sapien
tggaatgttttctttcaatattagttccaggca

SEQ ID NO: 827934 - DNA, 33 bp, Homo sapien
tggaatgttttctttcgatattagttccaggca

SEQ ID NO: 827935 - DNA, 33 bp, Homo sapien
gtacaaacccagctaacgatggaatgttttctt

SEQ ID NO: 827936 - DNA, 33 bp, Homo sapien
gtacaaacccagctaatgatggaatgttttctt

SEQ ID NO: 827937 - DNA, 33 bp, Homo sapien
cttcatttgaatgaaacggcctgtatgaaaaat

SEQ ID NO: 827938 - DNA, 33 bp, Homo sapien
cttcatttgaatgaaatggcctgtatgaaaaat

SEQ ID NO: 827939 - DNA, 33 bp, Homo sapien
tcaaacagtgagtaaacaatgtagctttaaact

SEQ ID NO: 827940 - DNA, 33 bp, Homo sapien
tcaaacagtgagtaaagaatgtagctttaaact

SEQ ID NO: 827941 - DNA, 33 bp, Homo sapien
ataataatgtgtcatacatttgtttcaaaacat

SEQ ID NO: 827942 - DNA, 33 bp, Homo sapien
ataataatgtgtcatatatttgtttcaaaacat

SEQ ID NO: 827943 - DNA, 33 bp, Homo sapien
tgataagaagcagaccaattcaaccaacagagt

SEQ ID NO: 827944 - DNA, 33 bp, Homo sapien
tgataagaagcagaccgattcaaccaacagagt

SEQ ID NO: 827945 - DNA, 33 bp, Homo sapien
gtcaacagaagaaccacagctaatacccacatt

SEQ ID NO: 827946 - DNA, 33 bp, Homo sapien
gtcaacagaagaaccagagctaatacccacatt

SEQ ID NO: 827947 - DNA, 33 bp, Homo sapien
tcttctgttgactagcaaagtgaccttgggcaa

SEQ ID NO: 827948 - DNA, 33 bp, Homo sapien
tcttctgttgactagccaagtgaccttgggcaa

SEQ ID NO: 827949 - DNA, 33 bp, Homo sapien
gttgtgtgctgtttgacagaaatgcaatatgag

SEQ ID NO: 827950 - DNA, 33 bp, Homo sapien
gttgtgtgctgtttgatagaaatgcaatatgag

SEQ ID NO: 827951 - DNA, 33 bp, Homo sapien
gttgctgtcacacatactagagatgaagccttc

SEQ ID NO: 827952 - DNA, 33 bp, Homo sapien
gttgctgtcacacatattagagatgaagccttc

SEQ ID NO: 827953 - DNA, 33 bp, Homo sapien
tgaaaaagcatttggacgtgttgctaaatacat

SEQ ID NO: 827954 - DNA, 33 bp, Homo sapien
tgaaaaagcatttggatgtgttgctaaatacat

SEQ ID NO: 827955 - DNA, 33 bp, Homo sapien
actaataagacactcaccgtaaagatcagtaaa

SEQ ID NO: 827956 - DNA, 33 bp, Homo sapien
actaataagacactcatcgtaaagatcagtaaa

SEQ ID NO: 827957 - DNA, 33 bp, Homo sapien
agtctgtggtacatagaacaagctggaaccttt

SEQ ID NO: 827958 - DNA, 33 bp, Homo sapien
agtctgtggtacataggacaagctggaaccttt

SEQ ID NO: 827959 - DNA, 33 bp, Homo sapien
aatgactacagtgtgacagaatttcattaccgt

SEQ ID NO: 827960 - DNA, 33 bp, Homo sapien
aatgactacagtgtgatagaatttcattaccgt

SEQ ID NO: 827961 - DNA, 33 bp, Homo sapien
ctcaattctgatgggaactcacctatttagaga

SEQ ID NO: 827962 - DNA, 33 bp, Homo sapien
ctcaattctgatgggatctcacctatttagaga

SEQ ID NO: 827963 - DNA, 33 bp, Homo sapien
acaggtataaaggatgaaagatttctaggacac

SEQ ID NO: 827964 - DNA, 33 bp, Homo sapien
acaggtataaaggatgtaagatttctaggacac

SEQ ID NO: 827965 - DNA, 33 bp, Homo sapien
cccaaaggcattgtagcccaaccgaagtggttc

SEQ ID NO: 827966 - DNA, 33 bp, Homo sapien
cccaaaggcattgtaggccaaccgaagtggttc

SEQ ID NO: 827967 - DNA, 33 bp, Homo sapien
taggtattccaatttcactctcaccctgaaaaa

SEQ ID NO: 827968 - DNA, 33 bp, Homo sapien
taggtattccaatttctctctcaccctgaaaaa

SEQ ID NO: 827969 - DNA, 33 bp, Homo sapien
aatattttcctttctaataccagcttattaact

SEQ ID NO: 827970 - DNA, 33 bp, Homo sapien
aatattttcctttctagtaccagcttattaact

SEQ ID NO: 827971 - DNA, 33 bp, Homo sapien
gaaatgtcctggaaaggctgtctccaagtgcac

SEQ ID NO: 827972 - DNA, 33 bp, Homo sapien
gaaatgtcctggaaagtctgtctccaagtgcac

SEQ ID NO: 827973 - DNA, 33 bp, Homo sapien
caatccagtgggctcaatcttttaatctctaac

SEQ ID NO: 827974 - DNA, 33 bp, Homo sapien
caatccagtgggctcagtcttttaatctctaac

SEQ ID NO: 827975 - DNA, 33 bp, Homo sapien
taccaggcaggggacacgtgtattcctcatttg

SEQ ID NO: 827976 - DNA, 33 bp, Homo sapien
taccaggcaggggacatgtgtattcctcatttg

SEQ ID NO: 827977 - DNA, 33 bp, Homo sapien
gaaaccaaccctattgaaggtcaaggagcatct

SEQ ID NO: 827978 - DNA, 33 bp, Homo sapien
gaaaccaaccctattgtaggtcaaggagcatct

SEQ ID NO: 827979 - DNA, 33 bp, Homo sapien
gctggtaactttatcaagagttgtatattttta

SEQ ID NO: 827980 - DNA, 33 bp, Homo sapien
gctggtaactttatcaggagttgtatattttta

SEQ ID NO: 827981 - DNA, 33 bp, Homo sapien
taaaaaattgtgaaaaatgttgataagaaagaa

SEQ ID NO: 827982 - DNA, 33 bp, Homo sapien
taaaaaattgtgaaaagtgttgataagaaagaa

SEQ ID NO: 827983 - DNA, 33 bp, Homo sapien
tctatatagcacacttcaaaaatttgcaggcta

SEQ ID NO: 827984 - DNA, 33 bp, Homo sapien
tctatatagcacactttaaaaatttgcaggcta

SEQ ID NO: 827985 - DNA, 33 bp, Homo sapien
gcatcagggagttcccagaaccatatatggaaa

SEQ ID NO: 827986 - DNA, 33 bp, Homo sapien
gcatcagggagttccccgaaccatatatggaaa

SEQ ID NO: 827987 - DNA, 33 bp, Homo sapien
tcaggggaaattattaaactctagcatatgagg

SEQ ID NO: 827988 - DNA, 33 bp, Homo sapien
tcaggggaaattattagactctagcatatgagg

SEQ ID NO: 827989 - DNA, 33 bp, Homo sapien
ccacagctgtttggtacccttcctagccagatt

SEQ ID NO: 827990 - DNA, 33 bp, Homo sapien
ccacagctgtttggtatccttcctagccagatt

SEQ ID NO: 827991 - DNA, 33 bp, Homo sapien
aataaaagacatctcacagtgtgaaccagttag

SEQ ID NO: 827992 - DNA, 33 bp, Homo sapien
aataaaagacatctcagagtgtgaaccagttag

SEQ ID NO: 827993 - DNA, 33 bp, Homo sapien
gaaaactacaggaataccaaaataacttgctag

SEQ ID NO: 827994 - DNA, 33 bp, Homo sapien
gaaaactacaggaatagcaaaataacttgctag

SEQ ID NO: 827995 - DNA, 33 bp, Homo sapien
gtatttactaggaatcagagtgggtgtctgaca

SEQ ID NO: 827996 - DNA, 33 bp, Homo sapien
gtatttactaggaatcggagtgggtgtctgaca

SEQ ID NO: 827997 - DNA, 33 bp, Homo sapien
agtgtaagctgaccaaatatatacgataggaac

SEQ ID NO: 827998 - DNA, 33 bp, Homo sapien
agtgtaagctgaccaagtatatacgataggaac

SEQ ID NO: 827999 - DNA, 33 bp, Homo sapien
caacaaatatctataaaaacatactccttgtcc

SEQ ID NO: 828000 - DNA, 33 bp, Homo sapien
caacaaatatctataagaacatactccttgtcc

SEQ ID NO: 828001 - DNA, 33 bp, Homo sapien
actccatcaattaatgaaacacaagttgatatg

SEQ ID NO: 828002 - DNA, 33 bp, Homo sapien
actccatcaattaatggaacacaagttgatatg

SEQ ID NO: 828003 - DNA, 33 bp, Homo sapien
aagctattatacccacagcttaaatctctttct

SEQ ID NO: 828004 - DNA, 33 bp, Homo sapien
aagctattatacccactgcttaaatctctttct

SEQ ID NO: 828005 - DNA, 33 bp, Homo sapien
atttgaacttagtctgaattctctgctatgaga

SEQ ID NO: 828006 - DNA, 33 bp, Homo sapien
atttgaacttagtctgtattctctgctatgaga

SEQ ID NO: 828007 - DNA, 33 bp, Homo sapien
tcattttctaatgagaagcttttgatgaaagaa

SEQ ID NO: 828008 - DNA, 33 bp, Homo sapien
tcattttctaatgagatgcttttgatgaaagaa

SEQ ID NO: 828009 - DNA, 33 bp, Homo sapien
aagcctggattagctcaattaagatgtttaaag

SEQ ID NO: 828010 - DNA, 33 bp, Homo sapien
aagcctggattagctcgattaagatgtttaaag

SEQ ID NO: 828011 - DNA, 33 bp, Homo sapien
tcttcagctggtaaaactttctctgtttagccc

SEQ ID NO: 828012 - DNA, 33 bp, Homo sapien
tcttcagctggtaaaattttctctgtttagccc

SEQ ID NO: 828013 - DNA, 33 bp, Homo sapien
gccaaaaagagtcctacgtagaaactgaatcag

SEQ ID NO: 828014 - DNA, 33 bp, Homo sapien
gccaaaaagagtcctatgtagaaactgaatcag

SEQ ID NO: 828015 - DNA, 33 bp, Homo sapien
tccttacaactgtgtaaagagtggattcttggt

SEQ ID NO: 828016 - DNA, 33 bp, Homo sapien
tccttacaactgtgtagagagtggattcttggt

SEQ ID NO: 828017 - DNA, 33 bp, Homo sapien
gaagcacccgtctgctaacaccattagagcctt

SEQ ID NO: 828018 - DNA, 33 bp, Homo sapien
gaagcacccgtctgctgacaccattagagcctt

SEQ ID NO: 828019 - DNA, 33 bp, Homo sapien
agagtggttacattccacaaagttacagaccta

SEQ ID NO: 828020 - DNA, 33 bp, Homo sapien
agagtggttacattccgcaaagttacagaccta

SEQ ID NO: 828021 - DNA, 33 bp, Homo sapien
atcttaataacgactacgaactgtggaaatttc

SEQ ID NO: 828022 - DNA, 33 bp, Homo sapien
atcttaataacgactatgaactgtggaaatttc

SEQ ID NO: 828023 - DNA, 33 bp, Homo sapien
atatacaagaatacaaaaagggaaggttggaaa

SEQ ID NO: 828024 - DNA, 33 bp, Homo sapien
atatacaagaatacaagaagggaaggttggaaa

SEQ ID NO: 828025 - DNA, 33 bp, Homo sapien
ccaggctcctgtggcaaattcattctcactttt

SEQ ID NO: 828026 - DNA, 33 bp, Homo sapien
ccaggctcctgtggcagattcattctcactttt

SEQ ID NO: 828027 - DNA, 33 bp, Homo sapien
aggagaccaggttagagaatgacccgggaagga

SEQ ID NO: 828028 - DNA, 33 bp, Homo sapien
aggagaccaggttagataatgacccgggaagga

SEQ ID NO: 828029 - DNA, 33 bp, Homo sapien
gggagagttgtggggaaatagtatgtgccatta

SEQ ID NO: 828030 - DNA, 33 bp, Homo sapien
gggagagttgtggggagatagtatgtgccatta

SEQ ID NO: 828031 - DNA, 33 bp, Homo sapien
caatttgcaatgactgaacaggcttgtgtgcca

SEQ ID NO: 828032 - DNA, 33 bp, Homo sapien
caatttgcaatgactgcacaggcttgtgtgcca

SEQ ID NO: 828033 - DNA, 33 bp, Homo sapien
acacttcattattcccaaatcttaatgtgtctt

SEQ ID NO: 828034 - DNA, 33 bp, Homo sapien
acacttcattattcccgaatcttaatgtgtctt

SEQ ID NO: 828035 - DNA, 33 bp, Homo sapien
tgaccaattccaagaaaatgagtaagctgccaa

SEQ ID NO: 828036 - DNA, 33 bp, Homo sapien
tgaccaattccaagaacatgagtaagctgccaa

SEQ ID NO: 828037 - DNA, 33 bp, Homo sapien
ccacccaggaaccatacgaggaaagggatgctg

SEQ ID NO: 828038 - DNA, 33 bp, Homo sapien
ccacccaggaaccatatgaggaaagggatgctg

SEQ ID NO: 828039 - DNA, 33 bp, Homo sapien
catcacacctataggaactagaaaatcaaggac

SEQ ID NO: 828040 - DNA, 33 bp, Homo sapien
catcacacctataggagctagaaaatcaaggac

SEQ ID NO: 828041 - DNA, 33 bp, Homo sapien
ttcacaggttctgagcagatgtatcttttggag

SEQ ID NO: 828042 - DNA, 33 bp, Homo sapien
ttcacaggttctgagcggatgtatcttttggag

SEQ ID NO: 828043 - DNA, 33 bp, Homo sapien
ccctctatgtagtacaaccactagctgaattcc

SEQ ID NO: 828044 - DNA, 33 bp, Homo sapien
ccctctatgtagtacagccactagctgaattcc

SEQ ID NO: 828045 - DNA, 33 bp, Homo sapien
ttaacattttaagaacagtatttggatgcagaa

SEQ ID NO: 828046 - DNA, 33 bp, Homo sapien
ttaacattttaagaaccgtatttggatgcagaa

SEQ ID NO: 828047 - DNA, 33 bp, Homo sapien
ggaatctcattaatcaaccatctatatctgtct

SEQ ID NO: 828048 - DNA, 33 bp, Homo sapien
ggaatctcattaatcagccatctatatctgtct

SEQ ID NO: 828049 - DNA, 33 bp, Homo sapien
aaaggcacgtgattgtaaaaatttggcttttaa

SEQ ID NO: 828050 - DNA, 33 bp, Homo sapien
aaaggcacgtgattgtgaaaatttggcttttaa

SEQ ID NO: 828051 - DNA, 33 bp, Homo sapien
tctgtcccagtagctcactagagtagcaaccat

SEQ ID NO: 828052 - DNA, 33 bp, Homo sapien
tctgtcccagtagctcgctagagtagcaaccat

SEQ ID NO: 828053 - DNA, 33 bp, Homo sapien
gaggtgtctttaaacacaagcacacataaaaca

SEQ ID NO: 828054 - DNA, 33 bp, Homo sapien
gaggtgtctttaaacataagcacacataaaaca

SEQ ID NO: 828055 - DNA, 33 bp, Homo sapien
tagatgttcagttgataaaaatgctgtcaccag

SEQ ID NO: 828056 - DNA, 33 bp, Homo sapien
tagatgttcagttgatgaaaatgctgtcaccag

SEQ ID NO: 828057 - DNA, 33 bp, Homo sapien
gttctagggtgcttgtcaaacatttaatctaga

SEQ ID NO: 828058 - DNA, 33 bp, Homo sapien
gttctagggtgcttgtgaaacatttaatctaga

SEQ ID NO: 828059 - DNA, 33 bp, Homo sapien
tatgaaagtaaccaataaacttctcattttagc

SEQ ID NO: 828060 - DNA, 33 bp, Homo sapien
tatgaaagtaaccaatgaacttctcattttagc

SEQ ID NO: 828061 - DNA, 33 bp, Homo sapien
gggctgaacaaaagccaagagggcaaacagatg

SEQ ID NO: 828062 - DNA, 33 bp, Homo sapien
gggctgaacaaaagccgagagggcaaacagatg

SEQ ID NO: 828063 - DNA, 33 bp, Homo sapien
gaacagatgcatcctaggtccaatggggagcta

SEQ ID NO: 828064 - DNA, 33 bp, Homo sapien
gaacagatgcatcctatgtccaatggggagcta

SEQ ID NO: 828065 - DNA, 33 bp, Homo sapien
ataaaattgaaacaaaatatgtagatgagagag

SEQ ID NO: 828066 - DNA, 33 bp, Homo sapien
ataaaattgaaacaaagtatgtagatgagagag

SEQ ID NO: 828067 - DNA, 33 bp, Homo sapien
ccattatcaatatccaccagagtactacatttg

SEQ ID NO: 828068 - DNA, 33 bp, Homo sapien
ccattatcaatatccatcagagtactacatttg

SEQ ID NO: 828069 - DNA, 33 bp, Homo sapien
taagatacacatggaaaataacaatcacgctgt

SEQ ID NO: 828070 - DNA, 33 bp, Homo sapien
taagatacacatggaagataacaatcacgctgt

SEQ ID NO: 828071 - DNA, 33 bp, Homo sapien
cacactcacccggtgacctttggcagagggtgc

SEQ ID NO: 828072 - DNA, 33 bp, Homo sapien
cacactcacccggtgatctttggcagagggtgc

SEQ ID NO: 828073 - DNA, 33 bp, Homo sapien
tttctgtgattttaagcatgtgcaaagagattc

SEQ ID NO: 828074 - DNA, 33 bp, Homo sapien
tttctgtgattttaagtatgtgcaaagagattc

SEQ ID NO: 828075 - DNA, 33 bp, Homo sapien
acaaattttctccatcacttctaaggctgaatt

SEQ ID NO: 828076 - DNA, 33 bp, Homo sapien
acaaattttctccatctcttctaaggctgaatt

SEQ ID NO: 828077 - DNA, 33 bp, Homo sapien
gtttgtgaaggtcagaagtccaggaaaggccag

SEQ ID NO: 828078 - DNA, 33 bp, Homo sapien
gtttgtgaaggtcagatgtccaggaaaggccag

SEQ ID NO: 828079 - DNA, 33 bp, Homo sapien
aatagtgggatgactgcaagctttgtctacatg

SEQ ID NO: 828080 - DNA, 33 bp, Homo sapien
aatagtgggatgactggaagctttgtctacatg

SEQ ID NO: 828081 - DNA, 33 bp, Homo sapien
gcttgtatcacaggataaaaatggctgtgattc

SEQ ID NO: 828082 - DNA, 33 bp, Homo sapien
gcttgtatcacaggattaaaatggctgtgattc

SEQ ID NO: 828083 - DNA, 33 bp, Homo sapien
actctcaattagtaagcattttctgatctagca

SEQ ID NO: 828084 - DNA, 33 bp, Homo sapien
actctcaattagtaaggattttctgatctagca

SEQ ID NO: 828085 - DNA, 33 bp, Homo sapien
gacccaaaagaaataaatgagcatgttatgaat

SEQ ID NO: 828086 - DNA, 33 bp, Homo sapien
gacccaaaagaaataagtgagcatgttatgaat

SEQ ID NO: 828087 - DNA, 33 bp, Homo sapien
aaacgaatcaaatttacattgacaaagtatcta

SEQ ID NO: 828088 - DNA, 33 bp, Homo sapien
aaacgaatcaaatttatattgacaaagtatcta

SEQ ID NO: 828089 - DNA, 33 bp, Homo sapien
ttgaaactgctcattagaggaatgcaagtcaaa

SEQ ID NO: 828090 - DNA, 33 bp, Homo sapien
ttgaaactgctcattataggaatgcaagtcaaa

SEQ ID NO: 828091 - DNA, 33 bp, Homo sapien
gataaatagttgtaaacgctgactggtgaaaag

SEQ ID NO: 828092 - DNA, 33 bp, Homo sapien
gataaatagttgtaaatgctgactggtgaaaag

SEQ ID NO: 828093 - DNA, 33 bp, Homo sapien
tgctgcctaagttagacgataaggaatatgtgt

SEQ ID NO: 828094 - DNA, 33 bp, Homo sapien
tgctgcctaagttagatgataaggaatatgtgt

SEQ ID NO: 828095 - DNA, 33 bp, Homo sapien
gctgagaatgcacttaaatagtctcacagtaaa

SEQ ID NO: 828096 - DNA, 33 bp, Homo sapien
gctgagaatgcacttacatagtctcacagtaaa

SEQ ID NO: 828097 - DNA, 33 bp, Homo sapien
caccttcataatctccacattgccacttccagc

SEQ ID NO: 828098 - DNA, 33 bp, Homo sapien
caccttcataatctccgcattgccacttccagc

SEQ ID NO: 828099 - DNA, 33 bp, Homo sapien
ttagttgaccaaccaccatttaaggactcacct

SEQ ID NO: 828100 - DNA, 33 bp, Homo sapien
ttagttgaccaaccactatttaaggactcacct

SEQ ID NO: 828101 - DNA, 33 bp, Homo sapien
acatgtttcttttcccaaacaccaatagctgca

SEQ ID NO: 828102 - DNA, 33 bp, Homo sapien
acatgtttcttttccccaacaccaatagctgca

SEQ ID NO: 828103 - DNA, 33 bp, Homo sapien
actgcttatcccaaaacaggagaggagagtgat

SEQ ID NO: 828104 - DNA, 33 bp, Homo sapien
actgcttatcccaaaataggagaggagagtgat

SEQ ID NO: 828105 - DNA, 33 bp, Homo sapien
gagatatatagctaaactggtaggtggttgggg

SEQ ID NO: 828106 - DNA, 33 bp, Homo sapien
gagatatatagctaaattggtaggtggttgggg

SEQ ID NO: 828107 - DNA, 33 bp, Homo sapien
caatattaattcaaaaaagtgaatggattcctt

SEQ ID NO: 828108 - DNA, 33 bp, Homo sapien
caatattaattcaaaagagtgaatggattcctt

SEQ ID NO: 828109 - DNA, 33 bp, Homo sapien
ttaaatggtgttgccactcactcatttaaggaa

SEQ ID NO: 828110 - DNA, 33 bp, Homo sapien
ttaaatggtgttgccattcactcatttaaggaa

SEQ ID NO: 828111 - DNA, 33 bp, Homo sapien
tgagtcttttgcgacccagtacatgattaatta

SEQ ID NO: 828112 - DNA, 33 bp, Homo sapien
tgagtcttttgcgacctagtacatgattaatta

SEQ ID NO: 828113 - DNA, 33 bp, Homo sapien
aggaggtaagtggcaaagtatatgagtctctca

SEQ ID NO: 828114 - DNA, 33 bp, Homo sapien
aggaggtaagtggcaaggtatatgagtctctca

SEQ ID NO: 828115 - DNA, 33 bp, Homo sapien
tctcaaacaggatctgcaacacaaggattgagc

SEQ ID NO: 828116 - DNA, 33 bp, Homo sapien
tctcaaacaggatctggaacacaaggattgagc

SEQ ID NO: 828117 - DNA, 33 bp, Homo sapien
ggctgcaatggtcagaacatactggaatctgaa

SEQ ID NO: 828118 - DNA, 33 bp, Homo sapien
ggctgcaatggtcagagcatactggaatctgaa

SEQ ID NO: 828119 - DNA, 33 bp, Homo sapien
cagtttgccaaatgagccctttccaagtgtttt

SEQ ID NO: 828120 - DNA, 33 bp, Homo sapien
cagtttgccaaatgagtcctttccaagtgtttt

SEQ ID NO: 828121 - DNA, 33 bp, Homo sapien
aatacgtacaaacaaacagatcctgactgatgg

SEQ ID NO: 828122 - DNA, 33 bp, Homo sapien
aatacgtacaaacaaatagatcctgactgatgg

SEQ ID NO: 828123 - DNA, 33 bp, Homo sapien
ctggaaggaatacttacctatcactatcactgt

SEQ ID NO: 828124 - DNA, 33 bp, Homo sapien
ctggaaggaatacttatctatcactatcactgt

SEQ ID NO: 828125 - DNA, 33 bp, Homo sapien
aaaagcagctttcaatcagttaatcaacggaag

SEQ ID NO: 828126 - DNA, 33 bp, Homo sapien
aaaagcagctttcaattagttaatcaacggaag

SEQ ID NO: 828127 - DNA, 33 bp, Homo sapien
atctgtacagtgtcaaatgaaaacagattgatt

SEQ ID NO: 828128 - DNA, 33 bp, Homo sapien
atctgtacagtgtcaagtgaaaacagattgatt

SEQ ID NO: 828129 - DNA, 33 bp, Homo sapien
aggagacttataatcacagaggaaggcaaaggg

SEQ ID NO: 828130 - DNA, 33 bp, Homo sapien
aggagacttataatcatagaggaaggcaaaggg

SEQ ID NO: 828131 - DNA, 33 bp, Homo sapien
cagatgaaattggttccattacatgggcaagac

SEQ ID NO: 828132 - DNA, 33 bp, Homo sapien
cagatgaaattggttctattacatgggcaagac

SEQ ID NO: 828133 - DNA, 33 bp, Homo sapien
ggaatgaatgaagactaacaacagaatgcaact

SEQ ID NO: 828134 - DNA, 33 bp, Homo sapien
ggaatgaatgaagactgacaacagaatgcaact

SEQ ID NO: 828135 - DNA, 33 bp, Homo sapien
acatttttgacatatgcacaatgccaaataccc

SEQ ID NO: 828136 - DNA, 33 bp, Homo sapien
acatttttgacatatggacaatgccaaataccc

SEQ ID NO: 828137 - DNA, 33 bp, Homo sapien
aatgatgacaaccacaaatctctttaatgcttc

SEQ ID NO: 828138 - DNA, 33 bp, Homo sapien
aatgatgacaaccacagatctctttaatgcttc

SEQ ID NO: 828139 - DNA, 33 bp, Homo sapien
ggaggctatggatttaccaaatgtagagcttgc

SEQ ID NO: 828140 - DNA, 33 bp, Homo sapien
ggaggctatggatttagcaaatgtagagcttgc

SEQ ID NO: 828141 - DNA, 33 bp, Homo sapien
aagcctgatccccacaataagtagaaccaattc

SEQ ID NO: 828142 - DNA, 33 bp, Homo sapien
aagcctgatccccacagtaagtagaaccaattc

SEQ ID NO: 828143 - DNA, 33 bp, Homo sapien
cactacttcagatcctcgagtgctaacattatg

SEQ ID NO: 828144 - DNA, 33 bp, Homo sapien
cactacttcagatccttgagtgctaacattatg

SEQ ID NO: 828145 - DNA, 33 bp, Homo sapien
tagtgtagcaataatcacaacaataacaaaata

SEQ ID NO: 828146 - DNA, 33 bp, Homo sapien
tagtgtagcaataatcgcaacaataacaaaata

SEQ ID NO: 828147 - DNA, 33 bp, Homo sapien
gttcttctagatggaaacacaaacggttttgct

SEQ ID NO: 828148 - DNA, 33 bp, Homo sapien
gttcttctagatggaagcacaaacggttttgct

SEQ ID NO: 828149 - DNA, 33 bp, Homo sapien
ggaggctgaggcatcaacatattaaatgatttg

SEQ ID NO: 828150 - DNA, 33 bp, Homo sapien
ggaggctgaggcatcagcatattaaatgatttg

SEQ ID NO: 828151 - DNA, 33 bp, Homo sapien
ttaaaatcaagtaagactaagcaagacatttca

SEQ ID NO: 828152 - DNA, 33 bp, Homo sapien
ttaaaatcaagtaagattaagcaagacatttca

SEQ ID NO: 828153 - DNA, 33 bp, Homo sapien
gtcttcttgttgattaaccttgaattccttgat

SEQ ID NO: 828154 - DNA, 33 bp, Homo sapien
gtcttcttgttgattagccttgaattccttgat

SEQ ID NO: 828155 - DNA, 33 bp, Homo sapien
taggaatagtagaggaagaaggccacttataag

SEQ ID NO: 828156 - DNA, 33 bp, Homo sapien
taggaatagtagaggaggaaggccacttataag

SEQ ID NO: 828157 - DNA, 33 bp, Homo sapien
ttcagcacttgctatgaaaaagaccaaagtcat

SEQ ID NO: 828158 - DNA, 33 bp, Homo sapien
ttcagcacttgctatggaaaagaccaaagtcat

SEQ ID NO: 828159 - DNA, 33 bp, Homo sapien
ttaggcctgtctaaaactgggttcctacctttt

SEQ ID NO: 828160 - DNA, 33 bp, Homo sapien
ttaggcctgtctaaaattgggttcctacctttt

SEQ ID NO: 828161 - DNA, 33 bp, Homo sapien
gggagggcagattcccaaaagaagtgtcataaa

SEQ ID NO: 828162 - DNA, 33 bp, Homo sapien
gggagggcagattcccgaaagaagtgtcataaa

SEQ ID NO: 828163 - DNA, 33 bp, Homo sapien
acaagagaaccttctgcaccaacaatgatggga

SEQ ID NO: 828164 - DNA, 33 bp, Homo sapien
acaagagaaccttctggaccaacaatgatggga

SEQ ID NO: 828165 - DNA, 33 bp, Homo sapien
tagaaatgataatgtcccttcaacttaaaaggg

SEQ ID NO: 828166 - DNA, 33 bp, Homo sapien
tagaaatgataatgtctcttcaacttaaaaggg

SEQ ID NO: 828167 - DNA, 33 bp, Homo sapien
caattatttgttgaacacctactaattccaggt

SEQ ID NO: 828168 - DNA, 33 bp, Homo sapien
caattatttgttgaacgcctactaattccaggt

SEQ ID NO: 828169 - DNA, 33 bp, Homo sapien
acagacaggtcttactaacagattaaattggaa

SEQ ID NO: 828170 - DNA, 33 bp, Homo sapien
acagacaggtcttactgacagattaaattggaa

SEQ ID NO: 828171 - DNA, 33 bp, Homo sapien
tattgtagagcctggaacttattggaagataag

SEQ ID NO: 828172 - DNA, 33 bp, Homo sapien
tattgtagagcctggagcttattggaagataag

SEQ ID NO: 828173 - DNA, 33 bp, Homo sapien
gtttgtttgaatttcaaagtgcttacatattca

SEQ ID NO: 828174 - DNA, 33 bp, Homo sapien
gtttgtttgaatttcagagtgcttacatattca

SEQ ID NO: 828175 - DNA, 33 bp, Homo sapien
acaggtaatgggaacaaaagatattatctaaaa

SEQ ID NO: 828176 - DNA, 33 bp, Homo sapien
acaggtaatgggaacacaagatattatctaaaa

SEQ ID NO: 828177 - DNA, 33 bp, Homo sapien
ttgctattgtcttatcacaactaattcaacctt

SEQ ID NO: 828178 - DNA, 33 bp, Homo sapien
ttgctattgtcttatcccaactaattcaacctt

SEQ ID NO: 828179 - DNA, 33 bp, Homo sapien
ggaaatatagtctaaaagtatgtagaaattaac

SEQ ID NO: 828180 - DNA, 33 bp, Homo sapien
ggaaatatagtctaaatgtatgtagaaattaac

SEQ ID NO: 828181 - DNA, 33 bp, Homo sapien
tgccatatgctccacactgcgtcttatcccacc

SEQ ID NO: 828182 - DNA, 33 bp, Homo sapien
tgccatatgctccacattgcgtcttatcccacc

SEQ ID NO: 828183 - DNA, 33 bp, Homo sapien
gtgagtagggggaggaacaatagtagtgattga

SEQ ID NO: 828184 - DNA, 33 bp, Homo sapien
gtgagtagggggaggagcaatagtagtgattga

SEQ ID NO: 828185 - DNA, 33 bp, Homo sapien
tttccactgcttggacagccacatctggaagct

SEQ ID NO: 828186 - DNA, 33 bp, Homo sapien
tttccactgcttggacggccacatctggaagct

SEQ ID NO: 828187 - DNA, 33 bp, Homo sapien
ccaggctattgatcaccgccctgaagtctgtat

SEQ ID NO: 828188 - DNA, 33 bp, Homo sapien
ccaggctattgatcactgccctgaagtctgtat

SEQ ID NO: 828189 - DNA, 33 bp, Homo sapien
gcttctcatacccatcccagttcagggttcatg

SEQ ID NO: 828190 - DNA, 33 bp, Homo sapien
gcttctcatacccatctcagttcagggttcatg

SEQ ID NO: 828191 - DNA, 33 bp, Homo sapien
gccagtagtttaaaaaatgcaactggtacccat

SEQ ID NO: 828192 - DNA, 33 bp, Homo sapien
gccagtagtttaaaaagtgcaactggtacccat

SEQ ID NO: 828193 - DNA, 33 bp, Homo sapien
ataggagacgagaaacacctaaaattaagtcac

SEQ ID NO: 828194 - DNA, 33 bp, Homo sapien
ataggagacgagaaacgcctaaaattaagtcac

SEQ ID NO: 828195 - DNA, 33 bp, Homo sapien
gcttaaaaaatccactcaatatttctcacaagc

SEQ ID NO: 828196 - DNA, 33 bp, Homo sapien
gcttaaaaaatccacttaatatttctcacaagc

SEQ ID NO: 828197 - DNA, 33 bp, Homo sapien
ttgtttctcagaggaaagaacttacatttgaaa

SEQ ID NO: 828198 - DNA, 33 bp, Homo sapien
ttgtttctcagaggaaggaacttacatttgaaa

SEQ ID NO: 828199 - DNA, 33 bp, Homo sapien
tgcaataagttgcgccagatgccaccaacttgc

SEQ ID NO: 828200 - DNA, 33 bp, Homo sapien
tgcaataagttgcgccggatgccaccaacttgc

SEQ ID NO: 828201 - DNA, 33 bp, Homo sapien
attataccggtctatacgttcctatgtaaccat

SEQ ID NO: 828202 - DNA, 33 bp, Homo sapien
attataccggtctatatgttcctatgtaaccat

SEQ ID NO: 828203 - DNA, 33 bp, Homo sapien
cttgataatggctttcactccatgagaatttgt

SEQ ID NO: 828204 - DNA, 33 bp, Homo sapien
cttgataatggctttcgctccatgagaatttgt

SEQ ID NO: 828205 - DNA, 33 bp, Homo sapien
gctcagtattaaattaacctaatatctctttcc

SEQ ID NO: 828206 - DNA, 33 bp, Homo sapien
gctcagtattaaattagcctaatatctctttcc

SEQ ID NO: 828207 - DNA, 33 bp, Homo sapien
gtccaaaaagttaagaatctaacagctagaatt

SEQ ID NO: 828208 - DNA, 33 bp, Homo sapien
gtccaaaaagttaagagtctaacagctagaatt

SEQ ID NO: 828209 - DNA, 33 bp, Homo sapien
acttgcttgtaatgccaaaagaagtcagggaca

SEQ ID NO: 828210 - DNA, 33 bp, Homo sapien
acttgcttgtaatgccgaaagaagtcagggaca

SEQ ID NO: 828211 - DNA, 33 bp, Homo sapien
agtttaacaggcctccaaggtgatttgaaagga

SEQ ID NO: 828212 - DNA, 33 bp, Homo sapien
agtttaacaggcctccgaggtgatttgaaagga

SEQ ID NO: 828213 - DNA, 33 bp, Homo sapien
aacttctagatcaaacagacaaaagactaattt

SEQ ID NO: 828214 - DNA, 33 bp, Homo sapien
aacttctagatcaaacggacaaaagactaattt

SEQ ID NO: 828215 - DNA, 33 bp, Homo sapien
ttggagtgcagctacaagaacccggttcactgc

SEQ ID NO: 828216 - DNA, 33 bp, Homo sapien
ttggagtgcagctacaggaacccggttcactgc

SEQ ID NO: 828217 - DNA, 33 bp, Homo sapien
aacatcagtcctgatcacaaaggaaatactttt

SEQ ID NO: 828218 - DNA, 33 bp, Homo sapien
aacatcagtcctgatcgcaaaggaaatactttt

SEQ ID NO: 828219 - DNA, 33 bp, Homo sapien
attaacagagtggtaacgtcataattaggacta

SEQ ID NO: 828220 - DNA, 33 bp, Homo sapien
attaacagagtggtaatgtcataattaggacta

SEQ ID NO: 828221 - DNA, 33 bp, Homo sapien
gacgtagggtgtgagaaaaagtgaaacgttaaa

SEQ ID NO: 828222 - DNA, 33 bp, Homo sapien
gacgtagggtgtgagagaaagtgaaacgttaaa

SEQ ID NO: 828223 - DNA, 33 bp, Homo sapien
ttatataaaaatgaaactcctccattctctcaa

SEQ ID NO: 828224 - DNA, 33 bp, Homo sapien
ttatataaaaatgaaattcctccattctctcaa

SEQ ID NO: 828225 - DNA, 33 bp, Homo sapien
ggtctgcgggctgcacaggaaacccttcctttc

SEQ ID NO: 828226 - DNA, 33 bp, Homo sapien
ggtctgcgggctgcaccggaaacccttcctttc

SEQ ID NO: 828227 - DNA, 33 bp, Homo sapien
atctgatgttgaccaacctctgtttttctcttt

SEQ ID NO: 828228 - DNA, 33 bp, Homo sapien
atctgatgttgaccaagctctgtttttctcttt

SEQ ID NO: 828229 - DNA, 33 bp, Homo sapien
tgtttagataacttaaagaacggggaccatttt

SEQ ID NO: 828230 - DNA, 33 bp, Homo sapien
tgtttagataacttaaggaacggggaccatttt

SEQ ID NO: 828231 - DNA, 33 bp, Homo sapien
aggcgcttttgccccaatctgtcacagaaattt

SEQ ID NO: 828232 - DNA, 33 bp, Homo sapien
aggcgcttttgccccagtctgtcacagaaattt

SEQ ID NO: 828233 - DNA, 33 bp, Homo sapien
taacaagtagaaatgaacagaaaggactctttc

SEQ ID NO: 828234 - DNA, 33 bp, Homo sapien
taacaagtagaaatgaccagaaaggactctttc

SEQ ID NO: 828235 - DNA, 33 bp, Homo sapien
accaacttaaattatgcactcactttcatataa

SEQ ID NO: 828236 - DNA, 33 bp, Homo sapien
accaacttaaattatggactcactttcatataa

SEQ ID NO: 828237 - DNA, 33 bp, Homo sapien
gggctcagctgctaaacaggataaatatcttaa

SEQ ID NO: 828238 - DNA, 33 bp, Homo sapien
gggctcagctgctaaataggataaatatcttaa

SEQ ID NO: 828239 - DNA, 33 bp, Homo sapien
tccgcataaatccaacacaaacagtatccagca

SEQ ID NO: 828240 - DNA, 33 bp, Homo sapien
tccgcataaatccaacgcaaacagtatccagca

SEQ ID NO: 828241 - DNA, 33 bp, Homo sapien
tagaagctgtctttcacggtacataaggagaaa

SEQ ID NO: 828242 - DNA, 33 bp, Homo sapien
tagaagctgtctttcatggtacataaggagaaa

SEQ ID NO: 828243 - DNA, 33 bp, Homo sapien
aattaatgctgttggaatatccttttttagatt

SEQ ID NO: 828244 - DNA, 33 bp, Homo sapien
aattaatgctgttggagtatccttttttagatt

SEQ ID NO: 828245 - DNA, 33 bp, Homo sapien
agagcaaagcttataaacaacagtgacaataag

SEQ ID NO: 828246 - DNA, 33 bp, Homo sapien
agagcaaagcttataagcaacagtgacaataag

SEQ ID NO: 828247 - DNA, 33 bp, Homo sapien
tggtttagtgttcgtaggtatgctacattcttt

SEQ ID NO: 828248 - DNA, 33 bp, Homo sapien
tggtttagtgttcgtatgtatgctacattcttt

SEQ ID NO: 828249 - DNA, 33 bp, Homo sapien
aaattgaatcccaaaaactgtggatgctgcctt

SEQ ID NO: 828250 - DNA, 33 bp, Homo sapien
aaattgaatcccaaaagctgtggatgctgcctt

SEQ ID NO: 828251 - DNA, 33 bp, Homo sapien
acttaactgagacaacagagacatcctatagaa

SEQ ID NO: 828252 - DNA, 33 bp, Homo sapien
acttaactgagacaacggagacatcctatagaa

SEQ ID NO: 828253 - DNA, 33 bp, Homo sapien
aattatgagtaggtcacatatgattatgattta

SEQ ID NO: 828254 - DNA, 33 bp, Homo sapien
aattatgagtaggtcagatatgattatgattta

SEQ ID NO: 828255 - DNA, 33 bp, Homo sapien
aaaaatcaaatcatagacatcaacctgtttatt

SEQ ID NO: 828256 - DNA, 33 bp, Homo sapien
aaaaatcaaatcatagtcatcaacctgtttatt

SEQ ID NO: 828257 - DNA, 33 bp, Homo sapien
atggaaactctacgtccattaaacaactccctg

SEQ ID NO: 828258 - DNA, 33 bp, Homo sapien
atggaaactctacgtctattaaacaactccctg

SEQ ID NO: 828259 - DNA, 33 bp, Homo sapien
gtttctgcaaagtacagactctcatttttatat

SEQ ID NO: 828260 - DNA, 33 bp, Homo sapien
gtttctgcaaagtacatactctcatttttatat

SEQ ID NO: 828261 - DNA, 33 bp, Homo sapien; identical to SEQ ID NO: 828259

SEQ ID NO: 828262 - DNA, 33 bp, Homo sapien; identical to SEQ ID NO: 828260

SEQ ID NO: 828263 - DNA, 33 bp, Homo sapien
tcataatgcaatcaaaagtattaatagaagaat

SEQ ID NO: 828264 - DNA, 33 bp, Homo sapien
tcataatgcaatcaaacgtattaatagaagaat

SEQ ID NO: 828265 - DNA, 33 bp, Homo sapien
gtatcttttccaactacaatgcaatgcaactag

SEQ ID NO: 828266 - DNA, 33 bp, Homo sapien
gtatcttttccaactataatgcaatgcaactag

SEQ ID NO: 828267 - DNA, 33 bp, Homo sapien
ctattcaaaatggtcaaagagagttagagaatc

SEQ ID NO: 828268 - DNA, 33 bp, Homo sapien
ctattcaaaatggtcagagagagttagagaatc

SEQ ID NO: 828269 - DNA, 33 bp, Homo sapien
gatccaaaagagtacaaaacttgaccaggaaca

SEQ ID NO: 828270 - DNA, 33 bp, Homo sapien
gatccaaaagagtacacaacttgaccaggaaca

SEQ ID NO: 828271 - DNA, 33 bp, Homo sapien
gaaaggtagaacagaccaatggccttttaaaaa

SEQ ID NO: 828272 - DNA, 33 bp, Homo sapien
gaaaggtagaacagactaatggccttttaaaaa

SEQ ID NO: 828273 - DNA, 33 bp, Homo sapien
ggcaagagagaatggaaattttaaaaaagatat

SEQ ID NO: 828274 - DNA, 33 bp, Homo sapien
ggcaagagagaatggacattttaaaaaagatat

SEQ ID NO: 828275 - DNA, 33 bp, Homo sapien
cttacccaagcaaagagaagagtatgtggaaag

SEQ ID NO: 828276 - DNA, 33 bp, Homo sapien
cttacccaagcaaagataagagtatgtggaaag

SEQ ID NO: 828277 - DNA, 33 bp, Homo sapien
acaccctaccttctgcacaagattatttggctt

SEQ ID NO: 828278 - DNA, 33 bp, Homo sapien
acaccctaccttctgcccaagattatttggctt

SEQ ID NO: 828279 - DNA, 33 bp, Homo sapien
acgtagctagcgaccaaattaaaacagaacaaa

SEQ ID NO: 828280 - DNA, 33 bp, Homo sapien
acgtagctagcgaccagattaaaacagaacaaa

SEQ ID NO: 828281 - DNA, 33 bp, Homo sapien
aaatcaggtctgtctcaattagctgttttctct

SEQ ID NO: 828282 - DNA, 33 bp, Homo sapien
aaatcaggtctgtctcgattagctgttttctct

SEQ ID NO: 828283 - DNA, 33 bp, Homo sapien
atttgcttatttatgcaccactgttataatatt

SEQ ID NO: 828284 - DNA, 33 bp, Homo sapien
atttgcttatttatgcgccactgttataatatt

SEQ ID NO: 828285 - DNA, 33 bp, Homo sapien
gaaattgtaggtggagaagagactccagatagg

SEQ ID NO: 828286 - DNA, 33 bp, Homo sapien
gaaattgtaggtggaggagagactccagatagg

SEQ ID NO: 828287 - DNA, 33 bp, Homo sapien
aggaggtttattctagcaagtgcctgagctggg

SEQ ID NO: 828288 - DNA, 33 bp, Homo sapien
aggaggtttattctaggaagtgcctgagctggg

SEQ ID NO: 828289 - DNA, 33 bp, Homo sapien
ctgagctgggataactcaaaggctgagcccagc

SEQ ID NO: 828290 - DNA, 33 bp, Homo sapien
ctgagctgggataactgaaaggctgagcccagc

SEQ ID NO: 828291 - DNA, 33 bp, Homo sapien
gctacctaaatatacacgctctttacgagctca

SEQ ID NO: 828292 - DNA, 33 bp, Homo sapien
gctacctaaatatacatgctctttacgagctca

SEQ ID NO: 828293 - DNA, 33 bp, Homo sapien
gcatatcaatgagagaggtctgcgatgttggca

SEQ ID NO: 828294 - DNA, 33 bp, Homo sapien
gcatatcaatgagagatgtctgcgatgttggca

SEQ ID NO: 828295 - DNA, 33 bp, Homo sapien
agggatcctggtagacactggatggggcttgtg

SEQ ID NO: 828296 - DNA, 33 bp, Homo sapien
agggatcctggtagacgctggatggggcttgtg

SEQ ID NO: 828297 - DNA, 33 bp, Homo sapien
ccttagctgctatttacaagtccatttcatcag

SEQ ID NO: 828298 - DNA, 33 bp, Homo sapien
ccttagctgctatttataagtccatttcatcag

SEQ ID NO: 828299 - DNA, 33 bp, Homo sapien
gggcagatgagttagacaactacctgtctgggg

SEQ ID NO: 828300 - DNA, 33 bp, Homo sapien
gggcagatgagttagagaactacctgtctgggg

SEQ ID NO: 828301 - DNA, 33 bp, Homo sapien
aacagactattgtatgcatatgagctcgggaca

SEQ ID NO: 828302 - DNA, 33 bp, Homo sapien
aacagactattgtatgtatatgagctcgggaca

SEQ ID NO: 828303 - DNA, 33 bp, Homo sapien
ccttctttaagtttcaatacagagaattaagcc

SEQ ID NO: 828304 - DNA, 33 bp, Homo sapien
ccttctttaagtttcagtacagagaattaagcc

SEQ ID NO: 828305 - DNA, 33 bp, Homo sapien
aaagaaaacccagtgcagaaatggacaataaga

SEQ ID NO: 828306 - DNA, 33 bp, Homo sapien
aaagaaaacccagtgcggaaatggacaataaga

SEQ ID NO: 828307 - DNA, 33 bp, Homo sapien
gatgtaaggcttcctcgccaaccttatttcatc

SEQ ID NO: 828308 - DNA, 33 bp, Homo sapien
gatgtaaggcttcctctccaaccttatttcatc

SEQ ID NO: 828309 - DNA, 33 bp, Homo sapien
ttgtgcgttttttcacaatatgtaagactttat

SEQ ID NO: 828310 - DNA, 33 bp, Homo sapien
ttgtgcgttttttcacgatatgtaagactttat

SEQ ID NO: 828311 - DNA, 33 bp, Homo sapien
taccactgcagagagacggtgatagtatttttt

SEQ ID NO: 828312 - DNA, 33 bp, Homo sapien
taccactgcagagagatggtgatagtatttttt

SEQ ID NO: 828313 - DNA, 33 bp, Homo sapien
aaacagctcctttgtacagggtagacaatgaag

SEQ ID NO: 828314 - DNA, 33 bp, Homo sapien
aaacagctcctttgtagagggtagacaatgaag

SEQ ID NO: 828315 - DNA, 33 bp, Homo sapien
gtttgcacgtctcccacgacattgtcttgtcat

SEQ ID NO: 828316 - DNA, 33 bp, Homo sapien
gtttgcacgtctcccatgacattgtcttgtcat

SEQ ID NO: 828317 - DNA, 33 bp, Homo sapien
ggtaggcaatgaagataagctcattagaccaga

SEQ ID NO: 828318 - DNA, 33 bp, Homo sapien
ggtaggcaatgaagattagctcattagaccaga

SEQ ID NO: 828319 - DNA, 33 bp, Homo sapien
aagtcttgtattagaaccattcagttaaggtta

SEQ ID NO: 828320 - DNA, 33 bp, Homo sapien
aagtcttgtattagaagcattcagttaaggtta

SEQ ID NO: 828321 - DNA, 33 bp, Homo sapien
aataaaaattacagtacaaggatcatggcaatg

SEQ ID NO: 828322 - DNA, 33 bp, Homo sapien
aataaaaattacagtagaaggatcatggcaatg

SEQ ID NO: 828323 - DNA, 33 bp, Homo sapien
cccgacaaataaccaaagttcttgattccacat

SEQ ID NO: 828324 - DNA, 33 bp, Homo sapien
cccgacaaataaccaacgttcttgattccacat

SEQ ID NO: 828325 - DNA, 33 bp, Homo sapien
cttctttcaaattaataatgcatcttcctgtct

SEQ ID NO: 828326 - DNA, 33 bp, Homo sapien
cttctttcaaattaatcatgcatcttcctgtct

SEQ ID NO: 828327 - DNA, 33 bp, Homo sapien
tctacagcaaaacaaacgtagcagcttagagaa

SEQ ID NO: 828328 - DNA, 33 bp, Homo sapien
tctacagcaaaacaaatgtagcagcttagagaa

SEQ ID NO: 828329 - DNA, 33 bp, Homo sapien
atatccaattagaaacagtgaagatatgtctaa

SEQ ID NO: 828330 - DNA, 33 bp, Homo sapien
atatccaattagaaaccgtgaagatatgtctaa

SEQ ID NO: 828331 - DNA, 33 bp, Homo sapien
tccctaaactctgaaactggggatgtggctaga

SEQ ID NO: 828332 - DNA, 33 bp, Homo sapien
tccctaaactctgaaagtggggatgtggctaga

SEQ ID NO: 828333 - DNA, 33 bp, Homo sapien
tgatggatttcatctccagcattgtggtccttg

SEQ ID NO: 828334 - DNA, 33 bp, Homo sapien
tgatggatttcatctctagcattgtggtccttg

SEQ ID NO: 828335 - DNA, 33 bp, Homo sapien
atggaagctgagcaaacgcttaacctcatgttc

SEQ ID NO: 828336 - DNA, 33 bp, Homo sapien
atggaagctgagcaaatgcttaacctcatgttc

SEQ ID NO: 828337 - DNA, 33 bp, Homo sapien
atagtagccataaaaccgttctgtgttcttatc

SEQ ID NO: 828338 - DNA, 33 bp, Homo sapien
atagtagccataaaactgttctgtgttcttatc

SEQ ID NO: 828339 - DNA, 33 bp, Homo sapien
ttgagagcaggtgtaacgcttactattaataaa

SEQ ID NO: 828340 - DNA, 33 bp, Homo sapien
ttgagagcaggtgtaatgcttactattaataaa

SEQ ID NO: 828341 - DNA, 33 bp, Homo sapien
actacgaatgaccagacagtaaaagtctttgat

SEQ ID NO: 828342 - DNA, 33 bp, Homo sapien
actacgaatgaccagagagtaaaagtctttgat

SEQ ID NO: 828343 - DNA, 33 bp, Homo sapien
gtttctaaacttcaaccgtgtgtcttttggcta

SEQ ID NO: 828344 - DNA, 33 bp, Homo sapien
gtttctaaacttcaactgtgtgtcttttggcta

SEQ ID NO: 828345 - DNA, 33 bp, Homo sapien
accctagagctatggaataagtgctaagagatg

SEQ ID NO: 828346 - DNA, 33 bp, Homo sapien
accctagagctatggagtaagtgctaagagatg

SEQ ID NO: 828347 - DNA, 33 bp, Homo sapien
tactacagggtggttccaagtattgaaaaataa

SEQ ID NO: 828348 - DNA, 33 bp, Homo sapien
tactacagggtggttctaagtattgaaaaataa

SEQ ID NO: 828349 - DNA, 33 bp, Homo sapien
ccacaaaaatgggaaaacaagcatttagtacta

SEQ ID NO: 828350 - DNA, 33 bp, Homo sapien
ccacaaaaatgggaaaccaagcatttagtacta

SEQ ID NO: 828351 - DNA, 33 bp, Homo sapien
acgtggctcaagctcaccttctccacaggtttt

SEQ ID NO: 828352 - DNA, 33 bp, Homo sapien
acgtggctcaagctcatcttctccacaggtttt

SEQ ID NO: 828353 - DNA, 33 bp, Homo sapien
cctttccttccaatgcaattgttatttatgctg

SEQ ID NO: 828354 - DNA, 33 bp, Homo sapien
cctttccttccaatgcgattgttatttatgctg

SEQ ID NO: 828355 - DNA, 33 bp, Homo sapien
cattcatcagttctaaacctaaagaggctgtta

SEQ ID NO: 828356 - DNA, 33 bp, Homo sapien
cattcatcagttctaatcctaaagaggctgtta

SEQ ID NO: 828357 - DNA, 33 bp, Homo sapien
acaaaatgcatgtcaacatagtatgggaaagcc

SEQ ID NO: 828358 - DNA, 33 bp, Homo sapien
acaaaatgcatgtcaagatagtatgggaaagcc

SEQ ID NO: 828359 - DNA, 33 bp, Homo sapien
aatccaaaatcattccagaaaagttttgacagg

SEQ ID NO: 828360 - DNA, 33 bp, Homo sapien
aatccaaaatcattccggaaaagttttgacagg

SEQ ID NO: 828361 - DNA, 33 bp, Homo sapien
tgagtaattacaaaccaggcaacagggatccaa

SEQ ID NO: 828362 - DNA, 33 bp, Homo sapien
tgagtaattacaaaccgggcaacagggatccaa

SEQ ID NO: 828363 - DNA, 33 bp, Homo sapien
aggcatggttggggaagaatttgtcaaaaaata

SEQ ID NO: 828364 - DNA, 33 bp, Homo sapien
aggcatggttggggaataatttgtcaaaaaata

SEQ ID NO: 828365 - DNA, 33 bp, Homo sapien
tttttcaacttgctaacgggatggtacatggca

SEQ ID NO: 828366 - DNA, 33 bp, Homo sapien
tttttcaacttgctaatgggatggtacatggca

SEQ ID NO: 828367 - DNA, 33 bp, Homo sapien
tttttattccaagacaaattttgccaaaataaa

SEQ ID NO: 828368 - DNA, 33 bp, Homo sapien
tttttattccaagacacattttgccaaaataaa

SEQ ID NO: 828369 - DNA, 33 bp, Homo sapien
aatcgtggtaactgctaaactgtaatctcatgg

SEQ ID NO: 828370 - DNA, 33 bp, Homo sapien
aatcgtggtaactgctgaactgtaatctcatgg

SEQ ID NO: 828371 - DNA, 33 bp, Homo sapien
acattgtcctgcaacactgagataaaataagca

SEQ ID NO: 828372 - DNA, 33 bp, Homo sapien
acattgtcctgcaacattgagataaaataagca

SEQ ID NO: 828373 - DNA, 33 bp, Homo sapien
ccttaaggagtttacgaaatctgctgttttatc

SEQ ID NO: 828374 - DNA, 33 bp, Homo sapien
ccttaaggagtttacggaatctgctgttttatc

SEQ ID NO: 828375 - DNA, 33 bp, Homo sapien
tctcaggaaattagaactgcaagttgataaaca

SEQ ID NO: 828376 - DNA, 33 bp, Homo sapien
tctcaggaaattagaattgcaagttgataaaca

SEQ ID NO: 828377 - DNA, 33 bp, Homo sapien
ggtaggcactaggaaacaggagcgttgattatc

SEQ ID NO: 828378 - DNA, 33 bp, Homo sapien
ggtaggcactaggaaataggagcgttgattatc

SEQ ID NO: 828379 - DNA, 33 bp, Homo sapien
aatgtacaatttacaagtcattggttaccaagc

SEQ ID NO: 828380 - DNA, 33 bp, Homo sapien
aatgtacaatttacaattcattggttaccaagc

SEQ ID NO: 828381 - DNA, 33 bp, Homo sapien
ctcccttcagtcttcaagatctcctgataatca

SEQ ID NO: 828382 - DNA, 33 bp, Homo sapien
ctcccttcagtcttcaggatctcctgataatca

SEQ ID NO: 828383 - DNA, 33 bp, Homo sapien
ggagtgtcaacacagacatcgtttgtattaact

SEQ ID NO: 828384 - DNA, 33 bp, Homo sapien
ggagtgtcaacacagatatcgtttgtattaact

SEQ ID NO: 828385 - DNA, 33 bp, Homo sapien
tatgccagcagtgtcacagcggagccactatca

SEQ ID NO: 828386 - DNA, 33 bp, Homo sapien
tatgccagcagtgtcagagcggagccactatca

SEQ ID NO: 828387 - DNA, 33 bp, Homo sapien
ataaccagatcttgcacgaactcatagaatgag

SEQ ID NO: 828388 - DNA, 33 bp, Homo sapien
ataaccagatcttgcatgaactcatagaatgag

SEQ ID NO: 828389 - DNA, 33 bp, Homo sapien
aattgattcgttgacacggacaaaactagaatt

SEQ ID NO: 828390 - DNA, 33 bp, Homo sapien
aattgattcgttgacatggacaaaactagaatt

SEQ ID NO: 828391 - DNA, 33 bp, Homo sapien
aggtgtctggaaggaacggcacgaactagtcaa

SEQ ID NO: 828392 - DNA, 33 bp, Homo sapien
aggtgtctggaaggaagggcacgaactagtcaa

SEQ ID NO: 828393 - DNA, 33 bp, Homo sapien
agtcaatatcttcaaaagtaggtcgagaactta

SEQ ID NO: 828394 - DNA, 33 bp, Homo sapien
agtcaatatcttcaaatgtaggtcgagaactta

SEQ ID NO: 828395 - DNA, 33 bp, Homo sapien
attatcctatgagaaacgcttcaggaaaaactg

SEQ ID NO: 828396 - DNA, 33 bp, Homo sapien
attatcctatgagaaatgcttcaggaaaaactg

SEQ ID NO: 828397 - DNA, 33 bp, Homo sapien
gaggactctaatcataaaacttcagagctgtcc

SEQ ID NO: 828398 - DNA, 33 bp, Homo sapien
gaggactctaatcatacaacttcagagctgtcc

SEQ ID NO: 828399 - DNA, 33 bp, Homo sapien
tgtgttattaagactcccctgataattctgata

SEQ ID NO: 828400 - DNA, 33 bp, Homo sapien
tgtgttattaagactctcctgataattctgata

SEQ ID NO: 828401 - DNA, 33 bp, Homo sapien
agtttttgagttgcacaggacatggtgcttagt

SEQ ID NO: 828402 - DNA, 33 bp, Homo sapien
agtttttgagttgcacgggacatggtgcttagt

SEQ ID NO: 828403 - DNA, 33 bp, Homo sapien
tttttctctgtatacaacaccaccaaacagata

SEQ ID NO: 828404 - DNA, 33 bp, Homo sapien
tttttctctgtatacaccaccaccaaacagata

SEQ ID NO: 828405 - DNA, 33 bp, Homo sapien
tgtcatcctcatattcactgcacaaatatgcac

SEQ ID NO: 828406 - DNA, 33 bp, Homo sapien
tgtcatcctcatattcgctgcacaaatatgcac

SEQ ID NO: 828407 - DNA, 33 bp, Homo sapien
gtgatggatatgctggaagaaagacagaggtgg

SEQ ID NO: 828408 - DNA, 33 bp, Homo sapien
gtgatggatatgctggcagaaagacagaggtgg

SEQ ID NO: 828409 - DNA, 33 bp, Homo sapien
cattcagaaaaccaacagagtgatggatatgct

SEQ ID NO: 828410 - DNA, 33 bp, Homo sapien
cattcagaaaaccaacggagtgatggatatgct

SEQ ID NO: 828411 - DNA, 33 bp, Homo sapien
agactttaacctctaaaccatatacctttcttg

SEQ ID NO: 828412 - DNA, 33 bp, Homo sapien
agactttaacctctaacccatatacctttcttg

SEQ ID NO: 828413 - DNA, 33 bp, Homo sapien
atataaacaagagtgacgttcccttggcaaatt

SEQ ID NO: 828414 - DNA, 33 bp, Homo sapien
atataaacaagagtgatgttcccttggcaaatt

SEQ ID NO: 828415 - DNA, 33 bp, Homo sapien
ttgtatgctttatgaacgtttattttgcaataa

SEQ ID NO: 828416 - DNA, 33 bp, Homo sapien
ttgtatgctttatgaatgtttattttgcaataa

SEQ ID NO: 828417 - DNA, 33 bp, Homo sapien
tgggtgtgtatgggtacgccctgtgatggatgg

SEQ ID NO: 828418 - DNA, 33 bp, Homo sapien
tgggtgtgtatgggtatgccctgtgatggatgg

SEQ ID NO: 828419 - DNA, 33 bp, Homo sapien
ctgccagttcaaggtcaaagtctaatgaaccat

SEQ ID NO: 828420 - DNA, 33 bp, Homo sapien
ctgccagttcaaggtcgaagtctaatgaaccat

SEQ ID NO: 828421 - DNA, 33 bp, Homo sapien
tataaatttaacactacggctaatttcccacga

SEQ ID NO: 828422 - DNA, 33 bp, Homo sapien
tataaatttaacactatggctaatttcccacga

SEQ ID NO: 828423 - DNA, 33 bp, Homo sapien
gagcctcacagcaggaactaaaaaacttgcact

SEQ ID NO: 828424 - DNA, 33 bp, Homo sapien
gagcctcacagcaggagctaaaaaacttgcact

SEQ ID NO: 828425 - DNA, 33 bp, Homo sapien
cattttcaaatgcagcaatgggcaaaggaaaca

SEQ ID NO: 828426 - DNA, 33 bp, Homo sapien
cattttcaaatgcagcgatgggcaaaggaaaca

SEQ ID NO: 828427 - DNA, 33 bp, Homo sapien
tataagaaacttaaacaataggccaagcaaatt

SEQ ID NO: 828428 - DNA, 33 bp, Homo sapien
tataagaaacttaaacgataggccaagcaaatt

SEQ ID NO: 828429 - DNA, 33 bp, Homo sapien
atcttgctcagacccaagttcttttcatagctc

SEQ ID NO: 828430 - DNA, 33 bp, Homo sapien
atcttgctcagacccaggttcttttcatagctc

SEQ ID NO: 828431 - DNA, 33 bp, Homo sapien
tggatgaaggagcatcgcagatcacattgtagg

SEQ ID NO: 828432 - DNA, 33 bp, Homo sapien
tggatgaaggagcatctcagatcacattgtagg

SEQ ID NO: 828433 - DNA, 33 bp, Homo sapien
agaaagggctacaaaaatgcatagacccatgat

SEQ ID NO: 828434 - DNA, 33 bp, Homo sapien
agaaagggctacaaaactgcatagacccatgat

SEQ ID NO: 828435 - DNA, 33 bp, Homo sapien
taaatattattgtcctaacagctgcttctagaa

SEQ ID NO: 828436 - DNA, 33 bp, Homo sapien
taaatattattgtccttacagctgcttctagaa

SEQ ID NO: 828437 - DNA, 33 bp, Homo sapien
gcagtctctctgcaacaaaagcagcttttcatc

SEQ ID NO: 828438 - DNA, 33 bp, Homo sapien
gcagtctctctgcaacgaaagcagcttttcatc

SEQ ID NO: 828439 - DNA, 33 bp, Homo sapien
ttatgactaacagggaacaatatggattggcat

SEQ ID NO: 828440 - DNA, 33 bp, Homo sapien
ttatgactaacagggagcaatatggattggcat

SEQ ID NO: 828441 - DNA, 33 bp, Homo sapien
attgaaatagatgagagacgtgttctttaaact

SEQ ID NO: 828442 - DNA, 33 bp, Homo sapien
attgaaatagatgagatacgtgttctttaaact

SEQ ID NO: 828443 - DNA, 33 bp, Homo sapien
tccatcctttattctcaaaaacaaactcagaga

SEQ ID NO: 828444 - DNA, 33 bp, Homo sapien
tccatcctttattctcgaaaacaaactcagaga

SEQ ID NO: 828445 - DNA, 33 bp, Homo sapien
agacttggaaacaacactggccattcctaccaa

SEQ ID NO: 828446 - DNA, 33 bp, Homo sapien
agacttggaaacaacattggccattcctaccaa

SEQ ID NO: 828447 - DNA, 33 bp, Homo sapien
taacttcctctgtaaaccatacccgcccccgtc

SEQ ID NO: 828448 - DNA, 33 bp, Homo sapien
taacttcctctgtaaatcatacccgcccccgtc

SEQ ID NO: 828449 - DNA, 33 bp, Homo sapien
caattttgtggtcattctcctcactcgaaaaag

SEQ ID NO: 828450 - DNA, 33 bp, Homo sapien
caattttgtggtcattttcctcactcgaaaaag

SEQ ID NO: 828451 - DNA, 33 bp, Homo sapien
gaagccgctccttgaagaagagagaactggaag

SEQ ID NO: 828452 - DNA, 33 bp, Homo sapien
gaagccgctccttgaataagagagaactggaag

SEQ ID NO: 828453 - DNA, 33 bp, Homo sapien
ggatgaaagacatgatcaatcaaaagaaggaca

SEQ ID NO: 828454 - DNA, 33 bp, Homo sapien
ggatgaaagacatgatgaatcaaaagaaggaca

SEQ ID NO: 828455 - DNA, 33 bp, Homo sapien
taaggtgaggctgaacactgtacatgaagtttg

SEQ ID NO: 828456 - DNA, 33 bp, Homo sapien
taaggtgaggctgaacgctgtacatgaagtttg

SEQ ID NO: 828457 - DNA, 33 bp, Homo sapien
ataagatgagagaaaaactcaaaatgttataat

SEQ ID NO: 828458 - DNA, 33 bp, Homo sapien
ataagatgagagaaaagctcaaaatgttataat

SEQ ID NO: 828459 - DNA, 33 bp, Homo sapien
cattcagttcttcagccatttcaaattcactct

SEQ ID NO: 828460 - DNA, 33 bp, Homo sapien
cattcagttcttcagctatttcaaattcactct

SEQ ID NO: 828461 - DNA, 33 bp, Homo sapien
acaaactttgggaacacagaatagtcatacatt

SEQ ID NO: 828462 - DNA, 33 bp, Homo sapien
acaaactttgggaacagagaatagtcatacatt

SEQ ID NO: 828463 - DNA, 33 bp, Homo sapien
tccatagatcagttagaaaaatggtgaagcaca

SEQ ID NO: 828464 - DNA, 33 bp, Homo sapien
tccatagatcagttaggaaaatggtgaagcaca

SEQ ID NO: 828465 - DNA, 33 bp, Homo sapien
tgtcgccttagtgtaacccaacagaggacaaat

SEQ ID NO: 828466 - DNA, 33 bp, Homo sapien
tgtcgccttagtgtaagccaacagaggacaaat

SEQ ID NO: 828467 - DNA, 33 bp, Homo sapien
atcctgtctgagtagacaaattagttaaatcac

SEQ ID NO: 828468 - DNA, 33 bp, Homo sapien
atcctgtctgagtagataaattagttaaatcac

SEQ ID NO: 828469 - DNA, 33 bp, Homo sapien
tttttgtcagtctataggtaagcattatgtaaa

SEQ ID NO: 828470 - DNA, 33 bp, Homo sapien
tttttgtcagtctatatgtaagcattatgtaaa

SEQ ID NO: 828471 - DNA, 33 bp, Homo sapien
aaaatctgttaagcaacgaaatgaccaatgtaa

SEQ ID NO: 828472 - DNA, 33 bp, Homo sapien
aaaatctgttaagcaatgaaatgaccaatgtaa

SEQ ID NO: 828473 - DNA, 33 bp, Homo sapien
ttagtggttcagcaataagttacatagaagttt

SEQ ID NO: 828474 - DNA, 33 bp, Homo sapien
ttagtggttcagcaatgagttacatagaagttt

SEQ ID NO: 828475 - DNA, 33 bp, Homo sapien
tccagataaatgttcaataactacccagtgatc

SEQ ID NO: 828476 - DNA, 33 bp, Homo sapien
tccagataaatgttcagtaactacccagtgatc

SEQ ID NO: 828477 - DNA, 33 bp, Homo sapien
ccatgtaagctaaaaacccattagtaaattagg

SEQ ID NO: 828478 - DNA, 33 bp, Homo sapien
ccatgtaagctaaaaatccattagtaaattagg

SEQ ID NO: 828479 - DNA, 33 bp, Homo sapien
gtggtttgattgaatcggacaattggttcccga

SEQ ID NO: 828480 - DNA, 33 bp, Homo sapien
gtggtttgattgaatctgacaattggttcccga

SEQ ID NO: 828481 - DNA, 33 bp, Homo sapien
tgagcttatcaggcaaacccagactggccaatc

SEQ ID NO: 828482 - DNA, 33 bp, Homo sapien
tgagcttatcaggcaagcccagactggccaatc

SEQ ID NO: 828483 - DNA, 33 bp, Homo sapien
atgcaggaacagaagcacggagatctaaaagac

SEQ ID NO: 828484 - DNA, 33 bp, Homo sapien
atgcaggaacagaagcgcggagatctaaaagac

SEQ ID NO: 828485 - DNA, 33 bp, Homo sapien
gaatggaatcatactcacttacaatactaaaac

SEQ ID NO: 828486 - DNA, 33 bp, Homo sapien
gaatggaatcatactcgcttacaatactaaaac

SEQ ID NO: 828487 - DNA, 33 bp, Homo sapien
taccatctgccattgacactaaattctgtcaag

SEQ ID NO: 828488 - DNA, 33 bp, Homo sapien
taccatctgccattgatactaaattctgtcaag

SEQ ID NO: 828489 - DNA, 33 bp, Homo sapien
aaagatttacctgaatcaacagagctttcttga

SEQ ID NO: 828490 - DNA, 33 bp, Homo sapien
aaagatttacctgaattaacagagctttcttga

SEQ ID NO: 828491 - DNA, 33 bp, Homo sapien
atattcatcattcccaaggacagcaaaaattga

SEQ ID NO: 828492 - DNA, 33 bp, Homo sapien
atattcatcattcccacggacagcaaaaattga

SEQ ID NO: 828493 - DNA, 33 bp, Homo sapien
gccacctaccggctgagaactgctcatgtagcg

SEQ ID NO: 828494 - DNA, 33 bp, Homo sapien
gccacctaccggctgataactgctcatgtagcg

SEQ ID NO: 828495 - DNA, 33 bp, Homo sapien
tttccctatcagttaacgcctttttgatttgca

SEQ ID NO: 828496 - DNA, 33 bp, Homo sapien
tttccctatcagttaatgcctttttgatttgca

SEQ ID NO: 828497 - DNA, 33 bp, Homo sapien
tctgtaattagtcagcacctaactatatattag

SEQ ID NO: 828498 - DNA, 33 bp, Homo sapien
tctgtaattagtcagctcctaactatatattag

SEQ ID NO: 828499 - DNA, 33 bp, Homo sapien
ctctaaattcacaaaccaaatgaaggattgtac

SEQ ID NO: 828500 - DNA, 33 bp, Homo sapien
ctctaaattcacaaactaaatgaaggattgtac

SEQ ID NO: 828501 - DNA, 33 bp, Homo sapien
tggttgcccatgtggccctgaactagatagaaa

SEQ ID NO: 828502 - DNA, 33 bp, Homo sapien
tggttgcccatgtggctctgaactagatagaaa

SEQ ID NO: 828503 - DNA, 33 bp, Homo sapien
tactgattttataccgaattctaatggttgccc

SEQ ID NO: 828504 - DNA, 33 bp, Homo sapien
tactgattttataccgcattctaatggttgccc

SEQ ID NO: 828505 - DNA, 33 bp, Homo sapien
ggttttctgtatctcccgatgtctcataaccag

SEQ ID NO: 828506 - DNA, 33 bp, Homo sapien
ggttttctgtatctccggatgtctcataaccag

SEQ ID NO: 828507 - DNA, 33 bp, Homo sapien
gacttcctgaagctgccgaactcaagtggcaaa

SEQ ID NO: 828508 - DNA, 33 bp, Homo sapien
gacttcctgaagctgctgaactcaagtggcaaa

SEQ ID NO: 828509 - DNA, 33 bp, Homo sapien
ctccaaggttggagaaagcactcagatggcccc

SEQ ID NO: 828510 - DNA, 33 bp, Homo sapien
ctccaaggttggagaaggcactcagatggcccc

SEQ ID NO: 828511 - DNA, 33 bp, Homo sapien
attatagccaattgtccatgtatagtgatgaaa

SEQ ID NO: 828512 - DNA, 33 bp, Homo sapien
attatagccaattgtctatgtatagtgatgaaa

SEQ ID NO: 828513 - DNA, 33 bp, Homo sapien
atgttgtcatacctggacatcattgttgaggca

SEQ ID NO: 828514 - DNA, 33 bp, Homo sapien
atgttgtcatacctggtcatcattgttgaggca

SEQ ID NO: 828515 - DNA, 33 bp, Homo sapien
gtttcacttgtctgctaagagttttggcaccac

SEQ ID NO: 828516 - DNA, 33 bp, Homo sapien
gtttcacttgtctgcttagagttttggcaccac

SEQ ID NO: 828517 - DNA, 33 bp, Homo sapien
taaagtggctaaaatgcaaaatattgacaacat

SEQ ID NO: 828518 - DNA, 33 bp, Homo sapien
taaagtggctaaaatgtaaaatattgacaacat

SEQ ID NO: 828519 - DNA, 33 bp, Homo sapien
ggtgatgttttttcgacagtgagttctcccgag

SEQ ID NO: 828520 - DNA, 33 bp, Homo sapien
ggtgatgttttttcgatagtgagttctcccgag

SEQ ID NO: 828521 - DNA, 33 bp, Homo sapien
aacaaaaacacaatcaaggacccacacagagtc

SEQ ID NO: 828522 - DNA, 33 bp, Homo sapien
aacaaaaacacaatcacggacccacacagagtc

SEQ ID NO: 828523 - DNA, 33 bp, Homo sapien
atatttggaagaattcaccattgagactctgag

SEQ ID NO: 828524 - DNA, 33 bp, Homo sapien
atatttggaagaattcgccattgagactctgag

SEQ ID NO: 828525 - DNA, 33 bp, Homo sapien
cttttacttaaattcaatcctcatctcagggtc

SEQ ID NO: 828526 - DNA, 33 bp, Homo sapien
cttttacttaaattcagtcctcatctcagggtc

SEQ ID NO: 828527 - DNA, 33 bp, Homo sapien
ttattcaagtagcacaagaagaatttttggcat

SEQ ID NO: 828528 - DNA, 33 bp, Homo sapien
ttattcaagtagcacaggaagaatttttggcat

SEQ ID NO: 828529 - DNA, 33 bp, Homo sapien
ccacttcctcatgcgacaaacagggacactgat

SEQ ID NO: 828530 - DNA, 33 bp, Homo sapien
ccacttcctcatgcgataaacagggacactgat

SEQ ID NO: 828531 - DNA, 33 bp, Homo sapien
tacttgtataagctgacggtcggttcaactgcc

SEQ ID NO: 828532 - DNA, 33 bp, Homo sapien
tacttgtataagctgatggtcggttcaactgcc

SEQ ID NO: 828533 - DNA, 33 bp, Homo sapien
acctgagccttctgcacggtgacactgattttt

SEQ ID NO: 828534 - DNA, 33 bp, Homo sapien
acctgagccttctgcatggtgacactgattttt

SEQ ID NO: 828535 - DNA, 33 bp, Homo sapien
ttgctaaccagtcgccagaattatcccctatag

SEQ ID NO: 828536 - DNA, 33 bp, Homo sapien
ttgctaaccagtcgccggaattatcccctatag

SEQ ID NO: 828537 - DNA, 33 bp, Homo sapien
tgggggtcctaaagaacagtgaatgatcaatgt

SEQ ID NO: 828538 - DNA, 33 bp, Homo sapien
tgggggtcctaaagaatagtgaatgatcaatgt

SEQ ID NO: 828539 - DNA, 33 bp, Homo sapien
tctcagagattaaaccaaagctaaaaggatgtc

SEQ ID NO: 828540 - DNA, 33 bp, Homo sapien
tctcagagattaaaccgaagctaaaaggatgtc

SEQ ID NO: 828541 - DNA, 33 bp, Homo sapien
aaaggctatgattgccaaggcctggaaattttg

SEQ ID NO: 828542 - DNA, 33 bp, Homo sapien
aaaggctatgattgccgaggcctggaaattttg

SEQ ID NO: 828543 - DNA, 33 bp, Homo sapien
cagtgtcatttgagagaaaggtaaacatggagc

SEQ ID NO: 828544 - DNA, 33 bp, Homo sapien
cagtgtcatttgagagtaaggtaaacatggagc

SEQ ID NO: 828545 - DNA, 33 bp, Homo sapien
agatcagcctaaggaacagtaaagtagggataa

SEQ ID NO: 828546 - DNA, 33 bp, Homo sapien
agatcagcctaaggaatagtaaagtagggataa

SEQ ID NO: 828547 - DNA, 33 bp, Homo sapien
gctatcccttgctaccgaatgaatttttattat

SEQ ID NO: 828548 - DNA, 33 bp, Homo sapien
gctatcccttgctacctaatgaatttttattat

SEQ ID NO: 828549 - DNA, 33 bp, Homo sapien
cttcttgacaactctcaatgtgctactgagaaa

SEQ ID NO: 828550 - DNA, 33 bp, Homo sapien
cttcttgacaactctcgatgtgctactgagaaa

SEQ ID NO: 828551 - DNA, 33 bp, Homo sapien
gctaaaaggtggaaaacgattgtgctgtctctt

SEQ ID NO: 828552 - DNA, 33 bp, Homo sapien
gctaaaaggtggaaaatgattgtgctgtctctt

SEQ ID NO: 828553 - DNA, 33 bp, Homo sapien
tatacagctttaaaaaatacaagctagctcagt

SEQ ID NO: 828554 - DNA, 33 bp, Homo sapien
tatacagctttaaaaagtacaagctagctcagt

SEQ ID NO: 828555 - DNA, 33 bp, Homo sapien
actccatttatccaaccccagcagtatcactga

SEQ ID NO: 828556 - DNA, 33 bp, Homo sapien
actccatttatccaactccagcagtatcactga

SEQ ID NO: 828557 - DNA, 33 bp, Homo sapien
ctgggcaacaaagaaagaacttgtctctacaaa

SEQ ID NO: 828558 - DNA, 33 bp, Homo sapien
ctgggcaacaaagaaataacttgtctctacaaa

SEQ ID NO: 828559 - DNA, 33 bp, Homo sapien
ggctggtccagaatcaaggaatgaatgtcttca

SEQ ID NO: 828560 - DNA, 33 bp, Homo sapien
ggctggtccagaatcagggaatgaatgtcttca

SEQ ID NO: 828561 - DNA, 33 bp, Homo sapien
ctcctcaaagttcagcgcaccagaacatacaca

SEQ ID NO: 828562 - DNA, 33 bp, Homo sapien
ctcctcaaagttcagctcaccagaacatacaca

SEQ ID NO: 828563 - DNA, 33 bp, Homo sapien
ctctgtgtcactcataccctactctctgaccct

SEQ ID NO: 828564 - DNA, 33 bp, Homo sapien
ctctgtgtcactcatatcctactctctgaccct

SEQ ID NO: 828565 - DNA, 33 bp, Homo sapien
cagaggtggttcgaggcagacatttagcccagc

SEQ ID NO: 828566 - DNA, 33 bp, Homo sapien
cagaggtggttcgaggtagacatttagcccagc

SEQ ID NO: 828567 - DNA, 33 bp, Homo sapien
ttgatgtttgatgttacgggcagagaaaaatac

SEQ ID NO: 828568 - DNA, 33 bp, Homo sapien
ttgatgtttgatgttatgggcagagaaaaatac

SEQ ID NO: 828569 - DNA, 33 bp, Homo sapien
agctgaggtattcccaatccaggctcacttaaa

SEQ ID NO: 828570 - DNA, 33 bp, Homo sapien
agctgaggtattcccagtccaggctcacttaaa

SEQ ID NO: 828571 - DNA, 33 bp, Homo sapien
gacacaaatgcataccagatggcttcctctgcc

SEQ ID NO: 828572 - DNA, 33 bp, Homo sapien
gacacaaatgcataccggatggcttcctctgcc

SEQ ID NO: 828573 - DNA, 33 bp, Homo sapien
cccggagagtatctgcaaacatatctacaaaaa

SEQ ID NO: 828574 - DNA, 33 bp, Homo sapien
cccggagagtatctgcgaacatatctacaaaaa

SEQ ID NO: 828575 - DNA, 33 bp, Homo sapien
aacccccaggtccacacagttgcagaggacagg

SEQ ID NO: 828576 - DNA, 33 bp, Homo sapien
aacccccaggtccacagagttgcagaggacagg

SEQ ID NO: 828577 - DNA, 33 bp, Homo sapien
tgtaagcttaattccaaactaatttgaagtctc

SEQ ID NO: 828578 - DNA, 33 bp, Homo sapien
tgtaagcttaattccagactaatttgaagtctc

SEQ ID NO: 828579 - DNA, 33 bp, Homo sapien
gaggctaaagacattcacaggagtgcaattaat

SEQ ID NO: 828580 - DNA, 33 bp, Homo sapien
gaggctaaagacattcgcaggagtgcaattaat

SEQ ID NO: 828581 - DNA, 33 bp, Homo sapien
tggagcaagtgcctcaaaccctttataattttc

SEQ ID NO: 828582 - DNA, 33 bp, Homo sapien
tggagcaagtgcctcagaccctttataattttc

SEQ ID NO: 828583 - DNA, 33 bp, Homo sapien
acagaggatggaaataaagatactgatgaagga

SEQ ID NO: 828584 - DNA, 33 bp, Homo sapien
acagaggatggaaatagagatactgatgaagga

SEQ ID NO: 828585 - DNA, 33 bp, Homo sapien
gatacaagccttgtgacgcacaaaactcaacct

SEQ ID NO: 828586 - DNA, 33 bp, Homo sapien
gatacaagccttgtgaggcacaaaactcaacct

SEQ ID NO: 828587 - DNA, 33 bp, Homo sapien
tttccagctttccttccactgagagccacttcc

SEQ ID NO: 828588 - DNA, 33 bp, Homo sapien
tttccagctttccttctactgagagccacttcc

SEQ ID NO: 828589 - DNA, 33 bp, Homo sapien
taacttcagaaggcagcaccttggaggggagcc

SEQ ID NO: 828590 - DNA, 33 bp, Homo sapien
taacttcagaaggcaggaccttggaggggagcc

SEQ ID NO: 828591 - DNA, 33 bp, Homo sapien
agctttgcaacaaaaggcaactgcgtctgaaca

SEQ ID NO: 828592 - DNA, 33 bp, Homo sapien
agctttgcaacaaaagtcaactgcgtctgaaca

SEQ ID NO: 828593 - DNA, 33 bp, Homo sapien
aatcatgcctgtccacaaatgatggtcttttac

SEQ ID NO: 828594 - DNA, 33 bp, Homo sapien
aatcatgcctgtccacgaatgatggtcttttac

SEQ ID NO: 828595 - DNA, 33 bp, Homo sapien
aaaagatgatgacttgcaaactgaatcaaaatg

SEQ ID NO: 828596 - DNA, 33 bp, Homo sapien
aaaagatgatgacttggaaactgaatcaaaatg

SEQ ID NO: 828597 - DNA, 33 bp, Homo sapien
gagagaggcaattctaaacacaaaaaatgctgg

SEQ ID NO: 828598 - DNA, 33 bp, Homo sapien
gagagaggcaattctacacacaaaaaatgctgg

SEQ ID NO: 828599 - DNA, 33 bp, Homo sapien
cgggctttgctggaaccgattgaggtgtggaac

SEQ ID NO: 828600 - DNA, 33 bp, Homo sapien
cgggctttgctggaactgattgaggtgtggaac

SEQ ID NO: 828601 - DNA, 33 bp, Homo sapien
tcttctctttcacaataagctaaaaggcaataa

SEQ ID NO: 828602 - DNA, 33 bp, Homo sapien
tcttctctttcacaatgagctaaaaggcaataa

SEQ ID NO: 828603 - DNA, 33 bp, Homo sapien
actgcttccatttctaaaatcttaaatgcaacc

SEQ ID NO: 828604 - DNA, 33 bp, Homo sapien
actgcttccatttctacaatcttaaatgcaacc

SEQ ID NO: 828605 - DNA, 33 bp, Homo sapien
ggttttgacttggagagaggagatttagttgca

SEQ ID NO: 828606 - DNA, 33 bp, Homo sapien
ggttttgacttggagataggagatttagttgca

SEQ ID NO: 828607 - DNA, 33 bp, Homo sapien
cacagagaatgaaagacggaagaaatgaagtag

SEQ ID NO: 828608 - DNA, 33 bp, Homo sapien
cacagagaatgaaagatggaagaaatgaagtag

SEQ ID NO: 828609 - DNA, 33 bp, Homo sapien
tcaagtaaatcagtaactatggcacgtttattt

SEQ ID NO: 828610 - DNA, 33 bp, Homo sapien
tcaagtaaatcagtaattatggcacgtttattt

SEQ ID NO: 828611 - DNA, 33 bp, Homo sapien
ataaaagaacggtgaccccataggccgagcagc

SEQ ID NO: 828612 - DNA, 33 bp, Homo sapien
ataaaagaacggtgactccataggccgagcagc

SEQ ID NO: 828613 - DNA, 33 bp, Homo sapien
tattgttacttgtcaactgtattctaaacaagg

SEQ ID NO: 828614 - DNA, 33 bp, Homo sapien
tattgttacttgtcaattgtattctaaacaagg

SEQ ID NO: 828615 - DNA, 33 bp, Homo sapien
atctgctctccaaaccagagtgtcacacagtgt

SEQ ID NO: 828616 - DNA, 33 bp, Homo sapien
atctgctctccaaacctgagtgtcacacagtgt

SEQ ID NO: 828617 - DNA, 33 bp, Homo sapien
agaaggaagatctgaaagtaagaagaaacagtt

SEQ ID NO: 828618 - DNA, 33 bp, Homo sapien
agaaggaagatctgaaggtaagaagaaacagtt

SEQ ID NO: 828619 - DNA, 33 bp, Homo sapien
tcatgctcatgaattacaagaatagtgttaaaa

SEQ ID NO: 828620 - DNA, 33 bp, Homo sapien
tcatgctcatgaattagaagaatagtgttaaaa

SEQ ID NO: 828621 - DNA, 33 bp, Homo sapien
tatgtctcatttgtgacggacagtgtagacact

SEQ ID NO: 828622 - DNA, 33 bp, Homo sapien
tatgtctcatttgtgatggacagtgtagacact

SEQ ID NO: 828623 - DNA, 33 bp, Homo sapien
agtgggagcacatctaaaccacagaatattttt

SEQ ID NO: 828624 - DNA, 33 bp, Homo sapien
agtgggagcacatctagaccacagaatattttt

SEQ ID NO: 828625 - DNA, 33 bp, Homo sapien
atgtattataatcaaagttacgcttagatctat

SEQ ID NO: 828626 - DNA, 33 bp, Homo sapien
atgtattataatcaaatttacgcttagatctat

SEQ ID NO: 828627 - DNA, 33 bp, Homo sapien
tgatatatatgcactacagcttgattctgcaac

SEQ ID NO: 828628 - DNA, 33 bp, Homo sapien
tgatatatatgcactagagcttgattctgcaac

SEQ ID NO: 828629 - DNA, 33 bp, Homo sapien
ctggaatgaacagaaaaattactagctctggct

SEQ ID NO: 828630 - DNA, 33 bp, Homo sapien
ctggaatgaacagaaagattactagctctggct

SEQ ID NO: 828631 - DNA, 33 bp, Homo sapien
caggcatatgaagttacggatggacgatttcac

SEQ ID NO: 828632 - DNA, 33 bp, Homo sapien
caggcatatgaagttatggatggacgatttcac

SEQ ID NO: 828633 - DNA, 33 bp, Homo sapien
tgtgagggtgaagaaacaaactggtaggtaggg

SEQ ID NO: 828634 - DNA, 33 bp, Homo sapien
tgtgagggtgaagaaataaactggtaggtaggg

SEQ ID NO: 828635 - DNA, 33 bp, Homo sapien
tttattgttgaagaagaaagtgctgccaggtgc

SEQ ID NO: 828636 - DNA, 33 bp, Homo sapien
tttattgttgaagaaggaagtgctgccaggtgc

SEQ ID NO: 828637 - DNA, 33 bp, Homo sapien
catttgatttatagcaagtgtaaactaggacta

SEQ ID NO: 828638 - DNA, 33 bp, Homo sapien
catttgatttatagcaggtgtaaactaggacta

SEQ ID NO: 828639 - DNA, 33 bp, Homo sapien
tcactctggcagctgaactaagaataggctata

SEQ ID NO: 828640 - DNA, 33 bp, Homo sapien
tcactctggcagctgacctaagaataggctata

SEQ ID NO: 828641 - DNA, 33 bp, Homo sapien
atttactgagtctaccaggcctcatacacttgc

SEQ ID NO: 828642 - DNA, 33 bp, Homo sapien
atttactgagtctaccgggcctcatacacttgc

SEQ ID NO: 828643 - DNA, 33 bp, Homo sapien
tttaggccaaatcataaaagatctggtgggcta

SEQ ID NO: 828644 - DNA, 33 bp, Homo sapien
tttaggccaaatcatagaagatctggtgggcta

SEQ ID NO: 828645 - DNA, 33 bp, Homo sapien
atgaaaatgcaggaaacagaatagggaccagac

SEQ ID NO: 828646 - DNA, 33 bp, Homo sapien
atgaaaatgcaggaaagagaatagggaccagac

SEQ ID NO: 828647 - DNA, 33 bp, Homo sapien
acatgaaggacagatgacaaggtacaggacaag

SEQ ID NO: 828648 - DNA, 33 bp, Homo sapien
acatgaaggacagatgccaaggtacaggacaag

SEQ ID NO: 828649 - DNA, 33 bp, Homo sapien
agatacggagtgccaactgtacctggtaattca

SEQ ID NO: 828650 - DNA, 33 bp, Homo sapien
agatacggagtgccaattgtacctggtaattca

SEQ ID NO: 828651 - DNA, 33 bp, Homo sapien
agttagatgatggataggtatgtatgtaggtag

SEQ ID NO: 828652 - DNA, 33 bp, Homo sapien
agttagatgatggatatgtatgtatgtaggtag

SEQ ID NO: 828653 - DNA, 33 bp, Homo sapien
gattctatgattgcaaataaccaggacatggct

SEQ ID NO: 828654 - DNA, 33 bp, Homo sapien
gattctatgattgcaactaaccaggacatggct

SEQ ID NO: 828655 - DNA, 33 bp, Homo sapien
tggctgccgtgcatcacggttaccggggcgaca

SEQ ID NO: 828656 - DNA, 33 bp, Homo sapien
tggctgccgtgcatcatggttaccggggcgaca

SEQ ID NO: 828657 - DNA, 33 bp, Homo sapien
tacctgcttagacataacagtatccggtgtgct

SEQ ID NO: 828658 - DNA, 33 bp, Homo sapien
tacctgcttagacatagcagtatccggtgtgct

SEQ ID NO: 828659 - DNA, 33 bp, Homo sapien
tggttccaaaacttgcagactcccaggttgtag

SEQ ID NO: 828660 - DNA, 33 bp, Homo sapien
tggttccaaaacttgcggactcccaggttgtag

SEQ ID NO: 828661 - DNA, 33 bp, Homo sapien
tgccatgatttcctacactctctgatttttctc

SEQ ID NO: 828662 - DNA, 33 bp, Homo sapien
tgccatgatttcctacgctctctgatttttctc

SEQ ID NO: 828663 - DNA, 33 bp, Homo sapien
atttgccttctgctgacggtgtcctgcctcagg

SEQ ID NO: 828664 - DNA, 33 bp, Homo sapien
atttgccttctgctgatggtgtcctgcctcagg

SEQ ID NO: 828665 - DNA, 33 bp, Homo sapien
ggtaagcccaaatccaatctgaaggaaaagaca

SEQ ID NO: 828666 - DNA, 33 bp, Homo sapien
ggtaagcccaaatccagtctgaaggaaaagaca

SEQ ID NO: 828667 - DNA, 33 bp, Homo sapien
taaggtctgtggtctacaccatatatcttgtct

SEQ ID NO: 828668 - DNA, 33 bp, Homo sapien
taaggtctgtggtctataccatatatcttgtct

SEQ ID NO: 828669 - DNA, 33 bp, Homo sapien
agagcctgttctgaaacctcccgttaccactat

SEQ ID NO: 828670 - DNA, 33 bp, Homo sapien
agagcctgttctgaaatctcccgttaccactat

SEQ ID NO: 828671 - DNA, 33 bp, Homo sapien
cggatgagagaaaagaagtgagcaatgggaacc

SEQ ID NO: 828672 - DNA, 33 bp, Homo sapien
cggatgagagaaaagaggtgagcaatgggaacc

SEQ ID NO: 828673 - DNA, 33 bp, Homo sapien
tgcatcctctgtgataccgtttataataaacca

SEQ ID NO: 828674 - DNA, 33 bp, Homo sapien
tgcatcctctgtgatatcgtttataataaacca

SEQ ID NO: 828675 - DNA, 33 bp, Homo sapien
ccatgtggcaccttccagcagtactttcaaggg

SEQ ID NO: 828676 - DNA, 33 bp, Homo sapien
ccatgtggcaccttccggcagtactttcaaggg

SEQ ID NO: 828677 - DNA, 33 bp, Homo sapien
agttgttaagtactaactgtatgggtatgacag

SEQ ID NO: 828678 - DNA, 33 bp, Homo sapien
agttgttaagtactaattgtatgggtatgacag

SEQ ID NO: 828679 - DNA, 33 bp, Homo sapien
agccaagtctgaaaagaaaacattgatggaaac

SEQ ID NO: 828680 - DNA, 33 bp, Homo sapien
agccaagtctgaaaagcaaacattgatggaaac

SEQ ID NO: 828681 - DNA, 33 bp, Homo sapien
taggtatgctttctaaaccaggactcttagcca

SEQ ID NO: 828682 - DNA, 33 bp, Homo sapien
taggtatgctttctaagccaggactcttagcca

SEQ ID NO: 828683 - DNA, 33 bp, Homo sapien
ggaccaagatcataagaccaagctacacaagct

SEQ ID NO: 828684 - DNA, 33 bp, Homo sapien
ggaccaagatcataagtccaagctacacaagct

SEQ ID NO: 828685 - DNA, 33 bp, Homo sapien
tcaggaccttttacacaatactttatccactca

SEQ ID NO: 828686 - DNA, 33 bp, Homo sapien
tcaggaccttttacacgatactttatccactca

SEQ ID NO: 828687 - DNA, 33 bp, Homo sapien
ttagaaaatgcagagaagtagcctaatgtttta

SEQ ID NO: 828688 - DNA, 33 bp, Homo sapien
ttagaaaatgcagagaggtagcctaatgtttta

SEQ ID NO: 828689 - DNA, 33 bp, Homo sapien
cattaaatcgaagagacattttcatttatttta

SEQ ID NO: 828690 - DNA, 33 bp, Homo sapien
cattaaatcgaagagatattttcatttatttta

SEQ ID NO: 828691 - DNA, 33 bp, Homo sapien
gtaggagaaggtacaaaaccacgacttgagaga

SEQ ID NO: 828692 - DNA, 33 bp, Homo sapien
gtaggagaaggtacaagaccacgacttgagaga

SEQ ID NO: 828693 - DNA, 33 bp, Homo sapien
ggaaatccaaaccacaataatacaccacttcat

SEQ ID NO: 828694 - DNA, 33 bp, Homo sapien
ggaaatccaaaccacagtaatacaccacttcat

SEQ ID NO: 828695 - DNA, 33 bp, Homo sapien
tttcttagctaagaaacgaaaagcacaagcaac

SEQ ID NO: 828696 - DNA, 33 bp, Homo sapien
tttcttagctaagaaatgaaaagcacaagcaac

SEQ ID NO: 828697 - DNA, 33 bp, Homo sapien
gtggtcatggtaagaccgtcaattgccggaaac

SEQ ID NO: 828698 - DNA, 33 bp, Homo sapien
gtggtcatggtaagactgtcaattgccggaaac

SEQ ID NO: 828699 - DNA, 33 bp, Homo sapien
gattatagttaacatacgtaccacgtggtcatg

SEQ ID NO: 828700 - DNA, 33 bp, Homo sapien
gattatagttaacatatgtaccacgtggtcatg

SEQ ID NO: 828701 - DNA, 33 bp, Homo sapien
gcctgatagtggaataaaggtttaggcttccaa

SEQ ID NO: 828702 - DNA, 33 bp, Homo sapien
gcctgatagtggaatacaggtttaggcttccaa

SEQ ID NO: 828703 - DNA, 33 bp, Homo sapien
atttaatgacgcctaaaaattgcattagaagaa

SEQ ID NO: 828704 - DNA, 33 bp, Homo sapien
atttaatgacgcctaataattgcattagaagaa

SEQ ID NO: 828705 - DNA, 33 bp, Homo sapien
gactgactcaaatatccgaaaaacttggtaact

SEQ ID NO: 828706 - DNA, 33 bp, Homo sapien
gactgactcaaatatctgaaaaacttggtaact

SEQ ID NO: 828707 - DNA, 33 bp, Homo sapien
aaatcatctcaaaaagaagtgacttagatatat

SEQ ID NO: 828708 - DNA, 33 bp, Homo sapien
aaatcatctcaaaaaggagtgacttagatatat

SEQ ID NO: 828709 - DNA, 33 bp, Homo sapien
ttcagtaatgatgaaacaccaattgttctccta

SEQ ID NO: 828710 - DNA, 33 bp, Homo sapien
ttcagtaatgatgaaataccaattgttctccta

SEQ ID NO: 828711 - DNA, 33 bp, Homo sapien
aattttgcaatgcttaacgccttctgtttcccc

SEQ ID NO: 828712 - DNA, 33 bp, Homo sapien
aattttgcaatgcttagcgccttctgtttcccc

SEQ ID NO: 828713 - DNA, 33 bp, Homo sapien
tgtacggtactgaaaacacaaagatgaagtaca

SEQ ID NO: 828714 - DNA, 33 bp, Homo sapien
tgtacggtactgaaaatacaaagatgaagtaca

SEQ ID NO: 828715 - DNA, 33 bp, Homo sapien
caaatgcatcagtatccattttttgtaatttag

SEQ ID NO: 828716 - DNA, 33 bp, Homo sapien
caaatgcatcagtatcgattttttgtaatttag

SEQ ID NO: 828717 - DNA, 33 bp, Homo sapien
tttctactttgaagacaaagcaaacgtacactc

SEQ ID NO: 828718 - DNA, 33 bp, Homo sapien
tttctactttgaagacgaagcaaacgtacactc

SEQ ID NO: 828719 - DNA, 33 bp, Homo sapien
acactgcctaccacacaacctttttatttggta

SEQ ID NO: 828720 - DNA, 33 bp, Homo sapien
acactgcctaccacacgacctttttatttggta

SEQ ID NO: 828721 - DNA, 33 bp, Homo sapien
agggagtggtggctacagatatttaccattttt

SEQ ID NO: 828722 - DNA, 33 bp, Homo sapien
agggagtggtggctaccgatatttaccattttt

SEQ ID NO: 828723 - DNA, 33 bp, Homo sapien
gctatctttgctgttacctagtacaactctcat

SEQ ID NO: 828724 - DNA, 33 bp, Homo sapien
gctatctttgctgttatctagtacaactctcat

SEQ ID NO: 828725 - DNA, 33 bp, Homo sapien
cactgatttgaacttaacagtctggctccagac

SEQ ID NO: 828726 - DNA, 33 bp, Homo sapien
cactgatttgaacttagcagtctggctccagac

SEQ ID NO: 828727 - DNA, 33 bp, Homo sapien
aaactgcttgaattaaatagtaaactctcccaa

SEQ ID NO: 828728 - DNA, 33 bp, Homo sapien
aaactgcttgaattaagtagtaaactctcccaa

SEQ ID NO: 828729 - DNA, 33 bp, Homo sapien
aagcagtttgttttcaaaatttatgagcagaca

SEQ ID NO: 828730 - DNA, 33 bp, Homo sapien
aagcagtttgttttcagaatttatgagcagaca

SEQ ID NO: 828731 - DNA, 33 bp, Homo sapien
ggggcctaagtcacttatctgagtcagcccttc

SEQ ID NO: 828732 - DNA, 33 bp, Homo sapien
ggggcctaagtcacttctctgagtcagcccttc

SEQ ID NO: 828733 - DNA, 33 bp, Homo sapien
ttagaaatgacaactgcaaggccatgtaatatt

SEQ ID NO: 828734 - DNA, 33 bp, Homo sapien
ttagaaatgacaactgtaaggccatgtaatatt

SEQ ID NO: 828735 - DNA, 33 bp, Homo sapien
cacactaaacaatatgaaagtaggtaaagggtg

SEQ ID NO: 828736 - DNA, 33 bp, Homo sapien
cacactaaacaatatgcaagtaggtaaagggtg

SEQ ID NO: 828737 - DNA, 33 bp, Homo sapien
aatttacattttcctaccatttgtcatctcctt

SEQ ID NO: 828738 - DNA, 33 bp, Homo sapien
aatttacattttcctatcatttgtcatctcctt

SEQ ID NO: 828739 - DNA, 33 bp, Homo sapien
tgatgcaatgacagcagaacgatactaaaccct

SEQ ID NO: 828740 - DNA, 33 bp, Homo sapien
tgatgcaatgacagcataacgatactaaaccct

SEQ ID NO: 828741 - DNA, 33 bp, Homo sapien
gtagtaatgttggaaacgttgacttgatagagg

SEQ ID NO: 828742 - DNA, 33 bp, Homo sapien
gtagtaatgttggaaaggttgacttgatagagg

SEQ ID NO: 828743 - DNA, 33 bp, Homo sapien
attgctatgatcctggaaaattggataggagtg

SEQ ID NO: 828744 - DNA, 33 bp, Homo sapien
attgctatgatcctgggaaattggataggagtg

SEQ ID NO: 828745 - DNA, 33 bp, Homo sapien
tctatcatttatcagggccattgtattggagga

SEQ ID NO: 828746 - DNA, 33 bp, Homo sapien
tctatcatttatcaggtccattgtattggagga

SEQ ID NO: 828747 - DNA, 33 bp, Homo sapien
taaatcaggcttatgactattatatcacagaaa

SEQ ID NO: 828748 - DNA, 33 bp, Homo sapien
taaatcaggcttatgattattatatcacagaaa

SEQ ID NO: 828749 - DNA, 33 bp, Homo sapien
atagcgttaatatccccctgataatatccaatg

SEQ ID NO: 828750 - DNA, 33 bp, Homo sapien
atagcgttaatatccctctgataatatccaatg

SEQ ID NO: 828751 - DNA, 33 bp, Homo sapien
aatcactgtatacaccaaggacagaactgatat

SEQ ID NO: 828752 - DNA, 33 bp, Homo sapien
aatcactgtatacaccgaggacagaactgatat

SEQ ID NO: 828753 - DNA, 33 bp, Homo sapien
aagtgttgctgagaaactgagttagatgaagac

SEQ ID NO: 828754 - DNA, 33 bp, Homo sapien
aagtgttgctgagaaattgagttagatgaagac

SEQ ID NO: 828755 - DNA, 33 bp, Homo sapien
ttagggtaaagtgcaacgagatttgcaaattgg

SEQ ID NO: 828756 - DNA, 33 bp, Homo sapien
ttagggtaaagtgcaatgagatttgcaaattgg

SEQ ID NO: 828757 - DNA, 33 bp, Homo sapien
tgatactctactcacaccaacactgtagaagtt

SEQ ID NO: 828758 - DNA, 33 bp, Homo sapien
tgatactctactcacagcaacactgtagaagtt

SEQ ID NO: 828759 - DNA, 33 bp, Homo sapien
gcttatattgtatgcacgataggcacaaaataa

SEQ ID NO: 828760 - DNA, 33 bp, Homo sapien
gcttatattgtatgcatgataggcacaaaataa

SEQ ID NO: 828761 - DNA, 33 bp, Homo sapien
ataataaataatctcaataagccatacatattc

SEQ ID NO: 828762 - DNA, 33 bp, Homo sapien
ataataaataatctcagtaagccatacatattc

SEQ ID NO: 828763 - DNA, 33 bp, Homo sapien
gctgtgttgagaccaaagtctaagggaatgaag

SEQ ID NO: 828764 - DNA, 33 bp, Homo sapien
gctgtgttgagaccaacgtctaagggaatgaag

SEQ ID NO: 828765 - DNA, 33 bp, Homo sapien
tactgtcttctagcacaaaataaatgtttgcta

SEQ ID NO: 828766 - DNA, 33 bp, Homo sapien
tactgtcttctagcacgaaataaatgtttgcta

SEQ ID NO: 828767 - DNA, 33 bp, Homo sapien
ctttatttctggtttcaatgttgttattttctt

SEQ ID NO: 828768 - DNA, 33 bp, Homo sapien
ctttatttctggtttcgatgttgttattttctt

SEQ ID NO: 828769 - DNA, 33 bp, Homo sapien
gtcctcactgagcttacgttctggttcttaggg

SEQ ID NO: 828770 - DNA, 33 bp, Homo sapien
gtcctcactgagcttatgttctggttcttaggg

SEQ ID NO: 828771 - DNA, 33 bp, Homo sapien
atgtcattctctcacaatactaccttttagaca

SEQ ID NO: 828772 - DNA, 33 bp, Homo sapien
atgtcattctctcacattactaccttttagaca

SEQ ID NO: 828773 - DNA, 33 bp, Homo sapien
ccagtacggaagacaacggaggaagcaatgggg

SEQ ID NO: 828774 - DNA, 33 bp, Homo sapien
ccagtacggaagacaatggaggaagcaatgggg

SEQ ID NO: 828775 - DNA, 33 bp, Homo sapien
gagtggtcaaaggttccaatgtcaaggccatga

SEQ ID NO: 828776 - DNA, 33 bp, Homo sapien
gagtggtcaaaggttctaatgtcaaggccatga

SEQ ID NO: 828777 - DNA, 33 bp, Homo sapien
aaatagacctatagacagacaatatatagaaaa

SEQ ID NO: 828778 - DNA, 33 bp, Homo sapien
aaatagacctatagactgacaatatatagaaaa

SEQ ID NO: 828779 - DNA, 33 bp, Homo sapien
tcatggacctgagtacagtacccagcacatggt

SEQ ID NO: 828780 - DNA, 33 bp, Homo sapien
tcatggacctgagtacggtacccagcacatggt

SEQ ID NO: 828781 - DNA, 33 bp, Homo sapien
agtatgaaattatcaccctcctgtcctccaatg

SEQ ID NO: 828782 - DNA, 33 bp, Homo sapien
agtatgaaattatcactctcctgtcctccaatg

SEQ ID NO: 828783 - DNA, 33 bp, Homo sapien
tgcaggtttcctttaacgtatttggagacacta

SEQ ID NO: 828784 - DNA, 33 bp, Homo sapien
tgcaggtttcctttaatgtatttggagacacta

SEQ ID NO: 828785 - DNA, 33 bp, Homo sapien
acattgactcaagcataaggataaacacaaatt

SEQ ID NO: 828786 - DNA, 33 bp, Homo sapien
acattgactcaagcatgaggataaacacaaatt

SEQ ID NO: 828787 - DNA, 33 bp, Homo sapien
tgcctggcaagagttaactgagtggtgtttcta

SEQ ID NO: 828788 - DNA, 33 bp, Homo sapien
tgcctggcaagagttacctgagtggtgtttcta

SEQ ID NO: 828789 - DNA, 33 bp, Homo sapien
gtcctgtttttagctacacacatacagagcagc

SEQ ID NO: 828790 - DNA, 33 bp, Homo sapien
gtcctgtttttagctatacacatacagagcagc

SEQ ID NO: 828791 - DNA, 33 bp, Homo sapien
gctctataaacagcccaacttttcttcaatact

SEQ ID NO: 828792 - DNA, 33 bp, Homo sapien
gctctataaacagcccgacttttcttcaatact

SEQ ID NO: 828793 - DNA, 33 bp, Homo sapien
tggatggtgttagaaccgagggaaaacatccca

SEQ ID NO: 828794 - DNA, 33 bp, Homo sapien
tggatggtgttagaactgagggaaaacatccca

SEQ ID NO: 828795 - DNA, 33 bp, Homo sapien
atattttcactttcacaatggtgtgccttgaaa

SEQ ID NO: 828796 - DNA, 33 bp, Homo sapien
atattttcactttcacgatggtgtgccttgaaa

SEQ ID NO: 828797 - DNA, 33 bp, Homo sapien
ggagtgacaaaatgaaaaagaacatagggacta

SEQ ID NO: 828798 - DNA, 33 bp, Homo sapien
ggagtgacaaaatgaagaagaacatagggacta

SEQ ID NO: 828799 - DNA, 33 bp, Homo sapien
ttcctgcaatccaattaaaaaagttttctgcag

SEQ ID NO: 828800 - DNA, 33 bp, Homo sapien
ttcctgcaatccaatttaaaaagttttctgcag

SEQ ID NO: 828801 - DNA, 33 bp, Homo sapien
gtgttacagctgatacagtaaaaatatgtgtga

SEQ ID NO: 828802 - DNA, 33 bp, Homo sapien
gtgttacagctgatacggtaaaaatatgtgtga

SEQ ID NO: 828803 - DNA, 33 bp, Homo sapien
cgaataatacaatgaacatatgctttaaacact

SEQ ID NO: 828804 - DNA, 33 bp, Homo sapien
cgaataatacaatgaatatatgctttaaacact

SEQ ID NO: 828805 - DNA, 33 bp, Homo sapien
taacaacacataacccacagattagcaaaagta

SEQ ID NO: 828806 - DNA, 33 bp, Homo sapien
taacaacacataacccgcagattagcaaaagta

SEQ ID NO: 828807 - DNA, 33 bp, Homo sapien
aagctggcctataaagcaagattctcttgagag

SEQ ID NO: 828808 - DNA, 33 bp, Homo sapien
aagctggcctataaaggaagattctcttgagag

SEQ ID NO: 828809 - DNA, 33 bp, Homo sapien
atggcagtgcaaaacaatgataactgagaggag

SEQ ID NO: 828810 - DNA, 33 bp, Homo sapien
atggcagtgcaaaacagtgataactgagaggag

SEQ ID NO: 828811 - DNA, 33 bp, Homo sapien
aggaagggagtggtaaagttaaataatgtgatc

SEQ ID NO: 828812 - DNA, 33 bp, Homo sapien
aggaagggagtggtaaggttaaataatgtgatc

SEQ ID NO: 828813 - DNA, 33 bp, Homo sapien
tcttgtctgtaagatcaagatagggaaacccaa

SEQ ID NO: 828814 - DNA, 33 bp, Homo sapien
tcttgtctgtaagatcgagatagggaaacccaa

SEQ ID NO: 828815 - DNA, 33 bp, Homo sapien
agtaaaacgtaaataaaactcaccaatagcagt

SEQ ID NO: 828816 - DNA, 33 bp, Homo sapien
agtaaaacgtaaataacactcaccaatagcagt

SEQ ID NO: 828817 - DNA, 33 bp, Homo sapien
acttttgcccagaaaacatctcacaaaggtcgg

SEQ ID NO: 828818 - DNA, 33 bp, Homo sapien
acttttgcccagaaaatatctcacaaaggtcgg

SEQ ID NO: 828819 - DNA, 33 bp, Homo sapien
atggataaggaagttcaaggtccctttcttctt

SEQ ID NO: 828820 - DNA, 33 bp, Homo sapien
atggataaggaagttcgaggtccctttcttctt

SEQ ID NO: 828821 - DNA, 33 bp, Homo sapien
tgaatgttactagggacagttagctttacttaa

SEQ ID NO: 828822 - DNA, 33 bp, Homo sapien
tgaatgttactagggatagttagctttacttaa

SEQ ID NO: 828823 - DNA, 33 bp, Homo sapien
ctctgttgttcccaataagtgctgataatcagt

SEQ ID NO: 828824 - DNA, 33 bp, Homo sapien
ctctgttgttcccaatgagtgctgataatcagt

SEQ ID NO: 828825 - DNA, 33 bp, Homo sapien
gcaactttaagcagcagattctttcacttgggg

SEQ ID NO: 828826 - DNA, 33 bp, Homo sapien
gcaactttaagcagcatattctttcacttgggg

SEQ ID NO: 828827 - DNA, 33 bp, Homo sapien
gctgctaacatgacagaacattcagggtgccac

SEQ ID NO: 828828 - DNA, 33 bp, Homo sapien
gctgctaacatgacaggacattcagggtgccac

SEQ ID NO: 828829 - DNA, 33 bp, Homo sapien
cataagagacaattgccaaagaaggttttgggg

SEQ ID NO: 828830 - DNA, 33 bp, Homo sapien
cataagagacaattgctaaagaaggttttgggg

SEQ ID NO: 828831 - DNA, 33 bp, Homo sapien
caggtcagaatcaccaggcttatttaacagttg

SEQ ID NO: 828832 - DNA, 33 bp, Homo sapien
caggtcagaatcaccatgcttatttaacagttg

SEQ ID NO: 828833 - DNA, 33 bp, Homo sapien
tgccagtacttgcagcaataagagagtttgact

SEQ ID NO: 828834 - DNA, 33 bp, Homo sapien
tgccagtacttgcagcgataagagagtttgact

SEQ ID NO: 828835 - DNA, 33 bp, Homo sapien
aggaatgaacatgaaacaatatggatgaaacca

SEQ ID NO: 828836 - DNA, 33 bp, Homo sapien
aggaatgaacatgaaagaatatggatgaaacca

SEQ ID NO: 828837 - DNA, 33 bp, Homo sapien
ggtggtttgattaccacaactctgtagtaggtt

SEQ ID NO: 828838 - DNA, 33 bp, Homo sapien
ggtggtttgattaccataactctgtagtaggtt

SEQ ID NO: 828839 - DNA, 33 bp, Homo sapien
caggtgcaggacaaaagaagccaatgtctctgc

SEQ ID NO: 828840 - DNA, 33 bp, Homo sapien
caggtgcaggacaaaataagccaatgtctctgc

SEQ ID NO: 828841 - DNA, 33 bp, Homo sapien
gaagcccaacgaactccgagtaggatgaactca

SEQ ID NO: 828842 - DNA, 33 bp, Homo sapien
gaagcccaacgaactctgagtaggatgaactca

SEQ ID NO: 828843 - DNA, 33 bp, Homo sapien
gatgataatgtgtctcaatgtgggtctctgagt

SEQ ID NO: 828844 - DNA, 33 bp, Homo sapien
gatgataatgtgtctcgatgtgggtctctgagt

SEQ ID NO: 828845 - DNA, 33 bp, Homo sapien
gctctcattcctgtaacaaacccttagtcccat

SEQ ID NO: 828846 - DNA, 33 bp, Homo sapien
gctctcattcctgtaataaacccttagtcccat

SEQ ID NO: 828847 - DNA, 33 bp, Homo sapien
atttcttctagggccaatattaacccagaacct

SEQ ID NO: 828848 - DNA, 33 bp, Homo sapien
atttcttctagggccagtattaacccagaacct

SEQ ID NO: 828849 - DNA, 33 bp, Homo sapien
tacttgaaaatatttaccattgattaaaaatgt

SEQ ID NO: 828850 - DNA, 33 bp, Homo sapien
tacttgaaaatatttagcattgattaaaaatgt

SEQ ID NO: 828851 - DNA, 33 bp, Homo sapien
aggtggttgaggcataagaattgttttagcctg

SEQ ID NO: 828852 - DNA, 33 bp, Homo sapien
aggtggttgaggcataggaattgttttagcctg

SEQ ID NO: 828853 - DNA, 33 bp, Homo sapien
aacctttgcatattccgctttaatgaactctga

SEQ ID NO: 828854 - DNA, 33 bp, Homo sapien
aacctttgcatattcctctttaatgaactctga

SEQ ID NO: 828855 - DNA, 33 bp, Homo sapien
ggacaagggcacaagcaagtagtatcacagaac

SEQ ID NO: 828856 - DNA, 33 bp, Homo sapien
ggacaagggcacaagcgagtagtatcacagaac

SEQ ID NO: 828857 - DNA, 33 bp, Homo sapien
atgcttgattttagaactcagagaccgtgaaag

SEQ ID NO: 828858 - DNA, 33 bp, Homo sapien
atgcttgattttagaagtcagagaccgtgaaag

SEQ ID NO: 828859 - DNA, 33 bp, Homo sapien
ccctcccatgtgagcacatacatgcccaccaaa

SEQ ID NO: 828860 - DNA, 33 bp, Homo sapien
ccctcccatgtgagcagatacatgcccaccaaa

SEQ ID NO: 828861 - DNA, 33 bp, Homo sapien
aggagactgcagaagacgtttgaagctagaaga

SEQ ID NO: 828862 - DNA, 33 bp, Homo sapien
aggagactgcagaagatgtttgaagctagaaga

SEQ ID NO: 828863 - DNA, 33 bp, Homo sapien
gaaatgtagtttagaaaggataatagcttcaca

SEQ ID NO: 828864 - DNA, 33 bp, Homo sapien
gaaatgtagtttagaatggataatagcttcaca

SEQ ID NO: 828865 - DNA, 33 bp, Homo sapien
taaactacatttcaaaaactttaagccctcatg

SEQ ID NO: 828866 - DNA, 33 bp, Homo sapien
taaactacatttcaaacactttaagccctcatg

SEQ ID NO: 828867 - DNA, 33 bp, Homo sapien
attaggtgctaatttacctaaaacggagtgcta

SEQ ID NO: 828868 - DNA, 33 bp, Homo sapien
attaggtgctaatttatctaaaacggagtgcta

SEQ ID NO: 828869 - DNA, 33 bp, Homo sapien
atatttctgtctaacactgtgagtgaacaagcc

SEQ ID NO: 828870 - DNA, 33 bp, Homo sapien
atatttctgtctaacattgtgagtgaacaagcc

SEQ ID NO: 828871 - DNA, 33 bp, Homo sapien
aaagccgcttgacttacgtacttaaaggacttg

SEQ ID NO: 828872 - DNA, 33 bp, Homo sapien
aaagccgcttgacttatgtacttaaaggacttg

SEQ ID NO: 828873 - DNA, 33 bp, Homo sapien
gtgagtaactaacgtacccactaaagtgaatgg

SEQ ID NO: 828874 - DNA, 33 bp, Homo sapien
gtgagtaactaacgtatccactaaagtgaatgg

SEQ ID NO: 828875 - DNA, 33 bp, Homo sapien
catacactacttctcaaaaaaggcaaaccctaa

SEQ ID NO: 828876 - DNA, 33 bp, Homo sapien
catacactacttctcataaaaggcaaaccctaa

SEQ ID NO: 828877 - DNA, 33 bp, Homo sapien
atggtcccagccagcaactagcaggaatatagg

SEQ ID NO: 828878 - DNA, 33 bp, Homo sapien
atggtcccagccagcagctagcaggaatatagg

SEQ ID NO: 828879 - DNA, 33 bp, Homo sapien
agcttgctgacccttagatgttttctaatgatc

SEQ ID NO: 828880 - DNA, 33 bp, Homo sapien
agcttgctgacccttatatgttttctaatgatc

SEQ ID NO: 828881 - DNA, 33 bp, Homo sapien
caccatcaccaggaaaatgtagatcagaaaggg

SEQ ID NO: 828882 - DNA, 33 bp, Homo sapien
caccatcaccaggaaagtgtagatcagaaaggg

SEQ ID NO: 828883 - DNA, 33 bp, Homo sapien
aataacctattatttacccctttctgatctaca

SEQ ID NO: 828884 - DNA, 33 bp, Homo sapien
aataacctattatttatccctttctgatctaca

SEQ ID NO: 828885 - DNA, 33 bp, Homo sapien
agagtagcaatctaataatggaggggtgctgag

SEQ ID NO: 828886 - DNA, 33 bp, Homo sapien
agagtagcaatctaatgatggaggggtgctgag

SEQ ID NO: 828887 - DNA, 33 bp, Homo sapien
gatggcgtctcaagtcactattcaatgacacct

SEQ ID NO: 828888 - DNA, 33 bp, Homo sapien
gatggcgtctcaagtcgctattcaatgacacct

SEQ ID NO: 828889 - DNA, 33 bp, Homo sapien
gatggagggcagtgaacgttaaatagtgccaga

SEQ ID NO: 828890 - DNA, 33 bp, Homo sapien
gatggagggcagtgaatgttaaatagtgccaga

SEQ ID NO: 828891 - DNA, 33 bp, Homo sapien
atgtctgtaaactgagcaaaatattgcatatct

SEQ ID NO: 828892 - DNA, 33 bp, Homo sapien
atgtctgtaaactgaggaaaatattgcatatct

SEQ ID NO: 828893 - DNA, 33 bp, Homo sapien
tgcacagcttttcccaatacatttgttacaatc

SEQ ID NO: 828894 - DNA, 33 bp, Homo sapien
tgcacagcttttcccagtacatttgttacaatc

SEQ ID NO: 828895 - DNA, 33 bp, Homo sapien
tggataaattgtgttacgtccacacaatgaaat

SEQ ID NO: 828896 - DNA, 33 bp, Homo sapien
tggataaattgtgttatgtccacacaatgaaat

SEQ ID NO: 828897 - DNA, 33 bp, Homo sapien
aagtctggaattgaccaccgaggatcaaaagac

SEQ ID NO: 828898 - DNA, 33 bp, Homo sapien
aagtctggaattgaccgccgaggatcaaaagac

SEQ ID NO: 828899 - DNA, 33 bp, Homo sapien
agttctgatggtcaaaatgatcaagagacttac

SEQ ID NO: 828900 - DNA, 33 bp, Homo sapien
agttctgatggtcaaagtgatcaagagacttac

SEQ ID NO: 828901 - DNA, 33 bp, Homo sapien
ctgcttagattgcgtcactccttgcctactgag

SEQ ID NO: 828902 - DNA, 33 bp, Homo sapien
ctgcttagattgcgtcgctccttgcctactgag

SEQ ID NO: 828903 - DNA, 33 bp, Homo sapien
aatcctaagtccaccactaattgtgtcactttg

SEQ ID NO: 828904 - DNA, 33 bp, Homo sapien
aatcctaagtccaccattaattgtgtcactttg

SEQ ID NO: 828905 - DNA, 33 bp, Homo sapien
atacacaaaaatagacaaactctccaagataga

SEQ ID NO: 828906 - DNA, 33 bp, Homo sapien
atacacaaaaatagaccaactctccaagataga

SEQ ID NO: 828907 - DNA, 33 bp, Homo sapien
accccatctctttacccagtgtctggatctatt

SEQ ID NO: 828908 - DNA, 33 bp, Homo sapien
accccatctctttacctagtgtctggatctatt

SEQ ID NO: 828909 - DNA, 33 bp, Homo sapien
aactcttttaaaattagcacaatcaggtagttc

SEQ ID NO: 828910 - DNA, 33 bp, Homo sapien
aactcttttaaaattatcacaatcaggtagttc

SEQ ID NO: 828911 - DNA, 33 bp, Homo sapien
caatcaaattttagcaacatccacgaacttaat

SEQ ID NO: 828912 - DNA, 33 bp, Homo sapien
caatcaaattttagcagcatccacgaacttaat

SEQ ID NO: 828913 - DNA, 33 bp, Homo sapien
tacttaaaattatcccactcaagttatgcctag

SEQ ID NO: 828914 - DNA, 33 bp, Homo sapien
tacttaaaattatccctctcaagttatgcctag

SEQ ID NO: 828915 - DNA, 33 bp, Homo sapien
acgttgaagtataacaataatccagctacaatg

SEQ ID NO: 828916 - DNA, 33 bp, Homo sapien
acgttgaagtataacagtaatccagctacaatg

SEQ ID NO: 828917 - DNA, 33 bp, Homo sapien
cagagtggtagcaagacgtgagagcaatcctct

SEQ ID NO: 828918 - DNA, 33 bp, Homo sapien
cagagtggtagcaagaggtgagagcaatcctct

SEQ ID NO: 828919 - DNA, 33 bp, Homo sapien
attttctaaggcatcaataagactttaaaatga

SEQ ID NO: 828920 - DNA, 33 bp, Homo sapien
attttctaaggcatcagtaagactttaaaatga

SEQ ID NO: 828921 - DNA, 33 bp, Homo sapien
tcctctccctccacgaatcgtcagtagactttg

SEQ ID NO: 828922 - DNA, 33 bp, Homo sapien
tcctctccctccacgagtcgtcagtagactttg

SEQ ID NO: 828923 - DNA, 33 bp, Homo sapien
tgatgagtcttggtgaccttttgttcacattaa

SEQ ID NO: 828924 - DNA, 33 bp, Homo sapien
tgatgagtcttggtgatcttttgttcacattaa

SEQ ID NO: 828925 - DNA, 33 bp, Homo sapien
tttgtggaatgaaaaactgaatagctgtgatat

SEQ ID NO: 828926 - DNA, 33 bp, Homo sapien
tttgtggaatgaaaaattgaatagctgtgatat

SEQ ID NO: 828927 - DNA, 33 bp, Homo sapien
ggatttgggtagatacagaagatcaaggaggag

SEQ ID NO: 828928 - DNA, 33 bp, Homo sapien
ggatttgggtagatacggaagatcaaggaggag

SEQ ID NO: 828929 - DNA, 33 bp, Homo sapien
gtctttgaacacccttaaaggaacctaggctag

SEQ ID NO: 828930 - DNA, 33 bp, Homo sapien
gtctttgaacacccttgaaggaacctaggctag

SEQ ID NO: 828931 - DNA, 33 bp, Homo sapien
agtacaaattcagagagaaggattagggcaaag

SEQ ID NO: 828932 - DNA, 33 bp, Homo sapien
agtacaaattcagagataaggattagggcaaag

SEQ ID NO: 828933 - DNA, 33 bp, Homo sapien
attgattgtcacaaacactgtttcttcatgcca

SEQ ID NO: 828934 - DNA, 33 bp, Homo sapien
attgattgtcacaaactctgtttcttcatgcca

SEQ ID NO: 828935 - DNA, 33 bp, Homo sapien
acagcctgtctggatcaactcaggttctggaat

SEQ ID NO: 828936 - DNA, 33 bp, Homo sapien
acagcctgtctggatcgactcaggttctggaat

SEQ ID NO: 828937 - DNA, 33 bp, Homo sapien
gcgtgctgtttggtaactcctgcagtttatgtg

SEQ ID NO: 828938 - DNA, 33 bp, Homo sapien
gcgtgctgtttggtaattcctgcagtttatgtg

SEQ ID NO: 828939 - DNA, 33 bp, Homo sapien
aagagtgtttggctaactgacacacactaaaag

SEQ ID NO: 828940 - DNA, 33 bp, Homo sapien
aagagtgtttggctaagtgacacacactaaaag

SEQ ID NO: 828941 - DNA, 33 bp, Homo sapien
atatgctgaaaaaccaacctaggcagagagcag

SEQ ID NO: 828942 - DNA, 33 bp, Homo sapien
atatgctgaaaaaccagcctaggcagagagcag

SEQ ID NO: 828943 - DNA, 33 bp, Homo sapien
tccacattgcagacccactttaagtcacctatc

SEQ ID NO: 828944 - DNA, 33 bp, Homo sapien
tccacattgcagacccgctttaagtcacctatc

SEQ ID NO: 828945 - DNA, 33 bp, Homo sapien
tttgaaagtttccgtgaaagaatcaataagtcg

SEQ ID NO: 828946 - DNA, 33 bp, Homo sapien
tttgaaagtttccgtggaagaatcaataagtcg

SEQ ID NO: 828947 - DNA, 33 bp, Homo sapien
ctcaggagccattttaaagccaaaagcgactta

SEQ ID NO: 828948 - DNA, 33 bp, Homo sapien
ctcaggagccattttagagccaaaagcgactta

SEQ ID NO: 828949 - DNA, 33 bp, Homo sapien
cactcctgcaggtctacgccatttcgtgcctgg

SEQ ID NO: 828950 - DNA, 33 bp, Homo sapien
cactcctgcaggtctatgccatttcgtgcctgg

SEQ ID NO: 828951 - DNA, 33 bp, Homo sapien
ctagatacaatcttcacctctggaactcatctt

SEQ ID NO: 828952 - DNA, 33 bp, Homo sapien
ctagatacaatcttcatctctggaactcatctt

SEQ ID NO: 828953 - DNA, 33 bp, Homo sapien
agtgctaaaatagaagcgtaagggagacatcac

SEQ ID NO: 828954 - DNA, 33 bp, Homo sapien
agtgctaaaatagaagtgtaagggagacatcac

SEQ ID NO: 828955 - DNA, 33 bp, Homo sapien
aacattttcaagcatacacgaaagtagagagaa

SEQ ID NO: 828956 - DNA, 33 bp, Homo sapien
aacattttcaagcatatacgaaagtagagagaa

SEQ ID NO: 828957 - DNA, 33 bp, Homo sapien
gcatggtatttggctacgataagcacgccataa

SEQ ID NO: 828958 - DNA, 33 bp, Homo sapien
gcatggtatttggctatgataagcacgccataa

SEQ ID NO: 828959 - DNA, 33 bp, Homo sapien
cgttggccattcttacggacagacatttcttcc

SEQ ID NO: 828960 - DNA, 33 bp, Homo sapien
cgttggccattcttactgacagacatttcttcc

SEQ ID NO: 828961 - DNA, 33 bp, Homo sapien
tactcaaattggtacacggaaggtattgtaaac

SEQ ID NO: 828962 - DNA, 33 bp, Homo sapien
tactcaaattggtacatggaaggtattgtaaac

SEQ ID NO: 828963 - DNA, 33 bp, Homo sapien
gcatttggtggatctacatggcctcaactggga

SEQ ID NO: 828964 - DNA, 33 bp, Homo sapien
gcatttggtggatctagatggcctcaactggga

SEQ ID NO: 828965 - DNA, 33 bp, Homo sapien
gggctgattcacccacagagtcccagttgaggc

SEQ ID NO: 828966 - DNA, 33 bp, Homo sapien
gggctgattcacccacggagtcccagttgaggc

SEQ ID NO: 828967 - DNA, 33 bp, Homo sapien
ctttattcgttttatgcagtttatagagctcag

SEQ ID NO: 828968 - DNA, 33 bp, Homo sapien
ctttattcgttttatgtagtttatagagctcag

SEQ ID NO: 828969 - DNA, 33 bp, Homo sapien
atcttgaagtcagttaaaacaatgttgtatgca

SEQ ID NO: 828970 - DNA, 33 bp, Homo sapien
atcttgaagtcagttagaacaatgttgtatgca

SEQ ID NO: 828971 - DNA, 33 bp, Homo sapien
taccatctcagagcccagggagtaagaggtgct

SEQ ID NO: 828972 - DNA, 33 bp, Homo sapien
taccatctcagagcccggggagtaagaggtgct

SEQ ID NO: 828973 - DNA, 33 bp, Homo sapien
gagcaggagagggtaaatgcatcctgtctctat

SEQ ID NO: 828974 - DNA, 33 bp, Homo sapien
gagcaggagagggtaagtgcatcctgtctctat

SEQ ID NO: 828975 - DNA, 33 bp, Homo sapien
tgtagtcttctcaaagccatctatgacttacaa

SEQ ID NO: 828976 - DNA, 33 bp, Homo sapien
tgtagtcttctcaaaggcatctatgacttacaa

SEQ ID NO: 828977 - DNA, 33 bp, Homo sapien
aactgtatgagaaagacgggccgtgtttataga

SEQ ID NO: 828978 - DNA, 33 bp, Homo sapien
aactgtatgagaaagatgggccgtgtttataga

SEQ ID NO: 828979 - DNA, 33 bp, Homo sapien
tatttttagatgcagacaaagccctgttgtgat

SEQ ID NO: 828980 - DNA, 33 bp, Homo sapien
tatttttagatgcagagaaagccctgttgtgat

SEQ ID NO: 828981 - DNA, 33 bp, Homo sapien
attgtggttgtgttaagccaccggcatctgggg

SEQ ID NO: 828982 - DNA, 33 bp, Homo sapien
attgtggttgtgttaatccaccggcatctgggg

SEQ ID NO: 828983 - DNA, 33 bp, Homo sapien
ccattaagtctgccccacaaggagtaaccagta

SEQ ID NO: 828984 - DNA, 33 bp, Homo sapien
ccattaagtctgccccgcaaggagtaaccagta

SEQ ID NO: 828985 - DNA, 33 bp, Homo sapien
gacatcctttgcttcaacttctacaccgttgag

SEQ ID NO: 828986 - DNA, 33 bp, Homo sapien
gacatcctttgcttcagcttctacaccgttgag

SEQ ID NO: 828987 - DNA, 33 bp, Homo sapien
ggaagtaatttctcagacagtttaactttgata

SEQ ID NO: 828988 - DNA, 33 bp, Homo sapien
ggaagtaatttctcaggcagtttaactttgata

SEQ ID NO: 828989 - DNA, 33 bp, Homo sapien
catagggagaaaagacgaatttcctatgccaaa

SEQ ID NO: 828990 - DNA, 33 bp, Homo sapien
catagggagaaaagactaatttcctatgccaaa

SEQ ID NO: 828991 - DNA, 33 bp, Homo sapien
ctctaagctattaccacgtgtatccttctagct

SEQ ID NO: 828992 - DNA, 33 bp, Homo sapien
ctctaagctattaccatgtgtatccttctagct

SEQ ID NO: 828993 - DNA, 33 bp, Homo sapien
actgaacagttaagtaaatggctagcagatggt

SEQ ID NO: 828994 - DNA, 33 bp, Homo sapien
actgaacagttaagtacatggctagcagatggt

SEQ ID NO: 828995 - DNA, 33 bp, Homo sapien
catgtggttttctttcaatgtatttgtattaat

SEQ ID NO: 828996 - DNA, 33 bp, Homo sapien
catgtggttttctttctatgtatttgtattaat

SEQ ID NO: 828997 - DNA, 33 bp, Homo sapien
ggagaaatcttactgaacacaatcaatagtctt

SEQ ID NO: 828998 - DNA, 33 bp, Homo sapien
ggagaaatcttactgatcacaatcaatagtctt

SEQ ID NO: 828999 - DNA, 33 bp, Homo sapien
gccactgaaaatttaaaatccctgcggtgtgaa

SEQ ID NO: 829000 - DNA, 33 bp, Homo sapien
gccactgaaaatttaagatccctgcggtgtgaa

SEQ ID NO: 829001 - DNA, 33 bp, Homo sapien
gtccctctcagccaaagattctctcgaaggaac

SEQ ID NO: 829002 - DNA, 33 bp, Homo sapien
gtccctctcagccaaatattctctcgaaggaac

SEQ ID NO: 829003 - DNA, 33 bp, Homo sapien
ttatttgatgtaaacccaccctaaatgtctgcc

SEQ ID NO: 829004 - DNA, 33 bp, Homo sapien
ttatttgatgtaaacctaccctaaatgtctgcc

SEQ ID NO: 829005 - DNA, 33 bp, Homo sapien
gagttatatacgcaccaagtagcacaggccatg

SEQ ID NO: 829006 - DNA, 33 bp, Homo sapien
gagttatatacgcaccgagtagcacaggccatg

SEQ ID NO: 829007 - DNA, 33 bp, Homo sapien
ttagtcaatgtttctaccatctattctgttatc

SEQ ID NO: 829008 - DNA, 33 bp, Homo sapien
ttagtcaatgtttctagcatctattctgttatc

SEQ ID NO: 829009 - DNA, 33 bp, Homo sapien
ctccacgcggtgtctgcattaaaggggtaaatg

SEQ ID NO: 829010 - DNA, 33 bp, Homo sapien
ctccacgcggtgtctggattaaaggggtaaatg

SEQ ID NO: 829011 - DNA, 33 bp, Homo sapien
tattcccagaactagaaagagcaaggcaaataa

SEQ ID NO: 829012 - DNA, 33 bp, Homo sapien
tattcccagaactagagagagcaaggcaaataa

SEQ ID NO: 829013 - DNA, 33 bp, Homo sapien
ccccttctgcggtgcacataggaaattcttaaa

SEQ ID NO: 829014 - DNA, 33 bp, Homo sapien
ccccttctgcggtgcatataggaaattcttaaa

SEQ ID NO: 829015 - DNA, 33 bp, Homo sapien
aaatcagcttgtctgacggggctacacagagaa

SEQ ID NO: 829016 - DNA, 33 bp, Homo sapien
aaatcagcttgtctgatggggctacacagagaa

SEQ ID NO: 829017 - DNA, 33 bp, Homo sapien
agagccatgaggcaaggaacatcaggtggcctt

SEQ ID NO: 829018 - DNA, 33 bp, Homo sapien
agagccatgaggcaagtaacatcaggtggcctt

SEQ ID NO: 829019 - DNA, 33 bp, Homo sapien
tttagctcagatctgcacatactctgcaggtac

SEQ ID NO: 829020 - DNA, 33 bp, Homo sapien
tttagctcagatctgcgcatactctgcaggtac

SEQ ID NO: 829021 - DNA, 33 bp, Homo sapien
agggctaagagcaatcaaagagatcattttact

SEQ ID NO: 829022 - DNA, 33 bp, Homo sapien
agggctaagagcaatcgaagagatcattttact

SEQ ID NO: 829023 - DNA, 33 bp, Homo sapien
tggaaatcttgctaaaccaatacagcccacatg

SEQ ID NO: 829024 - DNA, 33 bp, Homo sapien
tggaaatcttgctaaatcaatacagcccacatg

SEQ ID NO: 829025 - DNA, 33 bp, Homo sapien
taatgtacttgcaaaaccctaataaagttgaga

SEQ ID NO: 829026 - DNA, 33 bp, Homo sapien
taatgtacttgcaaaatcctaataaagttgaga

SEQ ID NO: 829027 - DNA, 33 bp, Homo sapien
aggcaaggaagacgaacgtcacctttcgttcaa

SEQ ID NO: 829028 - DNA, 33 bp, Homo sapien
aggcaaggaagacgaatgtcacctttcgttcaa

SEQ ID NO: 829029 - DNA, 33 bp, Homo sapien
gcagttgctgggaagcaaattcctttattgcaa

SEQ ID NO: 829030 - DNA, 33 bp, Homo sapien
gcagttgctgggaagcgaattcctttattgcaa

SEQ ID NO: 829031 - DNA, 33 bp, Homo sapien
cctagcattccttttacaacgttctgcgtgcac

SEQ ID NO: 829032 - DNA, 33 bp, Homo sapien
cctagcattccttttataacgttctgcgtgcac

SEQ ID NO: 829033 - DNA, 33 bp, Homo sapien
tgcagatcaatcaaccaatttataatagtacat

SEQ ID NO: 829034 - DNA, 33 bp, Homo sapien
tgcagatcaatcaaccgatttataatagtacat

SEQ ID NO: 829035 - DNA, 33 bp, Homo sapien
gcaacttgcaataatacatttgtgacaaactgt

SEQ ID NO: 829036 - DNA, 33 bp, Homo sapien
gcaacttgcaataatatatttgtgacaaactgt

SEQ ID NO: 829037 - DNA, 33 bp, Homo sapien
agtaaatgctgttgaaatgagacttttgaaggt

SEQ ID NO: 829038 - DNA, 33 bp, Homo sapien
agtaaatgctgttgaagtgagacttttgaaggt

SEQ ID NO: 829039 - DNA, 33 bp, Homo sapien
aagatgttggtaaagcagagttggcaaagctca

SEQ ID NO: 829040 - DNA, 33 bp, Homo sapien
aagatgttggtaaagcggagttggcaaagctca

SEQ ID NO: 829041 - DNA, 33 bp, Homo sapien
ttatttggaaataagaactttgcaactataatc

SEQ ID NO: 829042 - DNA, 33 bp, Homo sapien
ttatttggaaataagagctttgcaactataatc

SEQ ID NO: 829043 - DNA, 33 bp, Homo sapien
gacagactgtgaggtacacaaatgttagtttta

SEQ ID NO: 829044 - DNA, 33 bp, Homo sapien
gacagactgtgaggtatacaaatgttagtttta

SEQ ID NO: 829045 - DNA, 33 bp, Homo sapien
atgagttagcttgaaaaagacaaatgctacaaa

SEQ ID NO: 829046 - DNA, 33 bp, Homo sapien
atgagttagcttgaaatagacaaatgctacaaa

SEQ ID NO: 829047 - DNA, 33 bp, Homo sapien
actaccattgtctaccccagcccatcgtataca

SEQ ID NO: 829048 - DNA, 33 bp, Homo sapien
actaccattgtctacctcagcccatcgtataca

SEQ ID NO: 829049 - DNA, 33 bp, Homo sapien
cattatgatacccccaggtcttactctgacctc

SEQ ID NO: 829050 - DNA, 33 bp, Homo sapien
cattatgatacccccatgtcttactctgacctc

SEQ ID NO: 829051 - DNA, 33 bp, Homo sapien
ttatgtttgtaactcaaggaataagcattagct

SEQ ID NO: 829052 - DNA, 33 bp, Homo sapien
ttatgtttgtaactcagggaataagcattagct

SEQ ID NO: 829053 - DNA, 33 bp, Homo sapien
gcagagaaaatgagccggatggtaggagcagtg

SEQ ID NO: 829054 - DNA, 33 bp, Homo sapien
gcagagaaaatgagcctgatggtaggagcagtg

SEQ ID NO: 829055 - DNA, 33 bp, Homo sapien
gtaatttggtaataaacgttgcgtgctgggtga

SEQ ID NO: 829056 - DNA, 33 bp, Homo sapien
gtaatttggtaataaatgttgcgtgctgggtga

SEQ ID NO: 829057 - DNA, 33 bp, Homo sapien
ggtggtaaaaggtcagccctgtgttgtaatcca

SEQ ID NO: 829058 - DNA, 33 bp, Homo sapien
ggtggtaaaaggtcagtcctgtgttgtaatcca

SEQ ID NO: 829059 - DNA, 33 bp, Homo sapien
catataagccaggtaacagatgttgagtatata

SEQ ID NO: 829060 - DNA, 33 bp, Homo sapien
catataagccaggtaatagatgttgagtatata

SEQ ID NO: 829061 - DNA, 33 bp, Homo sapien
agattgttgtgtagacagaaaatagccaagcca

SEQ ID NO: 829062 - DNA, 33 bp, Homo sapien
agattgttgtgtagaccgaaaatagccaagcca

SEQ ID NO: 829063 - DNA, 33 bp, Homo sapien
aaagagagcagaatgcaatggcagtaatgatga

SEQ ID NO: 829064 - DNA, 33 bp, Homo sapien
aaagagagcagaatgcgatggcagtaatgatga

SEQ ID NO: 829065 - DNA, 33 bp, Homo sapien
aacttctttgttgtaccagttgctaaaaatctc

SEQ ID NO: 829066 - DNA, 33 bp, Homo sapien
aacttctttgttgtactagttgctaaaaatctc

SEQ ID NO: 829067 - DNA, 33 bp, Homo sapien
catatatggtcgtccacgatctgacccatctcc

SEQ ID NO: 829068 - DNA, 33 bp, Homo sapien
catatatggtcgtccatgatctgacccatctcc

SEQ ID NO: 829069 - DNA, 33 bp, Homo sapien
tattaggcaataagaacaatggagagttccagg

SEQ ID NO: 829070 - DNA, 33 bp, Homo sapien
tattaggcaataagaataatggagagttccagg

SEQ ID NO: 829071 - DNA, 33 bp, Homo sapien
tgcaatgagatataaaacaaaactgtggttaat

SEQ ID NO: 829072 - DNA, 33 bp, Homo sapien
tgcaatgagatataaatcaaaactgtggttaat

SEQ ID NO: 829073 - DNA, 33 bp, Homo sapien
tcctttttcatcaataaagccctgtcttactca

SEQ ID NO: 829074 - DNA, 33 bp, Homo sapien
tcctttttcatcaatagagccctgtcttactca

SEQ ID NO: 829075 - DNA, 33 bp, Homo sapien
tcagaagagaacacgtcaaggcctagagatagg

SEQ ID NO: 829076 - DNA, 33 bp, Homo sapien
tcagaagagaacacgttaaggcctagagatagg

SEQ ID NO: 829077 - DNA, 33 bp, Homo sapien
gaaacacaagggataaagtttcgtcagctccct

SEQ ID NO: 829078 - DNA, 33 bp, Homo sapien
gaaacacaagggataacgtttcgtcagctccct

SEQ ID NO: 829079 - DNA, 33 bp, Homo sapien
accacgcacagaacaacttgagatgacttccat

SEQ ID NO: 829080 - DNA, 33 bp, Homo sapien
accacgcacagaacaatttgagatgacttccat

SEQ ID NO: 829081 - DNA, 33 bp, Homo sapien
agtcagaacattaacactgattgcgttaccctc

SEQ ID NO: 829082 - DNA, 33 bp, Homo sapien
agtcagaacattaacattgattgcgttaccctc

SEQ ID NO: 829083 - DNA, 33 bp, Homo sapien
ggtaaagctgtgataaaggattgaggaacatat

SEQ ID NO: 829084 - DNA, 33 bp, Homo sapien
ggtaaagctgtgataatggattgaggaacatat

SEQ ID NO: 829085 - DNA, 33 bp, Homo sapien
tataaaaggatacggacggcttctagagcaggg

SEQ ID NO: 829086 - DNA, 33 bp, Homo sapien
tataaaaggatacggatggcttctagagcaggg

SEQ ID NO: 829087 - DNA, 33 bp, Homo sapien
ccagaagggcaaaaatcaatgcttcactctcac

SEQ ID NO: 829088 - DNA, 33 bp, Homo sapien
ccagaagggcaaaaatgaatgcttcactctcac

SEQ ID NO: 829089 - DNA, 33 bp, Homo sapien
tgtgacagcagctatacggaaatgagcccacaa

SEQ ID NO: 829090 - DNA, 33 bp, Homo sapien
tgtgacagcagctatatggaaatgagcccacaa

SEQ ID NO: 829091 - DNA, 33 bp, Homo sapien
tgatggccttctatataacatgtaaactcttca

SEQ ID NO: 829092 - DNA, 33 bp, Homo sapien
tgatggccttctatatgacatgtaaactcttca

SEQ ID NO: 829093 - DNA, 33 bp, Homo sapien
tttaataggtacctagaattgaaagaaaattga

SEQ ID NO: 829094 - DNA, 33 bp, Homo sapien
tttaataggtacctagcattgaaagaaaattga

SEQ ID NO: 829095 - DNA, 33 bp, Homo sapien
cacaaaacaaaacgaaagaataccagataacgt

SEQ ID NO: 829096 - DNA, 33 bp, Homo sapien
cacaaaacaaaacgaaggaataccagataacgt

SEQ ID NO: 829097 - DNA, 33 bp, Homo sapien
tgatgtgtcgaagttaataaaattaggcatttg

SEQ ID NO: 829098 - DNA, 33 bp, Homo sapien
tgatgtgtcgaagttagtaaaattaggcatttg

SEQ ID NO: 829099 - DNA, 33 bp, Homo sapien
aaattattgacgcaacaagagggaataatagaa

SEQ ID NO: 829100 - DNA, 33 bp, Homo sapien
aaattattgacgcaaccagagggaataatagaa

SEQ ID NO: 829101 - DNA, 33 bp, Homo sapien
ggtaattatggagaagaaaaccaatttggagcc

SEQ ID NO: 829102 - DNA, 33 bp, Homo sapien
ggtaattatggagaaggaaaccaatttggagcc

SEQ ID NO: 829103 - DNA, 33 bp, Homo sapien
aatgcatctgaactgaactactggtatcctatg

SEQ ID NO: 829104 - DNA, 33 bp, Homo sapien
aatgcatctgaactgagctactggtatcctatg

SEQ ID NO: 829105 - DNA, 33 bp, Homo sapien
gatgtatttgtcctcaagtaagaaaatagtcaa

SEQ ID NO: 829106 - DNA, 33 bp, Homo sapien
gatgtatttgtcctcacgtaagaaaatagtcaa

SEQ ID NO: 829107 - DNA, 33 bp, Homo sapien
accttatattctgatgaaggttgaaattgacat

SEQ ID NO: 829108 - DNA, 33 bp, Homo sapien
accttatattctgatggaggttgaaattgacat

SEQ ID NO: 829109 - DNA, 33 bp, Homo sapien
tggtttacaagtttaacgcagaacaggagctcc

SEQ ID NO: 829110 - DNA, 33 bp, Homo sapien
tggtttacaagtttaatgcagaacaggagctcc

SEQ ID NO: 829111 - DNA, 33 bp, Homo sapien
gtcatgtctagttccacgtaaagccccagaagt

SEQ ID NO: 829112 - DNA, 33 bp, Homo sapien
gtcatgtctagttccatgtaaagccccagaagt

SEQ ID NO: 829113 - DNA, 33 bp, Homo sapien
ttacagaccagaaaaccgaggtccaagaaacta

SEQ ID NO: 829114 - DNA, 33 bp, Homo sapien
ttacagaccagaaaactgaggtccaagaaacta

SEQ ID NO: 829115 - DNA, 33 bp, Homo sapien
gaagaaaatccatcacacttttgactacttttt

SEQ ID NO: 829116 - DNA, 33 bp, Homo sapien
gaagaaaatccatcacgcttttgactacttttt

SEQ ID NO: 829117 - DNA, 33 bp, Homo sapien
ctctacggttggaacacagattacaatggtact

SEQ ID NO: 829118 - DNA, 33 bp, Homo sapien
ctctacggttggaacagagattacaatggtact

SEQ ID NO: 829119 - DNA, 33 bp, Homo sapien
acagctcaaacaaataccaggaaaaagcacctg

SEQ ID NO: 829120 - DNA, 33 bp, Homo sapien
acagctcaaacaaatatcaggaaaaagcacctg

SEQ ID NO: 829121 - DNA, 33 bp, Homo sapien
cccttgaacaggctgacaaaagatttaaactgt

SEQ ID NO: 829122 - DNA, 33 bp, Homo sapien
cccttgaacaggctgagaaaagatttaaactgt

SEQ ID NO: 829123 - DNA, 33 bp, Homo sapien
ttacaaaataaacgtgaagatgatagaaattta

SEQ ID NO: 829124 - DNA, 33 bp, Homo sapien
ttacaaaataaacgtggagatgatagaaattta

SEQ ID NO: 829125 - DNA, 33 bp, Homo sapien
cactgggcctatgatcacattcttctcaggtca

SEQ ID NO: 829126 - DNA, 33 bp, Homo sapien
cactgggcctatgatcgcattcttctcaggtca

SEQ ID NO: 829127 - DNA, 33 bp, Homo sapien
tgtcccaggataattacgccgtacacatcactt

SEQ ID NO: 829128 - DNA, 33 bp, Homo sapien
tgtcccaggataattatgccgtacacatcactt

SEQ ID NO: 829129 - DNA, 33 bp, Homo sapien
ttttccatgacagatacgaagagagcttgtaca

SEQ ID NO: 829130 - DNA, 33 bp, Homo sapien
ttttccatgacagataggaagagagcttgtaca

SEQ ID NO: 829131 - DNA, 33 bp, Homo sapien
agacagaattccgccaccattgcatcatagagt

SEQ ID NO: 829132 - DNA, 33 bp, Homo sapien
agacagaattccgccatcattgcatcatagagt

SEQ ID NO: 829133 - DNA, 33 bp, Homo sapien
catttctggaagaaaaataatccattgtggctg

SEQ ID NO: 829134 - DNA, 33 bp, Homo sapien
catttctggaagaaaagtaatccattgtggctg

SEQ ID NO: 829135 - DNA, 33 bp, Homo sapien
ccaaaaccatgccaacactggagtccatcatta

SEQ ID NO: 829136 - DNA, 33 bp, Homo sapien
ccaaaaccatgccaacgctggagtccatcatta

SEQ ID NO: 829137 - DNA, 33 bp, Homo sapien
ctgcatactccggtaaagcagagaacaatgctc

SEQ ID NO: 829138 - DNA, 33 bp, Homo sapien
ctgcatactccggtaaggcagagaacaatgctc

SEQ ID NO: 829139 - DNA, 33 bp, Homo sapien
tttatccattaacccactaattatgtcttgagc

SEQ ID NO: 829140 - DNA, 33 bp, Homo sapien
tttatccattaacccattaattatgtcttgagc

SEQ ID NO: 829141 - DNA, 33 bp, Homo sapien
gttttatccttggaaacggaggatctttactgt

SEQ ID NO: 829142 - DNA, 33 bp, Homo sapien
gttttatccttggaaatggaggatctttactgt

SEQ ID NO: 829143 - DNA, 33 bp, Homo sapien
aaagtgttagccaaaactactttcagagagccc

SEQ ID NO: 829144 - DNA, 33 bp, Homo sapien
aaagtgttagccaaaattactttcagagagccc

SEQ ID NO: 829145 - DNA, 33 bp, Homo sapien
tagcaaatagatcaataaaaaacattttcaact

SEQ ID NO: 829146 - DNA, 33 bp, Homo sapien
tagcaaatagatcaattaaaaacattttcaact

SEQ ID NO: 829147 - DNA, 33 bp, Homo sapien
aactgcacacaactgaatatacacacacacaca

SEQ ID NO: 829148 - DNA, 33 bp, Homo sapien
aactgcacacaactgagtatacacacacacaca

SEQ ID NO: 829149 - DNA, 33 bp, Homo sapien
taactgtatgagaaaacgctttggaaattgtaa

SEQ ID NO: 829150 - DNA, 33 bp, Homo sapien
taactgtatgagaaaatgctttggaaattgtaa

SEQ ID NO: 829151 - DNA, 33 bp, Homo sapien
agacttttagagaggcacagcttgactaagatt

SEQ ID NO: 829152 - DNA, 33 bp, Homo sapien
agacttttagagaggcgcagcttgactaagatt

SEQ ID NO: 829153 - DNA, 33 bp, Homo sapien
tttttttggcctttgaagcttaagaagttgaat

SEQ ID NO: 829154 - DNA, 33 bp, Homo sapien
tttttttggcctttgaggcttaagaagttgaat

SEQ ID NO: 829155 - DNA, 33 bp, Homo sapien
ccctagacaaccactcaacctttctggctctta

SEQ ID NO: 829156 - DNA, 33 bp, Homo sapien
ccctagacaaccactccacctttctggctctta

SEQ ID NO: 829157 - DNA, 33 bp, Homo sapien
taaatcagaacattcaagtaaacaaatttcaga

SEQ ID NO: 829158 - DNA, 33 bp, Homo sapien
taaatcagaacattcaggtaaacaaatttcaga

SEQ ID NO: 829159 - DNA, 33 bp, Homo sapien
ctgtttttatgatttccacccctttgctatccc

SEQ ID NO: 829160 - DNA, 33 bp, Homo sapien
ctgtttttatgatttctacccctttgctatccc

SEQ ID NO: 829161 - DNA, 33 bp, Homo sapien
catattgcctgaaacaagttactcgctctttct

SEQ ID NO: 829162 - DNA, 33 bp, Homo sapien
catattgcctgaaacaggttactcgctctttct

SEQ ID NO: 829163 - DNA, 33 bp, Homo sapien
atttagtgtagtgataaagagactaatttttgg

SEQ ID NO: 829164 - DNA, 33 bp, Homo sapien
atttagtgtagtgatacagagactaatttttgg

SEQ ID NO: 829165 - DNA, 33 bp, Homo sapien
caaagtatttcagtacccactgctttctcctaa

SEQ ID NO: 829166 - DNA, 33 bp, Homo sapien
caaagtatttcagtactcactgctttctcctaa

SEQ ID NO: 829167 - DNA, 33 bp, Homo sapien
agtggaaaagctgaaactgcactgacgttagag

SEQ ID NO: 829168 - DNA, 33 bp, Homo sapien
agtggaaaagctgaaattgcactgacgttagag

SEQ ID NO: 829169 - DNA, 33 bp, Homo sapien
cattttaggcataaaccgttctgctagaatcca

SEQ ID NO: 829170 - DNA, 33 bp, Homo sapien
cattttaggcataaactgttctgctagaatcca

SEQ ID NO: 829171 - DNA, 33 bp, Homo sapien
cacaaaagtgctctgaagtggttgaagtgaggg

SEQ ID NO: 829172 - DNA, 33 bp, Homo sapien
cacaaaagtgctctgaggtggttgaagtgaggg

SEQ ID NO: 829173 - DNA, 33 bp, Homo sapien
catctatttatcctaaacgaagaccttttaaaa

SEQ ID NO: 829174 - DNA, 33 bp, Homo sapien
catctatttatcctaaccgaagaccttttaaaa

SEQ ID NO: 829175 - DNA, 33 bp, Homo sapien
ggaaagtgacaccatacagttgctcatgaattc

SEQ ID NO: 829176 - DNA, 33 bp, Homo sapien
ggaaagtgacaccatagagttgctcatgaattc

SEQ ID NO: 829177 - DNA, 33 bp, Homo sapien
taagtatatgcaggtacgtcaattaatagttgc

SEQ ID NO: 829178 - DNA, 33 bp, Homo sapien
taagtatatgcaggtaggtcaattaatagttgc

SEQ ID NO: 829179 - DNA, 33 bp, Homo sapien
aacattctacaggacaatgaacagggcagcccc

SEQ ID NO: 829180 - DNA, 33 bp, Homo sapien
aacattctacaggacattgaacagggcagcccc

SEQ ID NO: 829181 - DNA, 33 bp, Homo sapien
agagtaaaatctgtgacgtatgtagttagtatc

SEQ ID NO: 829182 - DNA, 33 bp, Homo sapien
agagtaaaatctgtgaggtatgtagttagtatc

SEQ ID NO: 829183 - DNA, 33 bp, Homo sapien
tcacatactgctcaaacgtaactcctctgtgag

SEQ ID NO: 829184 - DNA, 33 bp, Homo sapien
tcacatactgctcaaatgtaactcctctgtgag

SEQ ID NO: 829185 - DNA, 33 bp, Homo sapien
gtttcttgactaaataaacgttcgttgaatgaa

SEQ ID NO: 829186 - DNA, 33 bp, Homo sapien
gtttcttgactaaatagacgttcgttgaatgaa

SEQ ID NO: 829187 - DNA, 33 bp, Homo sapien
agaggtggaagagaagcctagctttacaagtgc

SEQ ID NO: 829188 - DNA, 33 bp, Homo sapien
agaggtggaagagaaggctagctttacaagtgc

SEQ ID NO: 829189 - DNA, 33 bp, Homo sapien
ctactcagaaagaaggaaacagattggtgatgg

SEQ ID NO: 829190 - DNA, 33 bp, Homo sapien
ctactcagaaagaaggtaacagattggtgatgg

SEQ ID NO: 829191 - DNA, 33 bp, Homo sapien
gctagatgaccagaaacgtgcttttagttgtaa

SEQ ID NO: 829192 - DNA, 33 bp, Homo sapien
gctagatgaccagaaatgtgcttttagttgtaa

SEQ ID NO: 829193 - DNA, 33 bp, Homo sapien
ctagttagaaggagaagacaggattttttagcc

SEQ ID NO: 829194 - DNA, 33 bp, Homo sapien
ctagttagaaggagaatacaggattttttagcc

SEQ ID NO: 829195 - DNA, 33 bp, Homo sapien
tgagccagagggcataggtacccagctcagata

SEQ ID NO: 829196 - DNA, 33 bp, Homo sapien
tgagccagagggcatatgtacccagctcagata

SEQ ID NO: 829197 - DNA, 33 bp, Homo sapien
ttcctattgatttatacgcattcgttgtatagt

SEQ ID NO: 829198 - DNA, 33 bp, Homo sapien
ttcctattgatttataggcattcgttgtatagt

SEQ ID NO: 829199 - DNA, 33 bp, Homo sapien
gccagactacacaatccgaatggaaggcacggc

SEQ ID NO: 829200 - DNA, 33 bp, Homo sapien
gccagactacacaatctgaatggaaggcacggc

SEQ ID NO: 829201 - DNA, 33 bp, Homo sapien
actagatggtctttaaataagtttccttcagat

SEQ ID NO: 829202 - DNA, 33 bp, Homo sapien
actagatggtctttaagtaagtttccttcagat

SEQ ID NO: 829203 - DNA, 33 bp, Homo sapien
ttcctcacagttgtacacagagagagagttgta

SEQ ID NO: 829204 - DNA, 33 bp, Homo sapien
ttcctcacagttgtactcagagagagagttgta

SEQ ID NO: 829205 - DNA, 33 bp, Homo sapien
tatttcaggcagaaaacatggtattgatataaa

SEQ ID NO: 829206 - DNA, 33 bp, Homo sapien
tatttcaggcagaaaatatggtattgatataaa

SEQ ID NO: 829207 - DNA, 33 bp, Homo sapien
ggctctcaacatcaccaagacagtagcaggggg

SEQ ID NO: 829208 - DNA, 33 bp, Homo sapien
ggctctcaacatcaccgagacagtagcaggggg

SEQ ID NO: 829209 - DNA, 33 bp, Homo sapien
tgtaaccagactccacacatattataagcatga

SEQ ID NO: 829210 - DNA, 33 bp, Homo sapien
tgtaaccagactccacgcatattataagcatga

SEQ ID NO: 829211 - DNA, 33 bp, Homo sapien
tcaagagtgcatgcccaagagcctccatagcag

SEQ ID NO: 829212 - DNA, 33 bp, Homo sapien
tcaagagtgcatgcccgagagcctccatagcag

SEQ ID NO: 829213 - DNA, 33 bp, Homo sapien
actcttcttgaaaaaacgggaggataatgttta

SEQ ID NO: 829214 - DNA, 33 bp, Homo sapien
actcttcttgaaaaaatgggaggataatgttta

SEQ ID NO: 829215 - DNA, 33 bp, Homo sapien
accaccatactgcaaaataaacattatcctccc

SEQ ID NO: 829216 - DNA, 33 bp, Homo sapien
accaccatactgcaaattaaacattatcctccc

SEQ ID NO: 829217 - DNA, 33 bp, Homo sapien
caggcaggatgtagtcactggaaaggagagagg

SEQ ID NO: 829218 - DNA, 33 bp, Homo sapien
caggcaggatgtagtcgctggaaaggagagagg

SEQ ID NO: 829219 - DNA, 33 bp, Homo sapien
tcctgttgttgtaccaaactctttcttgcatgt

SEQ ID NO: 829220 - DNA, 33 bp, Homo sapien
tcctgttgttgtaccagactctttcttgcatgt

SEQ ID NO: 829221 - DNA, 33 bp, Homo sapien
tgattgctaacacgtgaacacttaccatgatta

SEQ ID NO: 829222 - DNA, 33 bp, Homo sapien
tgattgctaacacgtgcacacttaccatgatta

SEQ ID NO: 829223 - DNA, 33 bp, Homo sapien
ttaccaacaaaaaccaacaggccctacatcctg

SEQ ID NO: 829224 - DNA, 33 bp, Homo sapien
ttaccaacaaaaaccagcaggccctacatcctg

SEQ ID NO: 829225 - DNA, 33 bp, Homo sapien
catatgacttggggcaaatttcttctctgagct

SEQ ID NO: 829226 - DNA, 33 bp, Homo sapien
catatgacttggggcacatttcttctctgagct

SEQ ID NO: 829227 - DNA, 33 bp, Homo sapien
atagctaggaggggaactgagtgtgagacactg

SEQ ID NO: 829228 - DNA, 33 bp, Homo sapien
atagctaggaggggaattgagtgtgagacactg

SEQ ID NO: 829229 - DNA, 33 bp, Homo sapien
ttgcagatgtgatgaaattaaagatcttgagat

SEQ ID NO: 829230 - DNA, 33 bp, Homo sapien
ttgcagatgtgatgaacttaaagatcttgagat

SEQ ID NO: 829231 - DNA, 33 bp, Homo sapien
tctcctggaagtcccactcttgaccatttctga

SEQ ID NO: 829232 - DNA, 33 bp, Homo sapien
tctcctggaagtcccattcttgaccatttctga

SEQ ID NO: 829233 - DNA, 33 bp, Homo sapien
gatttaaaaatataaccgacatgggcaatatag

SEQ ID NO: 829234 - DNA, 33 bp, Homo sapien
gatttaaaaatataactgacatgggcaatatag

SEQ ID NO: 829235 - DNA, 33 bp, Homo sapien
aaaaagacctatgttacgctacgggaacataag

SEQ ID NO: 829236 - DNA, 33 bp, Homo sapien
aaaaagacctatgttatgctacgggaacataag

SEQ ID NO: 829237 - DNA, 33 bp, Homo sapien
ttctctctttcatttgcagttaccaccacgttt

SEQ ID NO: 829238 - DNA, 33 bp, Homo sapien
ttctctctttcatttggagttaccaccacgttt

SEQ ID NO: 829239 - DNA, 33 bp, Homo sapien
tctggaagttctttcaccattgtttcctcagta

SEQ ID NO: 829240 - DNA, 33 bp, Homo sapien
tctggaagttctttcatcattgtttcctcagta

SEQ ID NO: 829241 - DNA, 33 bp, Homo sapien
agggaaagtgaaaatacctgtactcagctgctt

SEQ ID NO: 829242 - DNA, 33 bp, Homo sapien
agggaaagtgaaaatatctgtactcagctgctt

SEQ ID NO: 829243 - DNA, 33 bp, Homo sapien
aagcacagatgctatcactctcatttctctgta

SEQ ID NO: 829244 - DNA, 33 bp, Homo sapien
aagcacagatgctatcgctctcatttctctgta

SEQ ID NO: 829245 - DNA, 33 bp, Homo sapien
agaaggcataggataacgtttcaaagggaagag

SEQ ID NO: 829246 - DNA, 33 bp, Homo sapien
agaaggcataggataatgtttcaaagggaagag

SEQ ID NO: 829247 - DNA, 33 bp, Homo sapien
aggaggtacatgtggaagtttgctatatgggta

SEQ ID NO: 829248 - DNA, 33 bp, Homo sapien
aggaggtacatgtggaggtttgctatatgggta

SEQ ID NO: 829249 - DNA, 33 bp, Homo sapien
tttccacaactacacacgatctggcctcggtag

SEQ ID NO: 829250 - DNA, 33 bp, Homo sapien
tttccacaactacacaggatctggcctcggtag

SEQ ID NO: 829251 - DNA, 33 bp, Homo sapien
gtgttgtgtgtaagaacgctttgttgtcaactg

SEQ ID NO: 829252 - DNA, 33 bp, Homo sapien
gtgttgtgtgtaagaatgctttgttgtcaactg

SEQ ID NO: 829253 - DNA, 33 bp, Homo sapien
gcatattttgtaaatcaaggccatctaaacagg

SEQ ID NO: 829254 - DNA, 33 bp, Homo sapien
gcatattttgtaaatcgaggccatctaaacagg

SEQ ID NO: 829255 - DNA, 33 bp, Homo sapien
ctatgactgcctggaaatgctgacagagcagag

SEQ ID NO: 829256 - DNA, 33 bp, Homo sapien
ctatgactgcctggaactgctgacagagcagag

SEQ ID NO: 829257 - DNA, 33 bp, Homo sapien
ttatttcagtatctacagtacaatataagtatg

SEQ ID NO: 829258 - DNA, 33 bp, Homo sapien
ttatttcagtatctacggtacaatataagtatg

SEQ ID NO: 829259 - DNA, 33 bp, Homo sapien
ataatgaagccttccacgttaacccctacacaa

SEQ ID NO: 829260 - DNA, 33 bp, Homo sapien
ataatgaagccttccatgttaacccctacacaa

SEQ ID NO: 829261 - DNA, 33 bp, Homo sapien
cttactcctgctacatcagaacaaggcaaggat

SEQ ID NO: 829262 - DNA, 33 bp, Homo sapien
cttactcctgctacattagaacaaggcaaggat

SEQ ID NO: 829263 - DNA, 33 bp, Homo sapien
aggtcaattaagggaacctttgctagccaatat

SEQ ID NO: 829264 - DNA, 33 bp, Homo sapien
aggtcaattaagggaatctttgctagccaatat

SEQ ID NO: 829265 - DNA, 33 bp, Homo sapien
tgctcactatactcaacgtactgggagcaggag

SEQ ID NO: 829266 - DNA, 33 bp, Homo sapien
tgctcactatactcaaggtactgggagcaggag

SEQ ID NO: 829267 - DNA, 33 bp, Homo sapien
atgtaagcaagaattaagcttcagttactacaa

SEQ ID NO: 829268 - DNA, 33 bp, Homo sapien
atgtaagcaagaattaggcttcagttactacaa

SEQ ID NO: 829269 - DNA, 33 bp, Homo sapien
ttggagtcttacgttgcattgattgctttaaac

SEQ ID NO: 829270 - DNA, 33 bp, Homo sapien
ttggagtcttacgttgtattgattgctttaaac

SEQ ID NO: 829271 - DNA, 33 bp, Homo sapien
tgtaatagacatataacgagacatgcgttctcg

SEQ ID NO: 829272 - DNA, 33 bp, Homo sapien
tgtaatagacatataatgagacatgcgttctcg

SEQ ID NO: 829273 - DNA, 33 bp, Homo sapien
tggttacaaatataaaaattgcaaaatcagctc

SEQ ID NO: 829274 - DNA, 33 bp, Homo sapien
tggttacaaatataaacattgcaaaatcagctc

SEQ ID NO: 829275 - DNA, 33 bp, Homo sapien
aaaaatttattttaaacgagctagagctaggat

SEQ ID NO: 829276 - DNA, 33 bp, Homo sapien
aaaaatttattttaaatgagctagagctaggat

SEQ ID NO: 829277 - DNA, 33 bp, Homo sapien
agtttcaatcatgcagcacccctaggaattcca

SEQ ID NO: 829278 - DNA, 33 bp, Homo sapien
agtttcaatcatgcagtacccctaggaattcca

SEQ ID NO: 829279 - DNA, 33 bp, Homo sapien
tattgccttttattcacggtcactgccaaggtt

SEQ ID NO: 829280 - DNA, 33 bp, Homo sapien
tattgccttttattcatggtcactgccaaggtt

SEQ ID NO: 829281 - DNA, 33 bp, Homo sapien
atacatacattacaaacgggaacactatacatc

SEQ ID NO: 829282 - DNA, 33 bp, Homo sapien
atacatacattacaaatgggaacactatacatc

SEQ ID NO: 829283 - DNA, 33 bp, Homo sapien
ttagcaatgagaaatgccattcaagaaaaccct

SEQ ID NO: 829284 - DNA, 33 bp, Homo sapien
ttagcaatgagaaatgtcattcaagaaaaccct

SEQ ID NO: 829285 - DNA, 33 bp, Homo sapien
ttgctagattgggagaacatttctactgataag

SEQ ID NO: 829286 - DNA, 33 bp, Homo sapien
ttgctagattgggagagcatttctactgataag

SEQ ID NO: 829287 - DNA, 33 bp, Homo sapien
tggaaaatataaaccaataagatttgagctatt

SEQ ID NO: 829288 - DNA, 33 bp, Homo sapien
tggaaaatataaaccagtaagatttgagctatt

SEQ ID NO: 829289 - DNA, 33 bp, Homo sapien
ggattcaacataaaagactttgatattattgag

SEQ ID NO: 829290 - DNA, 33 bp, Homo sapien
ggattcaacataaaagtctttgatattattgag

SEQ ID NO: 829291 - DNA, 33 bp, Homo sapien
gagactataactgcaacggtaaaaaggcaggat

SEQ ID NO: 829292 - DNA, 33 bp, Homo sapien
gagactataactgcaatggtaaaaaggcaggat

SEQ ID NO: 829293 - DNA, 33 bp, Homo sapien
tgctcttacaagatagcaaagcatcgatttaat

SEQ ID NO: 829294 - DNA, 33 bp, Homo sapien
tgctcttacaagatagtaaagcatcgatttaat

SEQ ID NO: 829295 - DNA, 33 bp, Homo sapien
taagtgtgatatcattaaaagttacagcaaatt

SEQ ID NO: 829296 - DNA, 33 bp, Homo sapien
taagtgtgatatcattcaaagttacagcaaatt

SEQ ID NO: 829297 - DNA, 33 bp, Homo sapien
ctctttgtaggctgaaaggaagtttgaagaaaa

SEQ ID NO: 829298 - DNA, 33 bp, Homo sapien
ctctttgtaggctgaagggaagtttgaagaaaa

SEQ ID NO: 829299 - DNA, 33 bp, Homo sapien
ataacttatcttaatacagttggcttaattttt

SEQ ID NO: 829300 - DNA, 33 bp, Homo sapien
ataacttatcttaatagagttggcttaattttt

SEQ ID NO: 829301 - DNA, 33 bp, Homo sapien
aagagcatggaaaaaccgacttcctgacagtgc

SEQ ID NO: 829302 - DNA, 33 bp, Homo sapien
aagagcatggaaaaactgacttcctgacagtgc

SEQ ID NO: 829303 - DNA, 33 bp, Homo sapien
tgctgtctaaacaaaaatgtataattagttggg

SEQ ID NO: 829304 - DNA, 33 bp, Homo sapien
tgctgtctaaacaaaagtgtataattagttggg

SEQ ID NO: 829305 - DNA, 33 bp, Homo sapien
atgtaattgtggattgcatcctagacgttatta

SEQ ID NO: 829306 - DNA, 33 bp, Homo sapien
atgtaattgtggattggatcctagacgttatta

SEQ ID NO: 829307 - DNA, 33 bp, Homo sapien
ctgccaaacacgtttaaagcatcagatcttctg

SEQ ID NO: 829308 - DNA, 33 bp, Homo sapien
ctgccaaacacgtttacagcatcagatcttctg

SEQ ID NO: 829309 - DNA, 33 bp, Homo sapien
ctcacactgcgctataaagatactagttgagac

SEQ ID NO: 829310 - DNA, 33 bp, Homo sapien
ctcacactgcgctatacagatactagttgagac

SEQ ID NO: 829311 - DNA, 33 bp, Homo sapien
ggatacaacaacaacaatgaactacaggccaat

SEQ ID NO: 829312 - DNA, 33 bp, Homo sapien
ggatacaacaacaacagtgaactacaggccaat

SEQ ID NO: 829313 - DNA, 33 bp, Homo sapien
ttgcatgtttaactcacccacagtcacattact

SEQ ID NO: 829314 - DNA, 33 bp, Homo sapien
ttgcatgtttaactcatccacagtcacattact

SEQ ID NO: 829315 - DNA, 33 bp, Homo sapien
gcaaaaaatgtgacatcaaataggccttgaaaa

SEQ ID NO: 829316 - DNA, 33 bp, Homo sapien
gcaaaaaatgtgacatgaaataggccttgaaaa

SEQ ID NO: 829317 - DNA, 33 bp, Homo sapien
gcctggggactagggagaattaagccaagaaaa

SEQ ID NO: 829318 - DNA, 33 bp, Homo sapien
gcctggggactagggataattaagccaagaaaa

SEQ ID NO: 829319 - DNA, 33 bp, Homo sapien
agatttgattgtcaaaataagtgtccagttcag

SEQ ID NO: 829320 - DNA, 33 bp, Homo sapien
agatttgattgtcaaagtaagtgtccagttcag

SEQ ID NO: 829321 - DNA, 33 bp, Homo sapien
tcagccaagaagagtaagcagagaaaggagtcc

SEQ ID NO: 829322 - DNA, 33 bp, Homo sapien
tcagccaagaagagtatgcagagaaaggagtcc

SEQ ID NO: 829323 - DNA, 33 bp, Homo sapien
tgttaaacaggtctaaatcacaatgaatgacaa

SEQ ID NO: 829324 - DNA, 33 bp, Homo sapien
tgttaaacaggtctaattcacaatgaatgacaa

SEQ ID NO: 829325 - DNA, 33 bp, Homo sapien
aaggattggcattaaacatagtcaaaataaaac

SEQ ID NO: 829326 - DNA, 33 bp, Homo sapien
aaggattggcattaaagatagtcaaaataaaac

SEQ ID NO: 829327 - DNA, 33 bp, Homo sapien
gacaagctgtaacttaataaagaaagacaagga

SEQ ID NO: 829328 - DNA, 33 bp, Homo sapien
gacaagctgtaacttagtaaagaaagacaagga

SEQ ID NO: 829329 - DNA, 33 bp, Homo sapien
aggtgaggctaagttccaaccctcggatcacag

SEQ ID NO: 829330 - DNA, 33 bp, Homo sapien
aggtgaggctaagttctaaccctcggatcacag

SEQ ID NO: 829331 - DNA, 33 bp, Homo sapien
tgcactgaagaccaaactcctgcatggccccac

SEQ ID NO: 829332 - DNA, 33 bp, Homo sapien
tgcactgaagaccaaattcctgcatggccccac

SEQ ID NO: 829333 - DNA, 33 bp, Homo sapien
catatcctgaatgtcacaacacctaagttttag

SEQ ID NO: 829334 - DNA, 33 bp, Homo sapien
catatcctgaatgtcataacacctaagttttag

SEQ ID NO: 829335 - DNA, 33 bp, Homo sapien
gttgtacatggcacaaagtttctatttagtgtg

SEQ ID NO: 829336 - DNA, 33 bp, Homo sapien
gttgtacatggcacaaggtttctatttagtgtg

SEQ ID NO: 829337 - DNA, 33 bp, Homo sapien
aaaattttagctgagactaggataacatttgtt

SEQ ID NO: 829338 - DNA, 33 bp, Homo sapien
aaaattttagctgagattaggataacatttgtt

SEQ ID NO: 829339 - DNA, 33 bp, Homo sapien
cttacagggctgaggaaattaaaattaaatttc

SEQ ID NO: 829340 - DNA, 33 bp, Homo sapien
cttacagggctgaggagattaaaattaaatttc

SEQ ID NO: 829341 - DNA, 33 bp, Homo sapien
cagttcaattgtaatccatgttcataggaatgt

SEQ ID NO: 829342 - DNA, 33 bp, Homo sapien
cagttcaattgtaatcgatgttcataggaatgt

SEQ ID NO: 829343 - DNA, 33 bp, Homo sapien
tgaaaatggactaataagcattgttttaaatta

SEQ ID NO: 829344 - DNA, 33 bp, Homo sapien
tgaaaatggactaatatgcattgttttaaatta

SEQ ID NO: 829345 - DNA, 33 bp, Homo sapien
catacagtcatttaaacaggtgaggtgatcatt

SEQ ID NO: 829346 - DNA, 33 bp, Homo sapien
catacagtcatttaaataggtgaggtgatcatt

SEQ ID NO: 829347 - DNA, 33 bp, Homo sapien
gatattatttcacagaagctcctgaaagatttc

SEQ ID NO: 829348 - DNA, 33 bp, Homo sapien
gatattatttcacagacgctcctgaaagatttc

SEQ ID NO: 829349 - DNA, 33 bp, Homo sapien
aaatcttcacaatctcaacttccaacaaaaggc

SEQ ID NO: 829350 - DNA, 33 bp, Homo sapien
aaatcttcacaatctcgacttccaacaaaaggc

SEQ ID NO: 829351 - DNA, 33 bp, Homo sapien
tgggataatatataagccagattctaggactgg

SEQ ID NO: 829352 - DNA, 33 bp, Homo sapien
tgggataatatataagtcagattctaggactgg

SEQ ID NO: 829353 - DNA, 33 bp, Homo sapien
aagtttccaaattccaatctagtgtgcattcta

SEQ ID NO: 829354 - DNA, 33 bp, Homo sapien
aagtttccaaattccagtctagtgtgcattcta

SEQ ID NO: 829355 - DNA, 33 bp, Homo sapien
tcctttccgtttgaagaatttatttggccaatt

SEQ ID NO: 829356 - DNA, 33 bp, Homo sapien
tcctttccgtttgaagcatttatttggccaatt

SEQ ID NO: 829357 - DNA, 33 bp, Homo sapien
aagtattttctagggaagccgccacaagcctgg

SEQ ID NO: 829358 - DNA, 33 bp, Homo sapien
aagtattttctagggacgccgccacaagcctgg

SEQ ID NO: 829359 - DNA, 33 bp, Homo sapien
gtgtttgttttggacacatttttctcgcatgaa

SEQ ID NO: 829360 - DNA, 33 bp, Homo sapien
gtgtttgttttggacatatttttctcgcatgaa

SEQ ID NO: 829361 - DNA, 33 bp, Homo sapien
cactagactagttcacagacatctacaaagtaa

SEQ ID NO: 829362 - DNA, 33 bp, Homo sapien
cactagactagttcacggacatctacaaagtaa

SEQ ID NO: 829363 - DNA, 33 bp, Homo sapien
caacgattaagagtaaaggttttgaatagaatg

SEQ ID NO: 829364 - DNA, 33 bp, Homo sapien
caacgattaagagtaagggttttgaatagaatg

SEQ ID NO: 829365 - DNA, 33 bp, Homo sapien
gttagaattcttttcaaactcagtattagcaat

SEQ ID NO: 829366 - DNA, 33 bp, Homo sapien
gttagaattcttttcatactcagtattagcaat

SEQ ID NO: 829367 - DNA, 33 bp, Homo sapien
tggctctaggaactaaagaaaaagtaaatgcca

SEQ ID NO: 829368 - DNA, 33 bp, Homo sapien
tggctctaggaactaaggaaaaagtaaatgcca

SEQ ID NO: 829369 - DNA, 33 bp, Homo sapien
gtaagaaaatctgttacaagaactgacaatgac

SEQ ID NO: 829370 - DNA, 33 bp, Homo sapien
gtaagaaaatctgttataagaactgacaatgac

SEQ ID NO: 829371 - DNA, 33 bp, Homo sapien
caaactctcagctacaggaatgaacagtgaaat

SEQ ID NO: 829372 - DNA, 33 bp, Homo sapien
caaactctcagctacatgaatgaacagtgaaat

SEQ ID NO: 829373 - DNA, 33 bp, Homo sapien
tatgtagtcgtgtaccacttacacactcacact

SEQ ID NO: 829374 - DNA, 33 bp, Homo sapien
tatgtagtcgtgtaccgcttacacactcacact

SEQ ID NO: 829375 - DNA, 33 bp, Homo sapien
ctttactgctttttgacgggtccctaaggactc

SEQ ID NO: 829376 - DNA, 33 bp, Homo sapien
ctttactgctttttgatgggtccctaaggactc

SEQ ID NO: 829377 - DNA, 33 bp, Homo sapien
ggatgaagcatttaatcagtcagggaatagtaa

SEQ ID NO: 829378 - DNA, 33 bp, Homo sapien
ggatgaagcatttaatgagtcagggaatagtaa

SEQ ID NO: 829379 - DNA, 33 bp, Homo sapien
taaaaatcccaaatcaatgatcaagaggtcaag

SEQ ID NO: 829380 - DNA, 33 bp, Homo sapien
taaaaatcccaaatcactgatcaagaggtcaag

SEQ ID NO: 829381 - DNA, 33 bp, Homo sapien
catatgagtgtgtgaaaagaactatataaataa

SEQ ID NO: 829382 - DNA, 33 bp, Homo sapien
catatgagtgtgtgaagagaactatataaataa

SEQ ID NO: 829383 - DNA, 33 bp, Homo sapien
actaattagctaaaaaataatactcacaaataa

SEQ ID NO: 829384 - DNA, 33 bp, Homo sapien
actaattagctaaaaagtaatactcacaaataa

SEQ ID NO: 829385 - DNA, 33 bp, Homo sapien
gaaaagatgttagctccatatcattaagttata

SEQ ID NO: 829386 - DNA, 33 bp, Homo sapien
gaaaagatgttagctctatatcattaagttata

SEQ ID NO: 829387 - DNA, 33 bp, Homo sapien
tttacgtacttagtaacgtctgacttaatggat

SEQ ID NO: 829388 - DNA, 33 bp, Homo sapien
tttacgtacttagtaatgtctgacttaatggat

SEQ ID NO: 829389 - DNA, 33 bp, Homo sapien
tgtcattttctcttaccattaccaacatcatgt

SEQ ID NO: 829390 - DNA, 33 bp, Homo sapien
tgtcattttctcttactattaccaacatcatgt

SEQ ID NO: 829391 - DNA, 33 bp, Homo sapien
catgaaccaatggacccataataattaataaat

SEQ ID NO: 829392 - DNA, 33 bp, Homo sapien
catgaaccaatggaccgataataattaataaat

SEQ ID NO: 829393 - DNA, 33 bp, Homo sapien
ttttctttctgagaagacgtttgtgtttgaaga

SEQ ID NO: 829394 - DNA, 33 bp, Homo sapien
ttttctttctgagaaggcgtttgtgtttgaaga

SEQ ID NO: 829395 - DNA, 33 bp, Homo sapien
taatcctcattgcagcactatgaggtaggcatt

SEQ ID NO: 829396 - DNA, 33 bp, Homo sapien
taatcctcattgcagccctatgaggtaggcatt

SEQ ID NO: 829397 - DNA, 33 bp, Homo sapien
ttaactctatctttccaagtaatagcacacatg

SEQ ID NO: 829398 - DNA, 33 bp, Homo sapien
ttaactctatctttcctagtaatagcacacatg

SEQ ID NO: 829399 - DNA, 33 bp, Homo sapien
ttttaggcaattgtaactccatgcatgacatag

SEQ ID NO: 829400 - DNA, 33 bp, Homo sapien
ttttaggcaattgtaagtccatgcatgacatag

SEQ ID NO: 829401 - DNA, 33 bp, Homo sapien
ggacatttggctttcccattgataggcatttgt

SEQ ID NO: 829402 - DNA, 33 bp, Homo sapien
ggacatttggctttcctattgataggcatttgt

SEQ ID NO: 829403 - DNA, 33 bp, Homo sapien
gcacaattatgagactaaacactcccttcttct

SEQ ID NO: 829404 - DNA, 33 bp, Homo sapien
gcacaattatgagactgaacactcccttcttct

SEQ ID NO: 829405 - DNA, 33 bp, Homo sapien
gtgctaccatgtataaacctattgcaaatagta

SEQ ID NO: 829406 - DNA, 33 bp, Homo sapien
gtgctaccatgtataaccctattgcaaatagta

SEQ ID NO: 829407 - DNA, 33 bp, Homo sapien
ctccttttggggtcaaactaatggtcctcagaa

SEQ ID NO: 829408 - DNA, 33 bp, Homo sapien
ctccttttggggtcaatctaatggtcctcagaa

SEQ ID NO: 829409 - DNA, 33 bp, Homo sapien
agctttgttaatattaccttctctcctggtgtc

SEQ ID NO: 829410 - DNA, 33 bp, Homo sapien
agctttgttaatattatcttctctcctggtgtc

SEQ ID NO: 829411 - DNA, 33 bp, Homo sapien
ccccaaaggaatacaaatcattctgctataaag

SEQ ID NO: 829412 - DNA, 33 bp, Homo sapien
ccccaaaggaatacaagtcattctgctataaag

SEQ ID NO: 829413 - DNA, 33 bp, Homo sapien
aacagtggcgatcagaagctcccattgaaaaga

SEQ ID NO: 829414 - DNA, 33 bp, Homo sapien
aacagtggcgatcagaggctcccattgaaaaga

SEQ ID NO: 829415 - DNA, 33 bp, Homo sapien
acataaagagggaagcaaggacaagatgaccaa

SEQ ID NO: 829416 - DNA, 33 bp, Homo sapien
acataaagagggaagcgaggacaagatgaccaa

SEQ ID NO: 829417 - DNA, 33 bp, Homo sapien
gttgttcctaaaaacactgaatgatagggcttt

SEQ ID NO: 829418 - DNA, 33 bp, Homo sapien
gttgttcctaaaaacattgaatgatagggcttt

SEQ ID NO: 829419 - DNA, 33 bp, Homo sapien
agtcctgatttgctcccgatttttgacagttga

SEQ ID NO: 829420 - DNA, 33 bp, Homo sapien
agtcctgatttgctcctgatttttgacagttga

SEQ ID NO: 829421 - DNA, 33 bp, Homo sapien
atctagccaaatgtcactattttacagataaag

SEQ ID NO: 829422 - DNA, 33 bp, Homo sapien
atctagccaaatgtcattattttacagataaag

SEQ ID NO: 829423 - DNA, 33 bp, Homo sapien
tctttctcttatgctcccgctctcattatgtga

SEQ ID NO: 829424 - DNA, 33 bp, Homo sapien
tctttctcttatgctctcgctctcattatgtga

SEQ ID NO: 829425 - DNA, 33 bp, Homo sapien
tttttatcttgagtccagctcctttgcttccca

SEQ ID NO: 829426 - DNA, 33 bp, Homo sapien
tttttatcttgagtccggctcctttgcttccca

SEQ ID NO: 829427 - DNA, 33 bp, Homo sapien
ataaaaaacgtagggaagattcagcaaggacaa

SEQ ID NO: 829428 - DNA, 33 bp, Homo sapien
ataaaaaacgtagggaggattcagcaaggacaa

SEQ ID NO: 829429 - DNA, 33 bp, Homo sapien
tacagtagatttaacactggaagttcaacactg

SEQ ID NO: 829430 - DNA, 33 bp, Homo sapien
tacagtagatttaacattggaagttcaacactg

SEQ ID NO: 829431 - DNA, 33 bp, Homo sapien
ttctctcaattcaaaacgcagaagaatcccaag

SEQ ID NO: 829432 - DNA, 33 bp, Homo sapien
ttctctcaattcaaaatgcagaagaatcccaag

SEQ ID NO: 829433 - DNA, 33 bp, Homo sapien
aactgtaaaggttgaacgctccagaagagtatc

SEQ ID NO: 829434 - DNA, 33 bp, Homo sapien
aactgtaaaggttgaatgctccagaagagtatc

SEQ ID NO: 829435 - DNA, 33 bp, Homo sapien
taattctaacaagcaaatgacaaaataaataat

SEQ ID NO: 829436 - DNA, 33 bp, Homo sapien
taattctaacaagcaagtgacaaaataaataat

SEQ ID NO: 829437 - DNA, 33 bp, Homo sapien
gcaccctcagatgacactactatccccaaatgg

SEQ ID NO: 829438 - DNA, 33 bp, Homo sapien
gcaccctcagatgacagtactatccccaaatgg

SEQ ID NO: 829439 - DNA, 33 bp, Homo sapien
ctaataacatctttaacagcaacaggtatgttc

SEQ ID NO: 829440 - DNA, 33 bp, Homo sapien
ctaataacatctttaatagcaacaggtatgttc

SEQ ID NO: 829441 - DNA, 33 bp, Homo sapien
ggtgtgtttatttccacgtttgctcctctctga

SEQ ID NO: 829442 - DNA, 33 bp, Homo sapien
ggtgtgtttatttccatgtttgctcctctctga

SEQ ID NO: 829443 - DNA, 33 bp, Homo sapien
aaatggtaacttggagactatgataatgaattt

SEQ ID NO: 829444 - DNA, 33 bp, Homo sapien
aaatggtaacttggaggctatgataatgaattt

SEQ ID NO: 829445 - DNA, 33 bp, Homo sapien
ttccccatagaactgaggtttacagtctttttg

SEQ ID NO: 829446 - DNA, 33 bp, Homo sapien
ttccccatagaactgatgtttacagtctttttg

SEQ ID NO: 829447 - DNA, 33 bp, Homo sapien
ctacacttataaagcaccaaggaaggaaactgt

SEQ ID NO: 829448 - DNA, 33 bp, Homo sapien
ctacacttataaagcatcaaggaaggaaactgt

SEQ ID NO: 829449 - DNA, 33 bp, Homo sapien
aatgatgccttccttaccttgacattcccagaa

SEQ ID NO: 829450 - DNA, 33 bp, Homo sapien
aatgatgccttccttatcttgacattcccagaa

SEQ ID NO: 829451 - DNA, 33 bp, Homo sapien
tttattcttgctcacaccacatgcccaatagag

SEQ ID NO: 829452 - DNA, 33 bp, Homo sapien
tttattcttgctcacatcacatgcccaatagag

SEQ ID NO: 829453 - DNA, 33 bp, Homo sapien
gatatacaagtaaaaacattcatggatgactac

SEQ ID NO: 829454 - DNA, 33 bp, Homo sapien
gatatacaagtaaaaatattcatggatgactac

SEQ ID NO: 829455 - DNA, 33 bp, Homo sapien
tttttggaaggtcctgaaacacttgtggaaaac

SEQ ID NO: 829456 - DNA, 33 bp, Homo sapien
tttttggaaggtcctggaacacttgtggaaaac

SEQ ID NO: 829457 - DNA, 33 bp, Homo sapien
ctcggatgataccaaaactaacattatcagagt

SEQ ID NO: 829458 - DNA, 33 bp, Homo sapien
ctcggatgataccaaagctaacattatcagagt

SEQ ID NO: 829459 - DNA, 33 bp, Homo sapien
aaagattaatgaaacaatgataaacctgccaca

SEQ ID NO: 829460 - DNA, 33 bp, Homo sapien
aaagattaatgaaacagtgataaacctgccaca

SEQ ID NO: 829461 - DNA, 33 bp, Homo sapien
ttaatcttttgtgtaacgttttgaattttccaa

SEQ ID NO: 829462 - DNA, 33 bp, Homo sapien
ttaatcttttgtgtaatgttttgaattttccaa

SEQ ID NO: 829463 - DNA, 33 bp, Homo sapien
ctttgaggacaaggaacgtgtcttatttatttc

SEQ ID NO: 829464 - DNA, 33 bp, Homo sapien
ctttgaggacaaggaatgtgtcttatttatttc

SEQ ID NO: 829465 - DNA, 33 bp, Homo sapien
tgactacctgatgtgacgggattattcatacac

SEQ ID NO: 829466 - DNA, 33 bp, Homo sapien
tgactacctgatgtgatgggattattcatacac

SEQ ID NO: 829467 - DNA, 33 bp, Homo sapien
cctaaacataatctgaacatcttgcagagctga

SEQ ID NO: 829468 - DNA, 33 bp, Homo sapien
cctaaacataatctgaccatcttgcagagctga

SEQ ID NO: 829469 - DNA, 33 bp, Homo sapien
tggggcatgcttagagcagtttcatactagcct

SEQ ID NO: 829470 - DNA, 33 bp, Homo sapien
tggggcatgcttagagtagtttcatactagcct

SEQ ID NO: 829471 - DNA, 33 bp, Homo sapien
tttgggacctgttaaaattgttaaaatactagt

SEQ ID NO: 829472 - DNA, 33 bp, Homo sapien
tttgggacctgttaaagttgttaaaatactagt

SEQ ID NO: 829473 - DNA, 33 bp, Homo sapien
gagagagaactaagaaagtaggaaaaaaggagt

SEQ ID NO: 829474 - DNA, 33 bp, Homo sapien
gagagagaactaagaaggtaggaaaaaaggagt

SEQ ID NO: 829475 - DNA, 33 bp, Homo sapien
gtctccgtttacttcaatagaggatttctatga

SEQ ID NO: 829476 - DNA, 33 bp, Homo sapien
gtctccgtttacttcagtagaggatttctatga

SEQ ID NO: 829477 - DNA, 33 bp, Homo sapien
ctgtggtgatgaaaacactctgtatctgcactg

SEQ ID NO: 829478 - DNA, 33 bp, Homo sapien
ctgtggtgatgaaaacgctctgtatctgcactg

SEQ ID NO: 829479 - DNA, 33 bp, Homo sapien
accatcagaactacacacgtatatggcaggatg

SEQ ID NO: 829480 - DNA, 33 bp, Homo sapien
accatcagaactacacgcgtatatggcaggatg

SEQ ID NO: 829481 - DNA, 33 bp, Homo sapien
attgaaaagctaagtcaaggcactggtgtagaa

SEQ ID NO: 829482 - DNA, 33 bp, Homo sapien
attgaaaagctaagtcgaggcactggtgtagaa

SEQ ID NO: 829483 - DNA, 33 bp, Homo sapien
accctcacagatgacaacctccaatgtcactca

SEQ ID NO: 829484 - DNA, 33 bp, Homo sapien
accctcacagatgacagcctccaatgtcactca

SEQ ID NO: 829485 - DNA, 33 bp, Homo sapien
ccatattccaggaagcacaagtatgcagtgtga

SEQ ID NO: 829486 - DNA, 33 bp, Homo sapien
ccatattccaggaagcgcaagtatgcagtgtga

SEQ ID NO: 829487 - DNA, 33 bp, Homo sapien
tctactaagtgtactcaatatagaattggctag

SEQ ID NO: 829488 - DNA, 33 bp, Homo sapien
tctactaagtgtactcgatatagaattggctag

SEQ ID NO: 829489 - DNA, 33 bp, Homo sapien
atgtgttccagcataacgttgcccagctatggg

SEQ ID NO: 829490 - DNA, 33 bp, Homo sapien
atgtgttccagcataatgttgcccagctatggg

SEQ ID NO: 829491 - DNA, 33 bp, Homo sapien
tagcattcagggaatacaatactttcttaaggc

SEQ ID NO: 829492 - DNA, 33 bp, Homo sapien
tagcattcagggaatataatactttcttaaggc

SEQ ID NO: 829493 - DNA, 33 bp, Homo sapien
tagcatcctgcactgaatatatgttatcattct

SEQ ID NO: 829494 - DNA, 33 bp, Homo sapien
tagcatcctgcactgactatatgttatcattct

SEQ ID NO: 829495 - DNA, 33 bp, Homo sapien
aaaaatttatcttctcaagtagccaccaactac

SEQ ID NO: 829496 - DNA, 33 bp, Homo sapien
aaaaatttatcttctcgagtagccaccaactac

SEQ ID NO: 829497 - DNA, 33 bp, Homo sapien
tgtaactgaattcaataagtagctatgctgtgc

SEQ ID NO: 829498 - DNA, 33 bp, Homo sapien
tgtaactgaattcaatgagtagctatgctgtgc

SEQ ID NO: 829499 - DNA, 33 bp, Homo sapien
aacagctccttgcgggcagtgaccttgtctgtc

SEQ ID NO: 829500 - DNA, 33 bp, Homo sapien
aacagctccttgcgggtagtgaccttgtctgtc

SEQ ID NO: 829501 - DNA, 33 bp, Homo sapien
tctgatatcctcaagaataaagaacaactctgt

SEQ ID NO: 829502 - DNA, 33 bp, Homo sapien
tctgatatcctcaagattaaagaacaactctgt

SEQ ID NO: 829503 - DNA, 33 bp, Homo sapien
aaattttgtgtagtaactgcttcttaaattacc

SEQ ID NO: 829504 - DNA, 33 bp, Homo sapien
aaattttgtgtagtaagtgcttcttaaattacc

SEQ ID NO: 829505 - DNA, 33 bp, Homo sapien
tttattttattttttaacatggcagctttcaga

SEQ ID NO: 829506 - DNA, 33 bp, Homo sapien
tttattttattttttagcatggcagctttcaga

SEQ ID NO: 829507 - DNA, 33 bp, Homo sapien
tactgtaatactaaaccctaaagcaataagctg

SEQ ID NO: 829508 - DNA, 33 bp, Homo sapien
tactgtaatactaaactctaaagcaataagctg

SEQ ID NO: 829509 - DNA, 33 bp, Homo sapien
aaaaagaatggagaaaatctatcactctgaggt

SEQ ID NO: 829510 - DNA, 33 bp, Homo sapien
aaaaagaatggagaaagtctatcactctgaggt

SEQ ID NO: 829511 - DNA, 33 bp, Homo sapien
cccatgcatagaacccactaactcctcaccttc

SEQ ID NO: 829512 - DNA, 33 bp, Homo sapien
cccatgcatagaacccgctaactcctcaccttc

SEQ ID NO: 829513 - DNA, 33 bp, Homo sapien
aataaataacaaactcaacagaacccatcaagc

SEQ ID NO: 829514 - DNA, 33 bp, Homo sapien
aataaataacaaactcgacagaacccatcaagc

SEQ ID NO: 829515 - DNA, 33 bp, Homo sapien
aggccttctgataacactaattaccagcagagt

SEQ ID NO: 829516 - DNA, 33 bp, Homo sapien
aggccttctgataacattaattaccagcagagt

SEQ ID NO: 829517 - DNA, 33 bp, Homo sapien
aattatgggtccacacaatctttctttctctgt

SEQ ID NO: 829518 - DNA, 33 bp, Homo sapien
aattatgggtccacaccatctttctttctctgt

SEQ ID NO: 829519 - DNA, 33 bp, Homo sapien
gattataagggctaataagtttttgggtctgga

SEQ ID NO: 829520 - DNA, 33 bp, Homo sapien
gattataagggctaatcagtttttgggtctgga

SEQ ID NO: 829521 - DNA, 33 bp, Homo sapien
gagctgcagctcctcacgctcctagattccctg

SEQ ID NO: 829522 - DNA, 33 bp, Homo sapien
gagctgcagctcctcaggctcctagattccctg

SEQ ID NO: 829523 - DNA, 33 bp, Homo sapien
aaaagggctagaggaaggacaaccatctagtga

SEQ ID NO: 829524 - DNA, 33 bp, Homo sapien
aaaagggctagaggaatgacaaccatctagtga

SEQ ID NO: 829525 - DNA, 33 bp, Homo sapien
acattagaactaataaagcacaggcgcaattat

SEQ ID NO: 829526 - DNA, 33 bp, Homo sapien
acattagaactaataaggcacaggcgcaattat

SEQ ID NO: 829527 - DNA, 33 bp, Homo sapien
ggaaaagtctaaaaataattgcactgcataatg

SEQ ID NO: 829528 - DNA, 33 bp, Homo sapien
ggaaaagtctaaaaatgattgcactgcataatg

SEQ ID NO: 829529 - DNA, 33 bp, Homo sapien
tttgaaataaacaggacagtgggcgttaaacgt

SEQ ID NO: 829530 - DNA, 33 bp, Homo sapien
tttgaaataaacaggatagtgggcgttaaacgt

SEQ ID NO: 829531 - DNA, 33 bp, Homo sapien
tcgggagataatgcacacttcgcagtggatctt

SEQ ID NO: 829532 - DNA, 33 bp, Homo sapien
tcgggagataatgcactcttcgcagtggatctt

SEQ ID NO: 829533 - DNA, 33 bp, Homo sapien
cttcaggagaaagatcacgggttctggactagt

SEQ ID NO: 829534 - DNA, 33 bp, Homo sapien
cttcaggagaaagatcgcgggttctggactagt

SEQ ID NO: 829535 - DNA, 33 bp, Homo sapien
acacagtacttctacaacaagaggaagaagaga

SEQ ID NO: 829536 - DNA, 33 bp, Homo sapien
acacagtacttctacatcaagaggaagaagaga

SEQ ID NO: 829537 - DNA, 33 bp, Homo sapien
caaaccctagatataagacagcagccttgtaaa

SEQ ID NO: 829538 - DNA, 33 bp, Homo sapien
caaaccctagatataatacagcagccttgtaaa

SEQ ID NO: 829539 - DNA, 33 bp, Homo sapien
tacttgtttcccttcacgttctagtttgtagaa

SEQ ID NO: 829540 - DNA, 33 bp, Homo sapien
tacttgtttcccttcaggttctagtttgtagaa

SEQ ID NO: 829541 - DNA, 33 bp, Homo sapien
tccatgtctgacattcactatgctaattagcat

SEQ ID NO: 829542 - DNA, 33 bp, Homo sapien
tccatgtctgacattcgctatgctaattagcat

SEQ ID NO: 829543 - DNA, 33 bp, Homo sapien
ctctcctcagcctaaaacattttaatggttacc

SEQ ID NO: 829544 - DNA, 33 bp, Homo sapien
ctctcctcagcctaaagcattttaatggttacc

SEQ ID NO: 829545 - DNA, 33 bp, Homo sapien
agtaggacctgtctcacaccaacttatcatcat

SEQ ID NO: 829546 - DNA, 33 bp, Homo sapien
agtaggacctgtctcataccaacttatcatcat

SEQ ID NO: 829547 - DNA, 33 bp, Homo sapien
atacaaatattttaagaaattgactatcctgtg

SEQ ID NO: 829548 - DNA, 33 bp, Homo sapien
atacaaatattttaaggaattgactatcctgtg

SEQ ID NO: 829549 - DNA, 33 bp, Homo sapien
ctatcagccagtggaagctgcttggaatactgt

SEQ ID NO: 829550 - DNA, 33 bp, Homo sapien
ctatcagccagtggaatctgcttggaatactgt

SEQ ID NO: 829551 - DNA, 33 bp, Homo sapien
cttggaatactgtttaaagaaaggcaggagcca

SEQ ID NO: 829552 - DNA, 33 bp, Homo sapien
cttggaatactgtttagagaaaggcaggagcca

SEQ ID NO: 829553 - DNA, 33 bp, Homo sapien
gagctcagttacagccagagtatagtgagaggg

SEQ ID NO: 829554 - DNA, 33 bp, Homo sapien
gagctcagttacagcctgagtatagtgagaggg

SEQ ID NO: 829555 - DNA, 33 bp, Homo sapien
tgtatttgctaatttaaactgataaactggcat

SEQ ID NO: 829556 - DNA, 33 bp, Homo sapien
tgtatttgctaatttagactgataaactggcat

SEQ ID NO: 829557 - DNA, 33 bp, Homo sapien
atggacaataaaataccgtacatcaaggaaaat

SEQ ID NO: 829558 - DNA, 33 bp, Homo sapien
atggacaataaaatactgtacatcaaggaaaat

SEQ ID NO: 829559 - DNA, 33 bp, Homo sapien
tattttttcttctcgggatgtgaccttagcaag

SEQ ID NO: 829560 - DNA, 33 bp, Homo sapien
tattttttcttctcggtatgtgaccttagcaag

SEQ ID NO: 829561 - DNA, 33 bp, Homo sapien
taatgtatcagtctgcaaggtattatttttctc

SEQ ID NO: 829562 - DNA, 33 bp, Homo sapien
taatgtatcagtctgcgaggtattatttttctc

SEQ ID NO: 829563 - DNA, 33 bp, Homo sapien
ttctaagaaaagacaacggtaaagacaatggta

SEQ ID NO: 829564 - DNA, 33 bp, Homo sapien
ttctaagaaaagacaatggtaaagacaatggta

SEQ ID NO: 829565 - DNA, 33 bp, Homo sapien
ataatgtctccttttacgagaaatttggaagtt

SEQ ID NO: 829566 - DNA, 33 bp, Homo sapien
ataatgtctccttttatgagaaatttggaagtt

SEQ ID NO: 829567 - DNA, 33 bp, Homo sapien
agtgcaaaattgaaagactcttctctgctttat

SEQ ID NO: 829568 - DNA, 33 bp, Homo sapien
agtgcaaaattgaaaggctcttctctgctttat

SEQ ID NO: 829569 - DNA, 33 bp, Homo sapien
ctggcctacctgtaaaattaacagaggacagac

SEQ ID NO: 829570 - DNA, 33 bp, Homo sapien
ctggcctacctgtaaagttaacagaggacagac

SEQ ID NO: 829571 - DNA, 33 bp, Homo sapien
tttatccatttatataccatttgggtccagtag

SEQ ID NO: 829572 - DNA, 33 bp, Homo sapien
tttatccatttatatatcatttgggtccagtag

SEQ ID NO: 829573 - DNA, 33 bp, Homo sapien
agaggcatgctaatggccagctttcatttttct

SEQ ID NO: 829574 - DNA, 33 bp, Homo sapien
agaggcatgctaatggtcagctttcatttttct

SEQ ID NO: 829575 - DNA, 33 bp, Homo sapien
agtcaagtaagaaatgaaccaccaaaggcaagt

SEQ ID NO: 829576 - DNA, 33 bp, Homo sapien
agtcaagtaagaaatggaccaccaaaggcaagt

SEQ ID NO: 829577 - DNA, 33 bp, Homo sapien
ctatgggtcaggaaaacgtttctatttatttgg

SEQ ID NO: 829578 - DNA, 33 bp, Homo sapien
ctatgggtcaggaaaaggtttctatttatttgg

SEQ ID NO: 829579 - DNA, 33 bp, Homo sapien
tatatgatactgcaccaaataaaaatagtctaa

SEQ ID NO: 829580 - DNA, 33 bp, Homo sapien
tatatgatactgcacctaataaaaatagtctaa

SEQ ID NO: 829581 - DNA, 33 bp, Homo sapien
gaactacatctgaagaacaatgtttagctcttt

SEQ ID NO: 829582 - DNA, 33 bp, Homo sapien
gaactacatctgaagagcaatgtttagctcttt

SEQ ID NO: 829583 - DNA, 33 bp, Homo sapien
ttatcagtaggaagcaacatattggtctttaga

SEQ ID NO: 829584 - DNA, 33 bp, Homo sapien
ttatcagtaggaagcagcatattggtctttaga

SEQ ID NO: 829585 - DNA, 33 bp, Homo sapien
attagcttcttcaacaatgagctctgtggaata

SEQ ID NO: 829586 - DNA, 33 bp, Homo sapien
attagcttcttcaacagtgagctctgtggaata

SEQ ID NO: 829587 - DNA, 33 bp, Homo sapien
aagtcattctttagcactcaccatctttacgaa

SEQ ID NO: 829588 - DNA, 33 bp, Homo sapien
aagtcattctttagcattcaccatctttacgaa

SEQ ID NO: 829589 - DNA, 33 bp, Homo sapien
cagaatgaatggctcaagctcacattgtgttcc

SEQ ID NO: 829590 - DNA, 33 bp, Homo sapien
cagaatgaatggctcaggctcacattgtgttcc

SEQ ID NO: 829591 - DNA, 33 bp, Homo sapien
aaagcatctctaaaaacccagcaagacccttag

SEQ ID NO: 829592 - DNA, 33 bp, Homo sapien
aaagcatctctaaaaatccagcaagacccttag

SEQ ID NO: 829593 - DNA, 33 bp, Homo sapien
gggaacttttcagtagccatcccgtaggctaaa

SEQ ID NO: 829594 - DNA, 33 bp, Homo sapien
gggaacttttcagtagtcatcccgtaggctaaa

SEQ ID NO: 829595 - DNA, 33 bp, Homo sapien
tattaaatgtataaaaacaattatgtgggaaat

SEQ ID NO: 829596 - DNA, 33 bp, Homo sapien
tattaaatgtataaaagcaattatgtgggaaat

SEQ ID NO: 829597 - DNA, 33 bp, Homo sapien
aaagtcctttgttgcactatccagtggacccta

SEQ ID NO: 829598 - DNA, 33 bp, Homo sapien
aaagtcctttgttgcagtatccagtggacccta

SEQ ID NO: 829599 - DNA, 33 bp, Homo sapien
tgggtacctgcagcgtaaactccattctcaaat

SEQ ID NO: 829600 - DNA, 33 bp, Homo sapien
tgggtacctgcagcgtgaactccattctcaaat

SEQ ID NO: 829601 - DNA, 33 bp, Homo sapien
cggtgcctcattggaaacacagaacatgcttaa

SEQ ID NO: 829602 - DNA, 33 bp, Homo sapien
cggtgcctcattggaagcacagaacatgcttaa

SEQ ID NO: 829603 - DNA, 33 bp, Homo sapien
tgaacattgcacaaagaaaaagccaatgcatca

SEQ ID NO: 829604 - DNA, 33 bp, Homo sapien
tgaacattgcacaaaggaaaagccaatgcatca

SEQ ID NO: 829605 - DNA, 33 bp, Homo sapien
gtgagagttgttaaaacagctaacatcaacatg

SEQ ID NO: 829606 - DNA, 33 bp, Homo sapien
gtgagagttgttaaaatagctaacatcaacatg

SEQ ID NO: 829607 - DNA, 33 bp, Homo sapien
aaaaattgtaagcacactaagtccaggagaggt

SEQ ID NO: 829608 - DNA, 33 bp, Homo sapien
aaaaattgtaagcacagtaagtccaggagaggt

SEQ ID NO: 829609 - DNA, 33 bp, Homo sapien
ctcatttacttctgaaatgtacaaagaaattca

SEQ ID NO: 829610 - DNA, 33 bp, Homo sapien
ctcatttacttctgaactgtacaaagaaattca

SEQ ID NO: 829611 - DNA, 33 bp, Homo sapien
cttcacttcccaacagacagctttctttaaaac

SEQ ID NO: 829612 - DNA, 33 bp, Homo sapien
cttcacttcccaacagtcagctttctttaaaac

SEQ ID NO: 829613 - DNA, 33 bp, Homo sapien
aaaaagagaagtacaccataacgttggtgagag

SEQ ID NO: 829614 - DNA, 33 bp, Homo sapien
aaaaagagaagtacactataacgttggtgagag

SEQ ID NO: 829615 - DNA, 33 bp, Homo sapien
aagcttttggacaaacgcctcttcttgcttatt

SEQ ID NO: 829616 - DNA, 33 bp, Homo sapien
aagcttttggacaaactcctcttcttgcttatt

SEQ ID NO: 829617 - DNA, 33 bp, Homo sapien
aaatgaagaatcattacgtacctctacatgggt

SEQ ID NO: 829618 - DNA, 33 bp, Homo sapien
aaatgaagaatcattatgtacctctacatgggt

SEQ ID NO: 829619 - DNA, 33 bp, Homo sapien
ctactaattgctttacagagaagtaaaagattc

SEQ ID NO: 829620 - DNA, 33 bp, Homo sapien
ctactaattgctttacggagaagtaaaagattc

SEQ ID NO: 829621 - DNA, 33 bp, Homo sapien
accagcagcacagaaacttatcatttcttagtt

SEQ ID NO: 829622 - DNA, 33 bp, Homo sapien
accagcagcacagaaagttatcatttcttagtt

SEQ ID NO: 829623 - DNA, 33 bp, Homo sapien
cataaaactgaagcaaagtccttgtaagaaacc

SEQ ID NO: 829624 - DNA, 33 bp, Homo sapien
cataaaactgaagcaaggtccttgtaagaaacc

SEQ ID NO: 829625 - DNA, 33 bp, Homo sapien
aatacaaattccataaaaggctatagagtgtat

SEQ ID NO: 829626 - DNA, 33 bp, Homo sapien
aatacaaattccataagaggctatagagtgtat

SEQ ID NO: 829627 - DNA, 33 bp, Homo sapien
aaaaactaggaacctccctacaggtgtatgatc

SEQ ID NO: 829628 - DNA, 33 bp, Homo sapien
aaaaactaggaacctctctacaggtgtatgatc

SEQ ID NO: 829629 - DNA, 33 bp, Homo sapien
attgtatgactttctaagaacatgtgttacagt

SEQ ID NO: 829630 - DNA, 33 bp, Homo sapien
attgtatgactttctatgaacatgtgttacagt

SEQ ID NO: 829631 - DNA, 33 bp, Homo sapien
gattgaactacaatgacgtattaaagatagcaa

SEQ ID NO: 829632 - DNA, 33 bp, Homo sapien
gattgaactacaatgatgtattaaagatagcaa

SEQ ID NO: 829633 - DNA, 33 bp, Homo sapien
gcagatgcagtatttacgatggttgtcctgggg

SEQ ID NO: 829634 - DNA, 33 bp, Homo sapien
gcagatgcagtatttatgatggttgtcctgggg

SEQ ID NO: 829635 - DNA, 33 bp, Homo sapien
aatctaagccagtgaaaagaagttatccactgt

SEQ ID NO: 829636 - DNA, 33 bp, Homo sapien
aatctaagccagtgaacagaagttatccactgt

SEQ ID NO: 829637 - DNA, 33 bp, Homo sapien
ttgaaaatgacactgaacaagcgaagattacag

SEQ ID NO: 829638 - DNA, 33 bp, Homo sapien
ttgaaaatgacactgagcaagcgaagattacag

SEQ ID NO: 829639 - DNA, 33 bp, Homo sapien
taacatatatacatcaaaaaaaggcaaaaatgt

SEQ ID NO: 829640 - DNA, 33 bp, Homo sapien
taacatatatacatcagaaaaaggcaaaaatgt

SEQ ID NO: 829641 - DNA, 33 bp, Homo sapien
tctatctgggcaagggaatagcaccactgtggt

SEQ ID NO: 829642 - DNA, 33 bp, Homo sapien
tctatctgggcaagggcatagcaccactgtggt

SEQ ID NO: 829643 - DNA, 33 bp, Homo sapien
aaaccattgccttatacggtaagagtcttttct

SEQ ID NO: 829644 - DNA, 33 bp, Homo sapien
aaaccattgccttatatggtaagagtcttttct

SEQ ID NO: 829645 - DNA, 33 bp, Homo sapien
tactgtgagaattatcaacaattggaatagctg

SEQ ID NO: 829646 - DNA, 33 bp, Homo sapien
tactgtgagaattatcgacaattggaatagctg

SEQ ID NO: 829647 - DNA, 33 bp, Homo sapien
ttccataataattgacccatatttgcagatggg

SEQ ID NO: 829648 - DNA, 33 bp, Homo sapien
ttccataataattgactcatatttgcagatggg

SEQ ID NO: 829649 - DNA, 33 bp, Homo sapien
aggtctgaaatagggcagcaatatttccactgc

SEQ ID NO: 829650 - DNA, 33 bp, Homo sapien
aggtctgaaatagggcggcaatatttccactgc

SEQ ID NO: 829651 - DNA, 33 bp, Homo sapien
atccaaagagattttaaacacgggaacaccacc

SEQ ID NO: 829652 - DNA, 33 bp, Homo sapien
atccaaagagattttatacacgggaacaccacc

SEQ ID NO: 829653 - DNA, 33 bp, Homo sapien
tcaggttcatgcaaggacagaatgtcaagactc

SEQ ID NO: 829654 - DNA, 33 bp, Homo sapien
tcaggttcatgcaaggtcagaatgtcaagactc

SEQ ID NO: 829655 - DNA, 33 bp, Homo sapien
atgttccacccgcagaaaaggcccctactgagt

SEQ ID NO: 829656 - DNA, 33 bp, Homo sapien
atgttccacccgcagagaaggcccctactgagt

SEQ ID NO: 829657 - DNA, 33 bp, Homo sapien
gcttcctgtgggccacaaataacagagtctgac

SEQ ID NO: 829658 - DNA, 33 bp, Homo sapien
gcttcctgtgggccaccaataacagagtctgac

SEQ ID NO: 829659 - DNA, 33 bp, Homo sapien
atgccacatagaaaaacggatacaaaatatacc

SEQ ID NO: 829660 - DNA, 33 bp, Homo sapien
atgccacatagaaaaatggatacaaaatatacc

SEQ ID NO: 829661 - DNA, 33 bp, Homo sapien
actggattttcattaaaagtaggagccaggggc

SEQ ID NO: 829662 - DNA, 33 bp, Homo sapien
actggattttcattaagagtaggagccaggggc

SEQ ID NO: 829663 - DNA, 33 bp, Homo sapien
agtatatgtgtacacaatgtggatgacagcatg

SEQ ID NO: 829664 - DNA, 33 bp, Homo sapien
agtatatgtgtacacagtgtggatgacagcatg

SEQ ID NO: 829665 - DNA, 33 bp, Homo sapien
agaaaaaccaattacaaaccgattgagtgcata

SEQ ID NO: 829666 - DNA, 33 bp, Homo sapien
agaaaaaccaattacagaccgattgagtgcata

SEQ ID NO: 829667 - DNA, 33 bp, Homo sapien
aggattagtccagtaacggtcatatcacttgtt

SEQ ID NO: 829668 - DNA, 33 bp, Homo sapien
aggattagtccagtaatggtcatatcacttgtt

SEQ ID NO: 829669 - DNA, 33 bp, Homo sapien
gggagccttagttccacgttgtcctcacttaag

SEQ ID NO: 829670 - DNA, 33 bp, Homo sapien
gggagccttagttccatgttgtcctcacttaag

SEQ ID NO: 829671 - DNA, 33 bp, Homo sapien
atttataaatgtacacaaaatgtcaaactatga

SEQ ID NO: 829672 - DNA, 33 bp, Homo sapien
atttataaatgtacacgaaatgtcaaactatga

SEQ ID NO: 829673 - DNA, 33 bp, Homo sapien
gcatttatttcttcacactcagcaacatgaaat

SEQ ID NO: 829674 - DNA, 33 bp, Homo sapien
gcatttatttcttcacgctcagcaacatgaaat

SEQ ID NO: 829675 - DNA, 33 bp, Homo sapien
aagggttggcaaatgactaattttatttgttga

SEQ ID NO: 829676 - DNA, 33 bp, Homo sapien
aagggttggcaaatgagtaattttatttgttga

SEQ ID NO: 829677 - DNA, 33 bp, Homo sapien
gttgcagaattcacccaccaacttattgtcatt

SEQ ID NO: 829678 - DNA, 33 bp, Homo sapien
gttgcagaattcacccgccaacttattgtcatt

SEQ ID NO: 829679 - DNA, 33 bp, Homo sapien
agagctctaattctgaagaaagcatttagtctg

SEQ ID NO: 829680 - DNA, 33 bp, Homo sapien
agagctctaattctgaggaaagcatttagtctg

SEQ ID NO: 829681 - DNA, 33 bp, Homo sapien
ctcttcttgaggtggcaaattcactcaaggtat

SEQ ID NO: 829682 - DNA, 33 bp, Homo sapien
ctcttcttgaggtggcgaattcactcaaggtat

SEQ ID NO: 829683 - DNA, 33 bp, Homo sapien
ctcaaagaaatcattaaggttgtgggacctcaa

SEQ ID NO: 829684 - DNA, 33 bp, Homo sapien
ctcaaagaaatcattagggttgtgggacctcaa

SEQ ID NO: 829685 - DNA, 33 bp, Homo sapien
tgtacatccaaaaaacagcacgaaggggtggat

SEQ ID NO: 829686 - DNA, 33 bp, Homo sapien
tgtacatccaaaaaactgcacgaaggggtggat

SEQ ID NO: 829687 - DNA, 33 bp, Homo sapien
aatgccaatttcttcaacgaggttatatctgct

SEQ ID NO: 829688 - DNA, 33 bp, Homo sapien
aatgccaatttcttcagcgaggttatatctgct

SEQ ID NO: 829689 - DNA, 33 bp, Homo sapien
tcttcaacacagtaccaaaattgctagccagag

SEQ ID NO: 829690 - DNA, 33 bp, Homo sapien
tcttcaacacagtaccgaaattgctagccagag

SEQ ID NO: 829691 - DNA, 33 bp, Homo sapien
gcctaaagcttcacacagaatgatctgaaacaa

SEQ ID NO: 829692 - DNA, 33 bp, Homo sapien
gcctaaagcttcacacggaatgatctgaaacaa

SEQ ID NO: 829693 - DNA, 33 bp, Homo sapien
ttttgtttttatgagaccagtactttgttattt

SEQ ID NO: 829694 - DNA, 33 bp, Homo sapien
ttttgtttttatgagagcagtactttgttattt

SEQ ID NO: 829695 - DNA, 33 bp, Homo sapien
atatgacctctcagacaaaaaattaaaaatagc

SEQ ID NO: 829696 - DNA, 33 bp, Homo sapien
atatgacctctcagaccaaaaattaaaaatagc

SEQ ID NO: 829697 - DNA, 33 bp, Homo sapien
ttcagtttttcctccacgctttactcatgactg

SEQ ID NO: 829698 - DNA, 33 bp, Homo sapien
ttcagtttttcctccatgctttactcatgactg

SEQ ID NO: 829699 - DNA, 33 bp, Homo sapien
cctttctgagtaattacgacttttcggttcaca

SEQ ID NO: 829700 - DNA, 33 bp, Homo sapien
cctttctgagtaattatgacttttcggttcaca

SEQ ID NO: 829701 - DNA, 33 bp, Homo sapien
tccccattattaagaaacatgaccaagtgcagt

SEQ ID NO: 829702 - DNA, 33 bp, Homo sapien
tccccattattaagaatcatgaccaagtgcagt

SEQ ID NO: 829703 - DNA, 33 bp, Homo sapien
aaggactaatttgttacgagcttagaatgaaaa

SEQ ID NO: 829704 - DNA, 33 bp, Homo sapien
aaggactaatttgttatgagcttagaatgaaaa

SEQ ID NO: 829705 - DNA, 33 bp, Homo sapien
cacatcatacacagccaactgtacaatgaagac

SEQ ID NO: 829706 - DNA, 33 bp, Homo sapien
cacatcatacacagccgactgtacaatgaagac

SEQ ID NO: 829707 - DNA, 33 bp, Homo sapien
tttaatgaagcatttaaagtacataaagaaaac

SEQ ID NO: 829708 - DNA, 33 bp, Homo sapien
tttaatgaagcatttacagtacataaagaaaac

SEQ ID NO: 829709 - DNA, 33 bp, Homo sapien
atacatccacactaaagagattgaagatcagaa

SEQ ID NO: 829710 - DNA, 33 bp, Homo sapien
atacatccacactaaatagattgaagatcagaa

SEQ ID NO: 829711 - DNA, 33 bp, Homo sapien
tgttgtttgagtgaacaatattttccaaaatcc

SEQ ID NO: 829712 - DNA, 33 bp, Homo sapien
tgttgtttgagtgaacgatattttccaaaatcc

SEQ ID NO: 829713 - DNA, 33 bp, Homo sapien
tctgagccacattccacatttgcagatccaact

SEQ ID NO: 829714 - DNA, 33 bp, Homo sapien
tctgagccacattccagatttgcagatccaact

SEQ ID NO: 829715 - DNA, 33 bp, Homo sapien
gatgaatttgtcaagtgaaaaagaacctgtgaa

SEQ ID NO: 829716 - DNA, 33 bp, Homo sapien
gatgaatttgtcaagttaaaaagaacctgtgaa

SEQ ID NO: 829717 - DNA, 33 bp, Homo sapien
atcttcgcagtctcataatgaaacaagcaggac

SEQ ID NO: 829718 - DNA, 33 bp, Homo sapien
atcttcgcagtctcatcatgaaacaagcaggac

SEQ ID NO: 829719 - DNA, 33 bp, Homo sapien
ctttgggtacggcaaacgaccttatttttctga

SEQ ID NO: 829720 - DNA, 33 bp, Homo sapien
ctttgggtacggcaaaggaccttatttttctga

SEQ ID NO: 829721 - DNA, 33 bp, Homo sapien
ctgtctttctagtacaacctccatgctggggca

SEQ ID NO: 829722 - DNA, 33 bp, Homo sapien
ctgtctttctagtacagcctccatgctggggca

SEQ ID NO: 829723 - DNA, 33 bp, Homo sapien
tagtagaaagtggaaaaagaattgatgctagct

SEQ ID NO: 829724 - DNA, 33 bp, Homo sapien
tagtagaaagtggaaagagaattgatgctagct

SEQ ID NO: 829725 - DNA, 33 bp, Homo sapien
taccttatatacaggaaggatgttacacaattt

SEQ ID NO: 829726 - DNA, 33 bp, Homo sapien
taccttatatacaggagggatgttacacaattt

SEQ ID NO: 829727 - DNA, 33 bp, Homo sapien
aatccaaccaaagcataaaagagctgggcattg

SEQ ID NO: 829728 - DNA, 33 bp, Homo sapien
aatccaaccaaagcatgaaagagctgggcattg

SEQ ID NO: 829729 - DNA, 33 bp, Homo sapien
ttcgctcctaattggcagcatcaaatagctgta

SEQ ID NO: 829730 - DNA, 33 bp, Homo sapien
ttcgctcctaattggccgcatcaaatagctgta

SEQ ID NO: 829731 - DNA, 33 bp, Homo sapien
aaaaattattctcaacactgtgtaaaagggtgc

SEQ ID NO: 829732 - DNA, 33 bp, Homo sapien
aaaaattattctcaactctgtgtaaaagggtgc

SEQ ID NO: 829733 - DNA, 33 bp, Homo sapien
tgctgttattcttagaagagtcctgagaggttt

SEQ ID NO: 829734 - DNA, 33 bp, Homo sapien
tgctgttattcttagaggagtcctgagaggttt

SEQ ID NO: 829735 - DNA, 33 bp, Homo sapien
aattccacagacgtgcactgctttatttggggt

SEQ ID NO: 829736 - DNA, 33 bp, Homo sapien
aattccacagacgtgcgctgctttatttggggt

SEQ ID NO: 829737 - DNA, 33 bp, Homo sapien
ctggtaggaacgattacgctgctgcagtgtaaa

SEQ ID NO: 829738 - DNA, 33 bp, Homo sapien
ctggtaggaacgattatgctgctgcagtgtaaa

SEQ ID NO: 829739 - DNA, 33 bp, Homo sapien
caacagaagataacttaaaatttccagtactca

SEQ ID NO: 829740 - DNA, 33 bp, Homo sapien
caacagaagataacttgaaatttccagtactca

SEQ ID NO: 829741 - DNA, 33 bp, Homo sapien
atttagctcttggttacccggactcttgatgag

SEQ ID NO: 829742 - DNA, 33 bp, Homo sapien
atttagctcttggttatccggactcttgatgag

SEQ ID NO: 829743 - DNA, 33 bp, Homo sapien
tttcattttcaccagtaaataaggtcttggctg

SEQ ID NO: 829744 - DNA, 33 bp, Homo sapien
tttcattttcaccagtgaataaggtcttggctg

SEQ ID NO: 829745 - DNA, 33 bp, Homo sapien
gtgaaaaccagttaacaatttcattcattctta

SEQ ID NO: 829746 - DNA, 33 bp, Homo sapien
gtgaaaaccagttaacgatttcattcattctta

SEQ ID NO: 829747 - DNA, 33 bp, Homo sapien
attttatttcagtttaaatgtatctgtattaat

SEQ ID NO: 829748 - DNA, 33 bp, Homo sapien
attttatttcagtttacatgtatctgtattaat

SEQ ID NO: 829749 - DNA, 33 bp, Homo sapien
tctggcatacatttcacaagtttcgtttcattt

SEQ ID NO: 829750 - DNA, 33 bp, Homo sapien
tctggcatacatttcagaagtttcgtttcattt

SEQ ID NO: 829751 - DNA, 33 bp, Homo sapien
actttattagagaacacgggtgtccaaaatata

SEQ ID NO: 829752 - DNA, 33 bp, Homo sapien
actttattagagaacatgggtgtccaaaatata

SEQ ID NO: 829753 - DNA, 33 bp, Homo sapien
cttcctctgggagacaaagagtggaggagcagg

SEQ ID NO: 829754 - DNA, 33 bp, Homo sapien
cttcctctgggagacagagagtggaggagcagg

SEQ ID NO: 829755 - DNA, 33 bp, Homo sapien
tgtatgcctatccttgaaatttattactatata

SEQ ID NO: 829756 - DNA, 33 bp, Homo sapien
tgtatgcctatccttgcaatttattactatata

SEQ ID NO: 829757 - DNA, 33 bp, Homo sapien
agggtaccacgttcaactccaaagtcggcttca

SEQ ID NO: 829758 - DNA, 33 bp, Homo sapien
agggtaccacgttcaattccaaagtcggcttca

SEQ ID NO: 829759 - DNA, 33 bp, Homo sapien
cacgtgttatttgcaaagagaatctgaatgata

SEQ ID NO: 829760 - DNA, 33 bp, Homo sapien
cacgtgttatttgcaaggagaatctgaatgata

SEQ ID NO: 829761 - DNA, 33 bp, Homo sapien
ttcattaagatacccccgcttcctgacaacatt

SEQ ID NO: 829762 - DNA, 33 bp, Homo sapien
ttcattaagatacccctgcttcctgacaacatt

SEQ ID NO: 829763 - DNA, 33 bp, Homo sapien
acataactcccattcaagtaaccatacatcacc

SEQ ID NO: 829764 - DNA, 33 bp, Homo sapien
acataactcccattcacgtaaccatacatcacc

SEQ ID NO: 829765 - DNA, 33 bp, Homo sapien
tgcataagatacctcaacataagttatgctgtt

SEQ ID NO: 829766 - DNA, 33 bp, Homo sapien
tgcataagatacctcaccataagttatgctgtt

SEQ ID NO: 829767 - DNA, 33 bp, Homo sapien
cagacccttatctcgcaacacatacaaaaacca

SEQ ID NO: 829768 - DNA, 33 bp, Homo sapien
cagacccttatctcgcgacacatacaaaaacca

SEQ ID NO: 829769 - DNA, 33 bp, Homo sapien
gatggtgctggtcaacagaagagttcatttgca

SEQ ID NO: 829770 - DNA, 33 bp, Homo sapien
gatggtgctggtcaacggaagagttcatttgca

SEQ ID NO: 829771 - DNA, 33 bp, Homo sapien
atagagttctcccattaaaattcacataccttt

SEQ ID NO: 829772 - DNA, 33 bp, Homo sapien
atagagttctcccattcaaattcacataccttt

SEQ ID NO: 829773 - DNA, 33 bp, Homo sapien
tatttaatcacttccacgtactttttgccttct

SEQ ID NO: 829774 - DNA, 33 bp, Homo sapien
tatttaatcacttccatgtactttttgccttct

SEQ ID NO: 829775 - DNA, 33 bp, Homo sapien
gtagaacagcaaggtaacaccgccttttactgt

SEQ ID NO: 829776 - DNA, 33 bp, Homo sapien
gtagaacagcaaggtagcaccgccttttactgt

SEQ ID NO: 829777 - DNA, 33 bp, Homo sapien
gtaaaatgaatgacacaggactacaaatttagt

SEQ ID NO: 829778 - DNA, 33 bp, Homo sapien
gtaaaatgaatgacacgggactacaaatttagt

SEQ ID NO: 829779 - DNA, 33 bp, Homo sapien
tgggacttcagagcacaactgctgtgatgatga

SEQ ID NO: 829780 - DNA, 33 bp, Homo sapien
tgggacttcagagcacgactgctgtgatgatga

SEQ ID NO: 829781 - DNA, 33 bp, Homo sapien
aaactgccagccaagaatactatgaaccacaaa

SEQ ID NO: 829782 - DNA, 33 bp, Homo sapien
aaactgccagccaagagtactatgaaccacaaa

SEQ ID NO: 829783 - DNA, 33 bp, Homo sapien
ccaaagatgtcacacacagactgtactattgtg

SEQ ID NO: 829784 - DNA, 33 bp, Homo sapien
ccaaagatgtcacacagagactgtactattgtg

SEQ ID NO: 829785 - DNA, 33 bp, Homo sapien
ttttatatgtgaagaacctgaggtacaaaatgc

SEQ ID NO: 829786 - DNA, 33 bp, Homo sapien
ttttatatgtgaagaatctgaggtacaaaatgc

SEQ ID NO: 829787 - DNA, 33 bp, Homo sapien
gccctcattaagtccactctagagcccaccctg

SEQ ID NO: 829788 - DNA, 33 bp, Homo sapien
gccctcattaagtccagtctagagcccaccctg

SEQ ID NO: 829789 - DNA, 33 bp, Homo sapien
ttgcaataacagaagacggagaagagaaaaaga

SEQ ID NO: 829790 - DNA, 33 bp, Homo sapien
ttgcaataacagaagatggagaagagaaaaaga

SEQ ID NO: 829791 - DNA, 33 bp, Homo sapien
tctaggacactcgtacacaacctttttttgctt

SEQ ID NO: 829792 - DNA, 33 bp, Homo sapien
tctaggacactcgtacccaacctttttttgctt

SEQ ID NO: 829793 - DNA, 33 bp, Homo sapien
acatgagaattgatgacgcagttgaaagagagc

SEQ ID NO: 829794 - DNA, 33 bp, Homo sapien
acatgagaattgatgatgcagttgaaagagagc

SEQ ID NO: 829795 - DNA, 33 bp, Homo sapien
ggagtgagggtccttacgtctcacatggactct

SEQ ID NO: 829796 - DNA, 33 bp, Homo sapien
ggagtgagggtccttaggtctcacatggactct

SEQ ID NO: 829797 - DNA, 33 bp, Homo sapien
ctctgccatcaatacaataaaaacaatatcaaa

SEQ ID NO: 829798 - DNA, 33 bp, Homo sapien
ctctgccatcaatacagtaaaaacaatatcaaa

SEQ ID NO: 829799 - DNA, 33 bp, Homo sapien
ctatattctttatcagacaccattatcctctgt

SEQ ID NO: 829800 - DNA, 33 bp, Homo sapien
ctatattctttatcaggcaccattatcctctgt

SEQ ID NO: 829801 - DNA, 33 bp, Homo sapien
caagagttaagaaaggaaataatggtagctgaa

SEQ ID NO: 829802 - DNA, 33 bp, Homo sapien
caagagttaagaaagggaataatggtagctgaa

SEQ ID NO: 829803 - DNA, 33 bp, Homo sapien
ttaaagcaagataacaacaaataaaagacattc

SEQ ID NO: 829804 - DNA, 33 bp, Homo sapien
ttaaagcaagataacagcaaataaaagacattc

SEQ ID NO: 829805 - DNA, 33 bp, Homo sapien
caaggatacacagcatgaagaaattttattctc

SEQ ID NO: 829806 - DNA, 33 bp, Homo sapien
caaggatacacagcattaagaaattttattctc

SEQ ID NO: 829807 - DNA, 33 bp, Homo sapien
cgcatctgtatttgaactaggacaaattagaga

SEQ ID NO: 829808 - DNA, 33 bp, Homo sapien
cgcatctgtatttgaattaggacaaattagaga

SEQ ID NO: 829809 - DNA, 33 bp, Homo sapien
ttctctattcacggacaatttctgaacccattt

SEQ ID NO: 829810 - DNA, 33 bp, Homo sapien
ttctctattcacggactatttctgaacccattt

SEQ ID NO: 829811 - DNA, 33 bp, Homo sapien
gttgtatgtgcatgaactcttaaaacattccat

SEQ ID NO: 829812 - DNA, 33 bp, Homo sapien
gttgtatgtgcatgaagtcttaaaacattccat

SEQ ID NO: 829813 - DNA, 33 bp, Homo sapien
atttgtataacaacaagacaggtaagaataagc

SEQ ID NO: 829814 - DNA, 33 bp, Homo sapien
atttgtataacaacaatacaggtaagaataagc

SEQ ID NO: 829815 - DNA, 33 bp, Homo sapien
agaagatctctgttaacaagttgtgagtcttat

SEQ ID NO: 829816 - DNA, 33 bp, Homo sapien
agaagatctctgttaagaagttgtgagtcttat

SEQ ID NO: 829817 - DNA, 33 bp, Homo sapien
tttgtaggtacactcaagtcacagtggttgcac

SEQ ID NO: 829818 - DNA, 33 bp, Homo sapien
tttgtaggtacactcatgtcacagtggttgcac

SEQ ID NO: 829819 - DNA, 33 bp, Homo sapien
aacaagatgaggcaaagacattatttatggaac

SEQ ID NO: 829820 - DNA, 33 bp, Homo sapien
aacaagatgaggcaaatacattatttatggaac

SEQ ID NO: 829821 - DNA, 33 bp, Homo sapien
aagtgagtcctttctaagcagtatacagttgag

SEQ ID NO: 829822 - DNA, 33 bp, Homo sapien
aagtgagtcctttctaggcagtatacagttgag

SEQ ID NO: 829823 - DNA, 33 bp, Homo sapien
actttcaggtacaccaatcggacgtatttttgg

SEQ ID NO: 829824 - DNA, 33 bp, Homo sapien
actttcaggtacaccagtcggacgtatttttgg

SEQ ID NO: 829825 - DNA, 33 bp, Homo sapien
cagtgtaataatgaacaatgtacaggctgtcag

SEQ ID NO: 829826 - DNA, 33 bp, Homo sapien
cagtgtaataatgaacgatgtacaggctgtcag

SEQ ID NO: 829827 - DNA, 33 bp, Homo sapien
acaactttccccatcaaggtaagaataataggt

SEQ ID NO: 829828 - DNA, 33 bp, Homo sapien
acaactttccccatcacggtaagaataataggt

SEQ ID NO: 829829 - DNA, 33 bp, Homo sapien
gactgaataaccagaccaaccaagtacttttta

SEQ ID NO: 829830 - DNA, 33 bp, Homo sapien
gactgaataaccagacgaaccaagtacttttta

SEQ ID NO: 829831 - DNA, 33 bp, Homo sapien
cagtgctgtaacagaacgcgagaacagccatat

SEQ ID NO: 829832 - DNA, 33 bp, Homo sapien
cagtgctgtaacagaatgcgagaacagccatat

SEQ ID NO: 829833 - DNA, 33 bp, Homo sapien
ttctacagtccttgtcagaatatcctagagagt

SEQ ID NO: 829834 - DNA, 33 bp, Homo sapien
ttctacagtccttgtcggaatatcctagagagt

SEQ ID NO: 829835 - DNA, 33 bp, Homo sapien
tgatcaattaagagtacgctgaagtttttattt

SEQ ID NO: 829836 - DNA, 33 bp, Homo sapien
tgatcaattaagagtatgctgaagtttttattt

SEQ ID NO: 829837 - DNA, 33 bp, Homo sapien
gaatgcattaaggaaacacaaggccttgctcag

SEQ ID NO: 829838 - DNA, 33 bp, Homo sapien
gaatgcattaaggaaatacaaggccttgctcag

SEQ ID NO: 829839 - DNA, 33 bp, Homo sapien
ttcatgctgtagacataaagtggttcttaatgg

SEQ ID NO: 829840 - DNA, 33 bp, Homo sapien
ttcatgctgtagacatgaagtggttcttaatgg

SEQ ID NO: 829841 - DNA, 33 bp, Homo sapien
tctgggcaggaggtgacaagtatcatttgctgt

SEQ ID NO: 829842 - DNA, 33 bp, Homo sapien
tctgggcaggaggtgataagtatcatttgctgt

SEQ ID NO: 829843 - DNA, 33 bp, Homo sapien
ccaagactctactaaaaataaacatatatgtca

SEQ ID NO: 829844 - DNA, 33 bp, Homo sapien
ccaagactctactaaagataaacatatatgtca

SEQ ID NO: 829845 - DNA, 33 bp, Homo sapien
gtaacactgtcatagcaaactggaaggagattc

SEQ ID NO: 829846 - DNA, 33 bp, Homo sapien
gtaacactgtcatagcgaactggaaggagattc

SEQ ID NO: 829847 - DNA, 33 bp, Homo sapien
acattgtatgtgataccgagaggagacaggagg

SEQ ID NO: 829848 - DNA, 33 bp, Homo sapien
acattgtatgtgatacggagaggagacaggagg

SEQ ID NO: 829849 - DNA, 33 bp, Homo sapien
aaataaactttcaatacggtaagtctccgagat

SEQ ID NO: 829850 - DNA, 33 bp, Homo sapien
aaataaactttcaatatggtaagtctccgagat

SEQ ID NO: 829851 - DNA, 33 bp, Homo sapien
tataagcctttcattacgttgagttcatccaat

SEQ ID NO: 829852 - DNA, 33 bp, Homo sapien
tataagcctttcattatgttgagttcatccaat

SEQ ID NO: 829853 - DNA, 33 bp, Homo sapien
ttcagtgaactgagaacagtgagctttgctttc

SEQ ID NO: 829854 - DNA, 33 bp, Homo sapien
ttcagtgaactgagaagagtgagctttgctttc

SEQ ID NO: 829855 - DNA, 33 bp, Homo sapien
taaaaatgtatgcagaagtagctcttagatcat

SEQ ID NO: 829856 - DNA, 33 bp, Homo sapien
taaaaatgtatgcagaggtagctcttagatcat

SEQ ID NO: 829857 - DNA, 33 bp, Homo sapien
tccacaaggtaatagacgtcacataatgaggtg

SEQ ID NO: 829858 - DNA, 33 bp, Homo sapien
tccacaaggtaatagatgtcacataatgaggtg

SEQ ID NO: 829859 - DNA, 33 bp, Homo sapien
tattggtatatgctgaatatgaacaaatatgcc

SEQ ID NO: 829860 - DNA, 33 bp, Homo sapien
tattggtatatgctgactatgaacaaatatgcc

SEQ ID NO: 829861 - DNA, 33 bp, Homo sapien
aaacctataagaagaaaagcttcgagctgggca

SEQ ID NO: 829862 - DNA, 33 bp, Homo sapien
aaacctataagaagaagagcttcgagctgggca

SEQ ID NO: 829863 - DNA, 33 bp, Homo sapien
ctacgctcactatctaagtagcaggatcactca

SEQ ID NO: 829864 - DNA, 33 bp, Homo sapien
ctacgctcactatctaggtagcaggatcactca

SEQ ID NO: 829865 - DNA, 33 bp, Homo sapien
gttgatagcttagtagaagtattgttgaatatg

SEQ ID NO: 829866 - DNA, 33 bp, Homo sapien
gttgatagcttagtaggagtattgttgaatatg

SEQ ID NO: 829867 - DNA, 33 bp, Homo sapien
actgctcatctgaaaactctaaagacacatgga

SEQ ID NO: 829868 - DNA, 33 bp, Homo sapien
actgctcatctgaaaattctaaagacacatgga

SEQ ID NO: 829869 - DNA, 33 bp, Homo sapien
attattagtaaaagatgaatgtgttccaacggc

SEQ ID NO: 829870 - DNA, 33 bp, Homo sapien
attattagtaaaagattaatgtgttccaacggc

SEQ ID NO: 829871 - DNA, 33 bp, Homo sapien
ttttccctaaagaagaatcatcctcatagattg

SEQ ID NO: 829872 - DNA, 33 bp, Homo sapien
ttttccctaaagaagagtcatcctcatagattg

SEQ ID NO: 829873 - DNA, 33 bp, Homo sapien
gtttaactacatttcaagttctcagccatatgt

SEQ ID NO: 829874 - DNA, 33 bp, Homo sapien
gtttaactacatttcaggttctcagccatatgt

SEQ ID NO: 829875 - DNA, 33 bp, Homo sapien
agatgtaaacatatctcacctagcgttactatc

SEQ ID NO: 829876 - DNA, 33 bp, Homo sapien
agatgtaaacatatcttacctagcgttactatc

SEQ ID NO: 829877 - DNA, 33 bp, Homo sapien
tgacttgactgatacaccccaaaagagaagaag

SEQ ID NO: 829878 - DNA, 33 bp, Homo sapien
tgacttgactgatacatcccaaaagagaagaag

SEQ ID NO: 829879 - DNA, 33 bp, Homo sapien
gtcaactatgtttaacgggtttgagggcacata

SEQ ID NO: 829880 - DNA, 33 bp, Homo sapien
gtcaactatgtttaactggtttgagggcacata

SEQ ID NO: 829881 - DNA, 33 bp, Homo sapien
aggcttgattggtcacagtaatgatgctcccct

SEQ ID NO: 829882 - DNA, 33 bp, Homo sapien
aggcttgattggtcacggtaatgatgctcccct

SEQ ID NO: 829883 - DNA, 33 bp, Homo sapien
gatcttaatgcacaagcagtttgaatagtgaaa

SEQ ID NO: 829884 - DNA, 33 bp, Homo sapien
gatcttaatgcacaaggagtttgaatagtgaaa

SEQ ID NO: 829885 - DNA, 33 bp, Homo sapien
agcagtgttttgctggaagaataaagtataact

SEQ ID NO: 829886 - DNA, 33 bp, Homo sapien
agcagtgttttgctggcagaataaagtataact

SEQ ID NO: 829887 - DNA, 33 bp, Homo sapien
atgtctaaggtttcaaagaatcctaagaagtag

SEQ ID NO: 829888 - DNA, 33 bp, Homo sapien
atgtctaaggtttcaaggaatcctaagaagtag

SEQ ID NO: 829889 - DNA, 33 bp, Homo sapien
gaaattatgcataggaaaacgctggaagcagat

SEQ ID NO: 829890 - DNA, 33 bp, Homo sapien
gaaattatgcataggataacgctggaagcagat

SEQ ID NO: 829891 - DNA, 33 bp, Homo sapien
tggtcatcactgcaaacaaagctgtcatcacag

SEQ ID NO: 829892 - DNA, 33 bp, Homo sapien
tggtcatcactgcaaataaagctgtcatcacag

SEQ ID NO: 829893 - DNA, 33 bp, Homo sapien
gtatactgggactagaaagagcacaggacaagt

SEQ ID NO: 829894 - DNA, 33 bp, Homo sapien
gtatactgggactagagagagcacaggacaagt

SEQ ID NO: 829895 - DNA, 33 bp, Homo sapien
gagtgaagctccagtacgtgagaggggaagaca

SEQ ID NO: 829896 - DNA, 33 bp, Homo sapien
gagtgaagctccagtatgtgagaggggaagaca

SEQ ID NO: 829897 - DNA, 33 bp, Homo sapien
gagagtccttactataacacaatctatgtccat

SEQ ID NO: 829898 - DNA, 33 bp, Homo sapien
gagagtccttactataccacaatctatgtccat

SEQ ID NO: 829899 - DNA, 33 bp, Homo sapien
actcacacacctgaatcagcaatctgactcacc

SEQ ID NO: 829900 - DNA, 33 bp, Homo sapien
actcacacacctgaatgagcaatctgactcacc

SEQ ID NO: 829901 - DNA, 33 bp, Homo sapien
aacttacaatgaagaacattgaggcagaaagaa

SEQ ID NO: 829902 - DNA, 33 bp, Homo sapien
aacttacaatgaagaatattgaggcagaaagaa

SEQ ID NO: 829903 - DNA, 33 bp, Homo sapien
aaatagaagagatttacggatgacaaaacactg

SEQ ID NO: 829904 - DNA, 33 bp, Homo sapien
aaatagaagagatttatggatgacaaaacactg

SEQ ID NO: 829905 - DNA, 33 bp, Homo sapien
gctgggtggcattccactaatatgttgaatatg

SEQ ID NO: 829906 - DNA, 33 bp, Homo sapien
gctgggtggcattccagtaatatgttgaatatg

SEQ ID NO: 829907 - DNA, 33 bp, Homo sapien
gcagttgcagtagataccatttggcctgcaagc

SEQ ID NO: 829908 - DNA, 33 bp, Homo sapien
gcagttgcagtagatatcatttggcctgcaagc

SEQ ID NO: 829909 - DNA, 33 bp, Homo sapien
ccaagtaattgggattaaagtgtgagaaagtga

SEQ ID NO: 829910 - DNA, 33 bp, Homo sapien
ccaagtaattgggattgaagtgtgagaaagtga

SEQ ID NO: 829911 - DNA, 33 bp, Homo sapien
atgggtgacaaagataaggaattctacaatatt

SEQ ID NO: 829912 - DNA, 33 bp, Homo sapien
atgggtgacaaagatatggaattctacaatatt

SEQ ID NO: 829913 - DNA, 33 bp, Homo sapien
tactgaaatcttagaacgtttactgtagaaatt

SEQ ID NO: 829914 - DNA, 33 bp, Homo sapien
tactgaaatcttagaatgtttactgtagaaatt

SEQ ID NO: 829915 - DNA, 33 bp, Homo sapien
gcattctggaagtctgaattagctgtccaagaa

SEQ ID NO: 829916 - DNA, 33 bp, Homo sapien
gcattctggaagtctggattagctgtccaagaa

SEQ ID NO: 829917 - DNA, 33 bp, Homo sapien
aactatatctatctgaaaaacaaccataacaaa

SEQ ID NO: 829918 - DNA, 33 bp, Homo sapien
aactatatctatctgagaaacaaccataacaaa

SEQ ID NO: 829919 - DNA, 33 bp, Homo sapien
gtaaaggttgttaaacagcaggaatgatttatt

SEQ ID NO: 829920 - DNA, 33 bp, Homo sapien
gtaaaggttgttaaacggcaggaatgatttatt

SEQ ID NO: 829921 - DNA, 33 bp, Homo sapien
gagagttttgtgtaaacactttgagggatgaac

SEQ ID NO: 829922 - DNA, 33 bp, Homo sapien
gagagttttgtgtaaatactttgagggatgaac

SEQ ID NO: 829923 - DNA, 33 bp, Homo sapien
ctttttttgtagcaatcaaccatctccgctttc

SEQ ID NO: 829924 - DNA, 33 bp, Homo sapien
ctttttttgtagcaatgaaccatctccgctttc

SEQ ID NO: 829925 - DNA, 33 bp, Homo sapien
agaaaggttgcaggaaaatctgatatccataga

SEQ ID NO: 829926 - DNA, 33 bp, Homo sapien
agaaaggttgcaggaacatctgatatccataga

SEQ ID NO: 829927 - DNA, 33 bp, Homo sapien
atgtcttctactcacacccatccgtttggcaag

SEQ ID NO: 829928 - DNA, 33 bp, Homo sapien
atgtcttctactcacatccatccgtttggcaag

SEQ ID NO: 829929 - DNA, 33 bp, Homo sapien
gcctttaaatttcatgcaactctttactaaaaa

SEQ ID NO: 829930 - DNA, 33 bp, Homo sapien
gcctttaaatttcatggaactctttactaaaaa

SEQ ID NO: 829931 - DNA, 33 bp, Homo sapien
catagagaatccactacccaaaggagatcccaa

SEQ ID NO: 829932 - DNA, 33 bp, Homo sapien
catagagaatccactatccaaaggagatcccaa

SEQ ID NO: 829933 - DNA, 33 bp, Homo sapien
tctatcttgttttaacacatgtcttccaaacat

SEQ ID NO: 829934 - DNA, 33 bp, Homo sapien
tctatcttgttttaacccatgtcttccaaacat

SEQ ID NO: 829935 - DNA, 33 bp, Homo sapien
gatctatgtaatggcaaaaagataataataaat

SEQ ID NO: 829936 - DNA, 33 bp, Homo sapien
gatctatgtaatggcagaaagataataataaat

SEQ ID NO: 829937 - DNA, 33 bp, Homo sapien
tttctcttaaattcacagacagtgtgggccagt

SEQ ID NO: 829938 - DNA, 33 bp, Homo sapien
tttctcttaaattcactgacagtgtgggccagt

SEQ ID NO: 829939 - DNA, 33 bp, Homo sapien
tggcgagctcattatgaaaacatctattagaaa

SEQ ID NO: 829940 - DNA, 33 bp, Homo sapien
tggcgagctcattatggaaacatctattagaaa

SEQ ID NO: 829941 - DNA, 33 bp, Homo sapien
ttgtcttgctgtactcacattaaggtttacttt

SEQ ID NO: 829942 - DNA, 33 bp, Homo sapien
ttgtcttgctgtactcgcattaaggtttacttt

SEQ ID NO: 829943 - DNA, 33 bp, Homo sapien
cagtgtaaaagctttcacccaggacctatcatt

SEQ ID NO: 829944 - DNA, 33 bp, Homo sapien
cagtgtaaaagctttcgcccaggacctatcatt

SEQ ID NO: 829945 - DNA, 33 bp, Homo sapien
ttgcagtgacagactggagaaagaagaatcatc

SEQ ID NO: 829946 - DNA, 33 bp, Homo sapien
ttgcagtgacagactgtagaaagaagaatcatc

SEQ ID NO: 829947 - DNA, 33 bp, Homo sapien
caacacttggccagtgcatgatgggagccaatg

SEQ ID NO: 829948 - DNA, 33 bp, Homo sapien
caacacttggccagtggatgatgggagccaatg

SEQ ID NO: 829949 - DNA, 33 bp, Homo sapien
cagtcattctacatccacgttagcccttggtgt

SEQ ID NO: 829950 - DNA, 33 bp, Homo sapien
cagtcattctacatcctcgttagcccttggtgt

SEQ ID NO: 829951 - DNA, 33 bp, Homo sapien
tgctatggttctgacacgatcacttatgaagga

SEQ ID NO: 829952 - DNA, 33 bp, Homo sapien
tgctatggttctgacatgatcacttatgaagga

SEQ ID NO: 829953 - DNA, 33 bp, Homo sapien
tcaaggattagaaagaaaaggagagtaatgaag

SEQ ID NO: 829954 - DNA, 33 bp, Homo sapien
tcaaggattagaaagagaaggagagtaatgaag

SEQ ID NO: 829955 - DNA, 33 bp, Homo sapien
aagataccatgtatcacggatgttgtttcgcat

SEQ ID NO: 829956 - DNA, 33 bp, Homo sapien
aagataccatgtatcatggatgttgtttcgcat

SEQ ID NO: 829957 - DNA, 33 bp, Homo sapien
tttcaccacagtcatcaattctttgaccttctg

SEQ ID NO: 829958 - DNA, 33 bp, Homo sapien
tttcaccacagtcatccattctttgaccttctg

SEQ ID NO: 829959 - DNA, 33 bp, Homo sapien
agctgtgtgactttgaaaaacaaagaagtctgg

SEQ ID NO: 829960 - DNA, 33 bp, Homo sapien
agctgtgtgactttgagaaacaaagaagtctgg

SEQ ID NO: 829961 - DNA, 33 bp, Homo sapien
acagagtgtttattcacgggacattccctctcc

SEQ ID NO: 829962 - DNA, 33 bp, Homo sapien
acagagtgtttattcatgggacattccctctcc

SEQ ID NO: 829963 - DNA, 33 bp, Homo sapien
gcatacaaactacacactcatagacagcatgaa

SEQ ID NO: 829964 - DNA, 33 bp, Homo sapien
gcatacaaactacacattcatagacagcatgaa

SEQ ID NO: 829965 - DNA, 33 bp, Homo sapien
ggggtcacttacaagacaatcagtgcctatgag

SEQ ID NO: 829966 - DNA, 33 bp, Homo sapien
ggggtcacttacaagataatcagtgcctatgag

SEQ ID NO: 829967 - DNA, 33 bp, Homo sapien
acgtgaatgtgttgaacaatggagcaacaggat

SEQ ID NO: 829968 - DNA, 33 bp, Homo sapien
acgtgaatgtgttgaataatggagcaacaggat

SEQ ID NO: 829969 - DNA, 33 bp, Homo sapien
accaggaaagtgtggacgagctctgaagaaata

SEQ ID NO: 829970 - DNA, 33 bp, Homo sapien
accaggaaagtgtggatgagctctgaagaaata

SEQ ID NO: 829971 - DNA, 33 bp, Homo sapien
ggtagatagagaacggacagtaaatattgatga

SEQ ID NO: 829972 - DNA, 33 bp, Homo sapien
ggtagatagagaacgggcagtaaatattgatga

SEQ ID NO: 829973 - DNA, 33 bp, Homo sapien
ggatctcatgtgggtgaaagaaacacttgataa

SEQ ID NO: 829974 - DNA, 33 bp, Homo sapien
ggatctcatgtgggtggaagaaacacttgataa

SEQ ID NO: 829975 - DNA, 33 bp, Homo sapien
ggttcagttgagagcaatgcagatggtaaaaac

SEQ ID NO: 829976 - DNA, 33 bp, Homo sapien
ggttcagttgagagcattgcagatggtaaaaac

SEQ ID NO: 829977 - DNA, 33 bp, Homo sapien
tactgatctgctaagaagccatactctgaagaa

SEQ ID NO: 829978 - DNA, 33 bp, Homo sapien
tactgatctgctaagaggccatactctgaagaa

SEQ ID NO: 829979 - DNA, 33 bp, Homo sapien
tgactaacgggctttacattcaggaagttcaca

SEQ ID NO: 829980 - DNA, 33 bp, Homo sapien
tgactaacgggctttatattcaggaagttcaca

SEQ ID NO: 829981 - DNA, 33 bp, Homo sapien
ttctgtgaaccactgacgatttctcactgccta

SEQ ID NO: 829982 - DNA, 33 bp, Homo sapien
ttctgtgaaccactgatgatttctcactgccta

SEQ ID NO: 829983 - DNA, 33 bp, Homo sapien
cagtctgtctgtacaccatgtctaccattcaac

SEQ ID NO: 829984 - DNA, 33 bp, Homo sapien
cagtctgtctgtacactatgtctaccattcaac

SEQ ID NO: 829985 - DNA, 33 bp, Homo sapien
aagaaatgtgttctgaccaatgtgtccttagtg

SEQ ID NO: 829986 - DNA, 33 bp, Homo sapien
aagaaatgtgttctgagcaatgtgtccttagtg

SEQ ID NO: 829987 - DNA, 33 bp, Homo sapien
ggccacctgatccatcaaattgtctgattaagt

SEQ ID NO: 829988 - DNA, 33 bp, Homo sapien
ggccacctgatccatccaattgtctgattaagt

SEQ ID NO: 829989 - DNA, 33 bp, Homo sapien
attgccccagatggtggatgtaaaatgtgccat

SEQ ID NO: 829990 - DNA, 33 bp, Homo sapien
attgccccagatggtgtatgtaaaatgtgccat

SEQ ID NO: 829991 - DNA, 33 bp, Homo sapien
aataagtcactaataaccctactgctaacactg

SEQ ID NO: 829992 - DNA, 33 bp, Homo sapien
aataagtcactaataatcctactgctaacactg

SEQ ID NO: 829993 - DNA, 33 bp, Homo sapien
atctggtggtcaataaactttttatttatttat

SEQ ID NO: 829994 - DNA, 33 bp, Homo sapien
atctggtggtcaataagctttttatttatttat

SEQ ID NO: 829995 - DNA, 33 bp, Homo sapien
gagaaggaattggcacactagaattaatattat

SEQ ID NO: 829996 - DNA, 33 bp, Homo sapien
gagaaggaattggcactctagaattaatattat

SEQ ID NO: 829997 - DNA, 33 bp, Homo sapien
catttatggcccaagacggtaattgctaatgtt

SEQ ID NO: 829998 - DNA, 33 bp, Homo sapien
catttatggcccaagatggtaattgctaatgtt

SEQ ID NO: 829999 - DNA, 33 bp, Homo sapien
cttcccacttgtaaccaactagtatccctgcat

SEQ ID NO: 830000 - DNA, 33 bp, Homo sapien
cttcccacttgtaaccgactagtatccctgcat

SEQ ID NO: 830001 - DNA, 33 bp, Homo sapien
tctgggggattttataacaagattctaagaagg

SEQ ID NO: 830002 - DNA, 33 bp, Homo sapien
tctgggggattttatatcaagattctaagaagg

SEQ ID NO: 830003 - DNA, 33 bp, Homo sapien
ccacttgaaactcgcactctttcctagtactcc

SEQ ID NO: 830004 - DNA, 33 bp, Homo sapien
ccacttgaaactcgcattctttcctagtactcc

SEQ ID NO: 830005 - DNA, 33 bp, Homo sapien
tttactgtatgttaccaaggcaaattgagaagt

SEQ ID NO: 830006 - DNA, 33 bp, Homo sapien
tttactgtatgttaccgaggcaaattgagaagt

SEQ ID NO: 830007 - DNA, 33 bp, Homo sapien
gagtaagtgatcattaccaggaacctaaccacc

SEQ ID NO: 830008 - DNA, 33 bp, Homo sapien
gagtaagtgatcattatcaggaacctaaccacc

SEQ ID NO: 830009 - DNA, 33 bp, Homo sapien
taaagtcctgtctcaacgatggggagaaattca

SEQ ID NO: 830010 - DNA, 33 bp, Homo sapien
taaagtcctgtctcaatgatggggagaaattca

SEQ ID NO: 830011 - DNA, 33 bp, Homo sapien
agcaaccatgacagacagatgccagcggcctct

SEQ ID NO: 830012 - DNA, 33 bp, Homo sapien
agcaaccatgacagacggatgccagcggcctct

SEQ ID NO: 830013 - DNA, 33 bp, Homo sapien
gtcggaggaacagagaatattcagcacaggagg

SEQ ID NO: 830014 - DNA, 33 bp, Homo sapien
gtcggaggaacagagagtattcagcacaggagg

SEQ ID NO: 830015 - DNA, 33 bp, Homo sapien
ctgacaggcatacgtacgtgttgttagggagtt

SEQ ID NO: 830016 - DNA, 33 bp, Homo sapien
ctgacaggcatacgtatgtgttgttagggagtt

SEQ ID NO: 830017 - DNA, 33 bp, Homo sapien
tcttttcacttgtacacaacaatgcatgagtat

SEQ ID NO: 830018 - DNA, 33 bp, Homo sapien
tcttttcacttgtacataacaatgcatgagtat

SEQ ID NO: 830019 - DNA, 33 bp, Homo sapien
agcctgacacgtggccaagaaagaaaaagtgtt

SEQ ID NO: 830020 - DNA, 33 bp, Homo sapien
agcctgacacgtggccgagaaagaaaaagtgtt

SEQ ID NO: 830021 - DNA, 33 bp, Homo sapien
agcctgaagaaacagaaaacacctgaaccaggc

SEQ ID NO: 830022 - DNA, 33 bp, Homo sapien
agcctgaagaaacagagaacacctgaaccaggc

SEQ ID NO: 830023 - DNA, 33 bp, Homo sapien
acttataaacaatgaccgaaacacttccattaa

SEQ ID NO: 830024 - DNA, 33 bp, Homo sapien
acttataaacaatgactgaaacacttccattaa

SEQ ID NO: 830025 - DNA, 33 bp, Homo sapien
acgtatatggggtatacgcatggtggacctgaa

SEQ ID NO: 830026 - DNA, 33 bp, Homo sapien
acgtatatggggtatatgcatggtggacctgaa

SEQ ID NO: 830027 - DNA, 33 bp, Homo sapien
tagcagtgttgtgacaacaagagagtctaatca

SEQ ID NO: 830028 - DNA, 33 bp, Homo sapien
tagcagtgttgtgacaccaagagagtctaatca

SEQ ID NO: 830029 - DNA, 33 bp, Homo sapien
tgggagtgctattgctatcacctggtaagagta

SEQ ID NO: 830030 - DNA, 33 bp, Homo sapien
tgggagtgctattgctgtcacctggtaagagta

SEQ ID NO: 830031 - DNA, 33 bp, Homo sapien
ttgttttcctttggcccgagtataaagtgcctg

SEQ ID NO: 830032 - DNA, 33 bp, Homo sapien
ttgttttcctttggcctgagtataaagtgcctg

SEQ ID NO: 830033 - DNA, 33 bp, Homo sapien
atttggataatcatcacataatgactatagata

SEQ ID NO: 830034 - DNA, 33 bp, Homo sapien
atttggataatcatcagataatgactatagata

SEQ ID NO: 830035 - DNA, 33 bp, Homo sapien
tgaagcactagaagcaaacacttgaccacaatg

SEQ ID NO: 830036 - DNA, 33 bp, Homo sapien
tgaagcactagaagcagacacttgaccacaatg

SEQ ID NO: 830037 - DNA, 33 bp, Homo sapien
agtgatcaggatagaacgtatggaagagagagt

SEQ ID NO: 830038 - DNA, 33 bp, Homo sapien
agtgatcaggatagaatgtatggaagagagagt

SEQ ID NO: 830039 - DNA, 33 bp, Homo sapien
tgaaaaaatggacttaaacttggattgtgaaag

SEQ ID NO: 830040 - DNA, 33 bp, Homo sapien
tgaaaaaatggacttacacttggattgtgaaag

SEQ ID NO: 830041 - DNA, 33 bp, Homo sapien
catttctacatgaatgaaaaaagtgcttagtag

SEQ ID NO: 830042 - DNA, 33 bp, Homo sapien
catttctacatgaatggaaaaagtgcttagtag

SEQ ID NO: 830043 - DNA, 33 bp, Homo sapien
ccaaacccccaacttcaaagatcatacatataa

SEQ ID NO: 830044 - DNA, 33 bp, Homo sapien
ccaaacccccaacttcgaagatcatacatataa

SEQ ID NO: 830045 - DNA, 33 bp, Homo sapien
gcattcacccttagaaccctcacacaaaattgt

SEQ ID NO: 830046 - DNA, 33 bp, Homo sapien
gcattcacccttagaatcctcacacaaaattgt

SEQ ID NO: 830047 - DNA, 33 bp, Homo sapien
taatgaagagcaattaactttgcacttgttgga

SEQ ID NO: 830048 - DNA, 33 bp, Homo sapien
taatgaagagcaattatctttgcacttgttgga

SEQ ID NO: 830049 - DNA, 33 bp, Homo sapien
gtaacagcaactacatcatgacgcagatacttg

SEQ ID NO: 830050 - DNA, 33 bp, Homo sapien
gtaacagcaactacatgatgacgcagatacttg

SEQ ID NO: 830051 - DNA, 33 bp, Homo sapien
gggtgatcattcatcaagacccgaagtctccta

SEQ ID NO: 830052 - DNA, 33 bp, Homo sapien
gggtgatcattcatcacgacccgaagtctccta

SEQ ID NO: 830053 - DNA, 33 bp, Homo sapien
tcctgggtaatgaccaaatgtgctctgaaagag

SEQ ID NO: 830054 - DNA, 33 bp, Homo sapien
tcctgggtaatgaccatatgtgctctgaaagag

SEQ ID NO: 830055 - DNA, 33 bp, Homo sapien
agttgtattaactgacactgaaatctaaaccaa

SEQ ID NO: 830056 - DNA, 33 bp, Homo sapien
agttgtattaactgaccctgaaatctaaaccaa

SEQ ID NO: 830057 - DNA, 33 bp, Homo sapien
gccacggaattgccaacacacggacaaaaaaga

SEQ ID NO: 830058 - DNA, 33 bp, Homo sapien
gccacggaattgccaatacacggacaaaaaaga

SEQ ID NO: 830059 - DNA, 33 bp, Homo sapien
ggagttttcagtttacaggatcccagtgtatct

SEQ ID NO: 830060 - DNA, 33 bp, Homo sapien
ggagttttcagtttactggatcccagtgtatct

SEQ ID NO: 830061 - DNA, 33 bp, Homo sapien
cagtgccttcataccaagaaaaaaggcaaagga

SEQ ID NO: 830062 - DNA, 33 bp, Homo sapien
cagtgccttcataccatgaaaaaaggcaaagga

SEQ ID NO: 830063 - DNA, 33 bp, Homo sapien
tcagcaagtctctcaaactcttccagggagcaa

SEQ ID NO: 830064 - DNA, 33 bp, Homo sapien
tcagcaagtctctcaagctcttccagggagcaa

SEQ ID NO: 830065 - DNA, 33 bp, Homo sapien
tatcagagttgatcatcacagctatggcacaca

SEQ ID NO: 830066 - DNA, 33 bp, Homo sapien
tatcagagttgatcattacagctatggcacaca

SEQ ID NO: 830067 - DNA, 33 bp, Homo sapien
gaagtactttgaattgaatggaattaagtcaca

SEQ ID NO: 830068 - DNA, 33 bp, Homo sapien
gaagtactttgaattgcatggaattaagtcaca

SEQ ID NO: 830069 - DNA, 33 bp, Homo sapien
agatatgcacctgtaacagaactactaaatgtg

SEQ ID NO: 830070 - DNA, 33 bp, Homo sapien
agatatgcacctgtaagagaactactaaatgtg

SEQ ID NO: 830071 - DNA, 33 bp, Homo sapien
atcataccacaggataaaaatattaccaaggat

SEQ ID NO: 830072 - DNA, 33 bp, Homo sapien
atcataccacaggatacaaatattaccaaggat

SEQ ID NO: 830073 - DNA, 33 bp, Homo sapien
ttgggttccattttcaatctgctccaggtcata

SEQ ID NO: 830074 - DNA, 33 bp, Homo sapien
ttgggttccattttcactctgctccaggtcata

SEQ ID NO: 830075 - DNA, 33 bp, Homo sapien
gagtatatacgagacactggaacaaacagaagc

SEQ ID NO: 830076 - DNA, 33 bp, Homo sapien
gagtatatacgagacattggaacaaacagaagc

SEQ ID NO: 830077 - DNA, 33 bp, Homo sapien
gcacgttgaaaacagacgtcaaagcataatgtt

SEQ ID NO: 830078 - DNA, 33 bp, Homo sapien
gcacgttgaaaacagatgtcaaagcataatgtt

SEQ ID NO: 830079 - DNA, 33 bp, Homo sapien
tccctagatgcagaataactattaagaaaactc

SEQ ID NO: 830080 - DNA, 33 bp, Homo sapien
tccctagatgcagaatgactattaagaaaactc

SEQ ID NO: 830081 - DNA, 33 bp, Homo sapien
gatggattgatcagagcaagaatgtatagtgag

SEQ ID NO: 830082 - DNA, 33 bp, Homo sapien
gatggattgatcagagtaagaatgtatagtgag

SEQ ID NO: 830083 - DNA, 33 bp, Homo sapien
gttcttccaggagtaacgttaagtagctgaaag

SEQ ID NO: 830084 - DNA, 33 bp, Homo sapien
gttcttccaggagtaatgttaagtagctgaaag

SEQ ID NO: 830085 - DNA, 33 bp, Homo sapien
aatttattcaataaaacgttgcagctgttgtgt

SEQ ID NO: 830086 - DNA, 33 bp, Homo sapien
aatttattcaataaaatgttgcagctgttgtgt

SEQ ID NO: 830087 - DNA, 33 bp, Homo sapien
tatacgtctggttaagcaagctgttacataaaa

SEQ ID NO: 830088 - DNA, 33 bp, Homo sapien
tatacgtctggttaagtaagctgttacataaaa

SEQ ID NO: 830089 - DNA, 33 bp, Homo sapien
tttcttcacgaccttccccttcagtatactgat

SEQ ID NO: 830090 - DNA, 33 bp, Homo sapien
tttcttcacgaccttcgccttcagtatactgat

SEQ ID NO: 830091 - DNA, 33 bp, Homo sapien
ttttattcttaaaagacaagtgcatagagcaat

SEQ ID NO: 830092 - DNA, 33 bp, Homo sapien
ttttattcttaaaagataagtgcatagagcaat

SEQ ID NO: 830093 - DNA, 33 bp, Homo sapien
gtactgataaagttaactacaaaggcaaacatg

SEQ ID NO: 830094 - DNA, 33 bp, Homo sapien
gtactgataaagttaattacaaaggcaaacatg

SEQ ID NO: 830095 - DNA, 33 bp, Homo sapien
agggattaacatggtaaataaaacactgcccaa

SEQ ID NO: 830096 - DNA, 33 bp, Homo sapien
agggattaacatggtacataaaacactgcccaa

SEQ ID NO: 830097 - DNA, 33 bp, Homo sapien
ctgtctagagcttagaacactatttttttttgc

SEQ ID NO: 830098 - DNA, 33 bp, Homo sapien
ctgtctagagcttagagcactatttttttttgc

SEQ ID NO: 830099 - DNA, 33 bp, Homo sapien
tcgttggtatcttttacggaggcaattgttatc

SEQ ID NO: 830100 - DNA, 33 bp, Homo sapien
tcgttggtatcttttatggaggcaattgttatc

SEQ ID NO: 830101 - DNA, 33 bp, Homo sapien
ttactacttggcagtacgtttttaacttttgtg

SEQ ID NO: 830102 - DNA, 33 bp, Homo sapien
ttactacttggcagtatgtttttaacttttgtg

SEQ ID NO: 830103 - DNA, 33 bp, Homo sapien
atctataagactgaaaaccttgtaataaaacaa

SEQ ID NO: 830104 - DNA, 33 bp, Homo sapien
atctataagactgaaagccttgtaataaaacaa

SEQ ID NO: 830105 - DNA, 33 bp, Homo sapien
cttgctgtgtgacttacggttgttcactcacct

SEQ ID NO: 830106 - DNA, 33 bp, Homo sapien
cttgctgtgtgacttatggttgttcactcacct

SEQ ID NO: 830107 - DNA, 33 bp, Homo sapien
aagagatgttcttgctgaatgttttccaaactc

SEQ ID NO: 830108 - DNA, 33 bp, Homo sapien
aagagatgttcttgcttaatgttttccaaactc

SEQ ID NO: 830109 - DNA, 33 bp, Homo sapien
aggggtcagagagagcaccttgaatcactgcca

SEQ ID NO: 830110 - DNA, 33 bp, Homo sapien
aggggtcagagagagcgccttgaatcactgcca

SEQ ID NO: 830111 - DNA, 33 bp, Homo sapien
ggcagcaattagaagactacattctgacattgg

SEQ ID NO: 830112 - DNA, 33 bp, Homo sapien
ggcagcaattagaagagtacattctgacattgg

SEQ ID NO: 830113 - DNA, 33 bp, Homo sapien
accaaagtagtccagaaatcttgttttaggagt

SEQ ID NO: 830114 - DNA, 33 bp, Homo sapien
accaaagtagtccagagatcttgttttaggagt

SEQ ID NO: 830115 - DNA, 33 bp, Homo sapien
aagcaaatttcaataaaacaaggtatgctgtat

SEQ ID NO: 830116 - DNA, 33 bp, Homo sapien
aagcaaatttcaataagacaaggtatgctgtat

SEQ ID NO: 830117 - DNA, 33 bp, Homo sapien
tagttgagaaaactgacgaagagggttacacta

SEQ ID NO: 830118 - DNA, 33 bp, Homo sapien
tagttgagaaaactgatgaagagggttacacta

SEQ ID NO: 830119 - DNA, 33 bp, Homo sapien
gacaaaattcttcaaaataccagatcagattta

SEQ ID NO: 830120 - DNA, 33 bp, Homo sapien
gacaaaattcttcaaagtaccagatcagattta

SEQ ID NO: 830121 - DNA, 33 bp, Homo sapien
actcgtgtgcagagaacaggacacaatgccttt

SEQ ID NO: 830122 - DNA, 33 bp, Homo sapien
actcgtgtgcagagaataggacacaatgccttt

SEQ ID NO: 830123 - DNA, 33 bp, Homo sapien
ttacaatggagaaaaaaagattgtgtgtacata

SEQ ID NO: 830124 - DNA, 33 bp, Homo sapien
ttacaatggagaaaaagagattgtgtgtacata

SEQ ID NO: 830125 - DNA, 33 bp, Homo sapien
atatctagattgtccaagacactgaaattcaac

SEQ ID NO: 830126 - DNA, 33 bp, Homo sapien
atatctagattgtccaggacactgaaattcaac

SEQ ID NO: 830127 - DNA, 33 bp, Homo sapien
ctaattcccagtgttacggtattagaagggagg

SEQ ID NO: 830128 - DNA, 33 bp, Homo sapien
ctaattcccagtgttatggtattagaagggagg

SEQ ID NO: 830129 - DNA, 33 bp, Homo sapien
ttccctgatatagttgaagaatgcatgaatgga

SEQ ID NO: 830130 - DNA, 33 bp, Homo sapien
ttccctgatatagttgcagaatgcatgaatgga

SEQ ID NO: 830131 - DNA, 33 bp, Homo sapien
tagtctgtattgaactcaacttgctcacaagcc

SEQ ID NO: 830132 - DNA, 33 bp, Homo sapien
tagtctgtattgaacttaacttgctcacaagcc

SEQ ID NO: 830133 - DNA, 33 bp, Homo sapien
atactccaagtcaacactggaagctgattcctc

SEQ ID NO: 830134 - DNA, 33 bp, Homo sapien
atactccaagtcaacattggaagctgattcctc

SEQ ID NO: 830135 - DNA, 33 bp, Homo sapien
tctgaggtcaccaaaacaaattactggacagtg

SEQ ID NO: 830136 - DNA, 33 bp, Homo sapien
tctgaggtcaccaaaagaaattactggacagtg

SEQ ID NO: 830137 - DNA, 33 bp, Homo sapien
tgattctgatgatgcccgacttatagaaatgac

SEQ ID NO: 830138 - DNA, 33 bp, Homo sapien
tgattctgatgatgcctgacttatagaaatgac

SEQ ID NO: 830139 - DNA, 33 bp, Homo sapien
gttacttaaagtactacgttgttggtgtcctgt

SEQ ID NO: 830140 - DNA, 33 bp, Homo sapien
gttacttaaagtactatgttgttggtgtcctgt

SEQ ID NO: 830141 - DNA, 33 bp, Homo sapien
gataatctttatcagacgtatggtttacaagtc

SEQ ID NO: 830142 - DNA, 33 bp, Homo sapien
gataatctttatcagatgtatggtttacaagtc

SEQ ID NO: 830143 - DNA, 33 bp, Homo sapien
ccctcacatctgtaagaatgcctattatcaaaa

SEQ ID NO: 830144 - DNA, 33 bp, Homo sapien
ccctcacatctgtaagtatgcctattatcaaaa

SEQ ID NO: 830145 - DNA, 33 bp, Homo sapien
tctgtcaagaaagcaacggtagccaagtgccat

SEQ ID NO: 830146 - DNA, 33 bp, Homo sapien
tctgtcaagaaagcaatggtagccaagtgccat

SEQ ID NO: 830147 - DNA, 33 bp, Homo sapien
caaataataaacatggcatttggccactaaaaa

SEQ ID NO: 830148 - DNA, 33 bp, Homo sapien
caaataataaacatggtatttggccactaaaaa

SEQ ID NO: 830149 - DNA, 33 bp, Homo sapien
gtaatagcccttagccaaaaacaatccaaatgt

SEQ ID NO: 830150 - DNA, 33 bp, Homo sapien
gtaatagcccttagccgaaaacaatccaaatgt

SEQ ID NO: 830151 - DNA, 33 bp, Homo sapien
ttgaatgcaattgatgcaactctcaatatgtag

SEQ ID NO: 830152 - DNA, 33 bp, Homo sapien
ttgaatgcaattgatggaactctcaatatgtag

SEQ ID NO: 830153 - DNA, 33 bp, Homo sapien
tcttggctaagattcaagaagatcaagatccaa

SEQ ID NO: 830154 - DNA, 33 bp, Homo sapien
tcttggctaagattcaggaagatcaagatccaa

SEQ ID NO: 830155 - DNA, 33 bp, Homo sapien
aggacagtccctggacaagaaagctgcagtgtt

SEQ ID NO: 830156 - DNA, 33 bp, Homo sapien
aggacagtccctggacgagaaagctgcagtgtt

SEQ ID NO: 830157 - DNA, 33 bp, Homo sapien
cctatttgaagaaggccgattctgttgctgcta

SEQ ID NO: 830158 - DNA, 33 bp, Homo sapien
cctatttgaagaaggctgattctgttgctgcta

SEQ ID NO: 830159 - DNA, 33 bp, Homo sapien
cattgtcaactacaacagagatgtgctttatga

SEQ ID NO: 830160 - DNA, 33 bp, Homo sapien
cattgtcaactacaacggagatgtgctttatga

SEQ ID NO: 830161 - DNA, 33 bp, Homo sapien
ggggcatgccatccacaacgacctcaaagccct

SEQ ID NO: 830162 - DNA, 33 bp, Homo sapien
ggggcatgccatccacgacgacctcaaagccct

SEQ ID NO: 830163 - DNA, 33 bp, Homo sapien
ccaggttaggaagagcagatattcctctgtgga

SEQ ID NO: 830164 - DNA, 33 bp, Homo sapien
ccaggttaggaagagcggatattcctctgtgga

SEQ ID NO: 830165 - DNA, 33 bp, Homo sapien
cacttataaaacattccgaaccaggactctttt

SEQ ID NO: 830166 - DNA, 33 bp, Homo sapien
cacttataaaacattctgaaccaggactctttt

SEQ ID NO: 830167 - DNA, 33 bp, Homo sapien
cataaacttatgaacaaatttgaaagcttggat

SEQ ID NO: 830168 - DNA, 33 bp, Homo sapien
cataaacttatgaacagatttgaaagcttggat

SEQ ID NO: 830169 - DNA, 33 bp, Homo sapien
aataatgacttaatgaaaagtctagcctacatt

SEQ ID NO: 830170 - DNA, 33 bp, Homo sapien
aataatgacttaatgagaagtctagcctacatt

SEQ ID NO: 830171 - DNA, 33 bp, Homo sapien
tcctggaattatcacaacttcctccagttggag

SEQ ID NO: 830172 - DNA, 33 bp, Homo sapien
tcctggaattatcacagcttcctccagttggag

SEQ ID NO: 830173 - DNA, 33 bp, Homo sapien
ccaccagcaaagtataaaagtcttatttctcta

SEQ ID NO: 830174 - DNA, 33 bp, Homo sapien
ccaccagcaaagtatagaagtcttatttctcta

SEQ ID NO: 830175 - DNA, 33 bp, Homo sapien
tattaggtaaaacatacgtatgcatcagagttc

SEQ ID NO: 830176 - DNA, 33 bp, Homo sapien
tattaggtaaaacatatgtatgcatcagagttc

SEQ ID NO: 830177 - DNA, 33 bp, Homo sapien
aagaaactgaggtgccaaaaaaataggtgacct

SEQ ID NO: 830178 - DNA, 33 bp, Homo sapien
aagaaactgaggtgccgaaaaaataggtgacct

SEQ ID NO: 830179 - DNA, 33 bp, Homo sapien
aagagctatcgtctagccaggaccctttctatg

SEQ ID NO: 830180 - DNA, 33 bp, Homo sapien
aagagctatcgtctaggcaggaccctttctatg

SEQ ID NO: 830181 - DNA, 33 bp, Homo sapien
tcactaaaaggtcatacccattgcaaaaggata

SEQ ID NO: 830182 - DNA, 33 bp, Homo sapien
tcactaaaaggtcatatccattgcaaaaggata

SEQ ID NO: 830183 - DNA, 33 bp, Homo sapien
cataagcaagctcaaaggtatcactaaaaattt

SEQ ID NO: 830184 - DNA, 33 bp, Homo sapien
cataagcaagctcaaatgtatcactaaaaattt

SEQ ID NO: 830185 - DNA, 33 bp, Homo sapien
ttatggcagagaatcaggttttgaaaatacaaa

SEQ ID NO: 830186 - DNA, 33 bp, Homo sapien
ttatggcagagaatcatgttttgaaaatacaaa

SEQ ID NO: 830187 - DNA, 33 bp, Homo sapien
atttgctgccaggatcaccagacaagtgactta

SEQ ID NO: 830188 - DNA, 33 bp, Homo sapien
atttgctgccaggatcgccagacaagtgactta

SEQ ID NO: 830189 - DNA, 33 bp, Homo sapien
agcaaatgtcagaaatcattgcccttcacttta

SEQ ID NO: 830190 - DNA, 33 bp, Homo sapien
agcaaatgtcagaaattattgcccttcacttta

SEQ ID NO: 830191 - DNA, 33 bp, Homo sapien
ctcggtggcaatcaaaactcccattcgccttct

SEQ ID NO: 830192 - DNA, 33 bp, Homo sapien
ctcggtggcaatcaaatctcccattcgccttct

SEQ ID NO: 830193 - DNA, 33 bp, Homo sapien
tttctttcaactcttacgtaattttcaaatttt

SEQ ID NO: 830194 - DNA, 33 bp, Homo sapien
tttctttcaactcttaggtaattttcaaatttt

SEQ ID NO: 830195 - DNA, 33 bp, Homo sapien
gcaatatatctaaatcaaatcatggtaccagat

SEQ ID NO: 830196 - DNA, 33 bp, Homo sapien
gcaatatatctaaatcgaatcatggtaccagat

SEQ ID NO: 830197 - DNA, 33 bp, Homo sapien; identical to SEQ ID NO: 830195

SEQ ID NO: 830198 - DNA, 33 bp, Homo sapien; identical to SEQ ID NO: 830196

SEQ ID NO: 830199 - DNA, 33 bp, Homo sapien
aagtagcttctattagcattgtcctgtccgttt

SEQ ID NO: 830200 - DNA, 33 bp, Homo sapien
aagtagcttctattagtattgtcctgtccgttt

SEQ ID NO: 830201 - DNA, 33 bp, Homo sapien
cgagtagcagttccaaccaattattttcaggtc

SEQ ID NO: 830202 - DNA, 33 bp, Homo sapien
cgagtagcagttccaatcaattattttcaggtc

SEQ ID NO: 830203 - DNA, 33 bp, Homo sapien
atggactaatacacaacttatgtttgaaaaata

SEQ ID NO: 830204 - DNA, 33 bp, Homo sapien
atggactaatacacaagttatgtttgaaaaata

SEQ ID NO: 830205 - DNA, 33 bp, Homo sapien
agaaattgcaatcttccactctgacagaagacg

SEQ ID NO: 830206 - DNA, 33 bp, Homo sapien
agaaattgcaatcttctactctgacagaagacg

SEQ ID NO: 830207 - DNA, 33 bp, Homo sapien
aactgactttcaatgacggtgccaagaacacag

SEQ ID NO: 830208 - DNA, 33 bp, Homo sapien
aactgactttcaatgatggtgccaagaacacag

SEQ ID NO: 830209 - DNA, 33 bp, Homo sapien
tgctatcaaaactccaatattatttttcacaga

SEQ ID NO: 830210 - DNA, 33 bp, Homo sapien
tgctatcaaaactccagtattatttttcacaga

SEQ ID NO: 830211 - DNA, 33 bp, Homo sapien
tttactatatccagaccaggtttaggtgtttca

SEQ ID NO: 830212 - DNA, 33 bp, Homo sapien
tttactatatccagactaggtttaggtgtttca

SEQ ID NO: 830213 - DNA, 33 bp, Homo sapien
gaggatcacatttgtgaaagtacttagcactgt

SEQ ID NO: 830214 - DNA, 33 bp, Homo sapien
gaggatcacatttgtggaagtacttagcactgt

SEQ ID NO: 830215 - DNA, 33 bp, Homo sapien
gccacaagctgtgcacaactgctttccgtaaca

SEQ ID NO: 830216 - DNA, 33 bp, Homo sapien
gccacaagctgtgcacgactgctttccgtaaca

SEQ ID NO: 830217 - DNA, 33 bp, Homo sapien
gtgcatatgaaattatgacgagtgaaaaggcac

SEQ ID NO: 830218 - DNA, 33 bp, Homo sapien
gtgcatatgaaattattacgagtgaaaaggcac

SEQ ID NO: 830219 - DNA, 33 bp, Homo sapien
gtatgtttccacattacacaaatagtaagggct

SEQ ID NO: 830220 - DNA, 33 bp, Homo sapien
gtatgtttccacattatacaaatagtaagggct

SEQ ID NO: 830221 - DNA, 33 bp, Homo sapien
cacagttccatgtgtcagaaatcaaaaatcaag

SEQ ID NO: 830222 - DNA, 33 bp, Homo sapien
cacagttccatgtgtccgaaatcaaaaatcaag

SEQ ID NO: 830223 - DNA, 33 bp, Homo sapien
ttctctatttagcagactagatttccaaagtgt

SEQ ID NO: 830224 - DNA, 33 bp, Homo sapien
ttctctatttagcagattagatttccaaagtgt

SEQ ID NO: 830225 - DNA, 33 bp, Homo sapien
tataggttcacttgcgcattactaggatgtgat

SEQ ID NO: 830226 - DNA, 33 bp, Homo sapien
tataggttcacttgcgtattactaggatgtgat

SEQ ID NO: 830227 - DNA, 33 bp, Homo sapien
ggtttggagtctcacactgaattttctagagtc

SEQ ID NO: 830228 - DNA, 33 bp, Homo sapien
ggtttggagtctcacattgaattttctagagtc

SEQ ID NO: 830229 - DNA, 33 bp, Homo sapien
cttttgtttttcaggaaagatgacaaacttcct

SEQ ID NO: 830230 - DNA, 33 bp, Homo sapien
cttttgtttttcaggagagatgacaaacttcct

SEQ ID NO: 830231 - DNA, 33 bp, Homo sapien
agacagtggagatagaagacaggtcaattttaa

SEQ ID NO: 830232 - DNA, 33 bp, Homo sapien
agacagtggagatagaggacaggtcaattttaa

SEQ ID NO: 830233 - DNA, 33 bp, Homo sapien
accctagccacctgctcaatgtagaaactgtct

SEQ ID NO: 830234 - DNA, 33 bp, Homo sapien
accctagccacctgctgaatgtagaaactgtct

SEQ ID NO: 830235 - DNA, 33 bp, Homo sapien
ttaatgcaggaacaaaaatccacataccacatg

SEQ ID NO: 830236 - DNA, 33 bp, Homo sapien
ttaatgcaggaacaaacatccacataccacatg

SEQ ID NO: 830237 - DNA, 33 bp, Homo sapien
tttgccctagtccatgaaagtagtaaggggcag

SEQ ID NO: 830238 - DNA, 33 bp, Homo sapien
tttgccctagtccatggaagtagtaaggggcag

SEQ ID NO: 830239 - DNA, 33 bp, Homo sapien
tgagcaaaattgctaaaggaggcatctccaatt

SEQ ID NO: 830240 - DNA, 33 bp, Homo sapien
tgagcaaaattgctaacggaggcatctccaatt

SEQ ID NO: 830241 - DNA, 33 bp, Homo sapien
ggaaagacacaaagtacacaagcaattttgctt

SEQ ID NO: 830242 - DNA, 33 bp, Homo sapien
ggaaagacacaaagtagacaagcaattttgctt

SEQ ID NO: 830243 - DNA, 33 bp, Homo sapien
ctactcacccctgataaaatcccagagctggga

SEQ ID NO: 830244 - DNA, 33 bp, Homo sapien
ctactcacccctgatacaatcccagagctggga

SEQ ID NO: 830245 - DNA, 33 bp, Homo sapien
ctgccatgtataccacagtgagcttggcaaggg

SEQ ID NO: 830246 - DNA, 33 bp, Homo sapien
ctgccatgtataccacggtgagcttggcaaggg

SEQ ID NO: 830247 - DNA, 33 bp, Homo sapien
ataagtggcacctatagatttaagctgtgttga

SEQ ID NO: 830248 - DNA, 33 bp, Homo sapien
ataagtggcacctatatatttaagctgtgttga

SEQ ID NO: 830249 - DNA, 33 bp, Homo sapien
taaagtgactttatgaagtgacctcacatacct

SEQ ID NO: 830250 - DNA, 33 bp, Homo sapien
taaagtgactttatgatgtgacctcacatacct

SEQ ID NO: 830251 - DNA, 33 bp, Homo sapien
agatcagaaattaagacgataactgacaattcc

SEQ ID NO: 830252 - DNA, 33 bp, Homo sapien
agatcagaaattaagatgataactgacaattcc

SEQ ID NO: 830253 - DNA, 33 bp, Homo sapien
ttgcattttagcttctaaatgatagtccaggag

SEQ ID NO: 830254 - DNA, 33 bp, Homo sapien
ttgcattttagcttctgaatgatagtccaggag

SEQ ID NO: 830255 - DNA, 33 bp, Homo sapien
ggctaatatgaatgacacctacttctttctcat

SEQ ID NO: 830256 - DNA, 33 bp, Homo sapien
ggctaatatgaatgacgcctacttctttctcat

SEQ ID NO: 830257 - DNA, 33 bp, Homo sapien
cggaaaataacacaaaatcacgatctatgaaag

SEQ ID NO: 830258 - DNA, 33 bp, Homo sapien
cggaaaataacacaaagtcacgatctatgaaag

SEQ ID NO: 830259 - DNA, 33 bp, Homo sapien
acctcatgtcaagatacagtctaaaaactcatg

SEQ ID NO: 830260 - DNA, 33 bp, Homo sapien
acctcatgtcaagatatagtctaaaaactcatg

SEQ ID NO: 830261 - DNA, 33 bp, Homo sapien
tttgtgggaggttgcaagtcagaggtagtagat

SEQ ID NO: 830262 - DNA, 33 bp, Homo sapien
tttgtgggaggttgcacgtcagaggtagtagat

SEQ ID NO: 830263 - DNA, 33 bp, Homo sapien
ctaagtcacacaataaatgtcgaagccaaaact

SEQ ID NO: 830264 - DNA, 33 bp, Homo sapien
ctaagtcacacaataagtgtcgaagccaaaact

SEQ ID NO: 830265 - DNA, 33 bp, Homo sapien
agaagacagcttaaaagtataaaacagaataaa

SEQ ID NO: 830266 - DNA, 33 bp, Homo sapien
agaagacagcttaaaattataaaacagaataaa

SEQ ID NO: 830267 - DNA, 33 bp, Homo sapien
gtcaaatctctttagactacgtggttaattgac

SEQ ID NO: 830268 - DNA, 33 bp, Homo sapien
gtcaaatctctttagattacgtggttaattgac

SEQ ID NO: 830269 - DNA, 33 bp, Homo sapien
ccatcaaccttaagcacgatacatttcaggtgt

SEQ ID NO: 830270 - DNA, 33 bp, Homo sapien
ccatcaaccttaagcatgatacatttcaggtgt

SEQ ID NO: 830271 - DNA, 33 bp, Homo sapien
aggatcagacatagaagaacaggctaggaaaag

SEQ ID NO: 830272 - DNA, 33 bp, Homo sapien
aggatcagacatagaataacaggctaggaaaag

SEQ ID NO: 830273 - DNA, 33 bp, Homo sapien
tgcagacaatgccaaaaatttggtgtttatata

SEQ ID NO: 830274 - DNA, 33 bp, Homo sapien
tgcagacaatgccaaacatttggtgtttatata

SEQ ID NO: 830275 - DNA, 33 bp, Homo sapien
aactcaagacgtttcacgagcagttgaaaatta

SEQ ID NO: 830276 - DNA, 33 bp, Homo sapien
aactcaagacgtttcatgagcagttgaaaatta

SEQ ID NO: 830277 - DNA, 33 bp, Homo sapien
acgtagtagacatcctaaaaacaaaaacaaaac

SEQ ID NO: 830278 - DNA, 33 bp, Homo sapien
acgtagtagacatcctgaaaacaaaaacaaaac

SEQ ID NO: 830279 - DNA, 33 bp, Homo sapien
atcacaccttatattccatgcctgagtttccct

SEQ ID NO: 830280 - DNA, 33 bp, Homo sapien
atcacaccttatattctatgcctgagtttccct

SEQ ID NO: 830281 - DNA, 33 bp, Homo sapien
tcactcactcgtgtacagaaatgtcagcctctc

SEQ ID NO: 830282 - DNA, 33 bp, Homo sapien
tcactcactcgtgtacggaaatgtcagcctctc

SEQ ID NO: 830283 - DNA, 33 bp, Homo sapien
agtgagtataaaataaagtaagcataaacattt

SEQ ID NO: 830284 - DNA, 33 bp, Homo sapien
agtgagtataaaataatgtaagcataaacattt

SEQ ID NO: 830285 - DNA, 33 bp, Homo sapien
atggataaaggtgagtgaatgaattaatgaatg

SEQ ID NO: 830286 - DNA, 33 bp, Homo sapien
atggataaaggtgagttaatgaattaatgaatg

SEQ ID NO: 830287 - DNA, 33 bp, Homo sapien
gggaaactccatctcaaaaagttttattcatag

SEQ ID NO: 830288 - DNA, 33 bp, Homo sapien
gggaaactccatctcagaaagttttattcatag

SEQ ID NO: 830289 - DNA, 33 bp, Homo sapien
ccaaaagagatgaaaacatcctgtaaagcagtt

SEQ ID NO: 830290 - DNA, 33 bp, Homo sapien
ccaaaagagatgaaaatatcctgtaaagcagtt

SEQ ID NO: 830291 - DNA, 33 bp, Homo sapien
tccttgtctgtaaaaccgagatagtagctgctt

SEQ ID NO: 830292 - DNA, 33 bp, Homo sapien
tccttgtctgtaaaactgagatagtagctgctt

SEQ ID NO: 830293 - DNA, 33 bp, Homo sapien
attctccaatattaacaagtctgttggtgacca

SEQ ID NO: 830294 - DNA, 33 bp, Homo sapien
attctccaatattaacgagtctgttggtgacca

SEQ ID NO: 830295 - DNA, 33 bp, Homo sapien
gggtttctaaaacttgcattctttccactacct

SEQ ID NO: 830296 - DNA, 33 bp, Homo sapien
gggtttctaaaacttggattctttccactacct

SEQ ID NO: 830297 - DNA, 33 bp, Homo sapien
tgtttatgaatagacaagaaagttccgatttat

SEQ ID NO: 830298 - DNA, 33 bp, Homo sapien
tgtttatgaatagacaggaaagttccgatttat

SEQ ID NO: 830299 - DNA, 33 bp, Homo sapien
ataagtattattatcaacattttatagataaat

SEQ ID NO: 830300 - DNA, 33 bp, Homo sapien
ataagtattattatcaccattttatagataaat

SEQ ID NO: 830301 - DNA, 33 bp, Homo sapien
aggcctcatggaggaaatgacgttaagcaaaga

SEQ ID NO: 830302 - DNA, 33 bp, Homo sapien
aggcctcatggaggaagtgacgttaagcaaaga

SEQ ID NO: 830303 - DNA, 33 bp, Homo sapien
ctgcaggtaagtaaaacgcagtgaataaattct

SEQ ID NO: 830304 - DNA, 33 bp, Homo sapien
ctgcaggtaagtaaaatgcagtgaataaattct

SEQ ID NO: 830305 - DNA, 33 bp, Homo sapien
aaattcaaatacgatacaagtaaagagcatttc

SEQ ID NO: 830306 - DNA, 33 bp, Homo sapien
aaattcaaatacgatataagtaaagagcatttc

SEQ ID NO: 830307 - DNA, 33 bp, Homo sapien
atgtgtcctgtggtaacattttcttgcaactgc

SEQ ID NO: 830308 - DNA, 33 bp, Homo sapien
atgtgtcctgtggtaagattttcttgcaactgc

SEQ ID NO: 830309 - DNA, 33 bp, Homo sapien
gattttggttatcaaacatatctaggcagtgga

SEQ ID NO: 830310 - DNA, 33 bp, Homo sapien
gattttggttatcaaatatatctaggcagtgga

SEQ ID NO: 830311 - DNA, 33 bp, Homo sapien
gtttgaatgttagactcagggacaatatatttt

SEQ ID NO: 830312 - DNA, 33 bp, Homo sapien
gtttgaatgttagacttagggacaatatatttt

SEQ ID NO: 830313 - DNA, 33 bp, Homo sapien
aaatagaccagaggaagagactagaaagcccag

SEQ ID NO: 830314 - DNA, 33 bp, Homo sapien
aaatagaccagaggaatagactagaaagcccag

SEQ ID NO: 830315 - DNA, 33 bp, Homo sapien
ttgtgtctttccagtacggccctgctgtttttt

SEQ ID NO: 830316 - DNA, 33 bp, Homo sapien
ttgtgtctttccagtatggccctgctgtttttt

SEQ ID NO: 830317 - DNA, 33 bp, Homo sapien
caaaactccgtatcagccaataaataaataaat

SEQ ID NO: 830318 - DNA, 33 bp, Homo sapien
caaaactccgtatcagtcaataaataaataaat

SEQ ID NO: 830319 - DNA, 33 bp, Homo sapien
aaaaaatgcctccatccatctgttttgaactat

SEQ ID NO: 830320 - DNA, 33 bp, Homo sapien
aaaaaatgcctccatctatctgttttgaactat

SEQ ID NO: 830321 - DNA, 33 bp, Homo sapien
gcattcattcaatataactgcaaattatcctac

SEQ ID NO: 830322 - DNA, 33 bp, Homo sapien
gcattcattcaatatagctgcaaattatcctac

SEQ ID NO: 830323 - DNA, 33 bp, Homo sapien
ccatcatgcaaaaatcagaataaccaggcatgt

SEQ ID NO: 830324 - DNA, 33 bp, Homo sapien
ccatcatgcaaaaatcggaataaccaggcatgt

SEQ ID NO: 830325 - DNA, 33 bp, Homo sapien
tttgtatgcgaatctacgtttttatttttattt

SEQ ID NO: 830326 - DNA, 33 bp, Homo sapien
tttgtatgcgaatctatgtttttatttttattt

SEQ ID NO: 830327 - DNA, 33 bp, Homo sapien
gcctgaggtcttcaaccacagccaaattcactg

SEQ ID NO: 830328 - DNA, 33 bp, Homo sapien
gcctgaggtcttcaacgacagccaaattcactg

SEQ ID NO: 830329 - DNA, 33 bp, Homo sapien
ttgctaagacaatagacattaagtgttctcacc

SEQ ID NO: 830330 - DNA, 33 bp, Homo sapien
ttgctaagacaatagatattaagtgttctcacc

SEQ ID NO: 830331 - DNA, 33 bp, Homo sapien
aagattctacatatgaaggagatcttacagtat

SEQ ID NO: 830332 - DNA, 33 bp, Homo sapien
aagattctacatatgagggagatcttacagtat

SEQ ID NO: 830333 - DNA, 33 bp, Homo sapien
cttcaatcctcattcaaagaaagacttggcccc

SEQ ID NO: 830334 - DNA, 33 bp, Homo sapien
cttcaatcctcattcatagaaagacttggcccc

SEQ ID NO: 830335 - DNA, 33 bp, Homo sapien
atgatgccttcttccaatgaaagcttctggttc

SEQ ID NO: 830336 - DNA, 33 bp, Homo sapien
atgatgccttcttccactgaaagcttctggttc

SEQ ID NO: 830337 - DNA, 33 bp, Homo sapien
agatatctgtctaggaaatctctcgaagttaac

SEQ ID NO: 830338 - DNA, 33 bp, Homo sapien
agatatctgtctaggacatctctcgaagttaac

SEQ ID NO: 830339 - DNA, 33 bp, Homo sapien
ctgctcatttccaaaccgcaattttcataggta

SEQ ID NO: 830340 - DNA, 33 bp, Homo sapien
ctgctcatttccaaactgcaattttcataggta

SEQ ID NO: 830341 - DNA, 33 bp, Homo sapien
attctagaattatctacgttctgaaatgttacc

SEQ ID NO: 830342 - DNA, 33 bp, Homo sapien
attctagaattatctatgttctgaaatgttacc

SEQ ID NO: 830343 - DNA, 33 bp, Homo sapien
tagtgcaaagccaataccactatcaggtaaaac

SEQ ID NO: 830344 - DNA, 33 bp, Homo sapien
tagtgcaaagccaatatcactatcaggtaaaac

SEQ ID NO: 830345 - DNA, 33 bp, Homo sapien
ttactttgtcgtctgcacccaaataatcctacc

SEQ ID NO: 830346 - DNA, 33 bp, Homo sapien
ttactttgtcgtctgcgcccaaataatcctacc

SEQ ID NO: 830347 - DNA, 33 bp, Homo sapien
ttccttccttgtgagacattaaatttaaattct

SEQ ID NO: 830348 - DNA, 33 bp, Homo sapien
ttccttccttgtgagagattaaatttaaattct

SEQ ID NO: 830349 - DNA, 33 bp, Homo sapien
gccaggatgaaatcacagccgactaaaggagat

SEQ ID NO: 830350 - DNA, 33 bp, Homo sapien
gccaggatgaaatcacggccgactaaaggagat

SEQ ID NO: 830351 - DNA, 33 bp, Homo sapien
aagtaggaaacaaaagcctttgccaggatgaaa

SEQ ID NO: 830352 - DNA, 33 bp, Homo sapien
aagtaggaaacaaaaggctttgccaggatgaaa

SEQ ID NO: 830353 - DNA, 33 bp, Homo sapien
taatccaactatgtcaactcttcaaaagtacat

SEQ ID NO: 830354 - DNA, 33 bp, Homo sapien
taatccaactatgtcagctcttcaaaagtacat

SEQ ID NO: 830355 - DNA, 33 bp, Homo sapien
acattacaagatgataccctctttcctgtggtt

SEQ ID NO: 830356 - DNA, 33 bp, Homo sapien
acattacaagatgatatcctctttcctgtggtt

SEQ ID NO: 830357 - DNA, 33 bp, Homo sapien
tctacagcatctttgccagttcactgaagcgct

SEQ ID NO: 830358 - DNA, 33 bp, Homo sapien
tctacagcatctttgcgagttcactgaagcgct

SEQ ID NO: 830359 - DNA, 33 bp, Homo sapien
tgtggcatcactgaaacgaatgcaggactctcg

SEQ ID NO: 830360 - DNA, 33 bp, Homo sapien
tgtggcatcactgaaatgaatgcaggactctcg

SEQ ID NO: 830361 - DNA, 33 bp, Homo sapien
gtggattaggaaatgaagaaagttgtgtctaac

SEQ ID NO: 830362 - DNA, 33 bp, Homo sapien
gtggattaggaaatgaggaaagttgtgtctaac

SEQ ID NO: 830363 - DNA, 33 bp, Homo sapien
aggcataggtcctttcaaaatgcagtgcctgtg

SEQ ID NO: 830364 - DNA, 33 bp, Homo sapien
aggcataggtcctttcgaaatgcagtgcctgtg

SEQ ID NO: 830365 - DNA, 33 bp, Homo sapien
agagaaaaattgtataagtcagttcactaggaa

SEQ ID NO: 830366 - DNA, 33 bp, Homo sapien
agagaaaaattgtataggtcagttcactaggaa

SEQ ID NO: 830367 - DNA, 33 bp, Homo sapien
tgtggctgcttgtacacgtcgtattggaggaaa

SEQ ID NO: 830368 - DNA, 33 bp, Homo sapien
tgtggctgcttgtacatgtcgtattggaggaaa

SEQ ID NO: 830369 - DNA, 33 bp, Homo sapien
ctatgagagtccacaacgcagaaatgatgtcat

SEQ ID NO: 830370 - DNA, 33 bp, Homo sapien
ctatgagagtccacaatgcagaaatgatgtcat

SEQ ID NO: 830371 - DNA, 33 bp, Homo sapien
tgtgggtctgaacataaacgaggctattttcta

SEQ ID NO: 830372 - DNA, 33 bp, Homo sapien
tgtgggtctgaacatacacgaggctattttcta

SEQ ID NO: 830373 - DNA, 33 bp, Homo sapien
ctgccacaaaatgcaagagtagctactaaccac

SEQ ID NO: 830374 - DNA, 33 bp, Homo sapien
ctgccacaaaatgcaatagtagctactaaccac

SEQ ID NO: 830375 - DNA, 33 bp, Homo sapien
ctggactacataacctaagaggatgaaaagtat

SEQ ID NO: 830376 - DNA, 33 bp, Homo sapien
ctggactacataacctgagaggatgaaaagtat

SEQ ID NO: 830377 - DNA, 33 bp, Homo sapien
gtgcagagaacagcaacgggtccactggagtgt

SEQ ID NO: 830378 - DNA, 33 bp, Homo sapien
gtgcagagaacagcaatgggtccactggagtgt

SEQ ID NO: 830379 - DNA, 33 bp, Homo sapien
cccagatggctcaggcgctgcaaaagcacaggg

SEQ ID NO: 830380 - DNA, 33 bp, Homo sapien
cccagatggctcaggctctgcaaaagcacaggg

SEQ ID NO: 830381 - DNA, 33 bp, Homo sapien
ttgaagaatatagtcaagttaatcacaggttaa

SEQ ID NO: 830382 - DNA, 33 bp, Homo sapien
ttgaagaatatagtcatgttaatcacaggttaa

SEQ ID NO: 830383 - DNA, 33 bp, Homo sapien
tagtgagtggcagatcccttaaattctgtacaa

SEQ ID NO: 830384 - DNA, 33 bp, Homo sapien
tagtgagtggcagatctcttaaattctgtacaa

SEQ ID NO: 830385 - DNA, 33 bp, Homo sapien
ggccattccaacttataaacagctaactctgct

SEQ ID NO: 830386 - DNA, 33 bp, Homo sapien
ggccattccaacttatgaacagctaactctgct

SEQ ID NO: 830387 - DNA, 33 bp, Homo sapien
taaacttgactggttcccatccagttggcttgg

SEQ ID NO: 830388 - DNA, 33 bp, Homo sapien
taaacttgactggttctcatccagttggcttgg

SEQ ID NO: 830389 - DNA, 33 bp, Homo sapien
aaggacatatcagaaaacccagaaactgaccca

SEQ ID NO: 830390 - DNA, 33 bp, Homo sapien
aaggacatatcagaaagcccagaaactgaccca

SEQ ID NO: 830391 - DNA, 33 bp, Homo sapien
tgggagtgatactgtcacacctaagatcaaaac

SEQ ID NO: 830392 - DNA, 33 bp, Homo sapien
tgggagtgatactgtctcacctaagatcaaaac

SEQ ID NO: 830393 - DNA, 33 bp, Homo sapien
ttgctacaaattcaacggtctcatacacggttt

SEQ ID NO: 830394 - DNA, 33 bp, Homo sapien
ttgctacaaattcaactgtctcatacacggttt

SEQ ID NO: 830395 - DNA, 33 bp, Homo sapien
tgcttggcttcaggaaagtcaagaaagtaaggg

SEQ ID NO: 830396 - DNA, 33 bp, Homo sapien
tgcttggcttcaggaaggtcaagaaagtaaggg

SEQ ID NO: 830397 - DNA, 33 bp, Homo sapien
tccccagttcctgcaacaaaatacagagcaaaa

SEQ ID NO: 830398 - DNA, 33 bp, Homo sapien
tccccagttcctgcaataaaatacagagcaaaa

SEQ ID NO: 830399 - DNA, 33 bp, Homo sapien
atggcagaagtgataacagtagagtttaatcaa

SEQ ID NO: 830400 - DNA, 33 bp, Homo sapien
atggcagaagtgataatagtagagtttaatcaa

SEQ ID NO: 830401 - DNA, 33 bp, Homo sapien
ttttgttgtgagataacgtaaaatgctcattac

SEQ ID NO: 830402 - DNA, 33 bp, Homo sapien
ttttgttgtgagataatgtaaaatgctcattac

SEQ ID NO: 830403 - DNA, 33 bp, Homo sapien
gtttttcttggctttgaatacacctgtgcagat

SEQ ID NO: 830404 - DNA, 33 bp, Homo sapien
gtttttcttggctttggatacacctgtgcagat

SEQ ID NO: 830405 - DNA, 33 bp, Homo sapien
tggcagtgagtggaatgatgcatttctaatgcc

SEQ ID NO: 830406 - DNA, 33 bp, Homo sapien
tggcagtgagtggaattatgcatttctaatgcc

SEQ ID NO: 830407 - DNA, 33 bp, Homo sapien
aaaagtgggatgagccacaggaggacccagggg

SEQ ID NO: 830408 - DNA, 33 bp, Homo sapien
aaaagtgggatgagccgcaggaggacccagggg

SEQ ID NO: 830409 - DNA, 33 bp, Homo sapien
cagtatatttgtggaacgcccagctttccttct

SEQ ID NO: 830410 - DNA, 33 bp, Homo sapien
cagtatatttgtggaatgcccagctttccttct

SEQ ID NO: 830411 - DNA, 33 bp, Homo sapien
cattcaatttctcctactactagcagcttacat

SEQ ID NO: 830412 - DNA, 33 bp, Homo sapien
cattcaatttctcctattactagcagcttacat

SEQ ID NO: 830413 - DNA, 33 bp, Homo sapien
ttacaatgcaaacttacccgcagaaagattcaa

SEQ ID NO: 830414 - DNA, 33 bp, Homo sapien
ttacaatgcaaacttatccgcagaaagattcaa

SEQ ID NO: 830415 - DNA, 33 bp, Homo sapien
gggagaaagcgttgtaaatccttctcattcaag

SEQ ID NO: 830416 - DNA, 33 bp, Homo sapien
gggagaaagcgttgtacatccttctcattcaag

SEQ ID NO: 830417 - DNA, 33 bp, Homo sapien
taacaactacttgagaatatgtgtgtcagaaag

SEQ ID NO: 830418 - DNA, 33 bp, Homo sapien
taacaactacttgagattatgtgtgtcagaaag

SEQ ID NO: 830419 - DNA, 33 bp, Homo sapien
caacagtggaataaaaataaacttcataagcaa

SEQ ID NO: 830420 - DNA, 33 bp, Homo sapien
caacagtggaataaaactaaacttcataagcaa

SEQ ID NO: 830421 - DNA, 33 bp, Homo sapien
tcttactccagctttacgataactctaagggac

SEQ ID NO: 830422 - DNA, 33 bp, Homo sapien
tcttactccagctttatgataactctaagggac

SEQ ID NO: 830423 - DNA, 33 bp, Homo sapien
ggtacgtcttcctccaacatcaccccatcgaga

SEQ ID NO: 830424 - DNA, 33 bp, Homo sapien
ggtacgtcttcctccaccatcaccccatcgaga

SEQ ID NO: 830425 - DNA, 33 bp, Homo sapien
tgcccaagcctttcgacgactcctgattataaa

SEQ ID NO: 830426 - DNA, 33 bp, Homo sapien
tgcccaagcctttcgatgactcctgattataaa

SEQ ID NO: 830427 - DNA, 33 bp, Homo sapien
gaatagtagaaaacagcaagagggtctcgatag

SEQ ID NO: 830428 - DNA, 33 bp, Homo sapien
gaatagtagaaaacaggaagagggtctcgatag

SEQ ID NO: 830429 - DNA, 33 bp, Homo sapien
ctttcattttttgaacagtcagggtctcactgt

SEQ ID NO: 830430 - DNA, 33 bp, Homo sapien
ctttcattttttgaacggtcagggtctcactgt

SEQ ID NO: 830431 - DNA, 33 bp, Homo sapien
cgtacaaggacgaaaccgcctaatgacgcattt

SEQ ID NO: 830432 - DNA, 33 bp, Homo sapien
cgtacaaggacgaaactgcctaatgacgcattt

SEQ ID NO: 830433 - DNA, 33 bp, Homo sapien
tgttatcctagctccacgtttttttcttttttg

SEQ ID NO: 830434 - DNA, 33 bp, Homo sapien
tgttatcctagctccatgtttttttcttttttg

SEQ ID NO: 830435 - DNA, 33 bp, Homo sapien
tttattggaacatatccacattcactgatttat

SEQ ID NO: 830436 - DNA, 33 bp, Homo sapien
tttattggaacatatctacattcactgatttat

SEQ ID NO: 830437 - DNA, 33 bp, Homo sapien
ttgggagataaagcacactaagagctctggaca

SEQ ID NO: 830438 - DNA, 33 bp, Homo sapien
ttgggagataaagcacgctaagagctctggaca

SEQ ID NO: 830439 - DNA, 33 bp, Homo sapien
gatccattaaaagaaactcctcttagtcctggg

SEQ ID NO: 830440 - DNA, 33 bp, Homo sapien
gatccattaaaagaaattcctcttagtcctggg

SEQ ID NO: 830441 - DNA, 33 bp, Homo sapien
gcatctgaggaggaacaccgtgattcacttcca

SEQ ID NO: 830442 - DNA, 33 bp, Homo sapien
gcatctgaggaggaacgccgtgattcacttcca

SEQ ID NO: 830443 - DNA, 33 bp, Homo sapien
ggactaaaatcaggaaaaaaacaaagtacacca

SEQ ID NO: 830444 - DNA, 33 bp, Homo sapien
ggactaaaatcaggaagaaaacaaagtacacca

SEQ ID NO: 830445 - DNA, 33 bp, Homo sapien
tattaaaaatgattcacgtggattcgattattg

SEQ ID NO: 830446 - DNA, 33 bp, Homo sapien
tattaaaaatgattcaggtggattcgattattg

SEQ ID NO: 830447 - DNA, 33 bp, Homo sapien
tgagagttacaagggaaatgataatgtttgggc

SEQ ID NO: 830448 - DNA, 33 bp, Homo sapien
tgagagttacaagggacatgataatgtttgggc

SEQ ID NO: 830449 - DNA, 33 bp, Homo sapien
aaaggagcaatgtataaatgtgtgcaaaaagac

SEQ ID NO: 830450 - DNA, 33 bp, Homo sapien
aaaggagcaatgtatatatgtgtgcaaaaagac

SEQ ID NO: 830451 - DNA, 33 bp, Homo sapien
accaagctggttagcaacaaaaacaaatagctt

SEQ ID NO: 830452 - DNA, 33 bp, Homo sapien
accaagctggttagcagcaaaaacaaatagctt

SEQ ID NO: 830453 - DNA, 33 bp, Homo sapien
gacccaatcaaggtgaacctcccttgtacccac

SEQ ID NO: 830454 - DNA, 33 bp, Homo sapien
gacccaatcaaggtgagcctcccttgtacccac

SEQ ID NO: 830455 - DNA, 33 bp, Homo sapien
atgaataaagtttcagccatgcaagtaggcagg

SEQ ID NO: 830456 - DNA, 33 bp, Homo sapien
atgaataaagtttcaggcatgcaagtaggcagg

SEQ ID NO: 830457 - DNA, 33 bp, Homo sapien
gaatagttctgccttcacgagtcagccagctca

SEQ ID NO: 830458 - DNA, 33 bp, Homo sapien
gaatagttctgccttcgcgagtcagccagctca

SEQ ID NO: 830459 - DNA, 33 bp, Homo sapien
tagtcaagaaactcaaatccaacacgggtatct

SEQ ID NO: 830460 - DNA, 33 bp, Homo sapien
tagtcaagaaactcaagtccaacacgggtatct

SEQ ID NO: 830461 - DNA, 33 bp, Homo sapien
tagatgttatcaaaaactccttcagttctaata

SEQ ID NO: 830462 - DNA, 33 bp, Homo sapien
tagatgttatcaaaaattccttcagttctaata

SEQ ID NO: 830463 - DNA, 33 bp, Homo sapien
tctatttttttctaaactgaacacatcttacct

SEQ ID NO: 830464 - DNA, 33 bp, Homo sapien
tctatttttttctaaagtgaacacatcttacct

SEQ ID NO: 830465 - DNA, 33 bp, Homo sapien
aggcaatataaaggaacgaagtactaatacatg

SEQ ID NO: 830466 - DNA, 33 bp, Homo sapien
aggcaatataaaggaatgaagtactaatacatg

SEQ ID NO: 830467 - DNA, 33 bp, Homo sapien
ctgggaccttgacactcagaattcatctgcaca

SEQ ID NO: 830468 - DNA, 33 bp, Homo sapien
ctgggaccttgacactgagaattcatctgcaca

SEQ ID NO: 830469 - DNA, 33 bp, Homo sapien
agagggccctttatccactgcgactggtgccct

SEQ ID NO: 830470 - DNA, 33 bp, Homo sapien
agagggccctttatccgctgcgactggtgccct

SEQ ID NO: 830471 - DNA, 33 bp, Homo sapien
ccattccacacccatcacttttagctgtacagt

SEQ ID NO: 830472 - DNA, 33 bp, Homo sapien
ccattccacacccatctcttttagctgtacagt

SEQ ID NO: 830473 - DNA, 33 bp, Homo sapien
ctccttcctttctagcactgtttctgtgactcc

SEQ ID NO: 830474 - DNA, 33 bp, Homo sapien
ctccttcctttctagcgctgtttctgtgactcc

SEQ ID NO: 830475 - DNA, 33 bp, Homo sapien
ttcaattcttatctaacggggtcaccactgcta

SEQ ID NO: 830476 - DNA, 33 bp, Homo sapien
ttcaattcttatctaatggggtcaccactgcta

SEQ ID NO: 830477 - DNA, 33 bp, Homo sapien
tattttcactgacatacaaagcatccagcctct

SEQ ID NO: 830478 - DNA, 33 bp, Homo sapien
tattttcactgacatagaaagcatccagcctct

SEQ ID NO: 830479 - DNA, 33 bp, Homo sapien
tgagcatcccaataccaccagaggtaagacaaa

SEQ ID NO: 830480 - DNA, 33 bp, Homo sapien
tgagcatcccaataccgccagaggtaagacaaa

SEQ ID NO: 830481 - DNA, 33 bp, Homo sapien
agcaaagttctcagaaacaacagtatctctgca

SEQ ID NO: 830482 - DNA, 33 bp, Homo sapien
agcaaagttctcagaagcaacagtatctctgca

SEQ ID NO: 830483 - DNA, 33 bp, Homo sapien
agttgagacacagtgggatttttcaggacctta

SEQ ID NO: 830484 - DNA, 33 bp, Homo sapien
agttgagacacagtggtatttttcaggacctta

SEQ ID NO: 830485 - DNA, 33 bp, Homo sapien
gagtcaggaacaattaccacggtccaatctttc

SEQ ID NO: 830486 - DNA, 33 bp, Homo sapien
gagtcaggaacaattatcacggtccaatctttc

SEQ ID NO: 830487 - DNA, 33 bp, Homo sapien
ggttttaaagaaaatgcaagaggctccagagtc

SEQ ID NO: 830488 - DNA, 33 bp, Homo sapien
ggttttaaagaaaatggaagaggctccagagtc

SEQ ID NO: 830489 - DNA, 33 bp, Homo sapien
tcctgctgcaggtgaacgtgtcaggaaatgagc

SEQ ID NO: 830490 - DNA, 33 bp, Homo sapien
tcctgctgcaggtgaatgtgtcaggaaatgagc

SEQ ID NO: 830491 - DNA, 33 bp, Homo sapien
aagaagtattaaagcactaaccctgtccccaaa

SEQ ID NO: 830492 - DNA, 33 bp, Homo sapien
aagaagtattaaagcagtaaccctgtccccaaa

SEQ ID NO: 830493 - DNA, 33 bp, Homo sapien
agtgtgtatatagtaactaaaacataagaaagg

SEQ ID NO: 830494 - DNA, 33 bp, Homo sapien
agtgtgtatatagtaattaaaacataagaaagg

SEQ ID NO: 830495 - DNA, 33 bp, Homo sapien
gcatgccaggttctagacagaaatataattgag

SEQ ID NO: 830496 - DNA, 33 bp, Homo sapien
gcatgccaggttctaggcagaaatataattgag

SEQ ID NO: 830497 - DNA, 33 bp, Homo sapien
cttctctcttggacaacggtatttatatcagta

SEQ ID NO: 830498 - DNA, 33 bp, Homo sapien
cttctctcttggacaatggtatttatatcagta

SEQ ID NO: 830499 - DNA, 33 bp, Homo sapien
acctccttactttctaacaccacagataccatt

SEQ ID NO: 830500 - DNA, 33 bp, Homo sapien
acctccttactttctagcaccacagataccatt

SEQ ID NO: 830501 - DNA, 33 bp, Homo sapien
cagccatgtttaaggaagggcagttaagggctt

SEQ ID NO: 830502 - DNA, 33 bp, Homo sapien
cagccatgtttaaggacgggcagttaagggctt

SEQ ID NO: 830503 - DNA, 33 bp, Homo sapien
agtaaaagtttgatagccctggaacctggaaag

SEQ ID NO: 830504 - DNA, 33 bp, Homo sapien
agtaaaagtttgataggcctggaacctggaaag

SEQ ID NO: 830505 - DNA, 33 bp, Homo sapien
acacaacctaacaagaaataattattcaaagct

SEQ ID NO: 830506 - DNA, 33 bp, Homo sapien
acacaacctaacaagagataattattcaaagct

SEQ ID NO: 830507 - DNA, 33 bp, Homo sapien
cttggaactgtctccacgagtcataaccatact

SEQ ID NO: 830508 - DNA, 33 bp, Homo sapien
cttggaactgtctccatgagtcataaccatact

SEQ ID NO: 830509 - DNA, 33 bp, Homo sapien
gtcccttattagttgcagaaggagtcgggggga

SEQ ID NO: 830510 - DNA, 33 bp, Homo sapien
gtcccttattagttgcggaaggagtcgggggga

SEQ ID NO: 830511 - DNA, 33 bp, Homo sapien
cagtaagttagatggcgcagagataggattgaa

SEQ ID NO: 830512 - DNA, 33 bp, Homo sapien
cagtaagttagatggctcagagataggattgaa

SEQ ID NO: 830513 - DNA, 33 bp, Homo sapien
tacgatgttgccctaaccctcagggagtgtaca

SEQ ID NO: 830514 - DNA, 33 bp, Homo sapien
tacgatgttgccctaatcctcagggagtgtaca

SEQ ID NO: 830515 - DNA, 33 bp, Homo sapien
ccagagccagtactctcaaccattaagcggaag

SEQ ID NO: 830516 - DNA, 33 bp, Homo sapien
ccagagccagtactcttaaccattaagcggaag

SEQ ID NO: 830517 - DNA, 33 bp, Homo sapien
acagattttctcataccatatgtcacactcctg

SEQ ID NO: 830518 - DNA, 33 bp, Homo sapien
acagattttctcatactatatgtcacactcctg

SEQ ID NO: 830519 - DNA, 33 bp, Homo sapien
gtctttagtcatgaaacgttcattaagattccc

SEQ ID NO: 830520 - DNA, 33 bp, Homo sapien
gtctttagtcatgaaatgttcattaagattccc

SEQ ID NO: 830521 - DNA, 33 bp, Homo sapien
agaactcaattcgacaactggaatttaaacggc

SEQ ID NO: 830522 - DNA, 33 bp, Homo sapien
agaactcaattcgacacctggaatttaaacggc

SEQ ID NO: 830523 - DNA, 33 bp, Homo sapien
agttctgacactgcaaaccaaatccatatcaag

SEQ ID NO: 830524 - DNA, 33 bp, Homo sapien
agttctgacactgcaacccaaatccatatcaag

SEQ ID NO: 830525 - DNA, 33 bp, Homo sapien
actatattttataatcactgtaagctttaatta

SEQ ID NO: 830526 - DNA, 33 bp, Homo sapien
actatattttataatcgctgtaagctttaatta

SEQ ID NO: 830527 - DNA, 33 bp, Homo sapien
taccctggtgctatcacaatgtgaccctggaaa

SEQ ID NO: 830528 - DNA, 33 bp, Homo sapien
taccctggtgctatcataatgtgaccctggaaa

SEQ ID NO: 830529 - DNA, 33 bp, Homo sapien
cttgcaggttgcaaaagttggtgggagaaggat

SEQ ID NO: 830530 - DNA, 33 bp, Homo sapien
cttgcaggttgcaaaatttggtgggagaaggat

SEQ ID NO: 830531 - DNA, 33 bp, Homo sapien
ggataagtaggcgctaaacaggcgggggccaga

SEQ ID NO: 830532 - DNA, 33 bp, Homo sapien
ggataagtaggcgctagacaggcgggggccaga

SEQ ID NO: 830533 - DNA, 33 bp, Homo sapien
tttgtccacctccaaaaagaataactctcctac

SEQ ID NO: 830534 - DNA, 33 bp, Homo sapien
tttgtccacctccaaacagaataactctcctac

SEQ ID NO: 830535 - DNA, 33 bp, Homo sapien
gcactttgtttacagccctgtaagaccctgagc

SEQ ID NO: 830536 - DNA, 33 bp, Homo sapien
gcactttgtttacagctctgtaagaccctgagc

SEQ ID NO: 830537 - DNA, 33 bp, Homo sapien
tgccagctactgtgagaacaaatattacatcaa

SEQ ID NO: 830538 - DNA, 33 bp, Homo sapien
tgccagctactgtgaggacaaatattacatcaa

SEQ ID NO: 830539 - DNA, 33 bp, Homo sapien
aataaaagatgtattacgaagaaagctgccact

SEQ ID NO: 830540 - DNA, 33 bp, Homo sapien
aataaaagatgtattatgaagaaagctgccact

SEQ ID NO: 830541 - DNA, 33 bp, Homo sapien
atagaacatattattacactaccttataagcta

SEQ ID NO: 830542 - DNA, 33 bp, Homo sapien
atagaacatattattagactaccttataagcta

SEQ ID NO: 830543 - DNA, 33 bp, Homo sapien
catgtttaaccagaaactgctgaaggcctctct

SEQ ID NO: 830544 - DNA, 33 bp, Homo sapien
catgtttaaccagaaattgctgaaggcctctct

SEQ ID NO: 830545 - DNA, 33 bp, Homo sapien
gaacgtaacaagtccaaaatttaaggaggaggt

SEQ ID NO: 830546 - DNA, 33 bp, Homo sapien
gaacgtaacaagtccataatttaaggaggaggt

SEQ ID NO: 830547 - DNA, 33 bp, Homo sapien
agaaaagaaaagaaaagaagaacacatacaaag

SEQ ID NO: 830548 - DNA, 33 bp, Homo sapien
agaaaagaaaagaaaataagaacacatacaaag

SEQ ID NO: 830549 - DNA, 33 bp, Homo sapien
acccatccctaaacaaatggcactatgttactt

SEQ ID NO: 830550 - DNA, 33 bp, Homo sapien
acccatccctaaacaattggcactatgttactt

SEQ ID NO: 830551 - DNA, 33 bp, Homo sapien
aaggaacacttagaccaatgaaagcagaatctt

SEQ ID NO: 830552 - DNA, 33 bp, Homo sapien
aaggaacacttagaccgatgaaagcagaatctt

SEQ ID NO: 830553 - DNA, 33 bp, Homo sapien
tctttcatttggcataatatcttcaaggctcat

SEQ ID NO: 830554 - DNA, 33 bp, Homo sapien
tctttcatttggcatagtatcttcaaggctcat

SEQ ID NO: 830555 - DNA, 33 bp, Homo sapien
gcctggtgccgtgccacactcacctagctccaa

SEQ ID NO: 830556 - DNA, 33 bp, Homo sapien
gcctggtgccgtgccagactcacctagctccaa

SEQ ID NO: 830557 - DNA, 33 bp, Homo sapien
cctggcctcagatcaactgctacttgaataaaa

SEQ ID NO: 830558 - DNA, 33 bp, Homo sapien
cctggcctcagatcaattgctacttgaataaaa

SEQ ID NO: 830559 - DNA, 33 bp, Homo sapien
aaataatactctggaaagaagtctctgatcacc

SEQ ID NO: 830560 - DNA, 33 bp, Homo sapien
aaataatactctggaaggaagtctctgatcacc

SEQ ID NO: 830561 - DNA, 33 bp, Homo sapien
taaccacaggacgagtaaaatgatgtgtcactg

SEQ ID NO: 830562 - DNA, 33 bp, Homo sapien
taaccacaggacgagtgaaatgatgtgtcactg

SEQ ID NO: 830563 - DNA, 33 bp, Homo sapien
cttattcaaattccaaagtccttcccagccatt

SEQ ID NO: 830564 - DNA, 33 bp, Homo sapien
cttattcaaattccaaggtccttcccagccatt

SEQ ID NO: 830565 - DNA, 33 bp, Homo sapien
cacagtagacatccaagaaacattgtcgaatgc

SEQ ID NO: 830566 - DNA, 33 bp, Homo sapien
cacagtagacatccaataaacattgtcgaatgc

SEQ ID NO: 830567 - DNA, 33 bp, Homo sapien
tatattcagacgcctaacaaattatatgtaatt

SEQ ID NO: 830568 - DNA, 33 bp, Homo sapien
tatattcagacgcctaccaaattatatgtaatt

SEQ ID NO: 830569 - DNA, 33 bp, Homo sapien
ttcatgaagaagtttacggggcaccaagtgtta

SEQ ID NO: 830570 - DNA, 33 bp, Homo sapien
ttcatgaagaagtttatggggcaccaagtgtta

SEQ ID NO: 830571 - DNA, 33 bp, Homo sapien
actgaaaaacaggcaacgagaacaggaatttca

SEQ ID NO: 830572 - DNA, 33 bp, Homo sapien
actgaaaaacaggcaatgagaacaggaatttca

SEQ ID NO: 830573 - DNA, 33 bp, Homo sapien
cagagctggtgaatgcccttgaccatcctcagt

SEQ ID NO: 830574 - DNA, 33 bp, Homo sapien
cagagctggtgaatgcgcttgaccatcctcagt

SEQ ID NO: 830575 - DNA, 33 bp, Homo sapien
cacagattcatgagaacagaagaaatttgcaac

SEQ ID NO: 830576 - DNA, 33 bp, Homo sapien
cacagattcatgagaatagaagaaatttgcaac

SEQ ID NO: 830577 - DNA, 33 bp, Homo sapien
aatgatctcataaacacgcttggaaaatattga

SEQ ID NO: 830578 - DNA, 33 bp, Homo sapien
aatgatctcataaacatgcttggaaaatattga

SEQ ID NO: 830579 - DNA, 33 bp, Homo sapien
aactagaatgcattaaaaagaaaacataccctt

SEQ ID NO: 830580 - DNA, 33 bp, Homo sapien
aactagaatgcattaagaagaaaacataccctt

SEQ ID NO: 830581 - DNA, 33 bp, Homo sapien
tttaacctgtattgtcccatttgtgcacacggt

SEQ ID NO: 830582 - DNA, 33 bp, Homo sapien
tttaacctgtattgtctcatttgtgcacacggt

SEQ ID NO: 830583 - DNA, 33 bp, Homo sapien
tgcctctttcagacaactcaattatacatctgc

SEQ ID NO: 830584 - DNA, 33 bp, Homo sapien
tgcctctttcagacaagtcaattatacatctgc

SEQ ID NO: 830585 - DNA, 33 bp, Homo sapien
tatgtgttgtccaagacccaaagacaacctaag

SEQ ID NO: 830586 - DNA, 33 bp, Homo sapien
tatgtgttgtccaagatccaaagacaacctaag

SEQ ID NO: 830587 - DNA, 33 bp, Homo sapien
aaattgtctccaatccactttatgtatactcat

SEQ ID NO: 830588 - DNA, 33 bp, Homo sapien
aaattgtctccaatccgctttatgtatactcat

SEQ ID NO: 830589 - DNA, 33 bp, Homo sapien
gaaggctgtgattggaatagtcaatgaagattt

SEQ ID NO: 830590 - DNA, 33 bp, Homo sapien
gaaggctgtgattggagtagtcaatgaagattt

SEQ ID NO: 830591 - DNA, 33 bp, Homo sapien
taatataaaacctgaaatctgtgctattcaccc

SEQ ID NO: 830592 - DNA, 33 bp, Homo sapien
taatataaaacctgaagtctgtgctattcaccc

SEQ ID NO: 830593 - DNA, 33 bp, Homo sapien
tctaatggtttccaggcttacagaggaggcaca

SEQ ID NO: 830594 - DNA, 33 bp, Homo sapien
tctaatggtttccaggtttacagaggaggcaca

SEQ ID NO: 830595 - DNA, 33 bp, Homo sapien
aaactagtaaatgttgaaagttcagactggtta

SEQ ID NO: 830596 - DNA, 33 bp, Homo sapien
aaactagtaaatgttgcaagttcagactggtta

SEQ ID NO: 830597 - DNA, 33 bp, Homo sapien
tatgcgtgaatcctagaacaagcatgaactttt

SEQ ID NO: 830598 - DNA, 33 bp, Homo sapien
tatgcgtgaatcctaggacaagcatgaactttt

SEQ ID NO: 830599 - DNA, 33 bp, Homo sapien
caacatatgaattcaacaggggagacacaattc

SEQ ID NO: 830600 - DNA, 33 bp, Homo sapien
caacatatgaattcaataggggagacacaattc

SEQ ID NO: 830601 - DNA, 33 bp, Homo sapien
gcattttaatttaccaacttccacacacttcac

SEQ ID NO: 830602 - DNA, 33 bp, Homo sapien
gcattttaatttaccagcttccacacacttcac

SEQ ID NO: 830603 - DNA, 33 bp, Homo sapien
cagattaaataaaaagccttgtgagtgaagtct

SEQ ID NO: 830604 - DNA, 33 bp, Homo sapien
cagattaaataaaaaggcttgtgagtgaagtct

SEQ ID NO: 830605 - DNA, 33 bp, Homo sapien
actgcagccgcctaaggcagtggattagagtta

SEQ ID NO: 830606 - DNA, 33 bp, Homo sapien
actgcagccgcctaagtcagtggattagagtta

SEQ ID NO: 830607 - DNA, 33 bp, Homo sapien
atccattgtatatggcaagtcacttttgtttgg

SEQ ID NO: 830608 - DNA, 33 bp, Homo sapien
atccattgtatatggcgagtcacttttgtttgg

SEQ ID NO: 830609 - DNA, 33 bp, Homo sapien
attgcttctaatgagaaattgctttttagtatt

SEQ ID NO: 830610 - DNA, 33 bp, Homo sapien
attgcttctaatgagagattgctttttagtatt

SEQ ID NO: 830611 - DNA, 33 bp, Homo sapien
ctgggattacaggataaaaggtttccaatgcgt

SEQ ID NO: 830612 - DNA, 33 bp, Homo sapien
ctgggattacaggatacaaggtttccaatgcgt

SEQ ID NO: 830613 - DNA, 33 bp, Homo sapien
cttcattgatttccagaagttctctaggcaaga

SEQ ID NO: 830614 - DNA, 33 bp, Homo sapien
cttcattgatttccagtagttctctaggcaaga

SEQ ID NO: 830615 - DNA, 33 bp, Homo sapien
atgttccagctgtaagaagaaagcatatccttc

SEQ ID NO: 830616 - DNA, 33 bp, Homo sapien
atgttccagctgtaaggagaaagcatatccttc

SEQ ID NO: 830617 - DNA, 33 bp, Homo sapien
tcgattaccagttgcacgtagaattacttttgt

SEQ ID NO: 830618 - DNA, 33 bp, Homo sapien
tcgattaccagttgcatgtagaattacttttgt

SEQ ID NO: 830619 - DNA, 33 bp, Homo sapien
cctctcatgctaaaataaggagttaatgcgctg

SEQ ID NO: 830620 - DNA, 33 bp, Homo sapien
cctctcatgctaaaatcaggagttaatgcgctg

SEQ ID NO: 830621 - DNA, 33 bp, Homo sapien
tctccctgaacttgtaacacgtttagacttaga

SEQ ID NO: 830622 - DNA, 33 bp, Homo sapien
tctccctgaacttgtagcacgtttagacttaga

SEQ ID NO: 830623 - DNA, 33 bp, Homo sapien
aggcactagtctcatccatgagtatccagccct

SEQ ID NO: 830624 - DNA, 33 bp, Homo sapien
aggcactagtctcatctatgagtatccagccct

SEQ ID NO: 830625 - DNA, 33 bp, Homo sapien
tgctacagcagaaaaacgggtgttggtggaaat

SEQ ID NO: 830626 - DNA, 33 bp, Homo sapien
tgctacagcagaaaaatgggtgttggtggaaat

SEQ ID NO: 830627 - DNA, 33 bp, Homo sapien
cttatcactgagcaacaatttgaggagagtcgg

SEQ ID NO: 830628 - DNA, 33 bp, Homo sapien
cttatcactgagcaaccatttgaggagagtcgg

SEQ ID NO: 830629 - DNA, 33 bp, Homo sapien
gaccttgaccaccagagtaagaaaagtaagaat

SEQ ID NO: 830630 - DNA, 33 bp, Homo sapien
gaccttgaccaccagattaagaaaagtaagaat

SEQ ID NO: 830631 - DNA, 33 bp, Homo sapien
ctctccgtttacattcccaatgcacctgctcta

SEQ ID NO: 830632 - DNA, 33 bp, Homo sapien
ctctccgtttacattctcaatgcacctgctcta

SEQ ID NO: 830633 - DNA, 33 bp, Homo sapien
ttgaacagatgtatgccattcttcaaagagatt

SEQ ID NO: 830634 - DNA, 33 bp, Homo sapien
ttgaacagatgtatgctattcttcaaagagatt

SEQ ID NO: 830635 - DNA, 33 bp, Homo sapien
caaattcactctccaacaatacttctagagaat

SEQ ID NO: 830636 - DNA, 33 bp, Homo sapien
caaattcactctccaataatacttctagagaat

SEQ ID NO: 830637 - DNA, 33 bp, Homo sapien
ctagagaaccctgctccggtgggatttgcagtt

SEQ ID NO: 830638 - DNA, 33 bp, Homo sapien
ctagagaaccctgctctggtgggatttgcagtt

SEQ ID NO: 830639 - DNA, 33 bp, Homo sapien
aataatccacacctagaagaggaaaagctagtg

SEQ ID NO: 830640 - DNA, 33 bp, Homo sapien
aataatccacacctagcagaggaaaagctagtg

SEQ ID NO: 830641 - DNA, 33 bp, Homo sapien
gctttttctcttaacaatgcaaattccatgaga

SEQ ID NO: 830642 - DNA, 33 bp, Homo sapien
gctttttctcttaacagtgcaaattccatgaga

SEQ ID NO: 830643 - DNA, 33 bp, Homo sapien
aggctaagcgaatgccaaggaggacaaatacac

SEQ ID NO: 830644 - DNA, 33 bp, Homo sapien
aggctaagcgaatgcccaggaggacaaatacac

SEQ ID NO: 830645 - DNA, 33 bp, Homo sapien
agtgcagtatcaaaaccaggaaattgacattgg

SEQ ID NO: 830646 - DNA, 33 bp, Homo sapien
agtgcagtatcaaaacgaggaaattgacattgg

SEQ ID NO: 830647 - DNA, 33 bp, Homo sapien
tagcagccagggggagaataaggacaggtgatg

SEQ ID NO: 830648 - DNA, 33 bp, Homo sapien
tagcagccagggggaggataaggacaggtgatg

SEQ ID NO: 830649 - DNA, 33 bp, Homo sapien
agagtatccgctatatgataagaactccataga

SEQ ID NO: 830650 - DNA, 33 bp, Homo sapien
agagtatccgctatattataagaactccataga

SEQ ID NO: 830651 - DNA, 33 bp, Homo sapien
gacactcctttggtcactaactcaaataaatct

SEQ ID NO: 830652 - DNA, 33 bp, Homo sapien
gacactcctttggtcagtaactcaaataaatct

SEQ ID NO: 830653 - DNA, 33 bp, Homo sapien
agacctgggctctgataacaactcaagtcccag

SEQ ID NO: 830654 - DNA, 33 bp, Homo sapien
agacctgggctctgatcacaactcaagtcccag

SEQ ID NO: 830655 - DNA, 33 bp, Homo sapien
cagtctccagttggacaacctgtggattagaac

SEQ ID NO: 830656 - DNA, 33 bp, Homo sapien
cagtctccagttggaccacctgtggattagaac

SEQ ID NO: 830657 - DNA, 33 bp, Homo sapien
tgcagaaatatagatacggaatttgttagcagt

SEQ ID NO: 830658 - DNA, 33 bp, Homo sapien
tgcagaaatatagatatggaatttgttagcagt

SEQ ID NO: 830659 - DNA, 33 bp, Homo sapien
agctctatataacaaagaactctccaggaataa

SEQ ID NO: 830660 - DNA, 33 bp, Homo sapien
agctctatataacaaataactctccaggaataa

SEQ ID NO: 830661 - DNA, 33 bp, Homo sapien
ttcatttgtaaatttcaccaaactactaacttt

SEQ ID NO: 830662 - DNA, 33 bp, Homo sapien
ttcatttgtaaatttccccaaactactaacttt

SEQ ID NO: 830663 - DNA, 33 bp, Homo sapien
gctgtaaatatctctaaattctttgtgtttaaa

SEQ ID NO: 830664 - DNA, 33 bp, Homo sapien
gctgtaaatatctctacattctttgtgtttaaa

SEQ ID NO: 830665 - DNA, 33 bp, Homo sapien
gcctggaaaccaagaactgactgctcatctaat

SEQ ID NO: 830666 - DNA, 33 bp, Homo sapien
gcctggaaaccaagaagtgactgctcatctaat

SEQ ID NO: 830667 - DNA, 33 bp, Homo sapien
gacattcaggctcagtaaagtgaagggatatgc

SEQ ID NO: 830668 - DNA, 33 bp, Homo sapien
gacattcaggctcagtgaagtgaagggatatgc

SEQ ID NO: 830669 - DNA, 33 bp, Homo sapien
ggaaatcgtgacagaaagctagtgatataaacc

SEQ ID NO: 830670 - DNA, 33 bp, Homo sapien
ggaaatcgtgacagaatgctagtgatataaacc

SEQ ID NO: 830671 - DNA, 33 bp, Homo sapien
caagagggagtgaaatcaagacacctggtcatc

SEQ ID NO: 830672 - DNA, 33 bp, Homo sapien
caagagggagtgaaatgaagacacctggtcatc

SEQ ID NO: 830673 - DNA, 33 bp, Homo sapien
tctggccccacaataaatgctcaataaaatgta

SEQ ID NO: 830674 - DNA, 33 bp, Homo sapien
tctggccccacaataagtgctcaataaaatgta

SEQ ID NO: 830675 - DNA, 33 bp, Homo sapien
ttttgaactccaagcaataactggccccttttc

SEQ ID NO: 830676 - DNA, 33 bp, Homo sapien
ttttgaactccaagcagtaactggccccttttc

SEQ ID NO: 830677 - DNA, 33 bp, Homo sapien
aacagggtgaaatataatagtacaagtgacaac

SEQ ID NO: 830678 - DNA, 33 bp, Homo sapien
aacagggtgaaatatactagtacaagtgacaac

SEQ ID NO: 830679 - DNA, 33 bp, Homo sapien
aataagaagtcaataccaaaagaggaactccaa

SEQ ID NO: 830680 - DNA, 33 bp, Homo sapien
aataagaagtcaatacgaaaagaggaactccaa

SEQ ID NO: 830681 - DNA, 33 bp, Homo sapien
gtgaatagtttaaaagccgctgtttcaatattg

SEQ ID NO: 830682 - DNA, 33 bp, Homo sapien
gtgaatagtttaaaagtcgctgtttcaatattg

SEQ ID NO: 830683 - DNA, 33 bp, Homo sapien
tacatcagacatatgaagctctaaatacacaat

SEQ ID NO: 830684 - DNA, 33 bp, Homo sapien
tacatcagacatatgacgctctaaatacacaat

SEQ ID NO: 830685 - DNA, 33 bp, Homo sapien
tttgcatccactgtgacattttaaaagctttga

SEQ ID NO: 830686 - DNA, 33 bp, Homo sapien
tttgcatccactgtgatattttaaaagctttga

SEQ ID NO: 830687 - DNA, 33 bp, Homo sapien
catgattttaaaacaacgacagcaattcaaact

SEQ ID NO: 830688 - DNA, 33 bp, Homo sapien
catgattttaaaacaatgacagcaattcaaact

SEQ ID NO: 830689 - DNA, 33 bp, Homo sapien
agcataatggacaactcacaggcggtacagaac

SEQ ID NO: 830690 - DNA, 33 bp, Homo sapien
agcataatggacaactgacaggcggtacagaac

SEQ ID NO: 830691 - DNA, 33 bp, Homo sapien
tggttctcaggcttaactgtatattagaatcac

SEQ ID NO: 830692 - DNA, 33 bp, Homo sapien
tggttctcaggcttaattgtatattagaatcac

SEQ ID NO: 830693 - DNA, 33 bp, Homo sapien
tacattcacccaaaaacgttcctatagtttgtg

SEQ ID NO: 830694 - DNA, 33 bp, Homo sapien
tacattcacccaaaaatgttcctatagtttgtg

SEQ ID NO: 830695 - DNA, 33 bp, Homo sapien
gagcctgaggcaaaagcaatatgcatccctata

SEQ ID NO: 830696 - DNA, 33 bp, Homo sapien
gagcctgaggcaaaaggaatatgcatccctata

SEQ ID NO: 830697 - DNA, 33 bp, Homo sapien
gatttgttgcagagggaaaattacacactcaag

SEQ ID NO: 830698 - DNA, 33 bp, Homo sapien
gatttgttgcagaggggaaattacacactcaag

SEQ ID NO: 830699 - DNA, 33 bp, Homo sapien
ctctacagaatgcctaccttgagtccctgaata

SEQ ID NO: 830700 - DNA, 33 bp, Homo sapien
ctctacagaatgcctagcttgagtccctgaata

SEQ ID NO: 830701 - DNA, 33 bp, Homo sapien
tttcagtacaagtaaacgcaaccagatgacaga

SEQ ID NO: 830702 - DNA, 33 bp, Homo sapien
tttcagtacaagtaaatgcaaccagatgacaga

SEQ ID NO: 830703 - DNA, 33 bp, Homo sapien
aagaggagtatagacacagcaacagcccgtggg

SEQ ID NO: 830704 - DNA, 33 bp, Homo sapien
aagaggagtatagacagagcaacagcccgtggg

SEQ ID NO: 830705 - DNA, 33 bp, Homo sapien
gagttagaaacaggaacaggatcaagtgacatt

SEQ ID NO: 830706 - DNA, 33 bp, Homo sapien
gagttagaaacaggaataggatcaagtgacatt

SEQ ID NO: 830707 - DNA, 33 bp, Homo sapien
atcagcacagtattcaaatgttagtctcaaaat

SEQ ID NO: 830708 - DNA, 33 bp, Homo sapien
atcagcacagtattcagatgttagtctcaaaat

SEQ ID NO: 830709 - DNA, 33 bp, Homo sapien
ctatatctgtaggaaaatagttgtgatcctaag

SEQ ID NO: 830710 - DNA, 33 bp, Homo sapien
ctatatctgtaggaaattagttgtgatcctaag

SEQ ID NO: 830711 - DNA, 33 bp, Homo sapien
atgcaaatacaagccacaatgagaaatcatctc

SEQ ID NO: 830712 - DNA, 33 bp, Homo sapien
atgcaaatacaagccataatgagaaatcatctc

SEQ ID NO: 830713 - DNA, 33 bp, Homo sapien
gcacagaatttcaagcaccatataataaaagaa

SEQ ID NO: 830714 - DNA, 33 bp, Homo sapien
gcacagaatttcaagcgccatataataaaagaa

SEQ ID NO: 830715 - DNA, 33 bp, Homo sapien
cattgtcaacctgaccagaaagaacaacaaaag

SEQ ID NO: 830716 - DNA, 33 bp, Homo sapien
cattgtcaacctgaccggaaagaacaacaaaag

SEQ ID NO: 830717 - DNA, 33 bp, Homo sapien
taaatgtgtgtagacaaccagatagccacagct

SEQ ID NO: 830718 - DNA, 33 bp, Homo sapien
taaatgtgtgtagacagccagatagccacagct

SEQ ID NO: 830719 - DNA, 33 bp, Homo sapien
atgagatttgaattgaagtagtctggctctaga

SEQ ID NO: 830720 - DNA, 33 bp, Homo sapien
atgagatttgaattgaggtagtctggctctaga

SEQ ID NO: 830721 - DNA, 33 bp, Homo sapien
ccaggaactacctcgcaaactaagcaaaatctc

SEQ ID NO: 830722 - DNA, 33 bp, Homo sapien
ccaggaactacctcgcgaactaagcaaaatctc

SEQ ID NO: 830723 - DNA, 33 bp, Homo sapien
ttagataatttgctaaacgactttaggcctgag

SEQ ID NO: 830724 - DNA, 33 bp, Homo sapien
ttagataatttgctaagcgactttaggcctgag

SEQ ID NO: 830725 - DNA, 33 bp, Homo sapien
atgttggctggaaccccatgactggagtcggta

SEQ ID NO: 830726 - DNA, 33 bp, Homo sapien
atgttggctggaaccctatgactggagtcggta

SEQ ID NO: 830727 - DNA, 33 bp, Homo sapien
acagccatgtcttgtaaactgggacttttcccc

SEQ ID NO: 830728 - DNA, 33 bp, Homo sapien
acagccatgtcttgtacactgggacttttcccc

SEQ ID NO: 830729 - DNA, 33 bp, Homo sapien
ttaacagtgccctctcactctcaaaaggtcttg

SEQ ID NO: 830730 - DNA, 33 bp, Homo sapien
ttaacagtgccctctcgctctcaaaaggtcttg

SEQ ID NO: 830731 - DNA, 33 bp, Homo sapien
gtggccccttttatgcaaagttcaatattagac

SEQ ID NO: 830732 - DNA, 33 bp, Homo sapien
gtggccccttttatgcgaagttcaatattagac

SEQ ID NO: 830733 - DNA, 33 bp, Homo sapien
ctcattttatttttggacaacacacgtaagtca

SEQ ID NO: 830734 - DNA, 33 bp, Homo sapien
ctcattttatttttggtcaacacacgtaagtca

SEQ ID NO: 830735 - DNA, 33 bp, Homo sapien
ctgctgagaacagagaagtatatattcatgtta

SEQ ID NO: 830736 - DNA, 33 bp, Homo sapien
ctgctgagaacagagatgtatatattcatgtta

SEQ ID NO: 830737 - DNA, 33 bp, Homo sapien
agccttcgtctataaaatgggttgaataataca

SEQ ID NO: 830738 - DNA, 33 bp, Homo sapien
agccttcgtctataaagtgggttgaataataca

SEQ ID NO: 830739 - DNA, 33 bp, Homo sapien
ttcatgtggttttgcactcctgtgaaatgaaga

SEQ ID NO: 830740 - DNA, 33 bp, Homo sapien
ttcatgtggttttgcattcctgtgaaatgaaga

SEQ ID NO: 830741 - DNA, 33 bp, Homo sapien
aaactggaatgtgaacgggaatatgaccctcct

SEQ ID NO: 830742 - DNA, 33 bp, Homo sapien
aaactggaatgtgaactggaatatgaccctcct

SEQ ID NO: 830743 - DNA, 33 bp, Homo sapien
gcagcagctagagcaacaagtccaaggtcttag

SEQ ID NO: 830744 - DNA, 33 bp, Homo sapien
gcagcagctagagcaataagtccaaggtcttag

SEQ ID NO: 830745 - DNA, 33 bp, Homo sapien
tgcatttatttattccacaaacaggtatcccat

SEQ ID NO: 830746 - DNA, 33 bp, Homo sapien
tgcatttatttattcctcaaacaggtatcccat

SEQ ID NO: 830747 - DNA, 33 bp, Homo sapien
tggaagctcacaacagactatagtttctggcct

SEQ ID NO: 830748 - DNA, 33 bp, Homo sapien
tggaagctcacaacagtctatagtttctggcct

SEQ ID NO: 830749 - DNA, 33 bp, Homo sapien
ctgctttggctcttcaacagtttaaaagttggg

SEQ ID NO: 830750 - DNA, 33 bp, Homo sapien
ctgctttggctcttcagcagtttaaaagttggg

SEQ ID NO: 830751 - DNA, 33 bp, Homo sapien
tgatttggggctcttacgtataggtgtaggatc

SEQ ID NO: 830752 - DNA, 33 bp, Homo sapien
tgatttggggctcttatgtataggtgtaggatc

SEQ ID NO: 830753 - DNA, 33 bp, Homo sapien
agaatgctgaaggatccaacagacaggtttggc

SEQ ID NO: 830754 - DNA, 33 bp, Homo sapien
agaatgctgaaggatcgaacagacaggtttggc

SEQ ID NO: 830755 - DNA, 33 bp, Homo sapien
gaaataaaagcattcccatgtaagaaagtttat

SEQ ID NO: 830756 - DNA, 33 bp, Homo sapien
gaaataaaagcattcctatgtaagaaagtttat

SEQ ID NO: 830757 - DNA, 33 bp, Homo sapien
aggtgaatcacagtgacaaatctcgttctctgg

SEQ ID NO: 830758 - DNA, 33 bp, Homo sapien
aggtgaatcacagtgataaatctcgttctctgg

SEQ ID NO: 830759 - DNA, 33 bp, Homo sapien
tgtcactgcaccaaagacgtcagtagcttttct

SEQ ID NO: 830760 - DNA, 33 bp, Homo sapien
tgtcactgcaccaaaggcgtcagtagcttttct

SEQ ID NO: 830761 - DNA, 33 bp, Homo sapien
tagaagagaagaacaactggaatacagaatgat

SEQ ID NO: 830762 - DNA, 33 bp, Homo sapien
tagaagagaagaacaattggaatacagaatgat

SEQ ID NO: 830763 - DNA, 33 bp, Homo sapien
gctcagtgaatgacaaatgaatttacaagtaac

SEQ ID NO: 830764 - DNA, 33 bp, Homo sapien
gctcagtgaatgacaagtgaatttacaagtaac

SEQ ID NO: 830765 - DNA, 33 bp, Homo sapien
tcttcacggtgcatcactctttgcaatgacttt

SEQ ID NO: 830766 - DNA, 33 bp, Homo sapien
tcttcacggtgcatcattctttgcaatgacttt

SEQ ID NO: 830767 - DNA, 33 bp, Homo sapien
agtgaaggaacttgagaaattagacaggacgca

SEQ ID NO: 830768 - DNA, 33 bp, Homo sapien
agtgaaggaacttgaggaattagacaggacgca

SEQ ID NO: 830769 - DNA, 33 bp, Homo sapien
cgcatggcacattgctaaatgctgtaagagtaa

SEQ ID NO: 830770 - DNA, 33 bp, Homo sapien
cgcatggcacattgctgaatgctgtaagagtaa

SEQ ID NO: 830771 - DNA, 33 bp, Homo sapien
acatcaaccaggtaggcaagttccattttccac

SEQ ID NO: 830772 - DNA, 33 bp, Homo sapien
acatcaaccaggtaggtaagttccattttccac

SEQ ID NO: 830773 - DNA, 33 bp, Homo sapien
tatactggcaatctagaagaagtgatacaaatt

SEQ ID NO: 830774 - DNA, 33 bp, Homo sapien
tatactggcaatctagcagaagtgatacaaatt

SEQ ID NO: 830775 - DNA, 33 bp, Homo sapien
atttgtttccttaaaagtagctgcccaaatata

SEQ ID NO: 830776 - DNA, 33 bp, Homo sapien
atttgtttccttaaaattagctgcccaaatata

SEQ ID NO: 830777 - DNA, 33 bp, Homo sapien
tgtggtagacatgaaccgtggaatactcaactg

SEQ ID NO: 830778 - DNA, 33 bp, Homo sapien
tgtggtagacatgaactgtggaatactcaactg

SEQ ID NO: 830779 - DNA, 33 bp, Homo sapien
aagaaaactagagaacagaacagttagatggaa

SEQ ID NO: 830780 - DNA, 33 bp, Homo sapien
aagaaaactagagaacggaacagttagatggaa

SEQ ID NO: 830781 - DNA, 33 bp, Homo sapien
agtagtgatggctacacaaattaaagcatagaa

SEQ ID NO: 830782 - DNA, 33 bp, Homo sapien
agtagtgatggctacataaattaaagcatagaa

SEQ ID NO: 830783 - DNA, 33 bp, Homo sapien
atttctgtgcattaacagcccaagaacccagag

SEQ ID NO: 830784 - DNA, 33 bp, Homo sapien
atttctgtgcattaacggcccaagaacccagag

SEQ ID NO: 830785 - DNA, 33 bp, Homo sapien
caagacttttatgaatcacttgaattttttatt

SEQ ID NO: 830786 - DNA, 33 bp, Homo sapien
caagacttttatgaatgacttgaattttttatt

SEQ ID NO: 830787 - DNA, 33 bp, Homo sapien
tggagcatgtgggacaatcactaaattgagacc

SEQ ID NO: 830788 - DNA, 33 bp, Homo sapien
tggagcatgtgggacagtcactaaattgagacc

SEQ ID NO: 830789 - DNA, 33 bp, Homo sapien
ggagactgacgtggaaaaaaaggttgatagggt

SEQ ID NO: 830790 - DNA, 33 bp, Homo sapien
ggagactgacgtggaataaaaggttgatagggt

SEQ ID NO: 830791 - DNA, 33 bp, Homo sapien
gaagaacatagtacaaaataagctggaggaagt

SEQ ID NO: 830792 - DNA, 33 bp, Homo sapien
gaagaacatagtacaagataagctggaggaagt

SEQ ID NO: 830793 - DNA, 33 bp, Homo sapien
gagacagacatccagccagaaaatgtcagtaaa

SEQ ID NO: 830794 - DNA, 33 bp, Homo sapien
gagacagacatccagcgagaaaatgtcagtaaa

SEQ ID NO: 830795 - DNA, 33 bp, Homo sapien
gccaatgtgtggaaacccatctctactgaaaat

SEQ ID NO: 830796 - DNA, 33 bp, Homo sapien
gccaatgtgtggaaacgcatctctactgaaaat

SEQ ID NO: 830797 - DNA, 33 bp, Homo sapien
tcattgctggctatgacaatagaggaagggccg

SEQ ID NO: 830798 - DNA, 33 bp, Homo sapien
tcattgctggctatgataatagaggaagggccg

SEQ ID NO: 830799 - DNA, 33 bp, Homo sapien
tctctagacgctagaaaggcaaggaaatgaatt

SEQ ID NO: 830800 - DNA, 33 bp, Homo sapien
tctctagacgctagaatggcaaggaaatgaatt

SEQ ID NO: 830801 - DNA, 33 bp, Homo sapien
ttcctgactcaaatgccaaaggcaactgtgaca

SEQ ID NO: 830802 - DNA, 33 bp, Homo sapien
ttcctgactcaaatgctaaaggcaactgtgaca

SEQ ID NO: 830803 - DNA, 33 bp, Homo sapien
taatgctctcctttgaaaatctatcacccccta

SEQ ID NO: 830804 - DNA, 33 bp, Homo sapien
taatgctctcctttgagaatctatcacccccta

SEQ ID NO: 830805 - DNA, 33 bp, Homo sapien
tctaatagaaaaacaaagttaaagcatctcaaa

SEQ ID NO: 830806 - DNA, 33 bp, Homo sapien
tctaatagaaaaacaatgttaaagcatctcaaa

SEQ ID NO: 830807 - DNA, 33 bp, Homo sapien
gaagtttaatttaattaaaaaatgcaatacatg

SEQ ID NO: 830808 - DNA, 33 bp, Homo sapien
gaagtttaatttaatttaaaaatgcaatacatg

SEQ ID NO: 830809 - DNA, 33 bp, Homo sapien
gtatttttctcttctagaatgtctagttggttc

SEQ ID NO: 830810 - DNA, 33 bp, Homo sapien
gtatttttctcttctataatgtctagttggttc

SEQ ID NO: 830811 - DNA, 33 bp, Homo sapien
gtttgaagaagtagaacgaaatcaataattctg

SEQ ID NO: 830812 - DNA, 33 bp, Homo sapien
gtttgaagaagtagaatgaaatcaataattctg

SEQ ID NO: 830813 - DNA, 33 bp, Homo sapien
agattcagcaaagggcccaatgaagaaaacagc

SEQ ID NO: 830814 - DNA, 33 bp, Homo sapien
agattcagcaaagggctcaatgaagaaaacagc

SEQ ID NO: 830815 - DNA, 33 bp, Homo sapien
ctaaactgtttcaagacagaaaagtaactcctg

SEQ ID NO: 830816 - DNA, 33 bp, Homo sapien
ctaaactgtttcaagagagaaaagtaactcctg

SEQ ID NO: 830817 - DNA, 33 bp, Homo sapien
caactaaaaaattacacgatttgtgcaggcccc

SEQ ID NO: 830818 - DNA, 33 bp, Homo sapien
caactaaaaaattacatgatttgtgcaggcccc

SEQ ID NO: 830819 - DNA, 33 bp, Homo sapien
tgtgctctctgcaaagacagcaagtcaatattt

SEQ ID NO: 830820 - DNA, 33 bp, Homo sapien
tgtgctctctgcaaagtcagcaagtcaatattt

SEQ ID NO: 830821 - DNA, 33 bp, Homo sapien
ctgggattacaggggccgataattgttcttgaa

SEQ ID NO: 830822 - DNA, 33 bp, Homo sapien
ctgggattacaggggcggataattgttcttgaa

SEQ ID NO: 830823 - DNA, 33 bp, Homo sapien
cttagtggcactgaacaaacatatttcagtgtc

SEQ ID NO: 830824 - DNA, 33 bp, Homo sapien
cttagtggcactgaaccaacatatttcagtgtc

SEQ ID NO: 830825 - DNA, 33 bp, Homo sapien
tcaagtaatatacttcaatttgtcttgactttt

SEQ ID NO: 830826 - DNA, 33 bp, Homo sapien
tcaagtaatatacttcgatttgtcttgactttt

SEQ ID NO: 830827 - DNA, 33 bp, Homo sapien
agcaggtttttgtgacaagcaaacataaacaag

SEQ ID NO: 830828 - DNA, 33 bp, Homo sapien
agcaggtttttgtgacgagcaaacataaacaag

SEQ ID NO: 830829 - DNA, 33 bp, Homo sapien
aaaaaagtttgcagaaaatagtgtccctaaaat

SEQ ID NO: 830830 - DNA, 33 bp, Homo sapien
aaaaaagtttgcagaagatagtgtccctaaaat

SEQ ID NO: 830831 - DNA, 33 bp, Homo sapien
actatataaacagggacgaatttgaggaagttg

SEQ ID NO: 830832 - DNA, 33 bp, Homo sapien
actatataaacagggatgaatttgaggaagttg

SEQ ID NO: 830833 - DNA, 33 bp, Homo sapien
ataagatcatggattcagaagcacgcaaaggtt

SEQ ID NO: 830834 - DNA, 33 bp, Homo sapien
ataagatcatggattcggaagcacgcaaaggtt

SEQ ID NO: 830835 - DNA, 33 bp, Homo sapien
tacctcaaaatgaatacgtctgaaatcaaactc

SEQ ID NO: 830836 - DNA, 33 bp, Homo sapien
tacctcaaaatgaatatgtctgaaatcaaactc

SEQ ID NO: 830837 - DNA, 33 bp, Homo sapien
gtccttccaaaatcatcacagcacaataccccc

SEQ ID NO: 830838 - DNA, 33 bp, Homo sapien
gtccttccaaaatcatgacagcacaataccccc

SEQ ID NO: 830839 - DNA, 33 bp, Homo sapien
attcatccactcatagaacatctgaaaccactg

SEQ ID NO: 830840 - DNA, 33 bp, Homo sapien
attcatccactcatagcacatctgaaaccactg

SEQ ID NO: 830841 - DNA, 33 bp, Homo sapien
aaggtatgctctcctcaagtgaaatcagaaatg

SEQ ID NO: 830842 - DNA, 33 bp, Homo sapien
aaggtatgctctcctccagtgaaatcagaaatg

SEQ ID NO: 830843 - DNA, 33 bp, Homo sapien
ccatgggctaagaaggaacaggccagagatgat

SEQ ID NO: 830844 - DNA, 33 bp, Homo sapien
ccatgggctaagaaggtacaggccagagatgat

SEQ ID NO: 830845 - DNA, 33 bp, Homo sapien
atgacctgtgccatagacacttttcagacggat

SEQ ID NO: 830846 - DNA, 33 bp, Homo sapien
atgacctgtgccatagtcacttttcagacggat

SEQ ID NO: 830847 - DNA, 33 bp, Homo sapien
actcccaagaggatcaatctcttcccaatacat

SEQ ID NO: 830848 - DNA, 33 bp, Homo sapien
actcccaagaggatcagtctcttcccaatacat

SEQ ID NO: 830849 - DNA, 33 bp, Homo sapien
aacaattcttagagccacagaccatattagaga

SEQ ID NO: 830850 - DNA, 33 bp, Homo sapien
aacaattcttagagccgcagaccatattagaga

SEQ ID NO: 830851 - DNA, 33 bp, Homo sapien
tgtgggaggcaacgatgacaacaaaagggtaaa

SEQ ID NO: 830852 - DNA, 33 bp, Homo sapien
tgtgggaggcaacgattacaacaaaagggtaaa

SEQ ID NO: 830853 - DNA, 33 bp, Homo sapien
ggaagcagctttcaacaaaatcaccacttccac

SEQ ID NO: 830854 - DNA, 33 bp, Homo sapien
ggaagcagctttcaacgaaatcaccacttccac

SEQ ID NO: 830855 - DNA, 33 bp, Homo sapien
ggggtccagtcacgtacctttctagagatctaa

SEQ ID NO: 830856 - DNA, 33 bp, Homo sapien
ggggtccagtcacgtagctttctagagatctaa

SEQ ID NO: 830857 - DNA, 33 bp, Homo sapien
atgaacctttaacagcacccttctgtggcagtc

SEQ ID NO: 830858 - DNA, 33 bp, Homo sapien
atgaacctttaacagcccccttctgtggcagtc

SEQ ID NO: 830859 - DNA, 33 bp, Homo sapien
gtgaggacttactgtacactctcatgacttcac

SEQ ID NO: 830860 - DNA, 33 bp, Homo sapien
gtgaggacttactgtatactctcatgacttcac

SEQ ID NO: 830861 - DNA, 33 bp, Homo sapien
tctttggatcattatacaaacatggaagagatt

SEQ ID NO: 830862 - DNA, 33 bp, Homo sapien
tctttggatcattatagaaacatggaagagatt

SEQ ID NO: 830863 - DNA, 33 bp, Homo sapien
ttcactagtttcatggcataggtttttattgta

SEQ ID NO: 830864 - DNA, 33 bp, Homo sapien
ttcactagtttcatggtataggtttttattgta

SEQ ID NO: 830865 - DNA, 33 bp, Homo sapien
ttacgaagaggggtcacctatcaggaatcagag

SEQ ID NO: 830866 - DNA, 33 bp, Homo sapien
ttacgaagaggggtcatctatcaggaatcagag

SEQ ID NO: 830867 - DNA, 33 bp, Homo sapien
aaatttgacccccaaaacttctgcttatagacc

SEQ ID NO: 830868 - DNA, 33 bp, Homo sapien
aaatttgacccccaaagcttctgcttatagacc

SEQ ID NO: 830869 - DNA, 33 bp, Homo sapien
tcccttgactattgcaacagagaaactgaaatg

SEQ ID NO: 830870 - DNA, 33 bp, Homo sapien
tcccttgactattgcagcagagaaactgaaatg

SEQ ID NO: 830871 - DNA, 33 bp, Homo sapien
ctcaacgtgaataaggcaaggtctaatcacaac

SEQ ID NO: 830872 - DNA, 33 bp, Homo sapien
ctcaacgtgaataagggaaggtctaatcacaac

SEQ ID NO: 830873 - DNA, 33 bp, Homo sapien
atatacatacatgaggacatttatcacattaaa

SEQ ID NO: 830874 - DNA, 33 bp, Homo sapien
atatacatacatgaggccatttatcacattaaa

SEQ ID NO: 830875 - DNA, 33 bp, Homo sapien
tacataaggcaaagcacaaatcctaccaccacc

SEQ ID NO: 830876 - DNA, 33 bp, Homo sapien
tacataaggcaaagcataaatcctaccaccacc

SEQ ID NO: 830877 - DNA, 33 bp, Homo sapien
ccatcatcttctgcaaaatctcgataccatcta

SEQ ID NO: 830878 - DNA, 33 bp, Homo sapien
ccatcatcttctgcaagatctcgataccatcta

SEQ ID NO: 830879 - DNA, 33 bp, Homo sapien
cacgtttcatgtattccccgagaaaattaagct

SEQ ID NO: 830880 - DNA, 33 bp, Homo sapien
cacgtttcatgtattctccgagaaaattaagct

SEQ ID NO: 830881 - DNA, 33 bp, Homo sapien
aactaaagacagaaaggaattgaggctaaggac

SEQ ID NO: 830882 - DNA, 33 bp, Homo sapien
aactaaagacagaaagtaattgaggctaaggac

SEQ ID NO: 830883 - DNA, 33 bp, Homo sapien
aggtctgagaaatgcgcactgattaatagagtt

SEQ ID NO: 830884 - DNA, 33 bp, Homo sapien
aggtctgagaaatgcggactgattaatagagtt

SEQ ID NO: 830885 - DNA, 33 bp, Homo sapien
taagctatatatttacactgtgaaattgactgt

SEQ ID NO: 830886 - DNA, 33 bp, Homo sapien
taagctatatatttacgctgtgaaattgactgt

SEQ ID NO: 830887 - DNA, 33 bp, Homo sapien
ggattttcttccttgacgcgtattcaacgctaa

SEQ ID NO: 830888 - DNA, 33 bp, Homo sapien
ggattttcttccttgatgcgtattcaacgctaa

SEQ ID NO: 830889 - DNA, 33 bp, Homo sapien
tgtgtctgactctaaaactcatgttcttgccat

SEQ ID NO: 830890 - DNA, 33 bp, Homo sapien
tgtgtctgactctaaagctcatgttcttgccat

SEQ ID NO: 830891 - DNA, 33 bp, Homo sapien
gcctcatggtggatcccgcttacaggtgcatat

SEQ ID NO: 830892 - DNA, 33 bp, Homo sapien
gcctcatggtggatcctgcttacaggtgcatat

SEQ ID NO: 830893 - DNA, 33 bp, Homo sapien
ccaaatcaactctaaacatgggagaagcaggga

SEQ ID NO: 830894 - DNA, 33 bp, Homo sapien
ccaaatcaactctaaagatgggagaagcaggga

SEQ ID NO: 830895 - DNA, 33 bp, Homo sapien
gtccagggagcagagacctaagggggaattaat

SEQ ID NO: 830896 - DNA, 33 bp, Homo sapien
gtccagggagcagagatctaagggggaattaat

SEQ ID NO: 830897 - DNA, 33 bp, Homo sapien
gagccataaaactctacgtggggtagtgggaag

SEQ ID NO: 830898 - DNA, 33 bp, Homo sapien
gagccataaaactctatgtggggtagtgggaag

SEQ ID NO: 830899 - DNA, 33 bp, Homo sapien
cactgcagccttaacacgcaaaccacattttca

SEQ ID NO: 830900 - DNA, 33 bp, Homo sapien
cactgcagccttaacatgcaaaccacattttca

SEQ ID NO: 830901 - DNA, 33 bp, Homo sapien
catattgtggtggttaaggacacaggctttggc

SEQ ID NO: 830902 - DNA, 33 bp, Homo sapien
catattgtggtggttagggacacaggctttggc

SEQ ID NO: 830903 - DNA, 33 bp, Homo sapien
cctgaaactggaaacaccttgtgcaaacagaaa

SEQ ID NO: 830904 - DNA, 33 bp, Homo sapien
cctgaaactggaaacatcttgtgcaaacagaaa

SEQ ID NO: 830905 - DNA, 33 bp, Homo sapien
tgggagagtgtgataaaagcgggtgaggaaagt

SEQ ID NO: 830906 - DNA, 33 bp, Homo sapien
tgggagagtgtgataagagcgggtgaggaaagt

SEQ ID NO: 830907 - DNA, 33 bp, Homo sapien
ctcagcttagccgttcaagcccggggttgtgtc

SEQ ID NO: 830908 - DNA, 33 bp, Homo sapien
ctcagcttagccgttcgagcccggggttgtgtc

SEQ ID NO: 830909 - DNA, 33 bp, Homo sapien
agtggaaatcaagcccaagttgagagagaaaaa

SEQ ID NO: 830910 - DNA, 33 bp, Homo sapien
agtggaaatcaagccccagttgagagagaaaaa

SEQ ID NO: 830911 - DNA, 33 bp, Homo sapien
ttcgaattctgcaccaagtaatgaaggacatct

SEQ ID NO: 830912 - DNA, 33 bp, Homo sapien
ttcgaattctgcaccatgtaatgaaggacatct

SEQ ID NO: 830913 - DNA, 33 bp, Homo sapien
tggtgaggagcataataatctagaaaacgtctg

SEQ ID NO: 830914 - DNA, 33 bp, Homo sapien
tggtgaggagcataattatctagaaaacgtctg

SEQ ID NO: 830915 - DNA, 33 bp, Homo sapien
ctccagttaaacaacacgaagtatactgatgag

SEQ ID NO: 830916 - DNA, 33 bp, Homo sapien
ctccagttaaacaacatgaagtatactgatgag

SEQ ID NO: 830917 - DNA, 33 bp, Homo sapien
gctgacttgctgcaaacgacgccatgaatctcc

SEQ ID NO: 830918 - DNA, 33 bp, Homo sapien
gctgacttgctgcaaatgacgccatgaatctcc

SEQ ID NO: 830919 - DNA, 33 bp, Homo sapien
tatccacattgtctcaaggaacattttagggtt

SEQ ID NO: 830920 - DNA, 33 bp, Homo sapien
tatccacattgtctcacggaacattttagggtt

SEQ ID NO: 830921 - DNA, 33 bp, Homo sapien
tcaaaatgaaaagtaacgcaaggtatgtcaaaa

SEQ ID NO: 830922 - DNA, 33 bp, Homo sapien
tcaaaatgaaaagtaatgcaaggtatgtcaaaa

SEQ ID NO: 830923 - DNA, 33 bp, Homo sapien
aatgtgtacatcttcaacttcttgccccttttg

SEQ ID NO: 830924 - DNA, 33 bp, Homo sapien
aatgtgtacatcttcagcttcttgccccttttg

SEQ ID NO: 830925 - DNA, 33 bp, Homo sapien
ttactaatatgcctaacgggtatttcagaacac

SEQ ID NO: 830926 - DNA, 33 bp, Homo sapien
ttactaatatgcctaatgggtatttcagaacac

SEQ ID NO: 830927 - DNA, 33 bp, Homo sapien
attgccaagaagcaaaaccttaggaatgggttc

SEQ ID NO: 830928 - DNA, 33 bp, Homo sapien
attgccaagaagcaaagccttaggaatgggttc

SEQ ID NO: 830929 - DNA, 33 bp, Homo sapien
atgacaaacacaccaactctttgtccatgcaaa

SEQ ID NO: 830930 - DNA, 33 bp, Homo sapien
atgacaaacacaccaattctttgtccatgcaaa

SEQ ID NO: 830931 - DNA, 33 bp, Homo sapien
ctcctgcagccctcagcagccaaaatgtatatg

SEQ ID NO: 830932 - DNA, 33 bp, Homo sapien
ctcctgcagccctcagtagccaaaatgtatatg

SEQ ID NO: 830933 - DNA, 33 bp, Homo sapien
ctgaaattgaagtgacactcatctttgttgaag

SEQ ID NO: 830934 - DNA, 33 bp, Homo sapien
ctgaaattgaagtgaccctcatctttgttgaag

SEQ ID NO: 830935 - DNA, 33 bp, Homo sapien
aaatctgtcaggaacaagagaaatcgatgtagt

SEQ ID NO: 830936 - DNA, 33 bp, Homo sapien
aaatctgtcaggaacacgagaaatcgatgtagt

SEQ ID NO: 830937 - DNA, 33 bp, Homo sapien
taaagcactccaactcccatattcaaagtagat

SEQ ID NO: 830938 - DNA, 33 bp, Homo sapien
taaagcactccaactctcatattcaaagtagat

SEQ ID NO: 830939 - DNA, 33 bp, Homo sapien
agcattatcatttcctcacatattcattcgata

SEQ ID NO: 830940 - DNA, 33 bp, Homo sapien
agcattatcatttcctgacatattcattcgata

SEQ ID NO: 830941 - DNA, 33 bp, Homo sapien
aatgtgataattccaacagtgttatccaaatgt

SEQ ID NO: 830942 - DNA, 33 bp, Homo sapien
aatgtgataattccaatagtgttatccaaatgt

SEQ ID NO: 830943 - DNA, 33 bp, Homo sapien
ttgacctgatgcctacaatttacattatgctga

SEQ ID NO: 830944 - DNA, 33 bp, Homo sapien
ttgacctgatgcctactatttacattatgctga

SEQ ID NO: 830945 - DNA, 33 bp, Homo sapien
cctggctgcttctatcgcactttctctttgaaa

SEQ ID NO: 830946 - DNA, 33 bp, Homo sapien
cctggctgcttctatctcactttctctttgaaa

SEQ ID NO: 830947 - DNA, 33 bp, Homo sapien
taaggtagcatcaacaatatatgataagggttt

SEQ ID NO: 830948 - DNA, 33 bp, Homo sapien
taaggtagcatcaacactatatgataagggttt

SEQ ID NO: 830949 - DNA, 33 bp, Homo sapien
atttggaaggagactaagtttgaagaatttagt

SEQ ID NO: 830950 - DNA, 33 bp, Homo sapien
atttggaaggagactacgtttgaagaatttagt

SEQ ID NO: 830951 - DNA, 33 bp, Homo sapien
taaggtgagctctgaaatagagtattacacaga

SEQ ID NO: 830952 - DNA, 33 bp, Homo sapien
taaggtgagctctgaagtagagtattacacaga

SEQ ID NO: 830953 - DNA, 33 bp, Homo sapien
gagcaatctgtcacctgaaaaagtagaaatggt

SEQ ID NO: 830954 - DNA, 33 bp, Homo sapien
gagcaatctgtcaccttaaaaagtagaaatggt

SEQ ID NO: 830955 - DNA, 33 bp, Homo sapien
tcagcttagacttttacgccggagaatagaaaa

SEQ ID NO: 830956 - DNA, 33 bp, Homo sapien
tcagcttagacttttatgccggagaatagaaaa

SEQ ID NO: 830957 - DNA, 33 bp, Homo sapien
tgcagcaatttctttgaaggtcagtatgtgtgt

SEQ ID NO: 830958 - DNA, 33 bp, Homo sapien
tgcagcaatttctttggaggtcagtatgtgtgt

SEQ ID NO: 830959 - DNA, 33 bp, Homo sapien
atattcacccagtccaacttatagagtagcttc

SEQ ID NO: 830960 - DNA, 33 bp, Homo sapien
atattcacccagtccaccttatagagtagcttc

SEQ ID NO: 830961 - DNA, 33 bp, Homo sapien
tgccaccaagtagcccaaggtgaaattgagctc

SEQ ID NO: 830962 - DNA, 33 bp, Homo sapien
tgccaccaagtagcccgaggtgaaattgagctc

SEQ ID NO: 830963 - DNA, 33 bp, Homo sapien
gacccaggtagagtcaaatctattggttactaa

SEQ ID NO: 830964 - DNA, 33 bp, Homo sapien
gacccaggtagagtcagatctattggttactaa

SEQ ID NO: 830965 - DNA, 33 bp, Homo sapien
aaaacccatgtagcaaattgatgctggactttc

SEQ ID NO: 830966 - DNA, 33 bp, Homo sapien
aaaacccatgtagcaagttgatgctggactttc

SEQ ID NO: 830967 - DNA, 33 bp, Homo sapien
tattccacttaaattgcatggcaagctttagtg

SEQ ID NO: 830968 - DNA, 33 bp, Homo sapien
tattccacttaaattgtatggcaagctttagtg

SEQ ID NO: 830969 - DNA, 33 bp, Homo sapien
taaacaaaagaacaaacccaagcagtggtacat

SEQ ID NO: 830970 - DNA, 33 bp, Homo sapien
taaacaaaagaacaaatccaagcagtggtacat

SEQ ID NO: 830971 - DNA, 33 bp, Homo sapien
ttccccttgagaacaccctgcacaatcatatgc

SEQ ID NO: 830972 - DNA, 33 bp, Homo sapien
ttccccttgagaacactctgcacaatcatatgc

SEQ ID NO: 830973 - DNA, 33 bp, Homo sapien
ctactccaggaatgaacgttaggatcaaaagag

SEQ ID NO: 830974 - DNA, 33 bp, Homo sapien
ctactccaggaatgaatgttaggatcaaaagag

SEQ ID NO: 830975 - DNA, 33 bp, Homo sapien
ttctaacttatttgaactgagaccagaaaatac

SEQ ID NO: 830976 - DNA, 33 bp, Homo sapien
ttctaacttatttgaattgagaccagaaaatac

SEQ ID NO: 830977 - DNA, 33 bp, Homo sapien
cctcctctttgacccacgagttagaatttttaa

SEQ ID NO: 830978 - DNA, 33 bp, Homo sapien
cctcctctttgacccatgagttagaatttttaa

SEQ ID NO: 830979 - DNA, 33 bp, Homo sapien
agagcctggatcatacagggaactgcaaccatg

SEQ ID NO: 830980 - DNA, 33 bp, Homo sapien
agagcctggatcatacggggaactgcaaccatg

SEQ ID NO: 830981 - DNA, 33 bp, Homo sapien
ctatcattttgctaccagatactatgcttcctt

SEQ ID NO: 830982 - DNA, 33 bp, Homo sapien
ctatcattttgctaccggatactatgcttcctt

SEQ ID NO: 830983 - DNA, 33 bp, Homo sapien
tttaaaactggtatgacgctcattaaaataatt

SEQ ID NO: 830984 - DNA, 33 bp, Homo sapien
tttaaaactggtatgatgctcattaaaataatt

SEQ ID NO: 830985 - DNA, 33 bp, Homo sapien
actgttggtacttgagaataaggccatttgttt

SEQ ID NO: 830986 - DNA, 33 bp, Homo sapien
actgttggtacttgaggataaggccatttgttt

SEQ ID NO: 830987 - DNA, 33 bp, Homo sapien
tagcttcacattgtacccagaataaggttcatg

SEQ ID NO: 830988 - DNA, 33 bp, Homo sapien
tagcttcacattgtactcagaataaggttcatg

SEQ ID NO: 830989 - DNA, 33 bp, Homo sapien
ggttcatggtccataaagtcctacatggtctgc

SEQ ID NO: 830990 - DNA, 33 bp, Homo sapien
ggttcatggtccataaggtcctacatggtctgc

SEQ ID NO: 830991 - DNA, 33 bp, Homo sapien
aaaagatttcagagcactctttatcatggccat

SEQ ID NO: 830992 - DNA, 33 bp, Homo sapien
aaaagatttcagagcattctttatcatggccat

SEQ ID NO: 830993 - DNA, 33 bp, Homo sapien
tttatatcaaaaagcaatgattagctctaaatt

SEQ ID NO: 830994 - DNA, 33 bp, Homo sapien
tttatatcaaaaagcagtgattagctctaaatt

SEQ ID NO: 830995 - DNA, 33 bp, Homo sapien
tttatcaagaaagtcactattatgaaaaagaaa

SEQ ID NO: 830996 - DNA, 33 bp, Homo sapien
tttatcaagaaagtcagtattatgaaaaagaaa

SEQ ID NO: 830997 - DNA, 33 bp, Homo sapien
taatattttctttttgaacaagtctatagaacc

SEQ ID NO: 830998 - DNA, 33 bp, Homo sapien
taatattttctttttgcacaagtctatagaacc

SEQ ID NO: 830999 - DNA, 33 bp, Homo sapien
aatagccagttggtcacatcaatactccaataa

SEQ ID NO: 831000 - DNA, 33 bp, Homo sapien
aatagccagttggtcatatcaatactccaataa

SEQ ID NO: 831001 - DNA, 33 bp, Homo sapien
agataggtgaactaacagagggaaataaaaaca

SEQ ID NO: 831002 - DNA, 33 bp, Homo sapien
agataggtgaactaacggagggaaataaaaaca

SEQ ID NO: 831003 - DNA, 33 bp, Homo sapien
cacaaaaattagtcaaacagggataaaaataga

SEQ ID NO: 831004 - DNA, 33 bp, Homo sapien
cacaaaaattagtcaagcagggataaaaataga

SEQ ID NO: 831005 - DNA, 33 bp, Homo sapien
ggtagaatgagcaaaaaggtagaatcctgtgtg

SEQ ID NO: 831006 - DNA, 33 bp, Homo sapien
ggtagaatgagcaaaagggtagaatcctgtgtg

SEQ ID NO: 831007 - DNA, 33 bp, Homo sapien
gacaaatgaagagattaaaaacgaaaaagatga

SEQ ID NO: 831008 - DNA, 33 bp, Homo sapien
gacaaatgaagagattgaaaacgaaaaagatga

SEQ ID NO: 831009 - DNA, 33 bp, Homo sapien
ttttgtgtggctactacattgatttgacaggta

SEQ ID NO: 831010 - DNA, 33 bp, Homo sapien
ttttgtgtggctactatattgatttgacaggta

SEQ ID NO: 831011 - DNA, 33 bp, Homo sapien
tcatttccccaggtgaacttattcccttctaag

SEQ ID NO: 831012 - DNA, 33 bp, Homo sapien
tcatttccccaggtgaccttattcccttctaag

SEQ ID NO: 831013 - DNA, 33 bp, Homo sapien
tcacctcaactcaggacggctgtgaaaggtcaa

SEQ ID NO: 831014 - DNA, 33 bp, Homo sapien
tcacctcaactcaggatggctgtgaaaggtcaa

SEQ ID NO: 831015 - DNA, 33 bp, Homo sapien
gactcaggccaggaaacgccaagagtctgaata

SEQ ID NO: 831016 - DNA, 33 bp, Homo sapien
gactcaggccaggaaatgccaagagtctgaata

SEQ ID NO: 831017 - DNA, 33 bp, Homo sapien
cttaaacaaacaatgaagtggccagtttctgta

SEQ ID NO: 831018 - DNA, 33 bp, Homo sapien
cttaaacaaacaatgaggtggccagtttctgta

SEQ ID NO: 831019 - DNA, 33 bp, Homo sapien
tttgatttgtcattgaaaagagattatcatggg

SEQ ID NO: 831020 - DNA, 33 bp, Homo sapien
tttgatttgtcattgagaagagattatcatggg

SEQ ID NO: 831021 - DNA, 33 bp, Homo sapien
cacctaacaccaaaaacccaggagtcagaaaga

SEQ ID NO: 831022 - DNA, 33 bp, Homo sapien
cacctaacaccaaaaatccaggagtcagaaaga

SEQ ID NO: 831023 - DNA, 33 bp, Homo sapien
cctacccaaactttcaagggagagtccaactta

SEQ ID NO: 831024 - DNA, 33 bp, Homo sapien
cctacccaaactttcatgggagagtccaactta

SEQ ID NO: 831025 - DNA, 33 bp, Homo sapien
ataccatgccctaaagacactcacctttctcta

SEQ ID NO: 831026 - DNA, 33 bp, Homo sapien
ataccatgccctaaagccactcacctttctcta

SEQ ID NO: 831027 - DNA, 33 bp, Homo sapien
gatactcctctgatagcaaaccacaaaccattt

SEQ ID NO: 831028 - DNA, 33 bp, Homo sapien
gatactcctctgataggaaaccacaaaccattt

SEQ ID NO: 831029 - DNA, 33 bp, Homo sapien
tgattctctaaacttccaggattggtgtggata

SEQ ID NO: 831030 - DNA, 33 bp, Homo sapien
tgattctctaaacttctaggattggtgtggata

SEQ ID NO: 831031 - DNA, 33 bp, Homo sapien
agatgctgtgagctgacaggatttaagctattg

SEQ ID NO: 831032 - DNA, 33 bp, Homo sapien
agatgctgtgagctgataggatttaagctattg

SEQ ID NO: 831033 - DNA, 33 bp, Homo sapien
atctgtatgtgaaaataagtcaatctgaaacta

SEQ ID NO: 831034 - DNA, 33 bp, Homo sapien
atctgtatgtgaaaatgagtcaatctgaaacta

SEQ ID NO: 831035 - DNA, 33 bp, Homo sapien
ctgagcacatatttacacaggatttccaacacc

SEQ ID NO: 831036 - DNA, 33 bp, Homo sapien
ctgagcacatatttactcaggatttccaacacc

SEQ ID NO: 831037 - DNA, 33 bp, Homo sapien
ggaacagggtgagaaacggtcagatttagaatg

SEQ ID NO: 831038 - DNA, 33 bp, Homo sapien
ggaacagggtgagaaatggtcagatttagaatg

SEQ ID NO: 831039 - DNA, 33 bp, Homo sapien
aaatgtaagaacaaagccaccgagatagaaatt

SEQ ID NO: 831040 - DNA, 33 bp, Homo sapien
aaatgtaagaacaaaggcaccgagatagaaatt

SEQ ID NO: 831041 - DNA, 33 bp, Homo sapien
caagtacttgggggcacatcacaaaacaaaaca

SEQ ID NO: 831042 - DNA, 33 bp, Homo sapien
caagtacttgggggcatatcacaaaacaaaaca

SEQ ID NO: 831043 - DNA, 33 bp, Homo sapien
agtggttgccttgctcactaggtccttggcctt

SEQ ID NO: 831044 - DNA, 33 bp, Homo sapien
agtggttgccttgctcgctaggtccttggcctt

SEQ ID NO: 831045 - DNA, 33 bp, Homo sapien
aaaaaatgttgggaaaagttataaggatgtttc

SEQ ID NO: 831046 - DNA, 33 bp, Homo sapien
aaaaaatgttgggaaaggttataaggatgtttc

SEQ ID NO: 831047 - DNA, 33 bp, Homo sapien
tccacattcattcccacatcccctaatacacat

SEQ ID NO: 831048 - DNA, 33 bp, Homo sapien
tccacattcattcccatatcccctaatacacat

SEQ ID NO: 831049 - DNA, 33 bp, Homo sapien
tattcttgggcaagaacagggacgctagggcct

SEQ ID NO: 831050 - DNA, 33 bp, Homo sapien
tattcttgggcaagaagagggacgctagggcct

SEQ ID NO: 831051 - DNA, 33 bp, Homo sapien
gagctctgaaaattctaaacttgaacagaggtg

SEQ ID NO: 831052 - DNA, 33 bp, Homo sapien
gagctctgaaaattctgaacttgaacagaggtg

SEQ ID NO: 831053 - DNA, 33 bp, Homo sapien
caggttgttcctaagaacttcgtctgtggagaa

SEQ ID NO: 831054 - DNA, 33 bp, Homo sapien
caggttgttcctaagatcttcgtctgtggagaa

SEQ ID NO: 831055 - DNA, 33 bp, Homo sapien
ccttattatgtgtagacatcaagtgtttagcag

SEQ ID NO: 831056 - DNA, 33 bp, Homo sapien
ccttattatgtgtagatatcaagtgtttagcag

SEQ ID NO: 831057 - DNA, 33 bp, Homo sapien
agacaatgatcctaaacctcagttacttagaaa

SEQ ID NO: 831058 - DNA, 33 bp, Homo sapien
agacaatgatcctaaatctcagttacttagaaa

SEQ ID NO: 831059 - DNA, 33 bp, Homo sapien
catcaatggatgactgcaatttaaaaatgtgct

SEQ ID NO: 831060 - DNA, 33 bp, Homo sapien
catcaatggatgactggaatttaaaaatgtgct

SEQ ID NO: 831061 - DNA, 33 bp, Homo sapien
attttagtatttactcaccatgctcttgaggtt

SEQ ID NO: 831062 - DNA, 33 bp, Homo sapien
attttagtatttactctccatgctcttgaggtt

SEQ ID NO: 831063 - DNA, 33 bp, Homo sapien
tatctgaattgtagaaatgctatttaatggtat

SEQ ID NO: 831064 - DNA, 33 bp, Homo sapien
tatctgaattgtagaagtgctatttaatggtat

SEQ ID NO: 831065 - DNA, 33 bp, Homo sapien
ggcaatgttgctgcagaaatgcactgggttgat

SEQ ID NO: 831066 - DNA, 33 bp, Homo sapien
ggcaatgttgctgcaggaatgcactgggttgat

SEQ ID NO: 831067 - DNA, 33 bp, Homo sapien
tcttcctcctatctccccatatgtgataatccc

SEQ ID NO: 831068 - DNA, 33 bp, Homo sapien
tcttcctcctatctccgcatatgtgataatccc

SEQ ID NO: 831069 - DNA, 33 bp, Homo sapien
catgaactaacgagacaaggtgtctgcttcccc

SEQ ID NO: 831070 - DNA, 33 bp, Homo sapien
catgaactaacgagactaggtgtctgcttcccc

SEQ ID NO: 831071 - DNA, 33 bp, Homo sapien
ctttggaagacttttacaccagtaagtaacatg

SEQ ID NO: 831072 - DNA, 33 bp, Homo sapien
ctttggaagacttttataccagtaagtaacatg

SEQ ID NO: 831073 - DNA, 33 bp, Homo sapien
tctgccttattaggtaagatgagactaccaaaa

SEQ ID NO: 831074 - DNA, 33 bp, Homo sapien
tctgccttattaggtaggatgagactaccaaaa

SEQ ID NO: 831075 - DNA, 33 bp, Homo sapien
actggaagattccacaaacgttggaaggctagg

SEQ ID NO: 831076 - DNA, 33 bp, Homo sapien
actggaagattccacagacgttggaaggctagg

SEQ ID NO: 831077 - DNA, 33 bp, Homo sapien
attatgtgaggttcagaagtggacataatacac

SEQ ID NO: 831078 - DNA, 33 bp, Homo sapien
attatgtgaggttcaggagtggacataatacac

SEQ ID NO: 831079 - DNA, 33 bp, Homo sapien
tgcaggactgggctaaagagcagacattcaccc

SEQ ID NO: 831080 - DNA, 33 bp, Homo sapien
tgcaggactgggctaaggagcagacattcaccc

SEQ ID NO: 831081 - DNA, 33 bp, Homo sapien
gcccagttaggagaatgatgagagatggtgtga

SEQ ID NO: 831082 - DNA, 33 bp, Homo sapien
gcccagttaggagaattatgagagatggtgtga

SEQ ID NO: 831083 - DNA, 33 bp, Homo sapien
tcttcacataggcaataatgatacatcttatcc

SEQ ID NO: 831084 - DNA, 33 bp, Homo sapien
tcttcacataggcaatcatgatacatcttatcc

SEQ ID NO: 831085 - DNA, 33 bp, Homo sapien
aactttctctataaacagtgaactctccttttg

SEQ ID NO: 831086 - DNA, 33 bp, Homo sapien
aactttctctataaacggtgaactctccttttg

SEQ ID NO: 831087 - DNA, 33 bp, Homo sapien
aaataaatttggtcaaatcaggcatctctccaa

SEQ ID NO: 831088 - DNA, 33 bp, Homo sapien
aaataaatttggtcaagtcaggcatctctccaa

SEQ ID NO: 831089 - DNA, 33 bp, Homo sapien
atttccctagtctttcccattcctactctgcct

SEQ ID NO: 831090 - DNA, 33 bp, Homo sapien
atttccctagtctttctcattcctactctgcct

SEQ ID NO: 831091 - DNA, 33 bp, Homo sapien
ctgtgcttatggatagaaagaattaatgttgtt

SEQ ID NO: 831092 - DNA, 33 bp, Homo sapien
ctgtgcttatggataggaagaattaatgttgtt

SEQ ID NO: 831093 - DNA, 33 bp, Homo sapien
ctttggatcgtacagacattttaacaacattaa

SEQ ID NO: 831094 - DNA, 33 bp, Homo sapien
ctttggatcgtacagatattttaacaacattaa

SEQ ID NO: 831095 - DNA, 33 bp, Homo sapien
aaacgtaaaactaccaatggaaatagcccagac

SEQ ID NO: 831096 - DNA, 33 bp, Homo sapien
aaacgtaaaactaccagtggaaatagcccagac

SEQ ID NO: 831097 - DNA, 33 bp, Homo sapien
atacaggagctcggaacatctagcatccccagg

SEQ ID NO: 831098 - DNA, 33 bp, Homo sapien
atacaggagctcggaatatctagcatccccagg

SEQ ID NO: 831099 - DNA, 33 bp, Homo sapien
actcttccattaattgcgtctcttttctattta

SEQ ID NO: 831100 - DNA, 33 bp, Homo sapien
actcttccattaattgtgtctcttttctattta

SEQ ID NO: 831101 - DNA, 33 bp, Homo sapien
ttcagctcattgacaaagttaaagatctttcat

SEQ ID NO: 831102 - DNA, 33 bp, Homo sapien
ttcagctcattgacaaggttaaagatctttcat

SEQ ID NO: 831103 - DNA, 33 bp, Homo sapien
catttgaatttcacaaacttcagtgcttccctg

SEQ ID NO: 831104 - DNA, 33 bp, Homo sapien
catttgaatttcacaagcttcagtgcttccctg

SEQ ID NO: 831105 - DNA, 33 bp, Homo sapien
atgttgcttacctttgcaggaagactctttggg

SEQ ID NO: 831106 - DNA, 33 bp, Homo sapien
atgttgcttacctttgtaggaagactctttggg

SEQ ID NO: 831107 - DNA, 33 bp, Homo sapien
aacacagctaacagtccaatttgaagagcaaat

SEQ ID NO: 831108 - DNA, 33 bp, Homo sapien
aacacagctaacagtctaatttgaagagcaaat

SEQ ID NO: 831109 - DNA, 33 bp, Homo sapien
ttacatgacctatcacagacatttgaagtacct

SEQ ID NO: 831110 - DNA, 33 bp, Homo sapien
ttacatgacctatcacggacatttgaagtacct

SEQ ID NO: 831111 - DNA, 33 bp, Homo sapien
atatgcaaaaaggtcacaacctccatgttagtt

SEQ ID NO: 831112 - DNA, 33 bp, Homo sapien
atatgcaaaaaggtcagaacctccatgttagtt

SEQ ID NO: 831113 - DNA, 33 bp, Homo sapien
ggcaaaaggcgaagaaagagcaaagatacatct

SEQ ID NO: 831114 - DNA, 33 bp, Homo sapien
ggcaaaaggcgaagaaggagcaaagatacatct

SEQ ID NO: 831115 - DNA, 33 bp, Homo sapien
attttaccaaatgacaaagctgggtcaacctgc

SEQ ID NO: 831116 - DNA, 33 bp, Homo sapien
attttaccaaatgacatagctgggtcaacctgc

SEQ ID NO: 831117 - DNA, 33 bp, Homo sapien
agcttcacaaacacaactacctgttactaaaat

SEQ ID NO: 831118 - DNA, 33 bp, Homo sapien
agcttcacaaacacaattacctgttactaaaat

SEQ ID NO: 831119 - DNA, 33 bp, Homo sapien
atcaaaaatagcaaaggaaaaaacacaaaaata

SEQ ID NO: 831120 - DNA, 33 bp, Homo sapien
atcaaaaatagcaaagtaaaaaacacaaaaata

SEQ ID NO: 831121 - DNA, 33 bp, Homo sapien
agttaaccacaagaaactgaaagagtttggcct

SEQ ID NO: 831122 - DNA, 33 bp, Homo sapien
agttaaccacaagaaattgaaagagtttggcct

SEQ ID NO: 831123 - DNA, 33 bp, Homo sapien
tttggttggactttcaaaaaggacggcctagaa

SEQ ID NO: 831124 - DNA, 33 bp, Homo sapien
tttggttggactttcataaaggacggcctagaa

SEQ ID NO: 831125 - DNA, 33 bp, Homo sapien
cagccaggctgatgtaaaagagggttacaggcc

SEQ ID NO: 831126 - DNA, 33 bp, Homo sapien
cagccaggctgatgtacaagagggttacaggcc

SEQ ID NO: 831127 - DNA, 33 bp, Homo sapien
acagcccacagagtgaaaccttcaaccaattgg

SEQ ID NO: 831128 - DNA, 33 bp, Homo sapien
acagcccacagagtgataccttcaaccaattgg

SEQ ID NO: 831129 - DNA, 33 bp, Homo sapien
ctcactacaaaaagaaacgtatgtgaggtaatg

SEQ ID NO: 831130 - DNA, 33 bp, Homo sapien
ctcactacaaaaagaagcgtatgtgaggtaatg

SEQ ID NO: 831131 - DNA, 33 bp, Homo sapien
actaacacaaccaatagattattagcaaaaaca

SEQ ID NO: 831132 - DNA, 33 bp, Homo sapien
actaacacaaccaatatattattagcaaaaaca

SEQ ID NO: 831133 - DNA, 33 bp, Homo sapien
aaaggcagcttctgacagcagttgattgtaggt

SEQ ID NO: 831134 - DNA, 33 bp, Homo sapien
aaaggcagcttctgacggcagttgattgtaggt

SEQ ID NO: 831135 - DNA, 33 bp, Homo sapien
tgccagtctttttatccctaagtagtgtgaggc

SEQ ID NO: 831136 - DNA, 33 bp, Homo sapien
tgccagtctttttatctctaagtagtgtgaggc

SEQ ID NO: 831137 - DNA, 33 bp, Homo sapien
ctactgtgtgcttgacaatatccttgataaaat

SEQ ID NO: 831138 - DNA, 33 bp, Homo sapien
ctactgtgtgcttgacgatatccttgataaaat

SEQ ID NO: 831139 - DNA, 33 bp, Homo sapien
ctgactccatgaattagtaacaccaccaacaaa

SEQ ID NO: 831140 - DNA, 33 bp, Homo sapien
ctgactccatgaattattaacaccaccaacaaa

SEQ ID NO: 831141 - DNA, 33 bp, Homo sapien
attagagcaccctcaaataaatttccatttact

SEQ ID NO: 831142 - DNA, 33 bp, Homo sapien
attagagcaccctcaagtaaatttccatttact

SEQ ID NO: 831143 - DNA, 33 bp, Homo sapien
gaagatagaactggaaagcttgtattgtgagaa

SEQ ID NO: 831144 - DNA, 33 bp, Homo sapien
gaagatagaactggaaggcttgtattgtgagaa

SEQ ID NO: 831145 - DNA, 33 bp, Homo sapien
ttgacaactatcactacaacccatctcaattca

SEQ ID NO: 831146 - DNA, 33 bp, Homo sapien
ttgacaactatcactataacccatctcaattca

SEQ ID NO: 831147 - DNA, 33 bp, Homo sapien
ggatggaaggactgacgagaaccaacttacaaa

SEQ ID NO: 831148 - DNA, 33 bp, Homo sapien
ggatggaaggactgactagaaccaacttacaaa

SEQ ID NO: 831149 - DNA, 33 bp, Homo sapien
tccctgggctgtaagtcaatagtcccatctgtt

SEQ ID NO: 831150 - DNA, 33 bp, Homo sapien
tccctgggctgtaagtgaatagtcccatctgtt

SEQ ID NO: 831151 - DNA, 33 bp, Homo sapien
catgtttgctacacacaatgtggacacttgctt

SEQ ID NO: 831152 - DNA, 33 bp, Homo sapien
catgtttgctacacacgatgtggacacttgctt

SEQ ID NO: 831153 - DNA, 33 bp, Homo sapien
gtagaaaatttgaaaagttgcctgaaaccacat

SEQ ID NO: 831154 - DNA, 33 bp, Homo sapien
gtagaaaatttgaaaatttgcctgaaaccacat

SEQ ID NO: 831155 - DNA, 33 bp, Homo sapien
tctccaaatgtgattggagaattgtctattttg

SEQ ID NO: 831156 - DNA, 33 bp, Homo sapien
tctccaaatgtgattgtagaattgtctattttg

SEQ ID NO: 831157 - DNA, 33 bp, Homo sapien
agaccatataaggtaacgtccagatgttgtcat

SEQ ID NO: 831158 - DNA, 33 bp, Homo sapien
agaccatataaggtaatgtccagatgttgtcat

SEQ ID NO: 831159 - DNA, 33 bp, Homo sapien
atgttaatgccagagaagaataatgaggcatgt

SEQ ID NO: 831160 - DNA, 33 bp, Homo sapien
atgttaatgccagagaggaataatgaggcatgt

SEQ ID NO: 831161 - DNA, 33 bp, Homo sapien
cctgatggttttatagaaaggaatttccctgca

SEQ ID NO: 831162 - DNA, 33 bp, Homo sapien
cctgatggttttataggaaggaatttccctgca

SEQ ID NO: 831163 - DNA, 33 bp, Homo sapien
cacaaaaaggataaaccggttcttctggttgtt

SEQ ID NO: 831164 - DNA, 33 bp, Homo sapien
cacaaaaaggataaactggttcttctggttgtt

SEQ ID NO: 831165 - DNA, 33 bp, Homo sapien
gaaattcatactactcaagctcatgaagctgat

SEQ ID NO: 831166 - DNA, 33 bp, Homo sapien
gaaattcatactactctagctcatgaagctgat

SEQ ID NO: 831167 - DNA, 33 bp, Homo sapien
tgtttctgaatacttgaattccttaattgtcac

SEQ ID NO: 831168 - DNA, 33 bp, Homo sapien
tgtttctgaatacttggattccttaattgtcac

SEQ ID NO: 831169 - DNA, 33 bp, Homo sapien
ctacagtaatagttcaaaagtgtacatccaaaa

SEQ ID NO: 831170 - DNA, 33 bp, Homo sapien
ctacagtaatagttcagaagtgtacatccaaaa

SEQ ID NO: 831171 - DNA, 33 bp, Homo sapien
ggatcgtgtttcatcaatcgtgcaggattttca

SEQ ID NO: 831172 - DNA, 33 bp, Homo sapien
ggatcgtgtttcatcagtcgtgcaggattttca

SEQ ID NO: 831173 - DNA, 33 bp, Homo sapien
tagaatcacttggagaatcgatagaactttaac

SEQ ID NO: 831174 - DNA, 33 bp, Homo sapien
tagaatcacttggagagtcgatagaactttaac

SEQ ID NO: 831175 - DNA, 33 bp, Homo sapien
taatcatagcaagctaaaggcctgaatgatagt

SEQ ID NO: 831176 - DNA, 33 bp, Homo sapien
taatcatagcaagctagaggcctgaatgatagt

SEQ ID NO: 831177 - DNA, 33 bp, Homo sapien
gccacccacttattccaacgaaagtagctgtga

SEQ ID NO: 831178 - DNA, 33 bp, Homo sapien
gccacccacttattcccacgaaagtagctgtga

SEQ ID NO: 831179 - DNA, 33 bp, Homo sapien
tggtcacacgccccaaaagtttattaagctcct

SEQ ID NO: 831180 - DNA, 33 bp, Homo sapien
tggtcacacgccccaagagtttattaagctcct

SEQ ID NO: 831181 - DNA, 33 bp, Homo sapien
gggaaaatcgccacaaaaaaatgtaatgaaact

SEQ ID NO: 831182 - DNA, 33 bp, Homo sapien
gggaaaatcgccacaagaaaatgtaatgaaact

SEQ ID NO: 831183 - DNA, 33 bp, Homo sapien
tcgttgccacaggaataagaaattaacagcaga

SEQ ID NO: 831184 - DNA, 33 bp, Homo sapien
tcgttgccacaggaatgagaaattaacagcaga

SEQ ID NO: 831185 - DNA, 33 bp, Homo sapien
ataattttggaacacacattcacagttttcact

SEQ ID NO: 831186 - DNA, 33 bp, Homo sapien
ataattttggaacacatattcacagttttcact

SEQ ID NO: 831187 - DNA, 33 bp, Homo sapien
ggaagagcagagcccacgattcattcttcattc

SEQ ID NO: 831188 - DNA, 33 bp, Homo sapien
ggaagagcagagcccaggattcattcttcattc

SEQ ID NO: 831189 - DNA, 33 bp, Homo sapien
aatctccttcagtctacgtgatgagccatcaga

SEQ ID NO: 831190 - DNA, 33 bp, Homo sapien
aatctccttcagtctatgtgatgagccatcaga

SEQ ID NO: 831191 - DNA, 33 bp, Homo sapien
ttgaaatctctctggaataaatggtctcagttt

SEQ ID NO: 831192 - DNA, 33 bp, Homo sapien
ttgaaatctctctggattaaatggtctcagttt

SEQ ID NO: 831193 - DNA, 33 bp, Homo sapien
acacggcgactctcatcatcatagaacacgaac

SEQ ID NO: 831194 - DNA, 33 bp, Homo sapien
acacggcgactctcatgatcatagaacacgaac

SEQ ID NO: 831195 - DNA, 33 bp, Homo sapien
aaccacagcaagggtacgtggagagggggcctc

SEQ ID NO: 831196 - DNA, 33 bp, Homo sapien
aaccacagcaagggtatgtggagagggggcctc

SEQ ID NO: 831197 - DNA, 33 bp, Homo sapien
tgggtgctccacctggcacgtatatctctgctc

SEQ ID NO: 831198 - DNA, 33 bp, Homo sapien
tgggtgctccacctggtacgtatatctctgctc

SEQ ID NO: 831199 - DNA, 33 bp, Homo sapien
atgtgattcaagctcactcagaagaaacacaat

SEQ ID NO: 831200 - DNA, 33 bp, Homo sapien
atgtgattcaagctcattcagaagaaacacaat

SEQ ID NO: 831201 - DNA, 33 bp, Homo sapien
tcctgtgacactgaaaaggcctcggtgatcaac

SEQ ID NO: 831202 - DNA, 33 bp, Homo sapien
tcctgtgacactgaaagggcctcggtgatcaac

SEQ ID NO: 831203 - DNA, 33 bp, Homo sapien
ttctccatagcggctacaccagcactggcagaa

SEQ ID NO: 831204 - DNA, 33 bp, Homo sapien
ttctccatagcggctagaccagcactggcagaa

SEQ ID NO: 831205 - DNA, 33 bp, Homo sapien
taccattttaatgcacaccttggttttcagaaa

SEQ ID NO: 831206 - DNA, 33 bp, Homo sapien
taccattttaatgcacgccttggttttcagaaa

SEQ ID NO: 831207 - DNA, 33 bp, Homo sapien
agaaatagatgcatggccaatcgaatttccagg

SEQ ID NO: 831208 - DNA, 33 bp, Homo sapien
agaaatagatgcatggtcaatcgaatttccagg

SEQ ID NO: 831209 - DNA, 33 bp, Homo sapien
gtaaacatacagcataactccttccagtttatt

SEQ ID NO: 831210 - DNA, 33 bp, Homo sapien
gtaaacatacagcatatctccttccagtttatt

SEQ ID NO: 831211 - DNA, 33 bp, Homo sapien
ggaaatcaaggaaaccaaatgtctggtctcaat

SEQ ID NO: 831212 - DNA, 33 bp, Homo sapien
ggaaatcaaggaaaccgaatgtctggtctcaat

SEQ ID NO: 831213 - DNA, 33 bp, Homo sapien
acagtccttatgttaaataactgtaacctaaat

SEQ ID NO: 831214 - DNA, 33 bp, Homo sapien
acagtccttatgttaagtaactgtaacctaaat

SEQ ID NO: 831215 - DNA, 33 bp, Homo sapien
actttagcaggaatggaacctataactctcaca

SEQ ID NO: 831216 - DNA, 33 bp, Homo sapien
actttagcaggaatgggacctataactctcaca

SEQ ID NO: 831217 - DNA, 33 bp, Homo sapien
agtgctcatgtgtagcaacaggattctctattt

SEQ ID NO: 831218 - DNA, 33 bp, Homo sapien
agtgctcatgtgtagcgacaggattctctattt

SEQ ID NO: 831219 - DNA, 33 bp, Homo sapien
aatcagtaatgtaggaatcagtaatgccatcca

SEQ ID NO: 831220 - DNA, 33 bp, Homo sapien
aatcagtaatgtaggactcagtaatgccatcca

SEQ ID NO: 831221 - DNA, 33 bp, Homo sapien
cacaatctttgttcacggtaacctcttcctcct

SEQ ID NO: 831222 - DNA, 33 bp, Homo sapien
cacaatctttgttcactgtaacctcttcctcct

SEQ ID NO: 831223 - DNA, 33 bp, Homo sapien
taataactcttcagtaggtcctcagaatctgaa

SEQ ID NO: 831224 - DNA, 33 bp, Homo sapien
taataactcttcagtatgtcctcagaatctgaa

SEQ ID NO: 831225 - DNA, 33 bp, Homo sapien
tgcctgagccagcgaaatccgctcccgccccga

SEQ ID NO: 831226 - DNA, 33 bp, Homo sapien
tgcctgagccagcgaagtccgctcccgccccga

SEQ ID NO: 831227 - DNA, 33 bp, Homo sapien
gtaataagaccatttaacttgaaaaccggagct

SEQ ID NO: 831228 - DNA, 33 bp, Homo sapien
gtaataagaccatttagcttgaaaaccggagct

SEQ ID NO: 831229 - DNA, 33 bp, Homo sapien
ttgattttcctaacaccgcctggtttggcggga

SEQ ID NO: 831230 - DNA, 33 bp, Homo sapien
ttgattttcctaacactgcctggtttggcggga

SEQ ID NO: 831231 - DNA, 33 bp, Homo sapien
tgggtgttcttaacaccgaatcgtgaaactaac

SEQ ID NO: 831232 - DNA, 33 bp, Homo sapien
tgggtgttcttaacactgaatcgtgaaactaac

SEQ ID NO: 831233 - DNA, 33 bp, Homo sapien
tgaacatcgggaaccacgcaaaatccctttcct

SEQ ID NO: 831234 - DNA, 33 bp, Homo sapien
tgaacatcgggaaccatgcaaaatccctttcct

SEQ ID NO: 831235 - DNA, 33 bp, Homo sapien
aagcgttcgttaaaaactaggacagtgaacatt

SEQ ID NO: 831236 - DNA, 33 bp, Homo sapien
aagcgttcgttaaaaattaggacagtgaacatt

SEQ ID NO: 831237 - DNA, 33 bp, Homo sapien
ccatatcaaaactgagaaatttgctgaaatgtt

SEQ ID NO: 831238 - DNA, 33 bp, Homo sapien
ccatatcaaaactgaggaatttgctgaaatgtt

SEQ ID NO: 831239 - DNA, 33 bp, Homo sapien
aagacaatggccaagacacaaaagcctagttta

SEQ ID NO: 831240 - DNA, 33 bp, Homo sapien
aagacaatggccaagagacaaaagcctagttta

SEQ ID NO: 831241 - DNA, 33 bp, Homo sapien
tttccgcttgtttctaactatatgtttcaaatt

SEQ ID NO: 831242 - DNA, 33 bp, Homo sapien
tttccgcttgtttctagctatatgtttcaaatt

SEQ ID NO: 831243 - DNA, 33 bp, Homo sapien
atttaaaatagcatagccagacacagtagctca

SEQ ID NO: 831244 - DNA, 33 bp, Homo sapien
atttaaaatagcataggcagacacagtagctca

SEQ ID NO: 831245 - DNA, 33 bp, Homo sapien
ggcagcatgggcattacgtgggaacttgttaga

SEQ ID NO: 831246 - DNA, 33 bp, Homo sapien
ggcagcatgggcattatgtgggaacttgttaga

SEQ ID NO: 831247 - DNA, 33 bp, Homo sapien
acaccttcagaacaccacgagtctcctcataga

SEQ ID NO: 831248 - DNA, 33 bp, Homo sapien
acaccttcagaacaccgcgagtctcctcataga

SEQ ID NO: 831249 - DNA, 33 bp, Homo sapien
ttctcctagccacaggacagtagtctttaacat

SEQ ID NO: 831250 - DNA, 33 bp, Homo sapien
ttctcctagccacaggtcagtagtctttaacat

SEQ ID NO: 831251 - DNA, 33 bp, Homo sapien; identical to SEQ ID NO: 831249

SEQ ID NO: 831252 - DNA, 33 bp, Homo sapien; identical to SEQ ID NO: 831250

SEQ ID NO: 831253 - DNA, 33 bp, Homo sapien
tgcctggttggccatacgcgtccaatttttcac

SEQ ID NO: 831254 - DNA, 33 bp, Homo sapien
tgcctggttggccatatgcgtccaatttttcac

SEQ ID NO: 831255 - DNA, 33 bp, Homo sapien
ttaggaacatatgcccaacatgtttttgcttct

SEQ ID NO: 831256 - DNA, 33 bp, Homo sapien
ttaggaacatatgcccgacatgtttttgcttct

SEQ ID NO: 831257 - DNA, 33 bp, Homo sapien
tataatttggcctagaactattgaccttcaact

SEQ ID NO: 831258 - DNA, 33 bp, Homo sapien
tataatttggcctagagctattgaccttcaact

SEQ ID NO: 831259 - DNA, 33 bp, Homo sapien
tcttcttcggattagcaagtgtcatgtaactcc

SEQ ID NO: 831260 - DNA, 33 bp, Homo sapien
tcttcttcggattagctagtgtcatgtaactcc

SEQ ID NO: 831261 - DNA, 33 bp, Homo sapien
agcaaaactgtgaaaaaagatcaaatcaaataa

SEQ ID NO: 831262 - DNA, 33 bp, Homo sapien
agcaaaactgtgaaaagagatcaaatcaaataa

SEQ ID NO: 831263 - DNA, 33 bp, Homo sapien
tatccttttcgcatacacataatttcaagaatc

SEQ ID NO: 831264 - DNA, 33 bp, Homo sapien
tatccttttcgcatactcataatttcaagaatc

SEQ ID NO: 831265 - DNA, 33 bp, Homo sapien
cccatggagaaagaaactaagtcagtcctatgt

SEQ ID NO: 831266 - DNA, 33 bp, Homo sapien
cccatggagaaagaaattaagtcagtcctatgt

SEQ ID NO: 831267 - DNA, 33 bp, Homo sapien
tttgcattcctaaacaatgatcagcatatggta

SEQ ID NO: 831268 - DNA, 33 bp, Homo sapien
tttgcattcctaaacagtgatcagcatatggta

SEQ ID NO: 831269 - DNA, 33 bp, Homo sapien
taacatctgataacaaacaggtcagaatggtgc

SEQ ID NO: 831270 - DNA, 33 bp, Homo sapien
taacatctgataacaagcaggtcagaatggtgc

SEQ ID NO: 831271 - DNA, 33 bp, Homo sapien
gttcaacaatgtactaagagcgttttcatgtca

SEQ ID NO: 831272 - DNA, 33 bp, Homo sapien
gttcaacaatgtactaggagcgttttcatgtca

SEQ ID NO: 831273 - DNA, 33 bp, Homo sapien
aaatttaattttggagacatccactaataaaaa

SEQ ID NO: 831274 - DNA, 33 bp, Homo sapien
aaatttaattttggaggcatccactaataaaaa

SEQ ID NO: 831275 - DNA, 33 bp, Homo sapien
cagctcactcatatccacagggttgggggtgac

SEQ ID NO: 831276 - DNA, 33 bp, Homo sapien
cagctcactcatatccgcagggttgggggtgac

SEQ ID NO: 831277 - DNA, 33 bp, Homo sapien
aatcaaacacatgtaaaaaattcattggttggg

SEQ ID NO: 831278 - DNA, 33 bp, Homo sapien
aatcaaacacatgtaacaaattcattggttggg

SEQ ID NO: 831279 - DNA, 33 bp, Homo sapien
tgtccagctcctgcacacctctaggttgatgtc

SEQ ID NO: 831280 - DNA, 33 bp, Homo sapien
tgtccagctcctgcacccctctaggttgatgtc

SEQ ID NO: 831281 - DNA, 33 bp, Homo sapien
ttcctccttaattcaagatgttacattctttag

SEQ ID NO: 831282 - DNA, 33 bp, Homo sapien
ttcctccttaattcaatatgttacattctttag

SEQ ID NO: 831283 - DNA, 33 bp, Homo sapien
tgtttcacttacctaacgcattcgtgatttatt

SEQ ID NO: 831284 - DNA, 33 bp, Homo sapien
tgtttcacttacctaatgcattcgtgatttatt

SEQ ID NO: 831285 - DNA, 33 bp, Homo sapien
tgcccaggctggaaaaatgtactgttttaaacc

SEQ ID NO: 831286 - DNA, 33 bp, Homo sapien
tgcccaggctggaaaagtgtactgttttaaacc

SEQ ID NO: 831287 - DNA, 33 bp, Homo sapien
agaaaccactgaggaacgttgaaatgaaaactg

SEQ ID NO: 831288 - DNA, 33 bp, Homo sapien
agaaaccactgaggaaggttgaaatgaaaactg

SEQ ID NO: 831289 - DNA, 33 bp, Homo sapien
gggtaagtgcaggaaactgattagagcctgggc

SEQ ID NO: 831290 - DNA, 33 bp, Homo sapien
gggtaagtgcaggaaattgattagagcctgggc

SEQ ID NO: 831291 - DNA, 33 bp, Homo sapien
gaaaatgtttgtgttacgaacacctttatggag

SEQ ID NO: 831292 - DNA, 33 bp, Homo sapien
gaaaatgtttgtgttatgaacacctttatggag

SEQ ID NO: 831293 - DNA, 33 bp, Homo sapien
agcagagagagagtaacagatttgaattcagag

SEQ ID NO: 831294 - DNA, 33 bp, Homo sapien
agcagagagagagtaatagatttgaattcagag

SEQ ID NO: 831295 - DNA, 33 bp, Homo sapien
cctatgcccaggtacacattcaaaacagatgag

SEQ ID NO: 831296 - DNA, 33 bp, Homo sapien
cctatgcccaggtacagattcaaaacagatgag

SEQ ID NO: 831297 - DNA, 33 bp, Homo sapien
ttactgatattcattcaattattccataggaca

SEQ ID NO: 831298 - DNA, 33 bp, Homo sapien
ttactgatattcattcgattattccataggaca

SEQ ID NO: 831299 - DNA, 33 bp, Homo sapien
gtgagtcaggaaactaaaatttgaacaggacaa

SEQ ID NO: 831300 - DNA, 33 bp, Homo sapien
gtgagtcaggaaactagaatttgaacaggacaa

SEQ ID NO: 831301 - DNA, 33 bp, Homo sapien
ggcagctgttgggaaaagacagaagagaaggat

SEQ ID NO: 831302 - DNA, 33 bp, Homo sapien
ggcagctgttgggaaaggacagaagagaaggat

SEQ ID NO: 831303 - DNA, 33 bp, Homo sapien
tggctaatgagggtaaatatgtcagtattagaa

SEQ ID NO: 831304 - DNA, 33 bp, Homo sapien
tggctaatgagggtaattatgtcagtattagaa

SEQ ID NO: 831305 - DNA, 33 bp, Homo sapien
gagtgaggcttctgtacgagaatgggacagttc

SEQ ID NO: 831306 - DNA, 33 bp, Homo sapien
gagtgaggcttctgtatgagaatgggacagttc

SEQ ID NO: 831307 - DNA, 33 bp, Homo sapien
gggacctactggttcacccttcctggtccttga

SEQ ID NO: 831308 - DNA, 33 bp, Homo sapien
gggacctactggttcatccttcctggtccttga

SEQ ID NO: 831309 - DNA, 33 bp, Homo sapien
agagaggtggcagcacgattaagccactctaga

SEQ ID NO: 831310 - DNA, 33 bp, Homo sapien
agagaggtggcagcactattaagccactctaga

SEQ ID NO: 831311 - DNA, 33 bp, Homo sapien
agcacttcaggcaggaacattcagagttgttct

SEQ ID NO: 831312 - DNA, 33 bp, Homo sapien
agcacttcaggcaggagcattcagagttgttct

SEQ ID NO: 831313 - DNA, 33 bp, Homo sapien
aaccaccatcactcacacctggaatactagagt

SEQ ID NO: 831314 - DNA, 33 bp, Homo sapien
aaccaccatcactcacgcctggaatactagagt

SEQ ID NO: 831315 - DNA, 33 bp, Homo sapien
aaggggcccagggctacacagggaccataggga

SEQ ID NO: 831316 - DNA, 33 bp, Homo sapien
aaggggcccagggctagacagggaccataggga

SEQ ID NO: 831317 - DNA, 33 bp, Homo sapien
cagttataggttaatgaagataggatgttttgt

SEQ ID NO: 831318 - DNA, 33 bp, Homo sapien
cagttataggttaatgtagataggatgttttgt

SEQ ID NO: 831319 - DNA, 33 bp, Homo sapien
tttttttgagctaacacgacctatgatatacca

SEQ ID NO: 831320 - DNA, 33 bp, Homo sapien
tttttttgagctaacatgacctatgatatacca

SEQ ID NO: 831321 - DNA, 33 bp, Homo sapien
agccacaggaaggttaaagcagaaaaaggactg

SEQ ID NO: 831322 - DNA, 33 bp, Homo sapien
agccacaggaaggttagagcagaaaaaggactg

SEQ ID NO: 831323 - DNA, 33 bp, Homo sapien
ctggctatcagtcagaagtggtaggtaaaagag

SEQ ID NO: 831324 - DNA, 33 bp, Homo sapien
ctggctatcagtcagatgtggtaggtaaaagag

SEQ ID NO: 831325 - DNA, 33 bp, Homo sapien
gcccaccggatgaggacgggatatattgtgcaa

SEQ ID NO: 831326 - DNA, 33 bp, Homo sapien
gcccaccggatgaggatgggatatattgtgcaa

SEQ ID NO: 831327 - DNA, 33 bp, Homo sapien; identical to SEQ ID NO: 831325

SEQ ID NO: 831328 - DNA, 33 bp, Homo sapien; identical to SEQ ID NO: 831326

SEQ ID NO: 831329 - DNA, 33 bp, Homo sapien
gatgagactaactaaacaaaggagacggatttc

SEQ ID NO: 831330 - DNA, 33 bp, Homo sapien
gatgagactaactaaataaaggagacggatttc

SEQ ID NO: 831331 - DNA, 33 bp, Homo sapien
ttgcaagtcaatgatcaaagttcctaaggctaa

SEQ ID NO: 831332 - DNA, 33 bp, Homo sapien
ttgcaagtcaatgatcgaagttcctaaggctaa

SEQ ID NO: 831333 - DNA, 33 bp, Homo sapien
tgcaagtactttgctcaacttgacatcaggaag

SEQ ID NO: 831334 - DNA, 33 bp, Homo sapien
tgcaagtactttgctcgacttgacatcaggaag

SEQ ID NO: 831335 - DNA, 33 bp, Homo sapien
ggggctgaacccaccacatttaatccaaggcta

SEQ ID NO: 831336 - DNA, 33 bp, Homo sapien
ggggctgaacccaccagatttaatccaaggcta

SEQ ID NO: 831337 - DNA, 33 bp, Homo sapien
atttgtctcttagtgacgggtgaaccttcagat

SEQ ID NO: 831338 - DNA, 33 bp, Homo sapien
atttgtctcttagtgatgggtgaaccttcagat

SEQ ID NO: 831339 - DNA, 33 bp, Homo sapien
tgccttctcaaaaaaacttaatgcttctgagct

SEQ ID NO: 831340 - DNA, 33 bp, Homo sapien
tgccttctcaaaaaaatttaatgcttctgagct

SEQ ID NO: 831341 - DNA, 33 bp, Homo sapien
acaagtttttggttcaaagttctataggtcaga

SEQ ID NO: 831342 - DNA, 33 bp, Homo sapien
acaagtttttggttcacagttctataggtcaga

SEQ ID NO: 831343 - DNA, 33 bp, Homo sapien
ggggcaaccttcaaccaatttaagcaaaagagg

SEQ ID NO: 831344 - DNA, 33 bp, Homo sapien
ggggcaaccttcaaccgatttaagcaaaagagg

SEQ ID NO: 831345 - DNA, 33 bp, Homo sapien
cttctgagaatataatcaatgcctttcaaggtc

SEQ ID NO: 831346 - DNA, 33 bp, Homo sapien
cttctgagaatataatgaatgcctttcaaggtc

SEQ ID NO: 831347 - DNA, 33 bp, Homo sapien
aaccattgcactatgcgcattgattctgtgagt

SEQ ID NO: 831348 - DNA, 33 bp, Homo sapien
aaccattgcactatgctcattgattctgtgagt

SEQ ID NO: 831349 - DNA, 33 bp, Homo sapien
cagaagatagaagtgaacaaaactttctagctg

SEQ ID NO: 831350 - DNA, 33 bp, Homo sapien
cagaagatagaagtgagcaaaactttctagctg

SEQ ID NO: 831351 - DNA, 33 bp, Homo sapien
aagagaaagaacttcaaataaacagtaaaagag

SEQ ID NO: 831352 - DNA, 33 bp, Homo sapien
aagagaaagaacttcagataaacagtaaaagag

SEQ ID NO: 831353 - DNA, 33 bp, Homo sapien
ggcagctcatacccgagaattactgaagatgca

SEQ ID NO: 831354 - DNA, 33 bp, Homo sapien
ggcagctcatacccgataattactgaagatgca

SEQ ID NO: 831355 - DNA, 33 bp, Homo sapien
ttggtccaggacaacactggctgcagaggaagt

SEQ ID NO: 831356 - DNA, 33 bp, Homo sapien
ttggtccaggacaacattggctgcagaggaagt

SEQ ID NO: 831357 - DNA, 33 bp, Homo sapien
aggagagaggaatccacaggaccaccagagggt

SEQ ID NO: 831358 - DNA, 33 bp, Homo sapien
aggagagaggaatccataggaccaccagagggt

SEQ ID NO: 831359 - DNA, 33 bp, Homo sapien
gtccttcaactgtaaaaaaatgaattctgttaa

SEQ ID NO: 831360 - DNA, 33 bp, Homo sapien
gtccttcaactgtaaagaaatgaattctgttaa

SEQ ID NO: 831361 - DNA, 33 bp, Homo sapien
attgggttatgaggaaatgattaatggaaggaa

SEQ ID NO: 831362 - DNA, 33 bp, Homo sapien
attgggttatgaggaagtgattaatggaaggaa

SEQ ID NO: 831363 - DNA, 33 bp, Homo sapien
agctcatttagttcataagcggtcgagtgaaga

SEQ ID NO: 831364 - DNA, 33 bp, Homo sapien
agctcatttagttcatgagcggtcgagtgaaga

SEQ ID NO: 831365 - DNA, 33 bp, Homo sapien
aaaagaatcagagagacacaatggagaaaaaga

SEQ ID NO: 831366 - DNA, 33 bp, Homo sapien
aaaagaatcagagagatacaatggagaaaaaga

SEQ ID NO: 831367 - DNA, 33 bp, Homo sapien
agctatattaccttcaaagactgtagtttattg

SEQ ID NO: 831368 - DNA, 33 bp, Homo sapien
agctatattaccttcacagactgtagtttattg

SEQ ID NO: 831369 - DNA, 33 bp, Homo sapien
acaggcactactagacacaaaccttcccaaaag

SEQ ID NO: 831370 - DNA, 33 bp, Homo sapien
acaggcactactagacgcaaaccttcccaaaag

SEQ ID NO: 831371 - DNA, 33 bp, Homo sapien
gatgcttaaggactgaacaacccagctacagga

SEQ ID NO: 831372 - DNA, 33 bp, Homo sapien
gatgcttaaggactgagcaacccagctacagga

SEQ ID NO: 831373 - DNA, 33 bp, Homo sapien
ctgagcagaactcaaactgtacatgtagttaag

SEQ ID NO: 831374 - DNA, 33 bp, Homo sapien
ctgagcagaactcaaattgtacatgtagttaag

SEQ ID NO: 831375 - DNA, 33 bp, Homo sapien
cctgcatccttgttcacagccttttaaatgtgt

SEQ ID NO: 831376 - DNA, 33 bp, Homo sapien
cctgcatccttgttcatagccttttaaatgtgt

SEQ ID NO: 831377 - DNA, 33 bp, Homo sapien
gagtatggaatctctacctccagccttgaggtc

SEQ ID NO: 831378 - DNA, 33 bp, Homo sapien
gagtatggaatctctatctccagccttgaggtc

SEQ ID NO: 831379 - DNA, 33 bp, Homo sapien
tgcaagccacatgctaagacagaagaaaataaa

SEQ ID NO: 831380 - DNA, 33 bp, Homo sapien
tgcaagccacatgctaggacagaagaaaataaa

SEQ ID NO: 831381 - DNA, 33 bp, Homo sapien
cagtttgaatttaggccctgtggtagagttggc

SEQ ID NO: 831382 - DNA, 33 bp, Homo sapien
cagtttgaatttaggctctgtggtagagttggc

SEQ ID NO: 831383 - DNA, 33 bp, Homo sapien
tgaatgtgaagaaacactgattgtacacgtaac

SEQ ID NO: 831384 - DNA, 33 bp, Homo sapien
tgaatgtgaagaaacattgattgtacacgtaac

SEQ ID NO: 831385 - DNA, 33 bp, Homo sapien
cacagagagctgcaaacactttgagaggtaggg

SEQ ID NO: 831386 - DNA, 33 bp, Homo sapien
cacagagagctgcaaatactttgagaggtaggg

SEQ ID NO: 831387 - DNA, 33 bp, Homo sapien
ttgacgaaaagtttcagccctacctctcaaagt

SEQ ID NO: 831388 - DNA, 33 bp, Homo sapien
ttgacgaaaagtttcatccctacctctcaaagt

SEQ ID NO: 831389 - DNA, 33 bp, Homo sapien
ttcctcaatggcataaaacattaatttgggaga

SEQ ID NO: 831390 - DNA, 33 bp, Homo sapien
ttcctcaatggcataacacattaatttgggaga

SEQ ID NO: 831391 - DNA, 33 bp, Homo sapien
tggttgataaaactgaagtctggaaaatttaag

SEQ ID NO: 831392 - DNA, 33 bp, Homo sapien
tggttgataaaactgaggtctggaaaatttaag

SEQ ID NO: 831393 - DNA, 33 bp, Homo sapien
gcttcaaaagaaataactgtcagggaggcaact

SEQ ID NO: 831394 - DNA, 33 bp, Homo sapien
gcttcaaaagaaataattgtcagggaggcaact

SEQ ID NO: 831395 - DNA, 33 bp, Homo sapien
tgccctgtcgcctgtccccgaacgcgagcgccg

SEQ ID NO: 831396 - DNA, 33 bp, Homo sapien
tgccctgtcgcctgtctccgaacgcgagcgccg

SEQ ID NO: 831397 - DNA, 33 bp, Homo sapien
gtaacaagagtctttccagaggaatatctcgct

SEQ ID NO: 831398 - DNA, 33 bp, Homo sapien
gtaacaagagtctttctagaggaatatctcgct

SEQ ID NO: 831399 - DNA, 33 bp, Homo sapien
gtgtacatggtggacaagctatgaaatatctag

SEQ ID NO: 831400 - DNA, 33 bp, Homo sapien
gtgtacatggtggacaggctatgaaatatctag

SEQ ID NO: 831401 - DNA, 33 bp, Homo sapien
tttgagtgtcttctaaataggaacattctggcc

SEQ ID NO: 831402 - DNA, 33 bp, Homo sapien
tttgagtgtcttctaactaggaacattctggcc

SEQ ID NO: 831403 - DNA, 33 bp, Homo sapien
gcaggaacacattgcacgtcatgagatctgaca

SEQ ID NO: 831404 - DNA, 33 bp, Homo sapien
gcaggaacacattgcaggtcatgagatctgaca

SEQ ID NO: 831405 - DNA, 33 bp, Homo sapien
aattcaatctaattaccgagttaccaaagcaga

SEQ ID NO: 831406 - DNA, 33 bp, Homo sapien
aattcaatctaattactgagttaccaaagcaga

SEQ ID NO: 831407 - DNA, 33 bp, Homo sapien
cctgatattgagaataaacactttgagattaga

SEQ ID NO: 831408 - DNA, 33 bp, Homo sapien
cctgatattgagaatatacactttgagattaga

SEQ ID NO: 831409 - DNA, 33 bp, Homo sapien
gtgtgtatctgtctcccacatttgtaaggtctc

SEQ ID NO: 831410 - DNA, 33 bp, Homo sapien
gtgtgtatctgtctcctacatttgtaaggtctc

SEQ ID NO: 831411 - DNA, 33 bp, Homo sapien
ttttcctaaagttgcaataatcaggactgtact

SEQ ID NO: 831412 - DNA, 33 bp, Homo sapien
ttttcctaaagttgcagtaatcaggactgtact

SEQ ID NO: 831413 - DNA, 33 bp, Homo sapien
gaatcaccttttcggcgacggacttagggaagc

SEQ ID NO: 831414 - DNA, 33 bp, Homo sapien
gaatcaccttttcggctacggacttagggaagc

SEQ ID NO: 831415 - DNA, 33 bp, Homo sapien
tagtattgggcagatacgataaaacaacttgga

SEQ ID NO: 831416 - DNA, 33 bp, Homo sapien
tagtattgggcagataggataaaacaacttgga

SEQ ID NO: 831417 - DNA, 33 bp, Homo sapien
atgccctttttttggaccgcaatgagaaacctg

SEQ ID NO: 831418 - DNA, 33 bp, Homo sapien
atgccctttttttggagcgcaatgagaaacctg

SEQ ID NO: 831419 - DNA, 33 bp, Homo sapien
ggattgggattgttgcaaaatttgagaaactag

SEQ ID NO: 831420 - DNA, 33 bp, Homo sapien
ggattgggattgttgcgaaatttgagaaactag

SEQ ID NO: 831421 - DNA, 33 bp, Homo sapien
aaaaaaatttgtaatacgtcctcagtctgctgt

SEQ ID NO: 831422 - DNA, 33 bp, Homo sapien
aaaaaaatttgtaatatgtcctcagtctgctgt

SEQ ID NO: 831423 - DNA, 33 bp, Homo sapien
ttgtgccggttttaagcagcgttcagggctggc

SEQ ID NO: 831424 - DNA, 33 bp, Homo sapien
ttgtgccggttttaagtagcgttcagggctggc

SEQ ID NO: 831425 - DNA, 33 bp, Homo sapien
ccaggaggaagggaaccgtaaatcgcacccttt

SEQ ID NO: 831426 - DNA, 33 bp, Homo sapien
ccaggaggaagggaactgtaaatcgcacccttt

SEQ ID NO: 831427 - DNA, 33 bp, Homo sapien
tgtgccagttatcacacgattgtgtcccagccc

SEQ ID NO: 831428 - DNA, 33 bp, Homo sapien
tgtgccagttatcacatgattgtgtcccagccc

SEQ ID NO: 831429 - DNA, 33 bp, Homo sapien
atgttagttctcacaaactgatctatgaatgta

SEQ ID NO: 831430 - DNA, 33 bp, Homo sapien
atgttagttctcacaatctgatctatgaatgta

SEQ ID NO: 831431 - DNA, 33 bp, Homo sapien
atatttttagttttgacgtctttcacagttttg

SEQ ID NO: 831432 - DNA, 33 bp, Homo sapien
atatttttagttttgatgtctttcacagttttg

SEQ ID NO: 831433 - DNA, 33 bp, Homo sapien
aatttttagcactagaactcaaagattttcttc

SEQ ID NO: 831434 - DNA, 33 bp, Homo sapien
aatttttagcactagatctcaaagattttcttc

SEQ ID NO: 831435 - DNA, 33 bp, Homo sapien
ccaaggtccattgttaagtgaatttttttccta

SEQ ID NO: 831436 - DNA, 33 bp, Homo sapien
ccaaggtccattgttacgtgaatttttttccta

SEQ ID NO: 831437 - DNA, 33 bp, Homo sapien
ggaaacaatttgctgcacctactgagagatggc

SEQ ID NO: 831438 - DNA, 33 bp, Homo sapien
ggaaacaatttgctgcgcctactgagagatggc

SEQ ID NO: 831439 - DNA, 33 bp, Homo sapien
gtagtattgtgaccaccgcgggacataatggga

SEQ ID NO: 831440 - DNA, 33 bp, Homo sapien
gtagtattgtgaccactgcgggacataatggga

SEQ ID NO: 831441 - DNA, 33 bp, Homo sapien
tacagctttcttcctccagatgtgtgtatgaat

SEQ ID NO: 831442 - DNA, 33 bp, Homo sapien
tacagctttcttcctctagatgtgtgtatgaat

SEQ ID NO: 831443 - DNA, 33 bp, Homo sapien
ttatatttcttatttcccaaatcgccatgtcct

SEQ ID NO: 831444 - DNA, 33 bp, Homo sapien
ttatatttcttatttcgcaaatcgccatgtcct

SEQ ID NO: 831445 - DNA, 33 bp, Homo sapien
tttacacactaaaaagaaataccttagaccatg

SEQ ID NO: 831446 - DNA, 33 bp, Homo sapien
tttacacactaaaaaggaataccttagaccatg

SEQ ID NO: 831447 - DNA, 33 bp, Homo sapien
tcagctacaaggaacaagtgataatactatctc

SEQ ID NO: 831448 - DNA, 33 bp, Homo sapien
tcagctacaaggaacaggtgataatactatctc

SEQ ID NO: 831449 - DNA, 33 bp, Homo sapien
ttttaggggctattatcagcactgtttctttat

SEQ ID NO: 831450 - DNA, 33 bp, Homo sapien
ttttaggggctattattagcactgtttctttat

SEQ ID NO: 831451 - DNA, 33 bp, Homo sapien
agttccgagtcaccggaaagtcctgctgagagt

SEQ ID NO: 831452 - DNA, 33 bp, Homo sapien
agttccgagtcaccgggaagtcctgctgagagt

SEQ ID NO: 831453 - DNA, 33 bp, Homo sapien
ttgttgttgttgttctaaaatatagttggacat

SEQ ID NO: 831454 - DNA, 33 bp, Homo sapien
ttgttgttgttgttctgaaatatagttggacat

SEQ ID NO: 831455 - DNA, 33 bp, Homo sapien
cacggagatccaggtaagcatttgttttagcgg

SEQ ID NO: 831456 - DNA, 33 bp, Homo sapien
cacggagatccaggtacgcatttgttttagcgg

SEQ ID NO: 831457 - DNA, 33 bp, Homo sapien
ctcttcacggatcactaaaaccgccttctccga

SEQ ID NO: 831458 - DNA, 33 bp, Homo sapien
ctcttcacggatcactgaaaccgccttctccga

SEQ ID NO: 831459 - DNA, 33 bp, Homo sapien
ttttttctgattgtcacccatacaaaaaaattt

SEQ ID NO: 831460 - DNA, 33 bp, Homo sapien
ttttttctgattgtcagccatacaaaaaaattt

SEQ ID NO: 831461 - DNA, 33 bp, Homo sapien
ttagagtcccttaattaaacagaccatatacct

SEQ ID NO: 831462 - DNA, 33 bp, Homo sapien
ttagagtcccttaattgaacagaccatatacct

SEQ ID NO: 831463 - DNA, 33 bp, Homo sapien
gaaatgactgagatgacggacgtagaattcaga

SEQ ID NO: 831464 - DNA, 33 bp, Homo sapien
gaaatgactgagatgatggacgtagaattcaga

SEQ ID NO: 831465 - DNA, 33 bp, Homo sapien
agtgttcctctttagaagctagaagaaataatt

SEQ ID NO: 831466 - DNA, 33 bp, Homo sapien
agtgttcctctttagaggctagaagaaataatt

SEQ ID NO: 831467 - DNA, 33 bp, Homo sapien
acatatgaaatcagaaacttaatttttctgaaa

SEQ ID NO: 831468 - DNA, 33 bp, Homo sapien
acatatgaaatcagaatcttaatttttctgaaa

SEQ ID NO: 831469 - DNA, 33 bp, Homo sapien
agataataccacaagcaaaatatctataataat

SEQ ID NO: 831470 - DNA, 33 bp, Homo sapien
agataataccacaagcgaaatatctataataat

SEQ ID NO: 831471 - DNA, 33 bp, Homo sapien; identical to SEQ ID NO: 831469

SEQ ID NO: 831472 - DNA, 33 bp, Homo sapien; identical to SEQ ID NO: 831470

SEQ ID NO: 831473 - DNA, 33 bp, Homo sapien; identical to SEQ ID NO: 831469

SEQ ID NO: 831474 - DNA, 33 bp, Homo sapien; identical to SEQ ID NO: 831470

SEQ ID NO: 831475 - DNA, 33 bp, Homo sapien
atcataggagaaaacacaggtgttgaattttta

SEQ ID NO: 831476 - DNA, 33 bp, Homo sapien
atcataggagaaaacataggtgttgaattttta

SEQ ID NO: 831477 - DNA, 33 bp, Homo sapien
taaagatatgtagtaggccccaaaattctactt

SEQ ID NO: 831478 - DNA, 33 bp, Homo sapien
taaagatatgtagtagtccccaaaattctactt

SEQ ID NO: 831479 - DNA, 33 bp, Homo sapien
aaccgtggatagaagcacctgaaatgtttgccg

SEQ ID NO: 831480 - DNA, 33 bp, Homo sapien
aaccgtggatagaagcgcctgaaatgtttgccg

SEQ ID NO: 831481 - DNA, 33 bp, Homo sapien
gcaggcaagcaccataaactccggcaaacattt

SEQ ID NO: 831482 - DNA, 33 bp, Homo sapien
gcaggcaagcaccatagactccggcaaacattt

SEQ ID NO: 831483 - DNA, 33 bp, Homo sapien
taacaacaaaaataaccaaaatgaacacatagc

SEQ ID NO: 831484 - DNA, 33 bp, Homo sapien
taacaacaaaaataacgaaaatgaacacatagc

SEQ ID NO: 831485 - DNA, 33 bp, Homo sapien
aatgtttcaacttgggcattatagcataagcag

SEQ ID NO: 831486 - DNA, 33 bp, Homo sapien
aatgtttcaacttgggtattatagcataagcag

SEQ ID NO: 831487 - DNA, 33 bp, Homo sapien
atacattagagaaggccaaaactgacagattcc

SEQ ID NO: 831488 - DNA, 33 bp, Homo sapien
atacattagagaaggctaaaactgacagattcc

SEQ ID NO: 831489 - DNA, 33 bp, Homo sapien
cactccactcgcagacggcgggccttcctccga

SEQ ID NO: 831490 - DNA, 33 bp, Homo sapien
cactccactcgcagactgcgggccttcctccga

SEQ ID NO: 831491 - DNA, 33 bp, Homo sapien
tgaacacggattaaaacactcagtatgacccat

SEQ ID NO: 831492 - DNA, 33 bp, Homo sapien
tgaacacggattaaaagactcagtatgacccat

SEQ ID NO: 831493 - DNA, 33 bp, Homo sapien
aattcagcctgtaataactagcttatgcataca

SEQ ID NO: 831494 - DNA, 33 bp, Homo sapien
aattcagcctgtaatagctagcttatgcataca

SEQ ID NO: 831495 - DNA, 33 bp, Homo sapien
aggtaaggataatggaatagcagtagggtaggt

SEQ ID NO: 831496 - DNA, 33 bp, Homo sapien
aggtaaggataatggagtagcagtagggtaggt

SEQ ID NO: 831497 - DNA, 33 bp, Homo sapien
agacatgaggaatacacagaaggatctcttcga

SEQ ID NO: 831498 - DNA, 33 bp, Homo sapien
agacatgaggaatacatagaaggatctcttcga

SEQ ID NO: 831499 - DNA, 33 bp, Homo sapien
gaatgtcaaaactgaacgcatggaggagtcaat

SEQ ID NO: 831500 - DNA, 33 bp, Homo sapien
gaatgtcaaaactgaatgcatggaggagtcaat

SEQ ID NO: 831501 - DNA, 33 bp, Homo sapien
gctggtcaggggtagaaagtgaaagagaagagt

SEQ ID NO: 831502 - DNA, 33 bp, Homo sapien
gctggtcaggggtagacagtgaaagagaagagt

SEQ ID NO: 831503 - DNA, 33 bp, Homo sapien
cctggcatatgaacttcaaccaaattgagctgg

SEQ ID NO: 831504 - DNA, 33 bp, Homo sapien
cctggcatatgaactttaaccaaattgagctgg

SEQ ID NO: 831505 - DNA, 33 bp, Homo sapien
ttgtggaccagaaagaagcagatgtttctggat

SEQ ID NO: 831506 - DNA, 33 bp, Homo sapien
ttgtggaccagaaagatgcagatgtttctggat

SEQ ID NO: 831507 - DNA, 33 bp, Homo sapien
gtatccaataggtaacaatcatttaaaatcatt

SEQ ID NO: 831508 - DNA, 33 bp, Homo sapien
gtatccaataggtaacgatcatttaaaatcatt

SEQ ID NO: 831509 - DNA, 33 bp, Homo sapien
caaaaatcatcttcaaaagaacataaaaggact

SEQ ID NO: 831510 - DNA, 33 bp, Homo sapien
caaaaatcatcttcaagagaacataaaaggact

SEQ ID NO: 831511 - DNA, 33 bp, Homo sapien
tagatgaatggagaaaaaaattgtctgatgtat

SEQ ID NO: 831512 - DNA, 33 bp, Homo sapien
tagatgaatggagaaagaaattgtctgatgtat

SEQ ID NO: 831513 - DNA, 33 bp, Homo sapien
tcaaaacaggcagagagaaccaaaagaaataat

SEQ ID NO: 831514 - DNA, 33 bp, Homo sapien
tcaaaacaggcagagataaccaaaagaaataat

SEQ ID NO: 831515 - DNA, 33 bp, Homo sapien
tctctgcctgttttgacctgtgcctattgttgt

SEQ ID NO: 831516 - DNA, 33 bp, Homo sapien
tctctgcctgttttgatctgtgcctattgttgt

SEQ ID NO: 831517 - DNA, 33 bp, Homo sapien
cattttgcttaccagacaagtaagttgaatgac

SEQ ID NO: 831518 - DNA, 33 bp, Homo sapien
cattttgcttaccagataagtaagttgaatgac

SEQ ID NO: 831519 - DNA, 33 bp, Homo sapien
catgcagtgcttgtaaacgagtctggctaagga

SEQ ID NO: 831520 - DNA, 33 bp, Homo sapien
catgcagtgcttgtaatcgagtctggctaagga

SEQ ID NO: 831521 - DNA, 33 bp, Homo sapien
aacatcaacacagtaacaatgaaaaaaaagagg

SEQ ID NO: 831522 - DNA, 33 bp, Homo sapien
aacatcaacacagtaagaatgaaaaaaaagagg

SEQ ID NO: 831523 - DNA, 33 bp, Homo sapien
aagcacctgtccttaaaaactgacaaggacctc

SEQ ID NO: 831524 - DNA, 33 bp, Homo sapien
aagcacctgtccttaagaactgacaaggacctc

SEQ ID NO: 831525 - DNA, 33 bp, Homo sapien
cacacacacaaataaacagaaggcaatatagca

SEQ ID NO: 831526 - DNA, 33 bp, Homo sapien
cacacacacaaataaagagaaggcaatatagca

SEQ ID NO: 831527 - DNA, 33 bp, Homo sapien
gcgcctttcttaattcaatatttctccagacga

SEQ ID NO: 831528 - DNA, 33 bp, Homo sapien
gcgcctttcttaattcgatatttctccagacga

SEQ ID NO: 831529 - DNA, 33 bp, Homo sapien
tcttgttgcatgtttaacgtttgtctgggatcc

SEQ ID NO: 831530 - DNA, 33 bp, Homo sapien
tcttgttgcatgtttatcgtttgtctgggatcc

SEQ ID NO: 831531 - DNA, 33 bp, Homo sapien
cttttctccactttcacggaagtcaatagaatg

SEQ ID NO: 831532 - DNA, 33 bp, Homo sapien
cttttctccactttcatggaagtcaatagaatg

SEQ ID NO: 831533 - DNA, 33 bp, Homo sapien
ctgcggcaaaatcggaaagagaaggtgagaacc

SEQ ID NO: 831534 - DNA, 33 bp, Homo sapien
ctgcggcaaaatcggagagagaaggtgagaacc

SEQ ID NO: 831535 - DNA, 33 bp, Homo sapien
aattggcatgtgtctgcaaacatccttattccc

SEQ ID NO: 831536 - DNA, 33 bp, Homo sapien
aattggcatgtgtctgtaaacatccttattccc

SEQ ID NO: 831537 - DNA, 33 bp, Homo sapien
aggacagaaagataaacagagaaacagacaaaa

SEQ ID NO: 831538 - DNA, 33 bp, Homo sapien
aggacagaaagataaatagagaaacagacaaaa

SEQ ID NO: 831539 - DNA, 33 bp, Homo sapien
tgagagctaagacggaagccttcatttttgttt

SEQ ID NO: 831540 - DNA, 33 bp, Homo sapien
tgagagctaagacggaggccttcatttttgttt

SEQ ID NO: 831541 - DNA, 33 bp, Homo sapien
ctaaactgtgagggaacagccatcggattctac

SEQ ID NO: 831542 - DNA, 33 bp, Homo sapien
ctaaactgtgagggaatagccatcggattctac

SEQ ID NO: 831543 - DNA, 33 bp, Homo sapien
gttcactaacacaacccagaaattggcacctga

SEQ ID NO: 831544 - DNA, 33 bp, Homo sapien
gttcactaacacaacctagaaattggcacctga

SEQ ID NO: 831545 - DNA, 33 bp, Homo sapien
tttaatatcttctttaccgttccagagattttt

SEQ ID NO: 831546 - DNA, 33 bp, Homo sapien
tttaatatcttctttatcgttccagagattttt

SEQ ID NO: 831547 - DNA, 33 bp, Homo sapien
gatcgtggagaaacagacgacgcagtaacgtct

SEQ ID NO: 831548 - DNA, 33 bp, Homo sapien
gatcgtggagaaacaggcgacgcagtaacgtct

SEQ ID NO: 831549 - DNA, 33 bp, Homo sapien
ttgcttcgtaaaagccactcactaatacaacat

SEQ ID NO: 831550 - DNA, 33 bp, Homo sapien
ttgcttcgtaaaagccgctcactaatacaacat

SEQ ID NO: 831551 - DNA, 33 bp, Homo sapien
tggaagacagaacgcgaatccgttggaaattaa

SEQ ID NO: 831552 - DNA, 33 bp, Homo sapien
tggaagacagaacgcggatccgttggaaattaa

SEQ ID NO: 831553 - DNA, 33 bp, Homo sapien
gcccgcatcttgtataccatatatttttatcat

SEQ ID NO: 831554 - DNA, 33 bp, Homo sapien
gcccgcatcttgtatatcatatatttttatcat

SEQ ID NO: 831555 - DNA, 33 bp, Homo sapien
gtgacattcactacacaaaaatccaaaggtggc

SEQ ID NO: 831556 - DNA, 33 bp, Homo sapien
gtgacattcactacaccaaaatccaaaggtggc

SEQ ID NO: 831557 - DNA, 33 bp, Homo sapien
ggtcagctactatatccaactgatcaaagtttt

SEQ ID NO: 831558 - DNA, 33 bp, Homo sapien
ggtcagctactatatctaactgatcaaagtttt

SEQ ID NO: 831559 - DNA, 33 bp, Homo sapien
taaattgaggaaaaccaaagtcactaggacctg

SEQ ID NO: 831560 - DNA, 33 bp, Homo sapien
taaattgaggaaaaccgaagtcactaggacctg

SEQ ID NO: 831561 - DNA, 33 bp, Homo sapien
tccacaccgtcctacactggaaaattcctttcc

SEQ ID NO: 831562 - DNA, 33 bp, Homo sapien
tccacaccgtcctacattggaaaattcctttcc

SEQ ID NO: 831563 - DNA, 33 bp, Homo sapien
cagtggtcttcagaaaccgcttagcagagtggc

SEQ ID NO: 831564 - DNA, 33 bp, Homo sapien
cagtggtcttcagaaatcgcttagcagagtggc

SEQ ID NO: 831565 - DNA, 33 bp, Homo sapien
ggaaacatcaagaaatcagttgagtttgacctt

SEQ ID NO: 831566 - DNA, 33 bp, Homo sapien
ggaaacatcaagaaatgagttgagtttgacctt

SEQ ID NO: 831567 - DNA, 33 bp, Homo sapien
ccctgtccaggcgctaaaaatgcaacttttact

SEQ ID NO: 831568 - DNA, 33 bp, Homo sapien
ccctgtccaggcgctagaaatgcaacttttact

SEQ ID NO: 831569 - DNA, 33 bp, Homo sapien
aatatatcacacacatcaaaatttcaggtgcag

SEQ ID NO: 831570 - DNA, 33 bp, Homo sapien
aatatatcacacacattaaaatttcaggtgcag

SEQ ID NO: 831571 - DNA, 33 bp, Homo sapien
aagaagtccataatagcaggaacataggatctt

SEQ ID NO: 831572 - DNA, 33 bp, Homo sapien
aagaagtccataataggaggaacataggatctt

SEQ ID NO: 831573 - DNA, 33 bp, Homo sapien
tggagagaaaccttatcagggtactgaatgtgg

SEQ ID NO: 831574 - DNA, 33 bp, Homo sapien
tggagagaaaccttatgagggtactgaatgtgg

SEQ ID NO: 831575 - DNA, 33 bp, Homo sapien
ttcagcatcttaatcaacttaatcatcattgtt

SEQ ID NO: 831576 - DNA, 33 bp, Homo sapien
ttcagcatcttaatcatcttaatcatcattgtt

SEQ ID NO: 831577 - DNA, 33 bp, Homo sapien
ggtaaagtagacaccaaacaagaatagataggt

SEQ ID NO: 831578 - DNA, 33 bp, Homo sapien
ggtaaagtagacaccatacaagaatagataggt

SEQ ID NO: 831579 - DNA, 33 bp, Homo sapien
tttatatctctgtgctaacattacctatctatt

SEQ ID NO: 831580 - DNA, 33 bp, Homo sapien
tttatatctctgtgcttacattacctatctatt

SEQ ID NO: 831581 - DNA, 33 bp, Homo sapien
agtttgatggttcctcaagaaagctgattgcag

SEQ ID NO: 831582 - DNA, 33 bp, Homo sapien
agtttgatggttcctctagaaagctgattgcag

SEQ ID NO: 831583 - DNA, 33 bp, Homo sapien
taactgtcaatacacccacaacaaataattaac

SEQ ID NO: 831584 - DNA, 33 bp, Homo sapien
taactgtcaatacacctacaacaaataattaac

SEQ ID NO: 831585 - DNA, 33 bp, Homo sapien
tccttttcccatcttacatacatcctccaaagc

SEQ ID NO: 831586 - DNA, 33 bp, Homo sapien
tccttttcccatcttatatacatcctccaaagc

SEQ ID NO: 831587 - DNA, 33 bp, Homo sapien
cagctgctgaagggagactcataaatcctctga

SEQ ID NO: 831588 - DNA, 33 bp, Homo sapien
cagctgctgaagggagcctcataaatcctctga

SEQ ID NO: 831589 - DNA, 33 bp, Homo sapien
tgaaacccagacataactgtccattgtcatttt

SEQ ID NO: 831590 - DNA, 33 bp, Homo sapien
tgaaacccagacataagtgtccattgtcatttt

SEQ ID NO: 831591 - DNA, 33 bp, Homo sapien
gcctgttgactgtcctaaatatcttcaacactc

SEQ ID NO: 831592 - DNA, 33 bp, Homo sapien
gcctgttgactgtccttaatatcttcaacactc

SEQ ID NO: 831593 - DNA, 33 bp, Homo sapien
ccagataccctaaatcaacactctgaagtgcaa

SEQ ID NO: 831594 - DNA, 33 bp, Homo sapien
ccagataccctaaatcgacactctgaagtgcaa

SEQ ID NO: 831595 - DNA, 33 bp, Homo sapien
ttattgtagaatctcaaattaagatccaattgc

SEQ ID NO: 831596 - DNA, 33 bp, Homo sapien
ttattgtagaatctcacattaagatccaattgc

SEQ ID NO: 831597 - DNA, 33 bp, Homo sapien
tgttttcagttgaaagccatgttcttggcaaag

SEQ ID NO: 831598 - DNA, 33 bp, Homo sapien
tgttttcagttgaaaggcatgttcttggcaaag

SEQ ID NO: 831599 - DNA, 33 bp, Homo sapien
gtgatattgataatcccgactgccccgctgtct

SEQ ID NO: 831600 - DNA, 33 bp, Homo sapien
gtgatattgataatcctgactgccccgctgtct

SEQ ID NO: 831601 - DNA, 33 bp, Homo sapien
gtcaggcttttactaacgctattccagtcacaa

SEQ ID NO: 831602 - DNA, 33 bp, Homo sapien
gtcaggcttttactaatgctattccagtcacaa

SEQ ID NO: 831603 - DNA, 33 bp, Homo sapien
agttttaggttcatgaaaaaactgtggaaggta

SEQ ID NO: 831604 - DNA, 33 bp, Homo sapien
agttttaggttcatgacaaaactgtggaaggta

SEQ ID NO: 831605 - DNA, 33 bp, Homo sapien
ctcagaatccttgaaaagagcatcgaaaaggaa

SEQ ID NO: 831606 - DNA, 33 bp, Homo sapien
ctcagaatccttgaaaggagcatcgaaaaggaa

SEQ ID NO: 831607 - DNA, 33 bp, Homo sapien
gagaatcacatgaggaacatatccaaaaactgc

SEQ ID NO: 831608 - DNA, 33 bp, Homo sapien
gagaatcacatgaggaccatatccaaaaactgc

SEQ ID NO: 831609 - DNA, 33 bp, Homo sapien
ggtatgactacgaaaacagaatgcaatgtttgt

SEQ ID NO: 831610 - DNA, 33 bp, Homo sapien
ggtatgactacgaaaagagaatgcaatgtttgt

SEQ ID NO: 831611 - DNA, 33 bp, Homo sapien
gccacagaaacatgaaaaatgtctacccaggga

SEQ ID NO: 831612 - DNA, 33 bp, Homo sapien
gccacagaaacatgaagaatgtctacccaggga

SEQ ID NO: 831613 - DNA, 33 bp, Homo sapien
acagtcatgactggaggatcaaatacttgagat

SEQ ID NO: 831614 - DNA, 33 bp, Homo sapien
acagtcatgactggagtatcaaatacttgagat

SEQ ID NO: 831615 - DNA, 33 bp, Homo sapien
cttctctatatgttgcacaaagtggcctccaac

SEQ ID NO: 831616 - DNA, 33 bp, Homo sapien
cttctctatatgttgcccaaagtggcctccaac

SEQ ID NO: 831617 - DNA, 33 bp, Homo sapien
gtgtaccatcttgctacccttttaatttcagca

SEQ ID NO: 831618 - DNA, 33 bp, Homo sapien
gtgtaccatcttgctatccttttaatttcagca

SEQ ID NO: 831619 - DNA, 33 bp, Homo sapien
cagtgttttcctgaaccaacagtctttaatcct

SEQ ID NO: 831620 - DNA, 33 bp, Homo sapien
cagtgttttcctgaactaacagtctttaatcct

SEQ ID NO: 831621 - DNA, 33 bp, Homo sapien
tatgctagatgacatagagaggaatatcaaatg

SEQ ID NO: 831622 - DNA, 33 bp, Homo sapien
tatgctagatgacatatagaggaatatcaaatg

SEQ ID NO: 831623 - DNA, 33 bp, Homo sapien
tacaatataaaagggcaaataatcattatgtgt

SEQ ID NO: 831624 - DNA, 33 bp, Homo sapien
tacaatataaaagggcgaataatcattatgtgt

SEQ ID NO: 831625 - DNA, 33 bp, Homo sapien
tttatattgtactacccattccttctgattcct

SEQ ID NO: 831626 - DNA, 33 bp, Homo sapien
tttatattgtactacctattccttctgattcct

SEQ ID NO: 831627 - DNA, 33 bp, Homo sapien
tggcagagatctgagaaagggtgaggaaaaagt

SEQ ID NO: 831628 - DNA, 33 bp, Homo sapien
tggcagagatctgagagagggtgaggaaaaagt

SEQ ID NO: 831629 - DNA, 33 bp, Homo sapien
gaagcagggctggaaacaaattagactaaatgg

SEQ ID NO: 831630 - DNA, 33 bp, Homo sapien
gaagcagggctggaaagaaattagactaaatgg

SEQ ID NO: 831631 - DNA, 33 bp, Homo sapien
agagggtggtgaagacaatacccttaattttct

SEQ ID NO: 831632 - DNA, 33 bp, Homo sapien
agagggtggtgaagacgatacccttaattttct

SEQ ID NO: 831633 - DNA, 33 bp, Homo sapien
cgtcttcccattaagtcaaagtcatatgttgaa

SEQ ID NO: 831634 - DNA, 33 bp, Homo sapien
cgtcttcccattaagtgaaagtcatatgttgaa

SEQ ID NO: 831635 - DNA, 33 bp, Homo sapien
ggactagagaatcttacgatagattattatgtg

SEQ ID NO: 831636 - DNA, 33 bp, Homo sapien
ggactagagaatcttatgatagattattatgtg

SEQ ID NO: 831637 - DNA, 33 bp, Homo sapien
atattgtccttgagcacctttttatatgtttaa

SEQ ID NO: 831638 - DNA, 33 bp, Homo sapien
atattgtccttgagcatctttttatatgtttaa

SEQ ID NO: 831639 - DNA, 33 bp, Homo sapien
cctggtggaattgaaaatcctggagtaggccat

SEQ ID NO: 831640 - DNA, 33 bp, Homo sapien
cctggtggaattgaaagtcctggagtaggccat

SEQ ID NO: 831641 - DNA, 33 bp, Homo sapien
tattgctgttagctctgaaactacagagcagaa

SEQ ID NO: 831642 - DNA, 33 bp, Homo sapien
tattgctgttagctcttaaactacagagcagaa

SEQ ID NO: 831643 - DNA, 33 bp, Homo sapien
ataagacatcaaagtgcatgtgcagtagacggc

SEQ ID NO: 831644 - DNA, 33 bp, Homo sapien
ataagacatcaaagtgtatgtgcagtagacggc

SEQ ID NO: 831645 - DNA, 33 bp, Homo sapien
gacatgatgacaagctaagagtgtcaattggca

SEQ ID NO: 831646 - DNA, 33 bp, Homo sapien
gacatgatgacaagctcagagtgtcaattggca

SEQ ID NO: 831647 - DNA, 33 bp, Homo sapien
aaattcactgatcttccccacatgcagaataat

SEQ ID NO: 831648 - DNA, 33 bp, Homo sapien
aaattcactgatcttctccacatgcagaataat

SEQ ID NO: 831649 - DNA, 33 bp, Homo sapien
tttttgctttatgtacgctagctacactggccc

SEQ ID NO: 831650 - DNA, 33 bp, Homo sapien
tttttgctttatgtactctagctacactggccc

SEQ ID NO: 831651 - DNA, 33 bp, Homo sapien
ttgacgacaaaagaaaacacatctgcagtttgt

SEQ ID NO: 831652 - DNA, 33 bp, Homo sapien
ttgacgacaaaagaaagcacatctgcagtttgt

SEQ ID NO: 831653 - DNA, 33 bp, Homo sapien
agattaggcctaagagcagggtataacaccact

SEQ ID NO: 831654 - DNA, 33 bp, Homo sapien
agattaggcctaagaggagggtataacaccact

SEQ ID NO: 831655 - DNA, 33 bp, Homo sapien
gcgcttcctctttgagaccatgttacagtttat

SEQ ID NO: 831656 - DNA, 33 bp, Homo sapien
gcgcttcctctttgagtccatgttacagtttat

SEQ ID NO: 831657 - DNA, 33 bp, Homo sapien
cctatataaacagacaagatgaggtaaagttac

SEQ ID NO: 831658 - DNA, 33 bp, Homo sapien
cctatataaacagacaggatgaggtaaagttac

SEQ ID NO: 831659 - DNA, 33 bp, Homo sapien
ttaaaataaattgtgacggcacagctaacttta

SEQ ID NO: 831660 - DNA, 33 bp, Homo sapien
ttaaaataaattgtgatggcacagctaacttta

SEQ ID NO: 831661 - DNA, 33 bp, Homo sapien
tctaatcacatacctcccatccctattttagct

SEQ ID NO: 831662 - DNA, 33 bp, Homo sapien
tctaatcacatacctctcatccctattttagct

SEQ ID NO: 831663 - DNA, 33 bp, Homo sapien
aaagccataaagagaaagttctcacgcttgtat

SEQ ID NO: 831664 - DNA, 33 bp, Homo sapien
aaagccataaagagaaggttctcacgcttgtat

SEQ ID NO: 831665 - DNA, 33 bp, Homo sapien
cataacaactttgtgaaaaattactatttttat

SEQ ID NO: 831666 - DNA, 33 bp, Homo sapien
cataacaactttgtgataaattactatttttat

SEQ ID NO: 831667 - DNA, 33 bp, Homo sapien
acattatctggcacataataagcagtaaataat

SEQ ID NO: 831668 - DNA, 33 bp, Homo sapien
acattatctggcacatgataagcagtaaataat

SEQ ID NO: 831669 - DNA, 33 bp, Homo sapien
agctctggaagcgcaaatcggtcttgaagtcct

SEQ ID NO: 831670 - DNA, 33 bp, Homo sapien
agctctggaagcgcaagtcggtcttgaagtcct

SEQ ID NO: 831671 - DNA, 33 bp, Homo sapien
taaataacacgttctaaagtaatctcacaccct

SEQ ID NO: 831672 - DNA, 33 bp, Homo sapien
taaataacacgttctacagtaatctcacaccct

SEQ ID NO: 831673 - DNA, 33 bp, Homo sapien
ctagctgtttacatgaaagaatattttgcacac

SEQ ID NO: 831674 - DNA, 33 bp, Homo sapien
ctagctgtttacatgagagaatattttgcacac

SEQ ID NO: 831675 - DNA, 33 bp, Homo sapien
gaaccacactatctgaatcaagtgtgagcagtt

SEQ ID NO: 831676 - DNA, 33 bp, Homo sapien
gaaccacactatctgactcaagtgtgagcagtt

SEQ ID NO: 831677 - DNA, 33 bp, Homo sapien
agtacagctggtcacaaaaaacccacagctttc

SEQ ID NO: 831678 - DNA, 33 bp, Homo sapien
agtacagctggtcacacaaaacccacagctttc

SEQ ID NO: 831679 - DNA, 33 bp, Homo sapien
gcaaagctcgcgccaaagccaagacccgctctt

SEQ ID NO: 831680 - DNA, 33 bp, Homo sapien
gcaaagctcgcgccaaggccaagacccgctctt

SEQ ID NO: 831681 - DNA, 33 bp, Homo sapien
aatgaggtcatgatagacacatatgtagagcac

SEQ ID NO: 831682 - DNA, 33 bp, Homo sapien
aatgaggtcatgatagtcacatatgtagagcac

SEQ ID NO: 831683 - DNA, 33 bp, Homo sapien
gggaacaagtagcacaatgagtgtccacaggct

SEQ ID NO: 831684 - DNA, 33 bp, Homo sapien
gggaacaagtagcacagtgagtgtccacaggct

SEQ ID NO: 831685 - DNA, 33 bp, Homo sapien
actattttaattacgacgtgtcattactgattt

SEQ ID NO: 831686 - DNA, 33 bp, Homo sapien
actattttaattacgaggtgtcattactgattt

SEQ ID NO: 831687 - DNA, 33 bp, Homo sapien
aagacagggtttctggacacagctgatttccta

SEQ ID NO: 831688 - DNA, 33 bp, Homo sapien
aagacagggtttctgggcacagctgatttccta

SEQ ID NO: 831689 - DNA, 33 bp, Homo sapien
agaactttgaagatacagaatccactgcccttc

SEQ ID NO: 831690 - DNA, 33 bp, Homo sapien
agaactttgaagataccgaatccactgcccttc

SEQ ID NO: 831691 - DNA, 33 bp, Homo sapien
cacaagagaagttatacggtcaataagcacata

SEQ ID NO: 831692 - DNA, 33 bp, Homo sapien
cacaagagaagttatatggtcaataagcacata

SEQ ID NO: 831693 - DNA, 33 bp, Homo sapien
acagtagtgaaggatgaatgtgataatatctag

SEQ ID NO: 831694 - DNA, 33 bp, Homo sapien
acagtagtgaaggatggatgtgataatatctag

SEQ ID NO: 831695 - DNA, 33 bp, Homo sapien
gctaggtctaacaacacatatagaagatgggtc

SEQ ID NO: 831696 - DNA, 33 bp, Homo sapien
gctaggtctaacaacatatatagaagatgggtc

SEQ ID NO: 831697 - DNA, 33 bp, Homo sapien
tcctagttaattccacacctatcatcataatac

SEQ ID NO: 831698 - DNA, 33 bp, Homo sapien
tcctagttaattccactcctatcatcataatac

SEQ ID NO: 831699 - DNA, 33 bp, Homo sapien
cccagctccaaggaccaaggaaagatggtttct

SEQ ID NO: 831700 - DNA, 33 bp, Homo sapien
cccagctccaaggaccgaggaaagatggtttct

SEQ ID NO: 831701 - DNA, 33 bp, Homo sapien
ataaatattcaaatataagagcaatcgggtcca

SEQ ID NO: 831702 - DNA, 33 bp, Homo sapien
ataaatattcaaatatgagagcaatcgggtcca

SEQ ID NO: 831703 - DNA, 33 bp, Homo sapien
atatctatgtgggtcaaggaatgaattgcagtg

SEQ ID NO: 831704 - DNA, 33 bp, Homo sapien
atatctatgtgggtcatggaatgaattgcagtg

SEQ ID NO: 831705 - DNA, 33 bp, Homo sapien
tggatgaatggataaaagactgtgcatatatac

SEQ ID NO: 831706 - DNA, 33 bp, Homo sapien
tggatgaatggataaaggactgtgcatatatac

SEQ ID NO: 831707 - DNA, 33 bp, Homo sapien
gtgaagttctcacttaacccacatctacatctt

SEQ ID NO: 831708 - DNA, 33 bp, Homo sapien
gtgaagttctcacttagcccacatctacatctt

SEQ ID NO: 831709 - DNA, 33 bp, Homo sapien
gagaattaagtggtgaactaaaggataaagtgt

SEQ ID NO: 831710 - DNA, 33 bp, Homo sapien
gagaattaagtggtgacctaaaggataaagtgt

SEQ ID NO: 831711 - DNA, 33 bp, Homo sapien
gagcttaggaaatagccgcatttgggtaacata

SEQ ID NO: 831712 - DNA, 33 bp, Homo sapien
gagcttaggaaatagctgcatttgggtaacata

SEQ ID NO: 831713 - DNA, 33 bp, Homo sapien
ttctttttcacaacaacgtatctaggcagcttg

SEQ ID NO: 831714 - DNA, 33 bp, Homo sapien
ttctttttcacaacaatgtatctaggcagcttg

SEQ ID NO: 831715 - DNA, 33 bp, Homo sapien
tactggtgttttcaagaactctatgcactgcta

SEQ ID NO: 831716 - DNA, 33 bp, Homo sapien
tactggtgttttcaagcactctatgcactgcta

SEQ ID NO: 831717 - DNA, 33 bp, Homo sapien
aggatataaagtgaacaagtagataccaaaaag

SEQ ID NO: 831718 - DNA, 33 bp, Homo sapien
aggatataaagtgaacgagtagataccaaaaag

SEQ ID NO: 831719 - DNA, 33 bp, Homo sapien
ctgcttttctacttcccgatagaccgttgggct

SEQ ID NO: 831720 - DNA, 33 bp, Homo sapien
ctgcttttctacttcctgatagaccgttgggct

SEQ ID NO: 831721 - DNA, 33 bp, Homo sapien
gtttaaattcctagcaaagtgccgtaagaaaca

SEQ ID NO: 831722 - DNA, 33 bp, Homo sapien
gtttaaattcctagcagagtgccgtaagaaaca

SEQ ID NO: 831723 - DNA, 33 bp, Homo sapien
gagaacctctggaaaacaataagttgagatggc

SEQ ID NO: 831724 - DNA, 33 bp, Homo sapien
gagaacctctggaaaataataagttgagatggc

SEQ ID NO: 831725 - DNA, 33 bp, Homo sapien
atcatcagtctgtctccatgttctcagttcttg

SEQ ID NO: 831726 - DNA, 33 bp, Homo sapien
atcatcagtctgtctctatgttctcagttcttg

SEQ ID NO: 831727 - DNA, 33 bp, Homo sapien
aggctcaggatacaagccaatttttaaagaact

SEQ ID NO: 831728 - DNA, 33 bp, Homo sapien
aggctcaggatacaagtcaatttttaaagaact

SEQ ID NO: 831729 - DNA, 33 bp, Homo sapien
attcaccaaaactcacaaaaacgaatgtatgac

SEQ ID NO: 831730 - DNA, 33 bp, Homo sapien
attcaccaaaactcacgaaaacgaatgtatgac

SEQ ID NO: 831731 - DNA, 33 bp, Homo sapien
aaatggatcgagaaaaagatcatgtaaaatagt

SEQ ID NO: 831732 - DNA, 33 bp, Homo sapien
aaatggatcgagaaaaggatcatgtaaaatagt

SEQ ID NO: 831733 - DNA, 33 bp, Homo sapien
gggaaagatgatcatacaatttttccaaagcat

SEQ ID NO: 831734 - DNA, 33 bp, Homo sapien
gggaaagatgatcatataatttttccaaagcat

SEQ ID NO: 831735 - DNA, 33 bp, Homo sapien
tactggtctataaataacatatgatgtcactta

SEQ ID NO: 831736 - DNA, 33 bp, Homo sapien
tactggtctataaatagcatatgatgtcactta

SEQ ID NO: 831737 - DNA, 33 bp, Homo sapien
ctcttaggagtgatggcatttgaccgctatgca

SEQ ID NO: 831738 - DNA, 33 bp, Homo sapien
ctcttaggagtgatggtatttgaccgctatgca

SEQ ID NO: 831739 - DNA, 33 bp, Homo sapien
aggatcaaattgaattcaaaatatcaccagtag

SEQ ID NO: 831740 - DNA, 33 bp, Homo sapien
aggatcaaattgaattgaaaatatcaccagtag

SEQ ID NO: 831741 - DNA, 33 bp, Homo sapien
gattatcatttccatacagctccttagtagcgt

SEQ ID NO: 831742 - DNA, 33 bp, Homo sapien
gattatcatttccatagagctccttagtagcgt

SEQ ID NO: 831743 - DNA, 33 bp, Homo sapien
gtatcaatttctttcacactctaatggctctac

SEQ ID NO: 831744 - DNA, 33 bp, Homo sapien
gtatcaatttctttcatactctaatggctctac

SEQ ID NO: 831745 - DNA, 33 bp, Homo sapien
aattaatgcggtaggccattgtgtttgagctca

SEQ ID NO: 831746 - DNA, 33 bp, Homo sapien
aattaatgcggtaggctattgtgtttgagctca

SEQ ID NO: 831747 - DNA, 33 bp, Homo sapien
tatgcctgttgaaagagattgttaaaccacgta

SEQ ID NO: 831748 - DNA, 33 bp, Homo sapien
tatgcctgttgaaagatattgttaaaccacgta

SEQ ID NO: 831749 - DNA, 33 bp, Homo sapien
ataataccagcttacaatcttctgtagatttaa

SEQ ID NO: 831750 - DNA, 33 bp, Homo sapien
ataataccagcttacagtcttctgtagatttaa

SEQ ID NO: 831751 - DNA, 33 bp, Homo sapien
agtggagcttttctggacaagagatcttgtgct

SEQ ID NO: 831752 - DNA, 33 bp, Homo sapien
agtggagcttttctgggcaagagatcttgtgct

SEQ ID NO: 831753 - DNA, 33 bp, Homo sapien
gccttaggaatgtcccccaacaatagtgcatga

SEQ ID NO: 831754 - DNA, 33 bp, Homo sapien
gccttaggaatgtccctcaacaatagtgcatga

SEQ ID NO: 831755 - DNA, 33 bp, Homo sapien
atggacagaagcaaaacatgttcatagagaagt

SEQ ID NO: 831756 - DNA, 33 bp, Homo sapien
atggacagaagcaaaatatgttcatagagaagt

SEQ ID NO: 831757 - DNA, 33 bp, Homo sapien
gtgctggaattgaaccacccttctttattataa

SEQ ID NO: 831758 - DNA, 33 bp, Homo sapien
gtgctggaattgaaccgcccttctttattataa

SEQ ID NO: 831759 - DNA, 33 bp, Homo sapien
actgataaaccttgtcaaagcaggagatgcatg

SEQ ID NO: 831760 - DNA, 33 bp, Homo sapien
actgataaaccttgtccaagcaggagatgcatg

SEQ ID NO: 831761 - DNA, 33 bp, Homo sapien
gggcagtacagaaaagaaagcatacacctaaac

SEQ ID NO: 831762 - DNA, 33 bp, Homo sapien
gggcagtacagaaaaggaagcatacacctaaac

SEQ ID NO: 831763 - DNA, 33 bp, Homo sapien
ttcacagtgtgtaaaacctagctttggtgtcta

SEQ ID NO: 831764 - DNA, 33 bp, Homo sapien
ttcacagtgtgtaaaatctagctttggtgtcta

SEQ ID NO: 831765 - DNA, 33 bp, Homo sapien
tgggttggcagaacaagggagaaggtttggtca

SEQ ID NO: 831766 - DNA, 33 bp, Homo sapien
tgggttggcagaacaatggagaaggtttggtca

SEQ ID NO: 831767 - DNA, 33 bp, Homo sapien
taaaggtgaatgatgaagtctgagcagaggaat

SEQ ID NO: 831768 - DNA, 33 bp, Homo sapien
taaaggtgaatgatgaggtctgagcagaggaat

SEQ ID NO: 831769 - DNA, 33 bp, Homo sapien
gagatgtagctagatcacttgtcctaaagctcc

SEQ ID NO: 831770 - DNA, 33 bp, Homo sapien
gagatgtagctagatcgcttgtcctaaagctcc

SEQ ID NO: 831771 - DNA, 33 bp, Homo sapien
ggttggaatcttcctaagtctgatgggtggaaa

SEQ ID NO: 831772 - DNA, 33 bp, Homo sapien
ggttggaatcttcctatgtctgatgggtggaaa

SEQ ID NO: 831773 - DNA, 33 bp, Homo sapien
gtagtctggagcactacaaccattgtacccttt

SEQ ID NO: 831774 - DNA, 33 bp, Homo sapien
gtagtctggagcactataaccattgtacccttt

SEQ ID NO: 831775 - DNA, 33 bp, Homo sapien
aaacatcttttcaagcagaatttaggaatctac

SEQ ID NO: 831776 - DNA, 33 bp, Homo sapien
aaacatcttttcaagcggaatttaggaatctac

SEQ ID NO: 831777 - DNA, 33 bp, Homo sapien
ttaaacaaatgaaatccctgtttttgtgggtca

SEQ ID NO: 831778 - DNA, 33 bp, Homo sapien
ttaaacaaatgaaatctctgtttttgtgggtca

SEQ ID NO: 831779 - DNA, 33 bp, Homo sapien
agttgctgttgcaggcagagtacgtccccacga

SEQ ID NO: 831780 - DNA, 33 bp, Homo sapien
agttgctgttgcaggcggagtacgtccccacga

SEQ ID NO: 831781 - DNA, 33 bp, Homo sapien
ttaaaatagctacttacggtttaatgttaaaaa

SEQ ID NO: 831782 - DNA, 33 bp, Homo sapien
ttaaaatagctacttatggtttaatgttaaaaa

SEQ ID NO: 831783 - DNA, 33 bp, Homo sapien
catctagccttcctaactatgagacagtaagtg

SEQ ID NO: 831784 - DNA, 33 bp, Homo sapien
catctagccttcctaattatgagacagtaagtg

SEQ ID NO: 831785 - DNA, 33 bp, Homo sapien
tgcaaaactgttttccaatctgactagcacttg

SEQ ID NO: 831786 - DNA, 33 bp, Homo sapien
tgcaaaactgttttcccatctgactagcacttg

SEQ ID NO: 831787 - DNA, 33 bp, Homo sapien
taatcttctgtgaccaatctctacggatattta

SEQ ID NO: 831788 - DNA, 33 bp, Homo sapien
taatcttctgtgaccagtctctacggatattta

SEQ ID NO: 831789 - DNA, 33 bp, Homo sapien
gtaagagctggagaacagttaggagctatttag

SEQ ID NO: 831790 - DNA, 33 bp, Homo sapien
gtaagagctggagaactgttaggagctatttag

SEQ ID NO: 831791 - DNA, 33 bp, Homo sapien
ccatcttcaaagccaaaactgagttgagtcttt

SEQ ID NO: 831792 - DNA, 33 bp, Homo sapien
ccatcttcaaagccaacactgagttgagtcttt

SEQ ID NO: 831793 - DNA, 33 bp, Homo sapien
aaacccatgttgtaagaaactcagggtaacctc

SEQ ID NO: 831794 - DNA, 33 bp, Homo sapien
aaacccatgttgtaaggaactcagggtaacctc

SEQ ID NO: 831795 - DNA, 33 bp, Homo sapien
aaacctacatatgatacgataccagggggtgaa

SEQ ID NO: 831796 - DNA, 33 bp, Homo sapien
aaacctacatatgataggataccagggggtgaa

SEQ ID NO: 831797 - DNA, 33 bp, Homo sapien
agaacagactaatacaacttctacctattcaat

SEQ ID NO: 831798 - DNA, 33 bp, Homo sapien
agaacagactaatacagcttctacctattcaat

SEQ ID NO: 831799 - DNA, 33 bp, Homo sapien
aactttcatgtagaatcaccgtatcatccggca

SEQ ID NO: 831800 - DNA, 33 bp, Homo sapien
aactttcatgtagaatgaccgtatcatccggca

SEQ ID NO: 831801 - DNA, 33 bp, Homo sapien
gaacatttattggaaaaccccaccactaccatc

SEQ ID NO: 831802 - DNA, 33 bp, Homo sapien
gaacatttattggaaatccccaccactaccatc

SEQ ID NO: 831803 - DNA, 33 bp, Homo sapien
ggtcctaaaaatcctcaaagttctgcctgttta

SEQ ID NO: 831804 - DNA, 33 bp, Homo sapien
ggtcctaaaaatcctcgaagttctgcctgttta

SEQ ID NO: 831805 - DNA, 33 bp, Homo sapien
tcccctgttcccataccagcacaacttctccca

SEQ ID NO: 831806 - DNA, 33 bp, Homo sapien
tcccctgttcccatactagcacaacttctccca

SEQ ID NO: 831807 - DNA, 33 bp, Homo sapien
ttgctgtgaacctgaaagtgctctataaaaaga

SEQ ID NO: 831808 - DNA, 33 bp, Homo sapien
ttgctgtgaacctgaacgtgctctataaaaaga

SEQ ID NO: 831809 - DNA, 33 bp, Homo sapien
ttgtcttgttttctgaccctatgtacagccttc

SEQ ID NO: 831810 - DNA, 33 bp, Homo sapien
ttgtcttgttttctgagcctatgtacagccttc

SEQ ID NO: 831811 - DNA, 33 bp, Homo sapien
tatattcataatgtgcaaagagcataagctttt

SEQ ID NO: 831812 - DNA, 33 bp, Homo sapien
tatattcataatgtgctaagagcataagctttt

SEQ ID NO: 831813 - DNA, 33 bp, Homo sapien
aaatccacaattatccaaggtgcattcccatca

SEQ ID NO: 831814 - DNA, 33 bp, Homo sapien
aaatccacaattatccgaggtgcattcccatca

SEQ ID NO: 831815 - DNA, 33 bp, Homo sapien
caaaacccttagcaacactttcccatcagaggg

SEQ ID NO: 831816 - DNA, 33 bp, Homo sapien
caaaacccttagcaacgctttcccatcagaggg

SEQ ID NO: 831817 - DNA, 33 bp, Homo sapien
gaaacatgtagcacatgactatatgaaaggaca

SEQ ID NO: 831818 - DNA, 33 bp, Homo sapien
gaaacatgtagcacattactatatgaaaggaca

SEQ ID NO: 831819 - DNA, 33 bp, Homo sapien
tagtcctcatttactaaaagtctttgtcacaaa

SEQ ID NO: 831820 - DNA, 33 bp, Homo sapien
tagtcctcatttactataagtctttgtcacaaa

SEQ ID NO: 831821 - DNA, 33 bp, Homo sapien
tgcctcctatcaaccccctccaatattacataa

SEQ ID NO: 831822 - DNA, 33 bp, Homo sapien
tgcctcctatcaaccctctccaatattacataa

SEQ ID NO: 831823 - DNA, 33 bp, Homo sapien
aaagaagagtaaaagaactcatggatctgacca

SEQ ID NO: 831824 - DNA, 33 bp, Homo sapien
aaagaagagtaaaagacctcatggatctgacca

SEQ ID NO: 831825 - DNA, 33 bp, Homo sapien
acatattgcactggtacggcttctccccagtat

SEQ ID NO: 831826 - DNA, 33 bp, Homo sapien
acatattgcactggtatggcttctccccagtat

SEQ ID NO: 831827 - DNA, 33 bp, Homo sapien
ccaataggttctaatacgcaaagaatgccaaga

SEQ ID NO: 831828 - DNA, 33 bp, Homo sapien
ccaataggttctaatatgcaaagaatgccaaga

SEQ ID NO: 831829 - DNA, 33 bp, Homo sapien
cagtaagttcttgccaataagtttatacagaat

SEQ ID NO: 831830 - DNA, 33 bp, Homo sapien
cagtaagttcttgccagtaagtttatacagaat

SEQ ID NO: 831831 - DNA, 33 bp, Homo sapien
agaggggatcattgacacaaattcgtcctttta

SEQ ID NO: 831832 - DNA, 33 bp, Homo sapien
agaggggatcattgacgcaaattcgtcctttta

SEQ ID NO: 831833 - DNA, 33 bp, Homo sapien
cacacagagaagctagcaagcaagcaaataaac

SEQ ID NO: 831834 - DNA, 33 bp, Homo sapien
cacacagagaagctaggaagcaagcaaataaac

SEQ ID NO: 831835 - DNA, 33 bp, Homo sapien
agctatacagaggtcacgtggatgagaaccaaa

SEQ ID NO: 831836 - DNA, 33 bp, Homo sapien
agctatacagaggtcatgtggatgagaaccaaa

SEQ ID NO: 831837 - DNA, 33 bp, Homo sapien
gaaagcgcaggcggcaaatctcctgagtgtggg

SEQ ID NO: 831838 - DNA, 33 bp, Homo sapien
gaaagcgcaggcggcatatctcctgagtgtggg

SEQ ID NO: 831839 - DNA, 33 bp, Homo sapien
tgggagctggccactgacacttgcacagccttc

SEQ ID NO: 831840 - DNA, 33 bp, Homo sapien
tgggagctggccactggcacttgcacagccttc

SEQ ID NO: 831841 - DNA, 33 bp, Homo sapien
gatttatcatgtgtgacagaatatgattgagga

SEQ ID NO: 831842 - DNA, 33 bp, Homo sapien
gatttatcatgtgtgagagaatatgattgagga

SEQ ID NO: 831843 - DNA, 33 bp, Homo sapien
accataagagtgttgacgtgaccttttgagaat

SEQ ID NO: 831844 - DNA, 33 bp, Homo sapien
accataagagtgttgatgtgaccttttgagaat

SEQ ID NO: 831845 - DNA, 33 bp, Homo sapien
ttcaataaaactctaccctatccatcttcttat

SEQ ID NO: 831846 - DNA, 33 bp, Homo sapien
ttcaataaaactctactctatccatcttcttat

SEQ ID NO: 831847 - DNA, 33 bp, Homo sapien
tacgtgtttattgtgtaaactgagcacagtgaa

SEQ ID NO: 831848 - DNA, 33 bp, Homo sapien
tacgtgtttattgtgtcaactgagcacagtgaa

SEQ ID NO: 831849 - DNA, 33 bp, Homo sapien
tgtccattgtcacagaactattaaatgcagcgt

SEQ ID NO: 831850 - DNA, 33 bp, Homo sapien
tgtccattgtcacagagctattaaatgcagcgt

SEQ ID NO: 831851 - DNA, 33 bp, Homo sapien
aagcaccaattatgggaagaagaatacaattga

SEQ ID NO: 831852 - DNA, 33 bp, Homo sapien
aagcaccaattatggggagaagaatacaattga

SEQ ID NO: 831853 - DNA, 33 bp, Homo sapien
agcaacaaagagatcacgtaaatcacaaatcat

SEQ ID NO: 831854 - DNA, 33 bp, Homo sapien
agcaacaaagagatcatgtaaatcacaaatcat

SEQ ID NO: 831855 - DNA, 33 bp, Homo sapien
cacatatagacagaaacttatgacactattatt

SEQ ID NO: 831856 - DNA, 33 bp, Homo sapien
cacatatagacagaaagttatgacactattatt

SEQ ID NO: 831857 - DNA, 33 bp, Homo sapien
tagcagatttggcatacagtgaaagcttctctc

SEQ ID NO: 831858 - DNA, 33 bp, Homo sapien
tagcagatttggcatagagtgaaagcttctctc

SEQ ID NO: 831859 - DNA, 33 bp, Homo sapien
cccaatgggagtggaaaggttaatatcaatctt

SEQ ID NO: 831860 - DNA, 33 bp, Homo sapien
cccaatgggagtggaagggttaatatcaatctt

SEQ ID NO: 831861 - DNA, 33 bp, Homo sapien
tttcttcccactcttacaggtccatccacatga

SEQ ID NO: 831862 - DNA, 33 bp, Homo sapien
tttcttcccactcttataggtccatccacatga

SEQ ID NO: 831863 - DNA, 33 bp, Homo sapien
ttcttactataccaaacgaacaggagagtaggt

SEQ ID NO: 831864 - DNA, 33 bp, Homo sapien
ttcttactataccaaaggaacaggagagtaggt

SEQ ID NO: 831865 - DNA, 33 bp, Homo sapien
aaagagtcacgaatccaagacatttttaaaaca

SEQ ID NO: 831866 - DNA, 33 bp, Homo sapien
aaagagtcacgaatccgagacatttttaaaaca

SEQ ID NO: 831867 - DNA, 33 bp, Homo sapien
ctgtggatagagaaaagaaaaggtcaagaacag

SEQ ID NO: 831868 - DNA, 33 bp, Homo sapien
ctgtggatagagaaaataaaaggtcaagaacag

SEQ ID NO: 831869 - DNA, 33 bp, Homo sapien
caaaaaactggcataacattcacattaaaattc

SEQ ID NO: 831870 - DNA, 33 bp, Homo sapien
caaaaaactggcataatattcacattaaaattc

SEQ ID NO: 831871 - DNA, 33 bp, Homo sapien
cagagttatcccattaacaaccaggtctgtggt

SEQ ID NO: 831872 - DNA, 33 bp, Homo sapien
cagagttatcccattaccaaccaggtctgtggt

SEQ ID NO: 831873 - DNA, 33 bp, Homo sapien
aaacaacatcacagtacgtgaaatcacctaaca

SEQ ID NO: 831874 - DNA, 33 bp, Homo sapien
aaacaacatcacagtatgtgaaatcacctaaca

SEQ ID NO: 831875 - DNA, 33 bp, Homo sapien
acaactgtctttatcgaatcattgatcagtgcc

SEQ ID NO: 831876 - DNA, 33 bp, Homo sapien
acaactgtctttatcgtatcattgatcagtgcc

SEQ ID NO: 831877 - DNA, 33 bp, Homo sapien
ttcatacttaacagcaaaagactatgctttaac

SEQ ID NO: 831878 - DNA, 33 bp, Homo sapien
ttcatacttaacagcagaagactatgctttaac

SEQ ID NO: 831879 - DNA, 33 bp, Homo sapien
attccatgtcactccacctttttttggtactac

SEQ ID NO: 831880 - DNA, 33 bp, Homo sapien
attccatgtcactccatctttttttggtactac

SEQ ID NO: 831881 - DNA, 33 bp, Homo sapien
ttctaagacaagagaaagtatcaaagagatgac

SEQ ID NO: 831882 - DNA, 33 bp, Homo sapien
ttctaagacaagagaaggtatcaaagagatgac

SEQ ID NO: 831883 - DNA, 33 bp, Homo sapien
gctagttttccaaatacctaaagagctcctaaa

SEQ ID NO: 831884 - DNA, 33 bp, Homo sapien
gctagttttccaaatatctaaagagctcctaaa

SEQ ID NO: 831885 - DNA, 33 bp, Homo sapien
gcttaagacagaactccgagtaaaaccaatctc

SEQ ID NO: 831886 - DNA, 33 bp, Homo sapien
gcttaagacagaactctgagtaaaaccaatctc

SEQ ID NO: 831887 - DNA, 33 bp, Homo sapien
acccagacctcttatcacaaagacaggagaatg

SEQ ID NO: 831888 - DNA, 33 bp, Homo sapien
acccagacctcttatcgcaaagacaggagaatg

SEQ ID NO: 831889 - DNA, 33 bp, Homo sapien
accaactgcagaagaacgaaagaagtgtcaaat

SEQ ID NO: 831890 - DNA, 33 bp, Homo sapien
accaactgcagaagaatgaaagaagtgtcaaat

SEQ ID NO: 831891 - DNA, 33 bp, Homo sapien
cccatacttgttcttacaggtacaaatccctgt

SEQ ID NO: 831892 - DNA, 33 bp, Homo sapien
cccatacttgttcttataggtacaaatccctgt

SEQ ID NO: 831893 - DNA, 33 bp, Homo sapien
gacttcagttatatcccggaactggcaaattgt

SEQ ID NO: 831894 - DNA, 33 bp, Homo sapien
gacttcagttatatcctggaactggcaaattgt

SEQ ID NO: 831895 - DNA, 33 bp, Homo sapien
gagaaggaaaggaacaaagtttagcagggagca

SEQ ID NO: 831896 - DNA, 33 bp, Homo sapien
gagaaggaaaggaacagagtttagcagggagca

SEQ ID NO: 831897 - DNA, 33 bp, Homo sapien
aagaaggacacattcaatacaggctagccagtg

SEQ ID NO: 831898 - DNA, 33 bp, Homo sapien
aagaaggacacattcagtacaggctagccagtg

SEQ ID NO: 831899 - DNA, 33 bp, Homo sapien
aacaatgttgatttatcagaattcccttagtgt

SEQ ID NO: 831900 - DNA, 33 bp, Homo sapien
aacaatgttgatttatgagaattcccttagtgt

SEQ ID NO: 831901 - DNA, 33 bp, Homo sapien
tgagaagggagaaacaatatacaaggtaaagcg

SEQ ID NO: 831902 - DNA, 33 bp, Homo sapien
tgagaagggagaaacagtatacaaggtaaagcg

SEQ ID NO: 831903 - DNA, 33 bp, Homo sapien
cttcagacccaggtaaacctgcagctatgatct

SEQ ID NO: 831904 - DNA, 33 bp, Homo sapien
cttcagacccaggtaagcctgcagctatgatct

SEQ ID NO: 831905 - DNA, 33 bp, Homo sapien
ccttaatgattctagacgcctggtaggttgttt

SEQ ID NO: 831906 - DNA, 33 bp, Homo sapien
ccttaatgattctagatgcctggtaggttgttt

SEQ ID NO: 831907 - DNA, 33 bp, Homo sapien
agccaatactctgaaaccccagcttttggtagc

SEQ ID NO: 831908 - DNA, 33 bp, Homo sapien
agccaatactctgaaatcccagcttttggtagc

SEQ ID NO: 831909 - DNA, 33 bp, Homo sapien
gagtttggagaaaatccaaatactcactttgca

SEQ ID NO: 831910 - DNA, 33 bp, Homo sapien
gagtttggagaaaatcgaaatactcactttgca

SEQ ID NO: 831911 - DNA, 33 bp, Homo sapien
agcttttcagtaaatacatgtttctccagccct

SEQ ID NO: 831912 - DNA, 33 bp, Homo sapien
agcttttcagtaaatatatgtttctccagccct

SEQ ID NO: 831913 - DNA, 33 bp, Homo sapien
ggcactcttattgctacgagattactaaaaagt

SEQ ID NO: 831914 - DNA, 33 bp, Homo sapien
ggcactcttattgctatgagattactaaaaagt

SEQ ID NO: 831915 - DNA, 33 bp, Homo sapien
tttatatggttgacaactactcacatgcatgtc

SEQ ID NO: 831916 - DNA, 33 bp, Homo sapien
tttatatggttgacaattactcacatgcatgtc

SEQ ID NO: 831917 - DNA, 33 bp, Homo sapien
gctacaactgtgtctaaaataagagcaaaagtc

SEQ ID NO: 831918 - DNA, 33 bp, Homo sapien
gctacaactgtgtctagaataagagcaaaagtc

SEQ ID NO: 831919 - DNA, 33 bp, Homo sapien
tattcaatcttacccaatctcctactttgtctg

SEQ ID NO: 831920 - DNA, 33 bp, Homo sapien
tattcaatcttacccagtctcctactttgtctg

SEQ ID NO: 831921 - DNA, 33 bp, Homo sapien
aaaccagcacaatgaaaaggaaacatgatgaga

SEQ ID NO: 831922 - DNA, 33 bp, Homo sapien
aaaccagcacaatgaagaggaaacatgatgaga

SEQ ID NO: 831923 - DNA, 33 bp, Homo sapien
aagggtacagtaggtaagtatagtcgtggttaa

SEQ ID NO: 831924 - DNA, 33 bp, Homo sapien
aagggtacagtaggtatgtatagtcgtggttaa

SEQ ID NO: 831925 - DNA, 33 bp, Homo sapien
ccacaaagttgttttcgacgagaattcgatggg

SEQ ID NO: 831926 - DNA, 33 bp, Homo sapien
ccacaaagttgttttctacgagaattcgatggg

SEQ ID NO: 831927 - DNA, 33 bp, Homo sapien
ttttacaaagggttcaagaccttcctggtgtgg

SEQ ID NO: 831928 - DNA, 33 bp, Homo sapien
ttttacaaagggttcatgaccttcctggtgtgg

SEQ ID NO: 831929 - DNA, 33 bp, Homo sapien
gaagagacaagagtaaaggtggggagccagggg

SEQ ID NO: 831930 - DNA, 33 bp, Homo sapien
gaagagacaagagtaatggtggggagccagggg

SEQ ID NO: 831931 - DNA, 33 bp, Homo sapien
agacaaattggagataacaaggatcgaactggg

SEQ ID NO: 831932 - DNA, 33 bp, Homo sapien
agacaaattggagataccaaggatcgaactggg

SEQ ID NO: 831933 - DNA, 33 bp, Homo sapien
aaactacatccacctaagcactaaaaccttctt

SEQ ID NO: 831934 - DNA, 33 bp, Homo sapien
aaactacatccacctatgcactaaaaccttctt

SEQ ID NO: 831935 - DNA, 33 bp, Homo sapien
attcttgttcaacgtacgtgctgctgagcaaat

SEQ ID NO: 831936 - DNA, 33 bp, Homo sapien
attcttgttcaacgtatgtgctgctgagcaaat

SEQ ID NO: 831937 - DNA, 33 bp, Homo sapien
ctagagtagtgcatgactaattatgtgaatgtc

SEQ ID NO: 831938 - DNA, 33 bp, Homo sapien
ctagagtagtgcatgattaattatgtgaatgtc

SEQ ID NO: 831939 - DNA, 33 bp, Homo sapien
tggaaggtaaggaacaaatctaacaaaagactc

SEQ ID NO: 831940 - DNA, 33 bp, Homo sapien
tggaaggtaaggaacatatctaacaaaagactc

SEQ ID NO: 831941 - DNA, 33 bp, Homo sapien
cttttaggatttgttacggaacatcatgccgat

SEQ ID NO: 831942 - DNA, 33 bp, Homo sapien
cttttaggatttgttagggaacatcatgccgat

SEQ ID NO: 831943 - DNA, 33 bp, Homo sapien
agctacatcccctggcacaagtcggttgtaacg

SEQ ID NO: 831944 - DNA, 33 bp, Homo sapien
agctacatcccctggcgcaagtcggttgtaacg

SEQ ID NO: 831945 - DNA, 33 bp, Homo sapien
tcagatgttgtacagtaaagaacagcgactctt

SEQ ID NO: 831946 - DNA, 33 bp, Homo sapien
tcagatgttgtacagtgaagaacagcgactctt

SEQ ID NO: 831947 - DNA, 33 bp, Homo sapien
tgaaagctgtgtaatcgattgtgaagaagaggc

SEQ ID NO: 831948 - DNA, 33 bp, Homo sapien
tgaaagctgtgtaatctattgtgaagaagaggc

SEQ ID NO: 831949 - DNA, 33 bp, Homo sapien; identical to SEQ ID NO: 831947

SEQ ID NO: 831950 - DNA, 33 bp, Homo sapien; identical to SEQ ID NO: 831948

SEQ ID NO: 831951 - DNA, 33 bp, Homo sapien
tgaccgagtcattaccagctctgctacatattt

SEQ ID NO: 831952 - DNA, 33 bp, Homo sapien
tgaccgagtcattaccggctctgctacatattt

SEQ ID NO: 831953 - DNA, 33 bp, Homo sapien; identical to SEQ ID NO: 831951

SEQ ID NO: 831954 - DNA, 33 bp, Homo sapien; identical to SEQ ID NO: 831952

SEQ ID NO: 831955 - DNA, 33 bp, Homo sapien
tcccaattcagagtgacaaaaatcgagaaagaa

SEQ ID NO: 831956 - DNA, 33 bp, Homo sapien
tcccaattcagagtgagaaaaatcgagaaagaa

SEQ ID NO: 831957 - DNA, 33 bp, Homo sapien; identical to SEQ ID NO: 831955

SEQ ID NO: 831958 - DNA, 33 bp, Homo sapien; identical to SEQ ID NO: 831956

SEQ ID NO: 831959 - DNA, 33 bp, Homo sapien
gaagttgggatcaataacctgccacatttggta

SEQ ID NO: 831960 - DNA, 33 bp, Homo sapien
gaagttgggatcaatagcctgccacatttggta

SEQ ID NO: 831961 - DNA, 33 bp, Homo sapien
taatgtgatggtgacacgattgttcctctcctt

SEQ ID NO: 831962 - DNA, 33 bp, Homo sapien
taatgtgatggtgacatgattgttcctctcctt

SEQ ID NO: 831963 - DNA, 33 bp, Homo sapien
agatacgaaatggagacaaacaagacaattgga

SEQ ID NO: 831964 - DNA, 33 bp, Homo sapien
agatacgaaatggagagaaacaagacaattgga

SEQ ID NO: 831965 - DNA, 33 bp, Homo sapien
aatacatcaaaacccaaaagactatttgataac

SEQ ID NO: 831966 - DNA, 33 bp, Homo sapien
aatacatcaaaacccacaagactatttgataac

SEQ ID NO: 831967 - DNA, 33 bp, Homo sapien
cctttcaagtaatgcaacaaaaacgtaattgca

SEQ ID NO: 831968 - DNA, 33 bp, Homo sapien
cctttcaagtaatgcagcaaaaacgtaattgca

SEQ ID NO: 831969 - DNA, 33 bp, Homo sapien
tttgtgttcgcctcaccgtgaaaggattttgcc

SEQ ID NO: 831970 - DNA, 33 bp, Homo sapien
tttgtgttcgcctcacggtgaaaggattttgcc

SEQ ID NO: 831971 - DNA, 33 bp, Homo sapien
ttagaaatactgacacagatatatcaagatgta

SEQ ID NO: 831972 - DNA, 33 bp, Homo sapien
ttagaaatactgacactgatatatcaagatgta

SEQ ID NO: 831973 - DNA, 33 bp, Homo sapien
cagcgctttgcctcgccaacgcttaaaacatca

SEQ ID NO: 831974 - DNA, 33 bp, Homo sapien
cagcgctttgcctcgcgaacgcttaaaacatca

SEQ ID NO: 831975 - DNA, 33 bp, Homo sapien
gagctagagtaaaacacacaaatatttcgcctg

SEQ ID NO: 831976 - DNA, 33 bp, Homo sapien
gagctagagtaaaacagacaaatatttcgcctg

SEQ ID NO: 831977 - DNA, 33 bp, Homo sapien
atgtttgccgttgaatcaaaagtgtctttgaga

SEQ ID NO: 831978 - DNA, 33 bp, Homo sapien
atgtttgccgttgaatgaaaagtgtctttgaga

SEQ ID NO: 831979 - DNA, 33 bp, Homo sapien
tactgaaaatgaaagcaaatgggcagcaaagtc

SEQ ID NO: 831980 - DNA, 33 bp, Homo sapien
tactgaaaatgaaagcgaatgggcagcaaagtc

SEQ ID NO: 831981 - DNA, 33 bp, Homo sapien
ctaatttaatatacacagcctgaaaattaagct

SEQ ID NO: 831982 - DNA, 33 bp, Homo sapien
ctaatttaatatacacggcctgaaaattaagct

SEQ ID NO: 831983 - DNA, 33 bp, Homo sapien; identical to SEQ ID NO: 831981

SEQ ID NO: 831984 - DNA, 33 bp, Homo sapien; identical to SEQ ID NO: 831982

SEQ ID NO: 831985 - DNA, 33 bp, Homo sapien; identical to SEQ ID NO: 831981

SEQ ID NO: 831986 - DNA, 33 bp, Homo sapien; identical to SEQ ID NO: 831982

SEQ ID NO: 831987 - DNA, 33 bp, Homo sapien; identical to SEQ ID NO: 831981

SEQ ID NO: 831988 - DNA, 33 bp, Homo sapien; identical to SEQ ID NO: 831982

SEQ ID NO: 831989 - DNA, 33 bp, Homo sapien
ccattctcctgatgaacctcctggggcttttgc

SEQ ID NO: 831990 - DNA, 33 bp, Homo sapien
ccattctcctgatgaatctcctggggcttttgc

SEQ ID NO: 831991 - DNA, 33 bp, Homo sapien; identical to SEQ ID NO: 831989

SEQ ID NO: 831992 - DNA, 33 bp, Homo sapien; identical to SEQ ID NO: 831990

SEQ ID NO: 831993 - DNA, 33 bp, Homo sapien
acacctaaaacaacaaattcgggaagccgaaat

SEQ ID NO: 831994 - DNA, 33 bp, Homo sapien
acacctaaaacaacaagttcgggaagccgaaat

SEQ ID NO: 831995 - DNA, 33 bp, Homo sapien
gtattctgagcagtgaccatgtaggggagcatg

SEQ ID NO: 831996 - DNA, 33 bp, Homo sapien
gtattctgagcagtgagcatgtaggggagcatg

SEQ ID NO: 831997 - DNA, 33 bp, Homo sapien
cccaagaatctgatagacagccaggtttctctg

SEQ ID NO: 831998 - DNA, 33 bp, Homo sapien
cccaagaatctgatagtcagccaggtttctctg

SEQ ID NO: 831999 - DNA, 33 bp, Homo sapien
gaaagacggaggttgcactaagtccagatcgtg

SEQ ID NO: 832000 - DNA, 33 bp, Homo sapien
gaaagacggaggttgcgctaagtccagatcgtg

SEQ ID NO: 832001 - DNA, 33 bp, Homo sapien
ttcaaaggaataaacacgagtcacctctgtgta

SEQ ID NO: 832002 - DNA, 33 bp, Homo sapien
ttcaaaggaataaacatgagtcacctctgtgta

SEQ ID NO: 832003 - DNA, 33 bp, Homo sapien
ccggttaaacactctccccctcgctaacagtag

SEQ ID NO: 832004 - DNA, 33 bp, Homo sapien
ccggttaaacactctcgccctcgctaacagtag

SEQ ID NO: 832005 - DNA, 33 bp, Homo sapien
taacaaaaacaaaagcaaagaacactcttccta

SEQ ID NO: 832006 - DNA, 33 bp, Homo sapien
taacaaaaacaaaagctaagaacactcttccta

SEQ ID NO: 832007 - DNA, 33 bp, Homo sapien
atggtctgctcacaacaaggaactctctactta

SEQ ID NO: 832008 - DNA, 33 bp, Homo sapien
atggtctgctcacaacgaggaactctctactta

SEQ ID NO: 832009 - DNA, 33 bp, Homo sapien
taaaagtatctttgcaacagtaagtagagagtt

SEQ ID NO: 832010 - DNA, 33 bp, Homo sapien
taaaagtatctttgcagcagtaagtagagagtt

SEQ ID NO: 832011 - DNA, 33 bp, Homo sapien
agacactttaattcaacaggaaatatgtacaga

SEQ ID NO: 832012 - DNA, 33 bp, Homo sapien
agacactttaattcaataggaaatatgtacaga

SEQ ID NO: 832013 - DNA, 33 bp, Homo sapien; identical to SEQ ID NO: 832011

SEQ ID NO: 832014 - DNA, 33 bp, Homo sapien; identical to SEQ ID NO: 832012

SEQ ID NO: 832015 - DNA, 33 bp, Homo sapien
aatcagtcttatggaacatcagtagggaatgtt

SEQ ID NO: 832016 - DNA, 33 bp, Homo sapien
aatcagtcttatggaatatcagtagggaatgtt

SEQ ID NO: 832017 - DNA, 33 bp, Homo sapien
acaaaatgggagtgaaagcgagccgcctgtgaa

SEQ ID NO: 832018 - DNA, 33 bp, Homo sapien
acaaaatgggagtgaacgcgagccgcctgtgaa

SEQ ID NO: 832019 - DNA, 33 bp, Homo sapien
cattgcatctgaggtaacatttcttctaggccc

SEQ ID NO: 832020 - DNA, 33 bp, Homo sapien
cattgcatctgaggtatcatttcttctaggccc

SEQ ID NO: 832021 - DNA, 33 bp, Homo sapien
gggaaaatgaaataaaaaagcaatgttatttcc

SEQ ID NO: 832022 - DNA, 33 bp, Homo sapien
gggaaaatgaaataaagaagcaatgttatttcc

SEQ ID NO: 832023 - DNA, 33 bp, Homo sapien
acctagaggctcaatcaccaacgtgacaaagac

SEQ ID NO: 832024 - DNA, 33 bp, Homo sapien
acctagaggctcaatcgccaacgtgacaaagac

SEQ ID NO: 832025 - DNA, 33 bp, Homo sapien
ttttaacactgcctaacgtcctttgatgcacaa

SEQ ID NO: 832026 - DNA, 33 bp, Homo sapien
ttttaacactgcctaatgtcctttgatgcacaa

SEQ ID NO: 832027 - DNA, 33 bp, Homo sapien
ccttggcttcaggaatcaaactgcagactttca

SEQ ID NO: 832028 - DNA, 33 bp, Homo sapien
ccttggcttcaggaatgaaactgcagactttca

SEQ ID NO: 832029 - DNA, 33 bp, Homo sapien
atacaacaggtacaaccattagaaatctccacg

SEQ ID NO: 832030 - DNA, 33 bp, Homo sapien
atacaacaggtacaactattagaaatctccacg

SEQ ID NO: 832031 - DNA, 33 bp, Homo sapien
tgtgacagtctgggaacaggactacacatagtg

SEQ ID NO: 832032 - DNA, 33 bp, Homo sapien
tgtgacagtctgggaataggactacacatagtg

SEQ ID NO: 832033 - DNA, 33 bp, Homo sapien
agagtcacgtccactgcagagacacaaggaaga

SEQ ID NO: 832034 - DNA, 33 bp, Homo sapien
agagtcacgtccactgtagagacacaaggaaga

SEQ ID NO: 832035 - DNA, 33 bp, Homo sapien
ctggttaccagaatacactgaaaatacagaatt

SEQ ID NO: 832036 - DNA, 33 bp, Homo sapien
ctggttaccagaatactctgaaaatacagaatt

SEQ ID NO: 832037 - DNA, 33 bp, Homo sapien
acattgtaaccagtcaaaagatagtattaaaat

SEQ ID NO: 832038 - DNA, 33 bp, Homo sapien
acattgtaaccagtcagaagatagtattaaaat

SEQ ID NO: 832039 - DNA, 33 bp, Homo sapien
cccccaggccacgaaaccttgtcactcgctgga

SEQ ID NO: 832040 - DNA, 33 bp, Homo sapien
cccccaggccacgaaatcttgtcactcgctgga

SEQ ID NO: 832041 - DNA, 33 bp, Homo sapien
cccaccttgttctacccaactcatctattttgt

SEQ ID NO: 832042 - DNA, 33 bp, Homo sapien
cccaccttgttctacctaactcatctattttgt

SEQ ID NO: 832043 - DNA, 33 bp, Homo sapien
gtactggaattcctcacattctcattaatactg

SEQ ID NO: 832044 - DNA, 33 bp, Homo sapien
gtactggaattcctcatattctcattaatactg

SEQ ID NO: 832045 - DNA, 33 bp, Homo sapien
agagtagaaggttctaagagtgagtgcatttaa

SEQ ID NO: 832046 - DNA, 33 bp, Homo sapien
agagtagaaggttctacgagtgagtgcatttaa

SEQ ID NO: 832047 - DNA, 33 bp, Homo sapien
agcgtccagatgacccaacatataggtgtcctt

SEQ ID NO: 832048 - DNA, 33 bp, Homo sapien
agcgtccagatgaccccacatataggtgtcctt

SEQ ID NO: 832049 - DNA, 33 bp, Homo sapien
taggtggagctggctaacagtcctgcgccctgt

SEQ ID NO: 832050 - DNA, 33 bp, Homo sapien
taggtggagctggctaccagtcctgcgccctgt

SEQ ID NO: 832051 - DNA, 33 bp, Homo sapien
ttcatgacccaaagaacaagtatctgaaaagaa

SEQ ID NO: 832052 - DNA, 33 bp, Homo sapien
ttcatgacccaaagaataagtatctgaaaagaa

SEQ ID NO: 832053 - DNA, 33 bp, Homo sapien
aatgaactactgatgccgaacaacctagatgaa

SEQ ID NO: 832054 - DNA, 33 bp, Homo sapien
aatgaactactgatgctgaacaacctagatgaa

SEQ ID NO: 832055 - DNA, 33 bp, Homo sapien
tatatattcccagaaagaaaactcaagggtcag

SEQ ID NO: 832056 - DNA, 33 bp, Homo sapien
tatatattcccagaaataaaactcaagggtcag

SEQ ID NO: 832057 - DNA, 33 bp, Homo sapien
taaggcaccttaaacactgaagctacagaaaga

SEQ ID NO: 832058 - DNA, 33 bp, Homo sapien
taaggcaccttaaacattgaagctacagaaaga

SEQ ID NO: 832059 - DNA, 33 bp, Homo sapien
agagttggatgaaaagaacacaggagataaaat

SEQ ID NO: 832060 - DNA, 33 bp, Homo sapien
agagttggatgaaaaggacacaggagataaaat

SEQ ID NO: 832061 - DNA, 33 bp, Homo sapien
attggaaggaaaatggaaagacctgtctatggc

SEQ ID NO: 832062 - DNA, 33 bp, Homo sapien
attggaaggaaaatgggaagacctgtctatggc

SEQ ID NO: 832063 - DNA, 33 bp, Homo sapien
caaggatgtggtacaacgggccttgcaataaat

SEQ ID NO: 832064 - DNA, 33 bp, Homo sapien
caaggatgtggtacaatgggccttgcaataaat

SEQ ID NO: 832065 - DNA, 33 bp, Homo sapien
tccagaacagaccataccttaagtcacaaaaga

SEQ ID NO: 832066 - DNA, 33 bp, Homo sapien
tccagaacagaccatatcttaagtcacaaaaga

SEQ ID NO: 832067 - DNA, 33 bp, Homo sapien
cagcttttgtttgtcaaggaaagattttatgtc

SEQ ID NO: 832068 - DNA, 33 bp, Homo sapien
cagcttttgtttgtcagggaaagattttatgtc

SEQ ID NO: 832069 - DNA, 33 bp, Homo sapien
ttcagaaagagcaaaaattagaaagcttatcca

SEQ ID NO: 832070 - DNA, 33 bp, Homo sapien
ttcagaaagagcaaaagttagaaagcttatcca

SEQ ID NO: 832071 - DNA, 33 bp, Homo sapien
tgactcacaagaacataaaatgtgacctatctt

SEQ ID NO: 832072 - DNA, 33 bp, Homo sapien
tgactcacaagaacatgaaatgtgacctatctt

SEQ ID NO: 832073 - DNA, 33 bp, Homo sapien
gtcaacctcttcactacaccttaaaatgcaccc

SEQ ID NO: 832074 - DNA, 33 bp, Homo sapien
gtcaacctcttcactataccttaaaatgcaccc

SEQ ID NO: 832075 - DNA, 33 bp, Homo sapien
ttttaagagaggcatacgtattgaggagttgtt

SEQ ID NO: 832076 - DNA, 33 bp, Homo sapien
ttttaagagaggcatatgtattgaggagttgtt

SEQ ID NO: 832077 - DNA, 33 bp, Homo sapien
tctggaattacctcaacatttaactgcaacaaa

SEQ ID NO: 832078 - DNA, 33 bp, Homo sapien
tctggaattacctcaatatttaactgcaacaaa

SEQ ID NO: 832079 - DNA, 33 bp, Homo sapien
agaatacttaccagaaactgaaaagattagaat

SEQ ID NO: 832080 - DNA, 33 bp, Homo sapien
agaatacttaccagaagctgaaaagattagaat

SEQ ID NO: 832081 - DNA, 33 bp, Homo sapien
caatataaagagaaatcactgaattgtagaaag

SEQ ID NO: 832082 - DNA, 33 bp, Homo sapien
caatataaagagaaatgactgaattgtagaaag

SEQ ID NO: 832083 - DNA, 33 bp, Homo sapien
tccaacactaggcatacgtggttttgaaaatta

SEQ ID NO: 832084 - DNA, 33 bp, Homo sapien
tccaacactaggcatatgtggttttgaaaatta

SEQ ID NO: 832085 - DNA, 33 bp, Homo sapien
ggagcaccagtctcaaagggcttaacaatatcc

SEQ ID NO: 832086 - DNA, 33 bp, Homo sapien
ggagcaccagtctcaacgggcttaacaatatcc

SEQ ID NO: 832087 - DNA, 33 bp, Homo sapien
taggataggtgtctcaatacatagcccaagttg

SEQ ID NO: 832088 - DNA, 33 bp, Homo sapien
taggataggtgtctcactacatagcccaagttg

SEQ ID NO: 832089 - DNA, 33 bp, Homo sapien
aaatcaccagagcctgaaaaataggaaaatgag

SEQ ID NO: 832090 - DNA, 33 bp, Homo sapien
aaatcaccagagcctggaaaataggaaaatgag

SEQ ID NO: 832091 - DNA, 33 bp, Homo sapien
agttagaatgtcgtaaagattgaaaattcaaaa

SEQ ID NO: 832092 - DNA, 33 bp, Homo sapien
agttagaatgtcgtaaggattgaaaattcaaaa

SEQ ID NO: 832093 - DNA, 33 bp, Homo sapien
gtgtagcttctgttcaaatattttactcacttt

SEQ ID NO: 832094 - DNA, 33 bp, Homo sapien
gtgtagcttctgttcagatattttactcacttt

SEQ ID NO: 832095 - DNA, 33 bp, Homo sapien
attaggacagccatgaggaaaaccactgtgaag

SEQ ID NO: 832096 - DNA, 33 bp, Homo sapien
attaggacagccatgatgaaaaccactgtgaag

SEQ ID NO: 832097 - DNA, 33 bp, Homo sapien
tagaatacagtacttacgcacagttacttttct

SEQ ID NO: 832098 - DNA, 33 bp, Homo sapien
tagaatacagtacttatgcacagttacttttct

SEQ ID NO: 832099 - DNA, 33 bp, Homo sapien
tcagagtttcaagagccccagaaagcatctgta

SEQ ID NO: 832100 - DNA, 33 bp, Homo sapien
tcagagtttcaagagcgccagaaagcatctgta

SEQ ID NO: 832101 - DNA, 33 bp, Homo sapien
gtttcaatcttctgcacagagctagtcacttat

SEQ ID NO: 832102 - DNA, 33 bp, Homo sapien
gtttcaatcttctgcatagagctagtcacttat

SEQ ID NO: 832103 - DNA, 33 bp, Homo sapien
tattaggtctagcagaacctcagaaagacatgt

SEQ ID NO: 832104 - DNA, 33 bp, Homo sapien
tattaggtctagcagagcctcagaaagacatgt

SEQ ID NO: 832105 - DNA, 33 bp, Homo sapien
gcaactaggtagaaaacgtgacttggcgagcag

SEQ ID NO: 832106 - DNA, 33 bp, Homo sapien
gcaactaggtagaaaatgtgacttggcgagcag

SEQ ID NO: 832107 - DNA, 33 bp, Homo sapien
aggtaggtcactgtcaatatgtgtgagataatc

SEQ ID NO: 832108 - DNA, 33 bp, Homo sapien
aggtaggtcactgtcagtatgtgtgagataatc

SEQ ID NO: 832109 - DNA, 33 bp, Homo sapien
tccaaacacactagataactgtacaatgacaat

SEQ ID NO: 832110 - DNA, 33 bp, Homo sapien
tccaaacacactagatgactgtacaatgacaat

SEQ ID NO: 832111 - DNA, 33 bp, Homo sapien
gtgaagcaaatgaatcaacacttctccaaagaa

SEQ ID NO: 832112 - DNA, 33 bp, Homo sapien
gtgaagcaaatgaatcgacacttctccaaagaa

SEQ ID NO: 832113 - DNA, 33 bp, Homo sapien
taagccatttcaggacaaaaaaatgcctcaact

SEQ ID NO: 832114 - DNA, 33 bp, Homo sapien
taagccatttcaggacgaaaaaatgcctcaact

SEQ ID NO: 832115 - DNA, 33 bp, Homo sapien
atctggttgctttgacaaattcctagtgtctga

SEQ ID NO: 832116 - DNA, 33 bp, Homo sapien
atctggttgctttgacgaattcctagtgtctga

SEQ ID NO: 832117 - DNA, 33 bp, Homo sapien
aaatgtctgcaatgataaagattcaagattgca

SEQ ID NO: 832118 - DNA, 33 bp, Homo sapien
aaatgtctgcaatgatcaagattcaagattgca

SEQ ID NO: 832119 - DNA, 33 bp, Homo sapien
gaagactcgtggcataaggggaaggtatgatgc

SEQ ID NO: 832120 - DNA, 33 bp, Homo sapien
gaagactcgtggcatagggggaaggtatgatgc

SEQ ID NO: 832121 - DNA, 33 bp, Homo sapien
ttaacatatactcttacgtctaaaagtcacgtg

SEQ ID NO: 832122 - DNA, 33 bp, Homo sapien
ttaacatatactcttatgtctaaaagtcacgtg

SEQ ID NO: 832123 - DNA, 33 bp, Homo sapien
ccacattttaacgatgaaaagactgttctccaa

SEQ ID NO: 832124 - DNA, 33 bp, Homo sapien
ccacattttaacgatggaaagactgttctccaa

SEQ ID NO: 832125 - DNA, 33 bp, Homo sapien
tcacaaacctatgagccgaagaaaccaagacaa

SEQ ID NO: 832126 - DNA, 33 bp, Homo sapien
tcacaaacctatgagctgaagaaaccaagacaa

SEQ ID NO: 832127 - DNA, 33 bp, Homo sapien
ctgaatgtaattcataatacactaaacattgag

SEQ ID NO: 832128 - DNA, 33 bp, Homo sapien
ctgaatgtaattcatagtacactaaacattgag

SEQ ID NO: 832129 - DNA, 33 bp, Homo sapien
taaagaaaattcatagcaactagaatggaagtt

SEQ ID NO: 832130 - DNA, 33 bp, Homo sapien
taaagaaaattcataggaactagaatggaagtt

SEQ ID NO: 832131 - DNA, 33 bp, Homo sapien
tcctgtttgctcccacactgtctcatctagtac

SEQ ID NO: 832132 - DNA, 33 bp, Homo sapien
tcctgtttgctcccacgctgtctcatctagtac

SEQ ID NO: 832133 - DNA, 33 bp, Homo sapien
ctgaatatatatgcaaataaaattggagcacct

SEQ ID NO: 832134 - DNA, 33 bp, Homo sapien
ctgaatatatatgcaactaaaattggagcacct

SEQ ID NO: 832135 - DNA, 33 bp, Homo sapien
atatgaaagttacaaaagtagtgcagatgttat

SEQ ID NO: 832136 - DNA, 33 bp, Homo sapien
atatgaaagttacaaaggtagtgcagatgttat

SEQ ID NO: 832137 - DNA, 33 bp, Homo sapien
ttgatcatcaacctaacacaagacattgtggca

SEQ ID NO: 832138 - DNA, 33 bp, Homo sapien
ttgatcatcaacctaatacaagacattgtggca

SEQ ID NO: 832139 - DNA, 33 bp, Homo sapien
gtggaaatagctataacgtgatggaagaaccac

SEQ ID NO: 832140 - DNA, 33 bp, Homo sapien
gtggaaatagctataaggtgatggaagaaccac

SEQ ID NO: 832141 - DNA, 33 bp, Homo sapien
ccctctgctggtttgccgattttttattaaata

SEQ ID NO: 832142 - DNA, 33 bp, Homo sapien
ccctctgctggtttgctgattttttattaaata

SEQ ID NO: 832143 - DNA, 33 bp, Homo sapien
ttagcaagtgatgaaactggataatgcctagta

SEQ ID NO: 832144 - DNA, 33 bp, Homo sapien
ttagcaagtgatgaaattggataatgcctagta

SEQ ID NO: 832145 - DNA, 33 bp, Homo sapien
tttctaggctgtatcacccagctacacttcttc

SEQ ID NO: 832146 - DNA, 33 bp, Homo sapien
tttctaggctgtatcatccagctacacttcttc

SEQ ID NO: 832147 - DNA, 33 bp, Homo sapien
tgcacacgaggtttacaagcagcttgggcagtg

SEQ ID NO: 832148 - DNA, 33 bp, Homo sapien
tgcacacgaggtttacgagcagcttgggcagtg

SEQ ID NO: 832149 - DNA, 33 bp, Homo sapien
gagccaaagtaggggacgaggtgaattattaca

SEQ ID NO: 832150 - DNA, 33 bp, Homo sapien
gagccaaagtaggggatgaggtgaattattaca

SEQ ID NO: 832151 - DNA, 33 bp, Homo sapien
cgaccagagggacaacgacacatttttacttgc

SEQ ID NO: 832152 - DNA, 33 bp, Homo sapien
cgaccagagggacaactacacatttttacttgc

SEQ ID NO: 832153 - DNA, 33 bp, Homo sapien
ctaggatcggagatgaaaatcatcagaacggct

SEQ ID NO: 832154 - DNA, 33 bp, Homo sapien
ctaggatcggagatgacaatcatcagaacggct

SEQ ID NO: 832155 - DNA, 33 bp, Homo sapien
aagcgagaagtcattacggagtgcagcagggca

SEQ ID NO: 832156 - DNA, 33 bp, Homo sapien
aagcgagaagtcattatggagtgcagcagggca

SEQ ID NO: 832157 - DNA, 33 bp, Homo sapien
gatggatataggtgaaaagaacaggtgcataga

SEQ ID NO: 832158 - DNA, 33 bp, Homo sapien
gatggatataggtgaagagaacaggtgcataga

SEQ ID NO: 832159 - DNA, 33 bp, Homo sapien
gttatttatgcctcagaagagttctctggttta

SEQ ID NO: 832160 - DNA, 33 bp, Homo sapien
gttatttatgcctcagtagagttctctggttta

SEQ ID NO: 832161 - DNA, 33 bp, Homo sapien
gatgtgtcagtgaggaagtttttagatgagact

SEQ ID NO: 832162 - DNA, 33 bp, Homo sapien
gatgtgtcagtgaggatgtttttagatgagact

SEQ ID NO: 832163 - DNA, 33 bp, Homo sapien
attccgtgtctaagaactcaatgtcccctagtt

SEQ ID NO: 832164 - DNA, 33 bp, Homo sapien
attccgtgtctaagaattcaatgtcccctagtt

SEQ ID NO: 832165 - DNA, 33 bp, Homo sapien
gtttcaagacagtgaccacaaagcattaaatca

SEQ ID NO: 832166 - DNA, 33 bp, Homo sapien
gtttcaagacagtgacgacaaagcattaaatca

SEQ ID NO: 832167 - DNA, 33 bp, Homo sapien
ggaagcctgggtatctaaagctcctgtggcttc

SEQ ID NO: 832168 - DNA, 33 bp, Homo sapien
ggaagcctgggtatcttaagctcctgtggcttc

SEQ ID NO: 832169 - DNA, 33 bp, Homo sapien
cattatttttttttaccctagtcacatcaaatt

SEQ ID NO: 832170 - DNA, 33 bp, Homo sapien
cattatttttttttactctagtcacatcaaatt

SEQ ID NO: 832171 - DNA, 33 bp, Homo sapien
gaaaccactgaggagaaaagaatataatttgat

SEQ ID NO: 832172 - DNA, 33 bp, Homo sapien
gaaaccactgaggagagaagaatataatttgat

SEQ ID NO: 832173 - DNA, 33 bp, Homo sapien
aaatacaaacatttcaagcatatactaaataca

SEQ ID NO: 832174 - DNA, 33 bp, Homo sapien
aaatacaaacatttcacgcatatactaaataca

SEQ ID NO: 832175 - DNA, 33 bp, Homo sapien
cctggaagagtccccaatggaggtgtccgaagt

SEQ ID NO: 832176 - DNA, 33 bp, Homo sapien
cctggaagagtccccagtggaggtgtccgaagt

SEQ ID NO: 832177 - DNA, 33 bp, Homo sapien
ctgtggctagagagccaaagataaagaactgga

SEQ ID NO: 832178 - DNA, 33 bp, Homo sapien
ctgtggctagagagccgaagataaagaactgga

SEQ ID NO: 832179 - DNA, 33 bp, Homo sapien
tctataccaagcctaacgttattagagctaaaa

SEQ ID NO: 832180 - DNA, 33 bp, Homo sapien
tctataccaagcctaaggttattagagctaaaa

SEQ ID NO: 832181 - DNA, 33 bp, Homo sapien
ctctttcgcataatcaactctatcattcttatc

SEQ ID NO: 832182 - DNA, 33 bp, Homo sapien
ctctttcgcataatcacctctatcattcttatc

SEQ ID NO: 832183 - DNA, 33 bp, Homo sapien
atgtatttgcacatcaagtatcagatgagtggg

SEQ ID NO: 832184 - DNA, 33 bp, Homo sapien
atgtatttgcacatcaggtatcagatgagtggg

SEQ ID NO: 832185 - DNA, 33 bp, Homo sapien
cattttgcactattctcacttctctaccagtca

SEQ ID NO: 832186 - DNA, 33 bp, Homo sapien
cattttgcactattcttacttctctaccagtca

SEQ ID NO: 832187 - DNA, 33 bp, Homo sapien
tctaacgaacaatcagccacacactcaattcta

SEQ ID NO: 832188 - DNA, 33 bp, Homo sapien
tctaacgaacaatcagtcacacactcaattcta

SEQ ID NO: 832189 - DNA, 33 bp, Homo sapien
ggcctaaactgcaagacgtgaaaagattataag

SEQ ID NO: 832190 - DNA, 33 bp, Homo sapien
ggcctaaactgcaagatgtgaaaagattataag

SEQ ID NO: 832191 - DNA, 33 bp, Homo sapien
tgctttagaaagtttccatttgaaaggcagtaa

SEQ ID NO: 832192 - DNA, 33 bp, Homo sapien
tgctttagaaagtttctatttgaaaggcagtaa

SEQ ID NO: 832193 - DNA, 33 bp, Homo sapien
ggcagtataaatgaggacattgtagagttattc

SEQ ID NO: 832194 - DNA, 33 bp, Homo sapien
ggcagtataaatgaggccattgtagagttattc

SEQ ID NO: 832195 - DNA, 33 bp, Homo sapien
ccattcctccttgacactggatatgcattcttt

SEQ ID NO: 832196 - DNA, 33 bp, Homo sapien
ccattcctccttgacattggatatgcattcttt

SEQ ID NO: 832197 - DNA, 33 bp, Homo sapien
gtagtgagcacagtaaacaataggtagtttttt

SEQ ID NO: 832198 - DNA, 33 bp, Homo sapien
gtagtgagcacagtaaccaataggtagtttttt

SEQ ID NO: 832199 - DNA, 33 bp, Homo sapien
atccaagttccaataaacatcaagagtataaca

SEQ ID NO: 832200 - DNA, 33 bp, Homo sapien
atccaagttccaataatcatcaagagtataaca

SEQ ID NO: 832201 - DNA, 33 bp, Homo sapien
tcttgaacaaacactccccagattgcagcaagc

SEQ ID NO: 832202 - DNA, 33 bp, Homo sapien
tcttgaacaaacactctccagattgcagcaagc

SEQ ID NO: 832203 - DNA, 33 bp, Homo sapien
acatcatggttgccgacggtcataaataacagt

SEQ ID NO: 832204 - DNA, 33 bp, Homo sapien
acatcatggttgccgatggtcataaataacagt

SEQ ID NO: 832205 - DNA, 33 bp, Homo sapien
tcccgtgactgagaccacaaaccgagtagctta

SEQ ID NO: 832206 - DNA, 33 bp, Homo sapien
tcccgtgactgagaccgcaaaccgagtagctta

SEQ ID NO: 832207 - DNA, 33 bp, Homo sapien
tatgatccaagtaacaacatttaaagaattgct

SEQ ID NO: 832208 - DNA, 33 bp, Homo sapien
tatgatccaagtaacagcatttaaagaattgct

SEQ ID NO: 832209 - DNA, 33 bp, Homo sapien
tttacattagcccataaggatggttctccaact

SEQ ID NO: 832210 - DNA, 33 bp, Homo sapien
tttacattagcccatagggatggttctccaact

SEQ ID NO: 832211 - DNA, 33 bp, Homo sapien
ggctctcgcctcagaaccagagcaaatacttca

SEQ ID NO: 832212 - DNA, 33 bp, Homo sapien
ggctctcgcctcagaatcagagcaaatacttca

SEQ ID NO: 832213 - DNA, 33 bp, Homo sapien
tcagacaactgaaaaacgactaatctgcttata

SEQ ID NO: 832214 - DNA, 33 bp, Homo sapien
tcagacaactgaaaaaggactaatctgcttata

SEQ ID NO: 832215 - DNA, 33 bp, Homo sapien
tgcagcagccttatgaggcagaacaggctgggt

SEQ ID NO: 832216 - DNA, 33 bp, Homo sapien
tgcagcagccttatgatgcagaacaggctgggt

SEQ ID NO: 832217 - DNA, 33 bp, Homo sapien
ttagagagatgagaaacagagtcagatgaagag

SEQ ID NO: 832218 - DNA, 33 bp, Homo sapien
ttagagagatgagaaagagagtcagatgaagag

SEQ ID NO: 832219 - DNA, 33 bp, Homo sapien
ctcttgggcttccagaagttactggaccttgag

SEQ ID NO: 832220 - DNA, 33 bp, Homo sapien
ctcttgggcttccagaggttactggaccttgag

SEQ ID NO: 832221 - DNA, 33 bp, Homo sapien
atcctgcaagctcagacgcaggataaagggcca

SEQ ID NO: 832222 - DNA, 33 bp, Homo sapien
atcctgcaagctcagaggcaggataaagggcca

SEQ ID NO: 832223 - DNA, 33 bp, Homo sapien
caattggttttcctacaaagaatcacgtaatat

SEQ ID NO: 832224 - DNA, 33 bp, Homo sapien
caattggttttcctacgaagaatcacgtaatat

SEQ ID NO: 832225 - DNA, 33 bp, Homo sapien
cccaatgacatctacaaataccctatttccaaa

SEQ ID NO: 832226 - DNA, 33 bp, Homo sapien
cccaatgacatctacacataccctatttccaaa

SEQ ID NO: 832227 - DNA, 33 bp, Homo sapien
aaatgcttgcttgatgaacgacacatgaaagcg

SEQ ID NO: 832228 - DNA, 33 bp, Homo sapien
aaatgcttgcttgatgcacgacacatgaaagcg

SEQ ID NO: 832229 - DNA, 33 bp, Homo sapien
ggaagtcccatcctgccgaggatcctggatgtg

SEQ ID NO: 832230 - DNA, 33 bp, Homo sapien
ggaagtcccatcctgctgaggatcctggatgtg

SEQ ID NO: 832231 - DNA, 33 bp, Homo sapien
ccttgatgtccccgctcaattagcatctctacc

SEQ ID NO: 832232 - DNA, 33 bp, Homo sapien
ccttgatgtccccgcttaattagcatctctacc

SEQ ID NO: 832233 - DNA, 33 bp, Homo sapien
cacatgatagccaatgccagtgtttcattcctt

SEQ ID NO: 832234 - DNA, 33 bp, Homo sapien
cacatgatagccaatgtcagtgtttcattcctt

SEQ ID NO: 832235 - DNA, 33 bp, Homo sapien
ttccaaaagagctcaccgagacaaggtgatatt

SEQ ID NO: 832236 - DNA, 33 bp, Homo sapien
ttccaaaagagctcacggagacaaggtgatatt

SEQ ID NO: 832237 - DNA, 33 bp, Homo sapien
tgattgtgtttgctaccgcttgtttcctcagta

SEQ ID NO: 832238 - DNA, 33 bp, Homo sapien
tgattgtgtttgctactgcttgtttcctcagta

SEQ ID NO: 832239 - DNA, 33 bp, Homo sapien
tcataaagtgagtttgaatcctgaagaagccat

SEQ ID NO: 832240 - DNA, 33 bp, Homo sapien
tcataaagtgagtttggatcctgaagaagccat

SEQ ID NO: 832241 - DNA, 33 bp, Homo sapien
ggcagaggtcaccaggaaggcctgccacaggtc

SEQ ID NO: 832242 - DNA, 33 bp, Homo sapien
ggcagaggtcaccagggaggcctgccacaggtc

SEQ ID NO: 832243 - DNA, 33 bp, Homo sapien
ctctgtgggaatggaacatttatcaggtttttt

SEQ ID NO: 832244 - DNA, 33 bp, Homo sapien
ctctgtgggaatggaagatttatcaggtttttt

SEQ ID NO: 832245 - DNA, 33 bp, Homo sapien
tttacagacggaattacggaaagtctcagaaca

SEQ ID NO: 832246 - DNA, 33 bp, Homo sapien
tttacagacggaattatggaaagtctcagaaca

SEQ ID NO: 832247 - DNA, 33 bp, Homo sapien
ttcaggatggagtaatcaaaagtgtcagtggga

SEQ ID NO: 832248 - DNA, 33 bp, Homo sapien
ttcaggatggagtaattaaaagtgtcagtggga

SEQ ID NO: 832249 - DNA, 33 bp, Homo sapien
atgctcaagtttattgacaaaatgcccaccaga

SEQ ID NO: 832250 - DNA, 33 bp, Homo sapien
atgctcaagtttattggcaaaatgcccaccaga

SEQ ID NO: 832251 - DNA, 33 bp, Homo sapien
atatgttattctctccaggaattgaatttactc

SEQ ID NO: 832252 - DNA, 33 bp, Homo sapien
atatgttattctctcccggaattgaatttactc

SEQ ID NO: 832253 - DNA, 33 bp, Homo sapien
cccagctgctccttctgaatctcctttattggt

SEQ ID NO: 832254 - DNA, 33 bp, Homo sapien
cccagctgctccttcttaatctcctttattggt

SEQ ID NO: 832255 - DNA, 33 bp, Homo sapien
acagtgccctacaacaaaatggtcttgtgccga

SEQ ID NO: 832256 - DNA, 33 bp, Homo sapien
acagtgccctacaacacaatggtcttgtgccga

SEQ ID NO: 832257 - DNA, 33 bp, Homo sapien
aatggatgaaagtttacgtgatggacagaaatc

SEQ ID NO: 832258 - DNA, 33 bp, Homo sapien
aatggatgaaagtttatgtgatggacagaaatc

SEQ ID NO: 832259 - DNA, 33 bp, Homo sapien
ctgtataactgtgtaaatgtataactgtaacca

SEQ ID NO: 832260 - DNA, 33 bp, Homo sapien
ctgtataactgtgtaactgtataactgtaacca

SEQ ID NO: 832261 - DNA, 33 bp, Homo sapien
gcccgtgaaaaaaactcacaggtgatcagtagt

SEQ ID NO: 832262 - DNA, 33 bp, Homo sapien
gcccgtgaaaaaaacttacaggtgatcagtagt

SEQ ID NO: 832263 - DNA, 33 bp, Homo sapien
tctcttctttttttcacgaggagatccctgttc

SEQ ID NO: 832264 - DNA, 33 bp, Homo sapien
tctcttctttttttcatgaggagatccctgttc

SEQ ID NO: 832265 - DNA, 33 bp, Homo sapien
caaattcagaaaaccaactaaagtgtcagaggt

SEQ ID NO: 832266 - DNA, 33 bp, Homo sapien
caaattcagaaaaccagctaaagtgtcagaggt

SEQ ID NO: 832267 - DNA, 33 bp, Homo sapien
atcaaaattcatcaaaacgtatatttcaaatct

SEQ ID NO: 832268 - DNA, 33 bp, Homo sapien
atcaaaattcatcaaagcgtatatttcaaatct

SEQ ID NO: 832269 - DNA, 33 bp, Homo sapien
atctcctgccaaatccggaaaatgtgctcccat

SEQ ID NO: 832270 - DNA, 33 bp, Homo sapien
atctcctgccaaatcctgaaaatgtgctcccat

SEQ ID NO: 832271 - DNA, 33 bp, Homo sapien
actgcactagaaaatggatgcaggacagctgtt

SEQ ID NO: 832272 - DNA, 33 bp, Homo sapien
actgcactagaaaatgtatgcaggacagctgtt

SEQ ID NO: 832273 - DNA, 33 bp, Homo sapien
tcccctagacaagagcaccgtgtcgaggagaag

SEQ ID NO: 832274 - DNA, 33 bp, Homo sapien
tcccctagacaagagcgccgtgtcgaggagaag

SEQ ID NO: 832275 - DNA, 33 bp, Homo sapien
agtttatgccccagtaagaatcagttccagtgc

SEQ ID NO: 832276 - DNA, 33 bp, Homo sapien
agtttatgccccagtaggaatcagttccagtgc

SEQ ID NO: 832277 - DNA, 33 bp, Homo sapien
acaggttaaaggatcccataaggctgctcccca

SEQ ID NO: 832278 - DNA, 33 bp, Homo sapien
acaggttaaaggatcctataaggctgctcccca

SEQ ID NO: 832279 - DNA, 33 bp, Homo sapien
tatttttcctccattaaccaatcataaagtacc

SEQ ID NO: 832280 - DNA, 33 bp, Homo sapien
tatttttcctccattagccaatcataaagtacc

SEQ ID NO: 832281 - DNA, 33 bp, Homo sapien
tctgatacattctgccactaatacccttgcctg

SEQ ID NO: 832282 - DNA, 33 bp, Homo sapien
tctgatacattctgccgctaatacccttgcctg

SEQ ID NO: 832283 - DNA, 33 bp, Homo sapien
aaatctacataacaaaccttttctatctgtaaa

SEQ ID NO: 832284 - DNA, 33 bp, Homo sapien
aaatctacataacaaatcttttctatctgtaaa

SEQ ID NO: 832285 - DNA, 33 bp, Homo sapien
tcttagcaactgtataacatcttggctaggtaa

SEQ ID NO: 832286 - DNA, 33 bp, Homo sapien
tcttagcaactgtataccatcttggctaggtaa

SEQ ID NO: 832287 - DNA, 33 bp, Homo sapien
ggagcaagtgcctaagcatcccctctagggacg

SEQ ID NO: 832288 - DNA, 33 bp, Homo sapien
ggagcaagtgcctaagtatcccctctagggacg

SEQ ID NO: 832289 - DNA, 33 bp, Homo sapien
cgctccagccatgctgaactactcactttctct

SEQ ID NO: 832290 - DNA, 33 bp, Homo sapien
cgctccagccatgctgtactactcactttctct

SEQ ID NO: 832291 - DNA, 33 bp, Homo sapien
gtattttctagccacacgatgctccctatgccc

SEQ ID NO: 832292 - DNA, 33 bp, Homo sapien
gtattttctagccacatgatgctccctatgccc

SEQ ID NO: 832293 - DNA, 33 bp, Homo sapien
aggagaggttccagaggagggatctgcacaaag

SEQ ID NO: 832294 - DNA, 33 bp, Homo sapien
aggagaggttccagagtagggatctgcacaaag

SEQ ID NO: 832295 - DNA, 33 bp, Homo sapien
gtattttcttgaaactgagcacacaggtatttg

SEQ ID NO: 832296 - DNA, 33 bp, Homo sapien
gtattttcttgaaacttagcacacaggtatttg

SEQ ID NO: 832297 - DNA, 33 bp, Homo sapien
aaaggagacaaaagcaagagtgaaagagaacat

SEQ ID NO: 832298 - DNA, 33 bp, Homo sapien
aaaggagacaaaagcaggagtgaaagagaacat

SEQ ID NO: 832299 - DNA, 33 bp, Homo sapien
attattctttggagaaggagcttcacttatgag

SEQ ID NO: 832300 - DNA, 33 bp, Homo sapien
attattctttggagaatgagcttcacttatgag

SEQ ID NO: 832301 - DNA, 33 bp, Homo sapien
gtgtctctgtgagttaaaacttccttcatactc

SEQ ID NO: 832302 - DNA, 33 bp, Homo sapien
gtgtctctgtgagttacaacttccttcatactc

SEQ ID NO: 832303 - DNA, 33 bp, Homo sapien
caccctcaaaggacgaagagttcattgcccggt

SEQ ID NO: 832304 - DNA, 33 bp, Homo sapien
caccctcaaaggacgaggagttcattgcccggt

SEQ ID NO: 832305 - DNA, 33 bp, Homo sapien
tccaattctgactcaaacacttctacttgaatg

SEQ ID NO: 832306 - DNA, 33 bp, Homo sapien
tccaattctgactcaatcacttctacttgaatg

SEQ ID NO: 832307 - DNA, 33 bp, Homo sapien
gtcagttagaaatatgaacttgaggctgggcgc

SEQ ID NO: 832308 - DNA, 33 bp, Homo sapien
gtcagttagaaatatggacttgaggctgggcgc

SEQ ID NO: 832309 - DNA, 33 bp, Homo sapien
ctggtcctaggtctgacgggatctctaccccaa

SEQ ID NO: 832310 - DNA, 33 bp, Homo sapien
ctggtcctaggtctgatgggatctctaccccaa

SEQ ID NO: 832311 - DNA, 33 bp, Homo sapien
ctatgtgtctgcttatcacaccaagtgtgtacc

SEQ ID NO: 832312 - DNA, 33 bp, Homo sapien
ctatgtgtctgcttattacaccaagtgtgtacc

SEQ ID NO: 832313 - DNA, 33 bp, Homo sapien
gtatcaagtgagataacacaaaaacaaacaaat

SEQ ID NO: 832314 - DNA, 33 bp, Homo sapien
gtatcaagtgagataagacaaaaacaaacaaat

SEQ ID NO: 832315 - DNA, 33 bp, Homo sapien
gatagaaatagcttcacgagcttacttttattg

SEQ ID NO: 832316 - DNA, 33 bp, Homo sapien
gatagaaatagcttcatgagcttacttttattg

SEQ ID NO: 832317 - DNA, 33 bp, Homo sapien
tttgtgactcccaaaccgggctcacctgtacat

SEQ ID NO: 832318 - DNA, 33 bp, Homo sapien
tttgtgactcccaaactgggctcacctgtacat

SEQ ID NO: 832319 - DNA, 33 bp, Homo sapien
agggtctttggaatcactaatctcatgttggct

SEQ ID NO: 832320 - DNA, 33 bp, Homo sapien
agggtctttggaatcagtaatctcatgttggct

SEQ ID NO: 832321 - DNA, 33 bp, Homo sapien
ctccaaaaagacttaccagtgtttatctgaata

SEQ ID NO: 832322 - DNA, 33 bp, Homo sapien
ctccaaaaagacttacgagtgtttatctgaata

SEQ ID NO: 832323 - DNA, 33 bp, Homo sapien
ataaggttcacttaaacttgagaggtaaaggct

SEQ ID NO: 832324 - DNA, 33 bp, Homo sapien
ataaggttcacttaaagttgagaggtaaaggct

SEQ ID NO: 832325 - DNA, 33 bp, Homo sapien
gtgtggttgaaagtcaagattgcaggggtcaat

SEQ ID NO: 832326 - DNA, 33 bp, Homo sapien
gtgtggttgaaagtcaggattgcaggggtcaat

SEQ ID NO: 832327 - DNA, 33 bp, Homo sapien
cccatctcggacaaaaacagaaatgtatgtctc

SEQ ID NO: 832328 - DNA, 33 bp, Homo sapien
cccatctcggacaaaagcagaaatgtatgtctc

SEQ ID NO: 832329 - DNA, 33 bp, Homo sapien
tactgctgaaaagcccaagggaagatcttggag

SEQ ID NO: 832330 - DNA, 33 bp, Homo sapien
tactgctgaaaagcccgagggaagatcttggag

SEQ ID NO: 832331 - DNA, 33 bp, Homo sapien
agaagaagaagaagaacaattgcaatcctccct

SEQ ID NO: 832332 - DNA, 33 bp, Homo sapien
agaagaagaagaagaagaattgcaatcctccct

SEQ ID NO: 832333 - DNA, 33 bp, Homo sapien
gtggacaaggtgaagccgatggagggggagctt

SEQ ID NO: 832334 - DNA, 33 bp, Homo sapien
gtggacaaggtgaagcggatggagggggagctt

SEQ ID NO: 832335 - DNA, 33 bp, Homo sapien
tcaacttcctggctccaaagcctagacaaagcg

SEQ ID NO: 832336 - DNA, 33 bp, Homo sapien
tcaacttcctggctccgaagcctagacaaagcg

SEQ ID NO: 832337 - DNA, 33 bp, Homo sapien
attaagaacttgaaagcaaaggtagctgcattt

SEQ ID NO: 832338 - DNA, 33 bp, Homo sapien
attaagaacttgaaagtaaaggtagctgcattt

SEQ ID NO: 832339 - DNA, 33 bp, Homo sapien
agctaataacattaaactggtccaggagggttg

SEQ ID NO: 832340 - DNA, 33 bp, Homo sapien
agctaataacattaaattggtccaggagggttg

SEQ ID NO: 832341 - DNA, 33 bp, Homo sapien
tgtcattatccttactcagctcccttaaagcag

SEQ ID NO: 832342 - DNA, 33 bp, Homo sapien
tgtcattatccttacttagctcccttaaagcag

SEQ ID NO: 832343 - DNA, 33 bp, Homo sapien
ctgggaccaactcaacgctttctcattcccaca

SEQ ID NO: 832344 - DNA, 33 bp, Homo sapien
ctgggaccaactcaactctttctcattcccaca

SEQ ID NO: 832345 - DNA, 33 bp, Homo sapien
gaaaatccagatcacagaattgtgtgtgtgtgt

SEQ ID NO: 832346 - DNA, 33 bp, Homo sapien
gaaaatccagatcacataattgtgtgtgtgtgt

SEQ ID NO: 832347 - DNA, 33 bp, Homo sapien
tacatgtagtagttccactttatcatggttttg

SEQ ID NO: 832348 - DNA, 33 bp, Homo sapien
tacatgtagtagttcccctttatcatggttttg

SEQ ID NO: 832349 - DNA, 33 bp, Homo sapien
ggtaactgaagcattgaaaagcaaaaccatgat

SEQ ID NO: 832350 - DNA, 33 bp, Homo sapien
ggtaactgaagcattggaaagcaaaaccatgat

SEQ ID NO: 832351 - DNA, 33 bp, Homo sapien
tcatgaatgtcctgtcacaaggtttatcagcag

SEQ ID NO: 832352 - DNA, 33 bp, Homo sapien
tcatgaatgtcctgtctcaaggtttatcagcag

SEQ ID NO: 832353 - DNA, 33 bp, Homo sapien
aaatcattacactttacctggatcatctgggag

SEQ ID NO: 832354 - DNA, 33 bp, Homo sapien
aaatcattacactttagctggatcatctgggag

SEQ ID NO: 832355 - DNA, 33 bp, Homo sapien
ttaacttggtaatggacggaatcctcctcattc

SEQ ID NO: 832356 - DNA, 33 bp, Homo sapien
ttaacttggtaatggatggaatcctcctcattc

SEQ ID NO: 832357 - DNA, 33 bp, Homo sapien
acactttatcatacaaggggatttgtgttaagt

SEQ ID NO: 832358 - DNA, 33 bp, Homo sapien
acactttatcatacaatgggatttgtgttaagt

SEQ ID NO: 832359 - DNA, 33 bp, Homo sapien
tttgtgcttacagagacagtataatgcgcttac

SEQ ID NO: 832360 - DNA, 33 bp, Homo sapien
tttgtgcttacagagatagtataatgcgcttac

SEQ ID NO: 832361 - DNA, 33 bp, Homo sapien
gacacctgtgtaggataaatgggttctgcttgg

SEQ ID NO: 832362 - DNA, 33 bp, Homo sapien
gacacctgtgtaggatcaatgggttctgcttgg

SEQ ID NO: 832363 - DNA, 33 bp, Homo sapien
tttctatgcccctttacctctaatgtccctatt

SEQ ID NO: 832364 - DNA, 33 bp, Homo sapien
tttctatgcccctttatctctaatgtccctatt

SEQ ID NO: 832365 - DNA, 33 bp, Homo sapien
cacttcagattccgagactaacacgggactggg

SEQ ID NO: 832366 - DNA, 33 bp, Homo sapien
cacttcagattccgagcctaacacgggactggg

SEQ ID NO: 832367 - DNA, 33 bp, Homo sapien
ctgggcaacataccgagatgctgtctatgttta

SEQ ID NO: 832368 - DNA, 33 bp, Homo sapien
ctgggcaacataccgatatgctgtctatgttta

SEQ ID NO: 832369 - DNA, 33 bp, Homo sapien
cctatctgaagactcaagttaccatctggtatg

SEQ ID NO: 832370 - DNA, 33 bp, Homo sapien
cctatctgaagactcaggttaccatctggtatg

SEQ ID NO: 832371 - DNA, 33 bp, Homo sapien
tcccaggttgaaagaaatcataccagatggtaa

SEQ ID NO: 832372 - DNA, 33 bp, Homo sapien
tcccaggttgaaagaagtcataccagatggtaa

SEQ ID NO: 832373 - DNA, 33 bp, Homo sapien
gtcaaccacgctgagacggaggttcctcctgag

SEQ ID NO: 832374 - DNA, 33 bp, Homo sapien
gtcaaccacgctgagatggaggttcctcctgag

SEQ ID NO: 832375 - DNA, 33 bp, Homo sapien
gccagatcttgctacaccacaattgcctcacgt

SEQ ID NO: 832376 - DNA, 33 bp, Homo sapien
gccagatcttgctacatcacaattgcctcacgt

SEQ ID NO: 832377 - DNA, 33 bp, Homo sapien
atcttgttttccacacactccttttctttttct

SEQ ID NO: 832378 - DNA, 33 bp, Homo sapien
atcttgttttccacacgctccttttctttttct

SEQ ID NO: 832379 - DNA, 33 bp, Homo sapien
tccaccttacagctgccacatgaaatttgaggt

SEQ ID NO: 832380 - DNA, 33 bp, Homo sapien
tccaccttacagctgctacatgaaatttgaggt

SEQ ID NO: 832381 - DNA, 33 bp, Homo sapien
attttaagcaaacacaaaagtagacagaagagt

SEQ ID NO: 832382 - DNA, 33 bp, Homo sapien
attttaagcaaacacagaagtagacagaagagt

SEQ ID NO: 832383 - DNA, 33 bp, Homo sapien
ggaaataatgcttacccattgtgagatgctgta

SEQ ID NO: 832384 - DNA, 33 bp, Homo sapien
ggaaataatgcttacctattgtgagatgctgta

SEQ ID NO: 832385 - DNA, 33 bp, Homo sapien
gctagtgaatgcggcacaaatggaccctgaaga

SEQ ID NO: 832386 - DNA, 33 bp, Homo sapien
gctagtgaatgcggcagaaatggaccctgaaga

SEQ ID NO: 832387 - DNA, 33 bp, Homo sapien
ttccgtgatacttcaactatttcaccttattaa

SEQ ID NO: 832388 - DNA, 33 bp, Homo sapien
ttccgtgatacttcaattatttcaccttattaa

SEQ ID NO: 832389 - DNA, 33 bp, Homo sapien
gtgagtagaatgaactaagagatacacagcaaa

SEQ ID NO: 832390 - DNA, 33 bp, Homo sapien
gtgagtagaatgaactgagagatacacagcaaa

SEQ ID NO: 832391 - DNA, 33 bp, Homo sapien
gctaagttgttagtaacggtaatctctctaatc

SEQ ID NO: 832392 - DNA, 33 bp, Homo sapien
gctaagttgttagtaatggtaatctctctaatc

SEQ ID NO: 832393 - DNA, 33 bp, Homo sapien
atttgctatcttcgtcaagtttagtcatccaat

SEQ ID NO: 832394 - DNA, 33 bp, Homo sapien
atttgctatcttcgtcgagtttagtcatccaat

SEQ ID NO: 832395 - DNA, 33 bp, Homo sapien
gtagtactgtgactttcaaaatgatgtcatcag

SEQ ID NO: 832396 - DNA, 33 bp, Homo sapien
gtagtactgtgacttttaaaatgatgtcatcag

SEQ ID NO: 832397 - DNA, 33 bp, Homo sapien
gttccaggacaactaactcatgtctaacttact

SEQ ID NO: 832398 - DNA, 33 bp, Homo sapien
gttccaggacaactaagtcatgtctaacttact

SEQ ID NO: 832399 - DNA, 33 bp, Homo sapien
cctatagaatggtaaaccagcttatttcatcaa

SEQ ID NO: 832400 - DNA, 33 bp, Homo sapien
cctatagaatggtaaatcagcttatttcatcaa

SEQ ID NO: 832401 - DNA, 33 bp, Homo sapien
aactcctggatgtcctcaaccactggatgaata

SEQ ID NO: 832402 - DNA, 33 bp, Homo sapien
aactcctggatgtcctgaaccactggatgaata

SEQ ID NO: 832403 - DNA, 33 bp, Homo sapien
tagagtgtaggtcaaaacaatagatgtgggatg

SEQ ID NO: 832404 - DNA, 33 bp, Homo sapien
tagagtgtaggtcaaagcaatagatgtgggatg

SEQ ID NO: 832405 - DNA, 33 bp, Homo sapien
aaaacaacacaaataccagcaaaactggagcag

SEQ ID NO: 832406 - DNA, 33 bp, Homo sapien
aaaacaacacaaatactagcaaaactggagcag

SEQ ID NO: 832407 - DNA, 33 bp, Homo sapien
aataaatttagagcaaatgaaaattaaagtgca

SEQ ID NO: 832408 - DNA, 33 bp, Homo sapien
aataaatttagagcaagtgaaaattaaagtgca

SEQ ID NO: 832409 - DNA, 33 bp, Homo sapien
atatcctagcattgggcccactttcctcccaac

SEQ ID NO: 832410 - DNA, 33 bp, Homo sapien
atatcctagcattgggtccactttcctcccaac

SEQ ID NO: 832411 - DNA, 33 bp, Homo sapien
ccaggtgtcctgtccagtctcaggttggtcaca

SEQ ID NO: 832412 - DNA, 33 bp, Homo sapien
ccaggtgtcctgtccattctcaggttggtcaca

SEQ ID NO: 832413 - DNA, 33 bp, Homo sapien
ctctgttcctctccagaaggcaccaccacagcg

SEQ ID NO: 832414 - DNA, 33 bp, Homo sapien
ctctgttcctctccaggaggcaccaccacagcg

SEQ ID NO: 832415 - DNA, 33 bp, Homo sapien
atacatatatttggaactagccagcttgactca

SEQ ID NO: 832416 - DNA, 33 bp, Homo sapien
atacatatatttggaattagccagcttgactca

SEQ ID NO: 832417 - DNA, 33 bp, Homo sapien
cacatcaatgtcacaaacttcttcacagcctgt

SEQ ID NO: 832418 - DNA, 33 bp, Homo sapien
cacatcaatgtcacaagcttcttcacagcctgt

SEQ ID NO: 832419 - DNA, 33 bp, Homo sapien
aaaggcatcaggggaaataatatgataaattca

SEQ ID NO: 832420 - DNA, 33 bp, Homo sapien
aaaggcatcaggggaactaatatgataaattca

SEQ ID NO: 832421 - DNA, 33 bp, Homo sapien
cctcagggtatggggaactaaagctcgtgagga

SEQ ID NO: 832422 - DNA, 33 bp, Homo sapien
cctcagggtatggggacctaaagctcgtgagga

SEQ ID NO: 832423 - DNA, 33 bp, Homo sapien
agagggaaagtgatccagaagtagatacaaagc

SEQ ID NO: 832424 - DNA, 33 bp, Homo sapien
agagggaaagtgatccggaagtagatacaaagc

SEQ ID NO: 832425 - DNA, 33 bp, Homo sapien
acctgatgaatatcaacatccaatgccctgtaa

SEQ ID NO: 832426 - DNA, 33 bp, Homo sapien
acctgatgaatatcaatatccaatgccctgtaa

SEQ ID NO: 832427 - DNA, 33 bp, Homo sapien
aatgaaattcaggttgcatgaaccttgagaaca

SEQ ID NO: 832428 - DNA, 33 bp, Homo sapien
aatgaaattcaggttggatgaaccttgagaaca

SEQ ID NO: 832429 - DNA, 33 bp, Homo sapien
tggctcatttcacttacagtgttctcaaggttc

SEQ ID NO: 832430 - DNA, 33 bp, Homo sapien
tggctcatttcacttatagtgttctcaaggttc

SEQ ID NO: 832431 - DNA, 33 bp, Homo sapien
gccaccctctcaagaactgtaaaccagaagggc

SEQ ID NO: 832432 - DNA, 33 bp, Homo sapien
gccaccctctcaagaattgtaaaccagaagggc

SEQ ID NO: 832433 - DNA, 33 bp, Homo sapien
gtcaagttctcagaaacgtcatgcccagttacc

SEQ ID NO: 832434 - DNA, 33 bp, Homo sapien
gtcaagttctcagaaatgtcatgcccagttacc

SEQ ID NO: 832435 - DNA, 33 bp, Homo sapien
agaactccaggttgtacggtctttggactcttg

SEQ ID NO: 832436 - DNA, 33 bp, Homo sapien
agaactccaggttgtatggtctttggactcttg

SEQ ID NO: 832437 - DNA, 33 bp, Homo sapien
gtgataaatattaaacaagagactgctttaaac

SEQ ID NO: 832438 - DNA, 33 bp, Homo sapien
gtgataaatattaaaccagagactgctttaaac

SEQ ID NO: 832439 - DNA, 33 bp, Homo sapien
tttaaaatcccaaccacaggagaatctttatgt

SEQ ID NO: 832440 - DNA, 33 bp, Homo sapien
tttaaaatcccaaccataggagaatctttatgt

SEQ ID NO: 832441 - DNA, 33 bp, Homo sapien
gctgcatcccatctcagataaggaggtgatgta

SEQ ID NO: 832442 - DNA, 33 bp, Homo sapien
gctgcatcccatctcatataaggaggtgatgta

SEQ ID NO: 832443 - DNA, 33 bp, Homo sapien
agccaccatgccggccaaaaaagcatgtaaact

SEQ ID NO: 832444 - DNA, 33 bp, Homo sapien
agccaccatgccggccgaaaaagcatgtaaact

SEQ ID NO: 832445 - DNA, 33 bp, Homo sapien
atttgtcaacattccaatgccttctgaactcta

SEQ ID NO: 832446 - DNA, 33 bp, Homo sapien
atttgtcaacattccagtgccttctgaactcta

SEQ ID NO: 832447 - DNA, 33 bp, Homo sapien
gttgcaggtttccccaaatagagaacatcaata

SEQ ID NO: 832448 - DNA, 33 bp, Homo sapien
gttgcaggtttccccagatagagaacatcaata

SEQ ID NO: 832449 - DNA, 33 bp, Homo sapien
aggcttgggagctaacacaagaacagctttgga

SEQ ID NO: 832450 - DNA, 33 bp, Homo sapien
aggcttgggagctaacgcaagaacagctttgga

SEQ ID NO: 832451 - DNA, 33 bp, Homo sapien
gtttcctggaggctggaaatgctattccttgat

SEQ ID NO: 832452 - DNA, 33 bp, Homo sapien
gtttcctggaggctggcaatgctattccttgat

SEQ ID NO: 832453 - DNA, 33 bp, Homo sapien
cctccaggaaacaccactgggttctacttggtc

SEQ ID NO: 832454 - DNA, 33 bp, Homo sapien
cctccaggaaacaccattgggttctacttggtc

SEQ ID NO: 832455 - DNA, 33 bp, Homo sapien
gtctcatagttttctgcatctaaggtaagcgca

SEQ ID NO: 832456 - DNA, 33 bp, Homo sapien
gtctcatagttttctgtatctaaggtaagcgca

SEQ ID NO: 832457 - DNA, 33 bp, Homo sapien
atacttaaacatgaaacaggcatgtataaatgt

SEQ ID NO: 832458 - DNA, 33 bp, Homo sapien
atacttaaacatgaaataggcatgtataaatgt

SEQ ID NO: 832459 - DNA, 33 bp, Homo sapien
ggacatatgatgaaaacagggaccacagctgcc

SEQ ID NO: 832460 - DNA, 33 bp, Homo sapien
ggacatatgatgaaaatagggaccacagctgcc

SEQ ID NO: 832461 - DNA, 33 bp, Homo sapien
tgcttatatactcctccataacatctgcacaga

SEQ ID NO: 832462 - DNA, 33 bp, Homo sapien
tgcttatatactcctctataacatctgcacaga

SEQ ID NO: 832463 - DNA, 33 bp, Homo sapien
ccctgctgcccagagaagagtccttccatctcc

SEQ ID NO: 832464 - DNA, 33 bp, Homo sapien
ccctgctgcccagagaggagtccttccatctcc

SEQ ID NO: 832465 - DNA, 33 bp, Homo sapien
gatgcccagcagtctacgggtgtcctgcccaat

SEQ ID NO: 832466 - DNA, 33 bp, Homo sapien
gatgcccagcagtctaggggtgtcctgcccaat

SEQ ID NO: 832467 - DNA, 33 bp, Homo sapien
tccagaatttcagataacaccatagcttttgca

SEQ ID NO: 832468 - DNA, 33 bp, Homo sapien
tccagaatttcagatatcaccatagcttttgca

SEQ ID NO: 832469 - DNA, 33 bp, Homo sapien
ggtgtccttagatcaccggagttaatagtagca

SEQ ID NO: 832470 - DNA, 33 bp, Homo sapien
ggtgtccttagatcactggagttaatagtagca

SEQ ID NO: 832471 - DNA, 33 bp, Homo sapien; identical to SEQ ID NO: 832469

SEQ ID NO: 832472 - DNA, 33 bp, Homo sapien; identical to SEQ ID NO: 832470

SEQ ID NO: 832473 - DNA, 33 bp, Homo sapien
gctacctctgtttctgaagcacctgccccagct

SEQ ID NO: 832474 - DNA, 33 bp, Homo sapien
gctacctctgtttctgtagcacctgccccagct

SEQ ID NO: 832475 - DNA, 33 bp, Homo sapien
aggtgcacataaatacactgactcttgcatgca

SEQ ID NO: 832476 - DNA, 33 bp, Homo sapien
aggtgcacataaatacgctgactcttgcatgca

SEQ ID NO: 832477 - DNA, 33 bp, Homo sapien
gaacaattttattcatcagatccgcagagtgcc

SEQ ID NO: 832478 - DNA, 33 bp, Homo sapien
gaacaattttattcatgagatccgcagagtgcc

SEQ ID NO: 832479 - DNA, 33 bp, Homo sapien
tacagcaaaatctccacgtcacatttttaagct

SEQ ID NO: 832480 - DNA, 33 bp, Homo sapien
tacagcaaaatctccatgtcacatttttaagct

SEQ ID NO: 832481 - DNA, 33 bp, Homo sapien
ttcaaatgggaattacggcacatcctcaccatc

SEQ ID NO: 832482 - DNA, 33 bp, Homo sapien
ttcaaatgggaattactgcacatcctcaccatc

SEQ ID NO: 832483 - DNA, 33 bp, Homo sapien
caccatcacatcccacagacactccatcctctt

SEQ ID NO: 832484 - DNA, 33 bp, Homo sapien
caccatcacatcccacggacactccatcctctt

SEQ ID NO: 832485 - DNA, 33 bp, Homo sapien
agaaatgaaatggaagaatgatctctttggtaa

SEQ ID NO: 832486 - DNA, 33 bp, Homo sapien
agaaatgaaatggaaggatgatctctttggtaa

SEQ ID NO: 832487 - DNA, 33 bp, Homo sapien
cctgaaattaaatcacaagcaaataagaaattt

SEQ ID NO: 832488 - DNA, 33 bp, Homo sapien
cctgaaattaaatcacgagcaaataagaaattt

SEQ ID NO: 832489 - DNA, 33 bp, Homo sapien
ctagctcttaacaaaacagtgtgtggagcagta

SEQ ID NO: 832490 - DNA, 33 bp, Homo sapien
ctagctcttaacaaaagagtgtgtggagcagta

SEQ ID NO: 832491 - DNA, 33 bp, Homo sapien
aatgaccaggatggccaatatccctgtcttctt

SEQ ID NO: 832492 - DNA, 33 bp, Homo sapien
aatgaccaggatggccgatatccctgtcttctt

SEQ ID NO: 832493 - DNA, 33 bp, Homo sapien
tgagagctgtaactacacaaggagctgcagggg

SEQ ID NO: 832494 - DNA, 33 bp, Homo sapien
tgagagctgtaactacccaaggagctgcagggg

SEQ ID NO: 832495 - DNA, 33 bp, Homo sapien
acccccaaccaattaacagtggagataaattat

SEQ ID NO: 832496 - DNA, 33 bp, Homo sapien
acccccaaccaattaagagtggagataaattat

SEQ ID NO: 832497 - DNA, 33 bp, Homo sapien
agggagggtatgttctcacttcaggtctcaggt

SEQ ID NO: 832498 - DNA, 33 bp, Homo sapien
agggagggtatgttcttacttcaggtctcaggt

SEQ ID NO: 832499 - DNA, 33 bp, Homo sapien
tctgaacccaggggtacaagttgctgggaaact

SEQ ID NO: 832500 - DNA, 33 bp, Homo sapien
tctgaacccaggggtataagttgctgggaaact

SEQ ID NO: 832501 - DNA, 33 bp, Homo sapien; identical to SEQ ID NO: 832499

SEQ ID NO: 832502 - DNA, 33 bp, Homo sapien; identical to SEQ ID NO: 832500

SEQ ID NO: 832503 - DNA, 33 bp, Homo sapien
tggacttgcaacccacacaactgtgacatgata

SEQ ID NO: 832504 - DNA, 33 bp, Homo sapien
tggacttgcaacccacgcaactgtgacatgata

SEQ ID NO: 832505 - DNA, 33 bp, Homo sapien
atgagtggaaagatggccagagagtgggaagtg

SEQ ID NO: 832506 - DNA, 33 bp, Homo sapien
atgagtggaaagatggtcagagagtgggaagtg

SEQ ID NO: 832507 - DNA, 33 bp, Homo sapien
ttccaccaccgtctgcccatgcatttgcagctg

SEQ ID NO: 832508 - DNA, 33 bp, Homo sapien
ttccaccaccgtctgctcatgcatttgcagctg

SEQ ID NO: 832509 - DNA, 33 bp, Homo sapien
ggagaatgtgggcctgaagagactgagaacaag

SEQ ID NO: 832510 - DNA, 33 bp, Homo sapien
ggagaatgtgggcctgcagagactgagaacaag

SEQ ID NO: 832511 - DNA, 33 bp, Homo sapien
tctgaatcttgattgaagtctaggcattgagaa

SEQ ID NO: 832512 - DNA, 33 bp, Homo sapien
tctgaatcttgattgaggtctaggcattgagaa

SEQ ID NO: 832513 - DNA, 33 bp, Homo sapien
ctataggttcccttgccgaaagactgagggaat

SEQ ID NO: 832514 - DNA, 33 bp, Homo sapien
ctataggttcccttgctgaaagactgagggaat

SEQ ID NO: 832515 - DNA, 33 bp, Homo sapien
tatcagcttacatgcaatgaaaatgatcccccc

SEQ ID NO: 832516 - DNA, 33 bp, Homo sapien
tatcagcttacatgcagtgaaaatgatcccccc

SEQ ID NO: 832517 - DNA, 33 bp, Homo sapien
agagcatcagtgtcaactatgcactcagggaat

SEQ ID NO: 832518 - DNA, 33 bp, Homo sapien
agagcatcagtgtcaattatgcactcagggaat

SEQ ID NO: 832519 - DNA, 33 bp, Homo sapien
accaggaacactaaaacttgcttctaatgggga

SEQ ID NO: 832520 - DNA, 33 bp, Homo sapien
accaggaacactaaaagttgcttctaatgggga

SEQ ID NO: 832521 - DNA, 33 bp, Homo sapien
acaggacaccaagcaacgatgtgattccaagta

SEQ ID NO: 832522 - DNA, 33 bp, Homo sapien
acaggacaccaagcaatgatgtgattccaagta

SEQ ID NO: 832523 - DNA, 33 bp, Homo sapien
cttcactatgggtcaacgcaggcctggtaggat

SEQ ID NO: 832524 - DNA, 33 bp, Homo sapien
cttcactatgggtcaatgcaggcctggtaggat

SEQ ID NO: 832525 - DNA, 33 bp, Homo sapien
ttctcaataggaagaagatgtgggtctagaaac

SEQ ID NO: 832526 - DNA, 33 bp, Homo sapien
ttctcaataggaagaatatgtgggtctagaaac

SEQ ID NO: 832527 - DNA, 33 bp, Homo sapien
taaatttcctgaggccacctcttcagtcatgca

SEQ ID NO: 832528 - DNA, 33 bp, Homo sapien
taaatttcctgaggccgcctcttcagtcatgca

SEQ ID NO: 832529 - DNA, 33 bp, Homo sapien
gggcttgggatttacaagaaacatggctcactc

SEQ ID NO: 832530 - DNA, 33 bp, Homo sapien
gggcttgggatttacatgaaacatggctcactc

SEQ ID NO: 832531 - DNA, 33 bp, Homo sapien
ggattcctgaccattgaaaactgcggtagatga

SEQ ID NO: 832532 - DNA, 33 bp, Homo sapien
ggattcctgaccattggaaactgcggtagatga

SEQ ID NO: 832533 - DNA, 33 bp, Homo sapien
ggatgcattttattaccattcacaatgatcact

SEQ ID NO: 832534 - DNA, 33 bp, Homo sapien
ggatgcattttattactattcacaatgatcact

SEQ ID NO: 832535 - DNA, 33 bp, Homo sapien
gaatggcttgccttaacgcctgctgtgaccagt

SEQ ID NO: 832536 - DNA, 33 bp, Homo sapien
gaatggcttgccttaatgcctgctgtgaccagt

SEQ ID NO: 832537 - DNA, 33 bp, Homo sapien
gttggataaagagaagaattttacaggttggaa

SEQ ID NO: 832538 - DNA, 33 bp, Homo sapien
gttggataaagagaaggattttacaggttggaa

SEQ ID NO: 832539 - DNA, 33 bp, Homo sapien
ctggacttaatgactcacttctaactgatagag

SEQ ID NO: 832540 - DNA, 33 bp, Homo sapien
ctggacttaatgactcgcttctaactgatagag

SEQ ID NO: 832541 - DNA, 33 bp, Homo sapien
gaatcacaaactattaagtcagcattactctat

SEQ ID NO: 832542 - DNA, 33 bp, Homo sapien
gaatcacaaactattatgtcagcattactctat

SEQ ID NO: 832543 - DNA, 33 bp, Homo sapien
cgagggactcagaagacctggaatcagaccccc

SEQ ID NO: 832544 - DNA, 33 bp, Homo sapien
cgagggactcagaagagctggaatcagaccccc

SEQ ID NO: 832545 - DNA, 33 bp, Homo sapien
actacagctacagtgaatacagcaactagaaga

SEQ ID NO: 832546 - DNA, 33 bp, Homo sapien
actacagctacagtgattacagcaactagaaga

SEQ ID NO: 832547 - DNA, 33 bp, Homo sapien
gtccttcattttcacaagtgctttacaaaagag

SEQ ID NO: 832548 - DNA, 33 bp, Homo sapien
gtccttcattttcacaggtgctttacaaaagag

SEQ ID NO: 832549 - DNA, 33 bp, Homo sapien
tttgtatgaagcatgaagttttggctcaggtta

SEQ ID NO: 832550 - DNA, 33 bp, Homo sapien
tttgtatgaagcatgaggttttggctcaggtta

SEQ ID NO: 832551 - DNA, 33 bp, Homo sapien
ggcacttatttcaaacaagggaatactttatgt

SEQ ID NO: 832552 - DNA, 33 bp, Homo sapien
ggcacttatttcaaacgagggaatactttatgt

SEQ ID NO: 832553 - DNA, 33 bp, Homo sapien
atcatgaataaagctgcaagagtatttgtgcac

SEQ ID NO: 832554 - DNA, 33 bp, Homo sapien
atcatgaataaagctggaagagtatttgtgcac

SEQ ID NO: 832555 - DNA, 33 bp, Homo sapien
atctgctggttgaaataataactgagtcacaca

SEQ ID NO: 832556 - DNA, 33 bp, Homo sapien
atctgctggttgaaatcataactgagtcacaca

SEQ ID NO: 832557 - DNA, 33 bp, Homo sapien
cacaaagaatattaaacacgtatactcaaggat

SEQ ID NO: 832558 - DNA, 33 bp, Homo sapien
cacaaagaatattaaagacgtatactcaaggat

SEQ ID NO: 832559 - DNA, 33 bp, Homo sapien
aatgtagtttaggctaacttgcaacatagataa

SEQ ID NO: 832560 - DNA, 33 bp, Homo sapien
aatgtagtttaggctagcttgcaacatagataa

SEQ ID NO: 832561 - DNA, 33 bp, Homo sapien
ggtagtttaagacttcaagtatgttccttaggg

SEQ ID NO: 832562 - DNA, 33 bp, Homo sapien
ggtagtttaagacttctagtatgttccttaggg

SEQ ID NO: 832563 - DNA, 33 bp, Homo sapien
ttctctggtgactaaaataatgtgtagttcaat

SEQ ID NO: 832564 - DNA, 33 bp, Homo sapien
ttctctggtgactaaagtaatgtgtagttcaat

SEQ ID NO: 832565 - DNA, 33 bp, Homo sapien
gtgtattatagaatgccgatcgaatagccagtt

SEQ ID NO: 832566 - DNA, 33 bp, Homo sapien
gtgtattatagaatgctgatcgaatagccagtt

SEQ ID NO: 832567 - DNA, 33 bp, Homo sapien
acaaactgttatgtcaacattactctatcagtt

SEQ ID NO: 832568 - DNA, 33 bp, Homo sapien
acaaactgttatgtcagcattactctatcagtt

SEQ ID NO: 832569 - DNA, 33 bp, Homo sapien; identical to SEQ ID NO: 832567

SEQ ID NO: 832570 - DNA, 33 bp, Homo sapien; identical to SEQ ID NO: 832568

SEQ ID NO: 832571 - DNA, 33 bp, Homo sapien
acatgctcaatacattcaagtcaaagaaacctc

SEQ ID NO: 832572 - DNA, 33 bp, Homo sapien
acatgctcaatacattgaagtcaaagaaacctc

SEQ ID NO: 832573 - DNA, 33 bp, Homo sapien
aagttatagctcagtgcaccacaaatttgagac

SEQ ID NO: 832574 - DNA, 33 bp, Homo sapien
aagttatagctcagtggaccacaaatttgagac

SEQ ID NO: 832575 - DNA, 33 bp, Homo sapien
ttttctttactttgtcgaagcagagaatttaaa

SEQ ID NO: 832576 - DNA, 33 bp, Homo sapien
ttttctttactttgtctaagcagagaatttaaa

SEQ ID NO: 832577 - DNA, 33 bp, Homo sapien
cgttcataggatatgccctaattcccattggaa

SEQ ID NO: 832578 - DNA, 33 bp, Homo sapien
cgttcataggatatgctctaattcccattggaa

SEQ ID NO: 832579 - DNA, 33 bp, Homo sapien
ctctcagcctagctcactcttctccactcacac

SEQ ID NO: 832580 - DNA, 33 bp, Homo sapien
ctctcagcctagctcattcttctccactcacac

SEQ ID NO: 832581 - DNA, 33 bp, Homo sapien
caaataaaacctgtcacagtatcactgataatt

SEQ ID NO: 832582 - DNA, 33 bp, Homo sapien
caaataaaacctgtcatagtatcactgataatt

SEQ ID NO: 832583 - DNA, 33 bp, Homo sapien
gcccacagtgagagagcatcttccccaccagtc

SEQ ID NO: 832584 - DNA, 33 bp, Homo sapien
gcccacagtgagagaggatcttccccaccagtc

SEQ ID NO: 832585 - DNA, 33 bp, Homo sapien
aatgtatttgattacacaagaatttaaaatgca

SEQ ID NO: 832586 - DNA, 33 bp, Homo sapien
aatgtatttgattacagaagaatttaaaatgca

SEQ ID NO: 832587 - DNA, 33 bp, Homo sapien
ttcttatcatccttcacggagtcacccaacagg

SEQ ID NO: 832588 - DNA, 33 bp, Homo sapien
ttcttatcatccttcatggagtcacccaacagg

SEQ ID NO: 832589 - DNA, 33 bp, Homo sapien
agtggaccatgttctcaaagtgttgtggttgtc

SEQ ID NO: 832590 - DNA, 33 bp, Homo sapien
agtggaccatgttctcgaagtgttgtggttgtc

SEQ ID NO: 832591 - DNA, 33 bp, Homo sapien
aaaaaaaaattccctcagagagctgttaaagca

SEQ ID NO: 832592 - DNA, 33 bp, Homo sapien
aaaaaaaaattccctcggagagctgttaaagca

SEQ ID NO: 832593 - DNA, 33 bp, Homo sapien
ccaggaaactcattcaaatggtaaacatcatta

SEQ ID NO: 832594 - DNA, 33 bp, Homo sapien
ccaggaaactcattcatatggtaaacatcatta

SEQ ID NO: 832595 - DNA, 33 bp, Homo sapien
cttgtagatattttgaaattgggtattatggag

SEQ ID NO: 832596 - DNA, 33 bp, Homo sapien
cttgtagatattttgagattgggtattatggag

SEQ ID NO: 832597 - DNA, 33 bp, Homo sapien
atcatataaatgaaaccgttgcactgtctccat

SEQ ID NO: 832598 - DNA, 33 bp, Homo sapien
atcatataaatgaaactgttgcactgtctccat

SEQ ID NO: 832599 - DNA, 33 bp, Homo sapien
tgccacaggagaaacacagatcctctaagaagc

SEQ ID NO: 832600 - DNA, 33 bp, Homo sapien
tgccacaggagaaacagagatcctctaagaagc

SEQ ID NO: 832601 - DNA, 33 bp, Homo sapien
aatcaagcaatgttaacaaagaaatggtgcttt

SEQ ID NO: 832602 - DNA, 33 bp, Homo sapien
aatcaagcaatgttaataaagaaatggtgcttt

SEQ ID NO: 832603 - DNA, 33 bp, Homo sapien
aatataaaaacacttaaacataaaacagcatgt

SEQ ID NO: 832604 - DNA, 33 bp, Homo sapien
aatataaaaacacttagacataaaacagcatgt

SEQ ID NO: 832605 - DNA, 33 bp, Homo sapien
cctgaccaagaagagcaccacccatctatgtgc

SEQ ID NO: 832606 - DNA, 33 bp, Homo sapien
cctgaccaagaagagcgccacccatctatgtgc

SEQ ID NO: 832607 - DNA, 33 bp, Homo sapien
gttgggtggatgaaaagtgttagtatatatgag

SEQ ID NO: 832608 - DNA, 33 bp, Homo sapien
gttgggtggatgaaaattgttagtatatatgag

SEQ ID NO: 832609 - DNA, 33 bp, Homo sapien
ggcggcctggattgaacgccctgcccaggtctc

SEQ ID NO: 832610 - DNA, 33 bp, Homo sapien
ggcggcctggattgaatgccctgcccaggtctc

SEQ ID NO: 832611 - DNA, 33 bp, Homo sapien
ctccgagggaagatgacgtctgcacttttttct

SEQ ID NO: 832612 - DNA, 33 bp, Homo sapien
ctccgagggaagatgatgtctgcacttttttct

SEQ ID NO: 832613 - DNA, 33 bp, Homo sapien
ttaacatggtctatgacatggatcaatgttcac

SEQ ID NO: 832614 - DNA, 33 bp, Homo sapien
ttaacatggtctatgagatggatcaatgttcac

SEQ ID NO: 832615 - DNA, 33 bp, Homo sapien
gattgcttgaccccagacgttccagacaagtct

SEQ ID NO: 832616 - DNA, 33 bp, Homo sapien
gattgcttgaccccaggcgttccagacaagtct

SEQ ID NO: 832617 - DNA, 33 bp, Homo sapien
agtaatagacagtacaaccctttggctgaaatc

SEQ ID NO: 832618 - DNA, 33 bp, Homo sapien
agtaatagacagtacatccctttggctgaaatc

SEQ ID NO: 832619 - DNA, 33 bp, Homo sapien
atacattttcctaaaaagttttgtctaggagta

SEQ ID NO: 832620 - DNA, 33 bp, Homo sapien
atacattttcctaaaaggttttgtctaggagta

SEQ ID NO: 832621 - DNA, 33 bp, Homo sapien
caaaaaactctaatgactcagaggcacctaagt

SEQ ID NO: 832622 - DNA, 33 bp, Homo sapien
caaaaaactctaatgattcagaggcacctaagt

SEQ ID NO: 832623 - DNA, 33 bp, Homo sapien
ggctctctcccattagaagctgcctctcactgc

SEQ ID NO: 832624 - DNA, 33 bp, Homo sapien
ggctctctcccattaggagctgcctctcactgc

SEQ ID NO: 832625 - DNA, 33 bp, Homo sapien
accagagagcatttgccgaggccgaagaacaaa

SEQ ID NO: 832626 - DNA, 33 bp, Homo sapien
accagagagcatttgctgaggccgaagaacaaa

SEQ ID NO: 832627 - DNA, 33 bp, Homo sapien
ggaaaagacacagagacgcaaaagctgtgactg

SEQ ID NO: 832628 - DNA, 33 bp, Homo sapien
ggaaaagacacagagaggcaaaagctgtgactg

SEQ ID NO: 832629 - DNA, 33 bp, Homo sapien
gaccttacttaagtaccgattccccctttataa

SEQ ID NO: 832630 - DNA, 33 bp, Homo sapien
gaccttacttaagtactgattccccctttataa

SEQ ID NO: 832631 - DNA, 33 bp, Homo sapien
ctacagtagagtgtgaatataacttttatatgt

SEQ ID NO: 832632 - DNA, 33 bp, Homo sapien
ctacagtagagtgtgactataacttttatatgt

SEQ ID NO: 832633 - DNA, 33 bp, Homo sapien
atgttcatgattagccaacttgtgcccactcag

SEQ ID NO: 832634 - DNA, 33 bp, Homo sapien
atgttcatgattagccgacttgtgcccactcag

SEQ ID NO: 832635 - DNA, 33 bp, Homo sapien
attaacagtgaagataaattaacaacctttgta

SEQ ID NO: 832636 - DNA, 33 bp, Homo sapien
attaacagtgaagatagattaacaacctttgta

SEQ ID NO: 832637 - DNA, 33 bp, Homo sapien
atgtcattttcatgaacgtttgttattagtgta

SEQ ID NO: 832638 - DNA, 33 bp, Homo sapien
atgtcattttcatgaaggtttgttattagtgta

SEQ ID NO: 832639 - DNA, 33 bp, Homo sapien
aaaatgaactaactcccaataatttacagtagg

SEQ ID NO: 832640 - DNA, 33 bp, Homo sapien
aaaatgaactaactcctaataatttacagtagg

SEQ ID NO: 832641 - DNA, 33 bp, Homo sapien
gtcatgtcctcagggaaacccaggttgctgctg

SEQ ID NO: 832642 - DNA, 33 bp, Homo sapien
gtcatgtcctcagggagacccaggttgctgctg

SEQ ID NO: 832643 - DNA, 33 bp, Homo sapien
aagcaagcacatatgcaatgagtggtccactga

SEQ ID NO: 832644 - DNA, 33 bp, Homo sapien
aagcaagcacatatgcgatgagtggtccactga

SEQ ID NO: 832645 - DNA, 33 bp, Homo sapien
atgtgcttgctttccacgcttggagtctaccct

SEQ ID NO: 832646 - DNA, 33 bp, Homo sapien
atgtgcttgctttccatgcttggagtctaccct

SEQ ID NO: 832647 - DNA, 33 bp, Homo sapien
caggtgagtgtgacaactcaagggagagggaag

SEQ ID NO: 832648 - DNA, 33 bp, Homo sapien
caggtgagtgtgacaattcaagggagagggaag

SEQ ID NO: 832649 - DNA, 33 bp, Homo sapien
gcgttttaccatgtgacggactgttgtgggtta

SEQ ID NO: 832650 - DNA, 33 bp, Homo sapien
gcgttttaccatgtgagggactgttgtgggtta

SEQ ID NO: 832651 - DNA, 33 bp, Homo sapien
cagaattgatgatggccccagctcttgaagtct

SEQ ID NO: 832652 - DNA, 33 bp, Homo sapien
cagaattgatgatggctccagctcttgaagtct

SEQ ID NO: 832653 - DNA, 33 bp, Homo sapien
tcagccttcagaagagaaatgtcctgccttagt

SEQ ID NO: 832654 - DNA, 33 bp, Homo sapien
tcagccttcagaagaggaatgtcctgccttagt

SEQ ID NO: 832655 - DNA, 33 bp, Homo sapien; identical to SEQ ID NO: 832653

SEQ ID NO: 832656 - DNA, 33 bp, Homo sapien; identical to SEQ ID NO: 832654

SEQ ID NO: 832657 - DNA, 33 bp, Homo sapien
tggaccacaaagcaacgctgagcctcagtgatg

SEQ ID NO: 832658 - DNA, 33 bp, Homo sapien
tggaccacaaagcaactctgagcctcagtgatg

SEQ ID NO: 832659 - DNA, 33 bp, Homo sapien
agagaaattcatgagacagaaaatgctgggaaa

SEQ ID NO: 832660 - DNA, 33 bp, Homo sapien
agagaaattcatgagatagaaaatgctgggaaa

SEQ ID NO: 832661 - DNA, 33 bp, Homo sapien
ggtgttgtcagaactgaaagaggctcatcaggc

SEQ ID NO: 832662 - DNA, 33 bp, Homo sapien
ggtgttgtcagaactggaagaggctcatcaggc

SEQ ID NO: 832663 - DNA, 33 bp, Homo sapien; identical to SEQ ID NO: 832661

SEQ ID NO: 832664 - DNA, 33 bp, Homo sapien; identical to SEQ ID NO: 832662

SEQ ID NO: 832665 - DNA, 33 bp, Homo sapien
cccatgtttacacccacagaaaatacccaagtc

SEQ ID NO: 832666 - DNA, 33 bp, Homo sapien
cccatgtttacacccagagaaaatacccaagtc

SEQ ID NO: 832667 - DNA, 33 bp, Homo sapien
aacatgtgtgtccaggaatcaaaagatggaagc

SEQ ID NO: 832668 - DNA, 33 bp, Homo sapien
aacatgtgtgtccagggatcaaaagatggaagc

SEQ ID NO: 832669 - DNA, 33 bp, Homo sapien; identical to SEQ ID NO: 832667

SEQ ID NO: 832670 - DNA, 33 bp, Homo sapien; identical to SEQ ID NO: 832668

SEQ ID NO: 832671 - DNA, 33 bp, Homo sapien
ctccaggcccaggtaacagatcctcatcttcag

SEQ ID NO: 832672 - DNA, 33 bp, Homo sapien
ctccaggcccaggtaatagatcctcatcttcag

SEQ ID NO: 832673 - DNA, 33 bp, Homo sapien
tacatcaataggaaaccggtgaaattgtggtaa

SEQ ID NO: 832674 - DNA, 33 bp, Homo sapien
tacatcaataggaaactggtgaaattgtggtaa

SEQ ID NO: 832675 - DNA, 33 bp, Homo sapien; identical to SEQ ID NO: 832673

SEQ ID NO: 832676 - DNA, 33 bp, Homo sapien; identical to SEQ ID NO: 832674

SEQ ID NO: 832677 - DNA, 33 bp, Homo sapien
aaaactggctatttgacgggcattctataataa

SEQ ID NO: 832678 - DNA, 33 bp, Homo sapien
aaaactggctatttgatgggcattctataataa

SEQ ID NO: 832679 - DNA, 33 bp, Homo sapien
ccttcacttttcatccaggaatctccgtccctg

SEQ ID NO: 832680 - DNA, 33 bp, Homo sapien
ccttcacttttcatcccggaatctccgtccctg

SEQ ID NO: 832681 - DNA, 33 bp, Homo sapien; identical to SEQ ID NO: 832679

SEQ ID NO: 832682 - DNA, 33 bp, Homo sapien; identical to SEQ ID NO: 832680

SEQ ID NO: 832683 - DNA, 33 bp, Homo sapien
aagaggagctccaacaaaaagttcactatgatg

SEQ ID NO: 832684 - DNA, 33 bp, Homo sapien
aagaggagctccaacagaaagttcactatgatg

SEQ ID NO: 832685 - DNA, 33 bp, Homo sapien
tgccacccctacaatacctgcagtaccctcctg

SEQ ID NO: 832686 - DNA, 33 bp, Homo sapien
tgccacccctacaatatctgcagtaccctcctg

SEQ ID NO: 832687 - DNA, 33 bp, Homo sapien
aagtcttgtaaaagtgacaccttagagggcctg

SEQ ID NO: 832688 - DNA, 33 bp, Homo sapien
aagtcttgtaaaagtggcaccttagagggcctg

SEQ ID NO: 832689 - DNA, 33 bp, Homo sapien
ggaattatccctaagccaaaaaccataactata

SEQ ID NO: 832690 - DNA, 33 bp, Homo sapien
ggaattatccctaagcgaaaaaccataactata

SEQ ID NO: 832691 - DNA, 33 bp, Homo sapien
caggacgatgctgttacgacgatacatacaatt

SEQ ID NO: 832692 - DNA, 33 bp, Homo sapien
caggacgatgctgttatgacgatacatacaatt

SEQ ID NO: 832693 - DNA, 33 bp, Homo sapien
gcaagacatgaacagaagtttcactgaagagga

SEQ ID NO: 832694 - DNA, 33 bp, Homo sapien
gcaagacatgaacagacgtttcactgaagagga

SEQ ID NO: 832695 - DNA, 33 bp, Homo sapien
aacaccaggctaacaaacagatgaaaagacact

SEQ ID NO: 832696 - DNA, 33 bp, Homo sapien
aacaccaggctaacaagcagatgaaaagacact

SEQ ID NO: 832697 - DNA, 33 bp, Homo sapien
tgtctacctgtatctacaaagagagatgttatt

SEQ ID NO: 832698 - DNA, 33 bp, Homo sapien
tgtctacctgtatctataaagagagatgttatt

SEQ ID NO: 832699 - DNA, 33 bp, Homo sapien
tggctcagtcacaaaagcttaatctcttcattc

SEQ ID NO: 832700 - DNA, 33 bp, Homo sapien
tggctcagtcacaaaatcttaatctcttcattc

SEQ ID NO: 832701 - DNA, 33 bp, Homo sapien
atctgtccctcactgacaactggcggggcgatg

SEQ ID NO: 832702 - DNA, 33 bp, Homo sapien
atctgtccctcactgagaactggcggggcgatg

SEQ ID NO: 832703 - DNA, 33 bp, Homo sapien
gcacctcaggtgactaaatttttttactgttct

SEQ ID NO: 832704 - DNA, 33 bp, Homo sapien
gcacctcaggtgactacatttttttactgttct

SEQ ID NO: 832705 - DNA, 33 bp, Homo sapien
aaatgtgatggtcaagccctgtgccacctggaa

SEQ ID NO: 832706 - DNA, 33 bp, Homo sapien
aaatgtgatggtcaagtcctgtgccacctggaa

SEQ ID NO: 832707 - DNA, 33 bp, Homo sapien
gctaaaggctcttatgacaacttcttaaaataa

SEQ ID NO: 832708 - DNA, 33 bp, Homo sapien
gctaaaggctcttatggcaacttcttaaaataa

SEQ ID NO: 832709 - DNA, 33 bp, Homo sapien
cttggctcctggcatacgacactggtaccaagc

SEQ ID NO: 832710 - DNA, 33 bp, Homo sapien
cttggctcctggcatatgacactggtaccaagc

SEQ ID NO: 832711 - DNA, 33 bp, Homo sapien
ggaaaacaaaactgcccgagactgaaaagtggc

SEQ ID NO: 832712 - DNA, 33 bp, Homo sapien
ggaaaacaaaactgcctgagactgaaaagtggc

SEQ ID NO: 832713 - DNA, 33 bp, Homo sapien
tgtaggttgcaagtccacacagtcttatggggc

SEQ ID NO: 832714 - DNA, 33 bp, Homo sapien
tgtaggttgcaagtccgcacagtcttatggggc

SEQ ID NO: 832715 - DNA, 33 bp, Homo sapien
cacagcatatgataaaatgatagagtctgtgtc

SEQ ID NO: 832716 - DNA, 33 bp, Homo sapien
cacagcatatgataaagtgatagagtctgtgtc

SEQ ID NO: 832717 - DNA, 33 bp, Homo sapien
gaagttagagaagacaccaacgatgagggacag

SEQ ID NO: 832718 - DNA, 33 bp, Homo sapien
gaagttagagaagacatcaacgatgagggacag

SEQ ID NO: 832719 - DNA, 33 bp, Homo sapien
tctcatgatactttcacagggcatcattgcagc

SEQ ID NO: 832720 - DNA, 33 bp, Homo sapien
tctcatgatactttcatagggcatcattgcagc

SEQ ID NO: 832721 - DNA, 33 bp, Homo sapien
gtagctgaagacatcactatgagggccacagtg

SEQ ID NO: 832722 - DNA, 33 bp, Homo sapien
gtagctgaagacatcattatgagggccacagtg

SEQ ID NO: 832723 - DNA, 33 bp, Homo sapien
caaggcaggcctgttacaggaaagtcaggaccc

SEQ ID NO: 832724 - DNA, 33 bp, Homo sapien
caaggcaggcctgttagaggaaagtcaggaccc

SEQ ID NO: 832725 - DNA, 33 bp, Homo sapien
tctctgctgtggatgacacgatcttactccaga

SEQ ID NO: 832726 - DNA, 33 bp, Homo sapien
tctctgctgtggatgatacgatcttactccaga

SEQ ID NO: 832727 - DNA, 33 bp, Homo sapien
gacccacaacatcataaattgcacaggcccaac

SEQ ID NO: 832728 - DNA, 33 bp, Homo sapien
gacccacaacatcatacattgcacaggcccaac

SEQ ID NO: 832729 - DNA, 33 bp, Homo sapien; identical to SEQ ID NO: 832727

SEQ ID NO: 832730 - DNA, 33 bp, Homo sapien; identical to SEQ ID NO: 832728

SEQ ID NO: 832731 - DNA, 33 bp, Homo sapien
atgttcttcctcttgcaaacacagaactgtaga

SEQ ID NO: 832732 - DNA, 33 bp, Homo sapien
atgttcttcctcttgcgaacacagaactgtaga

SEQ ID NO: 832733 - DNA, 33 bp, Homo sapien
ctggataattctactcacacttgcaatggggtg

SEQ ID NO: 832734 - DNA, 33 bp, Homo sapien
ctggataattctactctcacttgcaatggggtg

SEQ ID NO: 832735 - DNA, 33 bp, Homo sapien
tgggtctgggcccttgaaaatcaaatcctctca

SEQ ID NO: 832736 - DNA, 33 bp, Homo sapien
tgggtctgggcccttggaaatcaaatcctctca

SEQ ID NO: 832737 - DNA, 33 bp, Homo sapien
attccgtggaaaattccagtccctgaggaggga

SEQ ID NO: 832738 - DNA, 33 bp, Homo sapien
attccgtggaaaattctagtccctgaggaggga

SEQ ID NO: 832739 - DNA, 33 bp, Homo sapien
gcaggcctggtctctacaagctccatgtcccga

SEQ ID NO: 832740 - DNA, 33 bp, Homo sapien
gcaggcctggtctctagaagctccatgtcccga

SEQ ID NO: 832741 - DNA, 33 bp, Homo sapien
tcaaaaaccctgactcactttctgcaaaggcac

SEQ ID NO: 832742 - DNA, 33 bp, Homo sapien
tcaaaaaccctgactctctttctgcaaaggcac

SEQ ID NO: 832743 - DNA, 33 bp, Homo sapien; identical to SEQ ID NO: 832741

SEQ ID NO: 832744 - DNA, 33 bp, Homo sapien; identical to SEQ ID NO: 832742

SEQ ID NO: 832745 - DNA, 33 bp, Homo sapien
gcacataaagttgagacagagatggagacatct

SEQ ID NO: 832746 - DNA, 33 bp, Homo sapien
gcacataaagttgagatagagatggagacatct

SEQ ID NO: 832747 - DNA, 33 bp, Homo sapien
gaccctgcctcttggcaaatttcagaatctggt

SEQ ID NO: 832748 - DNA, 33 bp, Homo sapien
gaccctgcctcttggcgaatttcagaatctggt

SEQ ID NO: 832749 - DNA, 33 bp, Homo sapien
aaagtcctcacattcaaaattgtcctgggccac

SEQ ID NO: 832750 - DNA, 33 bp, Homo sapien
aaagtcctcacattcagaattgtcctgggccac

SEQ ID NO: 832751 - DNA, 33 bp, Homo sapien
ttaccacacatacaacggaattaaacttttaca

SEQ ID NO: 832752 - DNA, 33 bp, Homo sapien
ttaccacacatacaactgaattaaacttttaca

SEQ ID NO: 832753 - DNA, 33 bp, Homo sapien
gggtattccttcctacgcttttcatgtttcatt

SEQ ID NO: 832754 - DNA, 33 bp, Homo sapien
gggtattccttcctactcttttcatgtttcatt

SEQ ID NO: 832755 - DNA, 33 bp, Homo sapien
acttgtctctcaattcaagctaaccatttcggg

SEQ ID NO: 832756 - DNA, 33 bp, Homo sapien
acttgtctctcaattcgagctaaccatttcggg

SEQ ID NO: 832757 - DNA, 33 bp, Homo sapien
atgttctcatatataactgggaactgagcaatg

SEQ ID NO: 832758 - DNA, 33 bp, Homo sapien
atgttctcatatataattgggaactgagcaatg

SEQ ID NO: 832759 - DNA, 33 bp, Homo sapien
agtgaagttcaagtaaagtgatcattgtgaatg

SEQ ID NO: 832760 - DNA, 33 bp, Homo sapien
agtgaagttcaagtaacgtgatcattgtgaatg

SEQ ID NO: 832761 - DNA, 33 bp, Homo sapien
gtcagatcccacagaacatgtggctagaggagg

SEQ ID NO: 832762 - DNA, 33 bp, Homo sapien
gtcagatcccacagaagatgtggctagaggagg

SEQ ID NO: 832763 - DNA, 33 bp, Homo sapien; identical to SEQ ID NO: 832761

SEQ ID NO: 832764 - DNA, 33 bp, Homo sapien; identical to SEQ ID NO: 832762

SEQ ID NO: 832765 - DNA, 33 bp, Homo sapien
acaggatttatggaaccggtgattccaccatgg

SEQ ID NO: 832766 - DNA, 33 bp, Homo sapien
acaggatttatggaactggtgattccaccatgg

SEQ ID NO: 832767 - DNA, 33 bp, Homo sapien
gaagcaggatggagctcaaccaagcatcagtgg

SEQ ID NO: 832768 - DNA, 33 bp, Homo sapien
gaagcaggatggagctgaaccaagcatcagtgg

SEQ ID NO: 832769 - DNA, 33 bp, Homo sapien
ttctatcttatcagggacagtaacatgctaaaa

SEQ ID NO: 832770 - DNA, 33 bp, Homo sapien
ttctatcttatcagggccagtaacatgctaaaa

SEQ ID NO: 832771 - DNA, 33 bp, Homo sapien
gcttggtgtcctatgcgcaagcattctatctta

SEQ ID NO: 832772 - DNA, 33 bp, Homo sapien
gcttggtgtcctatgctcaagcattctatctta

SEQ ID NO: 832773 - DNA, 33 bp, Homo sapien
tatcatgagacgaaaacggtccatgtcggttga

SEQ ID NO: 832774 - DNA, 33 bp, Homo sapien
tatcatgagacgaaaatggtccatgtcggttga

SEQ ID NO: 832775 - DNA, 33 bp, Homo sapien
gggctgatccatgatgcagactggctaacttca

SEQ ID NO: 832776 - DNA, 33 bp, Homo sapien
gggctgatccatgatgtagactggctaacttca

SEQ ID NO: 832777 - DNA, 33 bp, Homo sapien
gactctacaggcacaactcagtaccagcttgga

SEQ ID NO: 832778 - DNA, 33 bp, Homo sapien
gactctacaggcacaattcagtaccagcttgga

SEQ ID NO: 832779 - DNA, 33 bp, Homo sapien
cttggtttttggacccacgtattcttccttctg

SEQ ID NO: 832780 - DNA, 33 bp, Homo sapien
cttggtttttggacccgcgtattcttccttctg

SEQ ID NO: 832781 - DNA, 33 bp, Homo sapien
ggacagaaggagacaaagtctgttcgacgcatc

SEQ ID NO: 832782 - DNA, 33 bp, Homo sapien
ggacagaaggagacaaggtctgttcgacgcatc

SEQ ID NO: 832783 - DNA, 33 bp, Homo sapien
attattaaaatgcaggaaattaaaagatgtaga

SEQ ID NO: 832784 - DNA, 33 bp, Homo sapien
attattaaaatgcagggaattaaaagatgtaga

SEQ ID NO: 832785 - DNA, 33 bp, Homo sapien
cagcaagtgtggctaacattattaaaatgcagg

SEQ ID NO: 832786 - DNA, 33 bp, Homo sapien
cagcaagtgtggctaatattattaaaatgcagg

SEQ ID NO: 832787 - DNA, 33 bp, Homo sapien
ggaggaaaggaggaaacaaagatggaaggacag

SEQ ID NO: 832788 - DNA, 33 bp, Homo sapien
ggaggaaaggaggaaagaaagatggaaggacag

SEQ ID NO: 832789 - DNA, 33 bp, Homo sapien
cctcttccaacagccacgtgggatattcttgtg

SEQ ID NO: 832790 - DNA, 33 bp, Homo sapien
cctcttccaacagccatgtgggatattcttgtg

SEQ ID NO: 832791 - DNA, 33 bp, Homo sapien
gaagaactttgagaaaactttcctggattcctg

SEQ ID NO: 832792 - DNA, 33 bp, Homo sapien
gaagaactttgagaaacctttcctggattcctg

SEQ ID NO: 832793 - DNA, 33 bp, Homo sapien
ggctgttcagtgtcacaacttactatgactgat

SEQ ID NO: 832794 - DNA, 33 bp, Homo sapien
ggctgttcagtgtcaccacttactatgactgat

SEQ ID NO: 832795 - DNA, 33 bp, Homo sapien
agcattgttgtgaatgaaagtgtcacattttcc

SEQ ID NO: 832796 - DNA, 33 bp, Homo sapien
agcattgttgtgaatggaagtgtcacattttcc

SEQ ID NO: 832797 - DNA, 33 bp, Homo sapien
acgagagatgtaagaactgaaggtaccattcct

SEQ ID NO: 832798 - DNA, 33 bp, Homo sapien
acgagagatgtaagaattgaaggtaccattcct

SEQ ID NO: 832799 - DNA, 33 bp, Homo sapien
tcattctgttgggacagtaggggcatttgttta

SEQ ID NO: 832800 - DNA, 33 bp, Homo sapien
tcattctgttgggacattaggggcatttgttta

SEQ ID NO: 832801 - DNA, 33 bp, Homo sapien
gctgggctctggcttgaatctccagaatatctc

SEQ ID NO: 832802 - DNA, 33 bp, Homo sapien
gctgggctctggcttgtatctccagaatatctc

SEQ ID NO: 832803 - DNA, 33 bp, Homo sapien
agcgtagctgtccgcaaaaacattctttttttt

SEQ ID NO: 832804 - DNA, 33 bp, Homo sapien
agcgtagctgtccgcacaaacattctttttttt

SEQ ID NO: 832805 - DNA, 33 bp, Homo sapien
ttcaggggtggagtaaaaggagtctctcagttc

SEQ ID NO: 832806 - DNA, 33 bp, Homo sapien
ttcaggggtggagtaacaggagtctctcagttc

SEQ ID NO: 832807 - DNA, 33 bp, Homo sapien
gatattatttacaataaggaagaagaacttgta

SEQ ID NO: 832808 - DNA, 33 bp, Homo sapien
gatattatttacaatatggaagaagaacttgta

SEQ ID NO: 832809 - DNA, 33 bp, Homo sapien
gcagctgtgacttctgcatagtcatatatggga

SEQ ID NO: 832810 - DNA, 33 bp, Homo sapien
gcagctgtgacttctggatagtcatatatggga

SEQ ID NO: 832811 - DNA, 33 bp, Homo sapien
gttcttattgcaagaccaaaaattgagaaaacc

SEQ ID NO: 832812 - DNA, 33 bp, Homo sapien
gttcttattgcaagacgaaaaattgagaaaacc

SEQ ID NO: 832813 - DNA, 33 bp, Homo sapien
ctcactctatgttttggaatcccaggtaattca

SEQ ID NO: 832814 - DNA, 33 bp, Homo sapien
ctcactctatgttttgtaatcccaggtaattca

SEQ ID NO: 832815 - DNA, 33 bp, Homo sapien
gtgagtcaatggaaaacagatgatacagggtca

SEQ ID NO: 832816 - DNA, 33 bp, Homo sapien
gtgagtcaatggaaaatagatgatacagggtca

SEQ ID NO: 832817 - DNA, 33 bp, Homo sapien
actgtgtcttcaatccaatcatgtaggtcatgg

SEQ ID NO: 832818 - DNA, 33 bp, Homo sapien
actgtgtcttcaatcccatcatgtaggtcatgg

SEQ ID NO: 832819 - DNA, 33 bp, Homo sapien
ctgtgatgtaatatcaatgaaccactcatttcc

SEQ ID NO: 832820 - DNA, 33 bp, Homo sapien
ctgtgatgtaatatcagtgaaccactcatttcc

SEQ ID NO: 832821 - DNA, 33 bp, Homo sapien
tagaagacaacttcccagattccaccactgtct

SEQ ID NO: 832822 - DNA, 33 bp, Homo sapien
tagaagacaacttccccgattccaccactgtct

SEQ ID NO: 832823 - DNA, 33 bp, Homo sapien; identical to SEQ ID NO: 832821

SEQ ID NO: 832824 - DNA, 33 bp, Homo sapien; identical to SEQ ID NO: 832822

SEQ ID NO: 832825 - DNA, 33 bp, Homo sapien
caggctggatgaataaaaatcctttggcttgga

SEQ ID NO: 832826 - DNA, 33 bp, Homo sapien
caggctggatgaataagaatcctttggcttgga

SEQ ID NO: 832827 - DNA, 33 bp, Homo sapien
gtcttagttgccctggaacatgtaaaggaagga

SEQ ID NO: 832828 - DNA, 33 bp, Homo sapien
gtcttagttgccctggtacatgtaaaggaagga

SEQ ID NO: 832829 - DNA, 33 bp, Homo sapien
gtcatgatcccatcctcaatgcctagacctcag

SEQ ID NO: 832830 - DNA, 33 bp, Homo sapien
gtcatgatcccatccttaatgcctagacctcag

SEQ ID NO: 832831 - DNA, 33 bp, Homo sapien
ctcattcattctttagaccttaccagtttccct

SEQ ID NO: 832832 - DNA, 33 bp, Homo sapien
ctcattcattctttaggccttaccagtttccct

SEQ ID NO: 832833 - DNA, 33 bp, Homo sapien
gctgacaactggactgcaaccttgtgagaggcc

SEQ ID NO: 832834 - DNA, 33 bp, Homo sapien
gctgacaactggactggaaccttgtgagaggcc

SEQ ID NO: 832835 - DNA, 33 bp, Homo sapien
tgccatcctagcactacggaaggcagaggaagg

SEQ ID NO: 832836 - DNA, 33 bp, Homo sapien
tgccatcctagcactatggaaggcagaggaagg

SEQ ID NO: 832837 - DNA, 33 bp, Homo sapien
ggggaagaaaatggaaacaccaccagaatatcg

SEQ ID NO: 832838 - DNA, 33 bp, Homo sapien
ggggaagaaaatggaaccaccaccagaatatcg

SEQ ID NO: 832839 - DNA, 33 bp, Homo sapien; identical to SEQ ID NO: 832837

SEQ ID NO: 832840 - DNA, 33 bp, Homo sapien; identical to SEQ ID NO: 832838

SEQ ID NO: 832841 - DNA, 33 bp, Homo sapien
aagggcaggatcaggaaaaacaaggaaagcaga

SEQ ID NO: 832842 - DNA, 33 bp, Homo sapien
aagggcaggatcaggagaaacaaggaaagcaga

SEQ ID NO: 832843 - DNA, 33 bp, Homo sapien; identical to SEQ ID NO: 832841

SEQ ID NO: 832844 - DNA, 33 bp, Homo sapien; identical to SEQ ID NO: 832842

SEQ ID NO: 832845 - DNA, 33 bp, Homo sapien
atctcctgtgggatctcaccaggttctgttttt

SEQ ID NO: 832846 - DNA, 33 bp, Homo sapien
atctcctgtgggatctgaccaggttctgttttt

SEQ ID NO: 832847 - DNA, 33 bp, Homo sapien; identical to SEQ ID NO: 832845

SEQ ID NO: 832848 - DNA, 33 bp, Homo sapien; identical to SEQ ID NO: 832846

SEQ ID NO: 832849 - DNA, 33 bp, Homo sapien
aatcacagctctcatcaagtttttttatactgg

SEQ ID NO: 832850 - DNA, 33 bp, Homo sapien
aatcacagctctcatcgagtttttttatactgg

SEQ ID NO: 832851 - DNA, 33 bp, Homo sapien
ggctctctgctatgcaaatttagtggtggcggt

SEQ ID NO: 832852 - DNA, 33 bp, Homo sapien
ggctctctgctatgcagatttagtggtggcggt

SEQ ID NO: 832853 - DNA, 33 bp, Homo sapien
taatggcttgaggcaaaatctttgtctaactat

SEQ ID NO: 832854 - DNA, 33 bp, Homo sapien
taatggcttgaggcaatatctttgtctaactat

SEQ ID NO: 832855 - DNA, 33 bp, Homo sapien
ggatccattaaccataatagtaaagaaagtcca

SEQ ID NO: 832856 - DNA, 33 bp, Homo sapien
ggatccattaaccatagtagtaaagaaagtcca

SEQ ID NO: 832857 - DNA, 33 bp, Homo sapien
gctaaagaatttactacgccccaggcctgcacc

SEQ ID NO: 832858 - DNA, 33 bp, Homo sapien
gctaaagaatttactatgccccaggcctgcacc

SEQ ID NO: 832859 - DNA, 33 bp, Homo sapien
gaagaacagagaataacgagacataagaagcaa

SEQ ID NO: 832860 - DNA, 33 bp, Homo sapien
gaagaacagagaataatgagacataagaagcaa

SEQ ID NO: 832861 - DNA, 33 bp, Homo sapien
atcaggaccttatggcactggaggcagataaga

SEQ ID NO: 832862 - DNA, 33 bp, Homo sapien
atcaggaccttatggcgctggaggcagataaga

SEQ ID NO: 832863 - DNA, 33 bp, Homo sapien
gtcctgatgaaatgtccagcatctttgtggaaa

SEQ ID NO: 832864 - DNA, 33 bp, Homo sapien
gtcctgatgaaatgtctagcatctttgtggaaa

SEQ ID NO: 832865 - DNA, 33 bp, Homo sapien
taacctttctcattcccagtgttacatctgaat

SEQ ID NO: 832866 - DNA, 33 bp, Homo sapien
taacctttctcattcctagtgttacatctgaat

SEQ ID NO: 832867 - DNA, 33 bp, Homo sapien
aaactctgattggtcacggctgggtcatgttat

SEQ ID NO: 832868 - DNA, 33 bp, Homo sapien
aaactctgattggtcagggctgggtcatgttat

SEQ ID NO: 832869 - DNA, 33 bp, Homo sapien
aggacttcagtagataacccaacagcttggttg

SEQ ID NO: 832870 - DNA, 33 bp, Homo sapien
aggacttcagtagatagcccaacagcttggttg

SEQ ID NO: 832871 - DNA, 33 bp, Homo sapien
aagtgctagggtagcccgaagacattttcagaa

SEQ ID NO: 832872 - DNA, 33 bp, Homo sapien
aagtgctagggtagcctgaagacattttcagaa

SEQ ID NO: 832873 - DNA, 33 bp, Homo sapien
aacccatgagaagcccaatatgtgatatctttg

SEQ ID NO: 832874 - DNA, 33 bp, Homo sapien
aacccatgagaagcccgatatgtgatatctttg

SEQ ID NO: 832875 - DNA, 33 bp, Homo sapien
taaaacctaatccccaatgagatgatatttgga

SEQ ID NO: 832876 - DNA, 33 bp, Homo sapien
taaaacctaatccccagtgagatgatatttgga

SEQ ID NO: 832877 - DNA, 33 bp, Homo sapien
atggcagaagggccaaaacagctttctagaatc

SEQ ID NO: 832878 - DNA, 33 bp, Homo sapien
atggcagaagggccaagacagctttctagaatc

SEQ ID NO: 832879 - DNA, 33 bp, Homo sapien
gaaaagatgcgaagaacagtccaggaaacagcc

SEQ ID NO: 832880 - DNA, 33 bp, Homo sapien
gaaaagatgcgaagaatagtccaggaaacagcc

SEQ ID NO: 832881 - DNA, 33 bp, Homo sapien
atggtcttcagatcacacttttagtagcaagaa

SEQ ID NO: 832882 - DNA, 33 bp, Homo sapien
atggtcttcagatcacgcttttagtagcaagaa

SEQ ID NO: 832883 - DNA, 33 bp, Homo sapien
taaaactttgattgcaaacatactttatttttt

SEQ ID NO: 832884 - DNA, 33 bp, Homo sapien
taaaactttgattgcatacatactttatttttt

SEQ ID NO: 832885 - DNA, 33 bp, Homo sapien
aactcatgtttttggcactcattgataaatcag

SEQ ID NO: 832886 - DNA, 33 bp, Homo sapien
aactcatgtttttggcgctcattgataaatcag

SEQ ID NO: 832887 - DNA, 33 bp, Homo sapien; identical to SEQ ID NO: 832885

SEQ ID NO: 832888 - DNA, 33 bp, Homo sapien; identical to SEQ ID NO: 832886

SEQ ID NO: 832889 - DNA, 33 bp, Homo sapien
tacccagctatatccacagttgcaaaacaaagt

SEQ ID NO: 832890 - DNA, 33 bp, Homo sapien
tacccagctatatccatagttgcaaaacaaagt

SEQ ID NO: 832891 - DNA, 33 bp, Homo sapien
gctgagtccacaggaaaagtatgcttgttcata

SEQ ID NO: 832892 - DNA, 33 bp, Homo sapien
gctgagtccacaggaagagtatgcttgttcata

SEQ ID NO: 832893 - DNA, 33 bp, Homo sapien
aaaactagaacctacaatcgtctcagaacacaa

SEQ ID NO: 832894 - DNA, 33 bp, Homo sapien
aaaactagaacctacagtcgtctcagaacacaa

SEQ ID NO: 832895 - DNA, 33 bp, Homo sapien
agagagggcccggatcaagaaactgcaggaaga

SEQ ID NO: 832896 - DNA, 33 bp, Homo sapien
agagagggcccggatcgagaaactgcaggaaga

SEQ ID NO: 832897 - DNA, 33 bp, Homo sapien
ccaattttgtgctcaacctctcagtaccagggt

SEQ ID NO: 832898 - DNA, 33 bp, Homo sapien
ccaattttgtgctcaatctctcagtaccagggt

SEQ ID NO: 832899 - DNA, 33 bp, Homo sapien
gccaaggaatgcgggaactgagtatgcatttgt

SEQ ID NO: 832900 - DNA, 33 bp, Homo sapien
gccaaggaatgcgggacctgagtatgcatttgt

SEQ ID NO: 832901 - DNA, 33 bp, Homo sapien
tgtacctccctattacaagttccttgacctgcc

SEQ ID NO: 832902 - DNA, 33 bp, Homo sapien
tgtacctccctattaccagttccttgacctgcc

SEQ ID NO: 832903 - DNA, 33 bp, Homo sapien
tgggccgccgctcatcaaaatgtgagtaattgt

SEQ ID NO: 832904 - DNA, 33 bp, Homo sapien
tgggccgccgctcatccaaatgtgagtaattgt

SEQ ID NO: 832905 - DNA, 33 bp, Homo sapien
ggacaagaaacagtcacggacgagcctgggaaa

SEQ ID NO: 832906 - DNA, 33 bp, Homo sapien
ggacaagaaacagtcatggacgagcctgggaaa

SEQ ID NO: 832907 - DNA, 33 bp, Homo sapien
tgtgttcttgctgtgactcaaccctgccttttt

SEQ ID NO: 832908 - DNA, 33 bp, Homo sapien
tgtgttcttgctgtgagtcaaccctgccttttt

SEQ ID NO: 832909 - DNA, 33 bp, Homo sapien
atgatggatagaaataatagtgacattgatagg

SEQ ID NO: 832910 - DNA, 33 bp, Homo sapien
atgatggatagaaatattagtgacattgatagg

SEQ ID NO: 832911 - DNA, 33 bp, Homo sapien
gggaggtggcaacgcacagtgacctagaaaagc

SEQ ID NO: 832912 - DNA, 33 bp, Homo sapien
gggaggtggcaacgcagagtgacctagaaaagc

SEQ ID NO: 832913 - DNA, 33 bp, Homo sapien
tgcatagctgtaataacagttgaggaggaatct

SEQ ID NO: 832914 - DNA, 33 bp, Homo sapien
tgcatagctgtaataagagttgaggaggaatct

SEQ ID NO: 832915 - DNA, 33 bp, Homo sapien
acactctggtgacacaagttgtagagattgttc

SEQ ID NO: 832916 - DNA, 33 bp, Homo sapien
acactctggtgacacaggttgtagagattgttc

SEQ ID NO: 832917 - DNA, 33 bp, Homo sapien
atgacttgctttttcacggcctcttgtcttgtg

SEQ ID NO: 832918 - DNA, 33 bp, Homo sapien
atgacttgctttttcatggcctcttgtcttgtg

SEQ ID NO: 832919 - DNA, 33 bp, Homo sapien
ctcactgcagagtaaaacaacagcatggcagat

SEQ ID NO: 832920 - DNA, 33 bp, Homo sapien
ctcactgcagagtaaatcaacagcatggcagat

SEQ ID NO: 832921 - DNA, 33 bp, Homo sapien
ggaggggagactagaacgaggggaaagctataa

SEQ ID NO: 832922 - DNA, 33 bp, Homo sapien
ggaggggagactagaatgaggggaaagctataa

SEQ ID NO: 832923 - DNA, 33 bp, Homo sapien
ttagtgcagtgatcaaagtatgccctggggact

SEQ ID NO: 832924 - DNA, 33 bp, Homo sapien
ttagtgcagtgatcaaggtatgccctggggact

SEQ ID NO: 832925 - DNA, 33 bp, Homo sapien
tacatctccctgacccgctttcattgttccttc

SEQ ID NO: 832926 - DNA, 33 bp, Homo sapien
tacatctccctgaccctctttcattgttccttc

SEQ ID NO: 832927 - DNA, 33 bp, Homo sapien
cagggagatgtaaacaatgtggtgagtggggaa

SEQ ID NO: 832928 - DNA, 33 bp, Homo sapien
cagggagatgtaaacagtgtggtgagtggggaa

SEQ ID NO: 832929 - DNA, 33 bp, Homo sapien
aaggcaggccaacgtgcagttcaggctttatcc

SEQ ID NO: 832930 - DNA, 33 bp, Homo sapien
aaggcaggccaacgtggagttcaggctttatcc

SEQ ID NO: 832931 - DNA, 33 bp, Homo sapien
tgaaggaatgggtcgacggaaacatatttgata

SEQ ID NO: 832932 - DNA, 33 bp, Homo sapien
tgaaggaatgggtcgatggaaacatatttgata

SEQ ID NO: 832933 - DNA, 33 bp, Homo sapien
tcccaaagcatattcccatagaaactctggggt

SEQ ID NO: 832934 - DNA, 33 bp, Homo sapien
tcccaaagcatattcctatagaaactctggggt

SEQ ID NO: 832935 - DNA, 33 bp, Homo sapien
gttttcaaaagctaaaagaggaaaaagcatggc

SEQ ID NO: 832936 - DNA, 33 bp, Homo sapien
gttttcaaaagctaaaggaggaaaaagcatggc

SEQ ID NO: 832937 - DNA, 33 bp, Homo sapien
tagctggtgcttaaaacaagctgagatgattcc

SEQ ID NO: 832938 - DNA, 33 bp, Homo sapien
tagctggtgcttaaaataagctgagatgattcc

SEQ ID NO: 832939 - DNA, 33 bp, Homo sapien
accaggagatgttccactatttctgcgaggatg

SEQ ID NO: 832940 - DNA, 33 bp, Homo sapien
accaggagatgttccattatttctgcgaggatg

SEQ ID NO: 832941 - DNA, 33 bp, Homo sapien
tatggtggttgactaaaatcagaatgaccgggg

SEQ ID NO: 832942 - DNA, 33 bp, Homo sapien
tatggtggttgactaagatcagaatgaccgggg

SEQ ID NO: 832943 - DNA, 33 bp, Homo sapien
ccactgcactttagccaccctactgcactccag

SEQ ID NO: 832944 - DNA, 33 bp, Homo sapien
ccactgcactttagccgccctactgcactccag

SEQ ID NO: 832945 - DNA, 33 bp, Homo sapien
gtcacatagccgctcacgtttaattctttctaa

SEQ ID NO: 832946 - DNA, 33 bp, Homo sapien
gtcacatagccgctcatgtttaattctttctaa

SEQ ID NO: 832947 - DNA, 33 bp, Homo sapien
tatagtctatgcccaacaaccccagagtctgga

SEQ ID NO: 832948 - DNA, 33 bp, Homo sapien
tatagtctatgcccaataaccccagagtctgga

SEQ ID NO: 832949 - DNA, 33 bp, Homo sapien
tgagatacgacaggaacgtagattgtggagggg

SEQ ID NO: 832950 - DNA, 33 bp, Homo sapien
tgagatacgacaggaatgtagattgtggagggg

SEQ ID NO: 832951 - DNA, 33 bp, Homo sapien
ttcctaaggcatttccaacaatgtctgtttttt

SEQ ID NO: 832952 - DNA, 33 bp, Homo sapien
ttcctaaggcatttccgacaatgtctgtttttt

SEQ ID NO: 832953 - DNA, 33 bp, Homo sapien
ccaccctctaatcacaaggttcttctgccaacc

SEQ ID NO: 832954 - DNA, 33 bp, Homo sapien
ccaccctctaatcacatggttcttctgccaacc

SEQ ID NO: 832955 - DNA, 33 bp, Homo sapien
tcctaaaacccttgaaaagatgatccttaactt

SEQ ID NO: 832956 - DNA, 33 bp, Homo sapien
tcctaaaacccttgaacagatgatccttaactt

SEQ ID NO: 832957 - DNA, 33 bp, Homo sapien
aggagctctgtgccaaaactaattatatatata

SEQ ID NO: 832958 - DNA, 33 bp, Homo sapien
aggagctctgtgccaagactaattatatatata

SEQ ID NO: 832959 - DNA, 33 bp, Homo sapien
tgatgtttccatgcatcaatgtgagtctgtcta

SEQ ID NO: 832960 - DNA, 33 bp, Homo sapien
tgatgtttccatgcattaatgtgagtctgtcta

SEQ ID NO: 832961 - DNA, 33 bp, Homo sapien
agcagactgggactctaacatcacactgacaat

SEQ ID NO: 832962 - DNA, 33 bp, Homo sapien
agcagactgggactctgacatcacactgacaat

SEQ ID NO: 832963 - DNA, 33 bp, Homo sapien
cttggaaatgacccaaagtctgccaatttatgg

SEQ ID NO: 832964 - DNA, 33 bp, Homo sapien
cttggaaatgacccaatgtctgccaatttatgg

SEQ ID NO: 832965 - DNA, 33 bp, Homo sapien
ttaagattacacagaacgttctaatgaatatcc

SEQ ID NO: 832966 - DNA, 33 bp, Homo sapien
ttaagattacacagaatgttctaatgaatatcc

SEQ ID NO: 832967 - DNA, 33 bp, Homo sapien
acagaatagaacagcacaaagaatcaaggcagt

SEQ ID NO: 832968 - DNA, 33 bp, Homo sapien
acagaatagaacagcataaagaatcaaggcagt

SEQ ID NO: 832969 - DNA, 33 bp, Homo sapien
acaaagatccatccagacaaagacaatatttaa

SEQ ID NO: 832970 - DNA, 33 bp, Homo sapien
acaaagatccatccaggcaaagacaatatttaa

SEQ ID NO: 832971 - DNA, 33 bp, Homo sapien
tattactatggaagaaatgtgcctcctcccaac

SEQ ID NO: 832972 - DNA, 33 bp, Homo sapien
tattactatggaagaagtgtgcctcctcccaac

SEQ ID NO: 832973 - DNA, 33 bp, Homo sapien
ttttgcagttttggaaatccaggttttgttctg

SEQ ID NO: 832974 - DNA, 33 bp, Homo sapien
ttttgcagttttggaagtccaggttttgttctg

SEQ ID NO: 832975 - DNA, 33 bp, Homo sapien
ctccttaatttcaaaagtacgctgtcaatatcc

SEQ ID NO: 832976 - DNA, 33 bp, Homo sapien
ctccttaatttcaaaattacgctgtcaatatcc

SEQ ID NO: 832977 - DNA, 33 bp, Homo sapien
tggttctcatttaacacgtaagtcacataaaga

SEQ ID NO: 832978 - DNA, 33 bp, Homo sapien
tggttctcatttaacatgtaagtcacataaaga

SEQ ID NO: 832979 - DNA, 33 bp, Homo sapien
attgatctggaaaggacggccaaggaattagac

SEQ ID NO: 832980 - DNA, 33 bp, Homo sapien
attgatctggaaaggatggccaaggaattagac

SEQ ID NO: 832981 - DNA, 33 bp, Homo sapien
ttctcaaggtggcaccccagagtggcctccaag

SEQ ID NO: 832982 - DNA, 33 bp, Homo sapien
ttctcaaggtggcacctcagagtggcctccaag

SEQ ID NO: 832983 - DNA, 33 bp, Homo sapien
tatttatccccagttgaagaaaggagtcagtga

SEQ ID NO: 832984 - DNA, 33 bp, Homo sapien
tatttatccccagttggagaaaggagtcagtga

SEQ ID NO: 832985 - DNA, 33 bp, Homo sapien
ctcatcagcagtgacaccacctcacatgtggag

SEQ ID NO: 832986 - DNA, 33 bp, Homo sapien
ctcatcagcagtgacatcacctcacatgtggag

SEQ ID NO: 832987 - DNA, 33 bp, Homo sapien
caagaggtgaggatcacgaagggaggctgtctt

SEQ ID NO: 832988 - DNA, 33 bp, Homo sapien
caagaggtgaggatcatgaagggaggctgtctt

SEQ ID NO: 832989 - DNA, 33 bp, Homo sapien
gtgacttgcttctaatcaatggaataaggcaaa

SEQ ID NO: 832990 - DNA, 33 bp, Homo sapien
gtgacttgcttctaatgaatggaataaggcaaa

SEQ ID NO: 832991 - DNA, 33 bp, Homo sapien
tcatagctggtgtccaataaaattttaaatgta

SEQ ID NO: 832992 - DNA, 33 bp, Homo sapien
tcatagctggtgtccagtaaaattttaaatgta

SEQ ID NO: 832993 - DNA, 33 bp, Homo sapien
ttgactactttggcaaaggctcaataaatactg

SEQ ID NO: 832994 - DNA, 33 bp, Homo sapien
ttgactactttggcaagggctcaataaatactg

SEQ ID NO: 832995 - DNA, 33 bp, Homo sapien
acagctttggaaaccaaccaacttgcggtgagc

SEQ ID NO: 832996 - DNA, 33 bp, Homo sapien
acagctttggaaaccagccaacttgcggtgagc

SEQ ID NO: 832997 - DNA, 33 bp, Homo sapien
ccggaagctcccaggacggaagggttctttgca

SEQ ID NO: 832998 - DNA, 33 bp, Homo sapien
ccggaagctcccaggatggaagggttctttgca

SEQ ID NO: 832999 - DNA, 33 bp, Homo sapien
aaacggctgcaaggctaagagacagagagagag

SEQ ID NO: 833000 - DNA, 33 bp, Homo sapien
aaacggctgcaaggctgagagacagagagagag

SEQ ID NO: 833001 - DNA, 33 bp, Homo sapien
cggaacaaacctcaaactcaaatgagctgtatg

SEQ ID NO: 833002 - DNA, 33 bp, Homo sapien
cggaacaaacctcaaattcaaatgagctgtatg

SEQ ID NO: 833003 - DNA, 33 bp, Homo sapien
tcgtctgtgttccgcactaggctctttttgagg

SEQ ID NO: 833004 - DNA, 33 bp, Homo sapien
tcgtctgtgttccgcagtaggctctttttgagg

SEQ ID NO: 833005 - DNA, 33 bp, Homo sapien
actgttacagaaggcacagaaggaaaaccttcg

SEQ ID NO: 833006 - DNA, 33 bp, Homo sapien
actgttacagaaggcagagaaggaaaaccttcg

SEQ ID NO: 833007 - DNA, 33 bp, Homo sapien
ttggaacagtctcttagaacagggtggaggact

SEQ ID NO: 833008 - DNA, 33 bp, Homo sapien
ttggaacagtctcttataacagggtggaggact

SEQ ID NO: 833009 - DNA, 33 bp, Homo sapien
cctctgccgttctcaccaagccctttcctgttt

SEQ ID NO: 833010 - DNA, 33 bp, Homo sapien
cctctgccgttctcactaagccctttcctgttt

SEQ ID NO: 833011 - DNA, 33 bp, Homo sapien
tgtgcccggttactaacagagagcatcaagaaa

SEQ ID NO: 833012 - DNA, 33 bp, Homo sapien
tgtgcccggttactaagagagagcatcaagaaa

SEQ ID NO: 833013 - DNA, 33 bp, Homo sapien
ttagtaatgctggtagaaatgctaggaattggc

SEQ ID NO: 833014 - DNA, 33 bp, Homo sapien
ttagtaatgctggtaggaatgctaggaattggc

SEQ ID NO: 833015 - DNA, 33 bp, Homo sapien
gaatcgcttgaacctgacaagcgaaggttgtag

SEQ ID NO: 833016 - DNA, 33 bp, Homo sapien
gaatcgcttgaacctggcaagcgaaggttgtag

SEQ ID NO: 833017 - DNA, 33 bp, Homo sapien
tcgctccagcaacttacagaaaccaggagaaga

SEQ ID NO: 833018 - DNA, 33 bp, Homo sapien
tcgctccagcaacttatagaaaccaggagaaga

SEQ ID NO: 833019 - DNA, 33 bp, Homo sapien
cctgcagctttgcatacactgtatttctacaat

SEQ ID NO: 833020 - DNA, 33 bp, Homo sapien
cctgcagctttgcatatactgtatttctacaat

SEQ ID NO: 833021 - DNA, 33 bp, Homo sapien
tttgaggttgaggcaaagtcacataagtacgag

SEQ ID NO: 833022 - DNA, 33 bp, Homo sapien
tttgaggttgaggcaaggtcacataagtacgag

SEQ ID NO: 833023 - DNA, 33 bp, Homo sapien
aaagtgtatgagctaacggtgataaactgagaa

SEQ ID NO: 833024 - DNA, 33 bp, Homo sapien
aaagtgtatgagctaatggtgataaactgagaa

SEQ ID NO: 833025 - DNA, 33 bp, Homo sapien
aagatggtgaatctcaaaaataaagacaagtca

SEQ ID NO: 833026 - DNA, 33 bp, Homo sapien
aagatggtgaatctcagaaataaagacaagtca

SEQ ID NO: 833027 - DNA, 33 bp, Homo sapien
aaatagaaccaaggaaacaagaatggaggtagc

SEQ ID NO: 833028 - DNA, 33 bp, Homo sapien
aaatagaaccaaggaagcaagaatggaggtagc

SEQ ID NO: 833029 - DNA, 33 bp, Homo sapien
gagatgcaaccacactaacaacttgattttagc

SEQ ID NO: 833030 - DNA, 33 bp, Homo sapien
gagatgcaaccacactgacaacttgattttagc

SEQ ID NO: 833031 - DNA, 33 bp, Homo sapien
aaatctaaattatcaccctctaccacgtaaaca

SEQ ID NO: 833032 - DNA, 33 bp, Homo sapien
aaatctaaattatcactctctaccacgtaaaca

SEQ ID NO: 833033 - DNA, 33 bp, Homo sapien
caggctacctctgtgtcaaaaaaagagggaatg

SEQ ID NO: 833034 - DNA, 33 bp, Homo sapien
caggctacctctgtgttaaaaaaagagggaatg

SEQ ID NO: 833035 - DNA, 33 bp, Homo sapien
tccccactcttaagggacatctcagcaacaagt

SEQ ID NO: 833036 - DNA, 33 bp, Homo sapien
tccccactcttaaggggcatctcagcaacaagt

SEQ ID NO: 833037 - DNA, 33 bp, Homo sapien
agtgagattgatggatcatatagtagttctact

SEQ ID NO: 833038 - DNA, 33 bp, Homo sapien
agtgagattgatggatgatatagtagttctact

SEQ ID NO: 833039 - DNA, 33 bp, Homo sapien
cttaaactcacacatcaaaatccactatctctc

SEQ ID NO: 833040 - DNA, 33 bp, Homo sapien
cttaaactcacacatccaaatccactatctctc

SEQ ID NO: 833041 - DNA, 33 bp, Homo sapien
tcacaagtatccaggaagaaggttgggagaacc

SEQ ID NO: 833042 - DNA, 33 bp, Homo sapien
tcacaagtatccaggatgaaggttgggagaacc

SEQ ID NO: 833043 - DNA, 33 bp, Homo sapien
cgcgatcccggcactaagatcccggcactacag

SEQ ID NO: 833044 - DNA, 33 bp, Homo sapien
cgcgatcccggcactacgatcccggcactacag

SEQ ID NO: 833045 - DNA, 33 bp, Homo sapien
ctgctggagtgtcctacgaggaatgcaaagtgc

SEQ ID NO: 833046 - DNA, 33 bp, Homo sapien
ctgctggagtgtcctatgaggaatgcaaagtgc

SEQ ID NO: 833047 - DNA, 33 bp, Homo sapien; identical to SEQ ID NO: 833045

SEQ ID NO: 833048 - DNA, 33 bp, Homo sapien; identical to SEQ ID NO: 833046

SEQ ID NO: 833049 - DNA, 33 bp, Homo sapien
ggggaaagtcattgaactaaaatcagaaaaatc

SEQ ID NO: 833050 - DNA, 33 bp, Homo sapien
ggggaaagtcattgaagtaaaatcagaaaaatc

SEQ ID NO: 833051 - DNA, 33 bp, Homo sapien
tgtgggcatagggctcaagtatgtgggaaggat

SEQ ID NO: 833052 - DNA, 33 bp, Homo sapien
tgtgggcatagggctcgagtatgtgggaaggat

SEQ ID NO: 833053 - DNA, 33 bp, Homo sapien
atctagaaggtacataaaccagggagttctaga

SEQ ID NO: 833054 - DNA, 33 bp, Homo sapien
atctagaaggtacatagaccagggagttctaga

SEQ ID NO: 833055 - DNA, 33 bp, Homo sapien
ataccctgatggccgacactgggccctgtggca

SEQ ID NO: 833056 - DNA, 33 bp, Homo sapien
ataccctgatggccgatactgggccctgtggca

SEQ ID NO: 833057 - DNA, 33 bp, Homo sapien
tttccctatctttgtcccttgctaggattaaaa

SEQ ID NO: 833058 - DNA, 33 bp, Homo sapien
tttccctatctttgtctcttgctaggattaaaa

SEQ ID NO: 833059 - DNA, 33 bp, Homo sapien
gagtgtggagggctccaaagataggaagatgag

SEQ ID NO: 833060 - DNA, 33 bp, Homo sapien
gagtgtggagggctccgaagataggaagatgag

SEQ ID NO: 833061 - DNA, 33 bp, Homo sapien
gagcttttactcatggaataatgcaaagtggga

SEQ ID NO: 833062 - DNA, 33 bp, Homo sapien
gagcttttactcatggtataatgcaaagtggga

SEQ ID NO: 833063 - DNA, 33 bp, Homo sapien
cacaggcagttgtaacagtagtagccacaccac

SEQ ID NO: 833064 - DNA, 33 bp, Homo sapien
cacaggcagttgtaacggtagtagccacaccac

SEQ ID NO: 833065 - DNA, 33 bp, Homo sapien
aacctgggttccacaaactgtgcgaccatggct

SEQ ID NO: 833066 - DNA, 33 bp, Homo sapien
aacctgggttccacaagctgtgcgaccatggct

SEQ ID NO: 833067 - DNA, 33 bp, Homo sapien
agggtgtttgctgttacgactcttgctctcact

SEQ ID NO: 833068 - DNA, 33 bp, Homo sapien
agggtgtttgctgttatgactcttgctctcact

SEQ ID NO: 833069 - DNA, 33 bp, Homo sapien
tactcaggaagataagaagggaggatcatttga

SEQ ID NO: 833070 - DNA, 33 bp, Homo sapien
tactcaggaagataaggagggaggatcatttga

SEQ ID NO: 833071 - DNA, 33 bp, Homo sapien
ctcattttagagtacaaggtgtgaactcactct

SEQ ID NO: 833072 - DNA, 33 bp, Homo sapien
ctcattttagagtacatggtgtgaactcactct

SEQ ID NO: 833073 - DNA, 33 bp, Homo sapien
ctttcatcagccctgaaagcagaacgcaagcgc

SEQ ID NO: 833074 - DNA, 33 bp, Homo sapien
ctttcatcagccctgagagcagaacgcaagcgc

SEQ ID NO: 833075 - DNA, 33 bp, Homo sapien
ttggcaagtggcagaacatggatgcaaacctag

SEQ ID NO: 833076 - DNA, 33 bp, Homo sapien
ttggcaagtggcagaatatggatgcaaacctag

SEQ ID NO: 833077 - DNA, 33 bp, Homo sapien
aaagaatagatccatccgaaacagacctgtagc

SEQ ID NO: 833078 - DNA, 33 bp, Homo sapien
aaagaatagatccatctgaaacagacctgtagc

SEQ ID NO: 833079 - DNA, 33 bp, Homo sapien
gtatctgggcccaagaaagcaaaagtgtcacaa

SEQ ID NO: 833080 - DNA, 33 bp, Homo sapien
gtatctgggcccaagagagcaaaagtgtcacaa

SEQ ID NO: 833081 - DNA, 33 bp, Homo sapien
acctctaggagtaaatcacaagactgagaccag

SEQ ID NO: 833082 - DNA, 33 bp, Homo sapien
acctctaggagtaaattacaagactgagaccag

SEQ ID NO: 833083 - DNA, 33 bp, Homo sapien
ttgggcacatagaaggaaaatagatggagtggt

SEQ ID NO: 833084 - DNA, 33 bp, Homo sapien
ttgggcacatagaaggtaaatagatggagtggt

SEQ ID NO: 833085 - DNA, 33 bp, Homo sapien
gaatttacttctcaagcctctataatatgagac

SEQ ID NO: 833086 - DNA, 33 bp, Homo sapien
gaatttacttctcaaggctctataatatgagac

SEQ ID NO: 833087 - DNA, 33 bp, Homo sapien
gccagagactgtaacgaatcattgtcagcggga

SEQ ID NO: 833088 - DNA, 33 bp, Homo sapien
gccagagactgtaacgcatcattgtcagcggga

SEQ ID NO: 833089 - DNA, 33 bp, Homo sapien
gtgaatctggatgtagcagtacaggtgcattta

SEQ ID NO: 833090 - DNA, 33 bp, Homo sapien
gtgaatctggatgtagtagtacaggtgcattta

SEQ ID NO: 833091 - DNA, 33 bp, Homo sapien
ggtcaccctatccctaaaccatatgctgtcttg

SEQ ID NO: 833092 - DNA, 33 bp, Homo sapien
ggtcaccctatccctagaccatatgctgtcttg

SEQ ID NO: 833093 - DNA, 33 bp, Homo sapien
tttccttcagcttccaaagtctatactccctag

SEQ ID NO: 833094 - DNA, 33 bp, Homo sapien
tttccttcagcttccacagtctatactccctag

SEQ ID NO: 833095 - DNA, 33 bp, Homo sapien
aaaagcatactccaacggagcctgaatgttggt

SEQ ID NO: 833096 - DNA, 33 bp, Homo sapien
aaaagcatactccaactgagcctgaatgttggt

SEQ ID NO: 833097 - DNA, 33 bp, Homo sapien
aggctctgacattggccagctgtgcgactgggc

SEQ ID NO: 833098 - DNA, 33 bp, Homo sapien
aggctctgacattggctagctgtgcgactgggc

SEQ ID NO: 833099 - DNA, 33 bp, Homo sapien
aggctagagagtgaaaaaaaatattgcccagtc

SEQ ID NO: 833100 - DNA, 33 bp, Homo sapien
aggctagagagtgaaacaaaatattgcccagtc

SEQ ID NO: 833101 - DNA, 33 bp, Homo sapien
atcttccagaggagaacacggtaaaaatattct

SEQ ID NO: 833102 - DNA, 33 bp, Homo sapien
atcttccagaggagaatacggtaaaaatattct

SEQ ID NO: 833103 - DNA, 33 bp, Homo sapien
tcactctttccagacacgctggtgattattcat

SEQ ID NO: 833104 - DNA, 33 bp, Homo sapien
tcactctttccagacatgctggtgattattcat

SEQ ID NO: 833105 - DNA, 33 bp, Homo sapien
tttcctcctattgaaaaaccctcctattgtgac

SEQ ID NO: 833106 - DNA, 33 bp, Homo sapien
tttcctcctattgaaacaccctcctattgtgac

SEQ ID NO: 833107 - DNA, 33 bp, Homo sapien
gtttgcgtgacagtgccccaagccgggagaccc

SEQ ID NO: 833108 - DNA, 33 bp, Homo sapien
gtttgcgtgacagtgctccaagccgggagaccc

SEQ ID NO: 833109 - DNA, 33 bp, Homo sapien
ccacacactacgattcacaccccagacaagagc

SEQ ID NO: 833110 - DNA, 33 bp, Homo sapien
ccacacactacgattcgcaccccagacaagagc

SEQ ID NO: 833111 - DNA, 33 bp, Homo sapien
gactaccaaagtagtacattagtttcctatggc

SEQ ID NO: 833112 - DNA, 33 bp, Homo sapien
gactaccaaagtagtatattagtttcctatggc

SEQ ID NO: 833113 - DNA, 33 bp, Homo sapien
atccatcctcactcaacattcagaaaatcagca

SEQ ID NO: 833114 - DNA, 33 bp, Homo sapien
atccatcctcactcaagattcagaaaatcagca

SEQ ID NO: 833115 - DNA, 33 bp, Homo sapien
gagtggcatctacagggcatagttgtcagtgac

SEQ ID NO: 833116 - DNA, 33 bp, Homo sapien
gagtggcatctacaggtcatagttgtcagtgac

SEQ ID NO: 833117 - DNA, 33 bp, Homo sapien
ttggtctactctgtaactgatttgccactggga

SEQ ID NO: 833118 - DNA, 33 bp, Homo sapien
ttggtctactctgtaattgatttgccactggga

SEQ ID NO: 833119 - DNA, 33 bp, Homo sapien
gttcaaagtgtagggacaaaattccagtgagag

SEQ ID NO: 833120 - DNA, 33 bp, Homo sapien
gttcaaagtgtagggataaaattccagtgagag

SEQ ID NO: 833121 - DNA, 33 bp, Homo sapien
agttgtgccaacattaccattatcaattccaga

SEQ ID NO: 833122 - DNA, 33 bp, Homo sapien
agttgtgccaacattatcattatcaattccaga

SEQ ID NO: 833123 - DNA, 33 bp, Homo sapien
cgtaagggaaattatacgatatgtggcctttcg

SEQ ID NO: 833124 - DNA, 33 bp, Homo sapien
cgtaagggaaattatatgatatgtggcctttcg

SEQ ID NO: 833125 - DNA, 33 bp, Homo sapien
acacaaacacctatacacaaatgcttacggctg

SEQ ID NO: 833126 - DNA, 33 bp, Homo sapien
acacaaacacctatacgcaaatgcttacggctg

SEQ ID NO: 833127 - DNA, 33 bp, Homo sapien
aactgcttctctagtggaaatattcagatggtt

SEQ ID NO: 833128 - DNA, 33 bp, Homo sapien
aactgcttctctagtgtaaatattcagatggtt

SEQ ID NO: 833129 - DNA, 33 bp, Homo sapien
ctctaggcccagccacacttactttcctagtct

SEQ ID NO: 833130 - DNA, 33 bp, Homo sapien
ctctaggcccagccacgcttactttcctagtct

SEQ ID NO: 833131 - DNA, 33 bp, Homo sapien
gggcaataagattaagcaaagtccactctgttg

SEQ ID NO: 833132 - DNA, 33 bp, Homo sapien
gggcaataagattaaggaaagtccactctgttg

SEQ ID NO: 833133 - DNA, 33 bp, Homo sapien
caatttttcctgaacactatttgtagtttctga

SEQ ID NO: 833134 - DNA, 33 bp, Homo sapien
caatttttcctgaacattatttgtagtttctga

SEQ ID NO: 833135 - DNA, 33 bp, Homo sapien
tataaactgaattcacaacttgatgattgccag

SEQ ID NO: 833136 - DNA, 33 bp, Homo sapien
tataaactgaattcacgacttgatgattgccag

SEQ ID NO: 833137 - DNA, 33 bp, Homo sapien
atgggaaggtttgtgacaaggagctttaaggat

SEQ ID NO: 833138 - DNA, 33 bp, Homo sapien
atgggaaggtttgtgataaggagctttaaggat

SEQ ID NO: 833139 - DNA, 33 bp, Homo sapien
atttctttaggcaaaacgaacttccagatggtc

SEQ ID NO: 833140 - DNA, 33 bp, Homo sapien
atttctttaggcaaaatgaacttccagatggtc

SEQ ID NO: 833141 - DNA, 33 bp, Homo sapien
tgccatgatcatgatacagcaaatgaccaagtg

SEQ ID NO: 833142 - DNA, 33 bp, Homo sapien
tgccatgatcatgatatagcaaatgaccaagtg

SEQ ID NO: 833143 - DNA, 33 bp, Homo sapien
aataaagcttttcttcaaagccctggaacttga

SEQ ID NO: 833144 - DNA, 33 bp, Homo sapien
aataaagcttttcttcgaagccctggaacttga

SEQ ID NO: 833145 - DNA, 33 bp, Homo sapien
tccatttcttatggaacgttttgaacttgtact

SEQ ID NO: 833146 - DNA, 33 bp, Homo sapien
tccatttcttatggaatgttttgaacttgtact

SEQ ID NO: 833147 - DNA, 33 bp, Homo sapien
agggtaggggagagggacagtgcttgtttcaca

SEQ ID NO: 833148 - DNA, 33 bp, Homo sapien
agggtaggggagaggggcagtgcttgtttcaca

SEQ ID NO: 833149 - DNA, 33 bp, Homo sapien
aagacttgctgatctacctgttcatgttgccat

SEQ ID NO: 833150 - DNA, 33 bp, Homo sapien
aagacttgctgatctatctgttcatgttgccat

SEQ ID NO: 833151 - DNA, 33 bp, Homo sapien
gaaaacaaacaaaggcaagcagaaatgtaatag

SEQ ID NO: 833152 - DNA, 33 bp, Homo sapien
gaaaacaaacaaaggcgagcagaaatgtaatag

SEQ ID NO: 833153 - DNA, 33 bp, Homo sapien
tcttgatttgattctcacttggtcgttgttggt

SEQ ID NO: 833154 - DNA, 33 bp, Homo sapien
tcttgatttgattctctcttggtcgttgttggt

SEQ ID NO: 833155 - DNA, 33 bp, Homo sapien
cgagagttgaaggacacagaattgtttcaagtt

SEQ ID NO: 833156 - DNA, 33 bp, Homo sapien
cgagagttgaaggacatagaattgtttcaagtt

SEQ ID NO: 833157 - DNA, 33 bp, Homo sapien
caccttggataactaccgagtatcttggtaagt

SEQ ID NO: 833158 - DNA, 33 bp, Homo sapien
caccttggataactactgagtatcttggtaagt

SEQ ID NO: 833159 - DNA, 33 bp, Homo sapien
atatctttctaaaaacacatatataggccgggc

SEQ ID NO: 833160 - DNA, 33 bp, Homo sapien
atatctttctaaaaacgcatatataggccgggc

SEQ ID NO: 833161 - DNA, 33 bp, Homo sapien
cttctccctgaagaaaacctgaagtcttagaaa

SEQ ID NO: 833162 - DNA, 33 bp, Homo sapien
cttctccctgaagaaaccctgaagtcttagaaa

SEQ ID NO: 833163 - DNA, 33 bp, Homo sapien
ccttctgatgtgtggagccctgagggcagtgtt

SEQ ID NO: 833164 - DNA, 33 bp, Homo sapien
ccttctgatgtgtggatccctgagggcagtgtt

SEQ ID NO: 833165 - DNA, 33 bp, Homo sapien
gtctgaggttacaatcacatccttttttaacaa

SEQ ID NO: 833166 - DNA, 33 bp, Homo sapien
gtctgaggttacaatctcatccttttttaacaa

SEQ ID NO: 833167 - DNA, 33 bp, Homo sapien
ttttttaacaatctctaaatgagaaaatcatca

SEQ ID NO: 833168 - DNA, 33 bp, Homo sapien
ttttttaacaatctctcaatgagaaaatcatca

SEQ ID NO: 833169 - DNA, 33 bp, Homo sapien
tcaaacactgacttacagcatttatcctgtgtc

SEQ ID NO: 833170 - DNA, 33 bp, Homo sapien
tcaaacactgacttaccgcatttatcctgtgtc

SEQ ID NO: 833171 - DNA, 33 bp, Homo sapien
cattgtcccttcacaaccatgccttcactatta

SEQ ID NO: 833172 - DNA, 33 bp, Homo sapien
cattgtcccttcacaatcatgccttcactatta

SEQ ID NO: 833173 - DNA, 33 bp, Homo sapien
ctgtaagtgccagttacattttggcaaccccat

SEQ ID NO: 833174 - DNA, 33 bp, Homo sapien
ctgtaagtgccagttatattttggcaaccccat

SEQ ID NO: 833175 - DNA, 33 bp, Homo sapien
tagaatccaacctgaaagagaggccagggcctg

SEQ ID NO: 833176 - DNA, 33 bp, Homo sapien
tagaatccaacctgaatgagaggccagggcctg

SEQ ID NO: 833177 - DNA, 33 bp, Homo sapien
tttttttttagctgtaactgctggaatggaaaa

SEQ ID NO: 833178 - DNA, 33 bp, Homo sapien
tttttttttagctgtacctgctggaatggaaaa

SEQ ID NO: 833179 - DNA, 33 bp, Homo sapien
acatatgtttagatccacaaatacctaccattg

SEQ ID NO: 833180 - DNA, 33 bp, Homo sapien
acatatgtttagatccgcaaatacctaccattg

SEQ ID NO: 833181 - DNA, 33 bp, Homo sapien
ttttcaggtgtaataacatgcatggagctgcca

SEQ ID NO: 833182 - DNA, 33 bp, Homo sapien
ttttcaggtgtaataatatgcatggagctgcca

SEQ ID NO: 833183 - DNA, 33 bp, Homo sapien
tcttagagtatcacctaaagcatatgcagctta

SEQ ID NO: 833184 - DNA, 33 bp, Homo sapien
tcttagagtatcacctgaagcatatgcagctta

SEQ ID NO: 833185 - DNA, 33 bp, Homo sapien
gactcatgttaacaaaagctaaaatcaagccta

SEQ ID NO: 833186 - DNA, 33 bp, Homo sapien
gactcatgttaacaaaggctaaaatcaagccta

SEQ ID NO: 833187 - DNA, 33 bp, Homo sapien
agtttttttcaattcaatctacgaagccagcta

SEQ ID NO: 833188 - DNA, 33 bp, Homo sapien
agtttttttcaattcagtctacgaagccagcta

SEQ ID NO: 833189 - DNA, 33 bp, Homo sapien
ccacccaggtattaagcctagcacccattcatt

SEQ ID NO: 833190 - DNA, 33 bp, Homo sapien
ccacccaggtattaagtctagcacccattcatt

SEQ ID NO: 833191 - DNA, 33 bp, Homo sapien
taataggtacagaaaccatatgactgtgggcag

SEQ ID NO: 833192 - DNA, 33 bp, Homo sapien
taataggtacagaaactatatgactgtgggcag

SEQ ID NO: 833193 - DNA, 33 bp, Homo sapien
ggaaagtcaggacacaatacgccaacaggaaac

SEQ ID NO: 833194 - DNA, 33 bp, Homo sapien
ggaaagtcaggacacagtacgccaacaggaaac

SEQ ID NO: 833195 - DNA, 33 bp, Homo sapien
tcctctcttgttagagccactggataaagacag

SEQ ID NO: 833196 - DNA, 33 bp, Homo sapien
tcctctcttgttagaggcactggataaagacag

SEQ ID NO: 833197 - DNA, 33 bp, Homo sapien
aggctctgagatccccacattgatgctgaaggg

SEQ ID NO: 833198 - DNA, 33 bp, Homo sapien
aggctctgagatccccgcattgatgctgaaggg

SEQ ID NO: 833199 - DNA, 33 bp, Homo sapien
cctcatggaccccggaccttttgcaagtctgtc

SEQ ID NO: 833200 - DNA, 33 bp, Homo sapien
cctcatggaccccggatcttttgcaagtctgtc

SEQ ID NO: 833201 - DNA, 33 bp, Homo sapien
tcctctccagtgttctcactctggctgaagccc

SEQ ID NO: 833202 - DNA, 33 bp, Homo sapien
tcctctccagtgttcttactctggctgaagccc

SEQ ID NO: 833203 - DNA, 33 bp, Homo sapien
gataggaaagggcagaaccagtgaggcacatgg

SEQ ID NO: 833204 - DNA, 33 bp, Homo sapien
gataggaaagggcagagccagtgaggcacatgg

SEQ ID NO: 833205 - DNA, 33 bp, Homo sapien
cagcagccgcaacatacggaacggttgccatag

SEQ ID NO: 833206 - DNA, 33 bp, Homo sapien
cagcagccgcaacatatggaacggttgccatag

SEQ ID NO: 833207 - DNA, 33 bp, Homo sapien
agccctccccagatcacagccgtctttactatt

SEQ ID NO: 833208 - DNA, 33 bp, Homo sapien
agccctccccagatcatagccgtctttactatt

SEQ ID NO: 833209 - DNA, 33 bp, Homo sapien; identical to SEQ ID NO: 833207

SEQ ID NO: 833210 - DNA, 33 bp, Homo sapien; identical to SEQ ID NO: 833208

SEQ ID NO: 833211 - DNA, 33 bp, Homo sapien
ccaggaggaaccgtcaacaggacacacactcat

SEQ ID NO: 833212 - DNA, 33 bp, Homo sapien
ccaggaggaaccgtcaccaggacacacactcat

SEQ ID NO: 833213 - DNA, 33 bp, Homo sapien
gctgtgaatctgtcaaccactgggaactggcag

SEQ ID NO: 833214 - DNA, 33 bp, Homo sapien
gctgtgaatctgtcaatcactgggaactggcag

SEQ ID NO: 833215 - DNA, 33 bp, Homo sapien
atagactagctcatttaaaactcatcctcccac

SEQ ID NO: 833216 - DNA, 33 bp, Homo sapien
atagactagctcatttgaaactcatcctcccac

SEQ ID NO: 833217 - DNA, 33 bp, Homo sapien
atttcatctttaacaaacttatacacacaaaat

SEQ ID NO: 833218 - DNA, 33 bp, Homo sapien
atttcatctttaacaaccttatacacacaaaat

SEQ ID NO: 833219 - DNA, 33 bp, Homo sapien
ttacaaatgtaggaagcaggtttgactgatctt

SEQ ID NO: 833220 - DNA, 33 bp, Homo sapien
ttacaaatgtaggaaggaggtttgactgatctt

SEQ ID NO: 833221 - DNA, 33 bp, Homo sapien
atgagggagaagcctacatcttggagaggtgga

SEQ ID NO: 833222 - DNA, 33 bp, Homo sapien
atgagggagaagcctagatcttggagaggtgga

SEQ ID NO: 833223 - DNA, 33 bp, Homo sapien
tatgatcctgaccctgaaacaggccctggagtc

SEQ ID NO: 833224 - DNA, 33 bp, Homo sapien
tatgatcctgaccctggaacaggccctggagtc

SEQ ID NO: 833225 - DNA, 33 bp, Homo sapien
ctgagttctactaaaaagcaatttcggctctta

SEQ ID NO: 833226 - DNA, 33 bp, Homo sapien
ctgagttctactaaaaggcaatttcggctctta

SEQ ID NO: 833227 - DNA, 33 bp, Homo sapien
gatttgttccttgtgaggattaatttgatttct

SEQ ID NO: 833228 - DNA, 33 bp, Homo sapien
gatttgttccttgtgatgattaatttgatttct

SEQ ID NO: 833229 - DNA, 33 bp, Homo sapien
gtgagaagaagtggaaagagaggtacaaagaat

SEQ ID NO: 833230 - DNA, 33 bp, Homo sapien
gtgagaagaagtggaaggagaggtacaaagaat

SEQ ID NO: 833231 - DNA, 33 bp, Homo sapien
gcaacaggaccagaaaagaagagggtcgcctgg

SEQ ID NO: 833232 - DNA, 33 bp, Homo sapien
gcaacaggaccagaaaggaagagggtcgcctgg

SEQ ID NO: 833233 - DNA, 33 bp, Homo sapien
ctccacctgcctacataaggaggatgaaaatgt

SEQ ID NO: 833234 - DNA, 33 bp, Homo sapien
ctccacctgcctacatgaggaggatgaaaatgt

SEQ ID NO: 833235 - DNA, 33 bp, Homo sapien
cttcctggcaaacaaccacatagaagcctttta

SEQ ID NO: 833236 - DNA, 33 bp, Homo sapien
cttcctggcaaacaactacatagaagcctttta

SEQ ID NO: 833237 - DNA, 33 bp, Homo sapien
tgtccagagattaatgcaacaaactgtctccaa

SEQ ID NO: 833238 - DNA, 33 bp, Homo sapien
tgtccagagattaatgtaacaaactgtctccaa

SEQ ID NO: 833239 - DNA, 33 bp, Homo sapien
cagggctggaggtgcacagtgagatcctcagcg

SEQ ID NO: 833240 - DNA, 33 bp, Homo sapien
cagggctggaggtgcatagtgagatcctcagcg

SEQ ID NO: 833241 - DNA, 33 bp, Homo sapien
cccgtgtcggtgtctccaaatcctggagtacag

SEQ ID NO: 833242 - DNA, 33 bp, Homo sapien
cccgtgtcggtgtctctaaatcctggagtacag

SEQ ID NO: 833243 - DNA, 33 bp, Homo sapien
aggtgatcaacttcaacatcaacagtggtacat

SEQ ID NO: 833244 - DNA, 33 bp, Homo sapien
aggtgatcaacttcaatatcaacagtggtacat

SEQ ID NO: 833245 - DNA, 33 bp, Homo sapien
gataatctttcttcagcatcatttctgacacta

SEQ ID NO: 833246 - DNA, 33 bp, Homo sapien
gataatctttcttcaggatcatttctgacacta

SEQ ID NO: 833247 - DNA, 33 bp, Homo sapien
tgaggatcagtatagtcactagatgaagaggac

SEQ ID NO: 833248 - DNA, 33 bp, Homo sapien
tgaggatcagtatagttactagatgaagaggac

SEQ ID NO: 833249 - DNA, 33 bp, Homo sapien
caggattgatagcaacaggcctataactggtct

SEQ ID NO: 833250 - DNA, 33 bp, Homo sapien
caggattgatagcaacgggcctataactggtct

SEQ ID NO: 833251 - DNA, 33 bp, Homo sapien; identical to SEQ ID NO: 833249

SEQ ID NO: 833252 - DNA, 33 bp, Homo sapien; identical to SEQ ID NO: 833250

SEQ ID NO: 833253 - DNA, 33 bp, Homo sapien
acaatgaagaagactaaagtaaagatcaagctt

SEQ ID NO: 833254 - DNA, 33 bp, Homo sapien
acaatgaagaagactagagtaaagatcaagctt

SEQ ID NO: 833255 - DNA, 33 bp, Homo sapien
cgaaggttttgtgtcccgaagccattagagttt

SEQ ID NO: 833256 - DNA, 33 bp, Homo sapien
cgaaggttttgtgtcctgaagccattagagttt

SEQ ID NO: 833257 - DNA, 33 bp, Homo sapien
ctaaaagtagcagtcacgaaaggattaaggagt

SEQ ID NO: 833258 - DNA, 33 bp, Homo sapien
ctaaaagtagcagtcaggaaaggattaaggagt

SEQ ID NO: 833259 - DNA, 33 bp, Homo sapien
actcctgtcagctatacggtcaaaatttatggt

SEQ ID NO: 833260 - DNA, 33 bp, Homo sapien
actcctgtcagctatatggtcaaaatttatggt

SEQ ID NO: 833261 - DNA, 33 bp, Homo sapien
gaccagaactagaacacgggccagtgaatgcag

SEQ ID NO: 833262 - DNA, 33 bp, Homo sapien
gaccagaactagaacatgggccagtgaatgcag

SEQ ID NO: 833263 - DNA, 33 bp, Homo sapien
aatgaagactgctcggaatatccattaagcaca

SEQ ID NO: 833264 - DNA, 33 bp, Homo sapien
aatgaagactgctcgggatatccattaagcaca

SEQ ID NO: 833265 - DNA, 33 bp, Homo sapien
ctgcaaacaggatccacaaaatagccaaaagac

SEQ ID NO: 833266 - DNA, 33 bp, Homo sapien
ctgcaaacaggatccataaaatagccaaaagac

SEQ ID NO: 833267 - DNA, 33 bp, Homo sapien
ataatgacaaaaagtaataagtacatctctttg

SEQ ID NO: 833268 - DNA, 33 bp, Homo sapien
ataatgacaaaaagtagtaagtacatctctttg

SEQ ID NO: 833269 - DNA, 33 bp, Homo sapien
ctgatcttctttctcacgatccaaagagatgta

SEQ ID NO: 833270 - DNA, 33 bp, Homo sapien
ctgatcttctttctcatgatccaaagagatgta

SEQ ID NO: 833271 - DNA, 33 bp, Homo sapien
gaaagaagatcaggaacgaaagatctagctggg

SEQ ID NO: 833272 - DNA, 33 bp, Homo sapien
gaaagaagatcaggaatgaaagatctagctggg

SEQ ID NO: 833273 - DNA, 33 bp, Homo sapien
tatttccatttaaaaaagacccactttatgcaa

SEQ ID NO: 833274 - DNA, 33 bp, Homo sapien
tatttccatttaaaaaggacccactttatgcaa

SEQ ID NO: 833275 - DNA, 33 bp, Homo sapien
ttctcctttctctccacattttgaggaaatgaa

SEQ ID NO: 833276 - DNA, 33 bp, Homo sapien
ttctcctttctctccatattttgaggaaatgaa

SEQ ID NO: 833277 - DNA, 33 bp, Homo sapien
gtctactttgtgagaactgggttgtgcacttaa

SEQ ID NO: 833278 - DNA, 33 bp, Homo sapien
gtctactttgtgagaattgggttgtgcacttaa

SEQ ID NO: 833279 - DNA, 33 bp, Homo sapien
tccagctcttcacagaagtcctccaggatcaag

SEQ ID NO: 833280 - DNA, 33 bp, Homo sapien
tccagctcttcacagaggtcctccaggatcaag

SEQ ID NO: 833281 - DNA, 33 bp, Homo sapien
ccagcttgcatttcaaatatttggtcactaatt

SEQ ID NO: 833282 - DNA, 33 bp, Homo sapien
ccagcttgcatttcaagtatttggtcactaatt

SEQ ID NO: 833283 - DNA, 33 bp, Homo sapien
tgtgatccctgtagccaatcatatgtgctgtta

SEQ ID NO: 833284 - DNA, 33 bp, Homo sapien
tgtgatccctgtagccgatcatatgtgctgtta

SEQ ID NO: 833285 - DNA, 33 bp, Homo sapien
ccctactcctccaatcaaattgctttcctgttc

SEQ ID NO: 833286 - DNA, 33 bp, Homo sapien
ccctactcctccaatcgaattgctttcctgttc

SEQ ID NO: 833287 - DNA, 33 bp, Homo sapien
acttcactagatcgtactaaagctaagatcagt

SEQ ID NO: 833288 - DNA, 33 bp, Homo sapien
acttcactagatcgtattaaagctaagatcagt

SEQ ID NO: 833289 - DNA, 33 bp, Homo sapien
caggtttcttgtaagacaatgcaaattagttct

SEQ ID NO: 833290 - DNA, 33 bp, Homo sapien
caggtttcttgtaagataatgcaaattagttct

SEQ ID NO: 833291 - DNA, 33 bp, Homo sapien
gccatttaatggtaaaacctccaagacagggag

SEQ ID NO: 833292 - DNA, 33 bp, Homo sapien
gccatttaatggtaaagcctccaagacagggag

SEQ ID NO: 833293 - DNA, 33 bp, Homo sapien
aaccgcaccaactggcaattgaccgaccctcac

SEQ ID NO: 833294 - DNA, 33 bp, Homo sapien
aaccgcaccaactggcgattgaccgaccctcac

SEQ ID NO: 833295 - DNA, 33 bp, Homo sapien
caggcctctcgagggcaaccatgtttagattct

SEQ ID NO: 833296 - DNA, 33 bp, Homo sapien
caggcctctcgagggcgaccatgtttagattct

SEQ ID NO: 833297 - DNA, 33 bp, Homo sapien
tcgaaacacaggggcgccatcaaagaaggtgga

SEQ ID NO: 833298 - DNA, 33 bp, Homo sapien
tcgaaacacaggggcgtcatcaaagaaggtgga

SEQ ID NO: 833299 - DNA, 33 bp, Homo sapien
ctctcatccagttaaccctggtgtctgatactg

SEQ ID NO: 833300 - DNA, 33 bp, Homo sapien
ctctcatccagttaactctggtgtctgatactg

SEQ ID NO: 833301 - DNA, 33 bp, Homo sapien
catatcccttgcaaaaaatctctaagaacccat

SEQ ID NO: 833302 - DNA, 33 bp, Homo sapien
catatcccttgcaaaagatctctaagaacccat

SEQ ID NO: 833303 - DNA, 33 bp, Homo sapien
ttaatctgagtgtcaacaagctttagacccaat

SEQ ID NO: 833304 - DNA, 33 bp, Homo sapien
ttaatctgagtgtcaataagctttagacccaat

SEQ ID NO: 833305 - DNA, 33 bp, Homo sapien
gaggatttatagaacaacacatgttaggcagtt

SEQ ID NO: 833306 - DNA, 33 bp, Homo sapien
gaggatttatagaacaccacatgttaggcagtt

SEQ ID NO: 833307 - DNA, 33 bp, Homo sapien
agttgtatcaatataccccaatcctttctaacg

SEQ ID NO: 833308 - DNA, 33 bp, Homo sapien
agttgtatcaatatactccaatcctttctaacg

SEQ ID NO: 833309 - DNA, 33 bp, Homo sapien
cctttagtgaaggagaaggacaatgatacaaaa

SEQ ID NO: 833310 - DNA, 33 bp, Homo sapien
cctttagtgaaggagagggacaatgatacaaaa

SEQ ID NO: 833311 - DNA, 33 bp, Homo sapien
ccactctagagggaaactgttgacaggtaggga

SEQ ID NO: 833312 - DNA, 33 bp, Homo sapien
ccactctagagggaaattgttgacaggtaggga

SEQ ID NO: 833313 - DNA, 33 bp, Homo sapien
acatgtagataatggccatcatcctaagcccaa

SEQ ID NO: 833314 - DNA, 33 bp, Homo sapien
acatgtagataatggctatcatcctaagcccaa

SEQ ID NO: 833315 - DNA, 33 bp, Homo sapien
ctgagaagaatgacaaatcacgtgtaactggtt

SEQ ID NO: 833316 - DNA, 33 bp, Homo sapien
ctgagaagaatgacaagtcacgtgtaactggtt

SEQ ID NO: 833317 - DNA, 33 bp, Homo sapien
gacagttaattaattccagggcatatcactgct

SEQ ID NO: 833318 - DNA, 33 bp, Homo sapien
gacagttaattaattctagggcatatcactgct

SEQ ID NO: 833319 - DNA, 33 bp, Homo sapien
tagacctaaattaagaaaatctgggcttcttta

SEQ ID NO: 833320 - DNA, 33 bp, Homo sapien
tagacctaaattaagagaatctgggcttcttta

SEQ ID NO: 833321 - DNA, 33 bp, Homo sapien
gaaggcatgaagttgaagggggaactaagactg

SEQ ID NO: 833322 - DNA, 33 bp, Homo sapien
gaaggcatgaagttgacgggggaactaagactg

SEQ ID NO: 833323 - DNA, 33 bp, Homo sapien
ataatttggatactctgaatacaaaatggtttg

SEQ ID NO: 833324 - DNA, 33 bp, Homo sapien
ataatttggatactcttaatacaaaatggtttg

SEQ ID NO: 833325 - DNA, 33 bp, Homo sapien
aagaaatgtgattgaacacaaagtgaatggtcg

SEQ ID NO: 833326 - DNA, 33 bp, Homo sapien
aagaaatgtgattgaatacaaagtgaatggtcg

SEQ ID NO: 833327 - DNA, 33 bp, Homo sapien
ggagacaggctggacacagcaaaatcttgcctc

SEQ ID NO: 833328 - DNA, 33 bp, Homo sapien
ggagacaggctggacatagcaaaatcttgcctc

SEQ ID NO: 833329 - DNA, 33 bp, Homo sapien
ttttataagaacaccaatcccatcagattaggg

SEQ ID NO: 833330 - DNA, 33 bp, Homo sapien
ttttataagaacaccagtcccatcagattaggg

SEQ ID NO: 833331 - DNA, 33 bp, Homo sapien
taaaaaccctatctccaaatatagtcgcattga

SEQ ID NO: 833332 - DNA, 33 bp, Homo sapien
taaaaaccctatctcccaatatagtcgcattga

SEQ ID NO: 833333 - DNA, 33 bp, Homo sapien
tgagctacaagagatccagacaagtcggaggaa

SEQ ID NO: 833334 - DNA, 33 bp, Homo sapien
tgagctacaagagatctagacaagtcggaggaa

SEQ ID NO: 833335 - DNA, 33 bp, Homo sapien
tacatatactctctgaggacagctcaggtcaat

SEQ ID NO: 833336 - DNA, 33 bp, Homo sapien
tacatatactctctgatgacagctcaggtcaat

SEQ ID NO: 833337 - DNA, 33 bp, Homo sapien
acactccctcgggctacccctttgtagtcccat

SEQ ID NO: 833338 - DNA, 33 bp, Homo sapien
acactccctcgggctatccctttgtagtcccat

SEQ ID NO: 833339 - DNA, 33 bp, Homo sapien
agctcctactcagataacagaactcacaaactt

SEQ ID NO: 833340 - DNA, 33 bp, Homo sapien
agctcctactcagatagcagaactcacaaactt

SEQ ID NO: 833341 - DNA, 33 bp, Homo sapien
ttagtatgccttgttacggaggaataaattttc

SEQ ID NO: 833342 - DNA, 33 bp, Homo sapien
ttagtatgccttgttatggaggaataaattttc

SEQ ID NO: 833343 - DNA, 33 bp, Homo sapien
tgtctatgaacaagtacagctgaggccatcagc

SEQ ID NO: 833344 - DNA, 33 bp, Homo sapien
tgtctatgaacaagtatagctgaggccatcagc

SEQ ID NO: 833345 - DNA, 33 bp, Homo sapien
gcaggtaaccagaatcagagtcattgaaggcaa

SEQ ID NO: 833346 - DNA, 33 bp, Homo sapien
gcaggtaaccagaatcggagtcattgaaggcaa

SEQ ID NO: 833347 - DNA, 33 bp, Homo sapien
caacttactaacagcacgagtccgacatagatt

SEQ ID NO: 833348 - DNA, 33 bp, Homo sapien
caacttactaacagcatgagtccgacatagatt

SEQ ID NO: 833349 - DNA, 33 bp, Homo sapien
gaatcacatctctaaacaaaggcttgttccacc

SEQ ID NO: 833350 - DNA, 33 bp, Homo sapien
gaatcacatctctaaataaaggcttgttccacc

SEQ ID NO: 833351 - DNA, 33 bp, Homo sapien
gaaaagtttcatgcaacgtgcagcaaagatgct

SEQ ID NO: 833352 - DNA, 33 bp, Homo sapien
gaaaagtttcatgcaatgtgcagcaaagatgct

SEQ ID NO: 833353 - DNA, 33 bp, Homo sapien
aggaaacctcactccgacatctcaggaacatgt

SEQ ID NO: 833354 - DNA, 33 bp, Homo sapien
aggaaacctcactccgtcatctcaggaacatgt

SEQ ID NO: 833355 - DNA, 33 bp, Homo sapien
atattatcccttattgcagaagtagcaactgaa

SEQ ID NO: 833356 - DNA, 33 bp, Homo sapien
atattatcccttattgtagaagtagcaactgaa

SEQ ID NO: 833357 - DNA, 33 bp, Homo sapien
gctagaataactgtaaatgatgcactgtgggac

SEQ ID NO: 833358 - DNA, 33 bp, Homo sapien
gctagaataactgtaagtgatgcactgtgggac

SEQ ID NO: 833359 - DNA, 33 bp, Homo sapien
tgagtaagagtatgaactggaaccactttcagg

SEQ ID NO: 833360 - DNA, 33 bp, Homo sapien
tgagtaagagtatgaattggaaccactttcagg

SEQ ID NO: 833361 - DNA, 33 bp, Homo sapien
aatcaggtcaggcaaggcacatctgtaatctca

SEQ ID NO: 833362 - DNA, 33 bp, Homo sapien
aatcaggtcaggcaagtcacatctgtaatctca

SEQ ID NO: 833363 - DNA, 33 bp, Homo sapien
acatcaccaaaagagacggacacaagcagacag

SEQ ID NO: 833364 - DNA, 33 bp, Homo sapien
acatcaccaaaagagatggacacaagcagacag

SEQ ID NO: 833365 - DNA, 33 bp, Homo sapien
taattggtcacttgtgaaggactctacgtaacc

SEQ ID NO: 833366 - DNA, 33 bp, Homo sapien
taattggtcacttgtggaggactctacgtaacc

SEQ ID NO: 833367 - DNA, 33 bp, Homo sapien
ttctagtttccaaatccaccaacgtttgcttta

SEQ ID NO: 833368 - DNA, 33 bp, Homo sapien
ttctagtttccaaatcgaccaacgtttgcttta

SEQ ID NO: 833369 - DNA, 33 bp, Homo sapien
tccagtttgttgctaaagcgtgtttcactgggg

SEQ ID NO: 833370 - DNA, 33 bp, Homo sapien
tccagtttgttgctaaggcgtgtttcactgggg

SEQ ID NO: 833371 - DNA, 33 bp, Homo sapien
tatcacacaaattataagctgtgacgcacatag

SEQ ID NO: 833372 - DNA, 33 bp, Homo sapien
tatcacacaaattataggctgtgacgcacatag

SEQ ID NO: 833373 - DNA, 33 bp, Homo sapien
aatgaacattgggataaaattgacatacagttt

SEQ ID NO: 833374 - DNA, 33 bp, Homo sapien
aatgaacattgggatacaattgacatacagttt

SEQ ID NO: 833375 - DNA, 33 bp, Homo sapien
agtactatggagcattaaaaaaagaataaatat

SEQ ID NO: 833376 - DNA, 33 bp, Homo sapien
agtactatggagcattgaaaaaagaataaatat

SEQ ID NO: 833377 - DNA, 33 bp, Homo sapien
cttttgttatgacaaacagagctgcaataaata

SEQ ID NO: 833378 - DNA, 33 bp, Homo sapien
cttttgttatgacaaatagagctgcaataaata

SEQ ID NO: 833379 - DNA, 33 bp, Homo sapien
ttaaataactcaggcccgcacttttctacaact

SEQ ID NO: 833380 - DNA, 33 bp, Homo sapien
ttaaataactcaggcctgcacttttctacaact

SEQ ID NO: 833381 - DNA, 33 bp, Homo sapien
tcccacacacagagcaccactttttctttgata

SEQ ID NO: 833382 - DNA, 33 bp, Homo sapien
tcccacacacagagcatcactttttctttgata

SEQ ID NO: 833383 - DNA, 33 bp, Homo sapien
attataatagcacagaatcccaaaggctggaaa

SEQ ID NO: 833384 - DNA, 33 bp, Homo sapien
attataatagcacagactcccaaaggctggaaa

SEQ ID NO: 833385 - DNA, 33 bp, Homo sapien
tgtcacctgctcctcacctgtacccagtggact

SEQ ID NO: 833386 - DNA, 33 bp, Homo sapien
tgtcacctgctcctcatctgtacccagtggact

SEQ ID NO: 833387 - DNA, 33 bp, Homo sapien
gaaaatttgtgaggacaagaatgttctgggcct

SEQ ID NO: 833388 - DNA, 33 bp, Homo sapien
gaaaatttgtgaggacgagaatgttctgggcct

SEQ ID NO: 833389 - DNA, 33 bp, Homo sapien
tttacagattcttcaaactgtaaaataaatgaa

SEQ ID NO: 833390 - DNA, 33 bp, Homo sapien
tttacagattcttcaagctgtaaaataaatgaa

SEQ ID NO: 833391 - DNA, 33 bp, Homo sapien
gaactgaaagagccagacatttatatccagccc

SEQ ID NO: 833392 - DNA, 33 bp, Homo sapien
gaactgaaagagccaggcatttatatccagccc

SEQ ID NO: 833393 - DNA, 33 bp, Homo sapien
tcttctcggggctcacaaaacactttacaaaac

SEQ ID NO: 833394 - DNA, 33 bp, Homo sapien
tcttctcggggctcacgaaacactttacaaaac

SEQ ID NO: 833395 - DNA, 33 bp, Homo sapien
gaataatgtttccagaagaaagagcaagagcag

SEQ ID NO: 833396 - DNA, 33 bp, Homo sapien
gaataatgtttccagatgaaagagcaagagcag

SEQ ID NO: 833397 - DNA, 33 bp, Homo sapien
tagagaaaattaaaaagcaatgctccacaaagg

SEQ ID NO: 833398 - DNA, 33 bp, Homo sapien
tagagaaaattaaaaatcaatgctccacaaagg

SEQ ID NO: 833399 - DNA, 33 bp, Homo sapien
ctgagtagtctttgaaccattaaccacctgcag

SEQ ID NO: 833400 - DNA, 33 bp, Homo sapien
ctgagtagtctttgaatcattaaccacctgcag

SEQ ID NO: 833401 - DNA, 33 bp, Homo sapien
tttatggcttcctgaactgatctcatggatttt

SEQ ID NO: 833402 - DNA, 33 bp, Homo sapien
tttatggcttcctgaattgatctcatggatttt

SEQ ID NO: 833403 - DNA, 33 bp, Homo sapien
gagagcctgaacagaacgaaaagaggaaagaga

SEQ ID NO: 833404 - DNA, 33 bp, Homo sapien
gagagcctgaacagaatgaaaagaggaaagaga

SEQ ID NO: 833405 - DNA, 33 bp, Homo sapien
ctttcagaggctacagacaagtcctggagtgat

SEQ ID NO: 833406 - DNA, 33 bp, Homo sapien
ctttcagaggctacagtcaagtcctggagtgat

SEQ ID NO: 833407 - DNA, 33 bp, Homo sapien
taactgtgatgatcacaaaggaaatataaacat

SEQ ID NO: 833408 - DNA, 33 bp, Homo sapien
taactgtgatgatcacgaaggaaatataaacat

SEQ ID NO: 833409 - DNA, 33 bp, Homo sapien
cattaatcagaaagtaaacttggcatcctcgta

SEQ ID NO: 833410 - DNA, 33 bp, Homo sapien
cattaatcagaaagtagacttggcatcctcgta

SEQ ID NO: 833411 - DNA, 33 bp, Homo sapien
catgacatttataaaccatcttggtgctggtgg

SEQ ID NO: 833412 - DNA, 33 bp, Homo sapien
catgacatttataaactatcttggtgctggtgg

SEQ ID NO: 833413 - DNA, 33 bp, Homo sapien
tgggaagttaaacgtacgtttgagatgcctatt

SEQ ID NO: 833414 - DNA, 33 bp, Homo sapien
tgggaagttaaacgtatgtttgagatgcctatt

SEQ ID NO: 833415 - DNA, 33 bp, Homo sapien
cagaacaaaagctgagcccctagctggtgcagg

SEQ ID NO: 833416 - DNA, 33 bp, Homo sapien
cagaacaaaagctgagtccctagctggtgcagg

SEQ ID NO: 833417 - DNA, 33 bp, Homo sapien
ggtcaaaccactgtgcactatgatttaagttgt

SEQ ID NO: 833418 - DNA, 33 bp, Homo sapien
ggtcaaaccactgtgcgctatgatttaagttgt

SEQ ID NO: 833419 - DNA, 33 bp, Homo sapien
gatttaagttgtgtaccgataggttagagttta

SEQ ID NO: 833420 - DNA, 33 bp, Homo sapien
gatttaagttgtgtactgataggttagagttta

SEQ ID NO: 833421 - DNA, 33 bp, Homo sapien
gataccatttcttaggaacccaaggagatggca

SEQ ID NO: 833422 - DNA, 33 bp, Homo sapien
gataccatttcttagggacccaaggagatggca

SEQ ID NO: 833423 - DNA, 33 bp, Homo sapien
actagagacaaagaccaggacaatgatggtgat

SEQ ID NO: 833424 - DNA, 33 bp, Homo sapien
actagagacaaagaccgggacaatgatggtgat

SEQ ID NO: 833425 - DNA, 33 bp, Homo sapien
cgctgtctgtcgataccatgcactctagctctc

SEQ ID NO: 833426 - DNA, 33 bp, Homo sapien
cgctgtctgtcgatactatgcactctagctctc

SEQ ID NO: 833427 - DNA, 33 bp, Homo sapien
tgtgctaattagagacaggaaagatggaacaag

SEQ ID NO: 833428 - DNA, 33 bp, Homo sapien
tgtgctaattagagacgggaaagatggaacaag

SEQ ID NO: 833429 - DNA, 33 bp, Homo sapien
atggtggtcgaaaagaagcgagaggcaaatgag

SEQ ID NO: 833430 - DNA, 33 bp, Homo sapien
atggtggtcgaaaagaggcgagaggcaaatgag

SEQ ID NO: 833431 - DNA, 33 bp, Homo sapien
aatagagtaattgtgccgagaatgaatttgtct

SEQ ID NO: 833432 - DNA, 33 bp, Homo sapien
aatagagtaattgtgctgagaatgaatttgtct

SEQ ID NO: 833433 - DNA, 33 bp, Homo sapien
tcgcccgctggaagggaagaatcgaggtagtct

SEQ ID NO: 833434 - DNA, 33 bp, Homo sapien
tcgcccgctggaaggggagaatcgaggtagtct

SEQ ID NO: 833435 - DNA, 33 bp, Homo sapien
tgtacatctagcaccacagaggacccagcccag

SEQ ID NO: 833436 - DNA, 33 bp, Homo sapien
tgtacatctagcaccatagaggacccagcccag

SEQ ID NO: 833437 - DNA, 33 bp, Homo sapien
tcctgccattctgatgcattgtcaaacttcatg

SEQ ID NO: 833438 - DNA, 33 bp, Homo sapien
tcctgccattctgatgtattgtcaaacttcatg

SEQ ID NO: 833439 - DNA, 33 bp, Homo sapien
agccatctaggtgagacacggctcaggtattga

SEQ ID NO: 833440 - DNA, 33 bp, Homo sapien
agccatctaggtgagagacggctcaggtattga

SEQ ID NO: 833441 - DNA, 33 bp, Homo sapien
gcaagagcaaagcagaagtcacatcaaatgcac

SEQ ID NO: 833442 - DNA, 33 bp, Homo sapien
gcaagagcaaagcagaggtcacatcaaatgcac

SEQ ID NO: 833443 - DNA, 33 bp, Homo sapien
cttcgagacaaagagacagccgctgagctgagg

SEQ ID NO: 833444 - DNA, 33 bp, Homo sapien
cttcgagacaaagagatagccgctgagctgagg

SEQ ID NO: 833445 - DNA, 33 bp, Homo sapien
caggcatgagccattgcatccggccggggtttt

SEQ ID NO: 833446 - DNA, 33 bp, Homo sapien
caggcatgagccattgtatccggccggggtttt

SEQ ID NO: 833447 - DNA, 33 bp, Homo sapien
aggtgaaatggccataagaagagagagagaaaa

SEQ ID NO: 833448 - DNA, 33 bp, Homo sapien
aggtgaaatggccataggaagagagagagaaaa

SEQ ID NO: 833449 - DNA, 33 bp, Homo sapien
cagagtatggcatcatcactaattgaacaggtg

SEQ ID NO: 833450 - DNA, 33 bp, Homo sapien
cagagtatggcatcatgactaattgaacaggtg

SEQ ID NO: 833451 - DNA, 33 bp, Homo sapien
acctcctcctctgtacaacacccacctctattg

SEQ ID NO: 833452 - DNA, 33 bp, Homo sapien
acctcctcctctgtacgacacccacctctattg

SEQ ID NO: 833453 - DNA, 33 bp, Homo sapien
catgtctatggtgagaatagctcaggagagggg

SEQ ID NO: 833454 - DNA, 33 bp, Homo sapien
catgtctatggtgagagtagctcaggagagggg

SEQ ID NO: 833455 - DNA, 33 bp, Homo sapien
gcagccatcctgtgaccggaatagtctcaaaca

SEQ ID NO: 833456 - DNA, 33 bp, Homo sapien
gcagccatcctgtgacgggaatagtctcaaaca

SEQ ID NO: 833457 - DNA, 33 bp, Homo sapien
ctctccatgctaatagcctagtggcccttcttc

SEQ ID NO: 833458 - DNA, 33 bp, Homo sapien
ctctccatgctaatagtctagtggcccttcttc

SEQ ID NO: 833459 - DNA, 33 bp, Homo sapien
gcaaaagttggcttcagtacttcccttacctcc

SEQ ID NO: 833460 - DNA, 33 bp, Homo sapien
gcaaaagttggcttcattacttcccttacctcc

SEQ ID NO: 833461 - DNA, 33 bp, Homo sapien
acttggcagggtttaacaaccacatccaaacca

SEQ ID NO: 833462 - DNA, 33 bp, Homo sapien
acttggcagggtttaataaccacatccaaacca

SEQ ID NO: 833463 - DNA, 33 bp, Homo sapien
ccttaagtaattctgaaataagtgtgttctgaa

SEQ ID NO: 833464 - DNA, 33 bp, Homo sapien
ccttaagtaattctgatataagtgtgttctgaa

SEQ ID NO: 833465 - DNA, 33 bp, Homo sapien
ggctgggggatcaccaaatgttctaccatgaac

SEQ ID NO: 833466 - DNA, 33 bp, Homo sapien
ggctgggggatcaccagatgttctaccatgaac

SEQ ID NO: 833467 - DNA, 33 bp, Homo sapien
cgatctgaatttttccactgaagtttgctaagt

SEQ ID NO: 833468 - DNA, 33 bp, Homo sapien
cgatctgaatttttccgctgaagtttgctaagt

SEQ ID NO: 833469 - DNA, 33 bp, Homo sapien
gtgcaactattatccacccagcacaaagcccat

SEQ ID NO: 833470 - DNA, 33 bp, Homo sapien
gtgcaactattatccatccagcacaaagcccat

SEQ ID NO: 833471 - DNA, 33 bp, Homo sapien
ctggcccagtcctgcacgtcatatccagcgaaa

SEQ ID NO: 833472 - DNA, 33 bp, Homo sapien
ctggcccagtcctgcatgtcatatccagcgaaa

SEQ ID NO: 833473 - DNA, 33 bp, Homo sapien
gtgccatagtgtatcacgtttcctggcccagtc

SEQ ID NO: 833474 - DNA, 33 bp, Homo sapien
gtgccatagtgtatcatgtttcctggcccagtc

SEQ ID NO: 833475 - DNA, 33 bp, Homo sapien
atagagtttctatatgccagataatatcttcaa

SEQ ID NO: 833476 - DNA, 33 bp, Homo sapien
atagagtttctatatgtcagataatatcttcaa

SEQ ID NO: 833477 - DNA, 33 bp, Homo sapien
agctggtcacatctcacactttcttgccaaaac

SEQ ID NO: 833478 - DNA, 33 bp, Homo sapien
agctggtcacatctcagactttcttgccaaaac

SEQ ID NO: 833479 - DNA, 33 bp, Homo sapien
cgtgacccaagcaaaagtccaggaagtggacag

SEQ ID NO: 833480 - DNA, 33 bp, Homo sapien
cgtgacccaagcaaaattccaggaagtggacag

SEQ ID NO: 833481 - DNA, 33 bp, Homo sapien
gggggcacagatgccacgtgaagatcattgtgc

SEQ ID NO: 833482 - DNA, 33 bp, Homo sapien
gggggcacagatgccatgtgaagatcattgtgc

SEQ ID NO: 833483 - DNA, 33 bp, Homo sapien
cagatcagttctaggcaacaagcacatacggaa

SEQ ID NO: 833484 - DNA, 33 bp, Homo sapien
cagatcagttctaggccacaagcacatacggaa

SEQ ID NO: 833485 - DNA, 33 bp, Homo sapien
ccgtatggcctctctaagtgtcttttatcttaa

SEQ ID NO: 833486 - DNA, 33 bp, Homo sapien
ccgtatggcctctctatgtgtcttttatcttaa

SEQ ID NO: 833487 - DNA, 33 bp, Homo sapien
gctgactggtccgagaacatttttttaaatgcc

SEQ ID NO: 833488 - DNA, 33 bp, Homo sapien
gctgactggtccgagatcatttttttaaatgcc

SEQ ID NO: 833489 - DNA, 33 bp, Homo sapien
agatgagtggtaactccccaacacaacagagaa

SEQ ID NO: 833490 - DNA, 33 bp, Homo sapien
agatgagtggtaactctccaacacaacagagaa

SEQ ID NO: 833491 - DNA, 33 bp, Homo sapien
ttcttctatgaaatccataagcctccatatata

SEQ ID NO: 833492 - DNA, 33 bp, Homo sapien
ttcttctatgaaatccgtaagcctccatatata

SEQ ID NO: 833493 - DNA, 33 bp, Homo sapien
aggaggagacgcaaatgaatgagactgagaagg

SEQ ID NO: 833494 - DNA, 33 bp, Homo sapien
aggaggagacgcaaattaatgagactgagaagg

SEQ ID NO: 833495 - DNA, 33 bp, Homo sapien
catgtggtggatgacaagaaaagaagtcaagaa

SEQ ID NO: 833496 - DNA, 33 bp, Homo sapien
catgtggtggatgacacgaaaagaagtcaagaa

SEQ ID NO: 833497 - DNA, 33 bp, Homo sapien
ctctcatgcctttacaggaagaggaatgagctc

SEQ ID NO: 833498 - DNA, 33 bp, Homo sapien
ctctcatgcctttacatgaagaggaatgagctc

SEQ ID NO: 833499 - DNA, 33 bp, Homo sapien
aagaagagagctacaacataaaatataaataca

SEQ ID NO: 833500 - DNA, 33 bp, Homo sapien
aagaagagagctacaatataaaatataaataca

SEQ ID NO: 833501 - DNA, 33 bp, Homo sapien
ctggtattttactaaactctgggcatactcctg

SEQ ID NO: 833502 - DNA, 33 bp, Homo sapien
ctggtattttactaaattctgggcatactcctg

SEQ ID NO: 833503 - DNA, 33 bp, Homo sapien
atgcctataatctcaaagctctgtgtagacagc

SEQ ID NO: 833504 - DNA, 33 bp, Homo sapien
atgcctataatctcaaggctctgtgtagacagc

SEQ ID NO: 833505 - DNA, 33 bp, Homo sapien
aagagagacagagacacagatcatagtaaggat

SEQ ID NO: 833506 - DNA, 33 bp, Homo sapien
aagagagacagagacagagatcatagtaaggat

SEQ ID NO: 833507 - DNA, 33 bp, Homo sapien
gacatggaggaacacacggctttggatatggag

SEQ ID NO: 833508 - DNA, 33 bp, Homo sapien
gacatggaggaacacatggctttggatatggag

SEQ ID NO: 833509 - DNA, 33 bp, Homo sapien
taactcagccaaattcacaggcaccacttccat

SEQ ID NO: 833510 - DNA, 33 bp, Homo sapien
taactcagccaaattcgcaggcaccacttccat

SEQ ID NO: 833511 - DNA, 33 bp, Homo sapien
tggaatatttgttaacggaagcccagaattgga

SEQ ID NO: 833512 - DNA, 33 bp, Homo sapien
tggaatatttgttaactgaagcccagaattgga

SEQ ID NO: 833513 - DNA, 33 bp, Homo sapien
gggcataactctgaaccatccatccttttgttt

SEQ ID NO: 833514 - DNA, 33 bp, Homo sapien
gggcataactctgaacgatccatccttttgttt

SEQ ID NO: 833515 - DNA, 33 bp, Homo sapien
tgggtcgatggaagaacggagtcaggagagatg

SEQ ID NO: 833516 - DNA, 33 bp, Homo sapien
tgggtcgatggaagaatggagtcaggagagatg

SEQ ID NO: 833517 - DNA, 33 bp, Homo sapien
tatttatttctgcaatgacctgtctgcatatac

SEQ ID NO: 833518 - DNA, 33 bp, Homo sapien
tatttatttctgcaattacctgtctgcatatac

SEQ ID NO: 833519 - DNA, 33 bp, Homo sapien
cattcaggcctgacctcaccacaagtggactaa

SEQ ID NO: 833520 - DNA, 33 bp, Homo sapien
cattcaggcctgacctgaccacaagtggactaa

SEQ ID NO: 833521 - DNA, 33 bp, Homo sapien
tccccacagaaatctcaacttgaattgtagctc

SEQ ID NO: 833522 - DNA, 33 bp, Homo sapien
tccccacagaaatctcgacttgaattgtagctc

SEQ ID NO: 833523 - DNA, 33 bp, Homo sapien
acttattcacagtcatcagaatagcaagagaaa

SEQ ID NO: 833524 - DNA, 33 bp, Homo sapien
acttattcacagtcatgagaatagcaagagaaa

SEQ ID NO: 833525 - DNA, 33 bp, Homo sapien
tgagaagaaaatgccccgctacgtcccccttct

SEQ ID NO: 833526 - DNA, 33 bp, Homo sapien
tgagaagaaaatgcccggctacgtcccccttct

SEQ ID NO: 833527 - DNA, 33 bp, Homo sapien
agatgtcagggtgatcaattcaaagcatttatt

SEQ ID NO: 833528 - DNA, 33 bp, Homo sapien
agatgtcagggtgatcgattcaaagcatttatt

SEQ ID NO: 833529 - DNA, 33 bp, Homo sapien
cccagcaggcttgaacgcaaaccagggccttga

SEQ ID NO: 833530 - DNA, 33 bp, Homo sapien
cccagcaggcttgaactcaaaccagggccttga

SEQ ID NO: 833531 - DNA, 33 bp, Homo sapien
gtggcttcctctcgctaacatttgatctaaaac

SEQ ID NO: 833532 - DNA, 33 bp, Homo sapien
gtggcttcctctcgctgacatttgatctaaaac

SEQ ID NO: 833533 - DNA, 33 bp, Homo sapien
aaactgatattcatgcaagtatctctaatcaca

SEQ ID NO: 833534 - DNA, 33 bp, Homo sapien
aaactgatattcatgccagtatctctaatcaca

SEQ ID NO: 833535 - DNA, 33 bp, Homo sapien
cccagcctgaacttcaagaggaagattttatag

SEQ ID NO: 833536 - DNA, 33 bp, Homo sapien
cccagcctgaacttcaggaggaagattttatag

SEQ ID NO: 833537 - DNA, 33 bp, Homo sapien
gtattggcaagcacaaagaattccagaatctgc

SEQ ID NO: 833538 - DNA, 33 bp, Homo sapien
gtattggcaagcacaaggaattccagaatctgc

SEQ ID NO: 833539 - DNA, 33 bp, Homo sapien
agtttctgcacctcaaagacaacttagagcaat

SEQ ID NO: 833540 - DNA, 33 bp, Homo sapien
agtttctgcacctcaaggacaacttagagcaat

SEQ ID NO: 833541 - DNA, 33 bp, Homo sapien
tttgtgcatcattgggaagccacttaagtgact

SEQ ID NO: 833542 - DNA, 33 bp, Homo sapien
tttgtgcatcattggggagccacttaagtgact

SEQ ID NO: 833543 - DNA, 33 bp, Homo sapien
cacagttcaggcctaaaggcaacctggaggcag

SEQ ID NO: 833544 - DNA, 33 bp, Homo sapien
cacagttcaggcctaagggcaacctggaggcag

SEQ ID NO: 833545 - DNA, 33 bp, Homo sapien
gaaaagtatttcaaaaacaaatcctaaagtagt

SEQ ID NO: 833546 - DNA, 33 bp, Homo sapien
gaaaagtatttcaaaagcaaatcctaaagtagt

SEQ ID NO: 833547 - DNA, 33 bp, Homo sapien
atcaaacagagttttaagactgggattctagaa

SEQ ID NO: 833548 - DNA, 33 bp, Homo sapien
atcaaacagagttttaggactgggattctagaa

SEQ ID NO: 833549 - DNA, 33 bp, Homo sapien
attaagcaagacataaactgggatgttaaagca

SEQ ID NO: 833550 - DNA, 33 bp, Homo sapien
attaagcaagacataacctgggatgttaaagca

SEQ ID NO: 833551 - DNA, 33 bp, Homo sapien
cccatgtatacaaaggcccaactttacatatat

SEQ ID NO: 833552 - DNA, 33 bp, Homo sapien
cccatgtatacaaagggccaactttacatatat

SEQ ID NO: 833553 - DNA, 33 bp, Homo sapien
ggaaagggctaaataaagacaatctgcaatgca

SEQ ID NO: 833554 - DNA, 33 bp, Homo sapien
ggaaagggctaaataaggacaatctgcaatgca

SEQ ID NO: 833555 - DNA, 33 bp, Homo sapien
ggaaagggagcagttgaactgtaatgaagccgt

SEQ ID NO: 833556 - DNA, 33 bp, Homo sapien
ggaaagggagcagttggactgtaatgaagccgt

SEQ ID NO: 833557 - DNA, 33 bp, Homo sapien
catactgatcttgaaggctagtgtagcagatac

SEQ ID NO: 833558 - DNA, 33 bp, Homo sapien
catactgatcttgaagtctagtgtagcagatac

SEQ ID NO: 833559 - DNA, 33 bp, Homo sapien
gttttactatgacctggatgaaatactcctaaa

SEQ ID NO: 833560 - DNA, 33 bp, Homo sapien
gttttactatgacctgtatgaaatactcctaaa

SEQ ID NO: 833561 - DNA, 33 bp, Homo sapien
tcagattaaagagctcactttagcatttcttgt

SEQ ID NO: 833562 - DNA, 33 bp, Homo sapien
tcagattaaagagctccctttagcatttcttgt

SEQ ID NO: 833563 - DNA, 33 bp, Homo sapien
tctgcttaaggagagacgagcaacgggtaaaga

SEQ ID NO: 833564 - DNA, 33 bp, Homo sapien
tctgcttaaggagagatgagcaacgggtaaaga

SEQ ID NO: 833565 - DNA, 33 bp, Homo sapien
cctcccttagccataccggctggtgtctaccta

SEQ ID NO: 833566 - DNA, 33 bp, Homo sapien
cctcccttagccatactggctggtgtctaccta

SEQ ID NO: 833567 - DNA, 33 bp, Homo sapien
cactaataaaaatgtaaaaatcagtatgccagc

SEQ ID NO: 833568 - DNA, 33 bp, Homo sapien
cactaataaaaatgtagaaatcagtatgccagc

SEQ ID NO: 833569 - DNA, 33 bp, Homo sapien
aaatgggttattgatacctgggtatagatgaat

SEQ ID NO: 833570 - DNA, 33 bp, Homo sapien
aaatgggttattgatatctgggtatagatgaat

SEQ ID NO: 833571 - DNA, 33 bp, Homo sapien
tgggctagtggttgtgaagacaataaacctcca

SEQ ID NO: 833572 - DNA, 33 bp, Homo sapien
tgggctagtggttgtggagacaataaacctcca

SEQ ID NO: 833573 - DNA, 33 bp, Homo sapien
cctgttgccacagaccacattaggaatgagggt

SEQ ID NO: 833574 - DNA, 33 bp, Homo sapien
cctgttgccacagaccgcattaggaatgagggt

SEQ ID NO: 833575 - DNA, 33 bp, Homo sapien
tgaggagctgctcctacatgagaccctggatct

SEQ ID NO: 833576 - DNA, 33 bp, Homo sapien
tgaggagctgctcctagatgagaccctggatct

SEQ ID NO: 833577 - DNA, 33 bp, Homo sapien
gtggtcagatgtgccacagagtataagaaacct

SEQ ID NO: 833578 - DNA, 33 bp, Homo sapien
gtggtcagatgtgccatagagtataagaaacct

SEQ ID NO: 833579 - DNA, 33 bp, Homo sapien
gatgtggtgtttcctcaagtctcctgctgtgct

SEQ ID NO: 833580 - DNA, 33 bp, Homo sapien
gatgtggtgtttcctcgagtctcctgctgtgct

SEQ ID NO: 833581 - DNA, 33 bp, Homo sapien
ccaaggagagttactcaacagtccataagaagt

SEQ ID NO: 833582 - DNA, 33 bp, Homo sapien
ccaaggagagttactcgacagtccataagaagt

SEQ ID NO: 833583 - DNA, 33 bp, Homo sapien
gctccagttcccaatccagtggcaaaatcatcc

SEQ ID NO: 833584 - DNA, 33 bp, Homo sapien
gctccagttcccaatcgagtggcaaaatcatcc

SEQ ID NO: 833585 - DNA, 33 bp, Homo sapien
tgtctgagggaatagcaaaagagagaggcaatg

SEQ ID NO: 833586 - DNA, 33 bp, Homo sapien
tgtctgagggaatagcgaaagagagaggcaatg

SEQ ID NO: 833587 - DNA, 33 bp, Homo sapien
caagaacggtatgaaaagagatttgctatttcc

SEQ ID NO: 833588 - DNA, 33 bp, Homo sapien
caagaacggtatgaaaggagatttgctatttcc

SEQ ID NO: 833589 - DNA, 33 bp, Homo sapien
ctttgtgaggagatgaagtttgggaagtgagtt

SEQ ID NO: 833590 - DNA, 33 bp, Homo sapien
ctttgtgaggagatgaggtttgggaagtgagtt

SEQ ID NO: 833591 - DNA, 33 bp, Homo sapien
tatggaggtatttgcacagggaaacccattgtg

SEQ ID NO: 833592 - DNA, 33 bp, Homo sapien
tatggaggtatttgcagagggaaacccattgtg

SEQ ID NO: 833593 - DNA, 33 bp, Homo sapien
agccccatttcacagaagaggaaccaacactga

SEQ ID NO: 833594 - DNA, 33 bp, Homo sapien
agccccatttcacagacgaggaaccaacactga

SEQ ID NO: 833595 - DNA, 33 bp, Homo sapien
agtctctctcctctatcagaactgtgcctgggc

SEQ ID NO: 833596 - DNA, 33 bp, Homo sapien
agtctctctcctctattagaactgtgcctgggc

SEQ ID NO: 833597 - DNA, 33 bp, Homo sapien
tgcaaattaaacgagaacttaagctgtagagca

SEQ ID NO: 833598 - DNA, 33 bp, Homo sapien
tgcaaattaaacgagagcttaagctgtagagca

SEQ ID NO: 833599 - DNA, 33 bp, Homo sapien
ttaattctactaggctcaacctacaattcttat

SEQ ID NO: 833600 - DNA, 33 bp, Homo sapien
ttaattctactaggcttaacctacaattcttat

SEQ ID NO: 833601 - DNA, 33 bp, Homo sapien
tctaggaccttggctccaactctattgtactcg

SEQ ID NO: 833602 - DNA, 33 bp, Homo sapien
tctaggaccttggctctaactctattgtactcg

SEQ ID NO: 833603 - DNA, 33 bp, Homo sapien
agagagacccctagaacgtttccctcaaggacc

SEQ ID NO: 833604 - DNA, 33 bp, Homo sapien
agagagacccctagaatgtttccctcaaggacc

SEQ ID NO: 833605 - DNA, 33 bp, Homo sapien
gaagagaaagagtcagaagaaatcacccagctg

SEQ ID NO: 833606 - DNA, 33 bp, Homo sapien
gaagagaaagagtcaggagaaatcacccagctg

SEQ ID NO: 833607 - DNA, 33 bp, Homo sapien
atccacctcaaagtgcacaaacttcacctctcc

SEQ ID NO: 833608 - DNA, 33 bp, Homo sapien
atccacctcaaagtgcccaaacttcacctctcc

SEQ ID NO: 833609 - DNA, 33 bp, Homo sapien
gagagtccaggtctgcacccacagaaaaacaca

SEQ ID NO: 833610 - DNA, 33 bp, Homo sapien
gagagtccaggtctgcgcccacagaaaaacaca

SEQ ID NO: 833611 - DNA, 33 bp, Homo sapien
gtccctaaggtacaaacccaagagaaggaagtg

SEQ ID NO: 833612 - DNA, 33 bp, Homo sapien
gtccctaaggtacaaatccaagagaaggaagtg

SEQ ID NO: 833613 - DNA, 33 bp, Homo sapien
tcttgcccttaaattacaattgagaagtccctg

SEQ ID NO: 833614 - DNA, 33 bp, Homo sapien
tcttgcccttaaattagaattgagaagtccctg

SEQ ID NO: 833615 - DNA, 33 bp, Homo sapien
gctggatcctcagatcacaaaatatttggggag

SEQ ID NO: 833616 - DNA, 33 bp, Homo sapien
gctggatcctcagatcgcaaaatatttggggag

SEQ ID NO: 833617 - DNA, 33 bp, Homo sapien
gtctaataaccataacactcctacagctgactt

SEQ ID NO: 833618 - DNA, 33 bp, Homo sapien
gtctaataaccataactctcctacagctgactt

SEQ ID NO: 833619 - DNA, 33 bp, Homo sapien
cggtggcgggttctcaagaggctcactctcatc

SEQ ID NO: 833620 - DNA, 33 bp, Homo sapien
cggtggcgggttctcaggaggctcactctcatc

SEQ ID NO: 833621 - DNA, 33 bp, Homo sapien
gttaaagccatatgaacgtaaaaagcaggacat

SEQ ID NO: 833622 - DNA, 33 bp, Homo sapien
gttaaagccatatgaatgtaaaaagcaggacat

SEQ ID NO: 833623 - DNA, 33 bp, Homo sapien
ggaactttcaggctcacactagaggtttttagg

SEQ ID NO: 833624 - DNA, 33 bp, Homo sapien
ggaactttcaggctcatactagaggtttttagg

SEQ ID NO: 833625 - DNA, 33 bp, Homo sapien
tcaaaagagaagcaaaatgagggagcacgcagg

SEQ ID NO: 833626 - DNA, 33 bp, Homo sapien
tcaaaagagaagcaaagtgagggagcacgcagg

SEQ ID NO: 833627 - DNA, 33 bp, Homo sapien
gtaggttcttgaatcccgaatggaaaggggaga

SEQ ID NO: 833628 - DNA, 33 bp, Homo sapien
gtaggttcttgaatccggaatggaaaggggaga

SEQ ID NO: 833629 - DNA, 33 bp, Homo sapien
tcagaagctaaattcaatatatactctccccag

SEQ ID NO: 833630 - DNA, 33 bp, Homo sapien
tcagaagctaaattcagtatatactctccccag

SEQ ID NO: 833631 - DNA, 33 bp, Homo sapien
ggtgagagatcatttcacttggactaaaacaaa

SEQ ID NO: 833632 - DNA, 33 bp, Homo sapien
ggtgagagatcatttcgcttggactaaaacaaa

SEQ ID NO: 833633 - DNA, 33 bp, Homo sapien
tcctcagtttctttcacgtcctacatcctatcc

SEQ ID NO: 833634 - DNA, 33 bp, Homo sapien
tcctcagtttctttcatgtcctacatcctatcc

SEQ ID NO: 833635 - DNA, 33 bp, Homo sapien
ttccttgaggcttcagaactacaaaaaggcctt

SEQ ID NO: 833636 - DNA, 33 bp, Homo sapien
ttccttgaggcttcaggactacaaaaaggcctt

SEQ ID NO: 833637 - DNA, 33 bp, Homo sapien
gcccagggtctggtcactcattactggcccagc

SEQ ID NO: 833638 - DNA, 33 bp, Homo sapien
gcccagggtctggtcattcattactggcccagc

SEQ ID NO: 833639 - DNA, 33 bp, Homo sapien
ctaccctctccggaaacacctgaaagctggggt

SEQ ID NO: 833640 - DNA, 33 bp, Homo sapien
ctaccctctccggaaatacctgaaagctggggt

SEQ ID NO: 833641 - DNA, 33 bp, Homo sapien
agggagtcctggccatcacagttgtagtgccag

SEQ ID NO: 833642 - DNA, 33 bp, Homo sapien
agggagtcctggccatgacagttgtagtgccag

SEQ ID NO: 833643 - DNA, 33 bp, Homo sapien
ggtagttggatataccaatgtgaagaacaggga

SEQ ID NO: 833644 - DNA, 33 bp, Homo sapien
ggtagttggatataccgatgtgaagaacaggga

SEQ ID NO: 833645 - DNA, 33 bp, Homo sapien
agagtagatacgtaatcagtgacttgaaacacc

SEQ ID NO: 833646 - DNA, 33 bp, Homo sapien
agagtagatacgtaatgagtgacttgaaacacc

SEQ ID NO: 833647 - DNA, 33 bp, Homo sapien
tgcacaaacaactttcacagagtagatacgtaa

SEQ ID NO: 833648 - DNA, 33 bp, Homo sapien
tgcacaaacaactttcgcagagtagatacgtaa

SEQ ID NO: 833649 - DNA, 33 bp, Homo sapien
cccctgtcaagatataaaaagttctctttgccc

SEQ ID NO: 833650 - DNA, 33 bp, Homo sapien
cccctgtcaagatatagaaagttctctttgccc

SEQ ID NO: 833651 - DNA, 33 bp, Homo sapien
agtggcttcaattacacgtcccccagaattaca

SEQ ID NO: 833652 - DNA, 33 bp, Homo sapien
agtggcttcaattacatgtcccccagaattaca

SEQ ID NO: 833653 - DNA, 33 bp, Homo sapien
agggcagtagagtaaggcctgcaggtcaatgct

SEQ ID NO: 833654 - DNA, 33 bp, Homo sapien
agggcagtagagtaagtcctgcaggtcaatgct

SEQ ID NO: 833655 - DNA, 33 bp, Homo sapien
ccaaccattagtgttaaaatttcctgactgatc

SEQ ID NO: 833656 - DNA, 33 bp, Homo sapien
ccaaccattagtgttacaatttcctgactgatc

SEQ ID NO: 833657 - DNA, 33 bp, Homo sapien
gcggaatgaaagcaggccaaaagtggctgggag

SEQ ID NO: 833658 - DNA, 33 bp, Homo sapien
gcggaatgaaagcaggtcaaaagtggctgggag

SEQ ID NO: 833659 - DNA, 33 bp, Homo sapien
cacatcctgcactcaacatggatggcctcttgg

SEQ ID NO: 833660 - DNA, 33 bp, Homo sapien
cacatcctgcactcaatatggatggcctcttgg

SEQ ID NO: 833661 - DNA, 33 bp, Homo sapien
ttcagagttggagacaatccttcttccattgcc

SEQ ID NO: 833662 - DNA, 33 bp, Homo sapien
ttcagagttggagacagtccttcttccattgcc

SEQ ID NO: 833663 - DNA, 33 bp, Homo sapien
ggtagagtgaaaatcccagtctggagtttgcta

SEQ ID NO: 833664 - DNA, 33 bp, Homo sapien
ggtagagtgaaaatcctagtctggagtttgcta

SEQ ID NO: 833665 - DNA, 33 bp, Homo sapien
gcgcttttagtaaaacaaccttatctgctaaag

SEQ ID NO: 833666 - DNA, 33 bp, Homo sapien
gcgcttttagtaaaacgaccttatctgctaaag

SEQ ID NO: 833667 - DNA, 33 bp, Homo sapien
ttggaccataatgtggaaatatctgactaaaca

SEQ ID NO: 833668 - DNA, 33 bp, Homo sapien
ttggaccataatgtgggaatatctgactaaaca

SEQ ID NO: 833669 - DNA, 33 bp, Homo sapien
gagatttgttagccaacgcaaaaggtagataag

SEQ ID NO: 833670 - DNA, 33 bp, Homo sapien
gagatttgttagccaatgcaaaaggtagataag

SEQ ID NO: 833671 - DNA, 33 bp, Homo sapien
gatagagaggatagcactaatcccaagggaaca

SEQ ID NO: 833672 - DNA, 33 bp, Homo sapien
gatagagaggatagcattaatcccaagggaaca

SEQ ID NO: 833673 - DNA, 33 bp, Homo sapien
agctccagcattcacactgtagaccagctcatt

SEQ ID NO: 833674 - DNA, 33 bp, Homo sapien
agctccagcattcacattgtagaccagctcatt

SEQ ID NO: 833675 - DNA, 33 bp, Homo sapien
tgaaatgatacactcacaacaatccttcatgaa

SEQ ID NO: 833676 - DNA, 33 bp, Homo sapien
tgaaatgatacactcataacaatccttcatgaa

SEQ ID NO: 833677 - DNA, 33 bp, Homo sapien
gtaaacaccaactcccaccagttccaatctgta

SEQ ID NO: 833678 - DNA, 33 bp, Homo sapien
gtaaacaccaactcccgccagttccaatctgta

SEQ ID NO: 833679 - DNA, 33 bp, Homo sapien
tttattcctggaagatgagatcccatgttgcta

SEQ ID NO: 833680 - DNA, 33 bp, Homo sapien
tttattcctggaagattagatcccatgttgcta

SEQ ID NO: 833681 - DNA, 33 bp, Homo sapien
aggggaaagtgaggcaggaacacacggcacaca

SEQ ID NO: 833682 - DNA, 33 bp, Homo sapien
aggggaaagtgaggcatgaacacacggcacaca

SEQ ID NO: 833683 - DNA, 33 bp, Homo sapien
tttgagcatataaaccagaagttatcagagcct

SEQ ID NO: 833684 - DNA, 33 bp, Homo sapien
tttgagcatataaaccggaagttatcagagcct

SEQ ID NO: 833685 - DNA, 33 bp, Homo sapien
ctatcttaaggccaaacctacctgtatggacta

SEQ ID NO: 833686 - DNA, 33 bp, Homo sapien
ctatcttaaggccaaatctacctgtatggacta

SEQ ID NO: 833687 - DNA, 33 bp, Homo sapien
ttgaaagagcaacgaacggagcagtttccagaa

SEQ ID NO: 833688 - DNA, 33 bp, Homo sapien
ttgaaagagcaacgaagggagcagtttccagaa

SEQ ID NO: 833689 - DNA, 33 bp, Homo sapien
tgctgagtggtgtgcaaccttgctccgtgctca

SEQ ID NO: 833690 - DNA, 33 bp, Homo sapien
tgctgagtggtgtgcacccttgctccgtgctca

SEQ ID NO: 833691 - DNA, 33 bp, Homo sapien
ttcgcaccaacatttgaaatagtcagtgatttt

SEQ ID NO: 833692 - DNA, 33 bp, Homo sapien
ttcgcaccaacatttggaatagtcagtgatttt

SEQ ID NO: 833693 - DNA, 33 bp, Homo sapien
ggaaaaatgatcctacaatcactaagattttaa

SEQ ID NO: 833694 - DNA, 33 bp, Homo sapien
ggaaaaatgatcctaccatcactaagattttaa

SEQ ID NO: 833695 - DNA, 33 bp, Homo sapien
ccagaggccacttgtgaaagcccaagaaaaaaa

SEQ ID NO: 833696 - DNA, 33 bp, Homo sapien
ccagaggccacttgtggaagcccaagaaaaaaa

SEQ ID NO: 833697 - DNA, 33 bp, Homo sapien
ctcagaggcacctacacgtgaaataaagtctcc

SEQ ID NO: 833698 - DNA, 33 bp, Homo sapien
ctcagaggcacctacatgtgaaataaagtctcc

SEQ ID NO: 833699 - DNA, 33 bp, Homo sapien
tacagcaacagcagaaaggaattgctactgagc

SEQ ID NO: 833700 - DNA, 33 bp, Homo sapien
tacagcaacagcagaagggaattgctactgagc

SEQ ID NO: 833701 - DNA, 33 bp, Homo sapien
cccttagtactggggcaacactcactgcatctc

SEQ ID NO: 833702 - DNA, 33 bp, Homo sapien
cccttagtactggggcgacactcactgcatctc

SEQ ID NO: 833703 - DNA, 33 bp, Homo sapien
cctgcaaagccctgggcaaaaatcctcttttac

SEQ ID NO: 833704 - DNA, 33 bp, Homo sapien
cctgcaaagccctgggtaaaaatcctcttttac

SEQ ID NO: 833705 - DNA, 33 bp, Homo sapien
atctgatatataatcaccatctgtatttaagtt

SEQ ID NO: 833706 - DNA, 33 bp, Homo sapien
atctgatatataatcatcatctgtatttaagtt

SEQ ID NO: 833707 - DNA, 33 bp, Homo sapien
cagggatttctaagaaatgagtgaatcaattga

SEQ ID NO: 833708 - DNA, 33 bp, Homo sapien
cagggatttctaagaactgagtgaatcaattga

SEQ ID NO: 833709 - DNA, 33 bp, Homo sapien
tgggctaaattgcatccctccaaaaattggcat

SEQ ID NO: 833710 - DNA, 33 bp, Homo sapien
tgggctaaattgcatctctccaaaaattggcat

SEQ ID NO: 833711 - DNA, 33 bp, Homo sapien
ttagtttgatccaccactccctcatcaagaggt

SEQ ID NO: 833712 - DNA, 33 bp, Homo sapien
ttagtttgatccaccattccctcatcaagaggt

SEQ ID NO: 833713 - DNA, 33 bp, Homo sapien
tttaacatggttcaggcattgaagtggaaggaa

SEQ ID NO: 833714 - DNA, 33 bp, Homo sapien
tttaacatggttcagggattgaagtggaaggaa

SEQ ID NO: 833715 - DNA, 33 bp, Homo sapien
ctttggatctaaggacacatacaagttgaaaat

SEQ ID NO: 833716 - DNA, 33 bp, Homo sapien
ctttggatctaaggacgcatacaagttgaaaat

SEQ ID NO: 833717 - DNA, 33 bp, Homo sapien
tgaggaagataagggacgaaacagctataagac

SEQ ID NO: 833718 - DNA, 33 bp, Homo sapien
tgaggaagataagggatgaaacagctataagac

SEQ ID NO: 833719 - DNA, 33 bp, Homo sapien
gacaggaagacaagaacagagaaaacagaatga

SEQ ID NO: 833720 - DNA, 33 bp, Homo sapien
gacaggaagacaagaatagagaaaacagaatga

SEQ ID NO: 833721 - DNA, 33 bp, Homo sapien
tttggctatcttggaacgatctcccctgggata

SEQ ID NO: 833722 - DNA, 33 bp, Homo sapien
tttggctatcttggaatgatctcccctgggata

SEQ ID NO: 833723 - DNA, 33 bp, Homo sapien
agggtacaaatgagcaaccagatgaagaggtgc

SEQ ID NO: 833724 - DNA, 33 bp, Homo sapien
agggtacaaatgagcagccagatgaagaggtgc

SEQ ID NO: 833725 - DNA, 33 bp, Homo sapien
ggtccttttatgatcaaacttaattcattaatg

SEQ ID NO: 833726 - DNA, 33 bp, Homo sapien
ggtccttttatgatcagacttaattcattaatg

SEQ ID NO: 833727 - DNA, 33 bp, Homo sapien
ggtcactggtgggtgagagagcatgagcatgac

SEQ ID NO: 833728 - DNA, 33 bp, Homo sapien
ggtcactggtgggtgatagagcatgagcatgac

SEQ ID NO: 833729 - DNA, 33 bp, Homo sapien
tcacacttggagtagccagaacaccaggacccc

SEQ ID NO: 833730 - DNA, 33 bp, Homo sapien
tcacacttggagtagctagaacaccaggacccc

SEQ ID NO: 833731 - DNA, 33 bp, Homo sapien
gctggtaggaatgcaaaaaatgtggcagccaat

SEQ ID NO: 833732 - DNA, 33 bp, Homo sapien
gctggtaggaatgcaagaaatgtggcagccaat

SEQ ID NO: 833733 - DNA, 33 bp, Homo sapien
attcctaccagcaatagcagacattcctatttt

SEQ ID NO: 833734 - DNA, 33 bp, Homo sapien
attcctaccagcaatatcagacattcctatttt

SEQ ID NO: 833735 - DNA, 33 bp, Homo sapien
tgtctttttaactttacctgctctaggtgatgt

SEQ ID NO: 833736 - DNA, 33 bp, Homo sapien
tgtctttttaactttatctgctctaggtgatgt

SEQ ID NO: 833737 - DNA, 33 bp, Homo sapien
atatatgtaataagtcacttagatgaacatgaa

SEQ ID NO: 833738 - DNA, 33 bp, Homo sapien
atatatgtaataagtcgcttagatgaacatgaa

SEQ ID NO: 833739 - DNA, 33 bp, Homo sapien
tattacatatattttacgaactattttgcaaat

SEQ ID NO: 833740 - DNA, 33 bp, Homo sapien
tattacatatattttatgaactattttgcaaat

SEQ ID NO: 833741 - DNA, 33 bp, Homo sapien
tctctggaattaatcactgaatttgcaaaatag

SEQ ID NO: 833742 - DNA, 33 bp, Homo sapien
tctctggaattaatcattgaatttgcaaaatag

SEQ ID NO: 833743 - DNA, 33 bp, Homo sapien
tctttctttgtcaccaacttcattgtatatgta

SEQ ID NO: 833744 - DNA, 33 bp, Homo sapien
tctttctttgtcaccagcttcattgtatatgta

SEQ ID NO: 833745 - DNA, 33 bp, Homo sapien
gagttcatataacaagcatttcctaagttacga

SEQ ID NO: 833746 - DNA, 33 bp, Homo sapien
gagttcatataacaagtatttcctaagttacga

SEQ ID NO: 833747 - DNA, 33 bp, Homo sapien
tccaaaagaccttaaaatcaccattgggaagat

SEQ ID NO: 833748 - DNA, 33 bp, Homo sapien
tccaaaagaccttaaagtcaccattgggaagat

SEQ ID NO: 833749 - DNA, 33 bp, Homo sapien; identical to SEQ ID NO: 833747

SEQ ID NO: 833750 - DNA, 33 bp, Homo sapien; identical to SEQ ID NO: 833748

SEQ ID NO: 833751 - DNA, 33 bp, Homo sapien
tttatttagatcttcacggagaccatccattag

SEQ ID NO: 833752 - DNA, 33 bp, Homo sapien
tttatttagatcttcatggagaccatccattag

SEQ ID NO: 833753 - DNA, 33 bp, Homo sapien
ctgcagtgctttcttagggaaatgacagggcaa

SEQ ID NO: 833754 - DNA, 33 bp, Homo sapien
ctgcagtgctttcttatggaaatgacagggcaa

SEQ ID NO: 833755 - DNA, 33 bp, Homo sapien
cttaatgagaaaaattaaaaaagctcaatatca

SEQ ID NO: 833756 - DNA, 33 bp, Homo sapien
cttaatgagaaaaatttaaaaagctcaatatca

SEQ ID NO: 833757 - DNA, 33 bp, Homo sapien
caagtactgcaagaaacggcaggatgaggatgg

SEQ ID NO: 833758 - DNA, 33 bp, Homo sapien
caagtactgcaagaaatggcaggatgaggatgg

SEQ ID NO: 833759 - DNA, 33 bp, Homo sapien
aatcctcaacgctaataaggactgtctccttct

SEQ ID NO: 833760 - DNA, 33 bp, Homo sapien
aatcctcaacgctaatgaggactgtctccttct

SEQ ID NO: 833761 - DNA, 33 bp, Homo sapien
aaaataaaacaaagaagtgatgatcgtaaaagt

SEQ ID NO: 833762 - DNA, 33 bp, Homo sapien
aaaataaaacaaagaattgatgatcgtaaaagt

SEQ ID NO: 833763 - DNA, 33 bp, Homo sapien
aagaacacaatacagcaccatcaaacaagtcca

SEQ ID NO: 833764 - DNA, 33 bp, Homo sapien
aagaacacaatacagcgccatcaaacaagtcca

SEQ ID NO: 833765 - DNA, 33 bp, Homo sapien
tgtgcaggttcttgacactttgcctcagctact

SEQ ID NO: 833766 - DNA, 33 bp, Homo sapien
tgtgcaggttcttgacgctttgcctcagctact

SEQ ID NO: 833767 - DNA, 33 bp, Homo sapien
ttggttacactttcaaatcactggtaatccctt

SEQ ID NO: 833768 - DNA, 33 bp, Homo sapien
ttggttacactttcaagtcactggtaatccctt

SEQ ID NO: 833769 - DNA, 33 bp, Homo sapien
tagctcataactttccaacagtctgtgaatcaa

SEQ ID NO: 833770 - DNA, 33 bp, Homo sapien
tagctcataactttccgacagtctgtgaatcaa

SEQ ID NO: 833771 - DNA, 33 bp, Homo sapien
catctaggcccagctgcagttagtctttcctag

SEQ ID NO: 833772 - DNA, 33 bp, Homo sapien
catctaggcccagctgtagttagtctttcctag

SEQ ID NO: 833773 - DNA, 33 bp, Homo sapien
gttgtgcctccattaccacaatcaattacagat

SEQ ID NO: 833774 - DNA, 33 bp, Homo sapien
gttgtgcctccattactacaatcaattacagat

SEQ ID NO: 833775 - DNA, 33 bp, Homo sapien
tgacaggcagaataacagtctcctaaatatgtc

SEQ ID NO: 833776 - DNA, 33 bp, Homo sapien
tgacaggcagaataacggtctcctaaatatgtc

SEQ ID NO: 833777 - DNA, 33 bp, Homo sapien
tttagcccatagtgacacatttttgacttctta

SEQ ID NO: 833778 - DNA, 33 bp, Homo sapien
tttagcccatagtgacccatttttgacttctta

SEQ ID NO: 833779 - DNA, 33 bp, Homo sapien
tctggagaatatagcaatctcgcagcaggattc

SEQ ID NO: 833780 - DNA, 33 bp, Homo sapien
tctggagaatatagcagtctcgcagcaggattc

SEQ ID NO: 833781 - DNA, 33 bp, Homo sapien
ctccagaacctatgagaaagctcttatcactca

SEQ ID NO: 833782 - DNA, 33 bp, Homo sapien
ctccagaacctatgaggaagctcttatcactca

SEQ ID NO: 833783 - DNA, 33 bp, Homo sapien
tcactcatcttagtccacacaagcaaagcaggt

SEQ ID NO: 833784 - DNA, 33 bp, Homo sapien
tcactcatcttagtccgcacaagcaaagcaggt

SEQ ID NO: 833785 - DNA, 33 bp, Homo sapien
agggccccatttcttaggcaagtctctctcact

SEQ ID NO: 833786 - DNA, 33 bp, Homo sapien
agggccccatttcttatgcaagtctctctcact

SEQ ID NO: 833787 - DNA, 33 bp, Homo sapien
attgctcattggcctccataagcaaaggtaatc

SEQ ID NO: 833788 - DNA, 33 bp, Homo sapien
attgctcattggcctctataagcaaaggtaatc

SEQ ID NO: 833789 - DNA, 33 bp, Homo sapien
aagaacaaactcataccgctaatacaaggcaag

SEQ ID NO: 833790 - DNA, 33 bp, Homo sapien
aagaacaaactcatactgctaatacaaggcaag

SEQ ID NO: 833791 - DNA, 33 bp, Homo sapien
ttgttctttcttcccacagtgccacactcagaa

SEQ ID NO: 833792 - DNA, 33 bp, Homo sapien
ttgttctttcttcccatagtgccacactcagaa

SEQ ID NO: 833793 - DNA, 33 bp, Homo sapien
gtgagcccttagataacgtttctgagtgtggca

SEQ ID NO: 833794 - DNA, 33 bp, Homo sapien
gtgagcccttagataatgtttctgagtgtggca

SEQ ID NO: 833795 - DNA, 33 bp, Homo sapien
tctcctggttctaccccatactgcatcacacac

SEQ ID NO: 833796 - DNA, 33 bp, Homo sapien
tctcctggttctaccctatactgcatcacacac

SEQ ID NO: 833797 - DNA, 33 bp, Homo sapien
ataggatgtgatcttcaagataaaacccagctg

SEQ ID NO: 833798 - DNA, 33 bp, Homo sapien
ataggatgtgatcttcgagataaaacccagctg

SEQ ID NO: 833799 - DNA, 33 bp, Homo sapien
ctggtgagtatagtcaatccttcttccagcact

SEQ ID NO: 833800 - DNA, 33 bp, Homo sapien
ctggtgagtatagtcattccttcttccagcact

SEQ ID NO: 833801 - DNA, 33 bp, Homo sapien
tagtagcctgcatttacctgtttttttagtccc

SEQ ID NO: 833802 - DNA, 33 bp, Homo sapien
tagtagcctgcatttagctgtttttttagtccc

SEQ ID NO: 833803 - DNA, 33 bp, Homo sapien
gatttttgtttccaggaattcgatttcataaac

SEQ ID NO: 833804 - DNA, 33 bp, Homo sapien
gatttttgtttccagggattcgatttcataaac

SEQ ID NO: 833805 - DNA, 33 bp, Homo sapien
ttgtggcaatttcttacatagcaatggatagct

SEQ ID NO: 833806 - DNA, 33 bp, Homo sapien
ttgtggcaatttcttatatagcaatggatagct

SEQ ID NO: 833807 - DNA, 33 bp, Homo sapien
gatggtctggacccacaattccaggagagaaag

SEQ ID NO: 833808 - DNA, 33 bp, Homo sapien
gatggtctggacccacgattccaggagagaaag

SEQ ID NO: 833809 - DNA, 33 bp, Homo sapien
aatgacaagaatgataacattttacacttttat

SEQ ID NO: 833810 - DNA, 33 bp, Homo sapien
aatgacaagaatgatagcattttacacttttat

SEQ ID NO: 833811 - DNA, 33 bp, Homo sapien
gacctcaagaaaaaggacctaaagaaatgacaa

SEQ ID NO: 833812 - DNA, 33 bp, Homo sapien
gacctcaagaaaaagggcctaaagaaatgacaa

SEQ ID NO: 833813 - DNA, 33 bp, Homo sapien
agctagtgagtcagagaccattttatttaaaca

SEQ ID NO: 833814 - DNA, 33 bp, Homo sapien
agctagtgagtcagagtccattttatttaaaca

SEQ ID NO: 833815 - DNA, 33 bp, Homo sapien
tgcactcctgatccacactccatgtactctccc

SEQ ID NO: 833816 - DNA, 33 bp, Homo sapien
tgcactcctgatccacgctccatgtactctccc

SEQ ID NO: 833817 - DNA, 33 bp, Homo sapien
aaccagttgctagatacatttgaacattaatta

SEQ ID NO: 833818 - DNA, 33 bp, Homo sapien
aaccagttgctagatatatttgaacattaatta

SEQ ID NO: 833819 - DNA, 33 bp, Homo sapien
tggctcctaatttaaccactaccatttgaagtc

SEQ ID NO: 833820 - DNA, 33 bp, Homo sapien
tggctcctaatttaactactaccatttgaagtc

SEQ ID NO: 833821 - DNA, 33 bp, Homo sapien
ctccagctcctcatgaaaaatgacaaagaatgc

SEQ ID NO: 833822 - DNA, 33 bp, Homo sapien
ctccagctcctcatgagaaatgacaaagaatgc

SEQ ID NO: 833823 - DNA, 33 bp, Homo sapien
ataggtggtgtttgcacgtaggtgacagctaag

SEQ ID NO: 833824 - DNA, 33 bp, Homo sapien
ataggtggtgtttgcaggtaggtgacagctaag

SEQ ID NO: 833825 - DNA, 33 bp, Homo sapien
cccagaagcactaccccgcaacccttgcttgct

SEQ ID NO: 833826 - DNA, 33 bp, Homo sapien
cccagaagcactaccctgcaacccttgcttgct

SEQ ID NO: 833827 - DNA, 33 bp, Homo sapien
ctgctttccctgagaacagatatgacccctcat

SEQ ID NO: 833828 - DNA, 33 bp, Homo sapien
ctgctttccctgagaagagatatgacccctcat

SEQ ID NO: 833829 - DNA, 33 bp, Homo sapien
caatatcagacattccgattttttccatattct

SEQ ID NO: 833830 - DNA, 33 bp, Homo sapien
caatatcagacattcctattttttccatattct

SEQ ID NO: 833831 - DNA, 33 bp, Homo sapien
agtcatcgtcagcaaactaacatgggaacagaa

SEQ ID NO: 833832 - DNA, 33 bp, Homo sapien
agtcatcgtcagcaaagtaacatgggaacagaa

SEQ ID NO: 833833 - DNA, 33 bp, Homo sapien
agaaaacctaacaccacgtgtcctcactcttaa

SEQ ID NO: 833834 - DNA, 33 bp, Homo sapien
agaaaacctaacaccaggtgtcctcactcttaa

SEQ ID NO: 833835 - DNA, 33 bp, Homo sapien
tattttctaggtcttaccagaaatcatcaattg

SEQ ID NO: 833836 - DNA, 33 bp, Homo sapien
tattttctaggtcttatcagaaatcatcaattg

SEQ ID NO: 833837 - DNA, 33 bp, Homo sapien; identical to SEQ ID NO: 833835

SEQ ID NO: 833838 - DNA, 33 bp, Homo sapien; identical to SEQ ID NO: 833836

SEQ ID NO: 833839 - DNA, 33 bp, Homo sapien
aatattcttgctataactaagtgcctctccaag

SEQ ID NO: 833840 - DNA, 33 bp, Homo sapien
aatattcttgctataattaagtgcctctccaag

SEQ ID NO: 833841 - DNA, 33 bp, Homo sapien
gttttacctttagaaacatgcttttgttctctt

SEQ ID NO: 833842 - DNA, 33 bp, Homo sapien
gttttacctttagaaatatgcttttgttctctt

SEQ ID NO: 833843 - DNA, 33 bp, Homo sapien
tatattgtgtggtagaacttcccatagtgtgca

SEQ ID NO: 833844 - DNA, 33 bp, Homo sapien
tatattgtgtggtagagcttcccatagtgtgca

SEQ ID NO: 833845 - DNA, 33 bp, Homo sapien
ttgatgggttgcaaaacagttattatagtctca

SEQ ID NO: 833846 - DNA, 33 bp, Homo sapien
ttgatgggttgcaaaagagttattatagtctca

SEQ ID NO: 833847 - DNA, 33 bp, Homo sapien
attgtctatcaacagcaaagggacaagaaatgt

SEQ ID NO: 833848 - DNA, 33 bp, Homo sapien
attgtctatcaacagcgaagggacaagaaatgt

SEQ ID NO: 833849 - DNA, 33 bp, Homo sapien
ctccactttataaataactcacatttcttgtcc

SEQ ID NO: 833850 - DNA, 33 bp, Homo sapien
ctccactttataaatagctcacatttcttgtcc

SEQ ID NO: 833851 - DNA, 33 bp, Homo sapien
acagtcaccatcatgcccctgggtctcatcatc

SEQ ID NO: 833852 - DNA, 33 bp, Homo sapien
acagtcaccatcatgctcctgggtctcatcatc

SEQ ID NO: 833853 - DNA, 33 bp, Homo sapien
gcatgcgtggagaaagaaggacaatccacaagt

SEQ ID NO: 833854 - DNA, 33 bp, Homo sapien
gcatgcgtggagaaaggaggacaatccacaagt

SEQ ID NO: 833855 - DNA, 33 bp, Homo sapien
tcaaaacatcagcaaaatatatttgagtgaagg

SEQ ID NO: 833856 - DNA, 33 bp, Homo sapien
tcaaaacatcagcaaagtatatttgagtgaagg

SEQ ID NO: 833857 - DNA, 33 bp, Homo sapien
tacgctaagaagaatcactcctactgcacatcc

SEQ ID NO: 833858 - DNA, 33 bp, Homo sapien
tacgctaagaagaatcgctcctactgcacatcc

SEQ ID NO: 833859 - DNA, 33 bp, Homo sapien
aagcacacttaaaaacagcagagtaaaacattt

SEQ ID NO: 833860 - DNA, 33 bp, Homo sapien
aagcacacttaaaaacggcagagtaaaacattt

SEQ ID NO: 833861 - DNA, 33 bp, Homo sapien
ctggagctgaaatgtacgggaagcaaaatggaa

SEQ ID NO: 833862 - DNA, 33 bp, Homo sapien
ctggagctgaaatgtatgggaagcaaaatggaa

SEQ ID NO: 833863 - DNA, 33 bp, Homo sapien
tttgtctttgactttcaacagtttcaatataat

SEQ ID NO: 833864 - DNA, 33 bp, Homo sapien
tttgtctttgactttcgacagtttcaatataat

SEQ ID NO: 833865 - DNA, 33 bp, Homo sapien
tctatttacctatgaaattacttttagctgtgt

SEQ ID NO: 833866 - DNA, 33 bp, Homo sapien
tctatttacctatgaagttacttttagctgtgt

SEQ ID NO: 833867 - DNA, 33 bp, Homo sapien
tagaaacatcacctagacctttctttaaaaaat

SEQ ID NO: 833868 - DNA, 33 bp, Homo sapien
tagaaacatcacctaggcctttctttaaaaaat

SEQ ID NO: 833869 - DNA, 33 bp, Homo sapien
aaaatcactgctattacattgttgaacctttgt

SEQ ID NO: 833870 - DNA, 33 bp, Homo sapien
aaaatcactgctattatattgttgaacctttgt

SEQ ID NO: 833871 - DNA, 33 bp, Homo sapien
tgcagagcttataacacggaaaactacttgtat

SEQ ID NO: 833872 - DNA, 33 bp, Homo sapien
tgcagagcttataacatggaaaactacttgtat

SEQ ID NO: 833873 - DNA, 33 bp, Homo sapien
caaccacatttggcgaagttaatccagctttcc

SEQ ID NO: 833874 - DNA, 33 bp, Homo sapien
caaccacatttggcgaggttaatccagctttcc

SEQ ID NO: 833875 - DNA, 33 bp, Homo sapien
caaatgtggttgaatgaaactggcaaataattc

SEQ ID NO: 833876 - DNA, 33 bp, Homo sapien
caaatgtggttgaatgtaactggcaaataattc

SEQ ID NO: 833877 - DNA, 33 bp, Homo sapien
gtgtctttagcttcatcaggatctgcccagatg

SEQ ID NO: 833878 - DNA, 33 bp, Homo sapien
gtgtctttagcttcattaggatctgcccagatg

SEQ ID NO: 833879 - DNA, 33 bp, Homo sapien
cactgtctgggtcaagaatggtgcagagctggt

SEQ ID NO: 833880 - DNA, 33 bp, Homo sapien
cactgtctgggtcaaggatggtgcagagctggt

SEQ ID NO: 833881 - DNA, 33 bp, Homo sapien
agcgtttctcatttccaacaacgtcagtcccac

SEQ ID NO: 833882 - DNA, 33 bp, Homo sapien
agcgtttctcatttccgacaacgtcagtcccac

SEQ ID NO: 833883 - DNA, 33 bp, Homo sapien
tagcccccatgaccaacagagacggttccagaa

SEQ ID NO: 833884 - DNA, 33 bp, Homo sapien
tagcccccatgaccaagagagacggttccagaa

SEQ ID NO: 833885 - DNA, 33 bp, Homo sapien
cccacgcttgaaaatacgggaggtagccagtgt

SEQ ID NO: 833886 - DNA, 33 bp, Homo sapien
cccacgcttgaaaatatgggaggtagccagtgt

SEQ ID NO: 833887 - DNA, 33 bp, Homo sapien
atcagttgactttaagaccatgattatcctgcc

SEQ ID NO: 833888 - DNA, 33 bp, Homo sapien
atcagttgactttaaggccatgattatcctgcc

SEQ ID NO: 833889 - DNA, 33 bp, Homo sapien
ttaacattcacaacaacctatttatttgaactt

SEQ ID NO: 833890 - DNA, 33 bp, Homo sapien
ttaacattcacaacaatctatttatttgaactt

SEQ ID NO: 833891 - DNA, 33 bp, Homo sapien
ttaaaaccaaataacactgaatatcttttagtt

SEQ ID NO: 833892 - DNA, 33 bp, Homo sapien
ttaaaaccaaataacattgaatatcttttagtt

SEQ ID NO: 833893 - DNA, 33 bp, Homo sapien
tgtgggagatgataagaatttgttgttttgggt

SEQ ID NO: 833894 - DNA, 33 bp, Homo sapien
tgtgggagatgataagtatttgttgttttgggt

SEQ ID NO: 833895 - DNA, 33 bp, Homo sapien
cctggaaatgcggctcaaatcttcctcctgagg

SEQ ID NO: 833896 - DNA, 33 bp, Homo sapien
cctggaaatgcggctccaatcttcctcctgagg

SEQ ID NO: 833897 - DNA, 33 bp, Homo sapien
agggctgctgatacacagtaagggcaggaggag

SEQ ID NO: 833898 - DNA, 33 bp, Homo sapien
agggctgctgatacacggtaagggcaggaggag

SEQ ID NO: 833899 - DNA, 33 bp, Homo sapien
cccacctaccaaggccaaactagctgctgccac

SEQ ID NO: 833900 - DNA, 33 bp, Homo sapien
cccacctaccaaggccgaactagctgctgccac

SEQ ID NO: 833901 - DNA, 33 bp, Homo sapien
aaagttgcttcgagaaaggggcatatatttctg

SEQ ID NO: 833902 - DNA, 33 bp, Homo sapien
aaagttgcttcgagaagggggcatatatttctg

SEQ ID NO: 833903 - DNA, 33 bp, Homo sapien
cactgatgctcagttcactccatcctgcatctt

SEQ ID NO: 833904 - DNA, 33 bp, Homo sapien
cactgatgctcagttcgctccatcctgcatctt

SEQ ID NO: 833905 - DNA, 33 bp, Homo sapien
agatgaaagatgcaacaggtttttttttctgtt

SEQ ID NO: 833906 - DNA, 33 bp, Homo sapien
agatgaaagatgcaacgggtttttttttctgtt

SEQ ID NO: 833907 - DNA, 33 bp, Homo sapien
tggatgtccctgatgaaaggagaacaagacaga

SEQ ID NO: 833908 - DNA, 33 bp, Homo sapien
tggatgtccctgatgagaggagaacaagacaga

SEQ ID NO: 833909 - DNA, 33 bp, Homo sapien
tttaaagaagtccaaacgtctggccaggcgcat

SEQ ID NO: 833910 - DNA, 33 bp, Homo sapien
tttaaagaagtccaaatgtctggccaggcgcat

SEQ ID NO: 833911 - DNA, 33 bp, Homo sapien
tagatttgttgcctcacgatttcattgcatctg

SEQ ID NO: 833912 - DNA, 33 bp, Homo sapien
tagatttgttgcctcatgatttcattgcatctg

SEQ ID NO: 833913 - DNA, 33 bp, Homo sapien
acccccagaaagcttaagagacactgttttatg

SEQ ID NO: 833914 - DNA, 33 bp, Homo sapien
acccccagaaagcttaggagacactgttttatg

SEQ ID NO: 833915 - DNA, 33 bp, Homo sapien
aggtgcacaaaataccgactgttgcaagcaatg

SEQ ID NO: 833916 - DNA, 33 bp, Homo sapien
aggtgcacaaaatacctactgttgcaagcaatg

SEQ ID NO: 833917 - DNA, 33 bp, Homo sapien
cctcagagggcaacatcaccgtgacatgcaggg

SEQ ID NO: 833918 - DNA, 33 bp, Homo sapien
cctcagagggcaacattaccgtgacatgcaggg

SEQ ID NO: 833919 - DNA, 33 bp, Homo sapien
gccaccaggatttgccaaggagaggagcagagg

SEQ ID NO: 833920 - DNA, 33 bp, Homo sapien
gccaccaggatttgccgaggagaggagcagagg

SEQ ID NO: 833921 - DNA, 33 bp, Homo sapien
cactcacaaagctcaccgatgataatccaatta

SEQ ID NO: 833922 - DNA, 33 bp, Homo sapien
cactcacaaagctcactgatgataatccaatta

SEQ ID NO: 833923 - DNA, 33 bp, Homo sapien
tatggtataaaattacacacccataacagtaga

SEQ ID NO: 833924 - DNA, 33 bp, Homo sapien
tatggtataaaattacgcacccataacagtaga

SEQ ID NO: 833925 - DNA, 33 bp, Homo sapien
atttcttaaaagagtaatacggctgggtgcagt

SEQ ID NO: 833926 - DNA, 33 bp, Homo sapien
atttcttaaaagagtactacggctgggtgcagt

SEQ ID NO: 833927 - DNA, 33 bp, Homo sapien
gtctcaccatttcctacaagcccctcaacacag

SEQ ID NO: 833928 - DNA, 33 bp, Homo sapien
gtctcaccatttcctagaagcccctcaacacag

SEQ ID NO: 833929 - DNA, 33 bp, Homo sapien
aacttttttgcaacaaatgacattattaaaaga

SEQ ID NO: 833930 - DNA, 33 bp, Homo sapien
aacttttttgcaacaagtgacattattaaaaga

SEQ ID NO: 833931 - DNA, 33 bp, Homo sapien
gaggcctctgctgtgactcaactatgtgggcct

SEQ ID NO: 833932 - DNA, 33 bp, Homo sapien
gaggcctctgctgtgattcaactatgtgggcct

SEQ ID NO: 833933 - DNA, 33 bp, Homo sapien
ggtgaactgctcactaagaagatttcctttcac

SEQ ID NO: 833934 - DNA, 33 bp, Homo sapien
ggtgaactgctcactaggaagatttcctttcac

SEQ ID NO: 833935 - DNA, 33 bp, Homo sapien
gcacttataagatggacctgttagcatctgtcc

SEQ ID NO: 833936 - DNA, 33 bp, Homo sapien
gcacttataagatggagctgttagcatctgtcc

SEQ ID NO: 833937 - DNA, 33 bp, Homo sapien
atcccctgacttaatgaaagtagtggaaacacc

SEQ ID NO: 833938 - DNA, 33 bp, Homo sapien
atcccctgacttaatgcaagtagtggaaacacc

SEQ ID NO: 833939 - DNA, 33 bp, Homo sapien
gaatttgaaatgcaaacgaccattggaggctta

SEQ ID NO: 833940 - DNA, 33 bp, Homo sapien
gaatttgaaatgcaaaggaccattggaggctta

SEQ ID NO: 833941 - DNA, 33 bp, Homo sapien
ctgtttcctttgccgacgagactgattttctct

SEQ ID NO: 833942 - DNA, 33 bp, Homo sapien
ctgtttcctttgccgatgagactgattttctct

SEQ ID NO: 833943 - DNA, 33 bp, Homo sapien
cctttgctagggtgagcctatttcagtgtggtt

SEQ ID NO: 833944 - DNA, 33 bp, Homo sapien
cctttgctagggtgagtctatttcagtgtggtt

SEQ ID NO: 833945 - DNA, 33 bp, Homo sapien
gaagccaactcaaagacgatctgaatattgaag

SEQ ID NO: 833946 - DNA, 33 bp, Homo sapien
gaagccaactcaaagatgatctgaatattgaag

SEQ ID NO: 833947 - DNA, 33 bp, Homo sapien
aaaagacggttgaacaaagccaacagaaaacta

SEQ ID NO: 833948 - DNA, 33 bp, Homo sapien
aaaagacggttgaacagagccaacagaaaacta

SEQ ID NO: 833949 - DNA, 33 bp, Homo sapien
attgacaggtgaagaaatctgggcatggagttt

SEQ ID NO: 833950 - DNA, 33 bp, Homo sapien
attgacaggtgaagaagtctgggcatggagttt

SEQ ID NO: 833951 - DNA, 33 bp, Homo sapien
tagtgtgttctcacaagacttcatggttttata

SEQ ID NO: 833952 - DNA, 33 bp, Homo sapien
tagtgtgttctcacaatacttcatggttttata

SEQ ID NO: 833953 - DNA, 33 bp, Homo sapien
attaaaatgaaagggcactagacaacagctcag

SEQ ID NO: 833954 - DNA, 33 bp, Homo sapien
attaaaatgaaagggccctagacaacagctcag

SEQ ID NO: 833955 - DNA, 33 bp, Homo sapien
attaacaactaactgaaagattccattgccagt

SEQ ID NO: 833956 - DNA, 33 bp, Homo sapien
attaacaactaactgacagattccattgccagt

SEQ ID NO: 833957 - DNA, 33 bp, Homo sapien
cactactgaacactaccactacaaatggttaag

SEQ ID NO: 833958 - DNA, 33 bp, Homo sapien
cactactgaacactactactacaaatggttaag

SEQ ID NO: 833959 - DNA, 33 bp, Homo sapien
tgtgtcctttgacatgcatgatagcccccaaaa

SEQ ID NO: 833960 - DNA, 33 bp, Homo sapien
tgtgtcctttgacatgtatgatagcccccaaaa

SEQ ID NO: 833961 - DNA, 33 bp, Homo sapien
gaaacattgagtgtataaatcaggagcggggag

SEQ ID NO: 833962 - DNA, 33 bp, Homo sapien
gaaacattgagtgtatgaatcaggagcggggag

SEQ ID NO: 833963 - DNA, 33 bp, Homo sapien
ccctgaggcaaactataaattaaagtgttgtgg

SEQ ID NO: 833964 - DNA, 33 bp, Homo sapien
ccctgaggcaaactatgaattaaagtgttgtgg

SEQ ID NO: 833965 - DNA, 33 bp, Homo sapien
aatttcaagctagataaataaaaatcctttgac

SEQ ID NO: 833966 - DNA, 33 bp, Homo sapien
aatttcaagctagatagataaaaatcctttgac

SEQ ID NO: 833967 - DNA, 33 bp, Homo sapien
cagctgtcactggctacgtgtgaggcctctgca

SEQ ID NO: 833968 - DNA, 33 bp, Homo sapien
cagctgtcactggctatgtgtgaggcctctgca

SEQ ID NO: 833969 - DNA, 33 bp, Homo sapien
ctgccatagcacccgggaaccagggcatcttct

SEQ ID NO: 833970 - DNA, 33 bp, Homo sapien
ctgccatagcacccggtaaccagggcatcttct

SEQ ID NO: 833971 - DNA, 33 bp, Homo sapien
cactgcctggcaggccaagaatgccatccacgt

SEQ ID NO: 833972 - DNA, 33 bp, Homo sapien
cactgcctggcaggccgagaatgccatccacgt

SEQ ID NO: 833973 - DNA, 33 bp, Homo sapien
tttgtctgtgtctatgcaccactcctgaagcca

SEQ ID NO: 833974 - DNA, 33 bp, Homo sapien
tttgtctgtgtctatggaccactcctgaagcca

SEQ ID NO: 833975 - DNA, 33 bp, Homo sapien
aggggaaatagccatgaaagaaattggggagca

SEQ ID NO: 833976 - DNA, 33 bp, Homo sapien
aggggaaatagccatgtaagaaattggggagca

SEQ ID NO: 833977 - DNA, 33 bp, Homo sapien
gtcatgtgtgttacaacttcaacagtctcatgg

SEQ ID NO: 833978 - DNA, 33 bp, Homo sapien
gtcatgtgtgttacaatttcaacagtctcatgg

SEQ ID NO: 833979 - DNA, 33 bp, Homo sapien
tcctcagagaaaaaccaatgtcttagaaggcaa

SEQ ID NO: 833980 - DNA, 33 bp, Homo sapien
tcctcagagaaaaacccatgtcttagaaggcaa

SEQ ID NO: 833981 - DNA, 33 bp, Homo sapien; identical to SEQ ID NO: 833979

SEQ ID NO: 833982 - DNA, 33 bp, Homo sapien; identical to SEQ ID NO: 833980

SEQ ID NO: 833983 - DNA, 33 bp, Homo sapien
tatcacaagaataccacgggaaaaactggcccc

SEQ ID NO: 833984 - DNA, 33 bp, Homo sapien
tatcacaagaataccatgggaaaaactggcccc

SEQ ID NO: 833985 - DNA, 33 bp, Homo sapien
tctgtgtacagtgagacgcttcccttcggggtt

SEQ ID NO: 833986 - DNA, 33 bp, Homo sapien
tctgtgtacagtgagatgcttcccttcggggtt

SEQ ID NO: 833987 - DNA, 33 bp, Homo sapien
cattaagccaaaccaccgtacagaatttattaa

SEQ ID NO: 833988 - DNA, 33 bp, Homo sapien
cattaagccaaaccactgtacagaatttattaa

SEQ ID NO: 833989 - DNA, 33 bp, Homo sapien
gtcttggattcgcctcagacatttaatgacatt

SEQ ID NO: 833990 - DNA, 33 bp, Homo sapien
gtcttggattcgcctcggacatttaatgacatt

SEQ ID NO: 833991 - DNA, 33 bp, Homo sapien
cagcaacagcataaaggaatgactactgagcct

SEQ ID NO: 833992 - DNA, 33 bp, Homo sapien
cagcaacagcataaagtaatgactactgagcct

SEQ ID NO: 833993 - DNA, 33 bp, Homo sapien
ggcatgatttagggacaattgccttttccatgg

SEQ ID NO: 833994 - DNA, 33 bp, Homo sapien
ggcatgatttagggaccattgccttttccatgg

SEQ ID NO: 833995 - DNA, 33 bp, Homo sapien
tgcacttggaacaacaaggtgaagatgacagag

SEQ ID NO: 833996 - DNA, 33 bp, Homo sapien
tgcacttggaacaacagggtgaagatgacagag

SEQ ID NO: 833997 - DNA, 33 bp, Homo sapien
gctgcgtgactgacaacggaagctggaattcag

SEQ ID NO: 833998 - DNA, 33 bp, Homo sapien
gctgcgtgactgacaagggaagctggaattcag

SEQ ID NO: 833999 - DNA, 33 bp, Homo sapien
catggcacctagagaactggagtacggaccaag

SEQ ID NO: 834000 - DNA, 33 bp, Homo sapien
catggcacctagagaattggagtacggaccaag

SEQ ID NO: 834001 - DNA, 33 bp, Homo sapien
ttctcccgaggtcacacggcaaccgagtgtggt

SEQ ID NO: 834002 - DNA, 33 bp, Homo sapien
ttctcccgaggtcacatggcaaccgagtgtggt

SEQ ID NO: 834003 - DNA, 33 bp, Homo sapien
gaaacagaaaaatttaagtgatggcctttactc

SEQ ID NO: 834004 - DNA, 33 bp, Homo sapien
gaaacagaaaaatttaggtgatggcctttactc

SEQ ID NO: 834005 - DNA, 33 bp, Homo sapien
gaacatgcaccttaaaagtaggaggaaaacata

SEQ ID NO: 834006 - DNA, 33 bp, Homo sapien
gaacatgcaccttaaatgtaggaggaaaacata

SEQ ID NO: 834007 - DNA, 33 bp, Homo sapien
attttcacttggagcaaaacatgtgggtccaca

SEQ ID NO: 834008 - DNA, 33 bp, Homo sapien
attttcacttggagcagaacatgtgggtccaca

SEQ ID NO: 834009 - DNA, 33 bp, Homo sapien
acaggcctcaggagcaatcagccctgcaataca

SEQ ID NO: 834010 - DNA, 33 bp, Homo sapien
acaggcctcaggagcagtcagccctgcaataca

SEQ ID NO: 834011 - DNA, 33 bp, Homo sapien
gatctgggagataaaacgaggtagcttaatggg

SEQ ID NO: 834012 - DNA, 33 bp, Homo sapien
gatctgggagataaaatgaggtagcttaatggg

SEQ ID NO: 834013 - DNA, 33 bp, Homo sapien
aaattcactttcggaaacttcccatctgtctcg

SEQ ID NO: 834014 - DNA, 33 bp, Homo sapien
aaattcactttcggaaccttcccatctgtctcg

SEQ ID NO: 834015 - DNA, 33 bp, Homo sapien
gcaacaaatctatggccaggtaaagggtcaact

SEQ ID NO: 834016 - DNA, 33 bp, Homo sapien
gcaacaaatctatggctaggtaaagggtcaact

SEQ ID NO: 834017 - DNA, 33 bp, Homo sapien
caacagtgcatagtgaagccatttctggggaga

SEQ ID NO: 834018 - DNA, 33 bp, Homo sapien
caacagtgcatagtgaggccatttctggggaga

SEQ ID NO: 834019 - DNA, 33 bp, Homo sapien
ggctgtaataaaaaggaaaacgcaaatgagtgg

SEQ ID NO: 834020 - DNA, 33 bp, Homo sapien
ggctgtaataaaaagggaaacgcaaatgagtgg

SEQ ID NO: 834021 - DNA, 33 bp, Homo sapien
aaacatctctttcaaaggcactttaagaaagat

SEQ ID NO: 834022 - DNA, 33 bp, Homo sapien
aaacatctctttcaaatgcactttaagaaagat

SEQ ID NO: 834023 - DNA, 33 bp, Homo sapien
ccttgtagatctgtcacattgaaggggactatg

SEQ ID NO: 834024 - DNA, 33 bp, Homo sapien
ccttgtagatctgtcatattgaaggggactatg

SEQ ID NO: 834025 - DNA, 33 bp, Homo sapien
ggcggggccacgttcagaagagaaaattctagc

SEQ ID NO: 834026 - DNA, 33 bp, Homo sapien
ggcggggccacgttcataagagaaaattctagc

SEQ ID NO: 834027 - DNA, 33 bp, Homo sapien
cttacagaaggtccgggatctgtgagggattca

SEQ ID NO: 834028 - DNA, 33 bp, Homo sapien
cttacagaaggtccggtatctgtgagggattca

SEQ ID NO: 834029 - DNA, 33 bp, Homo sapien
ttatctgtactttctacaaattggtagttggct

SEQ ID NO: 834030 - DNA, 33 bp, Homo sapien
ttatctgtactttctataaattggtagttggct

SEQ ID NO: 834031 - DNA, 33 bp, Homo sapien
gaaaattgctcatcaactcggggaagtcaaagt

SEQ ID NO: 834032 - DNA, 33 bp, Homo sapien
gaaaattgctcatcaagtcggggaagtcaaagt

SEQ ID NO: 834033 - DNA, 33 bp, Homo sapien
agggctagacaggggcaagaaacaaggtcattc

SEQ ID NO: 834034 - DNA, 33 bp, Homo sapien
agggctagacaggggcgagaaacaaggtcattc

SEQ ID NO: 834035 - DNA, 33 bp, Homo sapien
ctaaacaaatgctaacaatcatatgaggcttca

SEQ ID NO: 834036 - DNA, 33 bp, Homo sapien
ctaaacaaatgctaaccatcatatgaggcttca

SEQ ID NO: 834037 - DNA, 33 bp, Homo sapien
tggaagagaccacaaaccgcaggcaattggcag

SEQ ID NO: 834038 - DNA, 33 bp, Homo sapien
tggaagagaccacaaagcgcaggcaattggcag

SEQ ID NO: 834039 - DNA, 33 bp, Homo sapien
cttagtgtgtttgtccgaaatcccatcacatag

SEQ ID NO: 834040 - DNA, 33 bp, Homo sapien
cttagtgtgtttgtcctaaatcccatcacatag

SEQ ID NO: 834041 - DNA, 33 bp, Homo sapien
gtagcactggaagaccaaagaggaaagagaccc

SEQ ID NO: 834042 - DNA, 33 bp, Homo sapien
gtagcactggaagaccgaagaggaaagagaccc

SEQ ID NO: 834043 - DNA, 33 bp, Homo sapien
accggaagtgaaggcacatttccctccttcgtc

SEQ ID NO: 834044 - DNA, 33 bp, Homo sapien
accggaagtgaaggcagatttccctccttcgtc

SEQ ID NO: 834045 - DNA, 33 bp, Homo sapien
tcatcccagtttcacaaaggaggacatcgaggc

SEQ ID NO: 834046 - DNA, 33 bp, Homo sapien
tcatcccagtttcacagaggaggacatcgaggc

SEQ ID NO: 834047 - DNA, 33 bp, Homo sapien
ttgcagtggggtctcaacccgactctgcctcaa

SEQ ID NO: 834048 - DNA, 33 bp, Homo sapien
ttgcagtggggtctcatcccgactctgcctcaa

SEQ ID NO: 834049 - DNA, 33 bp, Homo sapien
gccttgaatcagttaactaggtatgggtctgcc

SEQ ID NO: 834050 - DNA, 33 bp, Homo sapien
gccttgaatcagttaattaggtatgggtctgcc

SEQ ID NO: 834051 - DNA, 33 bp, Homo sapien
gctgtgaagacaggaaaagcatggcaaatgcaa

SEQ ID NO: 834052 - DNA, 33 bp, Homo sapien
gctgtgaagacaggaagagcatggcaaatgcaa

SEQ ID NO: 834053 - DNA, 33 bp, Homo sapien
ggagaagctgagaagacgaaggaaaagtcaggg

SEQ ID NO: 834054 - DNA, 33 bp, Homo sapien
ggagaagctgagaagatgaaggaaaagtcaggg

SEQ ID NO: 834055 - DNA, 33 bp, Homo sapien
gctgaaggagaaagaaagggagaatattagaga

SEQ ID NO: 834056 - DNA, 33 bp, Homo sapien
gctgaaggagaaagaaggggagaatattagaga

SEQ ID NO: 834057 - DNA, 33 bp, Homo sapien
cgagcctccgttcaaaatgatcatcatcaaaac

SEQ ID NO: 834058 - DNA, 33 bp, Homo sapien
cgagcctccgttcaaattgatcatcatcaaaac

SEQ ID NO: 834059 - DNA, 33 bp, Homo sapien
catctctcttcgcatcactttctgcctccccat

SEQ ID NO: 834060 - DNA, 33 bp, Homo sapien
catctctcttcgcatcgctttctgcctccccat

SEQ ID NO: 834061 - DNA, 33 bp, Homo sapien
agagatcttatcaaataaccagatcaaccacca

SEQ ID NO: 834062 - DNA, 33 bp, Homo sapien
agagatcttatcaaatgaccagatcaaccacca

SEQ ID NO: 834063 - DNA, 33 bp, Homo sapien
aggcagaaaagtttgcagaaatcagatgagaat

SEQ ID NO: 834064 - DNA, 33 bp, Homo sapien
aggcagaaaagtttgcggaaatcagatgagaat

SEQ ID NO: 834065 - DNA, 33 bp, Homo sapien
tccctgtctttggacacgtaagaattggaggaa

SEQ ID NO: 834066 - DNA, 33 bp, Homo sapien
tccctgtctttggacatgtaagaattggaggaa

SEQ ID NO: 834067 - DNA, 33 bp, Homo sapien
tgtgcctcggtctgtacgctgtgatcgttctgt

SEQ ID NO: 834068 - DNA, 33 bp, Homo sapien
tgtgcctcggtctgtatgctgtgatcgttctgt

SEQ ID NO: 834069 - DNA, 33 bp, Homo sapien
aaggcttgattataaacacataccaggcagaaa

SEQ ID NO: 834070 - DNA, 33 bp, Homo sapien
aaggcttgattataaatacataccaggcagaaa

SEQ ID NO: 834071 - DNA, 33 bp, Homo sapien
gaggtcagcgatgagacggaaggacaggaaatc

SEQ ID NO: 834072 - DNA, 33 bp, Homo sapien
gaggtcagcgatgagatggaaggacaggaaatc

SEQ ID NO: 834073 - DNA, 33 bp, Homo sapien
tctcctgggtctggtcaaggcagctgcctcctc

SEQ ID NO: 834074 - DNA, 33 bp, Homo sapien
tctcctgggtctggtcgaggcagctgcctcctc

SEQ ID NO: 834075 - DNA, 33 bp, Homo sapien
agagagcaagggagaacttcagacctgcccttc

SEQ ID NO: 834076 - DNA, 33 bp, Homo sapien
agagagcaagggagaatttcagacctgcccttc

SEQ ID NO: 834077 - DNA, 33 bp, Homo sapien
ctgttacgcactagaaatccccgacccttgctc

SEQ ID NO: 834078 - DNA, 33 bp, Homo sapien
ctgttacgcactagaactccccgacccttgctc

SEQ ID NO: 834079 - DNA, 33 bp, Homo sapien
caggtttagagagaaactgttttgttgcaatgt

SEQ ID NO: 834080 - DNA, 33 bp, Homo sapien
caggtttagagagaaattgttttgttgcaatgt

SEQ ID NO: 834081 - DNA, 33 bp, Homo sapien
actgctgctctccctacggcaaggaaatccaaa

SEQ ID NO: 834082 - DNA, 33 bp, Homo sapien
actgctgctctccctatggcaaggaaatccaaa

SEQ ID NO: 834083 - DNA, 33 bp, Homo sapien
tcttagtctttcttcagtaacctgataccagac

SEQ ID NO: 834084 - DNA, 33 bp, Homo sapien
tcttagtctttcttcattaacctgataccagac

SEQ ID NO: 834085 - DNA, 33 bp, Homo sapien
tttctaaaatgtgatactacctggatataagaa

SEQ ID NO: 834086 - DNA, 33 bp, Homo sapien
tttctaaaatgtgatattacctggatataagaa

SEQ ID NO: 834087 - DNA, 33 bp, Homo sapien
gacttgcacatggtaagtccaaagtatatattt

SEQ ID NO: 834088 - DNA, 33 bp, Homo sapien
gacttgcacatggtaattccaaagtatatattt

SEQ ID NO: 834089 - DNA, 33 bp, Homo sapien
caggattaggactcacaaagtcttctggtgtta

SEQ ID NO: 834090 - DNA, 33 bp, Homo sapien
caggattaggactcaccaagtcttctggtgtta

SEQ ID NO: 834091 - DNA, 33 bp, Homo sapien
gaatggattccctcaactgggaccagcctatct

SEQ ID NO: 834092 - DNA, 33 bp, Homo sapien
gaatggattccctcaagtgggaccagcctatct

SEQ ID NO: 834093 - DNA, 33 bp, Homo sapien
ggaaagtgccatgttaccaatttttttcttttt

SEQ ID NO: 834094 - DNA, 33 bp, Homo sapien
ggaaagtgccatgttatcaatttttttcttttt

SEQ ID NO: 834095 - DNA, 33 bp, Homo sapien
ttccaccctttagttagactgactttaggctac

SEQ ID NO: 834096 - DNA, 33 bp, Homo sapien
ttccaccctttagttatactgactttaggctac

SEQ ID NO: 834097 - DNA, 33 bp, Homo sapien
cttctctcctctcacaaatcagggctgctccgg

SEQ ID NO: 834098 - DNA, 33 bp, Homo sapien
cttctctcctctcacagatcagggctgctccgg

SEQ ID NO: 834099 - DNA, 33 bp, Homo sapien
ggaaatggcatcgtacacatctgcttttaccta

SEQ ID NO: 834100 - DNA, 33 bp, Homo sapien
ggaaatggcatcgtacgcatctgcttttaccta

SEQ ID NO: 834101 - DNA, 33 bp, Homo sapien
ctttgtgaaaggcccacgccctacatatcttcc

SEQ ID NO: 834102 - DNA, 33 bp, Homo sapien
ctttgtgaaaggcccatgccctacatatcttcc

SEQ ID NO: 834103 - DNA, 33 bp, Homo sapien
aaacggggtggagtgacggaagatatgtagggc

SEQ ID NO: 834104 - DNA, 33 bp, Homo sapien
aaacggggtggagtgatggaagatatgtagggc

SEQ ID NO: 834105 - DNA, 33 bp, Homo sapien
cttattgctgagcaggcattggaaagaccgagt

SEQ ID NO: 834106 - DNA, 33 bp, Homo sapien
cttattgctgagcaggtattggaaagaccgagt

SEQ ID NO: 834107 - DNA, 33 bp, Homo sapien
gaacagggagttaggcaaagcaaaaggaaggag

SEQ ID NO: 834108 - DNA, 33 bp, Homo sapien
gaacagggagttaggctaagcaaaaggaaggag

SEQ ID NO: 834109 - DNA, 33 bp, Homo sapien
gttcaaaactagagacacaaatttgagagtcat

SEQ ID NO: 834110 - DNA, 33 bp, Homo sapien
gttcaaaactagagacgcaaatttgagagtcat

SEQ ID NO: 834111 - DNA, 33 bp, Homo sapien
agagccaacatgtgcacacactaggtcctgaag

SEQ ID NO: 834112 - DNA, 33 bp, Homo sapien
agagccaacatgtgcatacactaggtcctgaag

SEQ ID NO: 834113 - DNA, 33 bp, Homo sapien
aaactgagatcaagataatagatgtaacttgta

SEQ ID NO: 834114 - DNA, 33 bp, Homo sapien
aaactgagatcaagatgatagatgtaacttgta

SEQ ID NO: 834115 - DNA, 33 bp, Homo sapien
aatatctcccccaaaagacatctgaaggctaca

SEQ ID NO: 834116 - DNA, 33 bp, Homo sapien
aatatctcccccaaaatacatctgaaggctaca

SEQ ID NO: 834117 - DNA, 33 bp, Homo sapien
aatcagtgaagaggcacgggacgtgggcagaga

SEQ ID NO: 834118 - DNA, 33 bp, Homo sapien
aatcagtgaagaggcatgggacgtgggcagaga

SEQ ID NO: 834119 - DNA, 33 bp, Homo sapien
tggaaaacccatcaagcctgtcaaggatttgct

SEQ ID NO: 834120 - DNA, 33 bp, Homo sapien
tggaaaacccatcaagtctgtcaaggatttgct

SEQ ID NO: 834121 - DNA, 33 bp, Homo sapien
cctttatatttccattcaacttgagggcccaca

SEQ ID NO: 834122 - DNA, 33 bp, Homo sapien
cctttatatttccattgaacttgagggcccaca

SEQ ID NO: 834123 - DNA, 33 bp, Homo sapien
catgaaatgtatcttacgacactatcacattaa

SEQ ID NO: 834124 - DNA, 33 bp, Homo sapien
catgaaatgtatcttatgacactatcacattaa

SEQ ID NO: 834125 - DNA, 33 bp, Homo sapien
taagagaaaggaattgaagcagatgtgtaaccc

SEQ ID NO: 834126 - DNA, 33 bp, Homo sapien
taagagaaaggaattggagcagatgtgtaaccc

SEQ ID NO: 834127 - DNA, 33 bp, Homo sapien
cccccaatctcagagccgagccgacagagagca

SEQ ID NO: 834128 - DNA, 33 bp, Homo sapien
cccccaatctcagagcggagccgacagagagca

SEQ ID NO: 834129 - DNA, 33 bp, Homo sapien
tcctacttctacacaccgtccaggagtgaacca

SEQ ID NO: 834130 - DNA, 33 bp, Homo sapien
tcctacttctacacactgtccaggagtgaacca

SEQ ID NO: 834131 - DNA, 33 bp, Homo sapien
taaaatttattgcaaaaacggaaataacaaacc

SEQ ID NO: 834132 - DNA, 33 bp, Homo sapien
taaaatttattgcaaagacggaaataacaaacc

SEQ ID NO: 834133 - DNA, 33 bp, Homo sapien
cctgataagagctcaacaacaggttgaattgta

SEQ ID NO: 834134 - DNA, 33 bp, Homo sapien
cctgataagagctcaataacaggttgaattgta

SEQ ID NO: 834135 - DNA, 33 bp, Homo sapien
cagtcagcgctacaccaagttgaggcagccatt

SEQ ID NO: 834136 - DNA, 33 bp, Homo sapien
cagtcagcgctacaccgagttgaggcagccatt

SEQ ID NO: 834137 - DNA, 33 bp, Homo sapien
ctaaattaactacctacggccaagtcctgtctc

SEQ ID NO: 834138 - DNA, 33 bp, Homo sapien
ctaaattaactacctatggccaagtcctgtctc

SEQ ID NO: 834139 - DNA, 33 bp, Homo sapien
gaatttttcctttagaagctgcaactgccaaag

SEQ ID NO: 834140 - DNA, 33 bp, Homo sapien
gaatttttcctttagaggctgcaactgccaaag

SEQ ID NO: 834141 - DNA, 33 bp, Homo sapien
gaggaattaccagtcaagaaactgcttcaagta

SEQ ID NO: 834142 - DNA, 33 bp, Homo sapien
gaggaattaccagtcaggaaactgcttcaagta

SEQ ID NO: 834143 - DNA, 33 bp, Homo sapien
ccactttgtagtcaaaagttgaacagcaggatc

SEQ ID NO: 834144 - DNA, 33 bp, Homo sapien
ccactttgtagtcaaaggttgaacagcaggatc

SEQ ID NO: 834145 - DNA, 33 bp, Homo sapien
cttgctcaccctgccacgtgtatccctgccttt

SEQ ID NO: 834146 - DNA, 33 bp, Homo sapien
cttgctcaccctgccatgtgtatccctgccttt

SEQ ID NO: 834147 - DNA, 33 bp, Homo sapien
catgagggtaggagataaggaagataaactggc

SEQ ID NO: 834148 - DNA, 33 bp, Homo sapien
catgagggtaggagattaggaagataaactggc

SEQ ID NO: 834149 - DNA, 33 bp, Homo sapien
ttaggtcagctaagacacaagcaggaacagcca

SEQ ID NO: 834150 - DNA, 33 bp, Homo sapien
ttaggtcagctaagacgcaagcaggaacagcca

SEQ ID NO: 834151 - DNA, 33 bp, Homo sapien
ttgatctcagtgtaacaacatggccagtgcctg

SEQ ID NO: 834152 - DNA, 33 bp, Homo sapien
ttgatctcagtgtaacgacatggccagtgcctg

SEQ ID NO: 834153 - DNA, 33 bp, Homo sapien
cctcaccattctctctcaagcctctagctgttt

SEQ ID NO: 834154 - DNA, 33 bp, Homo sapien
cctcaccattctctcttaagcctctagctgttt

SEQ ID NO: 834155 - DNA, 33 bp, Homo sapien
gtataaaatgaaaaaactagacgactcctgaat

SEQ ID NO: 834156 - DNA, 33 bp, Homo sapien
gtataaaatgaaaaaattagacgactcctgaat

SEQ ID NO: 834157 - DNA, 33 bp, Homo sapien
agggcatcaagaaagacggtccctggagtgatg

SEQ ID NO: 834158 - DNA, 33 bp, Homo sapien
agggcatcaagaaagatggtccctggagtgatg

SEQ ID NO: 834159 - DNA, 33 bp, Homo sapien
gaaactagttcatgccaagtgttgccagagata

SEQ ID NO: 834160 - DNA, 33 bp, Homo sapien
gaaactagttcatgccgagtgttgccagagata

SEQ ID NO: 834161 - DNA, 33 bp, Homo sapien
cacaggaacatggacaaatgttgaaacactagg

SEQ ID NO: 834162 - DNA, 33 bp, Homo sapien
cacaggaacatggacagatgttgaaacactagg

SEQ ID NO: 834163 - DNA, 33 bp, Homo sapien
gctgggggtgtgtgtacgtagagcctttgctga

SEQ ID NO: 834164 - DNA, 33 bp, Homo sapien
gctgggggtgtgtgtatgtagagcctttgctga

SEQ ID NO: 834165 - DNA, 33 bp, Homo sapien
tgaatgaggcaaagctcagacttcacctctacc

SEQ ID NO: 834166 - DNA, 33 bp, Homo sapien
tgaatgaggcaaagcttagacttcacctctacc

SEQ ID NO: 834167 - DNA, 33 bp, Homo sapien
cagagctccaggtcacacagccaggaagtcagt

SEQ ID NO: 834168 - DNA, 33 bp, Homo sapien
cagagctccaggtcacgcagccaggaagtcagt

SEQ ID NO: 834169 - DNA, 33 bp, Homo sapien
tctttgtcatggatacaactgggtcctccttta

SEQ ID NO: 834170 - DNA, 33 bp, Homo sapien
tctttgtcatggataccactgggtcctccttta

SEQ ID NO: 834171 - DNA, 33 bp, Homo sapien
cacacactgacacttcactgccaacactgacac

SEQ ID NO: 834172 - DNA, 33 bp, Homo sapien
cacacactgacacttcgctgccaacactgacac

SEQ ID NO: 834173 - DNA, 33 bp, Homo sapien
gagtttgggaatctgacaaactgagttccttcc

SEQ ID NO: 834174 - DNA, 33 bp, Homo sapien
gagtttgggaatctgagaaactgagttccttcc

SEQ ID NO: 834175 - DNA, 33 bp, Homo sapien
tcagattcccaaactccatttatctctactgca

SEQ ID NO: 834176 - DNA, 33 bp, Homo sapien
tcagattcccaaactctatttatctctactgca

SEQ ID NO: 834177 - DNA, 33 bp, Homo sapien
ccttgaagcgttttaacgtgggacagcctccct

SEQ ID NO: 834178 - DNA, 33 bp, Homo sapien
ccttgaagcgttttaatgtgggacagcctccct

SEQ ID NO: 834179 - DNA, 33 bp, Homo sapien
agctagcactttgcaaaatagcaacattccttc

SEQ ID NO: 834180 - DNA, 33 bp, Homo sapien
agctagcactttgcaagatagcaacattccttc

SEQ ID NO: 834181 - DNA, 33 bp, Homo sapien
ctctacctctctgataccatttatttaccctgc

SEQ ID NO: 834182 - DNA, 33 bp, Homo sapien
ctctacctctctgatatcatttatttaccctgc

SEQ ID NO: 834183 - DNA, 33 bp, Homo sapien
cttcatgacatccgaacatcttacttgatcaac

SEQ ID NO: 834184 - DNA, 33 bp, Homo sapien
cttcatgacatccgaatatcttacttgatcaac

SEQ ID NO: 834185 - DNA, 33 bp, Homo sapien
cccttaccactctttcccttgctcactctgctc

SEQ ID NO: 834186 - DNA, 33 bp, Homo sapien
cccttaccactctttctcttgctcactctgctc

SEQ ID NO: 834187 - DNA, 33 bp, Homo sapien
gtaaaatacaggttggaaaagcatttgattagc

SEQ ID NO: 834188 - DNA, 33 bp, Homo sapien
gtaaaatacaggttggtaaagcatttgattagc

SEQ ID NO: 834189 - DNA, 33 bp, Homo sapien
cttagcattgccattcacttgccagacacggac

SEQ ID NO: 834190 - DNA, 33 bp, Homo sapien
cttagcattgccattcgcttgccagacacggac

SEQ ID NO: 834191 - DNA, 33 bp, Homo sapien
actgtgaccaaaggacaaaatccagcctgctac

SEQ ID NO: 834192 - DNA, 33 bp, Homo sapien
actgtgaccaaaggaccaaatccagcctgctac

SEQ ID NO: 834193 - DNA, 33 bp, Homo sapien
aactcttaaaatgatgaatatgatagtctagaa

SEQ ID NO: 834194 - DNA, 33 bp, Homo sapien
aactcttaaaatgatgcatatgatagtctagaa

SEQ ID NO: 834195 - DNA, 33 bp, Homo sapien
tgagtgttctgtcacaatcaccatatatgctgt

SEQ ID NO: 834196 - DNA, 33 bp, Homo sapien
tgagtgttctgtcacagtcaccatatatgctgt

SEQ ID NO: 834197 - DNA, 33 bp, Homo sapien
aggagggaaacaaaaacgccagtcaacacatag

SEQ ID NO: 834198 - DNA, 33 bp, Homo sapien
aggagggaaacaaaaatgccagtcaacacatag

SEQ ID NO: 834199 - DNA, 33 bp, Homo sapien
tcattttggaaacttacagtttagtgcagacaa

SEQ ID NO: 834200 - DNA, 33 bp, Homo sapien
tcattttggaaacttatagtttagtgcagacaa

SEQ ID NO: 834201 - DNA, 33 bp, Homo sapien
agatatagatatggaaaaatgagaggctgaggt

SEQ ID NO: 834202 - DNA, 33 bp, Homo sapien
agatatagatatggaacaatgagaggctgaggt

SEQ ID NO: 834203 - DNA, 33 bp, Homo sapien
gtattaataatgtaataaagcacttgatgcata

SEQ ID NO: 834204 - DNA, 33 bp, Homo sapien
gtattaataatgtaatgaagcacttgatgcata

SEQ ID NO: 834205 - DNA, 33 bp, Homo sapien
tcaggttttgattctccctgagcttacatgttg

SEQ ID NO: 834206 - DNA, 33 bp, Homo sapien
tcaggttttgattctctctgagcttacatgttg

SEQ ID NO: 834207 - DNA, 33 bp, Homo sapien
atttcaaaataactagaagagaagatttgaaat

SEQ ID NO: 834208 - DNA, 33 bp, Homo sapien
atttcaaaataactaggagagaagatttgaaat

SEQ ID NO: 834209 - DNA, 33 bp, Homo sapien
tccagctacactcaacacatttcaccccacccc

SEQ ID NO: 834210 - DNA, 33 bp, Homo sapien
tccagctacactcaacgcatttcaccccacccc

SEQ ID NO: 834211 - DNA, 33 bp, Homo sapien
ttggccaaaacaaccacctgagaatcaaaacca

SEQ ID NO: 834212 - DNA, 33 bp, Homo sapien
ttggccaaaacaaccatctgagaatcaaaacca

SEQ ID NO: 834213 - DNA, 33 bp, Homo sapien
agcagaaagaagagcactaaatcccagggcgaa

SEQ ID NO: 834214 - DNA, 33 bp, Homo sapien
agcagaaagaagagcattaaatcccagggcgaa

SEQ ID NO: 834215 - DNA, 33 bp, Homo sapien
ttggagaatgagtcccacttcttgttctccctg

SEQ ID NO: 834216 - DNA, 33 bp, Homo sapien
ttggagaatgagtcccgcttcttgttctccctg

SEQ ID NO: 834217 - DNA, 33 bp, Homo sapien
gaacccaaagcaacggaacaaatataggagcaa

SEQ ID NO: 834218 - DNA, 33 bp, Homo sapien
gaacccaaagcaacgggacaaatataggagcaa

SEQ ID NO: 834219 - DNA, 33 bp, Homo sapien
tccttgaatttgcccacatttggcatctcttgc

SEQ ID NO: 834220 - DNA, 33 bp, Homo sapien
tccttgaatttgcccagatttggcatctcttgc

SEQ ID NO: 834221 - DNA, 33 bp, Homo sapien
ttggagcctcctcccacagctgatccatgaccc

SEQ ID NO: 834222 - DNA, 33 bp, Homo sapien
ttggagcctcctcccatagctgatccatgaccc

SEQ ID NO: 834223 - DNA, 33 bp, Homo sapien
actggatctgggggtacgtggccagacacaccc

SEQ ID NO: 834224 - DNA, 33 bp, Homo sapien
actggatctgggggtatgtggccagacacaccc

SEQ ID NO: 834225 - DNA, 33 bp, Homo sapien
aattcagactgcaaaacttagggtagactatgt

SEQ ID NO: 834226 - DNA, 33 bp, Homo sapien
aattcagactgcaaaatttagggtagactatgt

SEQ ID NO: 834227 - DNA, 33 bp, Homo sapien
tcaataagagatggcaactgtagtttcaaaaat

SEQ ID NO: 834228 - DNA, 33 bp, Homo sapien
tcaataagagatggcacctgtagtttcaaaaat

SEQ ID NO: 834229 - DNA, 33 bp, Homo sapien
gactttgagatttaacacggagctgggatggcc

SEQ ID NO: 834230 - DNA, 33 bp, Homo sapien
gactttgagatttaacccggagctgggatggcc

SEQ ID NO: 834231 - DNA, 33 bp, Homo sapien
tattgcccatgcttcacataaaatattgataat

SEQ ID NO: 834232 - DNA, 33 bp, Homo sapien
tattgcccatgcttcagataaaatattgataat

SEQ ID NO: 834233 - DNA, 33 bp, Homo sapien
gagtatttttatccaaccacttcagctgcttgg

SEQ ID NO: 834234 - DNA, 33 bp, Homo sapien
gagtatttttatccaatcacttcagctgcttgg

SEQ ID NO: 834235 - DNA, 33 bp, Homo sapien
tcactccacagtcatacctagaccttgtcatta

SEQ ID NO: 834236 - DNA, 33 bp, Homo sapien
tcactccacagtcatatctagaccttgtcatta

SEQ ID NO: 834237 - DNA, 33 bp, Homo sapien
attaatgtcattataaaaggacttgatggaaag

SEQ ID NO: 834238 - DNA, 33 bp, Homo sapien
attaatgtcattataagaggacttgatggaaag

SEQ ID NO: 834239 - DNA, 33 bp, Homo sapien
acccgctgctttagagaagatttctggagcaga

SEQ ID NO: 834240 - DNA, 33 bp, Homo sapien
acccgctgctttagagtagatttctggagcaga

SEQ ID NO: 834241 - DNA, 33 bp, Homo sapien
attcagttgcttaagaagtttttacagagagag

SEQ ID NO: 834242 - DNA, 33 bp, Homo sapien
attcagttgcttaagatgtttttacagagagag

SEQ ID NO: 834243 - DNA, 33 bp, Homo sapien
ctccatgggagtcttaaccctcattccatacct

SEQ ID NO: 834244 - DNA, 33 bp, Homo sapien
ctccatgggagtcttagccctcattccatacct

SEQ ID NO: 834245 - DNA, 33 bp, Homo sapien
ggtgggcaaccctataacaatcagcctattctg

SEQ ID NO: 834246 - DNA, 33 bp, Homo sapien
ggtgggcaaccctatagcaatcagcctattctg

SEQ ID NO: 834247 - DNA, 33 bp, Homo sapien
aatcctgggtcctcaaaagaggagaacaccgca

SEQ ID NO: 834248 - DNA, 33 bp, Homo sapien
aatcctgggtcctcaagagaggagaacaccgca

SEQ ID NO: 834249 - DNA, 33 bp, Homo sapien
cagacacacttgcccactgaaatttttttaaag

SEQ ID NO: 834250 - DNA, 33 bp, Homo sapien
cagacacacttgcccattgaaatttttttaaag

SEQ ID NO: 834251 - DNA, 33 bp, Homo sapien
catgtttatgggccatcatgcaaatgttaattt

SEQ ID NO: 834252 - DNA, 33 bp, Homo sapien
catgtttatgggccatgatgcaaatgttaattt

SEQ ID NO: 834253 - DNA, 33 bp, Homo sapien
gatcagaaatgacatccacaaaacctgagaact

SEQ ID NO: 834254 - DNA, 33 bp, Homo sapien
gatcagaaatgacatctacaaaacctgagaact

SEQ ID NO: 834255 - DNA, 33 bp, Homo sapien
ctaccttttatccatccgacaagctcctactta

SEQ ID NO: 834256 - DNA, 33 bp, Homo sapien
ctaccttttatccatctgacaagctcctactta

SEQ ID NO: 834257 - DNA, 33 bp, Homo sapien
aaacaaataggaggccaaaaacataagaaaaca

SEQ ID NO: 834258 - DNA, 33 bp, Homo sapien
aaacaaataggaggccgaaaacataagaaaaca

SEQ ID NO: 834259 - DNA, 33 bp, Homo sapien
tttgtttattgagaccacatctggctctgttac

SEQ ID NO: 834260 - DNA, 33 bp, Homo sapien
tttgtttattgagaccgcatctggctctgttac

SEQ ID NO: 834261 - DNA, 33 bp, Homo sapien
ctttagaaaatggtccacagaatttttatagtt

SEQ ID NO: 834262 - DNA, 33 bp, Homo sapien
ctttagaaaatggtccgcagaatttttatagtt

SEQ ID NO: 834263 - DNA, 33 bp, Homo sapien
gcccagtacctactgaagtgtttgcctttatct

SEQ ID NO: 834264 - DNA, 33 bp, Homo sapien
gcccagtacctactgatgtgtttgcctttatct

SEQ ID NO: 834265 - DNA, 33 bp, Homo sapien
tcacatcttagtcacacattagaagaagttaat

SEQ ID NO: 834266 - DNA, 33 bp, Homo sapien
tcacatcttagtcacagattagaagaagttaat

SEQ ID NO: 834267 - DNA, 33 bp, Homo sapien
gtctaagaaacttgacaaatgaaactatttatt

SEQ ID NO: 834268 - DNA, 33 bp, Homo sapien
gtctaagaaacttgacgaatgaaactatttatt

SEQ ID NO: 834269 - DNA, 33 bp, Homo sapien
cagagtggaagtgggaagaaggtcttcagattt

SEQ ID NO: 834270 - DNA, 33 bp, Homo sapien
cagagtggaagtgggaggaaggtcttcagattt

SEQ ID NO: 834271 - DNA, 33 bp, Homo sapien
tcctgggtacactgccactgaaccagatctcag

SEQ ID NO: 834272 - DNA, 33 bp, Homo sapien
tcctgggtacactgcctctgaaccagatctcag

SEQ ID NO: 834273 - DNA, 33 bp, Homo sapien
agaaatggaatataggaacacatataaagaaag

SEQ ID NO: 834274 - DNA, 33 bp, Homo sapien
agaaatggaatatagggacacatataaagaaag

SEQ ID NO: 834275 - DNA, 33 bp, Homo sapien
ttttatctcaacatataaactccttaagtgcaa

SEQ ID NO: 834276 - DNA, 33 bp, Homo sapien
ttttatctcaacatatgaactccttaagtgcaa

SEQ ID NO: 834277 - DNA, 33 bp, Homo sapien
tttctcatagatttcagaacttttagtagtttc

SEQ ID NO: 834278 - DNA, 33 bp, Homo sapien
tttctcatagatttcataacttttagtagtttc

SEQ ID NO: 834279 - DNA, 33 bp, Homo sapien
tggaatattatgcacactgcatgggtagcacac

SEQ ID NO: 834280 - DNA, 33 bp, Homo sapien
tggaatattatgcacattgcatgggtagcacac

SEQ ID NO: 834281 - DNA, 33 bp, Homo sapien
gtatattttctgctaccggctttactcagaggg

SEQ ID NO: 834282 - DNA, 33 bp, Homo sapien
gtatattttctgctactggctttactcagaggg

SEQ ID NO: 834283 - DNA, 33 bp, Homo sapien
tttaaaaagtgttaccgggcaatatctataaat

SEQ ID NO: 834284 - DNA, 33 bp, Homo sapien
tttaaaaagtgttacctggcaatatctataaat

SEQ ID NO: 834285 - DNA, 33 bp, Homo sapien
aattcagggcagtaaaaatccagttttaatggt

SEQ ID NO: 834286 - DNA, 33 bp, Homo sapien
aattcagggcagtaaatatccagttttaatggt

SEQ ID NO: 834287 - DNA, 33 bp, Homo sapien
tcatctccaacacctacaatgaaaagcaagaat

SEQ ID NO: 834288 - DNA, 33 bp, Homo sapien
tcatctccaacacctataatgaaaagcaagaat

SEQ ID NO: 834289 - DNA, 33 bp, Homo sapien
cacaggatgtgatataacatgagctttaattat

SEQ ID NO: 834290 - DNA, 33 bp, Homo sapien
cacaggatgtgatataccatgagctttaattat

SEQ ID NO: 834291 - DNA, 33 bp, Homo sapien
tttgcgtgcataccaaagtttaagaaccattgc

SEQ ID NO: 834292 - DNA, 33 bp, Homo sapien
tttgcgtgcataccaacgtttaagaaccattgc

SEQ ID NO: 834293 - DNA, 33 bp, Homo sapien
caagggcctgcatcaacgtcaccctggagtttt

SEQ ID NO: 834294 - DNA, 33 bp, Homo sapien
caagggcctgcatcaatgtcaccctggagtttt

SEQ ID NO: 834295 - DNA, 33 bp, Homo sapien
aaaataaactgaaatacggttcctggaattggc

SEQ ID NO: 834296 - DNA, 33 bp, Homo sapien
aaaataaactgaaatatggttcctggaattggc

SEQ ID NO: 834297 - DNA, 33 bp, Homo sapien
cctcctgtggctgccaccttttcgccattcaga

SEQ ID NO: 834298 - DNA, 33 bp, Homo sapien
cctcctgtggctgccagcttttcgccattcaga

SEQ ID NO: 834299 - DNA, 33 bp, Homo sapien
cctagctaaaggccctcacttcttggtcttgct

SEQ ID NO: 834300 - DNA, 33 bp, Homo sapien
cctagctaaaggcccttacttcttggtcttgct

SEQ ID NO: 834301 - DNA, 33 bp, Homo sapien
tttttgtttcggatgtgaatactatctctctac

SEQ ID NO: 834302 - DNA, 33 bp, Homo sapien
tttttgtttcggatgttaatactatctctctac

SEQ ID NO: 834303 - DNA, 33 bp, Homo sapien
aagatttctatagtctcaagttgaccagtacat

SEQ ID NO: 834304 - DNA, 33 bp, Homo sapien
aagatttctatagtcttaagttgaccagtacat

SEQ ID NO: 834305 - DNA, 33 bp, Homo sapien
ggactggaaagtcagaaaaatagtcatttgggt

SEQ ID NO: 834306 - DNA, 33 bp, Homo sapien
ggactggaaagtcagagaaatagtcatttgggt

SEQ ID NO: 834307 - DNA, 33 bp, Homo sapien
atttttgggtagctcacctttgtgtggttgaca

SEQ ID NO: 834308 - DNA, 33 bp, Homo sapien
atttttgggtagctcatctttgtgtggttgaca

SEQ ID NO: 834309 - DNA, 33 bp, Homo sapien
gagtccaagtgtggggcatggacagcaagcgaa

SEQ ID NO: 834310 - DNA, 33 bp, Homo sapien
gagtccaagtgtggggtatggacagcaagcgaa

SEQ ID NO: 834311 - DNA, 33 bp, Homo sapien
cactttgaaagccatacagtagaagaggtaaac

SEQ ID NO: 834312 - DNA, 33 bp, Homo sapien
cactttgaaagccatatagtagaagaggtaaac

SEQ ID NO: 834313 - DNA, 33 bp, Homo sapien
gggtaattatgattgacaagagtaccaacttca

SEQ ID NO: 834314 - DNA, 33 bp, Homo sapien
gggtaattatgattgagaagagtaccaacttca

SEQ ID NO: 834315 - DNA, 33 bp, Homo sapien
atgtatcctagaataacgagagtgaacacagtt

SEQ ID NO: 834316 - DNA, 33 bp, Homo sapien
atgtatcctagaataatgagagtgaacacagtt

SEQ ID NO: 834317 - DNA, 33 bp, Homo sapien
gtgaagtggccggaccaaaaaatataatgtatc

SEQ ID NO: 834318 - DNA, 33 bp, Homo sapien
gtgaagtggccggaccgaaaaatataatgtatc

SEQ ID NO: 834319 - DNA, 33 bp, Homo sapien
aagtagtgtgaaaagacaggtaaaacagggctg

SEQ ID NO: 834320 - DNA, 33 bp, Homo sapien
aagtagtgtgaaaagataggtaaaacagggctg

SEQ ID NO: 834321 - DNA, 33 bp, Homo sapien
aagttcaattcaaaaaagacatactccaagata

SEQ ID NO: 834322 - DNA, 33 bp, Homo sapien
aagttcaattcaaaaaggacatactccaagata

SEQ ID NO: 834323 - DNA, 33 bp, Homo sapien
tctgaaagaaacatcacgtgtaagagatctccc

SEQ ID NO: 834324 - DNA, 33 bp, Homo sapien
tctgaaagaaacatcatgtgtaagagatctccc

SEQ ID NO: 834325 - DNA, 33 bp, Homo sapien
ggaaatacaggaaagacacagaagctttaatgg

SEQ ID NO: 834326 - DNA, 33 bp, Homo sapien
ggaaatacaggaaagagacagaagctttaatgg

SEQ ID NO: 834327 - DNA, 33 bp, Homo sapien
catcggttaaagatcacgccaacaggaaccagc

SEQ ID NO: 834328 - DNA, 33 bp, Homo sapien
catcggttaaagatcatgccaacaggaaccagc

SEQ ID NO: 834329 - DNA, 33 bp, Homo sapien
acaaaggtactgtcaacgattgcctggataact

SEQ ID NO: 834330 - DNA, 33 bp, Homo sapien
acaaaggtactgtcaatgattgcctggataact

SEQ ID NO: 834331 - DNA, 33 bp, Homo sapien
tagtttgtgaactactaaagtggtgaaatgcat

SEQ ID NO: 834332 - DNA, 33 bp, Homo sapien
tagtttgtgaactactgaagtggtgaaatgcat

SEQ ID NO: 834333 - DNA, 33 bp, Homo sapien
ctaggcattaaggagaacataaatataagtatg

SEQ ID NO: 834334 - DNA, 33 bp, Homo sapien
ctaggcattaaggagagcataaatataagtatg

SEQ ID NO: 834335 - DNA, 33 bp, Homo sapien
tcagagtttgtcattgaaatactaagataccct

SEQ ID NO: 834336 - DNA, 33 bp, Homo sapien
tcagagtttgtcattgcaatactaagataccct

SEQ ID NO: 834337 - DNA, 33 bp, Homo sapien
atcaattttttttggtgaacagactgaaatttc

SEQ ID NO: 834338 - DNA, 33 bp, Homo sapien
atcaattttttttggttaacagactgaaatttc

SEQ ID NO: 834339 - DNA, 33 bp, Homo sapien
aagttttgaaactgggaagtgagagtcctgcaa

SEQ ID NO: 834340 - DNA, 33 bp, Homo sapien
aagttttgaaactggggagtgagagtcctgcaa

SEQ ID NO: 834341 - DNA, 33 bp, Homo sapien
gagcacactatgcacaaggccaaggcatctgaa

SEQ ID NO: 834342 - DNA, 33 bp, Homo sapien
gagcacactatgcacagggccaaggcatctgaa

SEQ ID NO: 834343 - DNA, 33 bp, Homo sapien
agggtcagtgaaattaagactaggctctggctt

SEQ ID NO: 834344 - DNA, 33 bp, Homo sapien
agggtcagtgaaattaggactaggctctggctt

SEQ ID NO: 834345 - DNA, 33 bp, Homo sapien
catgaacagcactctgaacttgctcttctgggc

SEQ ID NO: 834346 - DNA, 33 bp, Homo sapien
catgaacagcactctggacttgctcttctgggc

SEQ ID NO: 834347 - DNA, 33 bp, Homo sapien
gaaaggaataatcaaggatttggtcagtttctt

SEQ ID NO: 834348 - DNA, 33 bp, Homo sapien
gaaaggaataatcaagtatttggtcagtttctt

SEQ ID NO: 834349 - DNA, 33 bp, Homo sapien
gtgttttccacaaaaacgtcatcctggactcta

SEQ ID NO: 834350 - DNA, 33 bp, Homo sapien
gtgttttccacaaaaatgtcatcctggactcta

SEQ ID NO: 834351 - DNA, 33 bp, Homo sapien
acatattttacaaaagactcattgtttcacagt

SEQ ID NO: 834352 - DNA, 33 bp, Homo sapien
acatattttacaaaaggctcattgtttcacagt

SEQ ID NO: 834353 - DNA, 33 bp, Homo sapien
aaaatccacaaactcaaatggatgaaatttaat

SEQ ID NO: 834354 - DNA, 33 bp, Homo sapien
aaaatccacaaactcacatggatgaaatttaat

SEQ ID NO: 834355 - DNA, 33 bp, Homo sapien
ggatctgaaggtggtaagtaagaattctagata

SEQ ID NO: 834356 - DNA, 33 bp, Homo sapien
ggatctgaaggtggtaggtaagaattctagata

SEQ ID NO: 834357 - DNA, 33 bp, Homo sapien
aagatgatgtctaccaagaggccagtttggatc

SEQ ID NO: 834358 - DNA, 33 bp, Homo sapien
aagatgatgtctaccaggaggccagtttggatc

SEQ ID NO: 834359 - DNA, 33 bp, Homo sapien
gctggatttctctaaaacattaaacatatatct

SEQ ID NO: 834360 - DNA, 33 bp, Homo sapien
gctggatttctctaaagcattaaacatatatct

SEQ ID NO: 834361 - DNA, 33 bp, Homo sapien
atctgtttgttacagagtcaattttgtgtactg

SEQ ID NO: 834362 - DNA, 33 bp, Homo sapien
atctgtttgttacagattcaattttgtgtactg

SEQ ID NO: 834363 - DNA, 33 bp, Homo sapien
ttttgtgctggattaaggacactggtttgtcta

SEQ ID NO: 834364 - DNA, 33 bp, Homo sapien
ttttgtgctggattaatgacactggtttgtcta

SEQ ID NO: 834365 - DNA, 33 bp, Homo sapien
aaggtatgaggtgctcaagtaactttccaaagg

SEQ ID NO: 834366 - DNA, 33 bp, Homo sapien
aaggtatgaggtgctctagtaactttccaaagg

SEQ ID NO: 834367 - DNA, 33 bp, Homo sapien
ccactcctagctgagtcacctttggaaagttac

SEQ ID NO: 834368 - DNA, 33 bp, Homo sapien
ccactcctagctgagttacctttggaaagttac

SEQ ID NO: 834369 - DNA, 33 bp, Homo sapien
tgcaggaggcttagtagatcggtatgattttct

SEQ ID NO: 834370 - DNA, 33 bp, Homo sapien
tgcaggaggcttagtatatcggtatgattttct

SEQ ID NO: 834371 - DNA, 33 bp, Homo sapien
gcggttcttgaacaaaactgtcatctactggcc

SEQ ID NO: 834372 - DNA, 33 bp, Homo sapien
gcggttcttgaacaaacctgtcatctactggcc

SEQ ID NO: 834373 - DNA, 33 bp, Homo sapien
gcttctctctcttaaacgtcccagcagaattct

SEQ ID NO: 834374 - DNA, 33 bp, Homo sapien
gcttctctctcttaaaggtcccagcagaattct

SEQ ID NO: 834375 - DNA, 33 bp, Homo sapien
tctactctcaaaagtgaaaatgacattaataac

SEQ ID NO: 834376 - DNA, 33 bp, Homo sapien
tctactctcaaaagtgcaaatgacattaataac

SEQ ID NO: 834377 - DNA, 33 bp, Homo sapien
agcctagccattgaaactgatatgaactggaat

SEQ ID NO: 834378 - DNA, 33 bp, Homo sapien
agcctagccattgaaattgatatgaactggaat

SEQ ID NO: 834379 - DNA, 33 bp, Homo sapien
taacagttctcaacacaatcttgatcaatattc

SEQ ID NO: 834380 - DNA, 33 bp, Homo sapien
taacagttctcaacacgatcttgatcaatattc

SEQ ID NO: 834381 - DNA, 33 bp, Homo sapien
tgtgatgagaatctcaagacagtgaggtttagt

SEQ ID NO: 834382 - DNA, 33 bp, Homo sapien
tgtgatgagaatctcaggacagtgaggtttagt

SEQ ID NO: 834383 - DNA, 33 bp, Homo sapien
agaagtaaaaattcatcagcagagttggattta

SEQ ID NO: 834384 - DNA, 33 bp, Homo sapien
agaagtaaaaattcattagcagagttggattta

SEQ ID NO: 834385 - DNA, 33 bp, Homo sapien
aattggctcccctctcaatgagctggtgcacta

SEQ ID NO: 834386 - DNA, 33 bp, Homo sapien
aattggctcccctctcgatgagctggtgcacta

SEQ ID NO: 834387 - DNA, 33 bp, Homo sapien
tagtttccaagctgccgatatcagatcaatcag

SEQ ID NO: 834388 - DNA, 33 bp, Homo sapien
tagtttccaagctgcctatatcagatcaatcag

SEQ ID NO: 834389 - DNA, 33 bp, Homo sapien
aattatctagatgttgaatgatttggggctgga

SEQ ID NO: 834390 - DNA, 33 bp, Homo sapien
aattatctagatgttggatgatttggggctgga

SEQ ID NO: 834391 - DNA, 33 bp, Homo sapien
tcataggaactgaatcctgagttctaactaact

SEQ ID NO: 834392 - DNA, 33 bp, Homo sapien
tcataggaactgaatcttgagttctaactaact

SEQ ID NO: 834393 - DNA, 33 bp, Homo sapien
tgcagagaataggtgacccttttgaggtgagct

SEQ ID NO: 834394 - DNA, 33 bp, Homo sapien
tgcagagaataggtgatccttttgaggtgagct

SEQ ID NO: 834395 - DNA, 33 bp, Homo sapien
agtttgtattgaaataaccctcttgctggtaac

SEQ ID NO: 834396 - DNA, 33 bp, Homo sapien
agtttgtattgaaatacccctcttgctggtaac

SEQ ID NO: 834397 - DNA, 33 bp, Homo sapien
caccttcattttccaacttatttcattgtgttg

SEQ ID NO: 834398 - DNA, 33 bp, Homo sapien
caccttcattttccaatttatttcattgtgttg

SEQ ID NO: 834399 - DNA, 33 bp, Homo sapien
tttccactcttagcctcactttttgtgtgtctg

SEQ ID NO: 834400 - DNA, 33 bp, Homo sapien
tttccactcttagccttactttttgtgtgtctg

SEQ ID NO: 834401 - DNA, 33 bp, Homo sapien
taaagaggaatgttcacggtgaatcatctgctt

SEQ ID NO: 834402 - DNA, 33 bp, Homo sapien
taaagaggaatgttcatggtgaatcatctgctt

SEQ ID NO: 834403 - DNA, 33 bp, Homo sapien
tcagttgaatgcctgactagcataagagggaac

SEQ ID NO: 834404 - DNA, 33 bp, Homo sapien
tcagttgaatgcctgattagcataagagggaac

SEQ ID NO: 834405 - DNA, 33 bp, Homo sapien
acatggaatttcacataatctggcagttttggg

SEQ ID NO: 834406 - DNA, 33 bp, Homo sapien
acatggaatttcacatcatctggcagttttggg

SEQ ID NO: 834407 - DNA, 33 bp, Homo sapien
aattgtacctacttcaacttgtcttagaaccag

SEQ ID NO: 834408 - DNA, 33 bp, Homo sapien
aattgtacctacttcatcttgtcttagaaccag

SEQ ID NO: 834409 - DNA, 33 bp, Homo sapien
ataaaatgaaaattgccgatgtatcaatacccg

SEQ ID NO: 834410 - DNA, 33 bp, Homo sapien
ataaaatgaaaattgctgatgtatcaatacccg

SEQ ID NO: 834411 - DNA, 33 bp, Homo sapien
tgaggattctaagctacggtggacacaacttcc

SEQ ID NO: 834412 - DNA, 33 bp, Homo sapien
tgaggattctaagctagggtggacacaacttcc

SEQ ID NO: 834413 - DNA, 33 bp, Homo sapien
acctctacctgaaacccgatgctttaaagacca

SEQ ID NO: 834414 - DNA, 33 bp, Homo sapien
acctctacctgaaacctgatgctttaaagacca

SEQ ID NO: 834415 - DNA, 33 bp, Homo sapien; identical to SEQ ID NO: 834413

SEQ ID NO: 834416 - DNA, 33 bp, Homo sapien; identical to SEQ ID NO: 834414

SEQ ID NO: 834417 - DNA, 33 bp, Homo sapien
aaataggctttgcccactatactctctcatatt

SEQ ID NO: 834418 - DNA, 33 bp, Homo sapien
aaataggctttgcccattatactctctcatatt

SEQ ID NO: 834419 - DNA, 33 bp, Homo sapien
tgaggttcaacactctcaacactggagaaggat

SEQ ID NO: 834420 - DNA, 33 bp, Homo sapien
tgaggttcaacactcttaacactggagaaggat

SEQ ID NO: 834421 - DNA, 33 bp, Homo sapien
ctagacttcaagatgaacaactcaggccaagag

SEQ ID NO: 834422 - DNA, 33 bp, Homo sapien
ctagacttcaagatgatcaactcaggccaagag

SEQ ID NO: 834423 - DNA, 33 bp, Homo sapien
aagagagtagaaaaataagtaaggaaatgggga

SEQ ID NO: 834424 - DNA, 33 bp, Homo sapien
aagagagtagaaaaatgagtaaggaaatgggga

SEQ ID NO: 834425 - DNA, 33 bp, Homo sapien
ctctggagatgagagacaataatatcagattcc

SEQ ID NO: 834426 - DNA, 33 bp, Homo sapien
ctctggagatgagagagaataatatcagattcc

SEQ ID NO: 834427 - DNA, 33 bp, Homo sapien; identical to SEQ ID NO: 834425

SEQ ID NO: 834428 - DNA, 33 bp, Homo sapien; identical to SEQ ID NO: 834426

SEQ ID NO: 834429 - DNA, 33 bp, Homo sapien
ccttctgtgggggtcacgctgggtgaagaatac

SEQ ID NO: 834430 - DNA, 33 bp, Homo sapien
ccttctgtgggggtcatgctgggtgaagaatac

SEQ ID NO: 834431 - DNA, 33 bp, Homo sapien
acagtcaaacattaaaatctctcatcttggctg

SEQ ID NO: 834432 - DNA, 33 bp, Homo sapien
acagtcaaacattaaagtctctcatcttggctg

SEQ ID NO: 834433 - DNA, 33 bp, Homo sapien
aggcagcatactctccaagtgtagctttctctt

SEQ ID NO: 834434 - DNA, 33 bp, Homo sapien
aggcagcatactctcccagtgtagctttctctt

SEQ ID NO: 834435 - DNA, 33 bp, Homo sapien
ttctctctaagaaacaccatcacctatagcaag

SEQ ID NO: 834436 - DNA, 33 bp, Homo sapien
ttctctctaagaaacatcatcacctatagcaag

SEQ ID NO: 834437 - DNA, 33 bp, Homo sapien
tgccagctttgtaaagccattaaagcagaagtt

SEQ ID NO: 834438 - DNA, 33 bp, Homo sapien
tgccagctttgtaaagtcattaaagcagaagtt

SEQ ID NO: 834439 - DNA, 33 bp, Homo sapien; identical to SEQ ID NO: 834437

SEQ ID NO: 834440 - DNA, 33 bp, Homo sapien; identical to SEQ ID NO: 834438

SEQ ID NO: 834441 - DNA, 33 bp, Homo sapien
acataggaaaaaattcgcaacagcactaattat

SEQ ID NO: 834442 - DNA, 33 bp, Homo sapien
acataggaaaaaattctcaacagcactaattat

SEQ ID NO: 834443 - DNA, 33 bp, Homo sapien
cttccatagggacgtcagaaagttccgggcggt

SEQ ID NO: 834444 - DNA, 33 bp, Homo sapien
cttccatagggacgtcggaaagttccgggcggt

SEQ ID NO: 834445 - DNA, 33 bp, Homo sapien
cattagggaaaagagccaatgcgtgctgggctt

SEQ ID NO: 834446 - DNA, 33 bp, Homo sapien
cattagggaaaagagctaatgcgtgctgggctt

SEQ ID NO: 834447 - DNA, 33 bp, Homo sapien
caccatttatgacttacaattaccagttgttga

SEQ ID NO: 834448 - DNA, 33 bp, Homo sapien
caccatttatgacttataattaccagttgttga

SEQ ID NO: 834449 - DNA, 33 bp, Homo sapien
gaaataaactgcataaagcaaaaaagtaaaaat

SEQ ID NO: 834450 - DNA, 33 bp, Homo sapien
gaaataaactgcataacgcaaaaaagtaaaaat

SEQ ID NO: 834451 - DNA, 33 bp, Homo sapien
ttgatgaatccattcaatcaatgcaggttcaag

SEQ ID NO: 834452 - DNA, 33 bp, Homo sapien
ttgatgaatccattcagtcaatgcaggttcaag

SEQ ID NO: 834453 - DNA, 33 bp, Homo sapien
tcttctaaaaattctagactcacacttttaaaa

SEQ ID NO: 834454 - DNA, 33 bp, Homo sapien
tcttctaaaaattctatactcacacttttaaaa

SEQ ID NO: 834455 - DNA, 33 bp, Homo sapien
gtgtaaccatctgaaaaatctatggttaaaaag

SEQ ID NO: 834456 - DNA, 33 bp, Homo sapien
gtgtaaccatctgaaacatctatggttaaaaag

SEQ ID NO: 834457 - DNA, 33 bp, Homo sapien
ttgtgaaagtctctacgcaaaatctggggactt

SEQ ID NO: 834458 - DNA, 33 bp, Homo sapien
ttgtgaaagtctctactcaaaatctggggactt

SEQ ID NO: 834459 - DNA, 33 bp, Homo sapien
acagataagaatgttgaaaaataaaaatatgtg

SEQ ID NO: 834460 - DNA, 33 bp, Homo sapien
acagataagaatgttggaaaataaaaatatgtg

SEQ ID NO: 834461 - DNA, 33 bp, Homo sapien
agactgcagtgctaaccatgcaagctacagtga

SEQ ID NO: 834462 - DNA, 33 bp, Homo sapien
agactgcagtgctaactatgcaagctacagtga

SEQ ID NO: 834463 - DNA, 33 bp, Homo sapien
gcctagatcataacacggaactacagcatgggt

SEQ ID NO: 834464 - DNA, 33 bp, Homo sapien
gcctagatcataacactgaactacagcatgggt

SEQ ID NO: 834465 - DNA, 33 bp, Homo sapien
tcggaaaacctggcccagcttagtgtttattac

SEQ ID NO: 834466 - DNA, 33 bp, Homo sapien
tcggaaaacctggcccggcttagtgtttattac

SEQ ID NO: 834467 - DNA, 33 bp, Homo sapien
ttctgcctcacgttacactgattcagaaaactt

SEQ ID NO: 834468 - DNA, 33 bp, Homo sapien
ttctgcctcacgttaccctgattcagaaaactt

SEQ ID NO: 834469 - DNA, 33 bp, Homo sapien
aacacagattttttcaaatggttcacacccatg

SEQ ID NO: 834470 - DNA, 33 bp, Homo sapien
aacacagattttttcagatggttcacacccatg

SEQ ID NO: 834471 - DNA, 33 bp, Homo sapien
ttgaacaagccactatcagttatggagcagctg

SEQ ID NO: 834472 - DNA, 33 bp, Homo sapien
ttgaacaagccactattagttatggagcagctg

SEQ ID NO: 834473 - DNA, 33 bp, Homo sapien
ttcccatttaatgccccaactaactcatttctc

SEQ ID NO: 834474 - DNA, 33 bp, Homo sapien
ttcccatttaatgcccgaactaactcatttctc

SEQ ID NO: 834475 - DNA, 33 bp, Homo sapien
ctcctatacattggaactagcagcccttgcatc

SEQ ID NO: 834476 - DNA, 33 bp, Homo sapien
ctcctatacattggaattagcagcccttgcatc

SEQ ID NO: 834477 - DNA, 33 bp, Homo sapien
tagtgagtagtgaccaaattgtgtctgaattat

SEQ ID NO: 834478 - DNA, 33 bp, Homo sapien
tagtgagtagtgaccagattgtgtctgaattat

SEQ ID NO: 834479 - DNA, 33 bp, Homo sapien
agattgagagtctgccaattattagtgagtagt

SEQ ID NO: 834480 - DNA, 33 bp, Homo sapien
agattgagagtctgcccattattagtgagtagt

SEQ ID NO: 834481 - DNA, 33 bp, Homo sapien
ttacacttaaaaataaccctgtgaagatgatgc

SEQ ID NO: 834482 - DNA, 33 bp, Homo sapien
ttacacttaaaaataatcctgtgaagatgatgc

SEQ ID NO: 834483 - DNA, 33 bp, Homo sapien
agaatcaaggaataagaaaaataatgtgagctg

SEQ ID NO: 834484 - DNA, 33 bp, Homo sapien
agaatcaaggaataaggaaaataatgtgagctg

SEQ ID NO: 834485 - DNA, 33 bp, Homo sapien
aaacatagggcagaaacactagcttatgtctaa

SEQ ID NO: 834486 - DNA, 33 bp, Homo sapien
aaacatagggcagaaatactagcttatgtctaa

SEQ ID NO: 834487 - DNA, 33 bp, Homo sapien
tgatgaataaaatgaacctggtctccatcagta

SEQ ID NO: 834488 - DNA, 33 bp, Homo sapien
tgatgaataaaatgaatctggtctccatcagta

SEQ ID NO: 834489 - DNA, 33 bp, Homo sapien
gcagtccttccctgaagctctctactcagaaca

SEQ ID NO: 834490 - DNA, 33 bp, Homo sapien
gcagtccttccctgaatctctctactcagaaca

SEQ ID NO: 834491 - DNA, 33 bp, Homo sapien
ctcattgtgtcacagccacggtttggaatacta

SEQ ID NO: 834492 - DNA, 33 bp, Homo sapien
ctcattgtgtcacagctacggtttggaatacta

SEQ ID NO: 834493 - DNA, 33 bp, Homo sapien
ccacagtatccatcacccaaatcacatgcattg

SEQ ID NO: 834494 - DNA, 33 bp, Homo sapien
ccacagtatccatcactcaaatcacatgcattg

SEQ ID NO: 834495 - DNA, 33 bp, Homo sapien
tgaaaagatagcactgcattgggaccagaattc

SEQ ID NO: 834496 - DNA, 33 bp, Homo sapien
tgaaaagatagcactgtattgggaccagaattc

SEQ ID NO: 834497 - DNA, 33 bp, Homo sapien
agcactatgagatccactgaaagagataatatt

SEQ ID NO: 834498 - DNA, 33 bp, Homo sapien
agcactatgagatccattgaaagagataatatt

SEQ ID NO: 834499 - DNA, 33 bp, Homo sapien
tgctgattggttctccaacacgagattacccaa

SEQ ID NO: 834500 - DNA, 33 bp, Homo sapien
tgctgattggttctccgacacgagattacccaa

SEQ ID NO: 834501 - DNA, 33 bp, Homo sapien
aagtcactaataaatacgggttgtgtgaaatat

SEQ ID NO: 834502 - DNA, 33 bp, Homo sapien
aagtcactaataaatatgggttgtgtgaaatat

SEQ ID NO: 834503 - DNA, 33 bp, Homo sapien
cattgttcacatctcacagggctgaaagtcaat

SEQ ID NO: 834504 - DNA, 33 bp, Homo sapien
cattgttcacatctcatagggctgaaagtcaat

SEQ ID NO: 834505 - DNA, 33 bp, Homo sapien
aaacatatgtcctcacaaagatatgtgttcaag

SEQ ID NO: 834506 - DNA, 33 bp, Homo sapien
aaacatatgtcctcacgaagatatgtgttcaag

SEQ ID NO: 834507 - DNA, 33 bp, Homo sapien
atccatatgataaagacgggcaatctctgaaaa

SEQ ID NO: 834508 - DNA, 33 bp, Homo sapien
atccatatgataaagatgggcaatctctgaaaa

SEQ ID NO: 834509 - DNA, 33 bp, Homo sapien
ggaggcagtgaaagaaatgtcgattggcatgat

SEQ ID NO: 834510 - DNA, 33 bp, Homo sapien
ggaggcagtgaaagaagtgtcgattggcatgat

SEQ ID NO: 834511 - DNA, 33 bp, Homo sapien
caagtaattgtatgaaatatcaggatccagttt

SEQ ID NO: 834512 - DNA, 33 bp, Homo sapien
caagtaattgtatgaagtatcaggatccagttt

SEQ ID NO: 834513 - DNA, 33 bp, Homo sapien
tccagaaggtcttttgaaactggtaattaaatt

SEQ ID NO: 834514 - DNA, 33 bp, Homo sapien
tccagaaggtcttttgtaactggtaattaaatt

SEQ ID NO: 834515 - DNA, 33 bp, Homo sapien
ttttcaccagattaccactgactgttactgctc

SEQ ID NO: 834516 - DNA, 33 bp, Homo sapien
ttttcaccagattaccgctgactgttactgctc

SEQ ID NO: 834517 - DNA, 33 bp, Homo sapien
cctgttttagatacatgatatttgtgaccactg

SEQ ID NO: 834518 - DNA, 33 bp, Homo sapien
cctgttttagatacattatatttgtgaccactg

SEQ ID NO: 834519 - DNA, 33 bp, Homo sapien
tactgggcataactagaaggtgccatgggatgt

SEQ ID NO: 834520 - DNA, 33 bp, Homo sapien
tactgggcataactagcaggtgccatgggatgt

SEQ ID NO: 834521 - DNA, 33 bp, Homo sapien
tttgtggttaggaaaacagaaataagaacaaca

SEQ ID NO: 834522 - DNA, 33 bp, Homo sapien
tttgtggttaggaaaagagaaataagaacaaca

SEQ ID NO: 834523 - DNA, 33 bp, Homo sapien
gtgttaatgagggtcaaatgtgcctcgattcta

SEQ ID NO: 834524 - DNA, 33 bp, Homo sapien
gtgttaatgagggtcagatgtgcctcgattcta

SEQ ID NO: 834525 - DNA, 33 bp, Homo sapien
cttaatgcgggggttaaggacaccaatgcccaa

SEQ ID NO: 834526 - DNA, 33 bp, Homo sapien
cttaatgcgggggttagggacaccaatgcccaa

SEQ ID NO: 834527 - DNA, 33 bp, Homo sapien
tattgacaccaatgagacagtgttgcagttaaa

SEQ ID NO: 834528 - DNA, 33 bp, Homo sapien
tattgacaccaatgaggcagtgttgcagttaaa

SEQ ID NO: 834529 - DNA, 33 bp, Homo sapien
taaatggttgcaaaagaagggtaccagggcttt

SEQ ID NO: 834530 - DNA, 33 bp, Homo sapien
taaatggttgcaaaaggagggtaccagggcttt

SEQ ID NO: 834531 - DNA, 33 bp, Homo sapien
atctgctgcagtctatgaagtgattctgtgaaa

SEQ ID NO: 834532 - DNA, 33 bp, Homo sapien
atctgctgcagtctattaagtgattctgtgaaa

SEQ ID NO: 834533 - DNA, 33 bp, Homo sapien
ccacttacacatccaactgtcttcatctagagg

SEQ ID NO: 834534 - DNA, 33 bp, Homo sapien
ccacttacacatccaattgtcttcatctagagg

SEQ ID NO: 834535 - DNA, 33 bp, Homo sapien
caggatgtgccagttgaatcttatgatctaggc

SEQ ID NO: 834536 - DNA, 33 bp, Homo sapien
caggatgtgccagttgcatcttatgatctaggc

SEQ ID NO: 834537 - DNA, 33 bp, Homo sapien
gggctcttaatgatgtcaattataatggcacat

SEQ ID NO: 834538 - DNA, 33 bp, Homo sapien
gggctcttaatgatgtgaattataatggcacat

SEQ ID NO: 834539 - DNA, 33 bp, Homo sapien
ttttgggatggtagtccagaatttcacctatta

SEQ ID NO: 834540 - DNA, 33 bp, Homo sapien
ttttgggatggtagtctagaatttcacctatta

SEQ ID NO: 834541 - DNA, 33 bp, Homo sapien
cctaaggaatttccatgagatacaaagcaggta

SEQ ID NO: 834542 - DNA, 33 bp, Homo sapien
cctaaggaatttccattagatacaaagcaggta

SEQ ID NO: 834543 - DNA, 33 bp, Homo sapien; identical to SEQ ID NO: 834541

SEQ ID NO: 834544 - DNA, 33 bp, Homo sapien; identical to SEQ ID NO: 834542

SEQ ID NO: 834545 - DNA, 33 bp, Homo sapien
taggtaggtggggtcaacttaacatttggagaa

SEQ ID NO: 834546 - DNA, 33 bp, Homo sapien
taggtaggtggggtcagcttaacatttggagaa

SEQ ID NO: 834547 - DNA, 33 bp, Homo sapien
gattcaaagatgaaaaatcatgctgtcttccct

SEQ ID NO: 834548 - DNA, 33 bp, Homo sapien
gattcaaagatgaaaagtcatgctgtcttccct

SEQ ID NO: 834549 - DNA, 33 bp, Homo sapien
tgtcgatgagaggactcagctacaaagttgtta

SEQ ID NO: 834550 - DNA, 33 bp, Homo sapien
tgtcgatgagaggacttagctacaaagttgtta

SEQ ID NO: 834551 - DNA, 33 bp, Homo sapien
ggatgtgtaaaacaccaatcaggcatggtctac

SEQ ID NO: 834552 - DNA, 33 bp, Homo sapien
ggatgtgtaaaacaccgatcaggcatggtctac

SEQ ID NO: 834553 - DNA, 33 bp, Homo sapien
aatacacaaaatgatgaaagaaactgactttca

SEQ ID NO: 834554 - DNA, 33 bp, Homo sapien
aatacacaaaatgatggaagaaactgactttca

SEQ ID NO: 834555 - DNA, 33 bp, Homo sapien
tccccaacctaacagcagaaaagactgagaaat

SEQ ID NO: 834556 - DNA, 33 bp, Homo sapien
tccccaacctaacagcggaaaagactgagaaat

SEQ ID NO: 834557 - DNA, 33 bp, Homo sapien
tcaactagaaaaatcagatctcgatgttcccct

SEQ ID NO: 834558 - DNA, 33 bp, Homo sapien
tcaactagaaaaatcatatctcgatgttcccct

SEQ ID NO: 834559 - DNA, 33 bp, Homo sapien
cttctgcgaggttatggaaggccatgaccctga

SEQ ID NO: 834560 - DNA, 33 bp, Homo sapien
cttctgcgaggttatgtaaggccatgaccctga

SEQ ID NO: 834561 - DNA, 33 bp, Homo sapien
acacctctcaaacacactgtcctgtgcacggga

SEQ ID NO: 834562 - DNA, 33 bp, Homo sapien
acacctctcaaacacattgtcctgtgcacggga

SEQ ID NO: 834563 - DNA, 33 bp, Homo sapien
agctgtctcctcctggccattccgaaaccaccg

SEQ ID NO: 834564 - DNA, 33 bp, Homo sapien
agctgtctcctcctggtcattccgaaaccaccg

SEQ ID NO: 834565 - DNA, 33 bp, Homo sapien
agctgtttaaatcctccctgaaccatgaaatag

SEQ ID NO: 834566 - DNA, 33 bp, Homo sapien
agctgtttaaatcctctctgaaccatgaaatag

SEQ ID NO: 834567 - DNA, 33 bp, Homo sapien
taatcttgaggactgaagcaccaatactgtctt

SEQ ID NO: 834568 - DNA, 33 bp, Homo sapien
taatcttgaggactgaggcaccaatactgtctt

SEQ ID NO: 834569 - DNA, 33 bp, Homo sapien
atgttctatttcatcacactcagataataggta

SEQ ID NO: 834570 - DNA, 33 bp, Homo sapien
atgttctatttcatcagactcagataataggta

SEQ ID NO: 834571 - DNA, 33 bp, Homo sapien
ttcttcatttctttgaggcacagaagaacccat

SEQ ID NO: 834572 - DNA, 33 bp, Homo sapien
ttcttcatttctttgatgcacagaagaacccat

SEQ ID NO: 834573 - DNA, 33 bp, Homo sapien
cgtagtggtgaggaaactctggtgggtgaagac

SEQ ID NO: 834574 - DNA, 33 bp, Homo sapien
cgtagtggtgaggaaattctggtgggtgaagac

SEQ ID NO: 834575 - DNA, 33 bp, Homo sapien
aacagagactgaaaacacatcccaaagtaggag

SEQ ID NO: 834576 - DNA, 33 bp, Homo sapien
aacagagactgaaaacgcatcccaaagtaggag

SEQ ID NO: 834577 - DNA, 33 bp, Homo sapien
tttctcttcaatcacaatcttgcctagtaacct

SEQ ID NO: 834578 - DNA, 33 bp, Homo sapien
tttctcttcaatcacagtcttgcctagtaacct

SEQ ID NO: 834579 - DNA, 33 bp, Homo sapien
aattttatatttctaccggcagtttgaatggta

SEQ ID NO: 834580 - DNA, 33 bp, Homo sapien
aattttatatttctactggcagtttgaatggta

SEQ ID NO: 834581 - DNA, 33 bp, Homo sapien
tccaccaggcttgcaacgccctctacagtccag

SEQ ID NO: 834582 - DNA, 33 bp, Homo sapien
tccaccaggcttgcaatgccctctacagtccag

SEQ ID NO: 834583 - DNA, 33 bp, Homo sapien
caacatagggagacccagaagcagttcaaatgg

SEQ ID NO: 834584 - DNA, 33 bp, Homo sapien
caacatagggagacccggaagcagttcaaatgg

SEQ ID NO: 834585 - DNA, 33 bp, Homo sapien
agatctttgttagtcacatctgctcatggactc

SEQ ID NO: 834586 - DNA, 33 bp, Homo sapien
agatctttgttagtcatatctgctcatggactc

SEQ ID NO: 834587 - DNA, 33 bp, Homo sapien
atttcttgtataacacacagtgtactatcctta

SEQ ID NO: 834588 - DNA, 33 bp, Homo sapien
atttcttgtataacacccagtgtactatcctta

SEQ ID NO: 834589 - DNA, 33 bp, Homo sapien
tgaaagcagagatatagaaaataatgaagatga

SEQ ID NO: 834590 - DNA, 33 bp, Homo sapien
tgaaagcagagatatataaaataatgaagatga

SEQ ID NO: 834591 - DNA, 33 bp, Homo sapien
agttcaatgactttaacagtaatatgcgtatgt

SEQ ID NO: 834592 - DNA, 33 bp, Homo sapien
agttcaatgactttaatagtaatatgcgtatgt

SEQ ID NO: 834593 - DNA, 33 bp, Homo sapien
gcagaatctttcatcaatcataggctgacatta

SEQ ID NO: 834594 - DNA, 33 bp, Homo sapien
gcagaatctttcatcagtcataggctgacatta

SEQ ID NO: 834595 - DNA, 33 bp, Homo sapien
aatgagattttagcaaggctatttttgactatc

SEQ ID NO: 834596 - DNA, 33 bp, Homo sapien
aatgagattttagcaatgctatttttgactatc

SEQ ID NO: 834597 - DNA, 33 bp, Homo sapien
atcaaaacatttcaacaaatctaaaaagcagtg

SEQ ID NO: 834598 - DNA, 33 bp, Homo sapien
atcaaaacatttcaacgaatctaaaaagcagtg

SEQ ID NO: 834599 - DNA, 33 bp, Homo sapien
cactatcattattaaacacccctctaaccatca

SEQ ID NO: 834600 - DNA, 33 bp, Homo sapien
cactatcattattaaatacccctctaaccatca

SEQ ID NO: 834601 - DNA, 33 bp, Homo sapien
taaccatcagactaacaaagctgattaccaagt

SEQ ID NO: 834602 - DNA, 33 bp, Homo sapien
taaccatcagactaaccaagctgattaccaagt

SEQ ID NO: 834603 - DNA, 33 bp, Homo sapien
tatgtcttgaaagataaatttctcagagtaaat

SEQ ID NO: 834604 - DNA, 33 bp, Homo sapien
tatgtcttgaaagatacatttctcagagtaaat

SEQ ID NO: 834605 - DNA, 33 bp, Homo sapien
attaattgttgttaagaattatggtgattctgc

SEQ ID NO: 834606 - DNA, 33 bp, Homo sapien
attaattgttgttaaggattatggtgattctgc

SEQ ID NO: 834607 - DNA, 33 bp, Homo sapien
attctgctccatagcaacttcattaaaggacct

SEQ ID NO: 834608 - DNA, 33 bp, Homo sapien
attctgctccatagcagcttcattaaaggacct

SEQ ID NO: 834609 - DNA, 33 bp, Homo sapien
ttatctaatggtcaaagatacttacaattgtac

SEQ ID NO: 834610 - DNA, 33 bp, Homo sapien
ttatctaatggtcaaatatacttacaattgtac

SEQ ID NO: 834611 - DNA, 33 bp, Homo sapien
tgctgaaactgggtcaagataatgatagtaaac

SEQ ID NO: 834612 - DNA, 33 bp, Homo sapien
tgctgaaactgggtcaggataatgatagtaaac

SEQ ID NO: 834613 - DNA, 33 bp, Homo sapien
tcatcataatctattacagtccacttttattgc

SEQ ID NO: 834614 - DNA, 33 bp, Homo sapien
tcatcataatctattagagtccacttttattgc

SEQ ID NO: 834615 - DNA, 33 bp, Homo sapien
ccaccttggatacataagtgagcttggccaagg

SEQ ID NO: 834616 - DNA, 33 bp, Homo sapien
ccaccttggatacataggtgagcttggccaagg

SEQ ID NO: 834617 - DNA, 33 bp, Homo sapien
cacctagctgacccagacatataagcatattgt

SEQ ID NO: 834618 - DNA, 33 bp, Homo sapien
cacctagctgacccaggcatataagcatattgt

SEQ ID NO: 834619 - DNA, 33 bp, Homo sapien
caacagatgactaatacactaactaatgtacct

SEQ ID NO: 834620 - DNA, 33 bp, Homo sapien
caacagatgactaatatactaactaatgtacct

SEQ ID NO: 834621 - DNA, 33 bp, Homo sapien
cactcttgccttcctaacactcacgtaccattt

SEQ ID NO: 834622 - DNA, 33 bp, Homo sapien
cactcttgccttcctagcactcacgtaccattt

SEQ ID NO: 834623 - DNA, 33 bp, Homo sapien
agtaggagttcaagtcacaatttatttatttat

SEQ ID NO: 834624 - DNA, 33 bp, Homo sapien
agtaggagttcaagtctcaatttatttatttat

SEQ ID NO: 834625 - DNA, 33 bp, Homo sapien
actcagtgtgctgaacaaaaattcccaagaaga

SEQ ID NO: 834626 - DNA, 33 bp, Homo sapien
actcagtgtgctgaacgaaaattcccaagaaga

SEQ ID NO: 834627 - DNA, 33 bp, Homo sapien
actgagtcccaatgggcaactgattgcctcttt

SEQ ID NO: 834628 - DNA, 33 bp, Homo sapien
actgagtcccaatgggtaactgattgcctcttt

SEQ ID NO: 834629 - DNA, 33 bp, Homo sapien
tcaaatcaacaatctcactacacactcttatca

SEQ ID NO: 834630 - DNA, 33 bp, Homo sapien
tcaaatcaacaatctcgctacacactcttatca

SEQ ID NO: 834631 - DNA, 33 bp, Homo sapien
atacaatgctttatcacacaagaccttcaaatc

SEQ ID NO: 834632 - DNA, 33 bp, Homo sapien
atacaatgctttatcatacaagaccttcaaatc

SEQ ID NO: 834633 - DNA, 33 bp, Homo sapien
cattagttgagtttaacgtttgccaaaagttgc

SEQ ID NO: 834634 - DNA, 33 bp, Homo sapien
cattagttgagtttaatgtttgccaaaagttgc

SEQ ID NO: 834635 - DNA, 33 bp, Homo sapien
gctttggaaataataaagataagttgtctaata

SEQ ID NO: 834636 - DNA, 33 bp, Homo sapien
gctttggaaataataacgataagttgtctaata

SEQ ID NO: 834637 - DNA, 33 bp, Homo sapien
cccacctagatgaaaaagcgtgaaagtggagtc

SEQ ID NO: 834638 - DNA, 33 bp, Homo sapien
cccacctagatgaaaatgcgtgaaagtggagtc

SEQ ID NO: 834639 - DNA, 33 bp, Homo sapien
atctagtatttcataactgtccaatctgattat

SEQ ID NO: 834640 - DNA, 33 bp, Homo sapien
atctagtatttcataattgtccaatctgattat

SEQ ID NO: 834641 - DNA, 33 bp, Homo sapien
gatctatacctgaaaacgttcataacaaaagag

SEQ ID NO: 834642 - DNA, 33 bp, Homo sapien
gatctatacctgaaaatgttcataacaaaagag

SEQ ID NO: 834643 - DNA, 33 bp, Homo sapien
ctaattttgccaaccacattttccttgatgact

SEQ ID NO: 834644 - DNA, 33 bp, Homo sapien
ctaattttgccaaccatattttccttgatgact

SEQ ID NO: 834645 - DNA, 33 bp, Homo sapien
atatatgtagttcttacacaactgaagcttcat

SEQ ID NO: 834646 - DNA, 33 bp, Homo sapien
atatatgtagttcttatacaactgaagcttcat

SEQ ID NO: 834647 - DNA, 33 bp, Homo sapien
cattttgataatctgaagaaagcttagcttgag

SEQ ID NO: 834648 - DNA, 33 bp, Homo sapien
cattttgataatctgacgaaagcttagcttgag

SEQ ID NO: 834649 - DNA, 33 bp, Homo sapien
gcatagcacaataaaaagaggcattcctgttgc

SEQ ID NO: 834650 - DNA, 33 bp, Homo sapien
gcatagcacaataaaatgaggcattcctgttgc

SEQ ID NO: 834651 - DNA, 33 bp, Homo sapien
ctatcagcaaaaagatcataactcactaaaggc

SEQ ID NO: 834652 - DNA, 33 bp, Homo sapien
ctatcagcaaaaagattataactcactaaaggc

SEQ ID NO: 834653 - DNA, 33 bp, Homo sapien
acttttttagacataaggccatttcacacttaa

SEQ ID NO: 834654 - DNA, 33 bp, Homo sapien
acttttttagacataatgccatttcacacttaa

SEQ ID NO: 834655 - DNA, 33 bp, Homo sapien
acctgggagaaaaggaagtcagttctcagtaag

SEQ ID NO: 834656 - DNA, 33 bp, Homo sapien
acctgggagaaaaggaggtcagttctcagtaag

SEQ ID NO: 834657 - DNA, 33 bp, Homo sapien
tacttgttgagttgaactgaaattcttaattca

SEQ ID NO: 834658 - DNA, 33 bp, Homo sapien
tacttgttgagttgaagtgaaattcttaattca

SEQ ID NO: 834659 - DNA, 33 bp, Homo sapien
aaagacatgaaaggaaatgtagtttggtttgat

SEQ ID NO: 834660 - DNA, 33 bp, Homo sapien
aaagacatgaaaggaagtgtagtttggtttgat

SEQ ID NO: 834661 - DNA, 33 bp, Homo sapien
atcctcggataagctcactgcccattagaggaa

SEQ ID NO: 834662 - DNA, 33 bp, Homo sapien
atcctcggataagctcgctgcccattagaggaa

SEQ ID NO: 834663 - DNA, 33 bp, Homo sapien
tgaaaagtggaagctcaactggttttttaattt

SEQ ID NO: 834664 - DNA, 33 bp, Homo sapien
tgaaaagtggaagctcgactggttttttaattt

SEQ ID NO: 834665 - DNA, 33 bp, Homo sapien
aacaattatagggtacaagaaagactattacaa

SEQ ID NO: 834666 - DNA, 33 bp, Homo sapien
aacaattatagggtacgagaaagactattacaa

SEQ ID NO: 834667 - DNA, 33 bp, Homo sapien
ttataagttttgacccacagagtgcactgagaa

SEQ ID NO: 834668 - DNA, 33 bp, Homo sapien
ttataagttttgacccgcagagtgcactgagaa

SEQ ID NO: 834669 - DNA, 33 bp, Homo sapien
ttctcaagagatttccagatcttctcatggtaa

SEQ ID NO: 834670 - DNA, 33 bp, Homo sapien
ttctcaagagatttccggatcttctcatggtaa

SEQ ID NO: 834671 - DNA, 33 bp, Homo sapien
atgatctggggaatgacatgaaattggcctaaa

SEQ ID NO: 834672 - DNA, 33 bp, Homo sapien
atgatctggggaatgatatgaaattggcctaaa

SEQ ID NO: 834673 - DNA, 33 bp, Homo sapien
cccagatcatatttcaagtccagtaacacagga

SEQ ID NO: 834674 - DNA, 33 bp, Homo sapien
cccagatcatatttcatgtccagtaacacagga

SEQ ID NO: 834675 - DNA, 33 bp, Homo sapien
agtgacaatggaaaacagatagaagtagaagct

SEQ ID NO: 834676 - DNA, 33 bp, Homo sapien
agtgacaatggaaaacggatagaagtagaagct

SEQ ID NO: 834677 - DNA, 33 bp, Homo sapien
gcatacacattctttacagttgcattcctgaga

SEQ ID NO: 834678 - DNA, 33 bp, Homo sapien
gcatacacattctttatagttgcattcctgaga

SEQ ID NO: 834679 - DNA, 33 bp, Homo sapien
taatatatggtagaaaaaataagatggagaaca

SEQ ID NO: 834680 - DNA, 33 bp, Homo sapien
taatatatggtagaaacaataagatggagaaca

SEQ ID NO: 834681 - DNA, 33 bp, Homo sapien
acaccagccatgtggaacacctcagcctccaga

SEQ ID NO: 834682 - DNA, 33 bp, Homo sapien
acaccagccatgtggagcacctcagcctccaga

SEQ ID NO: 834683 - DNA, 33 bp, Homo sapien
acttccagtgtgcagacgtctacaccagccatg

SEQ ID NO: 834684 - DNA, 33 bp, Homo sapien
acttccagtgtgcagatgtctacaccagccatg

SEQ ID NO: 834685 - DNA, 33 bp, Homo sapien
aaagcttcctccattaagagggtcagagcctcg

SEQ ID NO: 834686 - DNA, 33 bp, Homo sapien
aaagcttcctccattatgagggtcagagcctcg

SEQ ID NO: 834687 - DNA, 33 bp, Homo sapien
gggtctgggtcacagcccatcttccccatttcc

SEQ ID NO: 834688 - DNA, 33 bp, Homo sapien
gggtctgggtcacagctcatcttccccatttcc

SEQ ID NO: 834689 - DNA, 33 bp, Homo sapien
ctgcgaaacccgtccaagcgaaattgagttctt

SEQ ID NO: 834690 - DNA, 33 bp, Homo sapien
ctgcgaaacccgtccacgcgaaattgagttctt

SEQ ID NO: 834691 - DNA, 33 bp, Homo sapien
agctcttgggaatctcagagacagagttatcca

SEQ ID NO: 834692 - DNA, 33 bp, Homo sapien
agctcttgggaatctcggagacagagttatcca

SEQ ID NO: 834693 - DNA, 33 bp, Homo sapien
aatcttcacagaaaaacgtctgcccagaggcag

SEQ ID NO: 834694 - DNA, 33 bp, Homo sapien
aatcttcacagaaaaatgtctgcccagaggcag

SEQ ID NO: 834695 - DNA, 33 bp, Homo sapien
ctattagacactctgaagagccttaagttttgg

SEQ ID NO: 834696 - DNA, 33 bp, Homo sapien
ctattagacactctgaggagccttaagttttgg

SEQ ID NO: 834697 - DNA, 33 bp, Homo sapien
ttatgtgtaactatcaagctaataggaggaaca

SEQ ID NO: 834698 - DNA, 33 bp, Homo sapien
ttatgtgtaactatcaggctaataggaggaaca

SEQ ID NO: 834699 - DNA, 33 bp, Homo sapien
cacctcagcgtccctcagaatagaggcctctgg

SEQ ID NO: 834700 - DNA, 33 bp, Homo sapien
cacctcagcgtccctcggaatagaggcctctgg

SEQ ID NO: 834701 - DNA, 33 bp, Homo sapien
cacctgggaaaaacacaaatcacaggagcatct

SEQ ID NO: 834702 - DNA, 33 bp, Homo sapien
cacctgggaaaaacacgaatcacaggagcatct

SEQ ID NO: 834703 - DNA, 33 bp, Homo sapien
tctgtgagaatagaaaatgaatcttttgggaag

SEQ ID NO: 834704 - DNA, 33 bp, Homo sapien
tctgtgagaatagaaagtgaatcttttgggaag

SEQ ID NO: 834705 - DNA, 33 bp, Homo sapien
taggatgcttttgcagaaattaacttgagtgga

SEQ ID NO: 834706 - DNA, 33 bp, Homo sapien
taggatgcttttgcagtaattaacttgagtgga

SEQ ID NO: 834707 - DNA, 33 bp, Homo sapien
agttttattacttacaaatcagtagcaagggac

SEQ ID NO: 834708 - DNA, 33 bp, Homo sapien
agttttattacttacagatcagtagcaagggac

SEQ ID NO: 834709 - DNA, 33 bp, Homo sapien
ccaatattacttcaaaactgtacaaacctatat

SEQ ID NO: 834710 - DNA, 33 bp, Homo sapien
ccaatattacttcaaagctgtacaaacctatat

SEQ ID NO: 834711 - DNA, 33 bp, Homo sapien
attaaagcatcaccaaatccatgtattttgtct

SEQ ID NO: 834712 - DNA, 33 bp, Homo sapien
attaaagcatcaccaagtccatgtattttgtct

SEQ ID NO: 834713 - DNA, 33 bp, Homo sapien
ttcttcacttcttcaaagtacataagggcccac

SEQ ID NO: 834714 - DNA, 33 bp, Homo sapien
ttcttcacttcttcaaggtacataagggcccac

SEQ ID NO: 834715 - DNA, 33 bp, Homo sapien
ggtgtcatgacaatcaagtatatttcaaaaaac

SEQ ID NO: 834716 - DNA, 33 bp, Homo sapien
ggtgtcatgacaatcaggtatatttcaaaaaac

SEQ ID NO: 834717 - DNA, 33 bp, Homo sapien
aagtcctgtaatttggcatgaaggcactgcgaa

SEQ ID NO: 834718 - DNA, 33 bp, Homo sapien
aagtcctgtaatttggtatgaaggcactgcgaa

SEQ ID NO: 834719 - DNA, 33 bp, Homo sapien
tcaggaaattaattaacacagcaaaatcgacat

SEQ ID NO: 834720 - DNA, 33 bp, Homo sapien
tcaggaaattaattaagacagcaaaatcgacat

SEQ ID NO: 834721 - DNA, 33 bp, Homo sapien
gacattaaattttaaagctggaaataatgtctt

SEQ ID NO: 834722 - DNA, 33 bp, Homo sapien
gacattaaattttaaatctggaaataatgtctt

SEQ ID NO: 834723 - DNA, 33 bp, Homo sapien
gctctctgtcagaatacgcaattagtaggtctc

SEQ ID NO: 834724 - DNA, 33 bp, Homo sapien
gctctctgtcagaatatgcaattagtaggtctc

SEQ ID NO: 834725 - DNA, 33 bp, Homo sapien
gctgattaaataattcaatgagctttactcaac

SEQ ID NO: 834726 - DNA, 33 bp, Homo sapien
gctgattaaataattcgatgagctttactcaac

SEQ ID NO: 834727 - DNA, 33 bp, Homo sapien
caaatttagtgtcctcggaacacaaacaccctc

SEQ ID NO: 834728 - DNA, 33 bp, Homo sapien
caaatttagtgtcctctgaacacaaacaccctc

SEQ ID NO: 834729 - DNA, 33 bp, Homo sapien
acactaaatttgagtccctgcatgcatcacaca

SEQ ID NO: 834730 - DNA, 33 bp, Homo sapien
acactaaatttgagtctctgcatgcatcacaca

SEQ ID NO: 834731 - DNA, 33 bp, Homo sapien
catcacacaagtcttcacccaaactaccatttg

SEQ ID NO: 834732 - DNA, 33 bp, Homo sapien
catcacacaagtcttcgcccaaactaccatttg

SEQ ID NO: 834733 - DNA, 33 bp, Homo sapien
tcacttcttagccccaaccctactgagaacgca

SEQ ID NO: 834734 - DNA, 33 bp, Homo sapien
tcacttcttagccccacccctactgagaacgca

SEQ ID NO: 834735 - DNA, 33 bp, Homo sapien
ttgatttagaggaaccaggtgtctgctggagaa

SEQ ID NO: 834736 - DNA, 33 bp, Homo sapien
ttgatttagaggaacccggtgtctgctggagaa

SEQ ID NO: 834737 - DNA, 33 bp, Homo sapien
gacaaaggatacagacgaacagattgataaaga

SEQ ID NO: 834738 - DNA, 33 bp, Homo sapien
gacaaaggatacagactaacagattgataaaga

SEQ ID NO: 834739 - DNA, 33 bp, Homo sapien
catactcagaagttaacaagaactttggggaga

SEQ ID NO: 834740 - DNA, 33 bp, Homo sapien
catactcagaagttaagaagaactttggggaga

SEQ ID NO: 834741 - DNA, 33 bp, Homo sapien
tctctctatctgaagacgtggcttactgtaaca

SEQ ID NO: 834742 - DNA, 33 bp, Homo sapien
tctctctatctgaagatgtggcttactgtaaca

SEQ ID NO: 834743 - DNA, 33 bp, Homo sapien
taaatgattccacttacataacactcctggaat

SEQ ID NO: 834744 - DNA, 33 bp, Homo sapien
taaatgattccacttatataacactcctggaat

SEQ ID NO: 834745 - DNA, 33 bp, Homo sapien
gggaaactgttggtcccgaaatctgtagggtgg

SEQ ID NO: 834746 - DNA, 33 bp, Homo sapien
gggaaactgttggtcctgaaatctgtagggtgg

SEQ ID NO: 834747 - DNA, 33 bp, Homo sapien
ttcctggtgtggactgaatatgccgtcccaaaa

SEQ ID NO: 834748 - DNA, 33 bp, Homo sapien
ttcctggtgtggactgtatatgccgtcccaaaa

SEQ ID NO: 834749 - DNA, 33 bp, Homo sapien
gcaggccttcaccagaaccctaccaggctgaca

SEQ ID NO: 834750 - DNA, 33 bp, Homo sapien
gcaggccttcaccagatccctaccaggctgaca

SEQ ID NO: 834751 - DNA, 33 bp, Homo sapien
cccaggcactgataaacgtatctaggttgtttc

SEQ ID NO: 834752 - DNA, 33 bp, Homo sapien
cccaggcactgataaaggtatctaggttgtttc

SEQ ID NO: 834753 - DNA, 33 bp, Homo sapien
gcccttagctggatgacgattcccaccagaagg

SEQ ID NO: 834754 - DNA, 33 bp, Homo sapien
gcccttagctggatgatgattcccaccagaagg

SEQ ID NO: 834755 - DNA, 33 bp, Homo sapien
aggaagattagcccaaataggaaggctgcaatg

SEQ ID NO: 834756 - DNA, 33 bp, Homo sapien
aggaagattagcccaagtaggaaggctgcaatg

SEQ ID NO: 834757 - DNA, 33 bp, Homo sapien
aacttggacatgtctacacctgccttgtcgatc

SEQ ID NO: 834758 - DNA, 33 bp, Homo sapien
aacttggacatgtctatacctgccttgtcgatc

SEQ ID NO: 834759 - DNA, 33 bp, Homo sapien
tgtctcatttttcctcccttcctagtgcaacca

SEQ ID NO: 834760 - DNA, 33 bp, Homo sapien
tgtctcatttttcctctcttcctagtgcaacca

SEQ ID NO: 834761 - DNA, 33 bp, Homo sapien
ttctgaggtactcccacaattactgcttctctt

SEQ ID NO: 834762 - DNA, 33 bp, Homo sapien
ttctgaggtactcccataattactgcttctctt

SEQ ID NO: 834763 - DNA, 33 bp, Homo sapien
cgtgtatcttgttacaataacacaaatggacta

SEQ ID NO: 834764 - DNA, 33 bp, Homo sapien
cgtgtatcttgttacactaacacaaatggacta

SEQ ID NO: 834765 - DNA, 33 bp, Homo sapien
cacaaatggactaagacagagagcataaggctt

SEQ ID NO: 834766 - DNA, 33 bp, Homo sapien
cacaaatggactaagatagagagcataaggctt

SEQ ID NO: 834767 - DNA, 33 bp, Homo sapien
agatggttgcaagggactcagctgagaacaagg

SEQ ID NO: 834768 - DNA, 33 bp, Homo sapien
agatggttgcaagggagtcagctgagaacaagg

SEQ ID NO: 834769 - DNA, 33 bp, Homo sapien
tttactaagggtcataaaacagtaaaaggttgc

SEQ ID NO: 834770 - DNA, 33 bp, Homo sapien
tttactaagggtcatagaacagtaaaaggttgc

SEQ ID NO: 834771 - DNA, 33 bp, Homo sapien
acataataatagctaacgtttgtcaattgctta

SEQ ID NO: 834772 - DNA, 33 bp, Homo sapien
acataataatagctaatgtttgtcaattgctta

SEQ ID NO: 834773 - DNA, 33 bp, Homo sapien
cagggatagccacttggaatccacatggcaatt

SEQ ID NO: 834774 - DNA, 33 bp, Homo sapien
cagggatagccacttgtaatccacatggcaatt

SEQ ID NO: 834775 - DNA, 33 bp, Homo sapien
aatgcaacattgtacacatcactggttgttggg

SEQ ID NO: 834776 - DNA, 33 bp, Homo sapien
aatgcaacattgtacatatcactggttgttggg

SEQ ID NO: 834777 - DNA, 33 bp, Homo sapien
aggtcgtgtccctgtaacttgatgtttgctgtt

SEQ ID NO: 834778 - DNA, 33 bp, Homo sapien
aggtcgtgtccctgtagcttgatgtttgctgtt

SEQ ID NO: 834779 - DNA, 33 bp, Homo sapien
ctctgcagcccataagcaatgttgttcctcaca

SEQ ID NO: 834780 - DNA, 33 bp, Homo sapien
ctctgcagcccataagtaatgttgttcctcaca

SEQ ID NO: 834781 - DNA, 33 bp, Homo sapien
tatcttaccctccttacgagcaggtacaaggcg

SEQ ID NO: 834782 - DNA, 33 bp, Homo sapien
tatcttaccctccttatgagcaggtacaaggcg

SEQ ID NO: 834783 - DNA, 33 bp, Homo sapien
gagaaaagcatccccaagtcctggcatacgggt

SEQ ID NO: 834784 - DNA, 33 bp, Homo sapien
gagaaaagcatccccaggtcctggcatacgggt

SEQ ID NO: 834785 - DNA, 33 bp, Homo sapien
actagacacaatagaaaactacaatagaaggga

SEQ ID NO: 834786 - DNA, 33 bp, Homo sapien
actagacacaatagaagactacaatagaaggga

SEQ ID NO: 834787 - DNA, 33 bp, Homo sapien
ccaactcgaaggatgaaagatgggaatcacatg

SEQ ID NO: 834788 - DNA, 33 bp, Homo sapien
ccaactcgaaggatgacagatgggaatcacatg

SEQ ID NO: 834789 - DNA, 33 bp, Homo sapien
aatctgtacaacatataactgcacctaacactg

SEQ ID NO: 834790 - DNA, 33 bp, Homo sapien
aatctgtacaacatatgactgcacctaacactg

SEQ ID NO: 834791 - DNA, 33 bp, Homo sapien
actaaaaatataaaagccaaccaggcatagtgg

SEQ ID NO: 834792 - DNA, 33 bp, Homo sapien
actaaaaatataaaagtcaaccaggcatagtgg

SEQ ID NO: 834793 - DNA, 33 bp, Homo sapien
gcaaagacacctagaaccagttaaaagagacta

SEQ ID NO: 834794 - DNA, 33 bp, Homo sapien
gcaaagacacctagaatcagttaaaagagacta

SEQ ID NO: 834795 - DNA, 33 bp, Homo sapien
agagtcatagaacaagacacatgggagtatggt

SEQ ID NO: 834796 - DNA, 33 bp, Homo sapien
agagtcatagaacaaggcacatgggagtatggt

SEQ ID NO: 834797 - DNA, 33 bp, Homo sapien
ggggacacaaagaaccacagtcattaacctgaa

SEQ ID NO: 834798 - DNA, 33 bp, Homo sapien
ggggacacaaagaaccgcagtcattaacctgaa

SEQ ID NO: 834799 - DNA, 33 bp, Homo sapien
tttgtgaagagtaaaacgctccccagacaaggt

SEQ ID NO: 834800 - DNA, 33 bp, Homo sapien
tttgtgaagagtaaaatgctccccagacaaggt

SEQ ID NO: 834801 - DNA, 33 bp, Homo sapien
ccatttcccagtaaagaaggagtgggagcaggg

SEQ ID NO: 834802 - DNA, 33 bp, Homo sapien
ccatttcccagtaaaggaggagtgggagcaggg

SEQ ID NO: 834803 - DNA, 33 bp, Homo sapien
atcaaggtcgttgggacggaagtaaccttatct

SEQ ID NO: 834804 - DNA, 33 bp, Homo sapien
atcaaggtcgttgggatggaagtaaccttatct

SEQ ID NO: 834805 - DNA, 33 bp, Homo sapien
acatgcctggcttatacgctgcatccacataac

SEQ ID NO: 834806 - DNA, 33 bp, Homo sapien
acatgcctggcttatatgctgcatccacataac

SEQ ID NO: 834807 - DNA, 33 bp, Homo sapien
tccgtattgcccaagaaccccattgagctttgc

SEQ ID NO: 834808 - DNA, 33 bp, Homo sapien
tccgtattgcccaagagccccattgagctttgc

SEQ ID NO: 834809 - DNA, 33 bp, Homo sapien
aaacaacactgggtcaaagagaaaatatggtta

SEQ ID NO: 834810 - DNA, 33 bp, Homo sapien
aaacaacactgggtcagagagaaaatatggtta

SEQ ID NO: 834811 - DNA, 33 bp, Homo sapien
tcactatcctatggcccggagccaattattttt

SEQ ID NO: 834812 - DNA, 33 bp, Homo sapien
tcactatcctatggcctggagccaattattttt

SEQ ID NO: 834813 - DNA, 33 bp, Homo sapien
gtgatcacagctcacaataagctcaaactcctg

SEQ ID NO: 834814 - DNA, 33 bp, Homo sapien
gtgatcacagctcacagtaagctcaaactcctg

SEQ ID NO: 834815 - DNA, 33 bp, Homo sapien
tggtataagtgtacaacagttggtttaaccatt

SEQ ID NO: 834816 - DNA, 33 bp, Homo sapien
tggtataagtgtacaatagttggtttaaccatt

SEQ ID NO: 834817 - DNA, 33 bp, Homo sapien
ctgatcacagatattacagatgtaagagatcac

SEQ ID NO: 834818 - DNA, 33 bp, Homo sapien
ctgatcacagatattatagatgtaagagatcac

SEQ ID NO: 834819 - DNA, 33 bp, Homo sapien
ctgagacatcaactgaggattattttcctcagg

SEQ ID NO: 834820 - DNA, 33 bp, Homo sapien
ctgagacatcaactgatgattattttcctcagg

SEQ ID NO: 834821 - DNA, 33 bp, Homo sapien
taaatgattagaagaaacaggacttaaaaagaa

SEQ ID NO: 834822 - DNA, 33 bp, Homo sapien
taaatgattagaagaagcaggacttaaaaagaa

SEQ ID NO: 834823 - DNA, 33 bp, Homo sapien
aacaggcctgtgttgcccattagtcacaagggg

SEQ ID NO: 834824 - DNA, 33 bp, Homo sapien
aacaggcctgtgttgctcattagtcacaagggg

SEQ ID NO: 834825 - DNA, 33 bp, Homo sapien
cacataaatatgccataagaaaaaaatgtttac

SEQ ID NO: 834826 - DNA, 33 bp, Homo sapien
cacataaatatgccatgagaaaaaaatgtttac

SEQ ID NO: 834827 - DNA, 33 bp, Homo sapien
tttattactaacacgtaaactttatcttaaaat

SEQ ID NO: 834828 - DNA, 33 bp, Homo sapien
tttattactaacacgtgaactttatcttaaaat

SEQ ID NO: 834829 - DNA, 33 bp, Homo sapien
accacggtgttaggaccccctgcattccagagg

SEQ ID NO: 834830 - DNA, 33 bp, Homo sapien
accacggtgttaggactccctgcattccagagg

SEQ ID NO: 834831 - DNA, 33 bp, Homo sapien
tggggtaacacaagaaagaggaagaatagctca

SEQ ID NO: 834832 - DNA, 33 bp, Homo sapien
tggggtaacacaagaaggaggaagaatagctca

SEQ ID NO: 834833 - DNA, 33 bp, Homo sapien
aataaaactgttaatcactcatatgttcaattc

SEQ ID NO: 834834 - DNA, 33 bp, Homo sapien
aataaaactgttaatcgctcatatgttcaattc

SEQ ID NO: 834835 - DNA, 33 bp, Homo sapien
aattttatatgtgaaacgaagttgtgttaagta

SEQ ID NO: 834836 - DNA, 33 bp, Homo sapien
aattttatatgtgaaatgaagttgtgttaagta

SEQ ID NO: 834837 - DNA, 33 bp, Homo sapien
tctgctcagggaaatacctgaatctagaatatc

SEQ ID NO: 834838 - DNA, 33 bp, Homo sapien
tctgctcagggaaatatctgaatctagaatatc

SEQ ID NO: 834839 - DNA, 33 bp, Homo sapien
ctagttaatggggatacgcaatttgactgtaga

SEQ ID NO: 834840 - DNA, 33 bp, Homo sapien
ctagttaatggggatatgcaatttgactgtaga

SEQ ID NO: 834841 - DNA, 33 bp, Homo sapien
ctgcattcagggtatgaaagaaataactgtcta

SEQ ID NO: 834842 - DNA, 33 bp, Homo sapien
ctgcattcagggtatggaagaaataactgtcta

SEQ ID NO: 834843 - DNA, 33 bp, Homo sapien
ggagatctagatgtagaaggtacacaagtagta

SEQ ID NO: 834844 - DNA, 33 bp, Homo sapien
ggagatctagatgtaggaggtacacaagtagta

SEQ ID NO: 834845 - DNA, 33 bp, Homo sapien
aacctggttggggctcaatacctcttcggtccc

SEQ ID NO: 834846 - DNA, 33 bp, Homo sapien
aacctggttggggctccatacctcttcggtccc

SEQ ID NO: 834847 - DNA, 33 bp, Homo sapien
tctggctctgcttctacgtctagctgcagtcct

SEQ ID NO: 834848 - DNA, 33 bp, Homo sapien
tctggctctgcttctatgtctagctgcagtcct

SEQ ID NO: 834849 - DNA, 33 bp, Homo sapien
tggaaatatctgatgacgtgactatgtcttagt

SEQ ID NO: 834850 - DNA, 33 bp, Homo sapien
tggaaatatctgatgatgtgactatgtcttagt

SEQ ID NO: 834851 - DNA, 33 bp, Homo sapien
cttgtttcacttcccactccttctgcacagttt

SEQ ID NO: 834852 - DNA, 33 bp, Homo sapien
cttgtttcacttcccattccttctgcacagttt

SEQ ID NO: 834853 - DNA, 33 bp, Homo sapien
ggcggccattttagacacagtaaccgaggttgg

SEQ ID NO: 834854 - DNA, 33 bp, Homo sapien
ggcggccattttagacgcagtaaccgaggttgg

SEQ ID NO: 834855 - DNA, 33 bp, Homo sapien
aacccacccacccaaagaaagcaaaagatttaa

SEQ ID NO: 834856 - DNA, 33 bp, Homo sapien
aacccacccacccaaataaagcaaaagatttaa

SEQ ID NO: 834857 - DNA, 33 bp, Homo sapien
cagaaggtccaaagccagaagggcctaaagcag

SEQ ID NO: 834858 - DNA, 33 bp, Homo sapien
cagaaggtccaaagccggaagggcctaaagcag

SEQ ID NO: 834859 - DNA, 33 bp, Homo sapien
gaccctacagagccccacaactatttaaccaat

SEQ ID NO: 834860 - DNA, 33 bp, Homo sapien
gaccctacagagccccgcaactatttaaccaat

SEQ ID NO: 834861 - DNA, 33 bp, Homo sapien
tggattgacacaggtacaagaacgaaactaggg

SEQ ID NO: 834862 - DNA, 33 bp, Homo sapien
tggattgacacaggtagaagaacgaaactaggg

SEQ ID NO: 834863 - DNA, 33 bp, Homo sapien
atatatgtccctgctccagcaaatgaaagagcc

SEQ ID NO: 834864 - DNA, 33 bp, Homo sapien
atatatgtccctgctctagcaaatgaaagagcc

SEQ ID NO: 834865 - DNA, 33 bp, Homo sapien
agaagagagagagtaaatgtattccaccaagaa

SEQ ID NO: 834866 - DNA, 33 bp, Homo sapien
agaagagagagagtaagtgtattccaccaagaa

SEQ ID NO: 834867 - DNA, 33 bp, Homo sapien
ttaaagccccagctgactaaaacaaaatgtagt

SEQ ID NO: 834868 - DNA, 33 bp, Homo sapien
ttaaagccccagctgagtaaaacaaaatgtagt

SEQ ID NO: 834869 - DNA, 33 bp, Homo sapien
ggagaattctggggaacatagtgtggctattgc

SEQ ID NO: 834870 - DNA, 33 bp, Homo sapien
ggagaattctggggaagatagtgtggctattgc

SEQ ID NO: 834871 - DNA, 33 bp, Homo sapien
ttcccaactttgggaacaaacttcttctgaggc

SEQ ID NO: 834872 - DNA, 33 bp, Homo sapien
ttcccaactttgggaataaacttcttctgaggc

SEQ ID NO: 834873 - DNA, 33 bp, Homo sapien
ctcacaagctggtctccattcgctgctgagtag

SEQ ID NO: 834874 - DNA, 33 bp, Homo sapien
ctcacaagctggtctctattcgctgctgagtag

SEQ ID NO: 834875 - DNA, 33 bp, Homo sapien
catttcttccttatgaccaatctgcaagttaag

SEQ ID NO: 834876 - DNA, 33 bp, Homo sapien
catttcttccttatgatcaatctgcaagttaag

SEQ ID NO: 834877 - DNA, 33 bp, Homo sapien
ttgtcttgtgtgacaaacctaaatacaaacaaa

SEQ ID NO: 834878 - DNA, 33 bp, Homo sapien
ttgtcttgtgtgacaaccctaaatacaaacaaa

SEQ ID NO: 834879 - DNA, 33 bp, Homo sapien
tgtgtagttagagcagaaatcaagatctcaaca

SEQ ID NO: 834880 - DNA, 33 bp, Homo sapien
tgtgtagttagagcaggaatcaagatctcaaca

SEQ ID NO: 834881 - DNA, 33 bp, Homo sapien
tgatggaagtggaggaaaatcatctcaggcaaa

SEQ ID NO: 834882 - DNA, 33 bp, Homo sapien
tgatggaagtggaggagaatcatctcaggcaaa

SEQ ID NO: 834883 - DNA, 33 bp, Homo sapien
tgatttcaacttattccctcttaagaagcccat

SEQ ID NO: 834884 - DNA, 33 bp, Homo sapien
tgatttcaacttattctctcttaagaagcccat

SEQ ID NO: 834885 - DNA, 33 bp, Homo sapien
cacatagtttatgtcaagaccaaaatgagcaat

SEQ ID NO: 834886 - DNA, 33 bp, Homo sapien
cacatagtttatgtcaggaccaaaatgagcaat

SEQ ID NO: 834887 - DNA, 33 bp, Homo sapien
ggtagagtcggtctgcaaggtatctcgtaagag

SEQ ID NO: 834888 - DNA, 33 bp, Homo sapien
ggtagagtcggtctgcgaggtatctcgtaagag

SEQ ID NO: 834889 - DNA, 33 bp, Homo sapien
aaggacacagtgcaaacaccaccaaagcattta

SEQ ID NO: 834890 - DNA, 33 bp, Homo sapien
aaggacacagtgcaaataccaccaaagcattta

SEQ ID NO: 834891 - DNA, 33 bp, Homo sapien
cctttcatataccaccaactccttcctttctct

SEQ ID NO: 834892 - DNA, 33 bp, Homo sapien
cctttcatataccaccgactccttcctttctct

SEQ ID NO: 834893 - DNA, 33 bp, Homo sapien
cagtttggccgttgcgcagccaggtgatattga

SEQ ID NO: 834894 - DNA, 33 bp, Homo sapien
cagtttggccgttgcgtagccaggtgatattga

SEQ ID NO: 834895 - DNA, 33 bp, Homo sapien
tacaaagagcactggaagaggagtcagaagtca

SEQ ID NO: 834896 - DNA, 33 bp, Homo sapien
tacaaagagcactggacgaggagtcagaagtca

SEQ ID NO: 834897 - DNA, 33 bp, Homo sapien
cttccagaaaactagacaacagttatggaagag

SEQ ID NO: 834898 - DNA, 33 bp, Homo sapien
cttccagaaaactagataacagttatggaagag

SEQ ID NO: 834899 - DNA, 33 bp, Homo sapien
gtaatgcctagcacataataggcgcctaggaga

SEQ ID NO: 834900 - DNA, 33 bp, Homo sapien
gtaatgcctagcacatcataggcgcctaggaga

SEQ ID NO: 834901 - DNA, 33 bp, Homo sapien
cttagttatgtataggccagtccaaagataaag

SEQ ID NO: 834902 - DNA, 33 bp, Homo sapien
cttagttatgtataggtcagtccaaagataaag

SEQ ID NO: 834903 - DNA, 33 bp, Homo sapien
tgtctcttgcagaaacaagtttgctcactttga

SEQ ID NO: 834904 - DNA, 33 bp, Homo sapien
tgtctcttgcagaaacgagtttgctcactttga

SEQ ID NO: 834905 - DNA, 33 bp, Homo sapien
aacctgccttgaactacacgtggctaaaaaata

SEQ ID NO: 834906 - DNA, 33 bp, Homo sapien
aacctgccttgaactagacgtggctaaaaaata

SEQ ID NO: 834907 - DNA, 33 bp, Homo sapien
tctctattattgaaaaccacttcatgaactcct

SEQ ID NO: 834908 - DNA, 33 bp, Homo sapien
tctctattattgaaaagcacttcatgaactcct

SEQ ID NO: 834909 - DNA, 33 bp, Homo sapien
gccacttctgtgttcccgagatcttagaaacac

SEQ ID NO: 834910 - DNA, 33 bp, Homo sapien
gccacttctgtgttcctgagatcttagaaacac

SEQ ID NO: 834911 - DNA, 33 bp, Homo sapien
tctccatatgcttcacagaaacatgtaacttct

SEQ ID NO: 834912 - DNA, 33 bp, Homo sapien
tctccatatgcttcacggaaacatgtaacttct

SEQ ID NO: 834913 - DNA, 33 bp, Homo sapien
tgcatggccaagtaaacgaggagccggaggaga

SEQ ID NO: 834914 - DNA, 33 bp, Homo sapien
tgcatggccaagtaaatgaggagccggaggaga

SEQ ID NO: 834915 - DNA, 33 bp, Homo sapien
ggagaccctcagacacaaggaaagaggaactct

SEQ ID NO: 834916 - DNA, 33 bp, Homo sapien
ggagaccctcagacacgaggaaagaggaactct

SEQ ID NO: 834917 - DNA, 33 bp, Homo sapien
aggactttggggcttacagttaagcagactact

SEQ ID NO: 834918 - DNA, 33 bp, Homo sapien
aggactttggggcttagagttaagcagactact

SEQ ID NO: 834919 - DNA, 33 bp, Homo sapien
gctcaccttcacctcagattgtcccctggattt

SEQ ID NO: 834920 - DNA, 33 bp, Homo sapien
gctcaccttcacctcatattgtcccctggattt

SEQ ID NO: 834921 - DNA, 33 bp, Homo sapien
ttgtgctgtgtcaaaaaatggcagagaaacaaa

SEQ ID NO: 834922 - DNA, 33 bp, Homo sapien
ttgtgctgtgtcaaaacatggcagagaaacaaa

SEQ ID NO: 834923 - DNA, 33 bp, Homo sapien
aagatcatgaaaagaaaataacaagagaggagc

SEQ ID NO: 834924 - DNA, 33 bp, Homo sapien
aagatcatgaaaagaagataacaagagaggagc

SEQ ID NO: 834925 - DNA, 33 bp, Homo sapien
actgggcaatgctaaccaaaacaactttggagc

SEQ ID NO: 834926 - DNA, 33 bp, Homo sapien
actgggcaatgctaactaaaacaactttggagc

SEQ ID NO: 834927 - DNA, 33 bp, Homo sapien
tgagctgtgtgaacaacaagctaaccagaatca

SEQ ID NO: 834928 - DNA, 33 bp, Homo sapien
tgagctgtgtgaacaataagctaaccagaatca

SEQ ID NO: 834929 - DNA, 33 bp, Homo sapien
catgcctatgtacaacaactagattttgattcc

SEQ ID NO: 834930 - DNA, 33 bp, Homo sapien
catgcctatgtacaacgactagattttgattcc

SEQ ID NO: 834931 - DNA, 33 bp, Homo sapien
tgccccggatgtaaaacggtgaaacattgggca

SEQ ID NO: 834932 - DNA, 33 bp, Homo sapien
tgccccggatgtaaaatggtgaaacattgggca

SEQ ID NO: 834933 - DNA, 33 bp, Homo sapien
cttccctgatgcagacaattttttatttctgag

SEQ ID NO: 834934 - DNA, 33 bp, Homo sapien
cttccctgatgcagaccattttttatttctgag

SEQ ID NO: 834935 - DNA, 33 bp, Homo sapien
ggcaaattccaaggacaaatagatggttctaca

SEQ ID NO: 834936 - DNA, 33 bp, Homo sapien
ggcaaattccaaggactaatagatggttctaca

SEQ ID NO: 834937 - DNA, 33 bp, Homo sapien
taaacagtcctaccaactgtcagtatcatgtaa

SEQ ID NO: 834938 - DNA, 33 bp, Homo sapien
taaacagtcctaccaagtgtcagtatcatgtaa

SEQ ID NO: 834939 - DNA, 33 bp, Homo sapien
cagcaaccccaacagacccaatacttttaaatt

SEQ ID NO: 834940 - DNA, 33 bp, Homo sapien
cagcaaccccaacagagccaatacttttaaatt

SEQ ID NO: 834941 - DNA, 33 bp, Homo sapien
aataaacaactggatgaaataatgggtgtctat

SEQ ID NO: 834942 - DNA, 33 bp, Homo sapien
aataaacaactggatggaataatgggtgtctat

SEQ ID NO: 834943 - DNA, 33 bp, Homo sapien
ttgaggcctgaatatacgactttactaattaac

SEQ ID NO: 834944 - DNA, 33 bp, Homo sapien
ttgaggcctgaatatatgactttactaattaac

SEQ ID NO: 834945 - DNA, 33 bp, Homo sapien
ttgcctgaatcatcagaaaacaatgttaaagca

SEQ ID NO: 834946 - DNA, 33 bp, Homo sapien
ttgcctgaatcatcagtaaacaatgttaaagca

SEQ ID NO: 834947 - DNA, 33 bp, Homo sapien
tccagccttaaaaatacgctcaaaaaacagaaa

SEQ ID NO: 834948 - DNA, 33 bp, Homo sapien
tccagccttaaaaatatgctcaaaaaacagaaa

SEQ ID NO: 834949 - DNA, 33 bp, Homo sapien
atcagtgcctaatttacactacccatacatata

SEQ ID NO: 834950 - DNA, 33 bp, Homo sapien
atcagtgcctaatttatactacccatacatata

SEQ ID NO: 834951 - DNA, 33 bp, Homo sapien
agaatcttttgctctagaccctgctgtaagaga

SEQ ID NO: 834952 - DNA, 33 bp, Homo sapien
agaatcttttgctctataccctgctgtaagaga

SEQ ID NO: 834953 - DNA, 33 bp, Homo sapien
acttctctatcatagaatcaatcaatacatagt

SEQ ID NO: 834954 - DNA, 33 bp, Homo sapien
acttctctatcatagagtcaatcaatacatagt

SEQ ID NO: 834955 - DNA, 33 bp, Homo sapien
tctactgagctggaaacggttagagaaagagct

SEQ ID NO: 834956 - DNA, 33 bp, Homo sapien
tctactgagctggaaatggttagagaaagagct

SEQ ID NO: 834957 - DNA, 33 bp, Homo sapien
attagctactttgttacatccactgtgaaattt

SEQ ID NO: 834958 - DNA, 33 bp, Homo sapien
attagctactttgttagatccactgtgaaattt

SEQ ID NO: 834959 - DNA, 33 bp, Homo sapien
gtccaatatactaacaccaaacaatgacattaa

SEQ ID NO: 834960 - DNA, 33 bp, Homo sapien
gtccaatatactaacatcaaacaatgacattaa

SEQ ID NO: 834961 - DNA, 33 bp, Homo sapien
ttcatgtgaaaactaccccagtggctgactgaa

SEQ ID NO: 834962 - DNA, 33 bp, Homo sapien
ttcatgtgaaaactactccagtggctgactgaa

SEQ ID NO: 834963 - DNA, 33 bp, Homo sapien
agctcggagttcctgtaaagcagccacaaaaga

SEQ ID NO: 834964 - DNA, 33 bp, Homo sapien
agctcggagttcctgtgaagcagccacaaaaga

SEQ ID NO: 834965 - DNA, 33 bp, Homo sapien
acacagtgacctactaccagggccctcctatct

SEQ ID NO: 834966 - DNA, 33 bp, Homo sapien
acacagtgacctactatcagggccctcctatct

SEQ ID NO: 834967 - DNA, 33 bp, Homo sapien
agacaaatacttcctcaatgtctcaggtaattt

SEQ ID NO: 834968 - DNA, 33 bp, Homo sapien
agacaaatacttcctcgatgtctcaggtaattt

SEQ ID NO: 834969 - DNA, 33 bp, Homo sapien
gggtgtaagcaggaaaagtggaagtcagtggaa

SEQ ID NO: 834970 - DNA, 33 bp, Homo sapien
gggtgtaagcaggaaaggtggaagtcagtggaa

SEQ ID NO: 834971 - DNA, 33 bp, Homo sapien
tcctaggacacacctaaaaggtactgacatcat

SEQ ID NO: 834972 - DNA, 33 bp, Homo sapien
tcctaggacacacctagaaggtactgacatcat

SEQ ID NO: 834973 - DNA, 33 bp, Homo sapien
cacccttctgtgactacaagttcaagttctcct

SEQ ID NO: 834974 - DNA, 33 bp, Homo sapien
cacccttctgtgactataagttcaagttctcct

SEQ ID NO: 834975 - DNA, 33 bp, Homo sapien
agagcaggcctgaagacactcaaacagaaacaa

SEQ ID NO: 834976 - DNA, 33 bp, Homo sapien
agagcaggcctgaagatactcaaacagaaacaa

SEQ ID NO: 834977 - DNA, 33 bp, Homo sapien
ggcctaggctggtggacgaatgcagacttagac

SEQ ID NO: 834978 - DNA, 33 bp, Homo sapien
ggcctaggctggtggatgaatgcagacttagac

SEQ ID NO: 834979 - DNA, 33 bp, Homo sapien
gtcctctaccttgaccaaaaggtgtcaatatga

SEQ ID NO: 834980 - DNA, 33 bp, Homo sapien
gtcctctaccttgaccgaaaggtgtcaatatga

SEQ ID NO: 834981 - DNA, 33 bp, Homo sapien
agccccacctctcctgaaattggaggaagccgg

SEQ ID NO: 834982 - DNA, 33 bp, Homo sapien
agccccacctctcctggaattggaggaagccgg

SEQ ID NO: 834983 - DNA, 33 bp, Homo sapien
cagctgaaattactacacaaaaacaagtcagca

SEQ ID NO: 834984 - DNA, 33 bp, Homo sapien
cagctgaaattactacgcaaaaacaagtcagca

SEQ ID NO: 834985 - DNA, 33 bp, Homo sapien
gtgagaaacctatgcaacataaaattaatatga

SEQ ID NO: 834986 - DNA, 33 bp, Homo sapien
gtgagaaacctatgcagcataaaattaatatga

SEQ ID NO: 834987 - DNA, 33 bp, Homo sapien
ttcaacgatggaaggaagtcatgagaatagcag

SEQ ID NO: 834988 - DNA, 33 bp, Homo sapien
ttcaacgatggaaggaggtcatgagaatagcag

SEQ ID NO: 834989 - DNA, 33 bp, Homo sapien
ttacaaaccatatccaatcagagtcattctctt

SEQ ID NO: 834990 - DNA, 33 bp, Homo sapien
ttacaaaccatatccagtcagagtcattctctt

SEQ ID NO: 834991 - DNA, 33 bp, Homo sapien
agctaagaatagtacaagagaacaggattgtgg

SEQ ID NO: 834992 - DNA, 33 bp, Homo sapien
agctaagaatagtacaggagaacaggattgtgg

SEQ ID NO: 834993 - DNA, 33 bp, Homo sapien
ttaatatgaattttgcagagtccactaatgtgt

SEQ ID NO: 834994 - DNA, 33 bp, Homo sapien
ttaatatgaattttgcggagtccactaatgtgt

SEQ ID NO: 834995 - DNA, 33 bp, Homo sapien
cccagctgtgtggacccaagatttctcgctctc

SEQ ID NO: 834996 - DNA, 33 bp, Homo sapien
cccagctgtgtggacctaagatttctcgctctc

SEQ ID NO: 834997 - DNA, 33 bp, Homo sapien
gagcaccaaagtcaaaagtgtgaataaactctg

SEQ ID NO: 834998 - DNA, 33 bp, Homo sapien
gagcaccaaagtcaaaggtgtgaataaactctg

SEQ ID NO: 834999 - DNA, 33 bp, Homo sapien
ttctcatccaggttcacgtagaactgctcctcc

SEQ ID NO: 835000 - DNA, 33 bp, Homo sapien
ttctcatccaggttcatgtagaactgctcctcc

SEQ ID NO: 835001 - DNA, 33 bp, Homo sapien
tatgtttgaatttgatcaggaggagcagttcta

SEQ ID NO: 835002 - DNA, 33 bp, Homo sapien
tatgtttgaatttgatgaggaggagcagttcta

SEQ ID NO: 835003 - DNA, 33 bp, Homo sapien
ggagaatgggtgaatacgtaggatgctacacag

SEQ ID NO: 835004 - DNA, 33 bp, Homo sapien
ggagaatgggtgaatatgtaggatgctacacag

SEQ ID NO: 835005 - DNA, 33 bp, Homo sapien
attaagcaaaacgaataaatctggagcatcaca

SEQ ID NO: 835006 - DNA, 33 bp, Homo sapien
attaagcaaaacgaatgaatctggagcatcaca

SEQ ID NO: 835007 - DNA, 33 bp, Homo sapien
tttcaaaattctcccagatcccacatcaacccc

SEQ ID NO: 835008 - DNA, 33 bp, Homo sapien
tttcaaaattctcccatatcccacatcaacccc

SEQ ID NO: 835009 - DNA, 33 bp, Homo sapien
ttgaacttctgactccactctacttcctccttc

SEQ ID NO: 835010 - DNA, 33 bp, Homo sapien
ttgaacttctgactccgctctacttcctccttc

SEQ ID NO: 835011 - DNA, 33 bp, Homo sapien
gcacataagccaaggaagtaaagatttccagga

SEQ ID NO: 835012 - DNA, 33 bp, Homo sapien
gcacataagccaaggaggtaaagatttccagga

SEQ ID NO: 835013 - DNA, 33 bp, Homo sapien
agtatcaaaagcctacaatatgtcgaacattgt

SEQ ID NO: 835014 - DNA, 33 bp, Homo sapien
agtatcaaaagcctactatatgtcgaacattgt

SEQ ID NO: 835015 - DNA, 33 bp, Homo sapien
gcaatcctatactggccccttctactgcataat

SEQ ID NO: 835016 - DNA, 33 bp, Homo sapien
gcaatcctatactggctccttctactgcataat

SEQ ID NO: 835017 - DNA, 33 bp, Homo sapien
tgaagcacggccttgaacaaaggcaaaacagac

SEQ ID NO: 835018 - DNA, 33 bp, Homo sapien
tgaagcacggccttgagcaaaggcaaaacagac

SEQ ID NO: 835019 - DNA, 33 bp, Homo sapien
tagagagattagagtacccatcccagaactgaa

SEQ ID NO: 835020 - DNA, 33 bp, Homo sapien
tagagagattagagtatccatcccagaactgaa

SEQ ID NO: 835021 - DNA, 33 bp, Homo sapien
tgaatgtccaatcaaaacctgctggagggagag

SEQ ID NO: 835022 - DNA, 33 bp, Homo sapien
tgaatgtccaatcaaagcctgctggagggagag

SEQ ID NO: 835023 - DNA, 33 bp, Homo sapien
atccagtcagcaaacaaccaacaaacacttttc

SEQ ID NO: 835024 - DNA, 33 bp, Homo sapien
atccagtcagcaaacagccaacaaacacttttc

SEQ ID NO: 835025 - DNA, 33 bp, Homo sapien
ccagttcttgcactacaactgattactaagtta

SEQ ID NO: 835026 - DNA, 33 bp, Homo sapien
ccagttcttgcactacgactgattactaagtta

SEQ ID NO: 835027 - DNA, 33 bp, Homo sapien
ttacctgcaaagcagacataagtgatgagtata

SEQ ID NO: 835028 - DNA, 33 bp, Homo sapien
ttacctgcaaagcagatataagtgatgagtata

SEQ ID NO: 835029 - DNA, 33 bp, Homo sapien
attcaaatacggtctccaactggtggtggacag

SEQ ID NO: 835030 - DNA, 33 bp, Homo sapien
attcaaatacggtctctaactggtggtggacag

SEQ ID NO: 835031 - DNA, 33 bp, Homo sapien
ctgaattaggggctaaagaagtgtgctctatta

SEQ ID NO: 835032 - DNA, 33 bp, Homo sapien
ctgaattaggggctaaggaagtgtgctctatta

SEQ ID NO: 835033 - DNA, 33 bp, Homo sapien
taatatatatataaacaacattctcatggtcta

SEQ ID NO: 835034 - DNA, 33 bp, Homo sapien
taatatatatataaacgacattctcatggtcta

SEQ ID NO: 835035 - DNA, 33 bp, Homo sapien
atgtgattaggtcagcagataaggggagtattg

SEQ ID NO: 835036 - DNA, 33 bp, Homo sapien
atgtgattaggtcagcggataaggggagtattg

SEQ ID NO: 835037 - DNA, 33 bp, Homo sapien
ctattttcaacatctaaaaatcaattccataat

SEQ ID NO: 835038 - DNA, 33 bp, Homo sapien
ctattttcaacatctagaaatcaattccataat

SEQ ID NO: 835039 - DNA, 33 bp, Homo sapien
gtctaagaaataataaactcaaatgctattcca

SEQ ID NO: 835040 - DNA, 33 bp, Homo sapien
gtctaagaaataataatctcaaatgctattcca

SEQ ID NO: 835041 - DNA, 33 bp, Homo sapien
tggggaggcgtttctcactgtatgaattattag

SEQ ID NO: 835042 - DNA, 33 bp, Homo sapien
tggggaggcgtttctctctgtatgaattattag

SEQ ID NO: 835043 - DNA, 33 bp, Homo sapien
aatgcaaaacacataaaaattttggattgtaaa

SEQ ID NO: 835044 - DNA, 33 bp, Homo sapien
aatgcaaaacacataacaattttggattgtaaa

SEQ ID NO: 835045 - DNA, 33 bp, Homo sapien
agatttaaaggagaccaaagctggtgacttcct

SEQ ID NO: 835046 - DNA, 33 bp, Homo sapien
agatttaaaggagaccgaagctggtgacttcct

SEQ ID NO: 835047 - DNA, 33 bp, Homo sapien
ggtctggcatctgtgacagtttattcacactgt

SEQ ID NO: 835048 - DNA, 33 bp, Homo sapien
ggtctggcatctgtgagagtttattcacactgt

SEQ ID NO: 835049 - DNA, 33 bp, Homo sapien
agtggcatcgatgactaaagttttggtaaatct

SEQ ID NO: 835050 - DNA, 33 bp, Homo sapien
agtggcatcgatgactgaagttttggtaaatct

SEQ ID NO: 835051 - DNA, 33 bp, Homo sapien
tctcctataaacagaacgttccaacaaaaggag

SEQ ID NO: 835052 - DNA, 33 bp, Homo sapien
tctcctataaacagaatgttccaacaaaaggag

SEQ ID NO: 835053 - DNA, 33 bp, Homo sapien
ttgtaagatgctgcccaagagattgcatgaggg

SEQ ID NO: 835054 - DNA, 33 bp, Homo sapien
ttgtaagatgctgcccgagagattgcatgaggg

SEQ ID NO: 835055 - DNA, 33 bp, Homo sapien
aatggcaataatgaaacgaaaagccacaggaat

SEQ ID NO: 835056 - DNA, 33 bp, Homo sapien
aatggcaataatgaaatgaaaagccacaggaat

SEQ ID NO: 835057 - DNA, 33 bp, Homo sapien
ttatttcatttttcatcacctttgcagtcactg

SEQ ID NO: 835058 - DNA, 33 bp, Homo sapien
ttatttcatttttcattacctttgcagtcactg

SEQ ID NO: 835059 - DNA, 33 bp, Homo sapien
gaacttcctggtagacaatattttacacatggc

SEQ ID NO: 835060 - DNA, 33 bp, Homo sapien
gaacttcctggtagacgatattttacacatggc

SEQ ID NO: 835061 - DNA, 33 bp, Homo sapien
gtcaaatgcatacaaacgagtctgtttagacag

SEQ ID NO: 835062 - DNA, 33 bp, Homo sapien
gtcaaatgcatacaaaggagtctgtttagacag

SEQ ID NO: 835063 - DNA, 33 bp, Homo sapien
gaaatacagagaggcccgctgccagctagaatc

SEQ ID NO: 835064 - DNA, 33 bp, Homo sapien
gaaatacagagaggcctgctgccagctagaatc

SEQ ID NO: 835065 - DNA, 33 bp, Homo sapien
gagcgaagtacacaaaatggattgacctgctcc

SEQ ID NO: 835066 - DNA, 33 bp, Homo sapien
gagcgaagtacacaaactggattgacctgctcc

SEQ ID NO: 835067 - DNA, 33 bp, Homo sapien
cctcaggagcatctacagcaccaggacagctga

SEQ ID NO: 835068 - DNA, 33 bp, Homo sapien
cctcaggagcatctacggcaccaggacagctga

SEQ ID NO: 835069 - DNA, 33 bp, Homo sapien
agtggaggctcagtagaacacggaattggggcc

SEQ ID NO: 835070 - DNA, 33 bp, Homo sapien
agtggaggctcagtaggacacggaattggggcc

SEQ ID NO: 835071 - DNA, 33 bp, Homo sapien
actactgacctcaaataagctgcctgtttcggc

SEQ ID NO: 835072 - DNA, 33 bp, Homo sapien
actactgacctcaaatgagctgcctgtttcggc

SEQ ID NO: 835073 - DNA, 33 bp, Homo sapien
gcagagggtatcatccaggagaaagagtatagg

SEQ ID NO: 835074 - DNA, 33 bp, Homo sapien
gcagagggtatcatccgggagaaagagtatagg

SEQ ID NO: 835075 - DNA, 33 bp, Homo sapien
cccaaatcatgggagaacccgacaaattcagag

SEQ ID NO: 835076 - DNA, 33 bp, Homo sapien
cccaaatcatgggagaccccgacaaattcagag

SEQ ID NO: 835077 - DNA, 33 bp, Homo sapien
caatggatcggtgtgaaaaggaggcaatgagga

SEQ ID NO: 835078 - DNA, 33 bp, Homo sapien
caatggatcggtgtgagaaggaggcaatgagga

SEQ ID NO: 835079 - DNA, 33 bp, Homo sapien
aaatgaagacaaaaaaaggtcacagactcagtc

SEQ ID NO: 835080 - DNA, 33 bp, Homo sapien
aaatgaagacaaaaaagggtcacagactcagtc

SEQ ID NO: 835081 - DNA, 33 bp, Homo sapien
ctaggagctgaccacagactgatcattagggct

SEQ ID NO: 835082 - DNA, 33 bp, Homo sapien
ctaggagctgaccacatactgatcattagggct

SEQ ID NO: 835083 - DNA, 33 bp, Homo sapien
ggaattggaatgcagccagttctgctttagaag

SEQ ID NO: 835084 - DNA, 33 bp, Homo sapien
ggaattggaatgcagctagttctgctttagaag

SEQ ID NO: 835085 - DNA, 33 bp, Homo sapien
gtcattgtgtttttcaaagtgatttcttttctg

SEQ ID NO: 835086 - DNA, 33 bp, Homo sapien
gtcattgtgtttttcagagtgatttcttttctg

SEQ ID NO: 835087 - DNA, 33 bp, Homo sapien; identical to SEQ ID NO: 835085

SEQ ID NO: 835088 - DNA, 33 bp, Homo sapien; identical to SEQ ID NO: 835086

SEQ ID NO: 835089 - DNA, 33 bp, Homo sapien; identical to SEQ ID NO: 835085

SEQ ID NO: 835090 - DNA, 33 bp, Homo sapien; identical to SEQ ID NO: 835086

SEQ ID NO: 835091 - DNA, 33 bp, Homo sapien
atatgctgcaaggaaggatctttctataatcaa

SEQ ID NO: 835092 - DNA, 33 bp, Homo sapien
atatgctgcaaggaagtatctttctataatcaa

SEQ ID NO: 835093 - DNA, 33 bp, Homo sapien
gctcgttcattgcccaacagaaactgatagaag

SEQ ID NO: 835094 - DNA, 33 bp, Homo sapien
gctcgttcattgcccagcagaaactgatagaag

SEQ ID NO: 835095 - DNA, 33 bp, Homo sapien
gacaaatcatgagagacacacgaagaggaccat

SEQ ID NO: 835096 - DNA, 33 bp, Homo sapien
gacaaatcatgagagagacacgaagaggaccat

SEQ ID NO: 835097 - DNA, 33 bp, Homo sapien
gctgaggttctggagacaaaaggatgaatcgtt

SEQ ID NO: 835098 - DNA, 33 bp, Homo sapien
gctgaggttctggagataaaaggatgaatcgtt

SEQ ID NO: 835099 - DNA, 33 bp, Homo sapien
tggactccataaagacacagtacctggaagaga

SEQ ID NO: 835100 - DNA, 33 bp, Homo sapien
tggactccataaagacgcagtacctggaagaga

SEQ ID NO: 835101 - DNA, 33 bp, Homo sapien
aagaccaccaaaaagcgccctcagcgcacaaca

SEQ ID NO: 835102 - DNA, 33 bp, Homo sapien
aagaccaccaaaaagctccctcagcgcacaaca

SEQ ID NO: 835103 - DNA, 33 bp, Homo sapien
taggtgttagattggccgcagttctctaccact

SEQ ID NO: 835104 - DNA, 33 bp, Homo sapien
taggtgttagattggctgcagttctctaccact

SEQ ID NO: 835105 - DNA, 33 bp, Homo sapien
ggcttcgaaggtgatcagacagcatcagtcttc

SEQ ID NO: 835106 - DNA, 33 bp, Homo sapien
ggcttcgaaggtgatcggacagcatcagtcttc

SEQ ID NO: 835107 - DNA, 33 bp, Homo sapien
taaggaggaagcaaagaattgggaataacagtc

SEQ ID NO: 835108 - DNA, 33 bp, Homo sapien
taaggaggaagcaaaggattgggaataacagtc

SEQ ID NO: 835109 - DNA, 33 bp, Homo sapien
gactaaacaagatgatgacccaacatgagccag

SEQ ID NO: 835110 - DNA, 33 bp, Homo sapien
gactaaacaagatgattacccaacatgagccag

SEQ ID NO: 835111 - DNA, 33 bp, Homo sapien
ctaatctcactgacaaacatacctggaaaaatc

SEQ ID NO: 835112 - DNA, 33 bp, Homo sapien
ctaatctcactgacaagcatacctggaaaaatc

SEQ ID NO: 835113 - DNA, 33 bp, Homo sapien
ctagggtttattaacacgaaaagattggagaaa

SEQ ID NO: 835114 - DNA, 33 bp, Homo sapien
ctagggtttattaacaggaaaagattggagaaa

SEQ ID NO: 835115 - DNA, 33 bp, Homo sapien
tcccacttttaggttacgtcctcacttctgttc

SEQ ID NO: 835116 - DNA, 33 bp, Homo sapien
tcccacttttaggttatgtcctcacttctgttc

SEQ ID NO: 835117 - DNA, 33 bp, Homo sapien
gggggatacaattgagcacaagctaatggtaag

SEQ ID NO: 835118 - DNA, 33 bp, Homo sapien
gggggatacaattgagtacaagctaatggtaag

SEQ ID NO: 835119 - DNA, 33 bp, Homo sapien
cgcagcgcagccgccacgaagcaaacacctcct

SEQ ID NO: 835120 - DNA, 33 bp, Homo sapien
cgcagcgcagccgccatgaagcaaacacctcct

SEQ ID NO: 835121 - DNA, 33 bp, Homo sapien
ctctattccagaaaacagcagcttctagccctc

SEQ ID NO: 835122 - DNA, 33 bp, Homo sapien
ctctattccagaaaacggcagcttctagccctc

SEQ ID NO: 835123 - DNA, 33 bp, Homo sapien
ataccagacactgaagaaaaaagcagaaggcat

SEQ ID NO: 835124 - DNA, 33 bp, Homo sapien
ataccagacactgaaggaaaaagcagaaggcat

SEQ ID NO: 835125 - DNA, 33 bp, Homo sapien
aagtgggtaaggagtgcatcaatgtgaaatatt

SEQ ID NO: 835126 - DNA, 33 bp, Homo sapien
aagtgggtaaggagtgtatcaatgtgaaatatt

SEQ ID NO: 835127 - DNA, 33 bp, Homo sapien
ttccttccgttggcacactataaaaatcaacca

SEQ ID NO: 835128 - DNA, 33 bp, Homo sapien
ttccttccgttggcactctataaaaatcaacca

SEQ ID NO: 835129 - DNA, 33 bp, Homo sapien
gggaggcagggaaaaacacatcatcagcagaag

SEQ ID NO: 835130 - DNA, 33 bp, Homo sapien
gggaggcagggaaaaatacatcatcagcagaag

SEQ ID NO: 835131 - DNA, 33 bp, Homo sapien
acgaatttagtcactacgtcggttaatttcaaa

SEQ ID NO: 835132 - DNA, 33 bp, Homo sapien
acgaatttagtcactatgtcggttaatttcaaa

SEQ ID NO: 835133 - DNA, 33 bp, Homo sapien
aacatattacattcccaatgccgaactaagcaa

SEQ ID NO: 835134 - DNA, 33 bp, Homo sapien
aacatattacattcccgatgccgaactaagcaa

SEQ ID NO: 835135 - DNA, 33 bp, Homo sapien
cctcccaacattgcaaactcttcctcgctttct

SEQ ID NO: 835136 - DNA, 33 bp, Homo sapien
cctcccaacattgcaagctcttcctcgctttct

SEQ ID NO: 835137 - DNA, 33 bp, Homo sapien
caatcctacccaactcaagcggcctcctagaca

SEQ ID NO: 835138 - DNA, 33 bp, Homo sapien
caatcctacccaactcgagcggcctcctagaca

SEQ ID NO: 835139 - DNA, 33 bp, Homo sapien
atagacacacaaagtacaagggtggtcgccagg

SEQ ID NO: 835140 - DNA, 33 bp, Homo sapien
atagacacacaaagtagaagggtggtcgccagg

SEQ ID NO: 835141 - DNA, 33 bp, Homo sapien
ggccactccagatgtacagactcagagaaagcc

SEQ ID NO: 835142 - DNA, 33 bp, Homo sapien
ggccactccagatgtatagactcagagaaagcc

SEQ ID NO: 835143 - DNA, 33 bp, Homo sapien
atctaactgtatcacagaattcaaaaaagaggc

SEQ ID NO: 835144 - DNA, 33 bp, Homo sapien
atctaactgtatcacataattcaaaaaagaggc

SEQ ID NO: 835145 - DNA, 33 bp, Homo sapien
gggaatcagttaagaacaaaattcatcacagta

SEQ ID NO: 835146 - DNA, 33 bp, Homo sapien
gggaatcagttaagaagaaaattcatcacagta

SEQ ID NO: 835147 - DNA, 33 bp, Homo sapien
aatatggcataaaggactaaaaaatggtacacc

SEQ ID NO: 835148 - DNA, 33 bp, Homo sapien
aatatggcataaaggattaaaaaatggtacacc

SEQ ID NO: 835149 - DNA, 33 bp, Homo sapien
caagtcaaacaagaagaaagtattcagcatgta

SEQ ID NO: 835150 - DNA, 33 bp, Homo sapien
caagtcaaacaagaaggaagtattcagcatgta

SEQ ID NO: 835151 - DNA, 33 bp, Homo sapien
catcatgttcaggcagacactcaaggccttctc

SEQ ID NO: 835152 - DNA, 33 bp, Homo sapien
catcatgttcaggcaggcactcaaggccttctc

SEQ ID NO: 835153 - DNA, 33 bp, Homo sapien
gctggaggtgcccaaaggtcaggaaccagaatc

SEQ ID NO: 835154 - DNA, 33 bp, Homo sapien
gctggaggtgcccaaatgtcaggaaccagaatc

SEQ ID NO: 835155 - DNA, 33 bp, Homo sapien
agtttcaaatctactccgacactgacttcccta

SEQ ID NO: 835156 - DNA, 33 bp, Homo sapien
agtttcaaatctactctgacactgacttcccta

SEQ ID NO: 835157 - DNA, 33 bp, Homo sapien
acttgctataatctggaatccaagtggttaaag

SEQ ID NO: 835158 - DNA, 33 bp, Homo sapien
acttgctataatctggcatccaagtggttaaag

SEQ ID NO: 835159 - DNA, 33 bp, Homo sapien
gggctaaaaaggatacaaggtcctggatggggg

SEQ ID NO: 835160 - DNA, 33 bp, Homo sapien
gggctaaaaaggataccaggtcctggatggggg

SEQ ID NO: 835161 - DNA, 33 bp, Homo sapien
ccacactaggtgtaaccggtcttcctctgggtt

SEQ ID NO: 835162 - DNA, 33 bp, Homo sapien
ccacactaggtgtaacgggtcttcctctgggtt

SEQ ID NO: 835163 - DNA, 33 bp, Homo sapien
gtgatgtggagtcagcacaggagtctggacaga

SEQ ID NO: 835164 - DNA, 33 bp, Homo sapien
gtgatgtggagtcagcgcaggagtctggacaga

SEQ ID NO: 835165 - DNA, 33 bp, Homo sapien
actccagtgccaatcactgagattcattagctc

SEQ ID NO: 835166 - DNA, 33 bp, Homo sapien
actccagtgccaatcattgagattcattagctc

SEQ ID NO: 835167 - DNA, 33 bp, Homo sapien
tatttgggagaagatcccgggaagcacaagcct

SEQ ID NO: 835168 - DNA, 33 bp, Homo sapien
tatttgggagaagatctcgggaagcacaagcct

SEQ ID NO: 835169 - DNA, 33 bp, Homo sapien
tatggaaccatctatacggatgtcaggggagga

SEQ ID NO: 835170 - DNA, 33 bp, Homo sapien
tatggaaccatctatatggatgtcaggggagga

SEQ ID NO: 835171 - DNA, 33 bp, Homo sapien
ttctaacttttggggaagatacaggaggcctga

SEQ ID NO: 835172 - DNA, 33 bp, Homo sapien
ttctaacttttggggatgatacaggaggcctga

SEQ ID NO: 835173 - DNA, 33 bp, Homo sapien
taataggagaatacccagctaaaaatcagaggc

SEQ ID NO: 835174 - DNA, 33 bp, Homo sapien
taataggagaatacccggctaaaaatcagaggc

SEQ ID NO: 835175 - DNA, 33 bp, Homo sapien
aagtattgtttggtgaactattgttttgcttat

SEQ ID NO: 835176 - DNA, 33 bp, Homo sapien
aagtattgtttggtgatctattgttttgcttat

SEQ ID NO: 835177 - DNA, 33 bp, Homo sapien
tggagaaaccacctacactcccatccagcgaat

SEQ ID NO: 835178 - DNA, 33 bp, Homo sapien
tggagaaaccacctacgctcccatccagcgaat

SEQ ID NO: 835179 - DNA, 33 bp, Homo sapien
catttctgggaacgtactacctgagaggataac

SEQ ID NO: 835180 - DNA, 33 bp, Homo sapien
catttctgggaacgtattacctgagaggataac

SEQ ID NO: 835181 - DNA, 33 bp, Homo sapien
ctgccgtgagtcccgaactgctgactgggctga

SEQ ID NO: 835182 - DNA, 33 bp, Homo sapien
ctgccgtgagtcccgagctgctgactgggctga

SEQ ID NO: 835183 - DNA, 33 bp, Homo sapien
atatttcaagtctacacgatagtaaagagaaaa

SEQ ID NO: 835184 - DNA, 33 bp, Homo sapien
atatttcaagtctacaggatagtaaagagaaaa

SEQ ID NO: 835185 - DNA, 33 bp, Homo sapien
cacctagtaatcccccaactcagaacataccag

SEQ ID NO: 835186 - DNA, 33 bp, Homo sapien
cacctagtaatccccccactcagaacataccag

SEQ ID NO: 835187 - DNA, 33 bp, Homo sapien
cttggagggaggaagacgttacgaggcacacaa

SEQ ID NO: 835188 - DNA, 33 bp, Homo sapien
cttggagggaggaagaggttacgaggcacacaa

SEQ ID NO: 835189 - DNA, 33 bp, Homo sapien
aggcacaggggatacaaagtgagcaaaatttcc

SEQ ID NO: 835190 - DNA, 33 bp, Homo sapien
aggcacaggggatacagagtgagcaaaatttcc

SEQ ID NO: 835191 - DNA, 33 bp, Homo sapien
ctaggacggaacatcaagaaacttctcaagtgt

SEQ ID NO: 835192 - DNA, 33 bp, Homo sapien
ctaggacggaacatcaggaaacttctcaagtgt

SEQ ID NO: 835193 - DNA, 33 bp, Homo sapien
tgcacgactatgcgccactggtctcgggtgccc

SEQ ID NO: 835194 - DNA, 33 bp, Homo sapien
tgcacgactatgcgccgctggtctcgggtgccc

SEQ ID NO: 835195 - DNA, 33 bp, Homo sapien
gtttggggtctcagtgaataagtgacagaccac

SEQ ID NO: 835196 - DNA, 33 bp, Homo sapien
gtttggggtctcagtggataagtgacagaccac

SEQ ID NO: 835197 - DNA, 33 bp, Homo sapien
ctgggtcagttccccaaagaaggatgctcgccg

SEQ ID NO: 835198 - DNA, 33 bp, Homo sapien
ctgggtcagttccccagagaaggatgctcgccg

SEQ ID NO: 835199 - DNA, 33 bp, Homo sapien
ggcccttagcagccccagagtgtagagaagcca

SEQ ID NO: 835200 - DNA, 33 bp, Homo sapien
ggcccttagcagccccggagtgtagagaagcca

SEQ ID NO: 835201 - DNA, 33 bp, Homo sapien
ggacagtggccagggaacaacctcagcactggg

SEQ ID NO: 835202 - DNA, 33 bp, Homo sapien
ggacagtggccagggagcaacctcagcactggg

SEQ ID NO: 835203 - DNA, 33 bp, Homo sapien
aacaccagtctgcctcactcttttctggaacac

SEQ ID NO: 835204 - DNA, 33 bp, Homo sapien
aacaccagtctgcctcgctcttttctggaacac

SEQ ID NO: 835205 - DNA, 33 bp, Homo sapien
tggcctgtaggacctcactcattcagccattcg

SEQ ID NO: 835206 - DNA, 33 bp, Homo sapien
tggcctgtaggacctcgctcattcagccattcg

SEQ ID NO: 835207 - DNA, 33 bp, Homo sapien
gcgctcatcccgagaacaaatgcctccaacccc

SEQ ID NO: 835208 - DNA, 33 bp, Homo sapien
gcgctcatcccgagaagaaatgcctccaacccc

SEQ ID NO: 835209 - DNA, 33 bp, Homo sapien
agcagtaaatactgaaaagggcatcctgttgca

SEQ ID NO: 835210 - DNA, 33 bp, Homo sapien
agcagtaaatactgaatagggcatcctgttgca

SEQ ID NO: 835211 - DNA, 33 bp, Homo sapien
taggcggatatccccaaacacgtttattgaatg

SEQ ID NO: 835212 - DNA, 33 bp, Homo sapien
taggcggatatccccagacacgtttattgaatg

SEQ ID NO: 835213 - DNA, 33 bp, Homo sapien
ttccatttggcaaataggtattcctctgttccc

SEQ ID NO: 835214 - DNA, 33 bp, Homo sapien
ttccatttggcaaatatgtattcctctgttccc

SEQ ID NO: 835215 - DNA, 33 bp, Homo sapien
agtcctccctggaaaacgcaggtatgggtgggg

SEQ ID NO: 835216 - DNA, 33 bp, Homo sapien
agtcctccctggaaaatgcaggtatgggtgggg

SEQ ID NO: 835217 - DNA, 33 bp, Homo sapien
gaggtgtggtcttttcccttgcacctcttctaa

SEQ ID NO: 835218 - DNA, 33 bp, Homo sapien
gaggtgtggtcttttctcttgcacctcttctaa

SEQ ID NO: 835219 - DNA, 33 bp, Homo sapien
ttatatttttctgccaagaattttgaaaagctc

SEQ ID NO: 835220 - DNA, 33 bp, Homo sapien
ttatatttttctgccaggaattttgaaaagctc

SEQ ID NO: 835221 - DNA, 33 bp, Homo sapien
agcagcccaagcgtcaactcatttatcctcaca

SEQ ID NO: 835222 - DNA, 33 bp, Homo sapien
agcagcccaagcgtcacctcatttatcctcaca

SEQ ID NO: 835223 - DNA, 33 bp, Homo sapien
cactgccgagggtggcactggaaacggaagtga

SEQ ID NO: 835224 - DNA, 33 bp, Homo sapien
cactgccgagggtggcgctggaaacggaagtga

SEQ ID NO: 835225 - DNA, 33 bp, Homo sapien
atgaagccttggtcaacgctgggttcctagcca

SEQ ID NO: 835226 - DNA, 33 bp, Homo sapien
atgaagccttggtcaatgctgggttcctagcca

SEQ ID NO: 835227 - DNA, 33 bp, Homo sapien
gggtgtcagtaggagtaactcacaatagtgttt

SEQ ID NO: 835228 - DNA, 33 bp, Homo sapien
gggtgtcagtaggagtgactcacaatagtgttt

SEQ ID NO: 835229 - DNA, 33 bp, Homo sapien
tgtatttacatgcaaacatattggtttatgcaa

SEQ ID NO: 835230 - DNA, 33 bp, Homo sapien
tgtatttacatgcaaatatattggtttatgcaa

SEQ ID NO: 835231 - DNA, 33 bp, Homo sapien
tccttgtacctcaagcagcatgaaaaccatttg

SEQ ID NO: 835232 - DNA, 33 bp, Homo sapien
tccttgtacctcaagcggcatgaaaaccatttg

SEQ ID NO: 835233 - DNA, 33 bp, Homo sapien
tctggaggtgattccacatcccctggcattatg

SEQ ID NO: 835234 - DNA, 33 bp, Homo sapien
tctggaggtgattccatatcccctggcattatg

SEQ ID NO: 835235 - DNA, 33 bp, Homo sapien
aaaaggaaaaaaaagcgcacatactcataaact

SEQ ID NO: 835236 - DNA, 33 bp, Homo sapien
aaaaggaaaaaaaagctcacatactcataaact

SEQ ID NO: 835237 - DNA, 33 bp, Homo sapien
atatgaatcgggtcaactgttaaccaactggac

SEQ ID NO: 835238 - DNA, 33 bp, Homo sapien
atatgaatcgggtcaattgttaaccaactggac

SEQ ID NO: 835239 - DNA, 33 bp, Homo sapien
tgaggacatactcgtaagtccagttggttaaca

SEQ ID NO: 835240 - DNA, 33 bp, Homo sapien
tgaggacatactcgtaggtccagttggttaaca

SEQ ID NO: 835241 - DNA, 33 bp, Homo sapien
cagaggcctgaacagacatcagtgctcaagggc

SEQ ID NO: 835242 - DNA, 33 bp, Homo sapien
cagaggcctgaacagagatcagtgctcaagggc

SEQ ID NO: 835243 - DNA, 33 bp, Homo sapien
aaacggcattacactccagacctggaggcttga

SEQ ID NO: 835244 - DNA, 33 bp, Homo sapien
aaacggcattacactctagacctggaggcttga

SEQ ID NO: 835245 - DNA, 33 bp, Homo sapien
tctatgaatccctgccactggccatgaagcggt

SEQ ID NO: 835246 - DNA, 33 bp, Homo sapien
tctatgaatccctgccgctggccatgaagcggt

SEQ ID NO: 835247 - DNA, 33 bp, Homo sapien
ttattgctgtcatagcgcagttgtcctcctgtc

SEQ ID NO: 835248 - DNA, 33 bp, Homo sapien
ttattgctgtcatagctcagttgtcctcctgtc

SEQ ID NO: 835249 - DNA, 33 bp, Homo sapien
cttgccacaccttgccacggtgacatccatgtc

SEQ ID NO: 835250 - DNA, 33 bp, Homo sapien
cttgccacaccttgccgcggtgacatccatgtc

SEQ ID NO: 835251 - DNA, 33 bp, Homo sapien
gccccatcagcagaaactagccctggagtctcc

SEQ ID NO: 835252 - DNA, 33 bp, Homo sapien
gccccatcagcagaaattagccctggagtctcc

SEQ ID NO: 835253 - DNA, 33 bp, Homo sapien
acctgacttcttgagcactgtcctggcctggga

SEQ ID NO: 835254 - DNA, 33 bp, Homo sapien
acctgacttcttgagcgctgtcctggcctggga

SEQ ID NO: 835255 - DNA, 33 bp, Homo sapien
ggggttaattgctccacctctcagctatcacaa

SEQ ID NO: 835256 - DNA, 33 bp, Homo sapien
ggggttaattgctccatctctcagctatcacaa

SEQ ID NO: 835257 - DNA, 33 bp, Homo sapien
tgggcttgctctcacactgacccttggcaagat

SEQ ID NO: 835258 - DNA, 33 bp, Homo sapien
tgggcttgctctcacagtgacccttggcaagat

SEQ ID NO: 835259 - DNA, 33 bp, Homo sapien
cccacacagctcctcactccgcatgtgaccttg

SEQ ID NO: 835260 - DNA, 33 bp, Homo sapien
cccacacagctcctcagtccgcatgtgaccttg

SEQ ID NO: 835261 - DNA, 33 bp, Homo sapien
gccgagtttctcacccacaggaatccaaatcct

SEQ ID NO: 835262 - DNA, 33 bp, Homo sapien
gccgagtttctcacccgcaggaatccaaatcct

SEQ ID NO: 835263 - DNA, 33 bp, Homo sapien
agaggtgttcactcacaaagcccagccctgccc

SEQ ID NO: 835264 - DNA, 33 bp, Homo sapien
agaggtgttcactcacgaagcccagccctgccc

SEQ ID NO: 835265 - DNA, 33 bp, Homo sapien
aatgtttagaacaagtaaccatcttcctgctga

SEQ ID NO: 835266 - DNA, 33 bp, Homo sapien
aatgtttagaacaagtgaccatcttcctgctga

SEQ ID NO: 835267 - DNA, 33 bp, Homo sapien
cttggctctggttgggaagaaggttcagcagga

SEQ ID NO: 835268 - DNA, 33 bp, Homo sapien
cttggctctggttgggtagaaggttcagcagga

SEQ ID NO: 835269 - DNA, 33 bp, Homo sapien
gaacagctcatatacaaagtagtcactgaagcc

SEQ ID NO: 835270 - DNA, 33 bp, Homo sapien
gaacagctcatatacagagtagtcactgaagcc

SEQ ID NO: 835271 - DNA, 33 bp, Homo sapien
tgtataaccgctctcccgcgccttccttttggg

SEQ ID NO: 835272 - DNA, 33 bp, Homo sapien
tgtataaccgctctcctgcgccttccttttggg

SEQ ID NO: 835273 - DNA, 33 bp, Homo sapien
tttaggataaggaaaccgtggcacaggttgact

SEQ ID NO: 835274 - DNA, 33 bp, Homo sapien
tttaggataaggaaactgtggcacaggttgact

SEQ ID NO: 835275 - DNA, 33 bp, Homo sapien
ggccctcccaggaatggataagcactgaagcct

SEQ ID NO: 835276 - DNA, 33 bp, Homo sapien
ggccctcccaggaatgtataagcactgaagcct

SEQ ID NO: 835277 - DNA, 33 bp, Homo sapien
gcctggaccacgtagacggcctctcgattcggt

SEQ ID NO: 835278 - DNA, 33 bp, Homo sapien
gcctggaccacgtagatggcctctcgattcggt

SEQ ID NO: 835279 - DNA, 33 bp, Homo sapien
agctgctgccgcattcaccttcctggcacctgg

SEQ ID NO: 835280 - DNA, 33 bp, Homo sapien
agctgctgccgcattcgccttcctggcacctgg

SEQ ID NO: 835281 - DNA, 33 bp, Homo sapien
ggcaactcaaccactccgaacctctgtctcctc

SEQ ID NO: 835282 - DNA, 33 bp, Homo sapien
ggcaactcaaccactctgaacctctgtctcctc

SEQ ID NO: 835283 - DNA, 33 bp, Homo sapien
agctacccacgaaacccgccagggcttctggca

SEQ ID NO: 835284 - DNA, 33 bp, Homo sapien
agctacccacgaaacctgccagggcttctggca

SEQ ID NO: 835285 - DNA, 33 bp, Homo sapien
cccaatggaacataaactagcaaaatagcaagc

SEQ ID NO: 835286 - DNA, 33 bp, Homo sapien
cccaatggaacataaagtagcaaaatagcaagc

SEQ ID NO: 835287 - DNA, 33 bp, Homo sapien
tgttctagaatcaccacgtctcagggcaggcca

SEQ ID NO: 835288 - DNA, 33 bp, Homo sapien
tgttctagaatcaccatgtctcagggcaggcca

SEQ ID NO: 835289 - DNA, 33 bp, Homo sapien
tgcagacctcctacaccgtcacccctctgcatt

SEQ ID NO: 835290 - DNA, 33 bp, Homo sapien
tgcagacctcctacactgtcacccctctgcatt

SEQ ID NO: 835291 - DNA, 33 bp, Homo sapien
acctcctgtgacaccactctaagcctgtgtgtg

SEQ ID NO: 835292 - DNA, 33 bp, Homo sapien
acctcctgtgacaccattctaagcctgtgtgtg

SEQ ID NO: 835293 - DNA, 33 bp, Homo sapien
gcagtgcttcaaacccaacacagataatttcta

SEQ ID NO: 835294 - DNA, 33 bp, Homo sapien
gcagtgcttcaaacccgacacagataatttcta

SEQ ID NO: 835295 - DNA, 33 bp, Homo sapien
aggtccggaaatctcaagcaggatagtagggtg

SEQ ID NO: 835296 - DNA, 33 bp, Homo sapien
aggtccggaaatctcaggcaggatagtagggtg

SEQ ID NO: 835297 - DNA, 33 bp, Homo sapien
aaagcaggcacagttacgaccaaacgagaggga

SEQ ID NO: 835298 - DNA, 33 bp, Homo sapien
aaagcaggcacagttatgaccaaacgagaggga

SEQ ID NO: 835299 - DNA, 33 bp, Homo sapien
tggggtcctgtaggacaactaactggctatgtg

SEQ ID NO: 835300 - DNA, 33 bp, Homo sapien
tggggtcctgtaggaccactaactggctatgtg

SEQ ID NO: 835301 - DNA, 33 bp, Homo sapien
ctattcaacctaacaaacatttattatgtgcct

SEQ ID NO: 835302 - DNA, 33 bp, Homo sapien
ctattcaacctaacaagcatttattatgtgcct

SEQ ID NO: 835303 - DNA, 33 bp, Homo sapien
cctccagtcatttttcaacttattccccataaa

SEQ ID NO: 835304 - DNA, 33 bp, Homo sapien
cctccagtcatttttcgacttattccccataaa

SEQ ID NO: 835305 - DNA, 33 bp, Homo sapien
gtgttctcgctccagaacccagctggtgatggt

SEQ ID NO: 835306 - DNA, 33 bp, Homo sapien
gtgttctcgctccagagcccagctggtgatggt

SEQ ID NO: 835307 - DNA, 33 bp, Homo sapien
ctcgtctcacagatgaaatggacagcagctgtg

SEQ ID NO: 835308 - DNA, 33 bp, Homo sapien
ctcgtctcacagatgagatggacagcagctgtg

SEQ ID NO: 835309 - DNA, 33 bp, Homo sapien
cctttatctctcagggcatggccaggaatcagg

SEQ ID NO: 835310 - DNA, 33 bp, Homo sapien
cctttatctctcagggtatggccaggaatcagg

SEQ ID NO: 835311 - DNA, 33 bp, Homo sapien
gaaagaggtgaggcgaaggtgactgcgggattc

SEQ ID NO: 835312 - DNA, 33 bp, Homo sapien
gaaagaggtgaggcgagggtgactgcgggattc

SEQ ID NO: 835313 - DNA, 33 bp, Homo sapien
ttgttgtatagcaataaataactggaagacatc

SEQ ID NO: 835314 - DNA, 33 bp, Homo sapien
ttgttgtatagcaatagataactggaagacatc

SEQ ID NO: 835315 - DNA, 33 bp, Homo sapien
tagatggcagagctgacgagatttgctgacaga

SEQ ID NO: 835316 - DNA, 33 bp, Homo sapien
tagatggcagagctgatgagatttgctgacaga

SEQ ID NO: 835317 - DNA, 33 bp, Homo sapien
ggccttctcttaccatcatgcatgcacacacat

SEQ ID NO: 835318 - DNA, 33 bp, Homo sapien
ggccttctcttaccatgatgcatgcacacacat

SEQ ID NO: 835319 - DNA, 33 bp, Homo sapien
gttggtggagaaaagacaagttgcagaaagcct

SEQ ID NO: 835320 - DNA, 33 bp, Homo sapien
gttggtggagaaaagataagttgcagaaagcct

SEQ ID NO: 835321 - DNA, 33 bp, Homo sapien
gtaagaaattgagggaaggtacacaaaggattt

SEQ ID NO: 835322 - DNA, 33 bp, Homo sapien
gtaagaaattgagggatggtacacaaaggattt

SEQ ID NO: 835323 - DNA, 33 bp, Homo sapien
attgggctctgagatacgtgcttggactcagca

SEQ ID NO: 835324 - DNA, 33 bp, Homo sapien
attgggctctgagatatgtgcttggactcagca

SEQ ID NO: 835325 - DNA, 33 bp, Homo sapien
acgcactttgtacaaacagtcggacttttagca

SEQ ID NO: 835326 - DNA, 33 bp, Homo sapien
acgcactttgtacaaatagtcggacttttagca

SEQ ID NO: 835327 - DNA, 33 bp, Homo sapien
ggtctaccagggtctacggtctctcttaactcc

SEQ ID NO: 835328 - DNA, 33 bp, Homo sapien
ggtctaccagggtctatggtctctcttaactcc

SEQ ID NO: 835329 - DNA, 33 bp, Homo sapien
caaaatacatcattaacagtaaaaaggcaagac

SEQ ID NO: 835330 - DNA, 33 bp, Homo sapien
caaaatacatcattaagagtaaaaaggcaagac

SEQ ID NO: 835331 - DNA, 33 bp, Homo sapien
gcccaagttccagaaccgagtagatggtactgg

SEQ ID NO: 835332 - DNA, 33 bp, Homo sapien
gcccaagttccagaactgagtagatggtactgg

SEQ ID NO: 835333 - DNA, 33 bp, Homo sapien
tgccaacctgacacaaaagactttggtttggag

SEQ ID NO: 835334 - DNA, 33 bp, Homo sapien
tgccaacctgacacaagagactttggtttggag

SEQ ID NO: 835335 - DNA, 33 bp, Homo sapien
cccctcaggcaacttacgtcttcacattcacgc

SEQ ID NO: 835336 - DNA, 33 bp, Homo sapien
cccctcaggcaacttatgtcttcacattcacgc

SEQ ID NO: 835337 - DNA, 33 bp, Homo sapien
tccaggcgacccttgacggcaacggggtttctt

SEQ ID NO: 835338 - DNA, 33 bp, Homo sapien
tccaggcgacccttgatggcaacggggtttctt

SEQ ID NO: 835339 - DNA, 33 bp, Homo sapien
ctgctggcctcaagaactgagggaaggagaagg

SEQ ID NO: 835340 - DNA, 33 bp, Homo sapien
ctgctggcctcaagaagtgagggaaggagaagg

SEQ ID NO: 835341 - DNA, 33 bp, Homo sapien
tagattatggatgggggaaggcgaatcctaagt

SEQ ID NO: 835342 - DNA, 33 bp, Homo sapien
tagattatggatggggtaaggcgaatcctaagt

SEQ ID NO: 835343 - DNA, 33 bp, Homo sapien
ttctgcttctgctgcacggtagctaaggaagag

SEQ ID NO: 835344 - DNA, 33 bp, Homo sapien
ttctgcttctgctgcatggtagctaaggaagag

SEQ ID NO: 835345 - DNA, 33 bp, Homo sapien
ggaagaggtgagtaataaatggctgaggcagca

SEQ ID NO: 835346 - DNA, 33 bp, Homo sapien
ggaagaggtgagtaatgaatggctgaggcagca

SEQ ID NO: 835347 - DNA, 33 bp, Homo sapien
gcaaactagaagccaccgccaattcgaatccca

SEQ ID NO: 835348 - DNA, 33 bp, Homo sapien
gcaaactagaagccactgccaattcgaatccca

SEQ ID NO: 835349 - DNA, 33 bp, Homo sapien
actgatgtgttttctcaagatgcatatggaaag

SEQ ID NO: 835350 - DNA, 33 bp, Homo sapien
actgatgtgttttctcgagatgcatatggaaag

SEQ ID NO: 835351 - DNA, 33 bp, Homo sapien
aagattatgcaattgaagctaagaataaaattt

SEQ ID NO: 835352 - DNA, 33 bp, Homo sapien
aagattatgcaattgaggctaagaataaaattt

SEQ ID NO: 835353 - DNA, 33 bp, Homo sapien
aggattttctcaagccgctcaatttggtcatct

SEQ ID NO: 835354 - DNA, 33 bp, Homo sapien
aggattttctcaagcctctcaatttggtcatct

SEQ ID NO: 835355 - DNA, 33 bp, Homo sapien
gtactataaaatggacaagtagaggtgactggg

SEQ ID NO: 835356 - DNA, 33 bp, Homo sapien
gtactataaaatggacgagtagaggtgactggg

SEQ ID NO: 835357 - DNA, 33 bp, Homo sapien
acaaagggcacccacaaagagcctaaagagcct

SEQ ID NO: 835358 - DNA, 33 bp, Homo sapien
acaaagggcacccacagagagcctaaagagcct

SEQ ID NO: 835359 - DNA, 33 bp, Homo sapien
acagggtcagataaaacccgtctgatgagaatg

SEQ ID NO: 835360 - DNA, 33 bp, Homo sapien
acagggtcagataaaatccgtctgatgagaatg

SEQ ID NO: 835361 - DNA, 33 bp, Homo sapien
tatacaattagctatacgtgtgaacaaatgggg

SEQ ID NO: 835362 - DNA, 33 bp, Homo sapien
tatacaattagctatatgtgtgaacaaatgggg

SEQ ID NO: 835363 - DNA, 33 bp, Homo sapien
agggttctagtgctcaaagttcttgggtgtaca

SEQ ID NO: 835364 - DNA, 33 bp, Homo sapien
agggttctagtgctcagagttcttgggtgtaca

SEQ ID NO: 835365 - DNA, 33 bp, Homo sapien
atcccacgtgtctttaccgaccacctgcgatgt

SEQ ID NO: 835366 - DNA, 33 bp, Homo sapien
atcccacgtgtctttatcgaccacctgcgatgt

SEQ ID NO: 835367 - DNA, 33 bp, Homo sapien
ggattctaatttaaagacacagccgccctgaat

SEQ ID NO: 835368 - DNA, 33 bp, Homo sapien
ggattctaatttaaaggcacagccgccctgaat

SEQ ID NO: 835369 - DNA, 33 bp, Homo sapien
tatttggctcagagaacgcgagtgacctaccta

SEQ ID NO: 835370 - DNA, 33 bp, Homo sapien
tatttggctcagagaatgcgagtgacctaccta

SEQ ID NO: 835371 - DNA, 33 bp, Homo sapien
atctgtttcctgtaaagaagcagaagggagaag

SEQ ID NO: 835372 - DNA, 33 bp, Homo sapien
atctgtttcctgtaaataagcagaagggagaag

SEQ ID NO: 835373 - DNA, 33 bp, Homo sapien
atctcatcagctaggaacatattaggcagtaag

SEQ ID NO: 835374 - DNA, 33 bp, Homo sapien
atctcatcagctaggagcatattaggcagtaag

SEQ ID NO: 835375 - DNA, 33 bp, Homo sapien
gtcctccacatgagacgaagtcccaggcctggt

SEQ ID NO: 835376 - DNA, 33 bp, Homo sapien
gtcctccacatgagactaagtcccaggcctggt

SEQ ID NO: 835377 - DNA, 33 bp, Homo sapien
tgtaatcctgcttcccactgaggtcggtctgag

SEQ ID NO: 835378 - DNA, 33 bp, Homo sapien
tgtaatcctgcttcccgctgaggtcggtctgag

SEQ ID NO: 835379 - DNA, 33 bp, Homo sapien
gtgtaaaagacaataacgacagatgtgaaagag

SEQ ID NO: 835380 - DNA, 33 bp, Homo sapien
gtgtaaaagacaataatgacagatgtgaaagag

SEQ ID NO: 835381 - DNA, 33 bp, Homo sapien
gcagaaagcaataaaactgataaatctgtagcc

SEQ ID NO: 835382 - DNA, 33 bp, Homo sapien
gcagaaagcaataaaattgataaatctgtagcc

SEQ ID NO: 835383 - DNA, 33 bp, Homo sapien
ttagaaggataatgacagaatactattcccaac

SEQ ID NO: 835384 - DNA, 33 bp, Homo sapien
ttagaaggataatgacggaatactattcccaac

SEQ ID NO: 835385 - DNA, 33 bp, Homo sapien
ggcttgaggatgaagacggtgagaggggctatc

SEQ ID NO: 835386 - DNA, 33 bp, Homo sapien
ggcttgaggatgaagatggtgagaggggctatc

SEQ ID NO: 835387 - DNA, 33 bp, Homo sapien
gcacacatcagcacacaagctgtggttatttgt

SEQ ID NO: 835388 - DNA, 33 bp, Homo sapien
gcacacatcagcacacgagctgtggttatttgt

SEQ ID NO: 835389 - DNA, 33 bp, Homo sapien
gcccctatcgactctccgaccctcataccaaaa

SEQ ID NO: 835390 - DNA, 33 bp, Homo sapien
gcccctatcgactctctgaccctcataccaaaa

SEQ ID NO: 835391 - DNA, 33 bp, Homo sapien
gcatgtgaacatatccagcgttcgtattcatag

SEQ ID NO: 835392 - DNA, 33 bp, Homo sapien
gcatgtgaacatatccggcgttcgtattcatag

SEQ ID NO: 835393 - DNA, 33 bp, Homo sapien
gtaggatcaaaaccataaggcagcacattctgt

SEQ ID NO: 835394 - DNA, 33 bp, Homo sapien
gtaggatcaaaaccatgaggcagcacattctgt

SEQ ID NO: 835395 - DNA, 33 bp, Homo sapien
tctggaatttaaagccccatcaacaaacttttc

SEQ ID NO: 835396 - DNA, 33 bp, Homo sapien
tctggaatttaaagcctcatcaacaaacttttc

SEQ ID NO: 835397 - DNA, 33 bp, Homo sapien
actattgccaacgggacacgcgagaagctggta

SEQ ID NO: 835398 - DNA, 33 bp, Homo sapien
actattgccaacgggatacgcgagaagctggta

SEQ ID NO: 835399 - DNA, 33 bp, Homo sapien
tatgaaagaatgttcaccacaactttactcaga

SEQ ID NO: 835400 - DNA, 33 bp, Homo sapien
tatgaaagaatgttcatcacaactttactcaga

SEQ ID NO: 835401 - DNA, 33 bp, Homo sapien
atttcacaggtcactaagggtgtgtgtcaggcc

SEQ ID NO: 835402 - DNA, 33 bp, Homo sapien
atttcacaggtcactacgggtgtgtgtcaggcc

SEQ ID NO: 835403 - DNA, 33 bp, Homo sapien
tgctgtgtgacagtcacaaattctcagtggctt

SEQ ID NO: 835404 - DNA, 33 bp, Homo sapien
tgctgtgtgacagtcagaaattctcagtggctt

SEQ ID NO: 835405 - DNA, 33 bp, Homo sapien
gattcttgagcgggcaatctttatcctgctctc

SEQ ID NO: 835406 - DNA, 33 bp, Homo sapien
gattcttgagcgggcagtctttatcctgctctc

SEQ ID NO: 835407 - DNA, 33 bp, Homo sapien
ctccttttaggccctacggcttctccagtccct

SEQ ID NO: 835408 - DNA, 33 bp, Homo sapien
ctccttttaggccctatggcttctccagtccct

SEQ ID NO: 835409 - DNA, 33 bp, Homo sapien
tgtcacaggcccagggaaaatgaaagcctgtcc

SEQ ID NO: 835410 - DNA, 33 bp, Homo sapien
tgtcacaggcccaggggaaatgaaagcctgtcc

SEQ ID NO: 835411 - DNA, 33 bp, Homo sapien
tagctccatctacaggaatgtgtcaaacaccta

SEQ ID NO: 835412 - DNA, 33 bp, Homo sapien
tagctccatctacaggtatgtgtcaaacaccta

SEQ ID NO: 835413 - DNA, 33 bp, Homo sapien
agcctctttcagcagcagactctccacacacct

SEQ ID NO: 835414 - DNA, 33 bp, Homo sapien
agcctctttcagcagcggactctccacacacct

SEQ ID NO: 835415 - DNA, 33 bp, Homo sapien
tttgctggtgaaggaaagattaggtgaccacgg

SEQ ID NO: 835416 - DNA, 33 bp, Homo sapien
tttgctggtgaaggaaggattaggtgaccacgg

SEQ ID NO: 835417 - DNA, 33 bp, Homo sapien
tctcaatgaatccttacacattagccggtgcta

SEQ ID NO: 835418 - DNA, 33 bp, Homo sapien
tctcaatgaatccttatacattagccggtgcta

SEQ ID NO: 835419 - DNA, 33 bp, Homo sapien
agggtgggggtgtggacgcttcacggtgggcac

SEQ ID NO: 835420 - DNA, 33 bp, Homo sapien
agggtgggggtgtggatgcttcacggtgggcac

SEQ ID NO: 835421 - DNA, 33 bp, Homo sapien
gcggctctgtggccagaacattaaggcaaagcc

SEQ ID NO: 835422 - DNA, 33 bp, Homo sapien
gcggctctgtggccagcacattaaggcaaagcc

SEQ ID NO: 835423 - DNA, 33 bp, Homo sapien
cccgtttccatgctcaaccgacgatagcggaaa

SEQ ID NO: 835424 - DNA, 33 bp, Homo sapien
cccgtttccatgctcagccgacgatagcggaaa

SEQ ID NO: 835425 - DNA, 33 bp, Homo sapien
ctctgtaattcttacaataaccagcaaagtcgg

SEQ ID NO: 835426 - DNA, 33 bp, Homo sapien
ctctgtaattcttacagtaaccagcaaagtcgg

SEQ ID NO: 835427 - DNA, 33 bp, Homo sapien
aatagtccttcacttacagcttgttgtgaggtt

SEQ ID NO: 835428 - DNA, 33 bp, Homo sapien
aatagtccttcacttatagcttgttgtgaggtt

SEQ ID NO: 835429 - DNA, 33 bp, Homo sapien
tcattcccatcaagctcagaggcgaatgcagac

SEQ ID NO: 835430 - DNA, 33 bp, Homo sapien
tcattcccatcaagcttagaggcgaatgcagac

SEQ ID NO: 835431 - DNA, 33 bp, Homo sapien
gcactctgccctctgacgttgtgttttcccagg

SEQ ID NO: 835432 - DNA, 33 bp, Homo sapien
gcactctgccctctgatgttgtgttttcccagg

SEQ ID NO: 835433 - DNA, 33 bp, Homo sapien
gagacatccgagaagacacctgaagacaccaag

SEQ ID NO: 835434 - DNA, 33 bp, Homo sapien
gagacatccgagaagatacctgaagacaccaag

SEQ ID NO: 835435 - DNA, 33 bp, Homo sapien
gtatgtgccaggagcacgtttcactcctttttt

SEQ ID NO: 835436 - DNA, 33 bp, Homo sapien
gtatgtgccaggagcatgtttcactcctttttt

SEQ ID NO: 835437 - DNA, 33 bp, Homo sapien
ggacttgactccctcactaatcagatctattcc

SEQ ID NO: 835438 - DNA, 33 bp, Homo sapien
ggacttgactccctcattaatcagatctattcc

SEQ ID NO: 835439 - DNA, 33 bp, Homo sapien
attgtgtgagggagaaatgaataatccacacga

SEQ ID NO: 835440 - DNA, 33 bp, Homo sapien
attgtgtgagggagaagtgaataatccacacga

SEQ ID NO: 835441 - DNA, 33 bp, Homo sapien
aacagtcctcactagacgcgtgaatgaaaggtg

SEQ ID NO: 835442 - DNA, 33 bp, Homo sapien
aacagtcctcactagatgcgtgaatgaaaggtg

SEQ ID NO: 835443 - DNA, 33 bp, Homo sapien
cttcaggctccaggagaaactgcggacacatca

SEQ ID NO: 835444 - DNA, 33 bp, Homo sapien
cttcaggctccaggaggaactgcggacacatca

SEQ ID NO: 835445 - DNA, 33 bp, Homo sapien
aatgaatacaactgtaaaaactggaaccaaacc

SEQ ID NO: 835446 - DNA, 33 bp, Homo sapien
aatgaatacaactgtacaaactggaaccaaacc

SEQ ID NO: 835447 - DNA, 33 bp, Homo sapien
ttttcctatattgacaactctctgttaaaacaa

SEQ ID NO: 835448 - DNA, 33 bp, Homo sapien
ttttcctatattgacacctctctgttaaaacaa

SEQ ID NO: 835449 - DNA, 33 bp, Homo sapien
aatgcatatatatggcccccgcattctgccccc

SEQ ID NO: 835450 - DNA, 33 bp, Homo sapien
aatgcatatatatggctcccgcattctgccccc

SEQ ID NO: 835451 - DNA, 33 bp, Homo sapien
ggatttcactccaactcacccattttacagatt

SEQ ID NO: 835452 - DNA, 33 bp, Homo sapien
ggatttcactccaacttacccattttacagatt

SEQ ID NO: 835453 - DNA, 33 bp, Homo sapien
gcaatgatggaggagaatcggctactagcccgt

SEQ ID NO: 835454 - DNA, 33 bp, Homo sapien
gcaatgatggaggagagtcggctactagcccgt

SEQ ID NO: 835455 - DNA, 33 bp, Homo sapien
atccctatgagcttcacggtatttttatcccta

SEQ ID NO: 835456 - DNA, 33 bp, Homo sapien
atccctatgagcttcatggtatttttatcccta

SEQ ID NO: 835457 - DNA, 33 bp, Homo sapien
acagcagttctcttcgaatccggttgttgtttt

SEQ ID NO: 835458 - DNA, 33 bp, Homo sapien
acagcagttctcttcggatccggttgttgtttt

SEQ ID NO: 835459 - DNA, 33 bp, Homo sapien
catggcctgcgagtcgcacagtgcagctggcag

SEQ ID NO: 835460 - DNA, 33 bp, Homo sapien
catggcctgcgagtcgtacagtgcagctggcag

SEQ ID NO: 835461 - DNA, 33 bp, Homo sapien
ctacaccctgcccttaacatcatctgtggatgg

SEQ ID NO: 835462 - DNA, 33 bp, Homo sapien
ctacaccctgcccttagcatcatctgtggatgg

SEQ ID NO: 835463 - DNA, 33 bp, Homo sapien
aaagactccaccaaaaaactattacaactgata

SEQ ID NO: 835464 - DNA, 33 bp, Homo sapien
aaagactccaccaaaacactattacaactgata

SEQ ID NO: 835465 - DNA, 33 bp, Homo sapien
atctgttgtgtttctcaatttgaggttaccatg

SEQ ID NO: 835466 - DNA, 33 bp, Homo sapien
atctgttgtgtttctcgatttgaggttaccatg

SEQ ID NO: 835467 - DNA, 33 bp, Homo sapien
atctcttttgcagccacgagctgtgcagcatgg

SEQ ID NO: 835468 - DNA, 33 bp, Homo sapien
atctcttttgcagccatgagctgtgcagcatgg

SEQ ID NO: 835469 - DNA, 33 bp, Homo sapien
aaatgcccctaaacacaatgcccctttccaccc

SEQ ID NO: 835470 - DNA, 33 bp, Homo sapien
aaatgcccctaaacacgatgcccctttccaccc

SEQ ID NO: 835471 - DNA, 33 bp, Homo sapien
gtgagcaagggggcccaaatcgaccataaaggg

SEQ ID NO: 835472 - DNA, 33 bp, Homo sapien
gtgagcaagggggcccgaatcgaccataaaggg

SEQ ID NO: 835473 - DNA, 33 bp, Homo sapien
tgatagtttcataggcaaacatgtcatgacttt

SEQ ID NO: 835474 - DNA, 33 bp, Homo sapien
tgatagtttcataggcgaacatgtcatgacttt

SEQ ID NO: 835475 - DNA, 33 bp, Homo sapien
acaacagttctcaacaacctgaaatattcttga

SEQ ID NO: 835476 - DNA, 33 bp, Homo sapien
acaacagttctcaacatcctgaaatattcttga

SEQ ID NO: 835477 - DNA, 33 bp, Homo sapien
ctaaacaacattctggaagcaaattggattttt

SEQ ID NO: 835478 - DNA, 33 bp, Homo sapien
ctaaacaacattctgggagcaaattggattttt

SEQ ID NO: 835479 - DNA, 33 bp, Homo sapien
aggatgcggactccaacaaaggcattaagaaag

SEQ ID NO: 835480 - DNA, 33 bp, Homo sapien
aggatgcggactccaataaaggcattaagaaag

SEQ ID NO: 835481 - DNA, 33 bp, Homo sapien
atgagcactgtatgtacagaaaagggaaggagc

SEQ ID NO: 835482 - DNA, 33 bp, Homo sapien
atgagcactgtatgtagagaaaagggaaggagc

SEQ ID NO: 835483 - DNA, 33 bp, Homo sapien
cttcagagcacatggacgatacccaggtcagca

SEQ ID NO: 835484 - DNA, 33 bp, Homo sapien
cttcagagcacatggatgatacccaggtcagca

SEQ ID NO: 835485 - DNA, 33 bp, Homo sapien
cccaagaatccagttcaaactctactgtcaaca

SEQ ID NO: 835486 - DNA, 33 bp, Homo sapien
cccaagaatccagttccaactctactgtcaaca

SEQ ID NO: 835487 - DNA, 33 bp, Homo sapien
agaaatcaggagaaatcaagatgagcagatgct

SEQ ID NO: 835488 - DNA, 33 bp, Homo sapien
agaaatcaggagaaatgaagatgagcagatgct

SEQ ID NO: 835489 - DNA, 33 bp, Homo sapien
gactagaagtaatccacgaagaactatcagatg

SEQ ID NO: 835490 - DNA, 33 bp, Homo sapien
gactagaagtaatccatgaagaactatcagatg

SEQ ID NO: 835491 - DNA, 33 bp, Homo sapien
accattgtcacatctaaagaaatttgtaataat

SEQ ID NO: 835492 - DNA, 33 bp, Homo sapien
accattgtcacatctacagaaatttgtaataat

SEQ ID NO: 835493 - DNA, 33 bp, Homo sapien
atagtgggcactagctcaatcaagtgatcaaac

SEQ ID NO: 835494 - DNA, 33 bp, Homo sapien
atagtgggcactagcttaatcaagtgatcaaac

SEQ ID NO: 835495 - DNA, 33 bp, Homo sapien
atatgctttcactgatcactttatataatgaat

SEQ ID NO: 835496 - DNA, 33 bp, Homo sapien
atatgctttcactgattactttatataatgaat

SEQ ID NO: 835497 - DNA, 33 bp, Homo sapien
ttgcacaaaacactgggccacaaattggggata

SEQ ID NO: 835498 - DNA, 33 bp, Homo sapien
ttgcacaaaacactggtccacaaattggggata

SEQ ID NO: 835499 - DNA, 33 bp, Homo sapien
ataaaactgttagaagaatggtaagatggacgt

SEQ ID NO: 835500 - DNA, 33 bp, Homo sapien
ataaaactgttagaaggatggtaagatggacgt

SEQ ID NO: 835501 - DNA, 33 bp, Homo sapien
tttgggtttgatcctacagtggggaaccacagt

SEQ ID NO: 835502 - DNA, 33 bp, Homo sapien
tttgggtttgatcctagagtggggaaccacagt

SEQ ID NO: 835503 - DNA, 33 bp, Homo sapien
gagtccttttgtaacacatcttggtcaccgttc

SEQ ID NO: 835504 - DNA, 33 bp, Homo sapien
gagtccttttgtaacatatcttggtcaccgttc

SEQ ID NO: 835505 - DNA, 33 bp, Homo sapien
ttttgatttagtgcaacctaagctgtacagtgt

SEQ ID NO: 835506 - DNA, 33 bp, Homo sapien
ttttgatttagtgcaagctaagctgtacagtgt

SEQ ID NO: 835507 - DNA, 33 bp, Homo sapien
ttattgtccatttgtacacagtgcttaccccac

SEQ ID NO: 835508 - DNA, 33 bp, Homo sapien
ttattgtccatttgtatacagtgcttaccccac

SEQ ID NO: 835509 - DNA, 33 bp, Homo sapien
gcttcttctccataaactgaaggattccaagtg

SEQ ID NO: 835510 - DNA, 33 bp, Homo sapien
gcttcttctccataaattgaaggattccaagtg

SEQ ID NO: 835511 - DNA, 33 bp, Homo sapien
ctataaatatgtgacactccctggactctgttt

SEQ ID NO: 835512 - DNA, 33 bp, Homo sapien
ctataaatatgtgacattccctggactctgttt

SEQ ID NO: 835513 - DNA, 33 bp, Homo sapien
caggtgtagacaatcacgtaacaaccaatcctg

SEQ ID NO: 835514 - DNA, 33 bp, Homo sapien
caggtgtagacaatcatgtaacaaccaatcctg

SEQ ID NO: 835515 - DNA, 33 bp, Homo sapien
atgataccccagaatacgacacattggcaggtt

SEQ ID NO: 835516 - DNA, 33 bp, Homo sapien
atgataccccagaatatgacacattggcaggtt

SEQ ID NO: 835517 - DNA, 33 bp, Homo sapien
tcaagctctggtctccagaattttagggctgag

SEQ ID NO: 835518 - DNA, 33 bp, Homo sapien
tcaagctctggtctcctgaattttagggctgag

SEQ ID NO: 835519 - DNA, 33 bp, Homo sapien
cctgggaagttaaaaactccctgaagatgacat

SEQ ID NO: 835520 - DNA, 33 bp, Homo sapien
cctgggaagttaaaaattccctgaagatgacat

SEQ ID NO: 835521 - DNA, 33 bp, Homo sapien
ggctatgaaaaggttaaagggtcatcagggtgt

SEQ ID NO: 835522 - DNA, 33 bp, Homo sapien
ggctatgaaaaggttacagggtcatcagggtgt

SEQ ID NO: 835523 - DNA, 33 bp, Homo sapien
agggtttggcaccaagaaaatatcttgtggaat

SEQ ID NO: 835524 - DNA, 33 bp, Homo sapien
agggtttggcaccaagtaaatatcttgtggaat

SEQ ID NO: 835525 - DNA, 33 bp, Homo sapien
gtataccagataagaaagatgctgcttggtttg

SEQ ID NO: 835526 - DNA, 33 bp, Homo sapien
gtataccagataagaaggatgctgcttggtttg

SEQ ID NO: 835527 - DNA, 33 bp, Homo sapien
atcaagtgggataaaagagagtcaatcccataa

SEQ ID NO: 835528 - DNA, 33 bp, Homo sapien
atcaagtgggataaaatagagtcaatcccataa

SEQ ID NO: 835529 - DNA, 33 bp, Homo sapien
atcaggtcagtggagaacacataggagcagtaa

SEQ ID NO: 835530 - DNA, 33 bp, Homo sapien
atcaggtcagtggagaccacataggagcagtaa

SEQ ID NO: 835531 - DNA, 33 bp, Homo sapien
gaggtggcaaacgaggcagtgataaagaagagg

SEQ ID NO: 835532 - DNA, 33 bp, Homo sapien
gaggtggcaaacgaggtagtgataaagaagagg

SEQ ID NO: 835533 - DNA, 33 bp, Homo sapien
gaaaaggcttggcagaccgagggctcgaatccc

SEQ ID NO: 835534 - DNA, 33 bp, Homo sapien
gaaaaggcttggcagatcgagggctcgaatccc

SEQ ID NO: 835535 - DNA, 33 bp, Homo sapien
tcattattacaagaggaccttttgcttaatttg

SEQ ID NO: 835536 - DNA, 33 bp, Homo sapien
tcattattacaagagggccttttgcttaatttg

SEQ ID NO: 835537 - DNA, 33 bp, Homo sapien
gggagggaacaaaatacgtttagatgcctgagg

SEQ ID NO: 835538 - DNA, 33 bp, Homo sapien
gggagggaacaaaatatgtttagatgcctgagg

SEQ ID NO: 835539 - DNA, 33 bp, Homo sapien
ctctgattatctgggccaggtaggaggtagact

SEQ ID NO: 835540 - DNA, 33 bp, Homo sapien
ctctgattatctgggctaggtaggaggtagact

SEQ ID NO: 835541 - DNA, 33 bp, Homo sapien
ggctgccatcttagaccatgaggacaagatagt

SEQ ID NO: 835542 - DNA, 33 bp, Homo sapien
ggctgccatcttagactatgaggacaagatagt

SEQ ID NO: 835543 - DNA, 33 bp, Homo sapien
tagtagagtaggcagcaagctagaaggagcctg

SEQ ID NO: 835544 - DNA, 33 bp, Homo sapien
tagtagagtaggcagcgagctagaaggagcctg

SEQ ID NO: 835545 - DNA, 33 bp, Homo sapien
aaccaggttcatggaacactttgaccagcattt

SEQ ID NO: 835546 - DNA, 33 bp, Homo sapien
aaccaggttcatggaatactttgaccagcattt

SEQ ID NO: 835547 - DNA, 33 bp, Homo sapien
ctgccacttgacattcactcatcacagtgctcc

SEQ ID NO: 835548 - DNA, 33 bp, Homo sapien
ctgccacttgacattcgctcatcacagtgctcc

SEQ ID NO: 835549 - DNA, 33 bp, Homo sapien
tctcctacccctctacaaactgactcctcagag

SEQ ID NO: 835550 - DNA, 33 bp, Homo sapien
tctcctacccctctactaactgactcctcagag

SEQ ID NO: 835551 - DNA, 33 bp, Homo sapien
cccagcctagggatggaagccagctggagtcag

SEQ ID NO: 835552 - DNA, 33 bp, Homo sapien
cccagcctagggatgggagccagctggagtcag

SEQ ID NO: 835553 - DNA, 33 bp, Homo sapien
cttgagtgggaacgaacctccaggcagagcgca

SEQ ID NO: 835554 - DNA, 33 bp, Homo sapien
cttgagtgggaacgaatctccaggcagagcgca

SEQ ID NO: 835555 - DNA, 33 bp, Homo sapien
ctgggtgccagacgcaagtggtcctgcccagag

SEQ ID NO: 835556 - DNA, 33 bp, Homo sapien
ctgggtgccagacgcaggtggtcctgcccagag

SEQ ID NO: 835557 - DNA, 33 bp, Homo sapien
gatgtatgggaccccccctaccaggacttgcaa

SEQ ID NO: 835558 - DNA, 33 bp, Homo sapien
gatgtatgggaccccctctaccaggacttgcaa

SEQ ID NO: 835559 - DNA, 33 bp, Homo sapien
tctctacattttgatacgtgattattcaattat

SEQ ID NO: 835560 - DNA, 33 bp, Homo sapien
tctctacattttgatatgtgattattcaattat

SEQ ID NO: 835561 - DNA, 33 bp, Homo sapien
tgaccaatagtctaacactatgaagaagcacaa

SEQ ID NO: 835562 - DNA, 33 bp, Homo sapien
tgaccaatagtctaaccctatgaagaagcacaa

SEQ ID NO: 835563 - DNA, 33 bp, Homo sapien
cctgatactcagtaacaggtggccagattctcc

SEQ ID NO: 835564 - DNA, 33 bp, Homo sapien
cctgatactcagtaacgggtggccagattctcc

SEQ ID NO: 835565 - DNA, 33 bp, Homo sapien
gcttctgctcagttggaaactctggcttaggtg

SEQ ID NO: 835566 - DNA, 33 bp, Homo sapien
gcttctgctcagttgggaactctggcttaggtg

SEQ ID NO: 835567 - DNA, 33 bp, Homo sapien
tattcttgtatccctacgggcagagatttgcat

SEQ ID NO: 835568 - DNA, 33 bp, Homo sapien
tattcttgtatccctatgggcagagatttgcat

SEQ ID NO: 835569 - DNA, 33 bp, Homo sapien
tctgaaagacattccacctatagaacactgcag

SEQ ID NO: 835570 - DNA, 33 bp, Homo sapien
tctgaaagacattccatctatagaacactgcag

SEQ ID NO: 835571 - DNA, 33 bp, Homo sapien
tctcccattcaccacaataggaaaaaagagacc

SEQ ID NO: 835572 - DNA, 33 bp, Homo sapien
tctcccattcaccacagtaggaaaaaagagacc

SEQ ID NO: 835573 - DNA, 33 bp, Homo sapien
cctggagatcccctccaaggagcacccgtatga

SEQ ID NO: 835574 - DNA, 33 bp, Homo sapien
cctggagatcccctccgaggagcacccgtatga

SEQ ID NO: 835575 - DNA, 33 bp, Homo sapien
agccaccataactggcagatggagtcagttttt

SEQ ID NO: 835576 - DNA, 33 bp, Homo sapien
agccaccataactggcggatggagtcagttttt

SEQ ID NO: 835577 - DNA, 33 bp, Homo sapien
gtcttccagtttgatacgccttcctctgtttga

SEQ ID NO: 835578 - DNA, 33 bp, Homo sapien
gtcttccagtttgatatgccttcctctgtttga

SEQ ID NO: 835579 - DNA, 33 bp, Homo sapien
atttgtcaaaaccgatcaaattgtgcacttaag

SEQ ID NO: 835580 - DNA, 33 bp, Homo sapien
atttgtcaaaaccgatgaaattgtgcacttaag

SEQ ID NO: 835581 - DNA, 33 bp, Homo sapien
gccacagtccagacccaagtgcaacctgcccca

SEQ ID NO: 835582 - DNA, 33 bp, Homo sapien
gccacagtccagacccgagtgcaacctgcccca

SEQ ID NO: 835583 - DNA, 33 bp, Homo sapien
tggaaagtgggtaagcactggactctatttggg

SEQ ID NO: 835584 - DNA, 33 bp, Homo sapien
tggaaagtgggtaagcgctggactctatttggg

SEQ ID NO: 835585 - DNA, 33 bp, Homo sapien
ggcgtgagcttttacaaccctacatccagctgt

SEQ ID NO: 835586 - DNA, 33 bp, Homo sapien
ggcgtgagcttttacatccctacatccagctgt

SEQ ID NO: 835587 - DNA, 33 bp, Homo sapien
ctatgcatctgtaaaacagaaccaggaaacata

SEQ ID NO: 835588 - DNA, 33 bp, Homo sapien
ctatgcatctgtaaaatagaaccaggaaacata

SEQ ID NO: 835589 - DNA, 33 bp, Homo sapien
tgtcagccaagaatggaaagaattgccttaacc

SEQ ID NO: 835590 - DNA, 33 bp, Homo sapien
tgtcagccaagaatgggaagaattgccttaacc

SEQ ID NO: 835591 - DNA, 33 bp, Homo sapien
ggctcactgtgacttcaacatctggggctcaag

SEQ ID NO: 835592 - DNA, 33 bp, Homo sapien
ggctcactgtgacttcgacatctggggctcaag

SEQ ID NO: 835593 - DNA, 33 bp, Homo sapien
ttccattaacgatagacgcttgcctttctttac

SEQ ID NO: 835594 - DNA, 33 bp, Homo sapien
ttccattaacgatagatgcttgcctttctttac

SEQ ID NO: 835595 - DNA, 33 bp, Homo sapien
caaaagaaatgctgaaatcttctatgcctctga

SEQ ID NO: 835596 - DNA, 33 bp, Homo sapien
caaaagaaatgctgaactcttctatgcctctga

SEQ ID NO: 835597 - DNA, 33 bp, Homo sapien
gaattaggtgtgcaaaatgcttaaaaaggagac

SEQ ID NO: 835598 - DNA, 33 bp, Homo sapien
gaattaggtgtgcaaagtgcttaaaaaggagac

SEQ ID NO: 835599 - DNA, 33 bp, Homo sapien
atgttactgcctcaaacagctatttagagaagt

SEQ ID NO: 835600 - DNA, 33 bp, Homo sapien
atgttactgcctcaaagagctatttagagaagt

SEQ ID NO: 835601 - DNA, 33 bp, Homo sapien
gtgtgagcaaccgtgcccggcctgcattttaaa

SEQ ID NO: 835602 - DNA, 33 bp, Homo sapien
gtgtgagcaaccgtgcgcggcctgcattttaaa

SEQ ID NO: 835603 - DNA, 33 bp, Homo sapien
gagcatactctgcataagtagtggtaagaaaag

SEQ ID NO: 835604 - DNA, 33 bp, Homo sapien
gagcatactctgcataggtagtggtaagaaaag

SEQ ID NO: 835605 - DNA, 33 bp, Homo sapien
cttctgggtattcataagctttgcctgcacctc

SEQ ID NO: 835606 - DNA, 33 bp, Homo sapien
cttctgggtattcataggctttgcctgcacctc

SEQ ID NO: 835607 - DNA, 33 bp, Homo sapien
gctaaaaacactacacaaacaggacattataaa

SEQ ID NO: 835608 - DNA, 33 bp, Homo sapien
gctaaaaacactacacgaacaggacattataaa

SEQ ID NO: 835609 - DNA, 33 bp, Homo sapien
agatttccagaaaggcaaaagagaccgccaaac

SEQ ID NO: 835610 - DNA, 33 bp, Homo sapien
agatttccagaaaggcgaaagagaccgccaaac

SEQ ID NO: 835611 - DNA, 33 bp, Homo sapien
acccagcttgcttcacaattattgatacaaata

SEQ ID NO: 835612 - DNA, 33 bp, Homo sapien
acccagcttgcttcactattattgatacaaata

SEQ ID NO: 835613 - DNA, 33 bp, Homo sapien
cacattgggtgattagaagtccaggcttttaat

SEQ ID NO: 835614 - DNA, 33 bp, Homo sapien
cacattgggtgattaggagtccaggcttttaat

SEQ ID NO: 835615 - DNA, 33 bp, Homo sapien
gccagggagtcttctaagcaccttatataccaa

SEQ ID NO: 835616 - DNA, 33 bp, Homo sapien
gccagggagtcttctaggcaccttatataccaa

SEQ ID NO: 835617 - DNA, 33 bp, Homo sapien
tgtgttgctgtcagaaaagccagggttcaggtg

SEQ ID NO: 835618 - DNA, 33 bp, Homo sapien
tgtgttgctgtcagaagagccagggttcaggtg

SEQ ID NO: 835619 - DNA, 33 bp, Homo sapien
cttggactgaggacaaaggcaaagcatgattgt

SEQ ID NO: 835620 - DNA, 33 bp, Homo sapien
cttggactgaggacaagggcaaagcatgattgt

SEQ ID NO: 835621 - DNA, 33 bp, Homo sapien
atgcttgtgccacacacagggcaagccccagtt

SEQ ID NO: 835622 - DNA, 33 bp, Homo sapien
atgcttgtgccacacatagggcaagccccagtt

SEQ ID NO: 835623 - DNA, 33 bp, Homo sapien
ggtggaatcttctcaacactgtagggccatttc

SEQ ID NO: 835624 - DNA, 33 bp, Homo sapien
ggtggaatcttctcaatactgtagggccatttc

SEQ ID NO: 835625 - DNA, 33 bp, Homo sapien
aggaatccttgcatgacggccttctacaaggaa

SEQ ID NO: 835626 - DNA, 33 bp, Homo sapien
aggaatccttgcatgatggccttctacaaggaa

SEQ ID NO: 835627 - DNA, 33 bp, Homo sapien
ttgtgaaaatttgagcactttttctagtagaac

SEQ ID NO: 835628 - DNA, 33 bp, Homo sapien
ttgtgaaaatttgagccctttttctagtagaac

SEQ ID NO: 835629 - DNA, 33 bp, Homo sapien
tgcttaatgctaagaaaaagtggacagtataat

SEQ ID NO: 835630 - DNA, 33 bp, Homo sapien
tgcttaatgctaagaacaagtggacagtataat

SEQ ID NO: 835631 - DNA, 33 bp, Homo sapien
aaagcacagttatccaaaatgtctaggcttaca

SEQ ID NO: 835632 - DNA, 33 bp, Homo sapien
aaagcacagttatccagaatgtctaggcttaca

SEQ ID NO: 835633 - DNA, 33 bp, Homo sapien
cgtccctactaaaatacgtgcgcctgtaatccc

SEQ ID NO: 835634 - DNA, 33 bp, Homo sapien
cgtccctactaaaatatgtgcgcctgtaatccc

SEQ ID NO: 835635 - DNA, 33 bp, Homo sapien
tacaggtattagtgcccattttactgatgattt

SEQ ID NO: 835636 - DNA, 33 bp, Homo sapien
tacaggtattagtgcctattttactgatgattt

SEQ ID NO: 835637 - DNA, 33 bp, Homo sapien
gatcactggggtctggaaagtatccatttctca

SEQ ID NO: 835638 - DNA, 33 bp, Homo sapien
gatcactggggtctggcaagtatccatttctca

SEQ ID NO: 835639 - DNA, 33 bp, Homo sapien
ccagagccagtatgcactctaagagagaaaagt

SEQ ID NO: 835640 - DNA, 33 bp, Homo sapien
ccagagccagtatgcagtctaagagagaaaagt

SEQ ID NO: 835641 - DNA, 33 bp, Homo sapien
atcagtgtgtcttaaaacatctgcagagttaga

SEQ ID NO: 835642 - DNA, 33 bp, Homo sapien
atcagtgtgtcttaaagcatctgcagagttaga

SEQ ID NO: 835643 - DNA, 33 bp, Homo sapien
ctgatgaaagtttcacaagcagagagagcaacc

SEQ ID NO: 835644 - DNA, 33 bp, Homo sapien
ctgatgaaagtttcacgagcagagagagcaacc

SEQ ID NO: 835645 - DNA, 33 bp, Homo sapien
tgtgttctgctgtaataatctccttccttgtgc

SEQ ID NO: 835646 - DNA, 33 bp, Homo sapien
tgtgttctgctgtaatgatctccttccttgtgc

SEQ ID NO: 835647 - DNA, 33 bp, Homo sapien
tgttcattccttctcaaaggtgaaggggcctct

SEQ ID NO: 835648 - DNA, 33 bp, Homo sapien
tgttcattccttctcagaggtgaaggggcctct

SEQ ID NO: 835649 - DNA, 33 bp, Homo sapien
atctgttaggtgagaaatgttcagttatttcaa

SEQ ID NO: 835650 - DNA, 33 bp, Homo sapien
atctgttaggtgagaattgttcagttatttcaa

SEQ ID NO: 835651 - DNA, 33 bp, Homo sapien
cacccctttttctaaccccaatcgactttgtgg

SEQ ID NO: 835652 - DNA, 33 bp, Homo sapien
cacccctttttctaactccaatcgactttgtgg

SEQ ID NO: 835653 - DNA, 33 bp, Homo sapien
aagcctctttacctccaaattcttcagaggctt

SEQ ID NO: 835654 - DNA, 33 bp, Homo sapien
aagcctctttacctccgaattcttcagaggctt

SEQ ID NO: 835655 - DNA, 33 bp, Homo sapien
tgtctcaagatctcctgaaggatggctactaaa

SEQ ID NO: 835656 - DNA, 33 bp, Homo sapien
tgtctcaagatctccttaaggatggctactaaa

SEQ ID NO: 835657 - DNA, 33 bp, Homo sapien
ctctttgcctacagaacttcccatgcttcaatc

SEQ ID NO: 835658 - DNA, 33 bp, Homo sapien
ctctttgcctacagaatttcccatgcttcaatc

SEQ ID NO: 835659 - DNA, 33 bp, Homo sapien
aatacaaaccataccacagagggaactacacaa

SEQ ID NO: 835660 - DNA, 33 bp, Homo sapien
aatacaaaccataccagagagggaactacacaa

SEQ ID NO: 835661 - DNA, 33 bp, Homo sapien
agactctgaagggcgcaagattctgattgtgcc

SEQ ID NO: 835662 - DNA, 33 bp, Homo sapien
agactctgaagggcgcgagattctgattgtgcc

SEQ ID NO: 835663 - DNA, 33 bp, Homo sapien
cccgtgacacctagataagcaaatttattggga

SEQ ID NO: 835664 - DNA, 33 bp, Homo sapien
cccgtgacacctagatgagcaaatttattggga

SEQ ID NO: 835665 - DNA, 33 bp, Homo sapien
agtgctctaagccttaagtaatctaaaatcaaa

SEQ ID NO: 835666 - DNA, 33 bp, Homo sapien
agtgctctaagccttatgtaatctaaaatcaaa

SEQ ID NO: 835667 - DNA, 33 bp, Homo sapien
ggaactcttggtcctcaaattttatctttccta

SEQ ID NO: 835668 - DNA, 33 bp, Homo sapien
ggaactcttggtcctcgaattttatctttccta

SEQ ID NO: 835669 - DNA, 33 bp, Homo sapien
cttcattaaatcataaggtctaaacaggagttt

SEQ ID NO: 835670 - DNA, 33 bp, Homo sapien
cttcattaaatcataatgtctaaacaggagttt

SEQ ID NO: 835671 - DNA, 33 bp, Homo sapien
tgacaattaagccttaacttcagcagcttcctc

SEQ ID NO: 835672 - DNA, 33 bp, Homo sapien
tgacaattaagccttatcttcagcagcttcctc

SEQ ID NO: 835673 - DNA, 33 bp, Homo sapien
ttgaaaccggatttaacatcatccctcaaacat

SEQ ID NO: 835674 - DNA, 33 bp, Homo sapien
ttgaaaccggatttaatatcatccctcaaacat

SEQ ID NO: 835675 - DNA, 33 bp, Homo sapien
gcctaatttaatagcacatttgctgtctttgct

SEQ ID NO: 835676 - DNA, 33 bp, Homo sapien
gcctaatttaatagcatatttgctgtctttgct

SEQ ID NO: 835677 - DNA, 33 bp, Homo sapien
tcaatgtgaaacagtccgaagtcccaaagctgg

SEQ ID NO: 835678 - DNA, 33 bp, Homo sapien
tcaatgtgaaacagtctgaagtcccaaagctgg

SEQ ID NO: 835679 - DNA, 33 bp, Homo sapien
agctggcctcgatgtacgggtagcataagaaac

SEQ ID NO: 835680 - DNA, 33 bp, Homo sapien
agctggcctcgatgtatgggtagcataagaaac

SEQ ID NO: 835681 - DNA, 33 bp, Homo sapien
gacataaatatcctgtgaagaatcgcccagcac

SEQ ID NO: 835682 - DNA, 33 bp, Homo sapien
gacataaatatcctgttaagaatcgcccagcac

SEQ ID NO: 835683 - DNA, 33 bp, Homo sapien
acagtgaggagccttaagtcagaagggtcaaag

SEQ ID NO: 835684 - DNA, 33 bp, Homo sapien
acagtgaggagccttaggtcagaagggtcaaag

SEQ ID NO: 835685 - DNA, 33 bp, Homo sapien
catgcctctaatgagaaagagctggaaagggcg

SEQ ID NO: 835686 - DNA, 33 bp, Homo sapien
catgcctctaatgagacagagctggaaagggcg

SEQ ID NO: 835687 - DNA, 33 bp, Homo sapien
aatagctttttaaaaacgtgggtatgtgcatgt

SEQ ID NO: 835688 - DNA, 33 bp, Homo sapien
aatagctttttaaaaatgtgggtatgtgcatgt

SEQ ID NO: 835689 - DNA, 33 bp, Homo sapien
ttattatatctccctcaagaagaagaaaaacag

SEQ ID NO: 835690 - DNA, 33 bp, Homo sapien
ttattatatctccctcgagaagaagaaaaacag

SEQ ID NO: 835691 - DNA, 33 bp, Homo sapien
caaggctgaagagccacgtcctaacagtgttcc

SEQ ID NO: 835692 - DNA, 33 bp, Homo sapien
caaggctgaagagccaggtcctaacagtgttcc

SEQ ID NO: 835693 - DNA, 33 bp, Homo sapien
tgtacattcttcagacactcacagagatacact

SEQ ID NO: 835694 - DNA, 33 bp, Homo sapien
tgtacattcttcagaccctcacagagatacact

SEQ ID NO: 835695 - DNA, 33 bp, Homo sapien
gacccccgagctgcccacaattcaaaggccatc

SEQ ID NO: 835696 - DNA, 33 bp, Homo sapien
gacccccgagctgcccgcaattcaaaggccatc

SEQ ID NO: 835697 - DNA, 33 bp, Homo sapien
aaggtctcacaaagtggagaggattgcatgacc

SEQ ID NO: 835698 - DNA, 33 bp, Homo sapien
aaggtctcacaaagtgtagaggattgcatgacc

SEQ ID NO: 835699 - DNA, 33 bp, Homo sapien
gcaagtgagtcttgcaagttgcaattatggagt

SEQ ID NO: 835700 - DNA, 33 bp, Homo sapien
gcaagtgagtcttgcaggttgcaattatggagt

SEQ ID NO: 835701 - DNA, 33 bp, Homo sapien
ggtccaagctgaagacagtactccctgagatcc

SEQ ID NO: 835702 - DNA, 33 bp, Homo sapien
ggtccaagctgaagacggtactccctgagatcc

SEQ ID NO: 835703 - DNA, 33 bp, Homo sapien
agcaggcatttgagccaaagttagtgatcatgg

SEQ ID NO: 835704 - DNA, 33 bp, Homo sapien
agcaggcatttgagccgaagttagtgatcatgg

SEQ ID NO: 835705 - DNA, 33 bp, Homo sapien
aggaagggtaacctgccgaaagtcacacagggc

SEQ ID NO: 835706 - DNA, 33 bp, Homo sapien
aggaagggtaacctgctgaaagtcacacagggc

SEQ ID NO: 835707 - DNA, 33 bp, Homo sapien
gttcgtcgtctgtcacacgggccttcatttgac

SEQ ID NO: 835708 - DNA, 33 bp, Homo sapien
gttcgtcgtctgtcacgcgggccttcatttgac

SEQ ID NO: 835709 - DNA, 33 bp, Homo sapien
ttcttaagaaccttgaccagctgaaccgggatt

SEQ ID NO: 835710 - DNA, 33 bp, Homo sapien
ttcttaagaaccttgagcagctgaaccgggatt

SEQ ID NO: 835711 - DNA, 33 bp, Homo sapien
aagcaaaatattaacacgtgagatgcctttcaa

SEQ ID NO: 835712 - DNA, 33 bp, Homo sapien
aagcaaaatattaacatgtgagatgcctttcaa

SEQ ID NO: 835713 - DNA, 33 bp, Homo sapien
agaggtgagtgggttcagaaatgccagggcctc

SEQ ID NO: 835714 - DNA, 33 bp, Homo sapien
agaggtgagtgggttcggaaatgccagggcctc

SEQ ID NO: 835715 - DNA, 33 bp, Homo sapien
ctccctgggacaaggacgcccttttctgacagt

SEQ ID NO: 835716 - DNA, 33 bp, Homo sapien
ctccctgggacaaggatgcccttttctgacagt

SEQ ID NO: 835717 - DNA, 33 bp, Homo sapien
tttccagctttttggccagtgttttcttaggtc

SEQ ID NO: 835718 - DNA, 33 bp, Homo sapien
tttccagctttttggcgagtgttttcttaggtc

SEQ ID NO: 835719 - DNA, 33 bp, Homo sapien
gtgtcctttattaaagacagacttgtaactgaa

SEQ ID NO: 835720 - DNA, 33 bp, Homo sapien
gtgtcctttattaaaggcagacttgtaactgaa

SEQ ID NO: 835721 - DNA, 33 bp, Homo sapien
tagaaatgtcttcaaaatagtcggtatgcattt

SEQ ID NO: 835722 - DNA, 33 bp, Homo sapien
tagaaatgtcttcaaagtagtcggtatgcattt

SEQ ID NO: 835723 - DNA, 33 bp, Homo sapien
gtgtgggatatgtccaaccgacctggttaagtc

SEQ ID NO: 835724 - DNA, 33 bp, Homo sapien
gtgtgggatatgtccagccgacctggttaagtc

SEQ ID NO: 835725 - DNA, 33 bp, Homo sapien
atccttgaattgtcaccggcctctaaacaaaga

SEQ ID NO: 835726 - DNA, 33 bp, Homo sapien
atccttgaattgtcactggcctctaaacaaaga

SEQ ID NO: 835727 - DNA, 33 bp, Homo sapien
tggtaaaaagacatacagggtacaacaaatata

SEQ ID NO: 835728 - DNA, 33 bp, Homo sapien
tggtaaaaagacatacggggtacaacaaatata

SEQ ID NO: 835729 - DNA, 33 bp, Homo sapien
gttgcaagtcactgaaatagcctattaaccccc

SEQ ID NO: 835730 - DNA, 33 bp, Homo sapien
gttgcaagtcactgaagtagcctattaaccccc

SEQ ID NO: 835731 - DNA, 33 bp, Homo sapien
ttattggtgcttgcaacacattctgtacagcac

SEQ ID NO: 835732 - DNA, 33 bp, Homo sapien
ttattggtgcttgcaagacattctgtacagcac

SEQ ID NO: 835733 - DNA, 33 bp, Homo sapien
ggttactcattattggaagttggctttacctta

SEQ ID NO: 835734 - DNA, 33 bp, Homo sapien
ggttactcattattggcagttggctttacctta

SEQ ID NO: 835735 - DNA, 33 bp, Homo sapien
ttttctatcaccttctaaagctacagtgctgga

SEQ ID NO: 835736 - DNA, 33 bp, Homo sapien
ttttctatcaccttctgaagctacagtgctgga

SEQ ID NO: 835737 - DNA, 33 bp, Homo sapien
gcatgggagaaaagaaatactagtgaacagaat

SEQ ID NO: 835738 - DNA, 33 bp, Homo sapien
gcatgggagaaaagaactactagtgaacagaat

SEQ ID NO: 835739 - DNA, 33 bp, Homo sapien
gtatctcatttagttaccttacaaatcctacat

SEQ ID NO: 835740 - DNA, 33 bp, Homo sapien
gtatctcatttagttatcttacaaatcctacat

SEQ ID NO: 835741 - DNA, 33 bp, Homo sapien
ttaactcgaaggtgcacgtaataaacttaaaca

SEQ ID NO: 835742 - DNA, 33 bp, Homo sapien
ttaactcgaaggtgcaggtaataaacttaaaca

SEQ ID NO: 835743 - DNA, 33 bp, Homo sapien
cttgctcctgaaacaacagcaataatgtgcaag

SEQ ID NO: 835744 - DNA, 33 bp, Homo sapien
cttgctcctgaaacaatagcaataatgtgcaag

SEQ ID NO: 835745 - DNA, 33 bp, Homo sapien
gaacaaacccatactcacccttcagtaagttaa

SEQ ID NO: 835746 - DNA, 33 bp, Homo sapien
gaacaaacccatactcgcccttcagtaagttaa

SEQ ID NO: 835747 - DNA, 33 bp, Homo sapien
tttcattaagataagcacctatcaagggcattt

SEQ ID NO: 835748 - DNA, 33 bp, Homo sapien
tttcattaagataagcgcctatcaagggcattt

SEQ ID NO: 835749 - DNA, 33 bp, Homo sapien
taggtcagcattcaaaactcatagctcagattg

SEQ ID NO: 835750 - DNA, 33 bp, Homo sapien
taggtcagcattcaaacctcatagctcagattg

SEQ ID NO: 835751 - DNA, 33 bp, Homo sapien
tatgctgcagtaaaaaacccaatatctcagtgg

SEQ ID NO: 835752 - DNA, 33 bp, Homo sapien
tatgctgcagtaaaaaccccaatatctcagtgg

SEQ ID NO: 835753 - DNA, 33 bp, Homo sapien
cagtcctctttcctcacgaccacccttcagata

SEQ ID NO: 835754 - DNA, 33 bp, Homo sapien
cagtcctctttcctcatgaccacccttcagata

SEQ ID NO: 835755 - DNA, 33 bp, Homo sapien
gggtctcccagttccccgagaaggcctggatgc

SEQ ID NO: 835756 - DNA, 33 bp, Homo sapien
gggtctcccagttccctgagaaggcctggatgc

SEQ ID NO: 835757 - DNA, 33 bp, Homo sapien
gagatgatgaggacacaatagtgaacaagccag

SEQ ID NO: 835758 - DNA, 33 bp, Homo sapien
gagatgatgaggacacgatagtgaacaagccag

SEQ ID NO: 835759 - DNA, 33 bp, Homo sapien
aaaggttcaggtgggtcaatactatagctatat

SEQ ID NO: 835760 - DNA, 33 bp, Homo sapien
aaaggttcaggtgggtgaatactatagctatat

SEQ ID NO: 835761 - DNA, 33 bp, Homo sapien
ctaagcatatgcctggaagatagttgtgttcag

SEQ ID NO: 835762 - DNA, 33 bp, Homo sapien
ctaagcatatgcctggcagatagttgtgttcag

SEQ ID NO: 835763 - DNA, 33 bp, Homo sapien
gggtctgggttacttccctgttgctactatagg

SEQ ID NO: 835764 - DNA, 33 bp, Homo sapien
gggtctgggttacttctctgttgctactatagg

SEQ ID NO: 835765 - DNA, 33 bp, Homo sapien
tgtctagggggtacagaagctagtcacctgggc

SEQ ID NO: 835766 - DNA, 33 bp, Homo sapien
tgtctagggggtacaggagctagtcacctgggc

SEQ ID NO: 835767 - DNA, 33 bp, Homo sapien
atgatggggcacctgacacaggcattccactgc

SEQ ID NO: 835768 - DNA, 33 bp, Homo sapien
atgatggggcacctgagacaggcattccactgc

SEQ ID NO: 835769 - DNA, 33 bp, Homo sapien
agctcaggaacagtaaaaaatggaaatgagcag

SEQ ID NO: 835770 - DNA, 33 bp, Homo sapien
agctcaggaacagtaacaaatggaaatgagcag

SEQ ID NO: 835771 - DNA, 33 bp, Homo sapien
ataagagaatctctaaagaactgaactcaactt

SEQ ID NO: 835772 - DNA, 33 bp, Homo sapien
ataagagaatctctaaggaactgaactcaactt

SEQ ID NO: 835773 - DNA, 33 bp, Homo sapien
actcaccattctctcccaccgtaatggctaaga

SEQ ID NO: 835774 - DNA, 33 bp, Homo sapien
actcaccattctctcctaccgtaatggctaaga

SEQ ID NO: 835775 - DNA, 33 bp, Homo sapien
gtttctttacatctcacggggactagagccagt

SEQ ID NO: 835776 - DNA, 33 bp, Homo sapien
gtttctttacatctcatggggactagagccagt

SEQ ID NO: 835777 - DNA, 33 bp, Homo sapien
tggatagtcagggacactggagtttggatatgc

SEQ ID NO: 835778 - DNA, 33 bp, Homo sapien
tggatagtcagggacattggagtttggatatgc

SEQ ID NO: 835779 - DNA, 33 bp, Homo sapien
cttgttccaactgtccagagttctggttggcag

SEQ ID NO: 835780 - DNA, 33 bp, Homo sapien
cttgttccaactgtccggagttctggttggcag

SEQ ID NO: 835781 - DNA, 33 bp, Homo sapien
ataaaaacaaagcagacataggttgaaaaggga

SEQ ID NO: 835782 - DNA, 33 bp, Homo sapien
ataaaaacaaagcagatataggttgaaaaggga

SEQ ID NO: 835783 - DNA, 33 bp, Homo sapien
tgtcacccatcccttccaccactatgacatgaa

SEQ ID NO: 835784 - DNA, 33 bp, Homo sapien
tgtcacccatcccttctaccactatgacatgaa

SEQ ID NO: 835785 - DNA, 33 bp, Homo sapien
ggctgttgtcagctcccgaggatgatgcactcc

SEQ ID NO: 835786 - DNA, 33 bp, Homo sapien
ggctgttgtcagctcctgaggatgatgcactcc

SEQ ID NO: 835787 - DNA, 33 bp, Homo sapien
ctggggaccaactctccgagagcgggaaccctc

SEQ ID NO: 835788 - DNA, 33 bp, Homo sapien
ctggggaccaactctctgagagcgggaaccctc

SEQ ID NO: 835789 - DNA, 33 bp, Homo sapien
gaaacctgggctaacaatgggagtctcaggggc

SEQ ID NO: 835790 - DNA, 33 bp, Homo sapien
gaaacctgggctaacagtgggagtctcaggggc

SEQ ID NO: 835791 - DNA, 33 bp, Homo sapien
tctcaacccaactggacgaagccattgtacttt

SEQ ID NO: 835792 - DNA, 33 bp, Homo sapien
tctcaacccaactggatgaagccattgtacttt

SEQ ID NO: 835793 - DNA, 33 bp, Homo sapien
tcagtttcaccagttccctgggtgattgtggtg

SEQ ID NO: 835794 - DNA, 33 bp, Homo sapien
tcagtttcaccagttctctgggtgattgtggtg

SEQ ID NO: 835795 - DNA, 33 bp, Homo sapien
taacagcatattccaacgaagaaagaaagcata

SEQ ID NO: 835796 - DNA, 33 bp, Homo sapien
taacagcatattccaatgaagaaagaaagcata

SEQ ID NO: 835797 - DNA, 33 bp, Homo sapien
caagtataggttgagcaatttggctagccacag

SEQ ID NO: 835798 - DNA, 33 bp, Homo sapien
caagtataggttgagcgatttggctagccacag

SEQ ID NO: 835799 - DNA, 33 bp, Homo sapien
agtaaaggggtgccgcactaagcagtgaacaaa

SEQ ID NO: 835800 - DNA, 33 bp, Homo sapien
agtaaaggggtgccgcgctaagcagtgaacaaa

SEQ ID NO: 835801 - DNA, 33 bp, Homo sapien
agagtggagaaaggcacgaagtgggtatcttac

SEQ ID NO: 835802 - DNA, 33 bp, Homo sapien
agagtggagaaaggcatgaagtgggtatcttac

SEQ ID NO: 835803 - DNA, 33 bp, Homo sapien
gaggagttcatcttcacggttatcaacaaactc

SEQ ID NO: 835804 - DNA, 33 bp, Homo sapien
gaggagttcatcttcagggttatcaacaaactc

SEQ ID NO: 835805 - DNA, 33 bp, Homo sapien
tggtgactttctttgcccctctccactcttaca

SEQ ID NO: 835806 - DNA, 33 bp, Homo sapien
tggtgactttctttgcgcctctccactcttaca

SEQ ID NO: 835807 - DNA, 33 bp, Homo sapien
aaggtgcgaagacagcaagtgggctacagtgga

SEQ ID NO: 835808 - DNA, 33 bp, Homo sapien
aaggtgcgaagacagcgagtgggctacagtgga

SEQ ID NO: 835809 - DNA, 33 bp, Homo sapien
cactgtttgattcacacggaagctgggtaggct

SEQ ID NO: 835810 - DNA, 33 bp, Homo sapien
cactgtttgattcacagggaagctgggtaggct

SEQ ID NO: 835811 - DNA, 33 bp, Homo sapien
tctgggaaactgataacatggtgaggccagagc

SEQ ID NO: 835812 - DNA, 33 bp, Homo sapien
tctgggaaactgataatatggtgaggccagagc

SEQ ID NO: 835813 - DNA, 33 bp, Homo sapien
atctccatttaactgacgtggaaattatggcac

SEQ ID NO: 835814 - DNA, 33 bp, Homo sapien
atctccatttaactgatgtggaaattatggcac

SEQ ID NO: 835815 - DNA, 33 bp, Homo sapien
tgcttctcaagtttaacacccaggggcgagtgg

SEQ ID NO: 835816 - DNA, 33 bp, Homo sapien
tgcttctcaagtttaatacccaggggcgagtgg

SEQ ID NO: 835817 - DNA, 33 bp, Homo sapien
tagtgtgctgttagtgaagattggtctcagatg

SEQ ID NO: 835818 - DNA, 33 bp, Homo sapien
tagtgtgctgttagtggagattggtctcagatg

SEQ ID NO: 835819 - DNA, 33 bp, Homo sapien
gattagcggtactgaacatgtaggtatgcgtag

SEQ ID NO: 835820 - DNA, 33 bp, Homo sapien
gattagcggtactgaatatgtaggtatgcgtag

SEQ ID NO: 835821 - DNA, 33 bp, Homo sapien
agaaaccctttgtggacgcctgtgcagatgctg

SEQ ID NO: 835822 - DNA, 33 bp, Homo sapien
agaaaccctttgtggatgcctgtgcagatgctg

SEQ ID NO: 835823 - DNA, 33 bp, Homo sapien
tctattcttgcatagactccagggatgctgtaa

SEQ ID NO: 835824 - DNA, 33 bp, Homo sapien
tctattcttgcatagattccagggatgctgtaa

SEQ ID NO: 835825 - DNA, 33 bp, Homo sapien
acctcttagcataccaataaaacacattttgtt

SEQ ID NO: 835826 - DNA, 33 bp, Homo sapien
acctcttagcataccagtaaaacacattttgtt

SEQ ID NO: 835827 - DNA, 33 bp, Homo sapien
gggcaagtgagtgaggcactcgtcttggacatg

SEQ ID NO: 835828 - DNA, 33 bp, Homo sapien
gggcaagtgagtgaggtactcgtcttggacatg

SEQ ID NO: 835829 - DNA, 33 bp, Homo sapien
actgtgaagttttccacaagctaagtgacaagt

SEQ ID NO: 835830 - DNA, 33 bp, Homo sapien
actgtgaagttttccagaagctaagtgacaagt

SEQ ID NO: 835831 - DNA, 33 bp, Homo sapien
taccttcaccttttaggaactcacaatttggtg

SEQ ID NO: 835832 - DNA, 33 bp, Homo sapien
taccttcaccttttagtaactcacaatttggtg

SEQ ID NO: 835833 - DNA, 33 bp, Homo sapien
agtgagtgtctgagggaatctgcaagtagttca

SEQ ID NO: 835834 - DNA, 33 bp, Homo sapien
agtgagtgtctgaggggatctgcaagtagttca

SEQ ID NO: 835835 - DNA, 33 bp, Homo sapien
aggtactgtagaaataatagctcttagtacttt

SEQ ID NO: 835836 - DNA, 33 bp, Homo sapien
aggtactgtagaaatattagctcttagtacttt

SEQ ID NO: 835837 - DNA, 33 bp, Homo sapien
gcctcagaaactgagcagaaagtaaacaaagag

SEQ ID NO: 835838 - DNA, 33 bp, Homo sapien
gcctcagaaactgagcggaaagtaaacaaagag

SEQ ID NO: 835839 - DNA, 33 bp, Homo sapien
attactgaccacttcacgctgtgacagtaactg

SEQ ID NO: 835840 - DNA, 33 bp, Homo sapien
attactgaccacttcatgctgtgacagtaactg

SEQ ID NO: 835841 - DNA, 33 bp, Homo sapien
agagtctcttaaatcccggactcactggacctg

SEQ ID NO: 835842 - DNA, 33 bp, Homo sapien
agagtctcttaaatcctggactcactggacctg

SEQ ID NO: 835843 - DNA, 33 bp, Homo sapien
ccaggcgctttcactcaccttacccaggacctc

SEQ ID NO: 835844 - DNA, 33 bp, Homo sapien
ccaggcgctttcactctccttacccaggacctc

SEQ ID NO: 835845 - DNA, 33 bp, Homo sapien
tgtctgactctagacccggcaaactccttacct

SEQ ID NO: 835846 - DNA, 33 bp, Homo sapien
tgtctgactctagacctggcaaactccttacct

SEQ ID NO: 835847 - DNA, 33 bp, Homo sapien
gtccctttgagataaaatcttgcaaaatttcat

SEQ ID NO: 835848 - DNA, 33 bp, Homo sapien
gtccctttgagataaagtcttgcaaaatttcat

SEQ ID NO: 835849 - DNA, 33 bp, Homo sapien
gaagatttatagtacacgcacatgaaattttgc

SEQ ID NO: 835850 - DNA, 33 bp, Homo sapien
gaagatttatagtacatgcacatgaaattttgc

SEQ ID NO: 835851 - DNA, 33 bp, Homo sapien
aacagcctttattcaacggttctgagagccaac

SEQ ID NO: 835852 - DNA, 33 bp, Homo sapien
aacagcctttattcaatggttctgagagccaac

SEQ ID NO: 835853 - DNA, 33 bp, Homo sapien
gctccaaaaagatatcacatctggtacagcagc

SEQ ID NO: 835854 - DNA, 33 bp, Homo sapien
gctccaaaaagatatcgcatctggtacagcagc

SEQ ID NO: 835855 - DNA, 33 bp, Homo sapien
gcctctatatttaaacagacactgtgtaggtat

SEQ ID NO: 835856 - DNA, 33 bp, Homo sapien
gcctctatatttaaacggacactgtgtaggtat

SEQ ID NO: 835857 - DNA, 33 bp, Homo sapien
aaggtcaccaagttgaacatgtatatggcacag

SEQ ID NO: 835858 - DNA, 33 bp, Homo sapien
aaggtcaccaagttgagcatgtatatggcacag

SEQ ID NO: 835859 - DNA, 33 bp, Homo sapien
acacctgctgaagggacggatggaaatgctgca

SEQ ID NO: 835860 - DNA, 33 bp, Homo sapien
acacctgctgaagggatggatggaaatgctgca

SEQ ID NO: 835861 - DNA, 33 bp, Homo sapien
ggggagagacaactcgacagtgagatgtacgcg

SEQ ID NO: 835862 - DNA, 33 bp, Homo sapien
ggggagagacaactcggcagtgagatgtacgcg

SEQ ID NO: 835863 - DNA, 33 bp, Homo sapien
gtagatgtagagaatcaatgggctgtattcacc

SEQ ID NO: 835864 - DNA, 33 bp, Homo sapien
gtagatgtagagaatcgatgggctgtattcacc

SEQ ID NO: 835865 - DNA, 33 bp, Homo sapien
catctgcatctgttaccgcaatcagggccccta

SEQ ID NO: 835866 - DNA, 33 bp, Homo sapien
catctgcatctgttactgcaatcagggccccta

SEQ ID NO: 835867 - DNA, 33 bp, Homo sapien
ctaaaagctttccttaaaaatctcctgaatgct

SEQ ID NO: 835868 - DNA, 33 bp, Homo sapien
ctaaaagctttccttacaaatctcctgaatgct

SEQ ID NO: 835869 - DNA, 33 bp, Homo sapien
aaataaaatttgtgtaccttgaatcattagaaa

SEQ ID NO: 835870 - DNA, 33 bp, Homo sapien
aaataaaatttgtgtatcttgaatcattagaaa

SEQ ID NO: 835871 - DNA, 33 bp, Homo sapien
aaactttccatatcaactcgtttgtaactgtgt

SEQ ID NO: 835872 - DNA, 33 bp, Homo sapien
aaactttccatatcaattcgtttgtaactgtgt

SEQ ID NO: 835873 - DNA, 33 bp, Homo sapien
tgcaagaaactcttaacggtggttatgcctaag

SEQ ID NO: 835874 - DNA, 33 bp, Homo sapien
tgcaagaaactcttaatggtggttatgcctaag

SEQ ID NO: 835875 - DNA, 33 bp, Homo sapien
ctcattcacaaacacccgggcagaaatcctcct

SEQ ID NO: 835876 - DNA, 33 bp, Homo sapien
ctcattcacaaacacctgggcagaaatcctcct

SEQ ID NO: 835877 - DNA, 33 bp, Homo sapien
acatcagggtcagcacagtgcccggaatggggt

SEQ ID NO: 835878 - DNA, 33 bp, Homo sapien
acatcagggtcagcacggtgcccggaatggggt

SEQ ID NO: 835879 - DNA, 33 bp, Homo sapien
cccagaagttgggagcaaaactgaaaatcccaa

SEQ ID NO: 835880 - DNA, 33 bp, Homo sapien
cccagaagttgggagcgaaactgaaaatcccaa

SEQ ID NO: 835881 - DNA, 33 bp, Homo sapien
aaaaatagtacagcgacgtcccatgtgctcttc

SEQ ID NO: 835882 - DNA, 33 bp, Homo sapien
aaaaatagtacagcgaggtcccatgtgctcttc

SEQ ID NO: 835883 - DNA, 33 bp, Homo sapien
tggtcatccattttccaattccccattcatttg

SEQ ID NO: 835884 - DNA, 33 bp, Homo sapien
tggtcatccattttccgattccccattcatttg

SEQ ID NO: 835885 - DNA, 33 bp, Homo sapien
tgtggaagtgtgaatcaacaaacctcttttctt

SEQ ID NO: 835886 - DNA, 33 bp, Homo sapien
tgtggaagtgtgaatcgacaaacctcttttctt

SEQ ID NO: 835887 - DNA, 33 bp, Homo sapien
cttgtggaattagaagacacgctccatgctacc

SEQ ID NO: 835888 - DNA, 33 bp, Homo sapien
cttgtggaattagaaggcacgctccatgctacc

SEQ ID NO: 835889 - DNA, 33 bp, Homo sapien
ctgggaactgcgtagaataaagctgcctcccat

SEQ ID NO: 835890 - DNA, 33 bp, Homo sapien
ctgggaactgcgtagagtaaagctgcctcccat

SEQ ID NO: 835891 - DNA, 33 bp, Homo sapien; identical to SEQ ID NO: 835889

SEQ ID NO: 835892 - DNA, 33 bp, Homo sapien; identical to SEQ ID NO: 835890

SEQ ID NO: 835893 - DNA, 33 bp, Homo sapien
aataaaggttctgaaccagttgtttttgaggaa

SEQ ID NO: 835894 - DNA, 33 bp, Homo sapien
aataaaggttctgaactagttgtttttgaggaa

SEQ ID NO: 835895 - DNA, 33 bp, Homo sapien
ccttgtactgcttcaccggcttcctttgcccat

SEQ ID NO: 835896 - DNA, 33 bp, Homo sapien
ccttgtactgcttcactggcttcctttgcccat

SEQ ID NO: 835897 - DNA, 33 bp, Homo sapien
cagggctaagagttacacagcagaaatgatagt

SEQ ID NO: 835898 - DNA, 33 bp, Homo sapien
cagggctaagagttacgcagcagaaatgatagt

SEQ ID NO: 835899 - DNA, 33 bp, Homo sapien
catcctggtgactcccaattctcatacccactc

SEQ ID NO: 835900 - DNA, 33 bp, Homo sapien
catcctggtgactcccgattctcatacccactc

SEQ ID NO: 835901 - DNA, 33 bp, Homo sapien
aggggagagaggcacacgacactggaggtaggc

SEQ ID NO: 835902 - DNA, 33 bp, Homo sapien
aggggagagaggcacaggacactggaggtaggc

SEQ ID NO: 835903 - DNA, 33 bp, Homo sapien
agctggaatgattggcacaaagcattttctcag

SEQ ID NO: 835904 - DNA, 33 bp, Homo sapien
agctggaatgattggcgcaaagcattttctcag

SEQ ID NO: 835905 - DNA, 33 bp, Homo sapien
tggtggcttagaacaaaggtttatgtatttctt

SEQ ID NO: 835906 - DNA, 33 bp, Homo sapien
tggtggcttagaacaacggtttatgtatttctt

SEQ ID NO: 835907 - DNA, 33 bp, Homo sapien
accagaggattaagcaagtttacttcggtacgt

SEQ ID NO: 835908 - DNA, 33 bp, Homo sapien
accagaggattaagcaggtttacttcggtacgt

SEQ ID NO: 835909 - DNA, 33 bp, Homo sapien
tgcagtgaagacagtacagaaaaagccactgat

SEQ ID NO: 835910 - DNA, 33 bp, Homo sapien
tgcagtgaagacagtatagaaaaagccactgat

SEQ ID NO: 835911 - DNA, 33 bp, Homo sapien
ttgtgtatgtgctcaacagtttagtaaatgttg

SEQ ID NO: 835912 - DNA, 33 bp, Homo sapien
ttgtgtatgtgctcaatagtttagtaaatgttg

SEQ ID NO: 835913 - DNA, 33 bp, Homo sapien
actaaagatgaagataagcctccaaaatccaga

SEQ ID NO: 835914 - DNA, 33 bp, Homo sapien
actaaagatgaagataggcctccaaaatccaga

SEQ ID NO: 835915 - DNA, 33 bp, Homo sapien
tatgagctaaaactcaaatgaaaaccaatgatc

SEQ ID NO: 835916 - DNA, 33 bp, Homo sapien
tatgagctaaaactcagatgaaaaccaatgatc

SEQ ID NO: 835917 - DNA, 33 bp, Homo sapien
ctcattaatcctacaaataaaacataagctgcc

SEQ ID NO: 835918 - DNA, 33 bp, Homo sapien
ctcattaatcctacaactaaaacataagctgcc

SEQ ID NO: 835919 - DNA, 33 bp, Homo sapien
gcctaggcttttcccactggctaccacaacatg

SEQ ID NO: 835920 - DNA, 33 bp, Homo sapien
gcctaggcttttcccattggctaccacaacatg

SEQ ID NO: 835921 - DNA, 33 bp, Homo sapien
cctaagacactctcgaacactgtaagaggtttt

SEQ ID NO: 835922 - DNA, 33 bp, Homo sapien
cctaagacactctcgagcactgtaagaggtttt

SEQ ID NO: 835923 - DNA, 33 bp, Homo sapien
atgcaggtgtgctcaaggtattaacttaagggc

SEQ ID NO: 835924 - DNA, 33 bp, Homo sapien
atgcaggtgtgctcaatgtattaacttaagggc

SEQ ID NO: 835925 - DNA, 33 bp, Homo sapien
aacatataacgaagaactaacagcaatctgtct

SEQ ID NO: 835926 - DNA, 33 bp, Homo sapien
aacatataacgaagaagtaacagcaatctgtct

SEQ ID NO: 835927 - DNA, 33 bp, Homo sapien
taggttatctcttcacactattgtttcctttgc

SEQ ID NO: 835928 - DNA, 33 bp, Homo sapien
taggttatctcttcacgctattgtttcctttgc

SEQ ID NO: 835929 - DNA, 33 bp, Homo sapien
atatgatttgattaacacttaagaccactcagg

SEQ ID NO: 835930 - DNA, 33 bp, Homo sapien
atatgatttgattaacgcttaagaccactcagg

SEQ ID NO: 835931 - DNA, 33 bp, Homo sapien
ttccccaggaatgatgaagttatagttaattaa

SEQ ID NO: 835932 - DNA, 33 bp, Homo sapien
ttccccaggaatgatggagttatagttaattaa

SEQ ID NO: 835933 - DNA, 33 bp, Homo sapien
gaaagcaatcacttcaaaagaggaatttaccag

SEQ ID NO: 835934 - DNA, 33 bp, Homo sapien
gaaagcaatcacttcagaagaggaatttaccag

SEQ ID NO: 835935 - DNA, 33 bp, Homo sapien
ggacagatgttgctccaaacagggaacccacag

SEQ ID NO: 835936 - DNA, 33 bp, Homo sapien
ggacagatgttgctccgaacagggaacccacag

SEQ ID NO: 835937 - DNA, 33 bp, Homo sapien
ggcaaatcaaagctacaagagcatctcacccca

SEQ ID NO: 835938 - DNA, 33 bp, Homo sapien
ggcaaatcaaagctacgagagcatctcacccca

SEQ ID NO: 835939 - DNA, 33 bp, Homo sapien
tattgcagtcactactaaagtcatccagggtga

SEQ ID NO: 835940 - DNA, 33 bp, Homo sapien
tattgcagtcactactgaagtcatccagggtga

SEQ ID NO: 835941 - DNA, 33 bp, Homo sapien
ctgttctaacaaataaaagaacctgtcaggaag

SEQ ID NO: 835942 - DNA, 33 bp, Homo sapien
ctgttctaacaaataagagaacctgtcaggaag

SEQ ID NO: 835943 - DNA, 33 bp, Homo sapien
gaggtgtcatgggaaacacaatttatagccagt

SEQ ID NO: 835944 - DNA, 33 bp, Homo sapien
gaggtgtcatgggaaatacaatttatagccagt

SEQ ID NO: 835945 - DNA, 33 bp, Homo sapien
cgtggcaagttcaaaaattggtcacagcctagt

SEQ ID NO: 835946 - DNA, 33 bp, Homo sapien
cgtggcaagttcaaaagttggtcacagcctagt

SEQ ID NO: 835947 - DNA, 33 bp, Homo sapien
taactgttcatgtaagcacgtttgttcatttcc

SEQ ID NO: 835948 - DNA, 33 bp, Homo sapien
taactgttcatgtaagtacgtttgttcatttcc

SEQ ID NO: 835949 - DNA, 33 bp, Homo sapien
acacatgtgtttttatcagcggcctacaggcag

SEQ ID NO: 835950 - DNA, 33 bp, Homo sapien
acacatgtgtttttattagcggcctacaggcag

SEQ ID NO: 835951 - DNA, 33 bp, Homo sapien
agatcttcagggtaaggactatcttgaatattt

SEQ ID NO: 835952 - DNA, 33 bp, Homo sapien
agatcttcagggtaagtactatcttgaatattt

SEQ ID NO: 835953 - DNA, 33 bp, Homo sapien
gcctctatcctaagagccccacgtttatttcta

SEQ ID NO: 835954 - DNA, 33 bp, Homo sapien
gcctctatcctaagagtcccacgtttatttcta

SEQ ID NO: 835955 - DNA, 33 bp, Homo sapien
cggaagcacagtggtacgaataggatgaccaga

SEQ ID NO: 835956 - DNA, 33 bp, Homo sapien
cggaagcacagtggtatgaataggatgaccaga

SEQ ID NO: 835957 - DNA, 33 bp, Homo sapien
tctaggagagcctagaaaatgtataattgttct

SEQ ID NO: 835958 - DNA, 33 bp, Homo sapien
tctaggagagcctagagaatgtataattgttct

SEQ ID NO: 835959 - DNA, 33 bp, Homo sapien
cagtgactatgaggcacggctcttgcttctgtt

SEQ ID NO: 835960 - DNA, 33 bp, Homo sapien
cagtgactatgaggcatggctcttgcttctgtt

SEQ ID NO: 835961 - DNA, 33 bp, Homo sapien
tcatgttcacagaccaagttgttttgcactctg

SEQ ID NO: 835962 - DNA, 33 bp, Homo sapien
tcatgttcacagaccaggttgttttgcactctg

SEQ ID NO: 835963 - DNA, 33 bp, Homo sapien
atctaaaaaggttgaactcattgaagtgaagag

SEQ ID NO: 835964 - DNA, 33 bp, Homo sapien
atctaaaaaggttgaattcattgaagtgaagag

SEQ ID NO: 835965 - DNA, 33 bp, Homo sapien
gatttttgccatttacaagatggaaggcaggga

SEQ ID NO: 835966 - DNA, 33 bp, Homo sapien
gatttttgccatttacgagatggaaggcaggga

SEQ ID NO: 835967 - DNA, 33 bp, Homo sapien
tattattcctgctttacacatgaggaaactgag

SEQ ID NO: 835968 - DNA, 33 bp, Homo sapien
tattattcctgctttatacatgaggaaactgag

SEQ ID NO: 835969 - DNA, 33 bp, Homo sapien
gcttaggagtgtagtacattgctggagtatata

SEQ ID NO: 835970 - DNA, 33 bp, Homo sapien
gcttaggagtgtagtatattgctggagtatata

SEQ ID NO: 835971 - DNA, 33 bp, Homo sapien
tgcctttccgtgattacagaaaacataagaaag

SEQ ID NO: 835972 - DNA, 33 bp, Homo sapien
tgcctttccgtgattatagaaaacataagaaag

SEQ ID NO: 835973 - DNA, 33 bp, Homo sapien
acagggaacaaaattaacaaaagcagtggggtc

SEQ ID NO: 835974 - DNA, 33 bp, Homo sapien
acagggaacaaaattagcaaaagcagtggggtc

SEQ ID NO: 835975 - DNA, 33 bp, Homo sapien
atgaatgatggtcgtccctgggagcttatctct

SEQ ID NO: 835976 - DNA, 33 bp, Homo sapien
atgaatgatggtcgtctctgggagcttatctct

SEQ ID NO: 835977 - DNA, 33 bp, Homo sapien
atttagggaatttggactcaagtctgataagaa

SEQ ID NO: 835978 - DNA, 33 bp, Homo sapien
atttagggaatttggagtcaagtctgataagaa

SEQ ID NO: 835979 - DNA, 33 bp, Homo sapien
gaaagacaaactactccgaatactgaaagtttc

SEQ ID NO: 835980 - DNA, 33 bp, Homo sapien
gaaagacaaactactctgaatactgaaagtttc

SEQ ID NO: 835981 - DNA, 33 bp, Homo sapien
aaagtcacagtctgtacaaaggcaaataagacc

SEQ ID NO: 835982 - DNA, 33 bp, Homo sapien
aaagtcacagtctgtataaaggcaaataagacc

SEQ ID NO: 835983 - DNA, 33 bp, Homo sapien
tgctctaaaaagaaaaccatctgaaacccacta

SEQ ID NO: 835984 - DNA, 33 bp, Homo sapien
tgctctaaaaagaaaatcatctgaaacccacta

SEQ ID NO: 835985 - DNA, 33 bp, Homo sapien
ttctgtctttctgtcactcactccagcatgcca

SEQ ID NO: 835986 - DNA, 33 bp, Homo sapien
ttctgtctttctgtcattcactccagcatgcca

SEQ ID NO: 835987 - DNA, 33 bp, Homo sapien
aatattttaccacacaatctacattacaggatg

SEQ ID NO: 835988 - DNA, 33 bp, Homo sapien
aatattttaccacacagtctacattacaggatg

SEQ ID NO: 835989 - DNA, 33 bp, Homo sapien
attattctttgtctagcagtatgtctgaaatat

SEQ ID NO: 835990 - DNA, 33 bp, Homo sapien
attattctttgtctagtagtatgtctgaaatat

SEQ ID NO: 835991 - DNA, 33 bp, Homo sapien
gcacctagaaagaaaccgcctcacaagcactaa

SEQ ID NO: 835992 - DNA, 33 bp, Homo sapien
gcacctagaaagaaactgcctcacaagcactaa

SEQ ID NO: 835993 - DNA, 33 bp, Homo sapien
aagaggacagtggacaatgctgtttaatggtgg

SEQ ID NO: 835994 - DNA, 33 bp, Homo sapien
aagaggacagtggacagtgctgtttaatggtgg

SEQ ID NO: 835995 - DNA, 33 bp, Homo sapien
agctgcttgtgggcccagagtaatcaggcagcc

SEQ ID NO: 835996 - DNA, 33 bp, Homo sapien
agctgcttgtgggcccggagtaatcaggcagcc

SEQ ID NO: 835997 - DNA, 33 bp, Homo sapien
ttgcagttcaaatcctcaccatccacagcaaga

SEQ ID NO: 835998 - DNA, 33 bp, Homo sapien
ttgcagttcaaatccttaccatccacagcaaga

SEQ ID NO: 835999 - DNA, 33 bp, Homo sapien
gcattggtgttagacaatcctcttttggttttt

SEQ ID NO: 836000 - DNA, 33 bp, Homo sapien
gcattggtgttagacactcctcttttggttttt

SEQ ID NO: 836001 - DNA, 33 bp, Homo sapien
agattttaggctagacacaggcaaaagagagta

SEQ ID NO: 836002 - DNA, 33 bp, Homo sapien
agattttaggctagacgcaggcaaaagagagta

SEQ ID NO: 836003 - DNA, 33 bp, Homo sapien
cccagctttaacaccacgaagacacatctgcca

SEQ ID NO: 836004 - DNA, 33 bp, Homo sapien
cccagctttaacaccatgaagacacatctgcca

SEQ ID NO: 836005 - DNA, 33 bp, Homo sapien
ccctagctagtccttacgtcagtgtgggacacc

SEQ ID NO: 836006 - DNA, 33 bp, Homo sapien
ccctagctagtccttatgtcagtgtgggacacc

SEQ ID NO: 836007 - DNA, 33 bp, Homo sapien
aggcccagagtagggccagggctcaggtctcca

SEQ ID NO: 836008 - DNA, 33 bp, Homo sapien
aggcccagagtagggcgagggctcaggtctcca

SEQ ID NO: 836009 - DNA, 33 bp, Homo sapien
ttccaaaaacacattaactgagtccaatcatga

SEQ ID NO: 836010 - DNA, 33 bp, Homo sapien
ttccaaaaacacattacctgagtccaatcatga

SEQ ID NO: 836011 - DNA, 33 bp, Homo sapien
cccattttgatgctgaacaatccagagttcact

SEQ ID NO: 836012 - DNA, 33 bp, Homo sapien
cccattttgatgctgaccaatccagagttcact

SEQ ID NO: 836013 - DNA, 33 bp, Homo sapien
tggaaatgggatagtacctttcatgattaagtc

SEQ ID NO: 836014 - DNA, 33 bp, Homo sapien
tggaaatgggatagtatctttcatgattaagtc

SEQ ID NO: 836015 - DNA, 33 bp, Homo sapien
ccacttaagaagtgcaaagtacattagttaaac

SEQ ID NO: 836016 - DNA, 33 bp, Homo sapien
ccacttaagaagtgcagagtacattagttaaac

SEQ ID NO: 836017 - DNA, 33 bp, Homo sapien
agtccttgagctcccccaaactcttgggccctt

SEQ ID NO: 836018 - DNA, 33 bp, Homo sapien
agtccttgagctccccgaaactcttgggccctt

SEQ ID NO: 836019 - DNA, 33 bp, Homo sapien
aacacacagaagaaccactctttccctccccac

SEQ ID NO: 836020 - DNA, 33 bp, Homo sapien
aacacacagaagaacctctctttccctccccac

SEQ ID NO: 836021 - DNA, 33 bp, Homo sapien
ttaatccttgaggcaacaagctccacaagggca

SEQ ID NO: 836022 - DNA, 33 bp, Homo sapien
ttaatccttgaggcaataagctccacaagggca

SEQ ID NO: 836023 - DNA, 33 bp, Homo sapien
agtgatcttcgttcccaatgctggtggctgtac

SEQ ID NO: 836024 - DNA, 33 bp, Homo sapien
agtgatcttcgttcccgatgctggtggctgtac

SEQ ID NO: 836025 - DNA, 33 bp, Homo sapien
cctcactgctctgatacggaacagtcaccaaga

SEQ ID NO: 836026 - DNA, 33 bp, Homo sapien
cctcactgctctgatatggaacagtcaccaaga

SEQ ID NO: 836027 - DNA, 33 bp, Homo sapien
agccgtggcaaaaggacggagctcgaattgtgc

SEQ ID NO: 836028 - DNA, 33 bp, Homo sapien
agccgtggcaaaaggatggagctcgaattgtgc

SEQ ID NO: 836029 - DNA, 33 bp, Homo sapien
gtaagtggttaggtcactcctgagacatcccag

SEQ ID NO: 836030 - DNA, 33 bp, Homo sapien
gtaagtggttaggtcattcctgagacatcccag

SEQ ID NO: 836031 - DNA, 33 bp, Homo sapien
acaattattcttttcaatagctgcagagaattg

SEQ ID NO: 836032 - DNA, 33 bp, Homo sapien
acaattattcttttcagtagctgcagagaattg

SEQ ID NO: 836033 - DNA, 33 bp, Homo sapien
caattgtaatagcaaagatccagaaataaccta

SEQ ID NO: 836034 - DNA, 33 bp, Homo sapien
caattgtaatagcaaatatccagaaataaccta

SEQ ID NO: 836035 - DNA, 33 bp, Homo sapien
gagcctcagcgagaagaactgctacactgctaa

SEQ ID NO: 836036 - DNA, 33 bp, Homo sapien
gagcctcagcgagaaggactgctacactgctaa

SEQ ID NO: 836037 - DNA, 33 bp, Homo sapien
caaggatggttgtaacaacaaggaaactggtca

SEQ ID NO: 836038 - DNA, 33 bp, Homo sapien
caaggatggttgtaacgacaaggaaactggtca

SEQ ID NO: 836039 - DNA, 33 bp, Homo sapien
ggagctgccaaaggtaacactggccctagtgtg

SEQ ID NO: 836040 - DNA, 33 bp, Homo sapien
ggagctgccaaaggtagcactggccctagtgtg

SEQ ID NO: 836041 - DNA, 33 bp, Homo sapien
taacaaccttgcttgaactgtgtgtatgtgtgt

SEQ ID NO: 836042 - DNA, 33 bp, Homo sapien
taacaaccttgcttgatctgtgtgtatgtgtgt

SEQ ID NO: 836043 - DNA, 33 bp, Homo sapien
tggcttagtgtaatagaaggagcctgggctctg

SEQ ID NO: 836044 - DNA, 33 bp, Homo sapien
tggcttagtgtaatagcaggagcctgggctctg

SEQ ID NO: 836045 - DNA, 33 bp, Homo sapien
cactggtgcagttggaagttgttcctaagtgac

SEQ ID NO: 836046 - DNA, 33 bp, Homo sapien
cactggtgcagttggacgttgttcctaagtgac

SEQ ID NO: 836047 - DNA, 33 bp, Homo sapien
cacagtacaccgggacaaagcagctgcagtata

SEQ ID NO: 836048 - DNA, 33 bp, Homo sapien
cacagtacaccgggacgaagcagctgcagtata

SEQ ID NO: 836049 - DNA, 33 bp, Homo sapien
tgggagagcttgaggcacttgttcaaggtcaca

SEQ ID NO: 836050 - DNA, 33 bp, Homo sapien
tgggagagcttgaggcgcttgttcaaggtcaca

SEQ ID NO: 836051 - DNA, 33 bp, Homo sapien
gctctcccagcttcaacattctccccggtaaag

SEQ ID NO: 836052 - DNA, 33 bp, Homo sapien
gctctcccagcttcaatattctccccggtaaag

SEQ ID NO: 836053 - DNA, 33 bp, Homo sapien
ccgacctttgatttgggacatgaactgtctgaa

SEQ ID NO: 836054 - DNA, 33 bp, Homo sapien
ccgacctttgatttggtacatgaactgtctgaa

SEQ ID NO: 836055 - DNA, 33 bp, Homo sapien
aatcaaaggtcggcaaactgcagcccacgggcc

SEQ ID NO: 836056 - DNA, 33 bp, Homo sapien
aatcaaaggtcggcaagctgcagcccacgggcc

SEQ ID NO: 836057 - DNA, 33 bp, Homo sapien
caccatgaatggtgtaactcatgaacggagcat

SEQ ID NO: 836058 - DNA, 33 bp, Homo sapien
caccatgaatggtgtatctcatgaacggagcat

SEQ ID NO: 836059 - DNA, 33 bp, Homo sapien
ggttcttcttagcagacagtgagggatgggaca

SEQ ID NO: 836060 - DNA, 33 bp, Homo sapien
ggttcttcttagcagatagtgagggatgggaca

SEQ ID NO: 836061 - DNA, 33 bp, Homo sapien
atggggatacataatacatgaaggttaatatgt
